United States Patent Application Publication US 2007/0042381 A1 - sequence listing, part 29

SEQ ID NO: 1274455 - RNA, 18 nt, Human
uccacucguguguuucua

SEQ ID NO: 1274456 - RNA, 16 nt, Human
uccacucguguguuuc

SEQ ID NO: 1274457 - RNA, 22 nt, Human
uccacugguucuucuuggucuc

SEQ ID NO: 1274458 - RNA, 18 nt, Human
uccagaauggucuuucua

SEQ ID NO: 1274459 - RNA, 21 nt, Human
uccagaaugcuguacaucuau

SEQ ID NO: 1274460 - RNA, 19 nt, Human
uccacugugcagguuccca

SEQ ID NO: 1274461 - RNA, 18 nt, Human
uccagaaugcuguacauc

SEQ ID NO: 1274462 - RNA, 23 nt, Human
uccagugggaggugagaccaccu

SEQ ID NO: 1274463 - RNA, 23 nt, Human
uccaguggacuucgcaguccacu

SEQ ID NO: 1274464 - RNA, 18 nt, Human
uccagugagacagcucug

SEQ ID NO: 1274465 - RNA, 16 nt, Human
uccaguaggauccagu

SEQ ID NO: 1274466 - RNA, 21 nt, Human
uccaguauaagacuacugaau

SEQ ID NO: 1274467 - RNA, 20 nt, Human
uccagucaggccuaucuaaa

SEQ ID NO: 1274468 - RNA, 18 nt, Human
uccaguccuaucugggcu

SEQ ID NO: 1274469 - RNA, 19 nt, Human
uccaguccuaucugggcuu

SEQ ID NO: 1274470 - RNA, 22 nt, Human
uccaguccuaucugggcuuccu

SEQ ID NO: 1274471 - RNA, 23 nt, Human
uccaguccuaucugggcuuccug

SEQ ID NO: 1274472 - RNA, 13 nt, Human
uccagucuauuca

SEQ ID NO: 1274473 - RNA, 15 nt, Human
acggccacacagcug

SEQ ID NO: 1274474 - RNA, 16 nt, Human
acggccacacagcugc

SEQ ID NO: 1274475 - RNA, 17 nt, Human
acggccacacagcugcc

SEQ ID NO: 1274476 - RNA, 18 nt, Human
acggccacacagcugccg

SEQ ID NO: 1274477 - RNA, 19 nt, Human
acggcucuguccccagccu

SEQ ID NO: 1274478 - RNA, 20 nt, Human
acggcucuguccccagccug

SEQ ID NO: 1274479 - RNA, 18 nt, Human
acggcugcgcacuguguc

SEQ ID NO: 1274480 - RNA, 16 nt, Human
acggcugcgcacugug

SEQ ID NO: 1274481 - RNA, 19 nt, Human
acggccacacagcugccgg

SEQ ID NO: 1274482 - RNA, 20 nt, Human
acggccacacagcugccggu

SEQ ID NO: 1274483 - RNA, 13 nt, Human
acggccacaucaa

SEQ ID NO: 1274484 - RNA, 18 nt, Human
acggccacaucaaagagg

SEQ ID NO: 1274485 - RNA, 18 nt, Human
acggcucgauuucuccag

SEQ ID NO: 1274486 - RNA, 19 nt, Human
acggcucgauuucuccagg

SEQ ID NO: 1274487 - RNA, 21 nt, Human
acgggacccacaugcuccaga

SEQ ID NO: 1274488 - RNA, 15 nt, Human
uccaguaaucuaaua

SEQ ID NO: 1274489 - RNA, 19 nt, Human
uccaguaaucuaauauggc

SEQ ID NO: 1274490 - RNA, 23 nt, Human
acgcgccucgccggaucugaggg

SEQ ID NO: 1274491 - RNA, 20 nt, Human
acgcgguuugguuugcagcg

SEQ ID NO: 1274492 - RNA, 15 nt, Human
acgcgguuugguuug

SEQ ID NO: 1274493 - RNA, 13 nt, Human
acgcgucuuccug

SEQ ID NO: 1274494 - RNA, 15 nt, Human
acgcgucuuccugag

SEQ ID NO: 1274495 - RNA, 17 nt, Human
acgccuggcugcugauc

SEQ ID NO: 1274496 - RNA, 18 nt, Human
acgccugggggugccagg

SEQ ID NO: 1274497 - RNA, 15 nt, Human
acgccucuugaccag

SEQ ID NO: 1274498 - RNA, 16 nt, Human
acgccucuugaccagg

SEQ ID NO: 1274499 - RNA, 24 nt, Human
acgccucuugaccaggcugccucc

SEQ ID NO: 1274500 - RNA, 11 nt, Human
acgccugagcc

SEQ ID NO: 1274501 - RNA, 12 nt, Human
acgccugagccc

SEQ ID NO: 1274502 - RNA, 13 nt, Human
acgccugagccca

SEQ ID NO: 1274503 - RNA, 15 nt, Human
acgccugagcccagg

SEQ ID NO: 1274504 - RNA, 16 nt, Human
acgccugagcccaggg

SEQ ID NO: 1274505 - RNA, 17 nt, Human
acgccugagcccaggga

SEQ ID NO: 1274506 - RNA, 18 nt, Human
acgccugagcccagggag

SEQ ID NO: 1274507 - RNA, 19 nt, Human
acgccugagcccagggagg

SEQ ID NO: 1274508 - RNA, 20 nt, Human
acgccugagcccagggaggc

SEQ ID NO: 1274509 - RNA, 21 nt, Human
acgccugagcccagggaggcc

SEQ ID NO: 1274510 - RNA, 13 nt, Human
acgccugaggaac

SEQ ID NO: 1274511 - RNA, 21 nt, Human
acgccugaggaacccuuacag

SEQ ID NO: 1274512 - RNA, 15 nt, Human
acgccugaggcaauu

SEQ ID NO: 1274513 - RNA, 19 nt, Human
acgccugaggcaauuagac

SEQ ID NO: 1274514 - RNA, 21 nt, Human
acggagucucacucugucacc

SEQ ID NO: 1274515 - RNA, 19 nt, Human
acgcugcugucacaaccaa

SEQ ID NO: 1274516 - RNA, 21 nt, Human
acgcugcugucacaaccaaga

SEQ ID NO: 1274517 - RNA, 14 nt, Human
acgcucucuggccu

SEQ ID NO: 1274518 - RNA, 11 nt, Human
acgcucucugg

SEQ ID NO: 1274519 - RNA, 14 nt, Human
acgcuccuuccucu

SEQ ID NO: 1274520 - RNA, 15 nt, Human
acgcuccuuccucug

SEQ ID NO: 1274521 - RNA, 14 nt, Human
acgcuauuccagcu

SEQ ID NO: 1274522 - RNA, 22 nt, Human
acgcuauuccagcugucccccc

SEQ ID NO: 1274523 - RNA, 13 nt, Human
acgcucagugggg

SEQ ID NO: 1274524 - RNA, 13 nt, Human
acgcuccaaaguc

SEQ ID NO: 1274525 - RNA, 21 nt, Human
acgcuccaaagucauaauugc

SEQ ID NO: 1274526 - RNA, 11 nt, Human
acgcuccagcu

SEQ ID NO: 1274527 - RNA, 14 nt, Human
acgcuccagcugcc

SEQ ID NO: 1274528 - RNA, 16 nt, Human
acgcuccagcugcccc

SEQ ID NO: 1274529 - RNA, 17 nt, Human
acgcuccagcugccccg

SEQ ID NO: 1274530 - RNA, 19 nt, Human
acgcuccagcugccccggc

SEQ ID NO: 1274531 - RNA, 21 nt, Human
acggucggggcaucuggccug

SEQ ID NO: 1274532 - RNA, 22 nt, Human
acggucggggcaucuggccugg

SEQ ID NO: 1274533 - RNA, 19 nt, Human
uccauccugaggcuccacu

SEQ ID NO: 1274534 - RNA, 19 nt, Human
uccaguuaaaaaaaauuuu

SEQ ID NO: 1274535 - RNA, 15 nt, Human
uccauccugaggcuc

SEQ ID NO: 1274536 - RNA, 12 nt, Human
uccauccugagg

SEQ ID NO: 1274537 - RNA, 15 nt, Human
uccaguguccugagc

SEQ ID NO: 1274538 - RNA, 16 nt, Human
uccaguguccugagcu

SEQ ID NO: 1274539 - RNA, 17 nt, Human
uccaguguccugagcuc

SEQ ID NO: 1274540 - RNA, 19 nt, Human
uccaguguccugagcucag

SEQ ID NO: 1274541 - RNA, 20 nt, Human
uccaguguccugagcucagc

SEQ ID NO: 1274542 - RNA, 22 nt, Human
uccaguguccugagcucagcgu

SEQ ID NO: 1274543 - RNA, 21 nt, Human
uccaguguccugagcucagcg

SEQ ID NO: 1274544 - RNA, 21 nt, Human
uccaguuaaaaaaaauuuuaa

SEQ ID NO: 1274545 - RNA, 14 nt, Human
acggugcccaagcc

SEQ ID NO: 1274546 - RNA, 15 nt, Human
acggugcccaagcca

SEQ ID NO: 1274547 - RNA, 17 nt, Human
acguaauaagguuuuaa

SEQ ID NO: 1274548 - RNA, 19 nt, Human
acguaaaguacuuguaguu

SEQ ID NO: 1274549 - RNA, 16 nt, Human
acguaaaguacuugua

SEQ ID NO: 1274550 - RNA, 15 nt, Human
acguaauaagguuuu

SEQ ID NO: 1274551 - RNA, 21 nt, Human
acguauuuaauagcaaagaau

SEQ ID NO: 1274552 - RNA, 19 nt, Human
acguuggagaagcccgugu

SEQ ID NO: 1274553 - RNA, 15 nt, Human
acguuaccaggcagg

SEQ ID NO: 1274554 - RNA, 22 nt, Human
acguguguuuuucuauuaaaag

SEQ ID NO: 1274555 - RNA, 17 nt, Human
acguuuaagccaaaaca

SEQ ID NO: 1274556 - RNA, 21 nt, Human
acgucacuggaccacugggca

SEQ ID NO: 1274557 - RNA, 20 nt, Human
acguccaucacguuagcugu

SEQ ID NO: 1274558 - RNA, 16 nt, Human
acguccugagaaagcu

SEQ ID NO: 1274559 - RNA, 14 nt, Human
acguguguuuuucu

SEQ ID NO: 1274560 - RNA, 16 nt, Human
acguguguuuuucuau

SEQ ID NO: 1274561 - RNA, 17 nt, Human
acguguguuuuucuauu

SEQ ID NO: 1274562 - RNA, 18 nt, Human
acguguguuuuucuauua

SEQ ID NO: 1274563 - RNA, 23 nt, Human
acguguguuuuucuauuaaaaga

SEQ ID NO: 1274564 - RNA, 16 nt, Human
acguguuugugcugug

SEQ ID NO: 1274565 - RNA, 15 nt, Human
acuacacccagcaau

SEQ ID NO: 1274566 - RNA, 16 nt, Human
acuacacccagcaaua

SEQ ID NO: 1274567 - RNA, 14 nt, Human
acuacacccagcaa

SEQ ID NO: 1274568 - RNA, 13 nt, Human
acuacacccagca

SEQ ID NO: 1274569 - RNA, 12 nt, Human
ucccacuuguca

SEQ ID NO: 1274570 - RNA, 19 nt, Human
ucccagaaaaaguaacuca

SEQ ID NO: 1274571 - RNA, 13 nt, Human
ucccagaagauga

SEQ ID NO: 1274572 - RNA, 17 nt, Human
ucccagaagaugacuga

SEQ ID NO: 1274573 - RNA, 20 nt, Human
ucccagaagaugacugaggg

SEQ ID NO: 1274574 - RNA, 14 nt, Human
ucccagagagcccg

SEQ ID NO: 1274575 - RNA, 16 nt, Human
ucccagagcaaaauaa

SEQ ID NO: 1274576 - RNA, 15 nt, Human
ucccagagagcccga

SEQ ID NO: 1274577 - RNA, 13 nt, Human
ucccagagcaccu

SEQ ID NO: 1274578 - RNA, 23 nt, Human
ucccagaggagccaccaguucuc

SEQ ID NO: 1274579 - RNA, 23 nt, Human
ucccagaggggccugccaccugg

SEQ ID NO: 1274580 - RNA, 15 nt, Human
ucccagagcaccugc

SEQ ID NO: 1274581 - RNA, 19 nt, Human
ucccagagcaccugcuguc

SEQ ID NO: 1274582 - RNA, 12 nt, Human
ucccagagcagg

SEQ ID NO: 1274583 - RNA, 16 nt, Human
ucccagaggagccacc

SEQ ID NO: 1274584 - RNA, 20 nt, Human
ucccagaggagccaccaguu

SEQ ID NO: 1274585 - RNA, 21 nt, Human
ucccagaggagccaccaguuc

SEQ ID NO: 1274586 - RNA, 16 nt, Human
ucccagaggggccugc

SEQ ID NO: 1274587 - RNA, 19 nt, Human
ucccagaggggccugccac

SEQ ID NO: 1274588 - RNA, 15 nt, Human
ucccagaguccucug

SEQ ID NO: 1274589 - RNA, 16 nt, Human
ucccagauaaugugaa

SEQ ID NO: 1274590 - RNA, 22 nt, Human
ucccagaggggccugccaccug

SEQ ID NO: 1274591 - RNA, 14 nt, Human
ucccagcccccuga

SEQ ID NO: 1274592 - RNA, 15 nt, Human
ucccagcccccugac

SEQ ID NO: 1274593 - RNA, 16 nt, Human
ucccagcccccugacc

SEQ ID NO: 1274594 - RNA, 17 nt, Human
ucccagcccccugacca

SEQ ID NO: 1274595 - RNA, 15 nt, Human
acuaauuuuaaaaug

SEQ ID NO: 1274596 - RNA, 18 nt, Human
acuaacaaccaaagacua

SEQ ID NO: 1274597 - RNA, 15 nt, Human
acuaacacucagaag

SEQ ID NO: 1274598 - RNA, 17 nt, Human
acuaacacucagaagcc

SEQ ID NO: 1274599 - RNA, 18 nt, Human
acuaacacucagaagccu

SEQ ID NO: 1274600 - RNA, 19 nt, Human
acuaacacucagaagccug

SEQ ID NO: 1274601 - RNA, 20 nt, Human
acuaacacucagaagccugg

SEQ ID NO: 1274602 - RNA, 21 nt, Human
acuaacacucagaagccuggg

SEQ ID NO: 1274603 - RNA, 15 nt, Human
acuaauuuuuauuuu

SEQ ID NO: 1274604 - RNA, 17 nt, Human
acuaaacuuuuuuucug

SEQ ID NO: 1274605 - RNA, 18 nt, Human
acuaaacuuuuuuucugu

SEQ ID NO: 1274606 - RNA, 19 nt, Human
acuaaacuuuuuuucugua

SEQ ID NO: 1274607 - RNA, 20 nt, Human
acuaaacuuuuuuucuguac

SEQ ID NO: 1274608 - RNA, 22 nt, Human
acuaaacuuuuuuucuguacca

SEQ ID NO: 1274609 - RNA, 17 nt, Human
acuaaagcaggccuuuu

SEQ ID NO: 1274610 - RNA, 20 nt, Human
acuaaagcaggccuuuugau

SEQ ID NO: 1274611 - RNA, 13 nt, Human
acuaaaucuuuua

SEQ ID NO: 1274612 - RNA, 15 nt, Human
acuaaaugcccugcu

SEQ ID NO: 1274613 - RNA, 15 nt, Human
acuaaaucuuuuaua

SEQ ID NO: 1274614 - RNA, 17 nt, Human
acucacaacagcugccu

SEQ ID NO: 1274615 - RNA, 18 nt, Human
acucaaggcggugcuuga

SEQ ID NO: 1274616 - RNA, 17 nt, Human
acucaaggacuuugcag

SEQ ID NO: 1274617 - RNA, 20 nt, Human
acuauggagugcaccaaaga

SEQ ID NO: 1274618 - RNA, 22 nt, Human
acuauggagugcaccaaagaga

SEQ ID NO: 1274619 - RNA, 23 nt, Human
acuauggagugcaccaaagagaa

SEQ ID NO: 1274620 - RNA, 21 nt, Human
acuauggauaaacuaaacacg

SEQ ID NO: 1274621 - RNA, 24 nt, Human
acuauggauaaacuaaacacguga

SEQ ID NO: 1274622 - RNA, 16 nt, Human
acuaucucauuuccaa

SEQ ID NO: 1274623 - RNA, 17 nt, Human
acuaucucauuuccaag

SEQ ID NO: 1274624 - RNA, 20 nt, Human
acuaucucuacugaauguca

SEQ ID NO: 1274625 - RNA, 14 nt, Human
acuaucugucuggu

SEQ ID NO: 1274626 - RNA, 17 nt, Human
acuaucugucugguggc

SEQ ID NO: 1274627 - RNA, 15 nt, Human
acuaucucauuucca

SEQ ID NO: 1274628 - RNA, 20 nt, Human
acuauaggcaugcgccacca

SEQ ID NO: 1274629 - RNA, 18 nt, Human
acuauagcggcauauaga

SEQ ID NO: 1274630 - RNA, 17 nt, Human
acuauauuguuugcuaa

SEQ ID NO: 1274631 - RNA, 22 nt, Human
acuauaggcaugcgccaccaug

SEQ ID NO: 1274632 - RNA, 22 nt, Human
acuauauuugggccugcuccag

SEQ ID NO: 1274633 - RNA, 23 nt, Human
acuauauuugggccugcuccaga

SEQ ID NO: 1274634 - RNA, 21 nt, Human
acuauaguccagcuuuguucu

SEQ ID NO: 1274635 - RNA, 22 nt, Human
acuauauuguuugcuaagcauu

SEQ ID NO: 1274636 - RNA, 16 nt, Human
acuagaccuccagcug

SEQ ID NO: 1274637 - RNA, 16 nt, Human
acuagagcaagcagga

SEQ ID NO: 1274638 - RNA, 18 nt, Human
acuacugacauguggggc

SEQ ID NO: 1274639 - RNA, 23 nt, Human
acuacugacauguggggccaggu

SEQ ID NO: 1274640 - RNA, 22 nt, Human
acuacugacggaguccuguguu

SEQ ID NO: 1274641 - RNA, 19 nt, Human
acuagacucccaagcugga

SEQ ID NO: 1274642 - RNA, 16 nt, Human
acuacuguguuaugca

SEQ ID NO: 1274643 - RNA, 15 nt, Human
uccccagguccagcu

SEQ ID NO: 1274644 - RNA, 16 nt, Human
uccccagguccagcuc

SEQ ID NO: 1274645 - RNA, 17 nt, Human
uccccagguccagcucu

SEQ ID NO: 1274646 - RNA, 23 nt, Human
uccccagguccagcucuggaggg

SEQ ID NO: 1274647 - RNA, 16 nt, Human
ucccauuuaucgcaga

SEQ ID NO: 1274648 - RNA, 13 nt, Human
ucccauuucagcu

SEQ ID NO: 1274649 - RNA, 17 nt, Human
ucccauuuaucuaaaua

SEQ ID NO: 1274650 - RNA, 18 nt, Human
ucccagcccccugaccac

SEQ ID NO: 1274651 - RNA, 16 nt, Human
ucccagcuaggaagag

SEQ ID NO: 1274652 - RNA, 23 nt, Human
ucccagcuaggaagagcaggacu

SEQ ID NO: 1274653 - RNA, 20 nt, Human
ucccagcuaggaagagcagg

SEQ ID NO: 1274654 - RNA, 11 nt, Human
ucacacuggga

SEQ ID NO: 1274655 - RNA, 16 nt, Human
ucacacuggguggugg

SEQ ID NO: 1274656 - RNA, 21 nt, Human
ucacacugggugguggccugg

SEQ ID NO: 1274657 - RNA, 22 nt, Human
ucacacugggugguggccuggu

SEQ ID NO: 1274658 - RNA, 23 nt, Human
ucacacugggugguggccugguc

SEQ ID NO: 1274659 - RNA, 17 nt, Human
ucacacuggucugcugu

SEQ ID NO: 1274660 - RNA, 18 nt, Human
ucacacuggucugcuguc

SEQ ID NO: 1274661 - RNA, 14 nt, Human
ucacaaccuucugu

SEQ ID NO: 1274662 - RNA, 14 nt, Human
ucacaacagccuga

SEQ ID NO: 1274663 - RNA, 22 nt, Human
ucacaacagccugacaacauuu

SEQ ID NO: 1274664 - RNA, 13 nt, Human
ucacaaccaagaa

SEQ ID NO: 1274665 - RNA, 23 nt, Human
ucacagaugugugauucacagug

SEQ ID NO: 1274666 - RNA, 21 nt, Human
ucacagaugugugauucacag

SEQ ID NO: 1274667 - RNA, 16 nt, Human
ucaauucuugccaaau

SEQ ID NO: 1274668 - RNA, 16 nt, Human
ucaauugcaucuccca

SEQ ID NO: 1274669 - RNA, 17 nt, Human
ucaauugcaucucccag

SEQ ID NO: 1274670 - RNA, 18 nt, Human
ucaauugcaucucccaga

SEQ ID NO: 1274671 - RNA, 22 nt, Human
ucaauugcaucucccagauaau

SEQ ID NO: 1274672 - RNA, 14 nt, Human
ucaauugcuuugua

SEQ ID NO: 1274673 - RNA, 20 nt, Human
accaaagcaccuuagcuggc

SEQ ID NO: 1274674 - RNA, 11 nt, Human
accaaagcaca

SEQ ID NO: 1274675 - RNA, 17 nt, Human
accaaagggagucugcc

SEQ ID NO: 1274676 - RNA, 19 nt, Human
accaaagggagucugccag

SEQ ID NO: 1274677 - RNA, 20 nt, Human
accaaagggagucugccagg

SEQ ID NO: 1274678 - RNA, 21 nt, Human
accaaaguccuuuuuuuccau

SEQ ID NO: 1274679 - RNA, 11 nt, Human
accaaaguucu

SEQ ID NO: 1274680 - RNA, 12 nt, Human
accaaaguucua

SEQ ID NO: 1274681 - RNA, 15 nt, Human
ucacaaaauaucacc

SEQ ID NO: 1274682 - RNA, 20 nt, Human
ucacaaaauauauuuuguuu

SEQ ID NO: 1274683 - RNA, 19 nt, Human
ucacaaacuucauuucaga

SEQ ID NO: 1274684 - RNA, 15 nt, Human
ucacaaacuuuuaua

SEQ ID NO: 1274685 - RNA, 17 nt, Human
ucacaaacuuuuauacu

SEQ ID NO: 1274686 - RNA, 21 nt, Human
ucacaaacuuuuauacucuuu

SEQ ID NO: 1274687 - RNA, 16 nt, Human
ucaauuugauguggug

SEQ ID NO: 1274688 - RNA, 23 nt, Human
ucaauuucuguguugccaagcuc

SEQ ID NO: 1274689 - RNA, 15 nt, Human
ucaauuucuguguug

SEQ ID NO: 1274690 - RNA, 15 nt, Human
ucaauuucugaacac

SEQ ID NO: 1274691 - RNA, 19 nt, Human
ucaauuuauaccucaauuu

SEQ ID NO: 1274692 - RNA, 14 nt, Human
ucaauuuauuugaa

SEQ ID NO: 1274693 - RNA, 20 nt, Human
ucaauuuauuugaaugauuu

SEQ ID NO: 1274694 - RNA, 16 nt, Human
ucaauuuauuugaaug

SEQ ID NO: 1274695 - RNA, 16 nt, Human
accaccacgccuggcu

SEQ ID NO: 1274696 - RNA, 16 nt, Human
accaccaagccaaggg

SEQ ID NO: 1274697 - RNA, 15 nt, Human
accacauugcuuuuc

SEQ ID NO: 1274698 - RNA, 12 nt, Human
accaccaagccu

SEQ ID NO: 1274699 - RNA, 14 nt, Human
accaccaagccuug

SEQ ID NO: 1274700 - RNA, 15 nt, Human
accaccaagccuuga

SEQ ID NO: 1274701 - RNA, 19 nt, Human
accaccaagccuugauugg

SEQ ID NO: 1274702 - RNA, 24 nt, Human
accacauuggagauguuuaguaau

SEQ ID NO: 1274703 - RNA, 23 nt, Human
accacaugccccaucccaugcug

SEQ ID NO: 1274704 - RNA, 22 nt, Human
accacaugccccaucccaugcu

SEQ ID NO: 1274705 - RNA, 13 nt, Human
accacauugcuuu

SEQ ID NO: 1274706 - RNA, 19 nt, Human
accaccaacuacuaccugu

SEQ ID NO: 1274707 - RNA, 15 nt, Human
accacaggcucaggc

SEQ ID NO: 1274708 - RNA, 16 nt, Human
accacaggcucaggca

SEQ ID NO: 1274709 - RNA, 17 nt, Human
accacaggcucaggcag

SEQ ID NO: 1274710 - RNA, 13 nt, Human
ucacccccuucuc

SEQ ID NO: 1274711 - RNA, 16 nt, Human
ucacccccuucuccau

SEQ ID NO: 1274712 - RNA, 22 nt, Human
ucacccccuucuccauccacau

SEQ ID NO: 1274713 - RNA, 18 nt, Human
ucacccccuucuccaucc

SEQ ID NO: 1274714 - RNA, 19 nt, Human
accacagccagcaccuggc

SEQ ID NO: 1274715 - RNA, 20 nt, Human
accacagccagcaccuggca

SEQ ID NO: 1274716 - RNA, 22 nt, Human
ucaccauguuggccaggcuggu

SEQ ID NO: 1274717 - RNA, 15 nt, Human
ucaccauuauaauga

SEQ ID NO: 1274718 - RNA, 20 nt, Human
ucaccauuauaaugaauuua

SEQ ID NO: 1274719 - RNA, 13 nt, Human
ucaccauucccag

SEQ ID NO: 1274720 - RNA, 17 nt, Human
ucaccauguuagccagg

SEQ ID NO: 1274721 - RNA, 23 nt, Human
ucaccauuauaaugaauuuagug

SEQ ID NO: 1274722 - RNA, 17 nt, Human
ucaccauuugauuaugu

SEQ ID NO: 1274723 - RNA, 22 nt, Human
ucaccauuugauuauguagcaa

SEQ ID NO: 1274724 - RNA, 16 nt, Human
ucaccauuuggauccu

SEQ ID NO: 1274725 - RNA, 23 nt, Human
ucaccauuuggcaaugccaucau

SEQ ID NO: 1274726 - RNA, 13 nt, Human
ucacccaacgcuc

SEQ ID NO: 1274727 - RNA, 20 nt, Human
ucaccauuuggauccugugu

SEQ ID NO: 1274728 - RNA, 13 nt, Human
ucacccaccccug

SEQ ID NO: 1274729 - RNA, 14 nt, Human
ucacccaccccugc

SEQ ID NO: 1274730 - RNA, 15 nt, Human
ucacccagacauaaa

SEQ ID NO: 1274731 - RNA, 19 nt, Human
ucacccagacauaaaggaa

SEQ ID NO: 1274732 - RNA, 20 nt, Human
ucacccagacauaaaggaaa

SEQ ID NO: 1274733 - RNA, 22 nt, Human
ucacccagacauaaaggaaaag

SEQ ID NO: 1274734 - RNA, 13 nt, Human
ucacccccagcuu

SEQ ID NO: 1274735 - RNA, 18 nt, Human
ucacccccagcuuugcua

SEQ ID NO: 1274736 - RNA, 13 nt, Human
ucacagcggaggu

SEQ ID NO: 1274737 - RNA, 19 nt, Human
ucacaguucuuugggccag

SEQ ID NO: 1274738 - RNA, 20 nt, Human
ucacaguucuuugggccaga

SEQ ID NO: 1274739 - RNA, 22 nt, Human
ucacaguucuuugggccagaca

SEQ ID NO: 1274740 - RNA, 17 nt, Human
ucacaguuugaaauaag

SEQ ID NO: 1274741 - RNA, 15 nt, Human
ucacaguuugaaaua

SEQ ID NO: 1274742 - RNA, 16 nt, Human
ucacaguuugaaauaa

SEQ ID NO: 1274743 - RNA, 14 nt, Human
ucacauagcccacu

SEQ ID NO: 1274744 - RNA, 19 nt, Human
ucacauagcccacuuacau

SEQ ID NO: 1274745 - RNA, 20 nt, Human
ucacauagcccacuuacauu

SEQ ID NO: 1274746 - RNA, 21 nt, Human
ucaccauguuagccaggcugg

SEQ ID NO: 1274747 - RNA, 17 nt, Human
ucacguuuggugcuucu

SEQ ID NO: 1274748 - RNA, 22 nt, Human
ucacguuucauguaauccucaa

SEQ ID NO: 1274749 - RNA, 20 nt, Human
ucacguuaccauuuacaugu

SEQ ID NO: 1274750 - RNA, 20 nt, Human
ucacguccugagaaagcuca

SEQ ID NO: 1274751 - RNA, 21 nt, Human
ucacguuuggugcuucucaga

SEQ ID NO: 1274752 - RNA, 17 nt, Human
ucacuaaaucuuuuaua

SEQ ID NO: 1274753 - RNA, 12 nt, Human
ucacuaaaucuu

SEQ ID NO: 1274754 - RNA, 16 nt, Human
ucacuaggcuucuggu

SEQ ID NO: 1274755 - RNA, 23 nt, Human
ucacuaggcccccacuugccucu

SEQ ID NO: 1274756 - RNA, 14 nt, Human
ucacuaauucauua

SEQ ID NO: 1274757 - RNA, 15 nt, Human
ucacuaauucauuaa

SEQ ID NO: 1274758 - RNA, 18 nt, Human
ucacuaauucauuaaucu

SEQ ID NO: 1274759 - RNA, 14 nt, Human
ucaccugugcuucg

SEQ ID NO: 1274760 - RNA, 16 nt, Human
ucaccuguaaaccuga

SEQ ID NO: 1274761 - RNA, 17 nt, Human
ucaccuguaaaccugag

SEQ ID NO: 1274762 - RNA, 19 nt, Human
ucaccuguaaaccugaguc

SEQ ID NO: 1274763 - RNA, 12 nt, Human
ucaccucaugga

SEQ ID NO: 1274764 - RNA, 13 nt, Human
ucaccucauggaa

SEQ ID NO: 1274765 - RNA, 14 nt, Human
ucaccucauggaau

SEQ ID NO: 1274766 - RNA, 15 nt, Human
accacuagccucagg

SEQ ID NO: 1274767 - RNA, 13 nt, Human
accagcucagcac

SEQ ID NO: 1274768 - RNA, 14 nt, Human
accagcucagcacu

SEQ ID NO: 1274769 - RNA, 16 nt, Human
accagcucagcacugc

SEQ ID NO: 1274770 - RNA, 13 nt, Human
accagcucaggac

SEQ ID NO: 1274771 - RNA, 14 nt, Human
accagcucaggaca

SEQ ID NO: 1274772 - RNA, 15 nt, Human
accagcucaggacag

SEQ ID NO: 1274773 - RNA, 16 nt, Human
accagcucaggacaga

SEQ ID NO: 1274774 - RNA, 16 nt, Human
accacuagccucaggg

SEQ ID NO: 1274775 - RNA, 23 nt, Human
accagcucaggacagaugccaca

SEQ ID NO: 1274776 - RNA, 20 nt, Human
accagcucccccucccuccc

SEQ ID NO: 1274777 - RNA, 19 nt, Human
accagcucccccucccucc

SEQ ID NO: 1274778 - RNA, 22 nt, Human
accagcugcuccgaggacccag

SEQ ID NO: 1274779 - RNA, 15 nt, Human
accagcuuccuucag

SEQ ID NO: 1274780 - RNA, 17 nt, Human
accagcuuccuucagag

SEQ ID NO: 1274781 - RNA, 18 nt, Human
accagcuuccuucagaga

SEQ ID NO: 1274782 - RNA, 20 nt, Human
accagcuuccuucagagagc

SEQ ID NO: 1274783 - RNA, 21 nt, Human
accagcuuccuucagagagca

SEQ ID NO: 1274784 - RNA, 23 nt, Human
accagcuuccuucagagagcagu

SEQ ID NO: 1274785 - RNA, 22 nt, Human
accagcuuccuucagagagcag

SEQ ID NO: 1274786 - RNA, 13 nt, Human
accaggaacagca

SEQ ID NO: 1274787 - RNA, 12 nt, Human
accaggaagccg

SEQ ID NO: 1274788 - RNA, 12 nt, Human
accaggacccug

SEQ ID NO: 1274789 - RNA, 22 nt, Human
accaggacuagggcuggaguga

SEQ ID NO: 1274790 - RNA, 20 nt, Human
accaguaucgcucauagauc

SEQ ID NO: 1274791 - RNA, 11 nt, Human
accaguauuua

SEQ ID NO: 1274792 - RNA, 18 nt, Human
accaguauuuaacuucug

SEQ ID NO: 1274793 - RNA, 14 nt, Human
accaguauuuagaa

SEQ ID NO: 1274794 - RNA, 18 nt, Human
accaguauuuagaagcca

SEQ ID NO: 1274795 - RNA, 19 nt, Human
accaguauuuagaagccaa

SEQ ID NO: 1274796 - RNA, 14 nt, Human
accagucugacugu

SEQ ID NO: 1274797 - RNA, 15 nt, Human
accagucccagagca

SEQ ID NO: 1274798 - RNA, 15 nt, Human
accaguccccccacc

SEQ ID NO: 1274799 - RNA, 17 nt, Human
accaguccccccacccu

SEQ ID NO: 1274800 - RNA, 20 nt, Human
accaguaggggcuuauaaua

SEQ ID NO: 1274801 - RNA, 23 nt, Human
ucacuugaacccgggaggcagag

SEQ ID NO: 1274802 - RNA, 15 nt, Human
ucacuguuucacuac

SEQ ID NO: 1274803 - RNA, 21 nt, Human
ucacuguuucacuacucagca

SEQ ID NO: 1274804 - RNA, 14 nt, Human
ucacuguuucacua

SEQ ID NO: 1274805 - RNA, 20 nt, Human
ucacuguuuagaacacacac

SEQ ID NO: 1274806 - RNA, 17 nt, Human
ucacuguuuagaacaca

SEQ ID NO: 1274807 - RNA, 19 nt, Human
ucacuaucccggcugcccu

SEQ ID NO: 1274808 - RNA, 20 nt, Human
ucacuaucccggcugcccuu

SEQ ID NO: 1274809 - RNA, 13 nt, Human
ucacugcauccuc

SEQ ID NO: 1274810 - RNA, 20 nt, Human
ucacugugcuguuguuauga

SEQ ID NO: 1274811 - RNA, 19 nt, Human
ucacugugcuguuguuaug

SEQ ID NO: 1274812 - RNA, 16 nt, Human
ucacugugcuguuguu

SEQ ID NO: 1274813 - RNA, 15 nt, Human
ucacuguguccaggu

SEQ ID NO: 1274814 - RNA, 17 nt, Human
ucacugugucacccagg

SEQ ID NO: 1274815 - RNA, 23 nt, Human
ucacugugcuguuguuaugaugu

SEQ ID NO: 1274816 - RNA, 18 nt, Human
ucaaauugugugaaaggu

SEQ ID NO: 1274817 - RNA, 15 nt, Human
acauucugaaugcuu

SEQ ID NO: 1274818 - RNA, 18 nt, Human
acauucugaaugcuucua

SEQ ID NO: 1274819 - RNA, 21 nt, Human
acauucugaaugcuucuaagu

SEQ ID NO: 1274820 - RNA, 23 nt, Human
acauucugauucgaaugacacug

SEQ ID NO: 1274821 - RNA, 11 nt, Human
acauucugaau

SEQ ID NO: 1274822 - RNA, 14 nt, Human
acauucugaaugcu

SEQ ID NO: 1274823 - RNA, 14 nt, Human
acauuccugaacag

SEQ ID NO: 1274824 - RNA, 15 nt, Human
acauuccugaacagg

SEQ ID NO: 1274825 - RNA, 14 nt, Human
acauuccuugcuga

SEQ ID NO: 1274826 - RNA, 22 nt, Human
acauuccucaugaauguaaauu

SEQ ID NO: 1274827 - RNA, 21 nt, Human
acauuccuugcugaaacgcau

SEQ ID NO: 1274828 - RNA, 20 nt, Human
acauuccucaugaauguaaa

SEQ ID NO: 1274829 - RNA, 21 nt, Human
acauuccucaugaauguaaau

SEQ ID NO: 1274830 - RNA, 17 nt, Human
acauguaggaaguagga

SEQ ID NO: 1274831 - RNA, 12 nt, Human
acaugucaaucu

SEQ ID NO: 1274832 - RNA, 15 nt, Human
acaugucaaucuguc

SEQ ID NO: 1274833 - RNA, 18 nt, Human
acaugucaguaccuucaa

SEQ ID NO: 1274834 - RNA, 19 nt, Human
acaugucaguaccuucaaa

SEQ ID NO: 1274835 - RNA, 21 nt, Human
acaugucaguaccuucaaacu

SEQ ID NO: 1274836 - RNA, 18 nt, Human
acauucccaagguuacuu

SEQ ID NO: 1274837 - RNA, 19 nt, Human
acauucccaagguuacuua

SEQ ID NO: 1274838 - RNA, 17 nt, Human
acauuccucaugaaugu

SEQ ID NO: 1274839 - RNA, 18 nt, Human
acauuccucaugaaugua

SEQ ID NO: 1274840 - RNA, 19 nt, Human
acauuccucaugaauguaa

SEQ ID NO: 1274841 - RNA, 15 nt, Human
ucaaccauuccccau

SEQ ID NO: 1274842 - RNA, 18 nt, Human
ucaaccauuccccauggg

SEQ ID NO: 1274843 - RNA, 16 nt, Human
ucaaccaucgcuuuau

SEQ ID NO: 1274844 - RNA, 16 nt, Human
ucaaccccagacacug

SEQ ID NO: 1274845 - RNA, 17 nt, Human
ucaaccccagacacugg

SEQ ID NO: 1274846 - RNA, 18 nt, Human
ucaaccccagacacuggu

SEQ ID NO: 1274847 - RNA, 16 nt, Human
ucaaccccuccccucc

SEQ ID NO: 1274848 - RNA, 15 nt, Human
ucaaccccuccccuc

SEQ ID NO: 1274849 - RNA, 14 nt, Human
ucaacugccuacuc

SEQ ID NO: 1274850 - RNA, 18 nt, Human
ucaacugccuacuccaaa

SEQ ID NO: 1274851 - RNA, 20 nt, Human
ucaacugccuacuccaaaau

SEQ ID NO: 1274852 - RNA, 14 nt, Human
ucaaauuuuaucug

SEQ ID NO: 1274853 - RNA, 20 nt, Human
acauucugaaugcuucuaag

SEQ ID NO: 1274854 - RNA, 22 nt, Human
ucaaauuuuaucugccucucuu

SEQ ID NO: 1274855 - RNA, 15 nt, Human
ucaacaaaaauuguc

SEQ ID NO: 1274856 - RNA, 18 nt, Human
ucaacaaaaauugucccu

SEQ ID NO: 1274857 - RNA, 12 nt, Human
ucaacaaacauu

SEQ ID NO: 1274858 - RNA, 14 nt, Human
ucaacaaagaaaca

SEQ ID NO: 1274859 - RNA, 20 nt, Human
ucaacaaagaaacaaagaug

SEQ ID NO: 1274860 - RNA, 21 nt, Human
ucaacaaagaaacaaagaugu

SEQ ID NO: 1274861 - RNA, 14 nt, Human
ucaacauuucucaa

SEQ ID NO: 1274862 - RNA, 15 nt, Human
acaugggacauuugc

SEQ ID NO: 1274863 - RNA, 20 nt, Human
acaugggacauuugcucaug

SEQ ID NO: 1274864 - RNA, 21 nt, Human
acaugggacauuugcucaugg

SEQ ID NO: 1274865 - RNA, 20 nt, Human
acaugggagccgggucugcc

SEQ ID NO: 1274866 - RNA, 11 nt, Human
acaugggacau

SEQ ID NO: 1274867 - RNA, 14 nt, Human
acaugggacauuug

SEQ ID NO: 1274868 - RNA, 23 nt, Human
acaugggagccgggucugccucu

SEQ ID NO: 1274869 - RNA, 11 nt, Human
acauggggagg

SEQ ID NO: 1274870 - RNA, 15 nt, Human
acauggggaggagga

SEQ ID NO: 1274871 - RNA, 13 nt, Human
acauggggaggag

SEQ ID NO: 1274872 - RNA, 19 nt, Human
acaugcuucccuuuccuga

SEQ ID NO: 1274873 - RNA, 18 nt, Human
acaugcuucccuuuccug

SEQ ID NO: 1274874 - RNA, 16 nt, Human
acaugcuucccuuucc

SEQ ID NO: 1274875 - RNA, 13 nt, Human
acaugcuucccuu

SEQ ID NO: 1274876 - RNA, 23 nt, Human
acaugcuuagcaguccccuuccc

SEQ ID NO: 1274877 - RNA, 15 nt, Human
acaugcuuauuccau

SEQ ID NO: 1274878 - RNA, 17 nt, Human
acaugcuuauuccauga

SEQ ID NO: 1274879 - RNA, 18 nt, Human
acaugcuuauuccaugac

SEQ ID NO: 1274880 - RNA, 21 nt, Human
acaugcuuauuccaugacugc

SEQ ID NO: 1274881 - RNA, 22 nt, Human
acaugcuuauuccaugacugcu

SEQ ID NO: 1274882 - RNA, 23 nt, Human
acaugcuuauuccaugacugcuu

SEQ ID NO: 1274883 - RNA, 17 nt, Human
acaugcuaagagaagua

SEQ ID NO: 1274884 - RNA, 18 nt, Human
acaugcuaagagaaguag

SEQ ID NO: 1274885 - RNA, 19 nt, Human
acaugcuaagagaaguaga

SEQ ID NO: 1274886 - RNA, 24 nt, Human
acaugcuaagagaaguagaaauca

SEQ ID NO: 1274887 - RNA, 13 nt, Human
acaugcuguuauu

SEQ ID NO: 1274888 - RNA, 19 nt, Human
acaugcuuagcaguccccu

SEQ ID NO: 1274889 - RNA, 23 nt, Human
acaugagguacugagagugaaca

SEQ ID NO: 1274890 - RNA, 20 nt, Human
acaugcgguagccagcacac

SEQ ID NO: 1274891 - RNA, 22 nt, Human
acaugcgguagccagcacacag

SEQ ID NO: 1274892 - RNA, 23 nt, Human
acaugcgguagccagcacacagg

SEQ ID NO: 1274893 - RNA, 20 nt, Human
acaugaauauuuaguguuca

SEQ ID NO: 1274894 - RNA, 20 nt, Human
acaugagguacugagaguga

SEQ ID NO: 1274895 - RNA, 18 nt, Human
acaugaauuuuagcuuuu

SEQ ID NO: 1274896 - RNA, 18 nt, Human
acagucccuauggaaaga

SEQ ID NO: 1274897 - RNA, 17 nt, Human
acaugaauuauuacagu

SEQ ID NO: 1274898 - RNA, 19 nt, Human
acaugaauuauuacagugu

SEQ ID NO: 1274899 - RNA, 21 nt, Human
acaugaauuauuacaguguuu

SEQ ID NO: 1274900 - RNA, 15 nt, Human
acaugaauuuuagcu

SEQ ID NO: 1274901 - RNA, 17 nt, Human
acaugaauuuuagcuuu

SEQ ID NO: 1274902 - RNA, 15 nt, Human
ucaauauuucagaua

SEQ ID NO: 1274903 - RNA, 19 nt, Human
ucaauauuucagauaauca

SEQ ID NO: 1274904 - RNA, 23 nt, Human
ucaauauuucagauaaucacaau

SEQ ID NO: 1274905 - RNA, 17 nt, Human
ucaaucuucaauccuug

SEQ ID NO: 1274906 - RNA, 17 nt, Human
ucaaucuguaaacugug

SEQ ID NO: 1274907 - RNA, 15 nt, Human
ucaaucuugcaugua

SEQ ID NO: 1274908 - RNA, 16 nt, Human
ucaaucuugcauguaa

SEQ ID NO: 1274909 - RNA, 17 nt, Human
ucaaucuugcauguaac

SEQ ID NO: 1274910 - RNA, 18 nt, Human
ucaaucuugcauguaacg

SEQ ID NO: 1274911 - RNA, 13 nt, Human
ucaaucuguaaac

SEQ ID NO: 1274912 - RNA, 14 nt, Human
ucaaucuguaaacu

SEQ ID NO: 1274913 - RNA, 16 nt, Human
ucaaucuguaaacugu

SEQ ID NO: 1274914 - RNA, 18 nt, Human
ucaaucucaauugcuuug

SEQ ID NO: 1274915 - RNA, 19 nt, Human
ucaaucucugggggcugag

SEQ ID NO: 1274916 - RNA, 23 nt, Human
ucaaugaaugaaugaauggcuaa

SEQ ID NO: 1274917 - RNA, 18 nt, Human
ucaaucuuuaaaccaauu

SEQ ID NO: 1274918 - RNA, 20 nt, Human
ucaaucuugcauguaacgca

SEQ ID NO: 1274919 - RNA, 21 nt, Human
ucaaugaauuuuauaaucugc

SEQ ID NO: 1274920 - RNA, 14 nt, Human
ucaaugacaugaau

SEQ ID NO: 1274921 - RNA, 15 nt, Human
ucaaugacaugaauu

SEQ ID NO: 1274922 - RNA, 16 nt, Human
ucaaugacaugaauuu

SEQ ID NO: 1274923 - RNA, 21 nt, Human
ucaaugacaugaauuuuagcu

SEQ ID NO: 1274924 - RNA, 23 nt, Human
ucaaugacaugaauuuuagcuuu

SEQ ID NO: 1274925 - RNA, 22 nt, Human
ucaaugacaugaauuuuagcuu

SEQ ID NO: 1274926 - RNA, 12 nt, Human
ucaaugagcaug

SEQ ID NO: 1274927 - RNA, 13 nt, Human
ucaaugagcaugu

SEQ ID NO: 1274928 - RNA, 14 nt, Human
ucaaugagcauguu

SEQ ID NO: 1274929 - RNA, 17 nt, Human
ucaaugagcauguuuag

SEQ ID NO: 1274930 - RNA, 19 nt, Human
ucaaugagcauguuuagac

SEQ ID NO: 1274931 - RNA, 21 nt, Human
ucaaugagcauguuuagacuu

SEQ ID NO: 1274932 - RNA, 16 nt, Human
ucaaugagguguccaa

SEQ ID NO: 1274933 - RNA, 21 nt, Human
acauucuucaagaucccauuu

SEQ ID NO: 1274934 - RNA, 17 nt, Human
ucaaugagguguccaac

SEQ ID NO: 1274935 - RNA, 17 nt, Human
ucaauauucaauaaagc

SEQ ID NO: 1274936 - RNA, 16 nt, Human
ucaauauucaauaaag

SEQ ID NO: 1274937 - RNA, 15 nt, Human
ucaauauucaauaaa

SEQ ID NO: 1274938 - RNA, 22 nt, Human
ucaauaucuuuuuuuuaauaaa

SEQ ID NO: 1274939 - RNA, 19 nt, Human
ucaagucuguuuacugcaa

SEQ ID NO: 1274940 - RNA, 15 nt, Human
ucaagucuuucucuu

SEQ ID NO: 1274941 - RNA, 18 nt, Human
ucaagucuuucucuuucc

SEQ ID NO: 1274942 - RNA, 20 nt, Human
ucaagucuuucucuuucccu

SEQ ID NO: 1274943 - RNA, 21 nt, Human
ucaagucuuucucuuucccug

SEQ ID NO: 1274944 - RNA, 22 nt, Human
ucaagucuuucucuuucccugg

SEQ ID NO: 1274945 - RNA, 23 nt, Human
ucaagucuuucucuuucccuggu

SEQ ID NO: 1274946 - RNA, 18 nt, Human
ucaauauaagcuuuucuu

SEQ ID NO: 1274947 - RNA, 18 nt, Human
ucaagucuaccaauuaua

SEQ ID NO: 1274948 - RNA, 22 nt, Human
ucaagucuaccaaccuguucaa

SEQ ID NO: 1274949 - RNA, 15 nt, Human
ucaagucuaccaacc

SEQ ID NO: 1274950 - RNA, 19 nt, Human
ucaaguccugccucuuaaa

SEQ ID NO: 1274951 - RNA, 20 nt, Human
ucaaguccugccucuuaaau

SEQ ID NO: 1274952 - RNA, 21 nt, Human
ucaacuuuuccuuugaauccu

SEQ ID NO: 1274953 - RNA, 19 nt, Human
ucaacuugcaaaaucaguu

SEQ ID NO: 1274954 - RNA, 15 nt, Human
ucaacuuuuccuuug

SEQ ID NO: 1274955 - RNA, 20 nt, Human
ucaacuugcaaaaucaguuu

SEQ ID NO: 1274956 - RNA, 14 nt, Human
ucaacuugcuuauc

SEQ ID NO: 1274957 - RNA, 16 nt, Human
ucaacuugcaaaauca

SEQ ID NO: 1274958 - RNA, 14 nt, Human
ucaacuugcaaaau

SEQ ID NO: 1274959 - RNA, 13 nt, Human
ucaacuugcaaaa

SEQ ID NO: 1274960 - RNA, 20 nt, Human
ucaacuugagcauguuacug

SEQ ID NO: 1274961 - RNA, 16 nt, Human
ucaacuugagcauguu

SEQ ID NO: 1274962 - RNA, 22 nt, Human
ucaacugucuccuaccucugcu

SEQ ID NO: 1274963 - RNA, 19 nt, Human
ucaacuuaacuaucaucuu

SEQ ID NO: 1274964 - RNA, 19 nt, Human
ucaacuuauuaacaauuag

SEQ ID NO: 1274965 - RNA, 14 nt, Human
acauuguugagcua

SEQ ID NO: 1274966 - RNA, 12 nt, Human
acauuuucagug

SEQ ID NO: 1274967 - RNA, 12 nt, Human
acauuuuccuuu

SEQ ID NO: 1274968 - RNA, 19 nt, Human
acauuuuccuuuucaaaua

SEQ ID NO: 1274969 - RNA, 18 nt, Human
acauuuucuaagaaacau

SEQ ID NO: 1274970 - RNA, 19 nt, Human
acauuuucuaagaaacauu

SEQ ID NO: 1274971 - RNA, 11 nt, Human
acauuuucucc

SEQ ID NO: 1274972 - RNA, 17 nt, Human
acauuuucucccuggau

SEQ ID NO: 1274973 - RNA, 13 nt, Human
acauuuugaaagu

SEQ ID NO: 1274974 - RNA, 17 nt, Human
acauuuugaaagucugu

SEQ ID NO: 1274975 - RNA, 21 nt, Human
acauuuugaaagucuguccuu

SEQ ID NO: 1274976 - RNA, 20 nt, Human
acauuuuguaacaaagaacu

SEQ ID NO: 1274977 - RNA, 16 nt, Human
acauucuuauauuuca

SEQ ID NO: 1274978 - RNA, 17 nt, Human
acauugcaucaaagcau

SEQ ID NO: 1274979 - RNA, 18 nt, Human
acauugcaucaaagcauc

SEQ ID NO: 1274980 - RNA, 11 nt, Human
acauugugcca

SEQ ID NO: 1274981 - RNA, 17 nt, Human
acauuguugagcuauug

SEQ ID NO: 1274982 - RNA, 16 nt, Human
accaaaacaguuaauc

SEQ ID NO: 1274983 - RNA, 14 nt, Human
accaaaacugcucc

SEQ ID NO: 1274984 - RNA, 13 nt, Human
accaaaacugcuc

SEQ ID NO: 1274985 - RNA, 13 nt, Human
accaaaagaagua

SEQ ID NO: 1274986 - RNA, 21 nt, Human
accaaaagaaguaaaagcaaa

SEQ ID NO: 1274987 - RNA, 14 nt, Human
accaaaagaaguaa

SEQ ID NO: 1274988 - RNA, 14 nt, Human
accaaaaguuacau

SEQ ID NO: 1274989 - RNA, 21 nt, Human
accaaaaguuacauguuugca

SEQ ID NO: 1274990 - RNA, 23 nt, Human
accaaaaguuacauguuugcacc

SEQ ID NO: 1274991 - RNA, 21 nt, Human
accaaacaauauugcuccaug

SEQ ID NO: 1274992 - RNA, 15 nt, Human
accaaagaagaaagu

SEQ ID NO: 1274993 - RNA, 18 nt, Human
accaaagaugaaugaagc

SEQ ID NO: 1274994 - RNA, 23 nt, Human
accaaagaugaaugaagcaaaug

SEQ ID NO: 1274995 - RNA, 14 nt, Human
ucagauuuuuuccu

SEQ ID NO: 1274996 - RNA, 17 nt, Human
ucagccacccugaguug

SEQ ID NO: 1274997 - RNA, 16 nt, Human
ucagccacccugaguu

SEQ ID NO: 1274998 - RNA, 12 nt, Human
ucagccagcacu

SEQ ID NO: 1274999 - RNA, 14 nt, Human
ucagccagcacuug

SEQ ID NO: 1275000 - RNA, 23 nt, Human
ucagccagcacuuguccagcuga

SEQ ID NO: 1275001 - RNA, 16 nt, Human
ucagauuucugaggaa

SEQ ID NO: 1275002 - RNA, 19 nt, Human
ucagauuucugguuguuau

SEQ ID NO: 1275003 - RNA, 13 nt, Human
accauaauguuac

SEQ ID NO: 1275004 - RNA, 15 nt, Human
accauaauguuacau

SEQ ID NO: 1275005 - RNA, 18 nt, Human
accauaauguuacauuau

SEQ ID NO: 1275006 - RNA, 23 nt, Human
accaguguguggcuuucagagcc

SEQ ID NO: 1275007 - RNA, 22 nt, Human
accaguguuagggaagggccug

SEQ ID NO: 1275008 - RNA, 17 nt, Human
ucagcccucccugcccc

SEQ ID NO: 1275009 - RNA, 13 nt, Human
ucagcccucccug

SEQ ID NO: 1275010 - RNA, 14 nt, Human
ucagcccucccugc

SEQ ID NO: 1275011 - RNA, 15 nt, Human
ucagcccucccugcc

SEQ ID NO: 1275012 - RNA, 16 nt, Human
ucagcccucccugccc

SEQ ID NO: 1275013 - RNA, 12 nt, Human
ucagccagccuc

SEQ ID NO: 1275014 - RNA, 21 nt, Human
ucagccagccucgcccauccc

SEQ ID NO: 1275015 - RNA, 13 nt, Human
ucagccagccucg

SEQ ID NO: 1275016 - RNA, 18 nt, Human
accccacccacuucugca

SEQ ID NO: 1275017 - RNA, 19 nt, Human
accccagacuagauguagu

SEQ ID NO: 1275018 - RNA, 17 nt, Human
accccaucccuccccag

SEQ ID NO: 1275019 - RNA, 23 nt, Human
accccaucaccuacucacacagg

SEQ ID NO: 1275020 - RNA, 17 nt, Human
accccauccaguucaug

SEQ ID NO: 1275021 - RNA, 15 nt, Human
acccccucucccugc

SEQ ID NO: 1275022 - RNA, 15 nt, Human
accccugagcuugca

SEQ ID NO: 1275023 - RNA, 10 nt, Human
accccugcau

SEQ ID NO: 1275024 - RNA, 23 nt, Human
accccugcauuggaacuggaggc

SEQ ID NO: 1275025 - RNA, 22 nt, Human
accccugcauuggaacuggagg

SEQ ID NO: 1275026 - RNA, 22 nt, Human
accccugcuuugggcuugggcc

SEQ ID NO: 1275027 - RNA, 14 nt, Human
ucagcuaagcucac

SEQ ID NO: 1275028 - RNA, 23 nt, Human
ucagcguggagggguaggggcug

SEQ ID NO: 1275029 - RNA, 13 nt, Human
ucagcguggccuu

SEQ ID NO: 1275030 - RNA, 14 nt, Human
ucagcguggccuug

SEQ ID NO: 1275031 - RNA, 17 nt, Human
ucagcguggccuuguuc

SEQ ID NO: 1275032 - RNA, 15 nt, Human
ucagcuaagcucacg

SEQ ID NO: 1275033 - RNA, 18 nt, Human
accccuggcuuuucacug

SEQ ID NO: 1275034 - RNA, 19 nt, Human
accccuggcuuuucacugc

SEQ ID NO: 1275035 - RNA, 20 nt, Human
accccuggcuuuucacugcu

SEQ ID NO: 1275036 - RNA, 21 nt, Human
accccuggcuuuucacugcug

SEQ ID NO: 1275037 - RNA, 17 nt, Human
ucagccuuaagaaccau

SEQ ID NO: 1275038 - RNA, 15 nt, Human
ucagccuuagcucuc

SEQ ID NO: 1275039 - RNA, 23 nt, Human
acccucguggacaccugcccugc

SEQ ID NO: 1275040 - RNA, 22 nt, Human
acccucguggacaccugcccug

SEQ ID NO: 1275041 - RNA, 20 nt, Human
acccucguggacaccugccc

SEQ ID NO: 1275042 - RNA, 23 nt, Human
acccucggggauguguccugaca

SEQ ID NO: 1275043 - RNA, 19 nt, Human
acccucguggacaccugcc

SEQ ID NO: 1275044 - RNA, 18 nt, Human
acccucguggacaccugc

SEQ ID NO: 1275045 - RNA, 17 nt, Human
acccucguggacaccug

SEQ ID NO: 1275046 - RNA, 15 nt, Human
acccucguggacacc

SEQ ID NO: 1275047 - RNA, 17 nt, Human
acccucggggauguguc

SEQ ID NO: 1275048 - RNA, 19 nt, Human
acccucggggauguguccu

SEQ ID NO: 1275049 - RNA, 20 nt, Human
acccucggggauguguccug

SEQ ID NO: 1275050 - RNA, 15 nt, Human
acccucucagcucca

SEQ ID NO: 1275051 - RNA, 16 nt, Human
acccucucagcuccag

SEQ ID NO: 1275052 - RNA, 16 nt, Human
acccucugaaauacau

SEQ ID NO: 1275053 - RNA, 14 nt, Human
acccucugaaauac

SEQ ID NO: 1275054 - RNA, 18 nt, Human
acccugaaggggccauga

SEQ ID NO: 1275055 - RNA, 12 nt, Human
acccugaagggg

SEQ ID NO: 1275056 - RNA, 17 nt, Human
acccugaaggggccaug

SEQ ID NO: 1275057 - RNA, 21 nt, Human
acccugcccuuguuuggggca

SEQ ID NO: 1275058 - RNA, 11 nt, Human
acccuugacac

SEQ ID NO: 1275059 - RNA, 17 nt, Human
acccuuucuucagcucu

SEQ ID NO: 1275060 - RNA, 21 nt, Human
acccuuuuggguuucugcccu

SEQ ID NO: 1275061 - RNA, 17 nt, Human
acccuuuuucuccagcu

SEQ ID NO: 1275062 - RNA, 18 nt, Human
acccggaggggccuggca

SEQ ID NO: 1275063 - RNA, 21 nt, Human
acccggaggggccuggcagcc

SEQ ID NO: 1275064 - RNA, 15 nt, Human
ucagguaauacaaac

SEQ ID NO: 1275065 - RNA, 16 nt, Human
ucagguaauacaaacu

SEQ ID NO: 1275066 - RNA, 16 nt, Human
acccggcacccccugc

SEQ ID NO: 1275067 - RNA, 18 nt, Human
acccggcacccccugcag

SEQ ID NO: 1275068 - RNA, 19 nt, Human
acccggcacccccugcagc

SEQ ID NO: 1275069 - RNA, 20 nt, Human
acccggcacccccugcagcu

SEQ ID NO: 1275070 - RNA, 22 nt, Human
acccggcacccccugcagcuug

SEQ ID NO: 1275071 - RNA, 13 nt, Human
acccggcuaauuu

SEQ ID NO: 1275072 - RNA, 17 nt, Human
acccgggaggcagaggu

SEQ ID NO: 1275073 - RNA, 14 nt, Human
acccggcugcagag

SEQ ID NO: 1275074 - RNA, 21 nt, Human
ucagcuuucuuuaaaguucuu

SEQ ID NO: 1275075 - RNA, 23 nt, Human
ucagggcuccuugugggccuggg

SEQ ID NO: 1275076 - RNA, 16 nt, Human
ucagggcuucuaguuu

SEQ ID NO: 1275077 - RNA, 22 nt, Human
ucagggcuucuaguuucucuua

SEQ ID NO: 1275078 - RNA, 19 nt, Human
accuauuuccagaaauaca

SEQ ID NO: 1275079 - RNA, 12 nt, Human
accuauuuccau

SEQ ID NO: 1275080 - RNA, 23 nt, Human
accuauuucuuaaacacuugcaa

SEQ ID NO: 1275081 - RNA, 18 nt, Human
accuauuucuuaaacacu

SEQ ID NO: 1275082 - RNA, 17 nt, Human
accuauuuccagaaaua

SEQ ID NO: 1275083 - RNA, 16 nt, Human
accuauuuccagaaau

SEQ ID NO: 1275084 - RNA, 16 nt, Human
accuauuaucccagcu

SEQ ID NO: 1275085 - RNA, 22 nt, Human
accuaugucauuucauuuccua

SEQ ID NO: 1275086 - RNA, 16 nt, Human
accuagggugauauua

SEQ ID NO: 1275087 - RNA, 18 nt, Human
accuaggaagccucagau

SEQ ID NO: 1275088 - RNA, 15 nt, Human
accgcagaaggaagg

SEQ ID NO: 1275089 - RNA, 15 nt, Human
accuaccuguugagc

SEQ ID NO: 1275090 - RNA, 17 nt, Human
accuaccuguugagcau

SEQ ID NO: 1275091 - RNA, 24 nt, Human
accuaccuguugagcaucacagaa

SEQ ID NO: 1275092 - RNA, 14 nt, Human
accuacucacacag

SEQ ID NO: 1275093 - RNA, 16 nt, Human
accuacucacacaggc

SEQ ID NO: 1275094 - RNA, 17 nt, Human
accuacucacacaggca

SEQ ID NO: 1275095 - RNA, 18 nt, Human
accuacucuggcuagaag

SEQ ID NO: 1275096 - RNA, 12 nt, Human
accuaggcuagg

SEQ ID NO: 1275097 - RNA, 17 nt, Human
accuaggcuaggguggg

SEQ ID NO: 1275098 - RNA, 17 nt, Human
accuaggaagccucaga

SEQ ID NO: 1275099 - RNA, 22 nt, Human
accuaggaagccucagauuccu

SEQ ID NO: 1275100 - RNA, 19 nt, Human
accuacugcccaggcacug

SEQ ID NO: 1275101 - RNA, 23 nt, Human
accuacugcccaggcacugcaaa

SEQ ID NO: 1275102 - RNA, 15 nt, Human
accuacuguucuaaa

SEQ ID NO: 1275103 - RNA, 16 nt, Human
accuacuguucuaaag

SEQ ID NO: 1275104 - RNA, 17 nt, Human
accuacuguucuaaagc

SEQ ID NO: 1275105 - RNA, 18 nt, Human
accuacuguucuaaagcu

SEQ ID NO: 1275106 - RNA, 20 nt, Human
accuacuguucuaaagcucu

SEQ ID NO: 1275107 - RNA, 21 nt, Human
accuacuguucuaaagcucug

SEQ ID NO: 1275108 - RNA, 23 nt, Human
accuacuguucuaaagcucugac

SEQ ID NO: 1275109 - RNA, 20 nt, Human
accuacuuugacuuuuugca

SEQ ID NO: 1275110 - RNA, 21 nt, Human
accuacuuugacuuuuugcau

SEQ ID NO: 1275111 - RNA, 17 nt, Human
accucccucaaccucau

SEQ ID NO: 1275112 - RNA, 17 nt, Human
accucccuauacugcuu

SEQ ID NO: 1275113 - RNA, 12 nt, Human
accuccccuugg

SEQ ID NO: 1275114 - RNA, 13 nt, Human
accuccccuuggg

SEQ ID NO: 1275115 - RNA, 14 nt, Human
accuccccuugggc

SEQ ID NO: 1275116 - RNA, 22 nt, Human
accuccccuugggcccacaccu

SEQ ID NO: 1275117 - RNA, 17 nt, Human
accuccugacacccuuc

SEQ ID NO: 1275118 - RNA, 18 nt, Human
accuccugacacccuucu

SEQ ID NO: 1275119 - RNA, 19 nt, Human
accuccugacacccuucuc

SEQ ID NO: 1275120 - RNA, 21 nt, Human
accuccugacacccuucuccc

SEQ ID NO: 1275121 - RNA, 22 nt, Human
accuccugacacccuucuccca

SEQ ID NO: 1275122 - RNA, 13 nt, Human
accuccugagaaa

SEQ ID NO: 1275123 - RNA, 15 nt, Human
accuccccagcauuc

SEQ ID NO: 1275124 - RNA, 21 nt, Human
accuccccagcauuccagccc

SEQ ID NO: 1275125 - RNA, 23 nt, Human
accuccccagcauuccagccccu

SEQ ID NO: 1275126 - RNA, 17 nt, Human
accuccagcuuuccugu

SEQ ID NO: 1275127 - RNA, 14 nt, Human
accuccacauccuc

SEQ ID NO: 1275128 - RNA, 16 nt, Human
accuccacauccucca

SEQ ID NO: 1275129 - RNA, 15 nt, Human
accuccaccuccugg

SEQ ID NO: 1275130 - RNA, 17 nt, Human
accuccaccuccugggu

SEQ ID NO: 1275131 - RNA, 13 nt, Human
accuccagcuguu

SEQ ID NO: 1275132 - RNA, 16 nt, Human
accuccagcuuuccug

SEQ ID NO: 1275133 - RNA, 18 nt, Human
accuccagcuuuccugua

SEQ ID NO: 1275134 - RNA, 23 nt, Human
ucaugcaaacuuuauuuuguguu

SEQ ID NO: 1275135 - RNA, 14 nt, Human
ucaugcaaacucuu

SEQ ID NO: 1275136 - RNA, 20 nt, Human
ucaugcacaguauuuguaau

SEQ ID NO: 1275137 - RNA, 17 nt, Human
ucaugcacaguauuugu

SEQ ID NO: 1275138 - RNA, 12 nt, Human
ucaugcagcugu

SEQ ID NO: 1275139 - RNA, 14 nt, Human
ucaugcagcugugg

SEQ ID NO: 1275140 - RNA, 17 nt, Human
ucaugugaaaucauuca

SEQ ID NO: 1275141 - RNA, 14 nt, Human
ucaugcauggaaau

SEQ ID NO: 1275142 - RNA, 17 nt, Human
ucaugugaccacucugu

SEQ ID NO: 1275143 - RNA, 14 nt, Human
ucaugugacucuuu

SEQ ID NO: 1275144 - RNA, 17 nt, Human
ucaugugacucuuucca

SEQ ID NO: 1275145 - RNA, 15 nt, Human
ucauguguauaaaaa

SEQ ID NO: 1275146 - RNA, 13 nt, Human
ucaugugucccag

SEQ ID NO: 1275147 - RNA, 14 nt, Human
ucaugugucccaga

SEQ ID NO: 1275148 - RNA, 18 nt, Human
ucaugugacucuuuccaa

SEQ ID NO: 1275149 - RNA, 19 nt, Human
ucaugugacucuuuccaac

SEQ ID NO: 1275150 - RNA, 21 nt, Human
ucaugugcauuauuuuccaga

SEQ ID NO: 1275151 - RNA, 13 nt, Human
ucauguggcugga

SEQ ID NO: 1275152 - RNA, 16 nt, Human
ucauguggcuggaaga

SEQ ID NO: 1275153 - RNA, 21 nt, Human
ucauguggcuggaagauccug

SEQ ID NO: 1275154 - RNA, 20 nt, Human
ucauguguacaaaaguuuca

SEQ ID NO: 1275155 - RNA, 10 nt, Human
ucauguguau

SEQ ID NO: 1275156 - RNA, 14 nt, Human
ucauguguauaaaa

SEQ ID NO: 1275157 - RNA, 14 nt, Human
ucaugcaaacuuua

SEQ ID NO: 1275158 - RNA, 11 nt, Human
ucaugauuuuu

SEQ ID NO: 1275159 - RNA, 21 nt, Human
ucaugauuuugaaaucaugaa

SEQ ID NO: 1275160 - RNA, 13 nt, Human
ucaugcaaacucu

SEQ ID NO: 1275161 - RNA, 19 nt, Human
ucaugaagauauuuuucca

SEQ ID NO: 1275162 - RNA, 17 nt, Human
ucaugauuucauuucaa

SEQ ID NO: 1275163 - RNA, 23 nt, Human
ucaugauuucauuucaacuguuu

SEQ ID NO: 1275164 - RNA, 22 nt, Human
ucaugauuuuaaguuucucugc

SEQ ID NO: 1275165 - RNA, 14 nt, Human
ucaugauuuugaaa

SEQ ID NO: 1275166 - RNA, 14 nt, Human
ucaucuaggauuuu

SEQ ID NO: 1275167 - RNA, 14 nt, Human
ucaucuaccuagau

SEQ ID NO: 1275168 - RNA, 20 nt, Human
ucaucuaccauuuucugguu

SEQ ID NO: 1275169 - RNA, 22 nt, Human
ucaucuaccauuuucugguucu

SEQ ID NO: 1275170 - RNA, 20 nt, Human
ucaucuaccuagauuuaaua

SEQ ID NO: 1275171 - RNA, 16 nt, Human
ucaugaaagauucaau

SEQ ID NO: 1275172 - RNA, 17 nt, Human
ucaugaaagauucaaug

SEQ ID NO: 1275173 - RNA, 11 nt, Human
ucaugaaccuc

SEQ ID NO: 1275174 - RNA, 22 nt, Human
ucaugaaccucaagcugcaucu

SEQ ID NO: 1275175 - RNA, 13 nt, Human
ucaucuaggauuu

SEQ ID NO: 1275176 - RNA, 16 nt, Human
ucaucuaaaagaaaaa

SEQ ID NO: 1275177 - RNA, 15 nt, Human
ucauccauaacugaa

SEQ ID NO: 1275178 - RNA, 12 nt, Human
ucaucccacucc

SEQ ID NO: 1275179 - RNA, 14 nt, Human
ucaucgaaucuacu

SEQ ID NO: 1275180 - RNA, 21 nt, Human
ucaucgaaucuacuaauucca

SEQ ID NO: 1275181 - RNA, 11 nt, Human
ucauccaucau

SEQ ID NO: 1275182 - RNA, 12 nt, Human
ucauccaucauc

SEQ ID NO: 1275183 - RNA, 14 nt, Human
ucauccaucaucau

SEQ ID NO: 1275184 - RNA, 13 nt, Human
ucauccauccagg

SEQ ID NO: 1275185 - RNA, 15 nt, Human
ucauccaucaucaug

SEQ ID NO: 1275186 - RNA, 16 nt, Human
ucauccaucaucaugu

SEQ ID NO: 1275187 - RNA, 17 nt, Human
ucauccaucaucaugug

SEQ ID NO: 1275188 - RNA, 14 nt, Human
ucauccauucuauu

SEQ ID NO: 1275189 - RNA, 19 nt, Human
ucauccauucuauuguuaa

SEQ ID NO: 1275190 - RNA, 23 nt, Human
ucaucccaaaggacagccgccug

SEQ ID NO: 1275191 - RNA, 15 nt, Human
ucaguuuuugugaaa

SEQ ID NO: 1275192 - RNA, 20 nt, Human
ucaguggggcccauggaugu

SEQ ID NO: 1275193 - RNA, 14 nt, Human
ucaguggggcaguc

SEQ ID NO: 1275194 - RNA, 16 nt, Human
ucaguuuuaucauuuu

SEQ ID NO: 1275195 - RNA, 17 nt, Human
ucaguuuuaucauuuuc

SEQ ID NO: 1275196 - RNA, 19 nt, Human
ucaguuuuaucauuuucaa

SEQ ID NO: 1275197 - RNA, 17 nt, Human
ucaguuuuugugaaaag

SEQ ID NO: 1275198 - RNA, 20 nt, Human
ucaguuuuccucucaauaaa

SEQ ID NO: 1275199 - RNA, 12 nt, Human
ucaguuuucauu

SEQ ID NO: 1275200 - RNA, 13 nt, Human
ucaguuuucauuu

SEQ ID NO: 1275201 - RNA, 16 nt, Human
ucaguggggaggggcu

SEQ ID NO: 1275202 - RNA, 20 nt, Human
ucagugcccuccaggauaga

SEQ ID NO: 1275203 - RNA, 13 nt, Human
ucaguaugaauua

SEQ ID NO: 1275204 - RNA, 17 nt, Human
ucaguaugaauuauuca

SEQ ID NO: 1275205 - RNA, 14 nt, Human
accgcagaaggaag

SEQ ID NO: 1275206 - RNA, 13 nt, Human
accgcagaaggaa

SEQ ID NO: 1275207 - RNA, 12 nt, Human
accgcagaagga

SEQ ID NO: 1275208 - RNA, 17 nt, Human
accgagucucuucucca

SEQ ID NO: 1275209 - RNA, 18 nt, Human
accgagucucuucuccac

SEQ ID NO: 1275210 - RNA, 16 nt, Human
accgagucucuucucc

SEQ ID NO: 1275211 - RNA, 15 nt, Human
ucauauuuucaugcu

SEQ ID NO: 1275212 - RNA, 13 nt, Human
accgaggcaggga

SEQ ID NO: 1275213 - RNA, 15 nt, Human
ucauauuuucuuuca

SEQ ID NO: 1275214 - RNA, 18 nt, Human
ucauauuuucuuucaaaa

SEQ ID NO: 1275215 - RNA, 21 nt, Human
ucauauuucccaugauuucau

SEQ ID NO: 1275216 - RNA, 19 nt, Human
ucauauuucccaugauuuc

SEQ ID NO: 1275217 - RNA, 13 nt, Human
ucauauuucccau

SEQ ID NO: 1275218 - RNA, 22 nt, Human
ucauauuucccaugauuucaug

SEQ ID NO: 1275219 - RNA, 20 nt, Human
ucauauuuuaaacagaggau

SEQ ID NO: 1275220 - RNA, 21 nt, Human
ucauauugugauucugccuuu

SEQ ID NO: 1275221 - RNA, 13 nt, Human
ucauaugcauauu

SEQ ID NO: 1275222 - RNA, 21 nt, Human
ucauauguaccauguacauga

SEQ ID NO: 1275223 - RNA, 22 nt, Human
ucauauguaccauguacaugaa

SEQ ID NO: 1275224 - RNA, 13 nt, Human
ucauaucauccac

SEQ ID NO: 1275225 - RNA, 16 nt, Human
ucauaucauccacaca

SEQ ID NO: 1275226 - RNA, 14 nt, Human
ucauaucauccaca

SEQ ID NO: 1275227 - RNA, 22 nt, Human
ucauauaaauagaauguaaaug

SEQ ID NO: 1275228 - RNA, 15 nt, Human
ucauauaauaaaugu

SEQ ID NO: 1275229 - RNA, 21 nt, Human
ucauauaaauagaauguaaau

SEQ ID NO: 1275230 - RNA, 18 nt, Human
ucauauaaauagaaugua

SEQ ID NO: 1275231 - RNA, 16 nt, Human
ucauauaaauagaaug

SEQ ID NO: 1275232 - RNA, 14 nt, Human
ucauauaaauagaa

SEQ ID NO: 1275233 - RNA, 16 nt, Human
ucauauaauaaaugua

SEQ ID NO: 1275234 - RNA, 16 nt, Human
ucauauaauuauaugu

SEQ ID NO: 1275235 - RNA, 20 nt, Human
ucauauaguuagcuaauaaa

SEQ ID NO: 1275236 - RNA, 14 nt, Human
ucauauauauacau

SEQ ID NO: 1275237 - RNA, 22 nt, Human
ucauauauaucacccagacaua

SEQ ID NO: 1275238 - RNA, 17 nt, Human
ucauauauaucacccag

SEQ ID NO: 1275239 - RNA, 13 nt, Human
ucauaguucagaa

SEQ ID NO: 1275240 - RNA, 13 nt, Human
ucauauaaauaga

SEQ ID NO: 1275241 - RNA, 18 nt, Human
ucauauaaaguaucauca

SEQ ID NO: 1275242 - RNA, 13 nt, Human
ucauauaaaguau

SEQ ID NO: 1275243 - RNA, 16 nt, Human
ucauauaaaguaucau

SEQ ID NO: 1275244 - RNA, 14 nt, Human
ucauaguucagaau

SEQ ID NO: 1275245 - RNA, 16 nt, Human
ucauaguucagaauuu

SEQ ID NO: 1275246 - RNA, 18 nt, Human
ucauaguucagaauuuag

SEQ ID NO: 1275247 - RNA, 13 nt, Human
ucauaguuuaauu

SEQ ID NO: 1275248 - RNA, 20 nt, Human
uaacgauaaaagacagugaa

SEQ ID NO: 1275249 - RNA, 16 nt, Human
uaaccuuaauuuauua

SEQ ID NO: 1275250 - RNA, 21 nt, Human
uaaccuuaccagauuuuuaca

SEQ ID NO: 1275251 - RNA, 16 nt, Human
uaaccuugccugguac

SEQ ID NO: 1275252 - RNA, 19 nt, Human
uaaccuugccugguacagu

SEQ ID NO: 1275253 - RNA, 21 nt, Human
uaaccuugccugguacaguau

SEQ ID NO: 1275254 - RNA, 14 nt, Human
uaaccuuuacauga

SEQ ID NO: 1275255 - RNA, 16 nt, Human
uaacuacuuuauaacu

SEQ ID NO: 1275256 - RNA, 17 nt, Human
uaacuacuuuauaacua

SEQ ID NO: 1275257 - RNA, 23 nt, Human
uaacuacuuuauaacuaacaugu

SEQ ID NO: 1275258 - RNA, 14 nt, Human
uaacuuaaauagua

SEQ ID NO: 1275259 - RNA, 16 nt, Human
uaacuuaaauaguauu

SEQ ID NO: 1275260 - RNA, 17 nt, Human
uaacuuaaauaguauuu

SEQ ID NO: 1275261 - RNA, 17 nt, Human
uaacuagacaccaaagu

SEQ ID NO: 1275262 - RNA, 18 nt, Human
uaacuagacaccaaaguu

SEQ ID NO: 1275263 - RNA, 20 nt, Human
uaacuagacaccaaaguucu

SEQ ID NO: 1275264 - RNA, 21 nt, Human
uaacuagacaccaaaguucua

SEQ ID NO: 1275265 - RNA, 22 nt, Human
uaacuagacaccaaaguucuaa

SEQ ID NO: 1275266 - RNA, 15 nt, Human
uaacuuucucuauga

SEQ ID NO: 1275267 - RNA, 23 nt, Human
uaacuucuuauggaauugauuug

SEQ ID NO: 1275268 - RNA, 12 nt, Human
uaacuucuugcu

SEQ ID NO: 1275269 - RNA, 13 nt, Human
uaacuucuugcuu

SEQ ID NO: 1275270 - RNA, 15 nt, Human
uaacuucuugcuucu

SEQ ID NO: 1275271 - RNA, 19 nt, Human
uaacuucuugcuucuuucu

SEQ ID NO: 1275272 - RNA, 20 nt, Human
uaacuucuugcuucuuucua

SEQ ID NO: 1275273 - RNA, 19 nt, Human
uaacuugauccauuucuaa

SEQ ID NO: 1275274 - RNA, 20 nt, Human
uaacuugauccauuucuaau

SEQ ID NO: 1275275 - RNA, 22 nt, Human
uaacuugauccauuucuaauua

SEQ ID NO: 1275276 - RNA, 16 nt, Human
uaagacaugauuuccu

SEQ ID NO: 1275277 - RNA, 19 nt, Human
uaagaauaucuguaauggu

SEQ ID NO: 1275278 - RNA, 20 nt, Human
uaagacacugaaaaaucuaa

SEQ ID NO: 1275279 - RNA, 23 nt, Human
uaagacacugaaaaaucuaagug

SEQ ID NO: 1275280 - RNA, 15 nt, Human
uaagaauaaacauuu

SEQ ID NO: 1275281 - RNA, 13 nt, Human
uaacuuucugggu

SEQ ID NO: 1275282 - RNA, 15 nt, Human
uaagaaguuuuaaaa

SEQ ID NO: 1275283 - RNA, 21 nt, Human
uaagaaguuuuaaaaagccag

SEQ ID NO: 1275284 - RNA, 18 nt, Human
aauauauuuuaagacgaa

SEQ ID NO: 1275285 - RNA, 22 nt, Human
aauaucacuugucaauaaaauc

SEQ ID NO: 1275286 - RNA, 17 nt, Human
uaacaguggacaaaguu

SEQ ID NO: 1275287 - RNA, 14 nt, Human
uaacaguguuuaaa

SEQ ID NO: 1275288 - RNA, 17 nt, Human
uaacaguuccuuucaaa

SEQ ID NO: 1275289 - RNA, 18 nt, Human
uaacaguuguauuuaaca

SEQ ID NO: 1275290 - RNA, 19 nt, Human
uaacaguuguauuuaacag

SEQ ID NO: 1275291 - RNA, 23 nt, Human
uaacaguuguauuuaacagaaau

SEQ ID NO: 1275292 - RNA, 14 nt, Human
uaacauauaauguu

SEQ ID NO: 1275293 - RNA, 23 nt, Human
uaacauauaauguuguuauuuaa

SEQ ID NO: 1275294 - RNA, 14 nt, Human
uaacaucuaaaaau

SEQ ID NO: 1275295 - RNA, 20 nt, Human
uaacaucuaaaaauagacuu

SEQ ID NO: 1275296 - RNA, 13 nt, Human
uaacaucugagaa

SEQ ID NO: 1275297 - RNA, 14 nt, Human
uaacaugaauauuu

SEQ ID NO: 1275298 - RNA, 15 nt, Human
uaacaugaagaccuu

SEQ ID NO: 1275299 - RNA, 16 nt, Human
aauagucaaauugugu

SEQ ID NO: 1275300 - RNA, 14 nt, Human
uaaaauuuauauug

SEQ ID NO: 1275301 - RNA, 17 nt, Human
uaaaauuuauauuguaa

SEQ ID NO: 1275302 - RNA, 16 nt, Human
uaaaauuuauauugua

SEQ ID NO: 1275303 - RNA, 19 nt, Human
aauagucaaauugugugaa

SEQ ID NO: 1275304 - RNA, 23 nt, Human
aauagugucauccucacagugaa

SEQ ID NO: 1275305 - RNA, 13 nt, Human
uaaaauuuguucu

SEQ ID NO: 1275306 - RNA, 15 nt, Human
aauauauuuuaagac

SEQ ID NO: 1275307 - RNA, 14 nt, Human
aauauauuuuaaga

SEQ ID NO: 1275308 - RNA, 14 nt, Human
aauaguuguugauu

SEQ ID NO: 1275309 - RNA, 11 nt, Human
aauaguuccug

SEQ ID NO: 1275310 - RNA, 13 nt, Human
aauaguuccugcu

SEQ ID NO: 1275311 - RNA, 12 nt, Human
aauauuuagugu

SEQ ID NO: 1275312 - RNA, 18 nt, Human
aauauuuauuuuaauaau

SEQ ID NO: 1275313 - RNA, 19 nt, Human
aauauuuauuuuaauaaug

SEQ ID NO: 1275314 - RNA, 14 nt, Human
aauauuucagauaa

SEQ ID NO: 1275315 - RNA, 14 nt, Human
aauauugacuugua

SEQ ID NO: 1275316 - RNA, 17 nt, Human
aauauugacuuguauau

SEQ ID NO: 1275317 - RNA, 13 nt, Human
aauauuguccauu

SEQ ID NO: 1275318 - RNA, 9 nt, Human
aauauugug

SEQ ID NO: 1275319 - RNA, 12 nt, Human
aauauuuaagac

SEQ ID NO: 1275320 - RNA, 21 nt, Human
aauaugccccauucaacaucu

SEQ ID NO: 1275321 - RNA, 24 nt, Human
aauaugccccauucaacaucuagu

SEQ ID NO: 1275322 - RNA, 21 nt, Human
aauaugccugcuauuugaagu

SEQ ID NO: 1275323 - RNA, 17 nt, Human
aauaugccuuuuugaag

SEQ ID NO: 1275324 - RNA, 15 nt, Human
aauauuccugcauuu

SEQ ID NO: 1275325 - RNA, 18 nt, Human
aauauucauaguuuaauu

SEQ ID NO: 1275326 - RNA, 15 nt, Human
aauauucccuagaaa

SEQ ID NO: 1275327 - RNA, 17 nt, Human
aauauucccuagaaacu

SEQ ID NO: 1275328 - RNA, 13 nt, Human
uaagacuuuacuu

SEQ ID NO: 1275329 - RNA, 12 nt, Human
uaagagaaguag

SEQ ID NO: 1275330 - RNA, 14 nt, Human
uaagagaaguagaa

SEQ ID NO: 1275331 - RNA, 18 nt, Human
uaagagaaguagaaauca

SEQ ID NO: 1275332 - RNA, 20 nt, Human
uaagagaaguagaaaucaua

SEQ ID NO: 1275333 - RNA, 17 nt, Human
uaagacaugauuuccuu

SEQ ID NO: 1275334 - RNA, 19 nt, Human
uaagacaugauuuccuuga

SEQ ID NO: 1275335 - RNA, 20 nt, Human
uaagacuuacucuaagaucu

SEQ ID NO: 1275336 - RNA, 14 nt, Human
uaagacuugacagu

SEQ ID NO: 1275337 - RNA, 17 nt, Human
uaagacuugacagugga

SEQ ID NO: 1275338 - RNA, 15 nt, Human
uaagagaaguuguaa

SEQ ID NO: 1275339 - RNA, 22 nt, Human
aaucaggguuaguauuguccag

SEQ ID NO: 1275340 - RNA, 18 nt, Human
aauauuuuuucuuuucua

SEQ ID NO: 1275341 - RNA, 14 nt, Human
uaagauuccagaga

SEQ ID NO: 1275342 - RNA, 22 nt, Human
uaagaugugauauucuaagacu

SEQ ID NO: 1275343 - RNA, 23 nt, Human
uaagaugugauauucuaagacuu

SEQ ID NO: 1275344 - RNA, 21 nt, Human
uaagaugugcagcauuucacu

SEQ ID NO: 1275345 - RNA, 14 nt, Human
uaagaugugauauu

SEQ ID NO: 1275346 - RNA, 18 nt, Human
uaagaugugauauucuaa

SEQ ID NO: 1275347 - RNA, 19 nt, Human
uaagaugugauauucuaag

SEQ ID NO: 1275348 - RNA, 20 nt, Human
uaagaugugauauucuaaga

SEQ ID NO: 1275349 - RNA, 21 nt, Human
uaagaugugauauucuaagac

SEQ ID NO: 1275350 - RNA, 21 nt, Human
uaagauuccagagaguggcuc

SEQ ID NO: 1275351 - RNA, 10 nt, Human
uaagauucua

SEQ ID NO: 1275352 - RNA, 11 nt, Human
uaagauucuaa

SEQ ID NO: 1275353 - RNA, 12 nt, Human
uaagauucuaaa

SEQ ID NO: 1275354 - RNA, 13 nt, Human
uaagauucuaaag

SEQ ID NO: 1275355 - RNA, 14 nt, Human
uaagauucuaaagg

SEQ ID NO: 1275356 - RNA, 16 nt, Human
uaagauucuaaagguc

SEQ ID NO: 1275357 - RNA, 17 nt, Human
uaagauucuaaaggucc

SEQ ID NO: 1275358 - RNA, 12 nt, Human
uaagauucuaac

SEQ ID NO: 1275359 - RNA, 13 nt, Human
uaagauucuaacg

SEQ ID NO: 1275360 - RNA, 17 nt, Human
uaagauucuaacggucu

SEQ ID NO: 1275361 - RNA, 12 nt, Human
uaagauucuaau

SEQ ID NO: 1275362 - RNA, 21 nt, Human
aaucaggguuaguauugucca

SEQ ID NO: 1275363 - RNA, 17 nt, Human
aauauuuuuaauauaua

SEQ ID NO: 1275364 - RNA, 14 nt, Human
aauauuuuuagaua

SEQ ID NO: 1275365 - RNA, 13 nt, Human
aauauuuuucuua

SEQ ID NO: 1275366 - RNA, 12 nt, Human
aauauuuguaca

SEQ ID NO: 1275367 - RNA, 14 nt, Human
aauauuuguacaua

SEQ ID NO: 1275368 - RNA, 17 nt, Human
aauauuugugacaaaaa

SEQ ID NO: 1275369 - RNA, 11 nt, Human
aauauuuuaaa

SEQ ID NO: 1275370 - RNA, 16 nt, Human
aauauuuuaaaaucag

SEQ ID NO: 1275371 - RNA, 13 nt, Human
aauauuuuaaaga

SEQ ID NO: 1275372 - RNA, 15 nt, Human
aauauuuuaaagaau

SEQ ID NO: 1275373 - RNA, 16 nt, Human
aauauuuuaaagaauu

SEQ ID NO: 1275374 - RNA, 20 nt, Human
aauauuuugcuaguuuuuga

SEQ ID NO: 1275375 - RNA, 16 nt, Human
uaagcuggagugcagu

SEQ ID NO: 1275376 - RNA, 14 nt, Human
uaagcaagaaggca

SEQ ID NO: 1275377 - RNA, 17 nt, Human
uaagcaacauggcuuug

SEQ ID NO: 1275378 - RNA, 22 nt, Human
uaagcaccuguaaugugcgagg

SEQ ID NO: 1275379 - RNA, 13 nt, Human
uaagcagaaagug

SEQ ID NO: 1275380 - RNA, 15 nt, Human
uaagcagaaagugcc

SEQ ID NO: 1275381 - RNA, 16 nt, Human
uaagcagaaagugccu

SEQ ID NO: 1275382 - RNA, 19 nt, Human
uaagcagaaagugccuuuc

SEQ ID NO: 1275383 - RNA, 21 nt, Human
uaagcagaaagugccuuucag

SEQ ID NO: 1275384 - RNA, 22 nt, Human
uaagcagaaagugccuuucagg

SEQ ID NO: 1275385 - RNA, 17 nt, Human
uaagcagaccacugaua

SEQ ID NO: 1275386 - RNA, 20 nt, Human
uaagcagaccacugauaaaa

SEQ ID NO: 1275387 - RNA, 23 nt, Human
uaagcaaaaacaaaaagaaaaga

SEQ ID NO: 1275388 - RNA, 14 nt, Human
uaagcaacauggcu

SEQ ID NO: 1275389 - RNA, 16 nt, Human
uaagcaacauggcuuu

SEQ ID NO: 1275390 - RNA, 13 nt, Human
uaagauucuaaug

SEQ ID NO: 1275391 - RNA, 14 nt, Human
uaagauucuaauga

SEQ ID NO: 1275392 - RNA, 15 nt, Human
uaagauucuaaugau

SEQ ID NO: 1275393 - RNA, 11 nt, Human
uaagauucuag

SEQ ID NO: 1275394 - RNA, 12 nt, Human
uaagauucuaga

SEQ ID NO: 1275395 - RNA, 13 nt, Human
uaagauucuagau

SEQ ID NO: 1275396 - RNA, 14 nt, Human
uaagauucuagauc

SEQ ID NO: 1275397 - RNA, 21 nt, Human
uaagauucuagaucagaugcu

SEQ ID NO: 1275398 - RNA, 17 nt, Human
uaagauucugauuuuag

SEQ ID NO: 1275399 - RNA, 13 nt, Human
uaagauucugauu

SEQ ID NO: 1275400 - RNA, 14 nt, Human
uaagauucugauuu

SEQ ID NO: 1275401 - RNA, 15 nt, Human
uaagauuuccuucuu

SEQ ID NO: 1275402 - RNA, 16 nt, Human
uaagauuuccuucuuu

SEQ ID NO: 1275403 - RNA, 12 nt, Human
uaagauuuguuu

SEQ ID NO: 1275404 - RNA, 15 nt, Human
uaagauuuguuuuua

SEQ ID NO: 1275405 - RNA, 18 nt, Human
uaagauuuguuuuuaaac

SEQ ID NO: 1275406 - RNA, 19 nt, Human
uaagauuuguuuuuaaacu

SEQ ID NO: 1275407 - RNA, 20 nt, Human
uaagauuuguuuuuaaacug

SEQ ID NO: 1275408 - RNA, 22 nt, Human
uaagauuuguuuuuaaacugua

SEQ ID NO: 1275409 - RNA, 23 nt, Human
uaagauuuguuuuuaaacuguac

SEQ ID NO: 1275410 - RNA, 16 nt, Human
aaucuuuaauuuuaca

SEQ ID NO: 1275411 - RNA, 15 nt, Human
aaucuuuaauuuuac

SEQ ID NO: 1275412 - RNA, 15 nt, Human
aaucuuuaaaccaau

SEQ ID NO: 1275413 - RNA, 23 nt, Human
aaucuuuaaaccaauugcugcua

SEQ ID NO: 1275414 - RNA, 21 nt, Human
aaucuuuagagaaguauacau

SEQ ID NO: 1275415 - RNA, 22 nt, Human
aaucuuuagagaaguauacaua

SEQ ID NO: 1275416 - RNA, 16 nt, Human
aaucuuuauaaaugua

SEQ ID NO: 1275417 - RNA, 15 nt, Human
uaaugucuugagcuc

SEQ ID NO: 1275418 - RNA, 21 nt, Human
uaaugugaaaaugguccagga

SEQ ID NO: 1275419 - RNA, 13 nt, Human
uaaugucuugagc

SEQ ID NO: 1275420 - RNA, 17 nt, Human
uaauguguaguucaugu

SEQ ID NO: 1275421 - RNA, 18 nt, Human
uaauguguaguucaugua

SEQ ID NO: 1275422 - RNA, 19 nt, Human
uaauguguaguucauguaa

SEQ ID NO: 1275423 - RNA, 20 nt, Human
uaauguguaguucauguaaa

SEQ ID NO: 1275424 - RNA, 22 nt, Human
uaauguguaguucauguaaaua

SEQ ID NO: 1275425 - RNA, 19 nt, Human
uaauguguauuacaaauau

SEQ ID NO: 1275426 - RNA, 13 nt, Human
uaauguuaauauu

SEQ ID NO: 1275427 - RNA, 17 nt, Human
uaauguuaauauugauu

SEQ ID NO: 1275428 - RNA, 16 nt, Human
uaauguuaauauugau

SEQ ID NO: 1275429 - RNA, 13 nt, Human
uaauguaucaaac

SEQ ID NO: 1275430 - RNA, 19 nt, Human
uaauguaucaaauacauuu

SEQ ID NO: 1275431 - RNA, 16 nt, Human
uaauguauguuaccaa

SEQ ID NO: 1275432 - RNA, 15 nt, Human
uaaugaaugcauaaa

SEQ ID NO: 1275433 - RNA, 23 nt, Human
uaaugaaugcuuaaagaauucaa

SEQ ID NO: 1275434 - RNA, 19 nt, Human
uaauguacauagugcuaac

SEQ ID NO: 1275435 - RNA, 13 nt, Human
uaauguacauagu

SEQ ID NO: 1275436 - RNA, 20 nt, Human
uaaugaaugcuuaaagaauu

SEQ ID NO: 1275437 - RNA, 18 nt, Human
uaaugaaugcuuaaagaa

SEQ ID NO: 1275438 - RNA, 13 nt, Human
uaaugaaugcuua

SEQ ID NO: 1275439 - RNA, 17 nt, Human
uaauguauguuaccaaa

SEQ ID NO: 1275440 - RNA, 14 nt, Human
aaugaaugcuuaaa

SEQ ID NO: 1275441 - RNA, 21 nt, Human
aaugaauggaggaacuuucca

SEQ ID NO: 1275442 - RNA, 22 nt, Human
aaugaauggcuaagcaaaaugu

SEQ ID NO: 1275443 - RNA, 20 nt, Human
aaugaaacuagaaagcagag

SEQ ID NO: 1275444 - RNA, 17 nt, Human
aaugaaugcauaaaaug

SEQ ID NO: 1275445 - RNA, 23 nt, Human
aaugaauguuuacacucuuugua

SEQ ID NO: 1275446 - RNA, 17 nt, Human
aaugaauuaaauaaacc

SEQ ID NO: 1275447 - RNA, 23 nt, Human
aaugaauuuagugagcauaggug

SEQ ID NO: 1275448 - RNA, 16 nt, Human
aaugacaaucaugugu

SEQ ID NO: 1275449 - RNA, 16 nt, Human
aaugaaaaugucuugu

SEQ ID NO: 1275450 - RNA, 23 nt, Human
aaugaaacaaagaguucaagaaa

SEQ ID NO: 1275451 - RNA, 16 nt, Human
aaugaaacaaagaguu

SEQ ID NO: 1275452 - RNA, 12 nt, Human
uaauccaguaaa

SEQ ID NO: 1275453 - RNA, 22 nt, Human
uaauccaggcagauccaggacu

SEQ ID NO: 1275454 - RNA, 23 nt, Human
uaauccaggcagauccaggacua

SEQ ID NO: 1275455 - RNA, 21 nt, Human
uaaucccagcaugcugagauu

SEQ ID NO: 1275456 - RNA, 17 nt, Human
uaauccaggcagaucca

SEQ ID NO: 1275457 - RNA, 18 nt, Human
uaauccaggcagauccag

SEQ ID NO: 1275458 - RNA, 19 nt, Human
uaauccaggcagauccagg

SEQ ID NO: 1275459 - RNA, 22 nt, Human
uaauauuuuccuccugagugcu

SEQ ID NO: 1275460 - RNA, 20 nt, Human
uaauauuuuccuccugagug

SEQ ID NO: 1275461 - RNA, 21 nt, Human
uaauauuuuccuccugagugc

SEQ ID NO: 1275462 - RNA, 17 nt, Human
uaaucaaaagcuauuua

SEQ ID NO: 1275463 - RNA, 23 nt, Human
uaaucaaauuuguaggguuucua

SEQ ID NO: 1275464 - RNA, 18 nt, Human
uaaucacgcuuuccugaa

SEQ ID NO: 1275465 - RNA, 20 nt, Human
uaaucacucuaauuaauugu

SEQ ID NO: 1275466 - RNA, 20 nt, Human
uaaugaauaccuuagugcag

SEQ ID NO: 1275467 - RNA, 18 nt, Human
uaaugaauaccuuagugc

SEQ ID NO: 1275468 - RNA, 13 nt, Human
uaaugaauaccuu

SEQ ID NO: 1275469 - RNA, 12 nt, Human
uaaugaauaccu

SEQ ID NO: 1275470 - RNA, 13 nt, Human
uaaugaaacaaag

SEQ ID NO: 1275471 - RNA, 21 nt, Human
uaaugaaaacagaaugucucu

SEQ ID NO: 1275472 - RNA, 16 nt, Human
uaaugaaacaaagagu

SEQ ID NO: 1275473 - RNA, 18 nt, Human
aaucuuaguguaugauua

SEQ ID NO: 1275474 - RNA, 21 nt, Human
aaucuuaguguaugauuacug

SEQ ID NO: 1275475 - RNA, 23 nt, Human
aaucuuaguguaugauuacuggc

SEQ ID NO: 1275476 - RNA, 14 nt, Human
aaucuuauaguucu

SEQ ID NO: 1275477 - RNA, 15 nt, Human
aaucuuauaguucua

SEQ ID NO: 1275478 - RNA, 18 nt, Human
aaucuuauaguucuaggc

SEQ ID NO: 1275479 - RNA, 19 nt, Human
aaucuuauaguucuaggca

SEQ ID NO: 1275480 - RNA, 14 nt, Human
uaauagauguuuga

SEQ ID NO: 1275481 - RNA, 16 nt, Human
uaauagauguuugaua

SEQ ID NO: 1275482 - RNA, 21 nt, Human
uaauagauguuugauagauuu

SEQ ID NO: 1275483 - RNA, 22 nt, Human
uaauagauguuugauagauuuu

SEQ ID NO: 1275484 - RNA, 12 nt, Human
uaauagauucuc

SEQ ID NO: 1275485 - RNA, 15 nt, Human
uaauagcaaagaauu

SEQ ID NO: 1275486 - RNA, 13 nt, Human
uaauagcaaagaa

SEQ ID NO: 1275487 - RNA, 14 nt, Human
uaauagcagccuuu

SEQ ID NO: 1275488 - RNA, 15 nt, Human
uaauagcagccuuuc

SEQ ID NO: 1275489 - RNA, 21 nt, Human
uaauagcagccuuucucucuu

SEQ ID NO: 1275490 - RNA, 18 nt, Human
uaauaaacacucuugaaa

SEQ ID NO: 1275491 - RNA, 12 nt, Human
uaauaaacacuc

SEQ ID NO: 1275492 - RNA, 15 nt, Human
uaauaaaauucaaca

SEQ ID NO: 1275493 - RNA, 13 nt, Human
uaauaaacauucu

SEQ ID NO: 1275494 - RNA, 13 nt, Human
uaauaaacuaaua

SEQ ID NO: 1275495 - RNA, 20 nt, Human
uaauaaacuaauaauugcag

SEQ ID NO: 1275496 - RNA, 20 nt, Human
uaaguugagauaguuuucau

SEQ ID NO: 1275497 - RNA, 21 nt, Human
uaaguugagauaguuuucauc

SEQ ID NO: 1275498 - RNA, 22 nt, Human
uaaguugagauaguuuucaucc

SEQ ID NO: 1275499 - RNA, 13 nt, Human
uaaguugggcuug

SEQ ID NO: 1275500 - RNA, 16 nt, Human
uaaguugggcuugcua

SEQ ID NO: 1275501 - RNA, 18 nt, Human
uaaguugggcuugcuauu

SEQ ID NO: 1275502 - RNA, 19 nt, Human
uaaguugggcuugcuauuc

SEQ ID NO: 1275503 - RNA, 22 nt, Human
uaaguugggcuugcuauucugu

SEQ ID NO: 1275504 - RNA, 12 nt, Human
aaucaugaauua

SEQ ID NO: 1275505 - RNA, 15 nt, Human
aaucaugaauuaguu

SEQ ID NO: 1275506 - RNA, 22 nt, Human
aaucauauaaauagaauguaaa

SEQ ID NO: 1275507 - RNA, 20 nt, Human
aaucaugaagauauuuuucc

SEQ ID NO: 1275508 - RNA, 21 nt, Human
aaucauauaaauagaauguaa

SEQ ID NO: 1275509 - RNA, 20 nt, Human
aaucauauaaauagaaugua

SEQ ID NO: 1275510 - RNA, 18 nt, Human
aaucauauaauaaaugua

SEQ ID NO: 1275511 - RNA, 21 nt, Human
aaucauauaauaaauguacau

SEQ ID NO: 1275512 - RNA, 18 nt, Human
aaucauauaaauagaaug

SEQ ID NO: 1275513 - RNA, 17 nt, Human
aaucauauaaauagaau

SEQ ID NO: 1275514 - RNA, 12 nt, Human
aaucauauaaau

SEQ ID NO: 1275515 - RNA, 19 nt, Human
uaauaaacuaauaauugca

SEQ ID NO: 1275516 - RNA, 20 nt, Human
aaucauagcugguucacacu

SEQ ID NO: 1275517 - RNA, 15 nt, Human
uaagcuuaugcuuaa

SEQ ID NO: 1275518 - RNA, 16 nt, Human
uaagcuuguauuccuu

SEQ ID NO: 1275519 - RNA, 20 nt, Human
uaagcuuuucuuuucuuugu

SEQ ID NO: 1275520 - RNA, 16 nt, Human
uaagcuuuucuuuucu

SEQ ID NO: 1275521 - RNA, 16 nt, Human
uaaguaaauacaauuu

SEQ ID NO: 1275522 - RNA, 14 nt, Human
uaaguaaauacaau

SEQ ID NO: 1275523 - RNA, 19 nt, Human
uaaguaaugauaacuggaa

SEQ ID NO: 1275524 - RNA, 21 nt, Human
uaaguaacuuauuuaugaaag

SEQ ID NO: 1275525 - RNA, 17 nt, Human
uaaguauuaugucucuu

SEQ ID NO: 1275526 - RNA, 21 nt, Human
uaaguauuaugucucuucuga

SEQ ID NO: 1275527 - RNA, 18 nt, Human
aaucugggccagaauuuc

SEQ ID NO: 1275528 - RNA, 16 nt, Human
aaucugugcuguuuca

SEQ ID NO: 1275529 - RNA, 19 nt, Human
aaucugugcuguuucaaag

SEQ ID NO: 1275530 - RNA, 22 nt, Human
aaucugugcuguuucaaaguuc

SEQ ID NO: 1275531 - RNA, 17 nt, Human
aaucugugggucuggga

SEQ ID NO: 1275532 - RNA, 16 nt, Human
aaucugggccagaauu

SEQ ID NO: 1275533 - RNA, 17 nt, Human
aaucugggccagaauuu

SEQ ID NO: 1275534 - RNA, 21 nt, Human
aaucuggcuucuggccaggaa

SEQ ID NO: 1275535 - RNA, 23 nt, Human
aaucuggcuucuggccaggaagc

SEQ ID NO: 1275536 - RNA, 19 nt, Human
aaucuacacuccagugaga

SEQ ID NO: 1275537 - RNA, 16 nt, Human
aaucuacacacggugc

SEQ ID NO: 1275538 - RNA, 19 nt, Human
aaucuuauaauuuaaaaua

SEQ ID NO: 1275539 - RNA, 19 nt, Human
aaucugugggucugggagu

SEQ ID NO: 1275540 - RNA, 23 nt, Human
aaucugugugaaacuuucauucc

SEQ ID NO: 1275541 - RNA, 20 nt, Human
aaucugugugaaacuuucau

SEQ ID NO: 1275542 - RNA, 15 nt, Human
aaucuguuuuucuaa

SEQ ID NO: 1275543 - RNA, 16 nt, Human
aaucuguuuuucuaac

SEQ ID NO: 1275544 - RNA, 19 nt, Human
aaucuuaagguguagccac

SEQ ID NO: 1275545 - RNA, 20 nt, Human
aaucuuaagguguagccaca

SEQ ID NO: 1275546 - RNA, 12 nt, Human
aauccgcccauc

SEQ ID NO: 1275547 - RNA, 18 nt, Human
aaucccuuaacaguugua

SEQ ID NO: 1275548 - RNA, 22 nt, Human
aaucccuuaacaguuguauuua

SEQ ID NO: 1275549 - RNA, 21 nt, Human
aaucccuuaauauccuaaaca

SEQ ID NO: 1275550 - RNA, 11 nt, Human
aaucccuucau

SEQ ID NO: 1275551 - RNA, 18 nt, Human
aaucccuucauacuugaa

SEQ ID NO: 1275552 - RNA, 12 nt, Human
aaucccuucaua

SEQ ID NO: 1275553 - RNA, 20 nt, Human
aauccuguaggaagguacug

SEQ ID NO: 1275554 - RNA, 18 nt, Human
aauccuguaggaagguac

SEQ ID NO: 1275555 - RNA, 22 nt, Human
aauccuguaggaagguacugua

SEQ ID NO: 1275556 - RNA, 19 nt, Human
aauccugucgauuagacug

SEQ ID NO: 1275557 - RNA, 21 nt, Human
aauccugucgauuagacugga

SEQ ID NO: 1275558 - RNA, 13 nt, Human
aauccuuuacugu

SEQ ID NO: 1275559 - RNA, 23 nt, Human
aauccuguaggaagguacuguau

SEQ ID NO: 1275560 - RNA, 15 nt, Human
aaucgaccugccucg

SEQ ID NO: 1275561 - RNA, 13 nt, Human
aauccuuugugaa

SEQ ID NO: 1275562 - RNA, 20 nt, Human
aauccugucgauuagacugg

SEQ ID NO: 1275563 - RNA, 15 nt, Human
aaucuaagugauaua

SEQ ID NO: 1275564 - RNA, 17 nt, Human
aaucuaagugauauaaa

SEQ ID NO: 1275565 - RNA, 19 nt, Human
aauguauacuauaguacca

SEQ ID NO: 1275566 - RNA, 13 nt, Human
aauguauaguaaa

SEQ ID NO: 1275567 - RNA, 13 nt, Human
aauguauaugcac

SEQ ID NO: 1275568 - RNA, 14 nt, Human
aauguauaugcacu

SEQ ID NO: 1275569 - RNA, 22 nt, Human
aauguauuacaguggggaauga

SEQ ID NO: 1275570 - RNA, 17 nt, Human
aauguauguuaccaaaa

SEQ ID NO: 1275571 - RNA, 21 nt, Human
aauguauguuaccaaaaauaa

SEQ ID NO: 1275572 - RNA, 16 nt, Human
aauguaucaaacugua

SEQ ID NO: 1275573 - RNA, 18 nt, Human
aauguaucaaauacauuu

SEQ ID NO: 1275574 - RNA, 13 nt, Human
aauguauguuacc

SEQ ID NO: 1275575 - RNA, 12 nt, Human
aaugugccuauu

SEQ ID NO: 1275576 - RNA, 18 nt, Human
aaugugcuauacugcaua

SEQ ID NO: 1275577 - RNA, 11 nt, Human
aaugugugugu

SEQ ID NO: 1275578 - RNA, 21 nt, Human
aaugugccuauugcuagagcu

SEQ ID NO: 1275579 - RNA, 19 nt, Human
aaugugauguucuaaggcu

SEQ ID NO: 1275580 - RNA, 20 nt, Human
aaugugauuuacgcucauug

SEQ ID NO: 1275581 - RNA, 15 nt, Human
aaugugcaauagaag

SEQ ID NO: 1275582 - RNA, 17 nt, Human
aaugugcaauagaaggu

SEQ ID NO: 1275583 - RNA, 17 nt, Human
aaugugcacuuuauccu

SEQ ID NO: 1275584 - RNA, 15 nt, Human
aaugugauguucuaa

SEQ ID NO: 1275585 - RNA, 16 nt, Human
aaugugauguucuaag

SEQ ID NO: 1275586 - RNA, 17 nt, Human
aaugugauguucuaagg

SEQ ID NO: 1275587 - RNA, 22 nt, Human
aaugugaaaaugguccaggaga

SEQ ID NO: 1275588 - RNA, 20 nt, Human
uacaucccuuaccugggaaa

SEQ ID NO: 1275589 - RNA, 12 nt, Human
uacaucauuucu

SEQ ID NO: 1275590 - RNA, 13 nt, Human
uacaucauuucuu

SEQ ID NO: 1275591 - RNA, 14 nt, Human
uacaucauuucuuu

SEQ ID NO: 1275592 - RNA, 20 nt, Human
uacaucauuucuuuuuggga

SEQ ID NO: 1275593 - RNA, 19 nt, Human
uacauccaaagcagacagc

SEQ ID NO: 1275594 - RNA, 20 nt, Human
uacauccaaagcagacagcu

SEQ ID NO: 1275595 - RNA, 23 nt, Human
uacauccaaagcagacagcucca

SEQ ID NO: 1275596 - RNA, 17 nt, Human
uacauaugaucugucug

SEQ ID NO: 1275597 - RNA, 17 nt, Human
uacagauuuauuccuuu

SEQ ID NO: 1275598 - RNA, 19 nt, Human
uacagauuuauuccuuugu

SEQ ID NO: 1275599 - RNA, 22 nt, Human
uacaggugugugccaccacacc

SEQ ID NO: 1275600 - RNA, 15 nt, Human
uacauaauucacucu

SEQ ID NO: 1275601 - RNA, 17 nt, Human
uacauaauucacucuga

SEQ ID NO: 1275602 - RNA, 16 nt, Human
uacauaauucacucug

SEQ ID NO: 1275603 - RNA, 17 nt, Human
aauuaauuccuucagca

SEQ ID NO: 1275604 - RNA, 12 nt, Human
aauuaauuguaa

SEQ ID NO: 1275605 - RNA, 15 nt, Human
aauuaauuguaaucu

SEQ ID NO: 1275606 - RNA, 23 nt, Human
aauuaauuccuguuugucuacau

SEQ ID NO: 1275607 - RNA, 22 nt, Human
aauuaaucugggccagaauuuc

SEQ ID NO: 1275608 - RNA, 21 nt, Human
aauuaauaucccuacauguau

SEQ ID NO: 1275609 - RNA, 19 nt, Human
aauuaauaucccuacaugu

SEQ ID NO: 1275610 - RNA, 21 nt, Human
aauuaagaaaggauaaaguug

SEQ ID NO: 1275611 - RNA, 22 nt, Human
aauuaacuggguaaugaaacaa

SEQ ID NO: 1275612 - RNA, 15 nt, Human
aauuaagagagucua

SEQ ID NO: 1275613 - RNA, 19 nt, Human
aauuaagaaggcaaaaaug

SEQ ID NO: 1275614 - RNA, 23 nt, Human
aauuaagaaggcaaaaauguaaa

SEQ ID NO: 1275615 - RNA, 13 nt, Human
aauuaagaaggca

SEQ ID NO: 1275616 - RNA, 14 nt, Human
aauuaagaaggcaa

SEQ ID NO: 1275617 - RNA, 16 nt, Human
aauuaagaaggcaaaa

SEQ ID NO: 1275618 - RNA, 20 nt, Human
uacauucuucaagaucccau

SEQ ID NO: 1275619 - RNA, 21 nt, Human
uacauucuucaagaucccauu

SEQ ID NO: 1275620 - RNA, 17 nt, Human
uacauucuucaagaucc

SEQ ID NO: 1275621 - RNA, 16 nt, Human
uacauucuucaagauc

SEQ ID NO: 1275622 - RNA, 20 nt, Human
uacauguauugcacauugua

SEQ ID NO: 1275623 - RNA, 21 nt, Human
uacauguauugcacauuguaa

SEQ ID NO: 1275624 - RNA, 22 nt, Human
uacauguauugcacauuguaaa

SEQ ID NO: 1275625 - RNA, 15 nt, Human
aauguugaaauauga

SEQ ID NO: 1275626 - RNA, 22 nt, Human
aauguugaaauaugauguuaaa

SEQ ID NO: 1275627 - RNA, 18 nt, Human
aauuaacuggguaaugaa

SEQ ID NO: 1275628 - RNA, 21 nt, Human
aauuaacuggguaaugaaaca

SEQ ID NO: 1275629 - RNA, 10 nt, Human
aauguucuuu

SEQ ID NO: 1275630 - RNA, 11 nt, Human
aauguucuuug

SEQ ID NO: 1275631 - RNA, 14 nt, Human
aauguucuuuggaa

SEQ ID NO: 1275632 - RNA, 17 nt, Human
aauguucuuuggaaagu

SEQ ID NO: 1275633 - RNA, 20 nt, Human
aauguucuuuggaaaguaca

SEQ ID NO: 1275634 - RNA, 21 nt, Human
aauguucuuuggaaaguacac

SEQ ID NO: 1275635 - RNA, 22 nt, Human
aauguucuuuggaaaguacacu

SEQ ID NO: 1275636 - RNA, 23 nt, Human
aauguguuguuccaaauacuaau

SEQ ID NO: 1275637 - RNA, 23 nt, Human
aauguguuucacaguuugaaaua

SEQ ID NO: 1275638 - RNA, 13 nt, Human
aauguuaaaaugu

SEQ ID NO: 1275639 - RNA, 12 nt, Human
aauguuaaaaug

SEQ ID NO: 1275640 - RNA, 16 nt, Human
aauguuaaaauguguu

SEQ ID NO: 1275641 - RNA, 15 nt, Human
aauguuaaaaugugu

SEQ ID NO: 1275642 - RNA, 19 nt, Human
aauguuaagacuugacagu

SEQ ID NO: 1275643 - RNA, 14 nt, Human
uacacuaagagaga

SEQ ID NO: 1275644 - RNA, 18 nt, Human
uacacuaagagagaauga

SEQ ID NO: 1275645 - RNA, 13 nt, Human
aauguaacuuacu

SEQ ID NO: 1275646 - RNA, 15 nt, Human
aauguaacuuuugua

SEQ ID NO: 1275647 - RNA, 16 nt, Human
aauguaacuuuuguaa

SEQ ID NO: 1275648 - RNA, 22 nt, Human
aauguaacuuuuguaagacaaa

SEQ ID NO: 1275649 - RNA, 23 nt, Human
uacacguauuugaauggccuuca

SEQ ID NO: 1275650 - RNA, 20 nt, Human
uacagauccccaagccuggc

SEQ ID NO: 1275651 - RNA, 13 nt, Human
uacagauauauuu

SEQ ID NO: 1275652 - RNA, 21 nt, Human
uacagauauauuuucuuucuc

SEQ ID NO: 1275653 - RNA, 14 nt, Human
uacagauaaaaugu

SEQ ID NO: 1275654 - RNA, 17 nt, Human
uacagacgcugcuguca

SEQ ID NO: 1275655 - RNA, 19 nt, Human
uacagaguguggacucugg

SEQ ID NO: 1275656 - RNA, 17 nt, Human
aauggacuggaagggga

SEQ ID NO: 1275657 - RNA, 23 nt, Human
aauggacuggaaggggaagggac

SEQ ID NO: 1275658 - RNA, 23 nt, Human
aauggcacaaucucggcucacug

SEQ ID NO: 1275659 - RNA, 13 nt, Human
aauggauuuuucu

SEQ ID NO: 1275660 - RNA, 17 nt, Human
aauggauuuuucuuuaa

SEQ ID NO: 1275661 - RNA, 18 nt, Human
aauggauuuuucuuuaac

SEQ ID NO: 1275662 - RNA, 20 nt, Human
aauggauuuuucuuuaacug

SEQ ID NO: 1275663 - RNA, 13 nt, Human
aauggcagcaggg

SEQ ID NO: 1275664 - RNA, 19 nt, Human
aauggcagcagggguuggg

SEQ ID NO: 1275665 - RNA, 17 nt, Human
aauggcaguuauauuuu

SEQ ID NO: 1275666 - RNA, 20 nt, Human
aauggcaguuauauuuugca

SEQ ID NO: 1275667 - RNA, 23 nt, Human
aauggcaugagaaauacaaaaau

SEQ ID NO: 1275668 - RNA, 24 nt, Human
aauguaaaugucucacugagcacu

SEQ ID NO: 1275669 - RNA, 12 nt, Human
aauguaaauuug

SEQ ID NO: 1275670 - RNA, 13 nt, Human
aauguaaauuugu

SEQ ID NO: 1275671 - RNA, 14 nt, Human
aauguaaauuugua

SEQ ID NO: 1275672 - RNA, 15 nt, Human
aauguaaauuuguac

SEQ ID NO: 1275673 - RNA, 16 nt, Human
aauguaaauuuguacu

SEQ ID NO: 1275674 - RNA, 18 nt, Human
aauguaaauuuguacuau

SEQ ID NO: 1275675 - RNA, 17 nt, Human
aauguaaauuuguacua

SEQ ID NO: 1275676 - RNA, 18 nt, Human
aauguaaaugucucacug

SEQ ID NO: 1275677 - RNA, 16 nt, Human
aauguaaaugucucac

SEQ ID NO: 1275678 - RNA, 15 nt, Human
aauguaaaugucuca

SEQ ID NO: 1275679 - RNA, 14 nt, Human
aauguaaaugucuc

SEQ ID NO: 1275680 - RNA, 13 nt, Human
aauguaaaugucu

SEQ ID NO: 1275681 - RNA, 12 nt, Human
aauguaaauguc

SEQ ID NO: 1275682 - RNA, 15 nt, Human
aauggcugauaauuu

SEQ ID NO: 1275683 - RNA, 20 nt, Human
aauggcuauguuuuuaaugu

SEQ ID NO: 1275684 - RNA, 16 nt, Human
aauggcuauguuuuua

SEQ ID NO: 1275685 - RNA, 20 nt, Human
aauggcaugagaaauacaaa

SEQ ID NO: 1275686 - RNA, 17 nt, Human
aauggccauuugcuuuu

SEQ ID NO: 1275687 - RNA, 21 nt, Human
aauggcccugggucccaggac

SEQ ID NO: 1275688 - RNA, 15 nt, Human
aauggccucaugugg

SEQ ID NO: 1275689 - RNA, 20 nt, Human
aauggccucauguggcugga

SEQ ID NO: 1275690 - RNA, 22 nt, Human
aauggccucauguggcuggaag

SEQ ID NO: 1275691 - RNA, 14 nt, Human
aauggccuucauau

SEQ ID NO: 1275692 - RNA, 13 nt, Human
aauggccuuuauu

SEQ ID NO: 1275693 - RNA, 17 nt, Human
aauggccuucauaucau

SEQ ID NO: 1275694 - RNA, 20 nt, Human
aauggcgucuggaaguccaa

SEQ ID NO: 1275695 - RNA, 14 nt, Human
aauggcuauguuuu

SEQ ID NO: 1275696 - RNA, 15 nt, Human
aaugccaucaucucc

SEQ ID NO: 1275697 - RNA, 22 nt, Human
aaugccaugaugccucugucuu

SEQ ID NO: 1275698 - RNA, 21 nt, Human
aaugccaguaacgcgucuucc

SEQ ID NO: 1275699 - RNA, 23 nt, Human
aaugccaguaacgcgucuuccug

SEQ ID NO: 1275700 - RNA, 14 nt, Human
aaugccacagcccu

SEQ ID NO: 1275701 - RNA, 15 nt, Human
aaugccacagcccug

SEQ ID NO: 1275702 - RNA, 16 nt, Human
aaugccacagcccugu

SEQ ID NO: 1275703 - RNA, 18 nt, Human
aaugccacagcccuguca

SEQ ID NO: 1275704 - RNA, 19 nt, Human
aaugccacagcccugucag

SEQ ID NO: 1275705 - RNA, 22 nt, Human
aaugccacagcccugucagcau

SEQ ID NO: 1275706 - RNA, 23 nt, Human
aaugccacagcccugucagcaug

SEQ ID NO: 1275707 - RNA, 22 nt, Human
aaugccacugccuucgcuucuu

SEQ ID NO: 1275708 - RNA, 15 nt, Human
aaugacaaucaugug

SEQ ID NO: 1275709 - RNA, 13 nt, Human
uacaauguaauua

SEQ ID NO: 1275710 - RNA, 15 nt, Human
uacaauguaauuauu

SEQ ID NO: 1275711 - RNA, 14 nt, Human
uacaauguaauuau

SEQ ID NO: 1275712 - RNA, 16 nt, Human
aaugcuucaucccuuu

SEQ ID NO: 1275713 - RNA, 22 nt, Human
aaugcuuaaucagauagauauu

SEQ ID NO: 1275714 - RNA, 14 nt, Human
aaugcuuaaucaga

SEQ ID NO: 1275715 - RNA, 20 nt, Human
aaugcuguauuuuaaaagaa

SEQ ID NO: 1275716 - RNA, 22 nt, Human
aaugcuguauuagucacagaga

SEQ ID NO: 1275717 - RNA, 16 nt, Human
aaugcuguauuuuaaa

SEQ ID NO: 1275718 - RNA, 22 nt, Human
aaugcuuaaagaauucaaauuu

SEQ ID NO: 1275719 - RNA, 21 nt, Human
aaugcuuaaagaauucaaauu

SEQ ID NO: 1275720 - RNA, 19 nt, Human
aaugcuuaaagaauucaaa

SEQ ID NO: 1275721 - RNA, 15 nt, Human
aaugcuuagaaauuc

SEQ ID NO: 1275722 - RNA, 23 nt, Human
aaugcuguacaucuauuuuggau

SEQ ID NO: 1275723 - RNA, 11 nt, Human
aaugcccagac

SEQ ID NO: 1275724 - RNA, 12 nt, Human
aaugcccagaca

SEQ ID NO: 1275725 - RNA, 12 nt, Human
aaugcuguacau

SEQ ID NO: 1275726 - RNA, 13 nt, Human
aaugcuguacauc

SEQ ID NO: 1275727 - RNA, 15 nt, Human
aaugcuguacaucua

SEQ ID NO: 1275728 - RNA, 17 nt, Human
aaugcuguacaucuauu

SEQ ID NO: 1275729 - RNA, 14 nt, Human
aauuacgugcucug

SEQ ID NO: 1275730 - RNA, 14 nt, Human
aauuaccuucuauu

SEQ ID NO: 1275731 - RNA, 14 nt, Human
aauuacacccaaag

SEQ ID NO: 1275732 - RNA, 17 nt, Human
aauuacagaaauuuaau

SEQ ID NO: 1275733 - RNA, 22 nt, Human
aauuacagaaauuuaauucaga

SEQ ID NO: 1275734 - RNA, 14 nt, Human
aauuaccuacucug

SEQ ID NO: 1275735 - RNA, 14 nt, Human
aauuaccuguggau

SEQ ID NO: 1275736 - RNA, 21 nt, Human
aauuaccuugagccaguaauu

SEQ ID NO: 1275737 - RNA, 18 nt, Human
aauuacaacggagucaaa

SEQ ID NO: 1275738 - RNA, 16 nt, Human
aauuacaacuaaguga

SEQ ID NO: 1275739 - RNA, 14 nt, Human
aauuacaacuaagu

SEQ ID NO: 1275740 - RNA, 18 nt, Human
aauuacaaaaaaaaauuu

SEQ ID NO: 1275741 - RNA, 14 nt, Human
aauuacugguccaa

SEQ ID NO: 1275742 - RNA, 23 nt, Human
aauuacuguuuauuaaaguacaa

SEQ ID NO: 1275743 - RNA, 19 nt, Human
aauuagccaguaauccugu

SEQ ID NO: 1275744 - RNA, 18 nt, Human
aauuagccaguaauccug

SEQ ID NO: 1275745 - RNA, 17 nt, Human
aauuagccaguaauccu

SEQ ID NO: 1275746 - RNA, 20 nt, Human
aauuagccaguaauccugua

SEQ ID NO: 1275747 - RNA, 14 nt, Human
aauuagccaguaau

SEQ ID NO: 1275748 - RNA, 12 nt, Human
aauuagccagua

SEQ ID NO: 1275749 - RNA, 12 nt, Human
aauuagcaauug

SEQ ID NO: 1275750 - RNA, 16 nt, Human
aauuagcuuauguuaa

SEQ ID NO: 1275751 - RNA, 22 nt, Human
aauuagcuuauguuaacugaca

SEQ ID NO: 1275752 - RNA, 20 nt, Human
aauuaggcccccaucauccu

SEQ ID NO: 1275753 - RNA, 15 nt, Human
aauuaggcuguaacu

SEQ ID NO: 1275754 - RNA, 16 nt, Human
aauuaggcuguaacua

SEQ ID NO: 1275755 - RNA, 17 nt, Human
aauuaggcuguaacuac

SEQ ID NO: 1275756 - RNA, 18 nt, Human
aauuaggcuguaacuacu

SEQ ID NO: 1275757 - RNA, 19 nt, Human
aauuaggcuguaacuacuu

SEQ ID NO: 1275758 - RNA, 21 nt, Human
aauuaggcuguaacuacuuua

SEQ ID NO: 1275759 - RNA, 22 nt, Human
aauuaggcuguaacuacuuuau

SEQ ID NO: 1275760 - RNA, 15 nt, Human
uaccacucuguaauu

SEQ ID NO: 1275761 - RNA, 16 nt, Human
uaccacucuguaauug

SEQ ID NO: 1275762 - RNA, 17 nt, Human
uaccacucuguaauugc

SEQ ID NO: 1275763 - RNA, 18 nt, Human
uaccacucuguaauugca

SEQ ID NO: 1275764 - RNA, 19 nt, Human
uaccacucuguaauugcaa

SEQ ID NO: 1275765 - RNA, 20 nt, Human
uaccugccccacuuguccuu

SEQ ID NO: 1275766 - RNA, 14 nt, Human
uaccaccugacauu

SEQ ID NO: 1275767 - RNA, 13 nt, Human
uaccacucuguaa

SEQ ID NO: 1275768 - RNA, 14 nt, Human
uaccacucuguaau

SEQ ID NO: 1275769 - RNA, 19 nt, Human
uaccuguagauucagguaa

SEQ ID NO: 1275770 - RNA, 17 nt, Human
uaccugcucagcccugc

SEQ ID NO: 1275771 - RNA, 21 nt, Human
uaccugcucacgucaaaugca

SEQ ID NO: 1275772 - RNA, 16 nt, Human
aauuauuauuuggccc

SEQ ID NO: 1275773 - RNA, 15 nt, Human
aauuauuauuugugu

SEQ ID NO: 1275774 - RNA, 16 nt, Human
aauuauuauuuguguu

SEQ ID NO: 1275775 - RNA, 18 nt, Human
aauuauuauuuguguuuu

SEQ ID NO: 1275776 - RNA, 14 nt, Human
aauuauucaauuua

SEQ ID NO: 1275777 - RNA, 17 nt, Human
aauuagugccacuuaau

SEQ ID NO: 1275778 - RNA, 20 nt, Human
aauuagugccacuuaaugua

SEQ ID NO: 1275779 - RNA, 22 nt, Human
aauuauuauuuauauauguauu

SEQ ID NO: 1275780 - RNA, 12 nt, Human
aauuauuauuug

SEQ ID NO: 1275781 - RNA, 23 nt, Human
aauuaggcuguaacuacuuuaua

SEQ ID NO: 1275782 - RNA, 21 nt, Human
aauuaggcccccaucauccuc

SEQ ID NO: 1275783 - RNA, 17 nt, Human
aauuaguaacauguguu

SEQ ID NO: 1275784 - RNA, 15 nt, Human
aauuagugccacuua

SEQ ID NO: 1275785 - RNA, 13 nt, Human
aauuauuuucauc

SEQ ID NO: 1275786 - RNA, 11 nt, Human
aauuauuuugu

SEQ ID NO: 1275787 - RNA, 19 nt, Human
aauuauuuuuuuucuuuua

SEQ ID NO: 1275788 - RNA, 16 nt, Human
aauuauuuuuuuucuu

SEQ ID NO: 1275789 - RNA, 16 nt, Human
aauucaaaaguuccaa

SEQ ID NO: 1275790 - RNA, 22 nt, Human
aauucaaaaguuccaagagucu

SEQ ID NO: 1275791 - RNA, 23 nt, Human
aauucaaaaguuccaagagucua

SEQ ID NO: 1275792 - RNA, 22 nt, Human
aauucaaagcuguguguuugga

SEQ ID NO: 1275793 - RNA, 17 nt, Human
aauucaaauaaaaaucc

SEQ ID NO: 1275794 - RNA, 18 nt, Human
aauuccaagugauugaaa

SEQ ID NO: 1275795 - RNA, 12 nt, Human
aauucacucuga

SEQ ID NO: 1275796 - RNA, 23 nt, Human
aauucacucugaguguuuuauga

SEQ ID NO: 1275797 - RNA, 13 nt, Human
aauucacuguacu

SEQ ID NO: 1275798 - RNA, 21 nt, Human
aauucacuguacuaucagguu

SEQ ID NO: 1275799 - RNA, 15 nt, Human
aauucacuuaggguc

SEQ ID NO: 1275800 - RNA, 23 nt, Human
aauucacuuagggucgagcaucc

SEQ ID NO: 1275801 - RNA, 13 nt, Human
aauucauuucacu

SEQ ID NO: 1275802 - RNA, 15 nt, Human
aauucauuucacugu

SEQ ID NO: 1275803 - RNA, 18 nt, Human
aauucauuuuuuaaauuc

SEQ ID NO: 1275804 - RNA, 22 nt, Human
aauucaaauuuuaucugccucu

SEQ ID NO: 1275805 - RNA, 15 nt, Human
aauucaacaaacauu

SEQ ID NO: 1275806 - RNA, 19 nt, Human
aauucacaaacuuuuauac

SEQ ID NO: 1275807 - RNA, 14 nt, Human
aauucacaaacuuu

SEQ ID NO: 1275808 - RNA, 12 nt, Human
aauucaacuuaa

SEQ ID NO: 1275809 - RNA, 20 nt, Human
aauucacagugcucuuuucu

SEQ ID NO: 1275810 - RNA, 21 nt, Human
aauucacaucuaaccucaucu

SEQ ID NO: 1275811 - RNA, 22 nt, Human
aauucacaucuaaccucaucuu

SEQ ID NO: 1275812 - RNA, 21 nt, Human
aauucacaugaugcacuucaa

SEQ ID NO: 1275813 - RNA, 21 nt, Human
aauucacccccuuuccuggac

SEQ ID NO: 1275814 - RNA, 22 nt, Human
aauuccacuuauaggaauugac

SEQ ID NO: 1275815 - RNA, 12 nt, Human
aauuccaaaguc

SEQ ID NO: 1275816 - RNA, 13 nt, Human
aauuccaaagucu

SEQ ID NO: 1275817 - RNA, 18 nt, Human
aauuccaaagucucuaau

SEQ ID NO: 1275818 - RNA, 20 nt, Human
aauuccaacaguuuaaugaa

SEQ ID NO: 1275819 - RNA, 18 nt, Human
aauuccaacaguuuaaug

SEQ ID NO: 1275820 - RNA, 19 nt, Human
aauugaugggauuugguca

SEQ ID NO: 1275821 - RNA, 16 nt, Human
aauugaguaauggugu

SEQ ID NO: 1275822 - RNA, 18 nt, Human
aauugaguguuuaaaguu

SEQ ID NO: 1275823 - RNA, 17 nt, Human
aauugaguuuucagugg

SEQ ID NO: 1275824 - RNA, 21 nt, Human
aauugaguaaugguguagaac

SEQ ID NO: 1275825 - RNA, 17 nt, Human
aauugaucgacuugcca

SEQ ID NO: 1275826 - RNA, 23 nt, Human
aauugccaaaaagugaaauaaug

SEQ ID NO: 1275827 - RNA, 21 nt, Human
aauugccaaaaagugaaauaa

SEQ ID NO: 1275828 - RNA, 23 nt, Human
aauugccaccucuaacagcacca

SEQ ID NO: 1275829 - RNA, 20 nt, Human
aauugccauguacaguaugu

SEQ ID NO: 1275830 - RNA, 15 nt, Human
aauugccugacgaac

SEQ ID NO: 1275831 - RNA, 23 nt, Human
aauugccugacgaacuccuugau

SEQ ID NO: 1275832 - RNA, 22 nt, Human
aauugacccacaagaaaugaaa

SEQ ID NO: 1275833 - RNA, 14 nt, Human
aauugacugucacu

SEQ ID NO: 1275834 - RNA, 14 nt, Human
uacuguaguauucu

SEQ ID NO: 1275835 - RNA, 15 nt, Human
uacuguauauucagg

SEQ ID NO: 1275836 - RNA, 18 nt, Human
uacuguaaggcaaucaug

SEQ ID NO: 1275837 - RNA, 14 nt, Human
uacuguaagaaaau

SEQ ID NO: 1275838 - RNA, 18 nt, Human
uacuggccuuuuucauuu

SEQ ID NO: 1275839 - RNA, 19 nt, Human
uacuguaaggcaaucaugg

SEQ ID NO: 1275840 - RNA, 20 nt, Human
uacucugugccagagccugg

SEQ ID NO: 1275841 - RNA, 21 nt, Human
uacucugugccagagccuggg

SEQ ID NO: 1275842 - RNA, 22 nt, Human
uacucugugccagagccugggg

SEQ ID NO: 1275843 - RNA, 23 nt, Human
uacucugugccagagccuggggc

SEQ ID NO: 1275844 - RNA, 21 nt, Human
uacucugaaauuguaacuaaa

SEQ ID NO: 1275845 - RNA, 14 nt, Human
uacucugugccaga

SEQ ID NO: 1275846 - RNA, 15 nt, Human
uacucugugccagag

SEQ ID NO: 1275847 - RNA, 16 nt, Human
uacucugugccagagc

SEQ ID NO: 1275848 - RNA, 17 nt, Human
uacucugugccagagcc

SEQ ID NO: 1275849 - RNA, 18 nt, Human
uacucugugccagagccu

SEQ ID NO: 1275850 - RNA, 19 nt, Human
uacucugugccagagccug

SEQ ID NO: 1275851 - RNA, 16 nt, Human
uacuauaguaccagua

SEQ ID NO: 1275852 - RNA, 13 nt, Human
uacuauaguacca

SEQ ID NO: 1275853 - RNA, 12 nt, Human
uacuauaguacc

SEQ ID NO: 1275854 - RNA, 20 nt, Human
uacuaucaugucaaacguga

SEQ ID NO: 1275855 - RNA, 14 nt, Human
uacuauauuuaugg

SEQ ID NO: 1275856 - RNA, 16 nt, Human
uacuacugaaucucua

SEQ ID NO: 1275857 - RNA, 17 nt, Human
uacuacugaaucucuaa

SEQ ID NO: 1275858 - RNA, 14 nt, Human
uacuacuguguaag

SEQ ID NO: 1275859 - RNA, 17 nt, Human
uacuacuuaugaaaugu

SEQ ID NO: 1275860 - RNA, 16 nt, Human
uacuaaaaaaaagaug

SEQ ID NO: 1275861 - RNA, 18 nt, Human
uacuaaaaaaaagaugaa

SEQ ID NO: 1275862 - RNA, 16 nt, Human
uacguaauaagguuuu

SEQ ID NO: 1275863 - RNA, 19 nt, Human
uacguaauaagguuuuaau

SEQ ID NO: 1275864 - RNA, 22 nt, Human
uacuaugaaauauguauaacuu

SEQ ID NO: 1275865 - RNA, 12 nt, Human
uacggugggggu

SEQ ID NO: 1275866 - RNA, 13 nt, Human
uacggugggggua

SEQ ID NO: 1275867 - RNA, 20 nt, Human
uacgguuugccccuuuauaa

SEQ ID NO: 1275868 - RNA, 24 nt, Human
uacgcuccaucgcugucaucucag

SEQ ID NO: 1275869 - RNA, 22 nt, Human
uacgcagcgugcuuuaaaaaau

SEQ ID NO: 1275870 - RNA, 13 nt, Human
uacgaugcuucaa

SEQ ID NO: 1275871 - RNA, 19 nt, Human
uacgagagcagaggucucc

SEQ ID NO: 1275872 - RNA, 20 nt, Human
aauucccguuuugucacuuu

SEQ ID NO: 1275873 - RNA, 21 nt, Human
aauucccguuuugucacuuuu

SEQ ID NO: 1275874 - RNA, 20 nt, Human
aauucccucacucgucuccc

SEQ ID NO: 1275875 - RNA, 13 nt, Human
aauuccgucacca

SEQ ID NO: 1275876 - RNA, 22 nt, Human
aauuccuauacgcagcgugcuu

SEQ ID NO: 1275877 - RNA, 16 nt, Human
acagccucuuagaugc

SEQ ID NO: 1275878 - RNA, 15 nt, Human
uaugguaaaaaauuu

SEQ ID NO: 1275879 - RNA, 16 nt, Human
uaugguaccagaugca

SEQ ID NO: 1275880 - RNA, 17 nt, Human
uaugguaccagaugcag

SEQ ID NO: 1275881 - RNA, 12 nt, Human
acagccuggcac

SEQ ID NO: 1275882 - RNA, 17 nt, Human
acagccugacaacauuu

SEQ ID NO: 1275883 - RNA, 20 nt, Human
acagccugacaacauuucua

SEQ ID NO: 1275884 - RNA, 21 nt, Human
acagccugacaacauuucuau

SEQ ID NO: 1275885 - RNA, 17 nt, Human
uauggggaugguaguuu

SEQ ID NO: 1275886 - RNA, 19 nt, Human
uauggggguuguaaauugg

SEQ ID NO: 1275887 - RNA, 23 nt, Human
uauggggguuguaaauuggcaug

SEQ ID NO: 1275888 - RNA, 18 nt, Human
uauggguaggguaaauca

SEQ ID NO: 1275889 - RNA, 19 nt, Human
uauggguaggguaaaucag

SEQ ID NO: 1275890 - RNA, 11 nt, Human
uaugggucaca

SEQ ID NO: 1275891 - RNA, 13 nt, Human
uaugggucacagg

SEQ ID NO: 1275892 - RNA, 14 nt, Human
uaugggucacagga

SEQ ID NO: 1275893 - RNA, 14 nt, Human
uaugggucuaggac

SEQ ID NO: 1275894 - RNA, 15 nt, Human
uaugggucacaggaa

SEQ ID NO: 1275895 - RNA, 11 nt, Human
uaugguaaaaa

SEQ ID NO: 1275896 - RNA, 19 nt, Human
uaugguaacugcuuucugu

SEQ ID NO: 1275897 - RNA, 15 nt, Human
uaugcuguacccagu

SEQ ID NO: 1275898 - RNA, 13 nt, Human
uaugcuuaaaaua

SEQ ID NO: 1275899 - RNA, 16 nt, Human
uaugcuuaaaauaagc

SEQ ID NO: 1275900 - RNA, 15 nt, Human
uaugcuuacugauau

SEQ ID NO: 1275901 - RNA, 17 nt, Human
uaugcuaccaccagcug

SEQ ID NO: 1275902 - RNA, 18 nt, Human
uaugcuaccaccagcugu

SEQ ID NO: 1275903 - RNA, 19 nt, Human
uaugcuaccaccagcugug

SEQ ID NO: 1275904 - RNA, 15 nt, Human
uaugcugauuuauuu

SEQ ID NO: 1275905 - RNA, 19 nt, Human
uaugcuuaaaauaagcagg

SEQ ID NO: 1275906 - RNA, 16 nt, Human
uaugcuuacugauaua

SEQ ID NO: 1275907 - RNA, 21 nt, Human
uaugcuuacugauauauuuua

SEQ ID NO: 1275908 - RNA, 19 nt, Human
uaugccccauucaacaucu

SEQ ID NO: 1275909 - RNA, 21 nt, Human
uaugcauuuaaauacagucuu

SEQ ID NO: 1275910 - RNA, 22 nt, Human
uaugcauuuaaauacagucuuc

SEQ ID NO: 1275911 - RNA, 14 nt, Human
uaugccugcuauuu

SEQ ID NO: 1275912 - RNA, 16 nt, Human
uaugccuuguuucaua

SEQ ID NO: 1275913 - RNA, 13 nt, Human
uaugcgguuaauu

SEQ ID NO: 1275914 - RNA, 13 nt, Human
uaugcuaaucagg

SEQ ID NO: 1275915 - RNA, 14 nt, Human
uaugcuaccaccag

SEQ ID NO: 1275916 - RNA, 15 nt, Human
uaugcuaccaccagc

SEQ ID NO: 1275917 - RNA, 18 nt, Human
uaugccugcuauuugaag

SEQ ID NO: 1275918 - RNA, 19 nt, Human
uaugaacuugaggacacau

SEQ ID NO: 1275919 - RNA, 18 nt, Human
uaugaacuugaggacaca

SEQ ID NO: 1275920 - RNA, 16 nt, Human
uaugaacuugaggaca

SEQ ID NO: 1275921 - RNA, 19 nt, Human
uaugaacauauuguugaaa

SEQ ID NO: 1275922 - RNA, 17 nt, Human
uaugaacauauuguuga

SEQ ID NO: 1275923 - RNA, 16 nt, Human
uaugauuaaguaauga

SEQ ID NO: 1275924 - RNA, 20 nt, Human
uaugauuaaguaaugauaac

SEQ ID NO: 1275925 - RNA, 21 nt, Human
uaugauuaaguaaugauaacu

SEQ ID NO: 1275926 - RNA, 22 nt, Human
uaucuuugccacccucaugcug

SEQ ID NO: 1275927 - RNA, 23 nt, Human
uaucuuuucauacauuuucuaag

SEQ ID NO: 1275928 - RNA, 21 nt, Human
uaucuuuucauacauuuucua

SEQ ID NO: 1275929 - RNA, 18 nt, Human
uaucuuuuuaccuuucau

SEQ ID NO: 1275930 - RNA, 17 nt, Human
uaugaaaugugcacuuu

SEQ ID NO: 1275931 - RNA, 14 nt, Human
uaugaacauauugu

SEQ ID NO: 1275932 - RNA, 16 nt, Human
uaucuuugccacccuc

SEQ ID NO: 1275933 - RNA, 14 nt, Human
uaucuuugccaccc

SEQ ID NO: 1275934 - RNA, 11 nt, Human
uaucuuugcca

SEQ ID NO: 1275935 - RNA, 18 nt, Human
acagccguuuguucccca

SEQ ID NO: 1275936 - RNA, 17 nt, Human
acagauuuauuccuuug

SEQ ID NO: 1275937 - RNA, 20 nt, Human
acagauuuauuccuuuguua

SEQ ID NO: 1275938 - RNA, 12 nt, Human
acagauauauuu

SEQ ID NO: 1275939 - RNA, 17 nt, Human
acagauccccaagccug

SEQ ID NO: 1275940 - RNA, 18 nt, Human
acagauccccaagccugg

SEQ ID NO: 1275941 - RNA, 12 nt, Human
acagaucaguaa

SEQ ID NO: 1275942 - RNA, 23 nt, Human
acagaucgaaccguuuugaagcu

SEQ ID NO: 1275943 - RNA, 22 nt, Human
acagaucucugcuuuggaaauc

SEQ ID NO: 1275944 - RNA, 22 nt, Human
acagaucaucuuggaacugcau

SEQ ID NO: 1275945 - RNA, 12 nt, Human
acagaucuggaa

SEQ ID NO: 1275946 - RNA, 21 nt, Human
acagagaagucacagggcagu

SEQ ID NO: 1275947 - RNA, 14 nt, Human
acagauuugagcuc

SEQ ID NO: 1275948 - RNA, 15 nt, Human
acagauuugagcuca

SEQ ID NO: 1275949 - RNA, 14 nt, Human
acagauuguuugca

SEQ ID NO: 1275950 - RNA, 15 nt, Human
acagauuguuugcaa

SEQ ID NO: 1275951 - RNA, 14 nt, Human
acagaucuggaacc

SEQ ID NO: 1275952 - RNA, 16 nt, Human
acagaucuggaaccuc

SEQ ID NO: 1275953 - RNA, 20 nt, Human
acagaucuggaaccucagcc

SEQ ID NO: 1275954 - RNA, 21 nt, Human
acagaucuggaaccucagccu

SEQ ID NO: 1275955 - RNA, 22 nt, Human
acagaucuggaaccucagccug

SEQ ID NO: 1275956 - RNA, 13 nt, Human
acagaugagucac

SEQ ID NO: 1275957 - RNA, 18 nt, Human
acagaugccacacaagga

SEQ ID NO: 1275958 - RNA, 23 nt, Human
uaucuauauuuuacauaaauuua

SEQ ID NO: 1275959 - RNA, 14 nt, Human
uaucuauguuuuac

SEQ ID NO: 1275960 - RNA, 16 nt, Human
uaucuauguuuuacca

SEQ ID NO: 1275961 - RNA, 11 nt, Human
uaucucaucuc

SEQ ID NO: 1275962 - RNA, 16 nt, Human
uaucuccagcggcccu

SEQ ID NO: 1275963 - RNA, 18 nt, Human
uaucuccagcggcccugu

SEQ ID NO: 1275964 - RNA, 16 nt, Human
acagagaaaccagcuu

SEQ ID NO: 1275965 - RNA, 17 nt, Human
acagagaaaccagcuuc

SEQ ID NO: 1275966 - RNA, 18 nt, Human
acagagaaaccagcuucc

SEQ ID NO: 1275967 - RNA, 19 nt, Human
acagagaaaccagcuuccu

SEQ ID NO: 1275968 - RNA, 20 nt, Human
acagagaaaccagcuuccuu

SEQ ID NO: 1275969 - RNA, 22 nt, Human
acagagaaaccagcuuccuuca

SEQ ID NO: 1275970 - RNA, 23 nt, Human
acagagaaaccagcuuccuucag

SEQ ID NO: 1275971 - RNA, 9 nt, Human
acagagaag

SEQ ID NO: 1275972 - RNA, 10 nt, Human
acagagaagc

SEQ ID NO: 1275973 - RNA, 11 nt, Human
acagagaagcc

SEQ ID NO: 1275974 - RNA, 12 nt, Human
acagagaagcca

SEQ ID NO: 1275975 - RNA, 13 nt, Human
acagagaagccag

SEQ ID NO: 1275976 - RNA, 14 nt, Human
acagagaagccagc

SEQ ID NO: 1275977 - RNA, 15 nt, Human
acagagaagccagcu

SEQ ID NO: 1275978 - RNA, 16 nt, Human
acagagaagccagcuu

SEQ ID NO: 1275979 - RNA, 17 nt, Human
acagagaagccagcuug

SEQ ID NO: 1275980 - RNA, 18 nt, Human
acagagaagccagcuugu

SEQ ID NO: 1275981 - RNA, 19 nt, Human
acagagaagccagcuuguu

SEQ ID NO: 1275982 - RNA, 13 nt, Human
acagagaagccau

SEQ ID NO: 1275983 - RNA, 14 nt, Human
acagagaagccauc

SEQ ID NO: 1275984 - RNA, 15 nt, Human
acagagaagccauca

SEQ ID NO: 1275985 - RNA, 20 nt, Human
acagagaagccaucaccuca

SEQ ID NO: 1275986 - RNA, 21 nt, Human
acagagaagccaucaccucag

SEQ ID NO: 1275987 - RNA, 12 nt, Human
acagagaagccu

SEQ ID NO: 1275988 - RNA, 13 nt, Human
acagagaagccuu

SEQ ID NO: 1275989 - RNA, 14 nt, Human
acagagaagccuuc

SEQ ID NO: 1275990 - RNA, 15 nt, Human
acagagaagccuuca

SEQ ID NO: 1275991 - RNA, 16 nt, Human
acagagaagccuucaa

SEQ ID NO: 1275992 - RNA, 20 nt, Human
acagagaagccuucaagcuc

SEQ ID NO: 1275993 - RNA, 23 nt, Human
acagagaagccuucaagcucuga

SEQ ID NO: 1275994 - RNA, 22 nt, Human
acagagaagccuucaagcucug

SEQ ID NO: 1275995 - RNA, 12 nt, Human
acagagaaguca

SEQ ID NO: 1275996 - RNA, 13 nt, Human
acagagaagucac

SEQ ID NO: 1275997 - RNA, 14 nt, Human
acagagaagucaca

SEQ ID NO: 1275998 - RNA, 16 nt, Human
acagagaagucacagg

SEQ ID NO: 1275999 - RNA, 17 nt, Human
acagagaagucacaggg

SEQ ID NO: 1276000 - RNA, 18 nt, Human
acagagaagucacagggc

SEQ ID NO: 1276001 - RNA, 19 nt, Human
acagagaagucacagggca

SEQ ID NO: 1276002 - RNA, 21 nt, Human
uaucaaggucguuuuuuucau

SEQ ID NO: 1276003 - RNA, 17 nt, Human
uaucaaccccagacacu

SEQ ID NO: 1276004 - RNA, 18 nt, Human
uaucaaccccagacacug

SEQ ID NO: 1276005 - RNA, 21 nt, Human
uaucaaccccagacacugguu

SEQ ID NO: 1276006 - RNA, 19 nt, Human
uaucaaccccagacacugg

SEQ ID NO: 1276007 - RNA, 14 nt, Human
uaucaacuuccuaa

SEQ ID NO: 1276008 - RNA, 19 nt, Human
uaucaacuuccuaaauauu

SEQ ID NO: 1276009 - RNA, 13 nt, Human
uauccaaaagcuu

SEQ ID NO: 1276010 - RNA, 15 nt, Human
uauccacuuugcaca

SEQ ID NO: 1276011 - RNA, 18 nt, Human
uauccacuuugcacagcu

SEQ ID NO: 1276012 - RNA, 15 nt, Human
uauccaggcaccagg

SEQ ID NO: 1276013 - RNA, 17 nt, Human
uauccaggcaccaggac

SEQ ID NO: 1276014 - RNA, 21 nt, Human
uauccagguaauccaagauau

SEQ ID NO: 1276015 - RNA, 18 nt, Human
uauccagguaauccaaga

SEQ ID NO: 1276016 - RNA, 19 nt, Human
uauccagguucccucccag

SEQ ID NO: 1276017 - RNA, 24 nt, Human
uauccauaaugcauucuucucugu

SEQ ID NO: 1276018 - RNA, 18 nt, Human
uauccaggcaccaggacu

SEQ ID NO: 1276019 - RNA, 17 nt, Human
uauccauauugagucaa

SEQ ID NO: 1276020 - RNA, 18 nt, Human
uauccggacagagcacgu

SEQ ID NO: 1276021 - RNA, 16 nt, Human
uauccuaaacaucauu

SEQ ID NO: 1276022 - RNA, 23 nt, Human
uauaaguguguguuuuucauaaa

SEQ ID NO: 1276023 - RNA, 17 nt, Human
uauaaguguguguuuuu

SEQ ID NO: 1276024 - RNA, 12 nt, Human
uauaagaaagcc

SEQ ID NO: 1276025 - RNA, 15 nt, Human
uauaaguguacauau

SEQ ID NO: 1276026 - RNA, 18 nt, Human
uauaaguguacauaugug

SEQ ID NO: 1276027 - RNA, 16 nt, Human
uauauuuaguaucuuu

SEQ ID NO: 1276028 - RNA, 19 nt, Human
uauauuguucagcaugcaa

SEQ ID NO: 1276029 - RNA, 15 nt, Human
uauauuguuugcuaa

SEQ ID NO: 1276030 - RNA, 17 nt, Human
uauauuguucacuucuu

SEQ ID NO: 1276031 - RNA, 19 nt, Human
uauauuguguuuguguauu

SEQ ID NO: 1276032 - RNA, 14 nt, Human
uauauuuaaaaaua

SEQ ID NO: 1276033 - RNA, 14 nt, Human
uauauuauauggaa

SEQ ID NO: 1276034 - RNA, 12 nt, Human
uauauuguaauu

SEQ ID NO: 1276035 - RNA, 14 nt, Human
uauauuguaauuua

SEQ ID NO: 1276036 - RNA, 18 nt, Human
uauauuguguuuguguau

SEQ ID NO: 1276037 - RNA, 17 nt, Human
uauauuacaaugaucac

SEQ ID NO: 1276038 - RNA, 22 nt, Human
uauauuacacuacacacugugu

SEQ ID NO: 1276039 - RNA, 17 nt, Human
uauauuacagauauuug

SEQ ID NO: 1276040 - RNA, 13 nt, Human
uauauuacaauga

SEQ ID NO: 1276041 - RNA, 12 nt, Human
uauauuacaaug

SEQ ID NO: 1276042 - RNA, 17 nt, Human
uauauuauacuuguaau

SEQ ID NO: 1276043 - RNA, 18 nt, Human
uauauuauacuuguaauu

SEQ ID NO: 1276044 - RNA, 20 nt, Human
uauauuauacuuguaauuau

SEQ ID NO: 1276045 - RNA, 13 nt, Human
uauauuauaugga

SEQ ID NO: 1276046 - RNA, 19 nt, Human
uauauuauauggaaauaua

SEQ ID NO: 1276047 - RNA, 17 nt, Human
uauguguaucucacacu

SEQ ID NO: 1276048 - RNA, 20 nt, Human
uauguguaugcacaguaaaa

SEQ ID NO: 1276049 - RNA, 17 nt, Human
uaugugggcagauuuuc

SEQ ID NO: 1276050 - RNA, 23 nt, Human
uaugugggcagauuuucagcaaa

SEQ ID NO: 1276051 - RNA, 22 nt, Human
uauguuuugacauuuuuaguuu

SEQ ID NO: 1276052 - RNA, 18 nt, Human
uauguuuucgaaaaucaa

SEQ ID NO: 1276053 - RNA, 13 nt, Human
uauguuuuuaaug

SEQ ID NO: 1276054 - RNA, 16 nt, Human
uauguuuuuguucaaa

SEQ ID NO: 1276055 - RNA, 15 nt, Human
uauguuuuuguucaa

SEQ ID NO: 1276056 - RNA, 20 nt, Human
uauuaaaaagguuuacagaa

SEQ ID NO: 1276057 - RNA, 12 nt, Human
uauuaaaagacu

SEQ ID NO: 1276058 - RNA, 13 nt, Human
uauuaaaagacuc

SEQ ID NO: 1276059 - RNA, 14 nt, Human
uauuaaaagacuca

SEQ ID NO: 1276060 - RNA, 15 nt, Human
uauuaaaagacucau

SEQ ID NO: 1276061 - RNA, 16 nt, Human
uauuaaaagacucauc

SEQ ID NO: 1276062 - RNA, 18 nt, Human
uauuaaaagacucauccg

SEQ ID NO: 1276063 - RNA, 18 nt, Human
uaugugacauuuuacauu

SEQ ID NO: 1276064 - RNA, 14 nt, Human
uaugugacauuuua

SEQ ID NO: 1276065 - RNA, 17 nt, Human
uaugugaaacauguuuc

SEQ ID NO: 1276066 - RNA, 12 nt, Human
uaugugaacagu

SEQ ID NO: 1276067 - RNA, 22 nt, Human
uaugugaacaguuguguuugaa

SEQ ID NO: 1276068 - RNA, 19 nt, Human
uaugugacauuuuacauua

SEQ ID NO: 1276069 - RNA, 21 nt, Human
uaugugacauuuuacauuaaa

SEQ ID NO: 1276070 - RNA, 14 nt, Human
uaugugaaacaugu

SEQ ID NO: 1276071 - RNA, 14 nt, Human
uaugucuuaaaacc

SEQ ID NO: 1276072 - RNA, 17 nt, Human
uaugucuuaaaaccugc

SEQ ID NO: 1276073 - RNA, 17 nt, Human
acaggcauuuccugggu

SEQ ID NO: 1276074 - RNA, 20 nt, Human
acaggcauuuccuggguggc

SEQ ID NO: 1276075 - RNA, 18 nt, Human
acaggcauuuccugggug

SEQ ID NO: 1276076 - RNA, 19 nt, Human
acaggcaugugucaccaug

SEQ ID NO: 1276077 - RNA, 16 nt, Human
acaggcaugugucacc

SEQ ID NO: 1276078 - RNA, 23 nt, Human
acaggaguguccucuucccucuc

SEQ ID NO: 1276079 - RNA, 19 nt, Human
acaggagggcggccuccuu

SEQ ID NO: 1276080 - RNA, 20 nt, Human
acaggagggcggccuccuuc

SEQ ID NO: 1276081 - RNA, 23 nt, Human
acaggagggggucguggagagcu

SEQ ID NO: 1276082 - RNA, 20 nt, Human
acaggagggggucguggaga

SEQ ID NO: 1276083 - RNA, 17 nt, Human
acaggaguguccucuuc

SEQ ID NO: 1276084 - RNA, 21 nt, Human
acaggaguguccucuucccuc

SEQ ID NO: 1276085 - RNA, 22 nt, Human
acaggacaugcgguagccagca

SEQ ID NO: 1276086 - RNA, 14 nt, Human
acaggacucugccu

SEQ ID NO: 1276087 - RNA, 16 nt, Human
acaggacuaacacuca

SEQ ID NO: 1276088 - RNA, 18 nt, Human
acaggacuaacacucaga

SEQ ID NO: 1276089 - RNA, 19 nt, Human
acaggacuaacacucagaa

SEQ ID NO: 1276090 - RNA, 20 nt, Human
acaggacuaacacucagaag

SEQ ID NO: 1276091 - RNA, 21 nt, Human
acaggacuaacacucagaagc

SEQ ID NO: 1276092 - RNA, 22 nt, Human
acaggacuaacacucagaagcc

SEQ ID NO: 1276093 - RNA, 23 nt, Human
acaggacuaacacucagaagccu

SEQ ID NO: 1276094 - RNA, 24 nt, Human
acaggacuaacacucagaagccug

SEQ ID NO: 1276095 - RNA, 12 nt, Human
acaggaaaaagu

SEQ ID NO: 1276096 - RNA, 21 nt, Human
acagcuuuugcaacuuaauac

SEQ ID NO: 1276097 - RNA, 17 nt, Human
acaggaaguagaggagg

SEQ ID NO: 1276098 - RNA, 19 nt, Human
acagcgugcuaaaauaaca

SEQ ID NO: 1276099 - RNA, 22 nt, Human
acagcguuccuagagaagacag

SEQ ID NO: 1276100 - RNA, 13 nt, Human
acagcguuccuag

SEQ ID NO: 1276101 - RNA, 15 nt, Human
acagccugcaaguca

SEQ ID NO: 1276102 - RNA, 11 nt, Human
acagccuggca

SEQ ID NO: 1276103 - RNA, 12 nt, Human
acagcuuuugca

SEQ ID NO: 1276104 - RNA, 13 nt, Human
acagcuuuugcaa

SEQ ID NO: 1276105 - RNA, 14 nt, Human
acagcuuuugcaac

SEQ ID NO: 1276106 - RNA, 15 nt, Human
acagcuuuugcaacu

SEQ ID NO: 1276107 - RNA, 22 nt, Human
acagcuuuugcaacuuaauacu

SEQ ID NO: 1276108 - RNA, 23 nt, Human
acaguagucuugaugaccaaagu

SEQ ID NO: 1276109 - RNA, 14 nt, Human
acaguaggagccca

SEQ ID NO: 1276110 - RNA, 22 nt, Human
acaguaggagcccagcucugaa

SEQ ID NO: 1276111 - RNA, 14 nt, Human
acaguagucuugau

SEQ ID NO: 1276112 - RNA, 16 nt, Human
acagucaccucaugga

SEQ ID NO: 1276113 - RNA, 17 nt, Human
acagucaccucauggaa

SEQ ID NO: 1276114 - RNA, 18 nt, Human
acagucaccucauggaau

SEQ ID NO: 1276115 - RNA, 14 nt, Human
acagucacugcucu

SEQ ID NO: 1276116 - RNA, 18 nt, Human
acagggauaaggccugug

SEQ ID NO: 1276117 - RNA, 22 nt, Human
acagggauaaggccuguggggg

SEQ ID NO: 1276118 - RNA, 21 nt, Human
acaguaauuguguuuacauuu

SEQ ID NO: 1276119 - RNA, 14 nt, Human
acaguacacuguca

SEQ ID NO: 1276120 - RNA, 18 nt, Human
acaguaauuguguuuaca

SEQ ID NO: 1276121 - RNA, 17 nt, Human
acaguaauuguguuuac

SEQ ID NO: 1276122 - RNA, 15 nt, Human
acaguaauuguguuu

SEQ ID NO: 1276123 - RNA, 15 nt, Human
acaguacccaaacug

SEQ ID NO: 1276124 - RNA, 13 nt, Human
acaguaggagccc

SEQ ID NO: 1276125 - RNA, 18 nt, Human
acaggcuggaagauagcu

SEQ ID NO: 1276126 - RNA, 20 nt, Human
acaggcuggaagauagcugu

SEQ ID NO: 1276127 - RNA, 13 nt, Human
acaggcuccugcc

SEQ ID NO: 1276128 - RNA, 15 nt, Human
acaggcuccugccac

SEQ ID NO: 1276129 - RNA, 21 nt, Human
acaggcuccugccaccacgcc

SEQ ID NO: 1276130 - RNA, 22 nt, Human
acaggcuccugccaccacgccc

SEQ ID NO: 1276131 - RNA, 13 nt, Human
acaggcucuuagc

SEQ ID NO: 1276132 - RNA, 15 nt, Human
acaggcucuuagcag

SEQ ID NO: 1276133 - RNA, 19 nt, Human
acaggcucuuagcagcuuc

SEQ ID NO: 1276134 - RNA, 20 nt, Human
acaggcucuuagcagcuucc

SEQ ID NO: 1276135 - RNA, 21 nt, Human
acagggaggacgcucucuggc

SEQ ID NO: 1276136 - RNA, 20 nt, Human
acagggaggacgcucucugg

SEQ ID NO: 1276137 - RNA, 23 nt, Human
acagggaaggcaggcagggcucu

SEQ ID NO: 1276138 - RNA, 22 nt, Human
acagggaauuaggcccccauca

SEQ ID NO: 1276139 - RNA, 22 nt, Human
acagggaacgugauuagugaaa

SEQ ID NO: 1276140 - RNA, 21 nt, Human
acagggaacgugauuagugaa

SEQ ID NO: 1276141 - RNA, 17 nt, Human
acaggcuucugagcagc

SEQ ID NO: 1276142 - RNA, 18 nt, Human
acaggcuucugagcagcg

SEQ ID NO: 1276143 - RNA, 23 nt, Human
acaggcuucugagcagcgagccu

SEQ ID NO: 1276144 - RNA, 21 nt, Human
acaggcuggaagauagcugug

SEQ ID NO: 1276145 - RNA, 16 nt, Human
acaggcuucugagcag

SEQ ID NO: 1276146 - RNA, 12 nt, Human
acagggaaggca

SEQ ID NO: 1276147 - RNA, 13 nt, Human
acagggaaggcag

SEQ ID NO: 1276148 - RNA, 14 nt, Human
acagggaaggcagg

SEQ ID NO: 1276149 - RNA, 15 nt, Human
acagggaaggcaggc

SEQ ID NO: 1276150 - RNA, 17 nt, Human
acagggaaggcaggcag

SEQ ID NO: 1276151 - RNA, 19 nt, Human
acagggaaggcaggcaggg

SEQ ID NO: 1276152 - RNA, 20 nt, Human
acagggaaggcaggcagggc

SEQ ID NO: 1276153 - RNA, 21 nt, Human
acagggaaggcaggcagggcu

SEQ ID NO: 1276154 - RNA, 22 nt, Human
acagggaaggcaggcagggcuc

SEQ ID NO: 1276155 - RNA, 21 nt, Human
uauucagcucauggacuucug

SEQ ID NO: 1276156 - RNA, 16 nt, Human
uauucaauucuuuuaa

SEQ ID NO: 1276157 - RNA, 15 nt, Human
uauucacaaaauauc

SEQ ID NO: 1276158 - RNA, 14 nt, Human
uauucaauaaagcu

SEQ ID NO: 1276159 - RNA, 17 nt, Human
uauucaauaagagauua

SEQ ID NO: 1276160 - RNA, 13 nt, Human
uauucaauaaagc

SEQ ID NO: 1276161 - RNA, 12 nt, Human
uauucaauaaag

SEQ ID NO: 1276162 - RNA, 14 nt, Human
uauucauaauuauu

SEQ ID NO: 1276163 - RNA, 22 nt, Human
acaggcgugagccaccgugccu

SEQ ID NO: 1276164 - RNA, 15 nt, Human
uauucagugucacug

SEQ ID NO: 1276165 - RNA, 12 nt, Human
acaggcuccugc

SEQ ID NO: 1276166 - RNA, 12 nt, Human
acaggcucaggc

SEQ ID NO: 1276167 - RNA, 14 nt, Human
acaggcucaggcag

SEQ ID NO: 1276168 - RNA, 15 nt, Human
acaggcucaggcagg

SEQ ID NO: 1276169 - RNA, 16 nt, Human
acaggcucaggcaggg

SEQ ID NO: 1276170 - RNA, 19 nt, Human
acaggcgugagccaccucg

SEQ ID NO: 1276171 - RNA, 20 nt, Human
acaggcgugagccaccucgc

SEQ ID NO: 1276172 - RNA, 20 nt, Human
acaggcucaaacaaugacaa

SEQ ID NO: 1276173 - RNA, 19 nt, Human
uauucagcuuuaguagaua

SEQ ID NO: 1276174 - RNA, 23 nt, Human
uauucaaaaauuaucuauagcua

SEQ ID NO: 1276175 - RNA, 21 nt, Human
uauuagugaccucagcuuuga

SEQ ID NO: 1276176 - RNA, 19 nt, Human
uauuagugaccucagcuuu

SEQ ID NO: 1276177 - RNA, 19 nt, Human
uauuaguauuguuguccuu

SEQ ID NO: 1276178 - RNA, 20 nt, Human
uauuaguauuguuguccuuu

SEQ ID NO: 1276179 - RNA, 21 nt, Human
uauuaguauuguuguccuuuu

SEQ ID NO: 1276180 - RNA, 15 nt, Human
uauuagaauaccaca

SEQ ID NO: 1276181 - RNA, 19 nt, Human
uauuacuuguaaauauaaa

SEQ ID NO: 1276182 - RNA, 21 nt, Human
uauuacuuguaaauauaaaga

SEQ ID NO: 1276183 - RNA, 23 nt, Human
uauuacuuguaaauauaaagacg

SEQ ID NO: 1276184 - RNA, 22 nt, Human
uauuacuuguaaauauaaagac

SEQ ID NO: 1276185 - RNA, 17 nt, Human
uauuaggugcaauuuca

SEQ ID NO: 1276186 - RNA, 21 nt, Human
uauuaggugcaauuucaaggu

SEQ ID NO: 1276187 - RNA, 13 nt, Human
uauuaguauuguu

SEQ ID NO: 1276188 - RNA, 15 nt, Human
uauuaguauuguugu

SEQ ID NO: 1276189 - RNA, 16 nt, Human
uauuaguauuguuguc

SEQ ID NO: 1276190 - RNA, 17 nt, Human
uauuaguauuguugucc

SEQ ID NO: 1276191 - RNA, 14 nt, Human
uauuacuguaagaa

SEQ ID NO: 1276192 - RNA, 16 nt, Human
uauuacgguuugcccc

SEQ ID NO: 1276193 - RNA, 16 nt, Human
uauuacguaugucugg

SEQ ID NO: 1276194 - RNA, 22 nt, Human
uauuacguaugucugguucuca

SEQ ID NO: 1276195 - RNA, 12 nt, Human
uauuaaaaugua

SEQ ID NO: 1276196 - RNA, 13 nt, Human
uauuaaaauguau

SEQ ID NO: 1276197 - RNA, 16 nt, Human
uauuaaaauguaugca

SEQ ID NO: 1276198 - RNA, 23 nt, Human
uauuacuuauuuuugacaguguu

SEQ ID NO: 1276199 - RNA, 18 nt, Human
uauuacuuguaaauauaa

SEQ ID NO: 1276200 - RNA, 15 nt, Human
uauaaguguguguuu

SEQ ID NO: 1276201 - RNA, 16 nt, Human
uauaacuuuaacuucu

SEQ ID NO: 1276202 - RNA, 17 nt, Human
uauaacuuuaacuucug

SEQ ID NO: 1276203 - RNA, 13 nt, Human
acacuaagagaga

SEQ ID NO: 1276204 - RNA, 14 nt, Human
acacuaagagagaa

SEQ ID NO: 1276205 - RNA, 23 nt, Human
acaccuuuuauugacacagaaaa

SEQ ID NO: 1276206 - RNA, 21 nt, Human
acaccuuuuauugacacagaa

SEQ ID NO: 1276207 - RNA, 22 nt, Human
acaccuuggacauccuccuccc

SEQ ID NO: 1276208 - RNA, 15 nt, Human
acaccuuuagguucu

SEQ ID NO: 1276209 - RNA, 16 nt, Human
acaccuuuagguucuu

SEQ ID NO: 1276210 - RNA, 21 nt, Human
acaccuuagccugcccuccuu

SEQ ID NO: 1276211 - RNA, 20 nt, Human
acaccuguagcacuuacugg

SEQ ID NO: 1276212 - RNA, 14 nt, Human
acaccuuccagcuc

SEQ ID NO: 1276213 - RNA, 16 nt, Human
acaccuuccagcuccu

SEQ ID NO: 1276214 - RNA, 20 nt, Human
acaccuuccagcuccuguaa

SEQ ID NO: 1276215 - RNA, 23 nt, Human
acaccuuggacauccuccuccca

SEQ ID NO: 1276216 - RNA, 14 nt, Human
acaccgggccugga

SEQ ID NO: 1276217 - RNA, 17 nt, Human
acacccuucucccacuc

SEQ ID NO: 1276218 - RNA, 21 nt, Human
acacccuucucccacucuccu

SEQ ID NO: 1276219 - RNA, 22 nt, Human
acacccuucucccacucuccua

SEQ ID NO: 1276220 - RNA, 16 nt, Human
acaccgggccuggaga

SEQ ID NO: 1276221 - RNA, 16 nt, Human
acaccucuuggggagu

SEQ ID NO: 1276222 - RNA, 13 nt, Human
acacccucacacu

SEQ ID NO: 1276223 - RNA, 14 nt, Human
acacccuccagaga

SEQ ID NO: 1276224 - RNA, 16 nt, Human
acacccucacacuggg

SEQ ID NO: 1276225 - RNA, 20 nt, Human
acacccaaagagguauuuau

SEQ ID NO: 1276226 - RNA, 19 nt, Human
acacccaaagagguauuua

SEQ ID NO: 1276227 - RNA, 16 nt, Human
acaccaugauuccuuu

SEQ ID NO: 1276228 - RNA, 18 nt, Human
acaccaugauuccuuuaa

SEQ ID NO: 1276229 - RNA, 17 nt, Human
acaccauugaaggcuua

SEQ ID NO: 1276230 - RNA, 20 nt, Human
acaccaugauuccuuuaaca

SEQ ID NO: 1276231 - RNA, 15 nt, Human
acacaucacagauga

SEQ ID NO: 1276232 - RNA, 17 nt, Human
acaccauagguagaaug

SEQ ID NO: 1276233 - RNA, 21 nt, Human
acaccauagguagaauguaaa

SEQ ID NO: 1276234 - RNA, 15 nt, Human
acaccaugauuccuu

SEQ ID NO: 1276235 - RNA, 18 nt, Human
acacaugauccugcaauu

SEQ ID NO: 1276236 - RNA, 15 nt, Human
acacaugaaguccaa

SEQ ID NO: 1276237 - RNA, 22 nt, Human
uauaaaagggacugagaaauuu

SEQ ID NO: 1276238 - RNA, 20 nt, Human
uauaaaaauaaaaaacacug

SEQ ID NO: 1276239 - RNA, 20 nt, Human
uauaaaagccuguuuaagag

SEQ ID NO: 1276240 - RNA, 19 nt, Human
uauaaaaauaaaaaacacu

SEQ ID NO: 1276241 - RNA, 22 nt, Human
acacauacucauuuuucaugau

SEQ ID NO: 1276242 - RNA, 19 nt, Human
acacauacucauuuuucau

SEQ ID NO: 1276243 - RNA, 15 nt, Human
uaguucauguaaaua

SEQ ID NO: 1276244 - RNA, 16 nt, Human
uaguucauguaaauaa

SEQ ID NO: 1276245 - RNA, 21 nt, Human
uaguucauguaaauaauacau

SEQ ID NO: 1276246 - RNA, 22 nt, Human
uaguucauguaaauaauacauu

SEQ ID NO: 1276247 - RNA, 14 nt, Human
uaguuccacugaga

SEQ ID NO: 1276248 - RNA, 15 nt, Human
uaguuccacugagac

SEQ ID NO: 1276249 - RNA, 22 nt, Human
uaguuaccuuauaguuacugug

SEQ ID NO: 1276250 - RNA, 23 nt, Human
uaguuaccuuauaguuacugugu

SEQ ID NO: 1276251 - RNA, 14 nt, Human
uaguucauguaaau

SEQ ID NO: 1276252 - RNA, 16 nt, Human
uaguuccccuguuuau

SEQ ID NO: 1276253 - RNA, 15 nt, Human
uaguuccccuguuua

SEQ ID NO: 1276254 - RNA, 17 nt, Human
uaguucaugucugcuau

SEQ ID NO: 1276255 - RNA, 18 nt, Human
uaguuccacuuauagccu

SEQ ID NO: 1276256 - RNA, 20 nt, Human
uaguuccacuuauagccucu

SEQ ID NO: 1276257 - RNA, 18 nt, Human
uaguuuuuucuuccuuuu

SEQ ID NO: 1276258 - RNA, 20 nt, Human
uaguuuuuucuuccuuuuca

SEQ ID NO: 1276259 - RNA, 23 nt, Human
uaguuuuuucuuccuuuucacug

SEQ ID NO: 1276260 - RNA, 14 nt, Human
uauaaaaaaugguu

SEQ ID NO: 1276261 - RNA, 15 nt, Human
uauaaaaaaugguuc

SEQ ID NO: 1276262 - RNA, 16 nt, Human
uauaaaaaaugguuca

SEQ ID NO: 1276263 - RNA, 21 nt, Human
uauaaaaaaugguucagaauu

SEQ ID NO: 1276264 - RNA, 17 nt, Human
uauaaaaaaugguucag

SEQ ID NO: 1276265 - RNA, 18 nt, Human
uauaaaaagcuuccauga

SEQ ID NO: 1276266 - RNA, 20 nt, Human
acacaccaccacgccuggcu

SEQ ID NO: 1276267 - RNA, 17 nt, Human
acacaccaccacgccug

SEQ ID NO: 1276268 - RNA, 20 nt, Human
acacacuaccgaaugugucu

SEQ ID NO: 1276269 - RNA, 13 nt, Human
acacacugaugcu

SEQ ID NO: 1276270 - RNA, 16 nt, Human
acacacggugccuuua

SEQ ID NO: 1276271 - RNA, 23 nt, Human
acacacggugccuuuauuuccac

SEQ ID NO: 1276272 - RNA, 22 nt, Human
acacacuaccgaaugugucuuu

SEQ ID NO: 1276273 - RNA, 22 nt, Human
acaauguccuaacugaaagaug

SEQ ID NO: 1276274 - RNA, 16 nt, Human
acaauggaccggagag

SEQ ID NO: 1276275 - RNA, 23 nt, Human
acaauggaccggagagugggggu

SEQ ID NO: 1276276 - RNA, 22 nt, Human
acacacaaauuaucuuaaaacu

SEQ ID NO: 1276277 - RNA, 14 nt, Human
acacaaugugucug

SEQ ID NO: 1276278 - RNA, 19 nt, Human
acaauggauaggcacagga

SEQ ID NO: 1276279 - RNA, 22 nt, Human
acaaugcuguauuuuaaaagaa

SEQ ID NO: 1276280 - RNA, 17 nt, Human
uagggagccauuugaga

SEQ ID NO: 1276281 - RNA, 12 nt, Human
uagggagccaug

SEQ ID NO: 1276282 - RNA, 18 nt, Human
uagggagggcggcagggg

SEQ ID NO: 1276283 - RNA, 22 nt, Human
uagugaaacucguuaauuugua

SEQ ID NO: 1276284 - RNA, 21 nt, Human
uagugaaaggaagauaaacgu

SEQ ID NO: 1276285 - RNA, 14 nt, Human
uagugaacuugaaa

SEQ ID NO: 1276286 - RNA, 19 nt, Human
uagugaaggcuucucucug

SEQ ID NO: 1276287 - RNA, 14 nt, Human
uaguacuaacuccu

SEQ ID NO: 1276288 - RNA, 20 nt, Human
uaguaccuuuuauaucccau

SEQ ID NO: 1276289 - RNA, 22 nt, Human
uaguccagcuuuguucuucuua

SEQ ID NO: 1276290 - RNA, 23 nt, Human
uaguccagcuuuguucuucuuaa

SEQ ID NO: 1276291 - RNA, 18 nt, Human
uagucccucaugcaaauc

SEQ ID NO: 1276292 - RNA, 23 nt, Human
uaguguuggagaagaacugaaau

SEQ ID NO: 1276293 - RNA, 18 nt, Human
uagugaauacugcuacag

SEQ ID NO: 1276294 - RNA, 21 nt, Human
uagugaaggcuucucucugug

SEQ ID NO: 1276295 - RNA, 15 nt, Human
uagugacccacaugc

SEQ ID NO: 1276296 - RNA, 14 nt, Human
uaguuaacacacua

SEQ ID NO: 1276297 - RNA, 14 nt, Human
uaguuaagacauga

SEQ ID NO: 1276298 - RNA, 19 nt, Human
uaguuaagacaugauuucc

SEQ ID NO: 1276299 - RNA, 21 nt, Human
uaguuaagacaugauuuccuu

SEQ ID NO: 1276300 - RNA, 23 nt, Human
uaguuaagacaugauuuccuuga

SEQ ID NO: 1276301 - RNA, 20 nt, Human
uaguuaacacacuaccgaau

SEQ ID NO: 1276302 - RNA, 16 nt, Human
uaguuaaucaucaaga

SEQ ID NO: 1276303 - RNA, 20 nt, Human
uaguuaaucaucaagagaau

SEQ ID NO: 1276304 - RNA, 12 nt, Human
uaguuaccuuau

SEQ ID NO: 1276305 - RNA, 14 nt, Human
uaguuaccuuauag

SEQ ID NO: 1276306 - RNA, 17 nt, Human
uaguuaccuuauaguua

SEQ ID NO: 1276307 - RNA, 18 nt, Human
uaguuaccuuauaguuac

SEQ ID NO: 1276308 - RNA, 19 nt, Human
uaguuaccuuauaguuacu

SEQ ID NO: 1276309 - RNA, 21 nt, Human
uaguuaccuuauaguuacugu

SEQ ID NO: 1276310 - RNA, 14 nt, Human
acacacuuacuuuu

SEQ ID NO: 1276311 - RNA, 15 nt, Human
acacacugaugcuua

SEQ ID NO: 1276312 - RNA, 17 nt, Human
acacacugaugcuuaga

SEQ ID NO: 1276313 - RNA, 22 nt, Human
acacagugcugaccagacagcc

SEQ ID NO: 1276314 - RNA, 15 nt, Human
acacaguuccuggga

SEQ ID NO: 1276315 - RNA, 16 nt, Human
acacaguuccugggaa

SEQ ID NO: 1276316 - RNA, 18 nt, Human
acacaguuccugggaaca

SEQ ID NO: 1276317 - RNA, 15 nt, Human
acacauacccucuuc

SEQ ID NO: 1276318 - RNA, 11 nt, Human
uaguaaaccaa

SEQ ID NO: 1276319 - RNA, 12 nt, Human
uaguaaaccaau

SEQ ID NO: 1276320 - RNA, 22 nt, Human
uaguaaaccaauccuaugcaug

SEQ ID NO: 1276321 - RNA, 17 nt, Human
uaguaaaccaauccuau

SEQ ID NO: 1276322 - RNA, 17 nt, Human
uaguaaagucaaggaga

SEQ ID NO: 1276323 - RNA, 14 nt, Human
uaguaaauaaugcu

SEQ ID NO: 1276324 - RNA, 15 nt, Human
uaguaaauaaugcuu

SEQ ID NO: 1276325 - RNA, 16 nt, Human
uaguaaauaaugcuuu

SEQ ID NO: 1276326 - RNA, 17 nt, Human
uaguaaauaaugcuuug

SEQ ID NO: 1276327 - RNA, 19 nt, Human
uaguaaauaaugcuuugaa

SEQ ID NO: 1276328 - RNA, 18 nt, Human
uaguaaaucacgcuuuuu

SEQ ID NO: 1276329 - RNA, 21 nt, Human
uaguaaaucacgcuuuuugaa

SEQ ID NO: 1276330 - RNA, 22 nt, Human
uaguaaaucacgcuuuuugaaa

SEQ ID NO: 1276331 - RNA, 14 nt, Human
uaguaacacuaaua

SEQ ID NO: 1276332 - RNA, 15 nt, Human
uaguaacacuaauau

SEQ ID NO: 1276333 - RNA, 22 nt, Human
uaguaacacuaauauauuuaaa

SEQ ID NO: 1276334 - RNA, 18 nt, Human
uaguaacuucuuauggaa

SEQ ID NO: 1276335 - RNA, 19 nt, Human
uaguaacuucuuauggaau

SEQ ID NO: 1276336 - RNA, 16 nt, Human
uaguacaaaguuucaa

SEQ ID NO: 1276337 - RNA, 17 nt, Human
uaguacaaaguuucaau

SEQ ID NO: 1276338 - RNA, 14 nt, Human
uaguaccaaaauaa

SEQ ID NO: 1276339 - RNA, 16 nt, Human
uaguaccaaucauuuu

SEQ ID NO: 1276340 - RNA, 23 nt, Human
uaguaccaaucauuuuaauuauu

SEQ ID NO: 1276341 - RNA, 19 nt, Human
uaggaaauauuuauuuuaa

SEQ ID NO: 1276342 - RNA, 16 nt, Human
uaggaaauccagggug

SEQ ID NO: 1276343 - RNA, 20 nt, Human
uaggaaaucuagaaguaguc

SEQ ID NO: 1276344 - RNA, 21 nt, Human
uaggaccuuuccaccacagcc

SEQ ID NO: 1276345 - RNA, 22 nt, Human
uaggaccuuuccaccacagcca

SEQ ID NO: 1276346 - RNA, 18 nt, Human
uaggaaauauuuauuuua

SEQ ID NO: 1276347 - RNA, 13 nt, Human
uagcugugggggu

SEQ ID NO: 1276348 - RNA, 14 nt, Human
uagcugugggggug

SEQ ID NO: 1276349 - RNA, 22 nt, Human
uagcugugugaauaccugcuca

SEQ ID NO: 1276350 - RNA, 17 nt, Human
uaggagaaccaaaucug

SEQ ID NO: 1276351 - RNA, 20 nt, Human
uaggagaaccaaaucuggaa

SEQ ID NO: 1276352 - RNA, 12 nt, Human
uaggagaagcca

SEQ ID NO: 1276353 - RNA, 15 nt, Human
uaggagaagccagga

SEQ ID NO: 1276354 - RNA, 16 nt, Human
uaggagaagccaggaa

SEQ ID NO: 1276355 - RNA, 14 nt, Human
uaggagagaaggua

SEQ ID NO: 1276356 - RNA, 17 nt, Human
uaggagcaaagccuguu

SEQ ID NO: 1276357 - RNA, 16 nt, Human
uaggagcaaagccugu

SEQ ID NO: 1276358 - RNA, 13 nt, Human
uaggagcuaaggc

SEQ ID NO: 1276359 - RNA, 14 nt, Human
uaggagcuaaggcu

SEQ ID NO: 1276360 - RNA, 17 nt, Human
uaggagcuaaggcucua

SEQ ID NO: 1276361 - RNA, 16 nt, Human
uaggagcuaaggcucu

SEQ ID NO: 1276362 - RNA, 19 nt, Human
uaggagcuuugacucagga

SEQ ID NO: 1276363 - RNA, 20 nt, Human
uaggaggaccagagcuacug

SEQ ID NO: 1276364 - RNA, 22 nt, Human
uaggcagacucuuuaugcuugc

SEQ ID NO: 1276365 - RNA, 23 nt, Human
uaggagcuuugacucaggagccu

SEQ ID NO: 1276366 - RNA, 12 nt, Human
uaggagggacug

SEQ ID NO: 1276367 - RNA, 14 nt, Human
uaggagggacuguc

SEQ ID NO: 1276368 - RNA, 14 nt, Human
uaggagggagacac

SEQ ID NO: 1276369 - RNA, 23 nt, Human
uaggagggacugucgcugcuucg

SEQ ID NO: 1276370 - RNA, 16 nt, Human
uaggagggugggaagg

SEQ ID NO: 1276371 - RNA, 13 nt, Human
uaggaggguccuc

SEQ ID NO: 1276372 - RNA, 18 nt, Human
uaggcacuguaguucuaa

SEQ ID NO: 1276373 - RNA, 19 nt, Human
uaggcacuguaguucuaag

SEQ ID NO: 1276374 - RNA, 20 nt, Human
uaggcacuguaguucuaaga

SEQ ID NO: 1276375 - RNA, 22 nt, Human
uaggcacuguaguucuaagacu

SEQ ID NO: 1276376 - RNA, 21 nt, Human
uaggcacuguaguucuaagac

SEQ ID NO: 1276377 - RNA, 22 nt, Human
uaggcaggaagcccaauugcug

SEQ ID NO: 1276378 - RNA, 12 nt, Human
uaggcauuuccu

SEQ ID NO: 1276379 - RNA, 19 nt, Human
uaggcauuuuuaccaucac

SEQ ID NO: 1276380 - RNA, 21 nt, Human
uaggcauuuuuaccaucacug

SEQ ID NO: 1276381 - RNA, 14 nt, Human
uagggaagggccug

SEQ ID NO: 1276382 - RNA, 14 nt, Human
uagggacugaccag

SEQ ID NO: 1276383 - RNA, 15 nt, Human
uagggacugaccagc

SEQ ID NO: 1276384 - RNA, 17 nt, Human
uagggacugaccagcag

SEQ ID NO: 1276385 - RNA, 13 nt, Human
acaagacugcaca

SEQ ID NO: 1276386 - RNA, 14 nt, Human
acaagacugcacau

SEQ ID NO: 1276387 - RNA, 15 nt, Human
acaagacccccagca

SEQ ID NO: 1276388 - RNA, 22 nt, Human
acaagacugacgccaggguaug

SEQ ID NO: 1276389 - RNA, 14 nt, Human
acaagagaaaaagc

SEQ ID NO: 1276390 - RNA, 14 nt, Human
acaagagaagcauu

SEQ ID NO: 1276391 - RNA, 15 nt, Human
acaagagaagcauuc

SEQ ID NO: 1276392 - RNA, 17 nt, Human
acaagagaagcauucuc

SEQ ID NO: 1276393 - RNA, 22 nt, Human
acaaggacagccccuccuccau

SEQ ID NO: 1276394 - RNA, 21 nt, Human
acaaggacagccccuccucca

SEQ ID NO: 1276395 - RNA, 18 nt, Human
acaaggacuaggguccug

SEQ ID NO: 1276396 - RNA, 19 nt, Human
acaaggacuaggguccugg

SEQ ID NO: 1276397 - RNA, 15 nt, Human
acaaggacuuccugu

SEQ ID NO: 1276398 - RNA, 16 nt, Human
acaaggauagaugcug

SEQ ID NO: 1276399 - RNA, 17 nt, Human
acaaggauagaugcugg

SEQ ID NO: 1276400 - RNA, 18 nt, Human
acaaggauagaugcuggc

SEQ ID NO: 1276401 - RNA, 21 nt, Human
acaaggauagaugcuggccca

SEQ ID NO: 1276402 - RNA, 22 nt, Human
acaaggauagaugcuggcccag

SEQ ID NO: 1276403 - RNA, 16 nt, Human
acaauaagcaaaaaca

SEQ ID NO: 1276404 - RNA, 15 nt, Human
acaauaagcaaaaac

SEQ ID NO: 1276405 - RNA, 15 nt, Human
acaauaacuccuccc

SEQ ID NO: 1276406 - RNA, 16 nt, Human
acaauaacuccuccca

SEQ ID NO: 1276407 - RNA, 19 nt, Human
acaauaacuccucccaggg

SEQ ID NO: 1276408 - RNA, 13 nt, Human
acaauaaauagac

SEQ ID NO: 1276409 - RNA, 16 nt, Human
acaauaaauggcugua

SEQ ID NO: 1276410 - RNA, 23 nt, Human
acaauacaucccuuaccugggaa

SEQ ID NO: 1276411 - RNA, 14 nt, Human
acaauaauuuucua

SEQ ID NO: 1276412 - RNA, 12 nt, Human
acaauacaaaug

SEQ ID NO: 1276413 - RNA, 13 nt, Human
acaauacaaaugg

SEQ ID NO: 1276414 - RNA, 10 nt, Human
acaauaccug

SEQ ID NO: 1276415 - RNA, 17 nt, Human
acaauacagaucaucuu

SEQ ID NO: 1276416 - RNA, 14 nt, Human
acaauacaaaugga

SEQ ID NO: 1276417 - RNA, 15 nt, Human
acaauacaaauggau

SEQ ID NO: 1276418 - RNA, 16 nt, Human
acaauacaaauggauu

SEQ ID NO: 1276419 - RNA, 20 nt, Human
uagcuacagagaaaccagcu

SEQ ID NO: 1276420 - RNA, 21 nt, Human
uagcuacagagaaaccagcuu

SEQ ID NO: 1276421 - RNA, 22 nt, Human
uagcuacagagaaaccagcuuc

SEQ ID NO: 1276422 - RNA, 23 nt, Human
uagcuacagagaaaccagcuucc

SEQ ID NO: 1276423 - RNA, 24 nt, Human
uagcuacagagaaaccagcuuccu

SEQ ID NO: 1276424 - RNA, 22 nt, Human
uagcuaauaaaaagcuuuuguc

SEQ ID NO: 1276425 - RNA, 11 nt, Human
uagcuacagag

SEQ ID NO: 1276426 - RNA, 12 nt, Human
uagcuacagaga

SEQ ID NO: 1276427 - RNA, 13 nt, Human
uagcuacagagaa

SEQ ID NO: 1276428 - RNA, 14 nt, Human
uagcuacagagaaa

SEQ ID NO: 1276429 - RNA, 17 nt, Human
uagcuacagagaaacca

SEQ ID NO: 1276430 - RNA, 13 nt, Human
uagcugugaccug

SEQ ID NO: 1276431 - RNA, 14 nt, Human
uagcugugaccugc

SEQ ID NO: 1276432 - RNA, 15 nt, Human
uagcugugaccugcu

SEQ ID NO: 1276433 - RNA, 17 nt, Human
uagcugugaccugcuga

SEQ ID NO: 1276434 - RNA, 18 nt, Human
uagcugugaccugcugag

SEQ ID NO: 1276435 - RNA, 19 nt, Human
uagcugugaccugcugagc

SEQ ID NO: 1276436 - RNA, 20 nt, Human
uagcugugaccugcugagcu

SEQ ID NO: 1276437 - RNA, 22 nt, Human
uagcugugaccugcugagcucu

SEQ ID NO: 1276438 - RNA, 24 nt, Human
uagcugugaccugcugagcucuga

SEQ ID NO: 1276439 - RNA, 10 nt, Human
uagcuguggg

SEQ ID NO: 1276440 - RNA, 22 nt, Human
uagcuaaguacacaauaagcaa

SEQ ID NO: 1276441 - RNA, 15 nt, Human
uagcuaaguacacaa

SEQ ID NO: 1276442 - RNA, 20 nt, Human
uagcuaauaaaaagcuuuug

SEQ ID NO: 1276443 - RNA, 21 nt, Human
uagcuaauaaaaagcuuuugu

SEQ ID NO: 1276444 - RNA, 19 nt, Human
uagcuaauaacaugugaaa

SEQ ID NO: 1276445 - RNA, 16 nt, Human
acaaugacauuuauau

SEQ ID NO: 1276446 - RNA, 14 nt, Human
acaaucaugugugu

SEQ ID NO: 1276447 - RNA, 21 nt, Human
acaaucauguguguuaaccca

SEQ ID NO: 1276448 - RNA, 15 nt, Human
acaaucauguguguu

SEQ ID NO: 1276449 - RNA, 21 nt, Human
uagagauuaccuccugagaaa

SEQ ID NO: 1276450 - RNA, 11 nt, Human
uagagcacugc

SEQ ID NO: 1276451 - RNA, 17 nt, Human
uagagauuaccuccuga

SEQ ID NO: 1276452 - RNA, 18 nt, Human
uagagauuaccuccugag

SEQ ID NO: 1276453 - RNA, 19 nt, Human
uagagauuaccuccugaga

SEQ ID NO: 1276454 - RNA, 20 nt, Human
uagauaucaugcaaauuuca

SEQ ID NO: 1276455 - RNA, 19 nt, Human
uagauauccacuugagaca

SEQ ID NO: 1276456 - RNA, 23 nt, Human
uagauaucgacuuguuuuugcac

SEQ ID NO: 1276457 - RNA, 15 nt, Human
uagauaugaaagcug

SEQ ID NO: 1276458 - RNA, 16 nt, Human
uagauauuggacaaag

SEQ ID NO: 1276459 - RNA, 12 nt, Human
uagaugauaaag

SEQ ID NO: 1276460 - RNA, 22 nt, Human
uagaggagaaacuggaacucuc

SEQ ID NO: 1276461 - RNA, 22 nt, Human
uagaggauggucuuacagcagg

SEQ ID NO: 1276462 - RNA, 16 nt, Human
aauuguuacaaauugu

SEQ ID NO: 1276463 - RNA, 13 nt, Human
aauuguucucaga

SEQ ID NO: 1276464 - RNA, 21 nt, Human
aauuguguuuauaauuuuaaa

SEQ ID NO: 1276465 - RNA, 23 nt, Human
aauugccuuuuuucuguauaaau

SEQ ID NO: 1276466 - RNA, 20 nt, Human
aauugccuuuuuucuguaua

SEQ ID NO: 1276467 - RNA, 20 nt, Human
aauuguguuuuaauuguaaa

SEQ ID NO: 1276468 - RNA, 18 nt, Human
acaaaaggauaaugaaua

SEQ ID NO: 1276469 - RNA, 13 nt, Human
acaaagcagccac

SEQ ID NO: 1276470 - RNA, 14 nt, Human
acaaagcagccacg

SEQ ID NO: 1276471 - RNA, 21 nt, Human
acaaagcagaauaguauuuuu

SEQ ID NO: 1276472 - RNA, 11 nt, Human
acaaaggcaag

SEQ ID NO: 1276473 - RNA, 18 nt, Human
acaaaggcuuauuaauuu

SEQ ID NO: 1276474 - RNA, 17 nt, Human
aauuguugagauacuuu

SEQ ID NO: 1276475 - RNA, 23 nt, Human
aauuguugcuaaucuucuuaugc

SEQ ID NO: 1276476 - RNA, 19 nt, Human
acaaagaguucaagaaaua

SEQ ID NO: 1276477 - RNA, 22 nt, Human
acaaagaguucaagaaauaagu

SEQ ID NO: 1276478 - RNA, 21 nt, Human
acaaagaguucaagaaauaag

SEQ ID NO: 1276479 - RNA, 19 nt, Human
acaaagauucucuauguau

SEQ ID NO: 1276480 - RNA, 15 nt, Human
acaaagcaauucuuu

SEQ ID NO: 1276481 - RNA, 12 nt, Human
acaaagcagcca

SEQ ID NO: 1276482 - RNA, 14 nt, Human
uagccaagugcagg

SEQ ID NO: 1276483 - RNA, 18 nt, Human
uagccaauauuuuucuua

SEQ ID NO: 1276484 - RNA, 14 nt, Human
uagccacaccagga

SEQ ID NO: 1276485 - RNA, 15 nt, Human
uagccacaccaggau

SEQ ID NO: 1276486 - RNA, 17 nt, Human
uagccacaccaggauag

SEQ ID NO: 1276487 - RNA, 16 nt, Human
uagccacauuuggaau

SEQ ID NO: 1276488 - RNA, 19 nt, Human
acaaauuuacagagacaga

SEQ ID NO: 1276489 - RNA, 18 nt, Human
uagccagcacacagggca

SEQ ID NO: 1276490 - RNA, 19 nt, Human
uagccagcacacagggcag

SEQ ID NO: 1276491 - RNA, 20 nt, Human
uagccagcacacagggcagu

SEQ ID NO: 1276492 - RNA, 18 nt, Human
acaaauuuacagagacag

SEQ ID NO: 1276493 - RNA, 18 nt, Human
acaaauuuuucugcuuua

SEQ ID NO: 1276494 - RNA, 23 nt, Human
acaaauuuuucugcuuuaaaaau

SEQ ID NO: 1276495 - RNA, 14 nt, Human
acaacacuguagua

SEQ ID NO: 1276496 - RNA, 23 nt, Human
acaacacuguaguaaauaaugcu

SEQ ID NO: 1276497 - RNA, 20 nt, Human
acaagacccaaaaggcagaa

SEQ ID NO: 1276498 - RNA, 18 nt, Human
uagcaugucgucaaagcu

SEQ ID NO: 1276499 - RNA, 17 nt, Human
uagcaugucacuaaagc

SEQ ID NO: 1276500 - RNA, 19 nt, Human
uagcauuuucugcaucucc

SEQ ID NO: 1276501 - RNA, 17 nt, Human
uagcauuuucugcaucu

SEQ ID NO: 1276502 - RNA, 16 nt, Human
uagccaaaaauagcua

SEQ ID NO: 1276503 - RNA, 21 nt, Human
uagccaaaaauagcuaaauac

SEQ ID NO: 1276504 - RNA, 16 nt, Human
uagaugcaguucugaa

SEQ ID NO: 1276505 - RNA, 13 nt, Human
uagaugcuggccc

SEQ ID NO: 1276506 - RNA, 14 nt, Human
uagaugcuggccca

SEQ ID NO: 1276507 - RNA, 15 nt, Human
uagaugcuggcccag

SEQ ID NO: 1276508 - RNA, 23 nt, Human
uagaugcugacuguacuccuccc

SEQ ID NO: 1276509 - RNA, 14 nt, Human
uagaugcugacugu

SEQ ID NO: 1276510 - RNA, 15 nt, Human
uagaugcaguucuga

SEQ ID NO: 1276511 - RNA, 19 nt, Human
uagaugauuaaauaagauu

SEQ ID NO: 1276512 - RNA, 20 nt, Human
uagaugauuaaauaagauuc

SEQ ID NO: 1276513 - RNA, 21 nt, Human
uagaugauuaaauaagauucu

SEQ ID NO: 1276514 - RNA, 23 nt, Human
uagaugauuaaauaagauucuaa

SEQ ID NO: 1276515 - RNA, 22 nt, Human
uagaugauuucaguucuaggaa

SEQ ID NO: 1276516 - RNA, 18 nt, Human
uagaugauuucaguucua

SEQ ID NO: 1276517 - RNA, 16 nt, Human
uagaugcuggcccagg

SEQ ID NO: 1276518 - RNA, 18 nt, Human
uagaugcuggcccagggc

SEQ ID NO: 1276519 - RNA, 21 nt, Human
uagaugcuggcccagggccca

SEQ ID NO: 1276520 - RNA, 22 nt, Human
uagaugcuggcccagggcccag

SEQ ID NO: 1276521 - RNA, 17 nt, Human
guguaacaauuguguag

SEQ ID NO: 1276522 - RNA, 19 nt, Human
guguaacaauuguguagcc

SEQ ID NO: 1276523 - RNA, 23 nt, Human
guguaacaauuguguagccuuuu

SEQ ID NO: 1276524 - RNA, 20 nt, Human
guguaacugcccaaagcagc

SEQ ID NO: 1276525 - RNA, 17 nt, Human
gugguuuauauauuuaa

SEQ ID NO: 1276526 - RNA, 18 nt, Human
gugguuuaggcuauuugu

SEQ ID NO: 1276527 - RNA, 19 nt, Human
gugguuuucuuuugccaug

SEQ ID NO: 1276528 - RNA, 17 nt, Human
guguaaaauauuuugaa

SEQ ID NO: 1276529 - RNA, 18 nt, Human
guguaaaauauuuugaau

SEQ ID NO: 1276530 - RNA, 19 nt, Human
guguaaaauauuuugaauc

SEQ ID NO: 1276531 - RNA, 16 nt, Human
gugcucucuuucuguc

SEQ ID NO: 1276532 - RNA, 18 nt, Human
gugcugccgcgcagugug

SEQ ID NO: 1276533 - RNA, 22 nt, Human
gugcucuccauucugcuccuuc

SEQ ID NO: 1276534 - RNA, 13 nt, Human
gugcucucuuucu

SEQ ID NO: 1276535 - RNA, 11 nt, Human
gugcugccucu

SEQ ID NO: 1276536 - RNA, 12 nt, Human
gugcugccucua

SEQ ID NO: 1276537 - RNA, 19 nt, Human
gugcugccucuaccugaca

SEQ ID NO: 1276538 - RNA, 20 nt, Human
gugguucugagauggcuccc

SEQ ID NO: 1276539 - RNA, 18 nt, Human
guguaagaaauacagacu

SEQ ID NO: 1276540 - RNA, 19 nt, Human
guguaacugcccaaagcag

SEQ ID NO: 1276541 - RNA, 15 nt, Human
aagaggcaccugucc

SEQ ID NO: 1276542 - RNA, 18 nt, Human
aagaggcaccugucccag

SEQ ID NO: 1276543 - RNA, 18 nt, Human
aagaggcaccaggaagcc

SEQ ID NO: 1276544 - RNA, 18 nt, Human
aagaggccguggcugcug

SEQ ID NO: 1276545 - RNA, 17 nt, Human
aagaggcugcccuccug

SEQ ID NO: 1276546 - RNA, 16 nt, Human
aagagggacgccuggg

SEQ ID NO: 1276547 - RNA, 17 nt, Human
aagagggacgccugggg

SEQ ID NO: 1276548 - RNA, 13 nt, Human
aagagguguuauu

SEQ ID NO: 1276549 - RNA, 21 nt, Human
aagaggugaccccagggcaca

SEQ ID NO: 1276550 - RNA, 22 nt, Human
aagaggugaccccagggcacag

SEQ ID NO: 1276551 - RNA, 24 nt, Human
aagaggugaccccagggcacagga

SEQ ID NO: 1276552 - RNA, 21 nt, Human
aagagguauuuaucuuuacuu

SEQ ID NO: 1276553 - RNA, 16 nt, Human
aagaggugaccccagg

SEQ ID NO: 1276554 - RNA, 17 nt, Human
aagaggugaccccaggg

SEQ ID NO: 1276555 - RNA, 18 nt, Human
aagaggugaccccagggc

SEQ ID NO: 1276556 - RNA, 19 nt, Human
aagaggugaccccagggca

SEQ ID NO: 1276557 - RNA, 20 nt, Human
aagaggugaccccagggcac

SEQ ID NO: 1276558 - RNA, 15 nt, Human
aagagguguuauuug

SEQ ID NO: 1276559 - RNA, 15 nt, Human
aagauagcugugacu

SEQ ID NO: 1276560 - RNA, 14 nt, Human
aagauagcugugac

SEQ ID NO: 1276561 - RNA, 15 nt, Human
aagcaaccucaguaa

SEQ ID NO: 1276562 - RNA, 16 nt, Human
guguaugugugugugu

SEQ ID NO: 1276563 - RNA, 13 nt, Human
guguauuccaaga

SEQ ID NO: 1276564 - RNA, 20 nt, Human
guguauuccaagacaugucu

SEQ ID NO: 1276565 - RNA, 14 nt, Human
gugucaccugugcu

SEQ ID NO: 1276566 - RNA, 15 nt, Human
gugucacucaaggcg

SEQ ID NO: 1276567 - RNA, 21 nt, Human
gugucacucaaggcggugcuu

SEQ ID NO: 1276568 - RNA, 14 nt, Human
gugucuuaauuauu

SEQ ID NO: 1276569 - RNA, 15 nt, Human
gugucuuaauuauua

SEQ ID NO: 1276570 - RNA, 19 nt, Human
gugucuuaauuauuauuug

SEQ ID NO: 1276571 - RNA, 17 nt, Human
aagauauuuuuaucuuu

SEQ ID NO: 1276572 - RNA, 19 nt, Human
aagauauuuuuaucuuuau

SEQ ID NO: 1276573 - RNA, 15 nt, Human
aagauauuuuucaug

SEQ ID NO: 1276574 - RNA, 17 nt, Human
aagauauuuuucaugau

SEQ ID NO: 1276575 - RNA, 13 nt, Human
aagauauuuuucc

SEQ ID NO: 1276576 - RNA, 16 nt, Human
aagauggaguuucuaa

SEQ ID NO: 1276577 - RNA, 17 nt, Human
aagauggaguuucuaag

SEQ ID NO: 1276578 - RNA, 16 nt, Human
aagauggcugugccuc

SEQ ID NO: 1276579 - RNA, 15 nt, Human
aagauggcccauccu

SEQ ID NO: 1276580 - RNA, 18 nt, Human
aagauggcugugccucug

SEQ ID NO: 1276581 - RNA, 18 nt, Human
aagauuuuuguuuguuua

SEQ ID NO: 1276582 - RNA, 13 nt, Human
aagauuuuuuaau

SEQ ID NO: 1276583 - RNA, 18 nt, Human
aagauggaguuucuaagg

SEQ ID NO: 1276584 - RNA, 20 nt, Human
aagauggaguuucuaagguc

SEQ ID NO: 1276585 - RNA, 19 nt, Human
aagauggcauaaccugucu

SEQ ID NO: 1276586 - RNA, 17 nt, Human
aagcaacccaaauguuc

SEQ ID NO: 1276587 - RNA, 16 nt, Human
aagcaacacuuuuuau

SEQ ID NO: 1276588 - RNA, 13 nt, Human
aagcaacauggcu

SEQ ID NO: 1276589 - RNA, 14 nt, Human
aagcaacauggcuu

SEQ ID NO: 1276590 - RNA, 15 nt, Human
aagcaacauggcuuu

SEQ ID NO: 1276591 - RNA, 20 nt, Human
aagcaacauucauagucuuu

SEQ ID NO: 1276592 - RNA, 13 nt, Human
aagcaaaauguga

SEQ ID NO: 1276593 - RNA, 17 nt, Human
aagauuuuuuaauaauu

SEQ ID NO: 1276594 - RNA, 14 nt, Human
aagauuuuuuaaua

SEQ ID NO: 1276595 - RNA, 16 nt, Human
aagauuuuuuaauaau

SEQ ID NO: 1276596 - RNA, 15 nt, Human
aagcaaaaaagaaaa

SEQ ID NO: 1276597 - RNA, 23 nt, Human
aagauuuuuuuuuuuucucucaa

SEQ ID NO: 1276598 - RNA, 12 nt, Human
guguuugaagca

SEQ ID NO: 1276599 - RNA, 14 nt, Human
guguuucuugccuc

SEQ ID NO: 1276600 - RNA, 15 nt, Human
guguuucuugccuca

SEQ ID NO: 1276601 - RNA, 13 nt, Human
guguuugcuuucu

SEQ ID NO: 1276602 - RNA, 13 nt, Human
gugugaaugaaca

SEQ ID NO: 1276603 - RNA, 13 nt, Human
guguuucugacuc

SEQ ID NO: 1276604 - RNA, 18 nt, Human
guguuucuguaagaaacc

SEQ ID NO: 1276605 - RNA, 16 nt, Human
guguuucuugccucau

SEQ ID NO: 1276606 - RNA, 11 nt, Human
aagcacagcag

SEQ ID NO: 1276607 - RNA, 16 nt, Human
aagcacagcagccugg

SEQ ID NO: 1276608 - RNA, 13 nt, Human
aagcacagcccuu

SEQ ID NO: 1276609 - RNA, 16 nt, Human
aagcacuaaacaaaga

SEQ ID NO: 1276610 - RNA, 13 nt, Human
aagcaccuguaau

SEQ ID NO: 1276611 - RNA, 16 nt, Human
aagcaccuuagcuggc

SEQ ID NO: 1276612 - RNA, 19 nt, Human
aagcaccuuagcuggcauu

SEQ ID NO: 1276613 - RNA, 15 nt, Human
aagcacgaaauguua

SEQ ID NO: 1276614 - RNA, 21 nt, Human
aagcacgugguaaaacacuug

SEQ ID NO: 1276615 - RNA, 22 nt, Human
aagcacugacugggaccaggca

SEQ ID NO: 1276616 - RNA, 18 nt, Human
aagcacauuuuaaaagug

SEQ ID NO: 1276617 - RNA, 18 nt, Human
aagccaagggaaccugug

SEQ ID NO: 1276618 - RNA, 19 nt, Human
aagccaagggaaccugugu

SEQ ID NO: 1276619 - RNA, 20 nt, Human
aagccaagggaaccuguguc

SEQ ID NO: 1276620 - RNA, 23 nt, Human
aagcauuuaaccccccuguacac

SEQ ID NO: 1276621 - RNA, 22 nt, Human
aagcauuuaaccccccuguaca

SEQ ID NO: 1276622 - RNA, 21 nt, Human
aagcauuuaaccccccuguac

SEQ ID NO: 1276623 - RNA, 19 nt, Human
aagcauuuguuucuacuuu

SEQ ID NO: 1276624 - RNA, 23 nt, Human
aagcauuuguuucuacuuugaua

SEQ ID NO: 1276625 - RNA, 12 nt, Human
aagcauuuugua

SEQ ID NO: 1276626 - RNA, 13 nt, Human
aagcauuuuguaa

SEQ ID NO: 1276627 - RNA, 23 nt, Human
aagcauuuuguaaguugaagcaa

SEQ ID NO: 1276628 - RNA, 19 nt, Human
aagcauuuuguaaguugaa

SEQ ID NO: 1276629 - RNA, 12 nt, Human
aagccaaagagu

SEQ ID NO: 1276630 - RNA, 13 nt, Human
aagcaucagaaag

SEQ ID NO: 1276631 - RNA, 14 nt, Human
aagcaucauuauuu

SEQ ID NO: 1276632 - RNA, 15 nt, Human
aagcaucauuauuua

SEQ ID NO: 1276633 - RNA, 17 nt, Human
aagcaucauuauuuaug

SEQ ID NO: 1276634 - RNA, 19 nt, Human
aagcaucauuauuuaugua

SEQ ID NO: 1276635 - RNA, 18 nt, Human
aagcaucauuauuuaugu

SEQ ID NO: 1276636 - RNA, 14 nt, Human
aagcaucuugcauu

SEQ ID NO: 1276637 - RNA, 12 nt, Human
aagcaugaaaug

SEQ ID NO: 1276638 - RNA, 23 nt, Human
aagcaugcacaaauucugucucu

SEQ ID NO: 1276639 - RNA, 20 nt, Human
aagcaucuuggggggguggc

SEQ ID NO: 1276640 - RNA, 15 nt, Human
aagcauggcuauuuu

SEQ ID NO: 1276641 - RNA, 23 nt, Human
aagcauggcuugaauaaggaaau

SEQ ID NO: 1276642 - RNA, 17 nt, Human
aagcaugggauuauuag

SEQ ID NO: 1276643 - RNA, 17 nt, Human
aagcauggucccacauc

SEQ ID NO: 1276644 - RNA, 22 nt, Human
aagcauggucccacaucccugg

SEQ ID NO: 1276645 - RNA, 23 nt, Human
aagcauggucccacaucccuggg

SEQ ID NO: 1276646 - RNA, 18 nt, Human
aagcauguauucagcuuu

SEQ ID NO: 1276647 - RNA, 21 nt, Human
aagccuuggggcugaugcagu

SEQ ID NO: 1276648 - RNA, 12 nt, Human
aagccuuccccu

SEQ ID NO: 1276649 - RNA, 20 nt, Human
aagccuuccccuuauccucc

SEQ ID NO: 1276650 - RNA, 21 nt, Human
aagccuuccccuuauccuccc

SEQ ID NO: 1276651 - RNA, 22 nt, Human
aagccuuccccuuauccucccu

SEQ ID NO: 1276652 - RNA, 13 nt, Human
aagccuucaagcu

SEQ ID NO: 1276653 - RNA, 14 nt, Human
aagccuucaagcuc

SEQ ID NO: 1276654 - RNA, 16 nt, Human
aagccuucaagcucug

SEQ ID NO: 1276655 - RNA, 18 nt, Human
aagccuucaagcucugag

SEQ ID NO: 1276656 - RNA, 21 nt, Human
aagccuucaagcucugaggga

SEQ ID NO: 1276657 - RNA, 20 nt, Human
aagccuugauugguguugcc

SEQ ID NO: 1276658 - RNA, 23 nt, Human
aagccuugauugguguugccagu

SEQ ID NO: 1276659 - RNA, 21 nt, Human
aagcuaggugcuauuugucau

SEQ ID NO: 1276660 - RNA, 23 nt, Human
aagcuaggugcuauuugucaucu

SEQ ID NO: 1276661 - RNA, 12 nt, Human
aagcuagucuuu

SEQ ID NO: 1276662 - RNA, 14 nt, Human
aagcuagucuuuug

SEQ ID NO: 1276663 - RNA, 15 nt, Human
aagcuagucuuuugc

SEQ ID NO: 1276664 - RNA, 16 nt, Human
aagcuagucuuuugcu

SEQ ID NO: 1276665 - RNA, 17 nt, Human
aagcuagucuuuugcuu

SEQ ID NO: 1276666 - RNA, 19 nt, Human
aagcuagucuuuugcuuuu

SEQ ID NO: 1276667 - RNA, 20 nt, Human
aagcuagucuuuugcuuuug

SEQ ID NO: 1276668 - RNA, 21 nt, Human
aagcuagucuuuugcuuuugc

SEQ ID NO: 1276669 - RNA, 18 nt, Human
aagccuguuuaagagaca

SEQ ID NO: 1276670 - RNA, 17 nt, Human
aagccuguucauggcag

SEQ ID NO: 1276671 - RNA, 18 nt, Human
aagccuguucauggcaga

SEQ ID NO: 1276672 - RNA, 15 nt, Human
aagccuguuuaagag

SEQ ID NO: 1276673 - RNA, 21 nt, Human
aagccucagauuccuucccau

SEQ ID NO: 1276674 - RNA, 22 nt, Human
aagccgugcucgccccagcagg

SEQ ID NO: 1276675 - RNA, 13 nt, Human
aagccguggcuuc

SEQ ID NO: 1276676 - RNA, 14 nt, Human
aagccguggcuucc

SEQ ID NO: 1276677 - RNA, 15 nt, Human
aagccguggcuuccc

SEQ ID NO: 1276678 - RNA, 23 nt, Human
aagccuaaaagugggcuugauuc

SEQ ID NO: 1276679 - RNA, 14 nt, Human
guucaguaccacau

SEQ ID NO: 1276680 - RNA, 19 nt, Human
guucaggcccggcagggcg

SEQ ID NO: 1276681 - RNA, 18 nt, Human
guuauuuugauguaaaga

SEQ ID NO: 1276682 - RNA, 20 nt, Human
guuauuuugauguaaagaug

SEQ ID NO: 1276683 - RNA, 20 nt, Human
guuauuauauuuacaaaugg

SEQ ID NO: 1276684 - RNA, 18 nt, Human
guuagagcaggacugaug

SEQ ID NO: 1276685 - RNA, 13 nt, Human
guuauugcaguuu

SEQ ID NO: 1276686 - RNA, 14 nt, Human
guuauugcaguuua

SEQ ID NO: 1276687 - RNA, 16 nt, Human
guuauugcaguuuauc

SEQ ID NO: 1276688 - RNA, 23 nt, Human
guuauugcaguuuaucauucaag

SEQ ID NO: 1276689 - RNA, 22 nt, Human
guuauugguguaagguacuuuc

SEQ ID NO: 1276690 - RNA, 13 nt, Human
guuauuuaaagaa

SEQ ID NO: 1276691 - RNA, 19 nt, Human
guuauuauauuuacaaaug

SEQ ID NO: 1276692 - RNA, 15 nt, Human
guuagagaauaaauu

SEQ ID NO: 1276693 - RNA, 13 nt, Human
guuacuguaauuc

SEQ ID NO: 1276694 - RNA, 19 nt, Human
guuacugugccauguguuu

SEQ ID NO: 1276695 - RNA, 13 nt, Human
guuacuguguaau

SEQ ID NO: 1276696 - RNA, 14 nt, Human
guuagaccuacagg

SEQ ID NO: 1276697 - RNA, 22 nt, Human
aagccauucuccugccucagcc

SEQ ID NO: 1276698 - RNA, 17 nt, Human
aagccauuuuuacaucu

SEQ ID NO: 1276699 - RNA, 18 nt, Human
aagcccagagggucuggg

SEQ ID NO: 1276700 - RNA, 14 nt, Human
guuaauaguuccug

SEQ ID NO: 1276701 - RNA, 18 nt, Human
guuaauauugauuuauua

SEQ ID NO: 1276702 - RNA, 15 nt, Human
guuaauauuuaagac

SEQ ID NO: 1276703 - RNA, 13 nt, Human
aagcccagcuuga

SEQ ID NO: 1276704 - RNA, 18 nt, Human
aagcccagcccauggaga

SEQ ID NO: 1276705 - RNA, 16 nt, Human
aagcccaccauuuggc

SEQ ID NO: 1276706 - RNA, 16 nt, Human
aagcccagagggucug

SEQ ID NO: 1276707 - RNA, 17 nt, Human
aagcccagagggucugg

SEQ ID NO: 1276708 - RNA, 20 nt, Human
aagcccagcacugcuugagg

SEQ ID NO: 1276709 - RNA, 23 nt, Human
aagcccagcacugcuugaggaaa

SEQ ID NO: 1276710 - RNA, 19 nt, Human
guuaauauuuauaggucac

SEQ ID NO: 1276711 - RNA, 21 nt, Human
guuaauauugauuuauuaaua

SEQ ID NO: 1276712 - RNA, 12 nt, Human
guuaauuuaaag

SEQ ID NO: 1276713 - RNA, 23 nt, Human
guuaauuuaaaguuguuugugcc

SEQ ID NO: 1276714 - RNA, 19 nt, Human
guuaauuuagaaaacuuua

SEQ ID NO: 1276715 - RNA, 23 nt, Human
guuacucuucaguuaagccuuug

SEQ ID NO: 1276716 - RNA, 12 nt, Human
guuaauuuuuga

SEQ ID NO: 1276717 - RNA, 14 nt, Human
guuaauuuuugaua

SEQ ID NO: 1276718 - RNA, 22 nt, Human
guuaauuuaguggaaaaggcac

SEQ ID NO: 1276719 - RNA, 17 nt, Human
guuaauuuugaagugcu

SEQ ID NO: 1276720 - RNA, 22 nt, Human
guuaauuuugaagugcuguuua

SEQ ID NO: 1276721 - RNA, 14 nt, Human
guuaauuuuuccaa

SEQ ID NO: 1276722 - RNA, 20 nt, Human
guuaauuuuuccaacuacua

SEQ ID NO: 1276723 - RNA, 14 nt, Human
guuaauuuuuccua

SEQ ID NO: 1276724 - RNA, 18 nt, Human
aagcuuaugcuuaaauuc

SEQ ID NO: 1276725 - RNA, 14 nt, Human
aagcuuaguauaaa

SEQ ID NO: 1276726 - RNA, 21 nt, Human
aagcuuccaugauucuauuua

SEQ ID NO: 1276727 - RNA, 23 nt, Human
aagcuucccacggccuuucuagc

SEQ ID NO: 1276728 - RNA, 23 nt, Human
aagcuuguauuccuuuuucucuc

SEQ ID NO: 1276729 - RNA, 19 nt, Human
aagcucuuggagcugugag

SEQ ID NO: 1276730 - RNA, 13 nt, Human
aagcuuaaaacuu

SEQ ID NO: 1276731 - RNA, 14 nt, Human
aagcuuaaaacuuu

SEQ ID NO: 1276732 - RNA, 15 nt, Human
aagcuuaaaacuuug

SEQ ID NO: 1276733 - RNA, 17 nt, Human
aagcuuaaaacuuugaa

SEQ ID NO: 1276734 - RNA, 19 nt, Human
aagcuuaauggcugauaau

SEQ ID NO: 1276735 - RNA, 21 nt, Human
aagcuuaauggcugauaauuu

SEQ ID NO: 1276736 - RNA, 13 nt, Human
aagcuauaaagca

SEQ ID NO: 1276737 - RNA, 15 nt, Human
aagcuauaaagcagu

SEQ ID NO: 1276738 - RNA, 20 nt, Human
aagcuauaaagcaguauuuu

SEQ ID NO: 1276739 - RNA, 15 nt, Human
aagcucacguccuga

SEQ ID NO: 1276740 - RNA, 17 nt, Human
aagcucacguccugaga

SEQ ID NO: 1276741 - RNA, 18 nt, Human
aagcucacguccugagaa

SEQ ID NO: 1276742 - RNA, 14 nt, Human
aagcucacuucugg

SEQ ID NO: 1276743 - RNA, 23 nt, Human
aagcucacuucugggcuucaucu

SEQ ID NO: 1276744 - RNA, 19 nt, Human
aagcucacguccugagaaa

SEQ ID NO: 1276745 - RNA, 22 nt, Human
aagcucagaggcgcacugugac

SEQ ID NO: 1276746 - RNA, 23 nt, Human
aagcucagaggcgcacugugacc

SEQ ID NO: 1276747 - RNA, 12 nt, Human
aagcucuuccuu

SEQ ID NO: 1276748 - RNA, 12 nt, Human
aagcugaaaaua

SEQ ID NO: 1276749 - RNA, 21 nt, Human
aagcuuuuaugugaaacaugu

SEQ ID NO: 1276750 - RNA, 19 nt, Human
aagcuuuuaugugaaacau

SEQ ID NO: 1276751 - RNA, 12 nt, Human
aagcuuggggaa

SEQ ID NO: 1276752 - RNA, 13 nt, Human
aagcuuuucuauu

SEQ ID NO: 1276753 - RNA, 17 nt, Human
aagcuuuucuauuuuaa

SEQ ID NO: 1276754 - RNA, 19 nt, Human
aagcuuuugucuacacacc

SEQ ID NO: 1276755 - RNA, 22 nt, Human
aagcuuuugucuacacacccug

SEQ ID NO: 1276756 - RNA, 23 nt, Human
aagcuuuuuauuccuccugcuca

SEQ ID NO: 1276757 - RNA, 13 nt, Human
guuccccacugga

SEQ ID NO: 1276758 - RNA, 14 nt, Human
guuccccacuggag

SEQ ID NO: 1276759 - RNA, 17 nt, Human
guuccccacuggagcag

SEQ ID NO: 1276760 - RNA, 20 nt, Human
guuccccacuguaucuaggc

SEQ ID NO: 1276761 - RNA, 12 nt, Human
guuccccagaga

SEQ ID NO: 1276762 - RNA, 13 nt, Human
guuccccagagaa

SEQ ID NO: 1276763 - RNA, 14 nt, Human
guuccccagagaaa

SEQ ID NO: 1276764 - RNA, 18 nt, Human
guucccccuguuucagag

SEQ ID NO: 1276765 - RNA, 18 nt, Human
guucccuugaugaagaag

SEQ ID NO: 1276766 - RNA, 14 nt, Human
guuccggcauggac

SEQ ID NO: 1276767 - RNA, 24 nt, Human
guugacuuauaguacaugauaaau

SEQ ID NO: 1276768 - RNA, 16 nt, Human
guugagaaucccaaau

SEQ ID NO: 1276769 - RNA, 19 nt, Human
guugagaaucccaaauuug

SEQ ID NO: 1276770 - RNA, 15 nt, Human
guugagacaagaaaa

SEQ ID NO: 1276771 - RNA, 12 nt, Human
guugauacuguu

SEQ ID NO: 1276772 - RNA, 13 nt, Human
guugauacuguug

SEQ ID NO: 1276773 - RNA, 14 nt, Human
guugauacuguugc

SEQ ID NO: 1276774 - RNA, 15 nt, Human
guugauacuguugca

SEQ ID NO: 1276775 - RNA, 16 nt, Human
guugauacuguugcac

SEQ ID NO: 1276776 - RNA, 17 nt, Human
guugauacuguugcacg

SEQ ID NO: 1276777 - RNA, 18 nt, Human
guugauacuguugcacgu

SEQ ID NO: 1276778 - RNA, 21 nt, Human
guugauacuguugcacgugug

SEQ ID NO: 1276779 - RNA, 19 nt, Human
guugauacuguugcacgug

SEQ ID NO: 1276780 - RNA, 15 nt, Human
aaggaaaaacaaacu

SEQ ID NO: 1276781 - RNA, 19 nt, Human
guugacuuauaguacauga

SEQ ID NO: 1276782 - RNA, 15 nt, Human
guugaccccagagga

SEQ ID NO: 1276783 - RNA, 14 nt, Human
guugaccccagagg

SEQ ID NO: 1276784 - RNA, 23 nt, Human
guucuugaggggaccaggagugg

SEQ ID NO: 1276785 - RNA, 22 nt, Human
guucuugaggggaccaggagug

SEQ ID NO: 1276786 - RNA, 19 nt, Human
guucuucgacuguuguuau

SEQ ID NO: 1276787 - RNA, 20 nt, Human
guucuuccucagccagccuc

SEQ ID NO: 1276788 - RNA, 19 nt, Human
guucuucuaccacccacca

SEQ ID NO: 1276789 - RNA, 16 nt, Human
guucuugaggggacca

SEQ ID NO: 1276790 - RNA, 20 nt, Human
guucuugaggggaccaggag

SEQ ID NO: 1276791 - RNA, 21 nt, Human
guucuugaggggaccaggagu

SEQ ID NO: 1276792 - RNA, 17 nt, Human
guucuagcgcaguuuuu

SEQ ID NO: 1276793 - RNA, 12 nt, Human
guucuaggaaaa

SEQ ID NO: 1276794 - RNA, 13 nt, Human
guucuaggaaaau

SEQ ID NO: 1276795 - RNA, 17 nt, Human
guucuaggaaaauaaaa

SEQ ID NO: 1276796 - RNA, 22 nt, Human
guucuaggcacuguaguucuaa

SEQ ID NO: 1276797 - RNA, 23 nt, Human
guucuaggcacuguaguucuaag

SEQ ID NO: 1276798 - RNA, 14 nt, Human
guucuagguuucaa

SEQ ID NO: 1276799 - RNA, 16 nt, Human
guucuagguuucaaag

SEQ ID NO: 1276800 - RNA, 19 nt, Human
guucuagguuucaaagaug

SEQ ID NO: 1276801 - RNA, 22 nt, Human
guucuagguuucaaagaugcug

SEQ ID NO: 1276802 - RNA, 15 nt, Human
guucucucuuugcau

SEQ ID NO: 1276803 - RNA, 13 nt, Human
guucuuccucagc

SEQ ID NO: 1276804 - RNA, 14 nt, Human
guucuuccucagcc

SEQ ID NO: 1276805 - RNA, 15 nt, Human
guucuuccucagcca

SEQ ID NO: 1276806 - RNA, 16 nt, Human
guucuuccucagccag

SEQ ID NO: 1276807 - RNA, 17 nt, Human
guucuuccucagccagc

SEQ ID NO: 1276808 - RNA, 18 nt, Human
guucuuccucagccagcc

SEQ ID NO: 1276809 - RNA, 19 nt, Human
guucuuccucagccagccu

SEQ ID NO: 1276810 - RNA, 13 nt, Human
aagucaacaguaa

SEQ ID NO: 1276811 - RNA, 18 nt, Human
aagucagaacagcagacu

SEQ ID NO: 1276812 - RNA, 22 nt, Human
aagucacugcacagugcaucuc

SEQ ID NO: 1276813 - RNA, 20 nt, Human
aagucaaagcaaggaaacua

SEQ ID NO: 1276814 - RNA, 15 nt, Human
aaguauuuuuaauua

SEQ ID NO: 1276815 - RNA, 18 nt, Human
aaguauuuuuaauuaauu

SEQ ID NO: 1276816 - RNA, 15 nt, Human
aaguauuuuuucagu

SEQ ID NO: 1276817 - RNA, 16 nt, Human
aaguauuuuuucagua

SEQ ID NO: 1276818 - RNA, 19 nt, Human
aaguauuuuuucaguauua

SEQ ID NO: 1276819 - RNA, 15 nt, Human
aagucaaacuuggau

SEQ ID NO: 1276820 - RNA, 13 nt, Human
aaguauuaucaga

SEQ ID NO: 1276821 - RNA, 12 nt, Human
aaguauuauuag

SEQ ID NO: 1276822 - RNA, 15 nt, Human
aaguauuaugucucu

SEQ ID NO: 1276823 - RNA, 15 nt, Human
aaguauuuugcugga

SEQ ID NO: 1276824 - RNA, 18 nt, Human
aaguauguuagugcaaau

SEQ ID NO: 1276825 - RNA, 19 nt, Human
aaguauguuagugcaaauu

SEQ ID NO: 1276826 - RNA, 21 nt, Human
aaguauguuagugcaaauugu

SEQ ID NO: 1276827 - RNA, 19 nt, Human
aaguacuaagcgcuagagg

SEQ ID NO: 1276828 - RNA, 18 nt, Human
aaguacacaauaagcaaa

SEQ ID NO: 1276829 - RNA, 17 nt, Human
aaguacacaauaagcaa

SEQ ID NO: 1276830 - RNA, 16 nt, Human
aaguacacaauaagca

SEQ ID NO: 1276831 - RNA, 19 nt, Human
guuuugauuuguacugaaa

SEQ ID NO: 1276832 - RNA, 15 nt, Human
guuuugcacagccaa

SEQ ID NO: 1276833 - RNA, 22 nt, Human
guuuugcacagccaaauuuaaa

SEQ ID NO: 1276834 - RNA, 19 nt, Human
aaguacacaauaagcaaaa

SEQ ID NO: 1276835 - RNA, 15 nt, Human
aaguacacucugcug

SEQ ID NO: 1276836 - RNA, 16 nt, Human
aaguacacucugcugu

SEQ ID NO: 1276837 - RNA, 19 nt, Human
aaguacacucugcuguuug

SEQ ID NO: 1276838 - RNA, 23 nt, Human
aaguacggcuggcuacaacugcu

SEQ ID NO: 1276839 - RNA, 13 nt, Human
guuuggagacaga

SEQ ID NO: 1276840 - RNA, 19 nt, Human
guuuggacaaaauggaaua

SEQ ID NO: 1276841 - RNA, 20 nt, Human
guuugcuuugcccuucuuuc

SEQ ID NO: 1276842 - RNA, 13 nt, Human
guuuggaaggagc

SEQ ID NO: 1276843 - RNA, 16 nt, Human
guuuggaaggagcaga

SEQ ID NO: 1276844 - RNA, 20 nt, Human
guuugcuuuguaugcacuuu

SEQ ID NO: 1276845 - RNA, 11 nt, Human
guuugcuuucu

SEQ ID NO: 1276846 - RNA, 21 nt, Human
guuugcuuucugaucaaggcc

SEQ ID NO: 1276847 - RNA, 21 nt, Human
guuuggaaauugauuuugaac

SEQ ID NO: 1276848 - RNA, 15 nt, Human
guuuuaaagcuucca

SEQ ID NO: 1276849 - RNA, 23 nt, Human
guuuuaaacauuaauagcagccu

SEQ ID NO: 1276850 - RNA, 21 nt, Human
guuuggagagagcagacuggc

SEQ ID NO: 1276851 - RNA, 17 nt, Human
guuuggagagagcagac

SEQ ID NO: 1276852 - RNA, 20 nt, Human
guuuggauauguaaaacauu

SEQ ID NO: 1276853 - RNA, 21 nt, Human
guuuggauauguaaaacauuu

SEQ ID NO: 1276854 - RNA, 21 nt, Human
guuugcugucaagccauuuuu

SEQ ID NO: 1276855 - RNA, 19 nt, Human
guuugcuucaacugucucc

SEQ ID NO: 1276856 - RNA, 15 nt, Human
guuugcuucaugugu

SEQ ID NO: 1276857 - RNA, 20 nt, Human
guuugcuucaugugucccag

SEQ ID NO: 1276858 - RNA, 21 nt, Human
guuugcuucaugugucccaga

SEQ ID NO: 1276859 - RNA, 15 nt, Human
guuuuaacuguggau

SEQ ID NO: 1276860 - RNA, 16 nt, Human
guuuuaacuguggaua

SEQ ID NO: 1276861 - RNA, 14 nt, Human
guuuuaauuuaaac

SEQ ID NO: 1276862 - RNA, 21 nt, Human
guuuuaauuuaaacaccuccu

SEQ ID NO: 1276863 - RNA, 20 nt, Human
guuuuaauuuaguaaaccaa

SEQ ID NO: 1276864 - RNA, 21 nt, Human
guuuuaugagaaagccuucuu

SEQ ID NO: 1276865 - RNA, 17 nt, Human
guuuuauucuugguuuu

SEQ ID NO: 1276866 - RNA, 12 nt, Human
guuuuauuucau

SEQ ID NO: 1276867 - RNA, 21 nt, Human
guuuugaaggcaaaauugcaa

SEQ ID NO: 1276868 - RNA, 14 nt, Human
guuuugacauuuuu

SEQ ID NO: 1276869 - RNA, 17 nt, Human
guuuugacauuuuuagu

SEQ ID NO: 1276870 - RNA, 20 nt, Human
guuuugauuuaauguuuuca

SEQ ID NO: 1276871 - RNA, 23 nt, Human
aaguaacugggauuacaggcaug

SEQ ID NO: 1276872 - RNA, 12 nt, Human
aaguaacaaaaa

SEQ ID NO: 1276873 - RNA, 13 nt, Human
aaguaacaaaaau

SEQ ID NO: 1276874 - RNA, 16 nt, Human
aaguaacaaaaauaaa

SEQ ID NO: 1276875 - RNA, 15 nt, Human
aaguaacucauugcu

SEQ ID NO: 1276876 - RNA, 18 nt, Human
aagguuuggaaggagcag

SEQ ID NO: 1276877 - RNA, 20 nt, Human
aagguuuuaauuuaguaaac

SEQ ID NO: 1276878 - RNA, 23 nt, Human
aagguuuuaauuuaguaaaccaa

SEQ ID NO: 1276879 - RNA, 15 nt, Human
aagguuuuagguucu

SEQ ID NO: 1276880 - RNA, 16 nt, Human
aagguuuuagguucua

SEQ ID NO: 1276881 - RNA, 17 nt, Human
aagguuuuagguucuaa

SEQ ID NO: 1276882 - RNA, 19 nt, Human
aagguuuuagguucuaaag

SEQ ID NO: 1276883 - RNA, 20 nt, Human
aagguuuuagguucuaaagu

SEQ ID NO: 1276884 - RNA, 20 nt, Human
aagguuuuauaaggcugaug

SEQ ID NO: 1276885 - RNA, 23 nt, Human
aagguuuuagguucuaaaguucu

SEQ ID NO: 1276886 - RNA, 23 nt, Human
aagguuucagaaagaagugggga

SEQ ID NO: 1276887 - RNA, 19 nt, Human
aagguuuggaaggagcaga

SEQ ID NO: 1276888 - RNA, 22 nt, Human
aagguauaucuagguuuaugac

SEQ ID NO: 1276889 - RNA, 23 nt, Human
aagguauaucuagguuuaugaca

SEQ ID NO: 1276890 - RNA, 18 nt, Human
aagguauuaaauugaugu

SEQ ID NO: 1276891 - RNA, 22 nt, Human
aagguauuaaauugauguugcu

SEQ ID NO: 1276892 - RNA, 17 nt, Human
aagguuuaugaaaaaga

SEQ ID NO: 1276893 - RNA, 13 nt, Human
aaggggagcccac

SEQ ID NO: 1276894 - RNA, 22 nt, Human
aaggggcuucagguccaggcug

SEQ ID NO: 1276895 - RNA, 22 nt, Human
aagggggcggccuaugacuugg

SEQ ID NO: 1276896 - RNA, 15 nt, Human
aagggcuguuauaau

SEQ ID NO: 1276897 - RNA, 19 nt, Human
aagggcugccggggcagcc

SEQ ID NO: 1276898 - RNA, 21 nt, Human
aagggcugccggggcagcccc

SEQ ID NO: 1276899 - RNA, 13 nt, Human
aaggcuguguaag

SEQ ID NO: 1276900 - RNA, 14 nt, Human
aaggcuguguaaga

SEQ ID NO: 1276901 - RNA, 16 nt, Human
aaggcuguguaagauu

SEQ ID NO: 1276902 - RNA, 21 nt, Human
aaggcuguguaagauuuguuu

SEQ ID NO: 1276903 - RNA, 20 nt, Human
aaggcuguuaaauacaggaa

SEQ ID NO: 1276904 - RNA, 21 nt, Human
aaggcuguuaaauacaggaaa

SEQ ID NO: 1276905 - RNA, 22 nt, Human
aaggcuguuaaauacaggaaac

SEQ ID NO: 1276906 - RNA, 15 nt, Human
aaggcuuaaacccau

SEQ ID NO: 1276907 - RNA, 17 nt, Human
aagggcuguuauaaucu

SEQ ID NO: 1276908 - RNA, 16 nt, Human
aagggcugcuucccug

SEQ ID NO: 1276909 - RNA, 19 nt, Human
aaggggacccuccgcucug

SEQ ID NO: 1276910 - RNA, 23 nt, Human
guuuauuacguaugucugguucu

SEQ ID NO: 1276911 - RNA, 23 nt, Human
guuuauuaaucuuaguguaugau

SEQ ID NO: 1276912 - RNA, 15 nt, Human
guuuaugacaguaau

SEQ ID NO: 1276913 - RNA, 17 nt, Human
guuuaugacaguaauug

SEQ ID NO: 1276914 - RNA, 14 nt, Human
guuuaugauuccac

SEQ ID NO: 1276915 - RNA, 18 nt, Human
guuuauucauaugcauau

SEQ ID NO: 1276916 - RNA, 19 nt, Human
guuuauucauaugcauauu

SEQ ID NO: 1276917 - RNA, 15 nt, Human
guuuauucuucuaga

SEQ ID NO: 1276918 - RNA, 16 nt, Human
guuuauucuucuagag

SEQ ID NO: 1276919 - RNA, 19 nt, Human
guuuauucuucuagaguuc

SEQ ID NO: 1276920 - RNA, 20 nt, Human
guuuauucuucuagaguuca

SEQ ID NO: 1276921 - RNA, 17 nt, Human
guuuauucauaugcaua

SEQ ID NO: 1276922 - RNA, 16 nt, Human
guuuauucauaugcau

SEQ ID NO: 1276923 - RNA, 14 nt, Human
guuuauucauaugc

SEQ ID NO: 1276924 - RNA, 13 nt, Human
guuuauucauaug

SEQ ID NO: 1276925 - RNA, 13 nt, Human
guuuauuacguau

SEQ ID NO: 1276926 - RNA, 22 nt, Human
guuuauugaauucauuucacug

SEQ ID NO: 1276927 - RNA, 19 nt, Human
guuucaaagaugcugugag

SEQ ID NO: 1276928 - RNA, 20 nt, Human
guuucaaagaugcugugagu

SEQ ID NO: 1276929 - RNA, 18 nt, Human
guuucaacggaaagugcu

SEQ ID NO: 1276930 - RNA, 13 nt, Human
guuucaagaggag

SEQ ID NO: 1276931 - RNA, 20 nt, Human
guuucaagaggagcccccac

SEQ ID NO: 1276932 - RNA, 18 nt, Human
guuucaaggcacucuaga

SEQ ID NO: 1276933 - RNA, 23 nt, Human
guuucaaggcacucuagauucca

SEQ ID NO: 1276934 - RNA, 19 nt, Human
guuucaaggcacucuagau

SEQ ID NO: 1276935 - RNA, 22 nt, Human
guuucaauuccaccugcaauca

SEQ ID NO: 1276936 - RNA, 16 nt, Human
guuucaauugcaucuc

SEQ ID NO: 1276937 - RNA, 17 nt, Human
guuucaauugcaucucc

SEQ ID NO: 1276938 - RNA, 22 nt, Human
guuucaauugcaucucccagau

SEQ ID NO: 1276939 - RNA, 19 nt, Human
guuucacaaggucuuuaaa

SEQ ID NO: 1276940 - RNA, 14 nt, Human
guuucacagaaaau

SEQ ID NO: 1276941 - RNA, 23 nt, Human
guuucacagccuauaaccagaca

SEQ ID NO: 1276942 - RNA, 16 nt, Human
guuucacaguuugaaa

SEQ ID NO: 1276943 - RNA, 18 nt, Human
guuucacaguuugaaaua

SEQ ID NO: 1276944 - RNA, 19 nt, Human
guuucacaguuugaaauaa

SEQ ID NO: 1276945 - RNA, 13 nt, Human
guuguuugugccu

SEQ ID NO: 1276946 - RNA, 14 nt, Human
guuuaaagaaagug

SEQ ID NO: 1276947 - RNA, 15 nt, Human
guuuaaagaaagugu

SEQ ID NO: 1276948 - RNA, 16 nt, Human
guuuaaagaaagugua

SEQ ID NO: 1276949 - RNA, 17 nt, Human
guuuaaagaaaguguau

SEQ ID NO: 1276950 - RNA, 18 nt, Human
guuuaaagaaaguguauu

SEQ ID NO: 1276951 - RNA, 21 nt, Human
guuuaaagaaaguguauuugg

SEQ ID NO: 1276952 - RNA, 14 nt, Human
guuuaaagagucua

SEQ ID NO: 1276953 - RNA, 17 nt, Human
guuuaaagagucuagau

SEQ ID NO: 1276954 - RNA, 11 nt, Human
guuuaaaugaa

SEQ ID NO: 1276955 - RNA, 14 nt, Human
guuuaaaugaacaa

SEQ ID NO: 1276956 - RNA, 19 nt, Human
guuuaaaugaacaagagaa

SEQ ID NO: 1276957 - RNA, 23 nt, Human
guuuaaaugaacaagagaagcau

SEQ ID NO: 1276958 - RNA, 18 nt, Human
guuuaaagagucuagauu

SEQ ID NO: 1276959 - RNA, 19 nt, Human
guuuaaagagucuagauuc

SEQ ID NO: 1276960 - RNA, 12 nt, Human
aaggaaagaaaa

SEQ ID NO: 1276961 - RNA, 21 nt, Human
aaguguguguuuuucauaaag

SEQ ID NO: 1276962 - RNA, 16 nt, Human
aaguguguguuuuuca

SEQ ID NO: 1276963 - RNA, 11 nt, Human
aaguuaagaau

SEQ ID NO: 1276964 - RNA, 23 nt, Human
aaguuaagaauguucuuauguug

SEQ ID NO: 1276965 - RNA, 19 nt, Human
aaguuaauccacugugacu

SEQ ID NO: 1276966 - RNA, 12 nt, Human
aaguuaauuuaa

SEQ ID NO: 1276967 - RNA, 15 nt, Human
aaguuaauuuaaagu

SEQ ID NO: 1276968 - RNA, 16 nt, Human
aaguuaauuuaaaguu

SEQ ID NO: 1276969 - RNA, 17 nt, Human
aaguuaauuuaaaguug

SEQ ID NO: 1276970 - RNA, 16 nt, Human
aaguuagcuuuaacuu

SEQ ID NO: 1276971 - RNA, 16 nt, Human
aaguuaguaucuuuug

SEQ ID NO: 1276972 - RNA, 20 nt, Human
aaguuaguaucuuuugauau

SEQ ID NO: 1276973 - RNA, 19 nt, Human
aaguuaguaucuuuugaua

SEQ ID NO: 1276974 - RNA, 18 nt, Human
aaguuaguuccacugaga

SEQ ID NO: 1276975 - RNA, 19 nt, Human
aaguuaguuccacugagac

SEQ ID NO: 1276976 - RNA, 15 nt, Human
aaguuaguuuguaua

SEQ ID NO: 1276977 - RNA, 17 nt, Human
aaguuaguuuguauaua

SEQ ID NO: 1276978 - RNA, 22 nt, Human
aaguuaguuuguauauauuauu

SEQ ID NO: 1276979 - RNA, 23 nt, Human
aaguuaguuuguauauauuauua

SEQ ID NO: 1276980 - RNA, 15 nt, Human
aaguuauaagacucu

SEQ ID NO: 1276981 - RNA, 14 nt, Human
aaguuauaagacuc

SEQ ID NO: 1276982 - RNA, 15 nt, Human
aaguuauagugaaua

SEQ ID NO: 1276983 - RNA, 17 nt, Human
aaguuauagugaauacu

SEQ ID NO: 1276984 - RNA, 17 nt, Human
aaguuauuaacuuuaau

SEQ ID NO: 1276985 - RNA, 15 nt, Human
aaguuauuaacuuua

SEQ ID NO: 1276986 - RNA, 16 nt, Human
aaguuauuuaaaucug

SEQ ID NO: 1276987 - RNA, 12 nt, Human
aaguguguguuu

SEQ ID NO: 1276988 - RNA, 20 nt, Human
aaguguggggauuuucacug

SEQ ID NO: 1276989 - RNA, 14 nt, Human
aagugccaguauuu

SEQ ID NO: 1276990 - RNA, 15 nt, Human
aagugccaguauuuu

SEQ ID NO: 1276991 - RNA, 21 nt, Human
aagugcaucuggagagaacag

SEQ ID NO: 1276992 - RNA, 23 nt, Human
aagugccaguauuuuaaaauagc

SEQ ID NO: 1276993 - RNA, 17 nt, Human
aagugccauuaacaaau

SEQ ID NO: 1276994 - RNA, 16 nt, Human
aagugccauuaacaaa

SEQ ID NO: 1276995 - RNA, 16 nt, Human
aagugucaacucuuug

SEQ ID NO: 1276996 - RNA, 17 nt, Human
aagugucaacucuuugu

SEQ ID NO: 1276997 - RNA, 16 nt, Human
aaguuuccaucaucua

SEQ ID NO: 1276998 - RNA, 11 nt, Human
aaguucuaaga

SEQ ID NO: 1276999 - RNA, 20 nt, Human
aaguuccuuggccaugcaga

SEQ ID NO: 1277000 - RNA, 12 nt, Human
aaguucgucugu

SEQ ID NO: 1277001 - RNA, 15 nt, Human
aaguucgucuguugu

SEQ ID NO: 1277002 - RNA, 14 nt, Human
aaguucccuacuuc

SEQ ID NO: 1277003 - RNA, 17 nt, Human
aaguucccuacuuccug

SEQ ID NO: 1277004 - RNA, 20 nt, Human
aaguucccuacuuccuguga

SEQ ID NO: 1277005 - RNA, 18 nt, Human
aaguucccaguuggagcu

SEQ ID NO: 1277006 - RNA, 19 nt, Human
aaguucccaguuggagcuc

SEQ ID NO: 1277007 - RNA, 21 nt, Human
aaguucaccagacucuauaaa

SEQ ID NO: 1277008 - RNA, 22 nt, Human
aaguucaauauaagcuuuucuu

SEQ ID NO: 1277009 - RNA, 13 nt, Human
aaguucccaguug

SEQ ID NO: 1277010 - RNA, 17 nt, Human
aaguucccaguuggagc

SEQ ID NO: 1277011 - RNA, 19 nt, Human
aaguuauuuuuaauuuggu

SEQ ID NO: 1277012 - RNA, 11 nt, Human
aaguucaaacu

SEQ ID NO: 1277013 - RNA, 23 nt, Human
aaguucaaauucuucugaacuca

SEQ ID NO: 1277014 - RNA, 16 nt, Human
aaguucaacauguuau

SEQ ID NO: 1277015 - RNA, 15 nt, Human
aaguuucucugcaga

SEQ ID NO: 1277016 - RNA, 11 nt, Human
aaguuucuaag

SEQ ID NO: 1277017 - RNA, 12 nt, Human
aaguuucuaaga

SEQ ID NO: 1277018 - RNA, 13 nt, Human
aaguuucuaagau

SEQ ID NO: 1277019 - RNA, 15 nt, Human
aaguuucuaagauuc

SEQ ID NO: 1277020 - RNA, 16 nt, Human
aaguuucuaagauucu

SEQ ID NO: 1277021 - RNA, 17 nt, Human
aaguuucuaagauucua

SEQ ID NO: 1277022 - RNA, 18 nt, Human
aaguuucuaagauucuaa

SEQ ID NO: 1277023 - RNA, 19 nt, Human
aaguuucuaagauucuaaa

SEQ ID NO: 1277024 - RNA, 20 nt, Human
aaguuucuaagauucuaaag

SEQ ID NO: 1277025 - RNA, 21 nt, Human
aaguuucuaagauucuaaagg

SEQ ID NO: 1277026 - RNA, 9 nt, Human
uaaaauggu

SEQ ID NO: 1277027 - RNA, 15 nt, Human
aaguuugauuucauu

SEQ ID NO: 1277028 - RNA, 16 nt, Human
aaguuugauuucauua

SEQ ID NO: 1277029 - RNA, 15 nt, Human
uaaaauguaaacugu

SEQ ID NO: 1277030 - RNA, 15 nt, Human
uaaaauguaaagcca

SEQ ID NO: 1277031 - RNA, 18 nt, Human
uaaaauguaaagccaugc

SEQ ID NO: 1277032 - RNA, 23 nt, Human
uaaaauguaaagccaugcuggaa

SEQ ID NO: 1277033 - RNA, 14 nt, Human
uaaaauguaagauu

SEQ ID NO: 1277034 - RNA, 16 nt, Human
uaaaauguaugcaugu

SEQ ID NO: 1277035 - RNA, 19 nt, Human
uaaaauguaugcauguugu

SEQ ID NO: 1277036 - RNA, 17 nt, Human
uaaaauguaugcauguu

SEQ ID NO: 1277037 - RNA, 17 nt, Human
uaaaaugugauguucua

SEQ ID NO: 1277038 - RNA, 19 nt, Human
uaaaaugugauguucuaag

SEQ ID NO: 1277039 - RNA, 20 nt, Human
uaaaaugugauguucuaagg

SEQ ID NO: 1277040 - RNA, 21 nt, Human
uaaaaugugauguucuaaggc

SEQ ID NO: 1277041 - RNA, 22 nt, Human
uaaaaugugauguucuaaggcu

SEQ ID NO: 1277042 - RNA, 18 nt, Human
uaaaaugugggauuaugg

SEQ ID NO: 1277043 - RNA, 20 nt, Human
uaaaaugugggauuaugggu

SEQ ID NO: 1277044 - RNA, 23 nt, Human
uaaaaugugggauuaugggucac

SEQ ID NO: 1277045 - RNA, 23 nt, Human
uaaaauguguuguuccaaauacu

SEQ ID NO: 1277046 - RNA, 22 nt, Human
uaaaauaauuuuuauauuugaa

SEQ ID NO: 1277047 - RNA, 18 nt, Human
uaaaauacaagacugcca

SEQ ID NO: 1277048 - RNA, 16 nt, Human
uaaaauaagcaggugg

SEQ ID NO: 1277049 - RNA, 21 nt, Human
uaaaauaagcagguggaucua

SEQ ID NO: 1277050 - RNA, 15 nt, Human
uaaaauaaugggauu

SEQ ID NO: 1277051 - RNA, 19 nt, Human
uaaaagugggcuugauucu

SEQ ID NO: 1277052 - RNA, 17 nt, Human
uaaaagugccauuaaca

SEQ ID NO: 1277053 - RNA, 22 nt, Human
uaaaagugggcuugauucugca

SEQ ID NO: 1277054 - RNA, 17 nt, Human
uaaaauaaagaaauaga

SEQ ID NO: 1277055 - RNA, 13 nt, Human
uaaaauaaagaaa

SEQ ID NO: 1277056 - RNA, 19 nt, Human
uaaaauaacagauuucuca

SEQ ID NO: 1277057 - RNA, 17 nt, Human
uaaaagaaacccugcac

SEQ ID NO: 1277058 - RNA, 13 nt, Human
uaaaagaaacuuu

SEQ ID NO: 1277059 - RNA, 14 nt, Human
uaaaagaaacuuuc

SEQ ID NO: 1277060 - RNA, 17 nt, Human
uaaaagaaacuuucuuu

SEQ ID NO: 1277061 - RNA, 16 nt, Human
uaaaagaaacccugca

SEQ ID NO: 1277062 - RNA, 12 nt, Human
uaaaagaaaauu

SEQ ID NO: 1277063 - RNA, 18 nt, Human
uaaaauagucucuuuaaa

SEQ ID NO: 1277064 - RNA, 19 nt, Human
uaaaauagcguucuuguaa

SEQ ID NO: 1277065 - RNA, 20 nt, Human
uaaaauagcguucuuguaau

SEQ ID NO: 1277066 - RNA, 21 nt, Human
uaaaauagcguucuuguaauu

SEQ ID NO: 1277067 - RNA, 17 nt, Human
uaaaauagcaaaagaag

SEQ ID NO: 1277068 - RNA, 21 nt, Human
uaaaauagcaaaagaagaagu

SEQ ID NO: 1277069 - RNA, 22 nt, Human
uaaaauagcaaaagaagaaguu

SEQ ID NO: 1277070 - RNA, 17 nt, Human
uaaaauagcguucuugu

SEQ ID NO: 1277071 - RNA, 16 nt, Human
uaaaauacagaauaca

SEQ ID NO: 1277072 - RNA, 13 nt, Human
uaaaauagcaaaa

SEQ ID NO: 1277073 - RNA, 16 nt, Human
uaaaauagcaaaagaa

SEQ ID NO: 1277074 - RNA, 13 nt, Human
aagugauucucau

SEQ ID NO: 1277075 - RNA, 16 nt, Human
aagugauucucaugcc

SEQ ID NO: 1277076 - RNA, 19 nt, Human
aagugauucucaugccuca

SEQ ID NO: 1277077 - RNA, 17 nt, Human
aagugauucucaugccu

SEQ ID NO: 1277078 - RNA, 13 nt, Human
aagugauuguaug

SEQ ID NO: 1277079 - RNA, 18 nt, Human
aagugauuguaugaauuu

SEQ ID NO: 1277080 - RNA, 22 nt, Human
aagugcaauaaaucugacccag

SEQ ID NO: 1277081 - RNA, 23 nt, Human
aagugcaauaaaucugacccagu

SEQ ID NO: 1277082 - RNA, 17 nt, Human
aagugcagaaugcuccu

SEQ ID NO: 1277083 - RNA, 17 nt, Human
uaaaaaggcuaaaugga

SEQ ID NO: 1277084 - RNA, 21 nt, Human
uaaaaaggacaucagcaaaca

SEQ ID NO: 1277085 - RNA, 19 nt, Human
uaaaaaggacaucagcaaa

SEQ ID NO: 1277086 - RNA, 18 nt, Human
uaaaaaggacaucagcaa

SEQ ID NO: 1277087 - RNA, 11 nt, Human
uaaaaaggaca

SEQ ID NO: 1277088 - RNA, 17 nt, Human
uaaaaagcuuuugucua

SEQ ID NO: 1277089 - RNA, 16 nt, Human
uaaaaaggccuccugg

SEQ ID NO: 1277090 - RNA, 19 nt, Human
uaaaaaguaauaaaauuca

SEQ ID NO: 1277091 - RNA, 16 nt, Human
uaaaaagucaauguuu

SEQ ID NO: 1277092 - RNA, 22 nt, Human
uaaaaauaugcuaauucucaga

SEQ ID NO: 1277093 - RNA, 20 nt, Human
aagucagauggaaaauucau

SEQ ID NO: 1277094 - RNA, 23 nt, Human
aagucagauggaaaauucauuuu

SEQ ID NO: 1277095 - RNA, 16 nt, Human
aagucaggaaucauca

SEQ ID NO: 1277096 - RNA, 18 nt, Human
aagucagcucuucuccau

SEQ ID NO: 1277097 - RNA, 21 nt, Human
aagucaggcccuuauuuucaa

SEQ ID NO: 1277098 - RNA, 23 nt, Human
aagucaguccaggaugcuaacau

SEQ ID NO: 1277099 - RNA, 22 nt, Human
uaaaaaaaaaaaaaauguucuu

SEQ ID NO: 1277100 - RNA, 21 nt, Human
uaaaaaaaaaccugagcccca

SEQ ID NO: 1277101 - RNA, 22 nt, Human
uaaaaagcuccaaaugcagcuu

SEQ ID NO: 1277102 - RNA, 20 nt, Human
uaaaaagcuuccaugauucu

SEQ ID NO: 1277103 - RNA, 21 nt, Human
uaaaaccauguagaaaauuug

SEQ ID NO: 1277104 - RNA, 19 nt, Human
uaaaacccauuuaaauuuu

SEQ ID NO: 1277105 - RNA, 22 nt, Human
uaaaacuucaguuucacagaaa

SEQ ID NO: 1277106 - RNA, 21 nt, Human
uaaaacuuugaaguuagcuuu

SEQ ID NO: 1277107 - RNA, 14 nt, Human
gugaucucagcuca

SEQ ID NO: 1277108 - RNA, 15 nt, Human
gugaucucagaucag

SEQ ID NO: 1277109 - RNA, 14 nt, Human
gugaucucagauca

SEQ ID NO: 1277110 - RNA, 23 nt, Human
gugaugguuccccuguucacucu

SEQ ID NO: 1277111 - RNA, 18 nt, Human
gugaucugggucucuaau

SEQ ID NO: 1277112 - RNA, 15 nt, Human
gugaugugaguugca

SEQ ID NO: 1277113 - RNA, 15 nt, Human
gugauguucaugggu

SEQ ID NO: 1277114 - RNA, 12 nt, Human
gugauguucuaa

SEQ ID NO: 1277115 - RNA, 13 nt, Human
gugauguucuaag

SEQ ID NO: 1277116 - RNA, 16 nt, Human
gugauguucuaaggcu

SEQ ID NO: 1277117 - RNA, 18 nt, Human
gugauguucuaaggcucu

SEQ ID NO: 1277118 - RNA, 19 nt, Human
gugauguucuaaggcucug

SEQ ID NO: 1277119 - RNA, 22 nt, Human
gugauguucuaaggcucugaga

SEQ ID NO: 1277120 - RNA, 16 nt, Human
gugaugucauacagag

SEQ ID NO: 1277121 - RNA, 17 nt, Human
gugaugucauacagaga

SEQ ID NO: 1277122 - RNA, 18 nt, Human
gugaugucauacagagaa

SEQ ID NO: 1277123 - RNA, 19 nt, Human
gugaugucauacagagaag

SEQ ID NO: 1277124 - RNA, 20 nt, Human
gugaugucauacagagaagu

SEQ ID NO: 1277125 - RNA, 22 nt, Human
gugaugucauacagagaaguca

SEQ ID NO: 1277126 - RNA, 15 nt, Human
gugaugugaagccaa

SEQ ID NO: 1277127 - RNA, 21 nt, Human
gugaugucauacagagaaguc

SEQ ID NO: 1277128 - RNA, 17 nt, Human
gugauuaccagggacug

SEQ ID NO: 1277129 - RNA, 16 nt, Human
gugauuaccagggacu

SEQ ID NO: 1277130 - RNA, 11 nt, Human
gugauuaccag

SEQ ID NO: 1277131 - RNA, 21 nt, Human
gugauucaaucuguaaacugu

SEQ ID NO: 1277132 - RNA, 23 nt, Human
gugauucaaucuguaaacugugu

SEQ ID NO: 1277133 - RNA, 13 nt, Human
gugauuagugaaa

SEQ ID NO: 1277134 - RNA, 22 nt, Human
gugauuagagggaggagaauga

SEQ ID NO: 1277135 - RNA, 14 nt, Human
gugauucaaucugu

SEQ ID NO: 1277136 - RNA, 16 nt, Human
gugauucaaucuguaa

SEQ ID NO: 1277137 - RNA, 20 nt, Human
gugcaaguugaggacuucuu

SEQ ID NO: 1277138 - RNA, 19 nt, Human
gugcaauaaaucugaccca

SEQ ID NO: 1277139 - RNA, 21 nt, Human
gugcaauaaaucugacccagu

SEQ ID NO: 1277140 - RNA, 22 nt, Human
gugcaauaaaucugacccagug

SEQ ID NO: 1277141 - RNA, 23 nt, Human
gugcaauaaaucugacccagugc

SEQ ID NO: 1277142 - RNA, 12 nt, Human
gugcaauagaag

SEQ ID NO: 1277143 - RNA, 13 nt, Human
gugcaccugcccc

SEQ ID NO: 1277144 - RNA, 17 nt, Human
gugcauuuaugagcucu

SEQ ID NO: 1277145 - RNA, 22 nt, Human
gugccaaacaaaaagguucuca

SEQ ID NO: 1277146 - RNA, 20 nt, Human
aacuugaggacacaugucca

SEQ ID NO: 1277147 - RNA, 19 nt, Human
aacuugaggacacaugucc

SEQ ID NO: 1277148 - RNA, 18 nt, Human
aacuugaggacacauguc

SEQ ID NO: 1277149 - RNA, 17 nt, Human
aacuugaggacacaugu

SEQ ID NO: 1277150 - RNA, 16 nt, Human
aacuugaggacacaug

SEQ ID NO: 1277151 - RNA, 15 nt, Human
aacuugaggacacau

SEQ ID NO: 1277152 - RNA, 14 nt, Human
aacuugaggacaca

SEQ ID NO: 1277153 - RNA, 13 nt, Human
aacuugaggacac

SEQ ID NO: 1277154 - RNA, 12 nt, Human
aacuugaggaca

SEQ ID NO: 1277155 - RNA, 15 nt, Human
aacuugagcauguua

SEQ ID NO: 1277156 - RNA, 15 nt, Human
aacuugacccugagc

SEQ ID NO: 1277157 - RNA, 19 nt, Human
aacuugacccugagcugac

SEQ ID NO: 1277158 - RNA, 18 nt, Human
aacuugacccugagcuga

SEQ ID NO: 1277159 - RNA, 21 nt, Human
aacuugaacugauucacaucu

SEQ ID NO: 1277160 - RNA, 14 nt, Human
aacuugaacugauu

SEQ ID NO: 1277161 - RNA, 21 nt, Human
aacuugaaauauccugcuuga

SEQ ID NO: 1277162 - RNA, 22 nt, Human
aacuucuugcuucuuucuagaa

SEQ ID NO: 1277163 - RNA, 18 nt, Human
aacuucagcgguuuauau

SEQ ID NO: 1277164 - RNA, 13 nt, Human
aacuucagacaua

SEQ ID NO: 1277165 - RNA, 22 nt, Human
aacuguguaacugcccaaagca

SEQ ID NO: 1277166 - RNA, 14 nt, Human
aacuucagaaagac

SEQ ID NO: 1277167 - RNA, 21 nt, Human
aacuucagcgguuuauauaag

SEQ ID NO: 1277168 - RNA, 15 nt, Human
aacuucuaauugcca

SEQ ID NO: 1277169 - RNA, 16 nt, Human
aacuucuaauugccau

SEQ ID NO: 1277170 - RNA, 17 nt, Human
aacuucuaauugccaug

SEQ ID NO: 1277171 - RNA, 20 nt, Human
aacuucuugcuucuuucuag

SEQ ID NO: 1277172 - RNA, 19 nt, Human
aacugucucucaugaaccu

SEQ ID NO: 1277173 - RNA, 21 nt, Human
aacugucuccuaccucugcuc

SEQ ID NO: 1277174 - RNA, 11 nt, Human
aacuguggaua

SEQ ID NO: 1277175 - RNA, 13 nt, Human
aacuguggauauu

SEQ ID NO: 1277176 - RNA, 14 nt, Human
aacuguggauauug

SEQ ID NO: 1277177 - RNA, 18 nt, Human
aacuguggauauuguuac

SEQ ID NO: 1277178 - RNA, 13 nt, Human
aacuguguaacug

SEQ ID NO: 1277179 - RNA, 20 nt, Human
aacuguguacauaacugaaa

SEQ ID NO: 1277180 - RNA, 21 nt, Human
aacuguguacauaacugaaaa

SEQ ID NO: 1277181 - RNA, 23 nt, Human
aacuguguacauaacugaaaaug

SEQ ID NO: 1277182 - RNA, 16 nt, Human
aacugcccccucugcc

SEQ ID NO: 1277183 - RNA, 17 nt, Human
aacugcccccucugccc

SEQ ID NO: 1277184 - RNA, 14 nt, Human
aacugccaggcucu

SEQ ID NO: 1277185 - RNA, 14 nt, Human
aacugcccaaagca

SEQ ID NO: 1277186 - RNA, 18 nt, Human
aacugcccccucugcccu

SEQ ID NO: 1277187 - RNA, 19 nt, Human
aacugcccccucugcccug

SEQ ID NO: 1277188 - RNA, 20 nt, Human
aacugcccccucugcccugc

SEQ ID NO: 1277189 - RNA, 21 nt, Human
aacugcccccucugcccugcg

SEQ ID NO: 1277190 - RNA, 16 nt, Human
aacugccguaauuuaa

SEQ ID NO: 1277191 - RNA, 17 nt, Human
aacugccguaauuuaac

SEQ ID NO: 1277192 - RNA, 18 nt, Human
aacugccguaauuuaacu

SEQ ID NO: 1277193 - RNA, 16 nt, Human
aacugccuacuccaaa

SEQ ID NO: 1277194 - RNA, 20 nt, Human
aacugccuacuccaaaaugu

SEQ ID NO: 1277195 - RNA, 13 nt, Human
aacuguauuugaa

SEQ ID NO: 1277196 - RNA, 20 nt, Human
aacuguauuugaaauaagaa

SEQ ID NO: 1277197 - RNA, 23 nt, Human
aacugucucgaugcaaugaacac

SEQ ID NO: 1277198 - RNA, 16 nt, Human
gugcucauuucaggau

SEQ ID NO: 1277199 - RNA, 14 nt, Human
gugcucgccccagc

SEQ ID NO: 1277200 - RNA, 16 nt, Human
gugcucgccccagcag

SEQ ID NO: 1277201 - RNA, 14 nt, Human
gugcucgcccugcg

SEQ ID NO: 1277202 - RNA, 19 nt, Human
gugcucaggagcccuggga

SEQ ID NO: 1277203 - RNA, 21 nt, Human
gugcucagggggcgccugugg

SEQ ID NO: 1277204 - RNA, 18 nt, Human
gugcucaggagcccuggg

SEQ ID NO: 1277205 - RNA, 13 nt, Human
gugcucuccauuc

SEQ ID NO: 1277206 - RNA, 22 nt, Human
aagaagcaccaaucaugaauua

SEQ ID NO: 1277207 - RNA, 13 nt, Human
aagaaagccugag

SEQ ID NO: 1277208 - RNA, 20 nt, Human
aagaaaggaagcauuguaaa

SEQ ID NO: 1277209 - RNA, 13 nt, Human
aagaagacuuuuu

SEQ ID NO: 1277210 - RNA, 19 nt, Human
aagaagagcgagagaucaa

SEQ ID NO: 1277211 - RNA, 22 nt, Human
aagaagagcgagagaucaaaga

SEQ ID NO: 1277212 - RNA, 23 nt, Human
aagaagagcgagagaucaaagau

SEQ ID NO: 1277213 - RNA, 21 nt, Human
aagaagcaaccucaguaauuu

SEQ ID NO: 1277214 - RNA, 15 nt, Human
aagaaguuucaucau

SEQ ID NO: 1277215 - RNA, 18 nt, Human
aagaaguuucaucauuuu

SEQ ID NO: 1277216 - RNA, 13 nt, Human
aagaaguuuuaaa

SEQ ID NO: 1277217 - RNA, 23 nt, Human
aagaaguuuuaaaaagccaguuu

SEQ ID NO: 1277218 - RNA, 18 nt, Human
aagaaguuuuaaaaagcc

SEQ ID NO: 1277219 - RNA, 14 nt, Human
aagaauaaacauuu

SEQ ID NO: 1277220 - RNA, 16 nt, Human
aagaauaaucacgcuu

SEQ ID NO: 1277221 - RNA, 22 nt, Human
aagaauaaucacgcuuuccuga

SEQ ID NO: 1277222 - RNA, 19 nt, Human
gugcuacuggggaaacugg

SEQ ID NO: 1277223 - RNA, 21 nt, Human
gugcuauacugcauacuuuuu

SEQ ID NO: 1277224 - RNA, 23 nt, Human
aagaauaaucacgcuuuccugaa

SEQ ID NO: 1277225 - RNA, 21 nt, Human
gugcuacacccuuuuccagcu

SEQ ID NO: 1277226 - RNA, 11 nt, Human
gugcuacuggg

SEQ ID NO: 1277227 - RNA, 13 nt, Human
gugcuacugggga

SEQ ID NO: 1277228 - RNA, 18 nt, Human
gugcuacuggggaaacug

SEQ ID NO: 1277229 - RNA, 14 nt, Human
aagaaagaacggaa

SEQ ID NO: 1277230 - RNA, 23 nt, Human
aagaaagaggugaccccagggca

SEQ ID NO: 1277231 - RNA, 12 nt, Human
aagaaagccuga

SEQ ID NO: 1277232 - RNA, 22 nt, Human
aagaaagccugaguacuccaca

SEQ ID NO: 1277233 - RNA, 22 nt, Human
aagaaagcuucaaacugcauga

SEQ ID NO: 1277234 - RNA, 16 nt, Human
aagaaagaaaaucagg

SEQ ID NO: 1277235 - RNA, 14 nt, Human
aagaaagaaaauca

SEQ ID NO: 1277236 - RNA, 15 nt, Human
aagaaaccuacugcc

SEQ ID NO: 1277237 - RNA, 11 nt, Human
aagaaacauuu

SEQ ID NO: 1277238 - RNA, 14 nt, Human
aagaaacauuuaua

SEQ ID NO: 1277239 - RNA, 14 nt, Human
aagaaacaaagaug

SEQ ID NO: 1277240 - RNA, 15 nt, Human
aagaaacaaagaugu

SEQ ID NO: 1277241 - RNA, 19 nt, Human
aagaaacaacucuuugaga

SEQ ID NO: 1277242 - RNA, 16 nt, Human
aagaaacaagguuuuc

SEQ ID NO: 1277243 - RNA, 19 nt, Human
gugccagauuuaugcauau

SEQ ID NO: 1277244 - RNA, 18 nt, Human
gugccagagaacccagcc

SEQ ID NO: 1277245 - RNA, 12 nt, Human
gugccagagccu

SEQ ID NO: 1277246 - RNA, 13 nt, Human
gugccagagccug

SEQ ID NO: 1277247 - RNA, 14 nt, Human
gugccagagccugg

SEQ ID NO: 1277248 - RNA, 15 nt, Human
gugccagagccuggg

SEQ ID NO: 1277249 - RNA, 16 nt, Human
gugccagagccugggg

SEQ ID NO: 1277250 - RNA, 17 nt, Human
gugccagagccuggggc

SEQ ID NO: 1277251 - RNA, 18 nt, Human
gugccagagccuggggcu

SEQ ID NO: 1277252 - RNA, 20 nt, Human
aagaaaaacaaacucguuuu

SEQ ID NO: 1277253 - RNA, 16 nt, Human
gucuuauucccuuccu

SEQ ID NO: 1277254 - RNA, 18 nt, Human
gucuuuccacggagccac

SEQ ID NO: 1277255 - RNA, 23 nt, Human
gucuuucagcaagauaaacauua

SEQ ID NO: 1277256 - RNA, 22 nt, Human
gucuuguuuuuuuuuuccacuu

SEQ ID NO: 1277257 - RNA, 23 nt, Human
gucuuguguuuccacagccugca

SEQ ID NO: 1277258 - RNA, 13 nt, Human
gucuuaaaaccug

SEQ ID NO: 1277259 - RNA, 14 nt, Human
gucuuaaaaccugc

SEQ ID NO: 1277260 - RNA, 20 nt, Human
gucuuaaaaccugcuuuuca

SEQ ID NO: 1277261 - RNA, 17 nt, Human
gucuuaaacuaaaugug

SEQ ID NO: 1277262 - RNA, 22 nt, Human
gucuuaaacuaaaugugcaaua

SEQ ID NO: 1277263 - RNA, 15 nt, Human
gucugaacagcugua

SEQ ID NO: 1277264 - RNA, 13 nt, Human
gucugaaauuuuu

SEQ ID NO: 1277265 - RNA, 14 nt, Human
gucucuuuuacccu

SEQ ID NO: 1277266 - RNA, 18 nt, Human
gucucuuuuacccuggcc

SEQ ID NO: 1277267 - RNA, 23 nt, Human
gucucuuuuacccuggccccucu

SEQ ID NO: 1277268 - RNA, 20 nt, Human
gucucuuuuacccuggcccc

SEQ ID NO: 1277269 - RNA, 21 nt, Human
gucucuuuuacccuggccccu

SEQ ID NO: 1277270 - RNA, 22 nt, Human
gucucuuuuacccuggccccuc

SEQ ID NO: 1277271 - RNA, 14 nt, Human
gucuggaagauggg

SEQ ID NO: 1277272 - RNA, 23 nt, Human
gucuggaagauggggaccagcag

SEQ ID NO: 1277273 - RNA, 14 nt, Human
gucuggaaguccaa

SEQ ID NO: 1277274 - RNA, 15 nt, Human
aaccuuccacccagu

SEQ ID NO: 1277275 - RNA, 13 nt, Human
aaccuuccaccca

SEQ ID NO: 1277276 - RNA, 21 nt, Human
aaccuucgccaccuggguucc

SEQ ID NO: 1277277 - RNA, 12 nt, Human
aacgucuuaaau

SEQ ID NO: 1277278 - RNA, 14 nt, Human
aacgucuuaaauau

SEQ ID NO: 1277279 - RNA, 13 nt, Human
aaccuucucuaug

SEQ ID NO: 1277280 - RNA, 15 nt, Human
aacgucuuaaauauu

SEQ ID NO: 1277281 - RNA, 12 nt, Human
aacgugaaaaug

SEQ ID NO: 1277282 - RNA, 17 nt, Human
aacgugcucuuuguuuu

SEQ ID NO: 1277283 - RNA, 20 nt, Human
aacgugcucuuuguuuugug

SEQ ID NO: 1277284 - RNA, 19 nt, Human
aacgugcucuuuguuuugu

SEQ ID NO: 1277285 - RNA, 23 nt, Human
aaccuggucacaggacucugccu

SEQ ID NO: 1277286 - RNA, 19 nt, Human
aaccuggguugcagacagg

SEQ ID NO: 1277287 - RNA, 20 nt, Human
aaccuggguugcagacagga

SEQ ID NO: 1277288 - RNA, 17 nt, Human
aaccuggguugcagaca

SEQ ID NO: 1277289 - RNA, 20 nt, Human
gucuuuccauuggaucucau

SEQ ID NO: 1277290 - RNA, 19 nt, Human
gucuuucccauggggaggg

SEQ ID NO: 1277291 - RNA, 20 nt, Human
gucuuucccauggggaggga

SEQ ID NO: 1277292 - RNA, 16 nt, Human
gucuuuccuggcacua

SEQ ID NO: 1277293 - RNA, 14 nt, Human
gucuuucucucuca

SEQ ID NO: 1277294 - RNA, 14 nt, Human
gucuuucucuuucc

SEQ ID NO: 1277295 - RNA, 21 nt, Human
gucuuucucuuucccuggucc

SEQ ID NO: 1277296 - RNA, 16 nt, Human
gucuuucucuuucccu

SEQ ID NO: 1277297 - RNA, 12 nt, Human
aaccuggccuuc

SEQ ID NO: 1277298 - RNA, 11 nt, Human
aaccuggccuu

SEQ ID NO: 1277299 - RNA, 15 nt, Human
aacuauugcauuuau

SEQ ID NO: 1277300 - RNA, 13 nt, Human
aacuauucacaaa

SEQ ID NO: 1277301 - RNA, 15 nt, Human
aacuauguugauaaa

SEQ ID NO: 1277302 - RNA, 12 nt, Human
aacuauggccug

SEQ ID NO: 1277303 - RNA, 18 nt, Human
aacuauggaucagaauag

SEQ ID NO: 1277304 - RNA, 17 nt, Human
aacuagggccaagccca

SEQ ID NO: 1277305 - RNA, 15 nt, Human
aacuaggcugagcaa

SEQ ID NO: 1277306 - RNA, 24 nt, Human
aacuauauauaaucaucaaguaau

SEQ ID NO: 1277307 - RNA, 21 nt, Human
aacuaggugcauauuuauaaa

SEQ ID NO: 1277308 - RNA, 20 nt, Human
aacuaaaacaaagccacuuu

SEQ ID NO: 1277309 - RNA, 15 nt, Human
aacuaaaauaauuuu

SEQ ID NO: 1277310 - RNA, 17 nt, Human
aacuaaaacaaagccac

SEQ ID NO: 1277311 - RNA, 13 nt, Human
aacuaaaacaaag

SEQ ID NO: 1277312 - RNA, 19 nt, Human
aacuaaaauaauuuuguaa

SEQ ID NO: 1277313 - RNA, 17 nt, Human
aacuaaaauaauuuugu

SEQ ID NO: 1277314 - RNA, 13 nt, Human
aacguuuucuaau

SEQ ID NO: 1277315 - RNA, 15 nt, Human
aacguuuucuaauug

SEQ ID NO: 1277316 - RNA, 17 nt, Human
aacguuuucuaauugcu

SEQ ID NO: 1277317 - RNA, 21 nt, Human
aacguuuucuaauugcuuauu

SEQ ID NO: 1277318 - RNA, 20 nt, Human
gugagaccaccucucaauau

SEQ ID NO: 1277319 - RNA, 20 nt, Human
gugagacccagcccucaucc

SEQ ID NO: 1277320 - RNA, 13 nt, Human
gugagaccugccc

SEQ ID NO: 1277321 - RNA, 14 nt, Human
gugagaccugcccc

SEQ ID NO: 1277322 - RNA, 15 nt, Human
gugagaccugccccu

SEQ ID NO: 1277323 - RNA, 16 nt, Human
gugagaccugccccuc

SEQ ID NO: 1277324 - RNA, 23 nt, Human
gugagaccugccccuccucucug

SEQ ID NO: 1277325 - RNA, 14 nt, Human
gugagaccaccucu

SEQ ID NO: 1277326 - RNA, 13 nt, Human
gugagaccaccuc

SEQ ID NO: 1277327 - RNA, 20 nt, Human
gugacuuuggcugcaugcga

SEQ ID NO: 1277328 - RNA, 18 nt, Human
gugacuuuggcugcaugc

SEQ ID NO: 1277329 - RNA, 23 nt, Human
gugacuugugucccaugaucccu

SEQ ID NO: 1277330 - RNA, 11 nt, Human
gugacuucuga

SEQ ID NO: 1277331 - RNA, 17 nt, Human
gugacuugugucccaug

SEQ ID NO: 1277332 - RNA, 16 nt, Human
gugacuucagcucugu

SEQ ID NO: 1277333 - RNA, 13 nt, Human
gugacuucugaga

SEQ ID NO: 1277334 - RNA, 22 nt, Human
gugacauguguuggcagccucu

SEQ ID NO: 1277335 - RNA, 21 nt, Human
gugacauugcaucaaagcauc

SEQ ID NO: 1277336 - RNA, 22 nt, Human
gugacauuugggagacauguga

SEQ ID NO: 1277337 - RNA, 16 nt, Human
gugacugucuggggag

SEQ ID NO: 1277338 - RNA, 15 nt, Human
gugacugucugggga

SEQ ID NO: 1277339 - RNA, 18 nt, Human
aacuccugaccucaggca

SEQ ID NO: 1277340 - RNA, 17 nt, Human
aacuccugaccucaggc

SEQ ID NO: 1277341 - RNA, 13 nt, Human
gugaaguugcugc

SEQ ID NO: 1277342 - RNA, 14 nt, Human
gugaaguugcugcu

SEQ ID NO: 1277343 - RNA, 15 nt, Human
gugaaguugcugcuu

SEQ ID NO: 1277344 - RNA, 23 nt, Human
gugaaguugcugcuucucccagg

SEQ ID NO: 1277345 - RNA, 14 nt, Human
aacuccuaguucua

SEQ ID NO: 1277346 - RNA, 15 nt, Human
aacuccuaguucuag

SEQ ID NO: 1277347 - RNA, 15 nt, Human
aacuccaccuuccca

SEQ ID NO: 1277348 - RNA, 12 nt, Human
aacuccugaccu

SEQ ID NO: 1277349 - RNA, 14 nt, Human
aacuccugaccuca

SEQ ID NO: 1277350 - RNA, 21 nt, Human
aacuccuaguucuagaaaaac

SEQ ID NO: 1277351 - RNA, 19 nt, Human
aacuccuaguucuagaaaa

SEQ ID NO: 1277352 - RNA, 16 nt, Human
aacuccucauuguaaa

SEQ ID NO: 1277353 - RNA, 14 nt, Human
aacuccucccaggg

SEQ ID NO: 1277354 - RNA, 11 nt, Human
aacuccuccca

SEQ ID NO: 1277355 - RNA, 13 nt, Human
gugaauaaauguc

SEQ ID NO: 1277356 - RNA, 16 nt, Human
gugaauaaaugucuug

SEQ ID NO: 1277357 - RNA, 19 nt, Human
gugacagggcggggguggc

SEQ ID NO: 1277358 - RNA, 22 nt, Human
gugacagggcggggguggcggc

SEQ ID NO: 1277359 - RNA, 22 nt, Human
gugagucaauacauagugcugc

SEQ ID NO: 1277360 - RNA, 20 nt, Human
aacucucuggaagccccugg

SEQ ID NO: 1277361 - RNA, 18 nt, Human
aacucucuuauugccuca

SEQ ID NO: 1277362 - RNA, 19 nt, Human
aacucucuuauugccucac

SEQ ID NO: 1277363 - RNA, 21 nt, Human
aacucucuuauugccucacuu

SEQ ID NO: 1277364 - RNA, 16 nt, Human
aacucugacaacagac

SEQ ID NO: 1277365 - RNA, 17 nt, Human
aacucuucacucuucaa

SEQ ID NO: 1277366 - RNA, 23 nt, Human
aacucuucacucuucaaaugccu

SEQ ID NO: 1277367 - RNA, 23 nt, Human
aacucuucccccucucccaguug

SEQ ID NO: 1277368 - RNA, 11 nt, Human
aacucuugauu

SEQ ID NO: 1277369 - RNA, 17 nt, Human
aacucuugauuauccau

SEQ ID NO: 1277370 - RNA, 12 nt, Human
aacucuuucaaa

SEQ ID NO: 1277371 - RNA, 13 nt, Human
aacucuuucaaaa

SEQ ID NO: 1277372 - RNA, 13 nt, Human
aacucuuucggua

SEQ ID NO: 1277373 - RNA, 14 nt, Human
aacucuuugagaaa

SEQ ID NO: 1277374 - RNA, 13 nt, Human
aacucuuugcugc

SEQ ID NO: 1277375 - RNA, 23 nt, Human
aacucuuugcugcugcccauguu

SEQ ID NO: 1277376 - RNA, 15 nt, Human
aacucuuuguuauuu

SEQ ID NO: 1277377 - RNA, 19 nt, Human
aacucuuuguuauuugaaa

SEQ ID NO: 1277378 - RNA, 23 nt, Human
gugagacugggaaggcuugggau

SEQ ID NO: 1277379 - RNA, 23 nt, Human
gugagagacauuaacucauuaga

SEQ ID NO: 1277380 - RNA, 19 nt, Human
gugagagacauuaacucau

SEQ ID NO: 1277381 - RNA, 15 nt, Human
gugagagaguggcug

SEQ ID NO: 1277382 - RNA, 16 nt, Human
gugagagaguggcugg

SEQ ID NO: 1277383 - RNA, 18 nt, Human
gugagagaguggcugggg

SEQ ID NO: 1277384 - RNA, 19 nt, Human
gugagagaguggcuggggc

SEQ ID NO: 1277385 - RNA, 20 nt, Human
gugagagaguggcuggggca

SEQ ID NO: 1277386 - RNA, 14 nt, Human
gugaggcuguccug

SEQ ID NO: 1277387 - RNA, 16 nt, Human
gugaggcuguccugua

SEQ ID NO: 1277388 - RNA, 17 nt, Human
gugagggagggcuguca

SEQ ID NO: 1277389 - RNA, 12 nt, Human
gucccuaauaaa

SEQ ID NO: 1277390 - RNA, 22 nt, Human
gucccggggccagcacuuccau

SEQ ID NO: 1277391 - RNA, 21 nt, Human
gucccggggccagcacuucca

SEQ ID NO: 1277392 - RNA, 22 nt, Human
gucccgggacaccuaggcuagg

SEQ ID NO: 1277393 - RNA, 18 nt, Human
guccccugcuacaccuau

SEQ ID NO: 1277394 - RNA, 15 nt, Human
gucccggggccagca

SEQ ID NO: 1277395 - RNA, 17 nt, Human
gucccggggccagcacu

SEQ ID NO: 1277396 - RNA, 15 nt, Human
guccccuccuuccca

SEQ ID NO: 1277397 - RNA, 13 nt, Human
guccccugcuaca

SEQ ID NO: 1277398 - RNA, 14 nt, Human
guccccagcagaga

SEQ ID NO: 1277399 - RNA, 12 nt, Human
guccccagcaga

SEQ ID NO: 1277400 - RNA, 13 nt, Human
guccccagccugg

SEQ ID NO: 1277401 - RNA, 17 nt, Human
guccccuccuucccaag

SEQ ID NO: 1277402 - RNA, 15 nt, Human
gucccuaauaaagcu

SEQ ID NO: 1277403 - RNA, 13 nt, Human
gucccacaucccu

SEQ ID NO: 1277404 - RNA, 14 nt, Human
gucccacaucccug

SEQ ID NO: 1277405 - RNA, 15 nt, Human
gucccacaucccugg

SEQ ID NO: 1277406 - RNA, 17 nt, Human
gucccacaucccugggc

SEQ ID NO: 1277407 - RNA, 18 nt, Human
gucccacaucccugggcc

SEQ ID NO: 1277408 - RNA, 19 nt, Human
gucccacaucccugggccu

SEQ ID NO: 1277409 - RNA, 20 nt, Human
gucccacaucccugggccug

SEQ ID NO: 1277410 - RNA, 21 nt, Human
gucccacaucccugggccugc

SEQ ID NO: 1277411 - RNA, 14 nt, Human
gucccacagccacg

SEQ ID NO: 1277412 - RNA, 15 nt, Human
gucccacagccacgu

SEQ ID NO: 1277413 - RNA, 23 nt, Human
gucccacaucccugggccugcug

SEQ ID NO: 1277414 - RNA, 22 nt, Human
gucccacaucccugggccugcu

SEQ ID NO: 1277415 - RNA, 21 nt, Human
guccaaaaccgccagcucugu

SEQ ID NO: 1277416 - RNA, 18 nt, Human
guccaaaagauugcugaa

SEQ ID NO: 1277417 - RNA, 16 nt, Human
guccaaagaggcugcc

SEQ ID NO: 1277418 - RNA, 19 nt, Human
guccaaagaggcugccccu

SEQ ID NO: 1277419 - RNA, 23 nt, Human
guccaaaaccgccagcucuguuc

SEQ ID NO: 1277420 - RNA, 15 nt, Human
guccaucagccucca

SEQ ID NO: 1277421 - RNA, 18 nt, Human
guccauaucacacacauu

SEQ ID NO: 1277422 - RNA, 23 nt, Human
guccaugaagauguagaggagaa

SEQ ID NO: 1277423 - RNA, 22 nt, Human
guccaugaagauguagaggaga

SEQ ID NO: 1277424 - RNA, 21 nt, Human
aacacugggagaaaugaaaaa

SEQ ID NO: 1277425 - RNA, 19 nt, Human
aacacucagaagccugggg

SEQ ID NO: 1277426 - RNA, 17 nt, Human
aacacucaguggcccau

SEQ ID NO: 1277427 - RNA, 24 nt, Human
aacacucaguggcccauggcauuu

SEQ ID NO: 1277428 - RNA, 19 nt, Human
aacacuggggacuuggccu

SEQ ID NO: 1277429 - RNA, 23 nt, Human
aacacuggggacuuggccucucu

SEQ ID NO: 1277430 - RNA, 22 nt, Human
aacacuggucugcuguuccagu

SEQ ID NO: 1277431 - RNA, 12 nt, Human
aacacucaccau

SEQ ID NO: 1277432 - RNA, 16 nt, Human
aacacucagaagccug

SEQ ID NO: 1277433 - RNA, 17 nt, Human
aacacucagaagccugg

SEQ ID NO: 1277434 - RNA, 18 nt, Human
aacacucagaagccuggg

SEQ ID NO: 1277435 - RNA, 20 nt, Human
aacacucagaagccuggggg

SEQ ID NO: 1277436 - RNA, 15 nt, Human
aacacaggcaaaauc

SEQ ID NO: 1277437 - RNA, 22 nt, Human
aacacaggcaaaauccuugcuu

SEQ ID NO: 1277438 - RNA, 23 nt, Human
aacacuggucugcuguuccagug

SEQ ID NO: 1277439 - RNA, 15 nt, Human
gucauuucauuuccu

SEQ ID NO: 1277440 - RNA, 16 nt, Human
aaauuugacuuuucug

SEQ ID NO: 1277441 - RNA, 18 nt, Human
aaauuugacuuuucugua

SEQ ID NO: 1277442 - RNA, 13 nt, Human
aacacaaacugua

SEQ ID NO: 1277443 - RNA, 15 nt, Human
aacacaaacuguaaa

SEQ ID NO: 1277444 - RNA, 16 nt, Human
aacacaaacuguaaau

SEQ ID NO: 1277445 - RNA, 19 nt, Human
aacacaaacuguaaauaaa

SEQ ID NO: 1277446 - RNA, 18 nt, Human
aaauuucuguaaaacagg

SEQ ID NO: 1277447 - RNA, 18 nt, Human
aacacaagauugguguuu

SEQ ID NO: 1277448 - RNA, 19 nt, Human
aacacaagauugguguuuu

SEQ ID NO: 1277449 - RNA, 20 nt, Human
aacacaagauugguguuuuu

SEQ ID NO: 1277450 - RNA, 23 nt, Human
aacacaagauugguguuuuuuuc

SEQ ID NO: 1277451 - RNA, 21 nt, Human
aacacaagauugguguuuuuu

SEQ ID NO: 1277452 - RNA, 14 nt, Human
aacacacacaaaag

SEQ ID NO: 1277453 - RNA, 21 nt, Human
aacacacaggugcaacagacu

SEQ ID NO: 1277454 - RNA, 18 nt, Human
aacacagcaauuccucag

SEQ ID NO: 1277455 - RNA, 23 nt, Human
aacacagcaguucugcagaggac

SEQ ID NO: 1277456 - RNA, 19 nt, Human
aacacagcaguucugcaga

SEQ ID NO: 1277457 - RNA, 20 nt, Human
gucuauuuacggaacucaaa

SEQ ID NO: 1277458 - RNA, 13 nt, Human
gucuauucagcuu

SEQ ID NO: 1277459 - RNA, 13 nt, Human
gucuauucuaguc

SEQ ID NO: 1277460 - RNA, 13 nt, Human
gucuauaaagcau

SEQ ID NO: 1277461 - RNA, 22 nt, Human
gucuagauguuuauucuucuag

SEQ ID NO: 1277462 - RNA, 11 nt, Human
gucuagauuca

SEQ ID NO: 1277463 - RNA, 15 nt, Human
gucuagauucaaagg

SEQ ID NO: 1277464 - RNA, 19 nt, Human
gucuagauucaaagguucu

SEQ ID NO: 1277465 - RNA, 20 nt, Human
gucuagauucaaagguucua

SEQ ID NO: 1277466 - RNA, 21 nt, Human
gucuagauucaaagguucuag

SEQ ID NO: 1277467 - RNA, 22 nt, Human
gucuagauucaaagguucuagg

SEQ ID NO: 1277468 - RNA, 12 nt, Human
gucuagauucuc

SEQ ID NO: 1277469 - RNA, 14 nt, Human
gucuaggacacagu

SEQ ID NO: 1277470 - RNA, 22 nt, Human
gucuagucacgcaugcaguguu

SEQ ID NO: 1277471 - RNA, 12 nt, Human
gucgccucugca

SEQ ID NO: 1277472 - RNA, 22 nt, Human
gucgcccuuugcugcauggcag

SEQ ID NO: 1277473 - RNA, 13 nt, Human
gucgauuagacug

SEQ ID NO: 1277474 - RNA, 14 nt, Human
gucgauuagacugg

SEQ ID NO: 1277475 - RNA, 13 nt, Human
gucgccaggcuag

SEQ ID NO: 1277476 - RNA, 17 nt, Human
gucgcccuuugcugcau

SEQ ID NO: 1277477 - RNA, 21 nt, Human
gucgcccuuugcugcauggca

SEQ ID NO: 1277478 - RNA, 16 nt, Human
gucgcucaugugugca

SEQ ID NO: 1277479 - RNA, 21 nt, Human
gucgcucaugugugcaacagg

SEQ ID NO: 1277480 - RNA, 11 nt, Human
gucgcuccugc

SEQ ID NO: 1277481 - RNA, 15 nt, Human
gucgcuccugcccac

SEQ ID NO: 1277482 - RNA, 19 nt, Human
guccuggaugauacuaaua

SEQ ID NO: 1277483 - RNA, 17 nt, Human
guccuggaugauacuaa

SEQ ID NO: 1277484 - RNA, 20 nt, Human
guccuggaggggcuggggac

SEQ ID NO: 1277485 - RNA, 19 nt, Human
guccuggagcagaccaccc

SEQ ID NO: 1277486 - RNA, 13 nt, Human
guccuggaggggc

SEQ ID NO: 1277487 - RNA, 14 nt, Human
guccuggaggggcu

SEQ ID NO: 1277488 - RNA, 11 nt, Human
guccuuucccu

SEQ ID NO: 1277489 - RNA, 22 nt, Human
guccuuucuagagcacugccac

SEQ ID NO: 1277490 - RNA, 13 nt, Human
guccuuucuuccg

SEQ ID NO: 1277491 - RNA, 20 nt, Human
guccuuucuuccggccccuc

SEQ ID NO: 1277492 - RNA, 21 nt, Human
guccuuuucauaggucugaaa

SEQ ID NO: 1277493 - RNA, 22 nt, Human
guccuuuucauaggucugaaau

SEQ ID NO: 1277494 - RNA, 15 nt, Human
guccuuuugacacug

SEQ ID NO: 1277495 - RNA, 16 nt, Human
guccuuuugacacugc

SEQ ID NO: 1277496 - RNA, 17 nt, Human
guccuuuugacacugcu

SEQ ID NO: 1277497 - RNA, 19 nt, Human
guccuuuugacacugcucu

SEQ ID NO: 1277498 - RNA, 20 nt, Human
guccuuuugacacugcucua

SEQ ID NO: 1277499 - RNA, 21 nt, Human
guccuuuugacacugcucuaa

SEQ ID NO: 1277500 - RNA, 15 nt, Human
gucgaggaguaacaa

SEQ ID NO: 1277501 - RNA, 14 nt, Human
gucgauagagcugu

SEQ ID NO: 1277502 - RNA, 18 nt, Human
guccucuuucagcuccug

SEQ ID NO: 1277503 - RNA, 19 nt, Human
guccucuuucagcuccuga

SEQ ID NO: 1277504 - RNA, 20 nt, Human
guccucuuucagcuccugac

SEQ ID NO: 1277505 - RNA, 14 nt, Human
guccucguuugugu

SEQ ID NO: 1277506 - RNA, 13 nt, Human
guccucuuucagc

SEQ ID NO: 1277507 - RNA, 14 nt, Human
guccucuuucagcu

SEQ ID NO: 1277508 - RNA, 15 nt, Human
guccucuuucagcuc

SEQ ID NO: 1277509 - RNA, 16 nt, Human
guccucuuucagcucc

SEQ ID NO: 1277510 - RNA, 17 nt, Human
guccucuuucagcuccu

SEQ ID NO: 1277511 - RNA, 14 nt, Human
guccugaaggccug

SEQ ID NO: 1277512 - RNA, 19 nt, Human
guccugaaggccugagguu

SEQ ID NO: 1277513 - RNA, 21 nt, Human
guccuggaagcgcgagggccu

SEQ ID NO: 1277514 - RNA, 23 nt, Human
aacauuccauccuugagucaaaa

SEQ ID NO: 1277515 - RNA, 11 nt, Human
aacauuccaag

SEQ ID NO: 1277516 - RNA, 19 nt, Human
aacauuccucaugaaugua

SEQ ID NO: 1277517 - RNA, 20 nt, Human
aacauuccucaugaauguaa

SEQ ID NO: 1277518 - RNA, 14 nt, Human
aacauuccauccuu

SEQ ID NO: 1277519 - RNA, 13 nt, Human
aacauuccauccu

SEQ ID NO: 1277520 - RNA, 10 nt, Human
aacauuccau

SEQ ID NO: 1277521 - RNA, 17 nt, Human
aacauuccaagacucua

SEQ ID NO: 1277522 - RNA, 23 nt, Human
aacauuauuaaguaacuuauuua

SEQ ID NO: 1277523 - RNA, 16 nt, Human
aacauucauagucuuu

SEQ ID NO: 1277524 - RNA, 12 nt, Human
aacauuccaaga

SEQ ID NO: 1277525 - RNA, 17 nt, Human
aacaugugaaaagaaua

SEQ ID NO: 1277526 - RNA, 22 nt, Human
aacauauaauguuguuauuuaa

SEQ ID NO: 1277527 - RNA, 15 nt, Human
aacauguaggaagua

SEQ ID NO: 1277528 - RNA, 19 nt, Human
aacauguccugccuauuau

SEQ ID NO: 1277529 - RNA, 20 nt, Human
aacauguccugccuauuauc

SEQ ID NO: 1277530 - RNA, 22 nt, Human
aacauuccucaugaauguaaau

SEQ ID NO: 1277531 - RNA, 21 nt, Human
aacauuccucaugaauguaaa

SEQ ID NO: 1277532 - RNA, 15 nt, Human
aacauuggaauguuc

SEQ ID NO: 1277533 - RNA, 21 nt, Human
aacauuggaauguucucagau

SEQ ID NO: 1277534 - RNA, 16 nt, Human
aacauuggaauguucu

SEQ ID NO: 1277535 - RNA, 14 nt, Human
aacauuguagccuc

SEQ ID NO: 1277536 - RNA, 13 nt, Human
guccuccuccagg

SEQ ID NO: 1277537 - RNA, 14 nt, Human
guccuccuccaggg

SEQ ID NO: 1277538 - RNA, 17 nt, Human
guccuccuccagggaca

SEQ ID NO: 1277539 - RNA, 20 nt, Human
guccuccuccagggacagca

SEQ ID NO: 1277540 - RNA, 18 nt, Human
guccuccuccagggacag

SEQ ID NO: 1277541 - RNA, 12 nt, Human
guccuccucugu

SEQ ID NO: 1277542 - RNA, 13 nt, Human
guccuccucugug

SEQ ID NO: 1277543 - RNA, 14 nt, Human
guccuccucuguga

SEQ ID NO: 1277544 - RNA, 18 nt, Human
guccucguuuguguucug

SEQ ID NO: 1277545 - RNA, 22 nt, Human
aacauaaaaaggacaucagcaa

SEQ ID NO: 1277546 - RNA, 20 nt, Human
aacauaaaaaggacaucagc

SEQ ID NO: 1277547 - RNA, 19 nt, Human
aacauaaaaaggacaucag

SEQ ID NO: 1277548 - RNA, 15 nt, Human
aacauaaaaaggaca

SEQ ID NO: 1277549 - RNA, 18 nt, Human
aacaguuuuccuaugcuu

SEQ ID NO: 1277550 - RNA, 20 nt, Human
aacaguuuuccuaugcuuug

SEQ ID NO: 1277551 - RNA, 21 nt, Human
aacaguuuuccuaugcuuuga

SEQ ID NO: 1277552 - RNA, 21 nt, Human
aacaguuuuuuaugcuaauca

SEQ ID NO: 1277553 - RNA, 12 nt, Human
aacauauauaac

SEQ ID NO: 1277554 - RNA, 13 nt, Human
aacauauaauguu

SEQ ID NO: 1277555 - RNA, 18 nt, Human
aacauauaauguuguuau

SEQ ID NO: 1277556 - RNA, 21 nt, Human
aacauauaauguuguuauuua

SEQ ID NO: 1277557 - RNA, 13 nt, Human
aacauaaaaauga

SEQ ID NO: 1277558 - RNA, 14 nt, Human
aacauaaaaaugau

SEQ ID NO: 1277559 - RNA, 21 nt, Human
aacauagacagaagaaacaag

SEQ ID NO: 1277560 - RNA, 12 nt, Human
aacauagauaaa

SEQ ID NO: 1277561 - RNA, 14 nt, Human
guccgguguucuaa

SEQ ID NO: 1277562 - RNA, 15 nt, Human
guccgguguucuaag

SEQ ID NO: 1277563 - RNA, 16 nt, Human
guccgguguucuaaga

SEQ ID NO: 1277564 - RNA, 17 nt, Human
guccgguguucuaagau

SEQ ID NO: 1277565 - RNA, 19 nt, Human
guccgugggacggugccca

SEQ ID NO: 1277566 - RNA, 18 nt, Human
gucacauuccugaacagg

SEQ ID NO: 1277567 - RNA, 15 nt, Human
gucacaggaaaaagu

SEQ ID NO: 1277568 - RNA, 23 nt, Human
gucacagggcaguaccugagggu

SEQ ID NO: 1277569 - RNA, 14 nt, Human
gucacauaaaacuu

SEQ ID NO: 1277570 - RNA, 19 nt, Human
gucacaggacucugccucc

SEQ ID NO: 1277571 - RNA, 16 nt, Human
gucacaggagggaggg

SEQ ID NO: 1277572 - RNA, 20 nt, Human
gucacaggaaguagaggagg

SEQ ID NO: 1277573 - RNA, 17 nt, Human
gucacaggacucugccu

SEQ ID NO: 1277574 - RNA, 18 nt, Human
gucacaggacucugccuc

SEQ ID NO: 1277575 - RNA, 13 nt, Human
gucaauuuauaau

SEQ ID NO: 1277576 - RNA, 19 nt, Human
aaauuuaaacuauaagcaa

SEQ ID NO: 1277577 - RNA, 13 nt, Human
aaauuuaaagcag

SEQ ID NO: 1277578 - RNA, 18 nt, Human
aaauuuaaagcagguucu

SEQ ID NO: 1277579 - RNA, 21 nt, Human
aaauuuaaagcagguucuugu

SEQ ID NO: 1277580 - RNA, 15 nt, Human
gucacaggaaguaga

SEQ ID NO: 1277581 - RNA, 13 nt, Human
gucacaggaagua

SEQ ID NO: 1277582 - RNA, 21 nt, Human
gucaauuuuguuauguauauu

SEQ ID NO: 1277583 - RNA, 17 nt, Human
gucaauuucuguguugc

SEQ ID NO: 1277584 - RNA, 22 nt, Human
gucaauuucuguguugccaagc

SEQ ID NO: 1277585 - RNA, 12 nt, Human
gucacagcugua

SEQ ID NO: 1277586 - RNA, 20 nt, Human
gucacugcacagugcaucuc

SEQ ID NO: 1277587 - RNA, 16 nt, Human
gucacugacacacacg

SEQ ID NO: 1277588 - RNA, 23 nt, Human
gucacugcacagugcaucucagc

SEQ ID NO: 1277589 - RNA, 12 nt, Human
gucacugagacc

SEQ ID NO: 1277590 - RNA, 22 nt, Human
gucaccaauguacccaccgggc

SEQ ID NO: 1277591 - RNA, 19 nt, Human
gucaccaauguacccaccg

SEQ ID NO: 1277592 - RNA, 14 nt, Human
gucaggaaagagaa

SEQ ID NO: 1277593 - RNA, 19 nt, Human
gucagaacagcagacucag

SEQ ID NO: 1277594 - RNA, 17 nt, Human
gucacuuuguuuuacug

SEQ ID NO: 1277595 - RNA, 14 nt, Human
gucacuuuuucuga

SEQ ID NO: 1277596 - RNA, 17 nt, Human
gucacuuuuugaggcaa

SEQ ID NO: 1277597 - RNA, 19 nt, Human
gucacuuuuugaggcaaaa

SEQ ID NO: 1277598 - RNA, 18 nt, Human
gucacuuuuugaggcaaa

SEQ ID NO: 1277599 - RNA, 18 nt, Human
gucacuuagguaguacca

SEQ ID NO: 1277600 - RNA, 19 nt, Human
gucacuggaccacugggca

SEQ ID NO: 1277601 - RNA, 21 nt, Human
gucacugguagaccaaaauaa

SEQ ID NO: 1277602 - RNA, 17 nt, Human
gucacuguuccuuguca

SEQ ID NO: 1277603 - RNA, 16 nt, Human
gucagaacagcagacu

SEQ ID NO: 1277604 - RNA, 20 nt, Human
gucaggagugugugugagug

SEQ ID NO: 1277605 - RNA, 17 nt, Human
gucagggaguguucccu

SEQ ID NO: 1277606 - RNA, 18 nt, Human
gucaggagugugugugag

SEQ ID NO: 1277607 - RNA, 16 nt, Human
gucaguaccuucaaac

SEQ ID NO: 1277608 - RNA, 23 nt, Human
gucagugcugugcugugcuaugg

SEQ ID NO: 1277609 - RNA, 23 nt, Human
aaauuaugugccagauuuaugca

SEQ ID NO: 1277610 - RNA, 22 nt, Human
aaauuaugugacauuuuacauu

SEQ ID NO: 1277611 - RNA, 20 nt, Human
aaauuaugugacauuuuaca

SEQ ID NO: 1277612 - RNA, 17 nt, Human
aaauuaugugacauuuu

SEQ ID NO: 1277613 - RNA, 22 nt, Human
aaauuauguaaauuaucaggca

SEQ ID NO: 1277614 - RNA, 11 nt, Human
aaauucaaaua

SEQ ID NO: 1277615 - RNA, 16 nt, Human
aaauucaacaaacauu

SEQ ID NO: 1277616 - RNA, 14 nt, Human
aaauucaacaaaca

SEQ ID NO: 1277617 - RNA, 16 nt, Human
aaauuaucuauagcua

SEQ ID NO: 1277618 - RNA, 15 nt, Human
aaauuauguaaauua

SEQ ID NO: 1277619 - RNA, 19 nt, Human
aaauuaggauuucaugauu

SEQ ID NO: 1277620 - RNA, 18 nt, Human
aaauuaggauuucaugau

SEQ ID NO: 1277621 - RNA, 13 nt, Human
aaauuacaacuaa

SEQ ID NO: 1277622 - RNA, 12 nt, Human
aaauuacaacua

SEQ ID NO: 1277623 - RNA, 16 nt, Human
aaauuacacccaaaga

SEQ ID NO: 1277624 - RNA, 22 nt, Human
aaauuacacccaaagagguauu

SEQ ID NO: 1277625 - RNA, 23 nt, Human
aaauuacauuacugaaaacuuca

SEQ ID NO: 1277626 - RNA, 22 nt, Human
aaauuagccaguaauccuguag

SEQ ID NO: 1277627 - RNA, 21 nt, Human
aaauuagccaguaauccugua

SEQ ID NO: 1277628 - RNA, 20 nt, Human
aaauuagccaguaauccugu

SEQ ID NO: 1277629 - RNA, 15 nt, Human
aaauguggcuccugg

SEQ ID NO: 1277630 - RNA, 14 nt, Human
aaauuaaucugggc

SEQ ID NO: 1277631 - RNA, 19 nt, Human
aaaugugggauuauggguc

SEQ ID NO: 1277632 - RNA, 22 nt, Human
aaaugugccuauugcuagagcu

SEQ ID NO: 1277633 - RNA, 16 nt, Human
aaaugugcuuugagaa

SEQ ID NO: 1277634 - RNA, 17 nt, Human
aaauuguauuacaaauc

SEQ ID NO: 1277635 - RNA, 13 nt, Human
aaauucuccugga

SEQ ID NO: 1277636 - RNA, 18 nt, Human
aaauugucagaugcugug

SEQ ID NO: 1277637 - RNA, 19 nt, Human
aaauuguauauuguaauuu

SEQ ID NO: 1277638 - RNA, 14 nt, Human
aaauucuccuggag

SEQ ID NO: 1277639 - RNA, 16 nt, Human
aaauucuccuggaggu

SEQ ID NO: 1277640 - RNA, 13 nt, Human
aaauuguauauug

SEQ ID NO: 1277641 - RNA, 15 nt, Human
aaauuguauauugua

SEQ ID NO: 1277642 - RNA, 21 nt, Human
aaauugucccuuaaacaaaaa

SEQ ID NO: 1277643 - RNA, 14 nt, Human
aaauuuaaacuaua

SEQ ID NO: 1277644 - RNA, 17 nt, Human
aaauuccaagugauuga

SEQ ID NO: 1277645 - RNA, 14 nt, Human
aaauucacaaacuu

SEQ ID NO: 1277646 - RNA, 15 nt, Human
aaauucacaaacuuu

SEQ ID NO: 1277647 - RNA, 17 nt, Human
aaauucacaaacuuuua

SEQ ID NO: 1277648 - RNA, 18 nt, Human
aaauucacaaacuuuuau

SEQ ID NO: 1277649 - RNA, 15 nt, Human
aaauucguguguuuu

SEQ ID NO: 1277650 - RNA, 19 nt, Human
aaauucacaugaugcacuu

SEQ ID NO: 1277651 - RNA, 21 nt, Human
aaauucacaugaugcacuuca

SEQ ID NO: 1277652 - RNA, 12 nt, Human
aaauuccaaagu

SEQ ID NO: 1277653 - RNA, 14 nt, Human
aaauuccaaagucu

SEQ ID NO: 1277654 - RNA, 17 nt, Human
aaauuccaaagucucua

SEQ ID NO: 1277655 - RNA, 18 nt, Human
aaauuccaaagucucuaa

SEQ ID NO: 1277656 - RNA, 21 nt, Human
aaauuccaaagucucuaauuc

SEQ ID NO: 1277657 - RNA, 22 nt, Human
aaauuccaaagucucuaauucu

SEQ ID NO: 1277658 - RNA, 19 nt, Human
guauugacaaaauguuauu

SEQ ID NO: 1277659 - RNA, 17 nt, Human
guauugacaaaauguua

SEQ ID NO: 1277660 - RNA, 16 nt, Human
guauugacaaaauguu

SEQ ID NO: 1277661 - RNA, 15 nt, Human
guauugacaaaaugu

SEQ ID NO: 1277662 - RNA, 13 nt, Human
guauugacaaaau

SEQ ID NO: 1277663 - RNA, 11 nt, Human
guauugacaaa

SEQ ID NO: 1277664 - RNA, 18 nt, Human
guauugacaaaauguuau

SEQ ID NO: 1277665 - RNA, 16 nt, Human
aaaucauucauuuucu

SEQ ID NO: 1277666 - RNA, 19 nt, Human
aaaucagcuauuuugugaa

SEQ ID NO: 1277667 - RNA, 22 nt, Human
aaaucaucagaaaggaaaaaca

SEQ ID NO: 1277668 - RNA, 15 nt, Human
aaaucaucagaaagg

SEQ ID NO: 1277669 - RNA, 20 nt, Human
aaaucaucagaaaggaaaaa

SEQ ID NO: 1277670 - RNA, 21 nt, Human
aaaucaugaagauauuuuucc

SEQ ID NO: 1277671 - RNA, 11 nt, Human
aaauguauacu

SEQ ID NO: 1277672 - RNA, 20 nt, Human
aaauguaguucugcuccaga

SEQ ID NO: 1277673 - RNA, 14 nt, Human
aaauguauaugcac

SEQ ID NO: 1277674 - RNA, 15 nt, Human
aaauguauaugcacu

SEQ ID NO: 1277675 - RNA, 20 nt, Human
aaauguaucauagaaaugua

SEQ ID NO: 1277676 - RNA, 17 nt, Human
aaauguaucauagaaau

SEQ ID NO: 1277677 - RNA, 17 nt, Human
aaaugucucacugagca

SEQ ID NO: 1277678 - RNA, 16 nt, Human
aaaugucucacugagc

SEQ ID NO: 1277679 - RNA, 14 nt, Human
aaaugucuuccugg

SEQ ID NO: 1277680 - RNA, 12 nt, Human
aaaugucuugug

SEQ ID NO: 1277681 - RNA, 13 nt, Human
aaaugucuugugu

SEQ ID NO: 1277682 - RNA, 11 nt, Human
guauuuauuca

SEQ ID NO: 1277683 - RNA, 22 nt, Human
aaauguaguauggccuguguca

SEQ ID NO: 1277684 - RNA, 13 nt, Human
guauuuaucuuua

SEQ ID NO: 1277685 - RNA, 16 nt, Human
guauuuacgcuuugau

SEQ ID NO: 1277686 - RNA, 17 nt, Human
guauuuacgcuuugauu

SEQ ID NO: 1277687 - RNA, 19 nt, Human
guauuuacgcuuugauuca

SEQ ID NO: 1277688 - RNA, 14 nt, Human
guauuuagaagcca

SEQ ID NO: 1277689 - RNA, 13 nt, Human
guauuuauaaaua

SEQ ID NO: 1277690 - RNA, 16 nt, Human
guauugugauuaucaa

SEQ ID NO: 1277691 - RNA, 17 nt, Human
guauugucugaacuugc

SEQ ID NO: 1277692 - RNA, 14 nt, Human
guauugugcaaugu

SEQ ID NO: 1277693 - RNA, 17 nt, Human
guauugugcaaugugua

SEQ ID NO: 1277694 - RNA, 19 nt, Human
guauugugcaauguguaua

SEQ ID NO: 1277695 - RNA, 22 nt, Human
guauugugcaauguguauaaac

SEQ ID NO: 1277696 - RNA, 23 nt, Human
guauugugcaauguguauaaaca

SEQ ID NO: 1277697 - RNA, 16 nt, Human
guauuguugaaaaagu

SEQ ID NO: 1277698 - RNA, 13 nt, Human
guauuguuguccu

SEQ ID NO: 1277699 - RNA, 15 nt, Human
guauuguuguccuuu

SEQ ID NO: 1277700 - RNA, 18 nt, Human
guauuguuguccuuuuca

SEQ ID NO: 1277701 - RNA, 19 nt, Human
guauuguuguccuuuucau

SEQ ID NO: 1277702 - RNA, 20 nt, Human
guauuguuguccuuuucaua

SEQ ID NO: 1277703 - RNA, 21 nt, Human
guauuguuguccuuuucauag

SEQ ID NO: 1277704 - RNA, 17 nt, Human
guauuuaacagaaauug

SEQ ID NO: 1277705 - RNA, 14 nt, Human
aaaacaaggaugaa

SEQ ID NO: 1277706 - RNA, 20 nt, Human
aaaacaaagcaauucuuuca

SEQ ID NO: 1277707 - RNA, 15 nt, Human
aaaacaaaacugcau

SEQ ID NO: 1277708 - RNA, 15 nt, Human
aaaacaaacucauuc

SEQ ID NO: 1277709 - RNA, 17 nt, Human
aaaacaaggaugaauua

SEQ ID NO: 1277710 - RNA, 22 nt, Human
aaaacaacuauggaucagaaua

SEQ ID NO: 1277711 - RNA, 21 nt, Human
aaaaauugcugacuguagcuu

SEQ ID NO: 1277712 - RNA, 23 nt, Human
aaaaauugcugacuguagcuuug

SEQ ID NO: 1277713 - RNA, 14 nt, Human
aaaaauugugauca

SEQ ID NO: 1277714 - RNA, 21 nt, Human
aaaaauuguuaauuuuuccua

SEQ ID NO: 1277715 - RNA, 20 nt, Human
aaaaauucagcaaagugguu

SEQ ID NO: 1277716 - RNA, 13 nt, Human
aaaaauugaaaug

SEQ ID NO: 1277717 - RNA, 22 nt, Human
aaaaauugaaauguaaggcugu

SEQ ID NO: 1277718 - RNA, 14 nt, Human
aaaaauugaaaugu

SEQ ID NO: 1277719 - RNA, 15 nt, Human
aaaaauugcugacug

SEQ ID NO: 1277720 - RNA, 13 nt, Human
aaaaagauaaaca

SEQ ID NO: 1277721 - RNA, 19 nt, Human
aaaaagauaaacacaagau

SEQ ID NO: 1277722 - RNA, 11 nt, Human
aaaaagauccc

SEQ ID NO: 1277723 - RNA, 14 nt, Human
aaaaagaucccaaa

SEQ ID NO: 1277724 - RNA, 17 nt, Human
aaaaagaaugaagccuc

SEQ ID NO: 1277725 - RNA, 20 nt, Human
aaaaacuuuggaaccagacu

SEQ ID NO: 1277726 - RNA, 14 nt, Human
aaaaagaagugcug

SEQ ID NO: 1277727 - RNA, 21 nt, Human
aaaaacuuuggaaccagacuc

SEQ ID NO: 1277728 - RNA, 18 nt, Human
aaaaagaagcaaccucag

SEQ ID NO: 1277729 - RNA, 15 nt, Human
aaaaacugagugacu

SEQ ID NO: 1277730 - RNA, 21 nt, Human
aaaaacagguauauacuuuga

SEQ ID NO: 1277731 - RNA, 19 nt, Human
aaaaacagguauauacuuu

SEQ ID NO: 1277732 - RNA, 15 nt, Human
aaaaaccaacaucua

SEQ ID NO: 1277733 - RNA, 12 nt, Human
aaaaacaggcac

SEQ ID NO: 1277734 - RNA, 18 nt, Human
aaaaacagguauauacuu

SEQ ID NO: 1277735 - RNA, 15 nt, Human
aguugaauuuuacau

SEQ ID NO: 1277736 - RNA, 12 nt, Human
aguugaauuuuu

SEQ ID NO: 1277737 - RNA, 19 nt, Human
aguuguaccgcaaugugac

SEQ ID NO: 1277738 - RNA, 10 nt, Human
aguugaauuu

SEQ ID NO: 1277739 - RNA, 19 nt, Human
aguuguauuuaacagaaau

SEQ ID NO: 1277740 - RNA, 20 nt, Human
aguuguauuuaacagaaauu

SEQ ID NO: 1277741 - RNA, 22 nt, Human
aguuguauuuaacagaaauugu

SEQ ID NO: 1277742 - RNA, 15 nt, Human
aguuacaguucugug

SEQ ID NO: 1277743 - RNA, 16 nt, Human
aguuacaguucugugg

SEQ ID NO: 1277744 - RNA, 22 nt, Human
aguuacauaauucacucugagu

SEQ ID NO: 1277745 - RNA, 15 nt, Human
aguuacauguuugca

SEQ ID NO: 1277746 - RNA, 13 nt, Human
aguuaagaccugg

SEQ ID NO: 1277747 - RNA, 16 nt, Human
aguuaagaccuggcag

SEQ ID NO: 1277748 - RNA, 17 nt, Human
aguuaagaccuggcagc

SEQ ID NO: 1277749 - RNA, 13 nt, Human
aguuacaguucug

SEQ ID NO: 1277750 - RNA, 14 nt, Human
aguuacaguucugu

SEQ ID NO: 1277751 - RNA, 23 nt, Human
aguuguauuuaacagaaauugua

SEQ ID NO: 1277752 - RNA, 20 nt, Human
agugugaauugcaaaaccca

SEQ ID NO: 1277753 - RNA, 23 nt, Human
agugucuuuccacggagccacuc

SEQ ID NO: 1277754 - RNA, 13 nt, Human
agugucuuuccac

SEQ ID NO: 1277755 - RNA, 15 nt, Human
agugucuuuuuuugu

SEQ ID NO: 1277756 - RNA, 16 nt, Human
agugucuuuuuuugua

SEQ ID NO: 1277757 - RNA, 17 nt, Human
agugucuuuuuuuguau

SEQ ID NO: 1277758 - RNA, 19 nt, Human
agugucuuuuuuuguauag

SEQ ID NO: 1277759 - RNA, 20 nt, Human
agugucuuuuuuuguauagu

SEQ ID NO: 1277760 - RNA, 22 nt, Human
agugucuuuuuuuguauaguua

SEQ ID NO: 1277761 - RNA, 18 nt, Human
agugauuaccagggacug

SEQ ID NO: 1277762 - RNA, 18 nt, Human
agugauucucaugccuca

SEQ ID NO: 1277763 - RNA, 19 nt, Human
agugauucucaugccucag

SEQ ID NO: 1277764 - RNA, 19 nt, Human
aguuaagacaugauuuccu

SEQ ID NO: 1277765 - RNA, 20 nt, Human
aguuaagacaugauuuccuu

SEQ ID NO: 1277766 - RNA, 16 nt, Human
aguccaagcauuuaga

SEQ ID NO: 1277767 - RNA, 17 nt, Human
agucauucguucugugg

SEQ ID NO: 1277768 - RNA, 15 nt, Human
agucauuggcugucu

SEQ ID NO: 1277769 - RNA, 21 nt, Human
aguccaagcauuuagauguau

SEQ ID NO: 1277770 - RNA, 11 nt, Human
aguccaagcug

SEQ ID NO: 1277771 - RNA, 14 nt, Human
aguccaagcuggga

SEQ ID NO: 1277772 - RNA, 16 nt, Human
aguccaagcugggaga

SEQ ID NO: 1277773 - RNA, 13 nt, Human
aguccaagguuua

SEQ ID NO: 1277774 - RNA, 16 nt, Human
aguccaagguuuaaag

SEQ ID NO: 1277775 - RNA, 14 nt, Human
aguccaauguggca

SEQ ID NO: 1277776 - RNA, 14 nt, Human
aguccacaaaauaa

SEQ ID NO: 1277777 - RNA, 15 nt, Human
agucauucagauaug

SEQ ID NO: 1277778 - RNA, 20 nt, Human
agucauucagauaugauuca

SEQ ID NO: 1277779 - RNA, 23 nt, Human
agucauucagauaugauucaaau

SEQ ID NO: 1277780 - RNA, 19 nt, Human
agucaaauugugugaaagg

SEQ ID NO: 1277781 - RNA, 22 nt, Human
agucaacccuccuaaaaguuca

SEQ ID NO: 1277782 - RNA, 15 nt, Human
agucaaccugccuga

SEQ ID NO: 1277783 - RNA, 14 nt, Human
agucaaccugggca

SEQ ID NO: 1277784 - RNA, 15 nt, Human
agucaaccugggcaa

SEQ ID NO: 1277785 - RNA, 15 nt, Human
agucaaauuguguga

SEQ ID NO: 1277786 - RNA, 17 nt, Human
agucaaauugugugaaa

SEQ ID NO: 1277787 - RNA, 18 nt, Human
agucaaggguaggguggg

SEQ ID NO: 1277788 - RNA, 13 nt, Human
agucaaauugugu

SEQ ID NO: 1277789 - RNA, 21 nt, Human
agucaauacauagugcugcug

SEQ ID NO: 1277790 - RNA, 17 nt, Human
agucaauauuuuuagau

SEQ ID NO: 1277791 - RNA, 20 nt, Human
agucaagugcguccacgagc

SEQ ID NO: 1277792 - RNA, 10 nt, Human
agucaauaca

SEQ ID NO: 1277793 - RNA, 12 nt, Human
agucaauacaua

SEQ ID NO: 1277794 - RNA, 14 nt, Human
agugaucaaacuac

SEQ ID NO: 1277795 - RNA, 15 nt, Human
agugauauuggaacu

SEQ ID NO: 1277796 - RNA, 16 nt, Human
agugacagacaggcuc

SEQ ID NO: 1277797 - RNA, 17 nt, Human
agugacagacaggcucu

SEQ ID NO: 1277798 - RNA, 22 nt, Human
aguccuggaugauacuaauaaa

SEQ ID NO: 1277799 - RNA, 22 nt, Human
aguccugcgaaaacccccaaac

SEQ ID NO: 1277800 - RNA, 20 nt, Human
aguccacuucugacagccuc

SEQ ID NO: 1277801 - RNA, 14 nt, Human
aguccuggaagcca

SEQ ID NO: 1277802 - RNA, 20 nt, Human
aguccuggaagccagcuuuc

SEQ ID NO: 1277803 - RNA, 22 nt, Human
aguccuggaagccagcuuuccc

SEQ ID NO: 1277804 - RNA, 23 nt, Human
aguccuggaagccagcuuucccu

SEQ ID NO: 1277805 - RNA, 17 nt, Human
aguccuggaugauacua

SEQ ID NO: 1277806 - RNA, 19 nt, Human
aguccuggaugauacuaau

SEQ ID NO: 1277807 - RNA, 18 nt, Human
aguccacccuugguuccu

SEQ ID NO: 1277808 - RNA, 15 nt, Human
aguccaccugaggaa

SEQ ID NO: 1277809 - RNA, 14 nt, Human
aguccacuuuguuu

SEQ ID NO: 1277810 - RNA, 18 nt, Human
auaucacuugucaauaaa

SEQ ID NO: 1277811 - RNA, 22 nt, Human
auaucacccagacauaaaggaa

SEQ ID NO: 1277812 - RNA, 21 nt, Human
auaucacccagacauaaagga

SEQ ID NO: 1277813 - RNA, 14 nt, Human
auaucacacacauu

SEQ ID NO: 1277814 - RNA, 18 nt, Human
auaucacauguuuucucu

SEQ ID NO: 1277815 - RNA, 13 nt, Human
auaucacagaaaa

SEQ ID NO: 1277816 - RNA, 22 nt, Human
auaucaccaaaaaccuauucca

SEQ ID NO: 1277817 - RNA, 14 nt, Human
auaucacccagaca

SEQ ID NO: 1277818 - RNA, 16 nt, Human
auaucacccagacaua

SEQ ID NO: 1277819 - RNA, 19 nt, Human
auaucacccagacauaaag

SEQ ID NO: 1277820 - RNA, 20 nt, Human
auaucacccagacauaaagg

SEQ ID NO: 1277821 - RNA, 21 nt, Human
auauccaugaccuaguuuucc

SEQ ID NO: 1277822 - RNA, 13 nt, Human
auaucccacuggg

SEQ ID NO: 1277823 - RNA, 15 nt, Human
auaucccuacaugua

SEQ ID NO: 1277824 - RNA, 16 nt, Human
auaucccuacauguau

SEQ ID NO: 1277825 - RNA, 17 nt, Human
auaucccuacauguauu

SEQ ID NO: 1277826 - RNA, 15 nt, Human
auaugcguauuauac

SEQ ID NO: 1277827 - RNA, 16 nt, Human
auaugcuaccaccagc

SEQ ID NO: 1277828 - RNA, 17 nt, Human
auaugcuaccaccagcu

SEQ ID NO: 1277829 - RNA, 19 nt, Human
auaugcuaccaccagcugu

SEQ ID NO: 1277830 - RNA, 21 nt, Human
auaugcuaccaccagcugugu

SEQ ID NO: 1277831 - RNA, 14 nt, Human
auaugcauauuugu

SEQ ID NO: 1277832 - RNA, 20 nt, Human
auaucccuccuguugggaga

SEQ ID NO: 1277833 - RNA, 13 nt, Human
auauccugcuuga

SEQ ID NO: 1277834 - RNA, 19 nt, Human
auaugcuuguaacuaaaau

SEQ ID NO: 1277835 - RNA, 15 nt, Human
auauggaaauauaua

SEQ ID NO: 1277836 - RNA, 16 nt, Human
auauggaaauauauau

SEQ ID NO: 1277837 - RNA, 18 nt, Human
auauggaaauauauauua

SEQ ID NO: 1277838 - RNA, 23 nt, Human
auauggaaauauauauuauacuu

SEQ ID NO: 1277839 - RNA, 15 nt, Human
auauggaauuuugca

SEQ ID NO: 1277840 - RNA, 22 nt, Human
auauggacaaaacaagaaagac

SEQ ID NO: 1277841 - RNA, 15 nt, Human
auauggacacuuaau

SEQ ID NO: 1277842 - RNA, 20 nt, Human
auauggacacuuaauacuac

SEQ ID NO: 1277843 - RNA, 19 nt, Human
auauggaauuuugcaaaga

SEQ ID NO: 1277844 - RNA, 23 nt, Human
auauuucagauaaucacaauaca

SEQ ID NO: 1277845 - RNA, 19 nt, Human
auauuuauuuuuuuuaagu

SEQ ID NO: 1277846 - RNA, 16 nt, Human
auauuuauaaaaauaa

SEQ ID NO: 1277847 - RNA, 18 nt, Human
auauuuaguguucauaaa

SEQ ID NO: 1277848 - RNA, 22 nt, Human
auauuauacuuguaauuaugga

SEQ ID NO: 1277849 - RNA, 14 nt, Human
auauuuauuacugu

SEQ ID NO: 1277850 - RNA, 19 nt, Human
auauuuauuacuguaagaa

SEQ ID NO: 1277851 - RNA, 18 nt, Human
auauuuauuuuaauaaug

SEQ ID NO: 1277852 - RNA, 22 nt, Human
auauuuauuacuguaagaaaau

SEQ ID NO: 1277853 - RNA, 21 nt, Human
auauuuauuuucuuucuguaa

SEQ ID NO: 1277854 - RNA, 14 nt, Human
auauuauacuugua

SEQ ID NO: 1277855 - RNA, 16 nt, Human
auauuauacuuguaau

SEQ ID NO: 1277856 - RNA, 19 nt, Human
auauuauacuuguaauuau

SEQ ID NO: 1277857 - RNA, 20 nt, Human
auauuuagauguaauuuugu

SEQ ID NO: 1277858 - RNA, 22 nt, Human
auauuuagauguaauuuugugu

SEQ ID NO: 1277859 - RNA, 12 nt, Human
auauaauucuua

SEQ ID NO: 1277860 - RNA, 15 nt, Human
auauaauugccaaaa

SEQ ID NO: 1277861 - RNA, 18 nt, Human
auauaauuguuuuaucug

SEQ ID NO: 1277862 - RNA, 17 nt, Human
auauaccaaagcacauu

SEQ ID NO: 1277863 - RNA, 19 nt, Human
auauacucaagagugguau

SEQ ID NO: 1277864 - RNA, 22 nt, Human
auauacuauuaaaaagguuuac

SEQ ID NO: 1277865 - RNA, 19 nt, Human
auauacucacuuucuagau

SEQ ID NO: 1277866 - RNA, 12 nt, Human
auauaccaaagc

SEQ ID NO: 1277867 - RNA, 17 nt, Human
auauagcugaucaguuu

SEQ ID NO: 1277868 - RNA, 18 nt, Human
auauagcugaucaguuuu

SEQ ID NO: 1277869 - RNA, 15 nt, Human
auauaaguguguguu

SEQ ID NO: 1277870 - RNA, 15 nt, Human
auauaaguguacaua

SEQ ID NO: 1277871 - RNA, 18 nt, Human
auauaaguguacauaugu

SEQ ID NO: 1277872 - RNA, 21 nt, Human
auauaauguuguuauuuaaag

SEQ ID NO: 1277873 - RNA, 22 nt, Human
auauaauguuguuauuuaaaga

SEQ ID NO: 1277874 - RNA, 15 nt, Human
auauaauuauauguu

SEQ ID NO: 1277875 - RNA, 14 nt, Human
auauaauuauaugu

SEQ ID NO: 1277876 - RNA, 15 nt, Human
auauaagugauugcu

SEQ ID NO: 1277877 - RNA, 14 nt, Human
auauaaguguacau

SEQ ID NO: 1277878 - RNA, 16 nt, Human
auacuugaaaauuaac

SEQ ID NO: 1277879 - RNA, 15 nt, Human
auacuugaaaauuaa

SEQ ID NO: 1277880 - RNA, 18 nt, Human
auacuuauuuguauaugg

SEQ ID NO: 1277881 - RNA, 15 nt, Human
auacuucgacacugu

SEQ ID NO: 1277882 - RNA, 19 nt, Human
auacuucgacacuguucuu

SEQ ID NO: 1277883 - RNA, 19 nt, Human
auacuugaaaauuaacaug

SEQ ID NO: 1277884 - RNA, 16 nt, Human
auacuucucauuuuuu

SEQ ID NO: 1277885 - RNA, 15 nt, Human
auacuucuugugugu

SEQ ID NO: 1277886 - RNA, 16 nt, Human
auacuucuugugugua

SEQ ID NO: 1277887 - RNA, 18 nt, Human
auacuucuuguguguaug

SEQ ID NO: 1277888 - RNA, 12 nt, Human
auaguauaaacc

SEQ ID NO: 1277889 - RNA, 20 nt, Human
auacuucuuguguguaugca

SEQ ID NO: 1277890 - RNA, 19 nt, Human
auaaguauuuaauucaugu

SEQ ID NO: 1277891 - RNA, 16 nt, Human
auaaguauuucaaauu

SEQ ID NO: 1277892 - RNA, 18 nt, Human
auaaguauuucaaauugg

SEQ ID NO: 1277893 - RNA, 19 nt, Human
auaaguauuucaaauugga

SEQ ID NO: 1277894 - RNA, 14 nt, Human
auaagucaacagua

SEQ ID NO: 1277895 - RNA, 15 nt, Human
auaagucaacaguaa

SEQ ID NO: 1277896 - RNA, 16 nt, Human
auaagucaacaguaaa

SEQ ID NO: 1277897 - RNA, 18 nt, Human
auaagucaacaguaaacc

SEQ ID NO: 1277898 - RNA, 17 nt, Human
auaagucaacaguaaac

SEQ ID NO: 1277899 - RNA, 13 nt, Human
auaaguguacaua

SEQ ID NO: 1277900 - RNA, 14 nt, Human
auaaguguacauau

SEQ ID NO: 1277901 - RNA, 19 nt, Human
auaaguguacauaugugcu

SEQ ID NO: 1277902 - RNA, 20 nt, Human
auaaguguacauaugugcug

SEQ ID NO: 1277903 - RNA, 22 nt, Human
auaaguguguguuuuucauaaa

SEQ ID NO: 1277904 - RNA, 19 nt, Human
auaaguguguguuuuucau

SEQ ID NO: 1277905 - RNA, 17 nt, Human
auaaguguucugucuga

SEQ ID NO: 1277906 - RNA, 13 nt, Human
auaaugugaaaau

SEQ ID NO: 1277907 - RNA, 16 nt, Human
auaaugugaaaauggu

SEQ ID NO: 1277908 - RNA, 23 nt, Human
auaacagaaagccugggugacau

SEQ ID NO: 1277909 - RNA, 15 nt, Human
auaacagauuucuca

SEQ ID NO: 1277910 - RNA, 22 nt, Human
auacccucccucccuacccuaa

SEQ ID NO: 1277911 - RNA, 16 nt, Human
auacccucccucccua

SEQ ID NO: 1277912 - RNA, 14 nt, Human
auacccucccuccc

SEQ ID NO: 1277913 - RNA, 18 nt, Human
auaccccuuacaaaugaa

SEQ ID NO: 1277914 - RNA, 22 nt, Human
auacccccugcaaagcccagcu

SEQ ID NO: 1277915 - RNA, 20 nt, Human
auacaauuuuuuuuauuagu

SEQ ID NO: 1277916 - RNA, 17 nt, Human
auacaauuuuuuuuauu

SEQ ID NO: 1277917 - RNA, 11 nt, Human
auacacaaauu

SEQ ID NO: 1277918 - RNA, 14 nt, Human
auaauuacuauguc

SEQ ID NO: 1277919 - RNA, 16 nt, Human
auaauuauaauauacu

SEQ ID NO: 1277920 - RNA, 19 nt, Human
auaccugaaugcucuguag

SEQ ID NO: 1277921 - RNA, 20 nt, Human
auaccugauuuuuuuuccuu

SEQ ID NO: 1277922 - RNA, 15 nt, Human
auacccugaccuggc

SEQ ID NO: 1277923 - RNA, 19 nt, Human
auacccuggccgcccccug

SEQ ID NO: 1277924 - RNA, 22 nt, Human
auacccuuggaaauacuguaug

SEQ ID NO: 1277925 - RNA, 21 nt, Human
auaccuaagaaguacauuguu

SEQ ID NO: 1277926 - RNA, 15 nt, Human
auaccuaagaaguac

SEQ ID NO: 1277927 - RNA, 19 nt, Human
auacuuauauggaaauucu

SEQ ID NO: 1277928 - RNA, 18 nt, Human
auguuucuuuguaaugaa

SEQ ID NO: 1277929 - RNA, 13 nt, Human
augugucuuuaga

SEQ ID NO: 1277930 - RNA, 21 nt, Human
augugucuuuagauagcccug

SEQ ID NO: 1277931 - RNA, 11 nt, Human
augugucccag

SEQ ID NO: 1277932 - RNA, 12 nt, Human
augugucccaga

SEQ ID NO: 1277933 - RNA, 14 nt, Human
augugucccagaag

SEQ ID NO: 1277934 - RNA, 16 nt, Human
augugucccagaagau

SEQ ID NO: 1277935 - RNA, 14 nt, Human
auguguccugacac

SEQ ID NO: 1277936 - RNA, 17 nt, Human
auguguccugacacugc

SEQ ID NO: 1277937 - RNA, 13 nt, Human
auguguccugguu

SEQ ID NO: 1277938 - RNA, 22 nt, Human
auguguacaaaaguuucauccu

SEQ ID NO: 1277939 - RNA, 18 nt, Human
auguguauuacaaauauu

SEQ ID NO: 1277940 - RNA, 15 nt, Human
auguuugcauauaag

SEQ ID NO: 1277941 - RNA, 13 nt, Human
auguuugcauaua

SEQ ID NO: 1277942 - RNA, 21 nt, Human
auguuugcaccuuucuaguug

SEQ ID NO: 1277943 - RNA, 21 nt, Human
auguuugauagauuuucugcu

SEQ ID NO: 1277944 - RNA, 17 nt, Human
auguuugcaccuuucua

SEQ ID NO: 1277945 - RNA, 19 nt, Human
auguuugcaccuuucuagu

SEQ ID NO: 1277946 - RNA, 22 nt, Human
auguuugcaccuuucuaguuga

SEQ ID NO: 1277947 - RNA, 14 nt, Human
auguuugcauauaa

SEQ ID NO: 1277948 - RNA, 17 nt, Human
auuaaagugcuaagguu

SEQ ID NO: 1277949 - RNA, 18 nt, Human
auuaaagugcuaagguuc

SEQ ID NO: 1277950 - RNA, 19 nt, Human
auuaaagugcuaagguucu

SEQ ID NO: 1277951 - RNA, 20 nt, Human
auuaaagugcuaagguucua

SEQ ID NO: 1277952 - RNA, 21 nt, Human
auuaaagugcuaagguucuaa

SEQ ID NO: 1277953 - RNA, 22 nt, Human
auuaaagugcuaagguucuaag

SEQ ID NO: 1277954 - RNA, 23 nt, Human
auuaaagugcuaagguucuaagg

SEQ ID NO: 1277955 - RNA, 13 nt, Human
auuaaauaaauuu

SEQ ID NO: 1277956 - RNA, 15 nt, Human
auuaaauaagauucu

SEQ ID NO: 1277957 - RNA, 16 nt, Human
auuaaauaagauucua

SEQ ID NO: 1277958 - RNA, 19 nt, Human
auuaaauaagauucuaacg

SEQ ID NO: 1277959 - RNA, 13 nt, Human
auuaaauucacaa

SEQ ID NO: 1277960 - RNA, 14 nt, Human
auuaaauucacaaa

SEQ ID NO: 1277961 - RNA, 16 nt, Human
auuaaauucacaaacu

SEQ ID NO: 1277962 - RNA, 17 nt, Human
auuaaauucacaaacuu

SEQ ID NO: 1277963 - RNA, 18 nt, Human
auuaaauucacaaacuuu

SEQ ID NO: 1277964 - RNA, 13 nt, Human
auguggggccagg

SEQ ID NO: 1277965 - RNA, 16 nt, Human
auguggggccagguca

SEQ ID NO: 1277966 - RNA, 15 nt, Human
auguggguuccacag

SEQ ID NO: 1277967 - RNA, 16 nt, Human
auguggguuccacaga

SEQ ID NO: 1277968 - RNA, 20 nt, Human
auguggugaaaagcagguug

SEQ ID NO: 1277969 - RNA, 16 nt, Human
auguggugaaaagcag

SEQ ID NO: 1277970 - RNA, 18 nt, Human
augugguggcacaggccc

SEQ ID NO: 1277971 - RNA, 22 nt, Human
augugguggcacaggcccccuu

SEQ ID NO: 1277972 - RNA, 17 nt, Human
auguggguuccacagac

SEQ ID NO: 1277973 - RNA, 15 nt, Human
auguggucacagcug

SEQ ID NO: 1277974 - RNA, 16 nt, Human
auguggucacagcugu

SEQ ID NO: 1277975 - RNA, 17 nt, Human
auguggucacagcugua

SEQ ID NO: 1277976 - RNA, 22 nt, Human
auguggucacagcuguauagcu

SEQ ID NO: 1277977 - RNA, 19 nt, Human
auguggucacagcuguaua

SEQ ID NO: 1277978 - RNA, 16 nt, Human
auguaaguaaacgguc

SEQ ID NO: 1277979 - RNA, 24 nt, Human
auguaagauuauagauucuaaaga

SEQ ID NO: 1277980 - RNA, 14 nt, Human
auguaauaaacuuu

SEQ ID NO: 1277981 - RNA, 15 nt, Human
auguaauaaacuuua

SEQ ID NO: 1277982 - RNA, 16 nt, Human
auguaauaaacuuuaa

SEQ ID NO: 1277983 - RNA, 22 nt, Human
auguaauaagguugaacacuuu

SEQ ID NO: 1277984 - RNA, 12 nt, Human
auguaauacuuc

SEQ ID NO: 1277985 - RNA, 15 nt, Human
auguaaucaauguuu

SEQ ID NO: 1277986 - RNA, 16 nt, Human
auguaaucaauguuuc

SEQ ID NO: 1277987 - RNA, 16 nt, Human
auguaagcugaaaaua

SEQ ID NO: 1277988 - RNA, 16 nt, Human
auguaacuuuuguaag

SEQ ID NO: 1277989 - RNA, 17 nt, Human
auguaacuuuuguaaga

SEQ ID NO: 1277990 - RNA, 18 nt, Human
auguaacuuuuguaagac

SEQ ID NO: 1277991 - RNA, 15 nt, Human
auguaagauuauaga

SEQ ID NO: 1277992 - RNA, 17 nt, Human
auguaagauuauagauu

SEQ ID NO: 1277993 - RNA, 19 nt, Human
auguaagauuauagauucu

SEQ ID NO: 1277994 - RNA, 20 nt, Human
auguaagauuauagauucua

SEQ ID NO: 1277995 - RNA, 21 nt, Human
auguaagauuauagauucuaa

SEQ ID NO: 1277996 - RNA, 22 nt, Human
auguaagauuauagauucuaaa

SEQ ID NO: 1277997 - RNA, 16 nt, Human
auggucugcccucugc

SEQ ID NO: 1277998 - RNA, 15 nt, Human
auggucuuacagcag

SEQ ID NO: 1277999 - RNA, 16 nt, Human
auggucuuacagcagg

SEQ ID NO: 1278000 - RNA, 17 nt, Human
auggucuuacagcaggc

SEQ ID NO: 1278001 - RNA, 17 nt, Human
auguacauguacugauu

SEQ ID NO: 1278002 - RNA, 17 nt, Human
auguacauagugcuaac

SEQ ID NO: 1278003 - RNA, 15 nt, Human
auguacauagugcua

SEQ ID NO: 1278004 - RNA, 21 nt, Human
auguaauacuucuugugugua

SEQ ID NO: 1278005 - RNA, 19 nt, Human
auguaaucuugaauuguaa

SEQ ID NO: 1278006 - RNA, 14 nt, Human
auguacaagaugaa

SEQ ID NO: 1278007 - RNA, 16 nt, Human
augucaaucagccuag

SEQ ID NO: 1278008 - RNA, 23 nt, Human
augucaagggcagcuuugcucau

SEQ ID NO: 1278009 - RNA, 21 nt, Human
augucaagggcagcuuugcuc

SEQ ID NO: 1278010 - RNA, 14 nt, Human
augucaagggcagc

SEQ ID NO: 1278011 - RNA, 18 nt, Human
augucaagauucagcuag

SEQ ID NO: 1278012 - RNA, 17 nt, Human
augucaagauucagcua

SEQ ID NO: 1278013 - RNA, 16 nt, Human
augucaagauucagcu

SEQ ID NO: 1278014 - RNA, 15 nt, Human
augucaagauucagc

SEQ ID NO: 1278015 - RNA, 22 nt, Human
augucaaggguucaagauuguu

SEQ ID NO: 1278016 - RNA, 18 nt, Human
auguacauagugcuaaca

SEQ ID NO: 1278017 - RNA, 15 nt, Human
auguacaugagaagg

SEQ ID NO: 1278018 - RNA, 19 nt, Human
augucaaauauuuagaugu

SEQ ID NO: 1278019 - RNA, 23 nt, Human
augucaaauauuuagauguaauu

SEQ ID NO: 1278020 - RNA, 16 nt, Human
augucacuaaagcagg

SEQ ID NO: 1278021 - RNA, 22 nt, Human
augucacuaaagcaggccuuuu

SEQ ID NO: 1278022 - RNA, 10 nt, Human
augucacuuu

SEQ ID NO: 1278023 - RNA, 20 nt, Human
augucacuuuuugaggcaaa

SEQ ID NO: 1278024 - RNA, 21 nt, Human
augucacuuuuugaggcaaaa

SEQ ID NO: 1278025 - RNA, 21 nt, Human
augucuugagcucuauuauga

SEQ ID NO: 1278026 - RNA, 15 nt, Human
augucuucucccugg

SEQ ID NO: 1278027 - RNA, 23 nt, Human
augucuugaugcaugcacuguuc

SEQ ID NO: 1278028 - RNA, 15 nt, Human
augucuugagcucua

SEQ ID NO: 1278029 - RNA, 16 nt, Human
augucuugagcucuau

SEQ ID NO: 1278030 - RNA, 20 nt, Human
augucuuggaacauuggaau

SEQ ID NO: 1278031 - RNA, 18 nt, Human
auggcuggagcuagaauu

SEQ ID NO: 1278032 - RNA, 20 nt, Human
auggcugauaauuuuaaauu

SEQ ID NO: 1278033 - RNA, 15 nt, Human
auggaaauuuaaagc

SEQ ID NO: 1278034 - RNA, 16 nt, Human
auggaggaaaaccaag

SEQ ID NO: 1278035 - RNA, 14 nt, Human
auggagcugggcua

SEQ ID NO: 1278036 - RNA, 13 nt, Human
auggaugccaaua

SEQ ID NO: 1278037 - RNA, 22 nt, Human
auggaugccaauauuaaaucug

SEQ ID NO: 1278038 - RNA, 23 nt, Human
auggaugccaauauuaaaucugc

SEQ ID NO: 1278039 - RNA, 15 nt, Human
auggaacacagaacu

SEQ ID NO: 1278040 - RNA, 19 nt, Human
auggaugggggaacucaga

SEQ ID NO: 1278041 - RNA, 17 nt, Human
auggauguccccagcag

SEQ ID NO: 1278042 - RNA, 18 nt, Human
auggauguccccagcaga

SEQ ID NO: 1278043 - RNA, 12 nt, Human
auggauucuaaa

SEQ ID NO: 1278044 - RNA, 20 nt, Human
auggaaauucccuucaucug

SEQ ID NO: 1278045 - RNA, 18 nt, Human
auggaaauucugcucaga

SEQ ID NO: 1278046 - RNA, 17 nt, Human
auggaaauuuaaagcag

SEQ ID NO: 1278047 - RNA, 13 nt, Human
auggaaauguuua

SEQ ID NO: 1278048 - RNA, 22 nt, Human
augcuuuuuauuauuauuauuu

SEQ ID NO: 1278049 - RNA, 16 nt, Human
augcuuuuuauuucug

SEQ ID NO: 1278050 - RNA, 19 nt, Human
augcuuuuuauuucugcau

SEQ ID NO: 1278051 - RNA, 23 nt, Human
augcuuuuuauuucugcauaugu

SEQ ID NO: 1278052 - RNA, 16 nt, Human
augcuugcaaaaacua

SEQ ID NO: 1278053 - RNA, 19 nt, Human
augcuugcaaaaacuacaa

SEQ ID NO: 1278054 - RNA, 17 nt, Human
augcuugcauaagagcu

SEQ ID NO: 1278055 - RNA, 18 nt, Human
augcuugcauaagagcuu

SEQ ID NO: 1278056 - RNA, 21 nt, Human
augccuuuguacuuuagggaa

SEQ ID NO: 1278057 - RNA, 14 nt, Human
augccuuuucccaa

SEQ ID NO: 1278058 - RNA, 16 nt, Human
augcauggaaauuccc

SEQ ID NO: 1278059 - RNA, 14 nt, Human
augcauuguccucu

SEQ ID NO: 1278060 - RNA, 12 nt, Human
augcauggaaau

SEQ ID NO: 1278061 - RNA, 17 nt, Human
augcaugcacuguuccc

SEQ ID NO: 1278062 - RNA, 21 nt, Human
augcacaguauuuguaauuaa

SEQ ID NO: 1278063 - RNA, 18 nt, Human
augcacaguauuuguaau

SEQ ID NO: 1278064 - RNA, 17 nt, Human
augcacaguaaaaaugg

SEQ ID NO: 1278065 - RNA, 14 nt, Human
augcacaguauuug

SEQ ID NO: 1278066 - RNA, 15 nt, Human
augcacaguauuugu

SEQ ID NO: 1278067 - RNA, 17 nt, Human
augcaauuuccuuuuuu

SEQ ID NO: 1278068 - RNA, 23 nt, Human
augauguauguugaagccuuugu

SEQ ID NO: 1278069 - RNA, 11 nt, Human
augaugugcuu

SEQ ID NO: 1278070 - RNA, 16 nt, Human
augaugugugaaaacu

SEQ ID NO: 1278071 - RNA, 13 nt, Human
augaugugcuuaa

SEQ ID NO: 1278072 - RNA, 21 nt, Human
augcaauauacuggaaagcuu

SEQ ID NO: 1278073 - RNA, 23 nt, Human
augaaaaaauauauaucaaauau

SEQ ID NO: 1278074 - RNA, 22 nt, Human
augaaaaaauauauaucaaaua

SEQ ID NO: 1278075 - RNA, 17 nt, Human
augaaaaaauauauauc

SEQ ID NO: 1278076 - RNA, 14 nt, Human
augaaaaaauauau

SEQ ID NO: 1278077 - RNA, 16 nt, Human
augaaaaugucuugug

SEQ ID NO: 1278078 - RNA, 16 nt, Human
augaaaaguauauuga

SEQ ID NO: 1278079 - RNA, 14 nt, Human
augaaaauaaagaa

SEQ ID NO: 1278080 - RNA, 17 nt, Human
augaaaauaaagaaugg

SEQ ID NO: 1278081 - RNA, 15 nt, Human
augaaaauaaagaau

SEQ ID NO: 1278082 - RNA, 16 nt, Human
augaaaacucuuugcu

SEQ ID NO: 1278083 - RNA, 13 nt, Human
augaaaagcuaga

SEQ ID NO: 1278084 - RNA, 18 nt, Human
augaaaagcuagaauuga

SEQ ID NO: 1278085 - RNA, 18 nt, Human
augaaacagaaacaaaaa

SEQ ID NO: 1278086 - RNA, 22 nt, Human
augaaacagaaacaaaaacacu

SEQ ID NO: 1278087 - RNA, 13 nt, Human
augaaacagaaac

SEQ ID NO: 1278088 - RNA, 16 nt, Human
augacuauguaaacua

SEQ ID NO: 1278089 - RNA, 15 nt, Human
augacuauguaaacu

SEQ ID NO: 1278090 - RNA, 16 nt, Human
augacucggggguggg

SEQ ID NO: 1278091 - RNA, 21 nt, Human
augaagcuuuuaugugaaaca

SEQ ID NO: 1278092 - RNA, 20 nt, Human
augaagcuuuuaugugaaac

SEQ ID NO: 1278093 - RNA, 19 nt, Human
augaagcuuuuaugugaaa

SEQ ID NO: 1278094 - RNA, 18 nt, Human
augaagcuuuuaugugaa

SEQ ID NO: 1278095 - RNA, 14 nt, Human
augacccugccucu

SEQ ID NO: 1278096 - RNA, 18 nt, Human
augacccugccucuccca

SEQ ID NO: 1278097 - RNA, 20 nt, Human
augacccugccucucccagg

SEQ ID NO: 1278098 - RNA, 23 nt, Human
augacccugccucucccaggcag

SEQ ID NO: 1278099 - RNA, 18 nt, Human
augaccuaguuuuccaug

SEQ ID NO: 1278100 - RNA, 14 nt, Human
augacccuuuucau

SEQ ID NO: 1278101 - RNA, 12 nt, Human
augaccuccagc

SEQ ID NO: 1278102 - RNA, 13 nt, Human
augaccuccagcu

SEQ ID NO: 1278103 - RNA, 19 nt, Human
augaccuccagcuuuccug

SEQ ID NO: 1278104 - RNA, 21 nt, Human
augaccuccagcuuuccugua

SEQ ID NO: 1278105 - RNA, 17 nt, Human
augacuccauagaccuu

SEQ ID NO: 1278106 - RNA, 18 nt, Human
augagcgugacacucauu

SEQ ID NO: 1278107 - RNA, 22 nt, Human
aucuuauaauuuaaaauaugcu

SEQ ID NO: 1278108 - RNA, 17 nt, Human
aucugggccagaauuuc

SEQ ID NO: 1278109 - RNA, 15 nt, Human
aucugggccuuggcc

SEQ ID NO: 1278110 - RNA, 16 nt, Human
aucugggccuuggccu

SEQ ID NO: 1278111 - RNA, 21 nt, Human
aucugggccuuggccuggagc

SEQ ID NO: 1278112 - RNA, 19 nt, Human
aucugggccuuggccugga

SEQ ID NO: 1278113 - RNA, 17 nt, Human
aucugggcugugggcaa

SEQ ID NO: 1278114 - RNA, 10 nt, Human
aucugggcuu

SEQ ID NO: 1278115 - RNA, 13 nt, Human
aucugggcuuccu

SEQ ID NO: 1278116 - RNA, 14 nt, Human
aucugggcuuccug

SEQ ID NO: 1278117 - RNA, 15 nt, Human
aucugggcuuccugg

SEQ ID NO: 1278118 - RNA, 15 nt, Human
aucugggccagaauu

SEQ ID NO: 1278119 - RNA, 19 nt, Human
aucuggaaccucagccugg

SEQ ID NO: 1278120 - RNA, 20 nt, Human
aucuggaaccucagccuggc

SEQ ID NO: 1278121 - RNA, 21 nt, Human
aucuggaaccucagccuggcc

SEQ ID NO: 1278122 - RNA, 22 nt, Human
aucuggaaccucagccuggcca

SEQ ID NO: 1278123 - RNA, 21 nt, Human
aucuggaagccaaaauguagg

SEQ ID NO: 1278124 - RNA, 14 nt, Human
aucuucaguugucu

SEQ ID NO: 1278125 - RNA, 16 nt, Human
aucuucaguugucucu

SEQ ID NO: 1278126 - RNA, 17 nt, Human
aucuucaguugucucug

SEQ ID NO: 1278127 - RNA, 18 nt, Human
aucuucaguugucucuga

SEQ ID NO: 1278128 - RNA, 19 nt, Human
aucuucaguugucucugau

SEQ ID NO: 1278129 - RNA, 22 nt, Human
aucuuccaauuuaguuguugua

SEQ ID NO: 1278130 - RNA, 15 nt, Human
aucuucucaaguucu

SEQ ID NO: 1278131 - RNA, 16 nt, Human
aucuucucaaguucua

SEQ ID NO: 1278132 - RNA, 18 nt, Human
aucuucucaaguucuaag

SEQ ID NO: 1278133 - RNA, 19 nt, Human
aucuucucaaguucuaaga

SEQ ID NO: 1278134 - RNA, 20 nt, Human
aucuucucaaguucuaagau

SEQ ID NO: 1278135 - RNA, 23 nt, Human
aucuucucaaguucuaagauucu

SEQ ID NO: 1278136 - RNA, 16 nt, Human
aucugggcuuccugga

SEQ ID NO: 1278137 - RNA, 18 nt, Human
aucugggcuuccuggagc

SEQ ID NO: 1278138 - RNA, 16 nt, Human
aucuggggagcaggca

SEQ ID NO: 1278139 - RNA, 20 nt, Human
aucugggcuuccuggagcag

SEQ ID NO: 1278140 - RNA, 15 nt, Human
aucuuauaguucuag

SEQ ID NO: 1278141 - RNA, 17 nt, Human
aucuuauaguucuaggc

SEQ ID NO: 1278142 - RNA, 17 nt, Human
aucucuaccuucucccc

SEQ ID NO: 1278143 - RNA, 19 nt, Human
aucucuaccuucuccccag

SEQ ID NO: 1278144 - RNA, 20 nt, Human
aucucuaccuucuccccagc

SEQ ID NO: 1278145 - RNA, 22 nt, Human
aucucuaccuucuccccagcuc

SEQ ID NO: 1278146 - RNA, 14 nt, Human
aucucucugcccaa

SEQ ID NO: 1278147 - RNA, 14 nt, Human
aucugcuggaguuu

SEQ ID NO: 1278148 - RNA, 18 nt, Human
aucugcuggaguuucaug

SEQ ID NO: 1278149 - RNA, 19 nt, Human
aucuggaacccagacucag

SEQ ID NO: 1278150 - RNA, 23 nt, Human
aucuggaacccagacucagacau

SEQ ID NO: 1278151 - RNA, 11 nt, Human
aucuggaaccu

SEQ ID NO: 1278152 - RNA, 16 nt, Human
aucuggaaccucagcc

SEQ ID NO: 1278153 - RNA, 17 nt, Human
aucuggaaccucagccu

SEQ ID NO: 1278154 - RNA, 18 nt, Human
aucuggaaccucagccug

SEQ ID NO: 1278155 - RNA, 23 nt, Human
aucuugaaauuaagaaggcaaaa

SEQ ID NO: 1278156 - RNA, 21 nt, Human
aucuugaaauuaagaaggcaa

SEQ ID NO: 1278157 - RNA, 22 nt, Human
aucuugaaauuaagaaggcaaa

SEQ ID NO: 1278158 - RNA, 12 nt, Human
aucuugaaauua

SEQ ID NO: 1278159 - RNA, 19 nt, Human
aucaucucagcucacugca

SEQ ID NO: 1278160 - RNA, 14 nt, Human
aucaucucagcuca

SEQ ID NO: 1278161 - RNA, 20 nt, Human
aucaucuccugccuuccucc

SEQ ID NO: 1278162 - RNA, 23 nt, Human
aucaucuccugccuuccuccugg

SEQ ID NO: 1278163 - RNA, 13 nt, Human
aucaucucagcuc

SEQ ID NO: 1278164 - RNA, 19 nt, Human
aucaucuauagaaagcuau

SEQ ID NO: 1278165 - RNA, 18 nt, Human
aucaucuuggaacugcau

SEQ ID NO: 1278166 - RNA, 14 nt, Human
aucaucuuauucag

SEQ ID NO: 1278167 - RNA, 15 nt, Human
aucaucuauagaaag

SEQ ID NO: 1278168 - RNA, 12 nt, Human
aucauggccagc

SEQ ID NO: 1278169 - RNA, 13 nt, Human
aucauggccagcu

SEQ ID NO: 1278170 - RNA, 14 nt, Human
aucauggccagcug

SEQ ID NO: 1278171 - RNA, 17 nt, Human
aucauggccagcuggag

SEQ ID NO: 1278172 - RNA, 19 nt, Human
aucauggccagcuggaggc

SEQ ID NO: 1278173 - RNA, 15 nt, Human
aucauggcuaucugu

SEQ ID NO: 1278174 - RNA, 12 nt, Human
aucaccugcccu

SEQ ID NO: 1278175 - RNA, 13 nt, Human
aucaccugcccug

SEQ ID NO: 1278176 - RNA, 13 nt, Human
aucagccagugac

SEQ ID NO: 1278177 - RNA, 15 nt, Human
aucagccccacccug

SEQ ID NO: 1278178 - RNA, 16 nt, Human
aucagccccacccugg

SEQ ID NO: 1278179 - RNA, 17 nt, Human
aucagccccacccuggc

SEQ ID NO: 1278180 - RNA, 19 nt, Human
aucagccccacccuggccu

SEQ ID NO: 1278181 - RNA, 16 nt, Human
aucagccuacaggccu

SEQ ID NO: 1278182 - RNA, 16 nt, Human
aucagcccuugggggu

SEQ ID NO: 1278183 - RNA, 20 nt, Human
auccacccgccucagccucc

SEQ ID NO: 1278184 - RNA, 23 nt, Human
auccaccccaauccucccagaaa

SEQ ID NO: 1278185 - RNA, 15 nt, Human
auccccuucuccccu

SEQ ID NO: 1278186 - RNA, 20 nt, Human
auccccuucuccccugcacu

SEQ ID NO: 1278187 - RNA, 21 nt, Human
auccccuucuccccugcacug

SEQ ID NO: 1278188 - RNA, 22 nt, Human
auccccuucuccccugcacugu

SEQ ID NO: 1278189 - RNA, 23 nt, Human
auccccuucuccccugcacugua

SEQ ID NO: 1278190 - RNA, 12 nt, Human
auccccuugaac

SEQ ID NO: 1278191 - RNA, 16 nt, Human
auccccuugaacucuu

SEQ ID NO: 1278192 - RNA, 21 nt, Human
auccccuugaggucucagccc

SEQ ID NO: 1278193 - RNA, 22 nt, Human
auccccuugaggucucagcccc

SEQ ID NO: 1278194 - RNA, 14 nt, Human
aucccgagcaccuc

SEQ ID NO: 1278195 - RNA, 17 nt, Human
aucccgagcaccuccac

SEQ ID NO: 1278196 - RNA, 19 nt, Human
aucccgagcaccuccacau

SEQ ID NO: 1278197 - RNA, 19 nt, Human
aucccucacccauccuaga

SEQ ID NO: 1278198 - RNA, 13 nt, Human
aucccucaccugu

SEQ ID NO: 1278199 - RNA, 12 nt, Human
aucccucaccca

SEQ ID NO: 1278200 - RNA, 14 nt, Human
aucccuagcuguga

SEQ ID NO: 1278201 - RNA, 14 nt, Human
aucccggcugcccu

SEQ ID NO: 1278202 - RNA, 14 nt, Human
aucccucaccugua

SEQ ID NO: 1278203 - RNA, 17 nt, Human
aucccucaccuguagca

SEQ ID NO: 1278204 - RNA, 15 nt, Human
auccuuugugaaaaa

SEQ ID NO: 1278205 - RNA, 20 nt, Human
auccuccuaccuccaaagcu

SEQ ID NO: 1278206 - RNA, 20 nt, Human
aucgauuuuuaaaaauuaaa

SEQ ID NO: 1278207 - RNA, 16 nt, Human
aucccucaccuucuga

SEQ ID NO: 1278208 - RNA, 17 nt, Human
aucccucaccuucugag

SEQ ID NO: 1278209 - RNA, 18 nt, Human
aucccucaccuucugagu

SEQ ID NO: 1278210 - RNA, 11 nt, Human
auccucccugu

SEQ ID NO: 1278211 - RNA, 15 nt, Human
auccucccuguaacu

SEQ ID NO: 1278212 - RNA, 16 nt, Human
auccucccuguaacuu

SEQ ID NO: 1278213 - RNA, 15 nt, Human
auccucccuuccucc

SEQ ID NO: 1278214 - RNA, 17 nt, Human
aucgcaccauucugacu

SEQ ID NO: 1278215 - RNA, 18 nt, Human
aucgcaccauucugacuc

SEQ ID NO: 1278216 - RNA, 20 nt, Human
aucgcagaccuuuuuuagga

SEQ ID NO: 1278217 - RNA, 15 nt, Human
aggaacuacugagga

SEQ ID NO: 1278218 - RNA, 17 nt, Human
aggacccggaggggccu

SEQ ID NO: 1278219 - RNA, 17 nt, Human
aggaccugaaauuccaa

SEQ ID NO: 1278220 - RNA, 16 nt, Human
aggagaaccaaaucug

SEQ ID NO: 1278221 - RNA, 19 nt, Human
aggagaaccaaaucuggaa

SEQ ID NO: 1278222 - RNA, 22 nt, Human
aggagaaccaaaucuggaagcc

SEQ ID NO: 1278223 - RNA, 11 nt, Human
aggagaagcca

SEQ ID NO: 1278224 - RNA, 12 nt, Human
aggagaagccag

SEQ ID NO: 1278225 - RNA, 13 nt, Human
aggagaagccagg

SEQ ID NO: 1278226 - RNA, 14 nt, Human
aggagaagccagga

SEQ ID NO: 1278227 - RNA, 15 nt, Human
aggagaagccaggaa

SEQ ID NO: 1278228 - RNA, 12 nt, Human
aggagaagcuca

SEQ ID NO: 1278229 - RNA, 13 nt, Human
aggagaagcucag

SEQ ID NO: 1278230 - RNA, 14 nt, Human
aggagaagcucagc

SEQ ID NO: 1278231 - RNA, 15 nt, Human
aggagaagcucagcu

SEQ ID NO: 1278232 - RNA, 19 nt, Human
aggagaagcucagcugcau

SEQ ID NO: 1278233 - RNA, 13 nt, Human
aggaccagcucag

SEQ ID NO: 1278234 - RNA, 14 nt, Human
aggaccagcucagg

SEQ ID NO: 1278235 - RNA, 15 nt, Human
aggaccagcucagga

SEQ ID NO: 1278236 - RNA, 18 nt, Human
aggaccagcucaggacag

SEQ ID NO: 1278237 - RNA, 23 nt, Human
aggaccagcucaggacagaugcc

SEQ ID NO: 1278238 - RNA, 17 nt, Human
aggaccaagcaucuugg

SEQ ID NO: 1278239 - RNA, 19 nt, Human
aggaccaagcaucuugggg

SEQ ID NO: 1278240 - RNA, 20 nt, Human
aggaccacaggcucaggcag

SEQ ID NO: 1278241 - RNA, 14 nt, Human
aggaccacaggcuc

SEQ ID NO: 1278242 - RNA, 17 nt, Human
aggaccacaggcucagg

SEQ ID NO: 1278243 - RNA, 12 nt, Human
aggaccagaagc

SEQ ID NO: 1278244 - RNA, 16 nt, Human
aggaccagaagcuccc

SEQ ID NO: 1278245 - RNA, 22 nt, Human
aggaccagaagcucccccagca

SEQ ID NO: 1278246 - RNA, 12 nt, Human
aggaccagcuca

SEQ ID NO: 1278247 - RNA, 22 nt, Human
aggauucugcuggccucugcga

SEQ ID NO: 1278248 - RNA, 20 nt, Human
aggauucugcuggccucugc

SEQ ID NO: 1278249 - RNA, 21 nt, Human
aggauucugcuggccucugcg

SEQ ID NO: 1278250 - RNA, 12 nt, Human
aggauucuaaaa

SEQ ID NO: 1278251 - RNA, 14 nt, Human
aggauucuaaaaug

SEQ ID NO: 1278252 - RNA, 13 nt, Human
aggauucugcugg

SEQ ID NO: 1278253 - RNA, 12 nt, Human
aggaggggaaga

SEQ ID NO: 1278254 - RNA, 15 nt, Human
aggaggggaagaggc

SEQ ID NO: 1278255 - RNA, 16 nt, Human
aggaggggaagaggcc

SEQ ID NO: 1278256 - RNA, 18 nt, Human
aggaggggaagaggccug

SEQ ID NO: 1278257 - RNA, 16 nt, Human
aggaggggcuguaaaa

SEQ ID NO: 1278258 - RNA, 14 nt, Human
aggaggggggaggg

SEQ ID NO: 1278259 - RNA, 16 nt, Human
aggaggggggagggaa

SEQ ID NO: 1278260 - RNA, 17 nt, Human
aggaggggggagggaag

SEQ ID NO: 1278261 - RNA, 21 nt, Human
aggaggggggagggaagggag

SEQ ID NO: 1278262 - RNA, 23 nt, Human
aggaggggggagggaagggagcc

SEQ ID NO: 1278263 - RNA, 20 nt, Human
aggagggggucguggagagc

SEQ ID NO: 1278264 - RNA, 21 nt, Human
aggagggggucguggagagcu

SEQ ID NO: 1278265 - RNA, 14 nt, Human
aggauguugaaaaa

SEQ ID NO: 1278266 - RNA, 17 nt, Human
aggauguugaaaaaguu

SEQ ID NO: 1278267 - RNA, 14 nt, Human
aggcacugcugccc

SEQ ID NO: 1278268 - RNA, 16 nt, Human
aggcacugcugcccag

SEQ ID NO: 1278269 - RNA, 22 nt, Human
aggcacugcugcccagccucca

SEQ ID NO: 1278270 - RNA, 21 nt, Human
aggcacugcccugguggcccu

SEQ ID NO: 1278271 - RNA, 13 nt, Human
aggcacugggcau

SEQ ID NO: 1278272 - RNA, 16 nt, Human
aggcacugggcaugag

SEQ ID NO: 1278273 - RNA, 14 nt, Human
aggcacugggcucc

SEQ ID NO: 1278274 - RNA, 16 nt, Human
aggcacuguaguucua

SEQ ID NO: 1278275 - RNA, 17 nt, Human
aggcacuguaguucuaa

SEQ ID NO: 1278276 - RNA, 19 nt, Human
aggcacuguaguucuaaga

SEQ ID NO: 1278277 - RNA, 21 nt, Human
aggcacuguaguucuaagacu

SEQ ID NO: 1278278 - RNA, 19 nt, Human
aggcacugcaaaccgccac

SEQ ID NO: 1278279 - RNA, 13 nt, Human
aggcacugcccug

SEQ ID NO: 1278280 - RNA, 14 nt, Human
aggcacugcccugg

SEQ ID NO: 1278281 - RNA, 15 nt, Human
aggcacugcccuggu

SEQ ID NO: 1278282 - RNA, 22 nt, Human
aggcacugcccugguggcccuc

SEQ ID NO: 1278283 - RNA, 14 nt, Human
agcuguaugauucc

SEQ ID NO: 1278284 - RNA, 21 nt, Human
agcuguauagcugcuuccagu

SEQ ID NO: 1278285 - RNA, 18 nt, Human
agcuuuucccaaaagccc

SEQ ID NO: 1278286 - RNA, 22 nt, Human
aggaaaaagcaaguucgucugu

SEQ ID NO: 1278287 - RNA, 17 nt, Human
aggaaauccaggguggu

SEQ ID NO: 1278288 - RNA, 13 nt, Human
aggaaaucccuuc

SEQ ID NO: 1278289 - RNA, 14 nt, Human
aggaaaucccuuca

SEQ ID NO: 1278290 - RNA, 16 nt, Human
aggaaaucccuucaua

SEQ ID NO: 1278291 - RNA, 18 nt, Human
aggaaaucccuucauacu

SEQ ID NO: 1278292 - RNA, 22 nt, Human
aggaaaucccuucauacuugaa

SEQ ID NO: 1278293 - RNA, 19 nt, Human
aggaaaugaaaaugucuug

SEQ ID NO: 1278294 - RNA, 22 nt, Human
aggaacguaaucguguccccua

SEQ ID NO: 1278295 - RNA, 23 nt, Human
aggaaaugugguagccucacuuu

SEQ ID NO: 1278296 - RNA, 20 nt, Human
aggaaauguuuuuaauaaaa

SEQ ID NO: 1278297 - RNA, 22 nt, Human
aggaaauguuuuuaauaaaaga

SEQ ID NO: 1278298 - RNA, 23 nt, Human
aggaaauguuuuuaauaaaagaa

SEQ ID NO: 1278299 - RNA, 15 nt, Human
agcuuuucccuuuuu

SEQ ID NO: 1278300 - RNA, 21 nt, Human
agcuuuucccuuuuuuuaagu

SEQ ID NO: 1278301 - RNA, 14 nt, Human
aggaaaaacagguc

SEQ ID NO: 1278302 - RNA, 16 nt, Human
agcuuuucccuucuuu

SEQ ID NO: 1278303 - RNA, 23 nt, Human
agcuucuguugcugccucaugcu

SEQ ID NO: 1278304 - RNA, 13 nt, Human
agcuuuucccuuc

SEQ ID NO: 1278305 - RNA, 21 nt, Human
agcuucuguugcugccucaug

SEQ ID NO: 1278306 - RNA, 22 nt, Human
agcuucuguugcugccucaugc

SEQ ID NO: 1278307 - RNA, 19 nt, Human
agcuucucauccugcaggc

SEQ ID NO: 1278308 - RNA, 12 nt, Human
agcuucuccaac

SEQ ID NO: 1278309 - RNA, 21 nt, Human
agcuuccuucagagagcagug

SEQ ID NO: 1278310 - RNA, 20 nt, Human
agcuucguuuauuuucaaga

SEQ ID NO: 1278311 - RNA, 17 nt, Human
agcuucagugcugccga

SEQ ID NO: 1278312 - RNA, 16 nt, Human
agcuuccuucagagag

SEQ ID NO: 1278313 - RNA, 17 nt, Human
agcuuccuucagagagc

SEQ ID NO: 1278314 - RNA, 18 nt, Human
agcuuccuucagagagca

SEQ ID NO: 1278315 - RNA, 19 nt, Human
agcuuccuucagagagcag

SEQ ID NO: 1278316 - RNA, 20 nt, Human
agcuuccuucagagagcagu

SEQ ID NO: 1278317 - RNA, 23 nt, Human
agcuuccuucagagagcagugcu

SEQ ID NO: 1278318 - RNA, 14 nt, Human
agcuggguuggaaa

SEQ ID NO: 1278319 - RNA, 16 nt, Human
agcugggucaggcagg

SEQ ID NO: 1278320 - RNA, 17 nt, Human
agcugggucaggcaggg

SEQ ID NO: 1278321 - RNA, 16 nt, Human
agcugaccagccguga

SEQ ID NO: 1278322 - RNA, 19 nt, Human
agcugaccagccgugagca

SEQ ID NO: 1278323 - RNA, 22 nt, Human
agcugaccagccgugagcaugu

SEQ ID NO: 1278324 - RNA, 22 nt, Human
agcugaggccacacucagcaca

SEQ ID NO: 1278325 - RNA, 12 nt, Human
agcugaggugcc

SEQ ID NO: 1278326 - RNA, 15 nt, Human
agcugaggugcccag

SEQ ID NO: 1278327 - RNA, 16 nt, Human
agcugaggugcccagg

SEQ ID NO: 1278328 - RNA, 17 nt, Human
agcugaggugcccagga

SEQ ID NO: 1278329 - RNA, 18 nt, Human
agcugaggugcccaggag

SEQ ID NO: 1278330 - RNA, 19 nt, Human
agcugaggugcccaggaga

SEQ ID NO: 1278331 - RNA, 22 nt, Human
agcugaggugcccaggagaaga

SEQ ID NO: 1278332 - RNA, 19 nt, Human
agcugaguauuaaaaugua

SEQ ID NO: 1278333 - RNA, 22 nt, Human
agcugaguauuaaaauguaugc

SEQ ID NO: 1278334 - RNA, 21 nt, Human
agcugaguuaggugucugucc

SEQ ID NO: 1278335 - RNA, 13 nt, Human
agcugaguuuccu

SEQ ID NO: 1278336 - RNA, 21 nt, Human
agcugaguuuccuaugggaac

SEQ ID NO: 1278337 - RNA, 20 nt, Human
agcugauacuuugacagugu

SEQ ID NO: 1278338 - RNA, 13 nt, Human
agcugaucaguuu

SEQ ID NO: 1278339 - RNA, 14 nt, Human
agcugaguuuccua

SEQ ID NO: 1278340 - RNA, 18 nt, Human
agcugcuccgaggaccca

SEQ ID NO: 1278341 - RNA, 19 nt, Human
agcugcuccgaggacccag

SEQ ID NO: 1278342 - RNA, 20 nt, Human
agcugcuccgaggacccagg

SEQ ID NO: 1278343 - RNA, 22 nt, Human
agcugcuccgaggacccaggaa

SEQ ID NO: 1278344 - RNA, 16 nt, Human
agcugacaaaauacuu

SEQ ID NO: 1278345 - RNA, 21 nt, Human
agcugacaaaauacuugucug

SEQ ID NO: 1278346 - RNA, 22 nt, Human
agcugaauguuuuucuaaagga

SEQ ID NO: 1278347 - RNA, 24 nt, Human
agcuccuguccccugcuacaccua

SEQ ID NO: 1278348 - RNA, 16 nt, Human
agcuccuguccccugc

SEQ ID NO: 1278349 - RNA, 17 nt, Human
agcuccuguccccugcu

SEQ ID NO: 1278350 - RNA, 18 nt, Human
agcuccuguccccugcua

SEQ ID NO: 1278351 - RNA, 20 nt, Human
agcuccuguccccugcuaca

SEQ ID NO: 1278352 - RNA, 12 nt, Human
agcuccucuguc

SEQ ID NO: 1278353 - RNA, 18 nt, Human
agcuccucugucucgagc

SEQ ID NO: 1278354 - RNA, 24 nt, Human
agcuccucugucucgagcgcccug

SEQ ID NO: 1278355 - RNA, 13 nt, Human
agcuccucuucca

SEQ ID NO: 1278356 - RNA, 14 nt, Human
agcuccucuuccau

SEQ ID NO: 1278357 - RNA, 15 nt, Human
agcuccucuuccaug

SEQ ID NO: 1278358 - RNA, 18 nt, Human
agcuccucuuccaugcug

SEQ ID NO: 1278359 - RNA, 10 nt, Human
agcuccugac

SEQ ID NO: 1278360 - RNA, 18 nt, Human
agcuccugacacugcugg

SEQ ID NO: 1278361 - RNA, 14 nt, Human
agcuccugaccagu

SEQ ID NO: 1278362 - RNA, 15 nt, Human
agcuccugaccaguu

SEQ ID NO: 1278363 - RNA, 16 nt, Human
agcuccugaccaguug

SEQ ID NO: 1278364 - RNA, 19 nt, Human
agcuccugaccaguugcag

SEQ ID NO: 1278365 - RNA, 24 nt, Human
agcuccugaccaguugcagucacu

SEQ ID NO: 1278366 - RNA, 11 nt, Human
agcuccuguaa

SEQ ID NO: 1278367 - RNA, 14 nt, Human
agcuccuguccccu

SEQ ID NO: 1278368 - RNA, 12 nt, Human
agcuccucccac

SEQ ID NO: 1278369 - RNA, 11 nt, Human
agcuccucccc

SEQ ID NO: 1278370 - RNA, 14 nt, Human
agcuccuccccugg

SEQ ID NO: 1278371 - RNA, 17 nt, Human
agcuccuccccuggagg

SEQ ID NO: 1278372 - RNA, 13 nt, Human
agcuccucccucu

SEQ ID NO: 1278373 - RNA, 14 nt, Human
agcuccucccucuc

SEQ ID NO: 1278374 - RNA, 15 nt, Human
agcuccucccucuca

SEQ ID NO: 1278375 - RNA, 17 nt, Human
aggggcagagccaggaa

SEQ ID NO: 1278376 - RNA, 16 nt, Human
aggggcagagccagga

SEQ ID NO: 1278377 - RNA, 15 nt, Human
aggggcagagccagg

SEQ ID NO: 1278378 - RNA, 14 nt, Human
aggggcagagccag

SEQ ID NO: 1278379 - RNA, 13 nt, Human
aggggcagaggcc

SEQ ID NO: 1278380 - RNA, 12 nt, Human
aggggcagcccc

SEQ ID NO: 1278381 - RNA, 13 nt, Human
aggggcagagcca

SEQ ID NO: 1278382 - RNA, 17 nt, Human
aggggccgaugcccaga

SEQ ID NO: 1278383 - RNA, 18 nt, Human
aggggccgaugcccagag

SEQ ID NO: 1278384 - RNA, 19 nt, Human
aggggccgaugcccagaga

SEQ ID NO: 1278385 - RNA, 13 nt, Human
agggcggcagggg

SEQ ID NO: 1278386 - RNA, 15 nt, Human
agggcggcaggggcc

SEQ ID NO: 1278387 - RNA, 16 nt, Human
agggcggcaggggccu

SEQ ID NO: 1278388 - RNA, 18 nt, Human
agggcggcaggggccugg

SEQ ID NO: 1278389 - RNA, 19 nt, Human
agggcggcaggggccugga

SEQ ID NO: 1278390 - RNA, 23 nt, Human
agggcggcaggggccuggagauc

SEQ ID NO: 1278391 - RNA, 17 nt, Human
agggcggccuccuucug

SEQ ID NO: 1278392 - RNA, 17 nt, Human
agggcgggcagagggcu

SEQ ID NO: 1278393 - RNA, 18 nt, Human
agggcgggcagagggcug

SEQ ID NO: 1278394 - RNA, 19 nt, Human
agggcgggcagagggcugg

SEQ ID NO: 1278395 - RNA, 20 nt, Human
agggcgggcagagggcugga

SEQ ID NO: 1278396 - RNA, 17 nt, Human
agggcggggguggcggc

SEQ ID NO: 1278397 - RNA, 18 nt, Human
aggggauuuuuaugucug

SEQ ID NO: 1278398 - RNA, 18 nt, Human
agggcaauuaauuccuuc

SEQ ID NO: 1278399 - RNA, 22 nt, Human
agggcaauuaauuccuucagca

SEQ ID NO: 1278400 - RNA, 19 nt, Human
agggcaauuaauuccuuca

SEQ ID NO: 1278401 - RNA, 12 nt, Human
agggcacaggag

SEQ ID NO: 1278402 - RNA, 13 nt, Human
agggcacaggagc

SEQ ID NO: 1278403 - RNA, 14 nt, Human
agggcacaggagcu

SEQ ID NO: 1278404 - RNA, 15 nt, Human
agggcacaggagcua

SEQ ID NO: 1278405 - RNA, 17 nt, Human
agggcacaggagcuacc

SEQ ID NO: 1278406 - RNA, 18 nt, Human
agggcacaggagcuaccu

SEQ ID NO: 1278407 - RNA, 19 nt, Human
agggcacaggagcuaccug

SEQ ID NO: 1278408 - RNA, 20 nt, Human
agggcacaggagcuaccugu

SEQ ID NO: 1278409 - RNA, 23 nt, Human
agggcacaggagcuaccugugug

SEQ ID NO: 1278410 - RNA, 22 nt, Human
agggcacaggagcuaccugugu

SEQ ID NO: 1278411 - RNA, 23 nt, Human
agggacucaucuuucccuccuug

SEQ ID NO: 1278412 - RNA, 18 nt, Human
agggacucaucuuucccu

SEQ ID NO: 1278413 - RNA, 19 nt, Human
agggacucaucuuucccuc

SEQ ID NO: 1278414 - RNA, 21 nt, Human
agggacucaucuuucccuccu

SEQ ID NO: 1278415 - RNA, 22 nt, Human
agggacucaucuuucccuccuu

SEQ ID NO: 1278416 - RNA, 17 nt, Human
agggacucaucuuuccc

SEQ ID NO: 1278417 - RNA, 17 nt, Human
agggacagaggccccag

SEQ ID NO: 1278418 - RNA, 20 nt, Human
agggacagaggccccagccu

SEQ ID NO: 1278419 - RNA, 21 nt, Human
agggacagaggccccagccuc

SEQ ID NO: 1278420 - RNA, 22 nt, Human
agggacagaggccccagccucc

SEQ ID NO: 1278421 - RNA, 12 nt, Human
aggcugcccucc

SEQ ID NO: 1278422 - RNA, 13 nt, Human
aggcugcccuccu

SEQ ID NO: 1278423 - RNA, 14 nt, Human
aggcugcccuccug

SEQ ID NO: 1278424 - RNA, 22 nt, Human
aggcugcccuccugugcucagc

SEQ ID NO: 1278425 - RNA, 22 nt, Human
aggcugccguccccuagagucc

SEQ ID NO: 1278426 - RNA, 12 nt, Human
aggcugccugag

SEQ ID NO: 1278427 - RNA, 12 nt, Human
aggcugccccuc

SEQ ID NO: 1278428 - RNA, 15 nt, Human
aggcugccccucuca

SEQ ID NO: 1278429 - RNA, 17 nt, Human
aggcugccccucucacc

SEQ ID NO: 1278430 - RNA, 13 nt, Human
aggcugccugagu

SEQ ID NO: 1278431 - RNA, 16 nt, Human
aggcugccguccccua

SEQ ID NO: 1278432 - RNA, 18 nt, Human
aggcuguggaccauggag

SEQ ID NO: 1278433 - RNA, 16 nt, Human
aggcuguggucacagc

SEQ ID NO: 1278434 - RNA, 19 nt, Human
aggcuguggugagggaaga

SEQ ID NO: 1278435 - RNA, 17 nt, Human
aggcuguguaagauuug

SEQ ID NO: 1278436 - RNA, 19 nt, Human
aggcuguguaagauuuguu

SEQ ID NO: 1278437 - RNA, 18 nt, Human
aggcuguguuuggcuuuc

SEQ ID NO: 1278438 - RNA, 20 nt, Human
aggcuguguuuggcuuucag

SEQ ID NO: 1278439 - RNA, 21 nt, Human
aggcuguguuuggcuuucagg

SEQ ID NO: 1278440 - RNA, 22 nt, Human
aggcuguguuuggcuuucaggg

SEQ ID NO: 1278441 - RNA, 19 nt, Human
aggcuguuaaauacaggaa

SEQ ID NO: 1278442 - RNA, 22 nt, Human
aggcuauggacagggcaugcca

SEQ ID NO: 1278443 - RNA, 21 nt, Human
aggcugaugucaauuucugug

SEQ ID NO: 1278444 - RNA, 15 nt, Human
aggcugauuucuagg

SEQ ID NO: 1278445 - RNA, 20 nt, Human
aggcugaacuuguuuucugg

SEQ ID NO: 1278446 - RNA, 21 nt, Human
aggcugaacuuguuuucuggg

SEQ ID NO: 1278447 - RNA, 21 nt, Human
aggcugacaccuaacucuucu

SEQ ID NO: 1278448 - RNA, 21 nt, Human
aggcagacucuuuaugcuugc

SEQ ID NO: 1278449 - RNA, 22 nt, Human
aggcagacucuuuaugcuugca

SEQ ID NO: 1278450 - RNA, 20 nt, Human
aggcagacucuuuaugcuug

SEQ ID NO: 1278451 - RNA, 15 nt, Human
agguggaaauaaacu

SEQ ID NO: 1278452 - RNA, 21 nt, Human
aggugcuucuaguucugccag

SEQ ID NO: 1278453 - RNA, 22 nt, Human
aggugcuucuaguucugccagg

SEQ ID NO: 1278454 - RNA, 17 nt, Human
aggugcuggggccuggu

SEQ ID NO: 1278455 - RNA, 21 nt, Human
aggugcuucaggauaccauau

SEQ ID NO: 1278456 - RNA, 23 nt, Human
aggugcuucuaguucugccagga

SEQ ID NO: 1278457 - RNA, 16 nt, Human
agguggauggccccag

SEQ ID NO: 1278458 - RNA, 23 nt, Human
agguggauggccccagcacagcu

SEQ ID NO: 1278459 - RNA, 20 nt, Human
agguccugguggggcagcuc

SEQ ID NO: 1278460 - RNA, 20 nt, Human
aggucgcuugggaauuuuau

SEQ ID NO: 1278461 - RNA, 20 nt, Human
agguccugagcacugccagg

SEQ ID NO: 1278462 - RNA, 21 nt, Human
agguccugagcacugccagga

SEQ ID NO: 1278463 - RNA, 22 nt, Human
agguccugagcacugccaggag

SEQ ID NO: 1278464 - RNA, 23 nt, Human
agguccugagcacugccaggagg

SEQ ID NO: 1278465 - RNA, 14 nt, Human
agguccuggugggg

SEQ ID NO: 1278466 - RNA, 17 nt, Human
agguccugguggggcag

SEQ ID NO: 1278467 - RNA, 19 nt, Human
agguccugguggggcagcu

SEQ ID NO: 1278468 - RNA, 22 nt, Human
agguccugguggggcagcuccu

SEQ ID NO: 1278469 - RNA, 20 nt, Human
agguccuuaggccucugaga

SEQ ID NO: 1278470 - RNA, 16 nt, Human
aggugcugacggccag

SEQ ID NO: 1278471 - RNA, 17 nt, Human
aggugcugacggccagg

SEQ ID NO: 1278472 - RNA, 20 nt, Human
aggugcugacggccagggag

SEQ ID NO: 1278473 - RNA, 18 nt, Human
aggugcucucuuucuguc

SEQ ID NO: 1278474 - RNA, 17 nt, Human
agguucaugcaaacuuu

SEQ ID NO: 1278475 - RNA, 15 nt, Human
agguucagccaaggu

SEQ ID NO: 1278476 - RNA, 19 nt, Human
agguucagccaagguuuua

SEQ ID NO: 1278477 - RNA, 19 nt, Human
agguucaagcaauccuccc

SEQ ID NO: 1278478 - RNA, 13 nt, Human
agguucagccaag

SEQ ID NO: 1278479 - RNA, 11 nt, Human
agguucuaaaa

SEQ ID NO: 1278480 - RNA, 11 nt, Human
agguucuaaag

SEQ ID NO: 1278481 - RNA, 12 nt, Human
agguucuaaagu

SEQ ID NO: 1278482 - RNA, 18 nt, Human
agguucauggauuuucca

SEQ ID NO: 1278483 - RNA, 18 nt, Human
agguuccacagaggacac

SEQ ID NO: 1278484 - RNA, 14 nt, Human
agguucccaagcuc

SEQ ID NO: 1278485 - RNA, 15 nt, Human
agguucccaagcuca

SEQ ID NO: 1278486 - RNA, 16 nt, Human
agguucccaagcucag

SEQ ID NO: 1278487 - RNA, 13 nt, Human
agguucccacuua

SEQ ID NO: 1278488 - RNA, 14 nt, Human
agguucccucccag

SEQ ID NO: 1278489 - RNA, 16 nt, Human
agguuaauauuuaaga

SEQ ID NO: 1278490 - RNA, 14 nt, Human
agguucaacuuauu

SEQ ID NO: 1278491 - RNA, 13 nt, Human
agguuaauauuua

SEQ ID NO: 1278492 - RNA, 22 nt, Human
agguucuaaggccuaggauucu

SEQ ID NO: 1278493 - RNA, 15 nt, Human
agguucuaaggccua

SEQ ID NO: 1278494 - RNA, 19 nt, Human
agguucuaaggccuaggau

SEQ ID NO: 1278495 - RNA, 23 nt, Human
agguucuaaaguucuaagauucu

SEQ ID NO: 1278496 - RNA, 14 nt, Human
agguucuaacccua

SEQ ID NO: 1278497 - RNA, 12 nt, Human
agguucuaaggc

SEQ ID NO: 1278498 - RNA, 13 nt, Human
agguucuaaggcc

SEQ ID NO: 1278499 - RNA, 13 nt, Human
agguucuaaaguu

SEQ ID NO: 1278500 - RNA, 14 nt, Human
agguucuaaaguuc

SEQ ID NO: 1278501 - RNA, 15 nt, Human
agguucuaaaguucu

SEQ ID NO: 1278502 - RNA, 16 nt, Human
agguucuaaaguucua

SEQ ID NO: 1278503 - RNA, 17 nt, Human
agguucuaaaguucuaa

SEQ ID NO: 1278504 - RNA, 18 nt, Human
agguucuaaaguucuaag

SEQ ID NO: 1278505 - RNA, 19 nt, Human
agguucuaaaguucuaaga

SEQ ID NO: 1278506 - RNA, 20 nt, Human
agguucuaaaguucuaagau

SEQ ID NO: 1278507 - RNA, 17 nt, Human
aggucccuaauaaagcu

SEQ ID NO: 1278508 - RNA, 21 nt, Human
agguaauccaagauauuuuaa

SEQ ID NO: 1278509 - RNA, 12 nt, Human
agguaccauccu

SEQ ID NO: 1278510 - RNA, 19 nt, Human
aggucccuaauaaagcugu

SEQ ID NO: 1278511 - RNA, 18 nt, Human
aggucccuaauaaagcug

SEQ ID NO: 1278512 - RNA, 20 nt, Human
aggucccuaauaaagcugug

SEQ ID NO: 1278513 - RNA, 23 nt, Human
aggucccuaauaaagcugugugg

SEQ ID NO: 1278514 - RNA, 13 nt, Human
agguaaguuuuuu

SEQ ID NO: 1278515 - RNA, 18 nt, Human
agguaauauaaaaagcuu

SEQ ID NO: 1278516 - RNA, 17 nt, Human
agguaaucgaccugccu

SEQ ID NO: 1278517 - RNA, 18 nt, Human
agguaaucgaccugccuc

SEQ ID NO: 1278518 - RNA, 19 nt, Human
agguaaucgaccugccucg

SEQ ID NO: 1278519 - RNA, 22 nt, Human
agguaagaaguuuuaaaaagcc

SEQ ID NO: 1278520 - RNA, 19 nt, Human
agguaagggugacaaaugg

SEQ ID NO: 1278521 - RNA, 17 nt, Human
aggggccgggggcaguc

SEQ ID NO: 1278522 - RNA, 15 nt, Human
agccagcacacaggg

SEQ ID NO: 1278523 - RNA, 18 nt, Human
agccagauuuuuuaaaau

SEQ ID NO: 1278524 - RNA, 23 nt, Human
agccagauuuuuuaaaauuuaua

SEQ ID NO: 1278525 - RNA, 22 nt, Human
agccagauuuuuuaaaauuuau

SEQ ID NO: 1278526 - RNA, 13 nt, Human
agccagcacacag

SEQ ID NO: 1278527 - RNA, 15 nt, Human
agccagauuuuccug

SEQ ID NO: 1278528 - RNA, 19 nt, Human
agccagauuuuccugaaaa

SEQ ID NO: 1278529 - RNA, 15 nt, Human
agccauguuucacaa

SEQ ID NO: 1278530 - RNA, 21 nt, Human
agccauuggcuauuuaaaacu

SEQ ID NO: 1278531 - RNA, 22 nt, Human
agccauuggcuauuuaaaacuu

SEQ ID NO: 1278532 - RNA, 12 nt, Human
agccauuugaga

SEQ ID NO: 1278533 - RNA, 15 nt, Human
agcaugcaucuguuu

SEQ ID NO: 1278534 - RNA, 11 nt, Human
agccagaggcu

SEQ ID NO: 1278535 - RNA, 14 nt, Human
agccagaggcuggg

SEQ ID NO: 1278536 - RNA, 15 nt, Human
agccagaggcugggu

SEQ ID NO: 1278537 - RNA, 18 nt, Human
agccagaggcuggguuca

SEQ ID NO: 1278538 - RNA, 14 nt, Human
agcaugcacaaauu

SEQ ID NO: 1278539 - RNA, 18 nt, Human
agcaugcaauacauacca

SEQ ID NO: 1278540 - RNA, 15 nt, Human
agcaucuugcauuau

SEQ ID NO: 1278541 - RNA, 19 nt, Human
agcaucuuggggggguggc

SEQ ID NO: 1278542 - RNA, 21 nt, Human
agcaucuuggggggguggccg

SEQ ID NO: 1278543 - RNA, 23 nt, Human
agcaucuuggggggguggccgcu

SEQ ID NO: 1278544 - RNA, 19 nt, Human
agcaguugagacaagaaaa

SEQ ID NO: 1278545 - RNA, 22 nt, Human
agcaguugagacaagaaaauaa

SEQ ID NO: 1278546 - RNA, 20 nt, Human
agcaguugagacaagaaaau

SEQ ID NO: 1278547 - RNA, 12 nt, Human
agcacugcucca

SEQ ID NO: 1278548 - RNA, 17 nt, Human
agcacugcuugaggaaa

SEQ ID NO: 1278549 - RNA, 21 nt, Human
agcacugccugcucccauccu

SEQ ID NO: 1278550 - RNA, 14 nt, Human
agcacugccaggag

SEQ ID NO: 1278551 - RNA, 15 nt, Human
agcacugccaggagg

SEQ ID NO: 1278552 - RNA, 17 nt, Human
agcacugccaggaggga

SEQ ID NO: 1278553 - RNA, 16 nt, Human
agcacugccaggaggg

SEQ ID NO: 1278554 - RNA, 13 nt, Human
agcacugccugcu

SEQ ID NO: 1278555 - RNA, 15 nt, Human
agcacugccugcucc

SEQ ID NO: 1278556 - RNA, 16 nt, Human
agcacugccugcuccc

SEQ ID NO: 1278557 - RNA, 19 nt, Human
agcacugccugcucccauc

SEQ ID NO: 1278558 - RNA, 20 nt, Human
agcacugccugcucccaucc

SEQ ID NO: 1278559 - RNA, 17 nt, Human
agcacgugguaaaacac

SEQ ID NO: 1278560 - RNA, 21 nt, Human
agcagugaaugauucaguguu

SEQ ID NO: 1278561 - RNA, 22 nt, Human
agcagugaaugauucaguguua

SEQ ID NO: 1278562 - RNA, 21 nt, Human
agcagucgugccuguguccau

SEQ ID NO: 1278563 - RNA, 20 nt, Human
agcagugaaugauucagugu

SEQ ID NO: 1278564 - RNA, 10 nt, Human
agcagccacg

SEQ ID NO: 1278565 - RNA, 13 nt, Human
agcagccacgagg

SEQ ID NO: 1278566 - RNA, 11 nt, Human
agcagccagcc

SEQ ID NO: 1278567 - RNA, 12 nt, Human
agcagccagccc

SEQ ID NO: 1278568 - RNA, 13 nt, Human
agcagccagcccu

SEQ ID NO: 1278569 - RNA, 14 nt, Human
agcagccagcccug

SEQ ID NO: 1278570 - RNA, 15 nt, Human
agcagccagcccugc

SEQ ID NO: 1278571 - RNA, 16 nt, Human
agcagccagcccugcc

SEQ ID NO: 1278572 - RNA, 17 nt, Human
agcagccagcccugccu

SEQ ID NO: 1278573 - RNA, 18 nt, Human
agcagccagcccugccug

SEQ ID NO: 1278574 - RNA, 19 nt, Human
agcagccagcccugccugg

SEQ ID NO: 1278575 - RNA, 20 nt, Human
agcagccagcccugccugga

SEQ ID NO: 1278576 - RNA, 21 nt, Human
agcagccagcccugccuggag

SEQ ID NO: 1278577 - RNA, 23 nt, Human
agcagccagcccugccuggagga

SEQ ID NO: 1278578 - RNA, 22 nt, Human
agcagccagcccugccuggagg

SEQ ID NO: 1278579 - RNA, 23 nt, Human
agcagccccacaccagggccagc

SEQ ID NO: 1278580 - RNA, 14 nt, Human
agcagcccccagcu

SEQ ID NO: 1278581 - RNA, 17 nt, Human
agcagcccccagcuccc

SEQ ID NO: 1278582 - RNA, 19 nt, Human
agcagcccccagcucccac

SEQ ID NO: 1278583 - RNA, 20 nt, Human
agcagcccccagcucccacc

SEQ ID NO: 1278584 - RNA, 16 nt, Human
agauguagaggagaaa

SEQ ID NO: 1278585 - RNA, 14 nt, Human
agauguagaggaga

SEQ ID NO: 1278586 - RNA, 14 nt, Human
agauguaauuuugu

SEQ ID NO: 1278587 - RNA, 15 nt, Human
agauguaauuuugug

SEQ ID NO: 1278588 - RNA, 17 nt, Human
agauguaauuuugugua

SEQ ID NO: 1278589 - RNA, 19 nt, Human
agauguaauuuuguguaag

SEQ ID NO: 1278590 - RNA, 21 nt, Human
agaugggagaaucacuugaac

SEQ ID NO: 1278591 - RNA, 16 nt, Human
agaugggacaauuaga

SEQ ID NO: 1278592 - RNA, 13 nt, Human
agauguaauuuug

SEQ ID NO: 1278593 - RNA, 23 nt, Human
agccccauaauuuuuuuuuuccu

SEQ ID NO: 1278594 - RNA, 17 nt, Human
agccccagugacagcua

SEQ ID NO: 1278595 - RNA, 17 nt, Human
agcccuagacuggugcu

SEQ ID NO: 1278596 - RNA, 19 nt, Human
agcccugaggacagaugcc

SEQ ID NO: 1278597 - RNA, 22 nt, Human
agcccugaggacagaugccucc

SEQ ID NO: 1278598 - RNA, 23 nt, Human
agcccugaggacagaugccuccu

SEQ ID NO: 1278599 - RNA, 16 nt, Human
agcccuaggguggaga

SEQ ID NO: 1278600 - RNA, 17 nt, Human
agcccuaggguggagag

SEQ ID NO: 1278601 - RNA, 20 nt, Human
agcccuaggguggagagcca

SEQ ID NO: 1278602 - RNA, 13 nt, Human
agccccagccagg

SEQ ID NO: 1278603 - RNA, 14 nt, Human
agccccagccaggg

SEQ ID NO: 1278604 - RNA, 21 nt, Human
agccccagcccagccccacuc

SEQ ID NO: 1278605 - RNA, 19 nt, Human
agccccagcccagccccac

SEQ ID NO: 1278606 - RNA, 16 nt, Human
agccccacccaggcca

SEQ ID NO: 1278607 - RNA, 20 nt, Human
agccccacccaggccaggca

SEQ ID NO: 1278608 - RNA, 18 nt, Human
agccccaccccagggcag

SEQ ID NO: 1278609 - RNA, 22 nt, Human
agccccaccccagggcagccag

SEQ ID NO: 1278610 - RNA, 23 nt, Human
agccccaccccagggcagccagg

SEQ ID NO: 1278611 - RNA, 16 nt, Human
agccccacccuggccu

SEQ ID NO: 1278612 - RNA, 17 nt, Human
agccccacccuggccua

SEQ ID NO: 1278613 - RNA, 13 nt, Human
agccccacuccuc

SEQ ID NO: 1278614 - RNA, 21 nt, Human
agcccaaguucaugcagcugu

SEQ ID NO: 1278615 - RNA, 23 nt, Human
agcccaaguucaugcagcugugg

SEQ ID NO: 1278616 - RNA, 15 nt, Human
agccuccccugccag

SEQ ID NO: 1278617 - RNA, 16 nt, Human
agccuccccugccagg

SEQ ID NO: 1278618 - RNA, 17 nt, Human
agccuccccugccaggg

SEQ ID NO: 1278619 - RNA, 18 nt, Human
agccuccccugccagggc

SEQ ID NO: 1278620 - RNA, 19 nt, Human
agccuccccugccagggca

SEQ ID NO: 1278621 - RNA, 20 nt, Human
agccuccccugccagggcag

SEQ ID NO: 1278622 - RNA, 22 nt, Human
agccuccccugccagggcaggg

SEQ ID NO: 1278623 - RNA, 13 nt, Human
agccucccugaag

SEQ ID NO: 1278624 - RNA, 17 nt, Human
agccucccugaagacca

SEQ ID NO: 1278625 - RNA, 14 nt, Human
agccucccugaagc

SEQ ID NO: 1278626 - RNA, 15 nt, Human
agccucccugaagcc

SEQ ID NO: 1278627 - RNA, 16 nt, Human
agccucccugaagccu

SEQ ID NO: 1278628 - RNA, 20 nt, Human
agccgggucugccucuucug

SEQ ID NO: 1278629 - RNA, 21 nt, Human
agccgggucugccucuucugg

SEQ ID NO: 1278630 - RNA, 22 nt, Human
agccgggucugccucuucuggg

SEQ ID NO: 1278631 - RNA, 16 nt, Human
agccggguguccccaa

SEQ ID NO: 1278632 - RNA, 20 nt, Human
agccgcuuggcgaugccagc

SEQ ID NO: 1278633 - RNA, 21 nt, Human
agccgcuuggcgaugccagcc

SEQ ID NO: 1278634 - RNA, 14 nt, Human
agccggcacagggu

SEQ ID NO: 1278635 - RNA, 15 nt, Human
agccggcacaggguc

SEQ ID NO: 1278636 - RNA, 16 nt, Human
agccggcacagggucu

SEQ ID NO: 1278637 - RNA, 16 nt, Human
agccgggguggggugg

SEQ ID NO: 1278638 - RNA, 19 nt, Human
agccggggugggguggcug

SEQ ID NO: 1278639 - RNA, 20 nt, Human
agccggggugggguggcugc

SEQ ID NO: 1278640 - RNA, 23 nt, Human
agccggggugggguggcugcagc

SEQ ID NO: 1278641 - RNA, 24 nt, Human
agccggggugggguggcugcagcc

SEQ ID NO: 1278642 - RNA, 16 nt, Human
agccgggucugccucu

SEQ ID NO: 1278643 - RNA, 14 nt, Human
agccgagcaggagg

SEQ ID NO: 1278644 - RNA, 15 nt, Human
agccgagcaggaggc

SEQ ID NO: 1278645 - RNA, 23 nt, Human
agacuacaggcacacaccaccac

SEQ ID NO: 1278646 - RNA, 16 nt, Human
agacuacagcuggggu

SEQ ID NO: 1278647 - RNA, 21 nt, Human
agacuacagcuggggugcagg

SEQ ID NO: 1278648 - RNA, 22 nt, Human
agacguuuuauaagcaucauua

SEQ ID NO: 1278649 - RNA, 16 nt, Human
agacguuuuauaagca

SEQ ID NO: 1278650 - RNA, 13 nt, Human
agacuaagccagc

SEQ ID NO: 1278651 - RNA, 15 nt, Human
agacuaagccagcac

SEQ ID NO: 1278652 - RNA, 16 nt, Human
agacuaagccagcacc

SEQ ID NO: 1278653 - RNA, 14 nt, Human
agacgggcccuggu

SEQ ID NO: 1278654 - RNA, 21 nt, Human
agaccaagauggcccauccug

SEQ ID NO: 1278655 - RNA, 11 nt, Human
agaccaauaaa

SEQ ID NO: 1278656 - RNA, 19 nt, Human
agaccaaggcuuucucuac

SEQ ID NO: 1278657 - RNA, 14 nt, Human
agaccacaugcccc

SEQ ID NO: 1278658 - RNA, 13 nt, Human
agaccaccaagcc

SEQ ID NO: 1278659 - RNA, 14 nt, Human
agaccaccaagccu

SEQ ID NO: 1278660 - RNA, 13 nt, Human
agaccauaauguu

SEQ ID NO: 1278661 - RNA, 17 nt, Human
agaccauccaccaggcc

SEQ ID NO: 1278662 - RNA, 12 nt, Human
agaccagggcuc

SEQ ID NO: 1278663 - RNA, 18 nt, Human
agaccagggcuccagccc

SEQ ID NO: 1278664 - RNA, 16 nt, Human
agaccagggcuccagc

SEQ ID NO: 1278665 - RNA, 13 nt, Human
agagaaggagcag

SEQ ID NO: 1278666 - RNA, 23 nt, Human
agagaagccuucaagcucugagg

SEQ ID NO: 1278667 - RNA, 12 nt, Human
agagaagccuuc

SEQ ID NO: 1278668 - RNA, 13 nt, Human
agagaagccuuca

SEQ ID NO: 1278669 - RNA, 14 nt, Human
agagaagccuucaa

SEQ ID NO: 1278670 - RNA, 17 nt, Human
agagaagccuucaagcu

SEQ ID NO: 1278671 - RNA, 21 nt, Human
agagaagccuucaagcucuga

SEQ ID NO: 1278672 - RNA, 22 nt, Human
agagaagccuucaagcucugag

SEQ ID NO: 1278673 - RNA, 15 nt, Human
agagaagcaaguaaa

SEQ ID NO: 1278674 - RNA, 22 nt, Human
agagaagcauucucauuggaaa

SEQ ID NO: 1278675 - RNA, 23 nt, Human
agagaagcauucucauuggaaau

SEQ ID NO: 1278676 - RNA, 11 nt, Human
agagaagccag

SEQ ID NO: 1278677 - RNA, 12 nt, Human
agagaagccagc

SEQ ID NO: 1278678 - RNA, 13 nt, Human
agagaagccagcu

SEQ ID NO: 1278679 - RNA, 14 nt, Human
agagaagccagcuu

SEQ ID NO: 1278680 - RNA, 16 nt, Human
agagaagccagcuugu

SEQ ID NO: 1278681 - RNA, 13 nt, Human
agagaagccauca

SEQ ID NO: 1278682 - RNA, 16 nt, Human
agagaagccaucaccu

SEQ ID NO: 1278683 - RNA, 22 nt, Human
agagaagccaucaccucagaug

SEQ ID NO: 1278684 - RNA, 16 nt, Human
agagagcuucuguugc

SEQ ID NO: 1278685 - RNA, 16 nt, Human
agagaaguagaaauca

SEQ ID NO: 1278686 - RNA, 20 nt, Human
agagagcuucuguugcugcc

SEQ ID NO: 1278687 - RNA, 23 nt, Human
agagagcuucuguugcugccuca

SEQ ID NO: 1278688 - RNA, 17 nt, Human
agacugcauuauauuua

SEQ ID NO: 1278689 - RNA, 21 nt, Human
agacugcauuauauuuauuac

SEQ ID NO: 1278690 - RNA, 18 nt, Human
agagaaaggggagcccac

SEQ ID NO: 1278691 - RNA, 19 nt, Human
agagaaaggggagcccacu

SEQ ID NO: 1278692 - RNA, 21 nt, Human
agagaaaggggagcccacugu

SEQ ID NO: 1278693 - RNA, 23 nt, Human
agagaaaggggagcccacugucc

SEQ ID NO: 1278694 - RNA, 15 nt, Human
agagcccuucauuug

SEQ ID NO: 1278695 - RNA, 15 nt, Human
agagcccugggaccg

SEQ ID NO: 1278696 - RNA, 17 nt, Human
agagcccugggaccgcu

SEQ ID NO: 1278697 - RNA, 12 nt, Human
agagcccuggga

SEQ ID NO: 1278698 - RNA, 13 nt, Human
agagcccugggac

SEQ ID NO: 1278699 - RNA, 19 nt, Human
agagcccugucaguagagu

SEQ ID NO: 1278700 - RNA, 10 nt, Human
agagccuggg

SEQ ID NO: 1278701 - RNA, 12 nt, Human
agagccuggggc

SEQ ID NO: 1278702 - RNA, 13 nt, Human
agagccuggggcu

SEQ ID NO: 1278703 - RNA, 16 nt, Human
agagccuggggcucua

SEQ ID NO: 1278704 - RNA, 23 nt, Human
agagccuggggcucuaacgccug

SEQ ID NO: 1278705 - RNA, 16 nt, Human
agagccuguaaacuuu

SEQ ID NO: 1278706 - RNA, 20 nt, Human
agagccuuccacccaggggc

SEQ ID NO: 1278707 - RNA, 22 nt, Human
agagccuuccacccaggggcag

SEQ ID NO: 1278708 - RNA, 13 nt, Human
agagccuuccacc

SEQ ID NO: 1278709 - RNA, 16 nt, Human
agagccuuccacccag

SEQ ID NO: 1278710 - RNA, 17 nt, Human
agagccuuccacccagg

SEQ ID NO: 1278711 - RNA, 14 nt, Human
agagaguggcuccu

SEQ ID NO: 1278712 - RNA, 16 nt, Human
agagaguggcuccucc

SEQ ID NO: 1278713 - RNA, 22 nt, Human
agagagguuugcagucccaagc

SEQ ID NO: 1278714 - RNA, 22 nt, Human
agagcccgaggaggugucucag

SEQ ID NO: 1278715 - RNA, 21 nt, Human
agagcccgaggaggugucuca

SEQ ID NO: 1278716 - RNA, 14 nt, Human
agagcccugaggcc

SEQ ID NO: 1278717 - RNA, 22 nt, Human
agagcccugaggccuagacucu

SEQ ID NO: 1278718 - RNA, 18 nt, Human
agagcccugaggccuaga

SEQ ID NO: 1278719 - RNA, 16 nt, Human
agaggguguccugcac

SEQ ID NO: 1278720 - RNA, 20 nt, Human
agaggggccgaugcccagag

SEQ ID NO: 1278721 - RNA, 13 nt, Human
agaggggccugcc

SEQ ID NO: 1278722 - RNA, 14 nt, Human
agaggggccugcca

SEQ ID NO: 1278723 - RNA, 17 nt, Human
agaggggccugccaccu

SEQ ID NO: 1278724 - RNA, 20 nt, Human
agaggggccugccaccugga

SEQ ID NO: 1278725 - RNA, 21 nt, Human
agaggggccugccaccuggac

SEQ ID NO: 1278726 - RNA, 22 nt, Human
agaggggccugccaccuggacc

SEQ ID NO: 1278727 - RNA, 23 nt, Human
agaggggccugccaccuggaccc

SEQ ID NO: 1278728 - RNA, 21 nt, Human
agaggggcugaauagcagaag

SEQ ID NO: 1278729 - RNA, 15 nt, Human
agaguuacaguucug

SEQ ID NO: 1278730 - RNA, 16 nt, Human
agaguuacaguucugu

SEQ ID NO: 1278731 - RNA, 17 nt, Human
agaguuacaguucugug

SEQ ID NO: 1278732 - RNA, 22 nt, Human
agaguuacaguucugugguuuc

SEQ ID NO: 1278733 - RNA, 11 nt, Human
agaguuacagu

SEQ ID NO: 1278734 - RNA, 16 nt, Human
agauacuuaagugcug

SEQ ID NO: 1278735 - RNA, 17 nt, Human
agaggagccaccaguuc

SEQ ID NO: 1278736 - RNA, 23 nt, Human
agaggagcccccacccuguuccu

SEQ ID NO: 1278737 - RNA, 21 nt, Human
agaggauggucuuacagcagg

SEQ ID NO: 1278738 - RNA, 21 nt, Human
agauaggucagugcaaauacu

SEQ ID NO: 1278739 - RNA, 17 nt, Human
agauaguuuucauccau

SEQ ID NO: 1278740 - RNA, 13 nt, Human
agauaguuuucau

SEQ ID NO: 1278741 - RNA, 14 nt, Human
agauaguuuucauc

SEQ ID NO: 1278742 - RNA, 21 nt, Human
agaugaggccagaccauggac

SEQ ID NO: 1278743 - RNA, 16 nt, Human
agaugaggccagacca

SEQ ID NO: 1278744 - RNA, 14 nt, Human
agaugaggccagac

SEQ ID NO: 1278745 - RNA, 13 nt, Human
agaugaggccaga

SEQ ID NO: 1278746 - RNA, 22 nt, Human
agaugaggccagaccauggaca

SEQ ID NO: 1278747 - RNA, 23 nt, Human
agauggcugugccucugccuguc

SEQ ID NO: 1278748 - RNA, 15 nt, Human
agaucuuagauucuc

SEQ ID NO: 1278749 - RNA, 18 nt, Human
agaucuguuuugaaggca

SEQ ID NO: 1278750 - RNA, 14 nt, Human
agaucuuagauucu

SEQ ID NO: 1278751 - RNA, 14 nt, Human
agaugacugagggu

SEQ ID NO: 1278752 - RNA, 14 nt, Human
agaugacuugaggc

SEQ ID NO: 1278753 - RNA, 23 nt, Human
agaucuguccucagccuugccag

SEQ ID NO: 1278754 - RNA, 14 nt, Human
agaucuguuuugaa

SEQ ID NO: 1278755 - RNA, 21 nt, Human
agaucuguuuugaaggcaaaa

SEQ ID NO: 1278756 - RNA, 21 nt, Human
aauggcuuuggucucuugcuu

SEQ ID NO: 1278757 - RNA, 18 nt, Human
aauggcuuuggucucuug

SEQ ID NO: 1278758 - RNA, 16 nt, Human
aauggcugauaauuuu

SEQ ID NO: 1278759 - RNA, 17 nt, Human
aauggcugauaauuuua

SEQ ID NO: 1278760 - RNA, 18 nt, Human
aauggcugauaauuuuaa

SEQ ID NO: 1278761 - RNA, 19 nt, Human
aauggcugauaauuuuaaa

SEQ ID NO: 1278762 - RNA, 16 nt, Human
aaugggcucaaccaga

SEQ ID NO: 1278763 - RNA, 14 nt, Human
aaugggcucaaacu

SEQ ID NO: 1278764 - RNA, 12 nt, Human
aauggggccaga

SEQ ID NO: 1278765 - RNA, 13 nt, Human
aauggggccagau

SEQ ID NO: 1278766 - RNA, 14 nt, Human
aauggggccagauc

SEQ ID NO: 1278767 - RNA, 20 nt, Human
aaugguacuccacauauuuc

SEQ ID NO: 1278768 - RNA, 18 nt, Human
aaugguacugacuuugcu

SEQ ID NO: 1278769 - RNA, 17 nt, Human
aaugguaggcauuuccu

SEQ ID NO: 1278770 - RNA, 18 nt, Human
aaugguaggcauuuccua

SEQ ID NO: 1278771 - RNA, 13 nt, Human
aaugucuggagac

SEQ ID NO: 1278772 - RNA, 14 nt, Human
aaugucuggagacc

SEQ ID NO: 1278773 - RNA, 20 nt, Human
aaugucuggagaccaccagg

SEQ ID NO: 1278774 - RNA, 22 nt, Human
aaugucucacugagcacuguuu

SEQ ID NO: 1278775 - RNA, 19 nt, Human
aaugucucacugagcacug

SEQ ID NO: 1278776 - RNA, 16 nt, Human
aaugucucacugagca

SEQ ID NO: 1278777 - RNA, 15 nt, Human
aaugguguagaacac

SEQ ID NO: 1278778 - RNA, 22 nt, Human
aauggucuuucuaaugugugaa

SEQ ID NO: 1278779 - RNA, 16 nt, Human
aauggugccuucauuu

SEQ ID NO: 1278780 - RNA, 20 nt, Human
aaugucuugaugcaugcacu

SEQ ID NO: 1278781 - RNA, 11 nt, Human
aaugucuugug

SEQ ID NO: 1278782 - RNA, 13 nt, Human
aaugucuuguguu

SEQ ID NO: 1278783 - RNA, 13 nt, Human
aaugucuugagcu

SEQ ID NO: 1278784 - RNA, 14 nt, Human
aaugucuugagcuc

SEQ ID NO: 1278785 - RNA, 15 nt, Human
aaugucuugagcucu

SEQ ID NO: 1278786 - RNA, 17 nt, Human
aaugucuugagcucuau

SEQ ID NO: 1278787 - RNA, 19 nt, Human
aaugucuugagcucuauua

SEQ ID NO: 1278788 - RNA, 16 nt, Human
aauuaaaagcaaauca

SEQ ID NO: 1278789 - RNA, 18 nt, Human
aauuaaaagcaaaucauu

SEQ ID NO: 1278790 - RNA, 21 nt, Human
aauuaaaagcaaaucauuugu

SEQ ID NO: 1278791 - RNA, 20 nt, Human
aauuaaaagcaaaucauuug

SEQ ID NO: 1278792 - RNA, 12 nt, Human
aauuaaacuuag

SEQ ID NO: 1278793 - RNA, 14 nt, Human
aauuaaacuuuuaa

SEQ ID NO: 1278794 - RNA, 22 nt, Human
aauguuuuuaauaaaagaaaau

SEQ ID NO: 1278795 - RNA, 14 nt, Human
aauguuuuucuaaa

SEQ ID NO: 1278796 - RNA, 15 nt, Human
aauguuuuucuaaag

SEQ ID NO: 1278797 - RNA, 23 nt, Human
aauguuuuuugccacagcuuuug

SEQ ID NO: 1278798 - RNA, 13 nt, Human
aauguuuuuugcc

SEQ ID NO: 1278799 - RNA, 15 nt, Human
aauguuuuuugccac

SEQ ID NO: 1278800 - RNA, 19 nt, Human
aauuaaacuuuuaauucau

SEQ ID NO: 1278801 - RNA, 15 nt, Human
aauuaaagcuguuau

SEQ ID NO: 1278802 - RNA, 14 nt, Human
aauuaaaguacuuu

SEQ ID NO: 1278803 - RNA, 16 nt, Human
aauuaaaguacuuuaa

SEQ ID NO: 1278804 - RNA, 14 nt, Human
aauuaguuuuauau

SEQ ID NO: 1278805 - RNA, 14 nt, Human
aauuaguuauauau

SEQ ID NO: 1278806 - RNA, 12 nt, Human
aauuaguuuccu

SEQ ID NO: 1278807 - RNA, 13 nt, Human
aauuaguuuccuu

SEQ ID NO: 1278808 - RNA, 14 nt, Human
aauuaguuuccuuu

SEQ ID NO: 1278809 - RNA, 15 nt, Human
aauuaguuuccuuuu

SEQ ID NO: 1278810 - RNA, 23 nt, Human
aauuaguuuccuuuuuaauaugc

SEQ ID NO: 1278811 - RNA, 17 nt, Human
aauuaguuuuauaugcu

SEQ ID NO: 1278812 - RNA, 20 nt, Human
aauuaguuuuauaugcuucu

SEQ ID NO: 1278813 - RNA, 12 nt, Human
aaugaagauacu

SEQ ID NO: 1278814 - RNA, 19 nt, Human
aaugaagacaaaacauaca

SEQ ID NO: 1278815 - RNA, 22 nt, Human
aaugaacagaacauagacagaa

SEQ ID NO: 1278816 - RNA, 11 nt, Human
aaugaagaaag

SEQ ID NO: 1278817 - RNA, 20 nt, Human
aaugauaacuggaaacuuca

SEQ ID NO: 1278818 - RNA, 17 nt, Human
aaugaagauacugaaau

SEQ ID NO: 1278819 - RNA, 21 nt, Human
aaugaucugauugaccguguu

SEQ ID NO: 1278820 - RNA, 18 nt, Human
aaucugcauuauuggaau

SEQ ID NO: 1278821 - RNA, 19 nt, Human
aaucugcuaccaaaacagu

SEQ ID NO: 1278822 - RNA, 21 nt, Human
aaucccaaauuugauugauuu

SEQ ID NO: 1278823 - RNA, 17 nt, Human
aaucucauugcuuacaa

SEQ ID NO: 1278824 - RNA, 17 nt, Human
aaucucaucucagugaa

SEQ ID NO: 1278825 - RNA, 15 nt, Human
aaucugcaauucaaa

SEQ ID NO: 1278826 - RNA, 19 nt, Human
aaucugcaauucaaaaguu

SEQ ID NO: 1278827 - RNA, 16 nt, Human
aaucugcauuauugga

SEQ ID NO: 1278828 - RNA, 17 nt, Human
aaucugcauuauuggaa

SEQ ID NO: 1278829 - RNA, 19 nt, Human
aaucugcuuguauuccaag

SEQ ID NO: 1278830 - RNA, 15 nt, Human
aaugaacagaacaua

SEQ ID NO: 1278831 - RNA, 21 nt, Human
aaugaacaucccuuuuucaau

SEQ ID NO: 1278832 - RNA, 13 nt, Human
aauccauacauuu

SEQ ID NO: 1278833 - RNA, 14 nt, Human
aauccauacauuug

SEQ ID NO: 1278834 - RNA, 18 nt, Human
aauccaggguggugguga

SEQ ID NO: 1278835 - RNA, 21 nt, Human
aauccaggcagauccaggacu

SEQ ID NO: 1278836 - RNA, 22 nt, Human
aauccaggcagauccaggacua

SEQ ID NO: 1278837 - RNA, 11 nt, Human
aaucccaaauu

SEQ ID NO: 1278838 - RNA, 16 nt, Human
aaucccaaauuugauu

SEQ ID NO: 1278839 - RNA, 18 nt, Human
aaucccaaauuugauuga

SEQ ID NO: 1278840 - RNA, 21 nt, Human
aaugaugaucaauuauaguuu

SEQ ID NO: 1278841 - RNA, 23 nt, Human
aaugaugaucaauuauaguuucu

SEQ ID NO: 1278842 - RNA, 13 nt, Human
aaucacaauacau

SEQ ID NO: 1278843 - RNA, 21 nt, Human
aaucaacuugcuuaucaacuu

SEQ ID NO: 1278844 - RNA, 15 nt, Human
aaucaacuugcuuau

SEQ ID NO: 1278845 - RNA, 17 nt, Human
aaucaacuugcuuauca

SEQ ID NO: 1278846 - RNA, 13 nt, Human
aaucaacuugcuu

SEQ ID NO: 1278847 - RNA, 22 nt, Human
aaucacauauuuuaaaauuugu

SEQ ID NO: 1278848 - RNA, 23 nt, Human
aaucacauauuuuaaaauuuguu

SEQ ID NO: 1278849 - RNA, 20 nt, Human
aaucaauuacugguccaaaa

SEQ ID NO: 1278850 - RNA, 18 nt, Human
aaucaacuugcuuaucaa

SEQ ID NO: 1278851 - RNA, 16 nt, Human
aauauucaauaaagcu

SEQ ID NO: 1278852 - RNA, 15 nt, Human
aauauucaauaaagc

SEQ ID NO: 1278853 - RNA, 14 nt, Human
aauauucaauaaag

SEQ ID NO: 1278854 - RNA, 18 nt, Human
aauauuaugagaugcugg

SEQ ID NO: 1278855 - RNA, 22 nt, Human
aaucaaauuuguaggguuucua

SEQ ID NO: 1278856 - RNA, 16 nt, Human
aauauuauguuaaaac

SEQ ID NO: 1278857 - RNA, 14 nt, Human
aauauuaugagaug

SEQ ID NO: 1278858 - RNA, 16 nt, Human
aauauuaugagaugcu

SEQ ID NO: 1278859 - RNA, 16 nt, Human
aauauuauuccucaaa

SEQ ID NO: 1278860 - RNA, 15 nt, Human
aauauggacugcuca

SEQ ID NO: 1278861 - RNA, 18 nt, Human
aauauggucuuuugguua

SEQ ID NO: 1278862 - RNA, 21 nt, Human
aauaugggggccuuuugggaa

SEQ ID NO: 1278863 - RNA, 12 nt, Human
aauauguaccaa

SEQ ID NO: 1278864 - RNA, 19 nt, Human
aauauguaccaagaaucuu

SEQ ID NO: 1278865 - RNA, 15 nt, Human
aauauguauaacuuu

SEQ ID NO: 1278866 - RNA, 23 nt, Human
aauauguauaacuuuaacuucug

SEQ ID NO: 1278867 - RNA, 15 nt, Human
aauauguaccaagaa

SEQ ID NO: 1278868 - RNA, 22 nt, Human
aauauuaugagaugcuggcuug

SEQ ID NO: 1278869 - RNA, 17 nt, Human
aauauggacacuuaaua

SEQ ID NO: 1278870 - RNA, 21 nt, Human
aauauggacacuuaauacuac

SEQ ID NO: 1278871 - RNA, 15 nt, Human
aauauaauuguuuua

SEQ ID NO: 1278872 - RNA, 17 nt, Human
aauaaacgucuuaaaua

SEQ ID NO: 1278873 - RNA, 19 nt, Human
aauaaaauucaacaaacau

SEQ ID NO: 1278874 - RNA, 18 nt, Human
aauaaacuaauaauugca

SEQ ID NO: 1278875 - RNA, 18 nt, Human
aauaaaauucaacaaaca

SEQ ID NO: 1278876 - RNA, 22 nt, Human
aauaaaauucaacaaacauuug

SEQ ID NO: 1278877 - RNA, 23 nt, Human
aauaaaauuaaagcugaaaacug

SEQ ID NO: 1278878 - RNA, 19 nt, Human
aauaaacuauuuguaaagu

SEQ ID NO: 1278879 - RNA, 16 nt, Human
aauaagugcccucucc

SEQ ID NO: 1278880 - RNA, 17 nt, Human
aauaagugcccucuccc

SEQ ID NO: 1278881 - RNA, 18 nt, Human
aauaagugcccucuccca

SEQ ID NO: 1278882 - RNA, 11 nt, Human
aauaaguuauu

SEQ ID NO: 1278883 - RNA, 20 nt, Human
aaguugugcuugagccagga

SEQ ID NO: 1278884 - RNA, 20 nt, Human
aaguuguuccuuaagucaga

SEQ ID NO: 1278885 - RNA, 18 nt, Human
aaguuguuguaaccugcu

SEQ ID NO: 1278886 - RNA, 21 nt, Human
aagugcuguuuauuaaucuua

SEQ ID NO: 1278887 - RNA, 22 nt, Human
aagugcuguuuauuaaucuuag

SEQ ID NO: 1278888 - RNA, 21 nt, Human
aaguggguuuuuuaguugaau

SEQ ID NO: 1278889 - RNA, 17 nt, Human
aaguggguuuuuuaguu

SEQ ID NO: 1278890 - RNA, 18 nt, Human
aagugguucccucucuua

SEQ ID NO: 1278891 - RNA, 22 nt, Human
aaguguaaaauauuuugaauca

SEQ ID NO: 1278892 - RNA, 21 nt, Human
aauaauccuaaacauaugaau

SEQ ID NO: 1278893 - RNA, 15 nt, Human
aauaauccaugaaag

SEQ ID NO: 1278894 - RNA, 20 nt, Human
aauaaucacgcuuuccugaa

SEQ ID NO: 1278895 - RNA, 21 nt, Human
aauaaucacgcuuuccugaau

SEQ ID NO: 1278896 - RNA, 20 nt, Human
aauaauaaagaauagcuuua

SEQ ID NO: 1278897 - RNA, 13 nt, Human
aauaaguuauugc

SEQ ID NO: 1278898 - RNA, 14 nt, Human
aauaaguuauugca

SEQ ID NO: 1278899 - RNA, 18 nt, Human
aauaaguuauugcaguuu

SEQ ID NO: 1278900 - RNA, 21 nt, Human
aauaaguucaaauucuucuga

SEQ ID NO: 1278901 - RNA, 22 nt, Human
aauaaguucaaauucuucugaa

SEQ ID NO: 1278902 - RNA, 20 nt, Human
aauaaguuuuuguuucacag

SEQ ID NO: 1278903 - RNA, 12 nt, Human
aauaauaaagaa

SEQ ID NO: 1278904 - RNA, 19 nt, Human
aauaauguaagacaaauau

SEQ ID NO: 1278905 - RNA, 12 nt, Human
aauaauguaaga

SEQ ID NO: 1278906 - RNA, 12 nt, Human
aauaaugcuuug

SEQ ID NO: 1278907 - RNA, 13 nt, Human
aauaaugcuuuga

SEQ ID NO: 1278908 - RNA, 15 nt, Human
aauaaugcuuugaaa

SEQ ID NO: 1278909 - RNA, 14 nt, Human
aagugcuguuuauu

SEQ ID NO: 1278910 - RNA, 16 nt, Human
aagugcuguuuauuaa

SEQ ID NO: 1278911 - RNA, 17 nt, Human
aagugcuguuuauuaau

SEQ ID NO: 1278912 - RNA, 18 nt, Human
aagugcuguuuauuaauc

SEQ ID NO: 1278913 - RNA, 20 nt, Human
aagugcuguuuauuaaucuu

SEQ ID NO: 1278914 - RNA, 20 nt, Human
aaguccaguguuucuuuuuu

SEQ ID NO: 1278915 - RNA, 19 nt, Human
aaguccagguccugguggg

SEQ ID NO: 1278916 - RNA, 20 nt, Human
aaguccaguccaguccuauc

SEQ ID NO: 1278917 - RNA, 17 nt, Human
aaguccagguccuggug

SEQ ID NO: 1278918 - RNA, 18 nt, Human
aaguccagguccuggugg

SEQ ID NO: 1278919 - RNA, 21 nt, Human
aaguccagguccugguggggc

SEQ ID NO: 1278920 - RNA, 13 nt, Human
aaguccagguccu

SEQ ID NO: 1278921 - RNA, 15 nt, Human
aaguccagguccugg

SEQ ID NO: 1278922 - RNA, 23 nt, Human
aaguccaggcuuuuuuaucaugu

SEQ ID NO: 1278923 - RNA, 14 nt, Human
aaguauguauuauu

SEQ ID NO: 1278924 - RNA, 21 nt, Human
aaguauguauuauuuacauuu

SEQ ID NO: 1278925 - RNA, 15 nt, Human
aaguacuuuuggcau

SEQ ID NO: 1278926 - RNA, 14 nt, Human
aaguacuuuuggca

SEQ ID NO: 1278927 - RNA, 14 nt, Human
aagguuuaaaugaa

SEQ ID NO: 1278928 - RNA, 16 nt, Human
aagguuuaaaugaaca

SEQ ID NO: 1278929 - RNA, 21 nt, Human
aagguuuaaaugaacaagaga

SEQ ID NO: 1278930 - RNA, 17 nt, Human
aaguacuuguaguucca

SEQ ID NO: 1278931 - RNA, 16 nt, Human
aaguagaaacaaaaua

SEQ ID NO: 1278932 - RNA, 15 nt, Human
aaguagaaaucauag

SEQ ID NO: 1278933 - RNA, 18 nt, Human
aaguagaaacaaaauaca

SEQ ID NO: 1278934 - RNA, 13 nt, Human
aaguagaaaucau

SEQ ID NO: 1278935 - RNA, 19 nt, Human
aaguaucaucaguguagaa

SEQ ID NO: 1278936 - RNA, 18 nt, Human
aaggugcugacggccagg

SEQ ID NO: 1278937 - RNA, 19 nt, Human
aagguggauggccccagca

SEQ ID NO: 1278938 - RNA, 20 nt, Human
aaggugggaggaugugaauu

SEQ ID NO: 1278939 - RNA, 22 nt, Human
aaggugggaggaugugaauugu

SEQ ID NO: 1278940 - RNA, 17 nt, Human
aagguucuuacugcuug

SEQ ID NO: 1278941 - RNA, 16 nt, Human
aagguugggcagggug

SEQ ID NO: 1278942 - RNA, 20 nt, Human
aagguuuaaagagucuagau

SEQ ID NO: 1278943 - RNA, 21 nt, Human
aagguuuaaagagucuagauu

SEQ ID NO: 1278944 - RNA, 19 nt, Human
aagucucuggaauuugaaa

SEQ ID NO: 1278945 - RNA, 15 nt, Human
aagucucuaauucua

SEQ ID NO: 1278946 - RNA, 18 nt, Human
aagucucuaauucuauua

SEQ ID NO: 1278947 - RNA, 14 nt, Human
aaggacuguaaucu

SEQ ID NO: 1278948 - RNA, 15 nt, Human
aaggauuuugcaguu

SEQ ID NO: 1278949 - RNA, 14 nt, Human
aaggauuuugcagu

SEQ ID NO: 1278950 - RNA, 13 nt, Human
aaggcaaaaauag

SEQ ID NO: 1278951 - RNA, 21 nt, Human
aaggcaaaaauaguuuggaua

SEQ ID NO: 1278952 - RNA, 18 nt, Human
aaggacccggaggggccu

SEQ ID NO: 1278953 - RNA, 21 nt, Human
aaggacccggaggggccuggc

SEQ ID NO: 1278954 - RNA, 18 nt, Human
aaggacuaggguccuggg

SEQ ID NO: 1278955 - RNA, 20 nt, Human
aaggacuaggguccugggga

SEQ ID NO: 1278956 - RNA, 21 nt, Human
aaggacuaugaaaagcuagaa

SEQ ID NO: 1278957 - RNA, 16 nt, Human
aaggacuauaagaaua

SEQ ID NO: 1278958 - RNA, 22 nt, Human
aaggacuccuccuuuuuccaug

SEQ ID NO: 1278959 - RNA, 15 nt, Human
aaggacuccugaaaa

SEQ ID NO: 1278960 - RNA, 20 nt, Human
aagcuggagugcaguggcau

SEQ ID NO: 1278961 - RNA, 20 nt, Human
aagcugcucaacuugcaaaa

SEQ ID NO: 1278962 - RNA, 23 nt, Human
aagcugcucaacuugcaaaauca

SEQ ID NO: 1278963 - RNA, 12 nt, Human
aagcugcucaac

SEQ ID NO: 1278964 - RNA, 23 nt, Human
aagcuggcggcuggggucccagc

SEQ ID NO: 1278965 - RNA, 22 nt, Human
aagcgugagcuuaaaauacaag

SEQ ID NO: 1278966 - RNA, 13 nt, Human
aagcuaaaauaaa

SEQ ID NO: 1278967 - RNA, 16 nt, Human
aagcuaaaauaaagaa

SEQ ID NO: 1278968 - RNA, 21 nt, Human
aagcuaaauccuuuacuguua

SEQ ID NO: 1278969 - RNA, 15 nt, Human
aagcuaaaauaaaga

SEQ ID NO: 1278970 - RNA, 20 nt, Human
aagcuaacagggaaggcagg

SEQ ID NO: 1278971 - RNA, 21 nt, Human
aagcuaacagggaaggcaggc

SEQ ID NO: 1278972 - RNA, 22 nt, Human
aagcuaacagggaaggcaggca

SEQ ID NO: 1278973 - RNA, 17 nt, Human
aagcuaagguuuagaua

SEQ ID NO: 1278974 - RNA, 23 nt, Human
aagcuaacagggaaggcaggcag

SEQ ID NO: 1278975 - RNA, 23 nt, Human
aagcugccuccccucuccuuccu

SEQ ID NO: 1278976 - RNA, 15 nt, Human
aagcugccugguaua

SEQ ID NO: 1278977 - RNA, 20 nt, Human
aagcugccugguauauccaa

SEQ ID NO: 1278978 - RNA, 15 nt, Human
aaggcaaaaauguaa

SEQ ID NO: 1278979 - RNA, 14 nt, Human
aaggcaaaaaugua

SEQ ID NO: 1278980 - RNA, 16 nt, Human
aaggcacaugucaccu

SEQ ID NO: 1278981 - RNA, 19 nt, Human
aaggcacccaucugucugc

SEQ ID NO: 1278982 - RNA, 19 nt, Human
aaggcacccccgucaagag

SEQ ID NO: 1278983 - RNA, 22 nt, Human
aaggcacccaucugucugccaa

SEQ ID NO: 1278984 - RNA, 14 nt, Human
aaggcacucuagau

SEQ ID NO: 1278985 - RNA, 23 nt, Human
aagccaggaauuucccaggaccc

SEQ ID NO: 1278986 - RNA, 23 nt, Human
aagccagcuuguuuacaugcuua

SEQ ID NO: 1278987 - RNA, 17 nt, Human
aagccauaugaacagcu

SEQ ID NO: 1278988 - RNA, 16 nt, Human
aagccaucaccucaga

SEQ ID NO: 1278989 - RNA, 20 nt, Human
aagccaucuugaguggucau

SEQ ID NO: 1278990 - RNA, 23 nt, Human
aagccaucaccucagauggcagc

SEQ ID NO: 1278991 - RNA, 22 nt, Human
aagccaugaguuccagaaagua

SEQ ID NO: 1278992 - RNA, 23 nt, Human
aagccaugaguuccagaaaguaa

SEQ ID NO: 1278993 - RNA, 13 nt, Human
aagccaugcugga

SEQ ID NO: 1278994 - RNA, 15 nt, Human
aagccaugcuggaaa

SEQ ID NO: 1278995 - RNA, 21 nt, Human
aagccaugcuggaaaauaaua

SEQ ID NO: 1278996 - RNA, 20 nt, Human
aagccauggagauucucaua

SEQ ID NO: 1278997 - RNA, 18 nt, Human
aagccauggguagccugg

SEQ ID NO: 1278998 - RNA, 21 nt, Human
aagccauggguagccugggug

SEQ ID NO: 1278999 - RNA, 22 nt, Human
aagccauggguagccugggugu

SEQ ID NO: 1279000 - RNA, 22 nt, Human
aagaaauuaugugccagauuua

SEQ ID NO: 1279001 - RNA, 17 nt, Human
aagaaauugaauacuuu

SEQ ID NO: 1279002 - RNA, 18 nt, Human
aagaaauugaauacuuug

SEQ ID NO: 1279003 - RNA, 19 nt, Human
aagaaauugaauacuuuga

SEQ ID NO: 1279004 - RNA, 13 nt, Human
aagaaauuaugug

SEQ ID NO: 1279005 - RNA, 13 nt, Human
aagaaauggugaa

SEQ ID NO: 1279006 - RNA, 22 nt, Human
aagaaauugaauacuuugaaug

SEQ ID NO: 1279007 - RNA, 15 nt, Human
aagaaauuucacaua

SEQ ID NO: 1279008 - RNA, 12 nt, Human
aagaacaaagua

SEQ ID NO: 1279009 - RNA, 19 nt, Human
aagaacacccuauauuuug

SEQ ID NO: 1279010 - RNA, 21 nt, Human
aagaacacccuauauuuugca

SEQ ID NO: 1279011 - RNA, 19 nt, Human
aagauugcuuaauaaauug

SEQ ID NO: 1279012 - RNA, 17 nt, Human
aagauugguguuuuuuu

SEQ ID NO: 1279013 - RNA, 19 nt, Human
aagauugguguuuuuuucu

SEQ ID NO: 1279014 - RNA, 20 nt, Human
aagauugguguuuuuuucua

SEQ ID NO: 1279015 - RNA, 23 nt, Human
aagauugguguuuuuuucuaugg

SEQ ID NO: 1279016 - RNA, 16 nt, Human
aagauugcugaaauuu

SEQ ID NO: 1279017 - RNA, 16 nt, Human
aagauuuaccacuugu

SEQ ID NO: 1279018 - RNA, 21 nt, Human
aagauugguguuuuuuucuau

SEQ ID NO: 1279019 - RNA, 21 nt, Human
aagauugugucccauuccccc

SEQ ID NO: 1279020 - RNA, 15 nt, Human
aagauuguuccugcu

SEQ ID NO: 1279021 - RNA, 12 nt, Human
aagauuuaauau

SEQ ID NO: 1279022 - RNA, 13 nt, Human
aagauuuaauauu

SEQ ID NO: 1279023 - RNA, 16 nt, Human
aagauuuccauauaaa

SEQ ID NO: 1279024 - RNA, 22 nt, Human
aagauuuccuucuuuuuuucuu

SEQ ID NO: 1279025 - RNA, 14 nt, Human
aagauuuguuuuua

SEQ ID NO: 1279026 - RNA, 16 nt, Human
aagauuuguuuuuaaa

SEQ ID NO: 1279027 - RNA, 17 nt, Human
aagauuuguuuuuaaac

SEQ ID NO: 1279028 - RNA, 19 nt, Human
aagauuuguuuuuaaacug

SEQ ID NO: 1279029 - RNA, 20 nt, Human
aagauuuguuuuuaaacugu

SEQ ID NO: 1279030 - RNA, 23 nt, Human
aagauuuguuuuuaaacuguaca

SEQ ID NO: 1279031 - RNA, 13 nt, Human
aagccagauuuuc

SEQ ID NO: 1279032 - RNA, 19 nt, Human
aagccagauuuuccugaaa

SEQ ID NO: 1279033 - RNA, 15 nt, Human
aagccagaggcuggg

SEQ ID NO: 1279034 - RNA, 16 nt, Human
aagccagaggcugggu

SEQ ID NO: 1279035 - RNA, 18 nt, Human
aagccacuuaaaauguuc

SEQ ID NO: 1279036 - RNA, 14 nt, Human
aagccagaggcugg

SEQ ID NO: 1279037 - RNA, 20 nt, Human
aagccagcguccuccucugu

SEQ ID NO: 1279038 - RNA, 19 nt, Human
aagccagcugcccccagag

SEQ ID NO: 1279039 - RNA, 22 nt, Human
aagccagcugcccccagagcca

SEQ ID NO: 1279040 - RNA, 20 nt, Human
aagccagcugcccccagagc

SEQ ID NO: 1279041 - RNA, 21 nt, Human
aagccagcugcccccagagcc

SEQ ID NO: 1279042 - RNA, 11 nt, Human
aagccagcuug

SEQ ID NO: 1279043 - RNA, 12 nt, Human
aagccagcuugu

SEQ ID NO: 1279044 - RNA, 14 nt, Human
aagccagcuuguuu

SEQ ID NO: 1279045 - RNA, 21 nt, Human
aagccagcuuguuuacaugcu

SEQ ID NO: 1279046 - RNA, 12 nt, Human
aagccagcuuuc

SEQ ID NO: 1279047 - RNA, 14 nt, Human
aagccagcuuuccc

SEQ ID NO: 1279048 - RNA, 15 nt, Human
aagccagcuuucccu

SEQ ID NO: 1279049 - RNA, 17 nt, Human
aagccagcuuucccugc

SEQ ID NO: 1279050 - RNA, 23 nt, Human
aagccagcuuucccugccucuca

SEQ ID NO: 1279051 - RNA, 20 nt, Human
aagccaggaauuucccagga

SEQ ID NO: 1279052 - RNA, 21 nt, Human
aagccaggaauuucccaggac

SEQ ID NO: 1279053 - RNA, 22 nt, Human
aagccaggaauuucccaggacc

SEQ ID NO: 1279054 - RNA, 16 nt, Human
aagcagacauuuuaaa

SEQ ID NO: 1279055 - RNA, 22 nt, Human
aagauuuguuuuuaaacuguac

SEQ ID NO: 1279056 - RNA, 12 nt, Human
aagcagacagcu

SEQ ID NO: 1279057 - RNA, 14 nt, Human
aagcagacagcucc

SEQ ID NO: 1279058 - RNA, 15 nt, Human
aagcagacagcucca

SEQ ID NO: 1279059 - RNA, 21 nt, Human
aagcagaccacugauaaaacc

SEQ ID NO: 1279060 - RNA, 19 nt, Human
aagcagagauuuucaacau

SEQ ID NO: 1279061 - RNA, 23 nt, Human
aagcagagauuuucaacauuuca

SEQ ID NO: 1279062 - RNA, 15 nt, Human
aagcagcuuagaguu

SEQ ID NO: 1279063 - RNA, 22 nt, Human
aagcaggaaaugaaaaugucuu

SEQ ID NO: 1279064 - RNA, 22 nt, Human
aaagucucuggaauuugaaaca

SEQ ID NO: 1279065 - RNA, 20 nt, Human
aaagucucuggaauuugaaa

SEQ ID NO: 1279066 - RNA, 12 nt, Human
aaagucucuugu

SEQ ID NO: 1279067 - RNA, 14 nt, Human
aaagucuguccuug

SEQ ID NO: 1279068 - RNA, 19 nt, Human
aaagucuguccuugaagga

SEQ ID NO: 1279069 - RNA, 22 nt, Human
aaagucuguccuugaaggacua

SEQ ID NO: 1279070 - RNA, 18 nt, Human
aaagucuguugauuaaag

SEQ ID NO: 1279071 - RNA, 19 nt, Human
aaagucuguugauuaaaga

SEQ ID NO: 1279072 - RNA, 20 nt, Human
aaagucuguugauuaaagau

SEQ ID NO: 1279073 - RNA, 17 nt, Human
aaagugaaauaaugugu

SEQ ID NO: 1279074 - RNA, 15 nt, Human
aaagugaaauaaugu

SEQ ID NO: 1279075 - RNA, 19 nt, Human
aaagucucuggaauuugaa

SEQ ID NO: 1279076 - RNA, 15 nt, Human
aaagucucuaauucu

SEQ ID NO: 1279077 - RNA, 18 nt, Human
aaagucucuaauucuauu

SEQ ID NO: 1279078 - RNA, 16 nt, Human
aaagggacugagaaau

SEQ ID NO: 1279079 - RNA, 20 nt, Human
aaagggacugagaaauuuau

SEQ ID NO: 1279080 - RNA, 19 nt, Human
aaaggcuguuaaauacagg

SEQ ID NO: 1279081 - RNA, 22 nt, Human
aaaggcuguuaaauacaggaaa

SEQ ID NO: 1279082 - RNA, 20 nt, Human
aaaggcuguuaaauacagga

SEQ ID NO: 1279083 - RNA, 12 nt, Human
aaauaacaauga

SEQ ID NO: 1279084 - RNA, 23 nt, Human
aaauaaaggaugugauuguggaa

SEQ ID NO: 1279085 - RNA, 14 nt, Human
aaauaaagaaugga

SEQ ID NO: 1279086 - RNA, 15 nt, Human
aaauaaagcaucuca

SEQ ID NO: 1279087 - RNA, 20 nt, Human
aaauaaagcuugcaacaaaa

SEQ ID NO: 1279088 - RNA, 22 nt, Human
aaauaaaauuaaagcugaaaac

SEQ ID NO: 1279089 - RNA, 13 nt, Human
aaauaaaaugcua

SEQ ID NO: 1279090 - RNA, 14 nt, Human
aaauaaaaugcuag

SEQ ID NO: 1279091 - RNA, 17 nt, Human
aaauaaaaugcuagguu

SEQ ID NO: 1279092 - RNA, 15 nt, Human
aaauaaaauuuguug

SEQ ID NO: 1279093 - RNA, 16 nt, Human
aaauaaaauuuguugc

SEQ ID NO: 1279094 - RNA, 17 nt, Human
aaauaaaauuuguugca

SEQ ID NO: 1279095 - RNA, 13 nt, Human
aaauaaagaaaua

SEQ ID NO: 1279096 - RNA, 15 nt, Human
aaauaaagaaaagau

SEQ ID NO: 1279097 - RNA, 13 nt, Human
aaauaaagaaugg

SEQ ID NO: 1279098 - RNA, 16 nt, Human
aaauaaagaauggaaa

SEQ ID NO: 1279099 - RNA, 14 nt, Human
aaagugacccuguu

SEQ ID NO: 1279100 - RNA, 19 nt, Human
aaagugacuaauggcauga

SEQ ID NO: 1279101 - RNA, 14 nt, Human
aaagugagagcacg

SEQ ID NO: 1279102 - RNA, 17 nt, Human
aaagugcuaagguucua

SEQ ID NO: 1279103 - RNA, 18 nt, Human
aaagugcuaagguucuaa

SEQ ID NO: 1279104 - RNA, 20 nt, Human
aaagugcuaagguucuaagg

SEQ ID NO: 1279105 - RNA, 21 nt, Human
aaagugcuaagguucuaaggc

SEQ ID NO: 1279106 - RNA, 23 nt, Human
aaagugcuaagguucuaaggccu

SEQ ID NO: 1279107 - RNA, 13 nt, Human
aaagugcugagau

SEQ ID NO: 1279108 - RNA, 18 nt, Human
aaauaaaaggaagccaaa

SEQ ID NO: 1279109 - RNA, 14 nt, Human
aaauaaauuugacu

SEQ ID NO: 1279110 - RNA, 23 nt, Human
aaauaacaaaucucaagcaaaca

SEQ ID NO: 1279111 - RNA, 20 nt, Human
aaauaacaaaugccaaauua

SEQ ID NO: 1279112 - RNA, 14 nt, Human
aaauaacaaugugc

SEQ ID NO: 1279113 - RNA, 17 nt, Human
aaauaacaaugugcucu

SEQ ID NO: 1279114 - RNA, 19 nt, Human
aaauggccauuugcuuuuu

SEQ ID NO: 1279115 - RNA, 22 nt, Human
aaauggccauuugcuuuuucac

SEQ ID NO: 1279116 - RNA, 23 nt, Human
aaauggccauuugcuuuuucacc

SEQ ID NO: 1279117 - RNA, 11 nt, Human
aaauggccuca

SEQ ID NO: 1279118 - RNA, 15 nt, Human
aaauggccucaugug

SEQ ID NO: 1279119 - RNA, 21 nt, Human
aaauggcgucuggaaguccaa

SEQ ID NO: 1279120 - RNA, 21 nt, Human
aaauggccucauguggcugga

SEQ ID NO: 1279121 - RNA, 22 nt, Human
aaauggccucauguggcuggaa

SEQ ID NO: 1279122 - RNA, 18 nt, Human
aaauggcuuccuggcaau

SEQ ID NO: 1279123 - RNA, 17 nt, Human
aaauggaauacucuuau

SEQ ID NO: 1279124 - RNA, 13 nt, Human
aaauggaaacuau

SEQ ID NO: 1279125 - RNA, 20 nt, Human
aaaugcuuuuuauuucugca

SEQ ID NO: 1279126 - RNA, 19 nt, Human
aaaucuugucauguguaua

SEQ ID NO: 1279127 - RNA, 20 nt, Human
aaaucuugucauguguauaa

SEQ ID NO: 1279128 - RNA, 21 nt, Human
aaaucuugucauguguauaaa

SEQ ID NO: 1279129 - RNA, 12 nt, Human
aaaucuuccaau

SEQ ID NO: 1279130 - RNA, 14 nt, Human
aaaucuuccaauuu

SEQ ID NO: 1279131 - RNA, 13 nt, Human
aaaucuugaaauu

SEQ ID NO: 1279132 - RNA, 14 nt, Human
aaaucuugaucagu

SEQ ID NO: 1279133 - RNA, 20 nt, Human
aaaucuugguugaugccaaa

SEQ ID NO: 1279134 - RNA, 22 nt, Human
aaaucuugguugaugccaaaaa

SEQ ID NO: 1279135 - RNA, 14 nt, Human
aaaucuugucaugu

SEQ ID NO: 1279136 - RNA, 16 nt, Human
aaaucuugucaugugu

SEQ ID NO: 1279137 - RNA, 17 nt, Human
aaaucuugucaugugua

SEQ ID NO: 1279138 - RNA, 18 nt, Human
aaaucuugucauguguau

SEQ ID NO: 1279139 - RNA, 20 nt, Human
aaaucaaaugguaucuuuug

SEQ ID NO: 1279140 - RNA, 13 nt, Human
aaaucaaaugaau

SEQ ID NO: 1279141 - RNA, 18 nt, Human
aaaucaacuugcuuauca

SEQ ID NO: 1279142 - RNA, 15 nt, Human
aaauauuuugaauca

SEQ ID NO: 1279143 - RNA, 21 nt, Human
aaauauuuugaaucaauaaua

SEQ ID NO: 1279144 - RNA, 22 nt, Human
aaauauuuugaaucaauaauau

SEQ ID NO: 1279145 - RNA, 16 nt, Human
aaauagaagagagagg

SEQ ID NO: 1279146 - RNA, 17 nt, Human
aaauagaauguaaaugu

SEQ ID NO: 1279147 - RNA, 14 nt, Human
aaauagaauguaaa

SEQ ID NO: 1279148 - RNA, 21 nt, Human
aaauagaauguaaaugucuca

SEQ ID NO: 1279149 - RNA, 19 nt, Human
aaauagaauguaaaugucu

SEQ ID NO: 1279150 - RNA, 15 nt, Human
aaauagacaaauaga

SEQ ID NO: 1279151 - RNA, 17 nt, Human
aaauagacagcaugaga

SEQ ID NO: 1279152 - RNA, 13 nt, Human
aaauaguaaaaau

SEQ ID NO: 1279153 - RNA, 16 nt, Human
aaauaguaaaaauaaa

SEQ ID NO: 1279154 - RNA, 12 nt, Human
aaauaguauuuc

SEQ ID NO: 1279155 - RNA, 19 nt, Human
aaauacuugucuguuuuaa

SEQ ID NO: 1279156 - RNA, 16 nt, Human
aaauacuugucuguuu

SEQ ID NO: 1279157 - RNA, 14 nt, Human
aaauacuugucugu

SEQ ID NO: 1279158 - RNA, 19 nt, Human
aaauacuuuuacucugccu

SEQ ID NO: 1279159 - RNA, 17 nt, Human
aaauacuuuuacucugc

SEQ ID NO: 1279160 - RNA, 14 nt, Human
aaauagaaaauggu

SEQ ID NO: 1279161 - RNA, 15 nt, Human
aaauagaaaaugguc

SEQ ID NO: 1279162 - RNA, 23 nt, Human
aaauauuuuaaagaauuguguca

SEQ ID NO: 1279163 - RNA, 19 nt, Human
aaauauuuuaaagaauugu

SEQ ID NO: 1279164 - RNA, 13 nt, Human
aaauauaaagacg

SEQ ID NO: 1279165 - RNA, 23 nt, Human
aaauagucucuuuaaaaggaaag

SEQ ID NO: 1279166 - RNA, 20 nt, Human
aaauaguuuggauauguaaa

SEQ ID NO: 1279167 - RNA, 21 nt, Human
aaauaguuuggauauguaaaa

SEQ ID NO: 1279168 - RNA, 13 nt, Human
aaauauaaaauau

SEQ ID NO: 1279169 - RNA, 10 nt, Human
aaauauaaag

SEQ ID NO: 1279170 - RNA, 12 nt, Human
aaauauaaagac

SEQ ID NO: 1279171 - RNA, 24 nt, Human
aaauauaaagacguuuuauaagca

SEQ ID NO: 1279172 - RNA, 22 nt, Human
aaauacuguuuuuaacaacuau

SEQ ID NO: 1279173 - RNA, 13 nt, Human
aaacacucuugaa

SEQ ID NO: 1279174 - RNA, 20 nt, Human
aaaauugcugacuguagcuu

SEQ ID NO: 1279175 - RNA, 17 nt, Human
aaacacucuugaaaaau

SEQ ID NO: 1279176 - RNA, 14 nt, Human
aaacacucuugaaa

SEQ ID NO: 1279177 - RNA, 13 nt, Human
aaaacacacaggu

SEQ ID NO: 1279178 - RNA, 18 nt, Human
aaaauucaacaaacauuu

SEQ ID NO: 1279179 - RNA, 13 nt, Human
aaaauucagcaaa

SEQ ID NO: 1279180 - RNA, 14 nt, Human
aaaauucagcaaag

SEQ ID NO: 1279181 - RNA, 19 nt, Human
aaaauucagcaaagugguu

SEQ ID NO: 1279182 - RNA, 12 nt, Human
aaaauucauuuu

SEQ ID NO: 1279183 - RNA, 24 nt, Human
aaacacuugcggauauucuggacu

SEQ ID NO: 1279184 - RNA, 15 nt, Human
aaacacuugcaaccu

SEQ ID NO: 1279185 - RNA, 14 nt, Human
aaacagauguccau

SEQ ID NO: 1279186 - RNA, 16 nt, Human
aaacagauuguuugca

SEQ ID NO: 1279187 - RNA, 22 nt, Human
aaacagauguccaucagaugac

SEQ ID NO: 1279188 - RNA, 17 nt, Human
aaacagauuuggaaaga

SEQ ID NO: 1279189 - RNA, 20 nt, Human
aaagaaaacuuguauuaugu

SEQ ID NO: 1279190 - RNA, 12 nt, Human
aaagaaaacuug

SEQ ID NO: 1279191 - RNA, 11 nt, Human
aaacugccccc

SEQ ID NO: 1279192 - RNA, 13 nt, Human
aaagaaaaacaaa

SEQ ID NO: 1279193 - RNA, 16 nt, Human
aaagaaaagaaaauuu

SEQ ID NO: 1279194 - RNA, 13 nt, Human
aaagaaaaccuuu

SEQ ID NO: 1279195 - RNA, 13 nt, Human
aaagaaaagaugc

SEQ ID NO: 1279196 - RNA, 14 nt, Human
aaagaaaagaugca

SEQ ID NO: 1279197 - RNA, 15 nt, Human
aaagaaaagaugcac

SEQ ID NO: 1279198 - RNA, 17 nt, Human
aaagaaaagaugcacuu

SEQ ID NO: 1279199 - RNA, 20 nt, Human
aaagaaaagaugcacuuugc

SEQ ID NO: 1279200 - RNA, 16 nt, Human
aaacugacucuuaaga

SEQ ID NO: 1279201 - RNA, 17 nt, Human
aaacugacucuuaagaa

SEQ ID NO: 1279202 - RNA, 16 nt, Human
aaacugcaugcccaga

SEQ ID NO: 1279203 - RNA, 11 nt, Human
aaagaacaucc

SEQ ID NO: 1279204 - RNA, 15 nt, Human
aaagaaauauaccua

SEQ ID NO: 1279205 - RNA, 15 nt, Human
aaagaaauuaugugc

SEQ ID NO: 1279206 - RNA, 13 nt, Human
aaagaaauuaugu

SEQ ID NO: 1279207 - RNA, 16 nt, Human
aaagaaaguguauuug

SEQ ID NO: 1279208 - RNA, 10 nt, Human
aaagaaagug

SEQ ID NO: 1279209 - RNA, 12 nt, Human
aaagaaagugua

SEQ ID NO: 1279210 - RNA, 13 nt, Human
aaagaaaguguau

SEQ ID NO: 1279211 - RNA, 12 nt, Human
aaagaguacucu

SEQ ID NO: 1279212 - RNA, 17 nt, Human
aaagaguacucuuguuu

SEQ ID NO: 1279213 - RNA, 13 nt, Human
aaagaguagaauu

SEQ ID NO: 1279214 - RNA, 18 nt, Human
aaagaguagaauugcauu

SEQ ID NO: 1279215 - RNA, 20 nt, Human
aaagauaucucaucucuucu

SEQ ID NO: 1279216 - RNA, 17 nt, Human
aaagaugaaagagcagu

SEQ ID NO: 1279217 - RNA, 15 nt, Human
aacuuugcugagccu

SEQ ID NO: 1279218 - RNA, 15 nt, Human
aacuuugaaguuagc

SEQ ID NO: 1279219 - RNA, 15 nt, Human
aacuuuggaaccaga

SEQ ID NO: 1279220 - RNA, 19 nt, Human
aacuuuggaaccagacucu

SEQ ID NO: 1279221 - RNA, 18 nt, Human
aacuuuggaguccccuca

SEQ ID NO: 1279222 - RNA, 24 nt, Human
aacuuuggaaccagacucuugccu

SEQ ID NO: 1279223 - RNA, 11 nt, Human
aacuuuuaauu

SEQ ID NO: 1279224 - RNA, 11 nt, Human
aacuuuuguaa

SEQ ID NO: 1279225 - RNA, 21 nt, Human
aacuuuuguaagacaaagguu

SEQ ID NO: 1279226 - RNA, 13 nt, Human
aacuuuugugaau

SEQ ID NO: 1279227 - RNA, 19 nt, Human
aacuuuugugaauuaggcu

SEQ ID NO: 1279228 - RNA, 21 nt, Human
aacuuuucuuaaaaaguuaua

SEQ ID NO: 1279229 - RNA, 20 nt, Human
aacuuuuuauugauuuuugg

SEQ ID NO: 1279230 - RNA, 16 nt, Human
aacuuuucuaacagaa

SEQ ID NO: 1279231 - RNA, 19 nt, Human
aacuuuucuaacagaaagc

SEQ ID NO: 1279232 - RNA, 18 nt, Human
aacuuuucuauuaaaagu

SEQ ID NO: 1279233 - RNA, 12 nt, Human
aacuuuguuuua

SEQ ID NO: 1279234 - RNA, 17 nt, Human
aacuuuuaguaaaguca

SEQ ID NO: 1279235 - RNA, 13 nt, Human
aagaaaucuauuu

SEQ ID NO: 1279236 - RNA, 23 nt, Human
aacuuuuuguucugguccuuuuu

SEQ ID NO: 1279237 - RNA, 15 nt, Human
aacuuuuuguucugg

SEQ ID NO: 1279238 - RNA, 23 nt, Human
aacuuuuuuauuuaaaaaacuaa

SEQ ID NO: 1279239 - RNA, 21 nt, Human
aacuuuuuuucuguaccaguu

SEQ ID NO: 1279240 - RNA, 22 nt, Human
aacuuuuuuucuguaccaguua

SEQ ID NO: 1279241 - RNA, 18 nt, Human
aacuuuuuuuuuucuuua

SEQ ID NO: 1279242 - RNA, 23 nt, Human
aacuuuuuuuuuucuuuauaaga

SEQ ID NO: 1279243 - RNA, 17 nt, Human
aacugauccagcaauua

SEQ ID NO: 1279244 - RNA, 14 nt, Human
aacugaccagccuc

SEQ ID NO: 1279245 - RNA, 19 nt, Human
aacugaccagccuccaugc

SEQ ID NO: 1279246 - RNA, 20 nt, Human
aacugacaagcuccauuuaa

SEQ ID NO: 1279247 - RNA, 19 nt, Human
aacugacaagcuccauuua

SEQ ID NO: 1279248 - RNA, 10 nt, Human
aacugacaag

SEQ ID NO: 1279249 - RNA, 16 nt, Human
aacugacaagccaucu

SEQ ID NO: 1279250 - RNA, 17 nt, Human
aacugacaagccaucuu

SEQ ID NO: 1279251 - RNA, 21 nt, Human
aacugauccaguauaagacua

SEQ ID NO: 1279252 - RNA, 17 nt, Human
aacugauucacaucuca

SEQ ID NO: 1279253 - RNA, 19 nt, Human
aacugauucacaucucauu

SEQ ID NO: 1279254 - RNA, 15 nt, Human
aacuguuuuuuaagu

SEQ ID NO: 1279255 - RNA, 13 nt, Human
aacuguuuuuuaa

SEQ ID NO: 1279256 - RNA, 23 nt, Human
aacuuagcauuuucugcaucucc

SEQ ID NO: 1279257 - RNA, 21 nt, Human
aacuuagcauuuucugcaucu

SEQ ID NO: 1279258 - RNA, 21 nt, Human
aacuuagcuuaugaguagcuu

SEQ ID NO: 1279259 - RNA, 16 nt, Human
aacugaacucugacaa

SEQ ID NO: 1279260 - RNA, 23 nt, Human
aacucauacacucguaugauacu

SEQ ID NO: 1279261 - RNA, 19 nt, Human
aacugaacucugacaacag

SEQ ID NO: 1279262 - RNA, 20 nt, Human
aacugaacucugacaacaga

SEQ ID NO: 1279263 - RNA, 23 nt, Human
aacugaacucugacaacagacuu

SEQ ID NO: 1279264 - RNA, 18 nt, Human
aacugaagaguaaucaau

SEQ ID NO: 1279265 - RNA, 18 nt, Human
aacugaagcagccucucc

SEQ ID NO: 1279266 - RNA, 20 nt, Human
aacugaagcagccucucccc

SEQ ID NO: 1279267 - RNA, 16 nt, Human
aacucacuccuuuuaa

SEQ ID NO: 1279268 - RNA, 16 nt, Human
aaccagcuuccuucag

SEQ ID NO: 1279269 - RNA, 17 nt, Human
aaccagcuuccuucaga

SEQ ID NO: 1279270 - RNA, 19 nt, Human
aaccagcuuccuucagaga

SEQ ID NO: 1279271 - RNA, 20 nt, Human
aaccagcuuccuucagagag

SEQ ID NO: 1279272 - RNA, 21 nt, Human
aaccagcuuccuucagagagc

SEQ ID NO: 1279273 - RNA, 22 nt, Human
aaccagcuuccuucagagagca

SEQ ID NO: 1279274 - RNA, 19 nt, Human
aaccacugaaaaaauauau

SEQ ID NO: 1279275 - RNA, 12 nt, Human
aaccacugcuuc

SEQ ID NO: 1279276 - RNA, 13 nt, Human
aaccacugcuucc

SEQ ID NO: 1279277 - RNA, 20 nt, Human
aaccacugcuuccauuuaau

SEQ ID NO: 1279278 - RNA, 23 nt, Human
aaccagcacagcuuagauuucau

SEQ ID NO: 1279279 - RNA, 23 nt, Human
aaccagaucuagucaaucaaguc

SEQ ID NO: 1279280 - RNA, 14 nt, Human
aaccagcucagcac

SEQ ID NO: 1279281 - RNA, 22 nt, Human
aaccagcucagcacugccugcu

SEQ ID NO: 1279282 - RNA, 17 nt, Human
aaccagcucagcacugc

SEQ ID NO: 1279283 - RNA, 13 nt, Human
aaccagcuuccuu

SEQ ID NO: 1279284 - RNA, 18 nt, Human
aaccaguccccccacccu

SEQ ID NO: 1279285 - RNA, 22 nt, Human
aaccaguccccccacccucauu

SEQ ID NO: 1279286 - RNA, 14 nt, Human
aaccagaucauugu

SEQ ID NO: 1279287 - RNA, 22 nt, Human
aaccacuggaaaguuuaugguu

SEQ ID NO: 1279288 - RNA, 13 nt, Human
aaccacugaaaaa

SEQ ID NO: 1279289 - RNA, 15 nt, Human
aaccacugaaaaaau

SEQ ID NO: 1279290 - RNA, 16 nt, Human
aaccacugaaaaaaua

SEQ ID NO: 1279291 - RNA, 20 nt, Human
aaccacugaaaaaauauaug

SEQ ID NO: 1279292 - RNA, 11 nt, Human
aacagcuggug

SEQ ID NO: 1279293 - RNA, 23 nt, Human
aacagcuggacccugaccagcuc

SEQ ID NO: 1279294 - RNA, 13 nt, Human
aacagcucgacuu

SEQ ID NO: 1279295 - RNA, 13 nt, Human
aacaugauuuggg

SEQ ID NO: 1279296 - RNA, 19 nt, Human
aacaucauuacuauaagaa

SEQ ID NO: 1279297 - RNA, 13 nt, Human
aacaucacagccc

SEQ ID NO: 1279298 - RNA, 20 nt, Human
aacaugcagaacaaaugaag

SEQ ID NO: 1279299 - RNA, 19 nt, Human
aacaugcagaacaaaugaa

SEQ ID NO: 1279300 - RNA, 12 nt, Human
aacaugcagaac

SEQ ID NO: 1279301 - RNA, 16 nt, Human
aacaugcacugauguu

SEQ ID NO: 1279302 - RNA, 19 nt, Human
aacaugcacugauguugug

SEQ ID NO: 1279303 - RNA, 21 nt, Human
aacaugaugagguaguaccuu

SEQ ID NO: 1279304 - RNA, 14 nt, Human
aacaugcacugaug

SEQ ID NO: 1279305 - RNA, 17 nt, Human
aacaugaugagguagua

SEQ ID NO: 1279306 - RNA, 22 nt, Human
aacccugucuggauccuauccu

SEQ ID NO: 1279307 - RNA, 17 nt, Human
aacaaagaaauuaugug

SEQ ID NO: 1279308 - RNA, 15 nt, Human
aacaaagaaauuaug

SEQ ID NO: 1279309 - RNA, 14 nt, Human
aacaaaauguaugu

SEQ ID NO: 1279310 - RNA, 17 nt, Human
aacaaaauguaugucug

SEQ ID NO: 1279311 - RNA, 17 nt, Human
aacaaacuguguaacug

SEQ ID NO: 1279312 - RNA, 20 nt, Human
aacaaacuguguaacugccc

SEQ ID NO: 1279313 - RNA, 13 nt, Human
aacaaaaauuguc

SEQ ID NO: 1279314 - RNA, 17 nt, Human
aacaaaacugcauuuca

SEQ ID NO: 1279315 - RNA, 22 nt, Human
aacaaaagaagcccggcuccug

SEQ ID NO: 1279316 - RNA, 18 nt, Human
aaauugcuuuguauugua

SEQ ID NO: 1279317 - RNA, 15 nt, Human
aaauugauuuugaac

SEQ ID NO: 1279318 - RNA, 18 nt, Human
aaauugcauuuccugaca

SEQ ID NO: 1279319 - RNA, 12 nt, Human
aaauuggagaaa

SEQ ID NO: 1279320 - RNA, 16 nt, Human
aaauuggcauggaaau

SEQ ID NO: 1279321 - RNA, 16 nt, Human
aaauuggaaagcaggu

SEQ ID NO: 1279322 - RNA, 20 nt, Human
aaauuggcauggaaauuuaa

SEQ ID NO: 1279323 - RNA, 21 nt, Human
aaauuggcauggaaauuuaaa

SEQ ID NO: 1279324 - RNA, 23 nt, Human
aaauuggcauggaaauuuaaagc

SEQ ID NO: 1279325 - RNA, 14 nt, Human
aaauugauuuugaa

SEQ ID NO: 1279326 - RNA, 13 nt, Human
aaauugcaaaucu

SEQ ID NO: 1279327 - RNA, 14 nt, Human
aaauugcaaaucuu

SEQ ID NO: 1279328 - RNA, 19 nt, Human
aaauugcaaaucuugaaau

SEQ ID NO: 1279329 - RNA, 21 nt, Human
aacaagaagccacagaccuag

SEQ ID NO: 1279330 - RNA, 19 nt, Human
aacaagaagggacugagag

SEQ ID NO: 1279331 - RNA, 12 nt, Human
aacaagaauugg

SEQ ID NO: 1279332 - RNA, 21 nt, Human
aacacauuugcuuuuugugau

SEQ ID NO: 1279333 - RNA, 15 nt, Human
aacaccaacauaaaa

SEQ ID NO: 1279334 - RNA, 14 nt, Human
aacaccaagcacag

SEQ ID NO: 1279335 - RNA, 17 nt, Human
aacaccaagcacagcag

SEQ ID NO: 1279336 - RNA, 18 nt, Human
aacaccaagcacagcagc

SEQ ID NO: 1279337 - RNA, 19 nt, Human
aacaccaagcacagcagcc

SEQ ID NO: 1279338 - RNA, 21 nt, Human
aacaccaagcacagcagccug

SEQ ID NO: 1279339 - RNA, 17 nt, Human
aacaccuuccagcuccu

SEQ ID NO: 1279340 - RNA, 16 nt, Human
aacaaagccacuuuca

SEQ ID NO: 1279341 - RNA, 15 nt, Human
aacaaagcagccacg

SEQ ID NO: 1279342 - RNA, 14 nt, Human
aacaaagcagccac

SEQ ID NO: 1279343 - RNA, 11 nt, Human
aacaaagaaac

SEQ ID NO: 1279344 - RNA, 12 nt, Human
aacaaagacaau

SEQ ID NO: 1279345 - RNA, 17 nt, Human
aacaaagaguucaagaa

SEQ ID NO: 1279346 - RNA, 23 nt, Human
aacaaagaguucaagaaauaagu

SEQ ID NO: 1279347 - RNA, 19 nt, Human
aacaaagaguucaagaaau

SEQ ID NO: 1279348 - RNA, 21 nt, Human
aacaaagaugccacauucaaa

SEQ ID NO: 1279349 - RNA, 19 nt, Human
aacaaagcaauucuuucaa

SEQ ID NO: 1279350 - RNA, 22 nt, Human
aacaaaggccuaauucuaugcc

SEQ ID NO: 1279351 - RNA, 15 nt, Human
aacaacucuuugaga

SEQ ID NO: 1279352 - RNA, 11 nt, Human
aacaagaaaaa

SEQ ID NO: 1279353 - RNA, 19 nt, Human
aacaagaaaaauaaagaaa

SEQ ID NO: 1279354 - RNA, 12 nt, Human
aacaagaaaaau

SEQ ID NO: 1279355 - RNA, 17 nt, Human
aacaagaaaaauaaaga

SEQ ID NO: 1279356 - RNA, 18 nt, Human
aacaagaaaaauaaagaa

SEQ ID NO: 1279357 - RNA, 15 nt, Human
aacacgcaccugccu

SEQ ID NO: 1279358 - RNA, 19 nt, Human
aacacgcaccugccucagg

SEQ ID NO: 1279359 - RNA, 14 nt, Human
aacacgcaccugcc

SEQ ID NO: 1279360 - RNA, 14 nt, Human
acuagcuauggugu

SEQ ID NO: 1279361 - RNA, 15 nt, Human
acuagcccaaugaaa

SEQ ID NO: 1279362 - RNA, 17 nt, Human
acuagcccaaugaaaug

SEQ ID NO: 1279363 - RNA, 18 nt, Human
acuagcccuccuuuuucc

SEQ ID NO: 1279364 - RNA, 17 nt, Human
acuagccaaaccucacc

SEQ ID NO: 1279365 - RNA, 18 nt, Human
acuagccaaaccucacca

SEQ ID NO: 1279366 - RNA, 19 nt, Human
acuagccaaaccucaccaa

SEQ ID NO: 1279367 - RNA, 22 nt, Human
acuagccaaaccucaccaacuc

SEQ ID NO: 1279368 - RNA, 15 nt, Human
acuaggguccugggg

SEQ ID NO: 1279369 - RNA, 16 nt, Human
acuagggccaagccca

SEQ ID NO: 1279370 - RNA, 16 nt, Human
acuaggguccugggga

SEQ ID NO: 1279371 - RNA, 11 nt, Human
acuagcucuug

SEQ ID NO: 1279372 - RNA, 13 nt, Human
acuagcucuuguu

SEQ ID NO: 1279373 - RNA, 24 nt, Human
acuagcucuuguugagccgugggc

SEQ ID NO: 1279374 - RNA, 18 nt, Human
acuaggaaauccauucac

SEQ ID NO: 1279375 - RNA, 18 nt, Human
acuaggagaaccaaaucu

SEQ ID NO: 1279376 - RNA, 21 nt, Human
acuaggagcuuugacucagga

SEQ ID NO: 1279377 - RNA, 23 nt, Human
acuaggagcuuugacucaggagc

SEQ ID NO: 1279378 - RNA, 22 nt, Human
acuaggagcuuugacucaggag

SEQ ID NO: 1279379 - RNA, 18 nt, Human
acuaggcccccacuugcc

SEQ ID NO: 1279380 - RNA, 20 nt, Human
acuaggcccccacuugccuc

SEQ ID NO: 1279381 - RNA, 22 nt, Human
acuaggcccccacuugccucuu

SEQ ID NO: 1279382 - RNA, 19 nt, Human
acuagggaucccucaucug

SEQ ID NO: 1279383 - RNA, 20 nt, Human
acuagggaucccucaucugu

SEQ ID NO: 1279384 - RNA, 12 nt, Human
acuccccuccuu

SEQ ID NO: 1279385 - RNA, 17 nt, Human
acuccccgaagucuuuu

SEQ ID NO: 1279386 - RNA, 14 nt, Human
acuccccgaagucu

SEQ ID NO: 1279387 - RNA, 16 nt, Human
acuccccgaagucuuu

SEQ ID NO: 1279388 - RNA, 20 nt, Human
acuccccacaucccaucguc

SEQ ID NO: 1279389 - RNA, 14 nt, Human
acucaguggggagg

SEQ ID NO: 1279390 - RNA, 20 nt, Human
acucagggaggcuaaaucag

SEQ ID NO: 1279391 - RNA, 21 nt, Human
acucagggaggcuaaaucagu

SEQ ID NO: 1279392 - RNA, 17 nt, Human
acucagggcagcgccag

SEQ ID NO: 1279393 - RNA, 20 nt, Human
acucagggcagcgccaggcu

SEQ ID NO: 1279394 - RNA, 21 nt, Human
acucagggcagcgccaggcug

SEQ ID NO: 1279395 - RNA, 22 nt, Human
acucagggcagcgccaggcuga

SEQ ID NO: 1279396 - RNA, 19 nt, Human
acucagucucucuucucuc

SEQ ID NO: 1279397 - RNA, 23 nt, Human
acucagucucucuucucuccagc

SEQ ID NO: 1279398 - RNA, 11 nt, Human
acucagcucug

SEQ ID NO: 1279399 - RNA, 22 nt, Human
acucaggcccccaccuggcuca

SEQ ID NO: 1279400 - RNA, 23 nt, Human
acucaggccuccaucuucucaug

SEQ ID NO: 1279401 - RNA, 23 nt, Human
acucaggcccccaccuggcucac

SEQ ID NO: 1279402 - RNA, 11 nt, Human
acucagccuuc

SEQ ID NO: 1279403 - RNA, 23 nt, Human
acucagccuucagacagagagga

SEQ ID NO: 1279404 - RNA, 19 nt, Human
acucagcucugacauucug

SEQ ID NO: 1279405 - RNA, 20 nt, Human
acucaaaccaaaucacugaa

SEQ ID NO: 1279406 - RNA, 19 nt, Human
acucaaaccaaaucacuga

SEQ ID NO: 1279407 - RNA, 14 nt, Human
acucaaacugagga

SEQ ID NO: 1279408 - RNA, 21 nt, Human
acucaaacugaggaauuucac

SEQ ID NO: 1279409 - RNA, 17 nt, Human
acucaaaauauuuguac

SEQ ID NO: 1279410 - RNA, 19 nt, Human
acucaaaauauuuguacau

SEQ ID NO: 1279411 - RNA, 20 nt, Human
acucaaaauauuuguacaua

SEQ ID NO: 1279412 - RNA, 20 nt, Human
acuauaagcaagaaggcaaa

SEQ ID NO: 1279413 - RNA, 18 nt, Human
acuauaagaacuuugagc

SEQ ID NO: 1279414 - RNA, 19 nt, Human
acuauaagaacuuugagcu

SEQ ID NO: 1279415 - RNA, 15 nt, Human
acucaaaauauuugu

SEQ ID NO: 1279416 - RNA, 20 nt, Human
acuaguugugucuggcaguu

SEQ ID NO: 1279417 - RNA, 13 nt, Human
acuauaagaacuu

SEQ ID NO: 1279418 - RNA, 14 nt, Human
acuauaagaacuuu

SEQ ID NO: 1279419 - RNA, 23 nt, Human
acucaaacugaggaauuucaccu

SEQ ID NO: 1279420 - RNA, 22 nt, Human
acucaaagcaugggauuauuag

SEQ ID NO: 1279421 - RNA, 17 nt, Human
acucaaaggguggaaua

SEQ ID NO: 1279422 - RNA, 11 nt, Human
acucagaucca

SEQ ID NO: 1279423 - RNA, 12 nt, Human
acucagauccag

SEQ ID NO: 1279424 - RNA, 14 nt, Human
acucagauccaggg

SEQ ID NO: 1279425 - RNA, 16 nt, Human
acucagauccagggac

SEQ ID NO: 1279426 - RNA, 17 nt, Human
acucagauccagggaca

SEQ ID NO: 1279427 - RNA, 19 nt, Human
acucagauccagggacaga

SEQ ID NO: 1279428 - RNA, 16 nt, Human
acucagauccuccuca

SEQ ID NO: 1279429 - RNA, 17 nt, Human
acucagauccuccucau

SEQ ID NO: 1279430 - RNA, 15 nt, Human
acucagcacaaggcc

SEQ ID NO: 1279431 - RNA, 17 nt, Human
acucagcacuuggcccu

SEQ ID NO: 1279432 - RNA, 21 nt, Human
acucuguucauuccuccaggu

SEQ ID NO: 1279433 - RNA, 16 nt, Human
acucugugcuggccag

SEQ ID NO: 1279434 - RNA, 20 nt, Human
acucuguugcaagugcaaua

SEQ ID NO: 1279435 - RNA, 17 nt, Human
acucugugcuggccagc

SEQ ID NO: 1279436 - RNA, 17 nt, Human
acucugugccagagccu

SEQ ID NO: 1279437 - RNA, 18 nt, Human
acucugugccagagccug

SEQ ID NO: 1279438 - RNA, 19 nt, Human
acucugugccagagccugg

SEQ ID NO: 1279439 - RNA, 20 nt, Human
acucugugccagagccuggg

SEQ ID NO: 1279440 - RNA, 21 nt, Human
acucugugccagagccugggg

SEQ ID NO: 1279441 - RNA, 22 nt, Human
acucugugccagagccuggggc

SEQ ID NO: 1279442 - RNA, 23 nt, Human
acucugugccagagccuggggcu

SEQ ID NO: 1279443 - RNA, 15 nt, Human
acucugugcuggcca

SEQ ID NO: 1279444 - RNA, 23 nt, Human
acucuagucaaugacaugaauuu

SEQ ID NO: 1279445 - RNA, 22 nt, Human
acucuagucaaugacaugaauu

SEQ ID NO: 1279446 - RNA, 22 nt, Human
acucuauauagcugaucaguuu

SEQ ID NO: 1279447 - RNA, 16 nt, Human
acucuauauuguucag

SEQ ID NO: 1279448 - RNA, 15 nt, Human
acucugugccagagc

SEQ ID NO: 1279449 - RNA, 16 nt, Human
acucugugccagagcc

SEQ ID NO: 1279450 - RNA, 19 nt, Human
acucuagucaaugacauga

SEQ ID NO: 1279451 - RNA, 20 nt, Human
acucuagucaaugacaugaa

SEQ ID NO: 1279452 - RNA, 13 nt, Human
acucccuuucaac

SEQ ID NO: 1279453 - RNA, 12 nt, Human
acucccuuucaa

SEQ ID NO: 1279454 - RNA, 15 nt, Human
acucccucacaagug

SEQ ID NO: 1279455 - RNA, 18 nt, Human
acucccuccuaaccuaga

SEQ ID NO: 1279456 - RNA, 14 nt, Human
acucccuugggcuc

SEQ ID NO: 1279457 - RNA, 16 nt, Human
acuaagagagaaugag

SEQ ID NO: 1279458 - RNA, 22 nt, Human
acgugauuagugaaaggaagau

SEQ ID NO: 1279459 - RNA, 16 nt, Human
acgccagacuucccac

SEQ ID NO: 1279460 - RNA, 22 nt, Human
acgccagacuucccacggcucc

SEQ ID NO: 1279461 - RNA, 23 nt, Human
acuaagaugugcagcauuucacu

SEQ ID NO: 1279462 - RNA, 19 nt, Human
acuaauaaacuaauaauug

SEQ ID NO: 1279463 - RNA, 11 nt, Human
acuaauaauug

SEQ ID NO: 1279464 - RNA, 13 nt, Human
acuaauaauugca

SEQ ID NO: 1279465 - RNA, 14 nt, Human
acuaauaauugcag

SEQ ID NO: 1279466 - RNA, 17 nt, Human
acuaauacagcugagcu

SEQ ID NO: 1279467 - RNA, 14 nt, Human
acuaauagaaaagu

SEQ ID NO: 1279468 - RNA, 16 nt, Human
acuaauagaauaaagg

SEQ ID NO: 1279469 - RNA, 17 nt, Human
acuaauagaauaaaggc

SEQ ID NO: 1279470 - RNA, 16 nt, Human
acuaauagaaaaguau

SEQ ID NO: 1279471 - RNA, 20 nt, Human
acuaauagaauaaaggcagu

SEQ ID NO: 1279472 - RNA, 14 nt, Human
acgaugacaguguu

SEQ ID NO: 1279473 - RNA, 17 nt, Human
accuguaugucuccagu

SEQ ID NO: 1279474 - RNA, 20 nt, Human
accugccccuccucucugcc

SEQ ID NO: 1279475 - RNA, 22 nt, Human
accugccccuccucucugcccu

SEQ ID NO: 1279476 - RNA, 15 nt, Human
accuguaaugacagg

SEQ ID NO: 1279477 - RNA, 20 nt, Human
accuguaaugacaggccugu

SEQ ID NO: 1279478 - RNA, 21 nt, Human
accuuuauuccuucauuucau

SEQ ID NO: 1279479 - RNA, 23 nt, Human
accuuuauuccuucauuucaucu

SEQ ID NO: 1279480 - RNA, 12 nt, Human
accuuuauucug

SEQ ID NO: 1279481 - RNA, 13 nt, Human
accuuuauucugg

SEQ ID NO: 1279482 - RNA, 17 nt, Human
accuuguuacuucugag

SEQ ID NO: 1279483 - RNA, 15 nt, Human
accuuguuacuucug

SEQ ID NO: 1279484 - RNA, 16 nt, Human
accuuguuacuucuga

SEQ ID NO: 1279485 - RNA, 14 nt, Human
accugccccuccuc

SEQ ID NO: 1279486 - RNA, 18 nt, Human
accugccccuccucucug

SEQ ID NO: 1279487 - RNA, 23 nt, Human
accugccccacuuguccuuagcc

SEQ ID NO: 1279488 - RNA, 16 nt, Human
accugcccccaaucca

SEQ ID NO: 1279489 - RNA, 21 nt, Human
accugcccaaccugcucuccu

SEQ ID NO: 1279490 - RNA, 17 nt, Human
accugccccaacucucc

SEQ ID NO: 1279491 - RNA, 17 nt, Human
accugccccacuugucc

SEQ ID NO: 1279492 - RNA, 19 nt, Human
accugccccacuuguccuu

SEQ ID NO: 1279493 - RNA, 22 nt, Human
accugccccacuuguccuuagc

SEQ ID NO: 1279494 - RNA, 21 nt, Human
accucugcacuacugacaugu

SEQ ID NO: 1279495 - RNA, 15 nt, Human
accucuucagaggcc

SEQ ID NO: 1279496 - RNA, 17 nt, Human
accucuucagaggcccu

SEQ ID NO: 1279497 - RNA, 18 nt, Human
accucuucagaggcccuc

SEQ ID NO: 1279498 - RNA, 20 nt, Human
acuuauuguagcauccugga

SEQ ID NO: 1279499 - RNA, 20 nt, Human
acuuauuggaacucugcuug

SEQ ID NO: 1279500 - RNA, 23 nt, Human
acuuauuguagcauccuggaaua

SEQ ID NO: 1279501 - RNA, 21 nt, Human
acuuauuggaacucugcuuga

SEQ ID NO: 1279502 - RNA, 24 nt, Human
acuguuuucuaguguaucaaaaug

SEQ ID NO: 1279503 - RNA, 23 nt, Human
acuguuuucuaguguaucaaaau

SEQ ID NO: 1279504 - RNA, 21 nt, Human
acuguuuucuaguguaucaaa

SEQ ID NO: 1279505 - RNA, 20 nt, Human
acuguuuucuaguguaucaa

SEQ ID NO: 1279506 - RNA, 19 nt, Human
acuguuuucuaguguauca

SEQ ID NO: 1279507 - RNA, 22 nt, Human
acuguuuucucucggcucccca

SEQ ID NO: 1279508 - RNA, 23 nt, Human
acuguuuucucucggcuccccau

SEQ ID NO: 1279509 - RNA, 15 nt, Human
acuuauuuaaacucu

SEQ ID NO: 1279510 - RNA, 13 nt, Human
acuuauuuaaugc

SEQ ID NO: 1279511 - RNA, 14 nt, Human
acuguuuauacacu

SEQ ID NO: 1279512 - RNA, 17 nt, Human
acuguuuauacacugug

SEQ ID NO: 1279513 - RNA, 19 nt, Human
acuguuuauacacugugua

SEQ ID NO: 1279514 - RNA, 18 nt, Human
acuguuuauacacugugu

SEQ ID NO: 1279515 - RNA, 18 nt, Human
acuguuuucuaguguauc

SEQ ID NO: 1279516 - RNA, 17 nt, Human
acuguuuucuaguguau

SEQ ID NO: 1279517 - RNA, 13 nt, Human
acuguuuucuagu

SEQ ID NO: 1279518 - RNA, 11 nt, Human
acuguuucaaa

SEQ ID NO: 1279519 - RNA, 20 nt, Human
acuguuuguuuacaaaauca

SEQ ID NO: 1279520 - RNA, 19 nt, Human
acuguuuguuuacaaaauc

SEQ ID NO: 1279521 - RNA, 17 nt, Human
acuguuguuaucuguuu

SEQ ID NO: 1279522 - RNA, 20 nt, Human
acuuguaaaggaauuuaaaa

SEQ ID NO: 1279523 - RNA, 19 nt, Human
acuuguaaaggaauuuaaa

SEQ ID NO: 1279524 - RNA, 15 nt, Human
acuuggucugugaga

SEQ ID NO: 1279525 - RNA, 14 nt, Human
acuuggucugugag

SEQ ID NO: 1279526 - RNA, 20 nt, Human
acuucuuuugcucuuagcug

SEQ ID NO: 1279527 - RNA, 22 nt, Human
acuucugccagcauaauacuug

SEQ ID NO: 1279528 - RNA, 12 nt, Human
acuucugagauc

SEQ ID NO: 1279529 - RNA, 20 nt, Human
acuucugagaucuguugauu

SEQ ID NO: 1279530 - RNA, 21 nt, Human
acuuggucugugagaugcuag

SEQ ID NO: 1279531 - RNA, 19 nt, Human
acuucuuuugcucuuagcu

SEQ ID NO: 1279532 - RNA, 12 nt, Human
acuuguaaauau

SEQ ID NO: 1279533 - RNA, 13 nt, Human
acuuguaaauaua

SEQ ID NO: 1279534 - RNA, 14 nt, Human
acuuguaaauauaa

SEQ ID NO: 1279535 - RNA, 15 nt, Human
acuuguaaauauaaa

SEQ ID NO: 1279536 - RNA, 16 nt, Human
acuuguaaauauaaag

SEQ ID NO: 1279537 - RNA, 20 nt, Human
acuuguaaaugugguaaaga

SEQ ID NO: 1279538 - RNA, 18 nt, Human
acuuguaaaugugguaaa

SEQ ID NO: 1279539 - RNA, 17 nt, Human
acuuguaaauauaaaga

SEQ ID NO: 1279540 - RNA, 18 nt, Human
acuuguaaauauaaagac

SEQ ID NO: 1279541 - RNA, 19 nt, Human
acuuguaaauauaaagacg

SEQ ID NO: 1279542 - RNA, 15 nt, Human
acuggguaggaaaga

SEQ ID NO: 1279543 - RNA, 22 nt, Human
acugggugguggccuggucccu

SEQ ID NO: 1279544 - RNA, 18 nt, Human
acugggugguggccuggu

SEQ ID NO: 1279545 - RNA, 17 nt, Human
acuggaacuugaacuga

SEQ ID NO: 1279546 - RNA, 18 nt, Human
acuggaacuugaacugau

SEQ ID NO: 1279547 - RNA, 19 nt, Human
acugcccccucugcccugc

SEQ ID NO: 1279548 - RNA, 18 nt, Human
acugcccccucugcccug

SEQ ID NO: 1279549 - RNA, 20 nt, Human
acugcccccucugcccugcg

SEQ ID NO: 1279550 - RNA, 16 nt, Human
acugcccccugcugcc

SEQ ID NO: 1279551 - RNA, 17 nt, Human
acugcccccugcugcca

SEQ ID NO: 1279552 - RNA, 19 nt, Human
acugcccccugcugccaug

SEQ ID NO: 1279553 - RNA, 18 nt, Human
acugcccccugcugccau

SEQ ID NO: 1279554 - RNA, 20 nt, Human
acugaaguaaaacaaacaau

SEQ ID NO: 1279555 - RNA, 13 nt, Human
acugaagugcuua

SEQ ID NO: 1279556 - RNA, 17 nt, Human
acugaagugcuuagugu

SEQ ID NO: 1279557 - RNA, 13 nt, Human
acugaagcuuuuu

SEQ ID NO: 1279558 - RNA, 14 nt, Human
acugaagcuuuuua

SEQ ID NO: 1279559 - RNA, 16 nt, Human
acugccaagacugcug

SEQ ID NO: 1279560 - RNA, 18 nt, Human
acugccaagacugcugug

SEQ ID NO: 1279561 - RNA, 19 nt, Human
acugccaagacugcugugg

SEQ ID NO: 1279562 - RNA, 20 nt, Human
acugccaagacugcuguggc

SEQ ID NO: 1279563 - RNA, 12 nt, Human
acugccaagcca

SEQ ID NO: 1279564 - RNA, 15 nt, Human
acugccaagccaugg

SEQ ID NO: 1279565 - RNA, 18 nt, Human
acugccaagccaugggua

SEQ ID NO: 1279566 - RNA, 21 nt, Human
acugguggcccgacagccugg

SEQ ID NO: 1279567 - RNA, 22 nt, Human
acugguggcccgacagccuggc

SEQ ID NO: 1279568 - RNA, 23 nt, Human
acugguggcccgacagccuggca

SEQ ID NO: 1279569 - RNA, 22 nt, Human
acugguggggauaggccagccg

SEQ ID NO: 1279570 - RNA, 21 nt, Human
acugguguuaucaccgugggc

SEQ ID NO: 1279571 - RNA, 22 nt, Human
acugguguuaucaccgugggcu

SEQ ID NO: 1279572 - RNA, 17 nt, Human
acuguccugggccugca

SEQ ID NO: 1279573 - RNA, 19 nt, Human
acugucucaagagggcacu

SEQ ID NO: 1279574 - RNA, 13 nt, Human
acugucgcugcuu

SEQ ID NO: 1279575 - RNA, 14 nt, Human
acugucgcugcuuc

SEQ ID NO: 1279576 - RNA, 19 nt, Human
acuguccugggccugcaga

SEQ ID NO: 1279577 - RNA, 17 nt, Human
acugucgcugcuucgug

SEQ ID NO: 1279578 - RNA, 18 nt, Human
acugugcaccaagcagga

SEQ ID NO: 1279579 - RNA, 22 nt, Human
acugugauucagaaaauguucu

SEQ ID NO: 1279580 - RNA, 15 nt, Human
acugugcacaucugu

SEQ ID NO: 1279581 - RNA, 19 nt, Human
acugugcacaucugugucu

SEQ ID NO: 1279582 - RNA, 20 nt, Human
acugugcacaucugugucuu

SEQ ID NO: 1279583 - RNA, 21 nt, Human
acugugcacaucugugucuug

SEQ ID NO: 1279584 - RNA, 19 nt, Human
acugucuggccccccuggu

SEQ ID NO: 1279585 - RNA, 22 nt, Human
acugucuggccccccugguccc

SEQ ID NO: 1279586 - RNA, 22 nt, Human
acugucuggggagcgggucugc

SEQ ID NO: 1279587 - RNA, 20 nt, Human
acugucuggggagcgggucu

SEQ ID NO: 1279588 - RNA, 18 nt, Human
agaaaaguugaauuuuac

SEQ ID NO: 1279589 - RNA, 21 nt, Human
agaaaaguugaauuuuacaug

SEQ ID NO: 1279590 - RNA, 15 nt, Human
agaaaaguauguucu

SEQ ID NO: 1279591 - RNA, 21 nt, Human
agaaaaguauguucuaaccuu

SEQ ID NO: 1279592 - RNA, 17 nt, Human
acuuuucuguaauucag

SEQ ID NO: 1279593 - RNA, 20 nt, Human
acuuuucuguaauucagguu

SEQ ID NO: 1279594 - RNA, 16 nt, Human
acuuuucuuaaaccuu

SEQ ID NO: 1279595 - RNA, 24 nt, Human
acuuuucuuaaaccuucaguuaug

SEQ ID NO: 1279596 - RNA, 17 nt, Human
acuuuucuuaaaaaguu

SEQ ID NO: 1279597 - RNA, 12 nt, Human
acuuuucuucua

SEQ ID NO: 1279598 - RNA, 20 nt, Human
acuuuucuucuauugccucu

SEQ ID NO: 1279599 - RNA, 18 nt, Human
acuuuucuucuauugccu

SEQ ID NO: 1279600 - RNA, 17 nt, Human
agaaaaguauguucuaa

SEQ ID NO: 1279601 - RNA, 17 nt, Human
acuuuucuauuaaaagu

SEQ ID NO: 1279602 - RNA, 11 nt, Human
acuuuucugua

SEQ ID NO: 1279603 - RNA, 18 nt, Human
acuuuuccuuugaauccu

SEQ ID NO: 1279604 - RNA, 19 nt, Human
acuuuuccuuugaauccuc

SEQ ID NO: 1279605 - RNA, 23 nt, Human
acuuuuauacucuuucuguauau

SEQ ID NO: 1279606 - RNA, 17 nt, Human
acuuuuccucccucagu

SEQ ID NO: 1279607 - RNA, 14 nt, Human
acuuuuaaacugug

SEQ ID NO: 1279608 - RNA, 15 nt, Human
acuuuuaaacugugu

SEQ ID NO: 1279609 - RNA, 17 nt, Human
acuuuuaaacuguguac

SEQ ID NO: 1279610 - RNA, 17 nt, Human
acuuuguuuuauuuuca

SEQ ID NO: 1279611 - RNA, 22 nt, Human
agaaaauuuuuguaguagcguu

SEQ ID NO: 1279612 - RNA, 20 nt, Human
agaaaauuuuuguaguagcg

SEQ ID NO: 1279613 - RNA, 16 nt, Human
agaaaauuuuuguagu

SEQ ID NO: 1279614 - RNA, 16 nt, Human
agaaaauucugugccu

SEQ ID NO: 1279615 - RNA, 13 nt, Human
agaaacaaagaug

SEQ ID NO: 1279616 - RNA, 18 nt, Human
agaaacaacaauuucuac

SEQ ID NO: 1279617 - RNA, 16 nt, Human
agaaaauguugagaau

SEQ ID NO: 1279618 - RNA, 17 nt, Human
agaaaauguugagaauc

SEQ ID NO: 1279619 - RNA, 22 nt, Human
agaaaauuaagggccgauuuaa

SEQ ID NO: 1279620 - RNA, 15 nt, Human
agaaaauuagacugu

SEQ ID NO: 1279621 - RNA, 23 nt, Human
agaaaauucugugccuuguuuuu

SEQ ID NO: 1279622 - RNA, 14 nt, Human
agaaaauguucugu

SEQ ID NO: 1279623 - RNA, 18 nt, Human
agaaaauguucuguuugc

SEQ ID NO: 1279624 - RNA, 14 nt, Human
agaaaauaacaaua

SEQ ID NO: 1279625 - RNA, 19 nt, Human
acuuuagggggugggauuc

SEQ ID NO: 1279626 - RNA, 23 nt, Human
acuuuagggaaguacuuuuggca

SEQ ID NO: 1279627 - RNA, 16 nt, Human
acuuuauaacuaacau

SEQ ID NO: 1279628 - RNA, 18 nt, Human
acuuuauaacuaacaugu

SEQ ID NO: 1279629 - RNA, 22 nt, Human
acuuucauauuuuaaacagagg

SEQ ID NO: 1279630 - RNA, 20 nt, Human
acuuucauuccuucagauuu

SEQ ID NO: 1279631 - RNA, 15 nt, Human
acuuucauuccuuca

SEQ ID NO: 1279632 - RNA, 18 nt, Human
acuuucauuccuucagau

SEQ ID NO: 1279633 - RNA, 13 nt, Human
acuuuccauuaca

SEQ ID NO: 1279634 - RNA, 14 nt, Human
acuuuccugcaacu

SEQ ID NO: 1279635 - RNA, 15 nt, Human
acuuucuagauuaag

SEQ ID NO: 1279636 - RNA, 20 nt, Human
acuuuguuucguggggaggu

SEQ ID NO: 1279637 - RNA, 14 nt, Human
acuuuguuuuauuu

SEQ ID NO: 1279638 - RNA, 12 nt, Human
acuuuuaaacag

SEQ ID NO: 1279639 - RNA, 15 nt, Human
acuuuuaaacaguga

SEQ ID NO: 1279640 - RNA, 13 nt, Human
acuuuuaaacugu

SEQ ID NO: 1279641 - RNA, 16 nt, Human
agaaaggauaaaguug

SEQ ID NO: 1279642 - RNA, 19 nt, Human
agaaauaaaaggaagccaa

SEQ ID NO: 1279643 - RNA, 20 nt, Human
agaaauaaaaggaagccaaa

SEQ ID NO: 1279644 - RNA, 17 nt, Human
agaaacaaagauguuau

SEQ ID NO: 1279645 - RNA, 14 nt, Human
agaaacaacacugu

SEQ ID NO: 1279646 - RNA, 15 nt, Human
agaaacaacacugua

SEQ ID NO: 1279647 - RNA, 16 nt, Human
agaaacaacacuguag

SEQ ID NO: 1279648 - RNA, 17 nt, Human
agaaacaacucuuugag

SEQ ID NO: 1279649 - RNA, 19 nt, Human
agaaaggaagcauuguaaa

SEQ ID NO: 1279650 - RNA, 21 nt, Human
agaaaggaagcauuguaaaau

SEQ ID NO: 1279651 - RNA, 22 nt, Human
agaaaggaagcauuguaaaaua

SEQ ID NO: 1279652 - RNA, 19 nt, Human
agaaaggacuccugaaaaa

SEQ ID NO: 1279653 - RNA, 22 nt, Human
accccuaaaagaaacccugcac

SEQ ID NO: 1279654 - RNA, 21 nt, Human
accccuaaaagaaacccugca

SEQ ID NO: 1279655 - RNA, 12 nt, Human
accccuaggacu

SEQ ID NO: 1279656 - RNA, 22 nt, Human
accccuaaagagauacuuugau

SEQ ID NO: 1279657 - RNA, 20 nt, Human
accccggggugcccacaggc

SEQ ID NO: 1279658 - RNA, 21 nt, Human
accccggggugcccacaggcc

SEQ ID NO: 1279659 - RNA, 23 nt, Human
accccggggugcccacaggccgc

SEQ ID NO: 1279660 - RNA, 13 nt, Human
accccggggugag

SEQ ID NO: 1279661 - RNA, 19 nt, Human
accccgccugcccucaugg

SEQ ID NO: 1279662 - RNA, 12 nt, Human
accccgacuuuu

SEQ ID NO: 1279663 - RNA, 15 nt, Human
accccgacuuuuguu

SEQ ID NO: 1279664 - RNA, 18 nt, Human
accccgaccaccugccca

SEQ ID NO: 1279665 - RNA, 15 nt, Human
accccgcagacaccu

SEQ ID NO: 1279666 - RNA, 17 nt, Human
accccgcagacaccuug

SEQ ID NO: 1279667 - RNA, 18 nt, Human
accccgcagacaccuugg

SEQ ID NO: 1279668 - RNA, 20 nt, Human
accccgcagacaccuuggac

SEQ ID NO: 1279669 - RNA, 14 nt, Human
accccgccugcccu

SEQ ID NO: 1279670 - RNA, 15 nt, Human
accccaaagcuuucc

SEQ ID NO: 1279671 - RNA, 17 nt, Human
accccaaagcuuuccug

SEQ ID NO: 1279672 - RNA, 18 nt, Human
accccaaagcuuuccugc

SEQ ID NO: 1279673 - RNA, 13 nt, Human
accccaaccugcu

SEQ ID NO: 1279674 - RNA, 14 nt, Human
accccaaccugcuc

SEQ ID NO: 1279675 - RNA, 15 nt, Human
accccaaccugcucu

SEQ ID NO: 1279676 - RNA, 18 nt, Human
accccaaccugcucuccu

SEQ ID NO: 1279677 - RNA, 23 nt, Human
accccaaaauuagccaguaaucc

SEQ ID NO: 1279678 - RNA, 22 nt, Human
accccaaaauuagccaguaauc

SEQ ID NO: 1279679 - RNA, 17 nt, Human
acccauuuuuccuuuug

SEQ ID NO: 1279680 - RNA, 16 nt, Human
accccaaacaccuucc

SEQ ID NO: 1279681 - RNA, 18 nt, Human
accccaaacaccuuccag

SEQ ID NO: 1279682 - RNA, 20 nt, Human
accccaaacaccuuccagcu

SEQ ID NO: 1279683 - RNA, 23 nt, Human
accccaaacaccuuccagcuccu

SEQ ID NO: 1279684 - RNA, 20 nt, Human
acccaugaguuggggucugg

SEQ ID NO: 1279685 - RNA, 21 nt, Human
acccaugaguuggggucuggc

SEQ ID NO: 1279686 - RNA, 23 nt, Human
acccaaggggauuuuuaugucug

SEQ ID NO: 1279687 - RNA, 18 nt, Human
acccaagguaccauccua

SEQ ID NO: 1279688 - RNA, 15 nt, Human
acccacaagaaauga

SEQ ID NO: 1279689 - RNA, 13 nt, Human
acccaauccaaau

SEQ ID NO: 1279690 - RNA, 14 nt, Human
acccaauccaaaug

SEQ ID NO: 1279691 - RNA, 16 nt, Human
accccuacaugaaaca

SEQ ID NO: 1279692 - RNA, 15 nt, Human
acauaaaaaggacau

SEQ ID NO: 1279693 - RNA, 22 nt, Human
acauaaaaaggacaucagcaaa

SEQ ID NO: 1279694 - RNA, 21 nt, Human
acauaaaaaggacaucagcaa

SEQ ID NO: 1279695 - RNA, 20 nt, Human
acauaaaaaggacaucagca

SEQ ID NO: 1279696 - RNA, 19 nt, Human
acauaaaaaugaucuaaac

SEQ ID NO: 1279697 - RNA, 12 nt, Human
acauaaaggaaa

SEQ ID NO: 1279698 - RNA, 15 nt, Human
acagguuagcugcuc

SEQ ID NO: 1279699 - RNA, 15 nt, Human
acagguuauaacagu

SEQ ID NO: 1279700 - RNA, 18 nt, Human
acagguuauaacaguguu

SEQ ID NO: 1279701 - RNA, 12 nt, Human
acauccagcaga

SEQ ID NO: 1279702 - RNA, 20 nt, Human
acaucccacucacaacagcu

SEQ ID NO: 1279703 - RNA, 14 nt, Human
acaucccacugcca

SEQ ID NO: 1279704 - RNA, 14 nt, Human
acaucggaaaaaua

SEQ ID NO: 1279705 - RNA, 15 nt, Human
acaucggaaaaauaa

SEQ ID NO: 1279706 - RNA, 16 nt, Human
acaucuaaccucaucu

SEQ ID NO: 1279707 - RNA, 17 nt, Human
acaucuaaccucaucuu

SEQ ID NO: 1279708 - RNA, 12 nt, Human
acauaaaguuga

SEQ ID NO: 1279709 - RNA, 15 nt, Human
acauaaaguugauaa

SEQ ID NO: 1279710 - RNA, 14 nt, Human
acauaaaggaaaag

SEQ ID NO: 1279711 - RNA, 16 nt, Human
acauaaaggaaaagac

SEQ ID NO: 1279712 - RNA, 17 nt, Human
acauaaaggaaaagaca

SEQ ID NO: 1279713 - RNA, 18 nt, Human
acauaaaggaaaagacac

SEQ ID NO: 1279714 - RNA, 22 nt, Human
acauaaaggaaaagacacauuu

SEQ ID NO: 1279715 - RNA, 20 nt, Human
acauaaaggaaaagacacau

SEQ ID NO: 1279716 - RNA, 20 nt, Human
acauaaauuuaguauuuugu

SEQ ID NO: 1279717 - RNA, 14 nt, Human
acauguuauuugua

SEQ ID NO: 1279718 - RNA, 20 nt, Human
acauguugggaaacuuggcu

SEQ ID NO: 1279719 - RNA, 20 nt, Human
acauguuguaagcacugacu

SEQ ID NO: 1279720 - RNA, 13 nt, Human
acauguuacaaca

SEQ ID NO: 1279721 - RNA, 11 nt, Human
acauuaaagaa

SEQ ID NO: 1279722 - RNA, 22 nt, Human
acauuaaagaaggguugagcug

SEQ ID NO: 1279723 - RNA, 18 nt, Human
acauuugcucauggaauu

SEQ ID NO: 1279724 - RNA, 22 nt, Human
acauuugcuguuuuaaacauua

SEQ ID NO: 1279725 - RNA, 23 nt, Human
acauuugcuguuuuaaacauuaa

SEQ ID NO: 1279726 - RNA, 23 nt, Human
acauuugcuuuuugugauaugca

SEQ ID NO: 1279727 - RNA, 12 nt, Human
acauuuggaaua

SEQ ID NO: 1279728 - RNA, 14 nt, Human
acauuuguauaaaa

SEQ ID NO: 1279729 - RNA, 17 nt, Human
accaacuccuaguucua

SEQ ID NO: 1279730 - RNA, 23 nt, Human
accaacuccuaguucuagaaaaa

SEQ ID NO: 1279731 - RNA, 22 nt, Human
accaacuccuaguucuagaaaa

SEQ ID NO: 1279732 - RNA, 15 nt, Human
acauuuggaauacuu

SEQ ID NO: 1279733 - RNA, 16 nt, Human
acauuuggaauacuuu

SEQ ID NO: 1279734 - RNA, 17 nt, Human
acauuuggaauacuuuu

SEQ ID NO: 1279735 - RNA, 18 nt, Human
acauuuggaauacuuuuu

SEQ ID NO: 1279736 - RNA, 19 nt, Human
acauuugcuuuuugugaua

SEQ ID NO: 1279737 - RNA, 15 nt, Human
acauuuggaguguuc

SEQ ID NO: 1279738 - RNA, 20 nt, Human
acauuuggaguguuccccuu

SEQ ID NO: 1279739 - RNA, 17 nt, Human
acauuugggagacaugu

SEQ ID NO: 1279740 - RNA, 19 nt, Human
acauuugggagacauguga

SEQ ID NO: 1279741 - RNA, 20 nt, Human
acauuugggagacaugugac

SEQ ID NO: 1279742 - RNA, 21 nt, Human
acauuugggagacaugugaca

SEQ ID NO: 1279743 - RNA, 20 nt, Human
acauuugggaguuuuuauga

SEQ ID NO: 1279744 - RNA, 21 nt, Human
acauuugggaguuuuuaugag

SEQ ID NO: 1279745 - RNA, 20 nt, Human
accacgccuggcuaauuuuu

SEQ ID NO: 1279746 - RNA, 13 nt, Human
accacgccuggcu

SEQ ID NO: 1279747 - RNA, 22 nt, Human
accacgccucuugaccaggcug

SEQ ID NO: 1279748 - RNA, 12 nt, Human
accaagccuuga

SEQ ID NO: 1279749 - RNA, 14 nt, Human
accaagcugaguuu

SEQ ID NO: 1279750 - RNA, 17 nt, Human
accaagcugaguuuccu

SEQ ID NO: 1279751 - RNA, 18 nt, Human
accaagcugaguuuccua

SEQ ID NO: 1279752 - RNA, 14 nt, Human
accaagcugcugug

SEQ ID NO: 1279753 - RNA, 14 nt, Human
accacgcccggcua

SEQ ID NO: 1279754 - RNA, 19 nt, Human
accaagcugaguuuccuau

SEQ ID NO: 1279755 - RNA, 20 nt, Human
accacgcccggcuaauuuuu

SEQ ID NO: 1279756 - RNA, 18 nt, Human
accacgcccguccugccu

SEQ ID NO: 1279757 - RNA, 19 nt, Human
accacgcccguccugccug

SEQ ID NO: 1279758 - RNA, 20 nt, Human
accacgcccguccugccugu

SEQ ID NO: 1279759 - RNA, 21 nt, Human
accacgcccguccugccugug

SEQ ID NO: 1279760 - RNA, 23 nt, Human
accacgcccguccugccuguggc

SEQ ID NO: 1279761 - RNA, 18 nt, Human
accacgccucuugaccag

SEQ ID NO: 1279762 - RNA, 20 nt, Human
acaagucagucauucagaua

SEQ ID NO: 1279763 - RNA, 14 nt, Human
acaaguauuuguua

SEQ ID NO: 1279764 - RNA, 17 nt, Human
acaaguauuuguuaauu

SEQ ID NO: 1279765 - RNA, 20 nt, Human
acaaguauuuguuaauuuag

SEQ ID NO: 1279766 - RNA, 22 nt, Human
acaaguauuuguuaauuuagaa

SEQ ID NO: 1279767 - RNA, 21 nt, Human
acaaguaugaauaaagacacc

SEQ ID NO: 1279768 - RNA, 23 nt, Human
acaaguaugaauaaagacaccua

SEQ ID NO: 1279769 - RNA, 12 nt, Human
acaaguauuuuu

SEQ ID NO: 1279770 - RNA, 15 nt, Human
acaaguauuuuuaau

SEQ ID NO: 1279771 - RNA, 23 nt, Human
acaagucauagguuaauauuuaa

SEQ ID NO: 1279772 - RNA, 23 nt, Human
acaagugaugcuaaaaccugaaa

SEQ ID NO: 1279773 - RNA, 17 nt, Human
acaacuauggaucagaa

SEQ ID NO: 1279774 - RNA, 18 nt, Human
acaaagaguucaagaaau

SEQ ID NO: 1279775 - RNA, 13 nt, Human
acaacuauuuuca

SEQ ID NO: 1279776 - RNA, 15 nt, Human
acaacuauuuucaga

SEQ ID NO: 1279777 - RNA, 20 nt, Human
acaacuauuuucagauguga

SEQ ID NO: 1279778 - RNA, 16 nt, Human
acaacuauuuucagau

SEQ ID NO: 1279779 - RNA, 16 nt, Human
acaacucacuccuuuu

SEQ ID NO: 1279780 - RNA, 17 nt, Human
acaacucacuccuuuua

SEQ ID NO: 1279781 - RNA, 17 nt, Human
acaacuucuaauugcca

SEQ ID NO: 1279782 - RNA, 22 nt, Human
acaacuugucuauuaccuguua

SEQ ID NO: 1279783 - RNA, 13 nt, Human
acaaguaacaaaa

SEQ ID NO: 1279784 - RNA, 14 nt, Human
acaaguaacaaaaa

SEQ ID NO: 1279785 - RNA, 15 nt, Human
acaaguaacaaaaau

SEQ ID NO: 1279786 - RNA, 13 nt, Human
aauuuugaaaaac

SEQ ID NO: 1279787 - RNA, 13 nt, Human
aauuuuaucugcc

SEQ ID NO: 1279788 - RNA, 18 nt, Human
aauuuuaguuuuucauua

SEQ ID NO: 1279789 - RNA, 16 nt, Human
aauuuuaguuuuucau

SEQ ID NO: 1279790 - RNA, 15 nt, Human
aauuuuauaaucugc

SEQ ID NO: 1279791 - RNA, 20 nt, Human
aauuuuauacuuucccuacc

SEQ ID NO: 1279792 - RNA, 21 nt, Human
aauuuuauacuuucccuaccc

SEQ ID NO: 1279793 - RNA, 14 nt, Human
aauuuuaucccuca

SEQ ID NO: 1279794 - RNA, 20 nt, Human
aauuuuaucccucaccugua

SEQ ID NO: 1279795 - RNA, 15 nt, Human
aauuuuagcuuuugu

SEQ ID NO: 1279796 - RNA, 19 nt, Human
aauuuuaguagagacaggg

SEQ ID NO: 1279797 - RNA, 14 nt, Human
aauuuuagcuuuug

SEQ ID NO: 1279798 - RNA, 14 nt, Human
aauuuuaguuuuuc

SEQ ID NO: 1279799 - RNA, 15 nt, Human
aauuuuaguuuuuca

SEQ ID NO: 1279800 - RNA, 24 nt, Human
aauuaguuuuaaaaugauauuguu

SEQ ID NO: 1279801 - RNA, 13 nt, Human
aauuauaaaugac

SEQ ID NO: 1279802 - RNA, 18 nt, Human
aauuauaacuggaaagaa

SEQ ID NO: 1279803 - RNA, 19 nt, Human
aauuauaacuggaaagaag

SEQ ID NO: 1279804 - RNA, 20 nt, Human
aauuauaacuguaaagaugu

SEQ ID NO: 1279805 - RNA, 16 nt, Human
aauuauaauauacuau

SEQ ID NO: 1279806 - RNA, 19 nt, Human
acaaaauggaauacucuua

SEQ ID NO: 1279807 - RNA, 14 nt, Human
aauuuugaugaaca

SEQ ID NO: 1279808 - RNA, 17 nt, Human
aauuuugaguugccaca

SEQ ID NO: 1279809 - RNA, 14 nt, Human
aauuuugaagugcu

SEQ ID NO: 1279810 - RNA, 19 nt, Human
aauuuugaagugcuguuua

SEQ ID NO: 1279811 - RNA, 20 nt, Human
aauuuugaagugcuguuuau

SEQ ID NO: 1279812 - RNA, 20 nt, Human
acaaaauggaauacucuuau

SEQ ID NO: 1279813 - RNA, 14 nt, Human
acaaaccaugcaaa

SEQ ID NO: 1279814 - RNA, 13 nt, Human
acaacuauauugu

SEQ ID NO: 1279815 - RNA, 18 nt, Human
acaacuaugauuuggaaa

SEQ ID NO: 1279816 - RNA, 17 nt, Human
acaaagagacaaagcuu

SEQ ID NO: 1279817 - RNA, 16 nt, Human
acaaagaguucaagaa

SEQ ID NO: 1279818 - RNA, 15 nt, Human
acaaagacccuggcu

SEQ ID NO: 1279819 - RNA, 12 nt, Human
acaaagaaccuu

SEQ ID NO: 1279820 - RNA, 14 nt, Human
acacaaacacacac

SEQ ID NO: 1279821 - RNA, 14 nt, Human
acacaaacuguaaa

SEQ ID NO: 1279822 - RNA, 15 nt, Human
acacaaacuguaaau

SEQ ID NO: 1279823 - RNA, 16 nt, Human
acacaaacuguaaaua

SEQ ID NO: 1279824 - RNA, 19 nt, Human
acacaaacuguaaauaaaa

SEQ ID NO: 1279825 - RNA, 21 nt, Human
acaauuagauaaauguccauu

SEQ ID NO: 1279826 - RNA, 14 nt, Human
acaauuuggcaauu

SEQ ID NO: 1279827 - RNA, 18 nt, Human
acaauuuggcaauuuugu

SEQ ID NO: 1279828 - RNA, 20 nt, Human
acaauuuggcaauuuugugg

SEQ ID NO: 1279829 - RNA, 22 nt, Human
acaauuuggcaauuuugugguu

SEQ ID NO: 1279830 - RNA, 17 nt, Human
acaauguuuaaaccuuu

SEQ ID NO: 1279831 - RNA, 16 nt, Human
acaauuaaagcuguua

SEQ ID NO: 1279832 - RNA, 19 nt, Human
acaauuaaagcuguuauuu

SEQ ID NO: 1279833 - RNA, 14 nt, Human
acaaugugucugag

SEQ ID NO: 1279834 - RNA, 17 nt, Human
acacgcuccuuccucug

SEQ ID NO: 1279835 - RNA, 19 nt, Human
acacgcuccuuccucugag

SEQ ID NO: 1279836 - RNA, 12 nt, Human
acacgcuuuugu

SEQ ID NO: 1279837 - RNA, 14 nt, Human
acacgcuuuuguga

SEQ ID NO: 1279838 - RNA, 17 nt, Human
acacgcuuuugugaugg

SEQ ID NO: 1279839 - RNA, 13 nt, Human
acaccacuagccu

SEQ ID NO: 1279840 - RNA, 13 nt, Human
acaccacucuggc

SEQ ID NO: 1279841 - RNA, 16 nt, Human
acaccacucuggcagc

SEQ ID NO: 1279842 - RNA, 17 nt, Human
acaccacucuggcagcc

SEQ ID NO: 1279843 - RNA, 22 nt, Human
acaccacucuggcagccacacu

SEQ ID NO: 1279844 - RNA, 18 nt, Human
acaccacucuggcagcca

SEQ ID NO: 1279845 - RNA, 20 nt, Human
acaccacucuggcagccaca

SEQ ID NO: 1279846 - RNA, 17 nt, Human
acacagcuacucucccc

SEQ ID NO: 1279847 - RNA, 23 nt, Human
acacagcuacucuccccacgagg

SEQ ID NO: 1279848 - RNA, 14 nt, Human
acacagaaaccaau

SEQ ID NO: 1279849 - RNA, 13 nt, Human
acacagaaaccuu

SEQ ID NO: 1279850 - RNA, 18 nt, Human
acacagaaaccuuuuuaa

SEQ ID NO: 1279851 - RNA, 19 nt, Human
acacagaaaccuuuuuaaa

SEQ ID NO: 1279852 - RNA, 21 nt, Human
acacagaaaccuuuuuaaaaa

SEQ ID NO: 1279853 - RNA, 14 nt, Human
acacagacuauuuu

SEQ ID NO: 1279854 - RNA, 23 nt, Human
acacagacugcgauuugucccag

SEQ ID NO: 1279855 - RNA, 16 nt, Human
acacuaaccaagcuga

SEQ ID NO: 1279856 - RNA, 22 nt, Human
acacuaaccaagcugaguuucc

SEQ ID NO: 1279857 - RNA, 23 nt, Human
acacuaaccaagcugaguuuccu

SEQ ID NO: 1279858 - RNA, 15 nt, Human
acagaagaaacuggg

SEQ ID NO: 1279859 - RNA, 14 nt, Human
acagaagaaacaag

SEQ ID NO: 1279860 - RNA, 13 nt, Human
acagaacacuuau

SEQ ID NO: 1279861 - RNA, 12 nt, Human
acagaacacuua

SEQ ID NO: 1279862 - RNA, 21 nt, Human
acagaacacauaauucaggaa

SEQ ID NO: 1279863 - RNA, 14 nt, Human
acagaaauuguaua

SEQ ID NO: 1279864 - RNA, 15 nt, Human
acagaaauuguauau

SEQ ID NO: 1279865 - RNA, 16 nt, Human
acagaaauuguauauu

SEQ ID NO: 1279866 - RNA, 19 nt, Human
acagaaauuguauauugua

SEQ ID NO: 1279867 - RNA, 12 nt, Human
acagaaauuuaa

SEQ ID NO: 1279868 - RNA, 23 nt, Human
acagaaauuguauauuguaauuu

SEQ ID NO: 1279869 - RNA, 20 nt, Human
acacugugcacaucuguguc

SEQ ID NO: 1279870 - RNA, 21 nt, Human
acacugugcacaucugugucu

SEQ ID NO: 1279871 - RNA, 18 nt, Human
acacugugcacaucugug

SEQ ID NO: 1279872 - RNA, 13 nt, Human
acacugcucuaac

SEQ ID NO: 1279873 - RNA, 14 nt, Human
acacugcucuaaca

SEQ ID NO: 1279874 - RNA, 17 nt, Human
acacugcucuaacagcc

SEQ ID NO: 1279875 - RNA, 19 nt, Human
acacugcucuaacagcccu

SEQ ID NO: 1279876 - RNA, 20 nt, Human
acacugcucuaacagcccuc

SEQ ID NO: 1279877 - RNA, 22 nt, Human
acacugaugcuuagauguucca

SEQ ID NO: 1279878 - RNA, 15 nt, Human
acagcaucucagcuc

SEQ ID NO: 1279879 - RNA, 14 nt, Human
acagcaucucagcu

SEQ ID NO: 1279880 - RNA, 11 nt, Human
acagcaucucc

SEQ ID NO: 1279881 - RNA, 14 nt, Human
acagcaucuccaag

SEQ ID NO: 1279882 - RNA, 24 nt, Human
acagagguagucucacugcuugaa

SEQ ID NO: 1279883 - RNA, 15 nt, Human
acagaaguuugcacu

SEQ ID NO: 1279884 - RNA, 17 nt, Human
acagaaguuugcacuau

SEQ ID NO: 1279885 - RNA, 15 nt, Human
acagcaucuccaagc

SEQ ID NO: 1279886 - RNA, 20 nt, Human
acagcaucuccaagcagcuu

SEQ ID NO: 1279887 - RNA, 22 nt, Human
acagcaucuccaagcagcuuag

SEQ ID NO: 1279888 - RNA, 21 nt, Human
acagcauguacggauuuucag

SEQ ID NO: 1279889 - RNA, 22 nt, Human
acagcauguacggauuuucagu

SEQ ID NO: 1279890 - RNA, 14 nt, Human
acagccaaauuuaa

SEQ ID NO: 1279891 - RNA, 13 nt, Human
acagccagcaccu

SEQ ID NO: 1279892 - RNA, 16 nt, Human
acagccagcaccuggc

SEQ ID NO: 1279893 - RNA, 20 nt, Human
acagcucugcauacucauua

SEQ ID NO: 1279894 - RNA, 13 nt, Human
acagcucuagaca

SEQ ID NO: 1279895 - RNA, 22 nt, Human
acaggugugagccaccacgccc

SEQ ID NO: 1279896 - RNA, 21 nt, Human
acaggugugagccaccacgcc

SEQ ID NO: 1279897 - RNA, 15 nt, Human
acaggucccuccccu

SEQ ID NO: 1279898 - RNA, 13 nt, Human
acaggucuagacu

SEQ ID NO: 1279899 - RNA, 18 nt, Human
acagggucccacagccac

SEQ ID NO: 1279900 - RNA, 22 nt, Human
acagguaaaacagggccacaua

SEQ ID NO: 1279901 - RNA, 18 nt, Human
acagguaaacuaucuugg

SEQ ID NO: 1279902 - RNA, 15 nt, Human
acagguaauauaaaa

SEQ ID NO: 1279903 - RNA, 22 nt, Human
acagguagaauuaucuaauuua

SEQ ID NO: 1279904 - RNA, 16 nt, Human
acagguauauacuuug

SEQ ID NO: 1279905 - RNA, 19 nt, Human
acagguauauacuuugaaa

SEQ ID NO: 1279906 - RNA, 13 nt, Human
acaggucccaaau

SEQ ID NO: 1279907 - RNA, 13 nt, Human
acaggucccuccc

SEQ ID NO: 1279908 - RNA, 21 nt, Human
acagcugcucaauaaaguaca

SEQ ID NO: 1279909 - RNA, 14 nt, Human
acaggggcuugacu

SEQ ID NO: 1279910 - RNA, 22 nt, Human
acaggguaacuaacuaaaacaa

SEQ ID NO: 1279911 - RNA, 21 nt, Human
acaggguaacuaacuaaaaca

SEQ ID NO: 1279912 - RNA, 21 nt, Human
acagggggucuggcugguguu

SEQ ID NO: 1279913 - RNA, 13 nt, Human
acagggggucugg

SEQ ID NO: 1279914 - RNA, 15 nt, Human
acagggggucuggcu

SEQ ID NO: 1279915 - RNA, 16 nt, Human
acagggggucuggcug

SEQ ID NO: 1279916 - RNA, 17 nt, Human
acagggggucuggcugg

SEQ ID NO: 1279917 - RNA, 18 nt, Human
acagggggucuggcuggu

SEQ ID NO: 1279918 - RNA, 19 nt, Human
acagggggucuggcuggug

SEQ ID NO: 1279919 - RNA, 20 nt, Human
acagggggucuggcuggugu

SEQ ID NO: 1279920 - RNA, 20 nt, Human
caaccucugccucccagguu

SEQ ID NO: 1279921 - RNA, 18 nt, Human
caaccguggcccuuccug

SEQ ID NO: 1279922 - RNA, 19 nt, Human
caaccguggcccuuccugg

SEQ ID NO: 1279923 - RNA, 20 nt, Human
caaccguggcccuuccugga

SEQ ID NO: 1279924 - RNA, 21 nt, Human
caaccguggcccuuccuggac

SEQ ID NO: 1279925 - RNA, 23 nt, Human
caaccguggcccuuccuggacag

SEQ ID NO: 1279926 - RNA, 22 nt, Human
caaccguggcccuuccuggaca

SEQ ID NO: 1279927 - RNA, 13 nt, Human
caaccuaaaacuc

SEQ ID NO: 1279928 - RNA, 13 nt, Human
caaccggcuuugu

SEQ ID NO: 1279929 - RNA, 22 nt, Human
caaccggcuuuguggcacuggg

SEQ ID NO: 1279930 - RNA, 15 nt, Human
caaccguggcccuuc

SEQ ID NO: 1279931 - RNA, 13 nt, Human
caacggagucaaa

SEQ ID NO: 1279932 - RNA, 20 nt, Human
caacggaaagugcugucuua

SEQ ID NO: 1279933 - RNA, 19 nt, Human
caaccuucgccaccugggu

SEQ ID NO: 1279934 - RNA, 20 nt, Human
caaccuguucugcuuuccuc

SEQ ID NO: 1279935 - RNA, 17 nt, Human
caaccuuagauguucua

SEQ ID NO: 1279936 - RNA, 18 nt, Human
caaccuuagauguucuaa

SEQ ID NO: 1279937 - RNA, 18 nt, Human
caaccuguagaguggcca

SEQ ID NO: 1279938 - RNA, 20 nt, Human
caaccuguuaccuacuuuga

SEQ ID NO: 1279939 - RNA, 22 nt, Human
caaccuguuaccuacuuugacu

SEQ ID NO: 1279940 - RNA, 23 nt, Human
caaccuguuaccuacuuugacuu

SEQ ID NO: 1279941 - RNA, 15 nt, Human
caacugaccagccuc

SEQ ID NO: 1279942 - RNA, 17 nt, Human
caacugaccagccucca

SEQ ID NO: 1279943 - RNA, 17 nt, Human
caaauuucaugaccagu

SEQ ID NO: 1279944 - RNA, 12 nt, Human
caacacugccag

SEQ ID NO: 1279945 - RNA, 13 nt, Human
caacacugccagc

SEQ ID NO: 1279946 - RNA, 14 nt, Human
caacacugccagca

SEQ ID NO: 1279947 - RNA, 22 nt, Human
caacacuggucugcuguuccag

SEQ ID NO: 1279948 - RNA, 18 nt, Human
caacacuggucugcuguu

SEQ ID NO: 1279949 - RNA, 13 nt, Human
caacccucagagc

SEQ ID NO: 1279950 - RNA, 18 nt, Human
caacccucagagccaccc

SEQ ID NO: 1279951 - RNA, 23 nt, Human
caacccgugccaaguccaggucc

SEQ ID NO: 1279952 - RNA, 16 nt, Human
caacccguggaggcug

SEQ ID NO: 1279953 - RNA, 17 nt, Human
caacccguggaggcugc

SEQ ID NO: 1279954 - RNA, 18 nt, Human
caacccguggaggcugcu

SEQ ID NO: 1279955 - RNA, 21 nt, Human
caacccguggaggcugcucgg

SEQ ID NO: 1279956 - RNA, 22 nt, Human
caacacuguaguaaauaaugcu

SEQ ID NO: 1279957 - RNA, 20 nt, Human
caacccgucuggcccaccag

SEQ ID NO: 1279958 - RNA, 21 nt, Human
caacccgucuggcccaccagg

SEQ ID NO: 1279959 - RNA, 22 nt, Human
caacccgucuggcccaccaggg

SEQ ID NO: 1279960 - RNA, 16 nt, Human
caacccgugccaaguc

SEQ ID NO: 1279961 - RNA, 17 nt, Human
caacccgugccaagucc

SEQ ID NO: 1279962 - RNA, 17 nt, Human
caacccuggcacccagg

SEQ ID NO: 1279963 - RNA, 19 nt, Human
caacccuccuaaaaguuca

SEQ ID NO: 1279964 - RNA, 19 nt, Human
caagacugcacaucaaaau

SEQ ID NO: 1279965 - RNA, 19 nt, Human
caagaagaagggcacccua

SEQ ID NO: 1279966 - RNA, 14 nt, Human
caagacucuagagu

SEQ ID NO: 1279967 - RNA, 17 nt, Human
caagacucuagagucca

SEQ ID NO: 1279968 - RNA, 21 nt, Human
caagacucuagaguccaaggu

SEQ ID NO: 1279969 - RNA, 14 nt, Human
caagagggcacugg

SEQ ID NO: 1279970 - RNA, 15 nt, Human
caagagggcacuggu

SEQ ID NO: 1279971 - RNA, 13 nt, Human
caagagggcacug

SEQ ID NO: 1279972 - RNA, 17 nt, Human
caagagggacgccuggg

SEQ ID NO: 1279973 - RNA, 19 nt, Human
caagagggacgccuggggg

SEQ ID NO: 1279974 - RNA, 22 nt, Human
caagacucuuuaugaucuggcc

SEQ ID NO: 1279975 - RNA, 16 nt, Human
caagacugacgccagg

SEQ ID NO: 1279976 - RNA, 20 nt, Human
caagaacacagcccugcuuc

SEQ ID NO: 1279977 - RNA, 22 nt, Human
caagaaaaauaaagaaaagaug

SEQ ID NO: 1279978 - RNA, 19 nt, Human
caagaaaaauaaagaaaag

SEQ ID NO: 1279979 - RNA, 20 nt, Human
caagaaaaauaaagaaaaga

SEQ ID NO: 1279980 - RNA, 14 nt, Human
caagaaaaauaaag

SEQ ID NO: 1279981 - RNA, 16 nt, Human
caagaaaaauaaagaa

SEQ ID NO: 1279982 - RNA, 17 nt, Human
caagaaaaauaaagaaa

SEQ ID NO: 1279983 - RNA, 18 nt, Human
caagaaaaauaaagaaaa

SEQ ID NO: 1279984 - RNA, 23 nt, Human
caagaaaaauaaagaaaagaugc

SEQ ID NO: 1279985 - RNA, 19 nt, Human
caacugaccagccuccaug

SEQ ID NO: 1279986 - RNA, 20 nt, Human
caacuuuuccuuugaauccu

SEQ ID NO: 1279987 - RNA, 13 nt, Human
caacuuuucuauu

SEQ ID NO: 1279988 - RNA, 21 nt, Human
caagccagauuuuccugaaaa

SEQ ID NO: 1279989 - RNA, 15 nt, Human
caagccagauuuuuu

SEQ ID NO: 1279990 - RNA, 13 nt, Human
caagccagaacuu

SEQ ID NO: 1279991 - RNA, 13 nt, Human
caagccagaggcu

SEQ ID NO: 1279992 - RNA, 15 nt, Human
caagccagaggcugg

SEQ ID NO: 1279993 - RNA, 16 nt, Human
caagccagaggcuggg

SEQ ID NO: 1279994 - RNA, 17 nt, Human
caagagggcacuggugg

SEQ ID NO: 1279995 - RNA, 14 nt, Human
caagccuggcaagg

SEQ ID NO: 1279996 - RNA, 18 nt, Human
caagccguggcuucccgc

SEQ ID NO: 1279997 - RNA, 18 nt, Human
caagccuaagggauccug

SEQ ID NO: 1279998 - RNA, 18 nt, Human
caagccucugcccaggca

SEQ ID NO: 1279999 - RNA, 11 nt, Human
caagccugagg

SEQ ID NO: 1280000 - RNA, 13 nt, Human
caagccugaggga

SEQ ID NO: 1280001 - RNA, 17 nt, Human
caagccugagggaaagg

SEQ ID NO: 1280002 - RNA, 18 nt, Human
caagccugagggaaaggc

SEQ ID NO: 1280003 - RNA, 21 nt, Human
caagccugagggaaaggccag

SEQ ID NO: 1280004 - RNA, 22 nt, Human
caagccugagggaaaggccagc

SEQ ID NO: 1280005 - RNA, 23 nt, Human
caagccugcacaauaaaaauguu

SEQ ID NO: 1280006 - RNA, 16 nt, Human
caaggaaguagaaaca

SEQ ID NO: 1280007 - RNA, 12 nt, Human
caaggaagucaa

SEQ ID NO: 1280008 - RNA, 12 nt, Human
caaggaauuucu

SEQ ID NO: 1280009 - RNA, 15 nt, Human
caaggaauuucuuaa

SEQ ID NO: 1280010 - RNA, 16 nt, Human
caaggaauuucuuaac

SEQ ID NO: 1280011 - RNA, 18 nt, Human
caaggaauuucuuaacuu

SEQ ID NO: 1280012 - RNA, 18 nt, Human
caaggacagccccuccuc

SEQ ID NO: 1280013 - RNA, 15 nt, Human
caaggacugcaggga

SEQ ID NO: 1280014 - RNA, 21 nt, Human
caaggaauuucuuaacuucuu

SEQ ID NO: 1280015 - RNA, 23 nt, Human
caaggaauuucuuaacuucuugc

SEQ ID NO: 1280016 - RNA, 19 nt, Human
caaggaaguagaaacaaaa

SEQ ID NO: 1280017 - RNA, 17 nt, Human
caaggcugauuaaacca

SEQ ID NO: 1280018 - RNA, 16 nt, Human
caaggagucacugaga

SEQ ID NO: 1280019 - RNA, 18 nt, Human
caaggaguaugcagggag

SEQ ID NO: 1280020 - RNA, 18 nt, Human
caaggaggggcuguaaaa

SEQ ID NO: 1280021 - RNA, 22 nt, Human
caaggacugcagggacugccag

SEQ ID NO: 1280022 - RNA, 14 nt, Human
caaggacuuccugu

SEQ ID NO: 1280023 - RNA, 19 nt, Human
caaggacuuccuguccagc

SEQ ID NO: 1280024 - RNA, 21 nt, Human
caaggacuuccuguccagcuc

SEQ ID NO: 1280025 - RNA, 22 nt, Human
caaggacuuccuguccagcucc

SEQ ID NO: 1280026 - RNA, 23 nt, Human
caaggacuuccuguccagcucca

SEQ ID NO: 1280027 - RNA, 15 nt, Human
caaggacuuugcagc

SEQ ID NO: 1280028 - RNA, 16 nt, Human
caaggacuuugcagcc

SEQ ID NO: 1280029 - RNA, 15 nt, Human
caaggacuuuguaca

SEQ ID NO: 1280030 - RNA, 16 nt, Human
caaggacuuuguacau

SEQ ID NO: 1280031 - RNA, 13 nt, Human
caaggucugcuuu

SEQ ID NO: 1280032 - RNA, 19 nt, Human
caaggucguuuuuuucauu

SEQ ID NO: 1280033 - RNA, 20 nt, Human
caagguccucugucagucac

SEQ ID NO: 1280034 - RNA, 21 nt, Human
caagguccucugucagucaca

SEQ ID NO: 1280035 - RNA, 22 nt, Human
caagguccucugucagucacag

SEQ ID NO: 1280036 - RNA, 18 nt, Human
caaggguagggugggccu

SEQ ID NO: 1280037 - RNA, 19 nt, Human
caaggguagggugggccuu

SEQ ID NO: 1280038 - RNA, 16 nt, Human
caaggggccugagcag

SEQ ID NO: 1280039 - RNA, 21 nt, Human
caaggggccugagcaguccuu

SEQ ID NO: 1280040 - RNA, 22 nt, Human
caaggggcuucagguccaggcu

SEQ ID NO: 1280041 - RNA, 20 nt, Human
caaggcuguggaccauggag

SEQ ID NO: 1280042 - RNA, 14 nt, Human
caaggggccugagc

SEQ ID NO: 1280043 - RNA, 15 nt, Human
caaggggccugagca

SEQ ID NO: 1280044 - RNA, 15 nt, Human
caaggcuguggacca

SEQ ID NO: 1280045 - RNA, 18 nt, Human
caaguguaaugaauaccu

SEQ ID NO: 1280046 - RNA, 19 nt, Human
caaguguaaugaauaccuu

SEQ ID NO: 1280047 - RNA, 15 nt, Human
caaguguaaugaaua

SEQ ID NO: 1280048 - RNA, 12 nt, Human
caaguguaauga

SEQ ID NO: 1280049 - RNA, 23 nt, Human
caaguguaaaauauuuugaauca

SEQ ID NO: 1280050 - RNA, 19 nt, Human
caaguggcucccacacccu

SEQ ID NO: 1280051 - RNA, 18 nt, Human
caaguggacucagggcag

SEQ ID NO: 1280052 - RNA, 23 nt, Human
caaguggacucagggcagcgcca

SEQ ID NO: 1280053 - RNA, 18 nt, Human
caagugagucucucuggg

SEQ ID NO: 1280054 - RNA, 19 nt, Human
caagugaucugcccaccuc

SEQ ID NO: 1280055 - RNA, 18 nt, Human
caagugaugcuaaaaccu

SEQ ID NO: 1280056 - RNA, 15 nt, Human
caaguggacucaggg

SEQ ID NO: 1280057 - RNA, 16 nt, Human
caaguggacucagggc

SEQ ID NO: 1280058 - RNA, 19 nt, Human
caagugaggugugucacaa

SEQ ID NO: 1280059 - RNA, 17 nt, Human
caagugauucucaugcc

SEQ ID NO: 1280060 - RNA, 18 nt, Human
caagugauucucaugccu

SEQ ID NO: 1280061 - RNA, 20 nt, Human
caagugauucucaugccuca

SEQ ID NO: 1280062 - RNA, 21 nt, Human
caagugauucucaugccucag

SEQ ID NO: 1280063 - RNA, 14 nt, Human
caauuaauuuuaga

SEQ ID NO: 1280064 - RNA, 15 nt, Human
caauuaauuccuuca

SEQ ID NO: 1280065 - RNA, 18 nt, Human
caauuaauuccuucagca

SEQ ID NO: 1280066 - RNA, 15 nt, Human
caauguuagccucaa

SEQ ID NO: 1280067 - RNA, 13 nt, Human
caauguucaucau

SEQ ID NO: 1280068 - RNA, 22 nt, Human
caauguuagccucaauuucuga

SEQ ID NO: 1280069 - RNA, 19 nt, Human
caauuacaacggagucaaa

SEQ ID NO: 1280070 - RNA, 13 nt, Human
caauucuccugcc

SEQ ID NO: 1280071 - RNA, 14 nt, Human
caauucuccugccu

SEQ ID NO: 1280072 - RNA, 15 nt, Human
caauucuccugccuc

SEQ ID NO: 1280073 - RNA, 16 nt, Human
caauucuccugccuca

SEQ ID NO: 1280074 - RNA, 13 nt, Human
caauuugaugugg

SEQ ID NO: 1280075 - RNA, 21 nt, Human
caauuuggauuuaaaagccug

SEQ ID NO: 1280076 - RNA, 23 nt, Human
caauuuggauuuaaaagccugcu

SEQ ID NO: 1280077 - RNA, 18 nt, Human
caauuuggcaauuuugug

SEQ ID NO: 1280078 - RNA, 19 nt, Human
caauuuggcaauuuugugg

SEQ ID NO: 1280079 - RNA, 14 nt, Human
caaugagcuuucug

SEQ ID NO: 1280080 - RNA, 15 nt, Human
caaugagcuuucuga

SEQ ID NO: 1280081 - RNA, 16 nt, Human
caaugagcuuucugaa

SEQ ID NO: 1280082 - RNA, 17 nt, Human
caaugagcuuucugaac

SEQ ID NO: 1280083 - RNA, 20 nt, Human
caaugagcuuucugaacagc

SEQ ID NO: 1280084 - RNA, 21 nt, Human
caaugagcuuucugaacagcu

SEQ ID NO: 1280085 - RNA, 23 nt, Human
caaugagcuuucugaacagcugg

SEQ ID NO: 1280086 - RNA, 12 nt, Human
caaugagcaugu

SEQ ID NO: 1280087 - RNA, 13 nt, Human
caaugagcauguu

SEQ ID NO: 1280088 - RNA, 14 nt, Human
caaugagcauguuu

SEQ ID NO: 1280089 - RNA, 18 nt, Human
caaugagcauguuuagac

SEQ ID NO: 1280090 - RNA, 20 nt, Human
caaugagcauguuuagacuu

SEQ ID NO: 1280091 - RNA, 12 nt, Human
caaugagcuuuc

SEQ ID NO: 1280092 - RNA, 13 nt, Human
caaugagcuuucu

SEQ ID NO: 1280093 - RNA, 19 nt, Human
caaugggagcugaggccac

SEQ ID NO: 1280094 - RNA, 23 nt, Human
caaugggagcugaggccacacuc

SEQ ID NO: 1280095 - RNA, 17 nt, Human
caauguacccaccgggc

SEQ ID NO: 1280096 - RNA, 19 nt, Human
caauguacccaccgggcca

SEQ ID NO: 1280097 - RNA, 22 nt, Human
caauguacccaccgggccacuc

SEQ ID NO: 1280098 - RNA, 16 nt, Human
caauguagauaagugu

SEQ ID NO: 1280099 - RNA, 20 nt, Human
caauguagauaaguguucug

SEQ ID NO: 1280100 - RNA, 21 nt, Human
caauguagauaaguguucugu

SEQ ID NO: 1280101 - RNA, 21 nt, Human
caaugggagcugaggccacac

SEQ ID NO: 1280102 - RNA, 22 nt, Human
caaugagcuuucugaacagcug

SEQ ID NO: 1280103 - RNA, 15 nt, Human
caauggggccaguca

SEQ ID NO: 1280104 - RNA, 23 nt, Human
caauggguuuuucccuguacagu

SEQ ID NO: 1280105 - RNA, 12 nt, Human
caauguaauuau

SEQ ID NO: 1280106 - RNA, 13 nt, Human
caauguaauuauu

SEQ ID NO: 1280107 - RNA, 14 nt, Human
caauguaauuauuu

SEQ ID NO: 1280108 - RNA, 22 nt, Human
caauguaauuauuuauguaugg

SEQ ID NO: 1280109 - RNA, 23 nt, Human
caauguaauuauuuauguauggu

SEQ ID NO: 1280110 - RNA, 18 nt, Human
caaucuguaaaacuaaga

SEQ ID NO: 1280111 - RNA, 12 nt, Human
caaucuguaaac

SEQ ID NO: 1280112 - RNA, 15 nt, Human
caaucuguaaacugu

SEQ ID NO: 1280113 - RNA, 16 nt, Human
caaucuguaaacugug

SEQ ID NO: 1280114 - RNA, 17 nt, Human
caaucuguaaacugugu

SEQ ID NO: 1280115 - RNA, 14 nt, Human
caaucugucaguuc

SEQ ID NO: 1280116 - RNA, 18 nt, Human
caaucuguaaacugugua

SEQ ID NO: 1280117 - RNA, 16 nt, Human
caauauaagcuuuucu

SEQ ID NO: 1280118 - RNA, 20 nt, Human
caauauacuggaaagcuuuu

SEQ ID NO: 1280119 - RNA, 23 nt, Human
caauacaucccuuaccugggaaa

SEQ ID NO: 1280120 - RNA, 16 nt, Human
caauacagauauauuu

SEQ ID NO: 1280121 - RNA, 21 nt, Human
caauacaaguuucauccagaa

SEQ ID NO: 1280122 - RNA, 16 nt, Human
caauacaaguuucauc

SEQ ID NO: 1280123 - RNA, 21 nt, Human
caauacaaauggauuuuggga

SEQ ID NO: 1280124 - RNA, 13 nt, Human
caauacagauaua

SEQ ID NO: 1280125 - RNA, 15 nt, Human
caauacagauauauu

SEQ ID NO: 1280126 - RNA, 13 nt, Human
caauaauuuucua

SEQ ID NO: 1280127 - RNA, 14 nt, Human
caauaauuuucuac

SEQ ID NO: 1280128 - RNA, 13 nt, Human
caauacaaaugga

SEQ ID NO: 1280129 - RNA, 14 nt, Human
caauacaaauggau

SEQ ID NO: 1280130 - RNA, 15 nt, Human
caauacaaauggauu

SEQ ID NO: 1280131 - RNA, 16 nt, Human
caauacaaauggauuu

SEQ ID NO: 1280132 - RNA, 17 nt, Human
caauagccacuaaccuu

SEQ ID NO: 1280133 - RNA, 18 nt, Human
caauagccacuaaccuug

SEQ ID NO: 1280134 - RNA, 22 nt, Human
caauagccacuaaccuugccug

SEQ ID NO: 1280135 - RNA, 24 nt, Human
caauagccacuaaccuugccuggu

SEQ ID NO: 1280136 - RNA, 12 nt, Human
caaguuaaaugu

SEQ ID NO: 1280137 - RNA, 13 nt, Human
caaguuaaaugua

SEQ ID NO: 1280138 - RNA, 14 nt, Human
caaguuaaauguag

SEQ ID NO: 1280139 - RNA, 16 nt, Human
caaguuagaaaacaua

SEQ ID NO: 1280140 - RNA, 13 nt, Human
caaguuauuaauu

SEQ ID NO: 1280141 - RNA, 13 nt, Human
caauaauauauuu

SEQ ID NO: 1280142 - RNA, 14 nt, Human
caauaauauauuuu

SEQ ID NO: 1280143 - RNA, 16 nt, Human
caauaauauauuuucu

SEQ ID NO: 1280144 - RNA, 17 nt, Human
caauaauauauuuucug

SEQ ID NO: 1280145 - RNA, 20 nt, Human
caauaauauauuuucuguuu

SEQ ID NO: 1280146 - RNA, 18 nt, Human
caauaauauauuuucugu

SEQ ID NO: 1280147 - RNA, 17 nt, Human
caaaaauuaucuauagc

SEQ ID NO: 1280148 - RNA, 21 nt, Human
caaauacgugggcauucaaau

SEQ ID NO: 1280149 - RNA, 22 nt, Human
caaauacgugggcauucaaaug

SEQ ID NO: 1280150 - RNA, 11 nt, Human
caaaguggaac

SEQ ID NO: 1280151 - RNA, 14 nt, Human
caaaguggaacgaa

SEQ ID NO: 1280152 - RNA, 15 nt, Human
caaaguggaacgaaa

SEQ ID NO: 1280153 - RNA, 20 nt, Human
caaauacgugggcauucaaa

SEQ ID NO: 1280154 - RNA, 15 nt, Human
caaauacuaaaaaga

SEQ ID NO: 1280155 - RNA, 16 nt, Human
caaauacuaaaaagaa

SEQ ID NO: 1280156 - RNA, 21 nt, Human
caaauacuaaaaagaagugcu

SEQ ID NO: 1280157 - RNA, 16 nt, Human
caaauacuaaugaaaa

SEQ ID NO: 1280158 - RNA, 17 nt, Human
caaauacuaaugaaaac

SEQ ID NO: 1280159 - RNA, 18 nt, Human
caaauacuguauauucag

SEQ ID NO: 1280160 - RNA, 19 nt, Human
caaagugcugggauuacag

SEQ ID NO: 1280161 - RNA, 13 nt, Human
caaauauguccug

SEQ ID NO: 1280162 - RNA, 14 nt, Human
caaauauguccugg

SEQ ID NO: 1280163 - RNA, 15 nt, Human
caaauauguccuggg

SEQ ID NO: 1280164 - RNA, 17 nt, Human
caaauauguccuggggu

SEQ ID NO: 1280165 - RNA, 14 nt, Human
caaauggggccaga

SEQ ID NO: 1280166 - RNA, 15 nt, Human
caaauggggccagau

SEQ ID NO: 1280167 - RNA, 16 nt, Human
caaauggggccagauc

SEQ ID NO: 1280168 - RNA, 17 nt, Human
caaauggggccagaucc

SEQ ID NO: 1280169 - RNA, 18 nt, Human
caaauggggccagaucca

SEQ ID NO: 1280170 - RNA, 19 nt, Human
caaauggggccagauccag

SEQ ID NO: 1280171 - RNA, 20 nt, Human
caaauggggccagauccagc

SEQ ID NO: 1280172 - RNA, 23 nt, Human
caaauggggccagauccagccug

SEQ ID NO: 1280173 - RNA, 13 nt, Human
caaaugguaggca

SEQ ID NO: 1280174 - RNA, 15 nt, Human
caaaugguaggcauu

SEQ ID NO: 1280175 - RNA, 20 nt, Human
caaaugguaggcauuuccua

SEQ ID NO: 1280176 - RNA, 15 nt, Human
caaaugguaucuuuu

SEQ ID NO: 1280177 - RNA, 15 nt, Human
caaaugucuauaaac

SEQ ID NO: 1280178 - RNA, 18 nt, Human
caaaugucaugcugccuu

SEQ ID NO: 1280179 - RNA, 14 nt, Human
caaaugucuauaaa

SEQ ID NO: 1280180 - RNA, 16 nt, Human
caaaugucaugcugcc

SEQ ID NO: 1280181 - RNA, 17 nt, Human
caaaugucaugcugccu

SEQ ID NO: 1280182 - RNA, 19 nt, Human
caaaugucaugcugccuua

SEQ ID NO: 1280183 - RNA, 13 nt, Human
caaaugguaucuu

SEQ ID NO: 1280184 - RNA, 22 nt, Human
caaauguaguauggccuguguc

SEQ ID NO: 1280185 - RNA, 23 nt, Human
caaauguaguauggccuguguca

SEQ ID NO: 1280186 - RNA, 14 nt, Human
caaauuaucuuaaa

SEQ ID NO: 1280187 - RNA, 15 nt, Human
caaauuauuaaugaa

SEQ ID NO: 1280188 - RNA, 17 nt, Human
caaauuauuaaugaaaa

SEQ ID NO: 1280189 - RNA, 14 nt, Human
caaauucaaauaaa

SEQ ID NO: 1280190 - RNA, 16 nt, Human
caaauucaguuucaua

SEQ ID NO: 1280191 - RNA, 21 nt, Human
caaauuguaagcaugcacaaa

SEQ ID NO: 1280192 - RNA, 12 nt, Human
caaauucaguuu

SEQ ID NO: 1280193 - RNA, 14 nt, Human
caaauucaguuuca

SEQ ID NO: 1280194 - RNA, 15 nt, Human
caaauucaguuucau

SEQ ID NO: 1280195 - RNA, 15 nt, Human
caaauugugugaaag

SEQ ID NO: 1280196 - RNA, 18 nt, Human
caaauugugcaguacuuu

SEQ ID NO: 1280197 - RNA, 21 nt, Human
caaaggcauuauaaaaagaau

SEQ ID NO: 1280198 - RNA, 12 nt, Human
caaagcugccug

SEQ ID NO: 1280199 - RNA, 11 nt, Human
caaagcugccu

SEQ ID NO: 1280200 - RNA, 17 nt, Human
caaaggaagguggaugg

SEQ ID NO: 1280201 - RNA, 23 nt, Human
caaaggccuaauucuaugccugu

SEQ ID NO: 1280202 - RNA, 21 nt, Human
caaagcugccugucccuaccc

SEQ ID NO: 1280203 - RNA, 19 nt, Human
caaacuagggccaagccca

SEQ ID NO: 1280204 - RNA, 20 nt, Human
caaacuacuuugcugcuaau

SEQ ID NO: 1280205 - RNA, 13 nt, Human
caaacuagggcca

SEQ ID NO: 1280206 - RNA, 12 nt, Human
caaacuguaaau

SEQ ID NO: 1280207 - RNA, 14 nt, Human
caaacuguaaauaa

SEQ ID NO: 1280208 - RNA, 20 nt, Human
caaacuguaaauaaaaagaa

SEQ ID NO: 1280209 - RNA, 21 nt, Human
caaacuguaaauaaaaagaaa

SEQ ID NO: 1280210 - RNA, 14 nt, Human
caaacuguaauaca

SEQ ID NO: 1280211 - RNA, 16 nt, Human
caaacuguauaacuug

SEQ ID NO: 1280212 - RNA, 15 nt, Human
caaacuguguaacug

SEQ ID NO: 1280213 - RNA, 20 nt, Human
caaacuguguaacugcccaa

SEQ ID NO: 1280214 - RNA, 15 nt, Human
caaagcccuuuuaua

SEQ ID NO: 1280215 - RNA, 19 nt, Human
caaagccuguucauggcag

SEQ ID NO: 1280216 - RNA, 20 nt, Human
caaagccuguucauggcaga

SEQ ID NO: 1280217 - RNA, 21 nt, Human
caaagccuguucauggcagau

SEQ ID NO: 1280218 - RNA, 22 nt, Human
caaagccuguucauggcagaug

SEQ ID NO: 1280219 - RNA, 18 nt, Human
caaacuguguaacugccc

SEQ ID NO: 1280220 - RNA, 20 nt, Human
caaagccagcguccuccucu

SEQ ID NO: 1280221 - RNA, 21 nt, Human
caaagccagcguccuccucug

SEQ ID NO: 1280222 - RNA, 23 nt, Human
caaagccagcguccuccucugug

SEQ ID NO: 1280223 - RNA, 22 nt, Human
caaagccagcguccuccucugu

SEQ ID NO: 1280224 - RNA, 14 nt, Human
caaagccagguccc

SEQ ID NO: 1280225 - RNA, 17 nt, Human
caaagccaggucccucu

SEQ ID NO: 1280226 - RNA, 18 nt, Human
caaagccaggucccucuc

SEQ ID NO: 1280227 - RNA, 19 nt, Human
caaagccaggucccucuca

SEQ ID NO: 1280228 - RNA, 21 nt, Human
caaagccaggucccucucauu

SEQ ID NO: 1280229 - RNA, 16 nt, Human
caaaauuuuuucucua

SEQ ID NO: 1280230 - RNA, 22 nt, Human
caaaauugcaaaucuugaaauu

SEQ ID NO: 1280231 - RNA, 21 nt, Human
caaaauuuuuucucuaggaaa

SEQ ID NO: 1280232 - RNA, 22 nt, Human
caaaauuuuuucucuaggaaau

SEQ ID NO: 1280233 - RNA, 16 nt, Human
caaacacacacaaaag

SEQ ID NO: 1280234 - RNA, 17 nt, Human
caaacaaugacaaagca

SEQ ID NO: 1280235 - RNA, 19 nt, Human
caaacaaugacaaagcaga

SEQ ID NO: 1280236 - RNA, 18 nt, Human
caaacaauugaagucaau

SEQ ID NO: 1280237 - RNA, 18 nt, Human
caaacaccaacauaaaaa

SEQ ID NO: 1280238 - RNA, 16 nt, Human
caaacaccaacauaaa

SEQ ID NO: 1280239 - RNA, 13 nt, Human
caaaccucaccaa

SEQ ID NO: 1280240 - RNA, 20 nt, Human
caaacgcccuuuccuccuca

SEQ ID NO: 1280241 - RNA, 22 nt, Human
caaacgcccuuuccuccucagg

SEQ ID NO: 1280242 - RNA, 23 nt, Human
caaacgcccuuuccuccucaggc

SEQ ID NO: 1280243 - RNA, 16 nt, Human
caaaauuguuacaaau

SEQ ID NO: 1280244 - RNA, 16 nt, Human
caaaauugcaaaucuu

SEQ ID NO: 1280245 - RNA, 17 nt, Human
caaaauugcaaaucuug

SEQ ID NO: 1280246 - RNA, 23 nt, Human
caaaauuagccaguaauccugua

SEQ ID NO: 1280247 - RNA, 21 nt, Human
caaaauuauagaaguuuagau

SEQ ID NO: 1280248 - RNA, 22 nt, Human
caaaauuagccaguaauccugu

SEQ ID NO: 1280249 - RNA, 21 nt, Human
caaaauuagccaguaauccug

SEQ ID NO: 1280250 - RNA, 20 nt, Human
caaaauuagccaguaauccu

SEQ ID NO: 1280251 - RNA, 13 nt, Human
caaaauuagccag

SEQ ID NO: 1280252 - RNA, 18 nt, Human
caaaauguuauuucccua

SEQ ID NO: 1280253 - RNA, 22 nt, Human
caaaauguugaaauaugauguu

SEQ ID NO: 1280254 - RNA, 17 nt, Human
caaaauguuauuucccu

SEQ ID NO: 1280255 - RNA, 16 nt, Human
caaaauguuauuuccc

SEQ ID NO: 1280256 - RNA, 19 nt, Human
caaaauguuaucuucucaa

SEQ ID NO: 1280257 - RNA, 20 nt, Human
caaaauguuaucuucucaag

SEQ ID NO: 1280258 - RNA, 21 nt, Human
caaaauguuaucuucucaagu

SEQ ID NO: 1280259 - RNA, 22 nt, Human
caaaauguuaucuucucaaguu

SEQ ID NO: 1280260 - RNA, 17 nt, Human
caaaauguuggucauuu

SEQ ID NO: 1280261 - RNA, 18 nt, Human
caaaauguuggucauuuu

SEQ ID NO: 1280262 - RNA, 21 nt, Human
caaaauguuggucauuuuaug

SEQ ID NO: 1280263 - RNA, 22 nt, Human
caaaaugcucuuauuucaucau

SEQ ID NO: 1280264 - RNA, 18 nt, Human
caaaaugcuuuuuauuuc

SEQ ID NO: 1280265 - RNA, 20 nt, Human
caaaaugcuuuuuauuucug

SEQ ID NO: 1280266 - RNA, 23 nt, Human
caaaaugcuuuuuauuucugcau

SEQ ID NO: 1280267 - RNA, 23 nt, Human
caaaauguaggcuuaguuugugu

SEQ ID NO: 1280268 - RNA, 16 nt, Human
caaaauguaugucugg

SEQ ID NO: 1280269 - RNA, 19 nt, Human
caaaaaucucaauauuuca

SEQ ID NO: 1280270 - RNA, 15 nt, Human
caaaaagugaaauaa

SEQ ID NO: 1280271 - RNA, 14 nt, Human
caaaaauagcuaaa

SEQ ID NO: 1280272 - RNA, 12 nt, Human
caaaaauauaaa

SEQ ID NO: 1280273 - RNA, 23 nt, Human
caaaaauauaaaauaugaagaca

SEQ ID NO: 1280274 - RNA, 19 nt, Human
caaaaauuaucuauagcua

SEQ ID NO: 1280275 - RNA, 21 nt, Human
caaaaauuucuguaaaacagg

SEQ ID NO: 1280276 - RNA, 22 nt, Human
caaaaauuucuguaaaacaggu

SEQ ID NO: 1280277 - RNA, 21 nt, Human
caaaacaaagcaauucuuuca

SEQ ID NO: 1280278 - RNA, 22 nt, Human
caaaacaaagcaauucuuucaa

SEQ ID NO: 1280279 - RNA, 12 nt, Human
caaaacaaaggc

SEQ ID NO: 1280280 - RNA, 15 nt, Human
caaaacaaaggccua

SEQ ID NO: 1280281 - RNA, 16 nt, Human
caaaacaaaggccuaa

SEQ ID NO: 1280282 - RNA, 14 nt, Human
caaaagaagaaguu

SEQ ID NO: 1280283 - RNA, 15 nt, Human
caaaagaagaaguuu

SEQ ID NO: 1280284 - RNA, 20 nt, Human
caaaagaagaaguuucauca

SEQ ID NO: 1280285 - RNA, 23 nt, Human
caaaacuucagacauagaauuaa

SEQ ID NO: 1280286 - RNA, 21 nt, Human
caaaacuucguuuaaugaaug

SEQ ID NO: 1280287 - RNA, 12 nt, Human
caaaacugcucc

SEQ ID NO: 1280288 - RNA, 22 nt, Human
caaaacaaaggccuaauucuau

SEQ ID NO: 1280289 - RNA, 14 nt, Human
caaaacaaacucau

SEQ ID NO: 1280290 - RNA, 14 nt, Human
caaaacaauguuua

SEQ ID NO: 1280291 - RNA, 18 nt, Human
caaaacaauguuuaaacc

SEQ ID NO: 1280292 - RNA, 16 nt, Human
caaaacaauguuuaaa

SEQ ID NO: 1280293 - RNA, 16 nt, Human
caaaacacuuguaauu

SEQ ID NO: 1280294 - RNA, 18 nt, Human
caaaacacuuguaauuuu

SEQ ID NO: 1280295 - RNA, 13 nt, Human
caaaacagauugu

SEQ ID NO: 1280296 - RNA, 18 nt, Human
caaaacagauuguuugca

SEQ ID NO: 1280297 - RNA, 21 nt, Human
caaaacaguauugacuuguau

SEQ ID NO: 1280298 - RNA, 16 nt, Human
caaaaccagguccaau

SEQ ID NO: 1280299 - RNA, 22 nt, Human
caaaaccagguccaaugagcuu

SEQ ID NO: 1280300 - RNA, 23 nt, Human
caaaaccagguccaaugagcuuu

SEQ ID NO: 1280301 - RNA, 13 nt, Human
caaaacccagacc

SEQ ID NO: 1280302 - RNA, 15 nt, Human
caaaacccagaccug

SEQ ID NO: 1280303 - RNA, 15 nt, Human
caaaaccccccagau

SEQ ID NO: 1280304 - RNA, 19 nt, Human
caaaaccccccagauauca

SEQ ID NO: 1280305 - RNA, 21 nt, Human
caaaaccccccagauaucauc

SEQ ID NO: 1280306 - RNA, 12 nt, Human
caaaaccgccag

SEQ ID NO: 1280307 - RNA, 14 nt, Human
caaaaccgccagcu

SEQ ID NO: 1280308 - RNA, 17 nt, Human
caaaaccgccagcucug

SEQ ID NO: 1280309 - RNA, 18 nt, Human
caaaaccgccagcucugu

SEQ ID NO: 1280310 - RNA, 20 nt, Human
caaaaccgccagcucuguuc

SEQ ID NO: 1280311 - RNA, 20 nt, Human
caaaaagaaaagaaaauuuu

SEQ ID NO: 1280312 - RNA, 23 nt, Human
caaaaacuuuggaguccccucac

SEQ ID NO: 1280313 - RNA, 16 nt, Human
caaaaacuauuuggga

SEQ ID NO: 1280314 - RNA, 14 nt, Human
caaaaacuauuugg

SEQ ID NO: 1280315 - RNA, 22 nt, Human
caaaaacagguauauacuuuga

SEQ ID NO: 1280316 - RNA, 17 nt, Human
caaaaaccuauuccacu

SEQ ID NO: 1280317 - RNA, 20 nt, Human
caaaaacagguauauacuuu

SEQ ID NO: 1280318 - RNA, 18 nt, Human
caaaaagcuaauaccagu

SEQ ID NO: 1280319 - RNA, 14 nt, Human
caaaaagaaccacu

SEQ ID NO: 1280320 - RNA, 17 nt, Human
caaaaagaaccacuugu

SEQ ID NO: 1280321 - RNA, 14 nt, Human
caaaaacaaaaaga

SEQ ID NO: 1280322 - RNA, 10 nt, Human
auuuuguaaa

SEQ ID NO: 1280323 - RNA, 17 nt, Human
auuuuguaaacucaaaa

SEQ ID NO: 1280324 - RNA, 19 nt, Human
caaaaaauuaaagcauuua

SEQ ID NO: 1280325 - RNA, 15 nt, Human
caaaaaauuaaagca

SEQ ID NO: 1280326 - RNA, 18 nt, Human
caaaaaauuaaagcauuu

SEQ ID NO: 1280327 - RNA, 13 nt, Human
auuuuccugaaaa

SEQ ID NO: 1280328 - RNA, 14 nt, Human
auuuuccugaaaac

SEQ ID NO: 1280329 - RNA, 14 nt, Human
auuuuccuuuucaa

SEQ ID NO: 1280330 - RNA, 14 nt, Human
auuuucuaaaaaag

SEQ ID NO: 1280331 - RNA, 16 nt, Human
auuuucuaagaaacau

SEQ ID NO: 1280332 - RNA, 17 nt, Human
auuuucuaagaaacauu

SEQ ID NO: 1280333 - RNA, 22 nt, Human
auuuuggagaguuuccugaaac

SEQ ID NO: 1280334 - RNA, 21 nt, Human
auuuuggagaguuuccugaaa

SEQ ID NO: 1280335 - RNA, 17 nt, Human
auuuuggauuuugcaag

SEQ ID NO: 1280336 - RNA, 22 nt, Human
auuuucuaagaaacauuuauau

SEQ ID NO: 1280337 - RNA, 21 nt, Human
auuuucuaccuggucucuccu

SEQ ID NO: 1280338 - RNA, 20 nt, Human
auuuuggagaguuuccugaa

SEQ ID NO: 1280339 - RNA, 22 nt, Human
auuuugguaaaauacuucuuga

SEQ ID NO: 1280340 - RNA, 19 nt, Human
auuuuguaaacucaaaaua

SEQ ID NO: 1280341 - RNA, 19 nt, Human
cacagugaucaaguuauuu

SEQ ID NO: 1280342 - RNA, 14 nt, Human
cacagugcaucuca

SEQ ID NO: 1280343 - RNA, 16 nt, Human
cacaggaguguccucu

SEQ ID NO: 1280344 - RNA, 13 nt, Human
cacaguuccccua

SEQ ID NO: 1280345 - RNA, 14 nt, Human
cacaguuccuggga

SEQ ID NO: 1280346 - RNA, 18 nt, Human
cacaguucuuugggccag

SEQ ID NO: 1280347 - RNA, 19 nt, Human
cacaguucuuugggccaga

SEQ ID NO: 1280348 - RNA, 20 nt, Human
cacaguucuuugggccagac

SEQ ID NO: 1280349 - RNA, 17 nt, Human
cacagugcaucucagcc

SEQ ID NO: 1280350 - RNA, 16 nt, Human
cacaguguaugaaggg

SEQ ID NO: 1280351 - RNA, 17 nt, Human
cacagugucaggcacug

SEQ ID NO: 1280352 - RNA, 19 nt, Human
cacaggagggcggccuccu

SEQ ID NO: 1280353 - RNA, 22 nt, Human
cacaggagggcggccuccuucu

SEQ ID NO: 1280354 - RNA, 12 nt, Human
cacaggaggggg

SEQ ID NO: 1280355 - RNA, 22 nt, Human
cacaggagggggucguggagag

SEQ ID NO: 1280356 - RNA, 23 nt, Human
cacaggagggggucguggagagc

SEQ ID NO: 1280357 - RNA, 14 nt, Human
cacaggagggaggg

SEQ ID NO: 1280358 - RNA, 20 nt, Human
cacaggagcuaccugugugg

SEQ ID NO: 1280359 - RNA, 19 nt, Human
cacaggagggagggggaag

SEQ ID NO: 1280360 - RNA, 21 nt, Human
cacaggagggagggggaaggc

SEQ ID NO: 1280361 - RNA, 17 nt, Human
cacagcuuagauuucau

SEQ ID NO: 1280362 - RNA, 14 nt, Human
cacaggagcuaccu

SEQ ID NO: 1280363 - RNA, 15 nt, Human
cacaggagcuaccug

SEQ ID NO: 1280364 - RNA, 16 nt, Human
cacaggagcuaccugu

SEQ ID NO: 1280365 - RNA, 18 nt, Human
cacaggagcuaccugugu

SEQ ID NO: 1280366 - RNA, 17 nt, Human
cacagcuguauagcugc

SEQ ID NO: 1280367 - RNA, 20 nt, Human
cacagcuguauagcugcuuc

SEQ ID NO: 1280368 - RNA, 15 nt, Human
cacagcuuagauuuc

SEQ ID NO: 1280369 - RNA, 16 nt, Human
cacagcuuagauuuca

SEQ ID NO: 1280370 - RNA, 19 nt, Human
cacagcuuagauuucauag

SEQ ID NO: 1280371 - RNA, 21 nt, Human
cacaguucuuugggccagaca

SEQ ID NO: 1280372 - RNA, 21 nt, Human
cacauagugaugguuccccug

SEQ ID NO: 1280373 - RNA, 17 nt, Human
cacauagcccacuuaca

SEQ ID NO: 1280374 - RNA, 19 nt, Human
cacauacccucuucaugga

SEQ ID NO: 1280375 - RNA, 22 nt, Human
cacauacccucuucauggaugg

SEQ ID NO: 1280376 - RNA, 18 nt, Human
cacauacccugaccuggc

SEQ ID NO: 1280377 - RNA, 16 nt, Human
cacauacccugaccug

SEQ ID NO: 1280378 - RNA, 18 nt, Human
cacauacucauuuuucau

SEQ ID NO: 1280379 - RNA, 19 nt, Human
cacauacucauuuuucaug

SEQ ID NO: 1280380 - RNA, 21 nt, Human
cacauagcccacuuacauuua

SEQ ID NO: 1280381 - RNA, 20 nt, Human
cacauagcccacuuacauuu

SEQ ID NO: 1280382 - RNA, 14 nt, Human
uuuucaaaagaaag

SEQ ID NO: 1280383 - RNA, 14 nt, Human
uuuuauuuugccaa

SEQ ID NO: 1280384 - RNA, 19 nt, Human
uuuuaucugaaaucaauua

SEQ ID NO: 1280385 - RNA, 20 nt, Human
uuuuaucugaaaucaauuaa

SEQ ID NO: 1280386 - RNA, 21 nt, Human
uuuuaucugaaaucaauuaaa

SEQ ID NO: 1280387 - RNA, 23 nt, Human
uuuuaucugaauuuuuaaacaag

SEQ ID NO: 1280388 - RNA, 20 nt, Human
uuuuaucugaguuacagaaa

SEQ ID NO: 1280389 - RNA, 19 nt, Human
uuuuaugagaaagccuucu

SEQ ID NO: 1280390 - RNA, 9 nt, Human
uuuuauaua

SEQ ID NO: 1280391 - RNA, 18 nt, Human
uuuuauacuuucccuacc

SEQ ID NO: 1280392 - RNA, 13 nt, Human
uuuuauauuugaa

SEQ ID NO: 1280393 - RNA, 18 nt, Human
uuuuauauuugaaauauu

SEQ ID NO: 1280394 - RNA, 13 nt, Human
uuuuauacucuuu

SEQ ID NO: 1280395 - RNA, 18 nt, Human
uuuuauacucuuucugua

SEQ ID NO: 1280396 - RNA, 19 nt, Human
uuuuauacucuuucuguau

SEQ ID NO: 1280397 - RNA, 21 nt, Human
uuuuaaaguaacccuacaaaa

SEQ ID NO: 1280398 - RNA, 17 nt, Human
uuuuaaacuguacagug

SEQ ID NO: 1280399 - RNA, 20 nt, Human
uuuuaaacuguacagugucu

SEQ ID NO: 1280400 - RNA, 13 nt, Human
uuuuaaacugugu

SEQ ID NO: 1280401 - RNA, 20 nt, Human
uuuuaaacuguguacauaac

SEQ ID NO: 1280402 - RNA, 23 nt, Human
uuuuaaacuguguacauaacuga

SEQ ID NO: 1280403 - RNA, 23 nt, Human
uuuuaaagaaaaaaauugaaaug

SEQ ID NO: 1280404 - RNA, 19 nt, Human
uuuuacaaaaaagaaaaga

SEQ ID NO: 1280405 - RNA, 12 nt, Human
uuuuacaaagcc

SEQ ID NO: 1280406 - RNA, 17 nt, Human
uuuuaaaguuaguaucu

SEQ ID NO: 1280407 - RNA, 17 nt, Human
uuuuacaauaaaaucuu

SEQ ID NO: 1280408 - RNA, 17 nt, Human
uuuuacaaguaacaaaa

SEQ ID NO: 1280409 - RNA, 23 nt, Human
uuuuacaauguaauuauuuaugu

SEQ ID NO: 1280410 - RNA, 12 nt, Human
uuuuacaaaugu

SEQ ID NO: 1280411 - RNA, 22 nt, Human
uuuuacaaauguuaaaaugugu

SEQ ID NO: 1280412 - RNA, 14 nt, Human
uuuuacaaauguua

SEQ ID NO: 1280413 - RNA, 12 nt, Human
uuuuacaaguaa

SEQ ID NO: 1280414 - RNA, 18 nt, Human
uuuuacaaguaacaaaaa

SEQ ID NO: 1280415 - RNA, 19 nt, Human
uuuuacguccaucucuugu

SEQ ID NO: 1280416 - RNA, 14 nt, Human
uuuuaccuuucaua

SEQ ID NO: 1280417 - RNA, 22 nt, Human
uuuuacccuggccccucucccu

SEQ ID NO: 1280418 - RNA, 16 nt, Human
uuuuacaauguaauua

SEQ ID NO: 1280419 - RNA, 23 nt, Human
uuuuauaauuuugugaagcaaaa

SEQ ID NO: 1280420 - RNA, 21 nt, Human
uuuuauaauuuugugaagcaa

SEQ ID NO: 1280421 - RNA, 21 nt, Human
uuuucaaaauuguuacaaauu

SEQ ID NO: 1280422 - RNA, 22 nt, Human
uuuucaaaaccagguccaauga

SEQ ID NO: 1280423 - RNA, 14 nt, Human
uuuucaaaauggag

SEQ ID NO: 1280424 - RNA, 16 nt, Human
uuuucaaacaaagaug

SEQ ID NO: 1280425 - RNA, 20 nt, Human
uuuucaaacaaagaugccac

SEQ ID NO: 1280426 - RNA, 18 nt, Human
uuuucaacagugaagaca

SEQ ID NO: 1280427 - RNA, 22 nt, Human
uuuucaacagugaagacagaag

SEQ ID NO: 1280428 - RNA, 16 nt, Human
uuuucacauuggaaac

SEQ ID NO: 1280429 - RNA, 18 nt, Human
uuuucacauuagaagaca

SEQ ID NO: 1280430 - RNA, 12 nt, Human
uuuucacauuuu

SEQ ID NO: 1280431 - RNA, 19 nt, Human
uuuucaccagauuugcuaa

SEQ ID NO: 1280432 - RNA, 23 nt, Human
uuuucaccuggaagcauuuguuu

SEQ ID NO: 1280433 - RNA, 20 nt, Human
uuuucccauuuaucuaaaua

SEQ ID NO: 1280434 - RNA, 22 nt, Human
uuuucccauuuaucuaaauaug

SEQ ID NO: 1280435 - RNA, 14 nt, Human
uuuuccccagacuu

SEQ ID NO: 1280436 - RNA, 16 nt, Human
uuuucccccuuugugc

SEQ ID NO: 1280437 - RNA, 20 nt, Human
uuuugaaauuaugugacauu

SEQ ID NO: 1280438 - RNA, 17 nt, Human
uuuugaaauuaaccucu

SEQ ID NO: 1280439 - RNA, 13 nt, Human
uuuucuuuauaag

SEQ ID NO: 1280440 - RNA, 19 nt, Human
uuuucuuuauaagaaagcc

SEQ ID NO: 1280441 - RNA, 20 nt, Human
uuuucuugucuauaaagcau

SEQ ID NO: 1280442 - RNA, 14 nt, Human
uuuucuuuaacugc

SEQ ID NO: 1280443 - RNA, 18 nt, Human
uuuucuuuaacugccgua

SEQ ID NO: 1280444 - RNA, 20 nt, Human
uuuucuuuacaaaacaaacu

SEQ ID NO: 1280445 - RNA, 13 nt, Human
uuuucuugucuau

SEQ ID NO: 1280446 - RNA, 13 nt, Human
uuuuccuaaguga

SEQ ID NO: 1280447 - RNA, 20 nt, Human
uuuuccuaagugauuguaug

SEQ ID NO: 1280448 - RNA, 20 nt, Human
uuuuccuaauaaaguucugu

SEQ ID NO: 1280449 - RNA, 22 nt, Human
uuuucccucuuuggcuccccug

SEQ ID NO: 1280450 - RNA, 15 nt, Human
uuuucccuguacagu

SEQ ID NO: 1280451 - RNA, 14 nt, Human
uuuucccuuugccu

SEQ ID NO: 1280452 - RNA, 17 nt, Human
uuuuccuagcccucuca

SEQ ID NO: 1280453 - RNA, 18 nt, Human
uuugcauaacguauaaaa

SEQ ID NO: 1280454 - RNA, 17 nt, Human
uuugcaguaacuguuuu

SEQ ID NO: 1280455 - RNA, 16 nt, Human
uuugcauaacaauucc

SEQ ID NO: 1280456 - RNA, 17 nt, Human
uuugcauaacaauuccu

SEQ ID NO: 1280457 - RNA, 18 nt, Human
uuugcauaacaauuccuc

SEQ ID NO: 1280458 - RNA, 22 nt, Human
uuugcaggguccucuucugggc

SEQ ID NO: 1280459 - RNA, 22 nt, Human
uuugcagguggccaaguuccuc

SEQ ID NO: 1280460 - RNA, 9 nt, Human
uuugcagua

SEQ ID NO: 1280461 - RNA, 10 nt, Human
uuugcaguaa

SEQ ID NO: 1280462 - RNA, 12 nt, Human
uuugcaguaacu

SEQ ID NO: 1280463 - RNA, 14 nt, Human
uuugcaguaacugu

SEQ ID NO: 1280464 - RNA, 20 nt, Human
uuugcauaacaauuccucua

SEQ ID NO: 1280465 - RNA, 22 nt, Human
uuugcauaacaauuccucuacu

SEQ ID NO: 1280466 - RNA, 18 nt, Human
uuugcauuaaauucacaa

SEQ ID NO: 1280467 - RNA, 21 nt, Human
uuugcauuaaauucacaaacu

SEQ ID NO: 1280468 - RNA, 22 nt, Human
uuugcauuaaauucacaaacuu

SEQ ID NO: 1280469 - RNA, 17 nt, Human
uuugcaguucuuuggcu

SEQ ID NO: 1280470 - RNA, 19 nt, Human
uuugcauugaacacaaacu

SEQ ID NO: 1280471 - RNA, 16 nt, Human
uuugcauuuaaaacag

SEQ ID NO: 1280472 - RNA, 17 nt, Human
uuugcauuuaaaacaga

SEQ ID NO: 1280473 - RNA, 19 nt, Human
uuugcauuuaaaacagaca

SEQ ID NO: 1280474 - RNA, 21 nt, Human
uuugcauuuaaaacagacacu

SEQ ID NO: 1280475 - RNA, 13 nt, Human
uuuggacaguuua

SEQ ID NO: 1280476 - RNA, 16 nt, Human
uuuggacaguuuacca

SEQ ID NO: 1280477 - RNA, 23 nt, Human
uuugcauuuaaaacagacacugg

SEQ ID NO: 1280478 - RNA, 16 nt, Human
uuuggaaagacuggac

SEQ ID NO: 1280479 - RNA, 13 nt, Human
uuuggaaaguaca

SEQ ID NO: 1280480 - RNA, 15 nt, Human
uuuggaaaguacacu

SEQ ID NO: 1280481 - RNA, 20 nt, Human
uuuggaaaguacacucugcu

SEQ ID NO: 1280482 - RNA, 21 nt, Human
uuuggaaaguacacucugcug

SEQ ID NO: 1280483 - RNA, 22 nt, Human
uuuggaaaguacacucugcugu

SEQ ID NO: 1280484 - RNA, 15 nt, Human
uuuccacagaagcuc

SEQ ID NO: 1280485 - RNA, 19 nt, Human
uuuccaccacagccagcac

SEQ ID NO: 1280486 - RNA, 17 nt, Human
uuucccuuguagcuccu

SEQ ID NO: 1280487 - RNA, 18 nt, Human
uuucccuuguagcuccuc

SEQ ID NO: 1280488 - RNA, 20 nt, Human
uuuccuaaauauauuuuaag

SEQ ID NO: 1280489 - RNA, 20 nt, Human
uuucccuuguagcuccuccc

SEQ ID NO: 1280490 - RNA, 15 nt, Human
uuucccuuugccuuc

SEQ ID NO: 1280491 - RNA, 22 nt, Human
uuuccguaaaaaugauuucagu

SEQ ID NO: 1280492 - RNA, 13 nt, Human
uuugagugcucug

SEQ ID NO: 1280493 - RNA, 14 nt, Human
uuugagugcucuga

SEQ ID NO: 1280494 - RNA, 16 nt, Human
uuugcaccuuucuagu

SEQ ID NO: 1280495 - RNA, 17 nt, Human
uuugcaccuuucuaguu

SEQ ID NO: 1280496 - RNA, 20 nt, Human
uuugcaccuuucuaguugaa

SEQ ID NO: 1280497 - RNA, 21 nt, Human
uuugcaccuuucuaguugaaa

SEQ ID NO: 1280498 - RNA, 18 nt, Human
uuugcacugauauaucau

SEQ ID NO: 1280499 - RNA, 23 nt, Human
uuuuaaaauccacuuuaucuuga

SEQ ID NO: 1280500 - RNA, 13 nt, Human
uuuuaaacacauu

SEQ ID NO: 1280501 - RNA, 13 nt, Human
uuuuaaacaguga

SEQ ID NO: 1280502 - RNA, 20 nt, Human
uuuuaaacccuauugguaaa

SEQ ID NO: 1280503 - RNA, 19 nt, Human
uuuuaaacagugagccuga

SEQ ID NO: 1280504 - RNA, 18 nt, Human
uuuuaaacacauuaggaa

SEQ ID NO: 1280505 - RNA, 21 nt, Human
uuuuaaacaucaaucuuuaaa

SEQ ID NO: 1280506 - RNA, 23 nt, Human
uuuuaaacauuaauagcagccuu

SEQ ID NO: 1280507 - RNA, 13 nt, Human
uuuuaaacuguac

SEQ ID NO: 1280508 - RNA, 14 nt, Human
uuuuaaacuguaca

SEQ ID NO: 1280509 - RNA, 15 nt, Human
uuuuaaacuguacag

SEQ ID NO: 1280510 - RNA, 16 nt, Human
uuuuaaacuguacagu

SEQ ID NO: 1280511 - RNA, 14 nt, Human
uuuuaaaauccacu

SEQ ID NO: 1280512 - RNA, 21 nt, Human
uuuuaaaauagcguucuugua

SEQ ID NO: 1280513 - RNA, 14 nt, Human
uuuuaaaaucagcu

SEQ ID NO: 1280514 - RNA, 22 nt, Human
uuuuaaaaucagcuauuuugug

SEQ ID NO: 1280515 - RNA, 20 nt, Human
uuuguugguuuuuaaagauu

SEQ ID NO: 1280516 - RNA, 13 nt, Human
uuuguugguuggu

SEQ ID NO: 1280517 - RNA, 18 nt, Human
uuuguuauauaauuuaga

SEQ ID NO: 1280518 - RNA, 17 nt, Human
uuuguguguugucucuu

SEQ ID NO: 1280519 - RNA, 23 nt, Human
uuuguuaauuuagaaaacuuuaa

SEQ ID NO: 1280520 - RNA, 22 nt, Human
uuuguuaauuuagaaaacuuua

SEQ ID NO: 1280521 - RNA, 22 nt, Human
uuuguugcguuccuuucuuuuc

SEQ ID NO: 1280522 - RNA, 14 nt, Human
uuuguugcuguuuu

SEQ ID NO: 1280523 - RNA, 15 nt, Human
uuuguuauuuugcaa

SEQ ID NO: 1280524 - RNA, 18 nt, Human
uuuguugacauucugaau

SEQ ID NO: 1280525 - RNA, 19 nt, Human
uuuguugacauucugaaug

SEQ ID NO: 1280526 - RNA, 20 nt, Human
uuuguugacauucugaaugc

SEQ ID NO: 1280527 - RNA, 14 nt, Human
uuuguauuguauau

SEQ ID NO: 1280528 - RNA, 22 nt, Human
uuuggucgaggaguaacaauac

SEQ ID NO: 1280529 - RNA, 14 nt, Human
uuuguauucucuga

SEQ ID NO: 1280530 - RNA, 16 nt, Human
uuuguauucucugagc

SEQ ID NO: 1280531 - RNA, 17 nt, Human
uuugguccgucauaacc

SEQ ID NO: 1280532 - RNA, 16 nt, Human
uuuggucgaggaguaa

SEQ ID NO: 1280533 - RNA, 18 nt, Human
uuuggucgaggaguaaca

SEQ ID NO: 1280534 - RNA, 19 nt, Human
uuuggucgaggaguaacaa

SEQ ID NO: 1280535 - RNA, 21 nt, Human
uuuguauuguuucaauugcau

SEQ ID NO: 1280536 - RNA, 17 nt, Human
uuuguauuuuguuuaaa

SEQ ID NO: 1280537 - RNA, 14 nt, Human
uuuguauuuuuagu

SEQ ID NO: 1280538 - RNA, 21 nt, Human
uuugugucauguuuaagaaau

SEQ ID NO: 1280539 - RNA, 20 nt, Human
uuugugucucuuauggaugu

SEQ ID NO: 1280540 - RNA, 16 nt, Human
uuugugugcucuccau

SEQ ID NO: 1280541 - RNA, 14 nt, Human
uuuguguguagucu

SEQ ID NO: 1280542 - RNA, 14 nt, Human
uuugugugcucucc

SEQ ID NO: 1280543 - RNA, 16 nt, Human
uuuguguguauuugcu

SEQ ID NO: 1280544 - RNA, 13 nt, Human
uuugugugucuua

SEQ ID NO: 1280545 - RNA, 15 nt, Human
uuuggucaacacuaa

SEQ ID NO: 1280546 - RNA, 21 nt, Human
uuugguccuucaaaggcuugu

SEQ ID NO: 1280547 - RNA, 18 nt, Human
uuuguauaaaauaauuuu

SEQ ID NO: 1280548 - RNA, 19 nt, Human
uuuguauaaaauaauuuuu

SEQ ID NO: 1280549 - RNA, 17 nt, Human
uuuguauaaaauaauuu

SEQ ID NO: 1280550 - RNA, 20 nt, Human
uuuuucauuaaauaaauuug

SEQ ID NO: 1280551 - RNA, 22 nt, Human
uuuuucauuaaauaaauuugac

SEQ ID NO: 1280552 - RNA, 11 nt, Human
uuuuuccaaca

SEQ ID NO: 1280553 - RNA, 21 nt, Human
uuuuuccaacuacuaauagaa

SEQ ID NO: 1280554 - RNA, 23 nt, Human
uuuuuccaacuacuaauagaaua

SEQ ID NO: 1280555 - RNA, 17 nt, Human
uuuuucaguauuauaug

SEQ ID NO: 1280556 - RNA, 18 nt, Human
uuuuucaguauuauaugu

SEQ ID NO: 1280557 - RNA, 11 nt, Human
uuuuucaguug

SEQ ID NO: 1280558 - RNA, 20 nt, Human
uuuuucaguuguucuuuuua

SEQ ID NO: 1280559 - RNA, 16 nt, Human
uuuuucaguuguucuu

SEQ ID NO: 1280560 - RNA, 15 nt, Human
uuuuucaucuucagu

SEQ ID NO: 1280561 - RNA, 16 nt, Human
uuuuucaucuucaguu

SEQ ID NO: 1280562 - RNA, 20 nt, Human
uuuuucaucuucaguugucu

SEQ ID NO: 1280563 - RNA, 23 nt, Human
uuuuucaucuucaguugucucug

SEQ ID NO: 1280564 - RNA, 11 nt, Human
uuuuucaugau

SEQ ID NO: 1280565 - RNA, 18 nt, Human
uuuuucaugauuuugaaa

SEQ ID NO: 1280566 - RNA, 16 nt, Human
uuuuucaugauaauga

SEQ ID NO: 1280567 - RNA, 13 nt, Human
uuuuuaaucuuua

SEQ ID NO: 1280568 - RNA, 16 nt, Human
uuuuuaauaaauuuca

SEQ ID NO: 1280569 - RNA, 14 nt, Human
uuuuuaauaauuua

SEQ ID NO: 1280570 - RNA, 14 nt, Human
uuuuuaauaugcuu

SEQ ID NO: 1280571 - RNA, 19 nt, Human
uuuuuaauccgccaauauu

SEQ ID NO: 1280572 - RNA, 18 nt, Human
uuuuuaauguauaguaaa

SEQ ID NO: 1280573 - RNA, 13 nt, Human
uuuuucacauuuu

SEQ ID NO: 1280574 - RNA, 23 nt, Human
uuuuuaaauguauacuauaguac

SEQ ID NO: 1280575 - RNA, 15 nt, Human
uuuuuaaauguauac

SEQ ID NO: 1280576 - RNA, 11 nt, Human
uuuugagaaag

SEQ ID NO: 1280577 - RNA, 20 nt, Human
uuuuuaaauguaaagauauu

SEQ ID NO: 1280578 - RNA, 24 nt, Human
uuuugacaguguugaaaauguuca

SEQ ID NO: 1280579 - RNA, 15 nt, Human
uuuugacauaaaguu

SEQ ID NO: 1280580 - RNA, 13 nt, Human
uuuugacugcuug

SEQ ID NO: 1280581 - RNA, 13 nt, Human
uuuugaaggcaaa

SEQ ID NO: 1280582 - RNA, 14 nt, Human
uuuugaaggcaaaa

SEQ ID NO: 1280583 - RNA, 14 nt, Human
uuuugaaguauuua

SEQ ID NO: 1280584 - RNA, 19 nt, Human
uuuugacaguguugaaaau

SEQ ID NO: 1280585 - RNA, 23 nt, Human
uuuugacaguguugaaaauguuc

SEQ ID NO: 1280586 - RNA, 12 nt, Human
uuuuuuacauuu

SEQ ID NO: 1280587 - RNA, 11 nt, Human
uuuuuuacauu

SEQ ID NO: 1280588 - RNA, 15 nt, Human
uuuuuuaauaaauuu

SEQ ID NO: 1280589 - RNA, 19 nt, Human
uuuuuuaauccgccaauau

SEQ ID NO: 1280590 - RNA, 12 nt, Human
uuuuuuaauuga

SEQ ID NO: 1280591 - RNA, 12 nt, Human
uuuuuucaguug

SEQ ID NO: 1280592 - RNA, 11 nt, Human
uuuuuucaucu

SEQ ID NO: 1280593 - RNA, 13 nt, Human
uuuuuucaucuuc

SEQ ID NO: 1280594 - RNA, 12 nt, Human
uuuuuuccaaaa

SEQ ID NO: 1280595 - RNA, 14 nt, Human
uuuuuuccaaaauc

SEQ ID NO: 1280596 - RNA, 13 nt, Human
uuuuuccaucuuu

SEQ ID NO: 1280597 - RNA, 17 nt, Human
uuuuuccccagacuugu

SEQ ID NO: 1280598 - RNA, 21 nt, Human
uuuuuccccagacuuguuggc

SEQ ID NO: 1280599 - RNA, 18 nt, Human
uuuuucccuaucacugaa

SEQ ID NO: 1280600 - RNA, 14 nt, Human
uuuuuccguaaaaa

SEQ ID NO: 1280601 - RNA, 16 nt, Human
uuuuuccguaaaaaug

SEQ ID NO: 1280602 - RNA, 15 nt, Human
uuuuuccguaaaaau

SEQ ID NO: 1280603 - RNA, 12 nt, Human
uuuuuuaacauu

SEQ ID NO: 1280604 - RNA, 10 nt, Human
uuuuuuaaga

SEQ ID NO: 1280605 - RNA, 17 nt, Human
uuuuuuaagaauaucug

SEQ ID NO: 1280606 - RNA, 12 nt, Human
uuuuuuuacauu

SEQ ID NO: 1280607 - RNA, 12 nt, Human
uuuuuuucaguu

SEQ ID NO: 1280608 - RNA, 10 nt, Human
uuuuuuuccu

SEQ ID NO: 1280609 - RNA, 12 nt, Human
uuuuuuucuuua

SEQ ID NO: 1280610 - RNA, 14 nt, Human
uuuuuuuguuauua

SEQ ID NO: 1280611 - RNA, 12 nt, Human
uuuuuuugugug

SEQ ID NO: 1280612 - RNA, 11 nt, Human
uuuuuuugcag

SEQ ID NO: 1280613 - RNA, 10 nt, Human
uuuuuuugca

SEQ ID NO: 1280614 - RNA, 15 nt, Human
uuuuuuccugucaua

SEQ ID NO: 1280615 - RNA, 12 nt, Human
uuuuuuccccag

SEQ ID NO: 1280616 - RNA, 13 nt, Human
uuuuuuccacuua

SEQ ID NO: 1280617 - RNA, 13 nt, Human
uuuuuuccaucuu

SEQ ID NO: 1280618 - RNA, 22 nt, Human
uuuuuuccaucuuuacaaaacu

SEQ ID NO: 1280619 - RNA, 10 nt, Human
uuuuuuccuu

SEQ ID NO: 1280620 - RNA, 16 nt, Human
uuuuuuguuuguuugu

SEQ ID NO: 1280621 - RNA, 13 nt, Human
uuuuuuuuccugu

SEQ ID NO: 1280622 - RNA, 14 nt, Human
uuuuuuuuaaacua

SEQ ID NO: 1280623 - RNA, 13 nt, Human
uuuuuuuguuugu

SEQ ID NO: 1280624 - RNA, 11 nt, Human
uuuuuuuugca

SEQ ID NO: 1280625 - RNA, 12 nt, Human
uuuuuuuugcag

SEQ ID NO: 1280626 - RNA, 14 nt, Human
uuuuuuuuguuugu

SEQ ID NO: 1280627 - RNA, 22 nt, Human
uuccugagucccaucccugcgu

SEQ ID NO: 1280628 - RNA, 20 nt, Human
uuccugaccuccgccaucca

SEQ ID NO: 1280629 - RNA, 19 nt, Human
uuccugcaacucaaggacu

SEQ ID NO: 1280630 - RNA, 20 nt, Human
uuccugcaacucaaggacuu

SEQ ID NO: 1280631 - RNA, 21 nt, Human
uuccugcaggcaggaacaaac

SEQ ID NO: 1280632 - RNA, 14 nt, Human
uuccaugcugugcg

SEQ ID NO: 1280633 - RNA, 23 nt, Human
uuccaugcugugcgcccagggcu

SEQ ID NO: 1280634 - RNA, 19 nt, Human
uuccauggcaggaaggcuu

SEQ ID NO: 1280635 - RNA, 17 nt, Human
uuccauggcaggaaggc

SEQ ID NO: 1280636 - RNA, 22 nt, Human
uuccaugggaccacaacuauuu

SEQ ID NO: 1280637 - RNA, 12 nt, Human
uuccaugggaau

SEQ ID NO: 1280638 - RNA, 21 nt, Human
uuccauggugugaucgucuga

SEQ ID NO: 1280639 - RNA, 16 nt, Human
uuccaugucgccucug

SEQ ID NO: 1280640 - RNA, 21 nt, Human
uuccaugucaagauucagcua

SEQ ID NO: 1280641 - RNA, 15 nt, Human
uuccaugucaagauu

SEQ ID NO: 1280642 - RNA, 17 nt, Human
uuccaugucaagauuca

SEQ ID NO: 1280643 - RNA, 13 nt, Human
uuccugaauccaa

SEQ ID NO: 1280644 - RNA, 18 nt, Human
uuccugaauccaaacuaa

SEQ ID NO: 1280645 - RNA, 13 nt, Human
uuccugacacuuu

SEQ ID NO: 1280646 - RNA, 22 nt, Human
uuccugacacuuuaauuaccaa

SEQ ID NO: 1280647 - RNA, 18 nt, Human
uucggugagcuacaaaug

SEQ ID NO: 1280648 - RNA, 18 nt, Human
uuccuuuaacaacauguu

SEQ ID NO: 1280649 - RNA, 19 nt, Human
uuccuuuaacaacauguuu

SEQ ID NO: 1280650 - RNA, 21 nt, Human
uuccuuuaacaacauguuucc

SEQ ID NO: 1280651 - RNA, 13 nt, Human
uucggggcuggga

SEQ ID NO: 1280652 - RNA, 17 nt, Human
uucggggcugggaaguc

SEQ ID NO: 1280653 - RNA, 16 nt, Human
uuccuugucacuggua

SEQ ID NO: 1280654 - RNA, 17 nt, Human
uuccuuuaacaacaugu

SEQ ID NO: 1280655 - RNA, 22 nt, Human
uuccuuuaacaacauguuucca

SEQ ID NO: 1280656 - RNA, 15 nt, Human
uuccugcuuuucccc

SEQ ID NO: 1280657 - RNA, 15 nt, Human
uuccuggacacucag

SEQ ID NO: 1280658 - RNA, 19 nt, Human
uuccuggacacucagaccu

SEQ ID NO: 1280659 - RNA, 13 nt, Human
uuccugcuugcca

SEQ ID NO: 1280660 - RNA, 15 nt, Human
uuccugcauuuguga

SEQ ID NO: 1280661 - RNA, 21 nt, Human
uuccugccuuggccucccaag

SEQ ID NO: 1280662 - RNA, 11 nt, Human
uuccugcugcu

SEQ ID NO: 1280663 - RNA, 12 nt, Human
uuccugcugcug

SEQ ID NO: 1280664 - RNA, 13 nt, Human
uuccugcugcugu

SEQ ID NO: 1280665 - RNA, 14 nt, Human
uuccugcugcuguc

SEQ ID NO: 1280666 - RNA, 15 nt, Human
uuccugcugcugucu

SEQ ID NO: 1280667 - RNA, 17 nt, Human
uuccugcugcugucugg

SEQ ID NO: 1280668 - RNA, 18 nt, Human
uuccugcugcugucuggg

SEQ ID NO: 1280669 - RNA, 20 nt, Human
uuccugcugcugucugggug

SEQ ID NO: 1280670 - RNA, 21 nt, Human
uuccugcugcugucugggugc

SEQ ID NO: 1280671 - RNA, 14 nt, Human
uucuauagcuuuuc

SEQ ID NO: 1280672 - RNA, 14 nt, Human
uucuauagccaaaa

SEQ ID NO: 1280673 - RNA, 15 nt, Human
uucuauagccaaaaa

SEQ ID NO: 1280674 - RNA, 17 nt, Human
uucuauagccaaaaaua

SEQ ID NO: 1280675 - RNA, 21 nt, Human
uucuauagccaaaaauagcua

SEQ ID NO: 1280676 - RNA, 23 nt, Human
uucuauagccaaaaauagcuaaa

SEQ ID NO: 1280677 - RNA, 16 nt, Human
uucuauaguuauuaag

SEQ ID NO: 1280678 - RNA, 14 nt, Human
uucuauaguucuag

SEQ ID NO: 1280679 - RNA, 15 nt, Human
uucuauaguucuaga

SEQ ID NO: 1280680 - RNA, 17 nt, Human
uucuauaguucuagaca

SEQ ID NO: 1280681 - RNA, 16 nt, Human
uucuauaguucuagac

SEQ ID NO: 1280682 - RNA, 13 nt, Human
uucuacugcucuc

SEQ ID NO: 1280683 - RNA, 19 nt, Human
uucuacuuugauaugacug

SEQ ID NO: 1280684 - RNA, 20 nt, Human
uucuacugcucuccuccacc

SEQ ID NO: 1280685 - RNA, 13 nt, Human
uucuacuauuuau

SEQ ID NO: 1280686 - RNA, 19 nt, Human
uucuacucacuuuucccac

SEQ ID NO: 1280687 - RNA, 20 nt, Human
uucuacucacuuuucccacu

SEQ ID NO: 1280688 - RNA, 21 nt, Human
uucuacucacuuuucccacuc

SEQ ID NO: 1280689 - RNA, 15 nt, Human
uucuaccauuucaga

SEQ ID NO: 1280690 - RNA, 18 nt, Human
uucuaccauuucagagag

SEQ ID NO: 1280691 - RNA, 13 nt, Human
uucguuaucuaau

SEQ ID NO: 1280692 - RNA, 23 nt, Human
uucuaaugugugaaucagagcac

SEQ ID NO: 1280693 - RNA, 13 nt, Human
uucguggggaggu

SEQ ID NO: 1280694 - RNA, 16 nt, Human
uucuaauuauguagcu

SEQ ID NO: 1280695 - RNA, 23 nt, Human
uucuaauuauguagcucuuuguc

SEQ ID NO: 1280696 - RNA, 14 nt, Human
uucuaauugccaug

SEQ ID NO: 1280697 - RNA, 15 nt, Human
uucuaauugccaugu

SEQ ID NO: 1280698 - RNA, 13 nt, Human
uucuaauugcuua

SEQ ID NO: 1280699 - RNA, 14 nt, Human
uucuaauugcuuau

SEQ ID NO: 1280700 - RNA, 17 nt, Human
uucuaauuggcaugaag

SEQ ID NO: 1280701 - RNA, 16 nt, Human
uucuaauugcuuauuu

SEQ ID NO: 1280702 - RNA, 13 nt, Human
uucggugugcacc

SEQ ID NO: 1280703 - RNA, 13 nt, Human
uucguaacacagc

SEQ ID NO: 1280704 - RNA, 15 nt, Human
uucguagauauugga

SEQ ID NO: 1280705 - RNA, 19 nt, Human
uucgucuguuuauaaacau

SEQ ID NO: 1280706 - RNA, 12 nt, Human
uucgucuguugu

SEQ ID NO: 1280707 - RNA, 19 nt, Human
uucuaccaaggucuucuua

SEQ ID NO: 1280708 - RNA, 14 nt, Human
uucuaccauuucag

SEQ ID NO: 1280709 - RNA, 15 nt, Human
uucuacauagaugcu

SEQ ID NO: 1280710 - RNA, 18 nt, Human
uucuacaaaauccugaug

SEQ ID NO: 1280711 - RNA, 21 nt, Human
uucuacaacucauacacucgu

SEQ ID NO: 1280712 - RNA, 15 nt, Human
uucuaauuuuuaaga

SEQ ID NO: 1280713 - RNA, 16 nt, Human
uucugauaaugaaaau

SEQ ID NO: 1280714 - RNA, 19 nt, Human
uucugauaaaagauggcca

SEQ ID NO: 1280715 - RNA, 15 nt, Human
uucugaguuuuacca

SEQ ID NO: 1280716 - RNA, 16 nt, Human
uucugaguuuuaccaa

SEQ ID NO: 1280717 - RNA, 14 nt, Human
uucugaguuuugug

SEQ ID NO: 1280718 - RNA, 15 nt, Human
uucugaguuuugugu

SEQ ID NO: 1280719 - RNA, 16 nt, Human
uucugaguuuuguguu

SEQ ID NO: 1280720 - RNA, 19 nt, Human
uucugaguuuuguguuugu

SEQ ID NO: 1280721 - RNA, 21 nt, Human
uucugaguuuuguguuuguug

SEQ ID NO: 1280722 - RNA, 22 nt, Human
uucugaguuuuguguuuguugu

SEQ ID NO: 1280723 - RNA, 23 nt, Human
uucugaguuuuguguuuguugua

SEQ ID NO: 1280724 - RNA, 18 nt, Human
uucugauaaaagauggcc

SEQ ID NO: 1280725 - RNA, 17 nt, Human
uucugagacgucaugag

SEQ ID NO: 1280726 - RNA, 19 nt, Human
uucugagacgucaugagga

SEQ ID NO: 1280727 - RNA, 22 nt, Human
uucugagacgucaugaggagau

SEQ ID NO: 1280728 - RNA, 16 nt, Human
uucugagaucuguuga

SEQ ID NO: 1280729 - RNA, 19 nt, Human
uucugagauggcucccagg

SEQ ID NO: 1280730 - RNA, 23 nt, Human
uucugagauggcucccaggggcu

SEQ ID NO: 1280731 - RNA, 16 nt, Human
uucugaggcuuuauga

SEQ ID NO: 1280732 - RNA, 17 nt, Human
uucugaggugcacuggg

SEQ ID NO: 1280733 - RNA, 13 nt, Human
uucugaguacaga

SEQ ID NO: 1280734 - RNA, 12 nt, Human
uucugaguuccu

SEQ ID NO: 1280735 - RNA, 15 nt, Human
uucugaguuccugca

SEQ ID NO: 1280736 - RNA, 14 nt, Human
uucugaucaaggcc

SEQ ID NO: 1280737 - RNA, 15 nt, Human
uucugaucaaggccu

SEQ ID NO: 1280738 - RNA, 22 nt, Human
uucugaucaaggccuuauugga

SEQ ID NO: 1280739 - RNA, 16 nt, Human
uucugauguacucuaa

SEQ ID NO: 1280740 - RNA, 21 nt, Human
uucugauucgaaugacacugu

SEQ ID NO: 1280741 - RNA, 17 nt, Human
uucugauuuuaggagcu

SEQ ID NO: 1280742 - RNA, 23 nt, Human
uucugauuuuaggagcuaaggcu

SEQ ID NO: 1280743 - RNA, 24 nt, Human
uucugauuuuaggagcuaaggcuc

SEQ ID NO: 1280744 - RNA, 14 nt, Human
uucugccuucucau

SEQ ID NO: 1280745 - RNA, 16 nt, Human
uucugccuucucauga

SEQ ID NO: 1280746 - RNA, 13 nt, Human
uucugccuuugcc

SEQ ID NO: 1280747 - RNA, 14 nt, Human
uucugccuuugcca

SEQ ID NO: 1280748 - RNA, 15 nt, Human
uucugccuuugccag

SEQ ID NO: 1280749 - RNA, 21 nt, Human
uucugccuuugccaggugacu

SEQ ID NO: 1280750 - RNA, 22 nt, Human
uucugccuuuggggacuuuucu

SEQ ID NO: 1280751 - RNA, 21 nt, Human
uucugcuacuuugcugcuaug

SEQ ID NO: 1280752 - RNA, 14 nt, Human
uucugcucagcucu

SEQ ID NO: 1280753 - RNA, 15 nt, Human
uucugcucagcucug

SEQ ID NO: 1280754 - RNA, 20 nt, Human
uucugcucagcucugggcca

SEQ ID NO: 1280755 - RNA, 13 nt, Human
uucugcucaucau

SEQ ID NO: 1280756 - RNA, 14 nt, Human
uucugcucaucauu

SEQ ID NO: 1280757 - RNA, 19 nt, Human
uucugcucaucauucucug

SEQ ID NO: 1280758 - RNA, 20 nt, Human
uucugcucaucauucucugu

SEQ ID NO: 1280759 - RNA, 21 nt, Human
uucugcucaucauucucuguc

SEQ ID NO: 1280760 - RNA, 15 nt, Human
uucugcuccagacag

SEQ ID NO: 1280761 - RNA, 16 nt, Human
uucugcuccagacagg

SEQ ID NO: 1280762 - RNA, 19 nt, Human
uucuccagccucagccucc

SEQ ID NO: 1280763 - RNA, 12 nt, Human
uucuccagcugg

SEQ ID NO: 1280764 - RNA, 14 nt, Human
uucuccagcugggc

SEQ ID NO: 1280765 - RNA, 15 nt, Human
uucuccagcugggcu

SEQ ID NO: 1280766 - RNA, 20 nt, Human
uucuccagcugggcucugca

SEQ ID NO: 1280767 - RNA, 16 nt, Human
uucucugagcugugca

SEQ ID NO: 1280768 - RNA, 17 nt, Human
uucucugagcugugcag

SEQ ID NO: 1280769 - RNA, 18 nt, Human
uucucugagcugugcagg

SEQ ID NO: 1280770 - RNA, 13 nt, Human
uucucugaggaca

SEQ ID NO: 1280771 - RNA, 16 nt, Human
uucucugaggacaaga

SEQ ID NO: 1280772 - RNA, 20 nt, Human
uucucugaggacaagagaaa

SEQ ID NO: 1280773 - RNA, 14 nt, Human
uucuaugaaauauu

SEQ ID NO: 1280774 - RNA, 14 nt, Human
uucuauccucugua

SEQ ID NO: 1280775 - RNA, 15 nt, Human
uucuauccucuguaa

SEQ ID NO: 1280776 - RNA, 21 nt, Human
uucuaugaaauauuauguuaa

SEQ ID NO: 1280777 - RNA, 20 nt, Human
uucucauguugaagccacug

SEQ ID NO: 1280778 - RNA, 20 nt, Human
uucucauuugccaauaauaa

SEQ ID NO: 1280779 - RNA, 21 nt, Human
uucucauuggaaauuuagcau

SEQ ID NO: 1280780 - RNA, 15 nt, Human
uucucauuaaaagaa

SEQ ID NO: 1280781 - RNA, 13 nt, Human
uucucauugcucu

SEQ ID NO: 1280782 - RNA, 18 nt, Human
uucucauuggaaauuuag

SEQ ID NO: 1280783 - RNA, 17 nt, Human
uucucauuuuuuaaaaa

SEQ ID NO: 1280784 - RNA, 23 nt, Human
uucucauuuuuuaaaaaagcuua

SEQ ID NO: 1280785 - RNA, 21 nt, Human
uucuccaccuagacuguaaac

SEQ ID NO: 1280786 - RNA, 12 nt, Human
uucuccacugga

SEQ ID NO: 1280787 - RNA, 22 nt, Human
uucucauuuuuuaaaaaagcuu

SEQ ID NO: 1280788 - RNA, 15 nt, Human
uugaaaagcagacau

SEQ ID NO: 1280789 - RNA, 13 nt, Human
uugaaaagagcug

SEQ ID NO: 1280790 - RNA, 17 nt, Human
uugaaaagcagacauuu

SEQ ID NO: 1280791 - RNA, 21 nt, Human
uugaaaauaagaauagaaaua

SEQ ID NO: 1280792 - RNA, 15 nt, Human
uugaaaaaugcaugu

SEQ ID NO: 1280793 - RNA, 22 nt, Human
uugaaaaaauagagccugaggg

SEQ ID NO: 1280794 - RNA, 13 nt, Human
uucuuucauuucu

SEQ ID NO: 1280795 - RNA, 14 nt, Human
uugaaaaagacauu

SEQ ID NO: 1280796 - RNA, 16 nt, Human
uugaaaaagacauuca

SEQ ID NO: 1280797 - RNA, 13 nt, Human
uugaaaaagcgaa

SEQ ID NO: 1280798 - RNA, 15 nt, Human
uugaaaaaguuuguu

SEQ ID NO: 1280799 - RNA, 18 nt, Human
uucuuuccacagaagcuc

SEQ ID NO: 1280800 - RNA, 14 nt, Human
uucuuucauuucuu

SEQ ID NO: 1280801 - RNA, 13 nt, Human
uugaaaaaaaaua

SEQ ID NO: 1280802 - RNA, 20 nt, Human
uugaaaaaauagagccugag

SEQ ID NO: 1280803 - RNA, 15 nt, Human
uucuuuaaaauuaca

SEQ ID NO: 1280804 - RNA, 20 nt, Human
uucuuuaaaauguaaagcca

SEQ ID NO: 1280805 - RNA, 23 nt, Human
uucuuuaaaaaacaacuauggau

SEQ ID NO: 1280806 - RNA, 14 nt, Human
uucuuccucagcca

SEQ ID NO: 1280807 - RNA, 16 nt, Human
uucuuccucagccagc

SEQ ID NO: 1280808 - RNA, 20 nt, Human
uucuuccucagccagccucg

SEQ ID NO: 1280809 - RNA, 17 nt, Human
uucuuccucagccagcc

SEQ ID NO: 1280810 - RNA, 14 nt, Human
uucuuguuggugca

SEQ ID NO: 1280811 - RNA, 17 nt, Human
uucuuguuggugcacag

SEQ ID NO: 1280812 - RNA, 13 nt, Human
uucuuccaucuga

SEQ ID NO: 1280813 - RNA, 14 nt, Human
uucuuccaucugau

SEQ ID NO: 1280814 - RNA, 15 nt, Human
uucuuccggccccuc

SEQ ID NO: 1280815 - RNA, 18 nt, Human
uucuuccuaccaagucaa

SEQ ID NO: 1280816 - RNA, 12 nt, Human
uucuuccucagc

SEQ ID NO: 1280817 - RNA, 13 nt, Human
uucuuccucagcc

SEQ ID NO: 1280818 - RNA, 20 nt, Human
uucugcuggccucugcgagu

SEQ ID NO: 1280819 - RNA, 16 nt, Human
uucugcuccuucccca

SEQ ID NO: 1280820 - RNA, 17 nt, Human
uucugcucugguuguuu

SEQ ID NO: 1280821 - RNA, 21 nt, Human
uucugcucugguuguuucugu

SEQ ID NO: 1280822 - RNA, 22 nt, Human
uucugcucugguuguuucuguu

SEQ ID NO: 1280823 - RNA, 23 nt, Human
uucugcucugguuguuucuguuc

SEQ ID NO: 1280824 - RNA, 15 nt, Human
uucugcuggccucug

SEQ ID NO: 1280825 - RNA, 18 nt, Human
uucugcuggccucugcga

SEQ ID NO: 1280826 - RNA, 20 nt, Human
uucugcuggggccugggaca

SEQ ID NO: 1280827 - RNA, 21 nt, Human
uucugcuggggccugggacaa

SEQ ID NO: 1280828 - RNA, 18 nt, Human
uucugcuuuccucuuccu

SEQ ID NO: 1280829 - RNA, 14 nt, Human
uucugcuuugcucu

SEQ ID NO: 1280830 - RNA, 15 nt, Human
uucugcuuuaaaaau

SEQ ID NO: 1280831 - RNA, 17 nt, Human
uucuggaauacaugaaa

SEQ ID NO: 1280832 - RNA, 19 nt, Human
uucuggaauacaugaaaua

SEQ ID NO: 1280833 - RNA, 15 nt, Human
uucuggaauguaauc

SEQ ID NO: 1280834 - RNA, 16 nt, Human
uucuggaauguaauca

SEQ ID NO: 1280835 - RNA, 20 nt, Human
uucuggaauguaaucaaugu

SEQ ID NO: 1280836 - RNA, 22 nt, Human
uucuggaauguaaucaauguuu

SEQ ID NO: 1280837 - RNA, 19 nt, Human
uucuggacccguucaacuu

SEQ ID NO: 1280838 - RNA, 15 nt, Human
uucuggaccucuggg

SEQ ID NO: 1280839 - RNA, 18 nt, Human
uucuggaccucuggguug

SEQ ID NO: 1280840 - RNA, 16 nt, Human
uucuggaccucugggu

SEQ ID NO: 1280841 - RNA, 17 nt, Human
uucuggaccucuggguu

SEQ ID NO: 1280842 - RNA, 15 nt, Human
uucuggcagaggagg

SEQ ID NO: 1280843 - RNA, 21 nt, Human
uucuggauuccccaucucagg

SEQ ID NO: 1280844 - RNA, 23 nt, Human
uucuggauggauuuuauaggaaa

SEQ ID NO: 1280845 - RNA, 21 nt, Human
uucugucccuagguguuuugu

SEQ ID NO: 1280846 - RNA, 13 nt, Human
uucugucccuagg

SEQ ID NO: 1280847 - RNA, 17 nt, Human
uucugucuucuacagau

SEQ ID NO: 1280848 - RNA, 18 nt, Human
uucugugguuucauguua

SEQ ID NO: 1280849 - RNA, 22 nt, Human
uucugugguuucauguuaguua

SEQ ID NO: 1280850 - RNA, 12 nt, Human
uucugugucuuu

SEQ ID NO: 1280851 - RNA, 22 nt, Human
uucugugucuuucacagcuccu

SEQ ID NO: 1280852 - RNA, 23 nt, Human
uucugugucuuucacagcuccuc

SEQ ID NO: 1280853 - RNA, 18 nt, Human
uugaauuuugaugaacaa

SEQ ID NO: 1280854 - RNA, 12 nt, Human
uugaauuuuaca

SEQ ID NO: 1280855 - RNA, 17 nt, Human
uugaauuucacugucuu

SEQ ID NO: 1280856 - RNA, 18 nt, Human
uugacaaaggcaagcacu

SEQ ID NO: 1280857 - RNA, 16 nt, Human
uugacaaccaugagac

SEQ ID NO: 1280858 - RNA, 18 nt, Human
uugacaacuggcaggcag

SEQ ID NO: 1280859 - RNA, 21 nt, Human
uugacaaaauguuauuucccu

SEQ ID NO: 1280860 - RNA, 20 nt, Human
uugacaaaauguuauuuccc

SEQ ID NO: 1280861 - RNA, 19 nt, Human
uugacaaaauguuauuucc

SEQ ID NO: 1280862 - RNA, 14 nt, Human
uugacaaaauguua

SEQ ID NO: 1280863 - RNA, 19 nt, Human
uugaauuuuuuuuaacauu

SEQ ID NO: 1280864 - RNA, 22 nt, Human
uugaauuuuuuuuaacauuccu

SEQ ID NO: 1280865 - RNA, 17 nt, Human
uugaacuccugaccuca

SEQ ID NO: 1280866 - RNA, 13 nt, Human
uugaacugauuca

SEQ ID NO: 1280867 - RNA, 17 nt, Human
uugacccacaagaaaug

SEQ ID NO: 1280868 - RNA, 16 nt, Human
uugacccuugcuguga

SEQ ID NO: 1280869 - RNA, 20 nt, Human
uugaccgcgacuaauuucaa

SEQ ID NO: 1280870 - RNA, 13 nt, Human
uugacucaggagc

SEQ ID NO: 1280871 - RNA, 14 nt, Human
uugacucaggagcc

SEQ ID NO: 1280872 - RNA, 20 nt, Human
uugacucaggagccugugac

SEQ ID NO: 1280873 - RNA, 15 nt, Human
uugacucuuuugcca

SEQ ID NO: 1280874 - RNA, 21 nt, Human
uugacucuuuugccauuaaac

SEQ ID NO: 1280875 - RNA, 14 nt, Human
uugaugaagaaguu

SEQ ID NO: 1280876 - RNA, 23 nt, Human
uugaugaagaaguugauaugccu

SEQ ID NO: 1280877 - RNA, 22 nt, Human
uugauauagaaguauaaagaau

SEQ ID NO: 1280878 - RNA, 20 nt, Human
uugauauagaaguauaaaga

SEQ ID NO: 1280879 - RNA, 20 nt, Human
uugaugaccaaaguccuuuu

SEQ ID NO: 1280880 - RNA, 15 nt, Human
uugaggucucagccc

SEQ ID NO: 1280881 - RNA, 18 nt, Human
uugauauagaaguauaaa

SEQ ID NO: 1280882 - RNA, 13 nt, Human
uugaggucucagc

SEQ ID NO: 1280883 - RNA, 17 nt, Human
uugaugacccccaacca

SEQ ID NO: 1280884 - RNA, 12 nt, Human
uugauucugcag

SEQ ID NO: 1280885 - RNA, 20 nt, Human
uugauucugcaguaaaucuu

SEQ ID NO: 1280886 - RNA, 13 nt, Human
uugauugauuuga

SEQ ID NO: 1280887 - RNA, 14 nt, Human
uugauugauuugaa

SEQ ID NO: 1280888 - RNA, 13 nt, Human
uugauuugaagaa

SEQ ID NO: 1280889 - RNA, 14 nt, Human
uugauuugaagaac

SEQ ID NO: 1280890 - RNA, 12 nt, Human
uugcaaaucuug

SEQ ID NO: 1280891 - RNA, 15 nt, Human
uugcaaaucuugaaa

SEQ ID NO: 1280892 - RNA, 16 nt, Human
uugcaaaucuugaaau

SEQ ID NO: 1280893 - RNA, 17 nt, Human
uugcaaaucuugaaauu

SEQ ID NO: 1280894 - RNA, 15 nt, Human
uugcaccuuucuagu

SEQ ID NO: 1280895 - RNA, 18 nt, Human
uugauuugaagaacaugu

SEQ ID NO: 1280896 - RNA, 13 nt, Human
uugauuugcauug

SEQ ID NO: 1280897 - RNA, 14 nt, Human
uugauuugcauuga

SEQ ID NO: 1280898 - RNA, 15 nt, Human
uugauuugcauugaa

SEQ ID NO: 1280899 - RNA, 17 nt, Human
uugauuugcauugaaca

SEQ ID NO: 1280900 - RNA, 19 nt, Human
uugauuugcauugaacaca

SEQ ID NO: 1280901 - RNA, 20 nt, Human
uugauuuuagccuucucugu

SEQ ID NO: 1280902 - RNA, 13 nt, Human
uugcaaagaaaga

SEQ ID NO: 1280903 - RNA, 19 nt, Human
uugcaaagaaagaaaaaaa

SEQ ID NO: 1280904 - RNA, 15 nt, Human
uugcaaagaaagaaa

SEQ ID NO: 1280905 - RNA, 16 nt, Human
uuauauuaugaagcuu

SEQ ID NO: 1280906 - RNA, 17 nt, Human
uuauauuaaccagauau

SEQ ID NO: 1280907 - RNA, 16 nt, Human
uuauauguaccguagg

SEQ ID NO: 1280908 - RNA, 14 nt, Human
uuauauguaccgua

SEQ ID NO: 1280909 - RNA, 19 nt, Human
uuauauguacccucugaaa

SEQ ID NO: 1280910 - RNA, 22 nt, Human
uuauauguacccucugaaauac

SEQ ID NO: 1280911 - RNA, 24 nt, Human
uuauauguacccucugaaauacau

SEQ ID NO: 1280912 - RNA, 14 nt, Human
uuauauggaaauuc

SEQ ID NO: 1280913 - RNA, 13 nt, Human
uuauauggaaauu

SEQ ID NO: 1280914 - RNA, 16 nt, Human
uuauauguacaugaga

SEQ ID NO: 1280915 - RNA, 19 nt, Human
uuauauguacaugagaagg

SEQ ID NO: 1280916 - RNA, 18 nt, Human
uuauauguuguaagcaac

SEQ ID NO: 1280917 - RNA, 18 nt, Human
uuauauguuguaauauuu

SEQ ID NO: 1280918 - RNA, 15 nt, Human
uuauauguuguucuu

SEQ ID NO: 1280919 - RNA, 13 nt, Human
uuauaugcuuacu

SEQ ID NO: 1280920 - RNA, 19 nt, Human
uuauaugcuuacugauaua

SEQ ID NO: 1280921 - RNA, 10 nt, Human
uuauauggaa

SEQ ID NO: 1280922 - RNA, 15 nt, Human
uuauauggaaauaua

SEQ ID NO: 1280923 - RNA, 18 nt, Human
uuauauggaaauauauau

SEQ ID NO: 1280924 - RNA, 19 nt, Human
uuauauggaaauauauauu

SEQ ID NO: 1280925 - RNA, 20 nt, Human
uuauauggaaauauauauua

SEQ ID NO: 1280926 - RNA, 22 nt, Human
uuauauggaaauauauauuaua

SEQ ID NO: 1280927 - RNA, 15 nt, Human
uuauaugaagaaaau

SEQ ID NO: 1280928 - RNA, 19 nt, Human
uuauaugaagaaaaucacu

SEQ ID NO: 1280929 - RNA, 16 nt, Human
uuauaucuggccucug

SEQ ID NO: 1280930 - RNA, 17 nt, Human
uuauauccugacaagau

SEQ ID NO: 1280931 - RNA, 16 nt, Human
uuauaauuuugugaag

SEQ ID NO: 1280932 - RNA, 17 nt, Human
uuauaauuuugugaagc

SEQ ID NO: 1280933 - RNA, 18 nt, Human
uuauaauuuugugaagca

SEQ ID NO: 1280934 - RNA, 14 nt, Human
uuauaauuuuccua

SEQ ID NO: 1280935 - RNA, 16 nt, Human
uuauaauuuuccuaau

SEQ ID NO: 1280936 - RNA, 13 nt, Human
uuauacacugugu

SEQ ID NO: 1280937 - RNA, 20 nt, Human
uuauacacuguguaaauacc

SEQ ID NO: 1280938 - RNA, 19 nt, Human
uuauaucuauauuuuacau

SEQ ID NO: 1280939 - RNA, 23 nt, Human
uuauaucuauauuuuacauaaau

SEQ ID NO: 1280940 - RNA, 16 nt, Human
uuauauauuuaaaagu

SEQ ID NO: 1280941 - RNA, 17 nt, Human
uuauauauuauauggaa

SEQ ID NO: 1280942 - RNA, 13 nt, Human
uuauacagcugua

SEQ ID NO: 1280943 - RNA, 15 nt, Human
uuauacagcuguauu

SEQ ID NO: 1280944 - RNA, 21 nt, Human
uuauacagcuguauugucuga

SEQ ID NO: 1280945 - RNA, 13 nt, Human
uuauauauuauau

SEQ ID NO: 1280946 - RNA, 16 nt, Human
uuauauauuauaugga

SEQ ID NO: 1280947 - RNA, 19 nt, Human
uuauauauuauauggaaau

SEQ ID NO: 1280948 - RNA, 12 nt, Human
uuauaauuuuaa

SEQ ID NO: 1280949 - RNA, 17 nt, Human
uuauaauucucauuaaa

SEQ ID NO: 1280950 - RNA, 14 nt, Human
uuauaauucuuuca

SEQ ID NO: 1280951 - RNA, 21 nt, Human
uuauaauucuuucaauacaga

SEQ ID NO: 1280952 - RNA, 23 nt, Human
uuauaauucuuucaauacagaua

SEQ ID NO: 1280953 - RNA, 12 nt, Human
uuauaauuuaaa

SEQ ID NO: 1280954 - RNA, 21 nt, Human
uuauaauuuuaaauguuuuuu

SEQ ID NO: 1280955 - RNA, 17 nt, Human
uuauaauuuuaaauguu

SEQ ID NO: 1280956 - RNA, 14 nt, Human
uuauaauuuuguga

SEQ ID NO: 1280957 - RNA, 15 nt, Human
uuauaauuuugugaa

SEQ ID NO: 1280958 - RNA, 11 nt, Human
uuauaaucuuu

SEQ ID NO: 1280959 - RNA, 18 nt, Human
uuauaaucuuauaauugu

SEQ ID NO: 1280960 - RNA, 14 nt, Human
uuauaauucucauu

SEQ ID NO: 1280961 - RNA, 21 nt, Human
uuauaauaaaggacuguaauc

SEQ ID NO: 1280962 - RNA, 13 nt, Human
uuauaauauacua

SEQ ID NO: 1280963 - RNA, 18 nt, Human
uuauaauauuuuaaugua

SEQ ID NO: 1280964 - RNA, 19 nt, Human
uuauaauaaaggacuguaa

SEQ ID NO: 1280965 - RNA, 18 nt, Human
uuauaauaaaggacugua

SEQ ID NO: 1280966 - RNA, 18 nt, Human
uuauaagggcaaauugga

SEQ ID NO: 1280967 - RNA, 20 nt, Human
ugucuuuucccauuuaucua

SEQ ID NO: 1280968 - RNA, 19 nt, Human
ugucuuuucccauuuaucu

SEQ ID NO: 1280969 - RNA, 19 nt, Human
uuagugaccucagcuuuga

SEQ ID NO: 1280970 - RNA, 15 nt, Human
uuagugacuaaacca

SEQ ID NO: 1280971 - RNA, 17 nt, Human
uuagugacuaaaccauu

SEQ ID NO: 1280972 - RNA, 23 nt, Human
uuagugacuaaaccauugugcau

SEQ ID NO: 1280973 - RNA, 18 nt, Human
uuagugccacuuaaugua

SEQ ID NO: 1280974 - RNA, 19 nt, Human
uuagugccacuuaauguau

SEQ ID NO: 1280975 - RNA, 22 nt, Human
uuauaagggcaaauuggagaaa

SEQ ID NO: 1280976 - RNA, 22 nt, Human
uuauaagcaucauuauuuaugu

SEQ ID NO: 1280977 - RNA, 21 nt, Human
uuauaagcaucauuauuuaug

SEQ ID NO: 1280978 - RNA, 18 nt, Human
uuauaaguagcaggccaa

SEQ ID NO: 1280979 - RNA, 15 nt, Human
uuauaagaaagccug

SEQ ID NO: 1280980 - RNA, 16 nt, Human
uuauaagaaagccuga

SEQ ID NO: 1280981 - RNA, 12 nt, Human
uuauaagacucu

SEQ ID NO: 1280982 - RNA, 13 nt, Human
uuauaagacucuc

SEQ ID NO: 1280983 - RNA, 20 nt, Human
uuauaagacucucacacuca

SEQ ID NO: 1280984 - RNA, 14 nt, Human
uuauaagacucuca

SEQ ID NO: 1280985 - RNA, 13 nt, Human
uuauaagcaucau

SEQ ID NO: 1280986 - RNA, 17 nt, Human
uuauaagcaucauuauu

SEQ ID NO: 1280987 - RNA, 19 nt, Human
uuauaagcaucauuauuua

SEQ ID NO: 1280988 - RNA, 16 nt, Human
uuaguggcucaacauu

SEQ ID NO: 1280989 - RNA, 20 nt, Human
uuaguggcucaacauugugu

SEQ ID NO: 1280990 - RNA, 23 nt, Human
uuaguggcucaacauuguguucc

SEQ ID NO: 1280991 - RNA, 13 nt, Human
uuaguguauccau

SEQ ID NO: 1280992 - RNA, 18 nt, Human
uuaguguaugauuacugg

SEQ ID NO: 1280993 - RNA, 19 nt, Human
uuauuacaguguuuauccu

SEQ ID NO: 1280994 - RNA, 12 nt, Human
uuauuacagugu

SEQ ID NO: 1280995 - RNA, 13 nt, Human
uuauuacaguguu

SEQ ID NO: 1280996 - RNA, 14 nt, Human
uuauuaauaaacau

SEQ ID NO: 1280997 - RNA, 15 nt, Human
uuauuaauaaacauu

SEQ ID NO: 1280998 - RNA, 20 nt, Human
uuauuaauauauauuaucuu

SEQ ID NO: 1280999 - RNA, 19 nt, Human
uuauuaauauauauuaucu

SEQ ID NO: 1281000 - RNA, 16 nt, Human
uuauuacuguaagaaa

SEQ ID NO: 1281001 - RNA, 23 nt, Human
uuauuacguaugucugguucuca

SEQ ID NO: 1281002 - RNA, 15 nt, Human
uuauuacuuguaaau

SEQ ID NO: 1281003 - RNA, 14 nt, Human
uuauuacuuuugcu

SEQ ID NO: 1281004 - RNA, 16 nt, Human
uuauuacuuguaaaua

SEQ ID NO: 1281005 - RNA, 18 nt, Human
uuauuacuuguaaauaua

SEQ ID NO: 1281006 - RNA, 20 nt, Human
uuauuacuuguaaauauaaa

SEQ ID NO: 1281007 - RNA, 18 nt, Human
uuauuagaaucaaacauu

SEQ ID NO: 1281008 - RNA, 18 nt, Human
uuauuacguaugucuggu

SEQ ID NO: 1281009 - RNA, 21 nt, Human
uuauuacguaugucugguucu

SEQ ID NO: 1281010 - RNA, 22 nt, Human
uuauguuuucgaaaaucaaaug

SEQ ID NO: 1281011 - RNA, 16 nt, Human
uuauuaacaauuaggc

SEQ ID NO: 1281012 - RNA, 19 nt, Human
uuauuaacaauuaggcaga

SEQ ID NO: 1281013 - RNA, 18 nt, Human
uuauuaacauaggugaaa

SEQ ID NO: 1281014 - RNA, 21 nt, Human
uuauuaacgauguccaacccg

SEQ ID NO: 1281015 - RNA, 15 nt, Human
uuauuaacuuuaaug

SEQ ID NO: 1281016 - RNA, 18 nt, Human
uuaugauuuuuuuuucau

SEQ ID NO: 1281017 - RNA, 19 nt, Human
uuaugauuuuuuuuucaua

SEQ ID NO: 1281018 - RNA, 15 nt, Human
uuaugcaaaagcaag

SEQ ID NO: 1281019 - RNA, 21 nt, Human
uuaugcaaaagcaagcugauu

SEQ ID NO: 1281020 - RNA, 17 nt, Human
uuaugcaaaagcaagcu

SEQ ID NO: 1281021 - RNA, 14 nt, Human
uuauggaauugauu

SEQ ID NO: 1281022 - RNA, 19 nt, Human
uuauggaauugauuugcau

SEQ ID NO: 1281023 - RNA, 20 nt, Human
uuauggaauugauuugcauu

SEQ ID NO: 1281024 - RNA, 21 nt, Human
uuauggaauugauuugcauug

SEQ ID NO: 1281025 - RNA, 23 nt, Human
uuauggaauugauuugcauugaa

SEQ ID NO: 1281026 - RNA, 18 nt, Human
uuauggagucauuuuuac

SEQ ID NO: 1281027 - RNA, 19 nt, Human
uuauggagucauuuuuaca

SEQ ID NO: 1281028 - RNA, 17 nt, Human
uuauguugcauagaaua

SEQ ID NO: 1281029 - RNA, 16 nt, Human
uuauauuuacaaaugg

SEQ ID NO: 1281030 - RNA, 17 nt, Human
uuauauuguucacuucu

SEQ ID NO: 1281031 - RNA, 15 nt, Human
uuauauuguucacuu

SEQ ID NO: 1281032 - RNA, 17 nt, Human
uuauauugauaagaucu

SEQ ID NO: 1281033 - RNA, 20 nt, Human
uuauauuuauuacuguaaga

SEQ ID NO: 1281034 - RNA, 13 nt, Human
uuauauuuaacuc

SEQ ID NO: 1281035 - RNA, 12 nt, Human
uuauauuugaaa

SEQ ID NO: 1281036 - RNA, 11 nt, Human
uuauauuucau

SEQ ID NO: 1281037 - RNA, 13 nt, Human
uuauauuugaaau

SEQ ID NO: 1281038 - RNA, 15 nt, Human
uuauauuugaaauau

SEQ ID NO: 1281039 - RNA, 22 nt, Human
uuauauuucuauuuuauuauga

SEQ ID NO: 1281040 - RNA, 16 nt, Human
uuauccuccaccgucu

SEQ ID NO: 1281041 - RNA, 11 nt, Human
uuauccucccu

SEQ ID NO: 1281042 - RNA, 13 nt, Human
uuauccucccugu

SEQ ID NO: 1281043 - RNA, 18 nt, Human
uuauccucccuguaacuu

SEQ ID NO: 1281044 - RNA, 14 nt, Human
uuauccucccugua

SEQ ID NO: 1281045 - RNA, 17 nt, Human
uuauccugaaauuucag

SEQ ID NO: 1281046 - RNA, 16 nt, Human
uuauccugaaauuuca

SEQ ID NO: 1281047 - RNA, 15 nt, Human
uuauccuuucauaua

SEQ ID NO: 1281048 - RNA, 14 nt, Human
uuaucgaaacucau

SEQ ID NO: 1281049 - RNA, 14 nt, Human
uuaucuugaauaau

SEQ ID NO: 1281050 - RNA, 20 nt, Human
uuaucuucaggacacucacu

SEQ ID NO: 1281051 - RNA, 18 nt, Human
uuaucuucucaaguucua

SEQ ID NO: 1281052 - RNA, 22 nt, Human
uuaucuucucaaguucuaagau

SEQ ID NO: 1281053 - RNA, 19 nt, Human
uuaucuucucaaguucuaa

SEQ ID NO: 1281054 - RNA, 16 nt, Human
uuaucuugaauaaugu

SEQ ID NO: 1281055 - RNA, 14 nt, Human
uuaugauuagcuuu

SEQ ID NO: 1281056 - RNA, 20 nt, Human
uuaucuguuugagaaaguca

SEQ ID NO: 1281057 - RNA, 16 nt, Human
uuaucuguuugagaaa

SEQ ID NO: 1281058 - RNA, 16 nt, Human
uuaucuuaaaacuccu

SEQ ID NO: 1281059 - RNA, 18 nt, Human
uuaucuauagcuaaguac

SEQ ID NO: 1281060 - RNA, 19 nt, Human
uuaucuacuuccaaacuaa

SEQ ID NO: 1281061 - RNA, 20 nt, Human
uuaucuacuuccaaacuaau

SEQ ID NO: 1281062 - RNA, 18 nt, Human
uuaucuaaucaugaaacu

SEQ ID NO: 1281063 - RNA, 22 nt, Human
uuaucuaaucaugaaacucccu

SEQ ID NO: 1281064 - RNA, 11 nt, Human
uuaucuaauuu

SEQ ID NO: 1281065 - RNA, 16 nt, Human
uuaucuaauuuauaaa

SEQ ID NO: 1281066 - RNA, 17 nt, Human
uuaucuaauuuauaaaa

SEQ ID NO: 1281067 - RNA, 18 nt, Human
uuaucguuuucuuaaagu

SEQ ID NO: 1281068 - RNA, 16 nt, Human
uuaucguuuucuuaaa

SEQ ID NO: 1281069 - RNA, 21 nt, Human
uuaucuaaguuaauuuaaagu

SEQ ID NO: 1281070 - RNA, 23 nt, Human
uucaaauuguaagcaugcacaaa

SEQ ID NO: 1281071 - RNA, 18 nt, Human
uucaaauguauuacagug

SEQ ID NO: 1281072 - RNA, 16 nt, Human
uucaaauucuucugaa

SEQ ID NO: 1281073 - RNA, 19 nt, Human
uucaaauucuucugaacuc

SEQ ID NO: 1281074 - RNA, 16 nt, Human
uucaacagugaagaca

SEQ ID NO: 1281075 - RNA, 18 nt, Human
uucaacagugaagacaga

SEQ ID NO: 1281076 - RNA, 19 nt, Human
uucaacagugaagacagaa

SEQ ID NO: 1281077 - RNA, 15 nt, Human
uucaaccauucccca

SEQ ID NO: 1281078 - RNA, 17 nt, Human
uucaacauguuauuugu

SEQ ID NO: 1281079 - RNA, 21 nt, Human
uucaacauguuauuuguaaua

SEQ ID NO: 1281080 - RNA, 18 nt, Human
uuauuuucaagaaacuga

SEQ ID NO: 1281081 - RNA, 13 nt, Human
uuauuuucaagaa

SEQ ID NO: 1281082 - RNA, 17 nt, Human
uuauuuucaaaaccagg

SEQ ID NO: 1281083 - RNA, 12 nt, Human
uuauuuugcaac

SEQ ID NO: 1281084 - RNA, 22 nt, Human
uuauuuugccaagggcauaaau

SEQ ID NO: 1281085 - RNA, 22 nt, Human
uuauuuugugaugcaaauaaau

SEQ ID NO: 1281086 - RNA, 19 nt, Human
uuauuuuaauaauguuuca

SEQ ID NO: 1281087 - RNA, 19 nt, Human
uuauuuguugagaguguga

SEQ ID NO: 1281088 - RNA, 12 nt, Human
uuauuuguugag

SEQ ID NO: 1281089 - RNA, 14 nt, Human
uuauuuguugagag

SEQ ID NO: 1281090 - RNA, 22 nt, Human
uuauuuguguuuuaauuuaaac

SEQ ID NO: 1281091 - RNA, 20 nt, Human
uuauuuuaauaauguuucaa

SEQ ID NO: 1281092 - RNA, 20 nt, Human
uuauuugagaagcugcucaa

SEQ ID NO: 1281093 - RNA, 13 nt, Human
uuauuugcaugug

SEQ ID NO: 1281094 - RNA, 11 nt, Human
uuauuugcaua

SEQ ID NO: 1281095 - RNA, 18 nt, Human
uuauuuggaaccuuguuu

SEQ ID NO: 1281096 - RNA, 23 nt, Human
uuauuuggaaccuuguuuuggac

SEQ ID NO: 1281097 - RNA, 12 nt, Human
uuauuuguaaua

SEQ ID NO: 1281098 - RNA, 16 nt, Human
uuauuuguaauagaug

SEQ ID NO: 1281099 - RNA, 17 nt, Human
uuauuuguaauagaugu

SEQ ID NO: 1281100 - RNA, 18 nt, Human
uuauuuguaauagauguu

SEQ ID NO: 1281101 - RNA, 18 nt, Human
uuauuugagaagcugcuc

SEQ ID NO: 1281102 - RNA, 12 nt, Human
uuauuugagaag

SEQ ID NO: 1281103 - RNA, 20 nt, Human
uuauuagaaucaaacauuuu

SEQ ID NO: 1281104 - RNA, 21 nt, Human
uuauuagaaucaaacauuuug

SEQ ID NO: 1281105 - RNA, 21 nt, Human
uuauuagagauuaccuccuga

SEQ ID NO: 1281106 - RNA, 17 nt, Human
uuauuagagugucuuuc

SEQ ID NO: 1281107 - RNA, 19 nt, Human
uucacgccugaggcaauua

SEQ ID NO: 1281108 - RNA, 22 nt, Human
uucacaagacccaaaaggcaga

SEQ ID NO: 1281109 - RNA, 21 nt, Human
uucacaaccuucuguggcuca

SEQ ID NO: 1281110 - RNA, 18 nt, Human
uucaccuaccgaguucaa

SEQ ID NO: 1281111 - RNA, 15 nt, Human
uucaauaagagauua

SEQ ID NO: 1281112 - RNA, 12 nt, Human
uucaauacagau

SEQ ID NO: 1281113 - RNA, 14 nt, Human
uucaauacagauau

SEQ ID NO: 1281114 - RNA, 16 nt, Human
uucaauacagauauau

SEQ ID NO: 1281115 - RNA, 17 nt, Human
uucaauacagauauauu

SEQ ID NO: 1281116 - RNA, 18 nt, Human
uucaauacagauauauuu

SEQ ID NO: 1281117 - RNA, 17 nt, Human
uucaauagcacauaugg

SEQ ID NO: 1281118 - RNA, 14 nt, Human
uucaauagccacua

SEQ ID NO: 1281119 - RNA, 15 nt, Human
uucaauagccacuaa

SEQ ID NO: 1281120 - RNA, 23 nt, Human
uucaauagccacuaaccuugccu

SEQ ID NO: 1281121 - RNA, 17 nt, Human
uucaauagccacuaacc

SEQ ID NO: 1281122 - RNA, 18 nt, Human
uucaauauaagcuuuucu

SEQ ID NO: 1281123 - RNA, 19 nt, Human
uucaauauaagcuuuucuu

SEQ ID NO: 1281124 - RNA, 16 nt, Human
uucacaaacuuuuaua

SEQ ID NO: 1281125 - RNA, 17 nt, Human
uucacaaacuuuuauac

SEQ ID NO: 1281126 - RNA, 22 nt, Human
uucacaaacuuuuauacucuuu

SEQ ID NO: 1281127 - RNA, 22 nt, Human
uucacaacagccugacaacauu

SEQ ID NO: 1281128 - RNA, 16 nt, Human
uucaugcauggaaauu

SEQ ID NO: 1281129 - RNA, 15 nt, Human
uucaugcauggaaau

SEQ ID NO: 1281130 - RNA, 21 nt, Human
uucaugccaauuagcaauuga

SEQ ID NO: 1281131 - RNA, 17 nt, Human
uucaucuucaguugucu

SEQ ID NO: 1281132 - RNA, 14 nt, Human
uucaugcauggaaa

SEQ ID NO: 1281133 - RNA, 17 nt, Human
uucaucuggaaccauca

SEQ ID NO: 1281134 - RNA, 19 nt, Human
uucaucuggcaacaucuuu

SEQ ID NO: 1281135 - RNA, 23 nt, Human
uucaucuggaaccaucagaaaca

SEQ ID NO: 1281136 - RNA, 12 nt, Human
uucaucuggaac

SEQ ID NO: 1281137 - RNA, 20 nt, Human
uucaugcuguucaugaaaga

SEQ ID NO: 1281138 - RNA, 21 nt, Human
uucaugccagcuacuuccucc

SEQ ID NO: 1281139 - RNA, 22 nt, Human
uucaugccagcuacuuccuccu

SEQ ID NO: 1281140 - RNA, 17 nt, Human
uucaugcuaucucugug

SEQ ID NO: 1281141 - RNA, 18 nt, Human
uucaugcuaucucugugu

SEQ ID NO: 1281142 - RNA, 22 nt, Human
uuccaaagaguagaauugcauu

SEQ ID NO: 1281143 - RNA, 22 nt, Human
uuccaaaaauuacuuaguauug

SEQ ID NO: 1281144 - RNA, 14 nt, Human
uuccaaagucucua

SEQ ID NO: 1281145 - RNA, 16 nt, Human
uuccaaagucucuaau

SEQ ID NO: 1281146 - RNA, 17 nt, Human
uuccaaagucucuaauu

SEQ ID NO: 1281147 - RNA, 20 nt, Human
uuccaacaagaagggacuga

SEQ ID NO: 1281148 - RNA, 18 nt, Human
uuccagauccuggaaauc

SEQ ID NO: 1281149 - RNA, 19 nt, Human
uuccagaggcuauuauuuu

SEQ ID NO: 1281150 - RNA, 20 nt, Human
uuccagaggcuauuauuuuc

SEQ ID NO: 1281151 - RNA, 16 nt, Human
uuccagaccugaagaa

SEQ ID NO: 1281152 - RNA, 17 nt, Human
uuccagaccugaagaau

SEQ ID NO: 1281153 - RNA, 23 nt, Human
uuccagacugcuuccaauuuucu

SEQ ID NO: 1281154 - RNA, 18 nt, Human
uuccaacuacuaauagaa

SEQ ID NO: 1281155 - RNA, 20 nt, Human
uuccagaagugugacuggcu

SEQ ID NO: 1281156 - RNA, 14 nt, Human
uuccagaaugcugu

SEQ ID NO: 1281157 - RNA, 15 nt, Human
uuccagaaugcugua

SEQ ID NO: 1281158 - RNA, 16 nt, Human
uuccagaaugcuguac

SEQ ID NO: 1281159 - RNA, 18 nt, Human
uuccagaaugcuguacau

SEQ ID NO: 1281160 - RNA, 19 nt, Human
uuccagaaugcuguacauc

SEQ ID NO: 1281161 - RNA, 14 nt, Human
uuccagaccugaag

SEQ ID NO: 1281162 - RNA, 19 nt, Human
uuccagauccuggaaauca

SEQ ID NO: 1281163 - RNA, 21 nt, Human
uuccauauggauccacuggcu

SEQ ID NO: 1281164 - RNA, 19 nt, Human
uuccauauggauccacugg

SEQ ID NO: 1281165 - RNA, 18 nt, Human
uuccauauggauccacug

SEQ ID NO: 1281166 - RNA, 22 nt, Human
uuccauauggauccacuggcug

SEQ ID NO: 1281167 - RNA, 19 nt, Human
uuccauccaccuuucccaa

SEQ ID NO: 1281168 - RNA, 15 nt, Human
uuccauccauggcca

SEQ ID NO: 1281169 - RNA, 17 nt, Human
uuccauccauggccagc

SEQ ID NO: 1281170 - RNA, 18 nt, Human
uuccauccauggccagca

SEQ ID NO: 1281171 - RNA, 20 nt, Human
uuccauccauggccagcagc

SEQ ID NO: 1281172 - RNA, 18 nt, Human
uuccaugcguguuucuga

SEQ ID NO: 1281173 - RNA, 21 nt, Human
uuccaugcguguuucugacuc

SEQ ID NO: 1281174 - RNA, 20 nt, Human
uucauaaauaaaguuuguug

SEQ ID NO: 1281175 - RNA, 19 nt, Human
uucaguucuaggaaaauaa

SEQ ID NO: 1281176 - RNA, 16 nt, Human
uucaguucuaggaaaa

SEQ ID NO: 1281177 - RNA, 23 nt, Human
uucaguuauuauauuuacaaaug

SEQ ID NO: 1281178 - RNA, 12 nt, Human
uucaguguuaaa

SEQ ID NO: 1281179 - RNA, 18 nt, Human
uucaguguuaaaugugau

SEQ ID NO: 1281180 - RNA, 22 nt, Human
uucaguguuaaaugugaugaau

SEQ ID NO: 1281181 - RNA, 18 nt, Human
uucaucgaaucuacuaau

SEQ ID NO: 1281182 - RNA, 23 nt, Human
uucaucgaaucuacuaauuccac

SEQ ID NO: 1281183 - RNA, 20 nt, Human
uucaucgaaucuacuaauuc

SEQ ID NO: 1281184 - RNA, 14 nt, Human
uucaguggggcagu

SEQ ID NO: 1281185 - RNA, 17 nt, Human
uucagugguuccuucug

SEQ ID NO: 1281186 - RNA, 20 nt, Human
uucaguguauggaaauaaau

SEQ ID NO: 1281187 - RNA, 16 nt, Human
uucagcugucuuuugg

SEQ ID NO: 1281188 - RNA, 20 nt, Human
uucagcugucuuuuggagga

SEQ ID NO: 1281189 - RNA, 22 nt, Human
uucagcuucguuuauuuucaag

SEQ ID NO: 1281190 - RNA, 14 nt, Human
uuucacaaggucuu

SEQ ID NO: 1281191 - RNA, 23 nt, Human
uuucagauaucuuggacaaauca

SEQ ID NO: 1281192 - RNA, 16 nt, Human
uuucacaaccuucugu

SEQ ID NO: 1281193 - RNA, 23 nt, Human
uuucacaacagccugacaacauu

SEQ ID NO: 1281194 - RNA, 22 nt, Human
uuucacaaccuucuguggcuca

SEQ ID NO: 1281195 - RNA, 17 nt, Human
uuucacaaggucuuuaa

SEQ ID NO: 1281196 - RNA, 14 nt, Human
uuucaauagccacu

SEQ ID NO: 1281197 - RNA, 21 nt, Human
uuucaauagccacuaaccuug

SEQ ID NO: 1281198 - RNA, 13 nt, Human
uuucaagguucua

SEQ ID NO: 1281199 - RNA, 14 nt, Human
uuucaagguucuaa

SEQ ID NO: 1281200 - RNA, 16 nt, Human
uuucaagguucuaacc

SEQ ID NO: 1281201 - RNA, 22 nt, Human
uuucaaguuccaaguugcuaau

SEQ ID NO: 1281202 - RNA, 16 nt, Human
uuucaauacagauaua

SEQ ID NO: 1281203 - RNA, 15 nt, Human
uuucaauagcacaua

SEQ ID NO: 1281204 - RNA, 13 nt, Human
uuucaauagccac

SEQ ID NO: 1281205 - RNA, 11 nt, Human
uuucagugagg

SEQ ID NO: 1281206 - RNA, 21 nt, Human
uuucaguggggcagucauuau

SEQ ID NO: 1281207 - RNA, 15 nt, Human
uuucaguucuaggaa

SEQ ID NO: 1281208 - RNA, 23 nt, Human
uuucagcacuagccaaaccucac

SEQ ID NO: 1281209 - RNA, 22 nt, Human
uuucagcacuagccaaaccuca

SEQ ID NO: 1281210 - RNA, 18 nt, Human
uuucagcaagauaaacau

SEQ ID NO: 1281211 - RNA, 12 nt, Human
uuucagcacuag

SEQ ID NO: 1281212 - RNA, 20 nt, Human
uuucagcacuagccaaaccu

SEQ ID NO: 1281213 - RNA, 11 nt, Human
uuucagaugug

SEQ ID NO: 1281214 - RNA, 18 nt, Human
uuucagaugugaaccauu

SEQ ID NO: 1281215 - RNA, 20 nt, Human
uuucagauucccagagcaaa

SEQ ID NO: 1281216 - RNA, 18 nt, Human
uuucaguucuaggaaaau

SEQ ID NO: 1281217 - RNA, 14 nt, Human
uuucauugucugug

SEQ ID NO: 1281218 - RNA, 15 nt, Human
uuucauugucuguga

SEQ ID NO: 1281219 - RNA, 16 nt, Human
uuucauugucugugaa

SEQ ID NO: 1281220 - RNA, 19 nt, Human
uuucauuuagucaugugac

SEQ ID NO: 1281221 - RNA, 14 nt, Human
uuucauuuaucuau

SEQ ID NO: 1281222 - RNA, 19 nt, Human
uuuccaaccggcuuugugg

SEQ ID NO: 1281223 - RNA, 12 nt, Human
uuuccaacuacu

SEQ ID NO: 1281224 - RNA, 17 nt, Human
uuucauuuaucuauaau

SEQ ID NO: 1281225 - RNA, 18 nt, Human
uuuccaacuacuaauaga

SEQ ID NO: 1281226 - RNA, 19 nt, Human
uuuccaacuacuaauagaa

SEQ ID NO: 1281227 - RNA, 22 nt, Human
uuuauaauuuugugaagcaaaa

SEQ ID NO: 1281228 - RNA, 17 nt, Human
uuuauaauucucauuaa

SEQ ID NO: 1281229 - RNA, 17 nt, Human
uuuauaagcaucauuau

SEQ ID NO: 1281230 - RNA, 18 nt, Human
uuuauaagcaucauuauu

SEQ ID NO: 1281231 - RNA, 20 nt, Human
uuuauaagcaucauuauuua

SEQ ID NO: 1281232 - RNA, 21 nt, Human
uuuauaagcaucauuauuuau

SEQ ID NO: 1281233 - RNA, 23 nt, Human
uuuauaagcaucauuauuuaugu

SEQ ID NO: 1281234 - RNA, 22 nt, Human
uuuauaagcaucauuauuuaug

SEQ ID NO: 1281235 - RNA, 20 nt, Human
uuuauaauucucauuaaaag

SEQ ID NO: 1281236 - RNA, 15 nt, Human
uuuauaagaaagccu

SEQ ID NO: 1281237 - RNA, 23 nt, Human
uuuauaagaaagccugaguacuc

SEQ ID NO: 1281238 - RNA, 16 nt, Human
uuuauaagaaagccug

SEQ ID NO: 1281239 - RNA, 12 nt, Human
uuuauaagcauc

SEQ ID NO: 1281240 - RNA, 13 nt, Human
uuuauaagcauca

SEQ ID NO: 1281241 - RNA, 14 nt, Human
uuuauaagcaucau

SEQ ID NO: 1281242 - RNA, 16 nt, Human
uuuauaagcaucauua

SEQ ID NO: 1281243 - RNA, 21 nt, Human
uuuauggcagacauugugcua

SEQ ID NO: 1281244 - RNA, 20 nt, Human
uuuauggcagacauugugcu

SEQ ID NO: 1281245 - RNA, 19 nt, Human
uuuauuuaaugcuguggca

SEQ ID NO: 1281246 - RNA, 22 nt, Human
uuuauuuaacuuuuaguaaagu

SEQ ID NO: 1281247 - RNA, 22 nt, Human
uuuauuuaaaaaacuaaaaacu

SEQ ID NO: 1281248 - RNA, 17 nt, Human
uuuauuaugcauuauau

SEQ ID NO: 1281249 - RNA, 16 nt, Human
uuuauuaugcauuaua

SEQ ID NO: 1281250 - RNA, 14 nt, Human
uuuauucuucuaga

SEQ ID NO: 1281251 - RNA, 15 nt, Human
uuuauucuucuagag

SEQ ID NO: 1281252 - RNA, 16 nt, Human
uuuauucuucuagagu

SEQ ID NO: 1281253 - RNA, 18 nt, Human
uuuauucuucuagaguuc

SEQ ID NO: 1281254 - RNA, 20 nt, Human
uuuauugaauucauuucacu

SEQ ID NO: 1281255 - RNA, 12 nt, Human
uuuauugacaca

SEQ ID NO: 1281256 - RNA, 13 nt, Human
uuuauugacacag

SEQ ID NO: 1281257 - RNA, 14 nt, Human
uuuauugacacaga

SEQ ID NO: 1281258 - RNA, 15 nt, Human
uuuauugacacagaa

SEQ ID NO: 1281259 - RNA, 15 nt, Human
uuucaacgcagcccu

SEQ ID NO: 1281260 - RNA, 16 nt, Human
uuucaacgcagcccug

SEQ ID NO: 1281261 - RNA, 20 nt, Human
uuucaacgcagcccugcuuu

SEQ ID NO: 1281262 - RNA, 21 nt, Human
uuucaacgcagcccugcuuug

SEQ ID NO: 1281263 - RNA, 15 nt, Human
uuucaacggaaagug

SEQ ID NO: 1281264 - RNA, 23 nt, Human
uuucaacggaaagugcugucuua

SEQ ID NO: 1281265 - RNA, 19 nt, Human
uuucaagaaacugaggaau

SEQ ID NO: 1281266 - RNA, 17 nt, Human
uuucaagaaacugagga

SEQ ID NO: 1281267 - RNA, 23 nt, Human
uuucaagaauaaucacgcuuucc

SEQ ID NO: 1281268 - RNA, 23 nt, Human
uuucaagaggagcccccacccug

SEQ ID NO: 1281269 - RNA, 22 nt, Human
uuucaagcagucgugccugugu

SEQ ID NO: 1281270 - RNA, 23 nt, Human
uuucaagcagucgugccuguguc

SEQ ID NO: 1281271 - RNA, 11 nt, Human
uuucaaggaag

SEQ ID NO: 1281272 - RNA, 19 nt, Human
uuucaaggaaguagaaaca

SEQ ID NO: 1281273 - RNA, 15 nt, Human
uuucaaggcacucua

SEQ ID NO: 1281274 - RNA, 17 nt, Human
uuucaaggcacucuaga

SEQ ID NO: 1281275 - RNA, 18 nt, Human
uuucaaggcacucuagau

SEQ ID NO: 1281276 - RNA, 19 nt, Human
uuucaaggcacucuagauu

SEQ ID NO: 1281277 - RNA, 20 nt, Human
uuucaaggcacucuagauuc

SEQ ID NO: 1281278 - RNA, 21 nt, Human
uuucaaggcacucuagauucc

SEQ ID NO: 1281279 - RNA, 22 nt, Human
uuucaaggcacucuagauucca

SEQ ID NO: 1281280 - RNA, 13 nt, Human
uuuaccacuugug

SEQ ID NO: 1281281 - RNA, 23 nt, Human
uuuacauuuuauggugccuagua

SEQ ID NO: 1281282 - RNA, 12 nt, Human
uuuaccaaguuu

SEQ ID NO: 1281283 - RNA, 22 nt, Human
uuuacauuuuauggugccuagu

SEQ ID NO: 1281284 - RNA, 17 nt, Human
uuuacauuuuauggugc

SEQ ID NO: 1281285 - RNA, 13 nt, Human
uuuacauuuuaug

SEQ ID NO: 1281286 - RNA, 16 nt, Human
uuuacauuguugagcu

SEQ ID NO: 1281287 - RNA, 13 nt, Human
uuuacagaauuuu

SEQ ID NO: 1281288 - RNA, 16 nt, Human
uuuacagcugccugca

SEQ ID NO: 1281289 - RNA, 15 nt, Human
uuuacagcugccugc

SEQ ID NO: 1281290 - RNA, 14 nt, Human
uuuacagaauugcu

SEQ ID NO: 1281291 - RNA, 19 nt, Human
uuuacagaauugcuuguuu

SEQ ID NO: 1281292 - RNA, 14 nt, Human
uuuacaggaacuuc

SEQ ID NO: 1281293 - RNA, 18 nt, Human
uuuacaggaacuucauca

SEQ ID NO: 1281294 - RNA, 19 nt, Human
uuuacaggaacuucaucau

SEQ ID NO: 1281295 - RNA, 11 nt, Human
uuuaauaauuu

SEQ ID NO: 1281296 - RNA, 14 nt, Human
uuuaauaauguuuc

SEQ ID NO: 1281297 - RNA, 21 nt, Human
uuuaauagguuuggacaaaau

SEQ ID NO: 1281298 - RNA, 18 nt, Human
uuuaauagcaaagaauug

SEQ ID NO: 1281299 - RNA, 17 nt, Human
uuuaauagcaaagaauu

SEQ ID NO: 1281300 - RNA, 19 nt, Human
uuuacacaauagaauuaua

SEQ ID NO: 1281301 - RNA, 15 nt, Human
uuuacacgcuuuugu

SEQ ID NO: 1281302 - RNA, 17 nt, Human
uuuacacgcuuuuguga

SEQ ID NO: 1281303 - RNA, 16 nt, Human
uuuacacgcuuuugug

SEQ ID NO: 1281304 - RNA, 16 nt, Human
uuuacacucuuuguaa

SEQ ID NO: 1281305 - RNA, 23 nt, Human
uuuauaaaaauaaaaaacacugg

SEQ ID NO: 1281306 - RNA, 21 nt, Human
uuuauaaaaauaaaaaacacu

SEQ ID NO: 1281307 - RNA, 12 nt, Human
uuuaguuuuuca

SEQ ID NO: 1281308 - RNA, 13 nt, Human
uuuaguuuuucau

SEQ ID NO: 1281309 - RNA, 15 nt, Human
uuuaguuuuucauua

SEQ ID NO: 1281310 - RNA, 16 nt, Human
uuuaguuuuucauuaa

SEQ ID NO: 1281311 - RNA, 18 nt, Human
uuuagaaaucauuuugca

SEQ ID NO: 1281312 - RNA, 13 nt, Human
uuuaccagaaagc

SEQ ID NO: 1281313 - RNA, 17 nt, Human
uuuacuuguuucagagu

SEQ ID NO: 1281314 - RNA, 15 nt, Human
uuuacuuguuucaga

SEQ ID NO: 1281315 - RNA, 13 nt, Human
uuuagaaaucauu

SEQ ID NO: 1281316 - RNA, 16 nt, Human
uuuagaaaucauuuug

SEQ ID NO: 1281317 - RNA, 15 nt, Human
uuuagaaagaauauu

SEQ ID NO: 1281318 - RNA, 15 nt, Human
uuuagaaagauaauu

SEQ ID NO: 1281319 - RNA, 21 nt, Human
uuuagaaagauaauucacugu

SEQ ID NO: 1281320 - RNA, 23 nt, Human
uuuaacaacuaugauuuggaaaa

SEQ ID NO: 1281321 - RNA, 14 nt, Human
uuuaacaacauguu

SEQ ID NO: 1281322 - RNA, 18 nt, Human
uuguuuggagacagaguc

SEQ ID NO: 1281323 - RNA, 18 nt, Human
uuuaaauuuuuuuccuua

SEQ ID NO: 1281324 - RNA, 20 nt, Human
uuuaacaacauguuuccagc

SEQ ID NO: 1281325 - RNA, 13 nt, Human
uuuaacagaaauu

SEQ ID NO: 1281326 - RNA, 14 nt, Human
uuuaacagaaauug

SEQ ID NO: 1281327 - RNA, 16 nt, Human
uuuaacagaaauugua

SEQ ID NO: 1281328 - RNA, 19 nt, Human
uuuaacagaaauuguauau

SEQ ID NO: 1281329 - RNA, 21 nt, Human
uuuaacagaaauuguauauug

SEQ ID NO: 1281330 - RNA, 19 nt, Human
uuuaacucuauaauguguu

SEQ ID NO: 1281331 - RNA, 13 nt, Human
uuuaacauaagcu

SEQ ID NO: 1281332 - RNA, 14 nt, Human
uuuaacauaagcua

SEQ ID NO: 1281333 - RNA, 16 nt, Human
uuuaacauaagcuauu

SEQ ID NO: 1281334 - RNA, 17 nt, Human
uuuaacauaagcuauuu

SEQ ID NO: 1281335 - RNA, 19 nt, Human
uuuaacauaagcuauuuuu

SEQ ID NO: 1281336 - RNA, 18 nt, Human
uuuaacauaagcuauuuu

SEQ ID NO: 1281337 - RNA, 16 nt, Human
uuuaaccuuugauaga

SEQ ID NO: 1281338 - RNA, 12 nt, Human
uuuaacauuccu

SEQ ID NO: 1281339 - RNA, 20 nt, Human
uuuaacucccauuaccaugu

SEQ ID NO: 1281340 - RNA, 14 nt, Human
uuuaacugacaagc

SEQ ID NO: 1281341 - RNA, 19 nt, Human
uuuaacugacaagccaucu

SEQ ID NO: 1281342 - RNA, 23 nt, Human
uuuaacugacuauucuugaugua

SEQ ID NO: 1281343 - RNA, 11 nt, Human
uuuaacugacu

SEQ ID NO: 1281344 - RNA, 12 nt, Human
uuuaacugccgu

SEQ ID NO: 1281345 - RNA, 21 nt, Human
uuuaacugccguaauuuaacu

SEQ ID NO: 1281346 - RNA, 12 nt, Human
uuuaacugugga

SEQ ID NO: 1281347 - RNA, 13 nt, Human
uuuaacuguggau

SEQ ID NO: 1281348 - RNA, 15 nt, Human
uuuaacuguggauau

SEQ ID NO: 1281349 - RNA, 20 nt, Human
uuuaagacgaaacauuuguu

SEQ ID NO: 1281350 - RNA, 12 nt, Human
uuuaauaaaaga

SEQ ID NO: 1281351 - RNA, 14 nt, Human
uuuaauaaauuuau

SEQ ID NO: 1281352 - RNA, 13 nt, Human
uuuaauaauguuu

SEQ ID NO: 1281353 - RNA, 14 nt, Human
uuuaagaaauagaa

SEQ ID NO: 1281354 - RNA, 19 nt, Human
uuuaagacauuuuuggaag

SEQ ID NO: 1281355 - RNA, 15 nt, Human
uuuaagaauaucugu

SEQ ID NO: 1281356 - RNA, 21 nt, Human
uuuaagaauaucuguaauggu

SEQ ID NO: 1281357 - RNA, 20 nt, Human
uuuaagaauugaguaauggu

SEQ ID NO: 1281358 - RNA, 15 nt, Human
uuuaagaauugagua

SEQ ID NO: 1281359 - RNA, 12 nt, Human
uuuaacuuuguu

SEQ ID NO: 1281360 - RNA, 17 nt, Human
uuuaacuuuguuuuauu

SEQ ID NO: 1281361 - RNA, 21 nt, Human
uuuaacuuuguuuuauuuuca

SEQ ID NO: 1281362 - RNA, 17 nt, Human
uuuaacuguggauauug

SEQ ID NO: 1281363 - RNA, 18 nt, Human
uuuaacuguggauauugu

SEQ ID NO: 1281364 - RNA, 14 nt, Human
uuuaacuuaaauag

SEQ ID NO: 1281365 - RNA, 13 nt, Human
uuuaacuuaaaua

SEQ ID NO: 1281366 - RNA, 20 nt, Human
uuguguugaagagguuuuaa

SEQ ID NO: 1281367 - RNA, 22 nt, Human
uuguguuuacauuuuauggugc

SEQ ID NO: 1281368 - RNA, 18 nt, Human
uuguguuuacauuuuaug

SEQ ID NO: 1281369 - RNA, 13 nt, Human
uuguguuuacauu

SEQ ID NO: 1281370 - RNA, 12 nt, Human
uuguguuuacau

SEQ ID NO: 1281371 - RNA, 16 nt, Human
uuguggcaagugaauu

SEQ ID NO: 1281372 - RNA, 22 nt, Human
uuguggcaagugaauuugccug

SEQ ID NO: 1281373 - RNA, 20 nt, Human
uuguguucccauuucagcug

SEQ ID NO: 1281374 - RNA, 18 nt, Human
uuguggcaagugaauuug

SEQ ID NO: 1281375 - RNA, 15 nt, Human
uuguguucuguuuug

SEQ ID NO: 1281376 - RNA, 21 nt, Human
uuguggaaaaugaaaauuagg

SEQ ID NO: 1281377 - RNA, 22 nt, Human
uuguggaauggagauucaguuu

SEQ ID NO: 1281378 - RNA, 21 nt, Human
uuguggaauugggagcuuggg

SEQ ID NO: 1281379 - RNA, 22 nt, Human
uugugcccccaaccauuuccuc

SEQ ID NO: 1281380 - RNA, 12 nt, Human
uugugccccugc

SEQ ID NO: 1281381 - RNA, 21 nt, Human
uugugccaugucaaacaaaua

SEQ ID NO: 1281382 - RNA, 16 nt, Human
uugugccagaaugcuu

SEQ ID NO: 1281383 - RNA, 21 nt, Human
uugugccagaaugcuuuagga

SEQ ID NO: 1281384 - RNA, 18 nt, Human
uugugcacauuuauuucc

SEQ ID NO: 1281385 - RNA, 16 nt, Human
uugugcacauuuauuu

SEQ ID NO: 1281386 - RNA, 17 nt, Human
uugugcaauguaaauau

SEQ ID NO: 1281387 - RNA, 18 nt, Human
uugugcaauguaaauauu

SEQ ID NO: 1281388 - RNA, 22 nt, Human
uugugcaauguaaauauuuuaa

SEQ ID NO: 1281389 - RNA, 23 nt, Human
uugugcaauguaaauauuuuaaa

SEQ ID NO: 1281390 - RNA, 19 nt, Human
uugugcaauguguauaaac

SEQ ID NO: 1281391 - RNA, 20 nt, Human
uugugcaauguguauaaaca

SEQ ID NO: 1281392 - RNA, 21 nt, Human
uugugcaauguguauaaacaa

SEQ ID NO: 1281393 - RNA, 11 nt, Human
uugugcagaga

SEQ ID NO: 1281394 - RNA, 14 nt, Human
uugugcauucugga

SEQ ID NO: 1281395 - RNA, 18 nt, Human
uuguuaaucuucaauagu

SEQ ID NO: 1281396 - RNA, 16 nt, Human
uuguuaauaguuccug

SEQ ID NO: 1281397 - RNA, 15 nt, Human
uuguuaaaaauguca

SEQ ID NO: 1281398 - RNA, 12 nt, Human
uuguuaaauuuu

SEQ ID NO: 1281399 - RNA, 18 nt, Human
uuguguuuugcaagccag

SEQ ID NO: 1281400 - RNA, 17 nt, Human
uuguguuuguguauuua

SEQ ID NO: 1281401 - RNA, 16 nt, Human
uuguuacguagccuaa

SEQ ID NO: 1281402 - RNA, 15 nt, Human
uuguuacuucucuaa

SEQ ID NO: 1281403 - RNA, 16 nt, Human
uuguuacuucucuaau

SEQ ID NO: 1281404 - RNA, 20 nt, Human
uuguuacuucucuaauucuu

SEQ ID NO: 1281405 - RNA, 14 nt, Human
uuguuacuucugag

SEQ ID NO: 1281406 - RNA, 19 nt, Human
uuguuaauuuagaaaacuu

SEQ ID NO: 1281407 - RNA, 20 nt, Human
uuguuaauuuagaaaacuuu

SEQ ID NO: 1281408 - RNA, 22 nt, Human
uuguuaauuuagaaaacuuuaa

SEQ ID NO: 1281409 - RNA, 21 nt, Human
uuguuaauuuagaaaacuuua

SEQ ID NO: 1281410 - RNA, 22 nt, Human
uuguuaauuuuuccuauauugc

SEQ ID NO: 1281411 - RNA, 15 nt, Human
uuguuguucuguuaa

SEQ ID NO: 1281412 - RNA, 13 nt, Human
uuguuguucuguu

SEQ ID NO: 1281413 - RNA, 14 nt, Human
uuguuguucuguua

SEQ ID NO: 1281414 - RNA, 21 nt, Human
uuguuguucuguuaacugaau

SEQ ID NO: 1281415 - RNA, 15 nt, Human
uuguuguuucuugcc

SEQ ID NO: 1281416 - RNA, 18 nt, Human
uuguuaugaugugcuuaa

SEQ ID NO: 1281417 - RNA, 17 nt, Human
uuguuaugaugugcuua

SEQ ID NO: 1281418 - RNA, 15 nt, Human
uuguuaugaugugcu

SEQ ID NO: 1281419 - RNA, 13 nt, Human
uuguuaugaugug

SEQ ID NO: 1281420 - RNA, 13 nt, Human
uuguuaucuguuu

SEQ ID NO: 1281421 - RNA, 18 nt, Human
uuguuauguagauaacaa

SEQ ID NO: 1281422 - RNA, 14 nt, Human
uuguugugcuuuua

SEQ ID NO: 1281423 - RNA, 22 nt, Human
uuguuaguuucugaguuuuacc

SEQ ID NO: 1281424 - RNA, 13 nt, Human
uuguuauauaauc

SEQ ID NO: 1281425 - RNA, 16 nt, Human
uuguuauauaaucauu

SEQ ID NO: 1281426 - RNA, 15 nt, Human
uuguuauauaauuua

SEQ ID NO: 1281427 - RNA, 16 nt, Human
uuguuaucagucaaua

SEQ ID NO: 1281428 - RNA, 22 nt, Human
uuguuaucagucaauauuuuua

SEQ ID NO: 1281429 - RNA, 15 nt, Human
uuguuuaaaaaguaa

SEQ ID NO: 1281430 - RNA, 21 nt, Human
uuguuucaaugagguguccaa

SEQ ID NO: 1281431 - RNA, 16 nt, Human
uuguuucaauugcauc

SEQ ID NO: 1281432 - RNA, 23 nt, Human
uuguuucaaugagguguccaacu

SEQ ID NO: 1281433 - RNA, 22 nt, Human
uuguuuccccacaaaacaaagc

SEQ ID NO: 1281434 - RNA, 23 nt, Human
uuguuuccuccccuaucuguauu

SEQ ID NO: 1281435 - RNA, 13 nt, Human
uuguuucgcucuu

SEQ ID NO: 1281436 - RNA, 15 nt, Human
uuguuucgcucuuug

SEQ ID NO: 1281437 - RNA, 18 nt, Human
uuguuucgcucuuugaga

SEQ ID NO: 1281438 - RNA, 19 nt, Human
uuguuucgcucuuugagaa

SEQ ID NO: 1281439 - RNA, 22 nt, Human
uuguuucgcucuuugagaaaua

SEQ ID NO: 1281440 - RNA, 16 nt, Human
uuguuucguggggagg

SEQ ID NO: 1281441 - RNA, 14 nt, Human
uuguuucuacuuug

SEQ ID NO: 1281442 - RNA, 23 nt, Human
uuguuucuacuuugauaugacug

SEQ ID NO: 1281443 - RNA, 14 nt, Human
uuguuucuccccca

SEQ ID NO: 1281444 - RNA, 16 nt, Human
uuguacuauuuaacug

SEQ ID NO: 1281445 - RNA, 19 nt, Human
uuguacuauuuaacugacu

SEQ ID NO: 1281446 - RNA, 22 nt, Human
uuguacuauuuaacugacuauu

SEQ ID NO: 1281447 - RNA, 23 nt, Human
uuguacuaaagccaaacauauau

SEQ ID NO: 1281448 - RNA, 16 nt, Human
uuguacuaaagccaaa

SEQ ID NO: 1281449 - RNA, 13 nt, Human
uuguacuauuuaa

SEQ ID NO: 1281450 - RNA, 18 nt, Human
uuguaaauuggcauggaa

SEQ ID NO: 1281451 - RNA, 16 nt, Human
uuguacauaguuauuu

SEQ ID NO: 1281452 - RNA, 13 nt, Human
uugucuaagaaau

SEQ ID NO: 1281453 - RNA, 19 nt, Human
uugucuaagaaauugaaua

SEQ ID NO: 1281454 - RNA, 21 nt, Human
uugucuaagaaauugaauacu

SEQ ID NO: 1281455 - RNA, 18 nt, Human
uugucuacacacccugca

SEQ ID NO: 1281456 - RNA, 13 nt, Human
uuguaaauauugu

SEQ ID NO: 1281457 - RNA, 17 nt, Human
uuguauuccaagcauau

SEQ ID NO: 1281458 - RNA, 17 nt, Human
uugucguaaagauuugg

SEQ ID NO: 1281459 - RNA, 14 nt, Human
uuguauuacaaauc

SEQ ID NO: 1281460 - RNA, 13 nt, Human
uugugaaauuauu

SEQ ID NO: 1281461 - RNA, 14 nt, Human
uugugaaaugaugg

SEQ ID NO: 1281462 - RNA, 21 nt, Human
uugucuggcaaggacuuugua

SEQ ID NO: 1281463 - RNA, 19 nt, Human
uugucuuuuuagaugccca

SEQ ID NO: 1281464 - RNA, 20 nt, Human
uugucuggcaaggacuuugu

SEQ ID NO: 1281465 - RNA, 13 nt, Human
uugucuuuuuaga

SEQ ID NO: 1281466 - RNA, 13 nt, Human
uugucucagagca

SEQ ID NO: 1281467 - RNA, 15 nt, Human
uugucuagugaaacu

SEQ ID NO: 1281468 - RNA, 15 nt, Human
uugucucaugccagu

SEQ ID NO: 1281469 - RNA, 21 nt, Human
uugucugaagucacugcacag

SEQ ID NO: 1281470 - RNA, 12 nt, Human
uuggguuagacc

SEQ ID NO: 1281471 - RNA, 15 nt, Human
uuggguuagaccuac

SEQ ID NO: 1281472 - RNA, 16 nt, Human
uuggguuagaccuaca

SEQ ID NO: 1281473 - RNA, 18 nt, Human
uuggguuagaccuacagg

SEQ ID NO: 1281474 - RNA, 13 nt, Human
uuggguucacagc

SEQ ID NO: 1281475 - RNA, 15 nt, Human
uugcacguggccucu

SEQ ID NO: 1281476 - RNA, 14 nt, Human
uugcacguguguuu

SEQ ID NO: 1281477 - RNA, 18 nt, Human
uugcacguguguuuuucu

SEQ ID NO: 1281478 - RNA, 20 nt, Human
uugcacguguguuuuucuau

SEQ ID NO: 1281479 - RNA, 21 nt, Human
uugcacguguguuuuucuauu

SEQ ID NO: 1281480 - RNA, 23 nt, Human
uugcacguguguuuuucuauuaa

SEQ ID NO: 1281481 - RNA, 22 nt, Human
uugcacguguguuuuucuauua

SEQ ID NO: 1281482 - RNA, 15 nt, Human
uugcacuaucuuuca

SEQ ID NO: 1281483 - RNA, 15 nt, Human
uugguccaagauucc

SEQ ID NO: 1281484 - RNA, 16 nt, Human
uuggucugugagaugc

SEQ ID NO: 1281485 - RNA, 13 nt, Human
uuguaaaacaggu

SEQ ID NO: 1281486 - RNA, 11 nt, Human
uuguaaauaua

SEQ ID NO: 1281487 - RNA, 12 nt, Human
uuguaaauauaa

SEQ ID NO: 1281488 - RNA, 13 nt, Human
uuguaaauauaaa

SEQ ID NO: 1281489 - RNA, 16 nt, Human
uuguaaaugugguaaa

SEQ ID NO: 1281490 - RNA, 21 nt, Human
uuguaaaugugguaaagaguu

SEQ ID NO: 1281491 - RNA, 17 nt, Human
uuguaaauauaaagacg

SEQ ID NO: 1281492 - RNA, 16 nt, Human
uuguaaauauaaagac

SEQ ID NO: 1281493 - RNA, 15 nt, Human
uuguaaaacagguag

SEQ ID NO: 1281494 - RNA, 14 nt, Human
uuguaaaacaggua

SEQ ID NO: 1281495 - RNA, 17 nt, Human
uuguaaaagcauuuugu

SEQ ID NO: 1281496 - RNA, 18 nt, Human
uuguaaaagcauuuugua

SEQ ID NO: 1281497 - RNA, 19 nt, Human
uuguaaaagcauuuuguaa

SEQ ID NO: 1281498 - RNA, 20 nt, Human
uuguaaaagcauuuuguaau

SEQ ID NO: 1281499 - RNA, 12 nt, Human
uuguaaauuggc

SEQ ID NO: 1281500 - RNA, 13 nt, Human
uuguaaauuggca

SEQ ID NO: 1281501 - RNA, 14 nt, Human
uuguaaauuggcau

SEQ ID NO: 1281502 - RNA, 16 nt, Human
uuguaaauuauuaauu

SEQ ID NO: 1281503 - RNA, 23 nt, Human
uuguaaauuauuaauuuaugcag

SEQ ID NO: 1281504 - RNA, 11 nt, Human
uguaauacaau

SEQ ID NO: 1281505 - RNA, 17 nt, Human
uguaaugaaaaccacau

SEQ ID NO: 1281506 - RNA, 13 nt, Human
uguaaugaaaacc

SEQ ID NO: 1281507 - RNA, 12 nt, Human
uguaaugaaaac

SEQ ID NO: 1281508 - RNA, 19 nt, Human
uguaauaauaaagaauagc

SEQ ID NO: 1281509 - RNA, 18 nt, Human
uguaauacuucuugugug

SEQ ID NO: 1281510 - RNA, 11 nt, Human
uguaaugaaaa

SEQ ID NO: 1281511 - RNA, 16 nt, Human
uguacaagaugaagga

SEQ ID NO: 1281512 - RNA, 18 nt, Human
uguaaauuuguacuauuu

SEQ ID NO: 1281513 - RNA, 14 nt, Human
uguaaauuuguacu

SEQ ID NO: 1281514 - RNA, 14 nt, Human
uguaacaagccaga

SEQ ID NO: 1281515 - RNA, 18 nt, Human
uguaacaagccagauuuu

SEQ ID NO: 1281516 - RNA, 15 nt, Human
uguaacaauugugua

SEQ ID NO: 1281517 - RNA, 16 nt, Human
uguaacaauuguguag

SEQ ID NO: 1281518 - RNA, 19 nt, Human
uguaacaauuguguagccu

SEQ ID NO: 1281519 - RNA, 20 nt, Human
uguaacaauuguguagccuu

SEQ ID NO: 1281520 - RNA, 21 nt, Human
uguaacaauuguguagccuuu

SEQ ID NO: 1281521 - RNA, 22 nt, Human
uguaacaauuguguagccuuuu

SEQ ID NO: 1281522 - RNA, 13 nt, Human
uguaaauuuguac

SEQ ID NO: 1281523 - RNA, 23 nt, Human
uguaaacucaaaauauuuguaca

SEQ ID NO: 1281524 - RNA, 14 nt, Human
uguaaacugugcac

SEQ ID NO: 1281525 - RNA, 15 nt, Human
uguaaacugugcacc

SEQ ID NO: 1281526 - RNA, 13 nt, Human
uguaaacugugua

SEQ ID NO: 1281527 - RNA, 14 nt, Human
uguaaacuguguau

SEQ ID NO: 1281528 - RNA, 18 nt, Human
uguaaacuguguauucca

SEQ ID NO: 1281529 - RNA, 19 nt, Human
uguaaacuguguauuccaa

SEQ ID NO: 1281530 - RNA, 17 nt, Human
uguaacauacuggccug

SEQ ID NO: 1281531 - RNA, 11 nt, Human
uguaacaugua

SEQ ID NO: 1281532 - RNA, 20 nt, Human
ugguuguacauauaagugau

SEQ ID NO: 1281533 - RNA, 17 nt, Human
ugguugguuuucuucuu

SEQ ID NO: 1281534 - RNA, 13 nt, Human
ugguugcauccua

SEQ ID NO: 1281535 - RNA, 14 nt, Human
ugguugaugccaaa

SEQ ID NO: 1281536 - RNA, 18 nt, Human
ugguugaugccaaaaaaa

SEQ ID NO: 1281537 - RNA, 16 nt, Human
ugguugguuuucuucu

SEQ ID NO: 1281538 - RNA, 21 nt, Human
ugguuuucuucuucucguccu

SEQ ID NO: 1281539 - RNA, 18 nt, Human
ugguuuucuuuugccaug

SEQ ID NO: 1281540 - RNA, 19 nt, Human
ugguuuucuuuugccauga

SEQ ID NO: 1281541 - RNA, 18 nt, Human
ugguuuuuacugcucuga

SEQ ID NO: 1281542 - RNA, 21 nt, Human
ugguuuuuacugcucugagaa

SEQ ID NO: 1281543 - RNA, 20 nt, Human
ugguuuuuacugcucugaga

SEQ ID NO: 1281544 - RNA, 12 nt, Human
uguaaaauggug

SEQ ID NO: 1281545 - RNA, 16 nt, Human
uguaaaaugacaauca

SEQ ID NO: 1281546 - RNA, 19 nt, Human
uguaaaaugacaaucaugu

SEQ ID NO: 1281547 - RNA, 21 nt, Human
uguaaaaugacaaucaugugu

SEQ ID NO: 1281548 - RNA, 19 nt, Human
uguaaaccugagucguaca

SEQ ID NO: 1281549 - RNA, 15 nt, Human
uguaaacucaaaaua

SEQ ID NO: 1281550 - RNA, 20 nt, Human
uguaaacucaaaauauuugu

SEQ ID NO: 1281551 - RNA, 11 nt, Human
uguaaaauggu

SEQ ID NO: 1281552 - RNA, 22 nt, Human
uguaaaaucuugucauguguau

SEQ ID NO: 1281553 - RNA, 12 nt, Human
uguaaaaugaca

SEQ ID NO: 1281554 - RNA, 21 nt, Human
uguaaaauauuuugaaucaau

SEQ ID NO: 1281555 - RNA, 12 nt, Human
uguaaaaucuug

SEQ ID NO: 1281556 - RNA, 15 nt, Human
uguaaaaucuuguca

SEQ ID NO: 1281557 - RNA, 16 nt, Human
uguaaaaucuugucau

SEQ ID NO: 1281558 - RNA, 18 nt, Human
uguaaaaucuugucaugu

SEQ ID NO: 1281559 - RNA, 19 nt, Human
uguaaaaucuugucaugug

SEQ ID NO: 1281560 - RNA, 20 nt, Human
uguaaaaucuugucaugugu

SEQ ID NO: 1281561 - RNA, 12 nt, Human
uguaaaacaggu

SEQ ID NO: 1281562 - RNA, 13 nt, Human
uguaaaacaggua

SEQ ID NO: 1281563 - RNA, 14 nt, Human
uguaaaacagguag

SEQ ID NO: 1281564 - RNA, 22 nt, Human
uguaaaacagguagaauuaucu

SEQ ID NO: 1281565 - RNA, 19 nt, Human
uguaaaacauuuauuuuga

SEQ ID NO: 1281566 - RNA, 17 nt, Human
uguaaaagcauuuugua

SEQ ID NO: 1281567 - RNA, 18 nt, Human
uguaaaagcauuuuguaa

SEQ ID NO: 1281568 - RNA, 19 nt, Human
uguaaaagcauuuuguaau

SEQ ID NO: 1281569 - RNA, 12 nt, Human
uguaaaauaauu

SEQ ID NO: 1281570 - RNA, 16 nt, Human
uguaaaauaauucuga

SEQ ID NO: 1281571 - RNA, 19 nt, Human
uguaaaauauuuugaauca

SEQ ID NO: 1281572 - RNA, 20 nt, Human
uguaaaauauuuugaaucaa

SEQ ID NO: 1281573 - RNA, 16 nt, Human
ugguucccuugaugaa

SEQ ID NO: 1281574 - RNA, 23 nt, Human
ugguuccccuguucacucuacuu

SEQ ID NO: 1281575 - RNA, 18 nt, Human
ugguucccguuucuccac

SEQ ID NO: 1281576 - RNA, 20 nt, Human
ugguucccguuucuccaccu

SEQ ID NO: 1281577 - RNA, 17 nt, Human
ugguucccuugaugaag

SEQ ID NO: 1281578 - RNA, 20 nt, Human
ugguucccuugaugaagaag

SEQ ID NO: 1281579 - RNA, 12 nt, Human
ugguuccucccc

SEQ ID NO: 1281580 - RNA, 18 nt, Human
ugguuccuccccuccucc

SEQ ID NO: 1281581 - RNA, 23 nt, Human
ugguuccuccccuccuccuggac

SEQ ID NO: 1281582 - RNA, 16 nt, Human
ugguuccccaguagag

SEQ ID NO: 1281583 - RNA, 17 nt, Human
ugguucuaaggaccuga

SEQ ID NO: 1281584 - RNA, 22 nt, Human
ugguucuaaggaccugaaauuc

SEQ ID NO: 1281585 - RNA, 12 nt, Human
ugguugaggaaa

SEQ ID NO: 1281586 - RNA, 22 nt, Human
ugguucuugaggggaccaggag

SEQ ID NO: 1281587 - RNA, 19 nt, Human
ugguucuuguguuggcugu

SEQ ID NO: 1281588 - RNA, 16 nt, Human
ugguugaaaauaaaaa

SEQ ID NO: 1281589 - RNA, 23 nt, Human
ugguugaacucugguggcacagg

SEQ ID NO: 1281590 - RNA, 16 nt, Human
ugguucucaauuccaa

SEQ ID NO: 1281591 - RNA, 23 nt, Human
ugguucucaauuccaacaguuua

SEQ ID NO: 1281592 - RNA, 18 nt, Human
ugguucucaauuccaaca

SEQ ID NO: 1281593 - RNA, 18 nt, Human
ugguucugagauggcucc

SEQ ID NO: 1281594 - RNA, 22 nt, Human
ugguucugagauggcucccagg

SEQ ID NO: 1281595 - RNA, 17 nt, Human
ugguucuggcuguuuga

SEQ ID NO: 1281596 - RNA, 15 nt, Human
ugguucuugagggga

SEQ ID NO: 1281597 - RNA, 21 nt, Human
ugguucuugaggggaccagga

SEQ ID NO: 1281598 - RNA, 23 nt, Human
ugguucuugaggggaccaggagu

SEQ ID NO: 1281599 - RNA, 22 nt, Human
ugguguagcuacagagaaacca

SEQ ID NO: 1281600 - RNA, 15 nt, Human
ugguguagaacacua

SEQ ID NO: 1281601 - RNA, 21 nt, Human
ugguguagaacacuaauucau

SEQ ID NO: 1281602 - RNA, 17 nt, Human
ugguguagaacacuaau

SEQ ID NO: 1281603 - RNA, 15 nt, Human
ugguguagcuacaga

SEQ ID NO: 1281604 - RNA, 16 nt, Human
ugguguagcuacagag

SEQ ID NO: 1281605 - RNA, 17 nt, Human
ugguguagcuacagaga

SEQ ID NO: 1281606 - RNA, 18 nt, Human
ugguguagcuacagagaa

SEQ ID NO: 1281607 - RNA, 20 nt, Human
ugguguagcuacagagaaac

SEQ ID NO: 1281608 - RNA, 18 nt, Human
uggugucagacccuggag

SEQ ID NO: 1281609 - RNA, 19 nt, Human
uggugucagacccuggagg

SEQ ID NO: 1281610 - RNA, 18 nt, Human
ugguguccagacagagcc

SEQ ID NO: 1281611 - RNA, 21 nt, Human
ugguguccagacagagcccug

SEQ ID NO: 1281612 - RNA, 16 nt, Human
ugguucauuaauucua

SEQ ID NO: 1281613 - RNA, 11 nt, Human
ugguuccccug

SEQ ID NO: 1281614 - RNA, 18 nt, Human
ugguuccccuguucacuc

SEQ ID NO: 1281615 - RNA, 19 nt, Human
ugguuccccuguucacucu

SEQ ID NO: 1281616 - RNA, 20 nt, Human
ugguuccccuguucacucua

SEQ ID NO: 1281617 - RNA, 12 nt, Human
ugguuccagggu

SEQ ID NO: 1281618 - RNA, 21 nt, Human
ugguuccagggucccucugug

SEQ ID NO: 1281619 - RNA, 22 nt, Human
ugguuccagggucccucugugu

SEQ ID NO: 1281620 - RNA, 14 nt, Human
uggugguagagaag

SEQ ID NO: 1281621 - RNA, 23 nt, Human
uggugggugccuaggccugggca

SEQ ID NO: 1281622 - RNA, 16 nt, Human
uggugguauuuucaau

SEQ ID NO: 1281623 - RNA, 14 nt, Human
ugguggucccuggg

SEQ ID NO: 1281624 - RNA, 15 nt, Human
ugguggucccugggu

SEQ ID NO: 1281625 - RNA, 15 nt, Human
ugguggucuguuggc

SEQ ID NO: 1281626 - RNA, 14 nt, Human
ugguggggcagcuc

SEQ ID NO: 1281627 - RNA, 16 nt, Human
ugguggguccaugggc

SEQ ID NO: 1281628 - RNA, 17 nt, Human
ugguggguccaugggca

SEQ ID NO: 1281629 - RNA, 18 nt, Human
ugguggguccaugggcag

SEQ ID NO: 1281630 - RNA, 18 nt, Human
ugguguaagguacuuuca

SEQ ID NO: 1281631 - RNA, 15 nt, Human
ugguggccugguccc

SEQ ID NO: 1281632 - RNA, 21 nt, Human
ugguggcccgacagccuggca

SEQ ID NO: 1281633 - RNA, 20 nt, Human
ugguggccaugcuccucuuc

SEQ ID NO: 1281634 - RNA, 21 nt, Human
ugguggccaugcuccucuucc

SEQ ID NO: 1281635 - RNA, 14 nt, Human
ugguggcccucucc

SEQ ID NO: 1281636 - RNA, 16 nt, Human
ugguggcccucucccc

SEQ ID NO: 1281637 - RNA, 19 nt, Human
ugguggcccucuccccugc

SEQ ID NO: 1281638 - RNA, 21 nt, Human
ugguggcccucuccccugccc

SEQ ID NO: 1281639 - RNA, 23 nt, Human
ugguggcccucuccccugccccc

SEQ ID NO: 1281640 - RNA, 22 nt, Human
ugguggcccucuccccugcccc

SEQ ID NO: 1281641 - RNA, 16 nt, Human
ugguggccuggucccu

SEQ ID NO: 1281642 - RNA, 20 nt, Human
uggugggccaacaaagaaca

SEQ ID NO: 1281643 - RNA, 23 nt, Human
uggugggccaacaaagaacacua

SEQ ID NO: 1281644 - RNA, 14 nt, Human
uggguagacacaca

SEQ ID NO: 1281645 - RNA, 21 nt, Human
uggguagaaagagauacagag

SEQ ID NO: 1281646 - RNA, 19 nt, Human
ugguggcccgacagccugg

SEQ ID NO: 1281647 - RNA, 23 nt, Human
uggugcaaguugaggacuucuug

SEQ ID NO: 1281648 - RNA, 14 nt, Human
ugguggccaugcuc

SEQ ID NO: 1281649 - RNA, 15 nt, Human
ugguggccaugcucc

SEQ ID NO: 1281650 - RNA, 16 nt, Human
uggugcaaguugagga

SEQ ID NO: 1281651 - RNA, 19 nt, Human
uggugcaaguugaggacuu

SEQ ID NO: 1281652 - RNA, 22 nt, Human
uggugcaaguugaggacuucuu

SEQ ID NO: 1281653 - RNA, 17 nt, Human
ugucuacacuaagagag

SEQ ID NO: 1281654 - RNA, 23 nt, Human
ugucuacacagauguucacccaa

SEQ ID NO: 1281655 - RNA, 22 nt, Human
ugucuacacuaagagagaauga

SEQ ID NO: 1281656 - RNA, 13 nt, Human
uguccugguggua

SEQ ID NO: 1281657 - RNA, 18 nt, Human
ugucuaagauucuagauc

SEQ ID NO: 1281658 - RNA, 14 nt, Human
uguccugggccugc

SEQ ID NO: 1281659 - RNA, 15 nt, Human
uguccugggccugca

SEQ ID NO: 1281660 - RNA, 17 nt, Human
uguccugggccugcaga

SEQ ID NO: 1281661 - RNA, 16 nt, Human
uguccugccuguggcc

SEQ ID NO: 1281662 - RNA, 18 nt, Human
uguccugcaccggggccu

SEQ ID NO: 1281663 - RNA, 21 nt, Human
uguccugagccccagggagag

SEQ ID NO: 1281664 - RNA, 12 nt, Human
uguccugagcuc

SEQ ID NO: 1281665 - RNA, 14 nt, Human
uguccugagcucag

SEQ ID NO: 1281666 - RNA, 15 nt, Human
uguccugagcucagc

SEQ ID NO: 1281667 - RNA, 17 nt, Human
uguccugagcucagcgu

SEQ ID NO: 1281668 - RNA, 16 nt, Human
uguccugagcucagcg

SEQ ID NO: 1281669 - RNA, 22 nt, Human
uguccugccuaaggcugaacuu

SEQ ID NO: 1281670 - RNA, 18 nt, Human
uguccugccacccagccc

SEQ ID NO: 1281671 - RNA, 22 nt, Human
uguccugccacccagccccagc

SEQ ID NO: 1281672 - RNA, 17 nt, Human
uguccugccuauuaucu

SEQ ID NO: 1281673 - RNA, 24 nt, Human
uguccugccuauuaucugucagcu

SEQ ID NO: 1281674 - RNA, 24 nt, Human
uguccugccacccagccccagcca

SEQ ID NO: 1281675 - RNA, 12 nt, Human
uguccugccugu

SEQ ID NO: 1281676 - RNA, 13 nt, Human
ugucaucucagcu

SEQ ID NO: 1281677 - RNA, 23 nt, Human
ugucauccucaaagaaaguguau

SEQ ID NO: 1281678 - RNA, 14 nt, Human
ugucauccucacag

SEQ ID NO: 1281679 - RNA, 19 nt, Human
ugucauccucaaagaaagu

SEQ ID NO: 1281680 - RNA, 20 nt, Human
ugucauccucaaagaaagug

SEQ ID NO: 1281681 - RNA, 21 nt, Human
ugucauccucaaagaaagugu

SEQ ID NO: 1281682 - RNA, 22 nt, Human
ugucauccucaaagaaagugua

SEQ ID NO: 1281683 - RNA, 13 nt, Human
uguccccuauccu

SEQ ID NO: 1281684 - RNA, 21 nt, Human
uguccuagcacagauggccag

SEQ ID NO: 1281685 - RNA, 22 nt, Human
uguccuagcacagauggccagc

SEQ ID NO: 1281686 - RNA, 20 nt, Human
uguccuaucuccagcggccc

SEQ ID NO: 1281687 - RNA, 13 nt, Human
uguccucagcccc

SEQ ID NO: 1281688 - RNA, 17 nt, Human
uguccucccgagcuccu

SEQ ID NO: 1281689 - RNA, 21 nt, Human
uguccucccgagcuccucuuc

SEQ ID NO: 1281690 - RNA, 14 nt, Human
uguccugagcccca

SEQ ID NO: 1281691 - RNA, 17 nt, Human
uguccugagccccaggg

SEQ ID NO: 1281692 - RNA, 18 nt, Human
uguccugagccccaggga

SEQ ID NO: 1281693 - RNA, 19 nt, Human
uguccugagccccagggag

SEQ ID NO: 1281694 - RNA, 16 nt, Human
ugucugucugucuguc

SEQ ID NO: 1281695 - RNA, 15 nt, Human
ugucugucugucugu

SEQ ID NO: 1281696 - RNA, 18 nt, Human
ugucugugaagugagacc

SEQ ID NO: 1281697 - RNA, 19 nt, Human
ugucugugaagugagaccu

SEQ ID NO: 1281698 - RNA, 15 nt, Human
ugucugucuguccca

SEQ ID NO: 1281699 - RNA, 14 nt, Human
ugucugucuguccc

SEQ ID NO: 1281700 - RNA, 20 nt, Human
ugucugugacuuuugugaaa

SEQ ID NO: 1281701 - RNA, 19 nt, Human
ugucuguggcaaaaguuua

SEQ ID NO: 1281702 - RNA, 15 nt, Human
ugucuguggauuuuu

SEQ ID NO: 1281703 - RNA, 20 nt, Human
ugucuguguuuugaaagaau

SEQ ID NO: 1281704 - RNA, 13 nt, Human
ugucuguucuaca

SEQ ID NO: 1281705 - RNA, 20 nt, Human
ugucugagacagaaucucag

SEQ ID NO: 1281706 - RNA, 16 nt, Human
ugucucaggucccugc

SEQ ID NO: 1281707 - RNA, 18 nt, Human
ugucucaggcugccugag

SEQ ID NO: 1281708 - RNA, 19 nt, Human
ugucucaggcugccugagu

SEQ ID NO: 1281709 - RNA, 20 nt, Human
ugucucaggcugccugaguc

SEQ ID NO: 1281710 - RNA, 21 nt, Human
ugucugaucguucaaagcaug

SEQ ID NO: 1281711 - RNA, 16 nt, Human
ugucuguuuuaaaaac

SEQ ID NO: 1281712 - RNA, 21 nt, Human
ugucuuaaaaccugcuuuuca

SEQ ID NO: 1281713 - RNA, 18 nt, Human
ugucuuaaacuaaaugug

SEQ ID NO: 1281714 - RNA, 15 nt, Human
ugucuguucuacaua

SEQ ID NO: 1281715 - RNA, 21 nt, Human
ugucuguucuacauagaugcu

SEQ ID NO: 1281716 - RNA, 16 nt, Human
ugucuguuguauucau

SEQ ID NO: 1281717 - RNA, 20 nt, Human
ugucuuaaacuaaaugugca

SEQ ID NO: 1281718 - RNA, 20 nt, Human
ugucuauggauuugccuucu

SEQ ID NO: 1281719 - RNA, 14 nt, Human
ugucuauaaagcau

SEQ ID NO: 1281720 - RNA, 12 nt, Human
ugucuauaaagc

SEQ ID NO: 1281721 - RNA, 20 nt, Human
ugucuacauaugaucugucu

SEQ ID NO: 1281722 - RNA, 20 nt, Human
ugucucacugagcacuguuu

SEQ ID NO: 1281723 - RNA, 13 nt, Human
ugucucaggcugc

SEQ ID NO: 1281724 - RNA, 16 nt, Human
ugucucaggcugccug

SEQ ID NO: 1281725 - RNA, 17 nt, Human
ugucucaggcugccuga

SEQ ID NO: 1281726 - RNA, 19 nt, Human
ugucucaagagggcacugg

SEQ ID NO: 1281727 - RNA, 16 nt, Human
ugucucaccuggacuu

SEQ ID NO: 1281728 - RNA, 14 nt, Human
ugucucacugagca

SEQ ID NO: 1281729 - RNA, 17 nt, Human
ugucucaagagggcacu

SEQ ID NO: 1281730 - RNA, 18 nt, Human
ugucucaagagggcacug

SEQ ID NO: 1281731 - RNA, 18 nt, Human
ugucuauuaccuguuagu

SEQ ID NO: 1281732 - RNA, 13 nt, Human
ugucuauaaagca

SEQ ID NO: 1281733 - RNA, 13 nt, Human
ugucuauucagcu

SEQ ID NO: 1281734 - RNA, 14 nt, Human
ugucuauucagcuu

SEQ ID NO: 1281735 - RNA, 20 nt, Human
ugucuauuuuuaauguuugu

SEQ ID NO: 1281736 - RNA, 18 nt, Human
uguauuuuaaaagaauga

SEQ ID NO: 1281737 - RNA, 19 nt, Human
uguauuuuaaaagaaugau

SEQ ID NO: 1281738 - RNA, 16 nt, Human
ugucaauuuauaauga

SEQ ID NO: 1281739 - RNA, 19 nt, Human
ugucaauuuauaaugauua

SEQ ID NO: 1281740 - RNA, 15 nt, Human
ugucaauuucugugu

SEQ ID NO: 1281741 - RNA, 16 nt, Human
ugucaauuucuguguu

SEQ ID NO: 1281742 - RNA, 13 nt, Human
uguaugcgugugu

SEQ ID NO: 1281743 - RNA, 18 nt, Human
uguauggaaauaaaugua

SEQ ID NO: 1281744 - RNA, 23 nt, Human
uguauggaaauaaauguaucaua

SEQ ID NO: 1281745 - RNA, 20 nt, Human
uguauggguaggguaaauca

SEQ ID NO: 1281746 - RNA, 22 nt, Human
uguauggguaggguaaaucagu

SEQ ID NO: 1281747 - RNA, 21 nt, Human
uguaugguuuuugagauauua

SEQ ID NO: 1281748 - RNA, 22 nt, Human
uguaugguuuuugagauauuaa

SEQ ID NO: 1281749 - RNA, 23 nt, Human
uguaugguuuuugagauauuaau

SEQ ID NO: 1281750 - RNA, 16 nt, Human
ugucacaaugagauug

SEQ ID NO: 1281751 - RNA, 21 nt, Human
ugucacaaugagauugaauuu

SEQ ID NO: 1281752 - RNA, 23 nt, Human
ugucacugguagaccaaaauaaa

SEQ ID NO: 1281753 - RNA, 21 nt, Human
ugucacugguagaccaaaaua

SEQ ID NO: 1281754 - RNA, 17 nt, Human
ugucaucaucauggcca

SEQ ID NO: 1281755 - RNA, 18 nt, Human
ugucaucaucauggccag

SEQ ID NO: 1281756 - RNA, 19 nt, Human
ugucaucaucauggccagc

SEQ ID NO: 1281757 - RNA, 21 nt, Human
ugucaucaucauggccagcug

SEQ ID NO: 1281758 - RNA, 16 nt, Human
ugucauccucaaagaa

SEQ ID NO: 1281759 - RNA, 20 nt, Human
uguaguguuggagaagaacu

SEQ ID NO: 1281760 - RNA, 21 nt, Human
uguaguguuggagaagaacug

SEQ ID NO: 1281761 - RNA, 20 nt, Human
uguaggaagguacuguauga

SEQ ID NO: 1281762 - RNA, 19 nt, Human
uguaggaagguacuguaug

SEQ ID NO: 1281763 - RNA, 18 nt, Human
uguaggaagguacuguau

SEQ ID NO: 1281764 - RNA, 16 nt, Human
uguaggaagguacugu

SEQ ID NO: 1281765 - RNA, 14 nt, Human
uguauaaaauaauu

SEQ ID NO: 1281766 - RNA, 21 nt, Human
uguauaaaagugugaaauaaa

SEQ ID NO: 1281767 - RNA, 13 nt, Human
uguauaaaauaga

SEQ ID NO: 1281768 - RNA, 15 nt, Human
uguauaaaauagaca

SEQ ID NO: 1281769 - RNA, 13 nt, Human
uguauaaaauaau

SEQ ID NO: 1281770 - RNA, 22 nt, Human
uguaguguuggagaagaacuga

SEQ ID NO: 1281771 - RNA, 18 nt, Human
uguauaaaagugugaaau

SEQ ID NO: 1281772 - RNA, 22 nt, Human
uguaggaagguacuguaugauc

SEQ ID NO: 1281773 - RNA, 17 nt, Human
uguacagcuggcucuac

SEQ ID NO: 1281774 - RNA, 22 nt, Human
uguagcugugaccugcugagcu

SEQ ID NO: 1281775 - RNA, 23 nt, Human
uguagcugugaccugcugagcuc

SEQ ID NO: 1281776 - RNA, 12 nt, Human
uguagcuuugcu

SEQ ID NO: 1281777 - RNA, 13 nt, Human
uguagcuuugcuc

SEQ ID NO: 1281778 - RNA, 15 nt, Human
uguagcuuugcucuu

SEQ ID NO: 1281779 - RNA, 23 nt, Human
uguagcuuuggaaguuuagcucu

SEQ ID NO: 1281780 - RNA, 15 nt, Human
uguauagcugcuucc

SEQ ID NO: 1281781 - RNA, 15 nt, Human
uguauaguaaaucac

SEQ ID NO: 1281782 - RNA, 16 nt, Human
uguauaaacaagaaaa

SEQ ID NO: 1281783 - RNA, 17 nt, Human
uguauaaacaagaaaaa

SEQ ID NO: 1281784 - RNA, 23 nt, Human
uguauaaacaagaaaaauaaaga

SEQ ID NO: 1281785 - RNA, 19 nt, Human
uguauaaaugucuuuaaug

SEQ ID NO: 1281786 - RNA, 16 nt, Human
uguauaacuaggagcu

SEQ ID NO: 1281787 - RNA, 15 nt, Human
uguauaacuaggagc

SEQ ID NO: 1281788 - RNA, 13 nt, Human
uguauaacuuuaa

SEQ ID NO: 1281789 - RNA, 18 nt, Human
uguauaacuuuaacuucu

SEQ ID NO: 1281790 - RNA, 17 nt, Human
uguauaagauccuagau

SEQ ID NO: 1281791 - RNA, 22 nt, Human
uguaugaaagauggcugugccu

SEQ ID NO: 1281792 - RNA, 16 nt, Human
uguaugacugcacaug

SEQ ID NO: 1281793 - RNA, 17 nt, Human
uguaugacugcacauga

SEQ ID NO: 1281794 - RNA, 16 nt, Human
ugggaguugucauuaa

SEQ ID NO: 1281795 - RNA, 18 nt, Human
ugggaggagggcaggcau

SEQ ID NO: 1281796 - RNA, 18 nt, Human
ugggaguguugagcaucu

SEQ ID NO: 1281797 - RNA, 22 nt, Human
ugggaguugaucgccuuuccca

SEQ ID NO: 1281798 - RNA, 14 nt, Human
ugggaguuguaguu

SEQ ID NO: 1281799 - RNA, 19 nt, Human
ugggaucacauguggacuu

SEQ ID NO: 1281800 - RNA, 20 nt, Human
ugggaguuuuuaugagaaac

SEQ ID NO: 1281801 - RNA, 14 nt, Human
ugggaggagggcag

SEQ ID NO: 1281802 - RNA, 17 nt, Human
ugggaggagggcaggca

SEQ ID NO: 1281803 - RNA, 14 nt, Human
ugggacagggagga

SEQ ID NO: 1281804 - RNA, 16 nt, Human
ugggacagcaaccugu

SEQ ID NO: 1281805 - RNA, 21 nt, Human
ugggcagcaauuuaaauguua

SEQ ID NO: 1281806 - RNA, 12 nt, Human
ugggcagccaga

SEQ ID NO: 1281807 - RNA, 13 nt, Human
ugggcagccagac

SEQ ID NO: 1281808 - RNA, 21 nt, Human
ugggcagccagaccagcaggc

SEQ ID NO: 1281809 - RNA, 19 nt, Human
ugggcagcaauuuaaaugu

SEQ ID NO: 1281810 - RNA, 18 nt, Human
ugggcagcaauuuaaaug

SEQ ID NO: 1281811 - RNA, 17 nt, Human
ugggcagcaauuuaaau

SEQ ID NO: 1281812 - RNA, 18 nt, Human
ugggaugguggagggcca

SEQ ID NO: 1281813 - RNA, 16 nt, Human
ugggaugguggagggc

SEQ ID NO: 1281814 - RNA, 17 nt, Human
ugggaugguggagggcc

SEQ ID NO: 1281815 - RNA, 14 nt, Human
ugggcccugggcug

SEQ ID NO: 1281816 - RNA, 16 nt, Human
ugggcccugggcugga

SEQ ID NO: 1281817 - RNA, 17 nt, Human
ugggcccugggcuggaa

SEQ ID NO: 1281818 - RNA, 13 nt, Human
ugggcccuggggc

SEQ ID NO: 1281819 - RNA, 14 nt, Human
ugggcccuggggcc

SEQ ID NO: 1281820 - RNA, 16 nt, Human
ugggcccuggggccug

SEQ ID NO: 1281821 - RNA, 19 nt, Human
ugggcccuggggccuguac

SEQ ID NO: 1281822 - RNA, 22 nt, Human
ugggcccuggggccuguacugc

SEQ ID NO: 1281823 - RNA, 13 nt, Human
ugggcccuuugag

SEQ ID NO: 1281824 - RNA, 13 nt, Human
ugggccgcugcca

SEQ ID NO: 1281825 - RNA, 14 nt, Human
ugggccgcugccac

SEQ ID NO: 1281826 - RNA, 21 nt, Human
ugggccggcuucaugccagcu

SEQ ID NO: 1281827 - RNA, 14 nt, Human
ugggccuaggcugc

SEQ ID NO: 1281828 - RNA, 15 nt, Human
ugggccuaggcugca

SEQ ID NO: 1281829 - RNA, 15 nt, Human
ugggccuauggagag

SEQ ID NO: 1281830 - RNA, 17 nt, Human
ugggccuauggagagcc

SEQ ID NO: 1281831 - RNA, 18 nt, Human
ugggccuauggagagccc

SEQ ID NO: 1281832 - RNA, 19 nt, Human
ugggccuauggagagcccu

SEQ ID NO: 1281833 - RNA, 20 nt, Human
ugggccuauggagagcccug

SEQ ID NO: 1281834 - RNA, 22 nt, Human
ugggccuauggagagcccuggg

SEQ ID NO: 1281835 - RNA, 19 nt, Human
ugggguuaucucuguguua

SEQ ID NO: 1281836 - RNA, 13 nt, Human
uggggggggugcu

SEQ ID NO: 1281837 - RNA, 13 nt, Human
uggggugugcugg

SEQ ID NO: 1281838 - RNA, 15 nt, Human
uggggugugcuggga

SEQ ID NO: 1281839 - RNA, 18 nt, Human
ugggguuaucucuguguu

SEQ ID NO: 1281840 - RNA, 20 nt, Human
ugggggccuggcuggcugag

SEQ ID NO: 1281841 - RNA, 17 nt, Human
ugggggccuggcuggcu

SEQ ID NO: 1281842 - RNA, 19 nt, Human
ugggggccuggcuggcuga

SEQ ID NO: 1281843 - RNA, 20 nt, Human
uggggccaggcugggucgcc

SEQ ID NO: 1281844 - RNA, 19 nt, Human
uggggccagauccagccug

SEQ ID NO: 1281845 - RNA, 20 nt, Human
uggggccagauccagccugg

SEQ ID NO: 1281846 - RNA, 17 nt, Human
uggggccaggcuggguc

SEQ ID NO: 1281847 - RNA, 20 nt, Human
uggggcagcuccucugucuc

SEQ ID NO: 1281848 - RNA, 13 nt, Human
uggggccagaucc

SEQ ID NO: 1281849 - RNA, 14 nt, Human
uggggccagaucca

SEQ ID NO: 1281850 - RNA, 15 nt, Human
uggggccagauccag

SEQ ID NO: 1281851 - RNA, 16 nt, Human
uggggccagauccagc

SEQ ID NO: 1281852 - RNA, 18 nt, Human
uggggccagauccagccu

SEQ ID NO: 1281853 - RNA, 11 nt, Human
ugggggccugg

SEQ ID NO: 1281854 - RNA, 12 nt, Human
ugggggccuggc

SEQ ID NO: 1281855 - RNA, 13 nt, Human
ugggggccuggcu

SEQ ID NO: 1281856 - RNA, 15 nt, Human
ugggggccuggcugg

SEQ ID NO: 1281857 - RNA, 18 nt, Human
ugggggcagcacaggagg

SEQ ID NO: 1281858 - RNA, 21 nt, Human
uggggccagauccagccuggg

SEQ ID NO: 1281859 - RNA, 23 nt, Human
ugggccugcugcugagaaccugg

SEQ ID NO: 1281860 - RNA, 21 nt, Human
ugggccuauggagagcccugg

SEQ ID NO: 1281861 - RNA, 13 nt, Human
ugggccugcagaa

SEQ ID NO: 1281862 - RNA, 14 nt, Human
ugggccugcuccag

SEQ ID NO: 1281863 - RNA, 15 nt, Human
ugggccugcuccaga

SEQ ID NO: 1281864 - RNA, 16 nt, Human
ugggccugcuccagac

SEQ ID NO: 1281865 - RNA, 18 nt, Human
ugggccugcuccagaccu

SEQ ID NO: 1281866 - RNA, 19 nt, Human
ugggccugcuccagaccug

SEQ ID NO: 1281867 - RNA, 20 nt, Human
ugggccugcuccagaccuga

SEQ ID NO: 1281868 - RNA, 12 nt, Human
ugggccugcugc

SEQ ID NO: 1281869 - RNA, 13 nt, Human
ugggccugcugcu

SEQ ID NO: 1281870 - RNA, 14 nt, Human
ugggccugcugcug

SEQ ID NO: 1281871 - RNA, 15 nt, Human
ugggccugcugcuga

SEQ ID NO: 1281872 - RNA, 16 nt, Human
ugggccugcugcugag

SEQ ID NO: 1281873 - RNA, 17 nt, Human
ugggccugcugcugaga

SEQ ID NO: 1281874 - RNA, 18 nt, Human
ugggccugcugcugagaa

SEQ ID NO: 1281875 - RNA, 15 nt, Human
uggggcagcuccucu

SEQ ID NO: 1281876 - RNA, 16 nt, Human
uggggcagcuccucug

SEQ ID NO: 1281877 - RNA, 14 nt, Human
ugggaaugaagcaa

SEQ ID NO: 1281878 - RNA, 18 nt, Human
uggcuuuucacugcuggc

SEQ ID NO: 1281879 - RNA, 19 nt, Human
uggcuuuucacugcuggcu

SEQ ID NO: 1281880 - RNA, 21 nt, Human
uggcuuuucacugcuggcugc

SEQ ID NO: 1281881 - RNA, 22 nt, Human
uggcuuuucacugcuggcugcc

SEQ ID NO: 1281882 - RNA, 16 nt, Human
uggcuuuucacugcug

SEQ ID NO: 1281883 - RNA, 16 nt, Human
uggcuugggcagcauc

SEQ ID NO: 1281884 - RNA, 17 nt, Human
uggcuuggccacagcca

SEQ ID NO: 1281885 - RNA, 18 nt, Human
uggcuuggccacagccag

SEQ ID NO: 1281886 - RNA, 19 nt, Human
uggcuuggccacagccagg

SEQ ID NO: 1281887 - RNA, 20 nt, Human
uggcuuggccacagccaggg

SEQ ID NO: 1281888 - RNA, 23 nt, Human
uggcuuggccacagccaggggag

SEQ ID NO: 1281889 - RNA, 22 nt, Human
uggcuuggccacagccagggga

SEQ ID NO: 1281890 - RNA, 18 nt, Human
uggcuugggacuaaaugc

SEQ ID NO: 1281891 - RNA, 23 nt, Human
uggcuugggacuaaaugcccugc

SEQ ID NO: 1281892 - RNA, 22 nt, Human
uggcuucccgcucagcccuccc

SEQ ID NO: 1281893 - RNA, 19 nt, Human
uggcuucccgcucagcccu

SEQ ID NO: 1281894 - RNA, 20 nt, Human
uggcuucccgcucagcccuc

SEQ ID NO: 1281895 - RNA, 21 nt, Human
uggcuucccgcucagcccucc

SEQ ID NO: 1281896 - RNA, 19 nt, Human
uggcuggccucacccaccc

SEQ ID NO: 1281897 - RNA, 15 nt, Human
uggcuggccucaccc

SEQ ID NO: 1281898 - RNA, 12 nt, Human
uggcuggcugag

SEQ ID NO: 1281899 - RNA, 13 nt, Human
uggcuggcugagg

SEQ ID NO: 1281900 - RNA, 14 nt, Human
uggcuggcugaggg

SEQ ID NO: 1281901 - RNA, 15 nt, Human
uggcuggcugagggc

SEQ ID NO: 1281902 - RNA, 18 nt, Human
uggcuggcugagggcagu

SEQ ID NO: 1281903 - RNA, 17 nt, Human
uggcuggcugagggcag

SEQ ID NO: 1281904 - RNA, 15 nt, Human
uggcugggacguggc

SEQ ID NO: 1281905 - RNA, 19 nt, Human
uggcugggacguggcucag

SEQ ID NO: 1281906 - RNA, 23 nt, Human
uggcugggacguggcucagccag

SEQ ID NO: 1281907 - RNA, 22 nt, Human
uggccucucucuaggguacaug

SEQ ID NO: 1281908 - RNA, 23 nt, Human
uggccuucggccuccauccugag

SEQ ID NO: 1281909 - RNA, 22 nt, Human
uggccuucggccuccauccuga

SEQ ID NO: 1281910 - RNA, 17 nt, Human
uggcuccagcuggccgg

SEQ ID NO: 1281911 - RNA, 23 nt, Human
uggcuccagaugcagggcaguca

SEQ ID NO: 1281912 - RNA, 20 nt, Human
uggcuccagaugcagggcag

SEQ ID NO: 1281913 - RNA, 21 nt, Human
uggcuccagaugcagggcagu

SEQ ID NO: 1281914 - RNA, 18 nt, Human
uggccuagaccagcagac

SEQ ID NO: 1281915 - RNA, 21 nt, Human
uggccuagaccagcagacaga

SEQ ID NO: 1281916 - RNA, 15 nt, Human
uggccucacccaccc

SEQ ID NO: 1281917 - RNA, 22 nt, Human
uggccucacccaccccugcaca

SEQ ID NO: 1281918 - RNA, 20 nt, Human
uggccucccaaaugagccau

SEQ ID NO: 1281919 - RNA, 13 nt, Human
uggccuccugccu

SEQ ID NO: 1281920 - RNA, 14 nt, Human
uggccuccugccuc

SEQ ID NO: 1281921 - RNA, 15 nt, Human
uggccuccugccucu

SEQ ID NO: 1281922 - RNA, 16 nt, Human
uggccuccugccucua

SEQ ID NO: 1281923 - RNA, 21 nt, Human
uggccuccugccucuacuggg

SEQ ID NO: 1281924 - RNA, 14 nt, Human
uggccucucuaucc

SEQ ID NO: 1281925 - RNA, 17 nt, Human
uggccucucuauccucu

SEQ ID NO: 1281926 - RNA, 23 nt, Human
uggccucucuauccucucuuccu

SEQ ID NO: 1281927 - RNA, 15 nt, Human
uggccucucucuagg

SEQ ID NO: 1281928 - RNA, 11 nt, Human
uggcagcucug

SEQ ID NO: 1281929 - RNA, 21 nt, Human
uggcagcucuggacagcccca

SEQ ID NO: 1281930 - RNA, 22 nt, Human
uggcagcucuggacagccccac

SEQ ID NO: 1281931 - RNA, 13 nt, Human
uggccccagcaca

SEQ ID NO: 1281932 - RNA, 14 nt, Human
uggccccagcacag

SEQ ID NO: 1281933 - RNA, 17 nt, Human
uggccccagcacagcuu

SEQ ID NO: 1281934 - RNA, 18 nt, Human
uggccccagcacagcuug

SEQ ID NO: 1281935 - RNA, 19 nt, Human
uggccccagcacagcuuga

SEQ ID NO: 1281936 - RNA, 12 nt, Human
uggccccaggac

SEQ ID NO: 1281937 - RNA, 15 nt, Human
uggccccaggaccug

SEQ ID NO: 1281938 - RNA, 20 nt, Human
uggccccaggaccuggcugc

SEQ ID NO: 1281939 - RNA, 19 nt, Human
uggccccucccccugccag

SEQ ID NO: 1281940 - RNA, 10 nt, Human
uggccccucu

SEQ ID NO: 1281941 - RNA, 12 nt, Human
uggccccucuga

SEQ ID NO: 1281942 - RNA, 13 nt, Human
uggccccucugac

SEQ ID NO: 1281943 - RNA, 14 nt, Human
uggccccucugacc

SEQ ID NO: 1281944 - RNA, 16 nt, Human
uggccccucugaccug

SEQ ID NO: 1281945 - RNA, 18 nt, Human
uggccccucugaccugca

SEQ ID NO: 1281946 - RNA, 14 nt, Human
uggccccugaacaa

SEQ ID NO: 1281947 - RNA, 20 nt, Human
uggccccugaacaagaauug

SEQ ID NO: 1281948 - RNA, 23 nt, Human
uggccuaaccugccgagagucca

SEQ ID NO: 1281949 - RNA, 15 nt, Human
uggccccucucccuu

SEQ ID NO: 1281950 - RNA, 21 nt, Human
uggccuaagaggcugcccucc

SEQ ID NO: 1281951 - RNA, 22 nt, Human
uggccuaagaggcugcccuccu

SEQ ID NO: 1281952 - RNA, 17 nt, Human
ugcuuuggaaaacccag

SEQ ID NO: 1281953 - RNA, 13 nt, Human
ugcuuuggaaauc

SEQ ID NO: 1281954 - RNA, 22 nt, Human
ugcuuugcccuucuuucuaccc

SEQ ID NO: 1281955 - RNA, 18 nt, Human
ugcuuucgaacugcuagu

SEQ ID NO: 1281956 - RNA, 15 nt, Human
ugcuuucuccuuuaa

SEQ ID NO: 1281957 - RNA, 20 nt, Human
ugcuuucuccuuuaauugua

SEQ ID NO: 1281958 - RNA, 22 nt, Human
ugcuuucuccuuuaauuguaaa

SEQ ID NO: 1281959 - RNA, 14 nt, Human
ugcuuucugaucaa

SEQ ID NO: 1281960 - RNA, 15 nt, Human
ugcuuugagagagaa

SEQ ID NO: 1281961 - RNA, 17 nt, Human
ugcuuugauauuucaau

SEQ ID NO: 1281962 - RNA, 13 nt, Human
ugcuuugauauuu

SEQ ID NO: 1281963 - RNA, 22 nt, Human
ugcuucuguuuuauaauuuugu

SEQ ID NO: 1281964 - RNA, 14 nt, Human
ugcuuguuaacuga

SEQ ID NO: 1281965 - RNA, 16 nt, Human
ugcuuguuaacugagu

SEQ ID NO: 1281966 - RNA, 20 nt, Human
ugcuuuccauucgugaaaac

SEQ ID NO: 1281967 - RNA, 17 nt, Human
ugcuuucgguuccaguu

SEQ ID NO: 1281968 - RNA, 21 nt, Human
ugcuuuccauucgugaaaaca

SEQ ID NO: 1281969 - RNA, 13 nt, Human
uggaaccuuguuu

SEQ ID NO: 1281970 - RNA, 13 nt, Human
uggaacuugaacu

SEQ ID NO: 1281971 - RNA, 15 nt, Human
uggaacuugaacuga

SEQ ID NO: 1281972 - RNA, 16 nt, Human
uggaacuugaacugau

SEQ ID NO: 1281973 - RNA, 22 nt, Human
uggaacuugccugccuuuccau

SEQ ID NO: 1281974 - RNA, 20 nt, Human
uggaacauaaaaaggacauc

SEQ ID NO: 1281975 - RNA, 18 nt, Human
uggaaccucagccuggcc

SEQ ID NO: 1281976 - RNA, 19 nt, Human
uggaaccucagccuggcca

SEQ ID NO: 1281977 - RNA, 23 nt, Human
uggaaccucagccuggccagaca

SEQ ID NO: 1281978 - RNA, 18 nt, Human
uggaacauaaaaaggaca

SEQ ID NO: 1281979 - RNA, 13 nt, Human
uggaacacuucga

SEQ ID NO: 1281980 - RNA, 22 nt, Human
uggaaaaguauguuagugcaaa

SEQ ID NO: 1281981 - RNA, 16 nt, Human
uggaaaccuuccaccc

SEQ ID NO: 1281982 - RNA, 19 nt, Human
uggaaaccuuccacccagu

SEQ ID NO: 1281983 - RNA, 13 nt, Human
ugcuucuccagcc

SEQ ID NO: 1281984 - RNA, 13 nt, Human
ugcuucucccagg

SEQ ID NO: 1281985 - RNA, 16 nt, Human
ugcuucucccaggcaa

SEQ ID NO: 1281986 - RNA, 17 nt, Human
ugcuucucccaggcaag

SEQ ID NO: 1281987 - RNA, 20 nt, Human
ugcuucucccaggcaaggcu

SEQ ID NO: 1281988 - RNA, 21 nt, Human
ugcuucucccaggcaaggcug

SEQ ID NO: 1281989 - RNA, 22 nt, Human
ugcuucucccaggcaaggcugu

SEQ ID NO: 1281990 - RNA, 12 nt, Human
ugcuucucugac

SEQ ID NO: 1281991 - RNA, 13 nt, Human
ugcuucucugacu

SEQ ID NO: 1281992 - RNA, 17 nt, Human
ugcuucuguuuuauaau

SEQ ID NO: 1281993 - RNA, 22 nt, Human
ugcuucucagauuucugaggaa

SEQ ID NO: 1281994 - RNA, 21 nt, Human
ugcuucucagauuucugagga

SEQ ID NO: 1281995 - RNA, 15 nt, Human
ugcuucgggcccuuc

SEQ ID NO: 1281996 - RNA, 14 nt, Human
ugcuuccuccugga

SEQ ID NO: 1281997 - RNA, 15 nt, Human
ugcuuccuccuggaa

SEQ ID NO: 1281998 - RNA, 22 nt, Human
ugcuuccugucuuauccuccac

SEQ ID NO: 1281999 - RNA, 13 nt, Human
ugcuucgggcccu

SEQ ID NO: 1282000 - RNA, 16 nt, Human
ugcuucccuuuccuga

SEQ ID NO: 1282001 - RNA, 12 nt, Human
ugcuuccuccug

SEQ ID NO: 1282002 - RNA, 13 nt, Human
ugcuuccuccugg

SEQ ID NO: 1282003 - RNA, 14 nt, Human
ugcuuaccucucag

SEQ ID NO: 1282004 - RNA, 22 nt, Human
ugcuuaccucucagccuuagcu

SEQ ID NO: 1282005 - RNA, 12 nt, Human
ugcuuccagugu

SEQ ID NO: 1282006 - RNA, 15 nt, Human
ugcuucccuaaucua

SEQ ID NO: 1282007 - RNA, 20 nt, Human
ugcuuaauucaaauaauaau

SEQ ID NO: 1282008 - RNA, 18 nt, Human
ugcuuaauucaaauaaua

SEQ ID NO: 1282009 - RNA, 17 nt, Human
ugcuuaauucaaauaau

SEQ ID NO: 1282010 - RNA, 16 nt, Human
ugcuuaauucaaauaa

SEQ ID NO: 1282011 - RNA, 22 nt, Human
ugcuuaacagggaacgugauua

SEQ ID NO: 1282012 - RNA, 15 nt, Human
ugcuuaauaaauugu

SEQ ID NO: 1282013 - RNA, 20 nt, Human
ugcuuaaagaauucaaauuu

SEQ ID NO: 1282014 - RNA, 19 nt, Human
ugcuuaaagaauucaaauu

SEQ ID NO: 1282015 - RNA, 18 nt, Human
ugcuuaaagaauucaaau

SEQ ID NO: 1282016 - RNA, 19 nt, Human
ugcuuaaaauaagcaggug

SEQ ID NO: 1282017 - RNA, 12 nt, Human
ugcuguuuuguu

SEQ ID NO: 1282018 - RNA, 13 nt, Human
ugcuguuuuguua

SEQ ID NO: 1282019 - RNA, 16 nt, Human
ugcuguuuuguuauau

SEQ ID NO: 1282020 - RNA, 19 nt, Human
ugcuguuuuguuauauaau

SEQ ID NO: 1282021 - RNA, 18 nt, Human
ugcuguuuuguuauauaa

SEQ ID NO: 1282022 - RNA, 14 nt, Human
ugcuuaaaauaagc

SEQ ID NO: 1282023 - RNA, 15 nt, Human
ugcuuaaaauaagca

SEQ ID NO: 1282024 - RNA, 17 nt, Human
ugcuuaaaauaagcagg

SEQ ID NO: 1282025 - RNA, 16 nt, Human
ugccugucccaccccc

SEQ ID NO: 1282026 - RNA, 19 nt, Human
ugccugucccacccccacc

SEQ ID NO: 1282027 - RNA, 23 nt, Human
ugcuguuuuaaacauuaauagca

SEQ ID NO: 1282028 - RNA, 18 nt, Human
ugcuguuuugauuuguac

SEQ ID NO: 1282029 - RNA, 19 nt, Human
uggaucaaauccagccugc

SEQ ID NO: 1282030 - RNA, 14 nt, Human
uggaucacaaagug

SEQ ID NO: 1282031 - RNA, 15 nt, Human
uggaucacaaagugg

SEQ ID NO: 1282032 - RNA, 16 nt, Human
uggaucacaagaugga

SEQ ID NO: 1282033 - RNA, 17 nt, Human
uggauauaguuuuacuu

SEQ ID NO: 1282034 - RNA, 16 nt, Human
uggauauguaaaacau

SEQ ID NO: 1282035 - RNA, 21 nt, Human
uggauauguaaaacauuuauu

SEQ ID NO: 1282036 - RNA, 17 nt, Human
uggauauguaaaacauu

SEQ ID NO: 1282037 - RNA, 14 nt, Human
uggauauuguuacg

SEQ ID NO: 1282038 - RNA, 11 nt, Human
uggauauuugu

SEQ ID NO: 1282039 - RNA, 13 nt, Human
uggauauuuguau

SEQ ID NO: 1282040 - RNA, 18 nt, Human
uggagaugaggccagacc

SEQ ID NO: 1282041 - RNA, 17 nt, Human
uggagaugaggccagac

SEQ ID NO: 1282042 - RNA, 16 nt, Human
uggagaugaggccaga

SEQ ID NO: 1282043 - RNA, 15 nt, Human
uggagaugaggccag

SEQ ID NO: 1282044 - RNA, 14 nt, Human
uggagaugaggcca

SEQ ID NO: 1282045 - RNA, 20 nt, Human
uggagauccuccugcagacc

SEQ ID NO: 1282046 - RNA, 21 nt, Human
uggagauccuccugcagacca

SEQ ID NO: 1282047 - RNA, 17 nt, Human
uggagaguuuccugaaa

SEQ ID NO: 1282048 - RNA, 23 nt, Human
uggagaucaccaguguguggcuu

SEQ ID NO: 1282049 - RNA, 14 nt, Human
uggagauccuccug

SEQ ID NO: 1282050 - RNA, 16 nt, Human
uggagauccuccugca

SEQ ID NO: 1282051 - RNA, 18 nt, Human
uggagauccuccugcaga

SEQ ID NO: 1282052 - RNA, 21 nt, Human
uggaggggcagagccaggaag

SEQ ID NO: 1282053 - RNA, 18 nt, Human
uggaggggcagagccagg

SEQ ID NO: 1282054 - RNA, 16 nt, Human
uggaggggcagagcca

SEQ ID NO: 1282055 - RNA, 14 nt, Human
uggaggggcagagc

SEQ ID NO: 1282056 - RNA, 13 nt, Human
uggaggggcagag

SEQ ID NO: 1282057 - RNA, 23 nt, Human
uggaggggcagagccaggaagau

SEQ ID NO: 1282058 - RNA, 16 nt, Human
uggaggggcuggggac

SEQ ID NO: 1282059 - RNA, 19 nt, Human
uggagggggaauggcagca

SEQ ID NO: 1282060 - RNA, 13 nt, Human
uggcaaggacuuu

SEQ ID NO: 1282061 - RNA, 19 nt, Human
uggcaaggacuuuguacau

SEQ ID NO: 1282062 - RNA, 20 nt, Human
uggcaaggacuuuguacauu

SEQ ID NO: 1282063 - RNA, 21 nt, Human
uggcaaggacuuuguacauuu

SEQ ID NO: 1282064 - RNA, 16 nt, Human
uggcaaggaaaaacag

SEQ ID NO: 1282065 - RNA, 16 nt, Human
uggauuuaaaagccug

SEQ ID NO: 1282066 - RNA, 18 nt, Human
uggauuuaaaagccugcu

SEQ ID NO: 1282067 - RNA, 20 nt, Human
uggauuuaaaagccugcuca

SEQ ID NO: 1282068 - RNA, 16 nt, Human
uggcaaccagaccauu

SEQ ID NO: 1282069 - RNA, 15 nt, Human
uggaacuugccugcc

SEQ ID NO: 1282070 - RNA, 18 nt, Human
uggaacuugccugccuuu

SEQ ID NO: 1282071 - RNA, 21 nt, Human
uggaacuugccugccuuucca

SEQ ID NO: 1282072 - RNA, 16 nt, Human
uggaagaaggggcagg

SEQ ID NO: 1282073 - RNA, 21 nt, Human
uggacucuggugccuccagag

SEQ ID NO: 1282074 - RNA, 22 nt, Human
uggacucuggugccuccagagg

SEQ ID NO: 1282075 - RNA, 13 nt, Human
uggacucuguccu

SEQ ID NO: 1282076 - RNA, 15 nt, Human
uggacucuguccuga

SEQ ID NO: 1282077 - RNA, 17 nt, Human
uggacucuguccugaag

SEQ ID NO: 1282078 - RNA, 22 nt, Human
uggacucuguccugaaggccug

SEQ ID NO: 1282079 - RNA, 23 nt, Human
uggacucuguccugaaggccuga

SEQ ID NO: 1282080 - RNA, 15 nt, Human
uggacugucauagaa

SEQ ID NO: 1282081 - RNA, 21 nt, Human
uggacugucauagaaauuaca

SEQ ID NO: 1282082 - RNA, 14 nt, Human
uggacugguuuuca

SEQ ID NO: 1282083 - RNA, 17 nt, Human
uggagaccaccagggca

SEQ ID NO: 1282084 - RNA, 13 nt, Human
uggagaccaccag

SEQ ID NO: 1282085 - RNA, 13 nt, Human
uggagagcccugg

SEQ ID NO: 1282086 - RNA, 14 nt, Human
uggagagcccuggg

SEQ ID NO: 1282087 - RNA, 15 nt, Human
uggagagcccuggga

SEQ ID NO: 1282088 - RNA, 16 nt, Human
uggagagcccugggac

SEQ ID NO: 1282089 - RNA, 20 nt, Human
uggagagcccugggaccgcu

SEQ ID NO: 1282090 - RNA, 18 nt, Human
uggagagcccugggaccg

SEQ ID NO: 1282091 - RNA, 14 nt, Human
uggagagcuaggag

SEQ ID NO: 1282092 - RNA, 15 nt, Human
uggagagcuaggagc

SEQ ID NO: 1282093 - RNA, 17 nt, Human
uggagagcuaggagcaa

SEQ ID NO: 1282094 - RNA, 23 nt, Human
uggagagcuaggagcaaagccug

SEQ ID NO: 1282095 - RNA, 22 nt, Human
uggagagcuaggagcaaagccu

SEQ ID NO: 1282096 - RNA, 15 nt, Human
uggagaguuuccuga

SEQ ID NO: 1282097 - RNA, 16 nt, Human
uggagaguuuccugaa

SEQ ID NO: 1282098 - RNA, 13 nt, Human
ugauguacaugua

SEQ ID NO: 1282099 - RNA, 22 nt, Human
ugauguaaucuugaauuguaac

SEQ ID NO: 1282100 - RNA, 21 nt, Human
ugauguaaggaugggcauggu

SEQ ID NO: 1282101 - RNA, 21 nt, Human
ugauguaaaaucuugucaugu

SEQ ID NO: 1282102 - RNA, 11 nt, Human
ugauguaaaau

SEQ ID NO: 1282103 - RNA, 15 nt, Human
ugauguaaaaucuug

SEQ ID NO: 1282104 - RNA, 16 nt, Human
ugauguaaaaucuugu

SEQ ID NO: 1282105 - RNA, 19 nt, Human
ugauguaaaaucuugucau

SEQ ID NO: 1282106 - RNA, 23 nt, Human
ugauguaaaaucuugucaugugu

SEQ ID NO: 1282107 - RNA, 15 nt, Human
ugaugcugccccuca

SEQ ID NO: 1282108 - RNA, 21 nt, Human
ugaucugaugcaagcaagaaa

SEQ ID NO: 1282109 - RNA, 20 nt, Human
ugaucugauaggguuuguga

SEQ ID NO: 1282110 - RNA, 22 nt, Human
ugaucugauaggguuugugaca

SEQ ID NO: 1282111 - RNA, 13 nt, Human
ugaucuggaaccc

SEQ ID NO: 1282112 - RNA, 14 nt, Human
ugaucuggaaccca

SEQ ID NO: 1282113 - RNA, 19 nt, Human
ugaugaaaaauugcugacu

SEQ ID NO: 1282114 - RNA, 21 nt, Human
ugaugaaaaauugcugacugu

SEQ ID NO: 1282115 - RNA, 12 nt, Human
ugaugaaaauaa

SEQ ID NO: 1282116 - RNA, 13 nt, Human
ugaugaaaauaaa

SEQ ID NO: 1282117 - RNA, 14 nt, Human
ugaugccaaaaaaa

SEQ ID NO: 1282118 - RNA, 18 nt, Human
ugaugccaaaaaaaaaua

SEQ ID NO: 1282119 - RNA, 21 nt, Human
ugaugccaaaaaaaaauacau

SEQ ID NO: 1282120 - RNA, 15 nt, Human
ugaugaaaauaaaga

SEQ ID NO: 1282121 - RNA, 16 nt, Human
ugaugaaaauaaagaa

SEQ ID NO: 1282122 - RNA, 17 nt, Human
ugaugaaaauaaagaau

SEQ ID NO: 1282123 - RNA, 19 nt, Human
ugaugaaaauaaagaaugg

SEQ ID NO: 1282124 - RNA, 23 nt, Human
ugauauaaguguguguuuuucau

SEQ ID NO: 1282125 - RNA, 17 nt, Human
ugauauaaguguguguu

SEQ ID NO: 1282126 - RNA, 24 nt, Human
ugauaguuguaccgcaaugugacu

SEQ ID NO: 1282127 - RNA, 19 nt, Human
ugauauaaaucagauucuu

SEQ ID NO: 1282128 - RNA, 16 nt, Human
ugauauagaaguauaa

SEQ ID NO: 1282129 - RNA, 21 nt, Human
ugauauagaaguauaaagaau

SEQ ID NO: 1282130 - RNA, 18 nt, Human
ugauauauaaguguacau

SEQ ID NO: 1282131 - RNA, 19 nt, Human
ugauauauaaguguacaua

SEQ ID NO: 1282132 - RNA, 22 nt, Human
ugauauauaaguguacauaugu

SEQ ID NO: 1282133 - RNA, 13 nt, Human
ugauauauuuuac

SEQ ID NO: 1282134 - RNA, 14 nt, Human
ugauauauuuuaca

SEQ ID NO: 1282135 - RNA, 18 nt, Human
ugaucagaccauaauguu

SEQ ID NO: 1282136 - RNA, 21 nt, Human
ugaucagagccgugguccuuu

SEQ ID NO: 1282137 - RNA, 22 nt, Human
ugaucagagccgugguccuuug

SEQ ID NO: 1282138 - RNA, 23 nt, Human
ugaucagagccgugguccuuugg

SEQ ID NO: 1282139 - RNA, 15 nt, Human
ugauauauuuuacaa

SEQ ID NO: 1282140 - RNA, 23 nt, Human
ugauaugcacaauguagauaagu

SEQ ID NO: 1282141 - RNA, 15 nt, Human
ugauaugcacaaugu

SEQ ID NO: 1282142 - RNA, 18 nt, Human
ugauaugcauauuuguuu

SEQ ID NO: 1282143 - RNA, 19 nt, Human
ugauaugcauauuuguuua

SEQ ID NO: 1282144 - RNA, 18 nt, Human
ugaucucagcucacugca

SEQ ID NO: 1282145 - RNA, 19 nt, Human
ugaucucagcucacugcaa

SEQ ID NO: 1282146 - RNA, 20 nt, Human
ugaucugaugcaagcaagaa

SEQ ID NO: 1282147 - RNA, 16 nt, Human
ugaucagccccacccu

SEQ ID NO: 1282148 - RNA, 20 nt, Human
ugaucaguuaagaaauuuca

SEQ ID NO: 1282149 - RNA, 21 nt, Human
ugaucaguuuuuucaccugga

SEQ ID NO: 1282150 - RNA, 22 nt, Human
ugagguuuuauuucauuuuuca

SEQ ID NO: 1282151 - RNA, 17 nt, Human
ugaguccuggaugauac

SEQ ID NO: 1282152 - RNA, 19 nt, Human
ugaguccuggaugauacua

SEQ ID NO: 1282153 - RNA, 21 nt, Human
ugaguccuggaugauacuaau

SEQ ID NO: 1282154 - RNA, 15 nt, Human
ugaggugugucacaa

SEQ ID NO: 1282155 - RNA, 14 nt, Human
ugagguuacuggaa

SEQ ID NO: 1282156 - RNA, 17 nt, Human
ugagguuacuggaaauu

SEQ ID NO: 1282157 - RNA, 13 nt, Human
ugaggucuguucc

SEQ ID NO: 1282158 - RNA, 14 nt, Human
ugaggucuguuccu

SEQ ID NO: 1282159 - RNA, 16 nt, Human
ugaggucuguuccuuu

SEQ ID NO: 1282160 - RNA, 18 nt, Human
ugaggcuguccuguacau

SEQ ID NO: 1282161 - RNA, 11 nt, Human
ugaggcugugg

SEQ ID NO: 1282162 - RNA, 21 nt, Human
ugaggcuguggucacagcgga

SEQ ID NO: 1282163 - RNA, 19 nt, Human
ugaggagcagcaggagggg

SEQ ID NO: 1282164 - RNA, 14 nt, Human
ugaggcuuuccaug

SEQ ID NO: 1282165 - RNA, 13 nt, Human
ugaggcuuuggau

SEQ ID NO: 1282166 - RNA, 18 nt, Human
ugaggcuuuggauuugac

SEQ ID NO: 1282167 - RNA, 23 nt, Human
ugaggcuuuggauuugacauugc

SEQ ID NO: 1282168 - RNA, 17 nt, Human
ugagggaaaagaaaaag

SEQ ID NO: 1282169 - RNA, 19 nt, Human
ugaggcuuuccaugggacc

SEQ ID NO: 1282170 - RNA, 14 nt, Human
ugaggcuggcacag

SEQ ID NO: 1282171 - RNA, 15 nt, Human
ugaggcuggcacagg

SEQ ID NO: 1282172 - RNA, 17 nt, Human
ugaggcuggcacaggac

SEQ ID NO: 1282173 - RNA, 11 nt, Human
ugaggcuggca

SEQ ID NO: 1282174 - RNA, 23 nt, Human
ugaggacuuaaaauauuccugca

SEQ ID NO: 1282175 - RNA, 17 nt, Human
ugaggaccguaaggccu

SEQ ID NO: 1282176 - RNA, 17 nt, Human
ugaggacugauuucaga

SEQ ID NO: 1282177 - RNA, 19 nt, Human
ugaggagacacaccugagg

SEQ ID NO: 1282178 - RNA, 15 nt, Human
ugaggagacacaccu

SEQ ID NO: 1282179 - RNA, 18 nt, Human
ugaggagauucugccuuu

SEQ ID NO: 1282180 - RNA, 22 nt, Human
ugaggagcagcaggagggggga

SEQ ID NO: 1282181 - RNA, 11 nt, Human
ugaggagcccc

SEQ ID NO: 1282182 - RNA, 14 nt, Human
ugaggagccccagc

SEQ ID NO: 1282183 - RNA, 16 nt, Human
ugaggagccccagcua

SEQ ID NO: 1282184 - RNA, 18 nt, Human
ugauagguauaaguggug

SEQ ID NO: 1282185 - RNA, 22 nt, Human
ugauaggaagaggggaagcaga

SEQ ID NO: 1282186 - RNA, 19 nt, Human
ugauaggguuugugacagg

SEQ ID NO: 1282187 - RNA, 22 nt, Human
ugauagguuauuuugauguaaa

SEQ ID NO: 1282188 - RNA, 16 nt, Human
ugauagucuuuugcuu

SEQ ID NO: 1282189 - RNA, 17 nt, Human
ugauagucuuuugcuuu

SEQ ID NO: 1282190 - RNA, 20 nt, Human
ugauaaaucauuuuauguca

SEQ ID NO: 1282191 - RNA, 15 nt, Human
ugauaaaucauuuua

SEQ ID NO: 1282192 - RNA, 14 nt, Human
ugauaaaucauuuu

SEQ ID NO: 1282193 - RNA, 22 nt, Human
ugaguuggcuuaccuggcccau

SEQ ID NO: 1282194 - RNA, 17 nt, Human
ugaguuggggucuggca

SEQ ID NO: 1282195 - RNA, 19 nt, Human
ugaguuggggucuggcagc

SEQ ID NO: 1282196 - RNA, 21 nt, Human
ugaguuggggucuggcagccu

SEQ ID NO: 1282197 - RNA, 16 nt, Human
ugaguuuaccuuguau

SEQ ID NO: 1282198 - RNA, 23 nt, Human
ugaguuuaccuuguauacuguag

SEQ ID NO: 1282199 - RNA, 11 nt, Human
ugaguuuccua

SEQ ID NO: 1282200 - RNA, 16 nt, Human
ugauaaaaccauguag

SEQ ID NO: 1282201 - RNA, 15 nt, Human
ugauaaagagacagu

SEQ ID NO: 1282202 - RNA, 18 nt, Human
ugauaaagauuuuuuaau

SEQ ID NO: 1282203 - RNA, 19 nt, Human
ugauaaagauuuuuuaaua

SEQ ID NO: 1282204 - RNA, 20 nt, Human
ugauaaagauuuuuuaauaa

SEQ ID NO: 1282205 - RNA, 13 nt, Human
ugauaaagccuca

SEQ ID NO: 1282206 - RNA, 20 nt, Human
ugauaaagccucaagguuuu

SEQ ID NO: 1282207 - RNA, 17 nt, Human
ugauaaaggccagauua

SEQ ID NO: 1282208 - RNA, 17 nt, Human
ugagcagucaggaaaga

SEQ ID NO: 1282209 - RNA, 20 nt, Human
ugagcagucaggaaagagaa

SEQ ID NO: 1282210 - RNA, 20 nt, Human
ugagaugcuagaacucccuu

SEQ ID NO: 1282211 - RNA, 16 nt, Human
ugagaugcuagaacuc

SEQ ID NO: 1282212 - RNA, 14 nt, Human
ugagaugcuagaac

SEQ ID NO: 1282213 - RNA, 14 nt, Human
ugagcaguccuugg

SEQ ID NO: 1282214 - RNA, 16 nt, Human
ugagcaguccuuggcc

SEQ ID NO: 1282215 - RNA, 17 nt, Human
ugagcaguccuuggccu

SEQ ID NO: 1282216 - RNA, 13 nt, Human
ugagccccaaaag

SEQ ID NO: 1282217 - RNA, 14 nt, Human
ugagcccagggagg

SEQ ID NO: 1282218 - RNA, 15 nt, Human
ugagcccagggaggc

SEQ ID NO: 1282219 - RNA, 17 nt, Human
ugagcccagggaggccg

SEQ ID NO: 1282220 - RNA, 17 nt, Human
ugagcccagcuggguca

SEQ ID NO: 1282221 - RNA, 21 nt, Human
ugagcccagcugggucaggca

SEQ ID NO: 1282222 - RNA, 11 nt, Human
ugagcccaggg

SEQ ID NO: 1282223 - RNA, 12 nt, Human
ugagcccaggga

SEQ ID NO: 1282224 - RNA, 13 nt, Human
ugagcccagggag

SEQ ID NO: 1282225 - RNA, 15 nt, Human
ugagcucccacaagc

SEQ ID NO: 1282226 - RNA, 18 nt, Human
ugagcucccacaagccug

SEQ ID NO: 1282227 - RNA, 19 nt, Human
ugagcucccacaagccuga

SEQ ID NO: 1282228 - RNA, 20 nt, Human
ugagcucccacaagccugag

SEQ ID NO: 1282229 - RNA, 21 nt, Human
ugagcucccacaagccugagg

SEQ ID NO: 1282230 - RNA, 12 nt, Human
ugagcucucugu

SEQ ID NO: 1282231 - RNA, 13 nt, Human
ugagcucucugcc

SEQ ID NO: 1282232 - RNA, 12 nt, Human
ugagcucugaga

SEQ ID NO: 1282233 - RNA, 15 nt, Human
ugagcucugagaggc

SEQ ID NO: 1282234 - RNA, 17 nt, Human
ugagcucugagaggccc

SEQ ID NO: 1282235 - RNA, 18 nt, Human
ugagcucugagaggcccu

SEQ ID NO: 1282236 - RNA, 19 nt, Human
ugagcucugagaggcccug

SEQ ID NO: 1282237 - RNA, 20 nt, Human
ugagcucugagaggcccugg

SEQ ID NO: 1282238 - RNA, 21 nt, Human
ugagcucugagaggcccugga

SEQ ID NO: 1282239 - RNA, 23 nt, Human
ugagcucugagaggcccuggauc

SEQ ID NO: 1282240 - RNA, 22 nt, Human
ugagcucugagaggcccuggau

SEQ ID NO: 1282241 - RNA, 12 nt, Human
ugagcucuucau

SEQ ID NO: 1282242 - RNA, 15 nt, Human
ugagcucuucauguu

SEQ ID NO: 1282243 - RNA, 16 nt, Human
ugagcucuucauguuu

SEQ ID NO: 1282244 - RNA, 18 nt, Human
ugagcucuucauguuuca

SEQ ID NO: 1282245 - RNA, 19 nt, Human
ugagaggcugggaauggag

SEQ ID NO: 1282246 - RNA, 13 nt, Human
ugagaggcccugg

SEQ ID NO: 1282247 - RNA, 14 nt, Human
ugagaggcccugga

SEQ ID NO: 1282248 - RNA, 16 nt, Human
ugagaggcccuggauc

SEQ ID NO: 1282249 - RNA, 17 nt, Human
ugagaggcccuggauca

SEQ ID NO: 1282250 - RNA, 23 nt, Human
ugagaggcccuggaucagcgugg

SEQ ID NO: 1282251 - RNA, 14 nt, Human
ugagagguuugacu

SEQ ID NO: 1282252 - RNA, 22 nt, Human
ugagagguuugacuagaugaug

SEQ ID NO: 1282253 - RNA, 20 nt, Human
ugagaugauacauccaaagc

SEQ ID NO: 1282254 - RNA, 18 nt, Human
ugagaccuaaucucugua

SEQ ID NO: 1282255 - RNA, 19 nt, Human
ugagaccuaaucucuguaa

SEQ ID NO: 1282256 - RNA, 20 nt, Human
ugagaccuaaucucuguaaa

SEQ ID NO: 1282257 - RNA, 12 nt, Human
ugagaggcccug

SEQ ID NO: 1282258 - RNA, 17 nt, Human
ugagaaaucuaaaaaac

SEQ ID NO: 1282259 - RNA, 17 nt, Human
ugacuguagcuuuggaa

SEQ ID NO: 1282260 - RNA, 16 nt, Human
ugacuguacuccuccc

SEQ ID NO: 1282261 - RNA, 17 nt, Human
ugacuguacuccuccca

SEQ ID NO: 1282262 - RNA, 18 nt, Human
ugacuguacuccucccag

SEQ ID NO: 1282263 - RNA, 22 nt, Human
ugacuguacuccucccaggcgc

SEQ ID NO: 1282264 - RNA, 18 nt, Human
ugagaaauuuaaacuaua

SEQ ID NO: 1282265 - RNA, 16 nt, Human
ugagacagcucugcau

SEQ ID NO: 1282266 - RNA, 14 nt, Human
ugagacagcucugc

SEQ ID NO: 1282267 - RNA, 13 nt, Human
ugagaaauuuaaa

SEQ ID NO: 1282268 - RNA, 14 nt, Human
ugagaaauuuaaac

SEQ ID NO: 1282269 - RNA, 15 nt, Human
ugagaaauuuaaacu

SEQ ID NO: 1282270 - RNA, 17 nt, Human
ugagaaauuuaaacuau

SEQ ID NO: 1282271 - RNA, 14 nt, Human
ugacugccaagacu

SEQ ID NO: 1282272 - RNA, 21 nt, Human
ugacugccaagacugcugugg

SEQ ID NO: 1282273 - RNA, 22 nt, Human
ugacugccaagacugcuguggc

SEQ ID NO: 1282274 - RNA, 13 nt, Human
ugacugccaagcc

SEQ ID NO: 1282275 - RNA, 14 nt, Human
ugacugccaagcca

SEQ ID NO: 1282276 - RNA, 16 nt, Human
ugacugccaagccaug

SEQ ID NO: 1282277 - RNA, 17 nt, Human
ugacugccaagccaugg

SEQ ID NO: 1282278 - RNA, 23 nt, Human
ugacugguguuaucaccgugggc

SEQ ID NO: 1282279 - RNA, 13 nt, Human
ugacucuuaagaa

SEQ ID NO: 1282280 - RNA, 20 nt, Human
ugacugagggugaguuggcu

SEQ ID NO: 1282281 - RNA, 12 nt, Human
ugacucuuaaga

SEQ ID NO: 1282282 - RNA, 14 nt, Human
ugacgucugggugg

SEQ ID NO: 1282283 - RNA, 15 nt, Human
ugacgucuggguggc

SEQ ID NO: 1282284 - RNA, 17 nt, Human
ugacgugaccggacuuu

SEQ ID NO: 1282285 - RNA, 22 nt, Human
ugacgugaccggacuuuucugc

SEQ ID NO: 1282286 - RNA, 24 nt, Human
ugacgugaccggacuuuucugcaa

SEQ ID NO: 1282287 - RNA, 18 nt, Human
ugacgucuggguggcccu

SEQ ID NO: 1282288 - RNA, 17 nt, Human
ugaccuuuuauguagua

SEQ ID NO: 1282289 - RNA, 18 nt, Human
ugaccuuuuauguaguaa

SEQ ID NO: 1282290 - RNA, 23 nt, Human
ugaccuuuuauguaguaauugac

SEQ ID NO: 1282291 - RNA, 15 nt, Human
ugacgacaagugcug

SEQ ID NO: 1282292 - RNA, 20 nt, Human
ugacgacaagugcugaacag

SEQ ID NO: 1282293 - RNA, 23 nt, Human
ugacgccaggguaugaagagugu

SEQ ID NO: 1282294 - RNA, 19 nt, Human
ugacggccagggagaagcu

SEQ ID NO: 1282295 - RNA, 16 nt, Human
ucuugaauaauguaag

SEQ ID NO: 1282296 - RNA, 13 nt, Human
ucuugaaggugcu

SEQ ID NO: 1282297 - RNA, 20 nt, Human
ugaccucaagugaucugccc

SEQ ID NO: 1282298 - RNA, 17 nt, Human
ugaccuaguuuuccaug

SEQ ID NO: 1282299 - RNA, 22 nt, Human
ugaccuaguuuuccaugcgugu

SEQ ID NO: 1282300 - RNA, 17 nt, Human
ugaccuauaccuguguu

SEQ ID NO: 1282301 - RNA, 23 nt, Human
ugaccuauaccuguguuucuugc

SEQ ID NO: 1282302 - RNA, 21 nt, Human
ugaccguguuggucuguacug

SEQ ID NO: 1282303 - RNA, 17 nt, Human
ugaccuaaauuauuuac

SEQ ID NO: 1282304 - RNA, 20 nt, Human
ugaccguguuggucuguacu

SEQ ID NO: 1282305 - RNA, 19 nt, Human
ugaccguguuggucuguac

SEQ ID NO: 1282306 - RNA, 12 nt, Human
ugacccugccuc

SEQ ID NO: 1282307 - RNA, 13 nt, Human
ugacccugccucu

SEQ ID NO: 1282308 - RNA, 18 nt, Human
ugacccugccucucccag

SEQ ID NO: 1282309 - RNA, 19 nt, Human
ugacccugccucucccagg

SEQ ID NO: 1282310 - RNA, 22 nt, Human
ugacccugccucucccaggcag

SEQ ID NO: 1282311 - RNA, 23 nt, Human
ugacccuccaccgcagaaggaag

SEQ ID NO: 1282312 - RNA, 14 nt, Human
ugacccuccccaaa

SEQ ID NO: 1282313 - RNA, 22 nt, Human
ugacccuccaccgcagaaggaa

SEQ ID NO: 1282314 - RNA, 17 nt, Human
ugacccugagcugacca

SEQ ID NO: 1282315 - RNA, 15 nt, Human
ugacccugaagugag

SEQ ID NO: 1282316 - RNA, 14 nt, Human
ugacccugagcuga

SEQ ID NO: 1282317 - RNA, 18 nt, Human
ugaccucgugauccaccc

SEQ ID NO: 1282318 - RNA, 19 nt, Human
ugaccuccgccauccaccc

SEQ ID NO: 1282319 - RNA, 16 nt, Human
ugaccucagcuuugau

SEQ ID NO: 1282320 - RNA, 13 nt, Human
ugaccuccagcuu

SEQ ID NO: 1282321 - RNA, 22 nt, Human
ugaccuccaugacugcacagua

SEQ ID NO: 1282322 - RNA, 18 nt, Human
ugaccuccagcuuuccug

SEQ ID NO: 1282323 - RNA, 17 nt, Human
ugaccuccgccauccac

SEQ ID NO: 1282324 - RNA, 14 nt, Human
ugcauuauauuuau

SEQ ID NO: 1282325 - RNA, 21 nt, Human
ugcauguugucuaagaaauug

SEQ ID NO: 1282326 - RNA, 15 nt, Human
ugcauuacugcaugc

SEQ ID NO: 1282327 - RNA, 17 nt, Human
ugcauuacugcaugcac

SEQ ID NO: 1282328 - RNA, 18 nt, Human
ugcauuacugcaugcacu

SEQ ID NO: 1282329 - RNA, 15 nt, Human
ugccaccacgcccgg

SEQ ID NO: 1282330 - RNA, 23 nt, Human
ugcauuuuggagaguuuccugaa

SEQ ID NO: 1282331 - RNA, 19 nt, Human
ugcauuagggaugccuccu

SEQ ID NO: 1282332 - RNA, 22 nt, Human
ugcauuagggaugccuccuuuc

SEQ ID NO: 1282333 - RNA, 22 nt, Human
ugcauuauaucaaaucuaccac

SEQ ID NO: 1282334 - RNA, 13 nt, Human
ugcauuuguuuau

SEQ ID NO: 1282335 - RNA, 18 nt, Human
ugcauuuguuuauguaau

SEQ ID NO: 1282336 - RNA, 19 nt, Human
ugcauuuguuuauguaauu

SEQ ID NO: 1282337 - RNA, 20 nt, Human
ugcauuuguuuauguaauuu

SEQ ID NO: 1282338 - RNA, 21 nt, Human
ugcauuuguuuauguaauuuc

SEQ ID NO: 1282339 - RNA, 22 nt, Human
ugcauuuguuuauguaauuuca

SEQ ID NO: 1282340 - RNA, 21 nt, Human
ugcauuuguuuuguuuacaga

SEQ ID NO: 1282341 - RNA, 18 nt, Human
ugcauguugucuaagaaa

SEQ ID NO: 1282342 - RNA, 19 nt, Human
ugcauguugucuaagaaau

SEQ ID NO: 1282343 - RNA, 20 nt, Human
ugcauguugucuaagaaauu

SEQ ID NO: 1282344 - RNA, 17 nt, Human
ugcauguaguaacacua

SEQ ID NO: 1282345 - RNA, 14 nt, Human
ugcauguaguaaca

SEQ ID NO: 1282346 - RNA, 15 nt, Human
ugcauccuccgccuc

SEQ ID NO: 1282347 - RNA, 14 nt, Human
ugcaugguuucagc

SEQ ID NO: 1282348 - RNA, 15 nt, Human
ugcaugguuucagca

SEQ ID NO: 1282349 - RNA, 16 nt, Human
ugcaugguuucagcac

SEQ ID NO: 1282350 - RNA, 17 nt, Human
ugcaugguuucagcacu

SEQ ID NO: 1282351 - RNA, 22 nt, Human
ugcaugguuucagcacuagcca

SEQ ID NO: 1282352 - RNA, 23 nt, Human
ugcauguaacgcaaguucccagu

SEQ ID NO: 1282353 - RNA, 18 nt, Human
ugcaugguuucagcacua

SEQ ID NO: 1282354 - RNA, 17 nt, Human
ugcauguacuguauauu

SEQ ID NO: 1282355 - RNA, 12 nt, Human
ugcauguaguaa

SEQ ID NO: 1282356 - RNA, 19 nt, Human
ugcagauaaacaguaguga

SEQ ID NO: 1282357 - RNA, 14 nt, Human
ugcauccuccgccu

SEQ ID NO: 1282358 - RNA, 14 nt, Human
ugcaucccuggcug

SEQ ID NO: 1282359 - RNA, 18 nt, Human
ugcagauggugagagaua

SEQ ID NO: 1282360 - RNA, 18 nt, Human
ugcauccauucuccugag

SEQ ID NO: 1282361 - RNA, 19 nt, Human
ugcauccauucuccugagg

SEQ ID NO: 1282362 - RNA, 22 nt, Human
ugcaucccaaaccacgccucuu

SEQ ID NO: 1282363 - RNA, 23 nt, Human
ugcaucccaaaccacgccucuug

SEQ ID NO: 1282364 - RNA, 20 nt, Human
ugccaugacaacuucuaauu

SEQ ID NO: 1282365 - RNA, 16 nt, Human
ugccaugaugccucug

SEQ ID NO: 1282366 - RNA, 20 nt, Human
ugccaugaugccucugucuu

SEQ ID NO: 1282367 - RNA, 18 nt, Human
ugccauguacaguauguu

SEQ ID NO: 1282368 - RNA, 17 nt, Human
ugccaugaugccucugu

SEQ ID NO: 1282369 - RNA, 19 nt, Human
ugccaugaugccucugucu

SEQ ID NO: 1282370 - RNA, 20 nt, Human
ugccauguaggguucccuua

SEQ ID NO: 1282371 - RNA, 18 nt, Human
ugccaugucaaacaaaua

SEQ ID NO: 1282372 - RNA, 17 nt, Human
ugccaugucaaacaaau

SEQ ID NO: 1282373 - RNA, 19 nt, Human
ugcccacggagucgugggg

SEQ ID NO: 1282374 - RNA, 13 nt, Human
ugccacucacuag

SEQ ID NO: 1282375 - RNA, 14 nt, Human
ugccacucacuagg

SEQ ID NO: 1282376 - RNA, 15 nt, Human
ugccacucacuaggc

SEQ ID NO: 1282377 - RNA, 17 nt, Human
ugccacucacuaggccc

SEQ ID NO: 1282378 - RNA, 18 nt, Human
ugccacucacuaggcccc

SEQ ID NO: 1282379 - RNA, 19 nt, Human
ugccacucacuaggccccc

SEQ ID NO: 1282380 - RNA, 20 nt, Human
ugccacucacuaggccccca

SEQ ID NO: 1282381 - RNA, 21 nt, Human
ugccacucacuaggcccccac

SEQ ID NO: 1282382 - RNA, 22 nt, Human
ugccacucacuaggcccccacu

SEQ ID NO: 1282383 - RNA, 22 nt, Human
ugccacugaggggggauccagu

SEQ ID NO: 1282384 - RNA, 17 nt, Human
ugccaggugaggucagc

SEQ ID NO: 1282385 - RNA, 15 nt, Human
ugccagggcagggcc

SEQ ID NO: 1282386 - RNA, 16 nt, Human
ugccagggcagggccc

SEQ ID NO: 1282387 - RNA, 17 nt, Human
ugccagggccccucucc

SEQ ID NO: 1282388 - RNA, 18 nt, Human
ugccagggccccucuccc

SEQ ID NO: 1282389 - RNA, 21 nt, Human
ugccagggccccucuccccag

SEQ ID NO: 1282390 - RNA, 23 nt, Human
ugccagggccccucuccccaggg

SEQ ID NO: 1282391 - RNA, 18 nt, Human
ugcccugcccugccaccu

SEQ ID NO: 1282392 - RNA, 15 nt, Human
ugcccugcccugcca

SEQ ID NO: 1282393 - RNA, 14 nt, Human
ugcccugcccugcc

SEQ ID NO: 1282394 - RNA, 19 nt, Human
ugcccugcgggucacagga

SEQ ID NO: 1282395 - RNA, 18 nt, Human
ugcccugcugagucccag

SEQ ID NO: 1282396 - RNA, 22 nt, Human
ugcccugcugagucccaggcug

SEQ ID NO: 1282397 - RNA, 23 nt, Human
ugcccugcugagucccaggcuga

SEQ ID NO: 1282398 - RNA, 18 nt, Human
ugcccgggagcucaggaa

SEQ ID NO: 1282399 - RNA, 18 nt, Human
ugcccggggaaaggcaag

SEQ ID NO: 1282400 - RNA, 17 nt, Human
ugcccgggagcucagga

SEQ ID NO: 1282401 - RNA, 17 nt, Human
ugcccagaauaaguuau

SEQ ID NO: 1282402 - RNA, 19 nt, Human
ugcccagaauaaguuauug

SEQ ID NO: 1282403 - RNA, 21 nt, Human
ugcccagaauaaguuauugca

SEQ ID NO: 1282404 - RNA, 21 nt, Human
ugcccggggaaaggcaagguc

SEQ ID NO: 1282405 - RNA, 16 nt, Human
ugcccugcugcccucc

SEQ ID NO: 1282406 - RNA, 14 nt, Human
ugcccugcugcccu

SEQ ID NO: 1282407 - RNA, 17 nt, Human
ugcccugcugcccuccc

SEQ ID NO: 1282408 - RNA, 18 nt, Human
ugcccuggauccaucagg

SEQ ID NO: 1282409 - RNA, 20 nt, Human
ugcccuggugcugccacacu

SEQ ID NO: 1282410 - RNA, 18 nt, Human
ugcccuggugcugccaca

SEQ ID NO: 1282411 - RNA, 21 nt, Human
ugcccuggugcugccacacuu

SEQ ID NO: 1282412 - RNA, 16 nt, Human
ugcccugguggcccuc

SEQ ID NO: 1282413 - RNA, 21 nt, Human
ugcccugguggcccucucccc

SEQ ID NO: 1282414 - RNA, 22 nt, Human
ugcccugguggcccucuccccu

SEQ ID NO: 1282415 - RNA, 15 nt, Human
ugcccugguuuccug

SEQ ID NO: 1282416 - RNA, 14 nt, Human
ugccguaauuuaac

SEQ ID NO: 1282417 - RNA, 19 nt, Human
ugccgucagugcugugcug

SEQ ID NO: 1282418 - RNA, 20 nt, Human
ugccguggauugcacguggc

SEQ ID NO: 1282419 - RNA, 22 nt, Human
ugccguggauugcacguggccu

SEQ ID NO: 1282420 - RNA, 23 nt, Human
ugccguggggccgccgccucuuu

SEQ ID NO: 1282421 - RNA, 14 nt, Human
ugccucuucccucu

SEQ ID NO: 1282422 - RNA, 14 nt, Human
ugccucuucauucu

SEQ ID NO: 1282423 - RNA, 13 nt, Human
ugccucuuccucc

SEQ ID NO: 1282424 - RNA, 21 nt, Human
ugccucuuccagucuuccuga

SEQ ID NO: 1282425 - RNA, 23 nt, Human
ugccucuuccagucuuccugaca

SEQ ID NO: 1282426 - RNA, 17 nt, Human
ugccucuuccuugaaga

SEQ ID NO: 1282427 - RNA, 13 nt, Human
ugccucuucuggg

SEQ ID NO: 1282428 - RNA, 16 nt, Human
ugccugccagcugcac

SEQ ID NO: 1282429 - RNA, 23 nt, Human
ugccugcauaggaguuuggagga

SEQ ID NO: 1282430 - RNA, 15 nt, Human
ugccugccagcugca

SEQ ID NO: 1282431 - RNA, 19 nt, Human
ugccugccagcugcacuga

SEQ ID NO: 1282432 - RNA, 14 nt, Human
ugccugguacagua

SEQ ID NO: 1282433 - RNA, 15 nt, Human
ugccugguacaguau

SEQ ID NO: 1282434 - RNA, 20 nt, Human
ugccugguauauccaaaagc

SEQ ID NO: 1282435 - RNA, 23 nt, Human
ugccugguauauccaaaagcuuu

SEQ ID NO: 1282436 - RNA, 16 nt, Human
ugccucccuucaugca

SEQ ID NO: 1282437 - RNA, 13 nt, Human
ugccucccugagc

SEQ ID NO: 1282438 - RNA, 19 nt, Human
ugccucccuuguggcagca

SEQ ID NO: 1282439 - RNA, 19 nt, Human
ugccuccguccccugccca

SEQ ID NO: 1282440 - RNA, 23 nt, Human
ugccuccguccccugcccaugcu

SEQ ID NO: 1282441 - RNA, 12 nt, Human
ugccuccucacc

SEQ ID NO: 1282442 - RNA, 22 nt, Human
ugccucccucucguaagauuuc

SEQ ID NO: 1282443 - RNA, 23 nt, Human
ugccucccucucguaagauuucc

SEQ ID NO: 1282444 - RNA, 14 nt, Human
ugccucccugagcu

SEQ ID NO: 1282445 - RNA, 18 nt, Human
ugccuaagaauaaacauu

SEQ ID NO: 1282446 - RNA, 19 nt, Human
ugccuaagaauaaacauuu

SEQ ID NO: 1282447 - RNA, 21 nt, Human
ugccucugugcugugugugac

SEQ ID NO: 1282448 - RNA, 13 nt, Human
ugccucugccugu

SEQ ID NO: 1282449 - RNA, 14 nt, Human
ugccucugccuguc

SEQ ID NO: 1282450 - RNA, 18 nt, Human
ugccucugccugucuccc

SEQ ID NO: 1282451 - RNA, 21 nt, Human
ugccucgaaacacagaaaccu

SEQ ID NO: 1282452 - RNA, 19 nt, Human
ugccuccucacccccagcu

SEQ ID NO: 1282453 - RNA, 24 nt, Human
ugccuccucacccccagcuuugcu

SEQ ID NO: 1282454 - RNA, 13 nt, Human
ugccucgaaacac

SEQ ID NO: 1282455 - RNA, 17 nt, Human
ugccucgaaacacagaa

SEQ ID NO: 1282456 - RNA, 14 nt, Human
ugcaaaaaggguca

SEQ ID NO: 1282457 - RNA, 19 nt, Human
ugcaaaaacuacaaccaau

SEQ ID NO: 1282458 - RNA, 21 nt, Human
ugcaaaaacucuuugagaggg

SEQ ID NO: 1282459 - RNA, 19 nt, Human
ugcaaaaggacucucagga

SEQ ID NO: 1282460 - RNA, 16 nt, Human
ugauuuuuuuuuuuca

SEQ ID NO: 1282461 - RNA, 18 nt, Human
ugauuuuuuuuucauaca

SEQ ID NO: 1282462 - RNA, 22 nt, Human
ugauuuuuuuuucauacacuua

SEQ ID NO: 1282463 - RNA, 22 nt, Human
ugauuuuuuuuuuuuuccuguc

SEQ ID NO: 1282464 - RNA, 20 nt, Human
ugauuuuuuuuuuuuuuucc

SEQ ID NO: 1282465 - RNA, 21 nt, Human
ugauuuuuuuuuuuuuuuccu

SEQ ID NO: 1282466 - RNA, 18 nt, Human
ugauuuuuaugccaccug

SEQ ID NO: 1282467 - RNA, 23 nt, Human
ugauuuuuauaaauacugcaaau

SEQ ID NO: 1282468 - RNA, 15 nt, Human
ugauuuuucuuuaca

SEQ ID NO: 1282469 - RNA, 14 nt, Human
ugauuuuucuuuac

SEQ ID NO: 1282470 - RNA, 21 nt, Human
ugauuuuugccucuuccaguc

SEQ ID NO: 1282471 - RNA, 22 nt, Human
ugauuuuugccucuuccagucu

SEQ ID NO: 1282472 - RNA, 17 nt, Human
ugauuuuuuuuaauuac

SEQ ID NO: 1282473 - RNA, 16 nt, Human
ugauuuuuuuuccuuu

SEQ ID NO: 1282474 - RNA, 22 nt, Human
ugauuuuaggagcuaaggcucu

SEQ ID NO: 1282475 - RNA, 20 nt, Human
ugauuuucaaagcuuuuucc

SEQ ID NO: 1282476 - RNA, 13 nt, Human
ugauuuucuggau

SEQ ID NO: 1282477 - RNA, 15 nt, Human
ugauuuugaaaccau

SEQ ID NO: 1282478 - RNA, 15 nt, Human
ugauuuugaaaucau

SEQ ID NO: 1282479 - RNA, 11 nt, Human
ugauuuugaac

SEQ ID NO: 1282480 - RNA, 23 nt, Human
ugauuuugaaccugaugaaaaua

SEQ ID NO: 1282481 - RNA, 17 nt, Human
ugaugugcuuaacaggg

SEQ ID NO: 1282482 - RNA, 19 nt, Human
ugauuuuaagaauccaaac

SEQ ID NO: 1282483 - RNA, 19 nt, Human
ugauuuuaaguuucucugc

SEQ ID NO: 1282484 - RNA, 22 nt, Human
ugauuuuaaguuucucugcaga

SEQ ID NO: 1282485 - RNA, 16 nt, Human
ugauuuuaauaauaua

SEQ ID NO: 1282486 - RNA, 15 nt, Human
ugauuuuagccuucu

SEQ ID NO: 1282487 - RNA, 19 nt, Human
ugauuuuagccuucucugu

SEQ ID NO: 1282488 - RNA, 20 nt, Human
ugauuuuaggagcuaaggcu

SEQ ID NO: 1282489 - RNA, 13 nt, Human
ugaugugcuuaac

SEQ ID NO: 1282490 - RNA, 19 nt, Human
ugaugugcacguaaaguac

SEQ ID NO: 1282491 - RNA, 12 nt, Human
ugaugucuccua

SEQ ID NO: 1282492 - RNA, 16 nt, Human
ugaugucuccuaagca

SEQ ID NO: 1282493 - RNA, 23 nt, Human
ugaugucuuuguuaagacugcug

SEQ ID NO: 1282494 - RNA, 20 nt, Human
ugaugucuccuaagcaccug

SEQ ID NO: 1282495 - RNA, 22 nt, Human
ugaugugaagccaauucagaca

SEQ ID NO: 1282496 - RNA, 14 nt, Human
ugaugugaagccaa

SEQ ID NO: 1282497 - RNA, 18 nt, Human
ugcaacuuuguauaaaag

SEQ ID NO: 1282498 - RNA, 18 nt, Human
ugcaacuuguaaaugugg

SEQ ID NO: 1282499 - RNA, 16 nt, Human
ugcaacuuguaaaugu

SEQ ID NO: 1282500 - RNA, 22 nt, Human
ugcaacucugaaggguaauuau

SEQ ID NO: 1282501 - RNA, 14 nt, Human
ugcaaccuucaccu

SEQ ID NO: 1282502 - RNA, 16 nt, Human
ugcaacucaaggacuu

SEQ ID NO: 1282503 - RNA, 17 nt, Human
ugcaacucaaggacuuu

SEQ ID NO: 1282504 - RNA, 18 nt, Human
ugcaaccuucgccaccug

SEQ ID NO: 1282505 - RNA, 21 nt, Human
ugcaaccuucgccaccugggu

SEQ ID NO: 1282506 - RNA, 14 nt, Human
ugcaaccucugccu

SEQ ID NO: 1282507 - RNA, 22 nt, Human
ugcaaccucgcuggacucucag

SEQ ID NO: 1282508 - RNA, 18 nt, Human
ugcaaccucuuggccuga

SEQ ID NO: 1282509 - RNA, 14 nt, Human
ugcaaccucgcugg

SEQ ID NO: 1282510 - RNA, 19 nt, Human
ugcaaccucgcuggacucu

SEQ ID NO: 1282511 - RNA, 20 nt, Human
ugcaaccucgcuggacucuc

SEQ ID NO: 1282512 - RNA, 15 nt, Human
ugcaaccuccaccuc

SEQ ID NO: 1282513 - RNA, 18 nt, Human
ugcaaccuccaccuccug

SEQ ID NO: 1282514 - RNA, 19 nt, Human
ugcaaccuccaccuccugg

SEQ ID NO: 1282515 - RNA, 20 nt, Human
ugcaaccuccaccuccuggg

SEQ ID NO: 1282516 - RNA, 21 nt, Human
ugcaaccuccaccuccugggu

SEQ ID NO: 1282517 - RNA, 13 nt, Human
ugcaaccuccacc

SEQ ID NO: 1282518 - RNA, 16 nt, Human
ugcaaccgucuguuau

SEQ ID NO: 1282519 - RNA, 20 nt, Human
ugcaaccaggaacagcaaau

SEQ ID NO: 1282520 - RNA, 16 nt, Human
ugcaaccauuugaaac

SEQ ID NO: 1282521 - RNA, 24 nt, Human
ugcaacaggguauggacuaucugu

SEQ ID NO: 1282522 - RNA, 15 nt, Human
ugcaacaugaugagg

SEQ ID NO: 1282523 - RNA, 12 nt, Human
ugcaaccaggaa

SEQ ID NO: 1282524 - RNA, 17 nt, Human
ugcaaccaggaacagca

SEQ ID NO: 1282525 - RNA, 20 nt, Human
ugcaaaaucaguuuuccucu

SEQ ID NO: 1282526 - RNA, 15 nt, Human
ugcaaaaucaguuuu

SEQ ID NO: 1282527 - RNA, 14 nt, Human
ugcaaaaucaguuu

SEQ ID NO: 1282528 - RNA, 22 nt, Human
ugcaaaaggacucucaggacca

SEQ ID NO: 1282529 - RNA, 14 nt, Human
ugcacaguaaaaau

SEQ ID NO: 1282530 - RNA, 16 nt, Human
ugcacaguauuuguaa

SEQ ID NO: 1282531 - RNA, 21 nt, Human
ugcacaaauauuuauuuucuu

SEQ ID NO: 1282532 - RNA, 15 nt, Human
ugcacagugcaucuc

SEQ ID NO: 1282533 - RNA, 17 nt, Human
ugcacagugacuucuga

SEQ ID NO: 1282534 - RNA, 19 nt, Human
ugcacagugacuucugaga

SEQ ID NO: 1282535 - RNA, 21 nt, Human
ugcacagugacuucugagauc

SEQ ID NO: 1282536 - RNA, 17 nt, Human
ugcacaguauuuguaau

SEQ ID NO: 1282537 - RNA, 18 nt, Human
ugcacaguauuuguaauu

SEQ ID NO: 1282538 - RNA, 19 nt, Human
ugcacaguauuuguaauua

SEQ ID NO: 1282539 - RNA, 20 nt, Human
ugcacaguauuuguaauuaa

SEQ ID NO: 1282540 - RNA, 23 nt, Human
ugcacaguauuuguaauuaaaag

SEQ ID NO: 1282541 - RNA, 17 nt, Human
ugcacagucacugcucu

SEQ ID NO: 1282542 - RNA, 15 nt, Human
ugcacagugacuucu

SEQ ID NO: 1282543 - RNA, 16 nt, Human
ugcacagugacuucug

SEQ ID NO: 1282544 - RNA, 16 nt, Human
ugcacagugcaucuca

SEQ ID NO: 1282545 - RNA, 17 nt, Human
ugcacagugcaucucag

SEQ ID NO: 1282546 - RNA, 20 nt, Human
ugcacagugacuucugagau

SEQ ID NO: 1282547 - RNA, 14 nt, Human
ugcaccuuucuagu

SEQ ID NO: 1282548 - RNA, 18 nt, Human
ugcacgaccgccccaguu

SEQ ID NO: 1282549 - RNA, 22 nt, Human
ugcacuuauuuaugaaccugcc

SEQ ID NO: 1282550 - RNA, 14 nt, Human
ugcacuucuuacaa

SEQ ID NO: 1282551 - RNA, 15 nt, Human
ugcacuucaaauuca

SEQ ID NO: 1282552 - RNA, 19 nt, Human
ugcagagguccacaacaca

SEQ ID NO: 1282553 - RNA, 18 nt, Human
ugcacugugaaggacccu

SEQ ID NO: 1282554 - RNA, 13 nt, Human
ugcacuguucccc

SEQ ID NO: 1282555 - RNA, 14 nt, Human
ugcacuguuccccc

SEQ ID NO: 1282556 - RNA, 19 nt, Human
ugcacuguucccccugugc

SEQ ID NO: 1282557 - RNA, 20 nt, Human
ugcacuguucccccugugca

SEQ ID NO: 1282558 - RNA, 21 nt, Human
ugcacuguucccccugugcag

SEQ ID NO: 1282559 - RNA, 23 nt, Human
ugcacuguucccccugugcagcc

SEQ ID NO: 1282560 - RNA, 15 nt, Human
ugcacuuacuugcuu

SEQ ID NO: 1282561 - RNA, 16 nt, Human
ugcacuuacuugcuua

SEQ ID NO: 1282562 - RNA, 18 nt, Human
ugcacuuacuugcuuauu

SEQ ID NO: 1282563 - RNA, 18 nt, Human
ugcaccuuucuaguugaa

SEQ ID NO: 1282564 - RNA, 15 nt, Human
ugcacugugaaggac

SEQ ID NO: 1282565 - RNA, 15 nt, Human
ugcacaaagcccuuc

SEQ ID NO: 1282566 - RNA, 17 nt, Human
ugcacaaagcccuucca

SEQ ID NO: 1282567 - RNA, 18 nt, Human
ugcacaaaacccagaccu

SEQ ID NO: 1282568 - RNA, 19 nt, Human
ugcacaaaacccagaccug

SEQ ID NO: 1282569 - RNA, 19 nt, Human
ugcaauguguguauaugga

SEQ ID NO: 1282570 - RNA, 14 nt, Human
ugcaauucaaaagu

SEQ ID NO: 1282571 - RNA, 16 nt, Human
ugcaauucaaaaguuc

SEQ ID NO: 1282572 - RNA, 17 nt, Human
ugcaauucaaaaguucc

SEQ ID NO: 1282573 - RNA, 18 nt, Human
ugcaauucaaaaguucca

SEQ ID NO: 1282574 - RNA, 19 nt, Human
ugcaauucaaaaguuccaa

SEQ ID NO: 1282575 - RNA, 21 nt, Human
ugcaauucaaaaguuccaaga

SEQ ID NO: 1282576 - RNA, 13 nt, Human
ugcaauuccccuc

SEQ ID NO: 1282577 - RNA, 14 nt, Human
ugcaauuccccucu

SEQ ID NO: 1282578 - RNA, 18 nt, Human
ugcaauuccccucugcug

SEQ ID NO: 1282579 - RNA, 21 nt, Human
ugcaauugccuuuuuucugua

SEQ ID NO: 1282580 - RNA, 23 nt, Human
ugcaauuggcaccgaagcccaga

SEQ ID NO: 1282581 - RNA, 22 nt, Human
ugcaauuggcaccgaagcccag

SEQ ID NO: 1282582 - RNA, 12 nt, Human
ugcaauuucaag

SEQ ID NO: 1282583 - RNA, 13 nt, Human
ugcaauuucaagg

SEQ ID NO: 1282584 - RNA, 17 nt, Human
ugcaauuucaagguucu

SEQ ID NO: 1282585 - RNA, 18 nt, Human
ugcaauuucaagguucua

SEQ ID NO: 1282586 - RNA, 19 nt, Human
ugcaauuucaagguucuaa

SEQ ID NO: 1282587 - RNA, 20 nt, Human
ugcaauuucaagguucuaac

SEQ ID NO: 1282588 - RNA, 22 nt, Human
ugcaagaaguggggcagcagca

SEQ ID NO: 1282589 - RNA, 22 nt, Human
ugcaauguaaauauuuuaaaga

SEQ ID NO: 1282590 - RNA, 13 nt, Human
ugcaauguguaua

SEQ ID NO: 1282591 - RNA, 14 nt, Human
ugcaauguguauaa

SEQ ID NO: 1282592 - RNA, 15 nt, Human
ugcaauguguauaaa

SEQ ID NO: 1282593 - RNA, 16 nt, Human
ugcaauguguauaaac

SEQ ID NO: 1282594 - RNA, 18 nt, Human
ugcaauguguauaaacaa

SEQ ID NO: 1282595 - RNA, 20 nt, Human
ugcaauguguauaaacaaga

SEQ ID NO: 1282596 - RNA, 21 nt, Human
ugcaauguguauaaacaagaa

SEQ ID NO: 1282597 - RNA, 20 nt, Human
ugcaauguguguauauggac

SEQ ID NO: 1282598 - RNA, 22 nt, Human
ucugucucuggauuauauuaug

SEQ ID NO: 1282599 - RNA, 18 nt, Human
ucuguccuugaaggacua

SEQ ID NO: 1282600 - RNA, 22 nt, Human
ucugucucgagcgcccugcaga

SEQ ID NO: 1282601 - RNA, 21 nt, Human
ucugucucgagcgcccugcag

SEQ ID NO: 1282602 - RNA, 15 nt, Human
ucuguccuugaagga

SEQ ID NO: 1282603 - RNA, 11 nt, Human
ucugguucuaa

SEQ ID NO: 1282604 - RNA, 13 nt, Human
ucugguucuaaca

SEQ ID NO: 1282605 - RNA, 13 nt, Human
ucugguuccuccc

SEQ ID NO: 1282606 - RNA, 21 nt, Human
ucugguuccagggucccucug

SEQ ID NO: 1282607 - RNA, 23 nt, Human
ucugguuccagggucccucugug

SEQ ID NO: 1282608 - RNA, 12 nt, Human
ucugguuccagg

SEQ ID NO: 1282609 - RNA, 13 nt, Human
ucugguuccaggg

SEQ ID NO: 1282610 - RNA, 14 nt, Human
ucugguuccagggu

SEQ ID NO: 1282611 - RNA, 20 nt, Human
ucugguuccuccccuccucc

SEQ ID NO: 1282612 - RNA, 21 nt, Human
ucugguuccuccccuccuccu

SEQ ID NO: 1282613 - RNA, 14 nt, Human
ucugguucucaauu

SEQ ID NO: 1282614 - RNA, 17 nt, Human
ucuggugagucaccacu

SEQ ID NO: 1282615 - RNA, 20 nt, Human
ucuggugagucaccacuuca

SEQ ID NO: 1282616 - RNA, 13 nt, Human
ucuggugccucca

SEQ ID NO: 1282617 - RNA, 15 nt, Human
ucuggugccuccaga

SEQ ID NO: 1282618 - RNA, 16 nt, Human
ucuggugccuccagag

SEQ ID NO: 1282619 - RNA, 12 nt, Human
ucugguggcccc

SEQ ID NO: 1282620 - RNA, 14 nt, Human
ucugguggccccgu

SEQ ID NO: 1282621 - RNA, 16 nt, Human
ucugguggucuguugg

SEQ ID NO: 1282622 - RNA, 21 nt, Human
ucugguguuggacaagcuucu

SEQ ID NO: 1282623 - RNA, 15 nt, Human
ucuggcuccagcugg

SEQ ID NO: 1282624 - RNA, 12 nt, Human
ucuggcucuaau

SEQ ID NO: 1282625 - RNA, 15 nt, Human
ucuggcucuaauuca

SEQ ID NO: 1282626 - RNA, 23 nt, Human
ucuggccuucggccuccauccug

SEQ ID NO: 1282627 - RNA, 18 nt, Human
ucuggccuucggccucca

SEQ ID NO: 1282628 - RNA, 17 nt, Human
ucuggccuucggccucc

SEQ ID NO: 1282629 - RNA, 20 nt, Human
ucuggcucuaauucacagug

SEQ ID NO: 1282630 - RNA, 16 nt, Human
ucuggcucuaauucac

SEQ ID NO: 1282631 - RNA, 13 nt, Human
ucugggaccucag

SEQ ID NO: 1282632 - RNA, 16 nt, Human
ucugggaccucaguuu

SEQ ID NO: 1282633 - RNA, 22 nt, Human
ucugcugauccucccaggcuuc

SEQ ID NO: 1282634 - RNA, 15 nt, Human
ucugcugaccugcug

SEQ ID NO: 1282635 - RNA, 18 nt, Human
ucugcugaccugcugacc

SEQ ID NO: 1282636 - RNA, 20 nt, Human
ucugcugaccugcugaccug

SEQ ID NO: 1282637 - RNA, 19 nt, Human
ucugcugaccugcugaccu

SEQ ID NO: 1282638 - RNA, 13 nt, Human
ucugcuggccucu

SEQ ID NO: 1282639 - RNA, 14 nt, Human
ucugcuggccucug

SEQ ID NO: 1282640 - RNA, 16 nt, Human
ucugcuggccucugcg

SEQ ID NO: 1282641 - RNA, 17 nt, Human
ucugcuggccucugcga

SEQ ID NO: 1282642 - RNA, 19 nt, Human
ucugcuggccucugcgagu

SEQ ID NO: 1282643 - RNA, 23 nt, Human
ucugcuggggccugggacaacug

SEQ ID NO: 1282644 - RNA, 14 nt, Human
ucuggaauacauga

SEQ ID NO: 1282645 - RNA, 22 nt, Human
ucuggaauacaugaaauauaga

SEQ ID NO: 1282646 - RNA, 16 nt, Human
ucugcuggggccuggg

SEQ ID NO: 1282647 - RNA, 19 nt, Human
ucugcuggggccugggaca

SEQ ID NO: 1282648 - RNA, 23 nt, Human
ucugccagugacagacaggcucu

SEQ ID NO: 1282649 - RNA, 17 nt, Human
ucugccaguccuguccu

SEQ ID NO: 1282650 - RNA, 19 nt, Human
ucugcucccaaggggccug

SEQ ID NO: 1282651 - RNA, 20 nt, Human
ucugcucccaaggggccuga

SEQ ID NO: 1282652 - RNA, 22 nt, Human
ucugcucccaaggggccugagc

SEQ ID NO: 1282653 - RNA, 23 nt, Human
ucugcucccaaggggccugagca

SEQ ID NO: 1282654 - RNA, 22 nt, Human
ucugcuccccuaaagccucaaa

SEQ ID NO: 1282655 - RNA, 19 nt, Human
ucugccagugacagacagg

SEQ ID NO: 1282656 - RNA, 21 nt, Human
ucugccagugacagacaggcu

SEQ ID NO: 1282657 - RNA, 19 nt, Human
ucugccagggccccucucc

SEQ ID NO: 1282658 - RNA, 20 nt, Human
ucugccagggccccucuccc

SEQ ID NO: 1282659 - RNA, 22 nt, Human
ucugccagggccccucucccca

SEQ ID NO: 1282660 - RNA, 23 nt, Human
ucugccagggccccucuccccag

SEQ ID NO: 1282661 - RNA, 24 nt, Human
ucugccagggccccucuccccagg

SEQ ID NO: 1282662 - RNA, 14 nt, Human
ucugccaguccugu

SEQ ID NO: 1282663 - RNA, 13 nt, Human
ucugccagugaca

SEQ ID NO: 1282664 - RNA, 15 nt, Human
ucugccaggagacag

SEQ ID NO: 1282665 - RNA, 22 nt, Human
ucuuaaccagaucauugugaaa

SEQ ID NO: 1282666 - RNA, 12 nt, Human
ucuuaacuucuu

SEQ ID NO: 1282667 - RNA, 12 nt, Human
ucuuaagaagac

SEQ ID NO: 1282668 - RNA, 16 nt, Human
ucuuaacuucuugcuu

SEQ ID NO: 1282669 - RNA, 23 nt, Human
ucuuaacuucuugcuucuuucua

SEQ ID NO: 1282670 - RNA, 18 nt, Human
ucuuaagaagacugcauu

SEQ ID NO: 1282671 - RNA, 15 nt, Human
ucuuagcugucugcu

SEQ ID NO: 1282672 - RNA, 18 nt, Human
ucuuagcugucugcucag

SEQ ID NO: 1282673 - RNA, 23 nt, Human
ucuuagcugucugcucagacaga

SEQ ID NO: 1282674 - RNA, 15 nt, Human
ucuuaaauaaaccuu

SEQ ID NO: 1282675 - RNA, 21 nt, Human
ucuuaaagugccaguauuuua

SEQ ID NO: 1282676 - RNA, 15 nt, Human
ucuuaaauaagaaac

SEQ ID NO: 1282677 - RNA, 16 nt, Human
ucuuaaauaagaaacu

SEQ ID NO: 1282678 - RNA, 18 nt, Human
ucuuaaauaagaaacuuu

SEQ ID NO: 1282679 - RNA, 19 nt, Human
ucuuaaauaagaaacuuuu

SEQ ID NO: 1282680 - RNA, 17 nt, Human
ucuuaaccagaucauug

SEQ ID NO: 1282681 - RNA, 16 nt, Human
ucuuaaccagaucauu

SEQ ID NO: 1282682 - RNA, 18 nt, Human
ucugucugucugucccaa

SEQ ID NO: 1282683 - RNA, 15 nt, Human
ucugucugucugucc

SEQ ID NO: 1282684 - RNA, 16 nt, Human
ucugucugucccaaag

SEQ ID NO: 1282685 - RNA, 15 nt, Human
ucugucugucccaaa

SEQ ID NO: 1282686 - RNA, 14 nt, Human
ucugucugucccaa

SEQ ID NO: 1282687 - RNA, 16 nt, Human
ucugucugguggcccc

SEQ ID NO: 1282688 - RNA, 17 nt, Human
ucugucugguggccccg

SEQ ID NO: 1282689 - RNA, 18 nt, Human
ucugucugccaaccuaaa

SEQ ID NO: 1282690 - RNA, 21 nt, Human
ucugucugccaaccuaaaacu

SEQ ID NO: 1282691 - RNA, 19 nt, Human
ucugucuggaagaugggga

SEQ ID NO: 1282692 - RNA, 14 nt, Human
ucugucuggcaaug

SEQ ID NO: 1282693 - RNA, 13 nt, Human
ucugucugguggc

SEQ ID NO: 1282694 - RNA, 14 nt, Human
ucugucuucuggac

SEQ ID NO: 1282695 - RNA, 12 nt, Human
ucugucuugaag

SEQ ID NO: 1282696 - RNA, 23 nt, Human
ucuguuuucuuucuaaugagaua

SEQ ID NO: 1282697 - RNA, 17 nt, Human
ucuguuuugaaggcaaa

SEQ ID NO: 1282698 - RNA, 22 nt, Human
ucuuaaaguauucuucucuucc

SEQ ID NO: 1282699 - RNA, 19 nt, Human
ucuuaaagugccaguauuu

SEQ ID NO: 1282700 - RNA, 18 nt, Human
ucuuaaaguauucuucuc

SEQ ID NO: 1282701 - RNA, 16 nt, Human
ucuuaaacacuugcaa

SEQ ID NO: 1282702 - RNA, 16 nt, Human
ucuuaaaccuucaguu

SEQ ID NO: 1282703 - RNA, 12 nt, Human
ucuuaaacuaaa

SEQ ID NO: 1282704 - RNA, 19 nt, Human
ucuguuuuguuucgcucuu

SEQ ID NO: 1282705 - RNA, 21 nt, Human
ucuguuuuguuucgcucuuug

SEQ ID NO: 1282706 - RNA, 18 nt, Human
ucuguuuuucuaacuggg

SEQ ID NO: 1282707 - RNA, 17 nt, Human
ucuuccuucccugcugu

SEQ ID NO: 1282708 - RNA, 21 nt, Human
ucuuccuugaagaacugcagg

SEQ ID NO: 1282709 - RNA, 15 nt, Human
ucuuccuucccugcu

SEQ ID NO: 1282710 - RNA, 14 nt, Human
ucuuccuucccugc

SEQ ID NO: 1282711 - RNA, 20 nt, Human
ucuuccuuacuuuuuauaua

SEQ ID NO: 1282712 - RNA, 22 nt, Human
ucuuccuugaagaacugcaggc

SEQ ID NO: 1282713 - RNA, 23 nt, Human
ucuuccuuacuuuuuauauauau

SEQ ID NO: 1282714 - RNA, 12 nt, Human
ucuucuccacug

SEQ ID NO: 1282715 - RNA, 16 nt, Human
ucuucucccaauucau

SEQ ID NO: 1282716 - RNA, 19 nt, Human
ucuucuccauccuaccaca

SEQ ID NO: 1282717 - RNA, 13 nt, Human
ucuugaaaaaugc

SEQ ID NO: 1282718 - RNA, 17 nt, Human
ucuugaacuccugaccu

SEQ ID NO: 1282719 - RNA, 19 nt, Human
ucuugaacuccugaccuca

SEQ ID NO: 1282720 - RNA, 13 nt, Human
ucuucuccuuuca

SEQ ID NO: 1282721 - RNA, 15 nt, Human
ucuucucccuggaau

SEQ ID NO: 1282722 - RNA, 14 nt, Human
ucuucuccuuucac

SEQ ID NO: 1282723 - RNA, 23 nt, Human
ucuucucguccucguuuguguuc

SEQ ID NO: 1282724 - RNA, 16 nt, Human
ucuucuuuuuuuguga

SEQ ID NO: 1282725 - RNA, 17 nt, Human
ucuucuuuuuuugugau

SEQ ID NO: 1282726 - RNA, 18 nt, Human
ucuucuuuuuuugugaug

SEQ ID NO: 1282727 - RNA, 22 nt, Human
ucuuaggguuaugauuaaguaa

SEQ ID NO: 1282728 - RNA, 17 nt, Human
ucuuccuggauuauuca

SEQ ID NO: 1282729 - RNA, 22 nt, Human
ucuuccuggccgccugggucca

SEQ ID NO: 1282730 - RNA, 15 nt, Human
ucuucaucccacucc

SEQ ID NO: 1282731 - RNA, 23 nt, Human
ucucugaggggcuaccaggaaag

SEQ ID NO: 1282732 - RNA, 16 nt, Human
ucucugaugcagcuua

SEQ ID NO: 1282733 - RNA, 15 nt, Human
ucucugaugcagcuu

SEQ ID NO: 1282734 - RNA, 18 nt, Human
ucucugcaggucccuaau

SEQ ID NO: 1282735 - RNA, 16 nt, Human
ucucugcaggucccua

SEQ ID NO: 1282736 - RNA, 15 nt, Human
ucucugcaggucccu

SEQ ID NO: 1282737 - RNA, 19 nt, Human
ucucuggcuguaaggcucu

SEQ ID NO: 1282738 - RNA, 20 nt, Human
ucucuggcuguaaggcucua

SEQ ID NO: 1282739 - RNA, 22 nt, Human
ucucuggcuguaaggcucuaga

SEQ ID NO: 1282740 - RNA, 23 nt, Human
ucucuggcuguaaggcucuagau

SEQ ID NO: 1282741 - RNA, 12 nt, Human
ucucugggcugg

SEQ ID NO: 1282742 - RNA, 13 nt, Human
ucucugggcugga

SEQ ID NO: 1282743 - RNA, 15 nt, Human
ucucugggcuggaug

SEQ ID NO: 1282744 - RNA, 22 nt, Human
ucucugggcuggaugagcuccc

SEQ ID NO: 1282745 - RNA, 16 nt, Human
ucucugggcuggauga

SEQ ID NO: 1282746 - RNA, 17 nt, Human
ucucugggcuggaugag

SEQ ID NO: 1282747 - RNA, 20 nt, Human
ucucugggcuggaugagcuc

SEQ ID NO: 1282748 - RNA, 16 nt, Human
ucucugggggcugagg

SEQ ID NO: 1282749 - RNA, 18 nt, Human
ucucugggggcugaggag

SEQ ID NO: 1282750 - RNA, 17 nt, Human
ucucugguaauauugac

SEQ ID NO: 1282751 - RNA, 15 nt, Human
ucucuguccgagugu

SEQ ID NO: 1282752 - RNA, 12 nt, Human
ucucugucucau

SEQ ID NO: 1282753 - RNA, 14 nt, Human
ucucugucucaucc

SEQ ID NO: 1282754 - RNA, 15 nt, Human
ucucugucucaucca

SEQ ID NO: 1282755 - RNA, 16 nt, Human
ucucugucucauccau

SEQ ID NO: 1282756 - RNA, 21 nt, Human
ucucugggggcugaggagcag

SEQ ID NO: 1282757 - RNA, 12 nt, Human
ucucuguaaagc

SEQ ID NO: 1282758 - RNA, 14 nt, Human
ucucuguaaagcua

SEQ ID NO: 1282759 - RNA, 21 nt, Human
ucucugucucauccaucauca

SEQ ID NO: 1282760 - RNA, 23 nt, Human
ucucugucucauccaucaucaug

SEQ ID NO: 1282761 - RNA, 12 nt, Human
ucucugugccuu

SEQ ID NO: 1282762 - RNA, 17 nt, Human
ucucugugccuucgucu

SEQ ID NO: 1282763 - RNA, 11 nt, Human
ucucugugcuu

SEQ ID NO: 1282764 - RNA, 14 nt, Human
ucucugcagguccc

SEQ ID NO: 1282765 - RNA, 13 nt, Human
ucucugcaggucc

SEQ ID NO: 1282766 - RNA, 22 nt, Human
ucucugaggggcuaccaggaaa

SEQ ID NO: 1282767 - RNA, 21 nt, Human
ucucugaggggcuaccaggaa

SEQ ID NO: 1282768 - RNA, 15 nt, Human
ucucugauacagaaa

SEQ ID NO: 1282769 - RNA, 13 nt, Human
ucucugaagccac

SEQ ID NO: 1282770 - RNA, 13 nt, Human
ucucugacuucug

SEQ ID NO: 1282771 - RNA, 17 nt, Human
ucucuaguuccacgccu

SEQ ID NO: 1282772 - RNA, 13 nt, Human
ucucucucuacaa

SEQ ID NO: 1282773 - RNA, 14 nt, Human
ucucucucuacaaa

SEQ ID NO: 1282774 - RNA, 12 nt, Human
ucucucugccca

SEQ ID NO: 1282775 - RNA, 14 nt, Human
ucucucugcccaac

SEQ ID NO: 1282776 - RNA, 16 nt, Human
ucucucugcccaaccc

SEQ ID NO: 1282777 - RNA, 20 nt, Human
ucucaauauucaauaaagcu

SEQ ID NO: 1282778 - RNA, 17 nt, Human
ucucaauauucaauaaa

SEQ ID NO: 1282779 - RNA, 23 nt, Human
ucucaauaaaauuauagcucuaa

SEQ ID NO: 1282780 - RNA, 21 nt, Human
ucucaauaaaauuauagcucu

SEQ ID NO: 1282781 - RNA, 21 nt, Human
ucucaaguucuaagauucuaa

SEQ ID NO: 1282782 - RNA, 22 nt, Human
ucucaaguucuaagauucuaau

SEQ ID NO: 1282783 - RNA, 16 nt, Human
ucucaaguucuaagau

SEQ ID NO: 1282784 - RNA, 17 nt, Human
ucucaaguucuaagauu

SEQ ID NO: 1282785 - RNA, 18 nt, Human
ucucaaguucuaagauuc

SEQ ID NO: 1282786 - RNA, 20 nt, Human
ucucaaguucuaagauucua

SEQ ID NO: 1282787 - RNA, 18 nt, Human
ucucaauauucaauaaag

SEQ ID NO: 1282788 - RNA, 22 nt, Human
ucucaauaaaauuauagcucua

SEQ ID NO: 1282789 - RNA, 17 nt, Human
ucucaagagggcacugg

SEQ ID NO: 1282790 - RNA, 18 nt, Human
ucucaagagggcacuggu

SEQ ID NO: 1282791 - RNA, 15 nt, Human
ucucaagagcccugu

SEQ ID NO: 1282792 - RNA, 19 nt, Human
ucucaagagggcacuggug

SEQ ID NO: 1282793 - RNA, 15 nt, Human
ucucaagcucuuccu

SEQ ID NO: 1282794 - RNA, 12 nt, Human
ucucaaguucua

SEQ ID NO: 1282795 - RNA, 13 nt, Human
ucucaaguucuaa

SEQ ID NO: 1282796 - RNA, 14 nt, Human
ucucaaguucuaag

SEQ ID NO: 1282797 - RNA, 15 nt, Human
ucucaaguucuaaga

SEQ ID NO: 1282798 - RNA, 21 nt, Human
ucuccuggaagugcuaauuuu

SEQ ID NO: 1282799 - RNA, 11 nt, Human
ucuccuggagg

SEQ ID NO: 1282800 - RNA, 12 nt, Human
ucuccuggcuuc

SEQ ID NO: 1282801 - RNA, 19 nt, Human
ucuccugccucagccuccc

SEQ ID NO: 1282802 - RNA, 14 nt, Human
ucuccugcugcucc

SEQ ID NO: 1282803 - RNA, 17 nt, Human
ucuccugcugcucccuc

SEQ ID NO: 1282804 - RNA, 18 nt, Human
ucuccugcugcucccuca

SEQ ID NO: 1282805 - RNA, 19 nt, Human
ucuccugcugcucccucag

SEQ ID NO: 1282806 - RNA, 20 nt, Human
ucuccugcugcucccucaga

SEQ ID NO: 1282807 - RNA, 21 nt, Human
ucuccugcugcucccucagac

SEQ ID NO: 1282808 - RNA, 17 nt, Human
ucuccugccucagccuc

SEQ ID NO: 1282809 - RNA, 22 nt, Human
ucuccuggcuucccauccccag

SEQ ID NO: 1282810 - RNA, 13 nt, Human
ucuccuggcuucc

SEQ ID NO: 1282811 - RNA, 15 nt, Human
ucuccuggcuuccca

SEQ ID NO: 1282812 - RNA, 21 nt, Human
ucucggcuccccauguguccu

SEQ ID NO: 1282813 - RNA, 18 nt, Human
ucuccuggcuucccaucc

SEQ ID NO: 1282814 - RNA, 19 nt, Human
ucucguccucguuuguguu

SEQ ID NO: 1282815 - RNA, 14 nt, Human
ucucgucucuuuua

SEQ ID NO: 1282816 - RNA, 21 nt, Human
ucucguccucguuuguguucu

SEQ ID NO: 1282817 - RNA, 20 nt, Human
ucucuaacaguggacaaagu

SEQ ID NO: 1282818 - RNA, 14 nt, Human
ucucuaacagugga

SEQ ID NO: 1282819 - RNA, 18 nt, Human
ucucuaaucugugcuguu

SEQ ID NO: 1282820 - RNA, 20 nt, Human
ucucuaaucugugcuguuuc

SEQ ID NO: 1282821 - RNA, 22 nt, Human
ucucuaggaccaugguuaagag

SEQ ID NO: 1282822 - RNA, 14 nt, Human
ucugcaacucugaa

SEQ ID NO: 1282823 - RNA, 15 nt, Human
ucugcaacucugaag

SEQ ID NO: 1282824 - RNA, 11 nt, Human
ucugaggcuga

SEQ ID NO: 1282825 - RNA, 23 nt, Human
ucugaggcugaaauucagaauau

SEQ ID NO: 1282826 - RNA, 19 nt, Human
ucugaggccagccuggccu

SEQ ID NO: 1282827 - RNA, 21 nt, Human
ucugaggcgccccaacccgug

SEQ ID NO: 1282828 - RNA, 14 nt, Human
ucugcacacagcac

SEQ ID NO: 1282829 - RNA, 22 nt, Human
ucugcacacccuccagagacaa

SEQ ID NO: 1282830 - RNA, 22 nt, Human
ucugcacaucuguaaaucuaca

SEQ ID NO: 1282831 - RNA, 12 nt, Human
ucugaggccagc

SEQ ID NO: 1282832 - RNA, 13 nt, Human
ucugaggccagcc

SEQ ID NO: 1282833 - RNA, 14 nt, Human
ucugaggccagccu

SEQ ID NO: 1282834 - RNA, 15 nt, Human
ucugaggccagccug

SEQ ID NO: 1282835 - RNA, 16 nt, Human
ucugaggccagccugg

SEQ ID NO: 1282836 - RNA, 17 nt, Human
ucugaggccagccuggc

SEQ ID NO: 1282837 - RNA, 18 nt, Human
ucugaggccagccuggcc

SEQ ID NO: 1282838 - RNA, 20 nt, Human
ucugaggccagccuggccuc

SEQ ID NO: 1282839 - RNA, 17 nt, Human
ucugcauucaggaucaa

SEQ ID NO: 1282840 - RNA, 16 nt, Human
ucugcauucuaguacu

SEQ ID NO: 1282841 - RNA, 20 nt, Human
ucugcauuuuucagagaaua

SEQ ID NO: 1282842 - RNA, 19 nt, Human
ucugccaaaggaugugaua

SEQ ID NO: 1282843 - RNA, 14 nt, Human
ucugccaaccuaaa

SEQ ID NO: 1282844 - RNA, 18 nt, Human
ucugccaaccuaaaacuc

SEQ ID NO: 1282845 - RNA, 17 nt, Human
ucugccaaccuaaaacu

SEQ ID NO: 1282846 - RNA, 13 nt, Human
ucugccacccagg

SEQ ID NO: 1282847 - RNA, 15 nt, Human
ucugccacccaggau

SEQ ID NO: 1282848 - RNA, 11 nt, Human
ucugcaucucc

SEQ ID NO: 1282849 - RNA, 13 nt, Human
ucugcaucuccac

SEQ ID NO: 1282850 - RNA, 19 nt, Human
ucugcauccucuggagcca

SEQ ID NO: 1282851 - RNA, 14 nt, Human
ucugcauccucugg

SEQ ID NO: 1282852 - RNA, 21 nt, Human
ucugcauccucuggagccagc

SEQ ID NO: 1282853 - RNA, 17 nt, Human
ucugaaauuuccuggga

SEQ ID NO: 1282854 - RNA, 18 nt, Human
ucugaaauuuccugggag

SEQ ID NO: 1282855 - RNA, 20 nt, Human
ucugaaauuuccugggagcu

SEQ ID NO: 1282856 - RNA, 14 nt, Human
ucugaaauuuuucu

SEQ ID NO: 1282857 - RNA, 15 nt, Human
ucugaaauuuuucuu

SEQ ID NO: 1282858 - RNA, 17 nt, Human
ucugaaauuuuucuucu

SEQ ID NO: 1282859 - RNA, 20 nt, Human
ucugaaauuuuucuucuuga

SEQ ID NO: 1282860 - RNA, 12 nt, Human
ucugaacacauu

SEQ ID NO: 1282861 - RNA, 13 nt, Human
ucugaacacauug

SEQ ID NO: 1282862 - RNA, 15 nt, Human
ucugaacacgaagcu

SEQ ID NO: 1282863 - RNA, 12 nt, Human
ucugaacagcug

SEQ ID NO: 1282864 - RNA, 14 nt, Human
ucugaacagcuggu

SEQ ID NO: 1282865 - RNA, 15 nt, Human
ucugaacagcuggug

SEQ ID NO: 1282866 - RNA, 16 nt, Human
ucugaacagcuggugu

SEQ ID NO: 1282867 - RNA, 17 nt, Human
ucugaacagcuggugua

SEQ ID NO: 1282868 - RNA, 21 nt, Human
ucugaacagcugguguagcua

SEQ ID NO: 1282869 - RNA, 20 nt, Human
ucugaacagcugguguagcu

SEQ ID NO: 1282870 - RNA, 13 nt, Human
ucugaacuaaagu

SEQ ID NO: 1282871 - RNA, 23 nt, Human
ucugacauaauccaguaaaauaa

SEQ ID NO: 1282872 - RNA, 19 nt, Human
ucugacauaauccaguaaa

SEQ ID NO: 1282873 - RNA, 13 nt, Human
ucugacauaaucc

SEQ ID NO: 1282874 - RNA, 14 nt, Human
ucugacagccucag

SEQ ID NO: 1282875 - RNA, 15 nt, Human
ucugacauaaguauu

SEQ ID NO: 1282876 - RNA, 13 nt, Human
ucugacagcagca

SEQ ID NO: 1282877 - RNA, 14 nt, Human
ucugacagcagcau

SEQ ID NO: 1282878 - RNA, 17 nt, Human
ucugacagcagcaucuc

SEQ ID NO: 1282879 - RNA, 22 nt, Human
ucugacagcagcaucucuaccu

SEQ ID NO: 1282880 - RNA, 12 nt, Human
ucugacagccuc

SEQ ID NO: 1282881 - RNA, 13 nt, Human
ucugacagccuca

SEQ ID NO: 1282882 - RNA, 22 nt, Human
ucugaaaauugaugggauuugg

SEQ ID NO: 1282883 - RNA, 18 nt, Human
ucugaaaauauaaccagc

SEQ ID NO: 1282884 - RNA, 15 nt, Human
ucugaaaccaguguu

SEQ ID NO: 1282885 - RNA, 20 nt, Human
ucugaaaccaguguuaggga

SEQ ID NO: 1282886 - RNA, 12 nt, Human
ucugaaagagaa

SEQ ID NO: 1282887 - RNA, 14 nt, Human
ucugaaaauugaug

SEQ ID NO: 1282888 - RNA, 18 nt, Human
ucugaaaagugaagacag

SEQ ID NO: 1282889 - RNA, 19 nt, Human
ucugaaaagugaagacaga

SEQ ID NO: 1282890 - RNA, 20 nt, Human
ucugaaaagugaagacagaa

SEQ ID NO: 1282891 - RNA, 13 nt, Human
ucugaaaauauaa

SEQ ID NO: 1282892 - RNA, 14 nt, Human
ucugaaaauauaac

SEQ ID NO: 1282893 - RNA, 15 nt, Human
ucucugugucuaaga

SEQ ID NO: 1282894 - RNA, 16 nt, Human
ucucugugucuaagau

SEQ ID NO: 1282895 - RNA, 17 nt, Human
ucucugugucuaagauu

SEQ ID NO: 1282896 - RNA, 20 nt, Human
ucucugugucuaagauucua

SEQ ID NO: 1282897 - RNA, 21 nt, Human
ucucugugucuaagauucuag

SEQ ID NO: 1282898 - RNA, 22 nt, Human
ucucugugucuaagauucuaga

SEQ ID NO: 1282899 - RNA, 18 nt, Human
ucucugugugcacaaaua

SEQ ID NO: 1282900 - RNA, 10 nt, Human
ucucuguguu

SEQ ID NO: 1282901 - RNA, 23 nt, Human
ucucugugucuaagauucuagau

SEQ ID NO: 1282902 - RNA, 13 nt, Human
ucucuguucauuu

SEQ ID NO: 1282903 - RNA, 14 nt, Human
ucucuguucauuuc

SEQ ID NO: 1282904 - RNA, 16 nt, Human
ucucuguucauuuccu

SEQ ID NO: 1282905 - RNA, 17 nt, Human
ucucuguucauuuccuc

SEQ ID NO: 1282906 - RNA, 18 nt, Human
ucucuguucauuuccuca

SEQ ID NO: 1282907 - RNA, 18 nt, Human
ucucuguugucguaaaga

SEQ ID NO: 1282908 - RNA, 13 nt, Human
ucucuguugucgu

SEQ ID NO: 1282909 - RNA, 16 nt, Human
ucucuuauggaugucc

SEQ ID NO: 1282910 - RNA, 21 nt, Human
ucguguguuucuauuuuuuga

SEQ ID NO: 1282911 - RNA, 13 nt, Human
ucguuaauuugua

SEQ ID NO: 1282912 - RNA, 14 nt, Human
ucgugucuggcaca

SEQ ID NO: 1282913 - RNA, 21 nt, Human
ucgugucuggcacagccuggc

SEQ ID NO: 1282914 - RNA, 12 nt, Human
ucguggggaggu

SEQ ID NO: 1282915 - RNA, 15 nt, Human
ucguggggugugcug

SEQ ID NO: 1282916 - RNA, 18 nt, Human
ucguggggugugcuggga

SEQ ID NO: 1282917 - RNA, 15 nt, Human
ucuaaauaaaaugcu

SEQ ID NO: 1282918 - RNA, 17 nt, Human
ucuaaauaaaaugcuag

SEQ ID NO: 1282919 - RNA, 16 nt, Human
ucuaaauauggacugc

SEQ ID NO: 1282920 - RNA, 22 nt, Human
ucuaauagggcaauuaauuccu

SEQ ID NO: 1282921 - RNA, 16 nt, Human
ucuaauagggcaauua

SEQ ID NO: 1282922 - RNA, 14 nt, Human
ucuaauaguauaaa

SEQ ID NO: 1282923 - RNA, 17 nt, Human
ucuaauaguauaaaccc

SEQ ID NO: 1282924 - RNA, 12 nt, Human
ucuaauaguaua

SEQ ID NO: 1282925 - RNA, 20 nt, Human
ucuaauaucccagaaaaagu

SEQ ID NO: 1282926 - RNA, 14 nt, Human
ucuaauauggccac

SEQ ID NO: 1282927 - RNA, 23 nt, Human
ucuaacaagucauagguuaauau

SEQ ID NO: 1282928 - RNA, 13 nt, Human
ucuaacaaugaca

SEQ ID NO: 1282929 - RNA, 13 nt, Human
ucuaacagauuag

SEQ ID NO: 1282930 - RNA, 13 nt, Human
ucuaacagcacca

SEQ ID NO: 1282931 - RNA, 14 nt, Human
ucuaacagcaccaa

SEQ ID NO: 1282932 - RNA, 22 nt, Human
ucuaacagcaccaaaucaaaau

SEQ ID NO: 1282933 - RNA, 12 nt, Human
ucuaacagcccu

SEQ ID NO: 1282934 - RNA, 13 nt, Human
ucuaacagcccuc

SEQ ID NO: 1282935 - RNA, 20 nt, Human
ucuaacagcccuccucugca

SEQ ID NO: 1282936 - RNA, 21 nt, Human
ucuaacagcccuccucugcac

SEQ ID NO: 1282937 - RNA, 22 nt, Human
ucuaacagcccuccucugcacu

SEQ ID NO: 1282938 - RNA, 23 nt, Human
ucuaacagcccuccucugcacuc

SEQ ID NO: 1282939 - RNA, 21 nt, Human
ucguggaacaguuaccucugc

SEQ ID NO: 1282940 - RNA, 17 nt, Human
ucguggacacacacaga

SEQ ID NO: 1282941 - RNA, 22 nt, Human
ucgugggacagucaccucaugg

SEQ ID NO: 1282942 - RNA, 12 nt, Human
ucgugccugugu

SEQ ID NO: 1282943 - RNA, 13 nt, Human
ucgugccuguguc

SEQ ID NO: 1282944 - RNA, 14 nt, Human
ucgugccugugucc

SEQ ID NO: 1282945 - RNA, 15 nt, Human
ucgugccugugucca

SEQ ID NO: 1282946 - RNA, 21 nt, Human
ucgugccuguguccaugcgcu

SEQ ID NO: 1282947 - RNA, 16 nt, Human
ucggccugcccccacc

SEQ ID NO: 1282948 - RNA, 22 nt, Human
ucggccucccaaagugcuggga

SEQ ID NO: 1282949 - RNA, 20 nt, Human
ucgaggggugggcugguauc

SEQ ID NO: 1282950 - RNA, 19 nt, Human
ucggccucccaaagugcug

SEQ ID NO: 1282951 - RNA, 14 nt, Human
ucggccugccccca

SEQ ID NO: 1282952 - RNA, 15 nt, Human
ucggccugcccccac

SEQ ID NO: 1282953 - RNA, 18 nt, Human
ucggccuccauccugagg

SEQ ID NO: 1282954 - RNA, 23 nt, Human
ucuaggacugaauuaugaaacuu

SEQ ID NO: 1282955 - RNA, 16 nt, Human
ucuaggacugaauuau

SEQ ID NO: 1282956 - RNA, 23 nt, Human
ucuaggaccaugguuaagagucc

SEQ ID NO: 1282957 - RNA, 19 nt, Human
ucuagaaagagaaacaguu

SEQ ID NO: 1282958 - RNA, 13 nt, Human
ucuagaacacagg

SEQ ID NO: 1282959 - RNA, 15 nt, Human
ucuagaacacaggca

SEQ ID NO: 1282960 - RNA, 16 nt, Human
ucuagaacacaggcaa

SEQ ID NO: 1282961 - RNA, 17 nt, Human
ucuagaacacaggcaaa

SEQ ID NO: 1282962 - RNA, 13 nt, Human
ucuaggacacagu

SEQ ID NO: 1282963 - RNA, 21 nt, Human
ucuaggacacaguuccuggga

SEQ ID NO: 1282964 - RNA, 23 nt, Human
ucuaggacacaguuccugggaac

SEQ ID NO: 1282965 - RNA, 22 nt, Human
ucuagugagcagucaggaaaga

SEQ ID NO: 1282966 - RNA, 19 nt, Human
ucuaggagggagacacugg

SEQ ID NO: 1282967 - RNA, 19 nt, Human
ucuagugagcagucaggaa

SEQ ID NO: 1282968 - RNA, 14 nt, Human
ucuaaugugugaau

SEQ ID NO: 1282969 - RNA, 13 nt, Human
ucuaauguuugca

SEQ ID NO: 1282970 - RNA, 18 nt, Human
ucuaauguuugcauauaa

SEQ ID NO: 1282971 - RNA, 19 nt, Human
ucuaauguuugcauauaag

SEQ ID NO: 1282972 - RNA, 17 nt, Human
ucuaauguuugcauaua

SEQ ID NO: 1282973 - RNA, 16 nt, Human
ucuaauguuugcauau

SEQ ID NO: 1282974 - RNA, 15 nt, Human
ucuaauguuugcaua

SEQ ID NO: 1282975 - RNA, 14 nt, Human
ucuaauguuugcau

SEQ ID NO: 1282976 - RNA, 15 nt, Human
ucuaauuaauuguaa

SEQ ID NO: 1282977 - RNA, 17 nt, Human
ucuaauuaauuguaauc

SEQ ID NO: 1282978 - RNA, 18 nt, Human
ucuaauuauguagcucuu

SEQ ID NO: 1282979 - RNA, 19 nt, Human
ucuaauuauguagcucuuu

SEQ ID NO: 1282980 - RNA, 16 nt, Human
ucuaauucacagugcu

SEQ ID NO: 1282981 - RNA, 21 nt, Human
ucuaauuauguagcucuuugu

SEQ ID NO: 1282982 - RNA, 19 nt, Human
ucuaauucuauuaaagugc

SEQ ID NO: 1282983 - RNA, 12 nt, Human
ucuacuuugaag

SEQ ID NO: 1282984 - RNA, 20 nt, Human
ucuacuuugaagucauacca

SEQ ID NO: 1282985 - RNA, 15 nt, Human
ucuacuuuuacucau

SEQ ID NO: 1282986 - RNA, 16 nt, Human
ucuagaaaaacaggca

SEQ ID NO: 1282987 - RNA, 17 nt, Human
ucuagaaaaacaggcac

SEQ ID NO: 1282988 - RNA, 18 nt, Human
ucuagaaaaacaggcacu

SEQ ID NO: 1282989 - RNA, 22 nt, Human
ucuagaaaaacaggcacuuggc

SEQ ID NO: 1282990 - RNA, 13 nt, Human
ucuaugccugucu

SEQ ID NO: 1282991 - RNA, 21 nt, Human
ucuaucaaccccagacacugg

SEQ ID NO: 1282992 - RNA, 14 nt, Human
ucuaugcauuuucu

SEQ ID NO: 1282993 - RNA, 15 nt, Human
ucuaugcauuuucug

SEQ ID NO: 1282994 - RNA, 16 nt, Human
ucucaaaggagcgagc

SEQ ID NO: 1282995 - RNA, 17 nt, Human
ucucaaaguguggucuc

SEQ ID NO: 1282996 - RNA, 14 nt, Human
ucuaugaaauauua

SEQ ID NO: 1282997 - RNA, 17 nt, Human
ucuaugaaauauuaugu

SEQ ID NO: 1282998 - RNA, 18 nt, Human
ucuaugaaauauuauguu

SEQ ID NO: 1282999 - RNA, 22 nt, Human
ucuaucaaccccagacacuggu

SEQ ID NO: 1283000 - RNA, 18 nt, Human
ucuaugagucuagauguu

SEQ ID NO: 1283001 - RNA, 19 nt, Human
ucuaucaaccccagacacu

SEQ ID NO: 1283002 - RNA, 20 nt, Human
ucuaucaaccccagacacug

SEQ ID NO: 1283003 - RNA, 16 nt, Human
uccuuggccaugcaga

SEQ ID NO: 1283004 - RNA, 13 nt, Human
uccuuuguuacuu

SEQ ID NO: 1283005 - RNA, 10 nt, Human
uccuuuguuc

SEQ ID NO: 1283006 - RNA, 23 nt, Human
uccuuggcaggcugauuucuagg

SEQ ID NO: 1283007 - RNA, 21 nt, Human
uccuuggcaggcugauuucua

SEQ ID NO: 1283008 - RNA, 12 nt, Human
uccuuuuaaaga

SEQ ID NO: 1283009 - RNA, 13 nt, Human
uccuuuuaaagaa

SEQ ID NO: 1283010 - RNA, 23 nt, Human
uccuuuuaaagaaaaaaauugaa

SEQ ID NO: 1283011 - RNA, 17 nt, Human
uccuuuuaauuuuccug

SEQ ID NO: 1283012 - RNA, 14 nt, Human
uccuuuuaaagaaa

SEQ ID NO: 1283013 - RNA, 19 nt, Human
uccuuuuaaaacacuucca

SEQ ID NO: 1283014 - RNA, 16 nt, Human
uccuuuguucuuaccu

SEQ ID NO: 1283015 - RNA, 24 nt, Human
uccuuuguucuuaccuguaugucu

SEQ ID NO: 1283016 - RNA, 15 nt, Human
ucgaacuccugaccu

SEQ ID NO: 1283017 - RNA, 15 nt, Human
ucgaaccguuuugaa

SEQ ID NO: 1283018 - RNA, 18 nt, Human
ucgaaccguuuugaagcu

SEQ ID NO: 1283019 - RNA, 19 nt, Human
ucgaaagcucuagaaucug

SEQ ID NO: 1283020 - RNA, 15 nt, Human
uccuuuuccucucuc

SEQ ID NO: 1283021 - RNA, 18 nt, Human
ucgaaacacagaaaccuu

SEQ ID NO: 1283022 - RNA, 14 nt, Human
ucgaaagcucuaga

SEQ ID NO: 1283023 - RNA, 16 nt, Human
ucgaaagcucuagaau

SEQ ID NO: 1283024 - RNA, 12 nt, Human
uccuuuucacug

SEQ ID NO: 1283025 - RNA, 14 nt, Human
uccuuuucauaggu

SEQ ID NO: 1283026 - RNA, 20 nt, Human
uccuuuucauaggucugaaa

SEQ ID NO: 1283027 - RNA, 21 nt, Human
uccuuuucauaggucugaaau

SEQ ID NO: 1283028 - RNA, 22 nt, Human
uccugucgauuagacuggacag

SEQ ID NO: 1283029 - RNA, 13 nt, Human
uccuucacugcuc

SEQ ID NO: 1283030 - RNA, 21 nt, Human
uccuugaagaacugcaggccc

SEQ ID NO: 1283031 - RNA, 23 nt, Human
uccuugaagaacugcaggcccug

SEQ ID NO: 1283032 - RNA, 17 nt, Human
uccuugaagguauaucu

SEQ ID NO: 1283033 - RNA, 13 nt, Human
uccuugaagguau

SEQ ID NO: 1283034 - RNA, 21 nt, Human
uccuugaaggacuaauagaaa

SEQ ID NO: 1283035 - RNA, 17 nt, Human
uccuugcuuccugucuu

SEQ ID NO: 1283036 - RNA, 17 nt, Human
uccugccucagccuccc

SEQ ID NO: 1283037 - RNA, 20 nt, Human
uccugagcacugccaggagg

SEQ ID NO: 1283038 - RNA, 21 nt, Human
uccugagcacugccaggaggg

SEQ ID NO: 1283039 - RNA, 22 nt, Human
uccugagcacugccaggaggga

SEQ ID NO: 1283040 - RNA, 23 nt, Human
uccugagcacugccaggagggac

SEQ ID NO: 1283041 - RNA, 14 nt, Human
uccugccucagccu

SEQ ID NO: 1283042 - RNA, 20 nt, Human
uccugccuaagugcagcccc

SEQ ID NO: 1283043 - RNA, 12 nt, Human
uccugagcacug

SEQ ID NO: 1283044 - RNA, 13 nt, Human
uccugagcacugc

SEQ ID NO: 1283045 - RNA, 14 nt, Human
uccugagcacugcc

SEQ ID NO: 1283046 - RNA, 15 nt, Human
uccugagcacugcca

SEQ ID NO: 1283047 - RNA, 16 nt, Human
uccugagcacugccag

SEQ ID NO: 1283048 - RNA, 17 nt, Human
uccugagcacugccagg

SEQ ID NO: 1283049 - RNA, 18 nt, Human
uccugagcacugccagga

SEQ ID NO: 1283050 - RNA, 19 nt, Human
uccugagcacugccaggag

SEQ ID NO: 1283051 - RNA, 13 nt, Human
uccucuucugggc

SEQ ID NO: 1283052 - RNA, 17 nt, Human
uccucuucugggccuga

SEQ ID NO: 1283053 - RNA, 19 nt, Human
uccugccuauuaucuguca

SEQ ID NO: 1283054 - RNA, 20 nt, Human
uccuguacauugugggaugu

SEQ ID NO: 1283055 - RNA, 14 nt, Human
uccuguacauugug

SEQ ID NO: 1283056 - RNA, 15 nt, Human
uccuguccucuuuca

SEQ ID NO: 1283057 - RNA, 17 nt, Human
uccuguccucuuucagc

SEQ ID NO: 1283058 - RNA, 18 nt, Human
uccuguccucuuucagcu

SEQ ID NO: 1283059 - RNA, 19 nt, Human
uccuguccucuuucagcuc

SEQ ID NO: 1283060 - RNA, 21 nt, Human
uccuguccucuuucagcuccu

SEQ ID NO: 1283061 - RNA, 20 nt, Human
uccuguccucuuucagcucc

SEQ ID NO: 1283062 - RNA, 19 nt, Human
uccuguccuuuaccaaaga

SEQ ID NO: 1283063 - RNA, 22 nt, Human
uccuguccuuuaccaaagauga

SEQ ID NO: 1283064 - RNA, 17 nt, Human
uccugucgauuagacug

SEQ ID NO: 1283065 - RNA, 21 nt, Human
uccugucgauuagacuggaca

SEQ ID NO: 1283066 - RNA, 19 nt, Human
ucccuccugggaaugaagc

SEQ ID NO: 1283067 - RNA, 11 nt, Human
ucccuccuggg

SEQ ID NO: 1283068 - RNA, 16 nt, Human
ucccuccucugcccgg

SEQ ID NO: 1283069 - RNA, 17 nt, Human
ucccucucccaggcccc

SEQ ID NO: 1283070 - RNA, 20 nt, Human
ucccucucccaggccccaug

SEQ ID NO: 1283071 - RNA, 21 nt, Human
ucccucucccaggccccauga

SEQ ID NO: 1283072 - RNA, 21 nt, Human
ucccucuacagagcuucccug

SEQ ID NO: 1283073 - RNA, 22 nt, Human
ucccucuacagagcuucccuga

SEQ ID NO: 1283074 - RNA, 14 nt, Human
ucccuccuguuggg

SEQ ID NO: 1283075 - RNA, 11 nt, Human
ucccuccuugg

SEQ ID NO: 1283076 - RNA, 12 nt, Human
ucccuccuuggu

SEQ ID NO: 1283077 - RNA, 16 nt, Human
ucccuaauaaagcugu

SEQ ID NO: 1283078 - RNA, 16 nt, Human
ucccuaaucuaugguc

SEQ ID NO: 1283079 - RNA, 23 nt, Human
ucccuaaucuauggucgggagac

SEQ ID NO: 1283080 - RNA, 16 nt, Human
ucccuacauuaaacau

SEQ ID NO: 1283081 - RNA, 14 nt, Human
ucccuaauguguuu

SEQ ID NO: 1283082 - RNA, 13 nt, Human
ucccuacauguau

SEQ ID NO: 1283083 - RNA, 24 nt, Human
ucccuacauguauugcacauugua

SEQ ID NO: 1283084 - RNA, 23 nt, Human
ucccuagguguuuuguucaccau

SEQ ID NO: 1283085 - RNA, 19 nt, Human
ucccuaucuuugccacccu

SEQ ID NO: 1283086 - RNA, 20 nt, Human
ucccuaucacugaagcuuuu

SEQ ID NO: 1283087 - RNA, 21 nt, Human
ucccuaucacugaagcuuuuu

SEQ ID NO: 1283088 - RNA, 14 nt, Human
ucccuauggaaaga

SEQ ID NO: 1283089 - RNA, 16 nt, Human
ucccuauccaaucaau

SEQ ID NO: 1283090 - RNA, 13 nt, Human
ucccuacauuaaa

SEQ ID NO: 1283091 - RNA, 14 nt, Human
ucccuauacugcuu

SEQ ID NO: 1283092 - RNA, 15 nt, Human
ucccuauacugcuug

SEQ ID NO: 1283093 - RNA, 17 nt, Human
ucccuauacugcuugga

SEQ ID NO: 1283094 - RNA, 15 nt, Human
ucccuaauaaagcug

SEQ ID NO: 1283095 - RNA, 15 nt, Human
ucccguguucuccuu

SEQ ID NO: 1283096 - RNA, 20 nt, Human
ucccguuucuccaccuagac

SEQ ID NO: 1283097 - RNA, 21 nt, Human
ucccggggccagcacuuccau

SEQ ID NO: 1283098 - RNA, 16 nt, Human
ucccggggccagcacu

SEQ ID NO: 1283099 - RNA, 20 nt, Human
ucccgucaccccuguuucug

SEQ ID NO: 1283100 - RNA, 18 nt, Human
uccagguguuacuguaau

SEQ ID NO: 1283101 - RNA, 17 nt, Human
uccagguucccucccag

SEQ ID NO: 1283102 - RNA, 18 nt, Human
uccagguucccucccaga

SEQ ID NO: 1283103 - RNA, 20 nt, Human
uccagguucccucccagagg

SEQ ID NO: 1283104 - RNA, 13 nt, Human
uccccuuauccuc

SEQ ID NO: 1283105 - RNA, 17 nt, Human
uccccuuauccucccug

SEQ ID NO: 1283106 - RNA, 18 nt, Human
uccccuuauccucccugu

SEQ ID NO: 1283107 - RNA, 19 nt, Human
uccccuuauccucccugua

SEQ ID NO: 1283108 - RNA, 23 nt, Human
uccccuuauccucccuguaacuu

SEQ ID NO: 1283109 - RNA, 20 nt, Human
uccccuuauccucccuguaa

SEQ ID NO: 1283110 - RNA, 22 nt, Human
uccccuuauccucccuguaacu

SEQ ID NO: 1283111 - RNA, 15 nt, Human
ucccuugaugaagaa

SEQ ID NO: 1283112 - RNA, 19 nt, Human
ucccuuccugccagccccu

SEQ ID NO: 1283113 - RNA, 16 nt, Human
ucccuugaugaagaag

SEQ ID NO: 1283114 - RNA, 18 nt, Human
ucccuucaugcauggaaa

SEQ ID NO: 1283115 - RNA, 17 nt, Human
ucccuucaugcauggaa

SEQ ID NO: 1283116 - RNA, 21 nt, Human
ucccuucaucuggaaccauca

SEQ ID NO: 1283117 - RNA, 19 nt, Human
ucccuggauuuuuaccagu

SEQ ID NO: 1283118 - RNA, 18 nt, Human
ucccuggcccccucccug

SEQ ID NO: 1283119 - RNA, 20 nt, Human
ucccuggcccccucccugga

SEQ ID NO: 1283120 - RNA, 19 nt, Human
ucccugcuuuuuguguuuu

SEQ ID NO: 1283121 - RNA, 20 nt, Human
ucccuggaaugaguugaggc

SEQ ID NO: 1283122 - RNA, 18 nt, Human
ucccuggaugacauuaaa

SEQ ID NO: 1283123 - RNA, 20 nt, Human
ucccuggaugacauuaaaga

SEQ ID NO: 1283124 - RNA, 17 nt, Human
ucccuggauuuuuacca

SEQ ID NO: 1283125 - RNA, 18 nt, Human
ucccuggauuuuuaccag

SEQ ID NO: 1283126 - RNA, 20 nt, Human
ucccuggauuuuuaccaguc

SEQ ID NO: 1283127 - RNA, 16 nt, Human
ucccuuccuuccucuc

SEQ ID NO: 1283128 - RNA, 19 nt, Human
ucccuuccuuccucuccug

SEQ ID NO: 1283129 - RNA, 23 nt, Human
ucccuggaaaccuuccacccagu

SEQ ID NO: 1283130 - RNA, 18 nt, Human
ucccuggaaggacaucca

SEQ ID NO: 1283131 - RNA, 22 nt, Human
ucccuggaaugaguugaggcca

SEQ ID NO: 1283132 - RNA, 22 nt, Human
ucccuggaaaccuuccacccag

SEQ ID NO: 1283133 - RNA, 20 nt, Human
ucccuggaaaccuuccaccc

SEQ ID NO: 1283134 - RNA, 13 nt, Human
ucccugccuggac

SEQ ID NO: 1283135 - RNA, 17 nt, Human
ucccugccucucaucaa

SEQ ID NO: 1283136 - RNA, 23 nt, Human
ucccugccucucaucaacugaau

SEQ ID NO: 1283137 - RNA, 20 nt, Human
ucccugccccucccuucaac

SEQ ID NO: 1283138 - RNA, 13 nt, Human
ucccugccuccug

SEQ ID NO: 1283139 - RNA, 16 nt, Human
ucccugccuccugccg

SEQ ID NO: 1283140 - RNA, 18 nt, Human
ucccugccuccugccggc

SEQ ID NO: 1283141 - RNA, 16 nt, Human
ucccucucucauaccc

SEQ ID NO: 1283142 - RNA, 14 nt, Human
ucccucucguaaga

SEQ ID NO: 1283143 - RNA, 15 nt, Human
ucccucucucacucc

SEQ ID NO: 1283144 - RNA, 17 nt, Human
ucccugcacagugacuu

SEQ ID NO: 1283145 - RNA, 20 nt, Human
ucccugcacagugacuucug

SEQ ID NO: 1283146 - RNA, 22 nt, Human
ucccugcacagugacuucugag

SEQ ID NO: 1283147 - RNA, 23 nt, Human
ucccugcacagugacuucugaga

SEQ ID NO: 1283148 - RNA, 21 nt, Human
uccucuuccugaauuuuauuu

SEQ ID NO: 1283149 - RNA, 20 nt, Human
uccucuucuacucacuuuuc

SEQ ID NO: 1283150 - RNA, 22 nt, Human
uccucuucuacucacuuuuccc

SEQ ID NO: 1283151 - RNA, 19 nt, Human
uccucuucuauuuuguaaa

SEQ ID NO: 1283152 - RNA, 23 nt, Human
uccucuucuacucacuuuuccca

SEQ ID NO: 1283153 - RNA, 12 nt, Human
uccucuucccca

SEQ ID NO: 1283154 - RNA, 13 nt, Human
uccucuuccccag

SEQ ID NO: 1283155 - RNA, 14 nt, Human
uccucuuccccaga

SEQ ID NO: 1283156 - RNA, 17 nt, Human
uccucuucccccaagau

SEQ ID NO: 1283157 - RNA, 18 nt, Human
uccucuuccccagacgcc

SEQ ID NO: 1283158 - RNA, 18 nt, Human
uccucuucccucucugca

SEQ ID NO: 1283159 - RNA, 14 nt, Human
uccucuucccucuc

SEQ ID NO: 1283160 - RNA, 15 nt, Human
uccucuagcuguggg

SEQ ID NO: 1283161 - RNA, 21 nt, Human
uccucuagcugugggggugag

SEQ ID NO: 1283162 - RNA, 13 nt, Human
uccucgccugaca

SEQ ID NO: 1283163 - RNA, 15 nt, Human
uccucgccugacaac

SEQ ID NO: 1283164 - RNA, 24 nt, Human
uccucgccugacaaccacuggucu

SEQ ID NO: 1283165 - RNA, 19 nt, Human
uccucuacuaacaaucagc

SEQ ID NO: 1283166 - RNA, 13 nt, Human
uccucguuugugu

SEQ ID NO: 1283167 - RNA, 14 nt, Human
uccucguuuguguu

SEQ ID NO: 1283168 - RNA, 15 nt, Human
uccucguuuguguuc

SEQ ID NO: 1283169 - RNA, 16 nt, Human
uccucguuuguguucu

SEQ ID NO: 1283170 - RNA, 16 nt, Human
uccucuaacuuggcuc

SEQ ID NO: 1283171 - RNA, 17 nt, Human
uccucuacuaacaauca

SEQ ID NO: 1283172 - RNA, 18 nt, Human
uccucuacuaacaaucag

SEQ ID NO: 1283173 - RNA, 21 nt, Human
uccucaugaauguaaauuugu

SEQ ID NO: 1283174 - RNA, 21 nt, Human
uccuccacguucugcucauca

SEQ ID NO: 1283175 - RNA, 22 nt, Human
uccuccacguucugcucaucau

SEQ ID NO: 1283176 - RNA, 23 nt, Human
uccuccacguucugcucaucauu

SEQ ID NO: 1283177 - RNA, 20 nt, Human
uccucaugaauguaaauuug

SEQ ID NO: 1283178 - RNA, 20 nt, Human
uccuccugggcccucucugc

SEQ ID NO: 1283179 - RNA, 22 nt, Human
uccuccugggcccucucugcuc

SEQ ID NO: 1283180 - RNA, 16 nt, Human
uccuccuguauuccug

SEQ ID NO: 1283181 - RNA, 20 nt, Human
uccuccuuccggggaaggau

SEQ ID NO: 1283182 - RNA, 22 nt, Human
uccuccuuccggggaaggauuu

SEQ ID NO: 1283183 - RNA, 13 nt, Human
uccuccuucuuca

SEQ ID NO: 1283184 - RNA, 18 nt, Human
uccuauacgcagcgugcu

SEQ ID NO: 1283185 - RNA, 19 nt, Human
uccuauacgcagcgugcuu

SEQ ID NO: 1283186 - RNA, 19 nt, Human
uccuaguucuagaaaaaca

SEQ ID NO: 1283187 - RNA, 20 nt, Human
uccuaguuuucuccucccag

SEQ ID NO: 1283188 - RNA, 13 nt, Human
uccuaguuuucuc

SEQ ID NO: 1283189 - RNA, 13 nt, Human
uccuaguucuaga

SEQ ID NO: 1283190 - RNA, 15 nt, Human
uccuaguucuagaaa

SEQ ID NO: 1283191 - RNA, 16 nt, Human
uccuaguucuagaaaa

SEQ ID NO: 1283192 - RNA, 17 nt, Human
uccuaguucuagaaaaa

SEQ ID NO: 1283193 - RNA, 18 nt, Human
uccuaguucuagaaaaac

SEQ ID NO: 1283194 - RNA, 22 nt, Human
uccuaguucuagaaaaacaggc

SEQ ID NO: 1283195 - RNA, 16 nt, Human
uccuaguucuucaucc

SEQ ID NO: 1283196 - RNA, 18 nt, Human
uccuauguuuuuguucaa

SEQ ID NO: 1283197 - RNA, 19 nt, Human
uccuauguuuuuguucaaa

SEQ ID NO: 1283198 - RNA, 11 nt, Human
uccuauguuug

SEQ ID NO: 1283199 - RNA, 14 nt, Human
uccucaugaaugua

SEQ ID NO: 1283200 - RNA, 15 nt, Human
uccucaugaauguaa

SEQ ID NO: 1283201 - RNA, 17 nt, Human
uccucaugaauguaaau

SEQ ID NO: 1283202 - RNA, 14 nt, Human
uccucaucccgugu

SEQ ID NO: 1283203 - RNA, 22 nt, Human
uccucaucccguguucuccuuu

SEQ ID NO: 1283204 - RNA, 15 nt, Human
uccuacaagacacag

SEQ ID NO: 1283205 - RNA, 16 nt, Human
uccuaauuuugagaaa

SEQ ID NO: 1283206 - RNA, 14 nt, Human
uccuaccaagucaa

SEQ ID NO: 1283207 - RNA, 22 nt, Human
uccuaaugaaugcauaaaaugu

SEQ ID NO: 1283208 - RNA, 15 nt, Human
uccuaauuccacagc

SEQ ID NO: 1283209 - RNA, 16 nt, Human
uccuaauuccacagcu

SEQ ID NO: 1283210 - RNA, 17 nt, Human
uccuaauuccacagcug

SEQ ID NO: 1283211 - RNA, 18 nt, Human
uccuaauuccacagcugc

SEQ ID NO: 1283212 - RNA, 14 nt, Human
uccuaauacuguca

SEQ ID NO: 1283213 - RNA, 15 nt, Human
uccuaauacugucau

SEQ ID NO: 1283214 - RNA, 18 nt, Human
uccuaauaaaguucugua

SEQ ID NO: 1283215 - RNA, 19 nt, Human
uccuaauaauaucccacug

SEQ ID NO: 1283216 - RNA, 22 nt, Human
uccuaauaauaucccacuggga

SEQ ID NO: 1283217 - RNA, 17 nt, Human
uauucguuaucuaauag

SEQ ID NO: 1283218 - RNA, 23 nt, Human
uauucuaacuuuuauuuuuauca

SEQ ID NO: 1283219 - RNA, 11 nt, Human
uauucuaagac

SEQ ID NO: 1283220 - RNA, 12 nt, Human
uauucuaagacu

SEQ ID NO: 1283221 - RNA, 13 nt, Human
uauucuaagacuu

SEQ ID NO: 1283222 - RNA, 21 nt, Human
uauucuaagacuuacucuaag

SEQ ID NO: 1283223 - RNA, 22 nt, Human
uauucuaagacuuacucuaaga

SEQ ID NO: 1283224 - RNA, 23 nt, Human
uauucuaagacuuacucuaagau

SEQ ID NO: 1283225 - RNA, 21 nt, Human
uauucuagccugcauugagcu

SEQ ID NO: 1283226 - RNA, 16 nt, Human
uauucuagccugcauu

SEQ ID NO: 1283227 - RNA, 10 nt, Human
uauucuaguc

SEQ ID NO: 1283228 - RNA, 20 nt, Human
uauucuauuacauuuucagu

SEQ ID NO: 1283229 - RNA, 17 nt, Human
uauuccugcauuuguga

SEQ ID NO: 1283230 - RNA, 19 nt, Human
uauuccugcauuugugaaa

SEQ ID NO: 1283231 - RNA, 20 nt, Human
uauuccugcauuugugaaau

SEQ ID NO: 1283232 - RNA, 21 nt, Human
uauuccugcauuugugaaaug

SEQ ID NO: 1283233 - RNA, 21 nt, Human
uauucccuagaaacuuccaaa

SEQ ID NO: 1283234 - RNA, 14 nt, Human
uauuccuauugugc

SEQ ID NO: 1283235 - RNA, 16 nt, Human
uauuccucaaaaaauu

SEQ ID NO: 1283236 - RNA, 18 nt, Human
uauuccuccugcucauau

SEQ ID NO: 1283237 - RNA, 22 nt, Human
uauuccugaccuccgccaucca

SEQ ID NO: 1283238 - RNA, 22 nt, Human
uauuccuguggauguaaaguga

SEQ ID NO: 1283239 - RNA, 22 nt, Human
uauuccuuuguuacuucucuaa

SEQ ID NO: 1283240 - RNA, 22 nt, Human
uauucgauacugcgacuuucug

SEQ ID NO: 1283241 - RNA, 19 nt, Human
uauucgccacacaguauuu

SEQ ID NO: 1283242 - RNA, 20 nt, Human
uauucgccacacaguauuuu

SEQ ID NO: 1283243 - RNA, 17 nt, Human
uauuacagauaaaaugu

SEQ ID NO: 1283244 - RNA, 19 nt, Human
uauuacagauaaaauguaa

SEQ ID NO: 1283245 - RNA, 17 nt, Human
uauuauuaacauaccua

SEQ ID NO: 1283246 - RNA, 19 nt, Human
uauuauuacuuauuuuuga

SEQ ID NO: 1283247 - RNA, 14 nt, Human
uauuauuacuugua

SEQ ID NO: 1283248 - RNA, 18 nt, Human
uauuauuacuuguaaaua

SEQ ID NO: 1283249 - RNA, 17 nt, Human
uauuauuacuuguaaau

SEQ ID NO: 1283250 - RNA, 12 nt, Human
uauuauuagggc

SEQ ID NO: 1283251 - RNA, 19 nt, Human
uauuauuaguuuugauuua

SEQ ID NO: 1283252 - RNA, 22 nt, Human
uauuauuauaaucuuauaauug

SEQ ID NO: 1283253 - RNA, 15 nt, Human
uauuauuauaaucuu

SEQ ID NO: 1283254 - RNA, 15 nt, Human
uauuacaaugaucac

SEQ ID NO: 1283255 - RNA, 16 nt, Human
uauuacacucuguaau

SEQ ID NO: 1283256 - RNA, 19 nt, Human
uauuacacucuguaauuga

SEQ ID NO: 1283257 - RNA, 14 nt, Human
uauuacaaugauca

SEQ ID NO: 1283258 - RNA, 17 nt, Human
uauuaauuuaugcagaa

SEQ ID NO: 1283259 - RNA, 14 nt, Human
uauuaauuuuaguu

SEQ ID NO: 1283260 - RNA, 21 nt, Human
uauuaauuuuaguuuuucauu

SEQ ID NO: 1283261 - RNA, 23 nt, Human
uauuccaugacugcuugcccuaa

SEQ ID NO: 1283262 - RNA, 16 nt, Human
uauuccaugacugcuu

SEQ ID NO: 1283263 - RNA, 17 nt, Human
uauuccccauucuuccu

SEQ ID NO: 1283264 - RNA, 12 nt, Human
uauuccaugacu

SEQ ID NO: 1283265 - RNA, 14 nt, Human
uauuccaugacugc

SEQ ID NO: 1283266 - RNA, 15 nt, Human
uauuccaugacugcu

SEQ ID NO: 1283267 - RNA, 19 nt, Human
uauuccaagacaugucugu

SEQ ID NO: 1283268 - RNA, 16 nt, Human
uauuccagaaugcugu

SEQ ID NO: 1283269 - RNA, 17 nt, Human
uauuccagaaugcugua

SEQ ID NO: 1283270 - RNA, 20 nt, Human
uauuccagaaugcuguacau

SEQ ID NO: 1283271 - RNA, 21 nt, Human
uauuccagaaugcuguacauc

SEQ ID NO: 1283272 - RNA, 23 nt, Human
uauuccagaaugcuguacaucua

SEQ ID NO: 1283273 - RNA, 17 nt, Human
uauuccagcuguccccc

SEQ ID NO: 1283274 - RNA, 22 nt, Human
uauuccagcuguccccccacuc

SEQ ID NO: 1283275 - RNA, 22 nt, Human
uauuuaguuguaaaccaaguga

SEQ ID NO: 1283276 - RNA, 19 nt, Human
uauuuaaaccgcuaaaaga

SEQ ID NO: 1283277 - RNA, 16 nt, Human
uauuuauaaauauauu

SEQ ID NO: 1283278 - RNA, 17 nt, Human
uauuuauaaauauauuu

SEQ ID NO: 1283279 - RNA, 19 nt, Human
uauuuauaaauauauuuaa

SEQ ID NO: 1283280 - RNA, 24 nt, Human
uauuuauaaaaauaaaaaacacug

SEQ ID NO: 1283281 - RNA, 21 nt, Human
uauuuaaaccgcuaaaagaaa

SEQ ID NO: 1283282 - RNA, 24 nt, Human
uauuuaaacucuguugcaagugca

SEQ ID NO: 1283283 - RNA, 14 nt, Human
uauuuaaaaaacua

SEQ ID NO: 1283284 - RNA, 16 nt, Human
uauuuaaaaaacuaaa

SEQ ID NO: 1283285 - RNA, 21 nt, Human
uauuuaaaaaacuaaaaacua

SEQ ID NO: 1283286 - RNA, 20 nt, Human
uauuuaaaaaacuaaaaacu

SEQ ID NO: 1283287 - RNA, 13 nt, Human
uauuuaaaaauaa

SEQ ID NO: 1283288 - RNA, 17 nt, Human
uauuuaaaaauaaguca

SEQ ID NO: 1283289 - RNA, 23 nt, Human
uauuuaaaaauaagucaacagua

SEQ ID NO: 1283290 - RNA, 12 nt, Human
uauuuaaaacuu

SEQ ID NO: 1283291 - RNA, 13 nt, Human
uauuuaaaacuug

SEQ ID NO: 1283292 - RNA, 15 nt, Human
uauuuaaaaguguca

SEQ ID NO: 1283293 - RNA, 14 nt, Human
uauuuaaaauagca

SEQ ID NO: 1283294 - RNA, 15 nt, Human
uauuuaaaauagcaa

SEQ ID NO: 1283295 - RNA, 23 nt, Human
uauuuaaaauagcaaaagaagaa

SEQ ID NO: 1283296 - RNA, 21 nt, Human
uauuuaaaauagcaaaagaag

SEQ ID NO: 1283297 - RNA, 22 nt, Human
uauuguuuuacaauaguucugu

SEQ ID NO: 1283298 - RNA, 20 nt, Human
uauuguuuuacaauaguucu

SEQ ID NO: 1283299 - RNA, 17 nt, Human
uauuguuuuacaauagu

SEQ ID NO: 1283300 - RNA, 15 nt, Human
uauuguuuuacaaua

SEQ ID NO: 1283301 - RNA, 14 nt, Human
uauuguuuuacaau

SEQ ID NO: 1283302 - RNA, 22 nt, Human
uauuguuacguagccuaaggcu

SEQ ID NO: 1283303 - RNA, 17 nt, Human
uauuguucagcaugcaa

SEQ ID NO: 1283304 - RNA, 17 nt, Human
uauugcugaaugcaaga

SEQ ID NO: 1283305 - RNA, 15 nt, Human
uauugcuagagcucc

SEQ ID NO: 1283306 - RNA, 16 nt, Human
uauugcuagagcuccu

SEQ ID NO: 1283307 - RNA, 20 nt, Human
uauugcuagagcuccucccu

SEQ ID NO: 1283308 - RNA, 16 nt, Human
uauuggaauauaauug

SEQ ID NO: 1283309 - RNA, 15 nt, Human
uauuggaacuugcga

SEQ ID NO: 1283310 - RNA, 17 nt, Human
uauuggacaaagaaccu

SEQ ID NO: 1283311 - RNA, 19 nt, Human
uauuggccaaggaaaggca

SEQ ID NO: 1283312 - RNA, 16 nt, Human
uauuguguuuguguau

SEQ ID NO: 1283313 - RNA, 16 nt, Human
uauucuccuauguuug

SEQ ID NO: 1283314 - RNA, 16 nt, Human
uauucuccuccucccu

SEQ ID NO: 1283315 - RNA, 20 nt, Human
uauugccuaagaauaaacau

SEQ ID NO: 1283316 - RNA, 22 nt, Human
uauugccuaagaauaaacauuu

SEQ ID NO: 1283317 - RNA, 13 nt, Human
uauugccucacuu

SEQ ID NO: 1283318 - RNA, 15 nt, Human
uauugccucugagag

SEQ ID NO: 1283319 - RNA, 14 nt, Human
uauugcuagagcuc

SEQ ID NO: 1283320 - RNA, 13 nt, Human
uauguacuucaug

SEQ ID NO: 1283321 - RNA, 17 nt, Human
uauguacuucaugcugu

SEQ ID NO: 1283322 - RNA, 16 nt, Human
uauguaccauguacau

SEQ ID NO: 1283323 - RNA, 10 nt, Human
uauguaccaa

SEQ ID NO: 1283324 - RNA, 16 nt, Human
uauguacccucugaaa

SEQ ID NO: 1283325 - RNA, 18 nt, Human
uauguacccucugaaaua

SEQ ID NO: 1283326 - RNA, 19 nt, Human
uauguacccucugaaauac

SEQ ID NO: 1283327 - RNA, 20 nt, Human
uauguacccucugaaauaca

SEQ ID NO: 1283328 - RNA, 11 nt, Human
uauguaacaug

SEQ ID NO: 1283329 - RNA, 12 nt, Human
uauguaacaugu

SEQ ID NO: 1283330 - RNA, 12 nt, Human
uauguacaguua

SEQ ID NO: 1283331 - RNA, 15 nt, Human
uauguacaugagaag

SEQ ID NO: 1283332 - RNA, 14 nt, Human
uauguaccaagaau

SEQ ID NO: 1283333 - RNA, 23 nt, Human
uauguagaaaaaaguaaauguga

SEQ ID NO: 1283334 - RNA, 14 nt, Human
uauguagauaacaa

SEQ ID NO: 1283335 - RNA, 15 nt, Human
uauguagcaaaauac

SEQ ID NO: 1283336 - RNA, 15 nt, Human
uauguagcucuuugu

SEQ ID NO: 1283337 - RNA, 14 nt, Human
uauguaguaauuga

SEQ ID NO: 1283338 - RNA, 17 nt, Human
uauguaguaauugacau

SEQ ID NO: 1283339 - RNA, 20 nt, Human
uauguaguaauugacaugug

SEQ ID NO: 1283340 - RNA, 18 nt, Human
uauguauaacuuuaacuu

SEQ ID NO: 1283341 - RNA, 19 nt, Human
uauguaucaaauguaacuu

SEQ ID NO: 1283342 - RNA, 22 nt, Human
uauguauggguaggguaaauca

SEQ ID NO: 1283343 - RNA, 23 nt, Human
uauguauggguaggguaaaucag

SEQ ID NO: 1283344 - RNA, 17 nt, Human
uauguauggugcaaugu

SEQ ID NO: 1283345 - RNA, 20 nt, Human
uauguaaaugguaugucauu

SEQ ID NO: 1283346 - RNA, 21 nt, Human
uauguaaaugguaugucauuc

SEQ ID NO: 1283347 - RNA, 15 nt, Human
uauguaaauuaugua

SEQ ID NO: 1283348 - RNA, 15 nt, Human
uauguaaaacauuua

SEQ ID NO: 1283349 - RNA, 23 nt, Human
uauggauccacuggcuggacaaa

SEQ ID NO: 1283350 - RNA, 16 nt, Human
uauggauguccccagc

SEQ ID NO: 1283351 - RNA, 15 nt, Human
uauggauguccccag

SEQ ID NO: 1283352 - RNA, 13 nt, Human
uauggauucuaaa

SEQ ID NO: 1283353 - RNA, 14 nt, Human
uauggauucuaaaa

SEQ ID NO: 1283354 - RNA, 15 nt, Human
uauggauucuaaaau

SEQ ID NO: 1283355 - RNA, 22 nt, Human
uauggugccuaguauugacaaa

SEQ ID NO: 1283356 - RNA, 15 nt, Human
uauggugcucugucu

SEQ ID NO: 1283357 - RNA, 23 nt, Human
uauggugcucugucuacuugcuc

SEQ ID NO: 1283358 - RNA, 17 nt, Human
uaugguggauccaaacu

SEQ ID NO: 1283359 - RNA, 22 nt, Human
uaugguuuuugagauauuaaug

SEQ ID NO: 1283360 - RNA, 13 nt, Human
uauguaaaacauu

SEQ ID NO: 1283361 - RNA, 16 nt, Human
uauggauucuaaaaug

SEQ ID NO: 1283362 - RNA, 20 nt, Human
uauggcaaccauuauaaccu

SEQ ID NO: 1283363 - RNA, 12 nt, Human
uauguugcauag

SEQ ID NO: 1283364 - RNA, 14 nt, Human
uauguugauaaaag

SEQ ID NO: 1283365 - RNA, 23 nt, Human
uaugucaagggcagcuuugcuca

SEQ ID NO: 1283366 - RNA, 15 nt, Human
uaugucaucacucua

SEQ ID NO: 1283367 - RNA, 16 nt, Human
uaugucauuucauuuc

SEQ ID NO: 1283368 - RNA, 16 nt, Human
uaugucaagggcagcu

SEQ ID NO: 1283369 - RNA, 12 nt, Human
uauguauuuaua

SEQ ID NO: 1283370 - RNA, 15 nt, Human
uauguauugugcaau

SEQ ID NO: 1283371 - RNA, 17 nt, Human
uauguauugugcaaugu

SEQ ID NO: 1283372 - RNA, 20 nt, Human
uauguauugugcaaugugua

SEQ ID NO: 1283373 - RNA, 21 nt, Human
uauguauugugcaauguguau

SEQ ID NO: 1283374 - RNA, 19 nt, Human
uauguauuauuuacauuua

SEQ ID NO: 1283375 - RNA, 21 nt, Human
uauguauuauuuacauuuaau

SEQ ID NO: 1283376 - RNA, 16 nt, Human
uauguugcauagaaua

SEQ ID NO: 1283377 - RNA, 20 nt, Human
uauuaaauuuuuuaaaaagc

SEQ ID NO: 1283378 - RNA, 22 nt, Human
uauuaaauuuuuuaaaaagcaa

SEQ ID NO: 1283379 - RNA, 19 nt, Human
uauuaaauuuuuuguugac

SEQ ID NO: 1283380 - RNA, 20 nt, Human
uauuaaauuuuuuguugaca

SEQ ID NO: 1283381 - RNA, 12 nt, Human
uauuaagaauga

SEQ ID NO: 1283382 - RNA, 20 nt, Human
uauuaagaaaggaagcauug

SEQ ID NO: 1283383 - RNA, 21 nt, Human
uauuaagaaaggaagcauugu

SEQ ID NO: 1283384 - RNA, 23 nt, Human
uauuaagaaaggaagcauuguaa

SEQ ID NO: 1283385 - RNA, 24 nt, Human
uauuaagaaaggaagcauuguaaa

SEQ ID NO: 1283386 - RNA, 23 nt, Human
uauuaaauuuuuuguugacauua

SEQ ID NO: 1283387 - RNA, 12 nt, Human
uauuaagaaagg

SEQ ID NO: 1283388 - RNA, 13 nt, Human
uauuaagaaagga

SEQ ID NO: 1283389 - RNA, 14 nt, Human
uauuaagaaaggaa

SEQ ID NO: 1283390 - RNA, 18 nt, Human
uauuaauauauauuaucu

SEQ ID NO: 1283391 - RNA, 23 nt, Human
uauuaauauauauuaucuuuuca

SEQ ID NO: 1283392 - RNA, 22 nt, Human
uauuaauauauauuaucuuuuc

SEQ ID NO: 1283393 - RNA, 14 nt, Human
uauuaaucuuagug

SEQ ID NO: 1283394 - RNA, 17 nt, Human
uauuaaucuuaguguau

SEQ ID NO: 1283395 - RNA, 18 nt, Human
uauuaaucuuaguguaug

SEQ ID NO: 1283396 - RNA, 13 nt, Human
uauuaaugaaaau

SEQ ID NO: 1283397 - RNA, 12 nt, Human
uauuaaugcacu

SEQ ID NO: 1283398 - RNA, 13 nt, Human
uauuaaugcacuu

SEQ ID NO: 1283399 - RNA, 14 nt, Human
uauuaaugcacuuu

SEQ ID NO: 1283400 - RNA, 17 nt, Human
uauuaaugcacuuucua

SEQ ID NO: 1283401 - RNA, 20 nt, Human
uauuaaugcacuuucuaucc

SEQ ID NO: 1283402 - RNA, 15 nt, Human
uauuaaugcccagac

SEQ ID NO: 1283403 - RNA, 20 nt, Human
ucaaaucaaucuguaaaacu

SEQ ID NO: 1283404 - RNA, 23 nt, Human
ucaaauauauucagccuggcuuc

SEQ ID NO: 1283405 - RNA, 22 nt, Human
ucaaauauauucagccuggcuu

SEQ ID NO: 1283406 - RNA, 14 nt, Human
ucaaagaaggcauu

SEQ ID NO: 1283407 - RNA, 23 nt, Human
ucaaaaauuaaaccggaccaucu

SEQ ID NO: 1283408 - RNA, 20 nt, Human
ucaaaaauuaucuauagcua

SEQ ID NO: 1283409 - RNA, 12 nt, Human
ucaaaaauuaaa

SEQ ID NO: 1283410 - RNA, 16 nt, Human
ucaaaacaaaggccua

SEQ ID NO: 1283411 - RNA, 14 nt, Human
ucaaaacacuugua

SEQ ID NO: 1283412 - RNA, 17 nt, Human
ucaaaacacuuguaauu

SEQ ID NO: 1283413 - RNA, 24 nt, Human
ucaaaacacuuguaauuuuguauc

SEQ ID NO: 1283414 - RNA, 14 nt, Human
ucaaaacagauugu

SEQ ID NO: 1283415 - RNA, 16 nt, Human
ucaaaacagauuguuu

SEQ ID NO: 1283416 - RNA, 19 nt, Human
ucaaaacagauuguuugca

SEQ ID NO: 1283417 - RNA, 15 nt, Human
ucaaauccuugaaga

SEQ ID NO: 1283418 - RNA, 16 nt, Human
ucaaaugaguaacauu

SEQ ID NO: 1283419 - RNA, 22 nt, Human
ucaaaugaguaacauuugcugu

SEQ ID NO: 1283420 - RNA, 18 nt, Human
ucaaauggggccagaucc

SEQ ID NO: 1283421 - RNA, 19 nt, Human
ucaaauggggccagaucca

SEQ ID NO: 1283422 - RNA, 21 nt, Human
ucaaauguuuaaucauauaaa

SEQ ID NO: 1283423 - RNA, 13 nt, Human
ucaaauucaaaua

SEQ ID NO: 1283424 - RNA, 14 nt, Human
ucaaauucuucuga

SEQ ID NO: 1283425 - RNA, 15 nt, Human
ucaaauucuucugaa

SEQ ID NO: 1283426 - RNA, 20 nt, Human
ucaaauuguaagcaugcaca

SEQ ID NO: 1283427 - RNA, 17 nt, Human
ucaaauuguaagcaugc

SEQ ID NO: 1283428 - RNA, 14 nt, Human
ucaaauugugugaa

SEQ ID NO: 1283429 - RNA, 16 nt, Human
ucaaauucuucugaac

SEQ ID NO: 1283430 - RNA, 21 nt, Human
ucaaauucuucugaacucaaa

SEQ ID NO: 1283431 - RNA, 15 nt, Human
ucaaauugugugaaa

SEQ ID NO: 1283432 - RNA, 22 nt, Human
ucaaauugugcaguacuuugug

SEQ ID NO: 1283433 - RNA, 13 nt, Human
uauuuuuugaaaa

SEQ ID NO: 1283434 - RNA, 14 nt, Human
uauuuuuuguauaa

SEQ ID NO: 1283435 - RNA, 16 nt, Human
uauuuuuuguauaauu

SEQ ID NO: 1283436 - RNA, 17 nt, Human
uauuuuuuguauaauug

SEQ ID NO: 1283437 - RNA, 21 nt, Human
uauuuucugugccugaauauu

SEQ ID NO: 1283438 - RNA, 16 nt, Human
uauuuuuucaguauua

SEQ ID NO: 1283439 - RNA, 19 nt, Human
uauuuuuucuuuucuuuac

SEQ ID NO: 1283440 - RNA, 21 nt, Human
uauuuuccuauauuacgguuu

SEQ ID NO: 1283441 - RNA, 22 nt, Human
uauuuucugguaaaaagaaaaa

SEQ ID NO: 1283442 - RNA, 17 nt, Human
uauuuuuuuuaaguauu

SEQ ID NO: 1283443 - RNA, 18 nt, Human
uauuuuuuuuuaagcucu

SEQ ID NO: 1283444 - RNA, 13 nt, Human
uauuuuauuauga

SEQ ID NO: 1283445 - RNA, 16 nt, Human
uauuuauauauguauu

SEQ ID NO: 1283446 - RNA, 23 nt, Human
uauuuauauauguauuuauaaau

SEQ ID NO: 1283447 - RNA, 17 nt, Human
uauuuuauguugcauag

SEQ ID NO: 1283448 - RNA, 16 nt, Human
uauuuucaaaaccagg

SEQ ID NO: 1283449 - RNA, 19 nt, Human
uauuuucaacgcagcccug

SEQ ID NO: 1283450 - RNA, 14 nt, Human
uauuuucaaaacca

SEQ ID NO: 1283451 - RNA, 17 nt, Human
uauuuucaaaaccaggu

SEQ ID NO: 1283452 - RNA, 13 nt, Human
uauuuuccaggcu

SEQ ID NO: 1283453 - RNA, 17 nt, Human
uauuuuauuaugaagaa

SEQ ID NO: 1283454 - RNA, 17 nt, Human
ucaaugccccugaauuu

SEQ ID NO: 1283455 - RNA, 15 nt, Human
ucaaugcaguugucu

SEQ ID NO: 1283456 - RNA, 17 nt, Human
ucaaugcaguugucucu

SEQ ID NO: 1283457 - RNA, 18 nt, Human
ucaaugcaguugucucug

SEQ ID NO: 1283458 - RNA, 19 nt, Human
ucaaugcaguugucucugu

SEQ ID NO: 1283459 - RNA, 18 nt, Human
ucaaugccccugaauuua

SEQ ID NO: 1283460 - RNA, 20 nt, Human
ucaaugccccugaauuuaaa

SEQ ID NO: 1283461 - RNA, 22 nt, Human
ucaaugccccugaauuuaaaua

SEQ ID NO: 1283462 - RNA, 22 nt, Human
ucaauaagccucagcuuucuaa

SEQ ID NO: 1283463 - RNA, 15 nt, Human
ucaauaauauauuuu

SEQ ID NO: 1283464 - RNA, 18 nt, Human
ucaauaauauauuuucug

SEQ ID NO: 1283465 - RNA, 19 nt, Human
ucaauaauauauuuucugu

SEQ ID NO: 1283466 - RNA, 20 nt, Human
ucaauaauauauuuucuguu

SEQ ID NO: 1283467 - RNA, 16 nt, Human
ucaauaauccaugaaa

SEQ ID NO: 1283468 - RNA, 21 nt, Human
ucaauaaaauccauacauuug

SEQ ID NO: 1283469 - RNA, 13 nt, Human
ucaaguugugcca

SEQ ID NO: 1283470 - RNA, 16 nt, Human
ucaaguugauuagaaa

SEQ ID NO: 1283471 - RNA, 23 nt, Human
ucaaguuguuccuuaagucagaa

SEQ ID NO: 1283472 - RNA, 13 nt, Human
ucaaguucuaaga

SEQ ID NO: 1283473 - RNA, 14 nt, Human
ucaaguucuaagau

SEQ ID NO: 1283474 - RNA, 15 nt, Human
ucaaguucuaagauu

SEQ ID NO: 1283475 - RNA, 16 nt, Human
ucaaguucuaagauuc

SEQ ID NO: 1283476 - RNA, 17 nt, Human
ucaaguucuaagauucu

SEQ ID NO: 1283477 - RNA, 18 nt, Human
ucaaguucuaagauucua

SEQ ID NO: 1283478 - RNA, 19 nt, Human
ucaaguucuaagauucuaa

SEQ ID NO: 1283479 - RNA, 15 nt, Human
ucaaguugaggggcu

SEQ ID NO: 1283480 - RNA, 17 nt, Human
ucaaguugaggggcuuc

SEQ ID NO: 1283481 - RNA, 21 nt, Human
ucaaguugauuagaaagacca

SEQ ID NO: 1283482 - RNA, 19 nt, Human
ucaauaaaauuauagcucu

SEQ ID NO: 1283483 - RNA, 17 nt, Human
ucaauaaaauuauagcu

SEQ ID NO: 1283484 - RNA, 15 nt, Human
ucaauaaaauuauag

SEQ ID NO: 1283485 - RNA, 14 nt, Human
ucaauaaaauuaua

SEQ ID NO: 1283486 - RNA, 14 nt, Human
ucaacgcagcccug

SEQ ID NO: 1283487 - RNA, 15 nt, Human
ucaacgcagcccugc

SEQ ID NO: 1283488 - RNA, 18 nt, Human
ucaacgcagcccugcuuu

SEQ ID NO: 1283489 - RNA, 18 nt, Human
ucaaccugggcaaagccu

SEQ ID NO: 1283490 - RNA, 19 nt, Human
ucaaccuguucaucuugaa

SEQ ID NO: 1283491 - RNA, 15 nt, Human
ucaaccuuaagaccu

SEQ ID NO: 1283492 - RNA, 23 nt, Human
ucaaccuuaagaccuacuguucu

SEQ ID NO: 1283493 - RNA, 16 nt, Human
ucacagucacauucca

SEQ ID NO: 1283494 - RNA, 18 nt, Human
ucacaagacccaaaaggc

SEQ ID NO: 1283495 - RNA, 17 nt, Human
ucacaagacccaaaagg

SEQ ID NO: 1283496 - RNA, 13 nt, Human
ucacaagacccaa

SEQ ID NO: 1283497 - RNA, 13 nt, Human
ucaauuaccacac

SEQ ID NO: 1283498 - RNA, 15 nt, Human
ucaauuacucuauaa

SEQ ID NO: 1283499 - RNA, 16 nt, Human
ucaauuacucuauaau

SEQ ID NO: 1283500 - RNA, 13 nt, Human
ucaauuacugguc

SEQ ID NO: 1283501 - RNA, 16 nt, Human
ucaauuacugguccaa

SEQ ID NO: 1283502 - RNA, 20 nt, Human
ucaauuacugguccaaaaga

SEQ ID NO: 1283503 - RNA, 22 nt, Human
ucacacccaacuugguuuugcu

SEQ ID NO: 1283504 - RNA, 20 nt, Human
ucacaccugaacugaacacc

SEQ ID NO: 1283505 - RNA, 18 nt, Human
ucacagugcucuuuucuc

SEQ ID NO: 1283506 - RNA, 20 nt, Human
ucacagugcucuuuucuccu

SEQ ID NO: 1283507 - RNA, 16 nt, Human
ucacagugcuuuuaag

SEQ ID NO: 1283508 - RNA, 18 nt, Human
ucacagugcuuuuaagug

SEQ ID NO: 1283509 - RNA, 16 nt, Human
ucacagugaacacuca

SEQ ID NO: 1283510 - RNA, 17 nt, Human
ucacagugcucuuuucu

SEQ ID NO: 1283511 - RNA, 11 nt, Human
ucacauuuucc

SEQ ID NO: 1283512 - RNA, 14 nt, Human
ucacauuuuccuuu

SEQ ID NO: 1283513 - RNA, 16 nt, Human
ucacauuuuccuuuuc

SEQ ID NO: 1283514 - RNA, 17 nt, Human
ucacauuuuccuuuuca

SEQ ID NO: 1283515 - RNA, 18 nt, Human
ucacauuuuccuuuucaa

SEQ ID NO: 1283516 - RNA, 14 nt, Human
ucaccaaggcugau

SEQ ID NO: 1283517 - RNA, 18 nt, Human
ucaccagaucugauuugu

SEQ ID NO: 1283518 - RNA, 15 nt, Human
ucaccagauuugcua

SEQ ID NO: 1283519 - RNA, 21 nt, Human
ucaccagauuugcuaauuuau

SEQ ID NO: 1283520 - RNA, 15 nt, Human
ucaccaauguaccca

SEQ ID NO: 1283521 - RNA, 23 nt, Human
ucaccaauguacccaccgggcca

SEQ ID NO: 1283522 - RNA, 12 nt, Human
ucaccacaaacu

SEQ ID NO: 1283523 - RNA, 22 nt, Human
ucaccacaaacuguaauacaau

SEQ ID NO: 1283524 - RNA, 15 nt, Human
ucauuccauucugga

SEQ ID NO: 1283525 - RNA, 14 nt, Human
ucauuccauucugg

SEQ ID NO: 1283526 - RNA, 17 nt, Human
ucauuccaugugcccag

SEQ ID NO: 1283527 - RNA, 18 nt, Human
ucauuccaugugcccagu

SEQ ID NO: 1283528 - RNA, 19 nt, Human
ucauuccaugugcccaguu

SEQ ID NO: 1283529 - RNA, 20 nt, Human
ucauuccaugugcccaguua

SEQ ID NO: 1283530 - RNA, 16 nt, Human
ucauuccaugugccca

SEQ ID NO: 1283531 - RNA, 23 nt, Human
ucauuccaccuucccaugcccug

SEQ ID NO: 1283532 - RNA, 14 nt, Human
ucauucauuuuugu

SEQ ID NO: 1283533 - RNA, 22 nt, Human
ucauucacaucgcagauucucc

SEQ ID NO: 1283534 - RNA, 20 nt, Human
ucauucacaucgcagauucu

SEQ ID NO: 1283535 - RNA, 17 nt, Human
ucauuauuuauguauug

SEQ ID NO: 1283536 - RNA, 16 nt, Human
ucauuauuuauguauu

SEQ ID NO: 1283537 - RNA, 14 nt, Human
ucauuauuuaugua

SEQ ID NO: 1283538 - RNA, 22 nt, Human
ucauucaaguguaaaauauuuu

SEQ ID NO: 1283539 - RNA, 12 nt, Human
ucaugcugccuu

SEQ ID NO: 1283540 - RNA, 14 nt, Human
ucaugcugggauuu

SEQ ID NO: 1283541 - RNA, 20 nt, Human
ucaugcugggauuuccaacu

SEQ ID NO: 1283542 - RNA, 22 nt, Human
ucauuagucauguuuaucugcu

SEQ ID NO: 1283543 - RNA, 18 nt, Human
ucaugcugggauuuccaa

SEQ ID NO: 1283544 - RNA, 19 nt, Human
ucauuagucauguuuaucu

SEQ ID NO: 1283545 - RNA, 22 nt, Human
ucauuaugcacuugggagaaaa

SEQ ID NO: 1283546 - RNA, 19 nt, Human
ucauuauuacuuuugcugu

SEQ ID NO: 1283547 - RNA, 23 nt, Human
ucauuauucguagauauuggaca

SEQ ID NO: 1283548 - RNA, 12 nt, Human
ucauuucaggau

SEQ ID NO: 1283549 - RNA, 12 nt, Human
ucauuucaucua

SEQ ID NO: 1283550 - RNA, 13 nt, Human
ucauuucacugua

SEQ ID NO: 1283551 - RNA, 21 nt, Human
ucauuucacuguagcucuaaa

SEQ ID NO: 1283552 - RNA, 13 nt, Human
ucauuucagaagu

SEQ ID NO: 1283553 - RNA, 21 nt, Human
ucauuucagaaguuaguuugu

SEQ ID NO: 1283554 - RNA, 19 nt, Human
ucauuccauucuggaagug

SEQ ID NO: 1283555 - RNA, 16 nt, Human
ucauuccauucuggaa

SEQ ID NO: 1283556 - RNA, 20 nt, Human
ucauuguguuaccuguagau

SEQ ID NO: 1283557 - RNA, 18 nt, Human
ucauugugaaauuauuca

SEQ ID NO: 1283558 - RNA, 17 nt, Human
ucauugugaaauuauuc

SEQ ID NO: 1283559 - RNA, 15 nt, Human
ucauugugaaauuau

SEQ ID NO: 1283560 - RNA, 12 nt, Human
ucauugugaaau

SEQ ID NO: 1283561 - RNA, 13 nt, Human
ucauuuccaagca

SEQ ID NO: 1283562 - RNA, 16 nt, Human
ucauuuccaagcaagu

SEQ ID NO: 1283563 - RNA, 15 nt, Human
ucauuucauuuccua

SEQ ID NO: 1283564 - RNA, 13 nt, Human
ucauuuccucaaa

SEQ ID NO: 1283565 - RNA, 13 nt, Human
ucauuucuauuuc

SEQ ID NO: 1283566 - RNA, 14 nt, Human
ucauagcuaaaaaa

SEQ ID NO: 1283567 - RNA, 22 nt, Human
ucauagcccaguagaccuuguu

SEQ ID NO: 1283568 - RNA, 21 nt, Human
ucauagcccucacccuggggc

SEQ ID NO: 1283569 - RNA, 14 nt, Human
ucauagcccaguag

SEQ ID NO: 1283570 - RNA, 14 nt, Human
ucagggcuccuggg

SEQ ID NO: 1283571 - RNA, 13 nt, Human
ucaucuucacugc

SEQ ID NO: 1283572 - RNA, 18 nt, Human
ucaucuucaguugucucu

SEQ ID NO: 1283573 - RNA, 20 nt, Human
ucaucuucaguugucucuga

SEQ ID NO: 1283574 - RNA, 15 nt, Human
ucaucuuauucagca

SEQ ID NO: 1283575 - RNA, 16 nt, Human
ucaucuuauucagcac

SEQ ID NO: 1283576 - RNA, 16 nt, Human
ucaucuucuucaccau

SEQ ID NO: 1283577 - RNA, 15 nt, Human
ucaucaggaacguuu

SEQ ID NO: 1283578 - RNA, 16 nt, Human
ucaucagaaaggaaaa

SEQ ID NO: 1283579 - RNA, 14 nt, Human
ucaucacacugggu

SEQ ID NO: 1283580 - RNA, 21 nt, Human
ucaucacuuugaccuaaauua

SEQ ID NO: 1283581 - RNA, 19 nt, Human
ucaucagaaaggaaaaaca

SEQ ID NO: 1283582 - RNA, 20 nt, Human
uccaggguggcagcaacaau

SEQ ID NO: 1283583 - RNA, 18 nt, Human
uccaggguggcagcaaca

SEQ ID NO: 1283584 - RNA, 15 nt, Human
uccaggguggcagca

SEQ ID NO: 1283585 - RNA, 14 nt, Human
uccaggguggcagc

SEQ ID NO: 1283586 - RNA, 21 nt, Human
uccagcuuuguucuucuuaaa

SEQ ID NO: 1283587 - RNA, 16 nt, Human
uccagggucccucugu

SEQ ID NO: 1283588 - RNA, 17 nt, Human
uccagggucccucugug

SEQ ID NO: 1283589 - RNA, 18 nt, Human
uccagggucccucugugu

SEQ ID NO: 1283590 - RNA, 17 nt, Human
uccagcuuuccuguauu

SEQ ID NO: 1283591 - RNA, 16 nt, Human
uccagguguuacugua

SEQ ID NO: 1283592 - RNA, 11 nt, Human
uccaggguggu

SEQ ID NO: 1283593 - RNA, 17 nt, Human
uccagggugugugcucg

SEQ ID NO: 1283594 - RNA, 14 nt, Human
uccagccccucugg

SEQ ID NO: 1283595 - RNA, 15 nt, Human
uccagccaucaccuu

SEQ ID NO: 1283596 - RNA, 14 nt, Human
uccagcuguccccc

SEQ ID NO: 1283597 - RNA, 16 nt, Human
uccagcugucccccca

SEQ ID NO: 1283598 - RNA, 17 nt, Human
uccagcuguccccccac

SEQ ID NO: 1283599 - RNA, 21 nt, Human
uccagcuguccccccacuccc

SEQ ID NO: 1283600 - RNA, 20 nt, Human
uccagcuguugagccccucc

SEQ ID NO: 1283601 - RNA, 19 nt, Human
uccagccaucaagagacug

SEQ ID NO: 1283602 - RNA, 20 nt, Human
uccagccaucaagagacuga

SEQ ID NO: 1283603 - RNA, 21 nt, Human
uccagccaucaagagacugag

SEQ ID NO: 1283604 - RNA, 24 nt, Human
uccagccaucaagagacugaguca

SEQ ID NO: 1283605 - RNA, 17 nt, Human
uccacuuggucugugag

SEQ ID NO: 1283606 - RNA, 12 nt, Human
uccaccuuccca

SEQ ID NO: 1283607 - RNA, 15 nt, Human
uccaccuucccacuu

SEQ ID NO: 1283608 - RNA, 16 nt, Human
uccacuuggucuguga

SEQ ID NO: 1283609 - RNA, 15 nt, Human
uccacuuggucugug

SEQ ID NO: 1283610 - RNA, 15 nt, Human
uccaccuucccaugc

SEQ ID NO: 1283611 - RNA, 19 nt, Human
uccacagaagcuccaggua

SEQ ID NO: 1283612 - RNA, 14 nt, Human
uccacacugcacaa

SEQ ID NO: 1283613 - RNA, 10 nt, Human
uccacagacg

SEQ ID NO: 1283614 - RNA, 23 nt, Human
uccacagacggaaggguaaacaa

SEQ ID NO: 1283615 - RNA, 22 nt, Human
uccacagacggaaggguaaaca

SEQ ID NO: 1283616 - RNA, 15 nt, Human
uccacagaggacaca

SEQ ID NO: 1283617 - RNA, 17 nt, Human
uccacagaggacacaga

SEQ ID NO: 1283618 - RNA, 19 nt, Human
uccacagaggacacagaga

SEQ ID NO: 1283619 - RNA, 17 nt, Human
uccacagcaaccccagg

SEQ ID NO: 1283620 - RNA, 21 nt, Human
uccaccccuuucuagaccaau

SEQ ID NO: 1283621 - RNA, 22 nt, Human
uccaccccuuucuagaccaaua

SEQ ID NO: 1283622 - RNA, 20 nt, Human
uccaccugguacucccucuc

SEQ ID NO: 1283623 - RNA, 21 nt, Human
uccaccugguacucccucuca

SEQ ID NO: 1283624 - RNA, 23 nt, Human
uccaccugguacucccucucagg

SEQ ID NO: 1283625 - RNA, 18 nt, Human
uccaauuuaguuguugua

SEQ ID NO: 1283626 - RNA, 16 nt, Human
uccaaaaugugccuau

SEQ ID NO: 1283627 - RNA, 14 nt, Human
uccaauuuucugga

SEQ ID NO: 1283628 - RNA, 18 nt, Human
uccaauuuucuggaauac

SEQ ID NO: 1283629 - RNA, 17 nt, Human
ucauuucuauuucuccu

SEQ ID NO: 1283630 - RNA, 21 nt, Human
ucauuucuauuucuccuccau

SEQ ID NO: 1283631 - RNA, 18 nt, Human
uccaaaaucuugaucagu

SEQ ID NO: 1283632 - RNA, 15 nt, Human
uccaaaaugugccua

SEQ ID NO: 1283633 - RNA, 22 nt, Human
uccaaaauguuggucauuuuau

SEQ ID NO: 1283634 - RNA, 13 nt, Human
uccacacugcaca

SEQ ID NO: 1283635 - RNA, 15 nt, Human
uccacacugcacaau

SEQ ID NO: 1283636 - RNA, 22 nt, Human
ucagaguaauccaagcaaaugu

SEQ ID NO: 1283637 - RNA, 21 nt, Human
ucagaguaauccaagcaaaug

SEQ ID NO: 1283638 - RNA, 19 nt, Human
ucagaggguguccugcacc

SEQ ID NO: 1283639 - RNA, 12 nt, Human
ucagagaauuuc

SEQ ID NO: 1283640 - RNA, 13 nt, Human
ucagacuggggca

SEQ ID NO: 1283641 - RNA, 14 nt, Human
ucagagaaggaaca

SEQ ID NO: 1283642 - RNA, 13 nt, Human
ucagagaauuucu

SEQ ID NO: 1283643 - RNA, 17 nt, Human
ucagacagagaggacug

SEQ ID NO: 1283644 - RNA, 22 nt, Human
ucagacagagaggacuguaggg

SEQ ID NO: 1283645 - RNA, 23 nt, Human
ucagaccauaauguuacauuauu

SEQ ID NO: 1283646 - RNA, 14 nt, Human
ucagacccuggagg

SEQ ID NO: 1283647 - RNA, 12 nt, Human
ucagacccugga

SEQ ID NO: 1283648 - RNA, 17 nt, Human
ucagacgccugaggaac

SEQ ID NO: 1283649 - RNA, 16 nt, Human
ucagacgccugaggaa

SEQ ID NO: 1283650 - RNA, 14 nt, Human
ucagacuguuuagu

SEQ ID NO: 1283651 - RNA, 22 nt, Human
ucagaaacacccucacacuggg

SEQ ID NO: 1283652 - RNA, 21 nt, Human
ucagaaacacccucacacugg

SEQ ID NO: 1283653 - RNA, 19 nt, Human
ucagaaacacccucacacu

SEQ ID NO: 1283654 - RNA, 20 nt, Human
ucacuuguuuuauuuaaccu

SEQ ID NO: 1283655 - RNA, 21 nt, Human
ucacuuuacacaauagaauua

SEQ ID NO: 1283656 - RNA, 15 nt, Human
ucagaaaccagacuc

SEQ ID NO: 1283657 - RNA, 13 nt, Human
ucagaaagacuug

SEQ ID NO: 1283658 - RNA, 14 nt, Human
ucagaauuuagugu

SEQ ID NO: 1283659 - RNA, 21 nt, Human
ucagaauuuaguguauccaua

SEQ ID NO: 1283660 - RNA, 20 nt, Human
ucagaauuuuauacuuuccc

SEQ ID NO: 1283661 - RNA, 21 nt, Human
ucagaauuuuauacuuucccu

SEQ ID NO: 1283662 - RNA, 22 nt, Human
ucagaauuuuauacuuucccua

SEQ ID NO: 1283663 - RNA, 23 nt, Human
ucagaauuuuauacuuucccuac

SEQ ID NO: 1283664 - RNA, 18 nt, Human
ucagacagaaccccuaca

SEQ ID NO: 1283665 - RNA, 22 nt, Human
ucacucuguucauuccuccagg

SEQ ID NO: 1283666 - RNA, 15 nt, Human
ucacucuuaugcugu

SEQ ID NO: 1283667 - RNA, 18 nt, Human
ucacugcauccuccgccu

SEQ ID NO: 1283668 - RNA, 19 nt, Human
ucacugcauccuccgccuc

SEQ ID NO: 1283669 - RNA, 20 nt, Human
ucacucuuaugcuguaccca

SEQ ID NO: 1283670 - RNA, 21 nt, Human
ucacucuguucauuccuccag

SEQ ID NO: 1283671 - RNA, 20 nt, Human
ucacucuguucauuccucca

SEQ ID NO: 1283672 - RNA, 23 nt, Human
ucaccccuaaaagaaacccugca

SEQ ID NO: 1283673 - RNA, 19 nt, Human
ucacugcuugaacuaggcu

SEQ ID NO: 1283674 - RNA, 17 nt, Human
ucacugcuggcugccuu

SEQ ID NO: 1283675 - RNA, 18 nt, Human
ucacugcuggcugccuua

SEQ ID NO: 1283676 - RNA, 22 nt, Human
ucacugcuggcugccuuagaac

SEQ ID NO: 1283677 - RNA, 12 nt, Human
ucacugcuggcu

SEQ ID NO: 1283678 - RNA, 14 nt, Human
ucacugcucacacu

SEQ ID NO: 1283679 - RNA, 13 nt, Human
ucacugcuggcug

SEQ ID NO: 1283680 - RNA, 14 nt, Human
ucacugcuggcugc

SEQ ID NO: 1283681 - RNA, 15 nt, Human
ucacugcuggcugcc

SEQ ID NO: 1283682 - RNA, 16 nt, Human
ucacugcuggcugccu

SEQ ID NO: 1283683 - RNA, 22 nt, Human
ucacugcuguuauauuucauca

SEQ ID NO: 1283684 - RNA, 23 nt, Human
ucacugcuguuauauuucaucau

SEQ ID NO: 1283685 - RNA, 18 nt, Human
ucacuggaccacugggca

SEQ ID NO: 1283686 - RNA, 11 nt, Human
ucacuggagca

SEQ ID NO: 1283687 - RNA, 13 nt, Human
ucacuggagcaca

SEQ ID NO: 1283688 - RNA, 14 nt, Human
ucacuggagcacaa

SEQ ID NO: 1283689 - RNA, 15 nt, Human
ucacuggagcacaau

SEQ ID NO: 1283690 - RNA, 16 nt, Human
ucacuggagcacaaua

SEQ ID NO: 1283691 - RNA, 18 nt, Human
ucacugguagaccaaaau

SEQ ID NO: 1283692 - RNA, 19 nt, Human
ucacugguagaccaaaaua

SEQ ID NO: 1283693 - RNA, 20 nt, Human
ucacugguagaccaaaauaa

SEQ ID NO: 1283694 - RNA, 20 nt, Human
ucacuguagaaugauuucau

SEQ ID NO: 1283695 - RNA, 15 nt, Human
ucagauaugauucaa

SEQ ID NO: 1283696 - RNA, 16 nt, Human
ucagauaugauucaaa

SEQ ID NO: 1283697 - RNA, 23 nt, Human
ucagauaucuuggacaaaucaca

SEQ ID NO: 1283698 - RNA, 14 nt, Human
ucagcaugaauuug

SEQ ID NO: 1283699 - RNA, 15 nt, Human
ucagcaugaauuugu

SEQ ID NO: 1283700 - RNA, 17 nt, Human
ucagcaugaauuuguaa

SEQ ID NO: 1283701 - RNA, 18 nt, Human
ucagcaugaauuuguaau

SEQ ID NO: 1283702 - RNA, 19 nt, Human
ucagcaugaauuuguaaug

SEQ ID NO: 1283703 - RNA, 15 nt, Human
ucagcaugcaauaca

SEQ ID NO: 1283704 - RNA, 12 nt, Human
ucagcaugucua

SEQ ID NO: 1283705 - RNA, 17 nt, Human
ucagcauucucacuccu

SEQ ID NO: 1283706 - RNA, 20 nt, Human
ucagcauucucacuccuacc

SEQ ID NO: 1283707 - RNA, 16 nt, Human
ucagcaugucuauuca

SEQ ID NO: 1283708 - RNA, 19 nt, Human
ucagcaugucuauucagcu

SEQ ID NO: 1283709 - RNA, 21 nt, Human
ucagcaugucuauucagcuuc

SEQ ID NO: 1283710 - RNA, 21 nt, Human
ucagauaucuuggacaaauca

SEQ ID NO: 1283711 - RNA, 22 nt, Human
ucagauaucuuggacaaaucac

SEQ ID NO: 1283712 - RNA, 20 nt, Human
ucagccucccgaguagcugg

SEQ ID NO: 1283713 - RNA, 23 nt, Human
ucagcauucucacuccuaccugg

SEQ ID NO: 1283714 - RNA, 20 nt, Human
ucagccuccugaguagcugg

SEQ ID NO: 1283715 - RNA, 16 nt, Human
ucagccucccaaagug

SEQ ID NO: 1283716 - RNA, 22 nt, Human
ucagccuccugaguagcuggga

SEQ ID NO: 1283717 - RNA, 12 nt, Human
ucagccuggcca

SEQ ID NO: 1283718 - RNA, 14 nt, Human
ucagccuggccaga

SEQ ID NO: 1283719 - RNA, 15 nt, Human
ucagccuggccagac

SEQ ID NO: 1283720 - RNA, 16 nt, Human
ucagccuggccagaca

SEQ ID NO: 1283721 - RNA, 17 nt, Human
ucagccuggccagacac

SEQ ID NO: 1283722 - RNA, 18 nt, Human
ucagccuggccagacaca

SEQ ID NO: 1283723 - RNA, 19 nt, Human
ucagccuggccagacacag

SEQ ID NO: 1283724 - RNA, 23 nt, Human
ucaggagcccugggaggcucugg

SEQ ID NO: 1283725 - RNA, 20 nt, Human
ucaggagcccugggaggcuc

SEQ ID NO: 1283726 - RNA, 20 nt, Human
ucagcugcauuccgcagccc

SEQ ID NO: 1283727 - RNA, 14 nt, Human
ucaggagccuguga

SEQ ID NO: 1283728 - RNA, 13 nt, Human
ucaggauugcgag

SEQ ID NO: 1283729 - RNA, 15 nt, Human
ucaggauugcgagag

SEQ ID NO: 1283730 - RNA, 19 nt, Human
ucaggagcccugggaggcu

SEQ ID NO: 1283731 - RNA, 20 nt, Human
ucagcugcaagguacucugg

SEQ ID NO: 1283732 - RNA, 21 nt, Human
ucagcugcaagguacucuggu

SEQ ID NO: 1283733 - RNA, 22 nt, Human
ucagcugcaagguacucuggug

SEQ ID NO: 1283734 - RNA, 18 nt, Human
ucagcugcauuccgcagc

SEQ ID NO: 1283735 - RNA, 12 nt, Human
ucagcugccagu

SEQ ID NO: 1283736 - RNA, 17 nt, Human
ucaggcuagauguaugu

SEQ ID NO: 1283737 - RNA, 19 nt, Human
ucaggcacugggcaugagg

SEQ ID NO: 1283738 - RNA, 18 nt, Human
ucaggauugcgagagaug

SEQ ID NO: 1283739 - RNA, 20 nt, Human
ucaggauugcgagagaugug

SEQ ID NO: 1283740 - RNA, 21 nt, Human
ucaggauugcgagagaugugu

SEQ ID NO: 1283741 - RNA, 22 nt, Human
ucaggauugcgagagaugugug

SEQ ID NO: 1283742 - RNA, 23 nt, Human
ucaggauugcgagagaugugugu

SEQ ID NO: 1283743 - RNA, 13 nt, Human
ucaggcacacagc

SEQ ID NO: 1283744 - RNA, 14 nt, Human
ucaggcacacagcu

SEQ ID NO: 1283745 - RNA, 18 nt, Human
ucaggcacugggcaugag

SEQ ID NO: 1283746 - RNA, 18 nt, Human
ucagggccaugcugaggc

SEQ ID NO: 1283747 - RNA, 19 nt, Human
ucagggccaugcugaggcc

SEQ ID NO: 1283748 - RNA, 21 nt, Human
ucagggccaugcugaggccug

SEQ ID NO: 1283749 - RNA, 23 nt, Human
ucagggccaugcugaggccuggg

SEQ ID NO: 1283750 - RNA, 18 nt, Human
ucagggaaagugggacag

SEQ ID NO: 1283751 - RNA, 23 nt, Human
ucagggacucaucuuucccuccu

SEQ ID NO: 1283752 - RNA, 15 nt, Human
ucagggaggcccugu

SEQ ID NO: 1283753 - RNA, 15 nt, Human
ucagggaggucauuu

SEQ ID NO: 1283754 - RNA, 19 nt, Human
ucagggaggcccugugccc

SEQ ID NO: 1283755 - RNA, 22 nt, Human
ucagggaggcccugugccccuu

SEQ ID NO: 1283756 - RNA, 19 nt, Human
ucagggaguguucccuauc

SEQ ID NO: 1283757 - RNA, 15 nt, Human
ucagggcaaagccag

SEQ ID NO: 1283758 - RNA, 16 nt, Human
ucagggcaaagccagg

SEQ ID NO: 1283759 - RNA, 20 nt, Human
ucagggcaaagccagguccc

SEQ ID NO: 1283760 - RNA, 21 nt, Human
ucagggcaaagccaggucccu

SEQ ID NO: 1283761 - RNA, 22 nt, Human
ucagggcaaagccaggucccuc

SEQ ID NO: 1283762 - RNA, 15 nt, Human
ucagggcagcgccag

SEQ ID NO: 1283763 - RNA, 19 nt, Human
ucagggcagcgccaggcug

SEQ ID NO: 1283764 - RNA, 13 nt, Human
ucagggccaggcc

SEQ ID NO: 1283765 - RNA, 17 nt, Human
ucagggccaggccucuc

SEQ ID NO: 1283766 - RNA, 13 nt, Human
ucagggccaugcu

SEQ ID NO: 1283767 - RNA, 14 nt, Human
ucagggccaugcug

SEQ ID NO: 1283768 - RNA, 17 nt, Human
ucagggccaugcugagg

SEQ ID NO: 1283769 - RNA, 15 nt, Human
gggaggaggcagaga

SEQ ID NO: 1283770 - RNA, 14 nt, Human
gggaggagaaugag

SEQ ID NO: 1283771 - RNA, 12 nt, Human
gggaggagggca

SEQ ID NO: 1283772 - RNA, 20 nt, Human
gggaggacgcucucuggccu

SEQ ID NO: 1283773 - RNA, 17 nt, Human
gggaggacgcucucugg

SEQ ID NO: 1283774 - RNA, 16 nt, Human
gggaggagggcaggca

SEQ ID NO: 1283775 - RNA, 11 nt, Human
gggaggcagag

SEQ ID NO: 1283776 - RNA, 14 nt, Human
gggagucugccagg

SEQ ID NO: 1283777 - RNA, 17 nt, Human
gggagucugccagggcc

SEQ ID NO: 1283778 - RNA, 12 nt, Human
gggagcugaggc

SEQ ID NO: 1283779 - RNA, 12 nt, Human
gggagcugccaa

SEQ ID NO: 1283780 - RNA, 14 nt, Human
gggagcugggccug

SEQ ID NO: 1283781 - RNA, 15 nt, Human
gggagcugggccugg

SEQ ID NO: 1283782 - RNA, 16 nt, Human
gggagcugggccuggu

SEQ ID NO: 1283783 - RNA, 17 nt, Human
gggagcugggccugguc

SEQ ID NO: 1283784 - RNA, 18 nt, Human
gggagcugggccuggucu

SEQ ID NO: 1283785 - RNA, 14 nt, Human
gggagcugggcuuc

SEQ ID NO: 1283786 - RNA, 19 nt, Human
gggagcugguuagaaaugc

SEQ ID NO: 1283787 - RNA, 13 nt, Human
gggagccgggagc

SEQ ID NO: 1283788 - RNA, 16 nt, Human
gggagcccccagccug

SEQ ID NO: 1283789 - RNA, 17 nt, Human
gggagcccccagccugu

SEQ ID NO: 1283790 - RNA, 21 nt, Human
gggagcccccagccugucaga

SEQ ID NO: 1283791 - RNA, 19 nt, Human
gggagccccuucugcucag

SEQ ID NO: 1283792 - RNA, 21 nt, Human
gggagccugaucaccugcccu

SEQ ID NO: 1283793 - RNA, 21 nt, Human
gggagccucgcaacccgugcc

SEQ ID NO: 1283794 - RNA, 23 nt, Human
gggagcucaggaaccgaggcagg

SEQ ID NO: 1283795 - RNA, 19 nt, Human
gggagcuccacucugcuuc

SEQ ID NO: 1283796 - RNA, 12 nt, Human
gggagcucugca

SEQ ID NO: 1283797 - RNA, 23 nt, Human
gggagcuccacucugcuucucug

SEQ ID NO: 1283798 - RNA, 12 nt, Human
gggagcucagga

SEQ ID NO: 1283799 - RNA, 22 nt, Human
gggagcucaggaaccgaggcag

SEQ ID NO: 1283800 - RNA, 22 nt, Human
gggagcgggucugcucccaagg

SEQ ID NO: 1283801 - RNA, 12 nt, Human
ggcuuuggauuu

SEQ ID NO: 1283802 - RNA, 17 nt, Human
ggcuugggccuaggcug

SEQ ID NO: 1283803 - RNA, 16 nt, Human
ggcuuugauguuccuu

SEQ ID NO: 1283804 - RNA, 13 nt, Human
ggcuuuucacugc

SEQ ID NO: 1283805 - RNA, 20 nt, Human
ggcuuuuauuaaugcacuuu

SEQ ID NO: 1283806 - RNA, 19 nt, Human
ggcuuuuauuaaugcacuu

SEQ ID NO: 1283807 - RNA, 22 nt, Human
gggaauaugagugcguggugcg

SEQ ID NO: 1283808 - RNA, 14 nt, Human
gggaaucagaacuc

SEQ ID NO: 1283809 - RNA, 11 nt, Human
gggaaugugaa

SEQ ID NO: 1283810 - RNA, 14 nt, Human
gggaauugaggaca

SEQ ID NO: 1283811 - RNA, 22 nt, Human
gggacaaguggacucagggcag

SEQ ID NO: 1283812 - RNA, 14 nt, Human
gggacaccuaggcu

SEQ ID NO: 1283813 - RNA, 19 nt, Human
gggaccaggaguggguggg

SEQ ID NO: 1283814 - RNA, 14 nt, Human
gggaccaggcacca

SEQ ID NO: 1283815 - RNA, 21 nt, Human
gggacgccugggggugccagg

SEQ ID NO: 1283816 - RNA, 22 nt, Human
gggacgccugggggugccagga

SEQ ID NO: 1283817 - RNA, 17 nt, Human
gggacggugcccaagcc

SEQ ID NO: 1283818 - RNA, 18 nt, Human
gggaccugguacccuccu

SEQ ID NO: 1283819 - RNA, 21 nt, Human
gggaccugguacccuccuggc

SEQ ID NO: 1283820 - RNA, 13 nt, Human
gggaccuggaagg

SEQ ID NO: 1283821 - RNA, 23 nt, Human
gggaccaggaguggguggggagu

SEQ ID NO: 1283822 - RNA, 21 nt, Human
gggacugaggggaggggagca

SEQ ID NO: 1283823 - RNA, 14 nt, Human
gggacguggcucag

SEQ ID NO: 1283824 - RNA, 18 nt, Human
gggacguggcucagccag

SEQ ID NO: 1283825 - RNA, 19 nt, Human
gggacguggcucagccagc

SEQ ID NO: 1283826 - RNA, 11 nt, Human
gggacugagag

SEQ ID NO: 1283827 - RNA, 23 nt, Human
gggacugccagucccccugcccc

SEQ ID NO: 1283828 - RNA, 19 nt, Human
gggagcccacuguccuggg

SEQ ID NO: 1283829 - RNA, 23 nt, Human
gggacugagagaugcagaaauau

SEQ ID NO: 1283830 - RNA, 12 nt, Human
gggacugagaga

SEQ ID NO: 1283831 - RNA, 20 nt, Human
gggagcccacuguccugggc

SEQ ID NO: 1283832 - RNA, 21 nt, Human
gggagcccacuguccugggcc

SEQ ID NO: 1283833 - RNA, 13 nt, Human
gggagcccccagc

SEQ ID NO: 1283834 - RNA, 15 nt, Human
gggagcccccagccu

SEQ ID NO: 1283835 - RNA, 15 nt, Human
ggcuugccacacccc

SEQ ID NO: 1283836 - RNA, 13 nt, Human
ggcuugccugcag

SEQ ID NO: 1283837 - RNA, 14 nt, Human
ggcuugccacaccc

SEQ ID NO: 1283838 - RNA, 15 nt, Human
ggcuugcuauucugu

SEQ ID NO: 1283839 - RNA, 11 nt, Human
ggcuugcugcc

SEQ ID NO: 1283840 - RNA, 14 nt, Human
ggcuugccugcagg

SEQ ID NO: 1283841 - RNA, 15 nt, Human
ggcuugccugcaggc

SEQ ID NO: 1283842 - RNA, 17 nt, Human
ggcuuggccacagccag

SEQ ID NO: 1283843 - RNA, 19 nt, Human
ggcuuggccacagccaggg

SEQ ID NO: 1283844 - RNA, 18 nt, Human
ggcuuggccacagccagg

SEQ ID NO: 1283845 - RNA, 12 nt, Human
ggcuugggauuu

SEQ ID NO: 1283846 - RNA, 17 nt, Human
ggcuugggauuugcugu

SEQ ID NO: 1283847 - RNA, 13 nt, Human
ggcuugggccuag

SEQ ID NO: 1283848 - RNA, 16 nt, Human
ggcuugggccuaggcu

SEQ ID NO: 1283849 - RNA, 18 nt, Human
ggcuugggccuaggcugc

SEQ ID NO: 1283850 - RNA, 20 nt, Human
ggcuguguaagauuuguuuu

SEQ ID NO: 1283851 - RNA, 22 nt, Human
ggcuguguaagauuuguuuuua

SEQ ID NO: 1283852 - RNA, 11 nt, Human
ggcugugugug

SEQ ID NO: 1283853 - RNA, 18 nt, Human
ggcuguguuuccaucuca

SEQ ID NO: 1283854 - RNA, 21 nt, Human
ggcuguggcauccagaguccc

SEQ ID NO: 1283855 - RNA, 23 nt, Human
ggcuguggcauccagagucccug

SEQ ID NO: 1283856 - RNA, 14 nt, Human
ggcugugggcaagc

SEQ ID NO: 1283857 - RNA, 15 nt, Human
ggcuguggucacagc

SEQ ID NO: 1283858 - RNA, 17 nt, Human
ggcuguggaccauggag

SEQ ID NO: 1283859 - RNA, 23 nt, Human
ggcuguggaccauggaguggcag

SEQ ID NO: 1283860 - RNA, 13 nt, Human
ggcugugccucug

SEQ ID NO: 1283861 - RNA, 16 nt, Human
ggcugugccucugccu

SEQ ID NO: 1283862 - RNA, 17 nt, Human
ggcugucuguuguauuc

SEQ ID NO: 1283863 - RNA, 14 nt, Human
ggcugucugaggcu

SEQ ID NO: 1283864 - RNA, 15 nt, Human
ggcugucccggaggc

SEQ ID NO: 1283865 - RNA, 13 nt, Human
ggcuguccuguac

SEQ ID NO: 1283866 - RNA, 22 nt, Human
ggcuguccuguacauuguggga

SEQ ID NO: 1283867 - RNA, 17 nt, Human
ggcugucccggaggcgg

SEQ ID NO: 1283868 - RNA, 20 nt, Human
ggcuggagugcaguggcgcg

SEQ ID NO: 1283869 - RNA, 20 nt, Human
ggcuggagugcaguggugug

SEQ ID NO: 1283870 - RNA, 23 nt, Human
ggcuggaguuagggacugaccag

SEQ ID NO: 1283871 - RNA, 20 nt, Human
ggcuggagugcaguggugca

SEQ ID NO: 1283872 - RNA, 13 nt, Human
ggcugggaggagg

SEQ ID NO: 1283873 - RNA, 15 nt, Human
ggcugggagcucugc

SEQ ID NO: 1283874 - RNA, 20 nt, Human
ggcugggaggagggcaggca

SEQ ID NO: 1283875 - RNA, 21 nt, Human
ggcugggaggagggcaggcau

SEQ ID NO: 1283876 - RNA, 23 nt, Human
ggcugggaguaguugucuuuccu

SEQ ID NO: 1283877 - RNA, 18 nt, Human
ggcuggagcuagaauuug

SEQ ID NO: 1283878 - RNA, 11 nt, Human
ggcuggaggag

SEQ ID NO: 1283879 - RNA, 14 nt, Human
ggcuggaggagccc

SEQ ID NO: 1283880 - RNA, 15 nt, Human
ggcuggaggagccca

SEQ ID NO: 1283881 - RNA, 17 nt, Human
ggcuggaggagcccagg

SEQ ID NO: 1283882 - RNA, 16 nt, Human
ggcuggaggagcccag

SEQ ID NO: 1283883 - RNA, 13 nt, Human
ggcuggaggccca

SEQ ID NO: 1283884 - RNA, 14 nt, Human
ggcuggaggcccag

SEQ ID NO: 1283885 - RNA, 15 nt, Human
ggcuggaggcccagg

SEQ ID NO: 1283886 - RNA, 19 nt, Human
ggcuggaggcccaggcugg

SEQ ID NO: 1283887 - RNA, 15 nt, Human
ggcugagggagccug

SEQ ID NO: 1283888 - RNA, 13 nt, Human
ggcugaggccacc

SEQ ID NO: 1283889 - RNA, 23 nt, Human
ggcucuggagcccacuguacuug

SEQ ID NO: 1283890 - RNA, 14 nt, Human
ggcucuguccccag

SEQ ID NO: 1283891 - RNA, 16 nt, Human
ggcucuguccccagcc

SEQ ID NO: 1283892 - RNA, 17 nt, Human
ggcucuguccccagccu

SEQ ID NO: 1283893 - RNA, 13 nt, Human
ggcugaggagcag

SEQ ID NO: 1283894 - RNA, 14 nt, Human
ggcugaggccugga

SEQ ID NO: 1283895 - RNA, 16 nt, Human
ggcugaggccuggacu

SEQ ID NO: 1283896 - RNA, 14 nt, Human
ggcugaggcuggca

SEQ ID NO: 1283897 - RNA, 17 nt, Human
ggcugaggcuggcacag

SEQ ID NO: 1283898 - RNA, 18 nt, Human
ggcugaggcuggcacagg

SEQ ID NO: 1283899 - RNA, 19 nt, Human
ggccggcuugccacacccc

SEQ ID NO: 1283900 - RNA, 15 nt, Human
ggccgggagccugau

SEQ ID NO: 1283901 - RNA, 18 nt, Human
ggccggggaacuggccaa

SEQ ID NO: 1283902 - RNA, 19 nt, Human
ggccggggaacuggccaag

SEQ ID NO: 1283903 - RNA, 20 nt, Human
ggccggggaacuggccaagc

SEQ ID NO: 1283904 - RNA, 21 nt, Human
ggccggggaacuggccaagcu

SEQ ID NO: 1283905 - RNA, 22 nt, Human
ggccggcuucaugccagcuacu

SEQ ID NO: 1283906 - RNA, 15 nt, Human
ggccuaaccugccga

SEQ ID NO: 1283907 - RNA, 16 nt, Human
ggccuaaccugccgag

SEQ ID NO: 1283908 - RNA, 21 nt, Human
ggccuaaccugccgagagucc

SEQ ID NO: 1283909 - RNA, 13 nt, Human
ggccguggcugcu

SEQ ID NO: 1283910 - RNA, 14 nt, Human
ggccguggcugcug

SEQ ID NO: 1283911 - RNA, 15 nt, Human
ggccguggcugcugu

SEQ ID NO: 1283912 - RNA, 18 nt, Human
ggcccagagcccagcucc

SEQ ID NO: 1283913 - RNA, 19 nt, Human
ggcccagagcccagcucca

SEQ ID NO: 1283914 - RNA, 12 nt, Human
ggcccagagccc

SEQ ID NO: 1283915 - RNA, 13 nt, Human
ggcccagagccca

SEQ ID NO: 1283916 - RNA, 14 nt, Human
ggcccagagcccag

SEQ ID NO: 1283917 - RNA, 15 nt, Human
ggcccagagcccagc

SEQ ID NO: 1283918 - RNA, 16 nt, Human
ggcccagagcccagcu

SEQ ID NO: 1283919 - RNA, 17 nt, Human
ggcccagagcccagcuc

SEQ ID NO: 1283920 - RNA, 13 nt, Human
ggccuagaccagc

SEQ ID NO: 1283921 - RNA, 14 nt, Human
ggccuagaccagca

SEQ ID NO: 1283922 - RNA, 13 nt, Human
ggccuagacucug

SEQ ID NO: 1283923 - RNA, 18 nt, Human
ggccuagacucugucuac

SEQ ID NO: 1283924 - RNA, 14 nt, Human
ggccuagaggccug

SEQ ID NO: 1283925 - RNA, 13 nt, Human
ggccuagaggccu

SEQ ID NO: 1283926 - RNA, 13 nt, Human
ggccuccugccuc

SEQ ID NO: 1283927 - RNA, 14 nt, Human
ggccuccugccucu

SEQ ID NO: 1283928 - RNA, 15 nt, Human
ggccuccugccucua

SEQ ID NO: 1283929 - RNA, 17 nt, Human
ggccucggacuuagcug

SEQ ID NO: 1283930 - RNA, 22 nt, Human
ggccuccuucugagcuccuguc

SEQ ID NO: 1283931 - RNA, 14 nt, Human
ggccuccuucugag

SEQ ID NO: 1283932 - RNA, 23 nt, Human
ggccucucccuccuccaggaagc

SEQ ID NO: 1283933 - RNA, 20 nt, Human
ggccucucccuccuccagga

SEQ ID NO: 1283934 - RNA, 13 nt, Human
ggccucucuaucc

SEQ ID NO: 1283935 - RNA, 22 nt, Human
ggccucucuauccucucuuccu

SEQ ID NO: 1283936 - RNA, 14 nt, Human
ggccucucucuagg

SEQ ID NO: 1283937 - RNA, 23 nt, Human
ggccucucuauccucucuuccuc

SEQ ID NO: 1283938 - RNA, 11 nt, Human
ggcgcaggagg

SEQ ID NO: 1283939 - RNA, 14 nt, Human
ggcgcaggccguga

SEQ ID NO: 1283940 - RNA, 11 nt, Human
ggccuggggug

SEQ ID NO: 1283941 - RNA, 15 nt, Human
ggccuggggugaccc

SEQ ID NO: 1283942 - RNA, 18 nt, Human
ggccuggggugacccggc

SEQ ID NO: 1283943 - RNA, 19 nt, Human
ggccuggggugacccggca

SEQ ID NO: 1283944 - RNA, 21 nt, Human
ggccuggggugacccggcacc

SEQ ID NO: 1283945 - RNA, 11 nt, Human
ggccugguccc

SEQ ID NO: 1283946 - RNA, 14 nt, Human
ggccuggucccugu

SEQ ID NO: 1283947 - RNA, 19 nt, Human
ggccuggucucacccugga

SEQ ID NO: 1283948 - RNA, 23 nt, Human
ggccuggucucacccuggaggca

SEQ ID NO: 1283949 - RNA, 21 nt, Human
ggccugguuaaauaaggcagg

SEQ ID NO: 1283950 - RNA, 22 nt, Human
ggccugguuaaauaaggcaggg

SEQ ID NO: 1283951 - RNA, 23 nt, Human
ggccugguuaaauaaggcagggu

SEQ ID NO: 1283952 - RNA, 14 nt, Human
ggccuguacugccu

SEQ ID NO: 1283953 - RNA, 16 nt, Human
ggccuguacugccugc

SEQ ID NO: 1283954 - RNA, 15 nt, Human
ggccuguacugccug

SEQ ID NO: 1283955 - RNA, 12 nt, Human
ggcgcacuguga

SEQ ID NO: 1283956 - RNA, 16 nt, Human
ggccugggcuccugga

SEQ ID NO: 1283957 - RNA, 14 nt, Human
ggccugggcuccug

SEQ ID NO: 1283958 - RNA, 19 nt, Human
ggccugggcaggagggagg

SEQ ID NO: 1283959 - RNA, 11 nt, Human
ggccugggccc

SEQ ID NO: 1283960 - RNA, 18 nt, Human
ggccugggcaguggaugg

SEQ ID NO: 1283961 - RNA, 15 nt, Human
ggccugggccgcugc

SEQ ID NO: 1283962 - RNA, 17 nt, Human
ggccugagcaguccuug

SEQ ID NO: 1283963 - RNA, 15 nt, Human
ggccugggcaggagg

SEQ ID NO: 1283964 - RNA, 17 nt, Human
ggccugggcaggaggga

SEQ ID NO: 1283965 - RNA, 19 nt, Human
ggccugagcaguccuuggc

SEQ ID NO: 1283966 - RNA, 20 nt, Human
ggccugaccaaacagccaac

SEQ ID NO: 1283967 - RNA, 16 nt, Human
ggccugacugccaagc

SEQ ID NO: 1283968 - RNA, 17 nt, Human
ggccugacugccaagcc

SEQ ID NO: 1283969 - RNA, 20 nt, Human
ggccugacugccaagccaug

SEQ ID NO: 1283970 - RNA, 18 nt, Human
ggccugacugccaagcca

SEQ ID NO: 1283971 - RNA, 19 nt, Human
ggccugacugccaagccau

SEQ ID NO: 1283972 - RNA, 20 nt, Human
ggccucugcgagugguuucu

SEQ ID NO: 1283973 - RNA, 19 nt, Human
ggcucuggagcccacugua

SEQ ID NO: 1283974 - RNA, 17 nt, Human
ggcucuggagcccacug

SEQ ID NO: 1283975 - RNA, 16 nt, Human
ggcucuggagcccacu

SEQ ID NO: 1283976 - RNA, 19 nt, Human
ggcucugcaauuccccucu

SEQ ID NO: 1283977 - RNA, 20 nt, Human
ggcucugcaauuccccucug

SEQ ID NO: 1283978 - RNA, 12 nt, Human
ggcucugccagu

SEQ ID NO: 1283979 - RNA, 16 nt, Human
ggcucugccaguccug

SEQ ID NO: 1283980 - RNA, 17 nt, Human
ggcucugccaguccugu

SEQ ID NO: 1283981 - RNA, 20 nt, Human
ggcucugccaguccuguccu

SEQ ID NO: 1283982 - RNA, 15 nt, Human
ggcucugagagucua

SEQ ID NO: 1283983 - RNA, 18 nt, Human
ggcucugagagucuagau

SEQ ID NO: 1283984 - RNA, 20 nt, Human
ggcucugagagucuagauuc

SEQ ID NO: 1283985 - RNA, 22 nt, Human
ggcucugagagucuagauucuc

SEQ ID NO: 1283986 - RNA, 14 nt, Human
ggcucugagcgccu

SEQ ID NO: 1283987 - RNA, 15 nt, Human
ggcucugagcgccuc

SEQ ID NO: 1283988 - RNA, 12 nt, Human
ggcucugaggcg

SEQ ID NO: 1283989 - RNA, 14 nt, Human
ggcucugaggcgcc

SEQ ID NO: 1283990 - RNA, 17 nt, Human
ggcucugaggugccugu

SEQ ID NO: 1283991 - RNA, 19 nt, Human
ggcucugaggugccugucc

SEQ ID NO: 1283992 - RNA, 20 nt, Human
ggcucugaggugccuguccc

SEQ ID NO: 1283993 - RNA, 23 nt, Human
ggcucugaggugccugucccacc

SEQ ID NO: 1283994 - RNA, 22 nt, Human
ggcucugaugaaaaauugcuga

SEQ ID NO: 1283995 - RNA, 16 nt, Human
ggcuccagagggcacu

SEQ ID NO: 1283996 - RNA, 17 nt, Human
ggcucccagggacaccu

SEQ ID NO: 1283997 - RNA, 13 nt, Human
ggcucccaggggc

SEQ ID NO: 1283998 - RNA, 23 nt, Human
ggcucccaggggcucccuccgcc

SEQ ID NO: 1283999 - RNA, 22 nt, Human
ggcucccaggggcucccuccgc

SEQ ID NO: 1284000 - RNA, 17 nt, Human
ggcuccccauguguccu

SEQ ID NO: 1284001 - RNA, 21 nt, Human
ggcuccccauguguccugguu

SEQ ID NO: 1284002 - RNA, 22 nt, Human
ggcuccccauguguccugguuc

SEQ ID NO: 1284003 - RNA, 16 nt, Human
ggcucccccaggggcu

SEQ ID NO: 1284004 - RNA, 12 nt, Human
ggcucuccuggc

SEQ ID NO: 1284005 - RNA, 14 nt, Human
ggcucuccuggccc

SEQ ID NO: 1284006 - RNA, 13 nt, Human
ggcucuccuggcu

SEQ ID NO: 1284007 - RNA, 16 nt, Human
ggcucuccuggcuucc

SEQ ID NO: 1284008 - RNA, 17 nt, Human
ggcucuccuggcuuccc

SEQ ID NO: 1284009 - RNA, 19 nt, Human
ggcggcuggggucccagca

SEQ ID NO: 1284010 - RNA, 20 nt, Human
ggcggcuggggucccagcag

SEQ ID NO: 1284011 - RNA, 24 nt, Human
ggcggcuggggucccagcagcugc

SEQ ID NO: 1284012 - RNA, 16 nt, Human
ggcgccccaacccgug

SEQ ID NO: 1284013 - RNA, 18 nt, Human
ggcgccccaacccgugga

SEQ ID NO: 1284014 - RNA, 23 nt, Human
ggcgccccaacccguggaggcug

SEQ ID NO: 1284015 - RNA, 19 nt, Human
ggcgccccaacccguggag

SEQ ID NO: 1284016 - RNA, 23 nt, Human
ggcuagugacuugugucccauga

SEQ ID NO: 1284017 - RNA, 20 nt, Human
ggcuagugacuuguguccca

SEQ ID NO: 1284018 - RNA, 20 nt, Human
ggcuaguaucaaaagaaaga

SEQ ID NO: 1284019 - RNA, 19 nt, Human
ggcuagguggguugaaagc

SEQ ID NO: 1284020 - RNA, 18 nt, Human
ggcgggcagagggcugga

SEQ ID NO: 1284021 - RNA, 17 nt, Human
ggcgggcagagggcugg

SEQ ID NO: 1284022 - RNA, 16 nt, Human
ggcggggaggaggaaa

SEQ ID NO: 1284023 - RNA, 12 nt, Human
ggcggggguggc

SEQ ID NO: 1284024 - RNA, 14 nt, Human
ggcggggguggcgg

SEQ ID NO: 1284025 - RNA, 19 nt, Human
ggcggggguggcggcggcc

SEQ ID NO: 1284026 - RNA, 13 nt, Human
ggcuagguacaca

SEQ ID NO: 1284027 - RNA, 17 nt, Human
ggcucacccccuucucc

SEQ ID NO: 1284028 - RNA, 22 nt, Human
ggcucacccccuucuccaucca

SEQ ID NO: 1284029 - RNA, 18 nt, Human
ggcucaccuugugcuggg

SEQ ID NO: 1284030 - RNA, 17 nt, Human
ggcucacgccuguaauc

SEQ ID NO: 1284031 - RNA, 13 nt, Human
ggcuccagagggc

SEQ ID NO: 1284032 - RNA, 22 nt, Human
ggcuccagagggcacucugcuu

SEQ ID NO: 1284033 - RNA, 14 nt, Human
ggagcuagaauuug

SEQ ID NO: 1284034 - RNA, 19 nt, Human
ggagcuaccuguguggaca

SEQ ID NO: 1284035 - RNA, 22 nt, Human
ggagcuaccuguguggacagga

SEQ ID NO: 1284036 - RNA, 23 nt, Human
ggagcuaccuguguggacaggac

SEQ ID NO: 1284037 - RNA, 21 nt, Human
ggagcucaggaaccgaggcag

SEQ ID NO: 1284038 - RNA, 17 nt, Human
ggagcuccacucugcuu

SEQ ID NO: 1284039 - RNA, 12 nt, Human
ggagcuauuuuc

SEQ ID NO: 1284040 - RNA, 15 nt, Human
ggagcggcagauggg

SEQ ID NO: 1284041 - RNA, 20 nt, Human
ggagcggccggccagccccu

SEQ ID NO: 1284042 - RNA, 14 nt, Human
ggagcgggucugcu

SEQ ID NO: 1284043 - RNA, 20 nt, Human
ggagcgggucugcucccaag

SEQ ID NO: 1284044 - RNA, 18 nt, Human
ggagcgggucugcuccca

SEQ ID NO: 1284045 - RNA, 12 nt, Human
ggagcuaaggcu

SEQ ID NO: 1284046 - RNA, 15 nt, Human
ggagcuaaggcucua

SEQ ID NO: 1284047 - RNA, 20 nt, Human
ggagcuaaggcucuaugagu

SEQ ID NO: 1284048 - RNA, 14 nt, Human
ggagcuaccugugu

SEQ ID NO: 1284049 - RNA, 22 nt, Human
ggagccucgcaacccgugccaa

SEQ ID NO: 1284050 - RNA, 18 nt, Human
ggagccucgcaacccgug

SEQ ID NO: 1284051 - RNA, 10 nt, Human
ggagccuguc

SEQ ID NO: 1284052 - RNA, 11 nt, Human
ggagccugucc

SEQ ID NO: 1284053 - RNA, 13 nt, Human
ggagccuguccug

SEQ ID NO: 1284054 - RNA, 14 nt, Human
ggagccuguccugc

SEQ ID NO: 1284055 - RNA, 16 nt, Human
ggagccuguccugccu

SEQ ID NO: 1284056 - RNA, 20 nt, Human
ggagccuguccugccugugg

SEQ ID NO: 1284057 - RNA, 14 nt, Human
ggagccugugaacc

SEQ ID NO: 1284058 - RNA, 17 nt, Human
ggagccugugaacccag

SEQ ID NO: 1284059 - RNA, 18 nt, Human
ggagccugugaacccagg

SEQ ID NO: 1284060 - RNA, 19 nt, Human
ggagccugugaacccagga

SEQ ID NO: 1284061 - RNA, 20 nt, Human
ggagccugugaacccaggac

SEQ ID NO: 1284062 - RNA, 22 nt, Human
ggagccugugaacccaggacaa

SEQ ID NO: 1284063 - RNA, 21 nt, Human
ggagccugugaacccaggaca

SEQ ID NO: 1284064 - RNA, 23 nt, Human
ggagccuucccaaguugugcuug

SEQ ID NO: 1284065 - RNA, 13 nt, Human
ggagccuucccaa

SEQ ID NO: 1284066 - RNA, 21 nt, Human
ggagccuucccaaguugugcu

SEQ ID NO: 1284067 - RNA, 22 nt, Human
ggagccuucccaaguugugcuu

SEQ ID NO: 1284068 - RNA, 22 nt, Human
ggagcgagcaugucguggacac

SEQ ID NO: 1284069 - RNA, 20 nt, Human
ggagcccugggaggcucugg

SEQ ID NO: 1284070 - RNA, 23 nt, Human
ggagcacggcucuguccccagcc

SEQ ID NO: 1284071 - RNA, 22 nt, Human
ggagcacggcucuguccccagc

SEQ ID NO: 1284072 - RNA, 18 nt, Human
ggagccgggucugccucu

SEQ ID NO: 1284073 - RNA, 17 nt, Human
ggagccgggucugccuc

SEQ ID NO: 1284074 - RNA, 19 nt, Human
ggagcccugggaggcucug

SEQ ID NO: 1284075 - RNA, 16 nt, Human
ggagcccugggaggcu

SEQ ID NO: 1284076 - RNA, 18 nt, Human
ggagcacaaagacccugg

SEQ ID NO: 1284077 - RNA, 20 nt, Human
ggagcacaaagacccuggcu

SEQ ID NO: 1284078 - RNA, 21 nt, Human
ggagcacaaagacccuggcuu

SEQ ID NO: 1284079 - RNA, 22 nt, Human
ggagcacaaagacccuggcuuu

SEQ ID NO: 1284080 - RNA, 21 nt, Human
ggagcacaauaaauggcugua

SEQ ID NO: 1284081 - RNA, 17 nt, Human
ggagcacaaagacccug

SEQ ID NO: 1284082 - RNA, 22 nt, Human
ggagacauaaccacugcuucca

SEQ ID NO: 1284083 - RNA, 14 nt, Human
ggagacaugugaca

SEQ ID NO: 1284084 - RNA, 15 nt, Human
ggagacaugugacau

SEQ ID NO: 1284085 - RNA, 19 nt, Human
ggagacaugugacauuuau

SEQ ID NO: 1284086 - RNA, 12 nt, Human
ggagaccaccag

SEQ ID NO: 1284087 - RNA, 19 nt, Human
ggaggcagagaagaaagaa

SEQ ID NO: 1284088 - RNA, 13 nt, Human
ggaggcaggggcu

SEQ ID NO: 1284089 - RNA, 17 nt, Human
ggaggcaggggcuuccu

SEQ ID NO: 1284090 - RNA, 18 nt, Human
ggaggcaggggcuuccug

SEQ ID NO: 1284091 - RNA, 17 nt, Human
ggaggcaggaguuucgu

SEQ ID NO: 1284092 - RNA, 15 nt, Human
ggaggcagagaagaa

SEQ ID NO: 1284093 - RNA, 14 nt, Human
ggaggcagagaaga

SEQ ID NO: 1284094 - RNA, 17 nt, Human
ggagggauucugguucc

SEQ ID NO: 1284095 - RNA, 22 nt, Human
ggagggauucugguuccagggu

SEQ ID NO: 1284096 - RNA, 16 nt, Human
ggaggacccaggacag

SEQ ID NO: 1284097 - RNA, 15 nt, Human
ggaggacccagggcu

SEQ ID NO: 1284098 - RNA, 16 nt, Human
ggaggacccagggcuc

SEQ ID NO: 1284099 - RNA, 15 nt, Human
ggaggacccaggaca

SEQ ID NO: 1284100 - RNA, 19 nt, Human
ggaggacccagggcucugu

SEQ ID NO: 1284101 - RNA, 18 nt, Human
ggaggacccagggcucug

SEQ ID NO: 1284102 - RNA, 13 nt, Human
ggaggaccugagc

SEQ ID NO: 1284103 - RNA, 14 nt, Human
ggaggaccugagcc

SEQ ID NO: 1284104 - RNA, 15 nt, Human
ggaggaccugagccu

SEQ ID NO: 1284105 - RNA, 16 nt, Human
ggaggaccugagccug

SEQ ID NO: 1284106 - RNA, 17 nt, Human
ggaggaccugagccugc

SEQ ID NO: 1284107 - RNA, 19 nt, Human
ggaggacgcucucuggccu

SEQ ID NO: 1284108 - RNA, 18 nt, Human
ggaggaccugagccugcc

SEQ ID NO: 1284109 - RNA, 19 nt, Human
ggaggaccugagccugccg

SEQ ID NO: 1284110 - RNA, 22 nt, Human
ggaggaccugagccugccgagc

SEQ ID NO: 1284111 - RNA, 16 nt, Human
ggaggacgcucucugg

SEQ ID NO: 1284112 - RNA, 16 nt, Human
ggaggggcagagccag

SEQ ID NO: 1284113 - RNA, 15 nt, Human
ggaggggcagagcca

SEQ ID NO: 1284114 - RNA, 13 nt, Human
ggaggggcagagc

SEQ ID NO: 1284115 - RNA, 12 nt, Human
ggaggggcagag

SEQ ID NO: 1284116 - RNA, 13 nt, Human
ggaggggaggggg

SEQ ID NO: 1284117 - RNA, 13 nt, Human
ggaggggccuggc

SEQ ID NO: 1284118 - RNA, 13 nt, Human
ggagggccugggc

SEQ ID NO: 1284119 - RNA, 19 nt, Human
ggagggccacaugggaggc

SEQ ID NO: 1284120 - RNA, 23 nt, Human
ggagggccacaugggaggcucac

SEQ ID NO: 1284121 - RNA, 20 nt, Human
ggagggcggcaggggccugg

SEQ ID NO: 1284122 - RNA, 21 nt, Human
ggagggcggcaggggccugga

SEQ ID NO: 1284123 - RNA, 16 nt, Human
ggagucaaaaauuaaa

SEQ ID NO: 1284124 - RNA, 13 nt, Human
ggagucacacagu

SEQ ID NO: 1284125 - RNA, 21 nt, Human
ggagucacacaguguuggagg

SEQ ID NO: 1284126 - RNA, 14 nt, Human
ggaguagcugagcu

SEQ ID NO: 1284127 - RNA, 15 nt, Human
ggaguagcugagcuc

SEQ ID NO: 1284128 - RNA, 17 nt, Human
ggaguagcugagcucac

SEQ ID NO: 1284129 - RNA, 16 nt, Human
ggaguagcugagcuca

SEQ ID NO: 1284130 - RNA, 15 nt, Human
ggagucacugagacc

SEQ ID NO: 1284131 - RNA, 14 nt, Human
ggaggggccuggca

SEQ ID NO: 1284132 - RNA, 18 nt, Human
ggaggggccuggcagccg

SEQ ID NO: 1284133 - RNA, 21 nt, Human
ggaggggccuggcagccgugc

SEQ ID NO: 1284134 - RNA, 18 nt, Human
ggaggggcuccuuuccau

SEQ ID NO: 1284135 - RNA, 19 nt, Human
ggagggggaauggcagcag

SEQ ID NO: 1284136 - RNA, 14 nt, Human
ggagggggaauggc

SEQ ID NO: 1284137 - RNA, 15 nt, Human
ggagguugggugggc

SEQ ID NO: 1284138 - RNA, 22 nt, Human
ggaguaacaauacaaauggauu

SEQ ID NO: 1284139 - RNA, 18 nt, Human
ggacugagaaauuuauaa

SEQ ID NO: 1284140 - RNA, 15 nt, Human
ggacugagugggaag

SEQ ID NO: 1284141 - RNA, 20 nt, Human
ggagaagaaagaggugaccc

SEQ ID NO: 1284142 - RNA, 11 nt, Human
ggagaagaacu

SEQ ID NO: 1284143 - RNA, 14 nt, Human
ggagaagaacugaa

SEQ ID NO: 1284144 - RNA, 23 nt, Human
ggagaagaaagaggugaccccag

SEQ ID NO: 1284145 - RNA, 12 nt, Human
ggagaaggaagg

SEQ ID NO: 1284146 - RNA, 19 nt, Human
ggagaagcuccucucccca

SEQ ID NO: 1284147 - RNA, 19 nt, Human
ggagacagguuagcugcuc

SEQ ID NO: 1284148 - RNA, 22 nt, Human
ggagaagucucagcuaagcuca

SEQ ID NO: 1284149 - RNA, 18 nt, Human
ggagaagugacauugcau

SEQ ID NO: 1284150 - RNA, 13 nt, Human
ggagaagucucag

SEQ ID NO: 1284151 - RNA, 14 nt, Human
ggacugagaaauuu

SEQ ID NO: 1284152 - RNA, 14 nt, Human
ggacugaccagcag

SEQ ID NO: 1284153 - RNA, 15 nt, Human
ggacugaccagcagc

SEQ ID NO: 1284154 - RNA, 17 nt, Human
ggacugaauuaugaaac

SEQ ID NO: 1284155 - RNA, 19 nt, Human
ggacugaauuaugaaacuu

SEQ ID NO: 1284156 - RNA, 19 nt, Human
ggacgcucucuggccuucg

SEQ ID NO: 1284157 - RNA, 16 nt, Human
ggacgcucucuggccu

SEQ ID NO: 1284158 - RNA, 18 nt, Human
ggaccuuuccaccacagc

SEQ ID NO: 1284159 - RNA, 19 nt, Human
ggaccuuuccaccacagcc

SEQ ID NO: 1284160 - RNA, 22 nt, Human
ggaccuuuccaccacagccagc

SEQ ID NO: 1284161 - RNA, 20 nt, Human
ggaccuuuccaccacagcca

SEQ ID NO: 1284162 - RNA, 23 nt, Human
ggacgacacggucggggcaucug

SEQ ID NO: 1284163 - RNA, 14 nt, Human
ggacgcacugagca

SEQ ID NO: 1284164 - RNA, 16 nt, Human
ggaccagcucaggaca

SEQ ID NO: 1284165 - RNA, 16 nt, Human
ggaccagccuggccca

SEQ ID NO: 1284166 - RNA, 15 nt, Human
ggaccaggcuguagg

SEQ ID NO: 1284167 - RNA, 18 nt, Human
ggaccaggcaccaggcag

SEQ ID NO: 1284168 - RNA, 19 nt, Human
ggaccagucaaccugggca

SEQ ID NO: 1284169 - RNA, 16 nt, Human
ggaccagucccagagc

SEQ ID NO: 1284170 - RNA, 17 nt, Human
ggaccagucccagagca

SEQ ID NO: 1284171 - RNA, 18 nt, Human
ggaccagucccagagcag

SEQ ID NO: 1284172 - RNA, 21 nt, Human
ggaccauggaguggcagccca

SEQ ID NO: 1284173 - RNA, 22 nt, Human
ggaccauggaguggcagcccag

SEQ ID NO: 1284174 - RNA, 17 nt, Human
ggacauuugcucaugga

SEQ ID NO: 1284175 - RNA, 17 nt, Human
ggacagccccacccugg

SEQ ID NO: 1284176 - RNA, 16 nt, Human
ggacagccgccuggag

SEQ ID NO: 1284177 - RNA, 20 nt, Human
ggacauuugcucauggaauu

SEQ ID NO: 1284178 - RNA, 12 nt, Human
ggaccagccucu

SEQ ID NO: 1284179 - RNA, 19 nt, Human
ggaccagcagccccacacc

SEQ ID NO: 1284180 - RNA, 12 nt, Human
ggaccagccugg

SEQ ID NO: 1284181 - RNA, 13 nt, Human
ggaccagccuggc

SEQ ID NO: 1284182 - RNA, 15 nt, Human
ggaccagccuggccc

SEQ ID NO: 1284183 - RNA, 22 nt, Human
ggaccagccuggcccaccccac

SEQ ID NO: 1284184 - RNA, 13 nt, Human
ggaccagcucagg

SEQ ID NO: 1284185 - RNA, 15 nt, Human
ggacagccccuccuc

SEQ ID NO: 1284186 - RNA, 16 nt, Human
ggacagccccuccucc

SEQ ID NO: 1284187 - RNA, 14 nt, Human
ggacagccccaccc

SEQ ID NO: 1284188 - RNA, 15 nt, Human
ggacagccccacccu

SEQ ID NO: 1284189 - RNA, 16 nt, Human
ggacagccccacccug

SEQ ID NO: 1284190 - RNA, 21 nt, Human
gcuuuuaugugaaacauguuu

SEQ ID NO: 1284191 - RNA, 15 nt, Human
gcuuuuauuaaugca

SEQ ID NO: 1284192 - RNA, 18 nt, Human
gcuuuuauuaaugcacuu

SEQ ID NO: 1284193 - RNA, 20 nt, Human
gcuuuuaugugaaacauguu

SEQ ID NO: 1284194 - RNA, 19 nt, Human
gcuuuuaugugaaacaugu

SEQ ID NO: 1284195 - RNA, 12 nt, Human
gcuuuucacugc

SEQ ID NO: 1284196 - RNA, 19 nt, Human
gcuuuuauuaaugcacuuu

SEQ ID NO: 1284197 - RNA, 22 nt, Human
gcuuuuauuaaugcacuuucua

SEQ ID NO: 1284198 - RNA, 13 nt, Human
gcuuuucaaacaa

SEQ ID NO: 1284199 - RNA, 14 nt, Human
gcuuuucaaacaaa

SEQ ID NO: 1284200 - RNA, 14 nt, Human
ggacacucagaccu

SEQ ID NO: 1284201 - RNA, 16 nt, Human
ggacacuuaauacuac

SEQ ID NO: 1284202 - RNA, 20 nt, Human
ggacagaggccccagccucc

SEQ ID NO: 1284203 - RNA, 23 nt, Human
ggacagaggccccagccucccug

SEQ ID NO: 1284204 - RNA, 14 nt, Human
ggacagaggcccca

SEQ ID NO: 1284205 - RNA, 15 nt, Human
ggacagaggccccag

SEQ ID NO: 1284206 - RNA, 16 nt, Human
ggacagaggccccagc

SEQ ID NO: 1284207 - RNA, 17 nt, Human
ggacagaggccccagcc

SEQ ID NO: 1284208 - RNA, 18 nt, Human
ggacagaggccccagccu

SEQ ID NO: 1284209 - RNA, 22 nt, Human
ggauuccacucguguguuucua

SEQ ID NO: 1284210 - RNA, 18 nt, Human
ggauuccccaucucaggc

SEQ ID NO: 1284211 - RNA, 18 nt, Human
ggauucugcuggccucug

SEQ ID NO: 1284212 - RNA, 19 nt, Human
ggauucaggaaaaggccug

SEQ ID NO: 1284213 - RNA, 21 nt, Human
ggauucaggaaaaggccuggg

SEQ ID NO: 1284214 - RNA, 20 nt, Human
ggauucaggaaaaggccugg

SEQ ID NO: 1284215 - RNA, 12 nt, Human
ggauuauauuau

SEQ ID NO: 1284216 - RNA, 19 nt, Human
ggauuaugggucacaggaa

SEQ ID NO: 1284217 - RNA, 19 nt, Human
ggauuauuagaaucaaaca

SEQ ID NO: 1284218 - RNA, 11 nt, Human
ggaugccuccu

SEQ ID NO: 1284219 - RNA, 18 nt, Human
ggaugaugacuauggaaa

SEQ ID NO: 1284220 - RNA, 16 nt, Human
ggaugauccccacgcc

SEQ ID NO: 1284221 - RNA, 20 nt, Human
ggaugauccccacgccacag

SEQ ID NO: 1284222 - RNA, 21 nt, Human
ggaugauccccacgccacagc

SEQ ID NO: 1284223 - RNA, 22 nt, Human
ggaugauccccacgccacagcc

SEQ ID NO: 1284224 - RNA, 17 nt, Human
ggaugccccgucccccu

SEQ ID NO: 1284225 - RNA, 14 nt, Human
ggagucacugagac

SEQ ID NO: 1284226 - RNA, 13 nt, Human
ggaguccccucac

SEQ ID NO: 1284227 - RNA, 15 nt, Human
ggaguccccucaccu

SEQ ID NO: 1284228 - RNA, 14 nt, Human
ggaugagcucccac

SEQ ID NO: 1284229 - RNA, 21 nt, Human
ggaugagcucccacaagccug

SEQ ID NO: 1284230 - RNA, 22 nt, Human
ggaugagcucccacaagccuga

SEQ ID NO: 1284231 - RNA, 23 nt, Human
ggaugagcucccacaagccugag

SEQ ID NO: 1284232 - RNA, 20 nt, Human
ggaugagggaaaagaaaaag

SEQ ID NO: 1284233 - RNA, 17 nt, Human
ggcagagccaggaagau

SEQ ID NO: 1284234 - RNA, 16 nt, Human
ggcagagccaggaaga

SEQ ID NO: 1284235 - RNA, 12 nt, Human
ggcagagcccaa

SEQ ID NO: 1284236 - RNA, 16 nt, Human
ggcagagcccaaggga

SEQ ID NO: 1284237 - RNA, 14 nt, Human
ggcagagccaggaa

SEQ ID NO: 1284238 - RNA, 13 nt, Human
ggcagagccagga

SEQ ID NO: 1284239 - RNA, 12 nt, Human
ggcagagccagg

SEQ ID NO: 1284240 - RNA, 21 nt, Human
ggcagagguugcagugagccg

SEQ ID NO: 1284241 - RNA, 14 nt, Human
ggcagagggcugga

SEQ ID NO: 1284242 - RNA, 20 nt, Human
ggcagagggcuggaggccca

SEQ ID NO: 1284243 - RNA, 21 nt, Human
ggcagagggcuggaggcccag

SEQ ID NO: 1284244 - RNA, 16 nt, Human
ggcagagcuggcucug

SEQ ID NO: 1284245 - RNA, 17 nt, Human
ggcagagcuggcucuga

SEQ ID NO: 1284246 - RNA, 19 nt, Human
ggcagagcuggcucugagc

SEQ ID NO: 1284247 - RNA, 11 nt, Human
ggcagagcugg

SEQ ID NO: 1284248 - RNA, 12 nt, Human
ggcagagggcug

SEQ ID NO: 1284249 - RNA, 13 nt, Human
ggcagagggcugg

SEQ ID NO: 1284250 - RNA, 14 nt, Human
ggauucugguucca

SEQ ID NO: 1284251 - RNA, 18 nt, Human
ggauucugguuccagggu

SEQ ID NO: 1284252 - RNA, 19 nt, Human
ggauucugguuccaggguc

SEQ ID NO: 1284253 - RNA, 23 nt, Human
ggauucuguacaugcauugagcu

SEQ ID NO: 1284254 - RNA, 14 nt, Human
ggauucuuuccauu

SEQ ID NO: 1284255 - RNA, 18 nt, Human
ggcaagauugugucccau

SEQ ID NO: 1284256 - RNA, 19 nt, Human
ggauugaaaauguccagga

SEQ ID NO: 1284257 - RNA, 12 nt, Human
ggauucuuuaaa

SEQ ID NO: 1284258 - RNA, 13 nt, Human
ggauugagucugu

SEQ ID NO: 1284259 - RNA, 18 nt, Human
ggcaaggacuuuguacau

SEQ ID NO: 1284260 - RNA, 14 nt, Human
ggcaccaggaagcc

SEQ ID NO: 1284261 - RNA, 15 nt, Human
ggcaccaggaagccg

SEQ ID NO: 1284262 - RNA, 17 nt, Human
ggcaccagggguuucuc

SEQ ID NO: 1284263 - RNA, 16 nt, Human
ggcaugguguucuccu

SEQ ID NO: 1284264 - RNA, 22 nt, Human
ggcaugguguucuccugcugcu

SEQ ID NO: 1284265 - RNA, 24 nt, Human
ggcaugucaacagcguuccuagag

SEQ ID NO: 1284266 - RNA, 13 nt, Human
ggcaugagaaaua

SEQ ID NO: 1284267 - RNA, 20 nt, Human
ggcaugagggguuccucccc

SEQ ID NO: 1284268 - RNA, 23 nt, Human
ggcaugagggguuccuccccucc

SEQ ID NO: 1284269 - RNA, 15 nt, Human
ggcauggucugcccu

SEQ ID NO: 1284270 - RNA, 21 nt, Human
ggcagugggacagggcauggc

SEQ ID NO: 1284271 - RNA, 13 nt, Human
ggcagugggaaaa

SEQ ID NO: 1284272 - RNA, 15 nt, Human
ggcagugggaaaaau

SEQ ID NO: 1284273 - RNA, 16 nt, Human
ggcaguaccugagggu

SEQ ID NO: 1284274 - RNA, 20 nt, Human
ggcaguaccugagggucugu

SEQ ID NO: 1284275 - RNA, 17 nt, Human
ggcaguaccugggcaag

SEQ ID NO: 1284276 - RNA, 23 nt, Human
ggcaguaccugggcaagcuggcg

SEQ ID NO: 1284277 - RNA, 22 nt, Human
ggcaguauccuguuugaggaaa

SEQ ID NO: 1284278 - RNA, 20 nt, Human
ggcagucauuggcugucucc

SEQ ID NO: 1284279 - RNA, 15 nt, Human
ggcaguccgugggac

SEQ ID NO: 1284280 - RNA, 19 nt, Human
ggcagucgauagagcugua

SEQ ID NO: 1284281 - RNA, 16 nt, Human
ggcaguccgugggacg

SEQ ID NO: 1284282 - RNA, 13 nt, Human
ggcagaguuacag

SEQ ID NO: 1284283 - RNA, 18 nt, Human
ggcagaguuacaguucug

SEQ ID NO: 1284284 - RNA, 19 nt, Human
ggcagaguuacaguucugu

SEQ ID NO: 1284285 - RNA, 17 nt, Human
ggcagggguuagagcag

SEQ ID NO: 1284286 - RNA, 14 nt, Human
ggcaguaauaaaaa

SEQ ID NO: 1284287 - RNA, 13 nt, Human
ggcaguaccugag

SEQ ID NO: 1284288 - RNA, 23 nt, Human
ggcauguguuuacuuuauguuac

SEQ ID NO: 1284289 - RNA, 16 nt, Human
ggccacacucagcaca

SEQ ID NO: 1284290 - RNA, 23 nt, Human
ggcauguuagcccuuccuccaau

SEQ ID NO: 1284291 - RNA, 21 nt, Human
ggccacacucagcacaaggcc

SEQ ID NO: 1284292 - RNA, 17 nt, Human
ggccacacuucaaacua

SEQ ID NO: 1284293 - RNA, 20 nt, Human
ggccacacuucaaacuacuu

SEQ ID NO: 1284294 - RNA, 12 nt, Human
ggccacagccag

SEQ ID NO: 1284295 - RNA, 11 nt, Human
ggccacagcca

SEQ ID NO: 1284296 - RNA, 13 nt, Human
ggccacagccagg

SEQ ID NO: 1284297 - RNA, 20 nt, Human
ggccacaguagucuugauga

SEQ ID NO: 1284298 - RNA, 16 nt, Human
ggccacaucaaagagg

SEQ ID NO: 1284299 - RNA, 19 nt, Human
ggccacaucaaagaggcug

SEQ ID NO: 1284300 - RNA, 16 nt, Human
ggccacauagaugcug

SEQ ID NO: 1284301 - RNA, 13 nt, Human
ggccaccucccca

SEQ ID NO: 1284302 - RNA, 16 nt, Human
ggccaccuccccagca

SEQ ID NO: 1284303 - RNA, 17 nt, Human
ggccaccuccccagcau

SEQ ID NO: 1284304 - RNA, 16 nt, Human
ggccacuguguuccuu

SEQ ID NO: 1284305 - RNA, 20 nt, Human
ggccacuguuuggaaauaaa

SEQ ID NO: 1284306 - RNA, 16 nt, Human
ggccagaaguaccaga

SEQ ID NO: 1284307 - RNA, 12 nt, Human
ggccagaaguac

SEQ ID NO: 1284308 - RNA, 16 nt, Human
ggccagacacaggccc

SEQ ID NO: 1284309 - RNA, 17 nt, Human
ggccagacacaggcccu

SEQ ID NO: 1284310 - RNA, 18 nt, Human
ggccagacacaggcccuc

SEQ ID NO: 1284311 - RNA, 15 nt, Human
ggccagacaugccac

SEQ ID NO: 1284312 - RNA, 18 nt, Human
ggccagacaugccacaag

SEQ ID NO: 1284313 - RNA, 14 nt, Human
ggccaggacucugc

SEQ ID NO: 1284314 - RNA, 15 nt, Human
ggccaggacucugca

SEQ ID NO: 1284315 - RNA, 16 nt, Human
ggccaggacucugcag

SEQ ID NO: 1284316 - RNA, 18 nt, Human
ggccaggacucugcagcc

SEQ ID NO: 1284317 - RNA, 20 nt, Human
ggccaggacucugcagccuc

SEQ ID NO: 1284318 - RNA, 21 nt, Human
ggccaggacucugcagccuca

SEQ ID NO: 1284319 - RNA, 13 nt, Human
ggccaugcuccuc

SEQ ID NO: 1284320 - RNA, 15 nt, Human
ggccaugcuccucuu

SEQ ID NO: 1284321 - RNA, 17 nt, Human
ggccaugcuccucuucc

SEQ ID NO: 1284322 - RNA, 18 nt, Human
ggccaugcuccucuuccc

SEQ ID NO: 1284323 - RNA, 22 nt, Human
ggccaugcuccucuuccccaga

SEQ ID NO: 1284324 - RNA, 21 nt, Human
ggccaugcuccucuuccccag

SEQ ID NO: 1284325 - RNA, 13 nt, Human
ggccaugcugagg

SEQ ID NO: 1284326 - RNA, 14 nt, Human
ggccaugcugaggc

SEQ ID NO: 1284327 - RNA, 15 nt, Human
ggccaugcugaggcc

SEQ ID NO: 1284328 - RNA, 18 nt, Human
ggccaugcugaggccugg

SEQ ID NO: 1284329 - RNA, 19 nt, Human
ggccaugcugaggccuggg

SEQ ID NO: 1284330 - RNA, 22 nt, Human
ggccaugcugaggccugggccg

SEQ ID NO: 1284331 - RNA, 14 nt, Human
ggccauggacucug

SEQ ID NO: 1284332 - RNA, 17 nt, Human
ggccauggacucugucc

SEQ ID NO: 1284333 - RNA, 18 nt, Human
ggccauggacucuguccu

SEQ ID NO: 1284334 - RNA, 21 nt, Human
ggccauggacucuguccugaa

SEQ ID NO: 1284335 - RNA, 22 nt, Human
ggccauggacucuguccugaag

SEQ ID NO: 1284336 - RNA, 15 nt, Human
ggccauggagaaagc

SEQ ID NO: 1284337 - RNA, 16 nt, Human
ggccauggagaaagcu

SEQ ID NO: 1284338 - RNA, 18 nt, Human
ggccauggagaaagcuga

SEQ ID NO: 1284339 - RNA, 21 nt, Human
ggccauggagaaagcugacuu

SEQ ID NO: 1284340 - RNA, 16 nt, Human
ggcccacauuggaaga

SEQ ID NO: 1284341 - RNA, 18 nt, Human
ggcccacauuggaagagc

SEQ ID NO: 1284342 - RNA, 14 nt, Human
ggcccaccaggguc

SEQ ID NO: 1284343 - RNA, 15 nt, Human
ggcccaccagggucc

SEQ ID NO: 1284344 - RNA, 18 nt, Human
ggcccaccccacccacuu

SEQ ID NO: 1284345 - RNA, 19 nt, Human
ggcccaccccacccacuuc

SEQ ID NO: 1284346 - RNA, 23 nt, Human
ggcccaccccacccacuucugca

SEQ ID NO: 1284347 - RNA, 22 nt, Human
ggcccaccccacccacuucugc

SEQ ID NO: 1284348 - RNA, 19 nt, Human
gcucuugaugccuggcggg

SEQ ID NO: 1284349 - RNA, 17 nt, Human
gcucuugauaccccccu

SEQ ID NO: 1284350 - RNA, 19 nt, Human
gcucuugauaccccccucu

SEQ ID NO: 1284351 - RNA, 20 nt, Human
gcucuugauaccccccucug

SEQ ID NO: 1284352 - RNA, 19 nt, Human
gcucuuggcagguacucag

SEQ ID NO: 1284353 - RNA, 17 nt, Human
gcucuuggagcugugag

SEQ ID NO: 1284354 - RNA, 13 nt, Human
gcucuuggcugga

SEQ ID NO: 1284355 - RNA, 14 nt, Human
gcucuuggcuggac

SEQ ID NO: 1284356 - RNA, 15 nt, Human
gcucuuggcuggacc

SEQ ID NO: 1284357 - RNA, 18 nt, Human
gcucuuggcuggacccag

SEQ ID NO: 1284358 - RNA, 20 nt, Human
gcucuuggcuggacccagcc

SEQ ID NO: 1284359 - RNA, 23 nt, Human
gcucuuggcuggacccagccagg

SEQ ID NO: 1284360 - RNA, 21 nt, Human
gcucuuggcuggacccagcca

SEQ ID NO: 1284361 - RNA, 18 nt, Human
gcucuuucucugccagug

SEQ ID NO: 1284362 - RNA, 21 nt, Human
gcucuuucucugccagugaca

SEQ ID NO: 1284363 - RNA, 13 nt, Human
gcucuuugagaaa

SEQ ID NO: 1284364 - RNA, 22 nt, Human
gcucuccaaaccacuuuuugca

SEQ ID NO: 1284365 - RNA, 12 nt, Human
gcucuucuuaaa

SEQ ID NO: 1284366 - RNA, 14 nt, Human
gcucuugaacuccu

SEQ ID NO: 1284367 - RNA, 16 nt, Human
gcucuugaacuccuga

SEQ ID NO: 1284368 - RNA, 19 nt, Human
gcucuugaacuccugaccu

SEQ ID NO: 1284369 - RNA, 21 nt, Human
gcucuugaacuccugaccuca

SEQ ID NO: 1284370 - RNA, 17 nt, Human
gcucuccaaaccacuuu

SEQ ID NO: 1284371 - RNA, 16 nt, Human
gcucuccaaaccacuu

SEQ ID NO: 1284372 - RNA, 12 nt, Human
gcucucaguucu

SEQ ID NO: 1284373 - RNA, 20 nt, Human
gcucgauguggucacagcug

SEQ ID NO: 1284374 - RNA, 22 nt, Human
gcucgauguggucacagcugua

SEQ ID NO: 1284375 - RNA, 13 nt, Human
gcucuuugguaga

SEQ ID NO: 1284376 - RNA, 18 nt, Human
gcucuuugguagaaaagg

SEQ ID NO: 1284377 - RNA, 21 nt, Human
gcucuuuguuuugugucucuu

SEQ ID NO: 1284378 - RNA, 22 nt, Human
gcucuuugguagaaaaggcuag

SEQ ID NO: 1284379 - RNA, 15 nt, Human
gcucuuugucaggga

SEQ ID NO: 1284380 - RNA, 16 nt, Human
gcucuuugucagggag

SEQ ID NO: 1284381 - RNA, 18 nt, Human
gcucuuugucagggagug

SEQ ID NO: 1284382 - RNA, 17 nt, Human
gcugacaugaagcuguu

SEQ ID NO: 1284383 - RNA, 21 nt, Human
gcugacaugaagcuguugugu

SEQ ID NO: 1284384 - RNA, 16 nt, Human
gcugacauucaccugc

SEQ ID NO: 1284385 - RNA, 17 nt, Human
gcugacauucaccugcc

SEQ ID NO: 1284386 - RNA, 13 nt, Human
gcugaccacagca

SEQ ID NO: 1284387 - RNA, 13 nt, Human
gcugacggccagg

SEQ ID NO: 1284388 - RNA, 15 nt, Human
gcugacggccaggga

SEQ ID NO: 1284389 - RNA, 19 nt, Human
gcugacgggacccacaugc

SEQ ID NO: 1284390 - RNA, 20 nt, Human
gcugacuaaacuuuuuuucu

SEQ ID NO: 1284391 - RNA, 19 nt, Human
gcugacuucaucucccacc

SEQ ID NO: 1284392 - RNA, 24 nt, Human
gcugacuucaucucccaccuagca

SEQ ID NO: 1284393 - RNA, 14 nt, Human
gcugacuuggcugg

SEQ ID NO: 1284394 - RNA, 15 nt, Human
gcugacuuggcuggu

SEQ ID NO: 1284395 - RNA, 16 nt, Human
gcugacuuggcuggug

SEQ ID NO: 1284396 - RNA, 17 nt, Human
gcugacuuggcuggugu

SEQ ID NO: 1284397 - RNA, 18 nt, Human
gcugacuuggcuggugug

SEQ ID NO: 1284398 - RNA, 14 nt, Human
gcugaccacagcac

SEQ ID NO: 1284399 - RNA, 16 nt, Human
gcugaccacagcacag

SEQ ID NO: 1284400 - RNA, 17 nt, Human
gcugaccacagcacagc

SEQ ID NO: 1284401 - RNA, 19 nt, Human
gcugaccacagcacagcca

SEQ ID NO: 1284402 - RNA, 12 nt, Human
gcugaccagaca

SEQ ID NO: 1284403 - RNA, 21 nt, Human
gcugaccagccgugagcaugu

SEQ ID NO: 1284404 - RNA, 12 nt, Human
gcugaccugcug

SEQ ID NO: 1284405 - RNA, 13 nt, Human
gcugaccugcuga

SEQ ID NO: 1284406 - RNA, 17 nt, Human
gcugaccugcugaccug

SEQ ID NO: 1284407 - RNA, 23 nt, Human
gcugcccuccugugcucagcccu

SEQ ID NO: 1284408 - RNA, 22 nt, Human
gcugcccuccugugcucagccc

SEQ ID NO: 1284409 - RNA, 15 nt, Human
gcugccacacuucag

SEQ ID NO: 1284410 - RNA, 17 nt, Human
gcugccacacuucaggc

SEQ ID NO: 1284411 - RNA, 18 nt, Human
gcugccacacuucaggcu

SEQ ID NO: 1284412 - RNA, 21 nt, Human
gcugccacacuucaggcucuu

SEQ ID NO: 1284413 - RNA, 22 nt, Human
gcugccacacuucaggcucuuc

SEQ ID NO: 1284414 - RNA, 23 nt, Human
gcugccacacuucaggcucuucu

SEQ ID NO: 1284415 - RNA, 11 nt, Human
gcugauuuuuu

SEQ ID NO: 1284416 - RNA, 18 nt, Human
gcugcaguaugaaaauaa

SEQ ID NO: 1284417 - RNA, 17 nt, Human
gcugcaguucgacucug

SEQ ID NO: 1284418 - RNA, 18 nt, Human
gcugcaguucgacucugu

SEQ ID NO: 1284419 - RNA, 20 nt, Human
gcugccaagagugaagggaa

SEQ ID NO: 1284420 - RNA, 23 nt, Human
gcugauuucuagguaggaaaugu

SEQ ID NO: 1284421 - RNA, 13 nt, Human
gcugauuucuagg

SEQ ID NO: 1284422 - RNA, 15 nt, Human
gcugauuaaaugaca

SEQ ID NO: 1284423 - RNA, 21 nt, Human
gcugauuaaaccaaggcuaga

SEQ ID NO: 1284424 - RNA, 16 nt, Human
gcugaucgccuucccc

SEQ ID NO: 1284425 - RNA, 17 nt, Human
gcugaucgccuucccca

SEQ ID NO: 1284426 - RNA, 19 nt, Human
gcugaucgccuuccccacc

SEQ ID NO: 1284427 - RNA, 16 nt, Human
gcugagaggagagaga

SEQ ID NO: 1284428 - RNA, 12 nt, Human
gcugauaauuuu

SEQ ID NO: 1284429 - RNA, 19 nt, Human
gcugauaauuuuaaauucu

SEQ ID NO: 1284430 - RNA, 13 nt, Human
gcugauaauuuua

SEQ ID NO: 1284431 - RNA, 14 nt, Human
gcugauaauuuuaa

SEQ ID NO: 1284432 - RNA, 16 nt, Human
gcugaucagugggccu

SEQ ID NO: 1284433 - RNA, 15 nt, Human
gcugauaauuuuaaa

SEQ ID NO: 1284434 - RNA, 17 nt, Human
gcugauauuuucucuag

SEQ ID NO: 1284435 - RNA, 15 nt, Human
gcugaucgccuuccc

SEQ ID NO: 1284436 - RNA, 23 nt, Human
gcugacuuggcuggugugguaca

SEQ ID NO: 1284437 - RNA, 22 nt, Human
gcugacuuggcuggugugguac

SEQ ID NO: 1284438 - RNA, 13 nt, Human
gcugagaaccugg

SEQ ID NO: 1284439 - RNA, 14 nt, Human
gcugagaaccuggc

SEQ ID NO: 1284440 - RNA, 15 nt, Human
gcugagaaccuggcc

SEQ ID NO: 1284441 - RNA, 16 nt, Human
gcugagaaccuggccu

SEQ ID NO: 1284442 - RNA, 17 nt, Human
gcugagaaccuggccuu

SEQ ID NO: 1284443 - RNA, 21 nt, Human
gcugagaaccuggccuucagu

SEQ ID NO: 1284444 - RNA, 18 nt, Human
gcugagaaccuggccuuc

SEQ ID NO: 1284445 - RNA, 9 nt, Human
gcugagacu

SEQ ID NO: 1284446 - RNA, 15 nt, Human
gcugagagaaaauaa

SEQ ID NO: 1284447 - RNA, 16 nt, Human
gcuggcauuacaggug

SEQ ID NO: 1284448 - RNA, 17 nt, Human
gcuggcaguccuggaag

SEQ ID NO: 1284449 - RNA, 17 nt, Human
gcuggaccucaccaagc

SEQ ID NO: 1284450 - RNA, 21 nt, Human
gcuggacccugaccagcuccc

SEQ ID NO: 1284451 - RNA, 22 nt, Human
gcuggacccugaccagcucccc

SEQ ID NO: 1284452 - RNA, 23 nt, Human
gcuggacccugaccagcuccccc

SEQ ID NO: 1284453 - RNA, 14 nt, Human
gcuggacaaacugc

SEQ ID NO: 1284454 - RNA, 19 nt, Human
gcuggacaaacugcaccag

SEQ ID NO: 1284455 - RNA, 12 nt, Human
gcuggacccagc

SEQ ID NO: 1284456 - RNA, 13 nt, Human
gcuggacccagcc

SEQ ID NO: 1284457 - RNA, 14 nt, Human
gcuggacccagcca

SEQ ID NO: 1284458 - RNA, 15 nt, Human
gcuggacccagccag

SEQ ID NO: 1284459 - RNA, 20 nt, Human
gcuggacccagccaggccca

SEQ ID NO: 1284460 - RNA, 21 nt, Human
gcuggacccagccaggcccag

SEQ ID NO: 1284461 - RNA, 14 nt, Human
gcuggacccugacc

SEQ ID NO: 1284462 - RNA, 15 nt, Human
gcuggacccugacca

SEQ ID NO: 1284463 - RNA, 20 nt, Human
gcuggacccugaccagcucc

SEQ ID NO: 1284464 - RNA, 14 nt, Human
gcuggcccugcccu

SEQ ID NO: 1284465 - RNA, 15 nt, Human
gcuggcccugcccug

SEQ ID NO: 1284466 - RNA, 16 nt, Human
gcuggcccugcccugg

SEQ ID NO: 1284467 - RNA, 19 nt, Human
gcuggcccuggcucccaca

SEQ ID NO: 1284468 - RNA, 18 nt, Human
gcuggccgcccccagccc

SEQ ID NO: 1284469 - RNA, 16 nt, Human
gcuggccagcgagcgc

SEQ ID NO: 1284470 - RNA, 14 nt, Human
gcuggccaguccag

SEQ ID NO: 1284471 - RNA, 15 nt, Human
gcuggccaguccagg

SEQ ID NO: 1284472 - RNA, 16 nt, Human
gcuggccaguccaggc

SEQ ID NO: 1284473 - RNA, 17 nt, Human
gcuggccaguccaggcu

SEQ ID NO: 1284474 - RNA, 15 nt, Human
gcuggccauggagaa

SEQ ID NO: 1284475 - RNA, 16 nt, Human
gcuggccauggagaaa

SEQ ID NO: 1284476 - RNA, 17 nt, Human
gcuggccauggagaaag

SEQ ID NO: 1284477 - RNA, 18 nt, Human
gcuggccauggagaaagc

SEQ ID NO: 1284478 - RNA, 20 nt, Human
gcuggccauggagaaagcug

SEQ ID NO: 1284479 - RNA, 19 nt, Human
gcuggccauggagaaagcu

SEQ ID NO: 1284480 - RNA, 21 nt, Human
gcuggaaaaguauguuagugc

SEQ ID NO: 1284481 - RNA, 23 nt, Human
gcuggaaaaguauguuagugcaa

SEQ ID NO: 1284482 - RNA, 17 nt, Human
gcuggaaaauaauacug

SEQ ID NO: 1284483 - RNA, 22 nt, Human
gcuggaaaauaauacugcugag

SEQ ID NO: 1284484 - RNA, 23 nt, Human
gcuggaaugauuucagcucacug

SEQ ID NO: 1284485 - RNA, 18 nt, Human
gcuggaagauagcuguga

SEQ ID NO: 1284486 - RNA, 16 nt, Human
gcuggaagcugggagg

SEQ ID NO: 1284487 - RNA, 17 nt, Human
gcuggaagcugggaggu

SEQ ID NO: 1284488 - RNA, 21 nt, Human
gcuggaagacgcaagggccug

SEQ ID NO: 1284489 - RNA, 23 nt, Human
gcuggaagacgcaagggccugau

SEQ ID NO: 1284490 - RNA, 17 nt, Human
gcuggaagauagcugug

SEQ ID NO: 1284491 - RNA, 14 nt, Human
gcuggaagauccug

SEQ ID NO: 1284492 - RNA, 15 nt, Human
gcuggaagauccugc

SEQ ID NO: 1284493 - RNA, 17 nt, Human
gcuggaagauccugcgg

SEQ ID NO: 1284494 - RNA, 18 nt, Human
gcuggaagauccugcggg

SEQ ID NO: 1284495 - RNA, 14 nt, Human
gcugcuacuuauau

SEQ ID NO: 1284496 - RNA, 18 nt, Human
gcugcuaauauuuuccuc

SEQ ID NO: 1284497 - RNA, 21 nt, Human
gcugcuaauauuuuccuccug

SEQ ID NO: 1284498 - RNA, 22 nt, Human
gcugcuaauauuuuccuccuga

SEQ ID NO: 1284499 - RNA, 24 nt, Human
gcugcuaauauuuuccuccugagu

SEQ ID NO: 1284500 - RNA, 23 nt, Human
gcugcuaauauuuuccuccugag

SEQ ID NO: 1284501 - RNA, 18 nt, Human
gcugcccuggugcugcca

SEQ ID NO: 1284502 - RNA, 12 nt, Human
gcugcccuggug

SEQ ID NO: 1284503 - RNA, 13 nt, Human
gcugcccuggugc

SEQ ID NO: 1284504 - RNA, 14 nt, Human
gcugcccuggugcu

SEQ ID NO: 1284505 - RNA, 15 nt, Human
gcugcccuggugcug

SEQ ID NO: 1284506 - RNA, 17 nt, Human
gcugcccuggugcugcc

SEQ ID NO: 1284507 - RNA, 15 nt, Human
gcugccuuagaaccu

SEQ ID NO: 1284508 - RNA, 20 nt, Human
gcugccuuagaaccuuucuu

SEQ ID NO: 1284509 - RNA, 19 nt, Human
gcugccuuauucagggaag

SEQ ID NO: 1284510 - RNA, 21 nt, Human
gcugccuuauucagggaagga

SEQ ID NO: 1284511 - RNA, 16 nt, Human
gcuguguggcagucug

SEQ ID NO: 1284512 - RNA, 18 nt, Human
gcugugugaauaccugcu

SEQ ID NO: 1284513 - RNA, 20 nt, Human
gcugugugaauaccugcuca

SEQ ID NO: 1284514 - RNA, 18 nt, Human
gcugugggcaagccuaag

SEQ ID NO: 1284515 - RNA, 19 nt, Human
gcuguggccuaaccugccg

SEQ ID NO: 1284516 - RNA, 20 nt, Human
gcuguggccuaaccugccga

SEQ ID NO: 1284517 - RNA, 15 nt, Human
gcugugggaaauggu

SEQ ID NO: 1284518 - RNA, 15 nt, Human
gcuguggccaggagg

SEQ ID NO: 1284519 - RNA, 16 nt, Human
gcuguggccaggaggu

SEQ ID NO: 1284520 - RNA, 20 nt, Human
gcuguggccaggaggugcca

SEQ ID NO: 1284521 - RNA, 18 nt, Human
gcuguggccaggaggugc

SEQ ID NO: 1284522 - RNA, 18 nt, Human
gcugugugcuuuuuuugu

SEQ ID NO: 1284523 - RNA, 23 nt, Human
gcuguguuuggcuuucagggagg

SEQ ID NO: 1284524 - RNA, 13 nt, Human
gcuguuaaauaca

SEQ ID NO: 1284525 - RNA, 15 nt, Human
gcuguuaaauacagg

SEQ ID NO: 1284526 - RNA, 16 nt, Human
gcuguuaaauacagga

SEQ ID NO: 1284527 - RNA, 22 nt, Human
gcuguuaaauacaggaaacagu

SEQ ID NO: 1284528 - RNA, 23 nt, Human
gcuguuaaauacaggaaacaguu

SEQ ID NO: 1284529 - RNA, 23 nt, Human
gcuguuagggguuauugguguaa

SEQ ID NO: 1284530 - RNA, 23 nt, Human
gcuguuauuuagguauuuuucuu

SEQ ID NO: 1284531 - RNA, 19 nt, Human
gcugguguagcuacagaga

SEQ ID NO: 1284532 - RNA, 20 nt, Human
gcugguguagcuacagagaa

SEQ ID NO: 1284533 - RNA, 21 nt, Human
gcugguguagcuacagagaaa

SEQ ID NO: 1284534 - RNA, 22 nt, Human
gcugguguagcuacagagaaac

SEQ ID NO: 1284535 - RNA, 12 nt, Human
gcugguguagcu

SEQ ID NO: 1284536 - RNA, 15 nt, Human
gcugguguagcuaca

SEQ ID NO: 1284537 - RNA, 17 nt, Human
gcugguguagcuacaga

SEQ ID NO: 1284538 - RNA, 18 nt, Human
gcugguguagcuacagag

SEQ ID NO: 1284539 - RNA, 23 nt, Human
gcugguguagcuacagagaaacc

SEQ ID NO: 1284540 - RNA, 18 nt, Human
gcugucaggauugcgaga

SEQ ID NO: 1284541 - RNA, 22 nt, Human
gcugucaggauugcgagagaug

SEQ ID NO: 1284542 - RNA, 13 nt, Human
gcugucaucucag

SEQ ID NO: 1284543 - RNA, 24 nt, Human
gcugucaggauugcgagagaugug

SEQ ID NO: 1284544 - RNA, 23 nt, Human
gcugucaggauugcgagagaugu

SEQ ID NO: 1284545 - RNA, 18 nt, Human
gcugucaucaauuaaagg

SEQ ID NO: 1284546 - RNA, 14 nt, Human
gcugucaucugugc

SEQ ID NO: 1284547 - RNA, 15 nt, Human
gcugucaucugugca

SEQ ID NO: 1284548 - RNA, 16 nt, Human
gcugucaucugugcac

SEQ ID NO: 1284549 - RNA, 14 nt, Human
gcugucccggaggc

SEQ ID NO: 1284550 - RNA, 22 nt, Human
gcugucaucugugcacugccca

SEQ ID NO: 1284551 - RNA, 18 nt, Human
gcuguccagaaagguuug

SEQ ID NO: 1284552 - RNA, 14 nt, Human
gcuguccccccacu

SEQ ID NO: 1284553 - RNA, 21 nt, Human
gcuguccccccacucccucac

SEQ ID NO: 1284554 - RNA, 15 nt, Human
gcuguccccccacuc

SEQ ID NO: 1284555 - RNA, 21 nt, Human
gcugggaggagggcaggcauc

SEQ ID NO: 1284556 - RNA, 18 nt, Human
gcugggaguaguugucuu

SEQ ID NO: 1284557 - RNA, 18 nt, Human
gcugggauagagggguca

SEQ ID NO: 1284558 - RNA, 13 nt, Human
gcugggcucugca

SEQ ID NO: 1284559 - RNA, 23 nt, Human
gcuggggaaaucaaaagggccaa

SEQ ID NO: 1284560 - RNA, 14 nt, Human
gcuggggaagacag

SEQ ID NO: 1284561 - RNA, 15 nt, Human
gcuggggaagacagu

SEQ ID NO: 1284562 - RNA, 16 nt, Human
gcuggggaagacagug

SEQ ID NO: 1284563 - RNA, 14 nt, Human
gcugguccagggcu

SEQ ID NO: 1284564 - RNA, 19 nt, Human
gcugguccagggcuaguga

SEQ ID NO: 1284565 - RNA, 15 nt, Human
gcugguccgugggac

SEQ ID NO: 1284566 - RNA, 16 nt, Human
gcugguccgugggacg

SEQ ID NO: 1284567 - RNA, 19 nt, Human
gcugguccuauggccucau

SEQ ID NO: 1284568 - RNA, 17 nt, Human
gcugguccuuucuuccg

SEQ ID NO: 1284569 - RNA, 18 nt, Human
gcuggucuagucacgcau

SEQ ID NO: 1284570 - RNA, 20 nt, Human
gcuggucucaaacuccugac

SEQ ID NO: 1284571 - RNA, 19 nt, Human
gcuggucucgaacuccuga

SEQ ID NO: 1284572 - RNA, 22 nt, Human
gcuggucucgaacuccugaccu

SEQ ID NO: 1284573 - RNA, 23 nt, Human
gcuggucucgaacuccugaccuu

SEQ ID NO: 1284574 - RNA, 20 nt, Human
gcugguccuauggccucaug

SEQ ID NO: 1284575 - RNA, 16 nt, Human
gcugguaucucagaaa

SEQ ID NO: 1284576 - RNA, 18 nt, Human
gcugguaucucagaaagu

SEQ ID NO: 1284577 - RNA, 24 nt, Human
gcugguaucucagaaagugccuga

SEQ ID NO: 1284578 - RNA, 21 nt, Human
gcuggggaagacaguggcccc

SEQ ID NO: 1284579 - RNA, 18 nt, Human
gcuggggacagguccuca

SEQ ID NO: 1284580 - RNA, 16 nt, Human
gcuggggaccugguac

SEQ ID NO: 1284581 - RNA, 23 nt, Human
gcuggggaccugguacccuccug

SEQ ID NO: 1284582 - RNA, 15 nt, Human
gcuuuuaugugaaac

SEQ ID NO: 1284583 - RNA, 13 nt, Human
gcuuuuaugugaa

SEQ ID NO: 1284584 - RNA, 17 nt, Human
gcuuuggucucuugcuu

SEQ ID NO: 1284585 - RNA, 21 nt, Human
gcuuuuaguauuuuagugaac

SEQ ID NO: 1284586 - RNA, 19 nt, Human
gcuuuccauucgugaaaac

SEQ ID NO: 1284587 - RNA, 15 nt, Human
gcuuugggcuugggc

SEQ ID NO: 1284588 - RNA, 17 nt, Human
gcuuuggugagaaccug

SEQ ID NO: 1284589 - RNA, 16 nt, Human
gcuuugguuuaaaaga

SEQ ID NO: 1284590 - RNA, 19 nt, Human
gcuuugggcugcccuggug

SEQ ID NO: 1284591 - RNA, 15 nt, Human
gcuuuccaugggacc

SEQ ID NO: 1284592 - RNA, 21 nt, Human
gcuuucauuuucucucaggug

SEQ ID NO: 1284593 - RNA, 19 nt, Human
gcuuucauuuucucucagg

SEQ ID NO: 1284594 - RNA, 15 nt, Human
gcuuucauguaaacu

SEQ ID NO: 1284595 - RNA, 20 nt, Human
gcuuucauguaaacugugca

SEQ ID NO: 1284596 - RNA, 21 nt, Human
gcuuucauguaaacugugcac

SEQ ID NO: 1284597 - RNA, 17 nt, Human
gcuuucauuuucucuca

SEQ ID NO: 1284598 - RNA, 18 nt, Human
gcuuucauuuucucucag

SEQ ID NO: 1284599 - RNA, 18 nt, Human
gcuuuaacuuaaauagua

SEQ ID NO: 1284600 - RNA, 18 nt, Human
gcuuucagggaggcccug

SEQ ID NO: 1284601 - RNA, 12 nt, Human
gcuuucauguaa

SEQ ID NO: 1284602 - RNA, 13 nt, Human
gcuuguugugcuu

SEQ ID NO: 1284603 - RNA, 16 nt, Human
gcuuguugugcuuuua

SEQ ID NO: 1284604 - RNA, 11 nt, Human
gcuuguuuaca

SEQ ID NO: 1284605 - RNA, 15 nt, Human
gcuuguuuacaugcu

SEQ ID NO: 1284606 - RNA, 19 nt, Human
gcuuguuuacaugcuuauu

SEQ ID NO: 1284607 - RNA, 16 nt, Human
gcuuguuuacaugcuu

SEQ ID NO: 1284608 - RNA, 13 nt, Human
gcuugccugcagg

SEQ ID NO: 1284609 - RNA, 14 nt, Human
gcuugccugcaggc

SEQ ID NO: 1284610 - RNA, 16 nt, Human
gcuugccugccugcuc

SEQ ID NO: 1284611 - RNA, 16 nt, Human
gcuugcuaauuauuuu

SEQ ID NO: 1284612 - RNA, 14 nt, Human
gcuugcuauucugu

SEQ ID NO: 1284613 - RNA, 18 nt, Human
gcuugcuauucugucccu

SEQ ID NO: 1284614 - RNA, 20 nt, Human
gcuugcuauucugucccuag

SEQ ID NO: 1284615 - RNA, 14 nt, Human
gcuugcuuuucaug

SEQ ID NO: 1284616 - RNA, 23 nt, Human
gcuugcuuuucaugcaaacucuu

SEQ ID NO: 1284617 - RNA, 21 nt, Human
gcuugcuuuucaugcaaacuc

SEQ ID NO: 1284618 - RNA, 14 nt, Human
gcuuggagcagagg

SEQ ID NO: 1284619 - RNA, 16 nt, Human
gcuuggagcagagggg

SEQ ID NO: 1284620 - RNA, 18 nt, Human
gcuuguggcaagugaauu

SEQ ID NO: 1284621 - RNA, 13 nt, Human
gcuuguggggccu

SEQ ID NO: 1284622 - RNA, 16 nt, Human
gcuuguggggccuggg

SEQ ID NO: 1284623 - RNA, 17 nt, Human
gcuuguggggccuggga

SEQ ID NO: 1284624 - RNA, 18 nt, Human
gcuuguggggccugggag

SEQ ID NO: 1284625 - RNA, 19 nt, Human
gcuuguggggccugggagg

SEQ ID NO: 1284626 - RNA, 14 nt, Human
gcuuguuaaauuuu

SEQ ID NO: 1284627 - RNA, 19 nt, Human
gcuucuguuuuauaauuuu

SEQ ID NO: 1284628 - RNA, 19 nt, Human
gcuucuguugcugccucau

SEQ ID NO: 1284629 - RNA, 14 nt, Human
gcuucuggccagga

SEQ ID NO: 1284630 - RNA, 17 nt, Human
gcuucuguugcugccuc

SEQ ID NO: 1284631 - RNA, 18 nt, Human
gcuucuguugcugccuca

SEQ ID NO: 1284632 - RNA, 17 nt, Human
gcuucucauccugcagg

SEQ ID NO: 1284633 - RNA, 18 nt, Human
gcuucucauccugcaggc

SEQ ID NO: 1284634 - RNA, 15 nt, Human
gcuucugcuggggcc

SEQ ID NO: 1284635 - RNA, 16 nt, Human
gcuucugcuggggccu

SEQ ID NO: 1284636 - RNA, 18 nt, Human
gcuucugcuggggccugg

SEQ ID NO: 1284637 - RNA, 20 nt, Human
gcuucugcuggggccuggga

SEQ ID NO: 1284638 - RNA, 21 nt, Human
gcuucugcuggggccugggac

SEQ ID NO: 1284639 - RNA, 22 nt, Human
gcuucugcuggggccugggaca

SEQ ID NO: 1284640 - RNA, 22 nt, Human
gcuucucagauuucugaggaaa

SEQ ID NO: 1284641 - RNA, 16 nt, Human
gcuucucauccugcag

SEQ ID NO: 1284642 - RNA, 21 nt, Human
gcuucucagauuucugaggaa

SEQ ID NO: 1284643 - RNA, 22 nt, Human
gcuuccagauugacgacaagug

SEQ ID NO: 1284644 - RNA, 23 nt, Human
gcuuccagauugacgacaagugc

SEQ ID NO: 1284645 - RNA, 22 nt, Human
gcuucauucaagucagcucuuc

SEQ ID NO: 1284646 - RNA, 12 nt, Human
gcuuccaauuuu

SEQ ID NO: 1284647 - RNA, 21 nt, Human
gcuuccacguacugcagccuc

SEQ ID NO: 1284648 - RNA, 18 nt, Human
gcuuaucaacuaaugauu

SEQ ID NO: 1284649 - RNA, 14 nt, Human
gcuucaucuggcaa

SEQ ID NO: 1284650 - RNA, 14 nt, Human
gcuucaugccagcu

SEQ ID NO: 1284651 - RNA, 17 nt, Human
gcuucauggcagaaggc

SEQ ID NO: 1284652 - RNA, 14 nt, Human
gcuucauguguccc

SEQ ID NO: 1284653 - RNA, 15 nt, Human
gcuucauguguccca

SEQ ID NO: 1284654 - RNA, 16 nt, Human
gcuucaugugucccag

SEQ ID NO: 1284655 - RNA, 17 nt, Human
gcuucaugugucccaga

SEQ ID NO: 1284656 - RNA, 18 nt, Human
gcuucaugugucccagaa

SEQ ID NO: 1284657 - RNA, 15 nt, Human
gcuuauauuguucac

SEQ ID NO: 1284658 - RNA, 15 nt, Human
gcuuauaucuggccu

SEQ ID NO: 1284659 - RNA, 17 nt, Human
gcuuauaucuggccucu

SEQ ID NO: 1284660 - RNA, 20 nt, Human
gcuuauaucuggccucugcu

SEQ ID NO: 1284661 - RNA, 17 nt, Human
gcuuauacgaaauaauu

SEQ ID NO: 1284662 - RNA, 18 nt, Human
gcuuauacgaaauaauug

SEQ ID NO: 1284663 - RNA, 19 nt, Human
gcuuauacgaaauaauugu

SEQ ID NO: 1284664 - RNA, 22 nt, Human
gcuuauacgaaauaauuguugu

SEQ ID NO: 1284665 - RNA, 23 nt, Human
gcuuauacgaaauaauuguuguu

SEQ ID NO: 1284666 - RNA, 11 nt, Human
gcuuauaucug

SEQ ID NO: 1284667 - RNA, 12 nt, Human
gcuuaccuggcc

SEQ ID NO: 1284668 - RNA, 22 nt, Human
gcuuaccuggcccaucagggua

SEQ ID NO: 1284669 - RNA, 17 nt, Human
gcuuacugauauauuuu

SEQ ID NO: 1284670 - RNA, 21 nt, Human
gcuuacugauauauuuuacaa

SEQ ID NO: 1284671 - RNA, 22 nt, Human
gcuccuccaggguggcagcaac

SEQ ID NO: 1284672 - RNA, 21 nt, Human
gcuccuccaggguggcagcaa

SEQ ID NO: 1284673 - RNA, 11 nt, Human
gcuccucccac

SEQ ID NO: 1284674 - RNA, 20 nt, Human
gcuccuccagggugugugcu

SEQ ID NO: 1284675 - RNA, 15 nt, Human
gcuccuccccuggag

SEQ ID NO: 1284676 - RNA, 23 nt, Human
gcuccuggggguucuuucuuccu

SEQ ID NO: 1284677 - RNA, 14 nt, Human
gcuccucccggugc

SEQ ID NO: 1284678 - RNA, 16 nt, Human
gcuccucccggugccc

SEQ ID NO: 1284679 - RNA, 21 nt, Human
gcuccuggucaccuaggaagc

SEQ ID NO: 1284680 - RNA, 14 nt, Human
gcuccuguccccug

SEQ ID NO: 1284681 - RNA, 19 nt, Human
gcuccuguccccugcuaca

SEQ ID NO: 1284682 - RNA, 17 nt, Human
gcuccuguccccugcua

SEQ ID NO: 1284683 - RNA, 13 nt, Human
gcuccuguggccc

SEQ ID NO: 1284684 - RNA, 15 nt, Human
gcuccuguggcccca

SEQ ID NO: 1284685 - RNA, 20 nt, Human
gcuccuguggccccacccug

SEQ ID NO: 1284686 - RNA, 21 nt, Human
gcuccuguggccccacccugg

SEQ ID NO: 1284687 - RNA, 21 nt, Human
gcuccuauucaacacacacau

SEQ ID NO: 1284688 - RNA, 21 nt, Human
gcuccucaaccccuccccucc

SEQ ID NO: 1284689 - RNA, 22 nt, Human
gcuccucaaccccuccccucca

SEQ ID NO: 1284690 - RNA, 18 nt, Human
gcuccucagggacucagg

SEQ ID NO: 1284691 - RNA, 19 nt, Human
gcuccucagggacucaggu

SEQ ID NO: 1284692 - RNA, 20 nt, Human
gcuccucagggacucaggug

SEQ ID NO: 1284693 - RNA, 23 nt, Human
gcuccgugugggagaccggccug

SEQ ID NO: 1284694 - RNA, 22 nt, Human
gcuccgugugggagaccggccu

SEQ ID NO: 1284695 - RNA, 17 nt, Human
gcuccgccuggccuggc

SEQ ID NO: 1284696 - RNA, 15 nt, Human
gcuccgccuggccug

SEQ ID NO: 1284697 - RNA, 23 nt, Human
gcuccggaggacucaccacugcc

SEQ ID NO: 1284698 - RNA, 22 nt, Human
gcuccguccaggagccugugcc

SEQ ID NO: 1284699 - RNA, 23 nt, Human
gcuccguccaggagccugugccu

SEQ ID NO: 1284700 - RNA, 14 nt, Human
gcuccuugggcccu

SEQ ID NO: 1284701 - RNA, 17 nt, Human
gcuccuugggcccuuug

SEQ ID NO: 1284702 - RNA, 19 nt, Human
gcuccuugggcccuuugag

SEQ ID NO: 1284703 - RNA, 15 nt, Human
gcuccuugugccaga

SEQ ID NO: 1284704 - RNA, 15 nt, Human
gcuccuugugggccu

SEQ ID NO: 1284705 - RNA, 16 nt, Human
gcuccuugugggccug

SEQ ID NO: 1284706 - RNA, 17 nt, Human
gcuccuugugggccugg

SEQ ID NO: 1284707 - RNA, 18 nt, Human
gcuccuugugggccuggg

SEQ ID NO: 1284708 - RNA, 20 nt, Human
gcuccuugugggccugggcu

SEQ ID NO: 1284709 - RNA, 22 nt, Human
gcuccuugugggccugggcucc

SEQ ID NO: 1284710 - RNA, 21 nt, Human
gcuccuugugggccugggcuc

SEQ ID NO: 1284711 - RNA, 16 nt, Human
gcucgaggggugggcu

SEQ ID NO: 1284712 - RNA, 15 nt, Human
gcuccuuaaggcucu

SEQ ID NO: 1284713 - RNA, 17 nt, Human
gcuccuuaaggcucuuu

SEQ ID NO: 1284714 - RNA, 21 nt, Human
gcuccuuaaggcucuuuugua

SEQ ID NO: 1284715 - RNA, 22 nt, Human
gcuccuguuuugcacagccaaa

SEQ ID NO: 1284716 - RNA, 18 nt, Human
gcuccuuccucugaggcu

SEQ ID NO: 1284717 - RNA, 18 nt, Human
gcuccuucccaucgcugu

SEQ ID NO: 1284718 - RNA, 13 nt, Human
gcuccuucccauc

SEQ ID NO: 1284719 - RNA, 20 nt, Human
gcuccuuccucugaggcuga

SEQ ID NO: 1284720 - RNA, 22 nt, Human
gcuccuuccucugaggcugaaa

SEQ ID NO: 1284721 - RNA, 14 nt, Human
gcuccuuccuggag

SEQ ID NO: 1284722 - RNA, 23 nt, Human
gcuccuuccuggagacugcccag

SEQ ID NO: 1284723 - RNA, 14 nt, Human
gcucauuucaggau

SEQ ID NO: 1284724 - RNA, 14 nt, Human
gcucauuuuggacu

SEQ ID NO: 1284725 - RNA, 17 nt, Human
gcucaugugugcaacag

SEQ ID NO: 1284726 - RNA, 22 nt, Human
gcucaugugugcaacaggguau

SEQ ID NO: 1284727 - RNA, 19 nt, Human
gcucccacagaacacagca

SEQ ID NO: 1284728 - RNA, 21 nt, Human
gcucccuucuacagccucaga

SEQ ID NO: 1284729 - RNA, 14 nt, Human
gcucccuucuuccc

SEQ ID NO: 1284730 - RNA, 15 nt, Human
gcuccgaggacccag

SEQ ID NO: 1284731 - RNA, 16 nt, Human
gcuccgaggacccagg

SEQ ID NO: 1284732 - RNA, 15 nt, Human
gcucccacaggcccu

SEQ ID NO: 1284733 - RNA, 23 nt, Human
gcucccacaagccucugcccagg

SEQ ID NO: 1284734 - RNA, 15 nt, Human
gcucccacaagccug

SEQ ID NO: 1284735 - RNA, 16 nt, Human
gcucccacaagccuga

SEQ ID NO: 1284736 - RNA, 17 nt, Human
gcucccacaagccugag

SEQ ID NO: 1284737 - RNA, 18 nt, Human
gcucccacaagccugagg

SEQ ID NO: 1284738 - RNA, 19 nt, Human
gcucccacaagccugaggg

SEQ ID NO: 1284739 - RNA, 13 nt, Human
gcucccacagaac

SEQ ID NO: 1284740 - RNA, 15 nt, Human
gcuccaguguccuga

SEQ ID NO: 1284741 - RNA, 16 nt, Human
gcuccaguguccugag

SEQ ID NO: 1284742 - RNA, 17 nt, Human
gcuccaguguccugagc

SEQ ID NO: 1284743 - RNA, 19 nt, Human
gcuccaguguccugagcuc

SEQ ID NO: 1284744 - RNA, 15 nt, Human
gcucccaaggggccu

SEQ ID NO: 1284745 - RNA, 16 nt, Human
gcucccaaggggccug

SEQ ID NO: 1284746 - RNA, 17 nt, Human
gcucccaaggggccuga

SEQ ID NO: 1284747 - RNA, 19 nt, Human
gcucccaaggggccugagc

SEQ ID NO: 1284748 - RNA, 20 nt, Human
gcucccaaggggccugagca

SEQ ID NO: 1284749 - RNA, 21 nt, Human
gcucccaaggggccugagcag

SEQ ID NO: 1284750 - RNA, 15 nt, Human
gcucccacaagccuc

SEQ ID NO: 1284751 - RNA, 15 nt, Human
gcuccagguggcucu

SEQ ID NO: 1284752 - RNA, 16 nt, Human
gcuccagguggcucug

SEQ ID NO: 1284753 - RNA, 18 nt, Human
gcuccagguggcucugag

SEQ ID NO: 1284754 - RNA, 21 nt, Human
gcuccagguggcucugaggug

SEQ ID NO: 1284755 - RNA, 20 nt, Human
gcuccaguguccugagcuca

SEQ ID NO: 1284756 - RNA, 18 nt, Human
gcucauggacuucugcca

SEQ ID NO: 1284757 - RNA, 16 nt, Human
gcucaucugcuggucc

SEQ ID NO: 1284758 - RNA, 21 nt, Human
gcucaucugcugguccguggg

SEQ ID NO: 1284759 - RNA, 23 nt, Human
gcucaucugcugguccgugggac

SEQ ID NO: 1284760 - RNA, 16 nt, Human
gcucaucauucucugu

SEQ ID NO: 1284761 - RNA, 18 nt, Human
gcucaucauucucugucu

SEQ ID NO: 1284762 - RNA, 19 nt, Human
gcucaucauucucugucuc

SEQ ID NO: 1284763 - RNA, 20 nt, Human
gcucaucauucucugucuca

SEQ ID NO: 1284764 - RNA, 13 nt, Human
gcucaucugcugg

SEQ ID NO: 1284765 - RNA, 14 nt, Human
gcucaucugcuggu

SEQ ID NO: 1284766 - RNA, 15 nt, Human
gcucaucugcugguc

SEQ ID NO: 1284767 - RNA, 15 nt, Human
gcucauauuucccau

SEQ ID NO: 1284768 - RNA, 19 nt, Human
gcucagcugucaaggcuca

SEQ ID NO: 1284769 - RNA, 16 nt, Human
gcucagcccugcacca

SEQ ID NO: 1284770 - RNA, 18 nt, Human
gcucagcucauccaugcc

SEQ ID NO: 1284771 - RNA, 16 nt, Human
gcucagcucugggcca

SEQ ID NO: 1284772 - RNA, 17 nt, Human
gcucagcucugggccau

SEQ ID NO: 1284773 - RNA, 12 nt, Human
gcucagcugcau

SEQ ID NO: 1284774 - RNA, 19 nt, Human
gcucagcugcauuccgcag

SEQ ID NO: 1284775 - RNA, 17 nt, Human
gcucagcccucccugcc

SEQ ID NO: 1284776 - RNA, 18 nt, Human
gcucagcccucccugccc

SEQ ID NO: 1284777 - RNA, 19 nt, Human
gcucagcccucccugcccc

SEQ ID NO: 1284778 - RNA, 21 nt, Human
gcucagcccucccugccccuc

SEQ ID NO: 1284779 - RNA, 12 nt, Human
gcucagcccuga

SEQ ID NO: 1284780 - RNA, 15 nt, Human
gcucagcccugagga

SEQ ID NO: 1284781 - RNA, 12 nt, Human
gcucagcccugc

SEQ ID NO: 1284782 - RNA, 22 nt, Human
gcucacagaacccuuggagcca

SEQ ID NO: 1284783 - RNA, 12 nt, Human
gcucagcccucc

SEQ ID NO: 1284784 - RNA, 22 nt, Human
gcucagccccaccccagggcag

SEQ ID NO: 1284785 - RNA, 15 nt, Human
gcucagcccucccug

SEQ ID NO: 1284786 - RNA, 16 nt, Human
gcucagcccucccugc

SEQ ID NO: 1284787 - RNA, 21 nt, Human
gcucagccaucccgucuucuc

SEQ ID NO: 1284788 - RNA, 15 nt, Human
gcucagccccacccc

SEQ ID NO: 1284789 - RNA, 20 nt, Human
gcucagccccaccccagggc

SEQ ID NO: 1284790 - RNA, 21 nt, Human
gcucagccccaccccagggca

SEQ ID NO: 1284791 - RNA, 16 nt, Human
gcuaucguaaaauuaa

SEQ ID NO: 1284792 - RNA, 15 nt, Human
gcuaucguaaaauua

SEQ ID NO: 1284793 - RNA, 17 nt, Human
gcuaucguaaaauuaag

SEQ ID NO: 1284794 - RNA, 18 nt, Human
gcucaagcgauucuccug

SEQ ID NO: 1284795 - RNA, 14 nt, Human
gcucaaggccagcu

SEQ ID NO: 1284796 - RNA, 16 nt, Human
gcucaaucccugagga

SEQ ID NO: 1284797 - RNA, 20 nt, Human
gcucaaucccugaggacuga

SEQ ID NO: 1284798 - RNA, 13 nt, Human
gcucaaugagcau

SEQ ID NO: 1284799 - RNA, 14 nt, Human
gcucaaugagcaug

SEQ ID NO: 1284800 - RNA, 19 nt, Human
gcucaaugagcauguuuag

SEQ ID NO: 1284801 - RNA, 20 nt, Human
gcucaaugagcauguuuaga

SEQ ID NO: 1284802 - RNA, 17 nt, Human
gcucaauggacuggaag

SEQ ID NO: 1284803 - RNA, 14 nt, Human
gcucacaaaccaug

SEQ ID NO: 1284804 - RNA, 13 nt, Human
gcucacaaggcag

SEQ ID NO: 1284805 - RNA, 14 nt, Human
gcucacaaggcagc

SEQ ID NO: 1284806 - RNA, 15 nt, Human
gcucacaaggcagca

SEQ ID NO: 1284807 - RNA, 19 nt, Human
gcucacaaggcagcaaggc

SEQ ID NO: 1284808 - RNA, 20 nt, Human
gcucacaaggcagcaaggcc

SEQ ID NO: 1284809 - RNA, 21 nt, Human
gcucacaaggcagcaaggccc

SEQ ID NO: 1284810 - RNA, 22 nt, Human
gcucacaaggcagcaaggcccg

SEQ ID NO: 1284811 - RNA, 13 nt, Human
gcucacacaccug

SEQ ID NO: 1284812 - RNA, 12 nt, Human
gcuauccaccaa

SEQ ID NO: 1284813 - RNA, 17 nt, Human
gcuauauaagacaagaa

SEQ ID NO: 1284814 - RNA, 20 nt, Human
gcuauaacuauguugauaaa

SEQ ID NO: 1284815 - RNA, 21 nt, Human
gcuauacugcauacuuuuuaa

SEQ ID NO: 1284816 - RNA, 14 nt, Human
gcuagauguaugua

SEQ ID NO: 1284817 - RNA, 16 nt, Human
gcuagauguauguacu

SEQ ID NO: 1284818 - RNA, 19 nt, Human
gcuauaaagcaguauuuuu

SEQ ID NO: 1284819 - RNA, 21 nt, Human
gcuauaaagcaguauuuuucu

SEQ ID NO: 1284820 - RNA, 13 nt, Human
gcuagauguaugu

SEQ ID NO: 1284821 - RNA, 22 nt, Human
gcgcccuuaacugcauccagcc

SEQ ID NO: 1284822 - RNA, 12 nt, Human
gcgcccugcaga

SEQ ID NO: 1284823 - RNA, 13 nt, Human
gcgcccugcagac

SEQ ID NO: 1284824 - RNA, 14 nt, Human
gcgcccugcagacc

SEQ ID NO: 1284825 - RNA, 16 nt, Human
gcgcccugcagacccu

SEQ ID NO: 1284826 - RNA, 18 nt, Human
gcgcccugcagacccugc

SEQ ID NO: 1284827 - RNA, 21 nt, Human
gcgccucgccggaucugaggg

SEQ ID NO: 1284828 - RNA, 15 nt, Human
gcgccugugguucug

SEQ ID NO: 1284829 - RNA, 18 nt, Human
gcgccccaacccguggag

SEQ ID NO: 1284830 - RNA, 21 nt, Human
gcgccccaacccguggaggcu

SEQ ID NO: 1284831 - RNA, 22 nt, Human
gcgccccaacccguggaggcug

SEQ ID NO: 1284832 - RNA, 13 nt, Human
gcgccccuucccc

SEQ ID NO: 1284833 - RNA, 21 nt, Human
gcgcccccuccgcccugccac

SEQ ID NO: 1284834 - RNA, 22 nt, Human
gcgcccccuccgcccugccacu

SEQ ID NO: 1284835 - RNA, 18 nt, Human
gcgcaguguggaggccac

SEQ ID NO: 1284836 - RNA, 22 nt, Human
gcgcaguuuuuuuuuucuuguc

SEQ ID NO: 1284837 - RNA, 13 nt, Human
gcgcaucagacug

SEQ ID NO: 1284838 - RNA, 17 nt, Human
gcggaccacccucacug

SEQ ID NO: 1284839 - RNA, 15 nt, Human
gcgguagccagcaca

SEQ ID NO: 1284840 - RNA, 21 nt, Human
gcgguagccagcacacagggc

SEQ ID NO: 1284841 - RNA, 22 nt, Human
gcgguagccagcacacagggca

SEQ ID NO: 1284842 - RNA, 23 nt, Human
gcgguagccagcacacagggcag

SEQ ID NO: 1284843 - RNA, 18 nt, Human
gcgcaggcuggcccugcc

SEQ ID NO: 1284844 - RNA, 19 nt, Human
gcgcaggcuggcccugccc

SEQ ID NO: 1284845 - RNA, 17 nt, Human
gcgcaggcuggcccugc

SEQ ID NO: 1284846 - RNA, 20 nt, Human
gcgcaggcuggcccugcccu

SEQ ID NO: 1284847 - RNA, 21 nt, Human
gcgcaggcuggcccugcccug

SEQ ID NO: 1284848 - RNA, 22 nt, Human
gcgcaggcuggcccugcccugg

SEQ ID NO: 1284849 - RNA, 17 nt, Human
gcgaagcguuguccuca

SEQ ID NO: 1284850 - RNA, 17 nt, Human
gccuuucuucucuccag

SEQ ID NO: 1284851 - RNA, 16 nt, Human
gccuuguuuuuuucua

SEQ ID NO: 1284852 - RNA, 18 nt, Human
gccuuucaggaucuauuu

SEQ ID NO: 1284853 - RNA, 15 nt, Human
gccuuuccauccaug

SEQ ID NO: 1284854 - RNA, 19 nt, Human
gccuuuccauccauggcca

SEQ ID NO: 1284855 - RNA, 21 nt, Human
gccuuuccauccauggccagc

SEQ ID NO: 1284856 - RNA, 18 nt, Human
gccuuucccuaagccagc

SEQ ID NO: 1284857 - RNA, 20 nt, Human
gccuuuccauccauggccag

SEQ ID NO: 1284858 - RNA, 16 nt, Human
gccugucuuaauuuuc

SEQ ID NO: 1284859 - RNA, 17 nt, Human
gccugucuuaauuuucu

SEQ ID NO: 1284860 - RNA, 14 nt, Human
gccugugaacccag

SEQ ID NO: 1284861 - RNA, 15 nt, Human
gccugugaacccagg

SEQ ID NO: 1284862 - RNA, 16 nt, Human
gccugugaacccagga

SEQ ID NO: 1284863 - RNA, 17 nt, Human
gccugugaacccaggac

SEQ ID NO: 1284864 - RNA, 18 nt, Human
gccugugaacccaggaca

SEQ ID NO: 1284865 - RNA, 13 nt, Human
gccuuccuccugg

SEQ ID NO: 1284866 - RNA, 14 nt, Human
gccuuccuccuggg

SEQ ID NO: 1284867 - RNA, 16 nt, Human
gccuuccuccugggcc

SEQ ID NO: 1284868 - RNA, 17 nt, Human
gccuuccuccugggccc

SEQ ID NO: 1284869 - RNA, 22 nt, Human
gccuuccuccugggcccucucu

SEQ ID NO: 1284870 - RNA, 15 nt, Human
gccuugucacgccag

SEQ ID NO: 1284871 - RNA, 16 nt, Human
gccuugucacgccaga

SEQ ID NO: 1284872 - RNA, 17 nt, Human
gccuugucacgccagac

SEQ ID NO: 1284873 - RNA, 21 nt, Human
gccuugugaugucauacagag

SEQ ID NO: 1284874 - RNA, 22 nt, Human
gccuugugaugucauacagaga

SEQ ID NO: 1284875 - RNA, 23 nt, Human
gccuugugaugucauacagagaa

SEQ ID NO: 1284876 - RNA, 16 nt, Human
gccuuguucugucacc

SEQ ID NO: 1284877 - RNA, 12 nt, Human
gccuuguucugu

SEQ ID NO: 1284878 - RNA, 15 nt, Human
gccuuguuuuuuucu

SEQ ID NO: 1284879 - RNA, 17 nt, Human
gccuugguuuuuacugc

SEQ ID NO: 1284880 - RNA, 22 nt, Human
gccuugguuuuuacugcucuga

SEQ ID NO: 1284881 - RNA, 23 nt, Human
gccuugguuuuuacugcucugag

SEQ ID NO: 1284882 - RNA, 17 nt, Human
gccuuguaauucuaaau

SEQ ID NO: 1284883 - RNA, 20 nt, Human
gccuuguaauucuaaaugaa

SEQ ID NO: 1284884 - RNA, 20 nt, Human
gccugagcgacagugagacu

SEQ ID NO: 1284885 - RNA, 17 nt, Human
gccugagcgacagugag

SEQ ID NO: 1284886 - RNA, 10 nt, Human
gccugaggga

SEQ ID NO: 1284887 - RNA, 14 nt, Human
gccugagggaaagg

SEQ ID NO: 1284888 - RNA, 15 nt, Human
gccugagggaaaggc

SEQ ID NO: 1284889 - RNA, 17 nt, Human
gccugagggaaaggcca

SEQ ID NO: 1284890 - RNA, 24 nt, Human
gccugcaggaucucaccaggcagc

SEQ ID NO: 1284891 - RNA, 13 nt, Human
gccugcaggaucu

SEQ ID NO: 1284892 - RNA, 16 nt, Human
gccugcaggaucucac

SEQ ID NO: 1284893 - RNA, 23 nt, Human
gccugcaggaucucaccaggcag

SEQ ID NO: 1284894 - RNA, 13 nt, Human
gccuggcacaggg

SEQ ID NO: 1284895 - RNA, 14 nt, Human
gccuggcacagggc

SEQ ID NO: 1284896 - RNA, 16 nt, Human
gccuggaccagccucu

SEQ ID NO: 1284897 - RNA, 17 nt, Human
gccuggaccagccucuc

SEQ ID NO: 1284898 - RNA, 23 nt, Human
gccuggacccguucaugggggag

SEQ ID NO: 1284899 - RNA, 17 nt, Human
gccugcaguccuggaag

SEQ ID NO: 1284900 - RNA, 22 nt, Human
gccugcauaggaguuuggagga

SEQ ID NO: 1284901 - RNA, 23 nt, Human
gccugcauaggaguuuggaggaa

SEQ ID NO: 1284902 - RNA, 22 nt, Human
gccugcauccauucuccugagg

SEQ ID NO: 1284903 - RNA, 21 nt, Human
gccugcauccauucuccugag

SEQ ID NO: 1284904 - RNA, 16 nt, Human
gccugcauugagcuug

SEQ ID NO: 1284905 - RNA, 21 nt, Human
gccugcauugagcuugcaugc

SEQ ID NO: 1284906 - RNA, 13 nt, Human
gccugccaccucc

SEQ ID NO: 1284907 - RNA, 21 nt, Human
gccugcucccauccugugugu

SEQ ID NO: 1284908 - RNA, 12 nt, Human
gccugcugcuga

SEQ ID NO: 1284909 - RNA, 13 nt, Human
gccugcugcugag

SEQ ID NO: 1284910 - RNA, 14 nt, Human
gccugcugcugaga

SEQ ID NO: 1284911 - RNA, 15 nt, Human
gccugcugcugagaa

SEQ ID NO: 1284912 - RNA, 17 nt, Human
gccugcugcugagaacc

SEQ ID NO: 1284913 - RNA, 18 nt, Human
gccugcugcugagaaccu

SEQ ID NO: 1284914 - RNA, 19 nt, Human
gccugcugcugagaaccug

SEQ ID NO: 1284915 - RNA, 20 nt, Human
gccugcugcugagaaccugg

SEQ ID NO: 1284916 - RNA, 21 nt, Human
gccugcugcugagaaccuggc

SEQ ID NO: 1284917 - RNA, 22 nt, Human
gccugcugcugagaaccuggcc

SEQ ID NO: 1284918 - RNA, 15 nt, Human
gccuggaagagcagc

SEQ ID NO: 1284919 - RNA, 17 nt, Human
gccuggaagagcagccc

SEQ ID NO: 1284920 - RNA, 19 nt, Human
gccuggguuugguguaugg

SEQ ID NO: 1284921 - RNA, 11 nt, Human
gccuguacugc

SEQ ID NO: 1284922 - RNA, 13 nt, Human
gccuguacugccu

SEQ ID NO: 1284923 - RNA, 14 nt, Human
gccuguacugccug

SEQ ID NO: 1284924 - RNA, 15 nt, Human
gccuguacugccugc

SEQ ID NO: 1284925 - RNA, 16 nt, Human
gccuguacugccugcu

SEQ ID NO: 1284926 - RNA, 19 nt, Human
gccuguccugccuguggcc

SEQ ID NO: 1284927 - RNA, 12 nt, Human
gccugucucaag

SEQ ID NO: 1284928 - RNA, 20 nt, Human
gccuggguuugguguauggu

SEQ ID NO: 1284929 - RNA, 20 nt, Human
gccugguauauccaaaagcu

SEQ ID NO: 1284930 - RNA, 15 nt, Human
gccugggcugggaaa

SEQ ID NO: 1284931 - RNA, 16 nt, Human
gccugggcuccuggac

SEQ ID NO: 1284932 - RNA, 19 nt, Human
gccuggguguaaaaccugg

SEQ ID NO: 1284933 - RNA, 22 nt, Human
gccuggguguaaaaccuggaga

SEQ ID NO: 1284934 - RNA, 17 nt, Human
gccugggccgcugccac

SEQ ID NO: 1284935 - RNA, 18 nt, Human
gccugggccgcugccacg

SEQ ID NO: 1284936 - RNA, 14 nt, Human
gccugggccuaugg

SEQ ID NO: 1284937 - RNA, 18 nt, Human
gccugggccuauggagag

SEQ ID NO: 1284938 - RNA, 19 nt, Human
gccugggccuauggagagc

SEQ ID NO: 1284939 - RNA, 20 nt, Human
gccugggccuauggagagcc

SEQ ID NO: 1284940 - RNA, 21 nt, Human
gccugggccuauggagagccc

SEQ ID NO: 1284941 - RNA, 22 nt, Human
gccugggccuauggagagcccu

SEQ ID NO: 1284942 - RNA, 23 nt, Human
gccugggccuauggagagcccug

SEQ ID NO: 1284943 - RNA, 17 nt, Human
gccugggcgcugguccu

SEQ ID NO: 1284944 - RNA, 20 nt, Human
gccugggcgcugguccuuuc

SEQ ID NO: 1284945 - RNA, 10 nt, Human
gccugggcuc

SEQ ID NO: 1284946 - RNA, 21 nt, Human
gccugggcgcugguccuuucu

SEQ ID NO: 1284947 - RNA, 13 nt, Human
gccugggcuccug

SEQ ID NO: 1284948 - RNA, 14 nt, Human
gccugggcuccugg

SEQ ID NO: 1284949 - RNA, 15 nt, Human
gccugggcuccugga

SEQ ID NO: 1284950 - RNA, 17 nt, Human
gccugggcuccuggacc

SEQ ID NO: 1284951 - RNA, 22 nt, Human
gccuggcagccgugccuucagc

SEQ ID NO: 1284952 - RNA, 18 nt, Human
gccuggcacagggcagug

SEQ ID NO: 1284953 - RNA, 19 nt, Human
gccuggcacagggcagugg

SEQ ID NO: 1284954 - RNA, 12 nt, Human
gccuggcagccg

SEQ ID NO: 1284955 - RNA, 20 nt, Human
gccuggcagccgugccuuca

SEQ ID NO: 1284956 - RNA, 21 nt, Human
gccuggcagccgugccuucag

SEQ ID NO: 1284957 - RNA, 18 nt, Human
gccuggcccaccccaccc

SEQ ID NO: 1284958 - RNA, 16 nt, Human
gccuggccccaugguc

SEQ ID NO: 1284959 - RNA, 16 nt, Human
gccugggcaggaggga

SEQ ID NO: 1284960 - RNA, 13 nt, Human
gccugggcagugg

SEQ ID NO: 1284961 - RNA, 14 nt, Human
gccugggcagugga

SEQ ID NO: 1284962 - RNA, 16 nt, Human
gccugggccgcugcca

SEQ ID NO: 1284963 - RNA, 13 nt, Human
gccaccugucugu

SEQ ID NO: 1284964 - RNA, 12 nt, Human
gccaccugucug

SEQ ID NO: 1284965 - RNA, 10 nt, Human
gccaccuguc

SEQ ID NO: 1284966 - RNA, 15 nt, Human
gccaccugucugucu

SEQ ID NO: 1284967 - RNA, 14 nt, Human
gccaccugucuguc

SEQ ID NO: 1284968 - RNA, 11 nt, Human
gccaccugggu

SEQ ID NO: 1284969 - RNA, 18 nt, Human
gccaccuggaccccugca

SEQ ID NO: 1284970 - RNA, 13 nt, Human
gccaccuggaccc

SEQ ID NO: 1284971 - RNA, 14 nt, Human
gccaccuggacccc

SEQ ID NO: 1284972 - RNA, 15 nt, Human
gccaccuggaccccu

SEQ ID NO: 1284973 - RNA, 16 nt, Human
gccaccuggaccccug

SEQ ID NO: 1284974 - RNA, 19 nt, Human
gccaccuggaccccugcau

SEQ ID NO: 1284975 - RNA, 20 nt, Human
gccaccuggcucucaccucu

SEQ ID NO: 1284976 - RNA, 12 nt, Human
gccaccuggacc

SEQ ID NO: 1284977 - RNA, 18 nt, Human
gccacggggacucagccc

SEQ ID NO: 1284978 - RNA, 23 nt, Human
gccacgggugccagaagcuacug

SEQ ID NO: 1284979 - RNA, 16 nt, Human
gccacgcuccagcugc

SEQ ID NO: 1284980 - RNA, 20 nt, Human
gccacgcccaacuaauuuuu

SEQ ID NO: 1284981 - RNA, 13 nt, Human
gccacgcuccagc

SEQ ID NO: 1284982 - RNA, 14 nt, Human
gccacgcuccagcu

SEQ ID NO: 1284983 - RNA, 15 nt, Human
gccacgcuccagcug

SEQ ID NO: 1284984 - RNA, 17 nt, Human
gccacgcuccagcugcc

SEQ ID NO: 1284985 - RNA, 16 nt, Human
gccaccugaauaaaga

SEQ ID NO: 1284986 - RNA, 17 nt, Human
gccaccucuaacagcac

SEQ ID NO: 1284987 - RNA, 18 nt, Human
gccaccucuaacagcacc

SEQ ID NO: 1284988 - RNA, 19 nt, Human
gccaccucuaacagcacca

SEQ ID NO: 1284989 - RNA, 21 nt, Human
gccaccucuaacagcaccaaa

SEQ ID NO: 1284990 - RNA, 17 nt, Human
gccaccgugccuggcca

SEQ ID NO: 1284991 - RNA, 22 nt, Human
gccaccgugccuggccacgccc

SEQ ID NO: 1284992 - RNA, 23 nt, Human
gccaccucagaccccggggugag

SEQ ID NO: 1284993 - RNA, 18 nt, Human
gccacaguagucuugaug

SEQ ID NO: 1284994 - RNA, 14 nt, Human
gccacaguuccccu

SEQ ID NO: 1284995 - RNA, 15 nt, Human
gccacaguuccccua

SEQ ID NO: 1284996 - RNA, 15 nt, Human
gccacaucaaagagg

SEQ ID NO: 1284997 - RNA, 23 nt, Human
gccacuccucugacucagggcuc

SEQ ID NO: 1284998 - RNA, 13 nt, Human
gccacuccuuccu

SEQ ID NO: 1284999 - RNA, 14 nt, Human
gccacuccuuccug

SEQ ID NO: 1285000 - RNA, 15 nt, Human
gccacuccuuccugc

SEQ ID NO: 1285001 - RNA, 17 nt, Human
gccacuccuuccugccc

SEQ ID NO: 1285002 - RNA, 18 nt, Human
gccacuccuuccugcccc

SEQ ID NO: 1285003 - RNA, 21 nt, Human
gccagacuucccacggcuccu

SEQ ID NO: 1285004 - RNA, 12 nt, Human
gcauuugugaaa

SEQ ID NO: 1285005 - RNA, 18 nt, Human
gccaagggaaccuguguc

SEQ ID NO: 1285006 - RNA, 19 nt, Human
gccaagggaaccugugucc

SEQ ID NO: 1285007 - RNA, 21 nt, Human
gccaagggauggacaucuugu

SEQ ID NO: 1285008 - RNA, 22 nt, Human
gccaagggcaacagaucaguaa

SEQ ID NO: 1285009 - RNA, 19 nt, Human
gccaagggcauaaauuauu

SEQ ID NO: 1285010 - RNA, 16 nt, Human
gccaagggcuuuguuu

SEQ ID NO: 1285011 - RNA, 18 nt, Human
gccaaggggcuucagguc

SEQ ID NO: 1285012 - RNA, 21 nt, Human
gccaagggccgacuaagagaa

SEQ ID NO: 1285013 - RNA, 13 nt, Human
gccaagguguccu

SEQ ID NO: 1285014 - RNA, 14 nt, Human
gccaagguguccua

SEQ ID NO: 1285015 - RNA, 16 nt, Human
gccaagguguccuaca

SEQ ID NO: 1285016 - RNA, 18 nt, Human
gccaagguguccuacaga

SEQ ID NO: 1285017 - RNA, 19 nt, Human
gccaagguguccuacagaa

SEQ ID NO: 1285018 - RNA, 20 nt, Human
gccaagguguccuacagaaa

SEQ ID NO: 1285019 - RNA, 21 nt, Human
gccaagguguccuacagaaaa

SEQ ID NO: 1285020 - RNA, 20 nt, Human
gccaagguuuuauaaggcug

SEQ ID NO: 1285021 - RNA, 20 nt, Human
gccaauaauaauaccucccu

SEQ ID NO: 1285022 - RNA, 16 nt, Human
gccaauagugucaucc

SEQ ID NO: 1285023 - RNA, 23 nt, Human
gccaagguguccuacagaaaaac

SEQ ID NO: 1285024 - RNA, 15 nt, Human
gccaaguccaggucc

SEQ ID NO: 1285025 - RNA, 16 nt, Human
gccaaguccagguccu

SEQ ID NO: 1285026 - RNA, 17 nt, Human
gccaaguccagguccug

SEQ ID NO: 1285027 - RNA, 18 nt, Human
gccaaguccagguccugg

SEQ ID NO: 1285028 - RNA, 19 nt, Human
gccaaguccagguccuggu

SEQ ID NO: 1285029 - RNA, 21 nt, Human
gccaaguccagguccuggugg

SEQ ID NO: 1285030 - RNA, 22 nt, Human
gccaaguccagguccugguggg

SEQ ID NO: 1285031 - RNA, 12 nt, Human
gccaaguuccuc

SEQ ID NO: 1285032 - RNA, 16 nt, Human
gccaaguuccucuaac

SEQ ID NO: 1285033 - RNA, 16 nt, Human
gccaauggagacuguc

SEQ ID NO: 1285034 - RNA, 19 nt, Human
gccaauggagacugucuca

SEQ ID NO: 1285035 - RNA, 21 nt, Human
gccaauggagacugucucaag

SEQ ID NO: 1285036 - RNA, 21 nt, Human
gccaaucccucaccuucugag

SEQ ID NO: 1285037 - RNA, 22 nt, Human
gccaaucccucaccuucugagu

SEQ ID NO: 1285038 - RNA, 21 nt, Human
gccaaugcaccuaaagaaaaa

SEQ ID NO: 1285039 - RNA, 19 nt, Human
gccaaugcaccuaaagaaa

SEQ ID NO: 1285040 - RNA, 18 nt, Human
gccaauauuaaaucugcu

SEQ ID NO: 1285041 - RNA, 22 nt, Human
gccaauauuaguaggauuuuug

SEQ ID NO: 1285042 - RNA, 23 nt, Human
gccacacuucaggcucuucuccu

SEQ ID NO: 1285043 - RNA, 19 nt, Human
gccacacuucaaacuacuu

SEQ ID NO: 1285044 - RNA, 16 nt, Human
gccacacuucucagga

SEQ ID NO: 1285045 - RNA, 17 nt, Human
gccacacuucucaggac

SEQ ID NO: 1285046 - RNA, 19 nt, Human
gccacacuucucaggacac

SEQ ID NO: 1285047 - RNA, 20 nt, Human
gccacacuucaggcucuucu

SEQ ID NO: 1285048 - RNA, 22 nt, Human
gccacacuucaggcucuucucc

SEQ ID NO: 1285049 - RNA, 19 nt, Human
gccacacucagcacaaggc

SEQ ID NO: 1285050 - RNA, 17 nt, Human
gccacacgagaaccuga

SEQ ID NO: 1285051 - RNA, 13 nt, Human
gccacaccaggau

SEQ ID NO: 1285052 - RNA, 16 nt, Human
gccacaccaggauaga

SEQ ID NO: 1285053 - RNA, 13 nt, Human
gccacacucagca

SEQ ID NO: 1285054 - RNA, 16 nt, Human
gccacacucagcacaa

SEQ ID NO: 1285055 - RNA, 17 nt, Human
gccacacucagcacaag

SEQ ID NO: 1285056 - RNA, 22 nt, Human
gccacacuucucaggacacagg

SEQ ID NO: 1285057 - RNA, 23 nt, Human
gccacacuucucaggacacaggc

SEQ ID NO: 1285058 - RNA, 12 nt, Human
gccacagccagg

SEQ ID NO: 1285059 - RNA, 14 nt, Human
gccacagccagggg

SEQ ID NO: 1285060 - RNA, 14 nt, Human
gccacagcccuguc

SEQ ID NO: 1285061 - RNA, 15 nt, Human
gccacagcccuguca

SEQ ID NO: 1285062 - RNA, 21 nt, Human
gccacagcccugucagcauga

SEQ ID NO: 1285063 - RNA, 13 nt, Human
gccacagcccuuu

SEQ ID NO: 1285064 - RNA, 21 nt, Human
gccacagccuccccugccagg

SEQ ID NO: 1285065 - RNA, 16 nt, Human
gccacagccuccccug

SEQ ID NO: 1285066 - RNA, 20 nt, Human
gccacagcccuuuugucucu

SEQ ID NO: 1285067 - RNA, 10 nt, Human
gccacagcuu

SEQ ID NO: 1285068 - RNA, 12 nt, Human
gccacagcuuuu

SEQ ID NO: 1285069 - RNA, 13 nt, Human
gccacagcuuuug

SEQ ID NO: 1285070 - RNA, 15 nt, Human
gccacagcuuuugca

SEQ ID NO: 1285071 - RNA, 18 nt, Human
gccacagcuuuugcaacu

SEQ ID NO: 1285072 - RNA, 16 nt, Human
gccacagcuuuugcaa

SEQ ID NO: 1285073 - RNA, 15 nt, Human
gccacaaaaacaggu

SEQ ID NO: 1285074 - RNA, 15 nt, Human
gccaauucagacagg

SEQ ID NO: 1285075 - RNA, 17 nt, Human
gccaauucagacaggca

SEQ ID NO: 1285076 - RNA, 18 nt, Human
gccaauucagacaggcaa

SEQ ID NO: 1285077 - RNA, 13 nt, Human
gccaauuccuaua

SEQ ID NO: 1285078 - RNA, 20 nt, Human
gccaauuucaaguuccaagu

SEQ ID NO: 1285079 - RNA, 13 nt, Human
gccacacagcugc

SEQ ID NO: 1285080 - RNA, 14 nt, Human
gccacacagcugcc

SEQ ID NO: 1285081 - RNA, 15 nt, Human
gccacacaguauuuu

SEQ ID NO: 1285082 - RNA, 15 nt, Human
gccacacagcugccg

SEQ ID NO: 1285083 - RNA, 21 nt, Human
gccacaccaggauagagacug

SEQ ID NO: 1285084 - RNA, 21 nt, Human
gccacaaggacuuccugucca

SEQ ID NO: 1285085 - RNA, 21 nt, Human
gccacaaugaacaucccuuuu

SEQ ID NO: 1285086 - RNA, 14 nt, Human
gccacaaggacuuc

SEQ ID NO: 1285087 - RNA, 17 nt, Human
gccacaaggacuuccug

SEQ ID NO: 1285088 - RNA, 18 nt, Human
gccacaaggacuuccugu

SEQ ID NO: 1285089 - RNA, 19 nt, Human
gccacaaggacuuccuguc

SEQ ID NO: 1285090 - RNA, 19 nt, Human
gccaugggcacugugggua

SEQ ID NO: 1285091 - RNA, 15 nt, Human
gccaugggaggccuu

SEQ ID NO: 1285092 - RNA, 14 nt, Human
gccaugggaggccu

SEQ ID NO: 1285093 - RNA, 23 nt, Human
gccaugggacagggaggacgcuc

SEQ ID NO: 1285094 - RNA, 16 nt, Human
gccauggacucugucc

SEQ ID NO: 1285095 - RNA, 17 nt, Human
gccauggacucuguccu

SEQ ID NO: 1285096 - RNA, 18 nt, Human
gccauggacucuguccug

SEQ ID NO: 1285097 - RNA, 12 nt, Human
gccaugggaggc

SEQ ID NO: 1285098 - RNA, 13 nt, Human
gccaugcugaggc

SEQ ID NO: 1285099 - RNA, 14 nt, Human
gccaugcugaggcc

SEQ ID NO: 1285100 - RNA, 17 nt, Human
gccaugcugaggccugg

SEQ ID NO: 1285101 - RNA, 18 nt, Human
gccaugcugaggccuggg

SEQ ID NO: 1285102 - RNA, 19 nt, Human
gccaugcugaggccugggc

SEQ ID NO: 1285103 - RNA, 20 nt, Human
gccaugcugaggccugggcc

SEQ ID NO: 1285104 - RNA, 21 nt, Human
gccaugcugaggccugggccg

SEQ ID NO: 1285105 - RNA, 19 nt, Human
gccauggacucuguccuga

SEQ ID NO: 1285106 - RNA, 13 nt, Human
gccauuuuuacau

SEQ ID NO: 1285107 - RNA, 15 nt, Human
gccauuuuuacaucu

SEQ ID NO: 1285108 - RNA, 14 nt, Human
gcccaaccugcucu

SEQ ID NO: 1285109 - RNA, 19 nt, Human
gcccaaguucaugcagcug

SEQ ID NO: 1285110 - RNA, 20 nt, Human
gcccaaguucaugcagcugu

SEQ ID NO: 1285111 - RNA, 16 nt, Human
gcccaacccuucccuc

SEQ ID NO: 1285112 - RNA, 12 nt, Human
gccaucugcucc

SEQ ID NO: 1285113 - RNA, 22 nt, Human
gccaugacccugccucucccag

SEQ ID NO: 1285114 - RNA, 23 nt, Human
gccaugacccugccucucccagg

SEQ ID NO: 1285115 - RNA, 23 nt, Human
gccaugagaugauacauccaaag

SEQ ID NO: 1285116 - RNA, 21 nt, Human
gccaucugcgugacaauaaaa

SEQ ID NO: 1285117 - RNA, 17 nt, Human
gccaguauuuuaaaaua

SEQ ID NO: 1285118 - RNA, 13 nt, Human
gccagugcccuga

SEQ ID NO: 1285119 - RNA, 14 nt, Human
gccagugcccugag

SEQ ID NO: 1285120 - RNA, 15 nt, Human
gccagugcccugagc

SEQ ID NO: 1285121 - RNA, 18 nt, Human
gccagugcccugauccca

SEQ ID NO: 1285122 - RNA, 16 nt, Human
gccagugcccugagcc

SEQ ID NO: 1285123 - RNA, 17 nt, Human
gccagugcccugagcca

SEQ ID NO: 1285124 - RNA, 18 nt, Human
gccagugcccugagccag

SEQ ID NO: 1285125 - RNA, 14 nt, Human
gccagggagcgagu

SEQ ID NO: 1285126 - RNA, 19 nt, Human
gccagggagagcccaggag

SEQ ID NO: 1285127 - RNA, 20 nt, Human
gccagggagagcccaggagc

SEQ ID NO: 1285128 - RNA, 21 nt, Human
gccagggagagcccaggagcu

SEQ ID NO: 1285129 - RNA, 22 nt, Human
gccagggagagcccaggagcuc

SEQ ID NO: 1285130 - RNA, 13 nt, Human
gccagggagagcc

SEQ ID NO: 1285131 - RNA, 15 nt, Human
gccagggagagccca

SEQ ID NO: 1285132 - RNA, 16 nt, Human
gccagggagagcccag

SEQ ID NO: 1285133 - RNA, 17 nt, Human
gccagggagagcccagg

SEQ ID NO: 1285134 - RNA, 20 nt, Human
gccagggcaaugaugaauga

SEQ ID NO: 1285135 - RNA, 15 nt, Human
gccagggcagaguga

SEQ ID NO: 1285136 - RNA, 16 nt, Human
gccagggcagagugag

SEQ ID NO: 1285137 - RNA, 21 nt, Human
gccagggcagagugagaccca

SEQ ID NO: 1285138 - RNA, 14 nt, Human
gccagggcagggcc

SEQ ID NO: 1285139 - RNA, 19 nt, Human
gccagggcagggccccagg

SEQ ID NO: 1285140 - RNA, 15 nt, Human
gccagggccacgcuc

SEQ ID NO: 1285141 - RNA, 19 nt, Human
gccagggccacgcuccagc

SEQ ID NO: 1285142 - RNA, 22 nt, Human
gccagggccacgcuccagcugc

SEQ ID NO: 1285143 - RNA, 20 nt, Human
gccagggccacgcuccagcu

SEQ ID NO: 1285144 - RNA, 13 nt, Human
gccagggccccuc

SEQ ID NO: 1285145 - RNA, 22 nt, Human
gccagggccccucacccugccu

SEQ ID NO: 1285146 - RNA, 14 nt, Human
gccagggccccucu

SEQ ID NO: 1285147 - RNA, 15 nt, Human
gccagggccccucuc

SEQ ID NO: 1285148 - RNA, 14 nt, Human
gccaggggagcaga

SEQ ID NO: 1285149 - RNA, 21 nt, Human
gccaggggagcagaggggcag

SEQ ID NO: 1285150 - RNA, 20 nt, Human
gccaggggagcagaggggca

SEQ ID NO: 1285151 - RNA, 20 nt, Human
gccagggggagcugggccug

SEQ ID NO: 1285152 - RNA, 19 nt, Human
gccaggggggugaggagcu

SEQ ID NO: 1285153 - RNA, 20 nt, Human
gccaggggggugaggagcug

SEQ ID NO: 1285154 - RNA, 21 nt, Human
gccaggggggugaggagcugg

SEQ ID NO: 1285155 - RNA, 22 nt, Human
gccaggggggugaggagcuggg

SEQ ID NO: 1285156 - RNA, 22 nt, Human
gccagggggagcugggccuggu

SEQ ID NO: 1285157 - RNA, 19 nt, Human
gccagggucuccagaaagc

SEQ ID NO: 1285158 - RNA, 15 nt, Human
gccagggucuccaga

SEQ ID NO: 1285159 - RNA, 23 nt, Human
gccagguucuccguuagcuccug

SEQ ID NO: 1285160 - RNA, 15 nt, Human
gccaguauuuuaaaa

SEQ ID NO: 1285161 - RNA, 19 nt, Human
gccaggcuggagugcagug

SEQ ID NO: 1285162 - RNA, 18 nt, Human
gccaggcuggagugcagu

SEQ ID NO: 1285163 - RNA, 22 nt, Human
gccaggcuggucucgaacuccu

SEQ ID NO: 1285164 - RNA, 14 nt, Human
gccagggagaagcu

SEQ ID NO: 1285165 - RNA, 15 nt, Human
gccagggagaagcuc

SEQ ID NO: 1285166 - RNA, 16 nt, Human
gccagggagaagcucc

SEQ ID NO: 1285167 - RNA, 20 nt, Human
gccagggagaagcuccucuc

SEQ ID NO: 1285168 - RNA, 13 nt, Human
gccaggcuggguc

SEQ ID NO: 1285169 - RNA, 16 nt, Human
gccaggcuggagugca

SEQ ID NO: 1285170 - RNA, 22 nt, Human
gccaggcugcucuugaacuccu

SEQ ID NO: 1285171 - RNA, 19 nt, Human
gccagauuuuccugaaaac

SEQ ID NO: 1285172 - RNA, 13 nt, Human
gccaggcugcucu

SEQ ID NO: 1285173 - RNA, 14 nt, Human
gccaggcugcucuu

SEQ ID NO: 1285174 - RNA, 14 nt, Human
gccagauccagccu

SEQ ID NO: 1285175 - RNA, 11 nt, Human
gccagauccag

SEQ ID NO: 1285176 - RNA, 16 nt, Human
gcccagcccuaaacau

SEQ ID NO: 1285177 - RNA, 21 nt, Human
gcccagcuugaaaccuucacu

SEQ ID NO: 1285178 - RNA, 19 nt, Human
gcccagcugggucaggcag

SEQ ID NO: 1285179 - RNA, 20 nt, Human
gcccagcugggucaggcagg

SEQ ID NO: 1285180 - RNA, 13 nt, Human
gcccagcuggguc

SEQ ID NO: 1285181 - RNA, 14 nt, Human
gcccagcuggguca

SEQ ID NO: 1285182 - RNA, 15 nt, Human
gcccagcugggucag

SEQ ID NO: 1285183 - RNA, 18 nt, Human
gcccagcugggucaggca

SEQ ID NO: 1285184 - RNA, 21 nt, Human
gcccagcggcuugccugccug

SEQ ID NO: 1285185 - RNA, 19 nt, Human
gcccagccgacccccucuc

SEQ ID NO: 1285186 - RNA, 13 nt, Human
gcccagccgaccc

SEQ ID NO: 1285187 - RNA, 23 nt, Human
gcccagccuuuguuccccacugg

SEQ ID NO: 1285188 - RNA, 17 nt, Human
gcccagccuuuguuccc

SEQ ID NO: 1285189 - RNA, 15 nt, Human
gcccaggcugggaac

SEQ ID NO: 1285190 - RNA, 16 nt, Human
gcccaggcugguuucg

SEQ ID NO: 1285191 - RNA, 13 nt, Human
gcccaggcuggga

SEQ ID NO: 1285192 - RNA, 14 nt, Human
gcccaaugaaauga

SEQ ID NO: 1285193 - RNA, 16 nt, Human
gcccagagacccagcg

SEQ ID NO: 1285194 - RNA, 14 nt, Human
gcccagagcccagc

SEQ ID NO: 1285195 - RNA, 15 nt, Human
gcccagagcccagcu

SEQ ID NO: 1285196 - RNA, 16 nt, Human
gcccagagcccagcuc

SEQ ID NO: 1285197 - RNA, 10 nt, Human
gcccagagac

SEQ ID NO: 1285198 - RNA, 20 nt, Human
gcccagagacauacuugaag

SEQ ID NO: 1285199 - RNA, 19 nt, Human
gcccagagacccaagcugc

SEQ ID NO: 1285200 - RNA, 23 nt, Human
gcccagagacauacuugaagggc

SEQ ID NO: 1285201 - RNA, 23 nt, Human
gcccagagacccagcggacacac

SEQ ID NO: 1285202 - RNA, 17 nt, Human
gcccagagcccagcucc

SEQ ID NO: 1285203 - RNA, 18 nt, Human
gcccagagcccagcucca

SEQ ID NO: 1285204 - RNA, 14 nt, Human
gcccagagggucug

SEQ ID NO: 1285205 - RNA, 15 nt, Human
gcccagagggucugg

SEQ ID NO: 1285206 - RNA, 19 nt, Human
gcccagagggucugggggc

SEQ ID NO: 1285207 - RNA, 18 nt, Human
gcccagagggucuggggg

SEQ ID NO: 1285208 - RNA, 19 nt, Human
gcccagcacaugugcugcc

SEQ ID NO: 1285209 - RNA, 20 nt, Human
gcccagcacugcuugaggaa

SEQ ID NO: 1285210 - RNA, 21 nt, Human
gcccagcacugcuugaggaaa

SEQ ID NO: 1285211 - RNA, 12 nt, Human
gcccagccagcg

SEQ ID NO: 1285212 - RNA, 13 nt, Human
gcccagccagcgu

SEQ ID NO: 1285213 - RNA, 14 nt, Human
gcccagccagcguc

SEQ ID NO: 1285214 - RNA, 22 nt, Human
gcccagccagcgucggucugug

SEQ ID NO: 1285215 - RNA, 16 nt, Human
gcccagcccauggaga

SEQ ID NO: 1285216 - RNA, 17 nt, Human
gcccagccccacuccuc

SEQ ID NO: 1285217 - RNA, 23 nt, Human
gcccagccccacuccucugcuga

SEQ ID NO: 1285218 - RNA, 18 nt, Human
gcccagccccacuccucu

SEQ ID NO: 1285219 - RNA, 15 nt, Human
gcaggucccuaauaa

SEQ ID NO: 1285220 - RNA, 14 nt, Human
gcaggucccuaaua

SEQ ID NO: 1285221 - RNA, 19 nt, Human
gcagggguuggggaaacag

SEQ ID NO: 1285222 - RNA, 18 nt, Human
gcagggcucuccuggcuu

SEQ ID NO: 1285223 - RNA, 19 nt, Human
gcaggccgugacgucuggg

SEQ ID NO: 1285224 - RNA, 20 nt, Human
gcaggccgugacgucugggu

SEQ ID NO: 1285225 - RNA, 13 nt, Human
gcagggauguggg

SEQ ID NO: 1285226 - RNA, 22 nt, Human
gcagggauguggguuccacaga

SEQ ID NO: 1285227 - RNA, 19 nt, Human
gcagggauuaaccucugca

SEQ ID NO: 1285228 - RNA, 22 nt, Human
gcagggauuaaccucugcacua

SEQ ID NO: 1285229 - RNA, 23 nt, Human
gcagggauguggguuccacagac

SEQ ID NO: 1285230 - RNA, 12 nt, Human
gcagggcucucc

SEQ ID NO: 1285231 - RNA, 14 nt, Human
gcagggcucuccug

SEQ ID NO: 1285232 - RNA, 15 nt, Human
gcagggcucuccugg

SEQ ID NO: 1285233 - RNA, 16 nt, Human
gcagggcucuccuggc

SEQ ID NO: 1285234 - RNA, 13 nt, Human
gcaggacugaugu

SEQ ID NO: 1285235 - RNA, 14 nt, Human
gcaggacugauguc

SEQ ID NO: 1285236 - RNA, 18 nt, Human
gcaggacugaugucuccu

SEQ ID NO: 1285237 - RNA, 19 nt, Human
gcaggacugaugucuccua

SEQ ID NO: 1285238 - RNA, 23 nt, Human
gcaggacugaugucuccuaagca

SEQ ID NO: 1285239 - RNA, 21 nt, Human
gcaggcaucggggagccggga

SEQ ID NO: 1285240 - RNA, 22 nt, Human
gcaggcaucggggagccgggag

SEQ ID NO: 1285241 - RNA, 15 nt, Human
gcaggcagggcucuc

SEQ ID NO: 1285242 - RNA, 16 nt, Human
gcaggcagggcucucc

SEQ ID NO: 1285243 - RNA, 19 nt, Human
gcaggcagggcucuccugg

SEQ ID NO: 1285244 - RNA, 20 nt, Human
gcaggcagggcucuccuggc

SEQ ID NO: 1285245 - RNA, 22 nt, Human
gcaggcagggcucuccuggcuu

SEQ ID NO: 1285246 - RNA, 18 nt, Human
gcaggcaggaacaaacag

SEQ ID NO: 1285247 - RNA, 22 nt, Human
gcaggcaggaacaaacagggcu

SEQ ID NO: 1285248 - RNA, 15 nt, Human
gcaggcaggcuccca

SEQ ID NO: 1285249 - RNA, 18 nt, Human
gcaggcaggcucccaggg

SEQ ID NO: 1285250 - RNA, 17 nt, Human
gcaggcaggcucccagg

SEQ ID NO: 1285251 - RNA, 12 nt, Human
gcaggcagggcu

SEQ ID NO: 1285252 - RNA, 13 nt, Human
gcaggcagggcuc

SEQ ID NO: 1285253 - RNA, 14 nt, Human
gcaggcagggcucu

SEQ ID NO: 1285254 - RNA, 23 nt, Human
gcaggcaucggggagccgggagc

SEQ ID NO: 1285255 - RNA, 20 nt, Human
gcaggccaagucaggcccuu

SEQ ID NO: 1285256 - RNA, 20 nt, Human
gcaggccacacuucaaacua

SEQ ID NO: 1285257 - RNA, 21 nt, Human
gcaggccacacuucaaacuac

SEQ ID NO: 1285258 - RNA, 23 nt, Human
gcaggccacacuucaaacuacuu

SEQ ID NO: 1285259 - RNA, 17 nt, Human
gcaggccaccuggcucu

SEQ ID NO: 1285260 - RNA, 18 nt, Human
gcaggccaccuggcucuc

SEQ ID NO: 1285261 - RNA, 21 nt, Human
gcaggccaccuggcucucacc

SEQ ID NO: 1285262 - RNA, 22 nt, Human
gcaggccaccuggcucucaccu

SEQ ID NO: 1285263 - RNA, 22 nt, Human
gcaggccagcugugguuuucuu

SEQ ID NO: 1285264 - RNA, 12 nt, Human
gcaggcccuggc

SEQ ID NO: 1285265 - RNA, 14 nt, Human
gcaggcccuggccu

SEQ ID NO: 1285266 - RNA, 15 nt, Human
gcaggcccuggccuc

SEQ ID NO: 1285267 - RNA, 16 nt, Human
gcaggcccuggccucc

SEQ ID NO: 1285268 - RNA, 19 nt, Human
gcaggucccuaauaaagcu

SEQ ID NO: 1285269 - RNA, 18 nt, Human
gcaggucccuaauaaagc

SEQ ID NO: 1285270 - RNA, 17 nt, Human
gcaggucccuaauaaag

SEQ ID NO: 1285271 - RNA, 16 nt, Human
gcaggucccuaauaaa

SEQ ID NO: 1285272 - RNA, 21 nt, Human
gcaggucccuaauaaagcugu

SEQ ID NO: 1285273 - RNA, 20 nt, Human
gcaggucccuaauaaagcug

SEQ ID NO: 1285274 - RNA, 23 nt, Human
gcaggucccuaauaaagcugugu

SEQ ID NO: 1285275 - RNA, 21 nt, Human
gcaggguccucuucugggccu

SEQ ID NO: 1285276 - RNA, 17 nt, Human
gcagugggaaaaaugua

SEQ ID NO: 1285277 - RNA, 19 nt, Human
gcagugggaaaaauguagg

SEQ ID NO: 1285278 - RNA, 21 nt, Human
gcagugggacagggcauggcc

SEQ ID NO: 1285279 - RNA, 20 nt, Human
gcaguggcugguccagggcu

SEQ ID NO: 1285280 - RNA, 17 nt, Human
gcagggucuagaaggcu

SEQ ID NO: 1285281 - RNA, 14 nt, Human
gcagugggaaaaau

SEQ ID NO: 1285282 - RNA, 14 nt, Human
gcaguggcuggucc

SEQ ID NO: 1285283 - RNA, 15 nt, Human
gcaguggcuggucca

SEQ ID NO: 1285284 - RNA, 18 nt, Human
gcaguggcugguccaggg

SEQ ID NO: 1285285 - RNA, 19 nt, Human
gcaguggcugguccagggc

SEQ ID NO: 1285286 - RNA, 19 nt, Human
gcaguucccacauuaaaga

SEQ ID NO: 1285287 - RNA, 21 nt, Human
gcaguucccacauuaaagaag

SEQ ID NO: 1285288 - RNA, 22 nt, Human
gcaguucccacauuaaagaaga

SEQ ID NO: 1285289 - RNA, 15 nt, Human
gcaucaucucagcuc

SEQ ID NO: 1285290 - RNA, 23 nt, Human
gcaucagugcccuccaggauaga

SEQ ID NO: 1285291 - RNA, 12 nt, Human
gcaucaugccuc

SEQ ID NO: 1285292 - RNA, 13 nt, Human
gcaucaugccucu

SEQ ID NO: 1285293 - RNA, 14 nt, Human
gcaucaugccucug

SEQ ID NO: 1285294 - RNA, 15 nt, Human
gcaucaugccucuga

SEQ ID NO: 1285295 - RNA, 16 nt, Human
gcaucaugccucugag

SEQ ID NO: 1285296 - RNA, 17 nt, Human
gcaucaugccucugagg

SEQ ID NO: 1285297 - RNA, 18 nt, Human
gcaucaugccucugaggc

SEQ ID NO: 1285298 - RNA, 20 nt, Human
gcaucaugccucugaggcca

SEQ ID NO: 1285299 - RNA, 21 nt, Human
gcaucaugccucugaggccag

SEQ ID NO: 1285300 - RNA, 13 nt, Human
gcaucauggcuau

SEQ ID NO: 1285301 - RNA, 17 nt, Human
gcaucauuauuuaugua

SEQ ID NO: 1285302 - RNA, 19 nt, Human
gcaucauuauuuauguauu

SEQ ID NO: 1285303 - RNA, 20 nt, Human
gcaucauuauuuauguauug

SEQ ID NO: 1285304 - RNA, 12 nt, Human
gcaucucagccc

SEQ ID NO: 1285305 - RNA, 20 nt, Human
gcaucuaguuccccuguuua

SEQ ID NO: 1285306 - RNA, 13 nt, Human
gcaucucagccca

SEQ ID NO: 1285307 - RNA, 14 nt, Human
gcaucucagcccac

SEQ ID NO: 1285308 - RNA, 22 nt, Human
gcaucuaguuccccuguuuauu

SEQ ID NO: 1285309 - RNA, 15 nt, Human
gcaucagugcccucc

SEQ ID NO: 1285310 - RNA, 19 nt, Human
gcaucaggccuagaggccu

SEQ ID NO: 1285311 - RNA, 12 nt, Human
gcaucaggguua

SEQ ID NO: 1285312 - RNA, 22 nt, Human
gcaucugggccuuggccuggag

SEQ ID NO: 1285313 - RNA, 21 nt, Human
gcaucugggccuuggccugga

SEQ ID NO: 1285314 - RNA, 16 nt, Human
gcaucugucccccuuu

SEQ ID NO: 1285315 - RNA, 15 nt, Human
gcaucucagcccaca

SEQ ID NO: 1285316 - RNA, 22 nt, Human
gcaucucagcucaucuucacug

SEQ ID NO: 1285317 - RNA, 17 nt, Human
gcaucucaguaugaauu

SEQ ID NO: 1285318 - RNA, 14 nt, Human
gcaucucagcucau

SEQ ID NO: 1285319 - RNA, 17 nt, Human
gcaucuccaagcagcuu

SEQ ID NO: 1285320 - RNA, 19 nt, Human
gcaucuccaagcagcuuag

SEQ ID NO: 1285321 - RNA, 20 nt, Human
gcaucuccaagcagcuuaga

SEQ ID NO: 1285322 - RNA, 12 nt, Human
gcaucucccaga

SEQ ID NO: 1285323 - RNA, 13 nt, Human
gcaucucccagau

SEQ ID NO: 1285324 - RNA, 21 nt, Human
gcaucucccagauaaugugaa

SEQ ID NO: 1285325 - RNA, 18 nt, Human
gcaucucuaccuucuccc

SEQ ID NO: 1285326 - RNA, 22 nt, Human
gcaucucuaccuucuccccagc

SEQ ID NO: 1285327 - RNA, 13 nt, Human
gcaucucugggcu

SEQ ID NO: 1285328 - RNA, 14 nt, Human
gcaucucugggcug

SEQ ID NO: 1285329 - RNA, 16 nt, Human
gcaucucugggcugga

SEQ ID NO: 1285330 - RNA, 20 nt, Human
gcaucucugggcuggaugag

SEQ ID NO: 1285331 - RNA, 23 nt, Human
gcaucucugggcuggaugagcuc

SEQ ID NO: 1285332 - RNA, 15 nt, Human
gcaucuggagagaac

SEQ ID NO: 1285333 - RNA, 16 nt, Human
gcaucuggagagaaca

SEQ ID NO: 1285334 - RNA, 15 nt, Human
gcaucuggccuggcc

SEQ ID NO: 1285335 - RNA, 16 nt, Human
gcaucuggccuggcca

SEQ ID NO: 1285336 - RNA, 17 nt, Human
gcaucuggccuggccag

SEQ ID NO: 1285337 - RNA, 18 nt, Human
gcaucuggccuggccagu

SEQ ID NO: 1285338 - RNA, 19 nt, Human
gcaucuggccuggccagug

SEQ ID NO: 1285339 - RNA, 12 nt, Human
gcaucugggccu

SEQ ID NO: 1285340 - RNA, 14 nt, Human
gcaucugggccuug

SEQ ID NO: 1285341 - RNA, 12 nt, Human
gcaucucacucc

SEQ ID NO: 1285342 - RNA, 13 nt, Human
gcauuaugcaauu

SEQ ID NO: 1285343 - RNA, 18 nt, Human
gcauuaugcaauuuuuau

SEQ ID NO: 1285344 - RNA, 19 nt, Human
gcauuaugcaauuuuuaua

SEQ ID NO: 1285345 - RNA, 20 nt, Human
gcauuaugcaauuuuuauau

SEQ ID NO: 1285346 - RNA, 14 nt, Human
gcauuaaauuacag

SEQ ID NO: 1285347 - RNA, 22 nt, Human
gcauuaaauucacaaacuuuua

SEQ ID NO: 1285348 - RNA, 18 nt, Human
gcauuaaauucacaaacu

SEQ ID NO: 1285349 - RNA, 23 nt, Human
gcauuaaauuuuagcaaagauau

SEQ ID NO: 1285350 - RNA, 15 nt, Human
gcauuaaauuacaga

SEQ ID NO: 1285351 - RNA, 21 nt, Human
gcauugaacacaaacuguaaa

SEQ ID NO: 1285352 - RNA, 22 nt, Human
gcauugaacacaaacuguaaau

SEQ ID NO: 1285353 - RNA, 23 nt, Human
gcauugaacacaaacuguaaaua

SEQ ID NO: 1285354 - RNA, 21 nt, Human
gcauugaauggcuauguuuuu

SEQ ID NO: 1285355 - RNA, 16 nt, Human
gcauugacuuucccca

SEQ ID NO: 1285356 - RNA, 16 nt, Human
gcauugagcuugcaug

SEQ ID NO: 1285357 - RNA, 22 nt, Human
gcauugaccgcgacuaauuuca

SEQ ID NO: 1285358 - RNA, 23 nt, Human
gcauugaccgcgacuaauuucaa

SEQ ID NO: 1285359 - RNA, 12 nt, Human
gcauugacuuuc

SEQ ID NO: 1285360 - RNA, 19 nt, Human
gcauugaauggcuauguuu

SEQ ID NO: 1285361 - RNA, 15 nt, Human
gcauugacuuucccc

SEQ ID NO: 1285362 - RNA, 17 nt, Human
gcauugacuuuccccac

SEQ ID NO: 1285363 - RNA, 15 nt, Human
gcacagccucuuaga

SEQ ID NO: 1285364 - RNA, 18 nt, Human
gcacagcaucucagcuca

SEQ ID NO: 1285365 - RNA, 13 nt, Human
gcacagcaucuca

SEQ ID NO: 1285366 - RNA, 22 nt, Human
gcacagccaacacgcaccugcc

SEQ ID NO: 1285367 - RNA, 17 nt, Human
gcacagccaaauuuaaa

SEQ ID NO: 1285368 - RNA, 15 nt, Human
gcacagcagccuggg

SEQ ID NO: 1285369 - RNA, 17 nt, Human
gauugugucccauuccc

SEQ ID NO: 1285370 - RNA, 18 nt, Human
gauugugucccauucccc

SEQ ID NO: 1285371 - RNA, 19 nt, Human
gauugugucccauuccccc

SEQ ID NO: 1285372 - RNA, 20 nt, Human
gauugugucccauuccccca

SEQ ID NO: 1285373 - RNA, 23 nt, Human
gcacagauggauuuguuuggacc

SEQ ID NO: 1285374 - RNA, 14 nt, Human
gcacagauggccag

SEQ ID NO: 1285375 - RNA, 19 nt, Human
gcacagauggccagccccu

SEQ ID NO: 1285376 - RNA, 23 nt, Human
gcacagauggccagccccuuaga

SEQ ID NO: 1285377 - RNA, 22 nt, Human
gcacagcacaaauuaguuauau

SEQ ID NO: 1285378 - RNA, 22 nt, Human
gcacagcagccuggggcuggcc

SEQ ID NO: 1285379 - RNA, 18 nt, Human
gcacagccucuuagaugc

SEQ ID NO: 1285380 - RNA, 11 nt, Human
gcacagcccuu

SEQ ID NO: 1285381 - RNA, 14 nt, Human
gcacagcuugaccu

SEQ ID NO: 1285382 - RNA, 16 nt, Human
gcacagggcaguggga

SEQ ID NO: 1285383 - RNA, 22 nt, Human
gcacagggagugcacauaucca

SEQ ID NO: 1285384 - RNA, 18 nt, Human
gcacagcuugaccugagg

SEQ ID NO: 1285385 - RNA, 19 nt, Human
gcacagcuugaccugaggc

SEQ ID NO: 1285386 - RNA, 20 nt, Human
gcacagcuugaccugaggcu

SEQ ID NO: 1285387 - RNA, 21 nt, Human
gcacagcuugaccugaggcug

SEQ ID NO: 1285388 - RNA, 22 nt, Human
gcacagcuugaccugaggcugu

SEQ ID NO: 1285389 - RNA, 14 nt, Human
gcacaggacaugcg

SEQ ID NO: 1285390 - RNA, 17 nt, Human
gcacagggagugcacau

SEQ ID NO: 1285391 - RNA, 21 nt, Human
gcaccagacacccaggacuua

SEQ ID NO: 1285392 - RNA, 20 nt, Human
gcaccaucucugauuuucaa

SEQ ID NO: 1285393 - RNA, 13 nt, Human
gcacccccugcag

SEQ ID NO: 1285394 - RNA, 14 nt, Human
gcacccccugcagc

SEQ ID NO: 1285395 - RNA, 15 nt, Human
gcacccccugcagcu

SEQ ID NO: 1285396 - RNA, 24 nt, Human
gcacccccugcagcuuguagccag

SEQ ID NO: 1285397 - RNA, 19 nt, Human
gcacccccugcagcuugua

SEQ ID NO: 1285398 - RNA, 22 nt, Human
gcaccaagugcggguccggcag

SEQ ID NO: 1285399 - RNA, 13 nt, Human
gcaccaccaagcc

SEQ ID NO: 1285400 - RNA, 15 nt, Human
gcaccaagcaggaaa

SEQ ID NO: 1285401 - RNA, 14 nt, Human
gcaccaccaagcca

SEQ ID NO: 1285402 - RNA, 17 nt, Human
gcaccaccaagccaagg

SEQ ID NO: 1285403 - RNA, 15 nt, Human
gcaccagacacccag

SEQ ID NO: 1285404 - RNA, 16 nt, Human
gcaccagacacccagg

SEQ ID NO: 1285405 - RNA, 17 nt, Human
gcaccagacacccagga

SEQ ID NO: 1285406 - RNA, 18 nt, Human
gcaccagacacccaggac

SEQ ID NO: 1285407 - RNA, 19 nt, Human
gcaccagacacccaggacu

SEQ ID NO: 1285408 - RNA, 20 nt, Human
gcaccagacacccaggacuu

SEQ ID NO: 1285409 - RNA, 12 nt, Human
gcacagggucug

SEQ ID NO: 1285410 - RNA, 17 nt, Human
gcacagggucugcucuu

SEQ ID NO: 1285411 - RNA, 18 nt, Human
gcacagggucugcucuuu

SEQ ID NO: 1285412 - RNA, 23 nt, Human
gcacagggucugcucuuucucug

SEQ ID NO: 1285413 - RNA, 20 nt, Human
gcaccaaaucaaaaucucuc

SEQ ID NO: 1285414 - RNA, 21 nt, Human
gcaccaaaucaaaaucucucc

SEQ ID NO: 1285415 - RNA, 22 nt, Human
gcaccaaaucaaaaucucucca

SEQ ID NO: 1285416 - RNA, 23 nt, Human
gcaccaaaucaaaaucucuccac

SEQ ID NO: 1285417 - RNA, 16 nt, Human
gcacuggcgaggagag

SEQ ID NO: 1285418 - RNA, 15 nt, Human
gcacuggcgaggaga

SEQ ID NO: 1285419 - RNA, 15 nt, Human
gcacuggccccaccc

SEQ ID NO: 1285420 - RNA, 18 nt, Human
gcacugggaggcuccccu

SEQ ID NO: 1285421 - RNA, 20 nt, Human
gcacugggaggcuccccuuc

SEQ ID NO: 1285422 - RNA, 13 nt, Human
gcacugggcauga

SEQ ID NO: 1285423 - RNA, 15 nt, Human
gcacugggcuccgga

SEQ ID NO: 1285424 - RNA, 22 nt, Human
gcacuguuuucuaguguaucaa

SEQ ID NO: 1285425 - RNA, 21 nt, Human
gcacuguuuucuaguguauca

SEQ ID NO: 1285426 - RNA, 20 nt, Human
gcacuguuuucuaguguauc

SEQ ID NO: 1285427 - RNA, 19 nt, Human
gcacuguuuucuaguguau

SEQ ID NO: 1285428 - RNA, 20 nt, Human
gcacuguucccccugugcag

SEQ ID NO: 1285429 - RNA, 15 nt, Human
gcacuguucccccug

SEQ ID NO: 1285430 - RNA, 18 nt, Human
gcacuguucccccugugc

SEQ ID NO: 1285431 - RNA, 19 nt, Human
gcacuguucccccugugca

SEQ ID NO: 1285432 - RNA, 12 nt, Human
gcacuacauuca

SEQ ID NO: 1285433 - RNA, 16 nt, Human
gcacuacauucauuua

SEQ ID NO: 1285434 - RNA, 17 nt, Human
gcacccucauacacaga

SEQ ID NO: 1285435 - RNA, 20 nt, Human
gcacccucauacacagaaac

SEQ ID NO: 1285436 - RNA, 20 nt, Human
gcacgcggagugaguuuuuu

SEQ ID NO: 1285437 - RNA, 15 nt, Human
gcacgcgugugcagg

SEQ ID NO: 1285438 - RNA, 18 nt, Human
gcacgugguaaaacacuu

SEQ ID NO: 1285439 - RNA, 14 nt, Human
gcacguguguuuuu

SEQ ID NO: 1285440 - RNA, 16 nt, Human
gcacguguguuuuucu

SEQ ID NO: 1285441 - RNA, 18 nt, Human
gcacguguguuuuucuau

SEQ ID NO: 1285442 - RNA, 23 nt, Human
gcacguguguuuuucuauuaaaa

SEQ ID NO: 1285443 - RNA, 19 nt, Human
gcacguguguuuuucuauu

SEQ ID NO: 1285444 - RNA, 18 nt, Human
gcagauguccuugaugcu

SEQ ID NO: 1285445 - RNA, 15 nt, Human
gcagauguaggaggg

SEQ ID NO: 1285446 - RNA, 16 nt, Human
gcagauguaggaggga

SEQ ID NO: 1285447 - RNA, 17 nt, Human
gcagauguaggagggac

SEQ ID NO: 1285448 - RNA, 19 nt, Human
gcagauguaggagggacug

SEQ ID NO: 1285449 - RNA, 13 nt, Human
gcagauguaggag

SEQ ID NO: 1285450 - RNA, 14 nt, Human
gcagauguaggagg

SEQ ID NO: 1285451 - RNA, 23 nt, Human
gcagagguugcagugagccgaga

SEQ ID NO: 1285452 - RNA, 15 nt, Human
gcagauccaggacua

SEQ ID NO: 1285453 - RNA, 18 nt, Human
gcagagguugcagugagc

SEQ ID NO: 1285454 - RNA, 21 nt, Human
gcagagguccacaacacacag

SEQ ID NO: 1285455 - RNA, 23 nt, Human
gcacuguuuucuaguguaucaaa

SEQ ID NO: 1285456 - RNA, 23 nt, Human
gcacuucuuuuucucgcuguccu

SEQ ID NO: 1285457 - RNA, 13 nt, Human
gcagaggggcaga

SEQ ID NO: 1285458 - RNA, 15 nt, Human
gcagaggggcagagg

SEQ ID NO: 1285459 - RNA, 14 nt, Human
gcagaggggcagag

SEQ ID NO: 1285460 - RNA, 20 nt, Human
gcagacucuuuaugcuugca

SEQ ID NO: 1285461 - RNA, 11 nt, Human
gcagacuggcg

SEQ ID NO: 1285462 - RNA, 15 nt, Human
gcagacuucccagcu

SEQ ID NO: 1285463 - RNA, 16 nt, Human
gcagacuucccagcua

SEQ ID NO: 1285464 - RNA, 18 nt, Human
gcagacuucccagcuagg

SEQ ID NO: 1285465 - RNA, 24 nt, Human
gcagcccugcuuugggcugcccug

SEQ ID NO: 1285466 - RNA, 21 nt, Human
gcagcaggaggggggagggaa

SEQ ID NO: 1285467 - RNA, 11 nt, Human
gcagcagccag

SEQ ID NO: 1285468 - RNA, 12 nt, Human
gcagcagccagc

SEQ ID NO: 1285469 - RNA, 13 nt, Human
gcagcagccagcc

SEQ ID NO: 1285470 - RNA, 14 nt, Human
gcagcagccagccc

SEQ ID NO: 1285471 - RNA, 15 nt, Human
gcagcagccagcccu

SEQ ID NO: 1285472 - RNA, 16 nt, Human
gcagcagccagcccug

SEQ ID NO: 1285473 - RNA, 17 nt, Human
gcagcagccagcccugc

SEQ ID NO: 1285474 - RNA, 18 nt, Human
gcagcagccagcccugcc

SEQ ID NO: 1285475 - RNA, 19 nt, Human
gcagcagccagcccugccu

SEQ ID NO: 1285476 - RNA, 20 nt, Human
gcagcagccagcccugccug

SEQ ID NO: 1285477 - RNA, 21 nt, Human
gcagcagccagcccugccugg

SEQ ID NO: 1285478 - RNA, 23 nt, Human
gcagcagccagcccugccuggag

SEQ ID NO: 1285479 - RNA, 22 nt, Human
gcagcagccagcccugccugga

SEQ ID NO: 1285480 - RNA, 22 nt, Human
gcagcagcccccagcucccacc

SEQ ID NO: 1285481 - RNA, 13 nt, Human
gcagcagccccca

SEQ ID NO: 1285482 - RNA, 20 nt, Human
gcagcagccucgccccuggc

SEQ ID NO: 1285483 - RNA, 23 nt, Human
gcagcagccucgccccuggcaga

SEQ ID NO: 1285484 - RNA, 22 nt, Human
gcagcagccucgccccuggcag

SEQ ID NO: 1285485 - RNA, 13 nt, Human
gcagcaggagggg

SEQ ID NO: 1285486 - RNA, 14 nt, Human
gcagcaggaggggg

SEQ ID NO: 1285487 - RNA, 15 nt, Human
gcagcaggagggggg

SEQ ID NO: 1285488 - RNA, 19 nt, Human
gcagcaggaggggggaggg

SEQ ID NO: 1285489 - RNA, 14 nt, Human
gcagccgugccuuc

SEQ ID NO: 1285490 - RNA, 14 nt, Human
gcagcccuuccaaa

SEQ ID NO: 1285491 - RNA, 16 nt, Human
gcagccgcugagcgag

SEQ ID NO: 1285492 - RNA, 17 nt, Human
gcagccgcugagcgagg

SEQ ID NO: 1285493 - RNA, 18 nt, Human
gcagccggcacagggucu

SEQ ID NO: 1285494 - RNA, 19 nt, Human
gcagccggcacagggucug

SEQ ID NO: 1285495 - RNA, 15 nt, Human
gcagccucagagaca

SEQ ID NO: 1285496 - RNA, 23 nt, Human
gcagccucagagacaucagcccu

SEQ ID NO: 1285497 - RNA, 13 nt, Human
gcagccucaggac

SEQ ID NO: 1285498 - RNA, 15 nt, Human
gcagccucaggacug

SEQ ID NO: 1285499 - RNA, 19 nt, Human
gcagccucaggacugggag

SEQ ID NO: 1285500 - RNA, 21 nt, Human
gcagccucaggacugggagcc

SEQ ID NO: 1285501 - RNA, 18 nt, Human
gcagccucccauccaggg

SEQ ID NO: 1285502 - RNA, 20 nt, Human
gcagccucccauccagggcc

SEQ ID NO: 1285503 - RNA, 21 nt, Human
gcagccucccauccagggccc

SEQ ID NO: 1285504 - RNA, 20 nt, Human
gcagccucuccccaggucca

SEQ ID NO: 1285505 - RNA, 20 nt, Human
gcagccucgccccuggcaga

SEQ ID NO: 1285506 - RNA, 14 nt, Human
gcagccucuggggg

SEQ ID NO: 1285507 - RNA, 15 nt, Human
gcagccucugggggg

SEQ ID NO: 1285508 - RNA, 22 nt, Human
gcagccucugggggguggccag

SEQ ID NO: 1285509 - RNA, 16 nt, Human
gcagccucgccccugg

SEQ ID NO: 1285510 - RNA, 19 nt, Human
gcagccucgccccuggcag

SEQ ID NO: 1285511 - RNA, 21 nt, Human
gcagccucgccccuggcagag

SEQ ID NO: 1285512 - RNA, 12 nt, Human
gcagccucuccc

SEQ ID NO: 1285513 - RNA, 16 nt, Human
gcagccucuccccagg

SEQ ID NO: 1285514 - RNA, 23 nt, Human
gcagccucugggggguggccagg

SEQ ID NO: 1285515 - RNA, 16 nt, Human
gcaggaacaaacaggg

SEQ ID NO: 1285516 - RNA, 18 nt, Human
gcaggaacaaacagggcu

SEQ ID NO: 1285517 - RNA, 23 nt, Human
gcaggaaggacuaugaaaagcua

SEQ ID NO: 1285518 - RNA, 21 nt, Human
gcaggaccuucgggcugugcc

SEQ ID NO: 1285519 - RNA, 13 nt, Human
gcaggacuccagg

SEQ ID NO: 1285520 - RNA, 14 nt, Human
gcaggacuccaggc

SEQ ID NO: 1285521 - RNA, 17 nt, Human
gcaggacuccaggccca

SEQ ID NO: 1285522 - RNA, 18 nt, Human
gcaggacuccaggcccaa

SEQ ID NO: 1285523 - RNA, 22 nt, Human
gcaggacuccaggcccaaggcu

SEQ ID NO: 1285524 - RNA, 23 nt, Human
gcaggacuccaggcccaaggcuc

SEQ ID NO: 1285525 - RNA, 21 nt, Human
gauuaacagguaugaaccacc

SEQ ID NO: 1285526 - RNA, 14 nt, Human
gauuaaccucugca

SEQ ID NO: 1285527 - RNA, 17 nt, Human
gauuaaccucugcacua

SEQ ID NO: 1285528 - RNA, 21 nt, Human
gauuaaaugacacucauauaa

SEQ ID NO: 1285529 - RNA, 19 nt, Human
gauguugaaaaaguucugc

SEQ ID NO: 1285530 - RNA, 22 nt, Human
gauguuaaaaaaauaagaagaa

SEQ ID NO: 1285531 - RNA, 18 nt, Human
gauguguuugcuuucuga

SEQ ID NO: 1285532 - RNA, 16 nt, Human
gauggggaccagcagc

SEQ ID NO: 1285533 - RNA, 14 nt, Human
gaugguggagggcc

SEQ ID NO: 1285534 - RNA, 19 nt, Human
gaugugcuuguuaacugag

SEQ ID NO: 1285535 - RNA, 15 nt, Human
gaugguggagggcca

SEQ ID NO: 1285536 - RNA, 21 nt, Human
gauggugucucuucuuuagaa

SEQ ID NO: 1285537 - RNA, 15 nt, Human
gaugggcuucccaag

SEQ ID NO: 1285538 - RNA, 13 nt, Human
gaugggcuuccca

SEQ ID NO: 1285539 - RNA, 20 nt, Human
gaugggcaugguguucuccu

SEQ ID NO: 1285540 - RNA, 22 nt, Human
gaugggcaugguguucuccugc

SEQ ID NO: 1285541 - RNA, 14 nt, Human
gauguguuugcuuu

SEQ ID NO: 1285542 - RNA, 16 nt, Human
gauguguuugcuuucu

SEQ ID NO: 1285543 - RNA, 18 nt, Human
gauguguccugacacugc

SEQ ID NO: 1285544 - RNA, 19 nt, Human
gauguguccugacacugca

SEQ ID NO: 1285545 - RNA, 12 nt, Human
gauguguguuga

SEQ ID NO: 1285546 - RNA, 14 nt, Human
gauguguguugaua

SEQ ID NO: 1285547 - RNA, 17 nt, Human
gauguguguugauacug

SEQ ID NO: 1285548 - RNA, 20 nt, Human
gauguguguugauacuguug

SEQ ID NO: 1285549 - RNA, 21 nt, Human
gauguguguugauacuguugc

SEQ ID NO: 1285550 - RNA, 22 nt, Human
gauguguguugauacuguugca

SEQ ID NO: 1285551 - RNA, 23 nt, Human
gauguguguugauacuguugcac

SEQ ID NO: 1285552 - RNA, 20 nt, Human
gaugugcuuguuaacugagu

SEQ ID NO: 1285553 - RNA, 14 nt, Human
gaugugcuuaacag

SEQ ID NO: 1285554 - RNA, 13 nt, Human
gaugugcuuaaca

SEQ ID NO: 1285555 - RNA, 18 nt, Human
gauguggaacugcugcca

SEQ ID NO: 1285556 - RNA, 21 nt, Human
gauguggaacugcugccacug

SEQ ID NO: 1285557 - RNA, 19 nt, Human
gauguggaacugcugccac

SEQ ID NO: 1285558 - RNA, 11 nt, Human
gauguguccug

SEQ ID NO: 1285559 - RNA, 13 nt, Human
gauguguccugac

SEQ ID NO: 1285560 - RNA, 17 nt, Human
gauguguccugacacug

SEQ ID NO: 1285561 - RNA, 24 nt, Human
gauugaccguguuggucuguacug

SEQ ID NO: 1285562 - RNA, 15 nt, Human
gauuggacaaaauga

SEQ ID NO: 1285563 - RNA, 14 nt, Human
gauuggacaaaaug

SEQ ID NO: 1285564 - RNA, 18 nt, Human
gauucuagaucagaugcu

SEQ ID NO: 1285565 - RNA, 19 nt, Human
gauucuagaucagaugcuc

SEQ ID NO: 1285566 - RNA, 21 nt, Human
gauucuagaucagaugcucca

SEQ ID NO: 1285567 - RNA, 23 nt, Human
gauucuagaucagaugcuccaag

SEQ ID NO: 1285568 - RNA, 15 nt, Human
gauucuauaguucua

SEQ ID NO: 1285569 - RNA, 17 nt, Human
gauucuauaguucuaga

SEQ ID NO: 1285570 - RNA, 18 nt, Human
gauucuauaguucuagac

SEQ ID NO: 1285571 - RNA, 19 nt, Human
gauucuauaguucuagaca

SEQ ID NO: 1285572 - RNA, 18 nt, Human
gauugaaaauguccagga

SEQ ID NO: 1285573 - RNA, 19 nt, Human
gauugaaaauguccaggaa

SEQ ID NO: 1285574 - RNA, 20 nt, Human
gauugaaaauguccaggaaa

SEQ ID NO: 1285575 - RNA, 21 nt, Human
gauugaaguauuuugcuggaa

SEQ ID NO: 1285576 - RNA, 23 nt, Human
gauugaaguauuuugcuggaaua

SEQ ID NO: 1285577 - RNA, 23 nt, Human
gauuguaauauguaaaugguaug

SEQ ID NO: 1285578 - RNA, 11 nt, Human
gauuguaacuc

SEQ ID NO: 1285579 - RNA, 10 nt, Human
gauuguauug

SEQ ID NO: 1285580 - RNA, 20 nt, Human
gauuguauuguugaaaaagu

SEQ ID NO: 1285581 - RNA, 15 nt, Human
gauuguauuguugaa

SEQ ID NO: 1285582 - RNA, 16 nt, Human
gauuguccuuuugcaa

SEQ ID NO: 1285583 - RNA, 13 nt, Human
gauugugccccug

SEQ ID NO: 1285584 - RNA, 17 nt, Human
gauuguccuuuugcaaa

SEQ ID NO: 1285585 - RNA, 18 nt, Human
gauuguccuuuugcaaag

SEQ ID NO: 1285586 - RNA, 15 nt, Human
gauugucuuaauauu

SEQ ID NO: 1285587 - RNA, 21 nt, Human
gauucagaaaauguucuguuu

SEQ ID NO: 1285588 - RNA, 18 nt, Human
gauucagaaaugaggcca

SEQ ID NO: 1285589 - RNA, 23 nt, Human
gauucagaaaauguucuguuugc

SEQ ID NO: 1285590 - RNA, 13 nt, Human
gauucaaagguuc

SEQ ID NO: 1285591 - RNA, 15 nt, Human
gauucaaagguucua

SEQ ID NO: 1285592 - RNA, 18 nt, Human
gauucaaagguucuaggu

SEQ ID NO: 1285593 - RNA, 19 nt, Human
gauucaaagguucuagguu

SEQ ID NO: 1285594 - RNA, 14 nt, Human
gauucaaucuguaa

SEQ ID NO: 1285595 - RNA, 16 nt, Human
gauucaaucuguaaac

SEQ ID NO: 1285596 - RNA, 18 nt, Human
gauucaaucuguaaacug

SEQ ID NO: 1285597 - RNA, 19 nt, Human
gauucaaucuguaaacugu

SEQ ID NO: 1285598 - RNA, 16 nt, Human
gauucacaucucauuu

SEQ ID NO: 1285599 - RNA, 15 nt, Human
gauucacaucucauu

SEQ ID NO: 1285600 - RNA, 16 nt, Human
gauucccacauuuguc

SEQ ID NO: 1285601 - RNA, 13 nt, Human
gauucccagagca

SEQ ID NO: 1285602 - RNA, 19 nt, Human
gauucccagagcaaaauaa

SEQ ID NO: 1285603 - RNA, 17 nt, Human
gauuccccaucucaggc

SEQ ID NO: 1285604 - RNA, 20 nt, Human
gauuccccaucucaggccag

SEQ ID NO: 1285605 - RNA, 14 nt, Human
gauucccucuccca

SEQ ID NO: 1285606 - RNA, 17 nt, Human
gauucccucucccaggc

SEQ ID NO: 1285607 - RNA, 18 nt, Human
gauucccucucccaggcc

SEQ ID NO: 1285608 - RNA, 20 nt, Human
gauucccucucccaggcccc

SEQ ID NO: 1285609 - RNA, 19 nt, Human
gauucccucucccaggccc

SEQ ID NO: 1285610 - RNA, 16 nt, Human
gauuccgcagugagag

SEQ ID NO: 1285611 - RNA, 15 nt, Human
gauuccggauccuaa

SEQ ID NO: 1285612 - RNA, 22 nt, Human
gauuccggauccuaagcaucua

SEQ ID NO: 1285613 - RNA, 18 nt, Human
gauuccggauccuaagca

SEQ ID NO: 1285614 - RNA, 15 nt, Human
gauuccugagccagu

SEQ ID NO: 1285615 - RNA, 18 nt, Human
gauuccuuagacucuuuu

SEQ ID NO: 1285616 - RNA, 16 nt, Human
gauucuaaagauucua

SEQ ID NO: 1285617 - RNA, 17 nt, Human
gauucuaaagauucuau

SEQ ID NO: 1285618 - RNA, 20 nt, Human
gauucuaaagauucuauagu

SEQ ID NO: 1285619 - RNA, 15 nt, Human
gauucuaaaggucca

SEQ ID NO: 1285620 - RNA, 15 nt, Human
gauucuaaugaugau

SEQ ID NO: 1285621 - RNA, 14 nt, Human
gaugacuauggaaa

SEQ ID NO: 1285622 - RNA, 14 nt, Human
gaugaaaauaaaga

SEQ ID NO: 1285623 - RNA, 15 nt, Human
gaugaaaauaaagaa

SEQ ID NO: 1285624 - RNA, 18 nt, Human
gaugaaaauaaagaaugg

SEQ ID NO: 1285625 - RNA, 16 nt, Human
gaugaaaauaaagaau

SEQ ID NO: 1285626 - RNA, 12 nt, Human
gaugacuaaaau

SEQ ID NO: 1285627 - RNA, 15 nt, Human
gaugacuaaaauauu

SEQ ID NO: 1285628 - RNA, 18 nt, Human
gaugacuaaaauauuuau

SEQ ID NO: 1285629 - RNA, 13 nt, Human
gaugcaaugaaca

SEQ ID NO: 1285630 - RNA, 20 nt, Human
gaugcaucagaaagggaggg

SEQ ID NO: 1285631 - RNA, 18 nt, Human
gaugacuuaguacaaagu

SEQ ID NO: 1285632 - RNA, 21 nt, Human
gaugccuggcgggguggggug

SEQ ID NO: 1285633 - RNA, 16 nt, Human
gaugccuccuuccucu

SEQ ID NO: 1285634 - RNA, 15 nt, Human
gaugccuccuuccuc

SEQ ID NO: 1285635 - RNA, 16 nt, Human
gaugcuccaagauucu

SEQ ID NO: 1285636 - RNA, 17 nt, Human
gaugcuccaagauucua

SEQ ID NO: 1285637 - RNA, 19 nt, Human
gaugcuccaagauucuaga

SEQ ID NO: 1285638 - RNA, 20 nt, Human
gaugcuccaagauucuagau

SEQ ID NO: 1285639 - RNA, 22 nt, Human
gaugcuccaagauucuagauga

SEQ ID NO: 1285640 - RNA, 22 nt, Human
gaugggacaauuagauaaaugu

SEQ ID NO: 1285641 - RNA, 22 nt, Human
gaugggacauuccaaagaacag

SEQ ID NO: 1285642 - RNA, 17 nt, Human
gauggcagcuuuuaaaa

SEQ ID NO: 1285643 - RNA, 15 nt, Human
gauggcaacagaucu

SEQ ID NO: 1285644 - RNA, 16 nt, Human
gauggcaacagaucug

SEQ ID NO: 1285645 - RNA, 17 nt, Human
gauggcaacagaucugg

SEQ ID NO: 1285646 - RNA, 21 nt, Human
gauggcaacagaucuggaacc

SEQ ID NO: 1285647 - RNA, 22 nt, Human
gauggcaacagaucuggaaccu

SEQ ID NO: 1285648 - RNA, 18 nt, Human
gauggcaaccagaccauu

SEQ ID NO: 1285649 - RNA, 18 nt, Human
gauggcagcuuuuaaaag

SEQ ID NO: 1285650 - RNA, 20 nt, Human
gauccuguguggagagggaa

SEQ ID NO: 1285651 - RNA, 15 nt, Human
gauccuuuuggaguc

SEQ ID NO: 1285652 - RNA, 17 nt, Human
gauccuuuuggagucag

SEQ ID NO: 1285653 - RNA, 17 nt, Human
gaucgaaccguuuugaa

SEQ ID NO: 1285654 - RNA, 12 nt, Human
gaucgccuuccc

SEQ ID NO: 1285655 - RNA, 20 nt, Human
gaucuguuuugaaggcaaaa

SEQ ID NO: 1285656 - RNA, 14 nt, Human
gaucuuagauucuc

SEQ ID NO: 1285657 - RNA, 13 nt, Human
gaucuuagauucu

SEQ ID NO: 1285658 - RNA, 14 nt, Human
gaucuuuuuuguca

SEQ ID NO: 1285659 - RNA, 18 nt, Human
gaugaaaaauugcugacu

SEQ ID NO: 1285660 - RNA, 20 nt, Human
gaugaaaaauugcugacugu

SEQ ID NO: 1285661 - RNA, 21 nt, Human
gaugaaaaguauauugauaac

SEQ ID NO: 1285662 - RNA, 23 nt, Human
gaugaaaaguauauugauaaccu

SEQ ID NO: 1285663 - RNA, 11 nt, Human
gaugaaaauaa

SEQ ID NO: 1285664 - RNA, 15 nt, Human
gauauauuuucuuuc

SEQ ID NO: 1285665 - RNA, 16 nt, Human
gauauauuuucuuucu

SEQ ID NO: 1285666 - RNA, 18 nt, Human
gauccuauccuccuaccu

SEQ ID NO: 1285667 - RNA, 16 nt, Human
gagucucugaggggcu

SEQ ID NO: 1285668 - RNA, 14 nt, Human
gagucucucugggc

SEQ ID NO: 1285669 - RNA, 18 nt, Human
gagucucuucuccacugg

SEQ ID NO: 1285670 - RNA, 14 nt, Human
gagucucuucucca

SEQ ID NO: 1285671 - RNA, 15 nt, Human
gagucucuucuccac

SEQ ID NO: 1285672 - RNA, 16 nt, Human
gagucucuucuccacu

SEQ ID NO: 1285673 - RNA, 17 nt, Human
gagucucuucuccacug

SEQ ID NO: 1285674 - RNA, 23 nt, Human
gagucucgcuauugucaccaggg

SEQ ID NO: 1285675 - RNA, 12 nt, Human
gagucucuucuc

SEQ ID NO: 1285676 - RNA, 13 nt, Human
gagucucucuggg

SEQ ID NO: 1285677 - RNA, 18 nt, Human
gagucguggggugugcug

SEQ ID NO: 1285678 - RNA, 19 nt, Human
gagucguggggugugcugg

SEQ ID NO: 1285679 - RNA, 20 nt, Human
gagucguggggugugcuggg

SEQ ID NO: 1285680 - RNA, 21 nt, Human
gagucguggggugugcuggga

SEQ ID NO: 1285681 - RNA, 16 nt, Human
gagucccugccuggac

SEQ ID NO: 1285682 - RNA, 19 nt, Human
gagucccugccuggaccag

SEQ ID NO: 1285683 - RNA, 17 nt, Human
gagucguacagaaagcu

SEQ ID NO: 1285684 - RNA, 22 nt, Human
gagucguacagaaagcugccug

SEQ ID NO: 1285685 - RNA, 17 nt, Human
gagucguggggugugcu

SEQ ID NO: 1285686 - RNA, 15 nt, Human
gagucaaaaauuaaa

SEQ ID NO: 1285687 - RNA, 14 nt, Human
gagucaaaaagaac

SEQ ID NO: 1285688 - RNA, 14 nt, Human
gagucaaaacacuu

SEQ ID NO: 1285689 - RNA, 17 nt, Human
gagucaaaacacuugua

SEQ ID NO: 1285690 - RNA, 20 nt, Human
gagucaaaacacuuguaauu

SEQ ID NO: 1285691 - RNA, 19 nt, Human
gagucaaaacuacaaauca

SEQ ID NO: 1285692 - RNA, 19 nt, Human
gagucaaaugguaggcauu

SEQ ID NO: 1285693 - RNA, 19 nt, Human
gaguagcugggacuacagg

SEQ ID NO: 1285694 - RNA, 13 nt, Human
gaguagcugagcu

SEQ ID NO: 1285695 - RNA, 14 nt, Human
gaguagcugagcuc

SEQ ID NO: 1285696 - RNA, 23 nt, Human
gaguauuuucugguaaaaagaaa

SEQ ID NO: 1285697 - RNA, 11 nt, Human
gaguccccuca

SEQ ID NO: 1285698 - RNA, 16 nt, Human
gaguccccucaccucc

SEQ ID NO: 1285699 - RNA, 17 nt, Human
gaguccccucaccuccu

SEQ ID NO: 1285700 - RNA, 18 nt, Human
gagucccaggcugagccu

SEQ ID NO: 1285701 - RNA, 19 nt, Human
gagucccaggcugagccuc

SEQ ID NO: 1285702 - RNA, 18 nt, Human
gagucccagguuggcucu

SEQ ID NO: 1285703 - RNA, 21 nt, Human
gagucccagguuggcucugcc

SEQ ID NO: 1285704 - RNA, 23 nt, Human
gagucccagguuggcucugccag

SEQ ID NO: 1285705 - RNA, 22 nt, Human
gagucccagguuggcucugcca

SEQ ID NO: 1285706 - RNA, 18 nt, Human
gaguccccucaccuccuc

SEQ ID NO: 1285707 - RNA, 19 nt, Human
gaguccccucaccuccucu

SEQ ID NO: 1285708 - RNA, 14 nt, Human
gagucccugccugg

SEQ ID NO: 1285709 - RNA, 15 nt, Human
gagucccugccugga

SEQ ID NO: 1285710 - RNA, 18 nt, Human
gagguccacaacacacag

SEQ ID NO: 1285711 - RNA, 17 nt, Human
gagggggucguggagag

SEQ ID NO: 1285712 - RNA, 18 nt, Human
gagggggucguggagagc

SEQ ID NO: 1285713 - RNA, 19 nt, Human
gagggggucguggagagcu

SEQ ID NO: 1285714 - RNA, 21 nt, Human
gagggggucguggagagcuag

SEQ ID NO: 1285715 - RNA, 20 nt, Human
gagguccugagcacugccag

SEQ ID NO: 1285716 - RNA, 21 nt, Human
gagguccugagcacugccagg

SEQ ID NO: 1285717 - RNA, 23 nt, Human
gagguccugagcacugccaggag

SEQ ID NO: 1285718 - RNA, 22 nt, Human
gagguccugagcacugccagga

SEQ ID NO: 1285719 - RNA, 17 nt, Human
gaggugggccagucugu

SEQ ID NO: 1285720 - RNA, 21 nt, Human
gaggugggccagucuguggau

SEQ ID NO: 1285721 - RNA, 12 nt, Human
gagguccugagc

SEQ ID NO: 1285722 - RNA, 13 nt, Human
gagguccugagca

SEQ ID NO: 1285723 - RNA, 14 nt, Human
gagguccugagcac

SEQ ID NO: 1285724 - RNA, 16 nt, Human
gagguccugagcacug

SEQ ID NO: 1285725 - RNA, 17 nt, Human
gagguccugagcacugc

SEQ ID NO: 1285726 - RNA, 18 nt, Human
gagguccugagcacugcc

SEQ ID NO: 1285727 - RNA, 19 nt, Human
gagguccugagcacugcca

SEQ ID NO: 1285728 - RNA, 22 nt, Human
gaguaccccugcuuugggcuug

SEQ ID NO: 1285729 - RNA, 17 nt, Human
gaguaauuuuggauuuu

SEQ ID NO: 1285730 - RNA, 15 nt, Human
gaguagcugagcuca

SEQ ID NO: 1285731 - RNA, 19 nt, Human
gagguuugcagucccaagc

SEQ ID NO: 1285732 - RNA, 22 nt, Human
gagguuugcagucccaagcggu

SEQ ID NO: 1285733 - RNA, 16 nt, Human
gagguuuuauuucauu

SEQ ID NO: 1285734 - RNA, 21 nt, Human
gagguuuuauuucauuuuuca

SEQ ID NO: 1285735 - RNA, 18 nt, Human
gaguaaagaauuauuuug

SEQ ID NO: 1285736 - RNA, 16 nt, Human
gagguuugcaguccca

SEQ ID NO: 1285737 - RNA, 21 nt, Human
gaguugaaaaucuuauaauuu

SEQ ID NO: 1285738 - RNA, 21 nt, Human
gaguuuuccauggcaggaagg

SEQ ID NO: 1285739 - RNA, 18 nt, Human
gaguuuuccauggcagga

SEQ ID NO: 1285740 - RNA, 12 nt, Human
gaguuccugcau

SEQ ID NO: 1285741 - RNA, 16 nt, Human
gaguuccagaaaguaa

SEQ ID NO: 1285742 - RNA, 15 nt, Human
gaguuccagaaagua

SEQ ID NO: 1285743 - RNA, 14 nt, Human
gaguuccugcaugc

SEQ ID NO: 1285744 - RNA, 17 nt, Human
gaguucuuuuugaagua

SEQ ID NO: 1285745 - RNA, 19 nt, Human
gaguucuuuuugaaguauu

SEQ ID NO: 1285746 - RNA, 21 nt, Human
gaguucuuuuugaaguauuua

SEQ ID NO: 1285747 - RNA, 22 nt, Human
gagugucuuuccacggagccac

SEQ ID NO: 1285748 - RNA, 12 nt, Human
gagugugaccaa

SEQ ID NO: 1285749 - RNA, 21 nt, Human
gagugugaccaaaaguuacau

SEQ ID NO: 1285750 - RNA, 20 nt, Human
gagugugaccaaaaguuaca

SEQ ID NO: 1285751 - RNA, 19 nt, Human
gaguuagggacugaccagc

SEQ ID NO: 1285752 - RNA, 21 nt, Human
gaguuagggacugaccagcag

SEQ ID NO: 1285753 - RNA, 13 nt, Human
gagugucuuucca

SEQ ID NO: 1285754 - RNA, 15 nt, Human
gagugucuuuccacg

SEQ ID NO: 1285755 - RNA, 19 nt, Human
gagugucuuuccacggagc

SEQ ID NO: 1285756 - RNA, 21 nt, Human
gagugucuuuccacggagcca

SEQ ID NO: 1285757 - RNA, 13 nt, Human
gaguggcuccucc

SEQ ID NO: 1285758 - RNA, 15 nt, Human
gaguggcuccucccg

SEQ ID NO: 1285759 - RNA, 13 nt, Human
gaguggcuggggc

SEQ ID NO: 1285760 - RNA, 17 nt, Human
gaguggcuggggcaugg

SEQ ID NO: 1285761 - RNA, 14 nt, Human
gaguggcuggggca

SEQ ID NO: 1285762 - RNA, 11 nt, Human
gagugggaagc

SEQ ID NO: 1285763 - RNA, 12 nt, Human
gagugggaagcc

SEQ ID NO: 1285764 - RNA, 13 nt, Human
gagugggaagccc

SEQ ID NO: 1285765 - RNA, 23 nt, Human
gagugaacaaauuuacagagaca

SEQ ID NO: 1285766 - RNA, 22 nt, Human
gagugaacaaauuuacagagac

SEQ ID NO: 1285767 - RNA, 22 nt, Human
gaguggcccuuucggauccagg

SEQ ID NO: 1285768 - RNA, 19 nt, Human
gagugaacaaauuuacaga

SEQ ID NO: 1285769 - RNA, 16 nt, Human
gagucugccacccagg

SEQ ID NO: 1285770 - RNA, 18 nt, Human
gagucugccacccaggau

SEQ ID NO: 1285771 - RNA, 12 nt, Human
gagucugccagg

SEQ ID NO: 1285772 - RNA, 13 nt, Human
gagucugccaggg

SEQ ID NO: 1285773 - RNA, 20 nt, Human
gagucugccagggccccucu

SEQ ID NO: 1285774 - RNA, 21 nt, Human
gagucugccagggccccucuc

SEQ ID NO: 1285775 - RNA, 13 nt, Human
gagucugaggucc

SEQ ID NO: 1285776 - RNA, 14 nt, Human
gagucugagguccu

SEQ ID NO: 1285777 - RNA, 15 nt, Human
gagucugagguccug

SEQ ID NO: 1285778 - RNA, 16 nt, Human
gagucugagguccuga

SEQ ID NO: 1285779 - RNA, 17 nt, Human
gagucugagguccugag

SEQ ID NO: 1285780 - RNA, 18 nt, Human
gagucugagguccugagc

SEQ ID NO: 1285781 - RNA, 19 nt, Human
gagucugagguccugagca

SEQ ID NO: 1285782 - RNA, 22 nt, Human
gagucugagguccugagcacug

SEQ ID NO: 1285783 - RNA, 23 nt, Human
gagucugagguccugagcacugc

SEQ ID NO: 1285784 - RNA, 23 nt, Human
gauagagacuggaacacuagaca

SEQ ID NO: 1285785 - RNA, 14 nt, Human
gauagaaugacagu

SEQ ID NO: 1285786 - RNA, 13 nt, Human
gaguuuuguguuu

SEQ ID NO: 1285787 - RNA, 15 nt, Human
gaguuuuguguuugu

SEQ ID NO: 1285788 - RNA, 18 nt, Human
gaguuuuguguuuguugu

SEQ ID NO: 1285789 - RNA, 22 nt, Human
gaguuuuguguuuguuguagau

SEQ ID NO: 1285790 - RNA, 17 nt, Human
gaguuuuguuuccucug

SEQ ID NO: 1285791 - RNA, 16 nt, Human
gaguuuuuuguaccaa

SEQ ID NO: 1285792 - RNA, 21 nt, Human
gauaaaacaucuuugaaauua

SEQ ID NO: 1285793 - RNA, 14 nt, Human
gauaaugaacagaa

SEQ ID NO: 1285794 - RNA, 13 nt, Human
gauaaugaacaga

SEQ ID NO: 1285795 - RNA, 21 nt, Human
gauaaugugauauuauacaua

SEQ ID NO: 1285796 - RNA, 21 nt, Human
gauauaaguguguguuuuuca

SEQ ID NO: 1285797 - RNA, 23 nt, Human
gauagauaggucagugcaaauac

SEQ ID NO: 1285798 - RNA, 17 nt, Human
gauauacucuagaugaa

SEQ ID NO: 1285799 - RNA, 19 nt, Human
gauauagaaguauaaagaa

SEQ ID NO: 1285800 - RNA, 14 nt, Human
gauauauuuuacaa

SEQ ID NO: 1285801 - RNA, 23 nt, Human
gauauauuuuacaauuuuuuauc

SEQ ID NO: 1285802 - RNA, 20 nt, Human
gaggaggcagagaagaaaga

SEQ ID NO: 1285803 - RNA, 16 nt, Human
gaggaggcagagaaga

SEQ ID NO: 1285804 - RNA, 19 nt, Human
gaggaggaaaucccuucau

SEQ ID NO: 1285805 - RNA, 18 nt, Human
gaggaggaaaucccuuca

SEQ ID NO: 1285806 - RNA, 16 nt, Human
gaggagccuguccugc

SEQ ID NO: 1285807 - RNA, 18 nt, Human
gaggagccuguccugccu

SEQ ID NO: 1285808 - RNA, 22 nt, Human
gaggagccuguccugccugugg

SEQ ID NO: 1285809 - RNA, 19 nt, Human
gaggagccuguccugccug

SEQ ID NO: 1285810 - RNA, 13 nt, Human
gaggagggcaggc

SEQ ID NO: 1285811 - RNA, 14 nt, Human
gaggagggcaggca

SEQ ID NO: 1285812 - RNA, 15 nt, Human
gaggagggcaggcau

SEQ ID NO: 1285813 - RNA, 18 nt, Human
gaggaggcuccagagggc

SEQ ID NO: 1285814 - RNA, 16 nt, Human
gaggacagaugccucc

SEQ ID NO: 1285815 - RNA, 17 nt, Human
gaggacagaugccuccu

SEQ ID NO: 1285816 - RNA, 20 nt, Human
gaggacagaugccuccuucc

SEQ ID NO: 1285817 - RNA, 21 nt, Human
gaggacagaugccuccuuccu

SEQ ID NO: 1285818 - RNA, 22 nt, Human
gaggacagaugccuccuuccuc

SEQ ID NO: 1285819 - RNA, 16 nt, Human
gaggagccaccaguuc

SEQ ID NO: 1285820 - RNA, 18 nt, Human
gaggagccaccaguucuc

SEQ ID NO: 1285821 - RNA, 23 nt, Human
gaggagcccacgacacugcagcc

SEQ ID NO: 1285822 - RNA, 12 nt, Human
gaggagcccagg

SEQ ID NO: 1285823 - RNA, 13 nt, Human
gaggagcccaggc

SEQ ID NO: 1285824 - RNA, 18 nt, Human
gaggagcccaggccagga

SEQ ID NO: 1285825 - RNA, 20 nt, Human
gaggagcccaggccaggacu

SEQ ID NO: 1285826 - RNA, 21 nt, Human
gaggagcccaggccaggacuc

SEQ ID NO: 1285827 - RNA, 14 nt, Human
gaggagccccagcu

SEQ ID NO: 1285828 - RNA, 15 nt, Human
gaggagccccagcua

SEQ ID NO: 1285829 - RNA, 20 nt, Human
gaggagcccccacccuguuc

SEQ ID NO: 1285830 - RNA, 21 nt, Human
gaggagcccccacccuguucc

SEQ ID NO: 1285831 - RNA, 23 nt, Human
gaggagcccccacccuguuccug

SEQ ID NO: 1285832 - RNA, 12 nt, Human
gaggagccuguc

SEQ ID NO: 1285833 - RNA, 14 nt, Human
gaggagccuguccu

SEQ ID NO: 1285834 - RNA, 14 nt, Human
gaggacacaugucc

SEQ ID NO: 1285835 - RNA, 13 nt, Human
gaggacacauguc

SEQ ID NO: 1285836 - RNA, 12 nt, Human
gaggacacaugu

SEQ ID NO: 1285837 - RNA, 11 nt, Human
gaggacacaug

SEQ ID NO: 1285838 - RNA, 18 nt, Human
gaggacaagagaaaaaag

SEQ ID NO: 1285839 - RNA, 13 nt, Human
gaggacacagaga

SEQ ID NO: 1285840 - RNA, 22 nt, Human
gaggaauuuucuuuguguagcu

SEQ ID NO: 1285841 - RNA, 14 nt, Human
gaggaauuucaccu

SEQ ID NO: 1285842 - RNA, 15 nt, Human
gaggacaaccauucc

SEQ ID NO: 1285843 - RNA, 21 nt, Human
gaggaaucugugggucuggga

SEQ ID NO: 1285844 - RNA, 22 nt, Human
gaggaaucugugggucugggag

SEQ ID NO: 1285845 - RNA, 19 nt, Human
gaggaaucugugggucugg

SEQ ID NO: 1285846 - RNA, 20 nt, Human
gaggaaucugugggucuggg

SEQ ID NO: 1285847 - RNA, 21 nt, Human
gaggaaggaggacccaggaca

SEQ ID NO: 1285848 - RNA, 18 nt, Human
gaggaaggaggacccagg

SEQ ID NO: 1285849 - RNA, 16 nt, Human
gaggaaggaggaccca

SEQ ID NO: 1285850 - RNA, 22 nt, Human
gagcuugaaacccguggcgcuu

SEQ ID NO: 1285851 - RNA, 16 nt, Human
gaggaaggacuucccu

SEQ ID NO: 1285852 - RNA, 21 nt, Human
gagcuucuguugcugccucau

SEQ ID NO: 1285853 - RNA, 19 nt, Human
gaggaaggggccagaggcu

SEQ ID NO: 1285854 - RNA, 21 nt, Human
gaggaauaagcucccagggcc

SEQ ID NO: 1285855 - RNA, 17 nt, Human
gaggaauacugaacauc

SEQ ID NO: 1285856 - RNA, 13 nt, Human
gaggcagcagugu

SEQ ID NO: 1285857 - RNA, 20 nt, Human
gaggcagcagugugaggcca

SEQ ID NO: 1285858 - RNA, 21 nt, Human
gaggcagcagugugaggccag

SEQ ID NO: 1285859 - RNA, 22 nt, Human
gaggcagcagugugaggccagg

SEQ ID NO: 1285860 - RNA, 21 nt, Human
gaggcaauuagacacuuugga

SEQ ID NO: 1285861 - RNA, 17 nt, Human
gaggcacaugucagcaa

SEQ ID NO: 1285862 - RNA, 13 nt, Human
gaggcaccaggaa

SEQ ID NO: 1285863 - RNA, 17 nt, Human
gaggcaccaggaagccg

SEQ ID NO: 1285864 - RNA, 20 nt, Human
gaggcaccugguggccaugc

SEQ ID NO: 1285865 - RNA, 18 nt, Human
gaggcacugaagugcuua

SEQ ID NO: 1285866 - RNA, 12 nt, Human
gaggcagcccag

SEQ ID NO: 1285867 - RNA, 13 nt, Human
gaggcagcccagg

SEQ ID NO: 1285868 - RNA, 16 nt, Human
gaggcagcccaggaag

SEQ ID NO: 1285869 - RNA, 12 nt, Human
gaggcagcccgc

SEQ ID NO: 1285870 - RNA, 18 nt, Human
gaggccagccuggccucc

SEQ ID NO: 1285871 - RNA, 19 nt, Human
gaggccagccuggccuccu

SEQ ID NO: 1285872 - RNA, 20 nt, Human
gaggccagccuggccuccug

SEQ ID NO: 1285873 - RNA, 13 nt, Human
gaggccagggcag

SEQ ID NO: 1285874 - RNA, 15 nt, Human
gaggccagggcagag

SEQ ID NO: 1285875 - RNA, 22 nt, Human
gaggaguaacaauacaaaugga

SEQ ID NO: 1285876 - RNA, 13 nt, Human
gaggagucugagg

SEQ ID NO: 1285877 - RNA, 14 nt, Human
gaggagucugaggu

SEQ ID NO: 1285878 - RNA, 15 nt, Human
gaggagucugagguc

SEQ ID NO: 1285879 - RNA, 18 nt, Human
gaggagucugagguccug

SEQ ID NO: 1285880 - RNA, 19 nt, Human
gaggagucugagguccuga

SEQ ID NO: 1285881 - RNA, 20 nt, Human
gaggagucugagguccugag

SEQ ID NO: 1285882 - RNA, 21 nt, Human
gaggagucugagguccugagc

SEQ ID NO: 1285883 - RNA, 22 nt, Human
gaggagucugagguccugagca

SEQ ID NO: 1285884 - RNA, 23 nt, Human
gaggagucugagguccugagcac

SEQ ID NO: 1285885 - RNA, 20 nt, Human
gaggagggucggugccuuca

SEQ ID NO: 1285886 - RNA, 21 nt, Human
gaggagggucggugccuucaa

SEQ ID NO: 1285887 - RNA, 19 nt, Human
gaggaggugucucaggcug

SEQ ID NO: 1285888 - RNA, 21 nt, Human
gaggaggugucucaggcugcc

SEQ ID NO: 1285889 - RNA, 23 nt, Human
gaggaggugucucaggcugccug

SEQ ID NO: 1285890 - RNA, 22 nt, Human
gaggaggugucucaggcugccu

SEQ ID NO: 1285891 - RNA, 11 nt, Human
gaggaguaaca

SEQ ID NO: 1285892 - RNA, 12 nt, Human
gaggaguaacaa

SEQ ID NO: 1285893 - RNA, 20 nt, Human
gaggaguaacaauacaaaug

SEQ ID NO: 1285894 - RNA, 21 nt, Human
gaggaguaacaauacaaaugg

SEQ ID NO: 1285895 - RNA, 21 nt, Human
gaggauguaaagaucaauaaa

SEQ ID NO: 1285896 - RNA, 13 nt, Human
gaggauacgacag

SEQ ID NO: 1285897 - RNA, 16 nt, Human
gagggagaacaagacc

SEQ ID NO: 1285898 - RNA, 18 nt, Human
gagggacugucgcugcuu

SEQ ID NO: 1285899 - RNA, 23 nt, Human
gagggacugucgcugcuucgugg

SEQ ID NO: 1285900 - RNA, 15 nt, Human
gagggagaaauaguc

SEQ ID NO: 1285901 - RNA, 14 nt, Human
gagggacgccuggg

SEQ ID NO: 1285902 - RNA, 15 nt, Human
gagggacgccugggg

SEQ ID NO: 1285903 - RNA, 16 nt, Human
gagggacgccuggggg

SEQ ID NO: 1285904 - RNA, 23 nt, Human
gagggacgccugggggugccagg

SEQ ID NO: 1285905 - RNA, 15 nt, Human
gagggacugucgcug

SEQ ID NO: 1285906 - RNA, 14 nt, Human
gaggcuugguuccu

SEQ ID NO: 1285907 - RNA, 23 nt, Human
gaggcuuuaugauaauagauucu

SEQ ID NO: 1285908 - RNA, 14 nt, Human
gaggcuuuggauuu

SEQ ID NO: 1285909 - RNA, 16 nt, Human
gaggcuuuggauuuga

SEQ ID NO: 1285910 - RNA, 20 nt, Human
gaggcuuuggauuugacauu

SEQ ID NO: 1285911 - RNA, 14 nt, Human
gaggcuuuccaugg

SEQ ID NO: 1285912 - RNA, 16 nt, Human
gagggaaaggccagca

SEQ ID NO: 1285913 - RNA, 14 nt, Human
gagggaagggagcc

SEQ ID NO: 1285914 - RNA, 15 nt, Human
gagggaagggagcca

SEQ ID NO: 1285915 - RNA, 16 nt, Human
gagggaagggagccaa

SEQ ID NO: 1285916 - RNA, 17 nt, Human
gagggaagggagccaag

SEQ ID NO: 1285917 - RNA, 20 nt, Human
gagggaagggagccaaggga

SEQ ID NO: 1285918 - RNA, 19 nt, Human
gagggaagggagccaaggg

SEQ ID NO: 1285919 - RNA, 14 nt, Human
gagggaaugugaaa

SEQ ID NO: 1285920 - RNA, 16 nt, Human
gagggacaaaggagcc

SEQ ID NO: 1285921 - RNA, 17 nt, Human
gagggacaaaggagccu

SEQ ID NO: 1285922 - RNA, 18 nt, Human
gagggacaaaggagccug

SEQ ID NO: 1285923 - RNA, 19 nt, Human
gagggacaaaggagccugu

SEQ ID NO: 1285924 - RNA, 20 nt, Human
gagggacaaaggagccugug

SEQ ID NO: 1285925 - RNA, 21 nt, Human
gagggacaaaggagccuguga

SEQ ID NO: 1285926 - RNA, 22 nt, Human
gagggacaaaggagccugugaa

SEQ ID NO: 1285927 - RNA, 23 nt, Human
gagggacaugcuuagcagucccc

SEQ ID NO: 1285928 - RNA, 12 nt, Human
gagggcacuggu

SEQ ID NO: 1285929 - RNA, 13 nt, Human
gaggggccugcca

SEQ ID NO: 1285930 - RNA, 15 nt, Human
gaggggccugccacc

SEQ ID NO: 1285931 - RNA, 17 nt, Human
gaggggccugccaccug

SEQ ID NO: 1285932 - RNA, 19 nt, Human
gaggggccugccaccugga

SEQ ID NO: 1285933 - RNA, 20 nt, Human
gaggggccugccaccuggac

SEQ ID NO: 1285934 - RNA, 21 nt, Human
gaggggccugccaccuggacc

SEQ ID NO: 1285935 - RNA, 22 nt, Human
gaggggccugccaccuggaccc

SEQ ID NO: 1285936 - RNA, 13 nt, Human
gaggggccuggca

SEQ ID NO: 1285937 - RNA, 14 nt, Human
gaggggccuggcag

SEQ ID NO: 1285938 - RNA, 18 nt, Human
gaggggccuggcagccgu

SEQ ID NO: 1285939 - RNA, 20 nt, Human
gaggggccuggcagccgugc

SEQ ID NO: 1285940 - RNA, 16 nt, Human
gagggcacugguggcc

SEQ ID NO: 1285941 - RNA, 18 nt, Human
gagggcacugguggcccg

SEQ ID NO: 1285942 - RNA, 14 nt, Human
gagggcagagcugg

SEQ ID NO: 1285943 - RNA, 17 nt, Human
gagggcagagcuggugc

SEQ ID NO: 1285944 - RNA, 16 nt, Human
gagggcagagcuggug

SEQ ID NO: 1285945 - RNA, 13 nt, Human
gagggcagcagcc

SEQ ID NO: 1285946 - RNA, 18 nt, Human
gaggcuacuguaaggcaa

SEQ ID NO: 1285947 - RNA, 14 nt, Human
gaggcuuccuucau

SEQ ID NO: 1285948 - RNA, 19 nt, Human
gaggccuggacuuuccugc

SEQ ID NO: 1285949 - RNA, 20 nt, Human
gaggccuggacuuuccugca

SEQ ID NO: 1285950 - RNA, 14 nt, Human
gaggccugggccgc

SEQ ID NO: 1285951 - RNA, 16 nt, Human
gaggccugggccgcug

SEQ ID NO: 1285952 - RNA, 20 nt, Human
gaggccugggccgcugccac

SEQ ID NO: 1285953 - RNA, 21 nt, Human
gaggccugggccgcugccacg

SEQ ID NO: 1285954 - RNA, 22 nt, Human
gaggccugggccgcugccacgu

SEQ ID NO: 1285955 - RNA, 13 nt, Human
gaggccugggcug

SEQ ID NO: 1285956 - RNA, 18 nt, Human
gaggccugggcugggaaa

SEQ ID NO: 1285957 - RNA, 17 nt, Human
gaggccugggcugggaa

SEQ ID NO: 1285958 - RNA, 19 nt, Human
gaggccuguuuggccucuc

SEQ ID NO: 1285959 - RNA, 21 nt, Human
gaggccuuacuuaaacccagc

SEQ ID NO: 1285960 - RNA, 22 nt, Human
gaggcccugugccccuugacaa

SEQ ID NO: 1285961 - RNA, 18 nt, Human
gaggccgaagcuaacagg

SEQ ID NO: 1285962 - RNA, 14 nt, Human
gaggccguggcugc

SEQ ID NO: 1285963 - RNA, 21 nt, Human
gaggccguggcugcuguggga

SEQ ID NO: 1285964 - RNA, 20 nt, Human
gaggccugacugccaagcca

SEQ ID NO: 1285965 - RNA, 13 nt, Human
gaggccuggacuu

SEQ ID NO: 1285966 - RNA, 18 nt, Human
gaggccuggacuuuccug

SEQ ID NO: 1285967 - RNA, 21 nt, Human
gaggcccccagcccagggcuc

SEQ ID NO: 1285968 - RNA, 19 nt, Human
gaggccagggcagagugag

SEQ ID NO: 1285969 - RNA, 22 nt, Human
gaggccagccuggccuccugcc

SEQ ID NO: 1285970 - RNA, 15 nt, Human
gaggcccccagccca

SEQ ID NO: 1285971 - RNA, 16 nt, Human
gaggcccccagcccag

SEQ ID NO: 1285972 - RNA, 17 nt, Human
gaggcccccagcccagg

SEQ ID NO: 1285973 - RNA, 19 nt, Human
gaggcccccagcccagggc

SEQ ID NO: 1285974 - RNA, 20 nt, Human
gaggcccccagcccagggcu

SEQ ID NO: 1285975 - RNA, 13 nt, Human
gaggcccggccuc

SEQ ID NO: 1285976 - RNA, 12 nt, Human
gaggcccuccac

SEQ ID NO: 1285977 - RNA, 17 nt, Human
gaggcccuccacaccug

SEQ ID NO: 1285978 - RNA, 18 nt, Human
gaggcccuccacaccugc

SEQ ID NO: 1285979 - RNA, 19 nt, Human
gaggcccuccacaccugcg

SEQ ID NO: 1285980 - RNA, 22 nt, Human
gaggcccuccacaccugcggcc

SEQ ID NO: 1285981 - RNA, 17 nt, Human
gaggcccucgcugccag

SEQ ID NO: 1285982 - RNA, 21 nt, Human
gaggcccuccacaccugcggc

SEQ ID NO: 1285983 - RNA, 12 nt, Human
gaggcccuggau

SEQ ID NO: 1285984 - RNA, 13 nt, Human
gaggcccuggauc

SEQ ID NO: 1285985 - RNA, 14 nt, Human
gaggcccuggauca

SEQ ID NO: 1285986 - RNA, 22 nt, Human
gaggcccuggaucagcguggcc

SEQ ID NO: 1285987 - RNA, 23 nt, Human
gaggcccuggaucagcguggccu

SEQ ID NO: 1285988 - RNA, 14 nt, Human
gagcuacaaaugca

SEQ ID NO: 1285989 - RNA, 11 nt, Human
gagcuaaggcu

SEQ ID NO: 1285990 - RNA, 23 nt, Human
gagcucaggaaccgaggcaggga

SEQ ID NO: 1285991 - RNA, 17 nt, Human
gagcuagaacccucugu

SEQ ID NO: 1285992 - RNA, 11 nt, Human
gagcuacugcc

SEQ ID NO: 1285993 - RNA, 20 nt, Human
gagcuacguauuuaauagca

SEQ ID NO: 1285994 - RNA, 11 nt, Human
gagcucaggau

SEQ ID NO: 1285995 - RNA, 14 nt, Human
gagcuaaggcucua

SEQ ID NO: 1285996 - RNA, 13 nt, Human
gagcuaaggcucu

SEQ ID NO: 1285997 - RNA, 15 nt, Human
gagcuacauaauuua

SEQ ID NO: 1285998 - RNA, 14 nt, Human
gagcuaccugugug

SEQ ID NO: 1285999 - RNA, 19 nt, Human
gagcuaccuguguggacag

SEQ ID NO: 1286000 - RNA, 20 nt, Human
gagcuaccuguguggacagg

SEQ ID NO: 1286001 - RNA, 22 nt, Human
gagcuaccuguguggacaggac

SEQ ID NO: 1286002 - RNA, 15 nt, Human
gagcuacguauuuaa

SEQ ID NO: 1286003 - RNA, 20 nt, Human
gagcuccuuaaggcucuuuu

SEQ ID NO: 1286004 - RNA, 19 nt, Human
gagcuccucuuccaugcug

SEQ ID NO: 1286005 - RNA, 17 nt, Human
gagcuccuguccccugc

SEQ ID NO: 1286006 - RNA, 13 nt, Human
gagcuccucuucc

SEQ ID NO: 1286007 - RNA, 14 nt, Human
gagcuccucuucca

SEQ ID NO: 1286008 - RNA, 19 nt, Human
gagcucuauuaugaaugug

SEQ ID NO: 1286009 - RNA, 19 nt, Human
gagcuccuguccccugcua

SEQ ID NO: 1286010 - RNA, 15 nt, Human
gagcucucugcccuu

SEQ ID NO: 1286011 - RNA, 17 nt, Human
gagcucucugcccuuga

SEQ ID NO: 1286012 - RNA, 11 nt, Human
gagcucugaga

SEQ ID NO: 1286013 - RNA, 12 nt, Human
gagcucugagag

SEQ ID NO: 1286014 - RNA, 13 nt, Human
gagcucugagagg

SEQ ID NO: 1286015 - RNA, 14 nt, Human
gagcucugagaggc

SEQ ID NO: 1286016 - RNA, 15 nt, Human
gagcucugagaggcc

SEQ ID NO: 1286017 - RNA, 16 nt, Human
gagcucugagaggccc

SEQ ID NO: 1286018 - RNA, 17 nt, Human
gagcucugagaggcccu

SEQ ID NO: 1286019 - RNA, 18 nt, Human
gagcucugagaggcccug

SEQ ID NO: 1286020 - RNA, 19 nt, Human
gagcucugagaggcccugg

SEQ ID NO: 1286021 - RNA, 20 nt, Human
gagcucugagaggcccugga

SEQ ID NO: 1286022 - RNA, 12 nt, Human
gagcucaggaug

SEQ ID NO: 1286023 - RNA, 13 nt, Human
gagcucaggauga

SEQ ID NO: 1286024 - RNA, 23 nt, Human
gagcucaggaugagggaaaagaa

SEQ ID NO: 1286025 - RNA, 12 nt, Human
gagcuccacucu

SEQ ID NO: 1286026 - RNA, 13 nt, Human
gagcuccacucug

SEQ ID NO: 1286027 - RNA, 16 nt, Human
gagcuccacucugcuu

SEQ ID NO: 1286028 - RNA, 18 nt, Human
gagcuccacucugcuucu

SEQ ID NO: 1286029 - RNA, 21 nt, Human
gagcuccacucugcuucucug

SEQ ID NO: 1286030 - RNA, 22 nt, Human
gagcuccacucugcuucucuga

SEQ ID NO: 1286031 - RNA, 15 nt, Human
gagcuccccucccca

SEQ ID NO: 1286032 - RNA, 17 nt, Human
gagcuccccuccccaac

SEQ ID NO: 1286033 - RNA, 19 nt, Human
gagcuccccuccccaacug

SEQ ID NO: 1286034 - RNA, 18 nt, Human
gagcuccccuccccaacu

SEQ ID NO: 1286035 - RNA, 12 nt, Human
gagcuccucccu

SEQ ID NO: 1286036 - RNA, 23 nt, Human
gagcuccucccucucaacaccca

SEQ ID NO: 1286037 - RNA, 19 nt, Human
gagcugauggagaaggaag

SEQ ID NO: 1286038 - RNA, 18 nt, Human
gagcugauggagaaggaa

SEQ ID NO: 1286039 - RNA, 17 nt, Human
gagcucuucauguuuca

SEQ ID NO: 1286040 - RNA, 16 nt, Human
gagcucugcagagcag

SEQ ID NO: 1286041 - RNA, 21 nt, Human
gagcucugagaggcccuggau

SEQ ID NO: 1286042 - RNA, 22 nt, Human
gagcucugagaggcccuggauc

SEQ ID NO: 1286043 - RNA, 23 nt, Human
gagcucugagaggcccuggauca

SEQ ID NO: 1286044 - RNA, 12 nt, Human
gagcugccaaga

SEQ ID NO: 1286045 - RNA, 15 nt, Human
gagcuuaacagugug

SEQ ID NO: 1286046 - RNA, 15 nt, Human
gagcuuaaaauacaa

SEQ ID NO: 1286047 - RNA, 16 nt, Human
gagcuuaaaauacaag

SEQ ID NO: 1286048 - RNA, 17 nt, Human
gagcuuaaaauacaaga

SEQ ID NO: 1286049 - RNA, 21 nt, Human
gagcuuaaucuuugaaagguu

SEQ ID NO: 1286050 - RNA, 22 nt, Human
gagcuuaaucuuugaaagguua

SEQ ID NO: 1286051 - RNA, 14 nt, Human
gagcuucuggcacu

SEQ ID NO: 1286052 - RNA, 18 nt, Human
gagcuucuguugcugccu

SEQ ID NO: 1286053 - RNA, 16 nt, Human
gagcuucauggcagaa

SEQ ID NO: 1286054 - RNA, 19 nt, Human
gagcuucauggcagaaggc

SEQ ID NO: 1286055 - RNA, 13 nt, Human
gagcuucccugac

SEQ ID NO: 1286056 - RNA, 17 nt, Human
gagcuucccugacucau

SEQ ID NO: 1286057 - RNA, 15 nt, Human
gagccugcaggaucu

SEQ ID NO: 1286058 - RNA, 13 nt, Human
gagccugcaggau

SEQ ID NO: 1286059 - RNA, 18 nt, Human
gagccuccuuucuggcuu

SEQ ID NO: 1286060 - RNA, 18 nt, Human
gagccucagucucccucc

SEQ ID NO: 1286061 - RNA, 13 nt, Human
gagcuacaaaugc

SEQ ID NO: 1286062 - RNA, 12 nt, Human
gagcuacaaaug

SEQ ID NO: 1286063 - RNA, 15 nt, Human
gagccuguaaacuuu

SEQ ID NO: 1286064 - RNA, 11 nt, Human
gagccuguccu

SEQ ID NO: 1286065 - RNA, 12 nt, Human
gagccuguccug

SEQ ID NO: 1286066 - RNA, 15 nt, Human
gagccuguccugccu

SEQ ID NO: 1286067 - RNA, 17 nt, Human
gagccuguccugccugu

SEQ ID NO: 1286068 - RNA, 18 nt, Human
gagccuguccugccugug

SEQ ID NO: 1286069 - RNA, 19 nt, Human
gagccuguccugccugugg

SEQ ID NO: 1286070 - RNA, 21 nt, Human
gagccuguccugccuguggcc

SEQ ID NO: 1286071 - RNA, 16 nt, Human
gagccugugaacccag

SEQ ID NO: 1286072 - RNA, 17 nt, Human
gagccugugaacccagg

SEQ ID NO: 1286073 - RNA, 18 nt, Human
gagccugugaacccagga

SEQ ID NO: 1286074 - RNA, 19 nt, Human
gagccugugaacccaggac

SEQ ID NO: 1286075 - RNA, 20 nt, Human
gagccugugaacccaggaca

SEQ ID NO: 1286076 - RNA, 21 nt, Human
gagccugugaacccaggacaa

SEQ ID NO: 1286077 - RNA, 23 nt, Human
gagccugugaacccaggacaagc

SEQ ID NO: 1286078 - RNA, 23 nt, Human
gagccugugacauacccccuccc

SEQ ID NO: 1286079 - RNA, 16 nt, Human
gagcgugagcugagca

SEQ ID NO: 1286080 - RNA, 17 nt, Human
gagcgugagcugagcag

SEQ ID NO: 1286081 - RNA, 19 nt, Human
gagcgugagcugagcaggc

SEQ ID NO: 1286082 - RNA, 23 nt, Human
gagccuggcuccguccaggagcc

SEQ ID NO: 1286083 - RNA, 11 nt, Human
gagccuggggc

SEQ ID NO: 1286084 - RNA, 13 nt, Human
gagccuggggcuc

SEQ ID NO: 1286085 - RNA, 15 nt, Human
gagccuggggcucua

SEQ ID NO: 1286086 - RNA, 23 nt, Human
gagccuggggcucuaacgccuga

SEQ ID NO: 1286087 - RNA, 20 nt, Human
gagaucaggaagagaaggag

SEQ ID NO: 1286088 - RNA, 13 nt, Human
gagaucaggaaga

SEQ ID NO: 1286089 - RNA, 13 nt, Human
gagauccuccugc

SEQ ID NO: 1286090 - RNA, 14 nt, Human
gagauccuccugca

SEQ ID NO: 1286091 - RNA, 23 nt, Human
gagauccuccugcagaccacgcc

SEQ ID NO: 1286092 - RNA, 17 nt, Human
gagauccuccugcagac

SEQ ID NO: 1286093 - RNA, 15 nt, Human
gagauccuuaucgaa

SEQ ID NO: 1286094 - RNA, 15 nt, Human
gagaucaaagaugaa

SEQ ID NO: 1286095 - RNA, 20 nt, Human
gagaucaaagaugaaaagua

SEQ ID NO: 1286096 - RNA, 19 nt, Human
gagauauuaaugcccagac

SEQ ID NO: 1286097 - RNA, 13 nt, Human
gagaucaaagaug

SEQ ID NO: 1286098 - RNA, 14 nt, Human
gagaucaaagauga

SEQ ID NO: 1286099 - RNA, 11 nt, Human
gagauauuaau

SEQ ID NO: 1286100 - RNA, 18 nt, Human
gagauauuaaugcccaga

SEQ ID NO: 1286101 - RNA, 14 nt, Human
gaaugcuguacauc

SEQ ID NO: 1286102 - RNA, 15 nt, Human
gaaugcuguacaucu

SEQ ID NO: 1286103 - RNA, 17 nt, Human
gaaugcuguacaucuau

SEQ ID NO: 1286104 - RNA, 20 nt, Human
gaaugcuguacaucuauuuu

SEQ ID NO: 1286105 - RNA, 13 nt, Human
gaaugcugggacu

SEQ ID NO: 1286106 - RNA, 14 nt, Human
gaaugcugggacuc

SEQ ID NO: 1286107 - RNA, 16 nt, Human
gaaugcugggacucag

SEQ ID NO: 1286108 - RNA, 17 nt, Human
gaaugcugggacucagc

SEQ ID NO: 1286109 - RNA, 18 nt, Human
gaaugcugggacucagcc

SEQ ID NO: 1286110 - RNA, 19 nt, Human
gaaugcugggacucagccu

SEQ ID NO: 1286111 - RNA, 13 nt, Human
gaaugcuguacau

SEQ ID NO: 1286112 - RNA, 12 nt, Human
gagcaaaauaau

SEQ ID NO: 1286113 - RNA, 19 nt, Human
gagcaaacugcaugcccag

SEQ ID NO: 1286114 - RNA, 20 nt, Human
gagcaaacugcaugcccaga

SEQ ID NO: 1286115 - RNA, 22 nt, Human
gagcaaacugcaugcccagaga

SEQ ID NO: 1286116 - RNA, 23 nt, Human
gagcaaacugcaugcccagagac

SEQ ID NO: 1286117 - RNA, 12 nt, Human
gagcaaagccug

SEQ ID NO: 1286118 - RNA, 23 nt, Human
gagcaaagccuguucauggcaga

SEQ ID NO: 1286119 - RNA, 14 nt, Human
gagcaccugcuguc

SEQ ID NO: 1286120 - RNA, 15 nt, Human
gagcaccugcugucu

SEQ ID NO: 1286121 - RNA, 16 nt, Human
gagcaccugcugucug

SEQ ID NO: 1286122 - RNA, 22 nt, Human
gagcaccgccugugaaauacca

SEQ ID NO: 1286123 - RNA, 14 nt, Human
gagcaccuccacau

SEQ ID NO: 1286124 - RNA, 19 nt, Human
gagcaccuccacauccucc

SEQ ID NO: 1286125 - RNA, 13 nt, Human
gagcaaagccugu

SEQ ID NO: 1286126 - RNA, 14 nt, Human
gagcaaagccuguu

SEQ ID NO: 1286127 - RNA, 22 nt, Human
gagcaaagccuguucauggcag

SEQ ID NO: 1286128 - RNA, 20 nt, Human
gagcacaauaaauggcugua

SEQ ID NO: 1286129 - RNA, 20 nt, Human
gagccaccgugccuggccac

SEQ ID NO: 1286130 - RNA, 14 nt, Human
gagccaccgugccu

SEQ ID NO: 1286131 - RNA, 14 nt, Human
gagccaccaguucu

SEQ ID NO: 1286132 - RNA, 20 nt, Human
gagcaggacugaugucuccu

SEQ ID NO: 1286133 - RNA, 22 nt, Human
gagcagcaggaggggggaggga

SEQ ID NO: 1286134 - RNA, 21 nt, Human
gagcagcaggaggggggaggg

SEQ ID NO: 1286135 - RNA, 21 nt, Human
gagcaggaggccuaggagggu

SEQ ID NO: 1286136 - RNA, 20 nt, Human
gagcaggaggccuaggaggg

SEQ ID NO: 1286137 - RNA, 11 nt, Human
gagcaggcagc

SEQ ID NO: 1286138 - RNA, 16 nt, Human
gagcaggcagccagca

SEQ ID NO: 1286139 - RNA, 17 nt, Human
gagcaggcagccagcau

SEQ ID NO: 1286140 - RNA, 19 nt, Human
gagcaggcagccagcaucu

SEQ ID NO: 1286141 - RNA, 11 nt, Human
gagcagcaccu

SEQ ID NO: 1286142 - RNA, 14 nt, Human
gagcagcaccuccu

SEQ ID NO: 1286143 - RNA, 15 nt, Human
gagcagcaccuccuc

SEQ ID NO: 1286144 - RNA, 19 nt, Human
gagcagcaccuccucagcc

SEQ ID NO: 1286145 - RNA, 20 nt, Human
gagcagcaccuccucagccu

SEQ ID NO: 1286146 - RNA, 21 nt, Human
gagcagcaccuccucagccug

SEQ ID NO: 1286147 - RNA, 22 nt, Human
gagcagcaccuccucagccuga

SEQ ID NO: 1286148 - RNA, 18 nt, Human
gagcagcaggagggggga

SEQ ID NO: 1286149 - RNA, 22 nt, Human
gagcagaccaccccgccugccc

SEQ ID NO: 1286150 - RNA, 14 nt, Human
gagcagaggucucc

SEQ ID NO: 1286151 - RNA, 14 nt, Human
gagcacuguuuucu

SEQ ID NO: 1286152 - RNA, 22 nt, Human
gagcacuguuuucuaguguauc

SEQ ID NO: 1286153 - RNA, 17 nt, Human
gagcaccugcugucugg

SEQ ID NO: 1286154 - RNA, 13 nt, Human
gagcacugcucca

SEQ ID NO: 1286155 - RNA, 22 nt, Human
gagcagaaaacccuugggccag

SEQ ID NO: 1286156 - RNA, 23 nt, Human
gagcagaaaacccuugggccaga

SEQ ID NO: 1286157 - RNA, 12 nt, Human
gagcagaagcag

SEQ ID NO: 1286158 - RNA, 14 nt, Human
gagcagaagcagca

SEQ ID NO: 1286159 - RNA, 16 nt, Human
gagcagaagcagcaac

SEQ ID NO: 1286160 - RNA, 17 nt, Human
gagcagaaggggagaug

SEQ ID NO: 1286161 - RNA, 18 nt, Human
gagcagaaggggagaugg

SEQ ID NO: 1286162 - RNA, 14 nt, Human
gagccacuccucug

SEQ ID NO: 1286163 - RNA, 15 nt, Human
gagccacuccucuga

SEQ ID NO: 1286164 - RNA, 17 nt, Human
gagccaugcgcccccuc

SEQ ID NO: 1286165 - RNA, 18 nt, Human
gagccaugucuucucccu

SEQ ID NO: 1286166 - RNA, 22 nt, Human
gagccaugucuucucccuggaa

SEQ ID NO: 1286167 - RNA, 12 nt, Human
gagccauguuuc

SEQ ID NO: 1286168 - RNA, 13 nt, Human
gagccauuugaga

SEQ ID NO: 1286169 - RNA, 24 nt, Human
gagcccaggccaggacucugcagc

SEQ ID NO: 1286170 - RNA, 14 nt, Human
gagcccaagggaau

SEQ ID NO: 1286171 - RNA, 11 nt, Human
gagcccaggcu

SEQ ID NO: 1286172 - RNA, 12 nt, Human
gagcccaggcuc

SEQ ID NO: 1286173 - RNA, 21 nt, Human
gagcccaggcucggccugccc

SEQ ID NO: 1286174 - RNA, 22 nt, Human
gagcccaggcucggccugcccc

SEQ ID NO: 1286175 - RNA, 11 nt, Human
gagcccaggga

SEQ ID NO: 1286176 - RNA, 15 nt, Human
gagcccagggaggcc

SEQ ID NO: 1286177 - RNA, 17 nt, Human
gagcccagggaggccga

SEQ ID NO: 1286178 - RNA, 16 nt, Human
gaaccugaugaaaaua

SEQ ID NO: 1286179 - RNA, 16 nt, Human
gaaccuggaacuuggg

SEQ ID NO: 1286180 - RNA, 11 nt, Human
gaaccuggccu

SEQ ID NO: 1286181 - RNA, 12 nt, Human
gaaccuggccuu

SEQ ID NO: 1286182 - RNA, 13 nt, Human
gaaccuggccuuc

SEQ ID NO: 1286183 - RNA, 16 nt, Human
gaaccuggccuucagu

SEQ ID NO: 1286184 - RNA, 14 nt, Human
gaaccuggccuuca

SEQ ID NO: 1286185 - RNA, 21 nt, Human
gaaccuggguugcagacagga

SEQ ID NO: 1286186 - RNA, 12 nt, Human
gaaccugugucc

SEQ ID NO: 1286187 - RNA, 22 nt, Human
gaacuagaguuuagcuggaaaa

SEQ ID NO: 1286188 - RNA, 22 nt, Human
gaacgugauuagugaaaggaag

SEQ ID NO: 1286189 - RNA, 15 nt, Human
gaacgucuuaucuaa

SEQ ID NO: 1286190 - RNA, 20 nt, Human
gaacguuuagcugacaaaau

SEQ ID NO: 1286191 - RNA, 18 nt, Human
gaacuagccaaaccagga

SEQ ID NO: 1286192 - RNA, 15 nt, Human
gaacuaggcugagca

SEQ ID NO: 1286193 - RNA, 17 nt, Human
gaacuaggcugagcaau

SEQ ID NO: 1286194 - RNA, 17 nt, Human
gaaccggagagccagcu

SEQ ID NO: 1286195 - RNA, 16 nt, Human
gaaccggagagccagc

SEQ ID NO: 1286196 - RNA, 11 nt, Human
gaaccugaccc

SEQ ID NO: 1286197 - RNA, 12 nt, Human
gaaccugacccc

SEQ ID NO: 1286198 - RNA, 15 nt, Human
gaaccugaugaaaau

SEQ ID NO: 1286199 - RNA, 20 nt, Human
gaaccugaugaaaauaaaga

SEQ ID NO: 1286200 - RNA, 17 nt, Human
gaaccguuuugaagcua

SEQ ID NO: 1286201 - RNA, 18 nt, Human
gaaccguuuugaagcuac

SEQ ID NO: 1286202 - RNA, 19 nt, Human
gaaccguuuugaagcuacu

SEQ ID NO: 1286203 - RNA, 19 nt, Human
gaaccuaauucaauucaaa

SEQ ID NO: 1286204 - RNA, 18 nt, Human
gaaccuacaguuuuaacu

SEQ ID NO: 1286205 - RNA, 19 nt, Human
gaaccuacaguuuuaacug

SEQ ID NO: 1286206 - RNA, 21 nt, Human
gaaccuacaguuuuaacugug

SEQ ID NO: 1286207 - RNA, 23 nt, Human
gaaccuacaguuuuaacugugga

SEQ ID NO: 1286208 - RNA, 23 nt, Human
gaacagaacauagacagaagaaa

SEQ ID NO: 1286209 - RNA, 21 nt, Human
gaacuugaggacacaugucca

SEQ ID NO: 1286210 - RNA, 19 nt, Human
gaacuugaggacacauguc

SEQ ID NO: 1286211 - RNA, 18 nt, Human
gaacuugaggacacaugu

SEQ ID NO: 1286212 - RNA, 15 nt, Human
gaacuugcauuguga

SEQ ID NO: 1286213 - RNA, 23 nt, Human
gaacuugcauugugauuggccug

SEQ ID NO: 1286214 - RNA, 11 nt, Human
gaacuugccug

SEQ ID NO: 1286215 - RNA, 16 nt, Human
gaacuugccugccuuu

SEQ ID NO: 1286216 - RNA, 17 nt, Human
gaacuugccugccuuuc

SEQ ID NO: 1286217 - RNA, 19 nt, Human
gaacuugccugccuuucca

SEQ ID NO: 1286218 - RNA, 17 nt, Human
gaacuugaggacacaug

SEQ ID NO: 1286219 - RNA, 16 nt, Human
gaacuugaggacacau

SEQ ID NO: 1286220 - RNA, 15 nt, Human
gaacuugaggacaca

SEQ ID NO: 1286221 - RNA, 14 nt, Human
gaacuugaggacac

SEQ ID NO: 1286222 - RNA, 13 nt, Human
gaacuugaggaca

SEQ ID NO: 1286223 - RNA, 15 nt, Human
gaacuugacccugag

SEQ ID NO: 1286224 - RNA, 23 nt, Human
gaacuuccagguguuacuguaau

SEQ ID NO: 1286225 - RNA, 22 nt, Human
gaacuuccagauccuggaaauc

SEQ ID NO: 1286226 - RNA, 16 nt, Human
gaacuuagauuuuaca

SEQ ID NO: 1286227 - RNA, 17 nt, Human
gaacuuagauuuuacau

SEQ ID NO: 1286228 - RNA, 19 nt, Human
gaacuuagauuuuacauga

SEQ ID NO: 1286229 - RNA, 13 nt, Human
gaacuucagaaag

SEQ ID NO: 1286230 - RNA, 14 nt, Human
gaacuucagaaaga

SEQ ID NO: 1286231 - RNA, 18 nt, Human
gaacuucagaaagacuug

SEQ ID NO: 1286232 - RNA, 21 nt, Human
gaacugucucucaugaaccuc

SEQ ID NO: 1286233 - RNA, 18 nt, Human
gaacuuaaggcauuuguu

SEQ ID NO: 1286234 - RNA, 20 nt, Human
gaacuuagauuuuacaugaa

SEQ ID NO: 1286235 - RNA, 15 nt, Human
gaacucccuuucaac

SEQ ID NO: 1286236 - RNA, 17 nt, Human
gaacugucucucaugaa

SEQ ID NO: 1286237 - RNA, 14 nt, Human
gaacucccuuucaa

SEQ ID NO: 1286238 - RNA, 15 nt, Human
gaacucaacuuugac

SEQ ID NO: 1286239 - RNA, 22 nt, Human
gaacuauuuucaaagacuuaag

SEQ ID NO: 1286240 - RNA, 19 nt, Human
gaacuauuuucaaagacuu

SEQ ID NO: 1286241 - RNA, 20 nt, Human
gaacuauuuucaaagacuua

SEQ ID NO: 1286242 - RNA, 16 nt, Human
gaacucaaauggggcc

SEQ ID NO: 1286243 - RNA, 19 nt, Human
gaacucaaauggggccaga

SEQ ID NO: 1286244 - RNA, 20 nt, Human
gaacucaaauggggccagau

SEQ ID NO: 1286245 - RNA, 22 nt, Human
gaacucaaauggggccagaucc

SEQ ID NO: 1286246 - RNA, 23 nt, Human
gaacucaaauggggccagaucca

SEQ ID NO: 1286247 - RNA, 16 nt, Human
gaacucaacuuugaca

SEQ ID NO: 1286248 - RNA, 22 nt, Human
gaacuuguaaaggaauuuaaaa

SEQ ID NO: 1286249 - RNA, 14 nt, Human
gaagaaaaagaagc

SEQ ID NO: 1286250 - RNA, 20 nt, Human
gaagaaagaacggaagaaga

SEQ ID NO: 1286251 - RNA, 19 nt, Human
gaagaaagaacggaagaag

SEQ ID NO: 1286252 - RNA, 16 nt, Human
gaagaaagaacggaag

SEQ ID NO: 1286253 - RNA, 20 nt, Human
gaagaaacaagguuuucagu

SEQ ID NO: 1286254 - RNA, 21 nt, Human
gaagaagcaccaaucaugaau

SEQ ID NO: 1286255 - RNA, 21 nt, Human
gaacuuguaaaggaauuuaaa

SEQ ID NO: 1286256 - RNA, 24 nt, Human
gaacuugcgagaaauucguguguu

SEQ ID NO: 1286257 - RNA, 22 nt, Human
gaacuugccugccuuuccaucc

SEQ ID NO: 1286258 - RNA, 13 nt, Human
gaaauauuauguu

SEQ ID NO: 1286259 - RNA, 16 nt, Human
gaaauauuauguuaaa

SEQ ID NO: 1286260 - RNA, 15 nt, Human
gaaauauucccuaga

SEQ ID NO: 1286261 - RNA, 16 nt, Human
gaaauggcuuugugau

SEQ ID NO: 1286262 - RNA, 21 nt, Human
gaaaugguacuguacagcugg

SEQ ID NO: 1286263 - RNA, 18 nt, Human
gaaaugguacuguacagc

SEQ ID NO: 1286264 - RNA, 21 nt, Human
gaaauguaaggcuguguaaga

SEQ ID NO: 1286265 - RNA, 14 nt, Human
gaaauguaaggcug

SEQ ID NO: 1286266 - RNA, 21 nt, Human
gaaauguuauuuuuuaauuau

SEQ ID NO: 1286267 - RNA, 22 nt, Human
gaaauguuauuuuuuaauuauu

SEQ ID NO: 1286268 - RNA, 19 nt, Human
gaaauguuuuuaauaaaag

SEQ ID NO: 1286269 - RNA, 21 nt, Human
gaaauguuuuuaauaaaagaa

SEQ ID NO: 1286270 - RNA, 22 nt, Human
gaaauguuuuuaauaaaagaaa

SEQ ID NO: 1286271 - RNA, 17 nt, Human
gaaauuaagaaggcaaa

SEQ ID NO: 1286272 - RNA, 18 nt, Human
gaaauuaagaaggcaaaa

SEQ ID NO: 1286273 - RNA, 22 nt, Human
gaaauuaagaaggcaaaaaugu

SEQ ID NO: 1286274 - RNA, 23 nt, Human
gaaauuaagacuuuauguaguuu

SEQ ID NO: 1286275 - RNA, 17 nt, Human
gaaauuacacccaaaga

SEQ ID NO: 1286276 - RNA, 15 nt, Human
gaaauuaccugugga

SEQ ID NO: 1286277 - RNA, 16 nt, Human
gaaauuaccuguggau

SEQ ID NO: 1286278 - RNA, 15 nt, Human
gaaauucguguguuu

SEQ ID NO: 1286279 - RNA, 19 nt, Human
gaaauucguguguuuuuuu

SEQ ID NO: 1286280 - RNA, 14 nt, Human
gaaauucuccugga

SEQ ID NO: 1286281 - RNA, 15 nt, Human
gaaauucuccuggag

SEQ ID NO: 1286282 - RNA, 16 nt, Human
gaaauucuccuggagg

SEQ ID NO: 1286283 - RNA, 16 nt, Human
gaaauuggaagagcac

SEQ ID NO: 1286284 - RNA, 18 nt, Human
gaaauugcuuuguauugu

SEQ ID NO: 1286285 - RNA, 17 nt, Human
gaaauugccugacgaac

SEQ ID NO: 1286286 - RNA, 19 nt, Human
gaaauugcauuuccugaca

SEQ ID NO: 1286287 - RNA, 15 nt, Human
gaaauugauuuugaa

SEQ ID NO: 1286288 - RNA, 17 nt, Human
gaaauucuccuggaggu

SEQ ID NO: 1286289 - RNA, 17 nt, Human
gaaauucguguguuuuu

SEQ ID NO: 1286290 - RNA, 22 nt, Human
gaaauucuuucccagucugucg

SEQ ID NO: 1286291 - RNA, 23 nt, Human
gaaauucuuucccagucugucga

SEQ ID NO: 1286292 - RNA, 14 nt, Human
gaaauugaaccuuu

SEQ ID NO: 1286293 - RNA, 17 nt, Human
gaaauugaaccuuugug

SEQ ID NO: 1286294 - RNA, 21 nt, Human
gaaauugaaccuuugugcccu

SEQ ID NO: 1286295 - RNA, 13 nt, Human
gaaauugaauacu

SEQ ID NO: 1286296 - RNA, 16 nt, Human
gaaauugaauacuuug

SEQ ID NO: 1286297 - RNA, 17 nt, Human
gaaauugaauacuuuga

SEQ ID NO: 1286298 - RNA, 18 nt, Human
gaaauugaauacuuugaa

SEQ ID NO: 1286299 - RNA, 19 nt, Human
gaaauugaauacuuugaau

SEQ ID NO: 1286300 - RNA, 20 nt, Human
gaaauugaauacuuugaaug

SEQ ID NO: 1286301 - RNA, 22 nt, Human
gaaauugaauacuuugaaugug

SEQ ID NO: 1286302 - RNA, 21 nt, Human
gaaauugaauacuuugaaugu

SEQ ID NO: 1286303 - RNA, 22 nt, Human
gaaauuuuaaccuaugauauuu

SEQ ID NO: 1286304 - RNA, 15 nt, Human
gaaauuuuauaugcu

SEQ ID NO: 1286305 - RNA, 19 nt, Human
gaaauuuuauaugcuuacu

SEQ ID NO: 1286306 - RNA, 22 nt, Human
gaaauuuuauaugcuuacugau

SEQ ID NO: 1286307 - RNA, 13 nt, Human
gaacacuggggac

SEQ ID NO: 1286308 - RNA, 22 nt, Human
gaacacuggggacuuggccucu

SEQ ID NO: 1286309 - RNA, 23 nt, Human
gaacacuggggacuuggccucuc

SEQ ID NO: 1286310 - RNA, 13 nt, Human
gaaauuuaaacua

SEQ ID NO: 1286311 - RNA, 14 nt, Human
gaaauuuaaacuau

SEQ ID NO: 1286312 - RNA, 20 nt, Human
gaaauuuaaacuauaagcaa

SEQ ID NO: 1286313 - RNA, 23 nt, Human
gaaauuuaaacuauaagcaagaa

SEQ ID NO: 1286314 - RNA, 13 nt, Human
gaaauuuaaagca

SEQ ID NO: 1286315 - RNA, 14 nt, Human
gaaauuuaaagcag

SEQ ID NO: 1286316 - RNA, 22 nt, Human
gaaauuuaaagcagguucuugu

SEQ ID NO: 1286317 - RNA, 23 nt, Human
gaaauuuaaagcagguucuuguu

SEQ ID NO: 1286318 - RNA, 12 nt, Human
gaaauuuagcau

SEQ ID NO: 1286319 - RNA, 14 nt, Human
gaaauuuagcauug

SEQ ID NO: 1286320 - RNA, 16 nt, Human
gaaauuuagcauugua

SEQ ID NO: 1286321 - RNA, 18 nt, Human
gaaauuuagcauuguagu

SEQ ID NO: 1286322 - RNA, 11 nt, Human
gaaacauuugg

SEQ ID NO: 1286323 - RNA, 13 nt, Human
gaaacauuuauau

SEQ ID NO: 1286324 - RNA, 14 nt, Human
gaaauaaagucaga

SEQ ID NO: 1286325 - RNA, 19 nt, Human
gaaauaaagucagauggaa

SEQ ID NO: 1286326 - RNA, 20 nt, Human
gaaacaugacucguauaugu

SEQ ID NO: 1286327 - RNA, 17 nt, Human
gaaacaguugcauguag

SEQ ID NO: 1286328 - RNA, 19 nt, Human
gaaacaguugcauguagua

SEQ ID NO: 1286329 - RNA, 20 nt, Human
gaaacaguugcauguaguaa

SEQ ID NO: 1286330 - RNA, 23 nt, Human
gaaacaguugcauguaguaacac

SEQ ID NO: 1286331 - RNA, 18 nt, Human
gaaacaguugguaacuuu

SEQ ID NO: 1286332 - RNA, 19 nt, Human
gaaacaguugguaacuuuu

SEQ ID NO: 1286333 - RNA, 20 nt, Human
gaaacaguugguaacuuuug

SEQ ID NO: 1286334 - RNA, 21 nt, Human
gaaacaguugguaacuuuugu

SEQ ID NO: 1286335 - RNA, 23 nt, Human
gaaacaguugguaacuuuuguga

SEQ ID NO: 1286336 - RNA, 21 nt, Human
gaaauaaauguaucauagaaa

SEQ ID NO: 1286337 - RNA, 15 nt, Human
gaaauaagcuauuug

SEQ ID NO: 1286338 - RNA, 18 nt, Human
gaaauaagcuauuugaug

SEQ ID NO: 1286339 - RNA, 19 nt, Human
gaaauaagcuauuugaugu

SEQ ID NO: 1286340 - RNA, 20 nt, Human
gaaauaagcuauuugaugua

SEQ ID NO: 1286341 - RNA, 23 nt, Human
gaaauaagcuauuugauguaaua

SEQ ID NO: 1286342 - RNA, 18 nt, Human
gaaauaagugcccucucc

SEQ ID NO: 1286343 - RNA, 20 nt, Human
gaaauaagugcccucuccca

SEQ ID NO: 1286344 - RNA, 21 nt, Human
gaaauaaguuuuuguuucaca

SEQ ID NO: 1286345 - RNA, 12 nt, Human
gaaauaaugugu

SEQ ID NO: 1286346 - RNA, 13 nt, Human
gaaauaaugugua

SEQ ID NO: 1286347 - RNA, 22 nt, Human
gaaauaauguguaguucaugua

SEQ ID NO: 1286348 - RNA, 13 nt, Human
gaaauaauuguug

SEQ ID NO: 1286349 - RNA, 15 nt, Human
gaaauaauuguuguu

SEQ ID NO: 1286350 - RNA, 19 nt, Human
gaaauaauuguuguucugu

SEQ ID NO: 1286351 - RNA, 20 nt, Human
gaaauaauuguuguucuguu

SEQ ID NO: 1286352 - RNA, 22 nt, Human
gaaauaauuguuguucuguuaa

SEQ ID NO: 1286353 - RNA, 21 nt, Human
gaaauauacuuuuacaaguaa

SEQ ID NO: 1286354 - RNA, 23 nt, Human
gaaauauacuuuuacaaguaaca

SEQ ID NO: 1286355 - RNA, 19 nt, Human
gaaauaucuucacuuguca

SEQ ID NO: 1286356 - RNA, 20 nt, Human
gaaauaugaagaacugagga

SEQ ID NO: 1286357 - RNA, 17 nt, Human
gaaauaugcacaauagc

SEQ ID NO: 1286358 - RNA, 18 nt, Human
gaaauaugcacaauagca

SEQ ID NO: 1286359 - RNA, 13 nt, Human
gaaauauguauaa

SEQ ID NO: 1286360 - RNA, 18 nt, Human
gaaauacaaaaauacuca

SEQ ID NO: 1286361 - RNA, 21 nt, Human
gaaauaauuguuguucuguua

SEQ ID NO: 1286362 - RNA, 13 nt, Human
gaaauacaaaaau

SEQ ID NO: 1286363 - RNA, 14 nt, Human
gaaauacaaaaaua

SEQ ID NO: 1286364 - RNA, 17 nt, Human
gaaauacagacuggaug

SEQ ID NO: 1286365 - RNA, 17 nt, Human
gaaauacaguucugcuc

SEQ ID NO: 1286366 - RNA, 19 nt, Human
gaaauacaguucugcucug

SEQ ID NO: 1286367 - RNA, 17 nt, Human
gaaauacuacuguguaa

SEQ ID NO: 1286368 - RNA, 14 nt, Human
gaaauacuauuuaa

SEQ ID NO: 1286369 - RNA, 15 nt, Human
gaaauacuauuuaaa

SEQ ID NO: 1286370 - RNA, 21 nt, Human
gaaauacuguaugguuuuguu

SEQ ID NO: 1286371 - RNA, 16 nt, Human
gaaauagaauuauaac

SEQ ID NO: 1286372 - RNA, 18 nt, Human
gaaauagacagcaugaga

SEQ ID NO: 1286373 - RNA, 15 nt, Human
gaaauagcuuaugaa

SEQ ID NO: 1286374 - RNA, 18 nt, Human
gaaauagcuuaugaaaag

SEQ ID NO: 1286375 - RNA, 21 nt, Human
gaaauagcuuaugaaaagaau

SEQ ID NO: 1286376 - RNA, 19 nt, Human
gaaauagcuuaugaaaaga

SEQ ID NO: 1286377 - RNA, 14 nt, Human
gaauacuuuauaaa

SEQ ID NO: 1286378 - RNA, 13 nt, Human
gaauacugcuaca

SEQ ID NO: 1286379 - RNA, 16 nt, Human
gaauacuuugaaugug

SEQ ID NO: 1286380 - RNA, 17 nt, Human
gaauacuuugaaugugu

SEQ ID NO: 1286381 - RNA, 18 nt, Human
gaauacuuugaauguguu

SEQ ID NO: 1286382 - RNA, 24 nt, Human
gaauacuuugcagcacagcugaga

SEQ ID NO: 1286383 - RNA, 19 nt, Human
gaauacuuuugcccuuuga

SEQ ID NO: 1286384 - RNA, 14 nt, Human
gaauacuuuuuaca

SEQ ID NO: 1286385 - RNA, 20 nt, Human
gaauacuuuuuacaauuaaa

SEQ ID NO: 1286386 - RNA, 23 nt, Human
gaauagaaauaaaggaugugauu

SEQ ID NO: 1286387 - RNA, 17 nt, Human
gaauagaagcuaagguu

SEQ ID NO: 1286388 - RNA, 20 nt, Human
gaauaaauuguacagccggc

SEQ ID NO: 1286389 - RNA, 18 nt, Human
gaauaagcucccagggcc

SEQ ID NO: 1286390 - RNA, 15 nt, Human
gaauaaauugcuccu

SEQ ID NO: 1286391 - RNA, 16 nt, Human
gaauaaauugauuuuu

SEQ ID NO: 1286392 - RNA, 17 nt, Human
gaauaaauuguacagcc

SEQ ID NO: 1286393 - RNA, 19 nt, Human
gaauaaauuguacagccgg

SEQ ID NO: 1286394 - RNA, 14 nt, Human
gaauaaaugucacu

SEQ ID NO: 1286395 - RNA, 15 nt, Human
gaauaaaugucacuu

SEQ ID NO: 1286396 - RNA, 16 nt, Human
gaauaaaugucacuuu

SEQ ID NO: 1286397 - RNA, 18 nt, Human
gaauaaaugucacuuuuu

SEQ ID NO: 1286398 - RNA, 23 nt, Human
gaauaaaugucacuuuuugaggc

SEQ ID NO: 1286399 - RNA, 17 nt, Human
gaauaagguacaagaag

SEQ ID NO: 1286400 - RNA, 19 nt, Human
gaauaagguacaagaagca

SEQ ID NO: 1286401 - RNA, 20 nt, Human
gaauaagguacaagaagcau

SEQ ID NO: 1286402 - RNA, 23 nt, Human
gaauaagguacaagaagcauuuu

SEQ ID NO: 1286403 - RNA, 12 nt, Human
gaauaaguuauu

SEQ ID NO: 1286404 - RNA, 13 nt, Human
gaauaaguuauug

SEQ ID NO: 1286405 - RNA, 14 nt, Human
gaauaaguuauugc

SEQ ID NO: 1286406 - RNA, 16 nt, Human
gaauaaguuauugcag

SEQ ID NO: 1286407 - RNA, 18 nt, Human
gaauaaguuauugcaguu

SEQ ID NO: 1286408 - RNA, 19 nt, Human
gaauaaguuauugcaguuu

SEQ ID NO: 1286409 - RNA, 13 nt, Human
gaauaaagcaauu

SEQ ID NO: 1286410 - RNA, 11 nt, Human
gaauaaagcaa

SEQ ID NO: 1286411 - RNA, 17 nt, Human
gaauaaagaaugaaugg

SEQ ID NO: 1286412 - RNA, 14 nt, Human
gaauaaagacaccu

SEQ ID NO: 1286413 - RNA, 15 nt, Human
gaauaaacauuuguu

SEQ ID NO: 1286414 - RNA, 16 nt, Human
gaauaaacauuuguua

SEQ ID NO: 1286415 - RNA, 15 nt, Human
gaauaaaggcaguuu

SEQ ID NO: 1286416 - RNA, 16 nt, Human
gaauaaaggcaguuuu

SEQ ID NO: 1286417 - RNA, 17 nt, Human
gaauaaaggcaguuuuc

SEQ ID NO: 1286418 - RNA, 19 nt, Human
gaauaaaggcaguuuucua

SEQ ID NO: 1286419 - RNA, 20 nt, Human
gaauaaaggcaguuuucuaa

SEQ ID NO: 1286420 - RNA, 12 nt, Human
gaauaaaauuuu

SEQ ID NO: 1286421 - RNA, 11 nt, Human
gaaguuucauc

SEQ ID NO: 1286422 - RNA, 17 nt, Human
gaaguuuagcucugaga

SEQ ID NO: 1286423 - RNA, 16 nt, Human
gaaguaaacuuuuugu

SEQ ID NO: 1286424 - RNA, 19 nt, Human
gaaguaaaagcaaaaaaga

SEQ ID NO: 1286425 - RNA, 13 nt, Human
gaaguaaacuuuu

SEQ ID NO: 1286426 - RNA, 20 nt, Human
gaaguaaacuuuuuguucug

SEQ ID NO: 1286427 - RNA, 15 nt, Human
gaauagccacauuug

SEQ ID NO: 1286428 - RNA, 18 nt, Human
gaauagccacauuuggaa

SEQ ID NO: 1286429 - RNA, 23 nt, Human
gaauagccacauuuggaauacuu

SEQ ID NO: 1286430 - RNA, 19 nt, Human
gaauagauaugaaagcuga

SEQ ID NO: 1286431 - RNA, 18 nt, Human
gaauagccauauuuguaa

SEQ ID NO: 1286432 - RNA, 15 nt, Human
gaauagaugcugacu

SEQ ID NO: 1286433 - RNA, 15 nt, Human
gaauagcaugucacu

SEQ ID NO: 1286434 - RNA, 18 nt, Human
gaauagaagcuaagguuu

SEQ ID NO: 1286435 - RNA, 20 nt, Human
gaauacuuugaauguguuuc

SEQ ID NO: 1286436 - RNA, 16 nt, Human
gaauagauaugaaagc

SEQ ID NO: 1286437 - RNA, 23 nt, Human
gaauagccauauuuguaaaauga

SEQ ID NO: 1286438 - RNA, 21 nt, Human
gaaucaauaauauauuuucug

SEQ ID NO: 1286439 - RNA, 20 nt, Human
gaaucacuguuuagaacaca

SEQ ID NO: 1286440 - RNA, 17 nt, Human
gaauccacauuucuaaa

SEQ ID NO: 1286441 - RNA, 18 nt, Human
gaauccacauuucuaaaa

SEQ ID NO: 1286442 - RNA, 16 nt, Human
gaauccacauuucuaa

SEQ ID NO: 1286443 - RNA, 19 nt, Human
gaaucccagcccccugacc

SEQ ID NO: 1286444 - RNA, 22 nt, Human
gaaucccagcccccugaccacu

SEQ ID NO: 1286445 - RNA, 19 nt, Human
gaauccccaacaugcacug

SEQ ID NO: 1286446 - RNA, 16 nt, Human
gaaucccuuaacaguu

SEQ ID NO: 1286447 - RNA, 13 nt, Human
gaaucagaacuca

SEQ ID NO: 1286448 - RNA, 23 nt, Human
gaaucagagaccuuccagaaaua

SEQ ID NO: 1286449 - RNA, 18 nt, Human
gaaucagccuacaggccu

SEQ ID NO: 1286450 - RNA, 20 nt, Human
gaaucauuguauguggucau

SEQ ID NO: 1286451 - RNA, 13 nt, Human
gaaucauuuagca

SEQ ID NO: 1286452 - RNA, 22 nt, Human
gaaucauuucuauuucuccucc

SEQ ID NO: 1286453 - RNA, 24 nt, Human
gaaucauuuagcauguuguugaaa

SEQ ID NO: 1286454 - RNA, 23 nt, Human
gaaucucaguugauuuucuggau

SEQ ID NO: 1286455 - RNA, 19 nt, Human
gaaucugugggucugggag

SEQ ID NO: 1286456 - RNA, 20 nt, Human
gaaucugugggucugggagu

SEQ ID NO: 1286457 - RNA, 14 nt, Human
gaaucugugugaaa

SEQ ID NO: 1286458 - RNA, 21 nt, Human
gaaucuuaagguguagccaca

SEQ ID NO: 1286459 - RNA, 19 nt, Human
gaaucccuuaacaguugua

SEQ ID NO: 1286460 - RNA, 21 nt, Human
gaaucccuuaacaguuguauu

SEQ ID NO: 1286461 - RNA, 20 nt, Human
gaauccuaggcuccacccca

SEQ ID NO: 1286462 - RNA, 14 nt, Human
gaauccugucgauu

SEQ ID NO: 1286463 - RNA, 22 nt, Human
gaaucuuaagguguagccacac

SEQ ID NO: 1286464 - RNA, 15 nt, Human
gaaucuugguuugcc

SEQ ID NO: 1286465 - RNA, 20 nt, Human
gaaucuugguuugccuucca

SEQ ID NO: 1286466 - RNA, 23 nt, Human
gaaucuugguuugccuuccagaa

SEQ ID NO: 1286467 - RNA, 20 nt, Human
gaaggcagggaggaggcaga

SEQ ID NO: 1286468 - RNA, 18 nt, Human
gaaggcagggaggaggca

SEQ ID NO: 1286469 - RNA, 17 nt, Human
gaaggcagggaggaggc

SEQ ID NO: 1286470 - RNA, 14 nt, Human
gaaggcagggaggg

SEQ ID NO: 1286471 - RNA, 16 nt, Human
gaaggcagggaggagg

SEQ ID NO: 1286472 - RNA, 14 nt, Human
gaaggcagggagga

SEQ ID NO: 1286473 - RNA, 13 nt, Human
gaaggcagggagg

SEQ ID NO: 1286474 - RNA, 16 nt, Human
gaaggcaggcagggcu

SEQ ID NO: 1286475 - RNA, 17 nt, Human
gaaggcaggcagggcuc

SEQ ID NO: 1286476 - RNA, 18 nt, Human
gaaggcaggcagggcucu

SEQ ID NO: 1286477 - RNA, 19 nt, Human
gaaggcaggcagggcucuc

SEQ ID NO: 1286478 - RNA, 21 nt, Human
gaaggcaggcagggcucuccu

SEQ ID NO: 1286479 - RNA, 22 nt, Human
gaaggcaggcagggcucuccug

SEQ ID NO: 1286480 - RNA, 23 nt, Human
gaaggcaggcagggcucuccugg

SEQ ID NO: 1286481 - RNA, 11 nt, Human
gaaggcaagau

SEQ ID NO: 1286482 - RNA, 13 nt, Human
gaaggcaggcagg

SEQ ID NO: 1286483 - RNA, 14 nt, Human
gaaggcaggcaggg

SEQ ID NO: 1286484 - RNA, 15 nt, Human
gaaggcaggcagggc

SEQ ID NO: 1286485 - RNA, 17 nt, Human
gaagggguuggauugca

SEQ ID NO: 1286486 - RNA, 13 nt, Human
gaaggguaaacaa

SEQ ID NO: 1286487 - RNA, 17 nt, Human
gaaggguaaacaauaua

SEQ ID NO: 1286488 - RNA, 13 nt, Human
gaagguacuguau

SEQ ID NO: 1286489 - RNA, 22 nt, Human
gaagguaaauaaaaagaaaggc

SEQ ID NO: 1286490 - RNA, 20 nt, Human
gaagguuaucagugcuuccc

SEQ ID NO: 1286491 - RNA, 14 nt, Human
gaaggguaaacaau

SEQ ID NO: 1286492 - RNA, 13 nt, Human
gaagguaaauaaa

SEQ ID NO: 1286493 - RNA, 17 nt, Human
gaagguaaauaaaaaga

SEQ ID NO: 1286494 - RNA, 19 nt, Human
gaaggacuaauagaaaagu

SEQ ID NO: 1286495 - RNA, 21 nt, Human
gaaggacuaugaaaagcuaga

SEQ ID NO: 1286496 - RNA, 20 nt, Human
gaaggacuaauagaaaagua

SEQ ID NO: 1286497 - RNA, 19 nt, Human
gaaggaucccaugagcucc

SEQ ID NO: 1286498 - RNA, 15 nt, Human
gaaggcaaagcacga

SEQ ID NO: 1286499 - RNA, 20 nt, Human
gaaggagccccauuccuggg

SEQ ID NO: 1286500 - RNA, 21 nt, Human
gaaggagccccauuccuggga

SEQ ID NO: 1286501 - RNA, 22 nt, Human
gaaggagccccauuccugggaa

SEQ ID NO: 1286502 - RNA, 12 nt, Human
gaaggagcugcc

SEQ ID NO: 1286503 - RNA, 14 nt, Human
gaaggagcugccug

SEQ ID NO: 1286504 - RNA, 15 nt, Human
gaaggagcugccugg

SEQ ID NO: 1286505 - RNA, 16 nt, Human
gaaggagcugccugga

SEQ ID NO: 1286506 - RNA, 17 nt, Human
gaaggagcugccuggac

SEQ ID NO: 1286507 - RNA, 19 nt, Human
gaaggagcugccuggaccc

SEQ ID NO: 1286508 - RNA, 18 nt, Human
gaaggagcugccuggacc

SEQ ID NO: 1286509 - RNA, 22 nt, Human
gaagccacgguguucugugaua

SEQ ID NO: 1286510 - RNA, 15 nt, Human
gaagacuccuagcug

SEQ ID NO: 1286511 - RNA, 17 nt, Human
gaagacugcauuauauu

SEQ ID NO: 1286512 - RNA, 20 nt, Human
gaagccacgggugccagaag

SEQ ID NO: 1286513 - RNA, 13 nt, Human
gaagccagcuugu

SEQ ID NO: 1286514 - RNA, 18 nt, Human
gaagccagcuuguuuaca

SEQ ID NO: 1286515 - RNA, 22 nt, Human
gaagccagcuuucccugccucu

SEQ ID NO: 1286516 - RNA, 19 nt, Human
gaagccaggaauuucccag

SEQ ID NO: 1286517 - RNA, 21 nt, Human
gaagccaggaauuucccagga

SEQ ID NO: 1286518 - RNA, 23 nt, Human
gaagccaggaauuucccaggacc

SEQ ID NO: 1286519 - RNA, 24 nt, Human
gaagccaggaauuucccaggaccc

SEQ ID NO: 1286520 - RNA, 22 nt, Human
gaagccagcuuguuuacaugcu

SEQ ID NO: 1286521 - RNA, 17 nt, Human
gaagccaucaccucaga

SEQ ID NO: 1286522 - RNA, 18 nt, Human
gaagccaucaccucagau

SEQ ID NO: 1286523 - RNA, 20 nt, Human
gaagccaucaccucagaugg

SEQ ID NO: 1286524 - RNA, 22 nt, Human
gaagccaucaccucagauggca

SEQ ID NO: 1286525 - RNA, 23 nt, Human
gaagccaugaguuccagaaagua

SEQ ID NO: 1286526 - RNA, 19 nt, Human
gaagccuccuuagaaaaaa

SEQ ID NO: 1286527 - RNA, 19 nt, Human
gaagccucagauuccuucc

SEQ ID NO: 1286528 - RNA, 20 nt, Human
gaagccucagauuccuuccc

SEQ ID NO: 1286529 - RNA, 21 nt, Human
gaagccucagauuccuuccca

SEQ ID NO: 1286530 - RNA, 22 nt, Human
gaagccucagauuccuucccau

SEQ ID NO: 1286531 - RNA, 22 nt, Human
gaagccguccuggcgccuggca

SEQ ID NO: 1286532 - RNA, 20 nt, Human
gaagccgugcucgccccagc

SEQ ID NO: 1286533 - RNA, 16 nt, Human
gaagccucagauuccu

SEQ ID NO: 1286534 - RNA, 14 nt, Human
gaagcccagagggu

SEQ ID NO: 1286535 - RNA, 18 nt, Human
gaagcccaauugcuggag

SEQ ID NO: 1286536 - RNA, 13 nt, Human
gaagcccagaggg

SEQ ID NO: 1286537 - RNA, 17 nt, Human
gaagcccagagggucug

SEQ ID NO: 1286538 - RNA, 18 nt, Human
gaagcuuuuaugugaaac

SEQ ID NO: 1286539 - RNA, 20 nt, Human
gaagcuuuggugagaaccug

SEQ ID NO: 1286540 - RNA, 18 nt, Human
gaagcuuggggaagaccc

SEQ ID NO: 1286541 - RNA, 19 nt, Human
gaagcuuggggaagaccca

SEQ ID NO: 1286542 - RNA, 14 nt, Human
gaagcuuuggugag

SEQ ID NO: 1286543 - RNA, 21 nt, Human
gaagccuuggggcugaugcag

SEQ ID NO: 1286544 - RNA, 10 nt, Human
gaagccuuug

SEQ ID NO: 1286545 - RNA, 11 nt, Human
gaagccuuugu

SEQ ID NO: 1286546 - RNA, 13 nt, Human
cuuuccacagaag

SEQ ID NO: 1286547 - RNA, 17 nt, Human
cuuucccaacaccucuu

SEQ ID NO: 1286548 - RNA, 15 nt, Human
cuuuccaccacagcc

SEQ ID NO: 1286549 - RNA, 17 nt, Human
cuuuccaccacagccag

SEQ ID NO: 1286550 - RNA, 21 nt, Human
cuuuccaccacagccagcacc

SEQ ID NO: 1286551 - RNA, 22 nt, Human
cuuuccaccacagccagcaccu

SEQ ID NO: 1286552 - RNA, 23 nt, Human
cuuuccaccacagccagcaccug

SEQ ID NO: 1286553 - RNA, 14 nt, Human
cuuucauuugcuuu

SEQ ID NO: 1286554 - RNA, 18 nt, Human
cuuucauuugcuuuggaa

SEQ ID NO: 1286555 - RNA, 17 nt, Human
cuuucauuuucucucag

SEQ ID NO: 1286556 - RNA, 18 nt, Human
cuuucauuuucucucagg

SEQ ID NO: 1286557 - RNA, 21 nt, Human
cuuucauuuucucucagguga

SEQ ID NO: 1286558 - RNA, 19 nt, Human
cuuucauuuucucucaggu

SEQ ID NO: 1286559 - RNA, 13 nt, Human
cuuucauauaguu

SEQ ID NO: 1286560 - RNA, 16 nt, Human
cuuucauauuuuaaac

SEQ ID NO: 1286561 - RNA, 19 nt, Human
cuuucauauuuuaaacaga

SEQ ID NO: 1286562 - RNA, 23 nt, Human
cuuucauauuuuaaacagaggau

SEQ ID NO: 1286563 - RNA, 23 nt, Human
cuuucauauaguuagcuaauaaa

SEQ ID NO: 1286564 - RNA, 16 nt, Human
cuuucaucacacuggg

SEQ ID NO: 1286565 - RNA, 19 nt, Human
cuuucaucacacugggugg

SEQ ID NO: 1286566 - RNA, 15 nt, Human
cuuucauuucuucua

SEQ ID NO: 1286567 - RNA, 18 nt, Human
cuuucaucacacugggug

SEQ ID NO: 1286568 - RNA, 21 nt, Human
cuuuauuuucuauaauuuaaa

SEQ ID NO: 1286569 - RNA, 22 nt, Human
cuuuauuuguuaauaguuccug

SEQ ID NO: 1286570 - RNA, 22 nt, Human
cuuuauuuuaaccuuugauaga

SEQ ID NO: 1286571 - RNA, 23 nt, Human
cuuuauuccagaaugcuguacau

SEQ ID NO: 1286572 - RNA, 18 nt, Human
cuuuauuccuucauuuca

SEQ ID NO: 1286573 - RNA, 16 nt, Human
cuuuauuggcugagau

SEQ ID NO: 1286574 - RNA, 18 nt, Human
cuuuauuggcugagauau

SEQ ID NO: 1286575 - RNA, 19 nt, Human
cuuuauaagaaagccugag

SEQ ID NO: 1286576 - RNA, 18 nt, Human
cuuuauaacuaacauguc

SEQ ID NO: 1286577 - RNA, 13 nt, Human
cuuuauaaaugua

SEQ ID NO: 1286578 - RNA, 12 nt, Human
cuuuauaagaaa

SEQ ID NO: 1286579 - RNA, 13 nt, Human
cuuuauaagaaag

SEQ ID NO: 1286580 - RNA, 15 nt, Human
cuuuauaagaaagcc

SEQ ID NO: 1286581 - RNA, 16 nt, Human
cuuuauaagaaagccu

SEQ ID NO: 1286582 - RNA, 18 nt, Human
cuuuauaagaaagccuga

SEQ ID NO: 1286583 - RNA, 20 nt, Human
cuuuauucuggcagaggagg

SEQ ID NO: 1286584 - RNA, 20 nt, Human
cuuuauuccagaaugcugua

SEQ ID NO: 1286585 - RNA, 20 nt, Human
cuuuauguuacuacaugcac

SEQ ID NO: 1286586 - RNA, 14 nt, Human
cuuuauuaaaaacu

SEQ ID NO: 1286587 - RNA, 17 nt, Human
cuuuauuaaaaacugag

SEQ ID NO: 1286588 - RNA, 16 nt, Human
cuuuagaauaugccuu

SEQ ID NO: 1286589 - RNA, 14 nt, Human
cuuuagaagccugc

SEQ ID NO: 1286590 - RNA, 15 nt, Human
cuuuagaaucccagc

SEQ ID NO: 1286591 - RNA, 15 nt, Human
cuuuagaagccugca

SEQ ID NO: 1286592 - RNA, 18 nt, Human
cuuuagaaucccagcccc

SEQ ID NO: 1286593 - RNA, 20 nt, Human
cuuuagaaucccagcccccu

SEQ ID NO: 1286594 - RNA, 21 nt, Human
cuuuagaaucccagcccccug

SEQ ID NO: 1286595 - RNA, 14 nt, Human
cuuuacuuuuaaac

SEQ ID NO: 1286596 - RNA, 14 nt, Human
cuuuagaaacagug

SEQ ID NO: 1286597 - RNA, 23 nt, Human
cuuuagaaacagugcaacacugg

SEQ ID NO: 1286598 - RNA, 16 nt, Human
cuuuacuuaaaaauau

SEQ ID NO: 1286599 - RNA, 21 nt, Human
cuuguuuuuuuuuuccacuua

SEQ ID NO: 1286600 - RNA, 23 nt, Human
cuuguuuuuuguuuguuuguugc

SEQ ID NO: 1286601 - RNA, 19 nt, Human
cuuguuuuuuuuuuccacu

SEQ ID NO: 1286602 - RNA, 20 nt, Human
cuuguuuuuuuuuuccacuu

SEQ ID NO: 1286603 - RNA, 14 nt, Human
cuuguuuucuggga

SEQ ID NO: 1286604 - RNA, 14 nt, Human
cuuguuuuggacag

SEQ ID NO: 1286605 - RNA, 13 nt, Human
cuuguuuuggaug

SEQ ID NO: 1286606 - RNA, 14 nt, Human
cuuguuuuggaugc

SEQ ID NO: 1286607 - RNA, 12 nt, Human
cuuguuuuugca

SEQ ID NO: 1286608 - RNA, 16 nt, Human
cuuguuuuugcacaug

SEQ ID NO: 1286609 - RNA, 16 nt, Human
cuuguggcagcaacgg

SEQ ID NO: 1286610 - RNA, 12 nt, Human
cuugugggccug

SEQ ID NO: 1286611 - RNA, 14 nt, Human
cuugugggccuggg

SEQ ID NO: 1286612 - RNA, 15 nt, Human
cuugugggccugggc

SEQ ID NO: 1286613 - RNA, 16 nt, Human
cuugugggccugggcu

SEQ ID NO: 1286614 - RNA, 17 nt, Human
cuugugggccugggcuc

SEQ ID NO: 1286615 - RNA, 19 nt, Human
cuugugggccugggcuccu

SEQ ID NO: 1286616 - RNA, 21 nt, Human
cuugugggccugggcuccugg

SEQ ID NO: 1286617 - RNA, 23 nt, Human
cuugugggccugggcuccuggac

SEQ ID NO: 1286618 - RNA, 12 nt, Human
cuuguggggccu

SEQ ID NO: 1286619 - RNA, 22 nt, Human
cuugugggccugggcuccugga

SEQ ID NO: 1286620 - RNA, 13 nt, Human
cuuguguuggcug

SEQ ID NO: 1286621 - RNA, 14 nt, Human
cuuguguuggcugu

SEQ ID NO: 1286622 - RNA, 17 nt, Human
cuuguguuggcuguggc

SEQ ID NO: 1286623 - RNA, 23 nt, Human
cuuguuggcguaggcuacagaga

SEQ ID NO: 1286624 - RNA, 22 nt, Human
cuuguuggcguaggcuacagag

SEQ ID NO: 1286625 - RNA, 17 nt, Human
cuuguugugcuuuuagu

SEQ ID NO: 1286626 - RNA, 15 nt, Human
cuuguugugcuuuua

SEQ ID NO: 1286627 - RNA, 16 nt, Human
cuuguuguuucuugcc

SEQ ID NO: 1286628 - RNA, 15 nt, Human
cuuguuguuucuugc

SEQ ID NO: 1286629 - RNA, 17 nt, Human
cuuguuuggggcaggag

SEQ ID NO: 1286630 - RNA, 18 nt, Human
cuuguuuggggcaggagu

SEQ ID NO: 1286631 - RNA, 19 nt, Human
cuuguuuggggcaggagua

SEQ ID NO: 1286632 - RNA, 19 nt, Human
cuuguaaaggaauuuaaaa

SEQ ID NO: 1286633 - RNA, 22 nt, Human
cuuggggagaccucuacugccu

SEQ ID NO: 1286634 - RNA, 19 nt, Human
cuuggggaguuaagaccug

SEQ ID NO: 1286635 - RNA, 20 nt, Human
cuuggggaguuaagaccugg

SEQ ID NO: 1286636 - RNA, 21 nt, Human
cuuggggaguuaagaccuggc

SEQ ID NO: 1286637 - RNA, 22 nt, Human
cuugggcagagcuggcucugag

SEQ ID NO: 1286638 - RNA, 23 nt, Human
cuugggcagagcuggcucugagc

SEQ ID NO: 1286639 - RNA, 14 nt, Human
cuugggcagcaucc

SEQ ID NO: 1286640 - RNA, 22 nt, Human
cuuggaguauuggggucugacc

SEQ ID NO: 1286641 - RNA, 14 nt, Human
cuuggcuggaccca

SEQ ID NO: 1286642 - RNA, 15 nt, Human
cuuggcuggacccag

SEQ ID NO: 1286643 - RNA, 16 nt, Human
cuuggcuggacccagc

SEQ ID NO: 1286644 - RNA, 17 nt, Human
cuuggcuggacccagcc

SEQ ID NO: 1286645 - RNA, 18 nt, Human
cuuggcuggacccagcca

SEQ ID NO: 1286646 - RNA, 11 nt, Human
cuuggcuggug

SEQ ID NO: 1286647 - RNA, 20 nt, Human
cuuggcuggacccagccagg

SEQ ID NO: 1286648 - RNA, 22 nt, Human
cuugggaaaggugguguuucug

SEQ ID NO: 1286649 - RNA, 18 nt, Human
cuugggaagacuccuagc

SEQ ID NO: 1286650 - RNA, 20 nt, Human
cuugggaagacuccuagcug

SEQ ID NO: 1286651 - RNA, 21 nt, Human
cuugggaagacuccuagcugu

SEQ ID NO: 1286652 - RNA, 10 nt, Human
cuugggaaug

SEQ ID NO: 1286653 - RNA, 18 nt, Human
cuugggaauggauccugg

SEQ ID NO: 1286654 - RNA, 13 nt, Human
cuugggaauuuua

SEQ ID NO: 1286655 - RNA, 20 nt, Human
cuugggacuaaaugcccugc

SEQ ID NO: 1286656 - RNA, 19 nt, Human
cuugggacuaaaugcccug

SEQ ID NO: 1286657 - RNA, 14 nt, Human
cuugggcagagcug

SEQ ID NO: 1286658 - RNA, 15 nt, Human
cuugggcagagcugg

SEQ ID NO: 1286659 - RNA, 18 nt, Human
cuugggcagagcuggcuc

SEQ ID NO: 1286660 - RNA, 19 nt, Human
cuugggcagagcuggcucu

SEQ ID NO: 1286661 - RNA, 20 nt, Human
cuugggcagagcuggcucug

SEQ ID NO: 1286662 - RNA, 17 nt, Human
cuuggagcugagcaaau

SEQ ID NO: 1286663 - RNA, 14 nt, Human
cuuggagcugagca

SEQ ID NO: 1286664 - RNA, 14 nt, Human
cuuggagcugugag

SEQ ID NO: 1286665 - RNA, 17 nt, Human
cuuggaggagaugggga

SEQ ID NO: 1286666 - RNA, 18 nt, Human
cuuggaguauuggggucu

SEQ ID NO: 1286667 - RNA, 23 nt, Human
cuuggagcugugaguucucccug

SEQ ID NO: 1286668 - RNA, 14 nt, Human
cuugccacugccuc

SEQ ID NO: 1286669 - RNA, 15 nt, Human
cuugccacugccucu

SEQ ID NO: 1286670 - RNA, 11 nt, Human
cuugccagaga

SEQ ID NO: 1286671 - RNA, 12 nt, Human
cuugccagagau

SEQ ID NO: 1286672 - RNA, 16 nt, Human
cuugccagagauccaa

SEQ ID NO: 1286673 - RNA, 23 nt, Human
cuugccagagauccaaaagaagc

SEQ ID NO: 1286674 - RNA, 18 nt, Human
cuugcccuggugccucac

SEQ ID NO: 1286675 - RNA, 17 nt, Human
cuugcccgcucaggcug

SEQ ID NO: 1286676 - RNA, 15 nt, Human
cuugcccuaagcaga

SEQ ID NO: 1286677 - RNA, 16 nt, Human
cuugcccuaagcagaa

SEQ ID NO: 1286678 - RNA, 18 nt, Human
cuugcccuaagcagaaag

SEQ ID NO: 1286679 - RNA, 16 nt, Human
cuugccccccuggccu

SEQ ID NO: 1286680 - RNA, 21 nt, Human
cuugccccccuggccuccccc

SEQ ID NO: 1286681 - RNA, 22 nt, Human
cuugccccccuggccuccccca

SEQ ID NO: 1286682 - RNA, 15 nt, Human
cuugcugugaauuaa

SEQ ID NO: 1286683 - RNA, 19 nt, Human
cuugcuuuucaugcaaacu

SEQ ID NO: 1286684 - RNA, 15 nt, Human
cuugcuuauuugaca

SEQ ID NO: 1286685 - RNA, 15 nt, Human
cuugcuuaccucuca

SEQ ID NO: 1286686 - RNA, 16 nt, Human
cuuggaacauuggaau

SEQ ID NO: 1286687 - RNA, 15 nt, Human
cuuggaacugaaggg

SEQ ID NO: 1286688 - RNA, 11 nt, Human
cuuggaacugc

SEQ ID NO: 1286689 - RNA, 13 nt, Human
cuuggaacugcau

SEQ ID NO: 1286690 - RNA, 15 nt, Human
cuuggaacuugccug

SEQ ID NO: 1286691 - RNA, 19 nt, Human
cuuggaacuugccugccuu

SEQ ID NO: 1286692 - RNA, 22 nt, Human
cuuggaacuugccugccuuucc

SEQ ID NO: 1286693 - RNA, 23 nt, Human
cuuggaacuugccugccuuucca

SEQ ID NO: 1286694 - RNA, 14 nt, Human
cuuuuuucuaaagu

SEQ ID NO: 1286695 - RNA, 20 nt, Human
cuuuuuucucugauacagaa

SEQ ID NO: 1286696 - RNA, 12 nt, Human
cuuuuuucccca

SEQ ID NO: 1286697 - RNA, 15 nt, Human
cuuuuuuccccagac

SEQ ID NO: 1286698 - RNA, 12 nt, Human
cuuuugacacug

SEQ ID NO: 1286699 - RNA, 17 nt, Human
cuuuugacacugcucua

SEQ ID NO: 1286700 - RNA, 18 nt, Human
cuuuugacacugcucuaa

SEQ ID NO: 1286701 - RNA, 22 nt, Human
cuuuuuucucugauacagaaaa

SEQ ID NO: 1286702 - RNA, 16 nt, Human
cuuuuuuggccaucug

SEQ ID NO: 1286703 - RNA, 12 nt, Human
gaaaaaguaacu

SEQ ID NO: 1286704 - RNA, 14 nt, Human
gaaaaaguuuguuu

SEQ ID NO: 1286705 - RNA, 13 nt, Human
gaaaaauaaagaa

SEQ ID NO: 1286706 - RNA, 22 nt, Human
gaaaacaauaacgauaaaagac

SEQ ID NO: 1286707 - RNA, 14 nt, Human
gaaaaauaaagaaa

SEQ ID NO: 1286708 - RNA, 17 nt, Human
gaaaaauaaagaaaaga

SEQ ID NO: 1286709 - RNA, 19 nt, Human
gaaaaauaaagaaaagaug

SEQ ID NO: 1286710 - RNA, 14 nt, Human
gaaaacaugcagaa

SEQ ID NO: 1286711 - RNA, 18 nt, Human
gaaaaccaagccguggcu

SEQ ID NO: 1286712 - RNA, 19 nt, Human
gaaaaccaagccguggcuu

SEQ ID NO: 1286713 - RNA, 21 nt, Human
gaaaaccaagccguggcuucc

SEQ ID NO: 1286714 - RNA, 15 nt, Human
gaaaaccagcucagc

SEQ ID NO: 1286715 - RNA, 20 nt, Human
gaaaaccagcucagcacugc

SEQ ID NO: 1286716 - RNA, 16 nt, Human
gaaaagcuaagagaag

SEQ ID NO: 1286717 - RNA, 23 nt, Human
gaaaagcuagaauugaguguuua

SEQ ID NO: 1286718 - RNA, 19 nt, Human
gaaaauaacgauaaaagac

SEQ ID NO: 1286719 - RNA, 18 nt, Human
gaaaauaagaauagaaau

SEQ ID NO: 1286720 - RNA, 17 nt, Human
gaaaauaagagcucagg

SEQ ID NO: 1286721 - RNA, 19 nt, Human
gaaaauaagagcucaggau

SEQ ID NO: 1286722 - RNA, 13 nt, Human
gaaaauaaggcac

SEQ ID NO: 1286723 - RNA, 21 nt, Human
gaaaauaaggcacccaucugu

SEQ ID NO: 1286724 - RNA, 18 nt, Human
gaaaauaaucauucuuau

SEQ ID NO: 1286725 - RNA, 12 nt, Human
gaaaauaucacu

SEQ ID NO: 1286726 - RNA, 19 nt, Human
gaaaaucuuauaauuuaaa

SEQ ID NO: 1286727 - RNA, 22 nt, Human
gaaacacccucacacugggacu

SEQ ID NO: 1286728 - RNA, 19 nt, Human
gaaacacccucacacuggg

SEQ ID NO: 1286729 - RNA, 18 nt, Human
gaaacacccucacacugg

SEQ ID NO: 1286730 - RNA, 22 nt, Human
gaaacacugggcuucuagaacc

SEQ ID NO: 1286731 - RNA, 20 nt, Human
gaaaaucuuauaauuuaaaa

SEQ ID NO: 1286732 - RNA, 14 nt, Human
gaaacacagaaacc

SEQ ID NO: 1286733 - RNA, 15 nt, Human
gaaaaucaaauggua

SEQ ID NO: 1286734 - RNA, 16 nt, Human
gaaacacuuugcauaa

SEQ ID NO: 1286735 - RNA, 11 nt, Human
gaaacagaaaa

SEQ ID NO: 1286736 - RNA, 22 nt, Human
gaaacagaaaaauauguaccaa

SEQ ID NO: 1286737 - RNA, 14 nt, Human
gaaacagaaacaaa

SEQ ID NO: 1286738 - RNA, 22 nt, Human
gaaacagaaacaaaaacacuaa

SEQ ID NO: 1286739 - RNA, 13 nt, Human
gaaacagcaucuc

SEQ ID NO: 1286740 - RNA, 17 nt, Human
gaaacagcaucuccaag

SEQ ID NO: 1286741 - RNA, 18 nt, Human
gaaacagcaucuccaagc

SEQ ID NO: 1286742 - RNA, 15 nt, Human
gaaacagcucgacuu

SEQ ID NO: 1286743 - RNA, 20 nt, Human
gaaacagcucgacuuuaaaa

SEQ ID NO: 1286744 - RNA, 17 nt, Human
cuuuucuccucacugua

SEQ ID NO: 1286745 - RNA, 17 nt, Human
cuuuucucugguaauau

SEQ ID NO: 1286746 - RNA, 19 nt, Human
cuuuucccccauuaaucag

SEQ ID NO: 1286747 - RNA, 20 nt, Human
cuuuucccucuuuggcuccc

SEQ ID NO: 1286748 - RNA, 22 nt, Human
cuuuucccucuuuggcuccccu

SEQ ID NO: 1286749 - RNA, 14 nt, Human
cuuuucccaaccau

SEQ ID NO: 1286750 - RNA, 13 nt, Human
cuuuucccacucc

SEQ ID NO: 1286751 - RNA, 17 nt, Human
cuuuucccacuccaagc

SEQ ID NO: 1286752 - RNA, 18 nt, Human
cuuuucccacuguuuaag

SEQ ID NO: 1286753 - RNA, 21 nt, Human
cuuuucccauuuaucuaaaua

SEQ ID NO: 1286754 - RNA, 22 nt, Human
cuuuucccacuccaagcccagc

SEQ ID NO: 1286755 - RNA, 23 nt, Human
cuuuucccccauuaaucaguuca

SEQ ID NO: 1286756 - RNA, 18 nt, Human
cuuuucuggaauguaauc

SEQ ID NO: 1286757 - RNA, 19 nt, Human
cuuuucuggaauguaauca

SEQ ID NO: 1286758 - RNA, 16 nt, Human
cuuuucugaccaaaga

SEQ ID NO: 1286759 - RNA, 13 nt, Human
cuuuucuguaauu

SEQ ID NO: 1286760 - RNA, 14 nt, Human
cuuuucuguaauuc

SEQ ID NO: 1286761 - RNA, 15 nt, Human
cuuuucuguaauuca

SEQ ID NO: 1286762 - RNA, 16 nt, Human
cuuuucuguaauucag

SEQ ID NO: 1286763 - RNA, 20 nt, Human
cuuuuacguccaucucuugu

SEQ ID NO: 1286764 - RNA, 16 nt, Human
cuuuuacccuggcccc

SEQ ID NO: 1286765 - RNA, 19 nt, Human
cuuuuacccuggccccucu

SEQ ID NO: 1286766 - RNA, 21 nt, Human
cuuuuacccuggccccucucc

SEQ ID NO: 1286767 - RNA, 22 nt, Human
cuuuuacccuggccccucuccc

SEQ ID NO: 1286768 - RNA, 23 nt, Human
cuuuuacccuggccccucucccu

SEQ ID NO: 1286769 - RNA, 12 nt, Human
cuuuuaauucau

SEQ ID NO: 1286770 - RNA, 13 nt, Human
cuuuuaauucauu

SEQ ID NO: 1286771 - RNA, 14 nt, Human
cuuuuaauuuuccu

SEQ ID NO: 1286772 - RNA, 23 nt, Human
cuuuuacaaguaacaaaaauaaa

SEQ ID NO: 1286773 - RNA, 15 nt, Human
cuuuuacccuggccc

SEQ ID NO: 1286774 - RNA, 17 nt, Human
cuuuguuucguggggag

SEQ ID NO: 1286775 - RNA, 18 nt, Human
cuuuguuucguggggagg

SEQ ID NO: 1286776 - RNA, 14 nt, Human
cuuuguuucucccc

SEQ ID NO: 1286777 - RNA, 15 nt, Human
cuuuguuucuccccc

SEQ ID NO: 1286778 - RNA, 16 nt, Human
cuuuguuucuccccca

SEQ ID NO: 1286779 - RNA, 15 nt, Human
cuuuguuuggcuggg

SEQ ID NO: 1286780 - RNA, 18 nt, Human
cuuuucacugcuguuaua

SEQ ID NO: 1286781 - RNA, 20 nt, Human
cuuuucacugcuguuauauu

SEQ ID NO: 1286782 - RNA, 17 nt, Human
cuuuucacugcuggcug

SEQ ID NO: 1286783 - RNA, 14 nt, Human
cuuuuacucugccu

SEQ ID NO: 1286784 - RNA, 18 nt, Human
cuuuucacugcuggcugc

SEQ ID NO: 1286785 - RNA, 20 nt, Human
cuuuucacugcuggcugccu

SEQ ID NO: 1286786 - RNA, 18 nt, Human
cuuuucauacauuuucua

SEQ ID NO: 1286787 - RNA, 18 nt, Human
cuuuucauaggucugaaa

SEQ ID NO: 1286788 - RNA, 20 nt, Human
cuuuucauaggucugaaauu

SEQ ID NO: 1286789 - RNA, 13 nt, Human
cuuuucaugcaaa

SEQ ID NO: 1286790 - RNA, 14 nt, Human
cuuuucaugcaaac

SEQ ID NO: 1286791 - RNA, 15 nt, Human
cuuuucaugcaaacu

SEQ ID NO: 1286792 - RNA, 17 nt, Human
cuuuucaugcaaacucu

SEQ ID NO: 1286793 - RNA, 19 nt, Human
cuuuucaugcaaacucuuu

SEQ ID NO: 1286794 - RNA, 20 nt, Human
cuuuucaugcaaacucuuug

SEQ ID NO: 1286795 - RNA, 18 nt, Human
cuuuucccaaaauguuga

SEQ ID NO: 1286796 - RNA, 22 nt, Human
cuuuucccaaaauguugaaaua

SEQ ID NO: 1286797 - RNA, 22 nt, Human
cuuuucccaaagcaucccucuu

SEQ ID NO: 1286798 - RNA, 18 nt, Human
cuuugcugagccuguaaa

SEQ ID NO: 1286799 - RNA, 18 nt, Human
cuuugcugacccucccca

SEQ ID NO: 1286800 - RNA, 23 nt, Human
cuuugcugacccuccccaaaggc

SEQ ID NO: 1286801 - RNA, 15 nt, Human
cuuugcugcauggca

SEQ ID NO: 1286802 - RNA, 17 nt, Human
cuuugcugugaggcugu

SEQ ID NO: 1286803 - RNA, 21 nt, Human
cuuugcugugaggcuguccug

SEQ ID NO: 1286804 - RNA, 22 nt, Human
cuuugcugugaggcuguccugu

SEQ ID NO: 1286805 - RNA, 18 nt, Human
cuuuggaaguuuagcucu

SEQ ID NO: 1286806 - RNA, 20 nt, Human
cuuuggaaguuuagcucuga

SEQ ID NO: 1286807 - RNA, 22 nt, Human
cuuuggaaguuuagcucugaga

SEQ ID NO: 1286808 - RNA, 15 nt, Human
cuuucccaccccaac

SEQ ID NO: 1286809 - RNA, 21 nt, Human
cuuucccaccccaaccugcuc

SEQ ID NO: 1286810 - RNA, 22 nt, Human
cuuucccaccccaaccugcucu

SEQ ID NO: 1286811 - RNA, 22 nt, Human
cuuucccaccccacgccuuauc

SEQ ID NO: 1286812 - RNA, 23 nt, Human
cuuucccaccccaaccugcucuc

SEQ ID NO: 1286813 - RNA, 15 nt, Human
cuuucccagucuguc

SEQ ID NO: 1286814 - RNA, 16 nt, Human
cuuucccauggggagg

SEQ ID NO: 1286815 - RNA, 17 nt, Human
cuuucccagucugucga

SEQ ID NO: 1286816 - RNA, 17 nt, Human
cuuugcucuucaagaaa

SEQ ID NO: 1286817 - RNA, 13 nt, Human
cuuugcugacccu

SEQ ID NO: 1286818 - RNA, 14 nt, Human
cuuugcugacccuc

SEQ ID NO: 1286819 - RNA, 20 nt, Human
cuuuggaccuaaauggccuc

SEQ ID NO: 1286820 - RNA, 21 nt, Human
cuuuggaccuaaauggccuca

SEQ ID NO: 1286821 - RNA, 21 nt, Human
cuuuggaaguuuagcucugag

SEQ ID NO: 1286822 - RNA, 18 nt, Human
cuuuggcuuauaauucuu

SEQ ID NO: 1286823 - RNA, 21 nt, Human
cuuuggcuuauaauucuuuca

SEQ ID NO: 1286824 - RNA, 18 nt, Human
cuuuguucauagcccagu

SEQ ID NO: 1286825 - RNA, 12 nt, Human
cuuuguucccca

SEQ ID NO: 1286826 - RNA, 16 nt, Human
cuuuguuccccacugg

SEQ ID NO: 1286827 - RNA, 18 nt, Human
cuuuguuccccacuggag

SEQ ID NO: 1286828 - RNA, 19 nt, Human
cuuuguuccccacuggagc

SEQ ID NO: 1286829 - RNA, 22 nt, Human
cuuuguuccccacuggagcaga

SEQ ID NO: 1286830 - RNA, 22 nt, Human
cuucagucucuauaccaauaaa

SEQ ID NO: 1286831 - RNA, 23 nt, Human
cuucagucucuauaccaauaaag

SEQ ID NO: 1286832 - RNA, 23 nt, Human
cuucauggaugggggaacucaga

SEQ ID NO: 1286833 - RNA, 15 nt, Human
cuucauggcagaagg

SEQ ID NO: 1286834 - RNA, 21 nt, Human
cuucauggcagaaggcaaacc

SEQ ID NO: 1286835 - RNA, 13 nt, Human
cuucauguguccc

SEQ ID NO: 1286836 - RNA, 14 nt, Human
cuucauguguccca

SEQ ID NO: 1286837 - RNA, 15 nt, Human
cuucaugugucccag

SEQ ID NO: 1286838 - RNA, 16 nt, Human
cuucaugugucccaga

SEQ ID NO: 1286839 - RNA, 17 nt, Human
cuucaugugucccagaa

SEQ ID NO: 1286840 - RNA, 20 nt, Human
cuucaugugucccagaagau

SEQ ID NO: 1286841 - RNA, 21 nt, Human
cuucagucucuauaccaauaa

SEQ ID NO: 1286842 - RNA, 17 nt, Human
cuucagucucuauacca

SEQ ID NO: 1286843 - RNA, 13 nt, Human
cuucagucucuau

SEQ ID NO: 1286844 - RNA, 22 nt, Human
cuucaguaaaugugauucaccu

SEQ ID NO: 1286845 - RNA, 18 nt, Human
cuucagguugguuuaauc

SEQ ID NO: 1286846 - RNA, 16 nt, Human
cuuccaaacuaauuuu

SEQ ID NO: 1286847 - RNA, 17 nt, Human
cuuccaaugucuggaga

SEQ ID NO: 1286848 - RNA, 18 nt, Human
cuuccaaugucuggagac

SEQ ID NO: 1286849 - RNA, 24 nt, Human
cuucauuugggaugcuacucuagu

SEQ ID NO: 1286850 - RNA, 19 nt, Human
cuuccaaacaggcucagag

SEQ ID NO: 1286851 - RNA, 14 nt, Human
cuuccaaaaauuac

SEQ ID NO: 1286852 - RNA, 16 nt, Human
cuucagcgguuuauau

SEQ ID NO: 1286853 - RNA, 21 nt, Human
cuucaggcccccgccuuggcc

SEQ ID NO: 1286854 - RNA, 10 nt, Human
cuucaggucc

SEQ ID NO: 1286855 - RNA, 18 nt, Human
cuucagguccaggcugug

SEQ ID NO: 1286856 - RNA, 17 nt, Human
cuucagguccaggcugu

SEQ ID NO: 1286857 - RNA, 14 nt, Human
cuucagcugccagu

SEQ ID NO: 1286858 - RNA, 16 nt, Human
cuucaggacacucacu

SEQ ID NO: 1286859 - RNA, 19 nt, Human
cuucaggacacucacuaca

SEQ ID NO: 1286860 - RNA, 17 nt, Human
cuucaggaucaaguccu

SEQ ID NO: 1286861 - RNA, 22 nt, Human
cuucaggcccccgccuuggccu

SEQ ID NO: 1286862 - RNA, 16 nt, Human
cuucagcacuuuagaa

SEQ ID NO: 1286863 - RNA, 15 nt, Human
cuucagcacuuuaga

SEQ ID NO: 1286864 - RNA, 14 nt, Human
cuucagcacuuuag

SEQ ID NO: 1286865 - RNA, 20 nt, Human
cuucagcaaguuagaacuag

SEQ ID NO: 1286866 - RNA, 15 nt, Human
cuucagccugaaaga

SEQ ID NO: 1286867 - RNA, 19 nt, Human
cuucagagagcagugcuuu

SEQ ID NO: 1286868 - RNA, 20 nt, Human
cuucagagagcagugcuuuu

SEQ ID NO: 1286869 - RNA, 22 nt, Human
cuucagagagcagugcuuuugg

SEQ ID NO: 1286870 - RNA, 21 nt, Human
cuucagaggcccucgcugcca

SEQ ID NO: 1286871 - RNA, 23 nt, Human
cuucagaggcccucgcugccagc

SEQ ID NO: 1286872 - RNA, 14 nt, Human
cuucagagagcagu

SEQ ID NO: 1286873 - RNA, 17 nt, Human
cuucagagagcagugcu

SEQ ID NO: 1286874 - RNA, 18 nt, Human
cuucagagagcagugcuu

SEQ ID NO: 1286875 - RNA, 21 nt, Human
cuucaauuuauaccucaauuu

SEQ ID NO: 1286876 - RNA, 17 nt, Human
cuucaagcucugaggga

SEQ ID NO: 1286877 - RNA, 15 nt, Human
cuucacaaauucuca

SEQ ID NO: 1286878 - RNA, 21 nt, Human
cuucacaaucugucaguucua

SEQ ID NO: 1286879 - RNA, 17 nt, Human
cuucaaauccuugaaga

SEQ ID NO: 1286880 - RNA, 15 nt, Human
cuuagucuagguccu

SEQ ID NO: 1286881 - RNA, 13 nt, Human
cuucaaaugccug

SEQ ID NO: 1286882 - RNA, 16 nt, Human
cuucaaaugccugacu

SEQ ID NO: 1286883 - RNA, 13 nt, Human
cuuaguauugcaa

SEQ ID NO: 1286884 - RNA, 17 nt, Human
cuucaacugaccagccu

SEQ ID NO: 1286885 - RNA, 20 nt, Human
cuucaacaauucuaaaauga

SEQ ID NO: 1286886 - RNA, 20 nt, Human
cuucaacugaccagccucca

SEQ ID NO: 1286887 - RNA, 23 nt, Human
cuucaacugaccagccuccaugc

SEQ ID NO: 1286888 - RNA, 18 nt, Human
cuucaagaucccauuuga

SEQ ID NO: 1286889 - RNA, 22 nt, Human
cuucaagcauggcuauuuuaua

SEQ ID NO: 1286890 - RNA, 12 nt, Human
cuucaagcucug

SEQ ID NO: 1286891 - RNA, 13 nt, Human
cuucaagcucuga

SEQ ID NO: 1286892 - RNA, 14 nt, Human
cuucaagcucugag

SEQ ID NO: 1286893 - RNA, 18 nt, Human
cuucaagcucugagggaa

SEQ ID NO: 1286894 - RNA, 18 nt, Human
cuucaagaaaacaggcac

SEQ ID NO: 1286895 - RNA, 15 nt, Human
cuuccuucccugcug

SEQ ID NO: 1286896 - RNA, 22 nt, Human
cuuccuucagagagcagugcuu

SEQ ID NO: 1286897 - RNA, 23 nt, Human
cuuccuucagagagcagugcuuu

SEQ ID NO: 1286898 - RNA, 13 nt, Human
cuuccuucauuuc

SEQ ID NO: 1286899 - RNA, 15 nt, Human
cuuccuucauuuccu

SEQ ID NO: 1286900 - RNA, 16 nt, Human
cuuccuucauuuccuc

SEQ ID NO: 1286901 - RNA, 15 nt, Human
cuuccugugugucca

SEQ ID NO: 1286902 - RNA, 23 nt, Human
cuuccuguguguccaaaacugcc

SEQ ID NO: 1286903 - RNA, 22 nt, Human
cuuccuguuuaaaaaaccacau

SEQ ID NO: 1286904 - RNA, 16 nt, Human
cuuccuguuuuucaca

SEQ ID NO: 1286905 - RNA, 17 nt, Human
cuuccuguuuuucacau

SEQ ID NO: 1286906 - RNA, 18 nt, Human
cuuccuguuuuucacauu

SEQ ID NO: 1286907 - RNA, 23 nt, Human
cuuccuguuuuucacauuuuccu

SEQ ID NO: 1286908 - RNA, 19 nt, Human
cuuccuuacucccaggcac

SEQ ID NO: 1286909 - RNA, 13 nt, Human
cuuccuucagaga

SEQ ID NO: 1286910 - RNA, 14 nt, Human
cuuccuucagagag

SEQ ID NO: 1286911 - RNA, 15 nt, Human
cuuccuucagagagc

SEQ ID NO: 1286912 - RNA, 16 nt, Human
cuuccuucagagagca

SEQ ID NO: 1286913 - RNA, 21 nt, Human
cuuccuucagagagcagugcu

SEQ ID NO: 1286914 - RNA, 15 nt, Human
cuucgccaccugggu

SEQ ID NO: 1286915 - RNA, 15 nt, Human
cuucgcuucuugccu

SEQ ID NO: 1286916 - RNA, 16 nt, Human
cuucgcuucuugccuc

SEQ ID NO: 1286917 - RNA, 17 nt, Human
cuucgcuucuugccucu

SEQ ID NO: 1286918 - RNA, 18 nt, Human
cuucgcuucuugccucug

SEQ ID NO: 1286919 - RNA, 20 nt, Human
cuucgcuucuugccucugug

SEQ ID NO: 1286920 - RNA, 21 nt, Human
cuucgcuucuugccucugugc

SEQ ID NO: 1286921 - RNA, 21 nt, Human
cuucgauacaccgggccugga

SEQ ID NO: 1286922 - RNA, 15 nt, Human
cuuccuuuguaaaaa

SEQ ID NO: 1286923 - RNA, 20 nt, Human
cuuccuuuuacuuuucuucu

SEQ ID NO: 1286924 - RNA, 17 nt, Human
cuuccuuuuaucaguag

SEQ ID NO: 1286925 - RNA, 14 nt, Human
cuucgccaccuggg

SEQ ID NO: 1286926 - RNA, 12 nt, Human
cuuccuuuucac

SEQ ID NO: 1286927 - RNA, 13 nt, Human
cuuccuuuucacu

SEQ ID NO: 1286928 - RNA, 14 nt, Human
cuuccuuuucacug

SEQ ID NO: 1286929 - RNA, 20 nt, Human
cuucggccuccauccugagg

SEQ ID NO: 1286930 - RNA, 16 nt, Human
cuucgggcugugcccg

SEQ ID NO: 1286931 - RNA, 14 nt, Human
cuucggggcuggga

SEQ ID NO: 1286932 - RNA, 15 nt, Human
cuucggggcugggaa

SEQ ID NO: 1286933 - RNA, 14 nt, Human
cuucgucuuuccca

SEQ ID NO: 1286934 - RNA, 21 nt, Human
cuucgucuuucccauggggag

SEQ ID NO: 1286935 - RNA, 22 nt, Human
cuucgucuuucccauggggagg

SEQ ID NO: 1286936 - RNA, 15 nt, Human
cuucucauccugcag

SEQ ID NO: 1286937 - RNA, 16 nt, Human
cuucucauccugcagg

SEQ ID NO: 1286938 - RNA, 17 nt, Human
cuucucauccugcaggc

SEQ ID NO: 1286939 - RNA, 14 nt, Human
cuucucaugaucca

SEQ ID NO: 1286940 - RNA, 22 nt, Human
cuucccuggaaaccuuccaccc

SEQ ID NO: 1286941 - RNA, 18 nt, Human
cuucccugaagcucccac

SEQ ID NO: 1286942 - RNA, 23 nt, Human
cuucccuggaaaccuuccaccca

SEQ ID NO: 1286943 - RNA, 19 nt, Human
cuucccugcugugaaagaa

SEQ ID NO: 1286944 - RNA, 14 nt, Human
cuucccugacucau

SEQ ID NO: 1286945 - RNA, 23 nt, Human
cuucccuaucuuugccacccuca

SEQ ID NO: 1286946 - RNA, 22 nt, Human
cuucccuaucuuugccacccuc

SEQ ID NO: 1286947 - RNA, 22 nt, Human
cuucccucuuccuucccugcug

SEQ ID NO: 1286948 - RNA, 13 nt, Human
cuucccugaagcu

SEQ ID NO: 1286949 - RNA, 15 nt, Human
cuucccugaagcucc

SEQ ID NO: 1286950 - RNA, 17 nt, Human
cuucccugaagcuccca

SEQ ID NO: 1286951 - RNA, 13 nt, Human
cuucccugacuca

SEQ ID NO: 1286952 - RNA, 20 nt, Human
cuucccugacucauucugaa

SEQ ID NO: 1286953 - RNA, 15 nt, Human
cuuccuaguuuucuc

SEQ ID NO: 1286954 - RNA, 17 nt, Human
cuuccuaguuuucuccu

SEQ ID NO: 1286955 - RNA, 23 nt, Human
cuuccuaguuuucuccucccagg

SEQ ID NO: 1286956 - RNA, 22 nt, Human
cuuccuaguuuucuccucccag

SEQ ID NO: 1286957 - RNA, 13 nt, Human
cuuccugugacuu

SEQ ID NO: 1286958 - RNA, 16 nt, Human
cuuccugugacuucag

SEQ ID NO: 1286959 - RNA, 23 nt, Human
cuuccuggacagcugugccucgc

SEQ ID NO: 1286960 - RNA, 24 nt, Human
cuuccuggacagcugugccucgcu

SEQ ID NO: 1286961 - RNA, 14 nt, Human
cuuccuggagacug

SEQ ID NO: 1286962 - RNA, 22 nt, Human
cuuccuggagacugcccagcua

SEQ ID NO: 1286963 - RNA, 12 nt, Human
cuuccuggagca

SEQ ID NO: 1286964 - RNA, 13 nt, Human
cuuccuggagcag

SEQ ID NO: 1286965 - RNA, 18 nt, Human
cuuccuggagcagaagca

SEQ ID NO: 1286966 - RNA, 19 nt, Human
cuuccuggagcagaagcag

SEQ ID NO: 1286967 - RNA, 18 nt, Human
cuuccuguccagcuccaa

SEQ ID NO: 1286968 - RNA, 21 nt, Human
cuuccuggagcagaagcagca

SEQ ID NO: 1286969 - RNA, 21 nt, Human
cuuccugccccaacuccuucc

SEQ ID NO: 1286970 - RNA, 11 nt, Human
cuuccucagcc

SEQ ID NO: 1286971 - RNA, 12 nt, Human
cuuccucagcca

SEQ ID NO: 1286972 - RNA, 14 nt, Human
cuuccucagccagc

SEQ ID NO: 1286973 - RNA, 12 nt, Human
cuuccugcuugc

SEQ ID NO: 1286974 - RNA, 14 nt, Human
cuuccugcuugcca

SEQ ID NO: 1286975 - RNA, 16 nt, Human
cuuccugcuugccaag

SEQ ID NO: 1286976 - RNA, 13 nt, Human
cuuccuggacagc

SEQ ID NO: 1286977 - RNA, 14 nt, Human
cuuccuggacagcu

SEQ ID NO: 1286978 - RNA, 15 nt, Human
cuuccuggacagcug

SEQ ID NO: 1286979 - RNA, 16 nt, Human
cuuccuggacagcugu

SEQ ID NO: 1286980 - RNA, 17 nt, Human
cuuccuggacagcugug

SEQ ID NO: 1286981 - RNA, 20 nt, Human
cuuccuggacagcugugccu

SEQ ID NO: 1286982 - RNA, 21 nt, Human
cuuccuggacagcugugccuc

SEQ ID NO: 1286983 - RNA, 22 nt, Human
cuuccuggacagcugugccucg

SEQ ID NO: 1286984 - RNA, 18 nt, Human
cuucccuaucuuugccac

SEQ ID NO: 1286985 - RNA, 17 nt, Human
cuucccuaucuuugcca

SEQ ID NO: 1286986 - RNA, 16 nt, Human
cuucccuaucuuugcc

SEQ ID NO: 1286987 - RNA, 15 nt, Human
cuucccccuccaauc

SEQ ID NO: 1286988 - RNA, 12 nt, Human
cuucccccucca

SEQ ID NO: 1286989 - RNA, 16 nt, Human
cuucccccaccaccaa

SEQ ID NO: 1286990 - RNA, 21 nt, Human
cuuccccagacgccuggcugc

SEQ ID NO: 1286991 - RNA, 18 nt, Human
cuuccccagacgccuggc

SEQ ID NO: 1286992 - RNA, 18 nt, Human
cuuccccaucuucuaaac

SEQ ID NO: 1286993 - RNA, 19 nt, Human
cuuccccauggcccugagc

SEQ ID NO: 1286994 - RNA, 21 nt, Human
cuuccccauggcccugagcga

SEQ ID NO: 1286995 - RNA, 13 nt, Human
cuucccccaccac

SEQ ID NO: 1286996 - RNA, 15 nt, Human
cuucccccaccacca

SEQ ID NO: 1286997 - RNA, 19 nt, Human
cuuccagauccuggaaauc

SEQ ID NO: 1286998 - RNA, 20 nt, Human
cuuccccacccaccaacccu

SEQ ID NO: 1286999 - RNA, 23 nt, Human
cuuccccacccaccaacccucag

SEQ ID NO: 1287000 - RNA, 19 nt, Human
cuuccaaugucuggagacc

SEQ ID NO: 1287001 - RNA, 18 nt, Human
cuuccacugagggcaguc

SEQ ID NO: 1287002 - RNA, 13 nt, Human
cuuccagaaauac

SEQ ID NO: 1287003 - RNA, 16 nt, Human
cuuccagaaaacaaaa

SEQ ID NO: 1287004 - RNA, 17 nt, Human
cuuaaccagaucauugu

SEQ ID NO: 1287005 - RNA, 23 nt, Human
cuuaagaagacugcauuauauuu

SEQ ID NO: 1287006 - RNA, 18 nt, Human
cuuaagaauuuugagcag

SEQ ID NO: 1287007 - RNA, 12 nt, Human
cuuaaaaauggu

SEQ ID NO: 1287008 - RNA, 12 nt, Human
cuuaaaaaguua

SEQ ID NO: 1287009 - RNA, 14 nt, Human
cuuaaaaaguuaua

SEQ ID NO: 1287010 - RNA, 19 nt, Human
cuuaacagggaacgugauu

SEQ ID NO: 1287011 - RNA, 16 nt, Human
cuuaacaguuguauuu

SEQ ID NO: 1287012 - RNA, 17 nt, Human
cuuaacaguuguauuua

SEQ ID NO: 1287013 - RNA, 20 nt, Human
cuuaauaaauuguguuuccu

SEQ ID NO: 1287014 - RNA, 14 nt, Human
cuuaagguguagcc

SEQ ID NO: 1287015 - RNA, 17 nt, Human
cuuaagguguagccaca

SEQ ID NO: 1287016 - RNA, 21 nt, Human
cuuaagguguagccacaccag

SEQ ID NO: 1287017 - RNA, 17 nt, Human
cuuaauacacacaguua

SEQ ID NO: 1287018 - RNA, 16 nt, Human
cuuaauacuaccuuga

SEQ ID NO: 1287019 - RNA, 18 nt, Human
cuuaauacuaccuugaaa

SEQ ID NO: 1287020 - RNA, 22 nt, Human
cuuaauacucaaaugaguaaca

SEQ ID NO: 1287021 - RNA, 13 nt, Human
cuuaauacuaagg

SEQ ID NO: 1287022 - RNA, 15 nt, Human
cuuaaggcucuuuug

SEQ ID NO: 1287023 - RNA, 20 nt, Human
cuuaagaccuacuguucuaa

SEQ ID NO: 1287024 - RNA, 22 nt, Human
cuuaagaccuacuguucuaaag

SEQ ID NO: 1287025 - RNA, 23 nt, Human
cuuaagaccuacuguucuaaagc

SEQ ID NO: 1287026 - RNA, 13 nt, Human
cuuaauucaaaua

SEQ ID NO: 1287027 - RNA, 19 nt, Human
cuuaauuauuauuuguguu

SEQ ID NO: 1287028 - RNA, 16 nt, Human
cuuaauugccaccucu

SEQ ID NO: 1287029 - RNA, 20 nt, Human
cuuaauugccaccucuaaca

SEQ ID NO: 1287030 - RNA, 16 nt, Human
cuuaauuuauuauuaa

SEQ ID NO: 1287031 - RNA, 11 nt, Human
cuuaauuauua

SEQ ID NO: 1287032 - RNA, 15 nt, Human
cuuaauuauuauuug

SEQ ID NO: 1287033 - RNA, 18 nt, Human
cuuaauuauuauuugugu

SEQ ID NO: 1287034 - RNA, 19 nt, Human
cuuaauauauauauccaga

SEQ ID NO: 1287035 - RNA, 14 nt, Human
cuuaaucuuugaaa

SEQ ID NO: 1287036 - RNA, 16 nt, Human
cuuagaauacaguuuu

SEQ ID NO: 1287037 - RNA, 18 nt, Human
cuuagaaguuuguuguga

SEQ ID NO: 1287038 - RNA, 19 nt, Human
cuuagacagaggcccucaa

SEQ ID NO: 1287039 - RNA, 20 nt, Human
cuuagacagaggcccucaag

SEQ ID NO: 1287040 - RNA, 15 nt, Human
cuuaguacaaaguuu

SEQ ID NO: 1287041 - RNA, 19 nt, Human
cuuaguacaaaguuucaau

SEQ ID NO: 1287042 - RNA, 21 nt, Human
cuuagacagaggcccucaagu

SEQ ID NO: 1287043 - RNA, 15 nt, Human
cuuagacucuuuucc

SEQ ID NO: 1287044 - RNA, 16 nt, Human
cuuagaaauugcauuu

SEQ ID NO: 1287045 - RNA, 17 nt, Human
cuuacugcgacuaaacu

SEQ ID NO: 1287046 - RNA, 22 nt, Human
cuuacugcgacuaaacuuaauu

SEQ ID NO: 1287047 - RNA, 11 nt, Human
cuuacugcuug

SEQ ID NO: 1287048 - RNA, 11 nt, Human
cuuagaaaacc

SEQ ID NO: 1287049 - RNA, 18 nt, Human
cuuagaaaaccagcucag

SEQ ID NO: 1287050 - RNA, 19 nt, Human
cuuagaaaaccagcucagc

SEQ ID NO: 1287051 - RNA, 20 nt, Human
cuuagaaaaccagcucagca

SEQ ID NO: 1287052 - RNA, 21 nt, Human
cuuagaaaaccagcucagcac

SEQ ID NO: 1287053 - RNA, 24 nt, Human
cuuagaaaaccagcucagcacugc

SEQ ID NO: 1287054 - RNA, 23 nt, Human
cuuagaaaaccagcucagcacug

SEQ ID NO: 1287055 - RNA, 15 nt, Human
cuuaauuuauuauua

SEQ ID NO: 1287056 - RNA, 12 nt, Human
cuuaccuggccc

SEQ ID NO: 1287057 - RNA, 13 nt, Human
cuuaccuggccca

SEQ ID NO: 1287058 - RNA, 18 nt, Human
cuuaccuggcccaucagg

SEQ ID NO: 1287059 - RNA, 19 nt, Human
cuuaccugggcauucuugu

SEQ ID NO: 1287060 - RNA, 20 nt, Human
cuuaccuguaugucuccagu

SEQ ID NO: 1287061 - RNA, 21 nt, Human
cuuaccuggcccaucagggua

SEQ ID NO: 1287062 - RNA, 13 nt, Human
cuuaccuuuuuau

SEQ ID NO: 1287063 - RNA, 20 nt, Human
cuuacuccugugggagccuc

SEQ ID NO: 1287064 - RNA, 12 nt, Human
cuuacucuaaga

SEQ ID NO: 1287065 - RNA, 20 nt, Human
cuuacucuaagaucuuagau

SEQ ID NO: 1287066 - RNA, 15 nt, Human
cuuacucuucuugaa

SEQ ID NO: 1287067 - RNA, 19 nt, Human
cuuacucuucuugaaauuu

SEQ ID NO: 1287068 - RNA, 12 nt, Human
cuuacugauaua

SEQ ID NO: 1287069 - RNA, 15 nt, Human
cuuacugauauauuu

SEQ ID NO: 1287070 - RNA, 19 nt, Human
cuuacugauauauuuuaca

SEQ ID NO: 1287071 - RNA, 21 nt, Human
cuuacugauauauuuuacaau

SEQ ID NO: 1287072 - RNA, 13 nt, Human
cuuacucuaagau

SEQ ID NO: 1287073 - RNA, 21 nt, Human
cuuacugauuuuuaaguuauu

SEQ ID NO: 1287074 - RNA, 21 nt, Human
cuguugccaggcuggagugca

SEQ ID NO: 1287075 - RNA, 18 nt, Human
cuguuugcauuugauaca

SEQ ID NO: 1287076 - RNA, 22 nt, Human
cuguuugcauuugauacauuuu

SEQ ID NO: 1287077 - RNA, 13 nt, Human
cuguuugcugugc

SEQ ID NO: 1287078 - RNA, 23 nt, Human
cuguuuggaaauaaaucuuccua

SEQ ID NO: 1287079 - RNA, 23 nt, Human
cuguuuggaaauugauuuugaac

SEQ ID NO: 1287080 - RNA, 13 nt, Human
cuguuugagaaag

SEQ ID NO: 1287081 - RNA, 12 nt, Human
cuguuugagaaa

SEQ ID NO: 1287082 - RNA, 21 nt, Human
cuguuugaggaaagcaagaau

SEQ ID NO: 1287083 - RNA, 15 nt, Human
cuguuugacaccucu

SEQ ID NO: 1287084 - RNA, 19 nt, Human
cuguuugacaccucuuuuu

SEQ ID NO: 1287085 - RNA, 23 nt, Human
cuguuugacaccucuuuuuucgu

SEQ ID NO: 1287086 - RNA, 12 nt, Human
cuguuucaaaca

SEQ ID NO: 1287087 - RNA, 17 nt, Human
cuguuuaguagcaguga

SEQ ID NO: 1287088 - RNA, 21 nt, Human
cuguuuauucauaugcauauu

SEQ ID NO: 1287089 - RNA, 12 nt, Human
cuguuucaaagu

SEQ ID NO: 1287090 - RNA, 14 nt, Human
cuguuucaaaguuc

SEQ ID NO: 1287091 - RNA, 15 nt, Human
cuguuucaaaguucu

SEQ ID NO: 1287092 - RNA, 11 nt, Human
cuguuucaagg

SEQ ID NO: 1287093 - RNA, 21 nt, Human
cuguuucaaggcacucuagau

SEQ ID NO: 1287094 - RNA, 22 nt, Human
cuguuucaaggcacucuagauu

SEQ ID NO: 1287095 - RNA, 16 nt, Human
cuguuucagaggcuca

SEQ ID NO: 1287096 - RNA, 14 nt, Human
cuguuuuauaauuu

SEQ ID NO: 1287097 - RNA, 22 nt, Human
cuguuuuacaaaaaagaaaaga

SEQ ID NO: 1287098 - RNA, 20 nt, Human
cuguuuguuuacaaaaucag

SEQ ID NO: 1287099 - RNA, 14 nt, Human
cuguuuggccucuc

SEQ ID NO: 1287100 - RNA, 22 nt, Human
cuguuuggaaauugauuuugaa

SEQ ID NO: 1287101 - RNA, 15 nt, Human
cuguuuuauaauuuu

SEQ ID NO: 1287102 - RNA, 14 nt, Human
cuguuuuacaaguu

SEQ ID NO: 1287103 - RNA, 17 nt, Human
cuguuuuacaaguugga

SEQ ID NO: 1287104 - RNA, 21 nt, Human
cuguuuuacaaguuggaguca

SEQ ID NO: 1287105 - RNA, 16 nt, Human
cuguuuucccacgagg

SEQ ID NO: 1287106 - RNA, 12 nt, Human
cuguuuuccccc

SEQ ID NO: 1287107 - RNA, 13 nt, Human
cuguuuucccccc

SEQ ID NO: 1287108 - RNA, 22 nt, Human
cuguuuucuaguguaucaaaau

SEQ ID NO: 1287109 - RNA, 20 nt, Human
cuguuuucuaguguaucaaa

SEQ ID NO: 1287110 - RNA, 21 nt, Human
cuguuuucucucggcucccca

SEQ ID NO: 1287111 - RNA, 18 nt, Human
cuguuuucuaguguauca

SEQ ID NO: 1287112 - RNA, 17 nt, Human
cuguuuucuaguguauc

SEQ ID NO: 1287113 - RNA, 15 nt, Human
cuguuuucuagugua

SEQ ID NO: 1287114 - RNA, 12 nt, Human
cuguuuuucaca

SEQ ID NO: 1287115 - RNA, 13 nt, Human
cuguuuuucacau

SEQ ID NO: 1287116 - RNA, 15 nt, Human
cuguuuuucacauuu

SEQ ID NO: 1287117 - RNA, 23 nt, Human
cuguuaaauacaggaaacaguug

SEQ ID NO: 1287118 - RNA, 12 nt, Human
cuguuaacugaa

SEQ ID NO: 1287119 - RNA, 13 nt, Human
cuguuaacugaau

SEQ ID NO: 1287120 - RNA, 14 nt, Human
cuguuaacugaaua

SEQ ID NO: 1287121 - RNA, 15 nt, Human
cuguuaacugaauac

SEQ ID NO: 1287122 - RNA, 17 nt, Human
cuguuaacugaauacca

SEQ ID NO: 1287123 - RNA, 18 nt, Human
cuguuaacugaauaccac

SEQ ID NO: 1287124 - RNA, 22 nt, Human
cuguuaacugaauaccacucug

SEQ ID NO: 1287125 - RNA, 19 nt, Human
cuguuaacugaauaccacu

SEQ ID NO: 1287126 - RNA, 11 nt, Human
cuguucugugu

SEQ ID NO: 1287127 - RNA, 13 nt, Human
cuguucugugucu

SEQ ID NO: 1287128 - RNA, 14 nt, Human
cuguucugugucuu

SEQ ID NO: 1287129 - RNA, 14 nt, Human
cuguucuguuucaa

SEQ ID NO: 1287130 - RNA, 15 nt, Human
cuguucuguuucaag

SEQ ID NO: 1287131 - RNA, 21 nt, Human
cuguucuguuucaaggcacuc

SEQ ID NO: 1287132 - RNA, 13 nt, Human
cuguucuuagcuc

SEQ ID NO: 1287133 - RNA, 16 nt, Human
cuguucuuagcucaau

SEQ ID NO: 1287134 - RNA, 17 nt, Human
cuguucuuagcucaaug

SEQ ID NO: 1287135 - RNA, 19 nt, Human
cuguucuuagcucaaugag

SEQ ID NO: 1287136 - RNA, 21 nt, Human
cuguucuuagcucaaugagca

SEQ ID NO: 1287137 - RNA, 23 nt, Human
cuguucuuagcucaaugagcaug

SEQ ID NO: 1287138 - RNA, 16 nt, Human
cuguucuuccucagcc

SEQ ID NO: 1287139 - RNA, 17 nt, Human
cuguucuuccucagcca

SEQ ID NO: 1287140 - RNA, 18 nt, Human
cuguucuuccucagccag

SEQ ID NO: 1287141 - RNA, 19 nt, Human
cuguucuuccucagccagc

SEQ ID NO: 1287142 - RNA, 20 nt, Human
cuguucuuccucagccagcc

SEQ ID NO: 1287143 - RNA, 22 nt, Human
cuguucuuccucagccagccuc

SEQ ID NO: 1287144 - RNA, 23 nt, Human
cuguucuuccucagccagccucg

SEQ ID NO: 1287145 - RNA, 17 nt, Human
cuguugaauuucccaca

SEQ ID NO: 1287146 - RNA, 17 nt, Human
cuguugagcaucacaga

SEQ ID NO: 1287147 - RNA, 17 nt, Human
cuguugcacguguguuu

SEQ ID NO: 1287148 - RNA, 18 nt, Human
cuguugcacguguguuuu

SEQ ID NO: 1287149 - RNA, 20 nt, Human
cuguugcacguguguuuuuc

SEQ ID NO: 1287150 - RNA, 22 nt, Human
cuguugcacguguguuuuucua

SEQ ID NO: 1287151 - RNA, 23 nt, Human
cuguugcacguguguuuuucuau

SEQ ID NO: 1287152 - RNA, 15 nt, Human
cuguugcacgugugu

SEQ ID NO: 1287153 - RNA, 16 nt, Human
cugugugcucaggagc

SEQ ID NO: 1287154 - RNA, 15 nt, Human
cuguguguccaaaac

SEQ ID NO: 1287155 - RNA, 19 nt, Human
cuguguguccaaaacugcc

SEQ ID NO: 1287156 - RNA, 21 nt, Human
cuguguguccaaaacugccuc

SEQ ID NO: 1287157 - RNA, 22 nt, Human
cuguguguccaaaacugccuca

SEQ ID NO: 1287158 - RNA, 11 nt, Human
cugugugugcc

SEQ ID NO: 1287159 - RNA, 13 nt, Human
cugugugugcccu

SEQ ID NO: 1287160 - RNA, 16 nt, Human
cugugugugcccucug

SEQ ID NO: 1287161 - RNA, 18 nt, Human
cugugugugcccucuggg

SEQ ID NO: 1287162 - RNA, 19 nt, Human
cugugugugcccucugggc

SEQ ID NO: 1287163 - RNA, 23 nt, Human
cugugugugcccucugggcucug

SEQ ID NO: 1287164 - RNA, 14 nt, Human
cugugugcucagga

SEQ ID NO: 1287165 - RNA, 16 nt, Human
cugugugcacaaauau

SEQ ID NO: 1287166 - RNA, 18 nt, Human
cugugugacucaaaccaa

SEQ ID NO: 1287167 - RNA, 19 nt, Human
cugugugaauaccugcuca

SEQ ID NO: 1287168 - RNA, 18 nt, Human
cugugugaauaccugcuc

SEQ ID NO: 1287169 - RNA, 20 nt, Human
cugugucuuucacagcuccu

SEQ ID NO: 1287170 - RNA, 20 nt, Human
cugugugaaacuuucauucc

SEQ ID NO: 1287171 - RNA, 23 nt, Human
cugugguucugagauggcuccca

SEQ ID NO: 1287172 - RNA, 15 nt, Human
cugugguuucauguu

SEQ ID NO: 1287173 - RNA, 16 nt, Human
cugugguuucauguua

SEQ ID NO: 1287174 - RNA, 17 nt, Human
cugugguuucauguuag

SEQ ID NO: 1287175 - RNA, 18 nt, Human
cugugguuucauguuagu

SEQ ID NO: 1287176 - RNA, 22 nt, Human
cugugguuuucuuuugccauga

SEQ ID NO: 1287177 - RNA, 21 nt, Human
cugugguuuucuuuugccaug

SEQ ID NO: 1287178 - RNA, 20 nt, Human
cugugugugcccucugggcu

SEQ ID NO: 1287179 - RNA, 22 nt, Human
cuguguuacuaaaaaaaagaug

SEQ ID NO: 1287180 - RNA, 23 nt, Human
cuguguuacuaaaaaaaagauga

SEQ ID NO: 1287181 - RNA, 19 nt, Human
cuguguuaugcaaaagcaa

SEQ ID NO: 1287182 - RNA, 17 nt, Human
cuguguuaugcaaaagc

SEQ ID NO: 1287183 - RNA, 21 nt, Human
cuguguuccuuccgcuuggag

SEQ ID NO: 1287184 - RNA, 13 nt, Human
cuguguuccuucc

SEQ ID NO: 1287185 - RNA, 13 nt, Human
cuguguugccaag

SEQ ID NO: 1287186 - RNA, 14 nt, Human
cuguguugccaagc

SEQ ID NO: 1287187 - RNA, 16 nt, Human
cuguguugccaagcuc

SEQ ID NO: 1287188 - RNA, 17 nt, Human
cuguguugccaagcucc

SEQ ID NO: 1287189 - RNA, 19 nt, Human
cuguguugccaagcuccaa

SEQ ID NO: 1287190 - RNA, 21 nt, Human
cuguguugccaagcuccaagc

SEQ ID NO: 1287191 - RNA, 14 nt, Human
cuguguugucucua

SEQ ID NO: 1287192 - RNA, 19 nt, Human
cuguguugucucuagagca

SEQ ID NO: 1287193 - RNA, 22 nt, Human
cuguguugucucuagagcaggg

SEQ ID NO: 1287194 - RNA, 18 nt, Human
cuguguuuugaaagaaua

SEQ ID NO: 1287195 - RNA, 22 nt, Human
cuguguuuugaaagaauagaac

SEQ ID NO: 1287196 - RNA, 11 nt, Human
cuguuaaauac

SEQ ID NO: 1287197 - RNA, 15 nt, Human
cuguuaaauacagga

SEQ ID NO: 1287198 - RNA, 16 nt, Human
cuguuaaauacaggaa

SEQ ID NO: 1287199 - RNA, 17 nt, Human
cuguuaaauacaggaaa

SEQ ID NO: 1287200 - RNA, 19 nt, Human
cuguuaaauacaggaaaca

SEQ ID NO: 1287201 - RNA, 21 nt, Human
cuguggaacauaaaaaggaca

SEQ ID NO: 1287202 - RNA, 18 nt, Human
cuguggaacauaaaaagg

SEQ ID NO: 1287203 - RNA, 16 nt, Human
cugugccucagagacc

SEQ ID NO: 1287204 - RNA, 16 nt, Human
cugugccucugccugu

SEQ ID NO: 1287205 - RNA, 17 nt, Human
cugugccucugccuguc

SEQ ID NO: 1287206 - RNA, 23 nt, Human
cuguggaccauggaguggcagcc

SEQ ID NO: 1287207 - RNA, 12 nt, Human
cugugccucugc

SEQ ID NO: 1287208 - RNA, 13 nt, Human
cugugccucugcc

SEQ ID NO: 1287209 - RNA, 14 nt, Human
cugugccucugccu

SEQ ID NO: 1287210 - RNA, 15 nt, Human
cugugccucugccug

SEQ ID NO: 1287211 - RNA, 22 nt, Human
cugugccccuuccgccacuggg

SEQ ID NO: 1287212 - RNA, 23 nt, Human
cugugccccuuccgccacugggg

SEQ ID NO: 1287213 - RNA, 20 nt, Human
cugugccccuugacaacugg

SEQ ID NO: 1287214 - RNA, 15 nt, Human
cugugccucagagac

SEQ ID NO: 1287215 - RNA, 24 nt, Human
cuguggaucaaauccagccugcug

SEQ ID NO: 1287216 - RNA, 14 nt, Human
cuguggaucaaauc

SEQ ID NO: 1287217 - RNA, 18 nt, Human
cuguggccuaaccugccg

SEQ ID NO: 1287218 - RNA, 21 nt, Human
cuguggccccacccugggccc

SEQ ID NO: 1287219 - RNA, 16 nt, Human
cuguggccccacccug

SEQ ID NO: 1287220 - RNA, 17 nt, Human
cuguggccccacccugg

SEQ ID NO: 1287221 - RNA, 18 nt, Human
cuguggccccacccuggg

SEQ ID NO: 1287222 - RNA, 20 nt, Human
cuguggccccacccugggcc

SEQ ID NO: 1287223 - RNA, 15 nt, Human
cuguggaucagagau

SEQ ID NO: 1287224 - RNA, 13 nt, Human
cuguggccaggag

SEQ ID NO: 1287225 - RNA, 14 nt, Human
cuguggccaggagg

SEQ ID NO: 1287226 - RNA, 15 nt, Human
cuguggccaggaggu

SEQ ID NO: 1287227 - RNA, 20 nt, Human
cuguggccaugacccugccu

SEQ ID NO: 1287228 - RNA, 22 nt, Human
cuguggccaugacccugccucu

SEQ ID NO: 1287229 - RNA, 14 nt, Human
cugugguguguccc

SEQ ID NO: 1287230 - RNA, 15 nt, Human
cuguggugugucccc

SEQ ID NO: 1287231 - RNA, 22 nt, Human
cuguggugugucccccucuguc

SEQ ID NO: 1287232 - RNA, 18 nt, Human
cugugguucugagauggc

SEQ ID NO: 1287233 - RNA, 20 nt, Human
cugugguucugagauggcuc

SEQ ID NO: 1287234 - RNA, 22 nt, Human
cugugguucugagauggcuccc

SEQ ID NO: 1287235 - RNA, 16 nt, Human
cuguggucacagcgga

SEQ ID NO: 1287236 - RNA, 20 nt, Human
cugugggggugugcccccuu

SEQ ID NO: 1287237 - RNA, 15 nt, Human
cuguggguaguauga

SEQ ID NO: 1287238 - RNA, 16 nt, Human
cugugggucugggagu

SEQ ID NO: 1287239 - RNA, 22 nt, Human
cugugggucugggagucacaca

SEQ ID NO: 1287240 - RNA, 19 nt, Human
cugugggggugugcccccu

SEQ ID NO: 1287241 - RNA, 24 nt, Human
cugugggggugagggucccaugug

SEQ ID NO: 1287242 - RNA, 23 nt, Human
cugugggggugagggucccaugu

SEQ ID NO: 1287243 - RNA, 16 nt, Human
cugugggagccucgca

SEQ ID NO: 1287244 - RNA, 14 nt, Human
cugugggaugggau

SEQ ID NO: 1287245 - RNA, 14 nt, Human
cugugggaaauggu

SEQ ID NO: 1287246 - RNA, 24 nt, Human
cugugggaaaugguacuguacagc

SEQ ID NO: 1287247 - RNA, 13 nt, Human
cugugggagccuc

SEQ ID NO: 1287248 - RNA, 14 nt, Human
cugugggagccucg

SEQ ID NO: 1287249 - RNA, 15 nt, Human
cugugggagccucgc

SEQ ID NO: 1287250 - RNA, 21 nt, Human
cugugggagccucgcaacccg

SEQ ID NO: 1287251 - RNA, 13 nt, Human
cugucuucuggac

SEQ ID NO: 1287252 - RNA, 15 nt, Human
cugucuucuggacug

SEQ ID NO: 1287253 - RNA, 14 nt, Human
cugucuucuggacu

SEQ ID NO: 1287254 - RNA, 16 nt, Human
cugucuuuaauucugu

SEQ ID NO: 1287255 - RNA, 21 nt, Human
cugucuuuuuucuaaaguaaa

SEQ ID NO: 1287256 - RNA, 14 nt, Human
cugucuuaauuuuc

SEQ ID NO: 1287257 - RNA, 16 nt, Human
cugucuuauccuccac

SEQ ID NO: 1287258 - RNA, 18 nt, Human
cugucuguuguauucauu

SEQ ID NO: 1287259 - RNA, 19 nt, Human
cugucuguuguauucauug

SEQ ID NO: 1287260 - RNA, 19 nt, Human
cugucuuaaacuaaaugug

SEQ ID NO: 1287261 - RNA, 21 nt, Human
cugucuuaaacuaaaugugca

SEQ ID NO: 1287262 - RNA, 15 nt, Human
cugucugucugucug

SEQ ID NO: 1287263 - RNA, 14 nt, Human
cugucugucugucu

SEQ ID NO: 1287264 - RNA, 17 nt, Human
cugucugucugucccaa

SEQ ID NO: 1287265 - RNA, 16 nt, Human
cugucugucuguccca

SEQ ID NO: 1287266 - RNA, 15 nt, Human
cugucugucuguccc

SEQ ID NO: 1287267 - RNA, 14 nt, Human
cugucugucugucc

SEQ ID NO: 1287268 - RNA, 23 nt, Human
cugucugguggccccguuucugg

SEQ ID NO: 1287269 - RNA, 17 nt, Human
cugucuggguggcucac

SEQ ID NO: 1287270 - RNA, 15 nt, Human
cugucugcucagaca

SEQ ID NO: 1287271 - RNA, 17 nt, Human
cugucuggaagaugggg

SEQ ID NO: 1287272 - RNA, 18 nt, Human
cugucuggaagaugggga

SEQ ID NO: 1287273 - RNA, 16 nt, Human
cugucuggcaaugcca

SEQ ID NO: 1287274 - RNA, 17 nt, Human
cugucuggcaaugccac

SEQ ID NO: 1287275 - RNA, 23 nt, Human
cugucuggcaaugccacagcccu

SEQ ID NO: 1287276 - RNA, 19 nt, Human
cugucuggcaaugccacag

SEQ ID NO: 1287277 - RNA, 16 nt, Human
cugucuggccccccug

SEQ ID NO: 1287278 - RNA, 15 nt, Human
cugucuggccccccu

SEQ ID NO: 1287279 - RNA, 16 nt, Human
cugucugggugcuacu

SEQ ID NO: 1287280 - RNA, 17 nt, Human
cugucugggugcuacug

SEQ ID NO: 1287281 - RNA, 19 nt, Human
cugucugggugcuacuggg

SEQ ID NO: 1287282 - RNA, 21 nt, Human
cugucugggugcuacugggga

SEQ ID NO: 1287283 - RNA, 22 nt, Human
cugucugggugcuacuggggaa

SEQ ID NO: 1287284 - RNA, 23 nt, Human
cugucugggugcuacuggggaaa

SEQ ID NO: 1287285 - RNA, 16 nt, Human
cugucuggguggcuca

SEQ ID NO: 1287286 - RNA, 13 nt, Human
cugucugguggcc

SEQ ID NO: 1287287 - RNA, 15 nt, Human
cugucugguggcccc

SEQ ID NO: 1287288 - RNA, 17 nt, Human
cugucugccaaccuaaa

SEQ ID NO: 1287289 - RNA, 20 nt, Human
cugucugccaaccuaaaacu

SEQ ID NO: 1287290 - RNA, 14 nt, Human
cugucugccccgcc

SEQ ID NO: 1287291 - RNA, 19 nt, Human
cugucugccccgcccucau

SEQ ID NO: 1287292 - RNA, 14 nt, Human
cugugaacccagga

SEQ ID NO: 1287293 - RNA, 15 nt, Human
cugugaacccaggac

SEQ ID NO: 1287294 - RNA, 16 nt, Human
cugugaacccaggaca

SEQ ID NO: 1287295 - RNA, 17 nt, Human
cugugaacccaggacaa

SEQ ID NO: 1287296 - RNA, 19 nt, Human
cugugaacccaggacaagc

SEQ ID NO: 1287297 - RNA, 22 nt, Human
cugugaacccaggacaagcaug

SEQ ID NO: 1287298 - RNA, 17 nt, Human
cugugagcccagcuggg

SEQ ID NO: 1287299 - RNA, 12 nt, Human
cugugaggcugu

SEQ ID NO: 1287300 - RNA, 15 nt, Human
cugugaggcuguccu

SEQ ID NO: 1287301 - RNA, 16 nt, Human
cugugaggcuguccug

SEQ ID NO: 1287302 - RNA, 17 nt, Human
cugugaggcuguccugu

SEQ ID NO: 1287303 - RNA, 13 nt, Human
cugugauucagaa

SEQ ID NO: 1287304 - RNA, 19 nt, Human
cugugccagagccuggggc

SEQ ID NO: 1287305 - RNA, 20 nt, Human
cugugccagagccuggggcu

SEQ ID NO: 1287306 - RNA, 22 nt, Human
cugugccagagccuggggcucu

SEQ ID NO: 1287307 - RNA, 21 nt, Human
cugugccagagccuggggcuc

SEQ ID NO: 1287308 - RNA, 14 nt, Human
cugugccaggugag

SEQ ID NO: 1287309 - RNA, 17 nt, Human
cugugcagguucccacu

SEQ ID NO: 1287310 - RNA, 16 nt, Human
cugugcagguucccac

SEQ ID NO: 1287311 - RNA, 13 nt, Human
cugugccagagcc

SEQ ID NO: 1287312 - RNA, 14 nt, Human
cugugccagagccu

SEQ ID NO: 1287313 - RNA, 15 nt, Human
cugugccagagccug

SEQ ID NO: 1287314 - RNA, 16 nt, Human
cugugccagagccugg

SEQ ID NO: 1287315 - RNA, 17 nt, Human
cugugccagagccuggg

SEQ ID NO: 1287316 - RNA, 18 nt, Human
cugugccagagccugggg

SEQ ID NO: 1287317 - RNA, 16 nt, Human
cugugauucagaaaau

SEQ ID NO: 1287318 - RNA, 21 nt, Human
cugugcaaccucuuggccuga

SEQ ID NO: 1287319 - RNA, 14 nt, Human
cugugcaccaagca

SEQ ID NO: 1287320 - RNA, 14 nt, Human
cugugcacugccca

SEQ ID NO: 1287321 - RNA, 16 nt, Human
cugugcagccgcugag

SEQ ID NO: 1287322 - RNA, 17 nt, Human
cugugcagccgcugagc

SEQ ID NO: 1287323 - RNA, 19 nt, Human
cugugcagccgcugagcga

SEQ ID NO: 1287324 - RNA, 21 nt, Human
cugugcagccgcugagcgagg

SEQ ID NO: 1287325 - RNA, 22 nt, Human
cugugcccccaggguccuggga

SEQ ID NO: 1287326 - RNA, 13 nt, Human
cugugccccuucc

SEQ ID NO: 1287327 - RNA, 17 nt, Human
cugugccccuuccgcca

SEQ ID NO: 1287328 - RNA, 18 nt, Human
cugugccccuuccgccac

SEQ ID NO: 1287329 - RNA, 20 nt, Human
cugugccccuuccgccacug

SEQ ID NO: 1287330 - RNA, 21 nt, Human
cugugccccuuccgccacugg

SEQ ID NO: 1287331 - RNA, 12 nt, Human
cugugcccccag

SEQ ID NO: 1287332 - RNA, 13 nt, Human
cugugcccccagg

SEQ ID NO: 1287333 - RNA, 14 nt, Human
cugugcccccaggg

SEQ ID NO: 1287334 - RNA, 20 nt, Human
cugugcccccaggguccugg

SEQ ID NO: 1287335 - RNA, 23 nt, Human
cugugcccccaggguccugggag

SEQ ID NO: 1287336 - RNA, 19 nt, Human
cugugccaggugaggucag

SEQ ID NO: 1287337 - RNA, 20 nt, Human
cugugccaggugaggucagc

SEQ ID NO: 1287338 - RNA, 15 nt, Human
cugguguagcuacag

SEQ ID NO: 1287339 - RNA, 17 nt, Human
cugguguagcuacagag

SEQ ID NO: 1287340 - RNA, 18 nt, Human
cugguguagcuacagaga

SEQ ID NO: 1287341 - RNA, 19 nt, Human
cugguguagcuacagagaa

SEQ ID NO: 1287342 - RNA, 12 nt, Human
cugguguagcua

SEQ ID NO: 1287343 - RNA, 20 nt, Human
cugguguagcuacagagaaa

SEQ ID NO: 1287344 - RNA, 21 nt, Human
cugguguagcuacagagaaac

SEQ ID NO: 1287345 - RNA, 23 nt, Human
cugguguagcuacagagaaacca

SEQ ID NO: 1287346 - RNA, 14 nt, Human
cuggugguggcucg

SEQ ID NO: 1287347 - RNA, 22 nt, Human
cuggugguggcucgggaggcga

SEQ ID NO: 1287348 - RNA, 23 nt, Human
cugguaugaacuugaggacacau

SEQ ID NO: 1287349 - RNA, 22 nt, Human
cugguauguaaaagaaaaucca

SEQ ID NO: 1287350 - RNA, 15 nt, Human
cugguauuguucuca

SEQ ID NO: 1287351 - RNA, 14 nt, Human
cugguuagaaaugc

SEQ ID NO: 1287352 - RNA, 23 nt, Human
cugguuagaaaugcagaauccua

SEQ ID NO: 1287353 - RNA, 20 nt, Human
cuguaaucccagcaugcuga

SEQ ID NO: 1287354 - RNA, 15 nt, Human
cuguaauucagguuu

SEQ ID NO: 1287355 - RNA, 18 nt, Human
cuguaauugaauauuauu

SEQ ID NO: 1287356 - RNA, 19 nt, Human
cuguaauugaauauuauuc

SEQ ID NO: 1287357 - RNA, 14 nt, Human
cuguaauugcaaaa

SEQ ID NO: 1287358 - RNA, 14 nt, Human
cuguacuccuccca

SEQ ID NO: 1287359 - RNA, 14 nt, Human
cuguacaucuauuu

SEQ ID NO: 1287360 - RNA, 23 nt, Human
cuguaccuuuugaggagccccag

SEQ ID NO: 1287361 - RNA, 15 nt, Human
cuguacuccucccag

SEQ ID NO: 1287362 - RNA, 16 nt, Human
cuguacuccucccagg

SEQ ID NO: 1287363 - RNA, 19 nt, Human
cuguacuccucccaggcgc

SEQ ID NO: 1287364 - RNA, 21 nt, Human
cuguacuccucccaggcgccc

SEQ ID NO: 1287365 - RNA, 13 nt, Human
cuguaguucuaag

SEQ ID NO: 1287366 - RNA, 14 nt, Human
cuguaguucuaaga

SEQ ID NO: 1287367 - RNA, 16 nt, Human
cuguaguucuaagacu

SEQ ID NO: 1287368 - RNA, 19 nt, Human
cuguaguucuaagacucaa

SEQ ID NO: 1287369 - RNA, 16 nt, Human
cuguaauuguguguga

SEQ ID NO: 1287370 - RNA, 12 nt, Human
cuguaauugugu

SEQ ID NO: 1287371 - RNA, 17 nt, Human
cuguauuagucacagag

SEQ ID NO: 1287372 - RNA, 19 nt, Human
cuguauuagucacagagau

SEQ ID NO: 1287373 - RNA, 16 nt, Human
cuguauucagacagau

SEQ ID NO: 1287374 - RNA, 15 nt, Human
cuguauucagacaga

SEQ ID NO: 1287375 - RNA, 20 nt, Human
cuguauuuuguauuguuuca

SEQ ID NO: 1287376 - RNA, 13 nt, Human
cuguauugucuga

SEQ ID NO: 1287377 - RNA, 14 nt, Human
cuguauugucugaa

SEQ ID NO: 1287378 - RNA, 17 nt, Human
cuguauugucugaacuu

SEQ ID NO: 1287379 - RNA, 16 nt, Human
cugggggccucuucug

SEQ ID NO: 1287380 - RNA, 12 nt, Human
cugggggccugg

SEQ ID NO: 1287381 - RNA, 13 nt, Human
cugggggccuggc

SEQ ID NO: 1287382 - RNA, 14 nt, Human
cugggggccuggcu

SEQ ID NO: 1287383 - RNA, 15 nt, Human
cugggggccuggcug

SEQ ID NO: 1287384 - RNA, 22 nt, Human
cugggcuuauaucuggccucug

SEQ ID NO: 1287385 - RNA, 20 nt, Human
cuggggaaaacuccaccuuc

SEQ ID NO: 1287386 - RNA, 17 nt, Human
cuggggaaacuggccau

SEQ ID NO: 1287387 - RNA, 22 nt, Human
cuggggaaacuggccauggccu

SEQ ID NO: 1287388 - RNA, 19 nt, Human
cuggggaaacuggccaugg

SEQ ID NO: 1287389 - RNA, 16 nt, Human
cugggggccuggcugg

SEQ ID NO: 1287390 - RNA, 17 nt, Human
cugggggccuggcuggc

SEQ ID NO: 1287391 - RNA, 18 nt, Human
cugggggccuggcuggcu

SEQ ID NO: 1287392 - RNA, 23 nt, Human
cugggggccuggcuggcugaggg

SEQ ID NO: 1287393 - RNA, 18 nt, Human
cugggggcugaggagcag

SEQ ID NO: 1287394 - RNA, 14 nt, Human
cugggggcugcagu

SEQ ID NO: 1287395 - RNA, 18 nt, Human
cugggggcugcaguucga

SEQ ID NO: 1287396 - RNA, 16 nt, Human
cugggggguggccagg

SEQ ID NO: 1287397 - RNA, 19 nt, Human
cugggggguggccaggccg

SEQ ID NO: 1287398 - RNA, 14 nt, Human
cugggggugccagg

SEQ ID NO: 1287399 - RNA, 15 nt, Human
cugggggugccagga

SEQ ID NO: 1287400 - RNA, 19 nt, Human
cugggggugccaggaccag

SEQ ID NO: 1287401 - RNA, 17 nt, Human
cugggggguggccaggc

SEQ ID NO: 1287402 - RNA, 20 nt, Human
cugggcuuauaucuggccuc

SEQ ID NO: 1287403 - RNA, 16 nt, Human
cugggcuggaugagcu

SEQ ID NO: 1287404 - RNA, 17 nt, Human
cugggcuggaugagcuc

SEQ ID NO: 1287405 - RNA, 18 nt, Human
cugggcuggaugagcucc

SEQ ID NO: 1287406 - RNA, 19 nt, Human
cugggcuggaugagcuccc

SEQ ID NO: 1287407 - RNA, 20 nt, Human
cugggcuggaugagcuccca

SEQ ID NO: 1287408 - RNA, 12 nt, Human
cugggcugggaa

SEQ ID NO: 1287409 - RNA, 15 nt, Human
cugggcugugggcaa

SEQ ID NO: 1287410 - RNA, 22 nt, Human
cugguaugaacuugaggacaca

SEQ ID NO: 1287411 - RNA, 21 nt, Human
cugguaugaacuugaggacac

SEQ ID NO: 1287412 - RNA, 20 nt, Human
cugguaugaacuugaggaca

SEQ ID NO: 1287413 - RNA, 18 nt, Human
cugguaugaacuugagga

SEQ ID NO: 1287414 - RNA, 14 nt, Human
cugguaucucagaa

SEQ ID NO: 1287415 - RNA, 15 nt, Human
cugguaucucagaaa

SEQ ID NO: 1287416 - RNA, 17 nt, Human
cugguaucucagaaagu

SEQ ID NO: 1287417 - RNA, 19 nt, Human
cugguaucucagaaagugc

SEQ ID NO: 1287418 - RNA, 22 nt, Human
cugguaucucagaaagugccug

SEQ ID NO: 1287419 - RNA, 23 nt, Human
cugguaucucagaaagugccuga

SEQ ID NO: 1287420 - RNA, 15 nt, Human
cugguaauauugacu

SEQ ID NO: 1287421 - RNA, 19 nt, Human
cugguaauauugacuugua

SEQ ID NO: 1287422 - RNA, 14 nt, Human
cugguaauagcugu

SEQ ID NO: 1287423 - RNA, 19 nt, Human
cugguauauccaaaagcuu

SEQ ID NO: 1287424 - RNA, 20 nt, Human
cugguauauccaaaagcuuu

SEQ ID NO: 1287425 - RNA, 16 nt, Human
cugggucgcccuggac

SEQ ID NO: 1287426 - RNA, 15 nt, Human
cugggucgcccugga

SEQ ID NO: 1287427 - RNA, 20 nt, Human
cuggguuuuguauucucuga

SEQ ID NO: 1287428 - RNA, 22 nt, Human
cuggguuuuguauucucugagc

SEQ ID NO: 1287429 - RNA, 20 nt, Human
cuggggguucuuucuuccuc

SEQ ID NO: 1287430 - RNA, 23 nt, Human
cuggggguucuuucuuccucugc

SEQ ID NO: 1287431 - RNA, 19 nt, Human
cugggguaaguggucuaag

SEQ ID NO: 1287432 - RNA, 20 nt, Human
cugggguauaaaacuuuccu

SEQ ID NO: 1287433 - RNA, 13 nt, Human
cugggucgcccug

SEQ ID NO: 1287434 - RNA, 20 nt, Human
cuggguccauaucacacaca

SEQ ID NO: 1287435 - RNA, 23 nt, Human
cuggguccaauuguggcacuugg

SEQ ID NO: 1287436 - RNA, 13 nt, Human
cuggguccauauc

SEQ ID NO: 1287437 - RNA, 15 nt, Human
cuggguccauaucac

SEQ ID NO: 1287438 - RNA, 17 nt, Human
cuggguccauaucacac

SEQ ID NO: 1287439 - RNA, 23 nt, Human
cugggccccugccucucugcagg

SEQ ID NO: 1287440 - RNA, 20 nt, Human
cugggccccugccucucugc

SEQ ID NO: 1287441 - RNA, 19 nt, Human
cugggcaaugauggcaauu

SEQ ID NO: 1287442 - RNA, 13 nt, Human
cugggcccucucu

SEQ ID NO: 1287443 - RNA, 14 nt, Human
cugggcccucucug

SEQ ID NO: 1287444 - RNA, 15 nt, Human
cugggcccucucugc

SEQ ID NO: 1287445 - RNA, 18 nt, Human
cugggcccucucugcucu

SEQ ID NO: 1287446 - RNA, 11 nt, Human
cugggauuagg

SEQ ID NO: 1287447 - RNA, 23 nt, Human
cugggauucaggaaaaggccugg

SEQ ID NO: 1287448 - RNA, 22 nt, Human
cugggauucaggaaaaggccug

SEQ ID NO: 1287449 - RNA, 23 nt, Human
cugggauuccuuagacucuuuuc

SEQ ID NO: 1287450 - RNA, 15 nt, Human
cugggcaaagccuag

SEQ ID NO: 1287451 - RNA, 15 nt, Human
cugggcaagcuggcg

SEQ ID NO: 1287452 - RNA, 18 nt, Human
cugggauuacaggcguga

SEQ ID NO: 1287453 - RNA, 11 nt, Human
cugggcccugg

SEQ ID NO: 1287454 - RNA, 13 nt, Human
cugggccugcaga

SEQ ID NO: 1287455 - RNA, 20 nt, Human
cugggccugaccaaacagcc

SEQ ID NO: 1287456 - RNA, 14 nt, Human
cugggccugccuca

SEQ ID NO: 1287457 - RNA, 15 nt, Human
cugggccugccucac

SEQ ID NO: 1287458 - RNA, 16 nt, Human
cugggccugccucacc

SEQ ID NO: 1287459 - RNA, 12 nt, Human
cugggccugcug

SEQ ID NO: 1287460 - RNA, 13 nt, Human
cugggccugcugc

SEQ ID NO: 1287461 - RNA, 14 nt, Human
cugggccugcugcu

SEQ ID NO: 1287462 - RNA, 15 nt, Human
cugggccugcugcug

SEQ ID NO: 1287463 - RNA, 16 nt, Human
cugggccugcugcuga

SEQ ID NO: 1287464 - RNA, 17 nt, Human
cugggccugcugcugag

SEQ ID NO: 1287465 - RNA, 18 nt, Human
cugggccugcugcugaga

SEQ ID NO: 1287466 - RNA, 19 nt, Human
cugggccugcugcugagaa

SEQ ID NO: 1287467 - RNA, 22 nt, Human
cugggccugcugcugagaaccu

SEQ ID NO: 1287468 - RNA, 20 nt, Human
cugggccugcugcugagaac

SEQ ID NO: 1287469 - RNA, 11 nt, Human
cugggccuggu

SEQ ID NO: 1287470 - RNA, 13 nt, Human
cugggccuggucu

SEQ ID NO: 1287471 - RNA, 14 nt, Human
cugggccuggucuc

SEQ ID NO: 1287472 - RNA, 15 nt, Human
cugggccuggucuca

SEQ ID NO: 1287473 - RNA, 16 nt, Human
cugggccuggucucac

SEQ ID NO: 1287474 - RNA, 19 nt, Human
cugggccuggucucacccu

SEQ ID NO: 1287475 - RNA, 23 nt, Human
cugggccuggucucacccuggag

SEQ ID NO: 1287476 - RNA, 14 nt, Human
cugggccuuaggaa

SEQ ID NO: 1287477 - RNA, 18 nt, Human
cugggccuuaggaagagc

SEQ ID NO: 1287478 - RNA, 14 nt, Human
cugggcuccuccag

SEQ ID NO: 1287479 - RNA, 15 nt, Human
cugggcuccuccagg

SEQ ID NO: 1287480 - RNA, 17 nt, Human
cugggcuccuccagggu

SEQ ID NO: 1287481 - RNA, 11 nt, Human
cugggccuugg

SEQ ID NO: 1287482 - RNA, 13 nt, Human
cugggcuccugga

SEQ ID NO: 1287483 - RNA, 15 nt, Human
cugggcuccuggacc

SEQ ID NO: 1287484 - RNA, 14 nt, Human
cugggcuccuggac

SEQ ID NO: 1287485 - RNA, 22 nt, Human
cugggcucugcaauuccccucu

SEQ ID NO: 1287486 - RNA, 23 nt, Human
cugggcucugcaauuccccucug

SEQ ID NO: 1287487 - RNA, 13 nt, Human
cugggcucugagu

SEQ ID NO: 1287488 - RNA, 12 nt, Human
cugggcugaggg

SEQ ID NO: 1287489 - RNA, 13 nt, Human
cugggcugaggga

SEQ ID NO: 1287490 - RNA, 16 nt, Human
cugggcugagggagcc

SEQ ID NO: 1287491 - RNA, 18 nt, Human
cugggcugagggagccug

SEQ ID NO: 1287492 - RNA, 19 nt, Human
cugggcugagggagccugg

SEQ ID NO: 1287493 - RNA, 23 nt, Human
cugggcugagggagccuggcccc

SEQ ID NO: 1287494 - RNA, 12 nt, Human
cugauuucuagg

SEQ ID NO: 1287495 - RNA, 16 nt, Human
cugauuuaggagaagc

SEQ ID NO: 1287496 - RNA, 17 nt, Human
cugauuuaggagaagcc

SEQ ID NO: 1287497 - RNA, 18 nt, Human
cugauuuaggagaagcca

SEQ ID NO: 1287498 - RNA, 20 nt, Human
cugauuuaggagaagccagg

SEQ ID NO: 1287499 - RNA, 22 nt, Human
cugauuuaggagaagccaggaa

SEQ ID NO: 1287500 - RNA, 21 nt, Human
cugauuuaggagaagccagga

SEQ ID NO: 1287501 - RNA, 18 nt, Human
cugauccuggaggcccag

SEQ ID NO: 1287502 - RNA, 19 nt, Human
cugauccuggaggcccagu

SEQ ID NO: 1287503 - RNA, 14 nt, Human
cugcaaaaagaaaa

SEQ ID NO: 1287504 - RNA, 13 nt, Human
cugcaaagcccag

SEQ ID NO: 1287505 - RNA, 15 nt, Human
cugcaaagcccagcu

SEQ ID NO: 1287506 - RNA, 15 nt, Human
cugcaaacugggaac

SEQ ID NO: 1287507 - RNA, 16 nt, Human
cugcaaacugggaacc

SEQ ID NO: 1287508 - RNA, 21 nt, Human
cugcaaacugggaaccccuuu

SEQ ID NO: 1287509 - RNA, 23 nt, Human
cugcaaacugggaaccccuuucc

SEQ ID NO: 1287510 - RNA, 22 nt, Human
cugcaaagaucuguccucagcc

SEQ ID NO: 1287511 - RNA, 23 nt, Human
cugcaaagaucuguccucagccu

SEQ ID NO: 1287512 - RNA, 17 nt, Human
cugcaaaaggacucuca

SEQ ID NO: 1287513 - RNA, 15 nt, Human
cugcaaacugccuuc

SEQ ID NO: 1287514 - RNA, 12 nt, Human
cugcaaacuggg

SEQ ID NO: 1287515 - RNA, 13 nt, Human
cugcaaacuggga

SEQ ID NO: 1287516 - RNA, 14 nt, Human
cugcaaacugggaa

SEQ ID NO: 1287517 - RNA, 18 nt, Human
cugauuuguaacccacug

SEQ ID NO: 1287518 - RNA, 19 nt, Human
cugauuuguaacccacuga

SEQ ID NO: 1287519 - RNA, 21 nt, Human
cugauuuuaggagcuaaggcu

SEQ ID NO: 1287520 - RNA, 22 nt, Human
cugauuuuaggagcuaaggcuc

SEQ ID NO: 1287521 - RNA, 23 nt, Human
cugauuuuaggagcuaaggcucu

SEQ ID NO: 1287522 - RNA, 18 nt, Human
cugauuuucaaagcuuuu

SEQ ID NO: 1287523 - RNA, 21 nt, Human
cugauuuucaaagcuuuuucc

SEQ ID NO: 1287524 - RNA, 15 nt, Human
cugauuuuuuuuccu

SEQ ID NO: 1287525 - RNA, 19 nt, Human
cugauuuuuuuuccuuuua

SEQ ID NO: 1287526 - RNA, 20 nt, Human
cugauuuuuuuuccuuuuaa

SEQ ID NO: 1287527 - RNA, 19 nt, Human
cugcaagugagguguguca

SEQ ID NO: 1287528 - RNA, 22 nt, Human
cugcaagugaggugugucacaa

SEQ ID NO: 1287529 - RNA, 17 nt, Human
cugcaaagcccagcuug

SEQ ID NO: 1287530 - RNA, 18 nt, Human
cugcaaguuaugaaauau

SEQ ID NO: 1287531 - RNA, 18 nt, Human
cugcaauacaaguuucau

SEQ ID NO: 1287532 - RNA, 15 nt, Human
cugcacaauaaaaau

SEQ ID NO: 1287533 - RNA, 18 nt, Human
cugcacaauaaaaauguu

SEQ ID NO: 1287534 - RNA, 13 nt, Human
cugcacacagcac

SEQ ID NO: 1287535 - RNA, 22 nt, Human
cugcacaauaaaaauguuuaac

SEQ ID NO: 1287536 - RNA, 15 nt, Human
cugcacaauaacucc

SEQ ID NO: 1287537 - RNA, 16 nt, Human
cugcacaauaacuccu

SEQ ID NO: 1287538 - RNA, 20 nt, Human
cugcacaauaacuccuccca

SEQ ID NO: 1287539 - RNA, 21 nt, Human
cugcacaauaacuccucccag

SEQ ID NO: 1287540 - RNA, 22 nt, Human
cugcacaauaacuccucccagg

SEQ ID NO: 1287541 - RNA, 23 nt, Human
cugcacaauaacuccucccaggg

SEQ ID NO: 1287542 - RNA, 14 nt, Human
cugcacacagcacg

SEQ ID NO: 1287543 - RNA, 20 nt, Human
cugcacacgcuccuuccucu

SEQ ID NO: 1287544 - RNA, 22 nt, Human
cugcacacgcuccuuccucuga

SEQ ID NO: 1287545 - RNA, 18 nt, Human
cugcacacccuccagaga

SEQ ID NO: 1287546 - RNA, 20 nt, Human
cugcacacccuccagagaca

SEQ ID NO: 1287547 - RNA, 15 nt, Human
cugcacaguugaagg

SEQ ID NO: 1287548 - RNA, 18 nt, Human
cugcacaucuguaaaucu

SEQ ID NO: 1287549 - RNA, 22 nt, Human
cugcacaucuguaaaucuacac

SEQ ID NO: 1287550 - RNA, 22 nt, Human
cugcacaugacucggggguggg

SEQ ID NO: 1287551 - RNA, 23 nt, Human
cugcacaugacucgggggugggg

SEQ ID NO: 1287552 - RNA, 21 nt, Human
cugcacauuaaggagaaaucu

SEQ ID NO: 1287553 - RNA, 15 nt, Human
cugcacugaugcugc

SEQ ID NO: 1287554 - RNA, 17 nt, Human
cugcacugaugcugccc

SEQ ID NO: 1287555 - RNA, 18 nt, Human
cugcacugaugcugcccc

SEQ ID NO: 1287556 - RNA, 19 nt, Human
cugcacugaugcugccccu

SEQ ID NO: 1287557 - RNA, 12 nt, Human
cugaguuuccua

SEQ ID NO: 1287558 - RNA, 19 nt, Human
cugaguuuccuaugggaac

SEQ ID NO: 1287559 - RNA, 20 nt, Human
cugaguuuccuaugggaaca

SEQ ID NO: 1287560 - RNA, 13 nt, Human
cugaguuuuacca

SEQ ID NO: 1287561 - RNA, 16 nt, Human
cugaguuuuccauggc

SEQ ID NO: 1287562 - RNA, 14 nt, Human
cugaguuuuaccaa

SEQ ID NO: 1287563 - RNA, 11 nt, Human
cugaguuuucc

SEQ ID NO: 1287564 - RNA, 19 nt, Human
cugauaagagaaucaacau

SEQ ID NO: 1287565 - RNA, 14 nt, Human
cugaguuccugcau

SEQ ID NO: 1287566 - RNA, 16 nt, Human
cugaguuccugcaugc

SEQ ID NO: 1287567 - RNA, 15 nt, Human
cugaguugcuuuuca

SEQ ID NO: 1287568 - RNA, 16 nt, Human
cugaguugcuuuucag

SEQ ID NO: 1287569 - RNA, 11 nt, Human
cugaguuuccu

SEQ ID NO: 1287570 - RNA, 20 nt, Human
cugagucccaggcugagccu

SEQ ID NO: 1287571 - RNA, 17 nt, Human
cugaguuacagaaauga

SEQ ID NO: 1287572 - RNA, 22 nt, Human
cugauacagaaaaguugaauuu

SEQ ID NO: 1287573 - RNA, 15 nt, Human
cugauaauuuuaaau

SEQ ID NO: 1287574 - RNA, 17 nt, Human
cugauaauuuuaaauuc

SEQ ID NO: 1287575 - RNA, 18 nt, Human
cugauaauuuuaaauucu

SEQ ID NO: 1287576 - RNA, 16 nt, Human
cugauauauuuuacaa

SEQ ID NO: 1287577 - RNA, 18 nt, Human
cugauauauuuuacaauu

SEQ ID NO: 1287578 - RNA, 15 nt, Human
cugaucaccugcccu

SEQ ID NO: 1287579 - RNA, 18 nt, Human
cugauauuuucucuagga

SEQ ID NO: 1287580 - RNA, 16 nt, Human
cugauauuuucucuag

SEQ ID NO: 1287581 - RNA, 12 nt, Human
cugaucaaggcc

SEQ ID NO: 1287582 - RNA, 15 nt, Human
cugaucaaggccuua

SEQ ID NO: 1287583 - RNA, 14 nt, Human
cugauauuuucucu

SEQ ID NO: 1287584 - RNA, 15 nt, Human
cugauauuuucucua

SEQ ID NO: 1287585 - RNA, 17 nt, Human
cugaucagaccacggcu

SEQ ID NO: 1287586 - RNA, 14 nt, Human
cugaucagagccgu

SEQ ID NO: 1287587 - RNA, 20 nt, Human
cugaucagagccgugguccu

SEQ ID NO: 1287588 - RNA, 16 nt, Human
cugaucagaacaaaug

SEQ ID NO: 1287589 - RNA, 15 nt, Human
cugaucccucuacag

SEQ ID NO: 1287590 - RNA, 12 nt, Human
cugauccuggag

SEQ ID NO: 1287591 - RNA, 15 nt, Human
cugauccuggaggcc

SEQ ID NO: 1287592 - RNA, 17 nt, Human
cugauccuggaggccca

SEQ ID NO: 1287593 - RNA, 14 nt, Human
cugaggcugaggca

SEQ ID NO: 1287594 - RNA, 11 nt, Human
cugaggcuggc

SEQ ID NO: 1287595 - RNA, 13 nt, Human
cugaggcuggcac

SEQ ID NO: 1287596 - RNA, 12 nt, Human
cugaggcugagg

SEQ ID NO: 1287597 - RNA, 17 nt, Human
cugaggcuggcacagga

SEQ ID NO: 1287598 - RNA, 18 nt, Human
cugaggcuggcacaggac

SEQ ID NO: 1287599 - RNA, 19 nt, Human
cugaggcuggcacaggaca

SEQ ID NO: 1287600 - RNA, 20 nt, Human
cugaggcuggcacaggacau

SEQ ID NO: 1287601 - RNA, 13 nt, Human
cugaggcuguggu

SEQ ID NO: 1287602 - RNA, 14 nt, Human
cugaggcugugguc

SEQ ID NO: 1287603 - RNA, 17 nt, Human
cugaggcuguggucaca

SEQ ID NO: 1287604 - RNA, 19 nt, Human
cugaggcuguggucacagc

SEQ ID NO: 1287605 - RNA, 20 nt, Human
cugaggcuguggucacagcg

SEQ ID NO: 1287606 - RNA, 14 nt, Human
cugaggcuuuggau

SEQ ID NO: 1287607 - RNA, 12 nt, Human
cugagggagccu

SEQ ID NO: 1287608 - RNA, 13 nt, Human
cugagggagccug

SEQ ID NO: 1287609 - RNA, 17 nt, Human
cugagggagccuggccc

SEQ ID NO: 1287610 - RNA, 15 nt, Human
cugagggaucuuuac

SEQ ID NO: 1287611 - RNA, 22 nt, Human
cugagucacccuaccugugccu

SEQ ID NO: 1287612 - RNA, 23 nt, Human
cugagucacccuaccugugccug

SEQ ID NO: 1287613 - RNA, 14 nt, Human
cugagucagagcca

SEQ ID NO: 1287614 - RNA, 18 nt, Human
cugagucagagccauguc

SEQ ID NO: 1287615 - RNA, 19 nt, Human
cugagucagagccaugucu

SEQ ID NO: 1287616 - RNA, 17 nt, Human
cugagucaggacuugaa

SEQ ID NO: 1287617 - RNA, 21 nt, Human
cugagucagagccaugucuuc

SEQ ID NO: 1287618 - RNA, 21 nt, Human
cugaggcuccacuuggucugu

SEQ ID NO: 1287619 - RNA, 15 nt, Human
cugaggcuccacuug

SEQ ID NO: 1287620 - RNA, 17 nt, Human
cugaggccuagacucug

SEQ ID NO: 1287621 - RNA, 23 nt, Human
cugaggcgccccaacccguggag

SEQ ID NO: 1287622 - RNA, 22 nt, Human
cugaggcgagaagggcugcuuc

SEQ ID NO: 1287623 - RNA, 19 nt, Human
cugaggccuagacucuguc

SEQ ID NO: 1287624 - RNA, 15 nt, Human
cugaggccuagacuc

SEQ ID NO: 1287625 - RNA, 12 nt, Human
cugaggccugga

SEQ ID NO: 1287626 - RNA, 15 nt, Human
cugaggccuggacuu

SEQ ID NO: 1287627 - RNA, 19 nt, Human
cugaggccuggacuuuccu

SEQ ID NO: 1287628 - RNA, 20 nt, Human
cugaggccuggacuuuccug

SEQ ID NO: 1287629 - RNA, 22 nt, Human
cugaggccuggacuuuccugca

SEQ ID NO: 1287630 - RNA, 14 nt, Human
cugaggccugggcc

SEQ ID NO: 1287631 - RNA, 15 nt, Human
cugaggccugggccg

SEQ ID NO: 1287632 - RNA, 19 nt, Human
cugaggccugggccgcugc

SEQ ID NO: 1287633 - RNA, 22 nt, Human
cugaggccugggccgcugccac

SEQ ID NO: 1287634 - RNA, 23 nt, Human
cugaggccugggccgcugccacg

SEQ ID NO: 1287635 - RNA, 19 nt, Human
cugagcccagggaggccga

SEQ ID NO: 1287636 - RNA, 12 nt, Human
cugagccccagg

SEQ ID NO: 1287637 - RNA, 13 nt, Human
cugagccccaggg

SEQ ID NO: 1287638 - RNA, 15 nt, Human
cugagccccagggag

SEQ ID NO: 1287639 - RNA, 18 nt, Human
cugagccccagggagagg

SEQ ID NO: 1287640 - RNA, 20 nt, Human
cugagcccgguaagagcaaa

SEQ ID NO: 1287641 - RNA, 19 nt, Human
cugagcccgguaagagcaa

SEQ ID NO: 1287642 - RNA, 23 nt, Human
cugccuggacuuggccccugcca

SEQ ID NO: 1287643 - RNA, 22 nt, Human
cugccuggacuuggccccugcc

SEQ ID NO: 1287644 - RNA, 12 nt, Human
cugccuggaccc

SEQ ID NO: 1287645 - RNA, 10 nt, Human
cugccuggag

SEQ ID NO: 1287646 - RNA, 22 nt, Human
cugccuggagacuuagggcacc

SEQ ID NO: 1287647 - RNA, 17 nt, Human
cugccuggaccagccuc

SEQ ID NO: 1287648 - RNA, 13 nt, Human
cugccuggacccg

SEQ ID NO: 1287649 - RNA, 11 nt, Human
cugccuggagg

SEQ ID NO: 1287650 - RNA, 12 nt, Human
cugccuggagga

SEQ ID NO: 1287651 - RNA, 15 nt, Human
cugccuggaggaccu

SEQ ID NO: 1287652 - RNA, 16 nt, Human
cugccuggaggaccug

SEQ ID NO: 1287653 - RNA, 17 nt, Human
cugccuggaggaccuga

SEQ ID NO: 1287654 - RNA, 18 nt, Human
cugccuggaggaccugag

SEQ ID NO: 1287655 - RNA, 19 nt, Human
cugccuggaggaccugagc

SEQ ID NO: 1287656 - RNA, 20 nt, Human
cugccuggaggaccugagcc

SEQ ID NO: 1287657 - RNA, 21 nt, Human
cugccuggaggaccugagccu

SEQ ID NO: 1287658 - RNA, 23 nt, Human
cugccuggaggaccugagccugc

SEQ ID NO: 1287659 - RNA, 22 nt, Human
cugccuggaggaccugagccug

SEQ ID NO: 1287660 - RNA, 21 nt, Human
cugccuucgcuucuugccucu

SEQ ID NO: 1287661 - RNA, 23 nt, Human
cugccuucgcuucuugccucugu

SEQ ID NO: 1287662 - RNA, 18 nt, Human
cugccuucuggccuugua

SEQ ID NO: 1287663 - RNA, 14 nt, Human
cugccuucuggccu

SEQ ID NO: 1287664 - RNA, 19 nt, Human
cugccuucuucggaaagaa

SEQ ID NO: 1287665 - RNA, 17 nt, Human
cugccuugaaaaagaca

SEQ ID NO: 1287666 - RNA, 19 nt, Human
cugccucucugcagguccc

SEQ ID NO: 1287667 - RNA, 14 nt, Human
cugccugcccuggu

SEQ ID NO: 1287668 - RNA, 20 nt, Human
cugccuggaagagcagcccu

SEQ ID NO: 1287669 - RNA, 15 nt, Human
cugccugcccuggug

SEQ ID NO: 1287670 - RNA, 11 nt, Human
cugccuggacc

SEQ ID NO: 1287671 - RNA, 23 nt, Human
cugcggaggaaggaggacccagg

SEQ ID NO: 1287672 - RNA, 18 nt, Human
cugcggcccaauccaagg

SEQ ID NO: 1287673 - RNA, 21 nt, Human
cugccuuuuaguuccugugca

SEQ ID NO: 1287674 - RNA, 23 nt, Human
cugccuuuuaguuccugugcaca

SEQ ID NO: 1287675 - RNA, 20 nt, Human
cugccuuuuaguuccugugc

SEQ ID NO: 1287676 - RNA, 19 nt, Human
cugccuuuuaguuccugug

SEQ ID NO: 1287677 - RNA, 17 nt, Human
cugccuuuuaguuccug

SEQ ID NO: 1287678 - RNA, 18 nt, Human
cugccuuugccaggugac

SEQ ID NO: 1287679 - RNA, 17 nt, Human
cugccuuugccagguga

SEQ ID NO: 1287680 - RNA, 15 nt, Human
cugccuuuccaucca

SEQ ID NO: 1287681 - RNA, 20 nt, Human
cugccuuuccauccauggcc

SEQ ID NO: 1287682 - RNA, 22 nt, Human
cugccuuuccauccauggccag

SEQ ID NO: 1287683 - RNA, 21 nt, Human
cugccuuuccauccauggcca

SEQ ID NO: 1287684 - RNA, 14 nt, Human
cugccuuugccagg

SEQ ID NO: 1287685 - RNA, 15 nt, Human
cugccuuugccaggu

SEQ ID NO: 1287686 - RNA, 16 nt, Human
cugccuuugccaggug

SEQ ID NO: 1287687 - RNA, 19 nt, Human
cugcgugacaauaaaacau

SEQ ID NO: 1287688 - RNA, 18 nt, Human
cugccucucugcaggucc

SEQ ID NO: 1287689 - RNA, 17 nt, Human
cugccucucugcagguc

SEQ ID NO: 1287690 - RNA, 16 nt, Human
cugccucucugcaggu

SEQ ID NO: 1287691 - RNA, 15 nt, Human
cugccucucugcagg

SEQ ID NO: 1287692 - RNA, 14 nt, Human
cugccuccagaaug

SEQ ID NO: 1287693 - RNA, 11 nt, Human
cugccucagga

SEQ ID NO: 1287694 - RNA, 22 nt, Human
cugccuccagaauggucuuucu

SEQ ID NO: 1287695 - RNA, 13 nt, Human
cugccuauuuuaa

SEQ ID NO: 1287696 - RNA, 23 nt, Human
cugccuauuaucugucagcugca

SEQ ID NO: 1287697 - RNA, 17 nt, Human
cugccucagccucccga

SEQ ID NO: 1287698 - RNA, 18 nt, Human
cugccucagccucccaag

SEQ ID NO: 1287699 - RNA, 10 nt, Human
cugccucagg

SEQ ID NO: 1287700 - RNA, 16 nt, Human
cugccggcuccuuggu

SEQ ID NO: 1287701 - RNA, 20 nt, Human
cugccuacagaacuucagaa

SEQ ID NO: 1287702 - RNA, 23 nt, Human
cugccuacagaacuucagaaaga

SEQ ID NO: 1287703 - RNA, 14 nt, Human
cugccuagaaacaa

SEQ ID NO: 1287704 - RNA, 15 nt, Human
cugccuagaaacaac

SEQ ID NO: 1287705 - RNA, 18 nt, Human
cugccuagaaacaacacu

SEQ ID NO: 1287706 - RNA, 20 nt, Human
cugccuagaaacaacacugu

SEQ ID NO: 1287707 - RNA, 21 nt, Human
cugccuagaaacaacacugua

SEQ ID NO: 1287708 - RNA, 23 nt, Human
cugccuagaaacaacacuguagu

SEQ ID NO: 1287709 - RNA, 15 nt, Human
cugccuagauucagg

SEQ ID NO: 1287710 - RNA, 23 nt, Human
cugccuagauucagggaaagugg

SEQ ID NO: 1287711 - RNA, 19 nt, Human
cugccuagauucagggaaa

SEQ ID NO: 1287712 - RNA, 17 nt, Human
cugccuauuaucuguca

SEQ ID NO: 1287713 - RNA, 21 nt, Human
cugccccuccucucugcccua

SEQ ID NO: 1287714 - RNA, 12 nt, Human
cugccccaacuc

SEQ ID NO: 1287715 - RNA, 13 nt, Human
cugccccucucac

SEQ ID NO: 1287716 - RNA, 17 nt, Human
cugccccucucaccaaa

SEQ ID NO: 1287717 - RNA, 15 nt, Human
cugccgcgcagugug

SEQ ID NO: 1287718 - RNA, 18 nt, Human
cugccaccugucugucug

SEQ ID NO: 1287719 - RNA, 16 nt, Human
cugccaccugucuguc

SEQ ID NO: 1287720 - RNA, 15 nt, Human
cugccaccugucugu

SEQ ID NO: 1287721 - RNA, 14 nt, Human
cugccaccugucug

SEQ ID NO: 1287722 - RNA, 13 nt, Human
cugccaccugucu

SEQ ID NO: 1287723 - RNA, 12 nt, Human
cugccaccuguc

SEQ ID NO: 1287724 - RNA, 11 nt, Human
cugccaccugu

SEQ ID NO: 1287725 - RNA, 17 nt, Human
cugccaccugucugucu

SEQ ID NO: 1287726 - RNA, 16 nt, Human
cugccacucacuaggc

SEQ ID NO: 1287727 - RNA, 19 nt, Human
cugccacucacuaggcccc

SEQ ID NO: 1287728 - RNA, 14 nt, Human
cugccacugagggg

SEQ ID NO: 1287729 - RNA, 18 nt, Human
cugccacugaggggggau

SEQ ID NO: 1287730 - RNA, 23 nt, Human
cugccacugaggggggauccagu

SEQ ID NO: 1287731 - RNA, 17 nt, Human
cugcccacucccaggac

SEQ ID NO: 1287732 - RNA, 17 nt, Human
cugcccagccuccaagc

SEQ ID NO: 1287733 - RNA, 13 nt, Human
cugcccaguugca

SEQ ID NO: 1287734 - RNA, 16 nt, Human
cugcccauggacaggc

SEQ ID NO: 1287735 - RNA, 18 nt, Human
cugcccauggacaggcug

SEQ ID NO: 1287736 - RNA, 20 nt, Human
cugcccauggacaggcuggc

SEQ ID NO: 1287737 - RNA, 19 nt, Human
cugccaccuccugccucag

SEQ ID NO: 1287738 - RNA, 12 nt, Human
cugccaccugga

SEQ ID NO: 1287739 - RNA, 13 nt, Human
cugccaccuggac

SEQ ID NO: 1287740 - RNA, 14 nt, Human
cugccaccuggacc

SEQ ID NO: 1287741 - RNA, 15 nt, Human
cugccaccuggaccc

SEQ ID NO: 1287742 - RNA, 16 nt, Human
cugccaccuggacccc

SEQ ID NO: 1287743 - RNA, 20 nt, Human
cugccaccuggaccccugca

SEQ ID NO: 1287744 - RNA, 22 nt, Human
cugccaccuggaccccugcauu

SEQ ID NO: 1287745 - RNA, 21 nt, Human
cugccaccuggaccccugcau

SEQ ID NO: 1287746 - RNA, 16 nt, Human
cugccaccuccugccu

SEQ ID NO: 1287747 - RNA, 14 nt, Human
cugccaccuccugc

SEQ ID NO: 1287748 - RNA, 12 nt, Human
cugccacacagg

SEQ ID NO: 1287749 - RNA, 21 nt, Human
cugcauggcagggggcugcug

SEQ ID NO: 1287750 - RNA, 22 nt, Human
cugcauggcagggggcugcugc

SEQ ID NO: 1287751 - RNA, 23 nt, Human
cugcauggcagggggcugcugcu

SEQ ID NO: 1287752 - RNA, 16 nt, Human
cugcauggcauccucc

SEQ ID NO: 1287753 - RNA, 17 nt, Human
cugcauggcauccucca

SEQ ID NO: 1287754 - RNA, 18 nt, Human
cugcauggcauccuccag

SEQ ID NO: 1287755 - RNA, 19 nt, Human
cugcauggcauccuccagc

SEQ ID NO: 1287756 - RNA, 21 nt, Human
cugcauggcauccuccagccc

SEQ ID NO: 1287757 - RNA, 22 nt, Human
cugcauggcauccuccagcccc

SEQ ID NO: 1287758 - RNA, 21 nt, Human
cugcauguacuguauauuaca

SEQ ID NO: 1287759 - RNA, 23 nt, Human
cugcaugcgagugcucauuucag

SEQ ID NO: 1287760 - RNA, 12 nt, Human
cugcaugcccag

SEQ ID NO: 1287761 - RNA, 13 nt, Human
cugcaugcccaga

SEQ ID NO: 1287762 - RNA, 14 nt, Human
cugcaugcccagag

SEQ ID NO: 1287763 - RNA, 16 nt, Human
cugcaugcccagagac

SEQ ID NO: 1287764 - RNA, 17 nt, Human
cugcaugcccagagacc

SEQ ID NO: 1287765 - RNA, 19 nt, Human
cugcaugcccagagaccca

SEQ ID NO: 1287766 - RNA, 20 nt, Human
cugcaugcccagagacccag

SEQ ID NO: 1287767 - RNA, 22 nt, Human
cugcaugcccagagacccagcg

SEQ ID NO: 1287768 - RNA, 21 nt, Human
cugcaugcccagagacccagc

SEQ ID NO: 1287769 - RNA, 13 nt, Human
cugcauggcaggg

SEQ ID NO: 1287770 - RNA, 14 nt, Human
cugcauggcagggg

SEQ ID NO: 1287771 - RNA, 17 nt, Human
cugcauggcagggggcu

SEQ ID NO: 1287772 - RNA, 20 nt, Human
cugcauggcagggggcugcu

SEQ ID NO: 1287773 - RNA, 13 nt, Human
cugcauccagccu

SEQ ID NO: 1287774 - RNA, 19 nt, Human
cugcauccauucuccugag

SEQ ID NO: 1287775 - RNA, 19 nt, Human
cugcauccuccgccucccg

SEQ ID NO: 1287776 - RNA, 20 nt, Human
cugcauccuccgccucccgg

SEQ ID NO: 1287777 - RNA, 15 nt, Human
cugcauccucuggag

SEQ ID NO: 1287778 - RNA, 16 nt, Human
cugcauccucuggagc

SEQ ID NO: 1287779 - RNA, 18 nt, Human
cugcauccucuggagcca

SEQ ID NO: 1287780 - RNA, 20 nt, Human
cugcauccucuggagccagc

SEQ ID NO: 1287781 - RNA, 22 nt, Human
cugcauccucuggagccagccg

SEQ ID NO: 1287782 - RNA, 20 nt, Human
cugcaucuagaggcuuccuu

SEQ ID NO: 1287783 - RNA, 21 nt, Human
cugcaucuagaggcuuccuuc

SEQ ID NO: 1287784 - RNA, 23 nt, Human
cugcacuugcgguuccggcaugg

SEQ ID NO: 1287785 - RNA, 22 nt, Human
cugcacuugcgguuccggcaug

SEQ ID NO: 1287786 - RNA, 16 nt, Human
cugcagaaacuacuga

SEQ ID NO: 1287787 - RNA, 21 nt, Human
cugcauccauucuccugagga

SEQ ID NO: 1287788 - RNA, 16 nt, Human
cugaauuaugaaacuu

SEQ ID NO: 1287789 - RNA, 18 nt, Human
cugaauuaucuauuucau

SEQ ID NO: 1287790 - RNA, 11 nt, Human
cugaauuuuua

SEQ ID NO: 1287791 - RNA, 12 nt, Human
cugaauuuuuaa

SEQ ID NO: 1287792 - RNA, 21 nt, Human
cugaauuuuuaaacaaguauu

SEQ ID NO: 1287793 - RNA, 17 nt, Human
cugaccagccuccaugc

SEQ ID NO: 1287794 - RNA, 18 nt, Human
cugaauuuuuaaacaagu

SEQ ID NO: 1287795 - RNA, 21 nt, Human
cugaccagccuccaugcugcc

SEQ ID NO: 1287796 - RNA, 23 nt, Human
cugaccagccuccaugcugccuc

SEQ ID NO: 1287797 - RNA, 20 nt, Human
cugaccagccgugagcaugu

SEQ ID NO: 1287798 - RNA, 23 nt, Human
cugaccagccgugagcauguuug

SEQ ID NO: 1287799 - RNA, 13 nt, Human
cugaccagcuccc

SEQ ID NO: 1287800 - RNA, 14 nt, Human
cugaccagcucccc

SEQ ID NO: 1287801 - RNA, 20 nt, Human
cugaccagcucccccucccu

SEQ ID NO: 1287802 - RNA, 21 nt, Human
cugaccagcucccccucccuc

SEQ ID NO: 1287803 - RNA, 22 nt, Human
cugaccagcucccccucccucc

SEQ ID NO: 1287804 - RNA, 13 nt, Human
cugaccagcugcu

SEQ ID NO: 1287805 - RNA, 16 nt, Human
cugaccagcugcuccg

SEQ ID NO: 1287806 - RNA, 19 nt, Human
cugaccagcugcuccgagg

SEQ ID NO: 1287807 - RNA, 14 nt, Human
cugacggacucaug

SEQ ID NO: 1287808 - RNA, 15 nt, Human
cugacggccagggag

SEQ ID NO: 1287809 - RNA, 19 nt, Human
cugacggccagggagaagc

SEQ ID NO: 1287810 - RNA, 20 nt, Human
cugacggccagggagaagcu

SEQ ID NO: 1287811 - RNA, 21 nt, Human
cugacggccagggagaagcuc

SEQ ID NO: 1287812 - RNA, 16 nt, Human
cugacggaguccugug

SEQ ID NO: 1287813 - RNA, 17 nt, Human
cugacuguacuccuccc

SEQ ID NO: 1287814 - RNA, 13 nt, Human
cugacuguagcuu

SEQ ID NO: 1287815 - RNA, 18 nt, Human
cugacuguagcuuuggaa

SEQ ID NO: 1287816 - RNA, 14 nt, Human
cugacuuugcuugc

SEQ ID NO: 1287817 - RNA, 15 nt, Human
cugacuuugcuugcu

SEQ ID NO: 1287818 - RNA, 16 nt, Human
cugacuuugcuugcuu

SEQ ID NO: 1287819 - RNA, 17 nt, Human
cugacuuugcuugcuuu

SEQ ID NO: 1287820 - RNA, 18 nt, Human
cugacuuugcuugcuuug

SEQ ID NO: 1287821 - RNA, 19 nt, Human
cugacuuugcuugcuuuga

SEQ ID NO: 1287822 - RNA, 21 nt, Human
cugagaaaagcuuugaacccu

SEQ ID NO: 1287823 - RNA, 14 nt, Human
cugacuaaacuuuu

SEQ ID NO: 1287824 - RNA, 15 nt, Human
cugacuaaacuuuuu

SEQ ID NO: 1287825 - RNA, 19 nt, Human
cugacuaaacuuuuuuucu

SEQ ID NO: 1287826 - RNA, 22 nt, Human
cugacuaaacuuuuuuucugua

SEQ ID NO: 1287827 - RNA, 16 nt, Human
cugacucagggcuccu

SEQ ID NO: 1287828 - RNA, 18 nt, Human
cugacucagggcuccugg

SEQ ID NO: 1287829 - RNA, 19 nt, Human
cugacucagggcuccuggg

SEQ ID NO: 1287830 - RNA, 21 nt, Human
cugacucagggcuccuggguu

SEQ ID NO: 1287831 - RNA, 16 nt, Human
cugacucauucugaag

SEQ ID NO: 1287832 - RNA, 15 nt, Human
cugacucgguuucuc

SEQ ID NO: 1287833 - RNA, 16 nt, Human
cugacucgguuucucc

SEQ ID NO: 1287834 - RNA, 17 nt, Human
cugacucgguuucucca

SEQ ID NO: 1287835 - RNA, 18 nt, Human
cugacucgguuucuccaa

SEQ ID NO: 1287836 - RNA, 14 nt, Human
cugacugccaagcc

SEQ ID NO: 1287837 - RNA, 15 nt, Human
cugacugccaagcca

SEQ ID NO: 1287838 - RNA, 18 nt, Human
cugacugccaagccaugg

SEQ ID NO: 1287839 - RNA, 16 nt, Human
cugacugccaagccau

SEQ ID NO: 1287840 - RNA, 18 nt, Human
cugacugggaccaggcac

SEQ ID NO: 1287841 - RNA, 12 nt, Human
cugacugggagu

SEQ ID NO: 1287842 - RNA, 23 nt, Human
cugagauuauaggcaccuaccac

SEQ ID NO: 1287843 - RNA, 14 nt, Human
cugagauuuauuaa

SEQ ID NO: 1287844 - RNA, 15 nt, Human
cugagauuuauuaaa

SEQ ID NO: 1287845 - RNA, 17 nt, Human
cugagauuuauuaaaga

SEQ ID NO: 1287846 - RNA, 18 nt, Human
cugagauuuauuaaagaa

SEQ ID NO: 1287847 - RNA, 19 nt, Human
cugagauuuauuaaagaaa

SEQ ID NO: 1287848 - RNA, 15 nt, Human
cugagcaaauguggc

SEQ ID NO: 1287849 - RNA, 17 nt, Human
cugagcaaauguggcuc

SEQ ID NO: 1287850 - RNA, 20 nt, Human
cugagcaaauguggcuccug

SEQ ID NO: 1287851 - RNA, 21 nt, Human
cugagcaaauguggcuccugg

SEQ ID NO: 1287852 - RNA, 19 nt, Human
cugagcaacgcuauuccag

SEQ ID NO: 1287853 - RNA, 20 nt, Human
cugagcaacgcuauuccagc

SEQ ID NO: 1287854 - RNA, 23 nt, Human
cugagcaacgcuauuccagcugu

SEQ ID NO: 1287855 - RNA, 20 nt, Human
cugagcaacucuugauuauc

SEQ ID NO: 1287856 - RNA, 12 nt, Human
cugagcccaggg

SEQ ID NO: 1287857 - RNA, 13 nt, Human
cugagcccaggga

SEQ ID NO: 1287858 - RNA, 14 nt, Human
cugagcccagggag

SEQ ID NO: 1287859 - RNA, 15 nt, Human
cugagcccagggagg

SEQ ID NO: 1287860 - RNA, 16 nt, Human
cugagcccagggaggc

SEQ ID NO: 1287861 - RNA, 17 nt, Human
cugagcccagggaggcc

SEQ ID NO: 1287862 - RNA, 22 nt, Human
cugagcccagggaggccgaagc

SEQ ID NO: 1287863 - RNA, 13 nt, Human
cugagcagggccg

SEQ ID NO: 1287864 - RNA, 16 nt, Human
cugagcagggccgggg

SEQ ID NO: 1287865 - RNA, 17 nt, Human
cugagcagggccgggga

SEQ ID NO: 1287866 - RNA, 21 nt, Human
cugagcagggccggggaacug

SEQ ID NO: 1287867 - RNA, 12 nt, Human
cugagcaggcca

SEQ ID NO: 1287868 - RNA, 13 nt, Human
cugagcaggccac

SEQ ID NO: 1287869 - RNA, 23 nt, Human
cugagcaggccacacuucaaacu

SEQ ID NO: 1287870 - RNA, 15 nt, Human
cugagcaggccacac

SEQ ID NO: 1287871 - RNA, 12 nt, Human
cugagcagggcc

SEQ ID NO: 1287872 - RNA, 23 nt, Human
cugagcagggccggggaacuggc

SEQ ID NO: 1287873 - RNA, 15 nt, Human
cugagcaguccuugg

SEQ ID NO: 1287874 - RNA, 17 nt, Human
cugagcaguccuuggcc

SEQ ID NO: 1287875 - RNA, 18 nt, Human
cugagcaguccuuggccu

SEQ ID NO: 1287876 - RNA, 21 nt, Human
cugagcaguccuuggccugcu

SEQ ID NO: 1287877 - RNA, 22 nt, Human
cugagcaguccuuggccugcua

SEQ ID NO: 1287878 - RNA, 20 nt, Human
cugagcagugaaugauucag

SEQ ID NO: 1287879 - RNA, 21 nt, Human
cugagcacuguuuucuagugu

SEQ ID NO: 1287880 - RNA, 23 nt, Human
cugagcacuguuuucuaguguau

SEQ ID NO: 1287881 - RNA, 15 nt, Human
cugagcacuguuuuc

SEQ ID NO: 1287882 - RNA, 14 nt, Human
cugagcacuguuuu

SEQ ID NO: 1287883 - RNA, 16 nt, Human
cugagcacuguuuaua

SEQ ID NO: 1287884 - RNA, 20 nt, Human
cugagcacuguuuauacacu

SEQ ID NO: 1287885 - RNA, 13 nt, Human
cugagcacuguuu

SEQ ID NO: 1287886 - RNA, 19 nt, Human
cugagcacugccaggaggg

SEQ ID NO: 1287887 - RNA, 12 nt, Human
cugagcacuguu

SEQ ID NO: 1287888 - RNA, 17 nt, Human
cugagcacugccaggag

SEQ ID NO: 1287889 - RNA, 18 nt, Human
cugagcacugccaggagg

SEQ ID NO: 1287890 - RNA, 22 nt, Human
cugagcacugccaggagggaca

SEQ ID NO: 1287891 - RNA, 16 nt, Human
cugagcagcgagccug

SEQ ID NO: 1287892 - RNA, 17 nt, Human
cugagcagcgagccugc

SEQ ID NO: 1287893 - RNA, 18 nt, Human
cugagcagcgagccugcu

SEQ ID NO: 1287894 - RNA, 17 nt, Human
cugagcaaucugacccu

SEQ ID NO: 1287895 - RNA, 13 nt, Human
cugagcacugcca

SEQ ID NO: 1287896 - RNA, 14 nt, Human
cugagcacugccag

SEQ ID NO: 1287897 - RNA, 15 nt, Human
cugagcacugccagg

SEQ ID NO: 1287898 - RNA, 16 nt, Human
cugagcacugccagga

SEQ ID NO: 1287899 - RNA, 13 nt, Human
cugaauuaugaaa

SEQ ID NO: 1287900 - RNA, 17 nt, Human
cugaauuaucuauuuca

SEQ ID NO: 1287901 - RNA, 14 nt, Human
cugaauuaugaaac

SEQ ID NO: 1287902 - RNA, 15 nt, Human
cugaauuaugaaacu

SEQ ID NO: 1287903 - RNA, 12 nt, Human
cugaauuauuuu

SEQ ID NO: 1287904 - RNA, 15 nt, Human
cugaauguugggacu

SEQ ID NO: 1287905 - RNA, 16 nt, Human
cugaauguugggacug

SEQ ID NO: 1287906 - RNA, 19 nt, Human
cugaauguugggacugcua

SEQ ID NO: 1287907 - RNA, 14 nt, Human
cugaauguuuuucu

SEQ ID NO: 1287908 - RNA, 15 nt, Human
cugaauguuuuucua

SEQ ID NO: 1287909 - RNA, 16 nt, Human
cugaauguuuuucuaa

SEQ ID NO: 1287910 - RNA, 17 nt, Human
cugaauguuuuucuaaa

SEQ ID NO: 1287911 - RNA, 18 nt, Human
cugaauguuuuucuaaag

SEQ ID NO: 1287912 - RNA, 23 nt, Human
cugaauguuuuucuaaaggaguu

SEQ ID NO: 1287913 - RNA, 20 nt, Human
cugaauguuuuucuaaagga

SEQ ID NO: 1287914 - RNA, 15 nt, Human
cugaauaaagcaauu

SEQ ID NO: 1287915 - RNA, 18 nt, Human
cugaauaaaguguaacaa

SEQ ID NO: 1287916 - RNA, 20 nt, Human
cugaaugaggucagcauguc

SEQ ID NO: 1287917 - RNA, 14 nt, Human
cugaaugcucugua

SEQ ID NO: 1287918 - RNA, 13 nt, Human
cugaaugcuucua

SEQ ID NO: 1287919 - RNA, 14 nt, Human
cugaaugcuucuaa

SEQ ID NO: 1287920 - RNA, 15 nt, Human
cugaaugcuucuaag

SEQ ID NO: 1287921 - RNA, 18 nt, Human
cugaaugcuucuaaguaa

SEQ ID NO: 1287922 - RNA, 20 nt, Human
cugaaugcuucuaaguaaau

SEQ ID NO: 1287923 - RNA, 22 nt, Human
cugaaugucauugaaaaacuaa

SEQ ID NO: 1287924 - RNA, 14 nt, Human
cugaauaaagcaau

SEQ ID NO: 1287925 - RNA, 13 nt, Human
cugaauaaagcaa

SEQ ID NO: 1287926 - RNA, 17 nt, Human
cugaagaacucucugga

SEQ ID NO: 1287927 - RNA, 14 nt, Human
cugaagaagauggu

SEQ ID NO: 1287928 - RNA, 13 nt, Human
cugaagucacugc

SEQ ID NO: 1287929 - RNA, 14 nt, Human
cugaagucacugca

SEQ ID NO: 1287930 - RNA, 15 nt, Human
cugaagucacugcac

SEQ ID NO: 1287931 - RNA, 21 nt, Human
cugaacuuugcugagccugua

SEQ ID NO: 1287932 - RNA, 14 nt, Human
cugaacuuugcuga

SEQ ID NO: 1287933 - RNA, 13 nt, Human
cugaacuuugcug

SEQ ID NO: 1287934 - RNA, 14 nt, Human
cugaagaaccaguc

SEQ ID NO: 1287935 - RNA, 15 nt, Human
cugaagaaccagucc

SEQ ID NO: 1287936 - RNA, 22 nt, Human
cugaagaaccaguccccccacc

SEQ ID NO: 1287937 - RNA, 12 nt, Human
cugaacuuugcu

SEQ ID NO: 1287938 - RNA, 16 nt, Human
cugaaccccagggcug

SEQ ID NO: 1287939 - RNA, 14 nt, Human
cugaaccccagggc

SEQ ID NO: 1287940 - RNA, 15 nt, Human
cugaaccccagggcu

SEQ ID NO: 1287941 - RNA, 11 nt, Human
cugaacaccau

SEQ ID NO: 1287942 - RNA, 15 nt, Human
cugaacaucugaguc

SEQ ID NO: 1287943 - RNA, 19 nt, Human
cugaacaucugaguccugg

SEQ ID NO: 1287944 - RNA, 23 nt, Human
cugaacaucugaguccuggauga

SEQ ID NO: 1287945 - RNA, 20 nt, Human
cugaacaucugaguccugga

SEQ ID NO: 1287946 - RNA, 20 nt, Human
cugaaauaaacgucuuaaau

SEQ ID NO: 1287947 - RNA, 12 nt, Human
cugaaauuccaa

SEQ ID NO: 1287948 - RNA, 13 nt, Human
cugaaauuccaaa

SEQ ID NO: 1287949 - RNA, 14 nt, Human
cugaaauuccaaag

SEQ ID NO: 1287950 - RNA, 15 nt, Human
cugaaauuccaaagu

SEQ ID NO: 1287951 - RNA, 16 nt, Human
cugaaauuccaaaguc

SEQ ID NO: 1287952 - RNA, 17 nt, Human
cugaaauuccaaagucu

SEQ ID NO: 1287953 - RNA, 20 nt, Human
cugaaauuccaaagucucua

SEQ ID NO: 1287954 - RNA, 14 nt, Human
cugaaauucuccug

SEQ ID NO: 1287955 - RNA, 15 nt, Human
cugaaauucuccugg

SEQ ID NO: 1287956 - RNA, 16 nt, Human
cugaaauucuccugga

SEQ ID NO: 1287957 - RNA, 17 nt, Human
cugaaauucuccuggag

SEQ ID NO: 1287958 - RNA, 18 nt, Human
cugaaauucuccuggagg

SEQ ID NO: 1287959 - RNA, 19 nt, Human
cugaaauucuccuggaggu

SEQ ID NO: 1287960 - RNA, 18 nt, Human
cugaaauuccaaagucuc

SEQ ID NO: 1287961 - RNA, 22 nt, Human
cugaaauuuuauaugcuuacug

SEQ ID NO: 1287962 - RNA, 20 nt, Human
cugaaauuuuucuucuugag

SEQ ID NO: 1287963 - RNA, 16 nt, Human
cugaaauuuuucuucu

SEQ ID NO: 1287964 - RNA, 19 nt, Human
cugaaauuuuucuucuuga

SEQ ID NO: 1287965 - RNA, 12 nt, Human
cugaacaagaau

SEQ ID NO: 1287966 - RNA, 13 nt, Human
cugaacaagaauu

SEQ ID NO: 1287967 - RNA, 14 nt, Human
cugaacaagaauug

SEQ ID NO: 1287968 - RNA, 16 nt, Human
cugaacaagaauugga

SEQ ID NO: 1287969 - RNA, 18 nt, Human
cucuuuguuauuugaaaa

SEQ ID NO: 1287970 - RNA, 12 nt, Human
cucuuuguaaga

SEQ ID NO: 1287971 - RNA, 18 nt, Human
cucuuuguuuugugucuc

SEQ ID NO: 1287972 - RNA, 20 nt, Human
cucuuuguuuugugucucuu

SEQ ID NO: 1287973 - RNA, 14 nt, Human
cucuuuuacccugg

SEQ ID NO: 1287974 - RNA, 20 nt, Human
cucuuuuacccuggccccuc

SEQ ID NO: 1287975 - RNA, 23 nt, Human
cucuuuuacccuggccccucucc

SEQ ID NO: 1287976 - RNA, 21 nt, Human
cucuuuuacccuggccccucu

SEQ ID NO: 1287977 - RNA, 20 nt, Human
cucuucugaauaaagcaauu

SEQ ID NO: 1287978 - RNA, 12 nt, Human
cucuucugagcu

SEQ ID NO: 1287979 - RNA, 19 nt, Human
cucuucugaauaaagcaau

SEQ ID NO: 1287980 - RNA, 16 nt, Human
cucuucugaauaaagc

SEQ ID NO: 1287981 - RNA, 10 nt, Human
cucuucugaa

SEQ ID NO: 1287982 - RNA, 15 nt, Human
cucuucugagcuauu

SEQ ID NO: 1287983 - RNA, 18 nt, Human
cucuucugagcuauuuca

SEQ ID NO: 1287984 - RNA, 21 nt, Human
cucuucugagcuauuucaucu

SEQ ID NO: 1287985 - RNA, 22 nt, Human
cucuucugagcuauuucaucua

SEQ ID NO: 1287986 - RNA, 23 nt, Human
cucuucugagcuauuucaucuau

SEQ ID NO: 1287987 - RNA, 15 nt, Human
cucugauacagaaaa

SEQ ID NO: 1287988 - RNA, 12 nt, Human
cucugaguguga

SEQ ID NO: 1287989 - RNA, 17 nt, Human
cucugaguguuuuauga

SEQ ID NO: 1287990 - RNA, 19 nt, Human
cucugaguguuuuaugaga

SEQ ID NO: 1287991 - RNA, 22 nt, Human
cucugaguguuuuaugagaaag

SEQ ID NO: 1287992 - RNA, 14 nt, Human
cucugauaagagaa

SEQ ID NO: 1287993 - RNA, 20 nt, Human
cucugcaggucccuaauaaa

SEQ ID NO: 1287994 - RNA, 19 nt, Human
cucugcaggucccuaauaa

SEQ ID NO: 1287995 - RNA, 22 nt, Human
cucugcaggucccuaauaaagc

SEQ ID NO: 1287996 - RNA, 21 nt, Human
cucugcaggucccuaauaaag

SEQ ID NO: 1287997 - RNA, 17 nt, Human
cucugcauccucuggag

SEQ ID NO: 1287998 - RNA, 18 nt, Human
cucugcauccucuggagc

SEQ ID NO: 1287999 - RNA, 20 nt, Human
cucugcauccucuggagcca

SEQ ID NO: 1288000 - RNA, 14 nt, Human
cucugcauucuagu

SEQ ID NO: 1288001 - RNA, 15 nt, Human
cucugcauucuagua

SEQ ID NO: 1288002 - RNA, 14 nt, Human
cucugccaaaggau

SEQ ID NO: 1288003 - RNA, 19 nt, Human
cucugccaaaggaugugau

SEQ ID NO: 1288004 - RNA, 21 nt, Human
cucugccaaaggaugugauau

SEQ ID NO: 1288005 - RNA, 14 nt, Human
cucugccaguccug

SEQ ID NO: 1288006 - RNA, 15 nt, Human
cucugccaguccugu

SEQ ID NO: 1288007 - RNA, 17 nt, Human
cucugccaguccugucc

SEQ ID NO: 1288008 - RNA, 13 nt, Human
cucugccagugac

SEQ ID NO: 1288009 - RNA, 14 nt, Human
cucugccagugaca

SEQ ID NO: 1288010 - RNA, 15 nt, Human
cucugccagugacag

SEQ ID NO: 1288011 - RNA, 20 nt, Human
cucugccagugacagacagg

SEQ ID NO: 1288012 - RNA, 20 nt, Human
cucugcccgggagcucagga

SEQ ID NO: 1288013 - RNA, 20 nt, Human
cucugcccuaaugcgcaggc

SEQ ID NO: 1288014 - RNA, 22 nt, Human
cucugcccuaaugcgcaggcug

SEQ ID NO: 1288015 - RNA, 14 nt, Human
cucugcccgggagc

SEQ ID NO: 1288016 - RNA, 18 nt, Human
cucugccaguccuguccu

SEQ ID NO: 1288017 - RNA, 14 nt, Human
cucugcccaacccu

SEQ ID NO: 1288018 - RNA, 20 nt, Human
cucugcccaacccuucccuc

SEQ ID NO: 1288019 - RNA, 19 nt, Human
cucugaaggguaauuauau

SEQ ID NO: 1288020 - RNA, 16 nt, Human
cucugacaacagacuu

SEQ ID NO: 1288021 - RNA, 12 nt, Human
cucgcugccagc

SEQ ID NO: 1288022 - RNA, 13 nt, Human
cucgcugccagcu

SEQ ID NO: 1288023 - RNA, 21 nt, Human
cucugacaacagacuucugaa

SEQ ID NO: 1288024 - RNA, 22 nt, Human
cucugacaacagacuucugaaa

SEQ ID NO: 1288025 - RNA, 17 nt, Human
cucugacucagggcucc

SEQ ID NO: 1288026 - RNA, 20 nt, Human
cucugacucagggcuccugg

SEQ ID NO: 1288027 - RNA, 21 nt, Human
cucugacucagggcuccuggg

SEQ ID NO: 1288028 - RNA, 15 nt, Human
cucugaccugcacug

SEQ ID NO: 1288029 - RNA, 14 nt, Human
cucugacucagggc

SEQ ID NO: 1288030 - RNA, 15 nt, Human
cucugacucagggcu

SEQ ID NO: 1288031 - RNA, 16 nt, Human
cucugacucagggcuc

SEQ ID NO: 1288032 - RNA, 12 nt, Human
cucugacagcag

SEQ ID NO: 1288033 - RNA, 13 nt, Human
cucugacagcagc

SEQ ID NO: 1288034 - RNA, 14 nt, Human
cucugacagcagca

SEQ ID NO: 1288035 - RNA, 17 nt, Human
cucugacagcagcaucu

SEQ ID NO: 1288036 - RNA, 18 nt, Human
cucugacagcagcaucuc

SEQ ID NO: 1288037 - RNA, 23 nt, Human
cucugacagcagcaucucuaccu

SEQ ID NO: 1288038 - RNA, 23 nt, Human
cucugacauuaugugguuuuaga

SEQ ID NO: 1288039 - RNA, 12 nt, Human
cucugaccugca

SEQ ID NO: 1288040 - RNA, 14 nt, Human
cucugaccugcacu

SEQ ID NO: 1288041 - RNA, 23 nt, Human
cucugagagcaucaggccuagag

SEQ ID NO: 1288042 - RNA, 13 nt, Human
cucugagaggccc

SEQ ID NO: 1288043 - RNA, 14 nt, Human
cucugagaggcccu

SEQ ID NO: 1288044 - RNA, 15 nt, Human
cucugagaggcccug

SEQ ID NO: 1288045 - RNA, 16 nt, Human
cucugagaggcccugg

SEQ ID NO: 1288046 - RNA, 17 nt, Human
cucugagaggcccugga

SEQ ID NO: 1288047 - RNA, 18 nt, Human
cucugagaggcccuggau

SEQ ID NO: 1288048 - RNA, 13 nt, Human
cucugagagucua

SEQ ID NO: 1288049 - RNA, 15 nt, Human
cucugagagucuaga

SEQ ID NO: 1288050 - RNA, 16 nt, Human
cucugagagucuagau

SEQ ID NO: 1288051 - RNA, 18 nt, Human
cucugagagucuagauuc

SEQ ID NO: 1288052 - RNA, 16 nt, Human
cucugagcugugcagg

SEQ ID NO: 1288053 - RNA, 17 nt, Human
cucugagagucuagauu

SEQ ID NO: 1288054 - RNA, 12 nt, Human
cucugaggacaa

SEQ ID NO: 1288055 - RNA, 15 nt, Human
cucugaggugccugu

SEQ ID NO: 1288056 - RNA, 19 nt, Human
cucugaggugccuguccca

SEQ ID NO: 1288057 - RNA, 22 nt, Human
cucugaggugccugucccaccc

SEQ ID NO: 1288058 - RNA, 19 nt, Human
cucuuaagaagacugcauu

SEQ ID NO: 1288059 - RNA, 20 nt, Human
cucuguuuuacaaguuggag

SEQ ID NO: 1288060 - RNA, 22 nt, Human
cucuguuuuacaaguuggaguc

SEQ ID NO: 1288061 - RNA, 23 nt, Human
cucuguuuuacaaguuggaguca

SEQ ID NO: 1288062 - RNA, 21 nt, Human
cucuguugucguaaagauuug

SEQ ID NO: 1288063 - RNA, 16 nt, Human
cucuguuuuacaaguu

SEQ ID NO: 1288064 - RNA, 15 nt, Human
cucugugucuaagau

SEQ ID NO: 1288065 - RNA, 18 nt, Human
cucugugucuaagauucu

SEQ ID NO: 1288066 - RNA, 19 nt, Human
cucugugucuaagauucua

SEQ ID NO: 1288067 - RNA, 21 nt, Human
cucugugucuaagauucuaga

SEQ ID NO: 1288068 - RNA, 22 nt, Human
cucugugucuaagauucuagau

SEQ ID NO: 1288069 - RNA, 23 nt, Human
cucugugucuaagauucuagauc

SEQ ID NO: 1288070 - RNA, 15 nt, Human
cucugugugcacaaa

SEQ ID NO: 1288071 - RNA, 17 nt, Human
cucugugugcacaaaua

SEQ ID NO: 1288072 - RNA, 21 nt, Human
cucuguugccaggcuggagug

SEQ ID NO: 1288073 - RNA, 14 nt, Human
cucugugaccaaug

SEQ ID NO: 1288074 - RNA, 15 nt, Human
cucugugaccaaugu

SEQ ID NO: 1288075 - RNA, 17 nt, Human
cucugugaccaaugucu

SEQ ID NO: 1288076 - RNA, 18 nt, Human
cucugugaccaaugucuu

SEQ ID NO: 1288077 - RNA, 19 nt, Human
cucugugaccaaugucuug

SEQ ID NO: 1288078 - RNA, 14 nt, Human
cucuucccucuucc

SEQ ID NO: 1288079 - RNA, 13 nt, Human
cucuuccucuucc

SEQ ID NO: 1288080 - RNA, 17 nt, Human
cucuucccccucuccca

SEQ ID NO: 1288081 - RNA, 18 nt, Human
cucuucccccucucccag

SEQ ID NO: 1288082 - RNA, 20 nt, Human
cucuucccccucucccaguu

SEQ ID NO: 1288083 - RNA, 19 nt, Human
cucuucccccucucccagu

SEQ ID NO: 1288084 - RNA, 23 nt, Human
cucuuaauugccaccucuaacag

SEQ ID NO: 1288085 - RNA, 17 nt, Human
cucuuaccaguauuuaa

SEQ ID NO: 1288086 - RNA, 19 nt, Human
cucuuaccaguauuuaacu

SEQ ID NO: 1288087 - RNA, 12 nt, Human
cucuuaauugcc

SEQ ID NO: 1288088 - RNA, 14 nt, Human
cucuuccaugcugu

SEQ ID NO: 1288089 - RNA, 15 nt, Human
cucuuccaugcugug

SEQ ID NO: 1288090 - RNA, 12 nt, Human
cucuuccccaga

SEQ ID NO: 1288091 - RNA, 16 nt, Human
cucuuccaugcugugc

SEQ ID NO: 1288092 - RNA, 14 nt, Human
cucuuccccagacg

SEQ ID NO: 1288093 - RNA, 16 nt, Human
cucuuccccagacgcc

SEQ ID NO: 1288094 - RNA, 21 nt, Human
cucuuccccagacgccuggcu

SEQ ID NO: 1288095 - RNA, 22 nt, Human
cucuuccccagacgccuggcug

SEQ ID NO: 1288096 - RNA, 14 nt, Human
cucuucccccaaga

SEQ ID NO: 1288097 - RNA, 15 nt, Human
cucuucccccaccac

SEQ ID NO: 1288098 - RNA, 15 nt, Human
cucuucccccaagau

SEQ ID NO: 1288099 - RNA, 15 nt, Human
cucuucccccucucc

SEQ ID NO: 1288100 - RNA, 16 nt, Human
cucuucccccucuccc

SEQ ID NO: 1288101 - RNA, 13 nt, Human
cucuuccuuucuu

SEQ ID NO: 1288102 - RNA, 14 nt, Human
cucuucuacucacu

SEQ ID NO: 1288103 - RNA, 18 nt, Human
cucuucuacucacuuuuc

SEQ ID NO: 1288104 - RNA, 22 nt, Human
cucuucuacucacuuuucccac

SEQ ID NO: 1288105 - RNA, 17 nt, Human
cucuucuauuuuguaaa

SEQ ID NO: 1288106 - RNA, 19 nt, Human
cucuucuauuuuguaaacu

SEQ ID NO: 1288107 - RNA, 19 nt, Human
cucuuccuucccugcugug

SEQ ID NO: 1288108 - RNA, 23 nt, Human
cucuuccuugaagaacugcaggc

SEQ ID NO: 1288109 - RNA, 16 nt, Human
cucuuccuuuuaucag

SEQ ID NO: 1288110 - RNA, 15 nt, Human
cucuuccuucccugc

SEQ ID NO: 1288111 - RNA, 21 nt, Human
cucuuccuuacuuuuuauaua

SEQ ID NO: 1288112 - RNA, 12 nt, Human
cucuucuccacu

SEQ ID NO: 1288113 - RNA, 13 nt, Human
cucuucuccacug

SEQ ID NO: 1288114 - RNA, 20 nt, Human
cucuggauuauauuaugaag

SEQ ID NO: 1288115 - RNA, 19 nt, Human
cucuggauuauauuaugaa

SEQ ID NO: 1288116 - RNA, 15 nt, Human
cucugccuacagaac

SEQ ID NO: 1288117 - RNA, 14 nt, Human
cucuggcagccaca

SEQ ID NO: 1288118 - RNA, 15 nt, Human
cucuggcagccacac

SEQ ID NO: 1288119 - RNA, 16 nt, Human
cucuggcagccacacu

SEQ ID NO: 1288120 - RNA, 18 nt, Human
cucuggcauuagaauuau

SEQ ID NO: 1288121 - RNA, 19 nt, Human
cucuggcauuagaauuauu

SEQ ID NO: 1288122 - RNA, 11 nt, Human
cucuggcagcc

SEQ ID NO: 1288123 - RNA, 13 nt, Human
cucuggcagccac

SEQ ID NO: 1288124 - RNA, 17 nt, Human
cucuggcagccacacuu

SEQ ID NO: 1288125 - RNA, 22 nt, Human
cucuggccuucggccuccaucc

SEQ ID NO: 1288126 - RNA, 21 nt, Human
cucuggccuucggccuccauc

SEQ ID NO: 1288127 - RNA, 20 nt, Human
cucuggcauuagaauuauuu

SEQ ID NO: 1288128 - RNA, 23 nt, Human
cucuggcauuagaauuauuuaaa

SEQ ID NO: 1288129 - RNA, 15 nt, Human
cucugucgcccaggc

SEQ ID NO: 1288130 - RNA, 18 nt, Human
cucugucgcccaggcugg

SEQ ID NO: 1288131 - RNA, 22 nt, Human
cucugucgcccaggcuggagug

SEQ ID NO: 1288132 - RNA, 16 nt, Human
cucugggggcugagga

SEQ ID NO: 1288133 - RNA, 20 nt, Human
cucugucgcccaugcuggag

SEQ ID NO: 1288134 - RNA, 18 nt, Human
cucugucgcccaugcugg

SEQ ID NO: 1288135 - RNA, 16 nt, Human
cucugucuaccugguc

SEQ ID NO: 1288136 - RNA, 19 nt, Human
cucugucuacuugcucagg

SEQ ID NO: 1288137 - RNA, 20 nt, Human
cucugucuaccuggucuggu

SEQ ID NO: 1288138 - RNA, 15 nt, Human
cucugucuuguguuu

SEQ ID NO: 1288139 - RNA, 16 nt, Human
cucugucuuguguuuc

SEQ ID NO: 1288140 - RNA, 21 nt, Human
cucugggggcugaggagcagc

SEQ ID NO: 1288141 - RNA, 20 nt, Human
cucugggccauucuccacag

SEQ ID NO: 1288142 - RNA, 11 nt, Human
cucugggcucu

SEQ ID NO: 1288143 - RNA, 15 nt, Human
cucugggcucugagu

SEQ ID NO: 1288144 - RNA, 13 nt, Human
cucugggcucuga

SEQ ID NO: 1288145 - RNA, 15 nt, Human
cucugggcuggauga

SEQ ID NO: 1288146 - RNA, 16 nt, Human
cucugggcuggaugag

SEQ ID NO: 1288147 - RNA, 19 nt, Human
cucugggcuggaugagcuc

SEQ ID NO: 1288148 - RNA, 20 nt, Human
cucugggcuggaugagcucc

SEQ ID NO: 1288149 - RNA, 21 nt, Human
cucugggcuggaugagcuccc

SEQ ID NO: 1288150 - RNA, 22 nt, Human
cucugggcuggaugagcuccca

SEQ ID NO: 1288151 - RNA, 17 nt, Human
cuauuucacuggagcac

SEQ ID NO: 1288152 - RNA, 15 nt, Human
cuauuucauguuuuu

SEQ ID NO: 1288153 - RNA, 17 nt, Human
cuauuucauguuuuuga

SEQ ID NO: 1288154 - RNA, 19 nt, Human
cucaaaucguccagcgacc

SEQ ID NO: 1288155 - RNA, 16 nt, Human
cucaaaugaguaacau

SEQ ID NO: 1288156 - RNA, 20 nt, Human
cucaaaugaguaacauuugc

SEQ ID NO: 1288157 - RNA, 21 nt, Human
cucaaaugaguaacauuugcu

SEQ ID NO: 1288158 - RNA, 22 nt, Human
cucaaaugaguaacauuugcug

SEQ ID NO: 1288159 - RNA, 22 nt, Human
cucaaaugcggggugggggcag

SEQ ID NO: 1288160 - RNA, 16 nt, Human
cucaacaccaugauuc

SEQ ID NO: 1288161 - RNA, 19 nt, Human
cucaacaccaugauuccuu

SEQ ID NO: 1288162 - RNA, 21 nt, Human
cucaacaccaugauuccuuua

SEQ ID NO: 1288163 - RNA, 22 nt, Human
cucaacaccaugauuccuuuaa

SEQ ID NO: 1288164 - RNA, 20 nt, Human
cucaacacccaacugucucg

SEQ ID NO: 1288165 - RNA, 17 nt, Human
cucaaaugaugggaagu

SEQ ID NO: 1288166 - RNA, 23 nt, Human
cucaacaccaugauuccuuuaac

SEQ ID NO: 1288167 - RNA, 13 nt, Human
cucaacacccagu

SEQ ID NO: 1288168 - RNA, 14 nt, Human
cucaacacccaguu

SEQ ID NO: 1288169 - RNA, 14 nt, Human
cucaacaggccuca

SEQ ID NO: 1288170 - RNA, 15 nt, Human
cucaacaggccucag

SEQ ID NO: 1288171 - RNA, 16 nt, Human
cucaacaggccucagg

SEQ ID NO: 1288172 - RNA, 18 nt, Human
cucaacaggccucagggc

SEQ ID NO: 1288173 - RNA, 22 nt, Human
cuauugugcaauguaaauauuu

SEQ ID NO: 1288174 - RNA, 19 nt, Human
cuauugucaccagggcugg

SEQ ID NO: 1288175 - RNA, 22 nt, Human
cuauuuaugugauccuuuugga

SEQ ID NO: 1288176 - RNA, 15 nt, Human
cuauuucacuggagc

SEQ ID NO: 1288177 - RNA, 16 nt, Human
cuauuucacuggagca

SEQ ID NO: 1288178 - RNA, 17 nt, Human
cuauuuauauguacaug

SEQ ID NO: 1288179 - RNA, 16 nt, Human
cuauuccagcuguccc

SEQ ID NO: 1288180 - RNA, 19 nt, Human
cuauuccagcugucccccc

SEQ ID NO: 1288181 - RNA, 17 nt, Human
cuauuccgagcccuuag

SEQ ID NO: 1288182 - RNA, 21 nt, Human
cuauucgccacacaguauuuu

SEQ ID NO: 1288183 - RNA, 15 nt, Human
cuauucuagccugca

SEQ ID NO: 1288184 - RNA, 17 nt, Human
cuauucuagccugcauu

SEQ ID NO: 1288185 - RNA, 23 nt, Human
cuauucuagccugcauugagcuu

SEQ ID NO: 1288186 - RNA, 13 nt, Human
cucaaccucaucc

SEQ ID NO: 1288187 - RNA, 21 nt, Human
cucaagaaauaaaaggaagcc

SEQ ID NO: 1288188 - RNA, 12 nt, Human
cucaaccucauc

SEQ ID NO: 1288189 - RNA, 17 nt, Human
cucaacaggccucaggg

SEQ ID NO: 1288190 - RNA, 22 nt, Human
cucaagaaauaaaaggaagcca

SEQ ID NO: 1288191 - RNA, 23 nt, Human
cucaagaaauaaaaggaagccaa

SEQ ID NO: 1288192 - RNA, 23 nt, Human
cucaagacccuuuuggguuucug

SEQ ID NO: 1288193 - RNA, 19 nt, Human
cucaagagaucccaaguag

SEQ ID NO: 1288194 - RNA, 15 nt, Human
cucaagagaucccaa

SEQ ID NO: 1288195 - RNA, 15 nt, Human
cucaagucuuucucu

SEQ ID NO: 1288196 - RNA, 16 nt, Human
cucaagucuuucucuu

SEQ ID NO: 1288197 - RNA, 21 nt, Human
cucaagucuuucucuuucccu

SEQ ID NO: 1288198 - RNA, 23 nt, Human
cucacaccaggcuugccugcagg

SEQ ID NO: 1288199 - RNA, 17 nt, Human
cucacaccacuagccuc

SEQ ID NO: 1288200 - RNA, 20 nt, Human
cucacaccacuagccucagg

SEQ ID NO: 1288201 - RNA, 21 nt, Human
cucacaccacuagccucaggg

SEQ ID NO: 1288202 - RNA, 16 nt, Human
cucacaggucccaaau

SEQ ID NO: 1288203 - RNA, 15 nt, Human
cucacaggucccaaa

SEQ ID NO: 1288204 - RNA, 22 nt, Human
cucacaguauugcucacccagu

SEQ ID NO: 1288205 - RNA, 12 nt, Human
cucacauuuaug

SEQ ID NO: 1288206 - RNA, 13 nt, Human
cucaccaacuccu

SEQ ID NO: 1288207 - RNA, 16 nt, Human
cucaccacggaccaaa

SEQ ID NO: 1288208 - RNA, 17 nt, Human
cucaccacugcccccug

SEQ ID NO: 1288209 - RNA, 21 nt, Human
cucaccacugcccccugcugc

SEQ ID NO: 1288210 - RNA, 18 nt, Human
cucaccaggcagccucug

SEQ ID NO: 1288211 - RNA, 19 nt, Human
cucaccaggcagccucugg

SEQ ID NO: 1288212 - RNA, 21 nt, Human
cucaccaggcagccucugggg

SEQ ID NO: 1288213 - RNA, 20 nt, Human
cucaccaggcagccucuggg

SEQ ID NO: 1288214 - RNA, 14 nt, Human
cucagcacaaggcc

SEQ ID NO: 1288215 - RNA, 20 nt, Human
cucagcacaaggccaucugg

SEQ ID NO: 1288216 - RNA, 17 nt, Human
cucagauuucugaggaa

SEQ ID NO: 1288217 - RNA, 16 nt, Human
cucagauuucugagga

SEQ ID NO: 1288218 - RNA, 17 nt, Human
cucagauuccuucccau

SEQ ID NO: 1288219 - RNA, 20 nt, Human
cucagauuccuucccaugga

SEQ ID NO: 1288220 - RNA, 21 nt, Human
cucagauuccuucccauggag

SEQ ID NO: 1288221 - RNA, 24 nt, Human
cucagauuccuucccauggaggga

SEQ ID NO: 1288222 - RNA, 15 nt, Human
cucagauuguaauau

SEQ ID NO: 1288223 - RNA, 22 nt, Human
cucagauuguaauauguaaaug

SEQ ID NO: 1288224 - RNA, 14 nt, Human
cucagauuccuucc

SEQ ID NO: 1288225 - RNA, 16 nt, Human
cucagauuccuuccca

SEQ ID NO: 1288226 - RNA, 14 nt, Human
cucagauccuccuc

SEQ ID NO: 1288227 - RNA, 17 nt, Human
cucagcacuuggcccuu

SEQ ID NO: 1288228 - RNA, 13 nt, Human
cucagcacugccu

SEQ ID NO: 1288229 - RNA, 15 nt, Human
cucagcacugccugc

SEQ ID NO: 1288230 - RNA, 16 nt, Human
cucagcacugccugcu

SEQ ID NO: 1288231 - RNA, 17 nt, Human
cucagcacugccugcuc

SEQ ID NO: 1288232 - RNA, 18 nt, Human
cucagcacugccugcucc

SEQ ID NO: 1288233 - RNA, 19 nt, Human
cucagcacugccugcuccc

SEQ ID NO: 1288234 - RNA, 21 nt, Human
cucagcacugccugcucccau

SEQ ID NO: 1288235 - RNA, 13 nt, Human
cucagcacuuggc

SEQ ID NO: 1288236 - RNA, 14 nt, Human
cucagcacuuggcc

SEQ ID NO: 1288237 - RNA, 15 nt, Human
cucagcacuuggccc

SEQ ID NO: 1288238 - RNA, 16 nt, Human
cucagcacuuggcccu

SEQ ID NO: 1288239 - RNA, 18 nt, Human
cucagcacuuggcccuuc

SEQ ID NO: 1288240 - RNA, 23 nt, Human
cucagagaauuucuaccauuuca

SEQ ID NO: 1288241 - RNA, 13 nt, Human
cucagagacaugc

SEQ ID NO: 1288242 - RNA, 16 nt, Human
cucagagacaugcaga

SEQ ID NO: 1288243 - RNA, 17 nt, Human
cucagagacaugcagag

SEQ ID NO: 1288244 - RNA, 19 nt, Human
cucagagacaugcagagau

SEQ ID NO: 1288245 - RNA, 13 nt, Human
cucagagaccagg

SEQ ID NO: 1288246 - RNA, 16 nt, Human
cucagagaccagggcu

SEQ ID NO: 1288247 - RNA, 21 nt, Human
cucagagaccagggcuccagc

SEQ ID NO: 1288248 - RNA, 22 nt, Human
cucagagaccagggcuccagcc

SEQ ID NO: 1288249 - RNA, 21 nt, Human
cucagauaagguaaaaugcca

SEQ ID NO: 1288250 - RNA, 22 nt, Human
cucagauaagguaaaaugccau

SEQ ID NO: 1288251 - RNA, 23 nt, Human
cucagauaagguaaaaugccaug

SEQ ID NO: 1288252 - RNA, 16 nt, Human
cucagauagaaugaca

SEQ ID NO: 1288253 - RNA, 18 nt, Human
cucagauagaaugacagu

SEQ ID NO: 1288254 - RNA, 17 nt, Human
cucagaucaguguacca

SEQ ID NO: 1288255 - RNA, 21 nt, Human
cucagaucaguguaccauuug

SEQ ID NO: 1288256 - RNA, 10 nt, Human
cucagaucca

SEQ ID NO: 1288257 - RNA, 13 nt, Human
cucagauccaggg

SEQ ID NO: 1288258 - RNA, 14 nt, Human
cucagauccaggga

SEQ ID NO: 1288259 - RNA, 15 nt, Human
cucagauccagggac

SEQ ID NO: 1288260 - RNA, 16 nt, Human
cucagauccagggaca

SEQ ID NO: 1288261 - RNA, 17 nt, Human
cucagauccagggacag

SEQ ID NO: 1288262 - RNA, 18 nt, Human
cucagauccagggacaga

SEQ ID NO: 1288263 - RNA, 20 nt, Human
cucagauccagggacagagg

SEQ ID NO: 1288264 - RNA, 22 nt, Human
cucagauccagggacagaggcc

SEQ ID NO: 1288265 - RNA, 16 nt, Human
cucagauccuccucau

SEQ ID NO: 1288266 - RNA, 19 nt, Human
cucacccccagcuuugcua

SEQ ID NO: 1288267 - RNA, 13 nt, Human
cucacuccuaccu

SEQ ID NO: 1288268 - RNA, 15 nt, Human
cucacuccuaccugg

SEQ ID NO: 1288269 - RNA, 18 nt, Human
cucacuccccacauccca

SEQ ID NO: 1288270 - RNA, 14 nt, Human
cucacucagcacuu

SEQ ID NO: 1288271 - RNA, 19 nt, Human
cucacucagcacuuggccc

SEQ ID NO: 1288272 - RNA, 12 nt, Human
cucacucagcca

SEQ ID NO: 1288273 - RNA, 18 nt, Human
cucacucagccacccuga

SEQ ID NO: 1288274 - RNA, 21 nt, Human
cucacucagccacccugaguu

SEQ ID NO: 1288275 - RNA, 22 nt, Human
cucacucagccacccugaguug

SEQ ID NO: 1288276 - RNA, 17 nt, Human
cucacccaccccugcac

SEQ ID NO: 1288277 - RNA, 13 nt, Human
cucacccagugcc

SEQ ID NO: 1288278 - RNA, 12 nt, Human
cucaccauucca

SEQ ID NO: 1288279 - RNA, 20 nt, Human
cucaccauuccaagucucca

SEQ ID NO: 1288280 - RNA, 22 nt, Human
cucaccauuccaagucuccacc

SEQ ID NO: 1288281 - RNA, 17 nt, Human
cucaccauuuggauccu

SEQ ID NO: 1288282 - RNA, 14 nt, Human
cucacccccagcuu

SEQ ID NO: 1288283 - RNA, 17 nt, Human
cucacccccagcuuugc

SEQ ID NO: 1288284 - RNA, 18 nt, Human
cucacccccagcuuugcu

SEQ ID NO: 1288285 - RNA, 13 nt, Human
cucacuccuuuua

SEQ ID NO: 1288286 - RNA, 14 nt, Human
cucacuccuuuuaa

SEQ ID NO: 1288287 - RNA, 16 nt, Human
cucacuccuaccuggu

SEQ ID NO: 1288288 - RNA, 17 nt, Human
cucacuccuaccuggua

SEQ ID NO: 1288289 - RNA, 19 nt, Human
cucacuccuaccugguaau

SEQ ID NO: 1288290 - RNA, 15 nt, Human
cucacuccuuuuaaa

SEQ ID NO: 1288291 - RNA, 18 nt, Human
cucacuccuuuuaaagaa

SEQ ID NO: 1288292 - RNA, 14 nt, Human
cucacucgucuccc

SEQ ID NO: 1288293 - RNA, 19 nt, Human
cucacuccuuuuaaagaaa

SEQ ID NO: 1288294 - RNA, 17 nt, Human
cucacugagcacuguuu

SEQ ID NO: 1288295 - RNA, 18 nt, Human
cucacugcaaccuucacc

SEQ ID NO: 1288296 - RNA, 18 nt, Human
cucacugagcacuguuuu

SEQ ID NO: 1288297 - RNA, 16 nt, Human
cucacugagcacuguu

SEQ ID NO: 1288298 - RNA, 15 nt, Human
cucacugagcacugu

SEQ ID NO: 1288299 - RNA, 15 nt, Human
cucacucuguuuccu

SEQ ID NO: 1288300 - RNA, 13 nt, Human
cuauggccugugg

SEQ ID NO: 1288301 - RNA, 14 nt, Human
cuauggccucaugu

SEQ ID NO: 1288302 - RNA, 13 nt, Human
cuaugggaacaau

SEQ ID NO: 1288303 - RNA, 15 nt, Human
cuauggagagcccug

SEQ ID NO: 1288304 - RNA, 16 nt, Human
cuauggagagcccugg

SEQ ID NO: 1288305 - RNA, 17 nt, Human
cuauggagagcccuggg

SEQ ID NO: 1288306 - RNA, 18 nt, Human
cuauggagagcccuggga

SEQ ID NO: 1288307 - RNA, 21 nt, Human
cuauggagagcccugggaccg

SEQ ID NO: 1288308 - RNA, 19 nt, Human
cuauggagugcaccaaaga

SEQ ID NO: 1288309 - RNA, 19 nt, Human
cuauggagagcccugggac

SEQ ID NO: 1288310 - RNA, 18 nt, Human
cuaugcaugguuucagca

SEQ ID NO: 1288311 - RNA, 15 nt, Human
cuaugcaugguuuca

SEQ ID NO: 1288312 - RNA, 11 nt, Human
cuaugcuuuga

SEQ ID NO: 1288313 - RNA, 15 nt, Human
cuaugcuuugaaaca

SEQ ID NO: 1288314 - RNA, 17 nt, Human
cuaugcuuugaaacaga

SEQ ID NO: 1288315 - RNA, 15 nt, Human
cuauggaaagauggc

SEQ ID NO: 1288316 - RNA, 19 nt, Human
cuaugcuuugaaacagaaa

SEQ ID NO: 1288317 - RNA, 11 nt, Human
cuauggagagc

SEQ ID NO: 1288318 - RNA, 14 nt, Human
cuauggagagcccu

SEQ ID NO: 1288319 - RNA, 13 nt, Human
cuaugagucuaga

SEQ ID NO: 1288320 - RNA, 14 nt, Human
cuaugagucuagau

SEQ ID NO: 1288321 - RNA, 15 nt, Human
cuaugagucuagaug

SEQ ID NO: 1288322 - RNA, 16 nt, Human
cuaugagucuagaugu

SEQ ID NO: 1288323 - RNA, 19 nt, Human
cuaugagucuagauguuua

SEQ ID NO: 1288324 - RNA, 17 nt, Human
cuaugagucuagauguu

SEQ ID NO: 1288325 - RNA, 20 nt, Human
cuaugcagagguccacaaca

SEQ ID NO: 1288326 - RNA, 23 nt, Human
cuaugauauuuucugugccugaa

SEQ ID NO: 1288327 - RNA, 13 nt, Human
cuaugcauggugc

SEQ ID NO: 1288328 - RNA, 19 nt, Human
cuaugcauggugccccagg

SEQ ID NO: 1288329 - RNA, 20 nt, Human
cuaugcauggugccccagga

SEQ ID NO: 1288330 - RNA, 21 nt, Human
cuaugcauggugccccaggac

SEQ ID NO: 1288331 - RNA, 22 nt, Human
cuaugcauggugccccaggacc

SEQ ID NO: 1288332 - RNA, 23 nt, Human
cuaugcauggugccccaggacca

SEQ ID NO: 1288333 - RNA, 13 nt, Human
cuauguaaacuac

SEQ ID NO: 1288334 - RNA, 23 nt, Human
cuauggugcucugucuacuugcu

SEQ ID NO: 1288335 - RNA, 14 nt, Human
cuauggugcucugu

SEQ ID NO: 1288336 - RNA, 16 nt, Human
cuauggugcucugucu

SEQ ID NO: 1288337 - RNA, 17 nt, Human
cuauggugcucugucua

SEQ ID NO: 1288338 - RNA, 19 nt, Human
cuaugggucuaggacacag

SEQ ID NO: 1288339 - RNA, 20 nt, Human
cuauggguguuaucaccuag

SEQ ID NO: 1288340 - RNA, 17 nt, Human
cuauggucgggagacag

SEQ ID NO: 1288341 - RNA, 21 nt, Human
cuauggucgggagacagcauc

SEQ ID NO: 1288342 - RNA, 17 nt, Human
cuauuacauuuucagug

SEQ ID NO: 1288343 - RNA, 21 nt, Human
cuauuaggugcaauuucaagg

SEQ ID NO: 1288344 - RNA, 17 nt, Human
cuauucacaaaauauca

SEQ ID NO: 1288345 - RNA, 14 nt, Human
cuaucugggcuucc

SEQ ID NO: 1288346 - RNA, 15 nt, Human
cuaucugggcuuccu

SEQ ID NO: 1288347 - RNA, 16 nt, Human
cuaucugggcuuccug

SEQ ID NO: 1288348 - RNA, 17 nt, Human
cuaucugggcuuccugg

SEQ ID NO: 1288349 - RNA, 18 nt, Human
cuaucugggcuuccugga

SEQ ID NO: 1288350 - RNA, 19 nt, Human
cuaucugggcuuccuggag

SEQ ID NO: 1288351 - RNA, 20 nt, Human
cuaucugggcuuccuggagc

SEQ ID NO: 1288352 - RNA, 21 nt, Human
cuaucugggcuuccuggagca

SEQ ID NO: 1288353 - RNA, 23 nt, Human
cuaucugggcuuccuggagcaga

SEQ ID NO: 1288354 - RNA, 12 nt, Human
cuaucuguauuc

SEQ ID NO: 1288355 - RNA, 11 nt, Human
cuaucugucug

SEQ ID NO: 1288356 - RNA, 14 nt, Human
cuaucugucuggug

SEQ ID NO: 1288357 - RNA, 16 nt, Human
cuaucugucugguggc

SEQ ID NO: 1288358 - RNA, 17 nt, Human
cuaucugucugguggcc

SEQ ID NO: 1288359 - RNA, 18 nt, Human
cuaucugucugguggccc

SEQ ID NO: 1288360 - RNA, 21 nt, Human
cuaucugucugguggccccgu

SEQ ID NO: 1288361 - RNA, 17 nt, Human
cuaucuguauucccaaa

SEQ ID NO: 1288362 - RNA, 17 nt, Human
cuauauuuuacauaaau

SEQ ID NO: 1288363 - RNA, 12 nt, Human
cuauauuugggc

SEQ ID NO: 1288364 - RNA, 22 nt, Human
cuauauuugggccugcuccaga

SEQ ID NO: 1288365 - RNA, 20 nt, Human
cuauauugcugaaugcaaga

SEQ ID NO: 1288366 - RNA, 16 nt, Human
cuauauuguucagcau

SEQ ID NO: 1288367 - RNA, 16 nt, Human
cuauauuuaacaagau

SEQ ID NO: 1288368 - RNA, 18 nt, Human
cuauauuguuugcuaagc

SEQ ID NO: 1288369 - RNA, 19 nt, Human
cuauauuacgguuugcccc

SEQ ID NO: 1288370 - RNA, 19 nt, Human
cuauagccaaaaauagcua

SEQ ID NO: 1288371 - RNA, 14 nt, Human
cuauagccaaaaau

SEQ ID NO: 1288372 - RNA, 10 nt, Human
cuauauguau

SEQ ID NO: 1288373 - RNA, 14 nt, Human
cuauaccaauaaag

SEQ ID NO: 1288374 - RNA, 13 nt, Human
cuauaccaauaaa

SEQ ID NO: 1288375 - RNA, 14 nt, Human
cuauagaugucuuu

SEQ ID NO: 1288376 - RNA, 15 nt, Human
cuauagaugucuuuu

SEQ ID NO: 1288377 - RNA, 16 nt, Human
cuauagaugucuuuuc

SEQ ID NO: 1288378 - RNA, 22 nt, Human
cuauagaugucuuuucccauuu

SEQ ID NO: 1288379 - RNA, 13 nt, Human
cuauagccaaaaa

SEQ ID NO: 1288380 - RNA, 22 nt, Human
cuauaauuuaccuaagauuaca

SEQ ID NO: 1288381 - RNA, 22 nt, Human
cuauaagcaagaaggcaaaaau

SEQ ID NO: 1288382 - RNA, 21 nt, Human
cuauaaggugcucucuuucug

SEQ ID NO: 1288383 - RNA, 22 nt, Human
cuauaaggugcucucuuucugu

SEQ ID NO: 1288384 - RNA, 23 nt, Human
cuauaaggugcucucuuucuguc

SEQ ID NO: 1288385 - RNA, 19 nt, Human
cuagugacuugugucccau

SEQ ID NO: 1288386 - RNA, 20 nt, Human
cuagugacuugugucccaug

SEQ ID NO: 1288387 - RNA, 18 nt, Human
cuaguggccgaaccagaa

SEQ ID NO: 1288388 - RNA, 14 nt, Human
cuagucaccagaga

SEQ ID NO: 1288389 - RNA, 18 nt, Human
cuagucaaugacaugaau

SEQ ID NO: 1288390 - RNA, 20 nt, Human
cuagucaaugacaugaauuu

SEQ ID NO: 1288391 - RNA, 21 nt, Human
cuagucacgcaugcaguguug

SEQ ID NO: 1288392 - RNA, 17 nt, Human
cuagucacgcaugcagu

SEQ ID NO: 1288393 - RNA, 16 nt, Human
cuagucaaucaagucu

SEQ ID NO: 1288394 - RNA, 20 nt, Human
cuagucaaucaagucuguuu

SEQ ID NO: 1288395 - RNA, 21 nt, Human
cuagucaaucaagucuguuua

SEQ ID NO: 1288396 - RNA, 15 nt, Human
cuagucaaugacaug

SEQ ID NO: 1288397 - RNA, 16 nt, Human
cuaguaauuggaaagg

SEQ ID NO: 1288398 - RNA, 16 nt, Human
cuaguacuaacuccua

SEQ ID NO: 1288399 - RNA, 16 nt, Human
cuagguuuaugacagu

SEQ ID NO: 1288400 - RNA, 12 nt, Human
cuagguuuauga

SEQ ID NO: 1288401 - RNA, 13 nt, Human
cuagguuucaaag

SEQ ID NO: 1288402 - RNA, 18 nt, Human
cuagguggguugaaagcc

SEQ ID NO: 1288403 - RNA, 19 nt, Human
cuagguggguugaaagcca

SEQ ID NO: 1288404 - RNA, 23 nt, Human
cuagguggguugaaagccaagga

SEQ ID NO: 1288405 - RNA, 14 nt, Human
cuagguguuuuguu

SEQ ID NO: 1288406 - RNA, 17 nt, Human
cuagguguuuuguucac

SEQ ID NO: 1288407 - RNA, 13 nt, Human
cuagguucuaaaa

SEQ ID NO: 1288408 - RNA, 20 nt, Human
cuagugaaacucguuaauuu

SEQ ID NO: 1288409 - RNA, 13 nt, Human
cuagucauaaccu

SEQ ID NO: 1288410 - RNA, 21 nt, Human
cuagugagcagucaggaaaga

SEQ ID NO: 1288411 - RNA, 17 nt, Human
cuagugacccacaugcc

SEQ ID NO: 1288412 - RNA, 18 nt, Human
cuagugacccacaugcca

SEQ ID NO: 1288413 - RNA, 19 nt, Human
cuagugacccacaugccau

SEQ ID NO: 1288414 - RNA, 18 nt, Human
cuagugacuuguguccca

SEQ ID NO: 1288415 - RNA, 17 nt, Human
cuagucuuuugcuuuug

SEQ ID NO: 1288416 - RNA, 17 nt, Human
cuagugaaggcuucucu

SEQ ID NO: 1288417 - RNA, 21 nt, Human
cuagugaaggcuucucucugu

SEQ ID NO: 1288418 - RNA, 16 nt, Human
cuagugacccacaugc

SEQ ID NO: 1288419 - RNA, 22 nt, Human
cuagguaaauuacaguuccuag

SEQ ID NO: 1288420 - RNA, 19 nt, Human
cuaggguuaggagguccuu

SEQ ID NO: 1288421 - RNA, 20 nt, Human
cuagguaauuuuuacagaau

SEQ ID NO: 1288422 - RNA, 21 nt, Human
cgccccaacccguggaggcug

SEQ ID NO: 1288423 - RNA, 22 nt, Human
cgccccaacccguggaggcugc

SEQ ID NO: 1288424 - RNA, 14 nt, Human
cuagguacgaugac

SEQ ID NO: 1288425 - RNA, 19 nt, Human
cuagguacgaugacagugu

SEQ ID NO: 1288426 - RNA, 20 nt, Human
cuagguacgaugacaguguu

SEQ ID NO: 1288427 - RNA, 17 nt, Human
cuagguaggaaaugugg

SEQ ID NO: 1288428 - RNA, 21 nt, Human
cuagguccccauacuccuaug

SEQ ID NO: 1288429 - RNA, 18 nt, Human
cuaggugcuauuugucau

SEQ ID NO: 1288430 - RNA, 15 nt, Human
cuagguggaaaagcc

SEQ ID NO: 1288431 - RNA, 12 nt, Human
cuagguggaaaa

SEQ ID NO: 1288432 - RNA, 17 nt, Human
cucgccggaucugaggg

SEQ ID NO: 1288433 - RNA, 20 nt, Human
cucgcccugcgguagauggg

SEQ ID NO: 1288434 - RNA, 18 nt, Human
cucgcauaggaccuuucc

SEQ ID NO: 1288435 - RNA, 19 nt, Human
cucgcauaggaccuuucca

SEQ ID NO: 1288436 - RNA, 18 nt, Human
cucgccggaucugaggga

SEQ ID NO: 1288437 - RNA, 15 nt, Human
cucgccuucaucucc

SEQ ID NO: 1288438 - RNA, 23 nt, Human
cucgccugacaaccacuggucug

SEQ ID NO: 1288439 - RNA, 15 nt, Human
cucgcuccccacucu

SEQ ID NO: 1288440 - RNA, 16 nt, Human
cucgcuccccacucug

SEQ ID NO: 1288441 - RNA, 17 nt, Human
cucgcuccccacucugc

SEQ ID NO: 1288442 - RNA, 21 nt, Human
cucgcuccccacucugcucug

SEQ ID NO: 1288443 - RNA, 23 nt, Human
cucgcuccccacucugcucugau

SEQ ID NO: 1288444 - RNA, 23 nt, Human
cucgcucugucgcccaggcugga

SEQ ID NO: 1288445 - RNA, 12 nt, Human
cucgagcgcccu

SEQ ID NO: 1288446 - RNA, 15 nt, Human
cucgagcgcccugca

SEQ ID NO: 1288447 - RNA, 16 nt, Human
cucgagcgcccugcag

SEQ ID NO: 1288448 - RNA, 17 nt, Human
cucgagcgcccugcaga

SEQ ID NO: 1288449 - RNA, 18 nt, Human
cucgagcgcccugcagac

SEQ ID NO: 1288450 - RNA, 19 nt, Human
cucgagcgcccugcagacc

SEQ ID NO: 1288451 - RNA, 20 nt, Human
cucgagcgcccugcagaccc

SEQ ID NO: 1288452 - RNA, 21 nt, Human
cucgagcgcccugcagacccu

SEQ ID NO: 1288453 - RNA, 23 nt, Human
cucgagcgcccugcagacccugc

SEQ ID NO: 1288454 - RNA, 18 nt, Human
cucgagggcagggaccac

SEQ ID NO: 1288455 - RNA, 23 nt, Human
cucgagggcagggaccacacccu

SEQ ID NO: 1288456 - RNA, 14 nt, Human
cucgaggggugggc

SEQ ID NO: 1288457 - RNA, 16 nt, Human
cucgaggggugggcug

SEQ ID NO: 1288458 - RNA, 17 nt, Human
cucgaggggugggcugg

SEQ ID NO: 1288459 - RNA, 17 nt, Human
cucgaggucgggcagca

SEQ ID NO: 1288460 - RNA, 14 nt, Human
cucgauuucuccag

SEQ ID NO: 1288461 - RNA, 19 nt, Human
cucgaggggugggcuggua

SEQ ID NO: 1288462 - RNA, 12 nt, Human
cucgcaacccgu

SEQ ID NO: 1288463 - RNA, 16 nt, Human
cucgcaacccgugcca

SEQ ID NO: 1288464 - RNA, 21 nt, Human
cucgcaacccgugccaagucc

SEQ ID NO: 1288465 - RNA, 23 nt, Human
cucgcaacccgugccaaguccag

SEQ ID NO: 1288466 - RNA, 22 nt, Human
cucgcaacccgugccaagucca

SEQ ID NO: 1288467 - RNA, 17 nt, Human
cuccuugggcccuuuga

SEQ ID NO: 1288468 - RNA, 18 nt, Human
cuccuugggcccuuugag

SEQ ID NO: 1288469 - RNA, 19 nt, Human
cuccuugggcccuuugagu

SEQ ID NO: 1288470 - RNA, 21 nt, Human
cuccuuggugauuccgcagug

SEQ ID NO: 1288471 - RNA, 15 nt, Human
cuccuuccugugugu

SEQ ID NO: 1288472 - RNA, 12 nt, Human
cuccuugggccc

SEQ ID NO: 1288473 - RNA, 13 nt, Human
cuccuugggcccu

SEQ ID NO: 1288474 - RNA, 16 nt, Human
cuccuugggcccuuug

SEQ ID NO: 1288475 - RNA, 14 nt, Human
cuccuuccggggaa

SEQ ID NO: 1288476 - RNA, 12 nt, Human
cuccuuccuaaa

SEQ ID NO: 1288477 - RNA, 11 nt, Human
cuccuuccugc

SEQ ID NO: 1288478 - RNA, 20 nt, Human
cuccuuccggggaaggauuu

SEQ ID NO: 1288479 - RNA, 13 nt, Human
cuccuuccugccc

SEQ ID NO: 1288480 - RNA, 15 nt, Human
cuccuuccugcccca

SEQ ID NO: 1288481 - RNA, 13 nt, Human
cuccuuccuggag

SEQ ID NO: 1288482 - RNA, 14 nt, Human
cuccuuccuggaga

SEQ ID NO: 1288483 - RNA, 21 nt, Human
cuccuuccugccccaacuccu

SEQ ID NO: 1288484 - RNA, 13 nt, Human
cuccuuccugugu

SEQ ID NO: 1288485 - RNA, 13 nt, Human
cucgagaucccaa

SEQ ID NO: 1288486 - RNA, 21 nt, Human
cuccuugguucuugaggggac

SEQ ID NO: 1288487 - RNA, 21 nt, Human
cucgagaucccaacacugcca

SEQ ID NO: 1288488 - RNA, 22 nt, Human
cucgagaucccaacacugccag

SEQ ID NO: 1288489 - RNA, 23 nt, Human
cucgagaucccaacacugccagc

SEQ ID NO: 1288490 - RNA, 17 nt, Human
cuccugccucagccucc

SEQ ID NO: 1288491 - RNA, 11 nt, Human
cuccugccuca

SEQ ID NO: 1288492 - RNA, 12 nt, Human
cuccugccucag

SEQ ID NO: 1288493 - RNA, 14 nt, Human
cuccucuccccagc

SEQ ID NO: 1288494 - RNA, 15 nt, Human
cuccugccggcuccu

SEQ ID NO: 1288495 - RNA, 19 nt, Human
cuccugccucagccucccg

SEQ ID NO: 1288496 - RNA, 15 nt, Human
cuccugcugcucccu

SEQ ID NO: 1288497 - RNA, 16 nt, Human
cuccugcugcucccuc

SEQ ID NO: 1288498 - RNA, 17 nt, Human
cuccugcugcucccuca

SEQ ID NO: 1288499 - RNA, 18 nt, Human
cuccugcugcucccucag

SEQ ID NO: 1288500 - RNA, 19 nt, Human
cuccugcugcucccucaga

SEQ ID NO: 1288501 - RNA, 20 nt, Human
cuccugcugcucccucagac

SEQ ID NO: 1288502 - RNA, 21 nt, Human
cuccugcugcucccucagacu

SEQ ID NO: 1288503 - RNA, 22 nt, Human
cuccugcugcucccucagacug

SEQ ID NO: 1288504 - RNA, 23 nt, Human
cuccugcugcucccucagacugg

SEQ ID NO: 1288505 - RNA, 11 nt, Human
cuccuggacuc

SEQ ID NO: 1288506 - RNA, 21 nt, Human
cuccuggaccccccuuucaca

SEQ ID NO: 1288507 - RNA, 12 nt, Human
cuccuggacucc

SEQ ID NO: 1288508 - RNA, 17 nt, Human
cuccuuaucaaaggaca

SEQ ID NO: 1288509 - RNA, 22 nt, Human
cuccuuaucaaaggacaccauu

SEQ ID NO: 1288510 - RNA, 22 nt, Human
cuccuggaccccccuuucacag

SEQ ID NO: 1288511 - RNA, 13 nt, Human
cuccuucccaagu

SEQ ID NO: 1288512 - RNA, 14 nt, Human
cuccuucccaagug

SEQ ID NO: 1288513 - RNA, 16 nt, Human
cuccuucccaucgcug

SEQ ID NO: 1288514 - RNA, 17 nt, Human
cuccuucccaucgcugu

SEQ ID NO: 1288515 - RNA, 12 nt, Human
cuccuuccccau

SEQ ID NO: 1288516 - RNA, 13 nt, Human
cuccuucccucuc

SEQ ID NO: 1288517 - RNA, 17 nt, Human
cuccuucccucucugga

SEQ ID NO: 1288518 - RNA, 19 nt, Human
cuccuucccucucuggaga

SEQ ID NO: 1288519 - RNA, 18 nt, Human
cuccuucccucucuggag

SEQ ID NO: 1288520 - RNA, 16 nt, Human
cuccccuuuuuuuccc

SEQ ID NO: 1288521 - RNA, 13 nt, Human
cuccccuugccug

SEQ ID NO: 1288522 - RNA, 18 nt, Human
cuccccuugccugugcca

SEQ ID NO: 1288523 - RNA, 15 nt, Human
cucccggugcccaag

SEQ ID NO: 1288524 - RNA, 21 nt, Human
cucccggugcccaagaauaga

SEQ ID NO: 1288525 - RNA, 17 nt, Human
cucccugccccccagcc

SEQ ID NO: 1288526 - RNA, 23 nt, Human
cucccugccccccagcccuccuu

SEQ ID NO: 1288527 - RNA, 13 nt, Human
cucccugccccuc

SEQ ID NO: 1288528 - RNA, 14 nt, Human
cucccugccccucc

SEQ ID NO: 1288529 - RNA, 14 nt, Human
cucccugcauggca

SEQ ID NO: 1288530 - RNA, 22 nt, Human
cucccugcauggcauccuccag

SEQ ID NO: 1288531 - RNA, 23 nt, Human
cucccugcauggcauccuccagc

SEQ ID NO: 1288532 - RNA, 17 nt, Human
cucccugccccucccuu

SEQ ID NO: 1288533 - RNA, 18 nt, Human
cucccugccccucccuuc

SEQ ID NO: 1288534 - RNA, 20 nt, Human
cucccugccccucccuucaa

SEQ ID NO: 1288535 - RNA, 21 nt, Human
cucccugccccucccuucaac

SEQ ID NO: 1288536 - RNA, 14 nt, Human
cucccugccuccug

SEQ ID NO: 1288537 - RNA, 12 nt, Human
cucccuggugcu

SEQ ID NO: 1288538 - RNA, 13 nt, Human
cucccuggugcuu

SEQ ID NO: 1288539 - RNA, 15 nt, Human
cucccuggugcuuau

SEQ ID NO: 1288540 - RNA, 14 nt, Human
cuccauccugaggc

SEQ ID NO: 1288541 - RNA, 13 nt, Human
cuccaucccuggc

SEQ ID NO: 1288542 - RNA, 14 nt, Human
cuccaucccuggcc

SEQ ID NO: 1288543 - RNA, 15 nt, Human
cuccaucccuggccc

SEQ ID NO: 1288544 - RNA, 16 nt, Human
cuccaucccuggcccc

SEQ ID NO: 1288545 - RNA, 13 nt, Human
cuccauccugagg

SEQ ID NO: 1288546 - RNA, 12 nt, Human
cuccccuccucc

SEQ ID NO: 1288547 - RNA, 20 nt, Human
cuccccuccuccuggacucc

SEQ ID NO: 1288548 - RNA, 19 nt, Human
cuccccagcauuccagccc

SEQ ID NO: 1288549 - RNA, 19 nt, Human
cuccaucccuggcccccuc

SEQ ID NO: 1288550 - RNA, 24 nt, Human
cuccaucccuggcccccucccugg

SEQ ID NO: 1288551 - RNA, 21 nt, Human
cuccccagcauuccagccccu

SEQ ID NO: 1288552 - RNA, 13 nt, Human
cuccccugccccc

SEQ ID NO: 1288553 - RNA, 15 nt, Human
cuccccugcccccug

SEQ ID NO: 1288554 - RNA, 17 nt, Human
cuccccugcccccugca

SEQ ID NO: 1288555 - RNA, 18 nt, Human
cuccccugcccccugcag

SEQ ID NO: 1288556 - RNA, 19 nt, Human
cuccccugcccccugcagg

SEQ ID NO: 1288557 - RNA, 23 nt, Human
cuccccugcccccugcaggaagg

SEQ ID NO: 1288558 - RNA, 20 nt, Human
cuccccugcccccugcagga

SEQ ID NO: 1288559 - RNA, 12 nt, Human
cuccccuucucu

SEQ ID NO: 1288560 - RNA, 15 nt, Human
cuccucaaccccucc

SEQ ID NO: 1288561 - RNA, 21 nt, Human
cuccucaaccccuccccucca

SEQ ID NO: 1288562 - RNA, 16 nt, Human
cuccuaugaucugagu

SEQ ID NO: 1288563 - RNA, 19 nt, Human
cuccuaugaucugagucag

SEQ ID NO: 1288564 - RNA, 23 nt, Human
cuccuaugaucugagucagagcc

SEQ ID NO: 1288565 - RNA, 22 nt, Human
cuccuauggguugucaccaagc

SEQ ID NO: 1288566 - RNA, 18 nt, Human
cuccuauguuuggcugcu

SEQ ID NO: 1288567 - RNA, 13 nt, Human
cuccgagaggugg

SEQ ID NO: 1288568 - RNA, 14 nt, Human
cuccgagagguggg

SEQ ID NO: 1288569 - RNA, 15 nt, Human
cuccgagaggugggc

SEQ ID NO: 1288570 - RNA, 17 nt, Human
cuccgagaggugggcca

SEQ ID NO: 1288571 - RNA, 18 nt, Human
cuccgagaggugggccag

SEQ ID NO: 1288572 - RNA, 22 nt, Human
cuccgagaggugggccagucug

SEQ ID NO: 1288573 - RNA, 15 nt, Human
cuccgaggacccagg

SEQ ID NO: 1288574 - RNA, 17 nt, Human
cuccgaggacccaggaa

SEQ ID NO: 1288575 - RNA, 12 nt, Human
cucccuuucaac

SEQ ID NO: 1288576 - RNA, 23 nt, Human
cucccuugggcucugaugaaaaa

SEQ ID NO: 1288577 - RNA, 19 nt, Human
cucccuuggggccuaugca

SEQ ID NO: 1288578 - RNA, 18 nt, Human
cucccuugggcucugaug

SEQ ID NO: 1288579 - RNA, 19 nt, Human
cucccuugggcucugauga

SEQ ID NO: 1288580 - RNA, 20 nt, Human
cucccuugggcucugaugaa

SEQ ID NO: 1288581 - RNA, 21 nt, Human
cucccuugggcucugaugaaa

SEQ ID NO: 1288582 - RNA, 13 nt, Human
cucccuugggcuc

SEQ ID NO: 1288583 - RNA, 14 nt, Human
cucccuugggcucc

SEQ ID NO: 1288584 - RNA, 18 nt, Human
cucccuugggcucccugu

SEQ ID NO: 1288585 - RNA, 16 nt, Human
cucccuugggcucuga

SEQ ID NO: 1288586 - RNA, 17 nt, Human
cucccuugggcucugau

SEQ ID NO: 1288587 - RNA, 22 nt, Human
cucccuggugcuuaugcucuua

SEQ ID NO: 1288588 - RNA, 19 nt, Human
cucccuguaaccucuucag

SEQ ID NO: 1288589 - RNA, 18 nt, Human
cucccuggugcuuaugcu

SEQ ID NO: 1288590 - RNA, 13 nt, Human
cucccuguaacuu

SEQ ID NO: 1288591 - RNA, 15 nt, Human
cucccuguaacuuga

SEQ ID NO: 1288592 - RNA, 15 nt, Human
cucccuguacagugu

SEQ ID NO: 1288593 - RNA, 18 nt, Human
cucccuguacaguguuac

SEQ ID NO: 1288594 - RNA, 13 nt, Human
cucccugugcccc

SEQ ID NO: 1288595 - RNA, 15 nt, Human
cucccugugccccca

SEQ ID NO: 1288596 - RNA, 19 nt, Human
cucccugugcccccagggu

SEQ ID NO: 1288597 - RNA, 16 nt, Human
cucccuguuccccaga

SEQ ID NO: 1288598 - RNA, 17 nt, Human
cucccuguuccccagag

SEQ ID NO: 1288599 - RNA, 18 nt, Human
cucccuguuccccagaga

SEQ ID NO: 1288600 - RNA, 19 nt, Human
cucccuguuccccagagaa

SEQ ID NO: 1288601 - RNA, 12 nt, Human
cuccucaucccg

SEQ ID NO: 1288602 - RNA, 14 nt, Human
cuccucacccccag

SEQ ID NO: 1288603 - RNA, 20 nt, Human
cuccucaaccccuccccucc

SEQ ID NO: 1288604 - RNA, 15 nt, Human
cuccucacccccagc

SEQ ID NO: 1288605 - RNA, 11 nt, Human
cuccucagccu

SEQ ID NO: 1288606 - RNA, 12 nt, Human
cuccucagccug

SEQ ID NO: 1288607 - RNA, 24 nt, Human
cuccucagccugaaccccagggcu

SEQ ID NO: 1288608 - RNA, 13 nt, Human
cuccucagccuga

SEQ ID NO: 1288609 - RNA, 17 nt, Human
cuccucaggcacacagc

SEQ ID NO: 1288610 - RNA, 18 nt, Human
cuccucaggcacacagcu

SEQ ID NO: 1288611 - RNA, 19 nt, Human
cuccucaggcacacagcua

SEQ ID NO: 1288612 - RNA, 21 nt, Human
cuccucaggcacacagcuacu

SEQ ID NO: 1288613 - RNA, 22 nt, Human
cuccucaggcacacagcuacuc

SEQ ID NO: 1288614 - RNA, 23 nt, Human
cuccucaggcacacagcuacucu

SEQ ID NO: 1288615 - RNA, 17 nt, Human
cuccucagggacucagg

SEQ ID NO: 1288616 - RNA, 11 nt, Human
cuccucaggga

SEQ ID NO: 1288617 - RNA, 12 nt, Human
cuccucccagga

SEQ ID NO: 1288618 - RNA, 11 nt, Human
cuccucccagg

SEQ ID NO: 1288619 - RNA, 22 nt, Human
cuccucccaggcgccccuuccc

SEQ ID NO: 1288620 - RNA, 23 nt, Human
cuccucccaggcgccccuucccc

SEQ ID NO: 1288621 - RNA, 17 nt, Human
cuccucccaggcgcccc

SEQ ID NO: 1288622 - RNA, 20 nt, Human
cuccucccacccggcugcag

SEQ ID NO: 1288623 - RNA, 22 nt, Human
cuccucccacccggcugcagag

SEQ ID NO: 1288624 - RNA, 14 nt, Human
cuccuccuggacuc

SEQ ID NO: 1288625 - RNA, 15 nt, Human
cuccuccuggacucc

SEQ ID NO: 1288626 - RNA, 19 nt, Human
cuccuccuggacuccugca

SEQ ID NO: 1288627 - RNA, 21 nt, Human
cuccaaacugacucuuaagaa

SEQ ID NO: 1288628 - RNA, 19 nt, Human
cuccaaaacuucguuuaau

SEQ ID NO: 1288629 - RNA, 19 nt, Human
cucauuuuuuuccuugcaa

SEQ ID NO: 1288630 - RNA, 12 nt, Human
cucauuagacug

SEQ ID NO: 1288631 - RNA, 17 nt, Human
cucauuaaaagaauauc

SEQ ID NO: 1288632 - RNA, 13 nt, Human
cucauuagacugg

SEQ ID NO: 1288633 - RNA, 15 nt, Human
cucaucucuucuuuu

SEQ ID NO: 1288634 - RNA, 12 nt, Human
cucaucucuucu

SEQ ID NO: 1288635 - RNA, 12 nt, Human
cucaucugcugg

SEQ ID NO: 1288636 - RNA, 13 nt, Human
cucaucugcuggu

SEQ ID NO: 1288637 - RNA, 23 nt, Human
cucauguugaagccacugccuuc

SEQ ID NO: 1288638 - RNA, 14 nt, Human
cuccacccuggccg

SEQ ID NO: 1288639 - RNA, 15 nt, Human
cuccacccuggccga

SEQ ID NO: 1288640 - RNA, 14 nt, Human
cuccacauccucca

SEQ ID NO: 1288641 - RNA, 15 nt, Human
cuccacauccuccac

SEQ ID NO: 1288642 - RNA, 17 nt, Human
cuccacauccuccacgu

SEQ ID NO: 1288643 - RNA, 22 nt, Human
cuccaaucccaccaacccucag

SEQ ID NO: 1288644 - RNA, 15 nt, Human
cuccaauuuuuuaag

SEQ ID NO: 1288645 - RNA, 23 nt, Human
cuccaauuuuuuaagugaaaaua

SEQ ID NO: 1288646 - RNA, 20 nt, Human
cuccacacacauaauggcag

SEQ ID NO: 1288647 - RNA, 20 nt, Human
cuccacacagugcucaaggc

SEQ ID NO: 1288648 - RNA, 12 nt, Human
cuccacaccugc

SEQ ID NO: 1288649 - RNA, 13 nt, Human
cuccagcuuuccu

SEQ ID NO: 1288650 - RNA, 16 nt, Human
cuccagcuuuccugua

SEQ ID NO: 1288651 - RNA, 15 nt, Human
cuccagcuuuccugu

SEQ ID NO: 1288652 - RNA, 19 nt, Human
cuccaggaagccuuccccu

SEQ ID NO: 1288653 - RNA, 12 nt, Human
cuccauccugag

SEQ ID NO: 1288654 - RNA, 20 nt, Human
cuccauccgugccucuuuuu

SEQ ID NO: 1288655 - RNA, 16 nt, Human
cuccauccuaccacaa

SEQ ID NO: 1288656 - RNA, 12 nt, Human
cuccauccaagg

SEQ ID NO: 1288657 - RNA, 13 nt, Human
cuccauccaaggc

SEQ ID NO: 1288658 - RNA, 14 nt, Human
cuccauccaaggcc

SEQ ID NO: 1288659 - RNA, 18 nt, Human
cuccauccaaggccaggu

SEQ ID NO: 1288660 - RNA, 20 nt, Human
cuccauccacaugggagccg

SEQ ID NO: 1288661 - RNA, 11 nt, Human
cuccaucccug

SEQ ID NO: 1288662 - RNA, 12 nt, Human
cuccaucccugg

SEQ ID NO: 1288663 - RNA, 18 nt, Human
cuccacguucugcucauc

SEQ ID NO: 1288664 - RNA, 13 nt, Human
cuccagcggcccu

SEQ ID NO: 1288665 - RNA, 15 nt, Human
cuccagcggcccugu

SEQ ID NO: 1288666 - RNA, 22 nt, Human
cuccagcggcccugucauccag

SEQ ID NO: 1288667 - RNA, 19 nt, Human
cuccagcggcccugucauc

SEQ ID NO: 1288668 - RNA, 14 nt, Human
cuccaccuccuggg

SEQ ID NO: 1288669 - RNA, 12 nt, Human
cuccaccuuccc

SEQ ID NO: 1288670 - RNA, 14 nt, Human
cuccaccuucccac

SEQ ID NO: 1288671 - RNA, 15 nt, Human
cuccacguucugcuc

SEQ ID NO: 1288672 - RNA, 16 nt, Human
cuccacguucugcuca

SEQ ID NO: 1288673 - RNA, 17 nt, Human
cuccacguucugcucau

SEQ ID NO: 1288674 - RNA, 20 nt, Human
cuccacguucugcucaucau

SEQ ID NO: 1288675 - RNA, 16 nt, Human
cucauacccucccucc

SEQ ID NO: 1288676 - RNA, 17 nt, Human
cucauacccucccuccc

SEQ ID NO: 1288677 - RNA, 20 nt, Human
cucauagcccucacccuggg

SEQ ID NO: 1288678 - RNA, 21 nt, Human
cucauagcccucacccugggg

SEQ ID NO: 1288679 - RNA, 13 nt, Human
cucauagcccuca

SEQ ID NO: 1288680 - RNA, 17 nt, Human
cucauagcccucacccu

SEQ ID NO: 1288681 - RNA, 18 nt, Human
cucauagacacugaucug

SEQ ID NO: 1288682 - RNA, 14 nt, Human
cucauagacacuga

SEQ ID NO: 1288683 - RNA, 17 nt, Human
cucagggcuucuaguuu

SEQ ID NO: 1288684 - RNA, 20 nt, Human
cucauauaauuauauguugu

SEQ ID NO: 1288685 - RNA, 21 nt, Human
cucauauccaguauuguuccu

SEQ ID NO: 1288686 - RNA, 17 nt, Human
cucauauaauuauaugu

SEQ ID NO: 1288687 - RNA, 16 nt, Human
cucaucaacugaauga

SEQ ID NO: 1288688 - RNA, 14 nt, Human
cucaucaacugaau

SEQ ID NO: 1288689 - RNA, 18 nt, Human
cucaucaauggggccagu

SEQ ID NO: 1288690 - RNA, 12 nt, Human
cucaucaguagu

SEQ ID NO: 1288691 - RNA, 12 nt, Human
cucauccuccuu

SEQ ID NO: 1288692 - RNA, 13 nt, Human
cucauccuccuuc

SEQ ID NO: 1288693 - RNA, 16 nt, Human
cucauccuccuucuuc

SEQ ID NO: 1288694 - RNA, 14 nt, Human
cucauccuccuucu

SEQ ID NO: 1288695 - RNA, 16 nt, Human
cucaucucucugccca

SEQ ID NO: 1288696 - RNA, 17 nt, Human
cucaucucucugcccaa

SEQ ID NO: 1288697 - RNA, 13 nt, Human
cucaucauucucu

SEQ ID NO: 1288698 - RNA, 14 nt, Human
cucaucauucucug

SEQ ID NO: 1288699 - RNA, 15 nt, Human
cucaucauucucugu

SEQ ID NO: 1288700 - RNA, 17 nt, Human
cucaucauucucugucu

SEQ ID NO: 1288701 - RNA, 18 nt, Human
cucaucauucucugucuc

SEQ ID NO: 1288702 - RNA, 19 nt, Human
cucaucauucucugucuca

SEQ ID NO: 1288703 - RNA, 20 nt, Human
cucaucauucucugucucau

SEQ ID NO: 1288704 - RNA, 22 nt, Human
cucaucauucucugucucaucc

SEQ ID NO: 1288705 - RNA, 22 nt, Human
cucaucccgagcaccuccacau

SEQ ID NO: 1288706 - RNA, 16 nt, Human
cucaucccguguucuc

SEQ ID NO: 1288707 - RNA, 19 nt, Human
cucaucccguguucuccuu

SEQ ID NO: 1288708 - RNA, 19 nt, Human
cucagcccacauagugaug

SEQ ID NO: 1288709 - RNA, 21 nt, Human
cucagcccacauagugauggu

SEQ ID NO: 1288710 - RNA, 14 nt, Human
cucagccagccucg

SEQ ID NO: 1288711 - RNA, 15 nt, Human
cucagccacccugag

SEQ ID NO: 1288712 - RNA, 16 nt, Human
cucagccacccugagu

SEQ ID NO: 1288713 - RNA, 17 nt, Human
cucagccacccugaguu

SEQ ID NO: 1288714 - RNA, 18 nt, Human
cucagccacccugaguug

SEQ ID NO: 1288715 - RNA, 21 nt, Human
cucagccacccugaguugcuu

SEQ ID NO: 1288716 - RNA, 11 nt, Human
cucagccagca

SEQ ID NO: 1288717 - RNA, 13 nt, Human
cucagccagcacu

SEQ ID NO: 1288718 - RNA, 12 nt, Human
cucagccagccu

SEQ ID NO: 1288719 - RNA, 13 nt, Human
cucagccagccuc

SEQ ID NO: 1288720 - RNA, 12 nt, Human
cucaggauccaa

SEQ ID NO: 1288721 - RNA, 18 nt, Human
cucaggauccaagcuaag

SEQ ID NO: 1288722 - RNA, 20 nt, Human
cucaggauccaagcuaagca

SEQ ID NO: 1288723 - RNA, 16 nt, Human
cucaggaugagggaaa

SEQ ID NO: 1288724 - RNA, 20 nt, Human
cucaggaugagggaaaagaa

SEQ ID NO: 1288725 - RNA, 22 nt, Human
cucaggaugagggaaaagaaaa

SEQ ID NO: 1288726 - RNA, 21 nt, Human
cucaggaugagggaaaagaaa

SEQ ID NO: 1288727 - RNA, 13 nt, Human
cucaggcacacag

SEQ ID NO: 1288728 - RNA, 14 nt, Human
cucaggcacacagc

SEQ ID NO: 1288729 - RNA, 15 nt, Human
cucaggcacacagcu

SEQ ID NO: 1288730 - RNA, 16 nt, Human
cucaggcacacagcua

SEQ ID NO: 1288731 - RNA, 18 nt, Human
cucaggcacacagcuacu

SEQ ID NO: 1288732 - RNA, 14 nt, Human
cucaggcagcucaa

SEQ ID NO: 1288733 - RNA, 15 nt, Human
cucaggcagcucaag

SEQ ID NO: 1288734 - RNA, 15 nt, Human
cucaggcaggggccu

SEQ ID NO: 1288735 - RNA, 18 nt, Human
cucaggcaggggccucca

SEQ ID NO: 1288736 - RNA, 16 nt, Human
cucagggaccauggcu

SEQ ID NO: 1288737 - RNA, 17 nt, Human
cucagggaccauggcuu

SEQ ID NO: 1288738 - RNA, 21 nt, Human
cucagggacucaucuuucccu

SEQ ID NO: 1288739 - RNA, 23 nt, Human
cucagggacucaucuuucccucc

SEQ ID NO: 1288740 - RNA, 14 nt, Human
cucagggcaaagcc

SEQ ID NO: 1288741 - RNA, 15 nt, Human
cucagggcaaagcca

SEQ ID NO: 1288742 - RNA, 16 nt, Human
cucagggcaaagccag

SEQ ID NO: 1288743 - RNA, 17 nt, Human
cucagggcaaagccagg

SEQ ID NO: 1288744 - RNA, 18 nt, Human
cucagggcaaagccaggu

SEQ ID NO: 1288745 - RNA, 10 nt, Human
cucagggcag

SEQ ID NO: 1288746 - RNA, 22 nt, Human
cucagggcaaagccaggucccu

SEQ ID NO: 1288747 - RNA, 13 nt, Human
cucagggcuccug

SEQ ID NO: 1288748 - RNA, 14 nt, Human
cucagggcuccugg

SEQ ID NO: 1288749 - RNA, 15 nt, Human
cucagggcuccuggg

SEQ ID NO: 1288750 - RNA, 17 nt, Human
cucagggcuccuggguu

SEQ ID NO: 1288751 - RNA, 14 nt, Human
cucagggcuccuug

SEQ ID NO: 1288752 - RNA, 15 nt, Human
cucagggcuccuugu

SEQ ID NO: 1288753 - RNA, 22 nt, Human
cucagggcuccuugugggccug

SEQ ID NO: 1288754 - RNA, 20 nt, Human
cgagauaccccaccucccuc

SEQ ID NO: 1288755 - RNA, 13 nt, Human
cgagaucccaaca

SEQ ID NO: 1288756 - RNA, 15 nt, Human
cgagaucccaacacu

SEQ ID NO: 1288757 - RNA, 21 nt, Human
cgagaucccaacacugccagc

SEQ ID NO: 1288758 - RNA, 22 nt, Human
cgagaucccaacacugccagca

SEQ ID NO: 1288759 - RNA, 17 nt, Human
cgagaucaguauuuaac

SEQ ID NO: 1288760 - RNA, 19 nt, Human
cgagaucaguauuuaacua

SEQ ID NO: 1288761 - RNA, 21 nt, Human
cgagauuaucguuuucuuaaa

SEQ ID NO: 1288762 - RNA, 23 nt, Human
cgagauuaucguuuucuuaaagu

SEQ ID NO: 1288763 - RNA, 14 nt, Human
cgagcaaccguggc

SEQ ID NO: 1288764 - RNA, 15 nt, Human
cgagcaaccguggcc

SEQ ID NO: 1288765 - RNA, 16 nt, Human
cgagcaaccguggccc

SEQ ID NO: 1288766 - RNA, 22 nt, Human
cgagcaaccguggcccuuccug

SEQ ID NO: 1288767 - RNA, 23 nt, Human
cgagcaaccguggcccuuccugg

SEQ ID NO: 1288768 - RNA, 13 nt, Human
cgagcaccuccac

SEQ ID NO: 1288769 - RNA, 11 nt, Human
cgagcagcuga

SEQ ID NO: 1288770 - RNA, 14 nt, Human
cgagcaggaggccu

SEQ ID NO: 1288771 - RNA, 12 nt, Human
cgagcagcugag

SEQ ID NO: 1288772 - RNA, 13 nt, Human
cgagcagcugagc

SEQ ID NO: 1288773 - RNA, 14 nt, Human
cgagcagcugagca

SEQ ID NO: 1288774 - RNA, 15 nt, Human
cgagcagcugagcag

SEQ ID NO: 1288775 - RNA, 16 nt, Human
cgagcagcugagcagg

SEQ ID NO: 1288776 - RNA, 19 nt, Human
cgagcagcugagcagggcc

SEQ ID NO: 1288777 - RNA, 13 nt, Human
cgagcaggaggcc

SEQ ID NO: 1288778 - RNA, 13 nt, Human
cgagauaccccac

SEQ ID NO: 1288779 - RNA, 22 nt, Human
cgagaggugggccagucugugg

SEQ ID NO: 1288780 - RNA, 23 nt, Human
cgagaggugggccagucugugga

SEQ ID NO: 1288781 - RNA, 16 nt, Human
cgagaagggcugcuuc

SEQ ID NO: 1288782 - RNA, 21 nt, Human
cgagaggggccgaugcccaga

SEQ ID NO: 1288783 - RNA, 22 nt, Human
cgagaggggccgaugcccagag

SEQ ID NO: 1288784 - RNA, 14 nt, Human
cgagaggugggcca

SEQ ID NO: 1288785 - RNA, 15 nt, Human
cgagaggugggccag

SEQ ID NO: 1288786 - RNA, 19 nt, Human
cgagaggugggccagucug

SEQ ID NO: 1288787 - RNA, 20 nt, Human
cgagaggugggccagucugu

SEQ ID NO: 1288788 - RNA, 11 nt, Human
cgacugucucc

SEQ ID NO: 1288789 - RNA, 19 nt, Human
cgaauacuuuugcccuuug

SEQ ID NO: 1288790 - RNA, 11 nt, Human
cgacuguuguu

SEQ ID NO: 1288791 - RNA, 19 nt, Human
cgacuguuguuaucuguuu

SEQ ID NO: 1288792 - RNA, 17 nt, Human
cgagaaagaggcaccag

SEQ ID NO: 1288793 - RNA, 16 nt, Human
cgacuuucugccugga

SEQ ID NO: 1288794 - RNA, 19 nt, Human
cgagaaagaggcaccagga

SEQ ID NO: 1288795 - RNA, 21 nt, Human
cgagaaagaggcaccaggaag

SEQ ID NO: 1288796 - RNA, 21 nt, Human
cgagaaauucguguguuuuuu

SEQ ID NO: 1288797 - RNA, 16 nt, Human
cgacuugccaaauuua

SEQ ID NO: 1288798 - RNA, 19 nt, Human
cgacuuguuuuugcacaug

SEQ ID NO: 1288799 - RNA, 13 nt, Human
cgacuuucugccu

SEQ ID NO: 1288800 - RNA, 14 nt, Human
cgacuuucugccug

SEQ ID NO: 1288801 - RNA, 15 nt, Human
cgacuuucugccugg

SEQ ID NO: 1288802 - RNA, 22 nt, Human
ccuuugaccugccucccuucau

SEQ ID NO: 1288803 - RNA, 21 nt, Human
ccuuugaccugccucccuuca

SEQ ID NO: 1288804 - RNA, 16 nt, Human
ccuuuuaguuccugug

SEQ ID NO: 1288805 - RNA, 16 nt, Human
ccuuuuauaucccauu

SEQ ID NO: 1288806 - RNA, 19 nt, Human
ccuuuuaucccaaaguugu

SEQ ID NO: 1288807 - RNA, 22 nt, Human
ccuuuuauguaguaauugacau

SEQ ID NO: 1288808 - RNA, 22 nt, Human
ccuuuuaguuccugugcacagc

SEQ ID NO: 1288809 - RNA, 15 nt, Human
ccuuuuauugacaca

SEQ ID NO: 1288810 - RNA, 10 nt, Human
ccuuuucaua

SEQ ID NO: 1288811 - RNA, 19 nt, Human
cgaaaacccccaaaccaga

SEQ ID NO: 1288812 - RNA, 22 nt, Human
cgaaaaucauauaaucuuacaa

SEQ ID NO: 1288813 - RNA, 13 nt, Human
cgaaaaucaaaug

SEQ ID NO: 1288814 - RNA, 17 nt, Human
cgaaacacagaaaccuu

SEQ ID NO: 1288815 - RNA, 14 nt, Human
cgaacuccugaccu

SEQ ID NO: 1288816 - RNA, 15 nt, Human
cgaacuccuugauuu

SEQ ID NO: 1288817 - RNA, 13 nt, Human
cgaagacacagac

SEQ ID NO: 1288818 - RNA, 13 nt, Human
cgaaagcucuaga

SEQ ID NO: 1288819 - RNA, 14 nt, Human
cgaaagcucuagaa

SEQ ID NO: 1288820 - RNA, 18 nt, Human
cgaaagcucuagaaucug

SEQ ID NO: 1288821 - RNA, 10 nt, Human
cgcagcccug

SEQ ID NO: 1288822 - RNA, 11 nt, Human
cgcagccaccc

SEQ ID NO: 1288823 - RNA, 12 nt, Human
cgcagccacccu

SEQ ID NO: 1288824 - RNA, 13 nt, Human
cgcagccacccug

SEQ ID NO: 1288825 - RNA, 14 nt, Human
cgcagccacccuga

SEQ ID NO: 1288826 - RNA, 16 nt, Human
cgcagccacccugagg

SEQ ID NO: 1288827 - RNA, 17 nt, Human
cgcagccacccugagga

SEQ ID NO: 1288828 - RNA, 22 nt, Human
cgcagccacccugaggagucug

SEQ ID NO: 1288829 - RNA, 17 nt, Human
cgcaccccccaagcugu

SEQ ID NO: 1288830 - RNA, 23 nt, Human
cgccaggauggaacacggccaca

SEQ ID NO: 1288831 - RNA, 16 nt, Human
cgccaggauggcgcag

SEQ ID NO: 1288832 - RNA, 19 nt, Human
cgccaggauggcgcaggaa

SEQ ID NO: 1288833 - RNA, 23 nt, Human
cgccaggauggcgcaggaacuca

SEQ ID NO: 1288834 - RNA, 16 nt, Human
cgccaggcugaccaca

SEQ ID NO: 1288835 - RNA, 17 nt, Human
cgccaggcugaccacag

SEQ ID NO: 1288836 - RNA, 20 nt, Human
cgccaggcugaccacagcac

SEQ ID NO: 1288837 - RNA, 21 nt, Human
cgccaggcugaccacagcaca

SEQ ID NO: 1288838 - RNA, 23 nt, Human
cgccaggcugaccacagcacagc

SEQ ID NO: 1288839 - RNA, 15 nt, Human
cgagcaugucgugga

SEQ ID NO: 1288840 - RNA, 15 nt, Human
cgauguggaacugcu

SEQ ID NO: 1288841 - RNA, 19 nt, Human
cgauguggaacugcugcca

SEQ ID NO: 1288842 - RNA, 20 nt, Human
cgauguggaacugcugccac

SEQ ID NO: 1288843 - RNA, 21 nt, Human
cgauguggaacugcugccacu

SEQ ID NO: 1288844 - RNA, 17 nt, Human
cgauguggucacagcug

SEQ ID NO: 1288845 - RNA, 18 nt, Human
cgauguggucacagcugu

SEQ ID NO: 1288846 - RNA, 19 nt, Human
cgauguggucacagcugua

SEQ ID NO: 1288847 - RNA, 18 nt, Human
cgauuagacuggacagcu

SEQ ID NO: 1288848 - RNA, 18 nt, Human
cgauucccucucccaggc

SEQ ID NO: 1288849 - RNA, 14 nt, Human
cgauuugucccagg

SEQ ID NO: 1288850 - RNA, 11 nt, Human
cgauuagacug

SEQ ID NO: 1288851 - RNA, 17 nt, Human
cgauucccucucccagg

SEQ ID NO: 1288852 - RNA, 15 nt, Human
cgcaaagagagauuu

SEQ ID NO: 1288853 - RNA, 16 nt, Human
cgcaaagagagauuuu

SEQ ID NO: 1288854 - RNA, 13 nt, Human
cgcaacccgugcc

SEQ ID NO: 1288855 - RNA, 14 nt, Human
cgcaacccgugcca

SEQ ID NO: 1288856 - RNA, 19 nt, Human
cgcaacccgugccaagucc

SEQ ID NO: 1288857 - RNA, 22 nt, Human
cgcaacccgugccaaguccagg

SEQ ID NO: 1288858 - RNA, 14 nt, Human
cgcaccauucugac

SEQ ID NO: 1288859 - RNA, 15 nt, Human
cgcaccauucugacu

SEQ ID NO: 1288860 - RNA, 21 nt, Human
ccuuguuucucuuccuuucuu

SEQ ID NO: 1288861 - RNA, 17 nt, Human
ccuuguuguuucuugcc

SEQ ID NO: 1288862 - RNA, 19 nt, Human
ccuuguuuacacauacccu

SEQ ID NO: 1288863 - RNA, 16 nt, Human
ccuuguuacuucugag

SEQ ID NO: 1288864 - RNA, 18 nt, Human
ccuuguuacuucugaggu

SEQ ID NO: 1288865 - RNA, 19 nt, Human
ccuuguuacuucugaggua

SEQ ID NO: 1288866 - RNA, 21 nt, Human
ccuuguucugauaaugaaaau

SEQ ID NO: 1288867 - RNA, 11 nt, Human
ccuuguucugu

SEQ ID NO: 1288868 - RNA, 15 nt, Human
ccuugucacgccaga

SEQ ID NO: 1288869 - RNA, 18 nt, Human
ccuugucacgccagacuu

SEQ ID NO: 1288870 - RNA, 16 nt, Human
ccuugucacugguaga

SEQ ID NO: 1288871 - RNA, 14 nt, Human
ccuuguccccauga

SEQ ID NO: 1288872 - RNA, 14 nt, Human
ccuuguccuuuccc

SEQ ID NO: 1288873 - RNA, 16 nt, Human
ccuuugaccugccucc

SEQ ID NO: 1288874 - RNA, 17 nt, Human
ccuuucggauccaggga

SEQ ID NO: 1288875 - RNA, 21 nt, Human
ccuuucggauccagggaggcu

SEQ ID NO: 1288876 - RNA, 14 nt, Human
ccuuucuagagcac

SEQ ID NO: 1288877 - RNA, 19 nt, Human
ccuuucuagagcacugcca

SEQ ID NO: 1288878 - RNA, 15 nt, Human
ccuuucuagccuggc

SEQ ID NO: 1288879 - RNA, 15 nt, Human
ccuuucuaguugaaa

SEQ ID NO: 1288880 - RNA, 14 nt, Human
ccuuucuaguugaa

SEQ ID NO: 1288881 - RNA, 18 nt, Human
ccuuucuaucguucucuc

SEQ ID NO: 1288882 - RNA, 19 nt, Human
ccuuggggcugaugcaguu

SEQ ID NO: 1288883 - RNA, 11 nt, Human
ccuuggggguc

SEQ ID NO: 1288884 - RNA, 20 nt, Human
ccuuggggguccuccuccag

SEQ ID NO: 1288885 - RNA, 22 nt, Human
ccuuggggguccuccuccaggg

SEQ ID NO: 1288886 - RNA, 21 nt, Human
ccuuggggguccuccuccagg

SEQ ID NO: 1288887 - RNA, 18 nt, Human
ccuuggguuagaccuaca

SEQ ID NO: 1288888 - RNA, 20 nt, Human
ccuuggguuagaccuacagg

SEQ ID NO: 1288889 - RNA, 23 nt, Human
ccuugggcccacaccuccuuccc

SEQ ID NO: 1288890 - RNA, 12 nt, Human
ccuugggcccuu

SEQ ID NO: 1288891 - RNA, 14 nt, Human
ccuugggcccuuug

SEQ ID NO: 1288892 - RNA, 17 nt, Human
ccuugggcccuuugagu

SEQ ID NO: 1288893 - RNA, 18 nt, Human
ccuuggggauucuuccau

SEQ ID NO: 1288894 - RNA, 22 nt, Human
ccuuggggauucuuccaucuga

SEQ ID NO: 1288895 - RNA, 23 nt, Human
ccuugggccagaaguaccagacu

SEQ ID NO: 1288896 - RNA, 22 nt, Human
ccuuggguuagaccuacagggg

SEQ ID NO: 1288897 - RNA, 20 nt, Human
ccuuggugauuccgcaguga

SEQ ID NO: 1288898 - RNA, 12 nt, Human
ccuugggacccc

SEQ ID NO: 1288899 - RNA, 22 nt, Human
ccuugggccagaaguaccagac

SEQ ID NO: 1288900 - RNA, 14 nt, Human
ccuugagugggguu

SEQ ID NO: 1288901 - RNA, 22 nt, Human
ccuugagugggguuaucucugu

SEQ ID NO: 1288902 - RNA, 23 nt, Human
ccuugagugggguuaucucugug

SEQ ID NO: 1288903 - RNA, 23 nt, Human
ccuugaugauugacaacacccau

SEQ ID NO: 1288904 - RNA, 20 nt, Human
ccuugaguaguuuuuaucug

SEQ ID NO: 1288905 - RNA, 18 nt, Human
ccuugauugguguugcca

SEQ ID NO: 1288906 - RNA, 21 nt, Human
ccuugauuuaucacacaaagc

SEQ ID NO: 1288907 - RNA, 20 nt, Human
ccuugauuuuagccuucucu

SEQ ID NO: 1288908 - RNA, 21 nt, Human
ccuugauuuuagccuucucug

SEQ ID NO: 1288909 - RNA, 22 nt, Human
ccuugauuuuagccuucucugu

SEQ ID NO: 1288910 - RNA, 13 nt, Human
ccuugaacuagga

SEQ ID NO: 1288911 - RNA, 21 nt, Human
ccuugaaaauaagaauagaaa

SEQ ID NO: 1288912 - RNA, 13 nt, Human
ccuucuuucuacc

SEQ ID NO: 1288913 - RNA, 18 nt, Human
ccuugaagaacugcaggc

SEQ ID NO: 1288914 - RNA, 21 nt, Human
ccuugaagaacugcaggcccu

SEQ ID NO: 1288915 - RNA, 22 nt, Human
ccuugaagaacugcaggcccug

SEQ ID NO: 1288916 - RNA, 23 nt, Human
ccuugaagaacugcaggcccugg

SEQ ID NO: 1288917 - RNA, 14 nt, Human
ccuugaagguauau

SEQ ID NO: 1288918 - RNA, 13 nt, Human
ccuugaaggacua

SEQ ID NO: 1288919 - RNA, 18 nt, Human
ccuugaaggacuaauaga

SEQ ID NO: 1288920 - RNA, 17 nt, Human
ccuugaggucucagccc

SEQ ID NO: 1288921 - RNA, 14 nt, Human
ccuugaggucucag

SEQ ID NO: 1288922 - RNA, 19 nt, Human
ccuugaguaguuuuuaucu

SEQ ID NO: 1288923 - RNA, 17 nt, Human
ccuugagggcaagagcc

SEQ ID NO: 1288924 - RNA, 19 nt, Human
ccuucuauacccacccaga

SEQ ID NO: 1288925 - RNA, 20 nt, Human
ccuucuauacccacccagaa

SEQ ID NO: 1288926 - RNA, 18 nt, Human
ccuucuauacccacccag

SEQ ID NO: 1288927 - RNA, 16 nt, Human
ccuucggccuccaucc

SEQ ID NO: 1288928 - RNA, 14 nt, Human
ccuucgggcugugc

SEQ ID NO: 1288929 - RNA, 14 nt, Human
ccuucuguggcuca

SEQ ID NO: 1288930 - RNA, 15 nt, Human
ccuucuauucuagcc

SEQ ID NO: 1288931 - RNA, 15 nt, Human
ccuucuauuggucuc

SEQ ID NO: 1288932 - RNA, 14 nt, Human
ccuucuauuugggg

SEQ ID NO: 1288933 - RNA, 20 nt, Human
ccuucucuacacucuuguaa

SEQ ID NO: 1288934 - RNA, 21 nt, Human
ccuucuguggcucacagaacc

SEQ ID NO: 1288935 - RNA, 20 nt, Human
ccuucagcacuuuagaauau

SEQ ID NO: 1288936 - RNA, 12 nt, Human
ccuucagccuga

SEQ ID NO: 1288937 - RNA, 13 nt, Human
ccuucagagagca

SEQ ID NO: 1288938 - RNA, 15 nt, Human
ccuucagagagcagu

SEQ ID NO: 1288939 - RNA, 16 nt, Human
ccuucagagagcagug

SEQ ID NO: 1288940 - RNA, 19 nt, Human
ccuucagagagcagugcuu

SEQ ID NO: 1288941 - RNA, 20 nt, Human
ccuucagagagcagugcuuu

SEQ ID NO: 1288942 - RNA, 22 nt, Human
ccuucagagagcagugcuuuug

SEQ ID NO: 1288943 - RNA, 23 nt, Human
ccuucagagagcagugcuuuugg

SEQ ID NO: 1288944 - RNA, 14 nt, Human
ccuucacuuaggaa

SEQ ID NO: 1288945 - RNA, 19 nt, Human
ccuucacugucaccacccu

SEQ ID NO: 1288946 - RNA, 22 nt, Human
ccuuagacagaggcccucaagu

SEQ ID NO: 1288947 - RNA, 15 nt, Human
ccuuccucugagccu

SEQ ID NO: 1288948 - RNA, 16 nt, Human
ccuuccucugagccuu

SEQ ID NO: 1288949 - RNA, 21 nt, Human
ccuuccucuccacugccuucg

SEQ ID NO: 1288950 - RNA, 20 nt, Human
ccuuccucugagccuuggga

SEQ ID NO: 1288951 - RNA, 13 nt, Human
ccuuccucugagg

SEQ ID NO: 1288952 - RNA, 14 nt, Human
ccuuccucugaggc

SEQ ID NO: 1288953 - RNA, 20 nt, Human
ccuucggccuccauccugag

SEQ ID NO: 1288954 - RNA, 14 nt, Human
ccuucggccuccau

SEQ ID NO: 1288955 - RNA, 19 nt, Human
ccuucgcuucuugccucug

SEQ ID NO: 1288956 - RNA, 20 nt, Human
ccuucgcuucuugccucugu

SEQ ID NO: 1288957 - RNA, 21 nt, Human
ccuucgcuucuugccucugug

SEQ ID NO: 1288958 - RNA, 23 nt, Human
ccuucgcuucuugccucugugcu

SEQ ID NO: 1288959 - RNA, 15 nt, Human
ccuucgauacaccgg

SEQ ID NO: 1288960 - RNA, 16 nt, Human
ccuucgcuucuugccu

SEQ ID NO: 1288961 - RNA, 17 nt, Human
ccuucgcuucuugccuc

SEQ ID NO: 1288962 - RNA, 18 nt, Human
ccuucgcuucuugccucu

SEQ ID NO: 1288963 - RNA, 19 nt, Human
ccuuccuuuuacuuuucuu

SEQ ID NO: 1288964 - RNA, 17 nt, Human
ccuuaagagucauccag

SEQ ID NO: 1288965 - RNA, 22 nt, Human
ccuuaagaccuacuguucuaaa

SEQ ID NO: 1288966 - RNA, 16 nt, Human
ccuuaacugcauccag

SEQ ID NO: 1288967 - RNA, 13 nt, Human
ccuuaaggcucuu

SEQ ID NO: 1288968 - RNA, 23 nt, Human
ccuuaagaccuacuguucuaaag

SEQ ID NO: 1288969 - RNA, 16 nt, Human
ccuuaaggcucuuuug

SEQ ID NO: 1288970 - RNA, 18 nt, Human
ccuuaaggcucuuuugua

SEQ ID NO: 1288971 - RNA, 12 nt, Human
ccuuaagucaga

SEQ ID NO: 1288972 - RNA, 23 nt, Human
ccuuaaucagguccucagagaau

SEQ ID NO: 1288973 - RNA, 16 nt, Human
ccuuaauuuauuauua

SEQ ID NO: 1288974 - RNA, 14 nt, Human
ccuuaaaggggaga

SEQ ID NO: 1288975 - RNA, 16 nt, Human
ccuuaacaguuguauu

SEQ ID NO: 1288976 - RNA, 17 nt, Human
ccuuaacaguuguauuu

SEQ ID NO: 1288977 - RNA, 20 nt, Human
ccuuaaacaguugcacagca

SEQ ID NO: 1288978 - RNA, 19 nt, Human
ccuuaaacaguugcacagc

SEQ ID NO: 1288979 - RNA, 20 nt, Human
ccuuaaacaaaaauuaaaau

SEQ ID NO: 1288980 - RNA, 13 nt, Human
ccuguuuuucaca

SEQ ID NO: 1288981 - RNA, 16 nt, Human
ccuguuuuucacauuu

SEQ ID NO: 1288982 - RNA, 20 nt, Human
ccuguuuuucacauuuuccu

SEQ ID NO: 1288983 - RNA, 17 nt, Human
ccuuaccacugcucuga

SEQ ID NO: 1288984 - RNA, 22 nt, Human
ccuuacaaguuagaaaacauaa

SEQ ID NO: 1288985 - RNA, 17 nt, Human
ccuuacaguaggagccc

SEQ ID NO: 1288986 - RNA, 21 nt, Human
ccuuacaguaggagcccagcu

SEQ ID NO: 1288987 - RNA, 20 nt, Human
ccuuaccacugcucugauga

SEQ ID NO: 1288988 - RNA, 14 nt, Human
ccuuaccuuuuuau

SEQ ID NO: 1288989 - RNA, 16 nt, Human
ccuuacucccaggcac

SEQ ID NO: 1288990 - RNA, 12 nt, Human
ccuuacuccugu

SEQ ID NO: 1288991 - RNA, 13 nt, Human
ccuuacuccugug

SEQ ID NO: 1288992 - RNA, 14 nt, Human
ccuuacuccugugg

SEQ ID NO: 1288993 - RNA, 15 nt, Human
ccuuacuccuguggg

SEQ ID NO: 1288994 - RNA, 19 nt, Human
ccuuacuccugugggagcc

SEQ ID NO: 1288995 - RNA, 20 nt, Human
ccuuacuccugugggagccu

SEQ ID NO: 1288996 - RNA, 21 nt, Human
ccuuacuccugugggagccuc

SEQ ID NO: 1288997 - RNA, 16 nt, Human
ccuuacucuucuugaa

SEQ ID NO: 1288998 - RNA, 17 nt, Human
ccuuacucuucuugaaa

SEQ ID NO: 1288999 - RNA, 22 nt, Human
ccuuacucuucuugaaauuuua

SEQ ID NO: 1289000 - RNA, 22 nt, Human
ccuuacuccugugggagccucg

SEQ ID NO: 1289001 - RNA, 15 nt, Human
ccuuagacagaggcc

SEQ ID NO: 1289002 - RNA, 17 nt, Human
ccuuagacagaggcccu

SEQ ID NO: 1289003 - RNA, 20 nt, Human
ccuuagacagaggcccucaa

SEQ ID NO: 1289004 - RNA, 21 nt, Human
ccuuagacagaggcccucaag

SEQ ID NO: 1289005 - RNA, 15 nt, Human
ccuguuuaagagaca

SEQ ID NO: 1289006 - RNA, 12 nt, Human
ccuguuuaagag

SEQ ID NO: 1289007 - RNA, 14 nt, Human
ccuguguuucuugc

SEQ ID NO: 1289008 - RNA, 18 nt, Human
ccuguguuucuugccuca

SEQ ID NO: 1289009 - RNA, 16 nt, Human
ccuguguguuaagcuc

SEQ ID NO: 1289010 - RNA, 20 nt, Human
ccuguguguuaagcucugcu

SEQ ID NO: 1289011 - RNA, 17 nt, Human
ccuguguguuaagcucu

SEQ ID NO: 1289012 - RNA, 19 nt, Human
ccuguguucuuccuggccg

SEQ ID NO: 1289013 - RNA, 20 nt, Human
ccuguguucuuccuggccgc

SEQ ID NO: 1289014 - RNA, 16 nt, Human
ccuguguugucucuag

SEQ ID NO: 1289015 - RNA, 20 nt, Human
ccuguguugucucuagagca

SEQ ID NO: 1289016 - RNA, 22 nt, Human
ccuguguugucucuagagcagg

SEQ ID NO: 1289017 - RNA, 19 nt, Human
ccuguguuucuugccucau

SEQ ID NO: 1289018 - RNA, 17 nt, Human
ccuguuucccaggccca

SEQ ID NO: 1289019 - RNA, 15 nt, Human
ccuguuucccaggcc

SEQ ID NO: 1289020 - RNA, 14 nt, Human
ccuguuucuggcac

SEQ ID NO: 1289021 - RNA, 12 nt, Human
ccuguuucuucc

SEQ ID NO: 1289022 - RNA, 21 nt, Human
ccuguuuauucauaugcauau

SEQ ID NO: 1289023 - RNA, 18 nt, Human
ccuguuucagaggcucag

SEQ ID NO: 1289024 - RNA, 14 nt, Human
ccuguuuaaaaaac

SEQ ID NO: 1289025 - RNA, 16 nt, Human
ccuguuuaaaaaacca

SEQ ID NO: 1289026 - RNA, 19 nt, Human
ccuguuugaggaaagcaag

SEQ ID NO: 1289027 - RNA, 15 nt, Human
ccuguuuggccucuc

SEQ ID NO: 1289028 - RNA, 16 nt, Human
ccuguuuggccucucu

SEQ ID NO: 1289029 - RNA, 21 nt, Human
ccuguuuggccucucuauccu

SEQ ID NO: 1289030 - RNA, 20 nt, Human
ccuguuuggccucucuaucc

SEQ ID NO: 1289031 - RNA, 23 nt, Human
ccuguuuucccacgaggaaucug

SEQ ID NO: 1289032 - RNA, 13 nt, Human
ccuguuuuccccc

SEQ ID NO: 1289033 - RNA, 19 nt, Human
ccuguguccaugcgcucag

SEQ ID NO: 1289034 - RNA, 13 nt, Human
ccuguguagcugu

SEQ ID NO: 1289035 - RNA, 14 nt, Human
ccuguguagcugug

SEQ ID NO: 1289036 - RNA, 15 nt, Human
ccuguguagcuguga

SEQ ID NO: 1289037 - RNA, 17 nt, Human
ccuguguagcugugacc

SEQ ID NO: 1289038 - RNA, 19 nt, Human
ccuguguagcugugaccug

SEQ ID NO: 1289039 - RNA, 23 nt, Human
ccuguguagcugugaccugcuga

SEQ ID NO: 1289040 - RNA, 20 nt, Human
ccuguguagcugugaccugc

SEQ ID NO: 1289041 - RNA, 21 nt, Human
ccuguguagcugugaccugcu

SEQ ID NO: 1289042 - RNA, 22 nt, Human
ccuguguagcugugaccugcug

SEQ ID NO: 1289043 - RNA, 13 nt, Human
ccuguguccaugc

SEQ ID NO: 1289044 - RNA, 14 nt, Human
ccuguguggacagg

SEQ ID NO: 1289045 - RNA, 15 nt, Human
ccuguguggacagga

SEQ ID NO: 1289046 - RNA, 17 nt, Human
ccuguguggacaggacu

SEQ ID NO: 1289047 - RNA, 12 nt, Human
ccuguguggaga

SEQ ID NO: 1289048 - RNA, 13 nt, Human
ccuguguggagag

SEQ ID NO: 1289049 - RNA, 14 nt, Human
ccuguguggagagg

SEQ ID NO: 1289050 - RNA, 15 nt, Human
ccuguguggagaggg

SEQ ID NO: 1289051 - RNA, 16 nt, Human
ccuguguggagaggga

SEQ ID NO: 1289052 - RNA, 19 nt, Human
ccuguguggagagggaaug

SEQ ID NO: 1289053 - RNA, 23 nt, Human
ccuguguggagagggaaugugaa

SEQ ID NO: 1289054 - RNA, 21 nt, Human
ccuguguggagagggaaugug

SEQ ID NO: 1289055 - RNA, 22 nt, Human
ccuguguggagagggaauguga

SEQ ID NO: 1289056 - RNA, 20 nt, Human
ccuguguguccaaaacugcc

SEQ ID NO: 1289057 - RNA, 21 nt, Human
ccuguguguccaaaacugccu

SEQ ID NO: 1289058 - RNA, 17 nt, Human
ccugcaagucaguccag

SEQ ID NO: 1289059 - RNA, 17 nt, Human
ccugcaacucaaggacu

SEQ ID NO: 1289060 - RNA, 18 nt, Human
ccugcaacucaaggacuu

SEQ ID NO: 1289061 - RNA, 20 nt, Human
ccugcaacucaaggacuuug

SEQ ID NO: 1289062 - RNA, 15 nt, Human
ccugcagggccaagc

SEQ ID NO: 1289063 - RNA, 18 nt, Human
ccugcaguacuuuaccuc

SEQ ID NO: 1289064 - RNA, 20 nt, Human
ccugcaguacuuuaccuccu

SEQ ID NO: 1289065 - RNA, 17 nt, Human
ccugcacuaacagagug

SEQ ID NO: 1289066 - RNA, 22 nt, Human
ccugcaggcaggaacaaacagg

SEQ ID NO: 1289067 - RNA, 23 nt, Human
ccugcaggcaggaacaaacaggg

SEQ ID NO: 1289068 - RNA, 22 nt, Human
ccugauuuuuuuuccuuuuaau

SEQ ID NO: 1289069 - RNA, 17 nt, Human
ccugcaaaaggacucuc

SEQ ID NO: 1289070 - RNA, 19 nt, Human
ccugcaaaaggacucucag

SEQ ID NO: 1289071 - RNA, 14 nt, Human
ccugccagccccug

SEQ ID NO: 1289072 - RNA, 11 nt, Human
ccugccaggag

SEQ ID NO: 1289073 - RNA, 21 nt, Human
ccugccaggagcuuuggaccu

SEQ ID NO: 1289074 - RNA, 13 nt, Human
ccugccaggagga

SEQ ID NO: 1289075 - RNA, 12 nt, Human
ccugccaggagg

SEQ ID NO: 1289076 - RNA, 13 nt, Human
ccugcccccaccc

SEQ ID NO: 1289077 - RNA, 14 nt, Human
ccugcccccacccc

SEQ ID NO: 1289078 - RNA, 18 nt, Human
ccugcccccaccccauuc

SEQ ID NO: 1289079 - RNA, 19 nt, Human
ccugcccccaccccauucc

SEQ ID NO: 1289080 - RNA, 13 nt, Human
ccugccagccccu

SEQ ID NO: 1289081 - RNA, 16 nt, Human
ccugccagccccugcc

SEQ ID NO: 1289082 - RNA, 12 nt, Human
ccugccagcugc

SEQ ID NO: 1289083 - RNA, 13 nt, Human
ccugccagcugca

SEQ ID NO: 1289084 - RNA, 14 nt, Human
ccugccagcugcac

SEQ ID NO: 1289085 - RNA, 16 nt, Human
ccugccagcugcacug

SEQ ID NO: 1289086 - RNA, 17 nt, Human
ccugccagcugcacuga

SEQ ID NO: 1289087 - RNA, 18 nt, Human
ccugccagcugcacugau

SEQ ID NO: 1289088 - RNA, 23 nt, Human
ccugccagcugcacugaugcugc

SEQ ID NO: 1289089 - RNA, 22 nt, Human
ccugcauggcauccuccagccc

SEQ ID NO: 1289090 - RNA, 22 nt, Human
ccugcauaauguuucuggauuu

SEQ ID NO: 1289091 - RNA, 22 nt, Human
ccugcauccauucuccugagga

SEQ ID NO: 1289092 - RNA, 23 nt, Human
ccugcauccauucuccugaggau

SEQ ID NO: 1289093 - RNA, 15 nt, Human
ccugcauggcauccu

SEQ ID NO: 1289094 - RNA, 16 nt, Human
ccugcauggcauccuc

SEQ ID NO: 1289095 - RNA, 18 nt, Human
ccugcauggcauccucca

SEQ ID NO: 1289096 - RNA, 19 nt, Human
ccugcauggcauccuccag

SEQ ID NO: 1289097 - RNA, 20 nt, Human
ccugcauggcauccuccagc

SEQ ID NO: 1289098 - RNA, 21 nt, Human
ccugcauggcauccuccagcc

SEQ ID NO: 1289099 - RNA, 23 nt, Human
ccugcauggcauccuccagcccc

SEQ ID NO: 1289100 - RNA, 13 nt, Human
ccugagccagggu

SEQ ID NO: 1289101 - RNA, 15 nt, Human
ccugagccagggucu

SEQ ID NO: 1289102 - RNA, 18 nt, Human
ccugagccagggucucca

SEQ ID NO: 1289103 - RNA, 19 nt, Human
ccugagccagggucuccag

SEQ ID NO: 1289104 - RNA, 20 nt, Human
ccugagccagggucuccaga

SEQ ID NO: 1289105 - RNA, 23 nt, Human
ccugagccagggucuccagaaag

SEQ ID NO: 1289106 - RNA, 12 nt, Human
ccugagcacugc

SEQ ID NO: 1289107 - RNA, 14 nt, Human
ccugagcacugcca

SEQ ID NO: 1289108 - RNA, 15 nt, Human
ccugagcacugccag

SEQ ID NO: 1289109 - RNA, 16 nt, Human
ccugagcacugccagg

SEQ ID NO: 1289110 - RNA, 17 nt, Human
ccugagcacugccagga

SEQ ID NO: 1289111 - RNA, 18 nt, Human
ccugagcacugccaggag

SEQ ID NO: 1289112 - RNA, 19 nt, Human
ccugagcacugccaggagg

SEQ ID NO: 1289113 - RNA, 20 nt, Human
ccugagcacugccaggaggg

SEQ ID NO: 1289114 - RNA, 14 nt, Human
ccugagcaguccuu

SEQ ID NO: 1289115 - RNA, 18 nt, Human
ccugagcaguccuuggcc

SEQ ID NO: 1289116 - RNA, 19 nt, Human
ccugagcaguccuuggccu

SEQ ID NO: 1289117 - RNA, 22 nt, Human
ccugagcaguccuuggccugcu

SEQ ID NO: 1289118 - RNA, 15 nt, Human
ccugagcccagggag

SEQ ID NO: 1289119 - RNA, 16 nt, Human
ccugagcccagggagg

SEQ ID NO: 1289120 - RNA, 17 nt, Human
ccugagcccagggaggc

SEQ ID NO: 1289121 - RNA, 18 nt, Human
ccugagcccagggaggcc

SEQ ID NO: 1289122 - RNA, 19 nt, Human
ccugagcccagggaggccg

SEQ ID NO: 1289123 - RNA, 15 nt, Human
ccugagccccaggga

SEQ ID NO: 1289124 - RNA, 17 nt, Human
ccugagccccagggaga

SEQ ID NO: 1289125 - RNA, 11 nt, Human
ccugagcccca

SEQ ID NO: 1289126 - RNA, 21 nt, Human
ccugagccagggucuccagaa

SEQ ID NO: 1289127 - RNA, 12 nt, Human
ccugagcccagg

SEQ ID NO: 1289128 - RNA, 13 nt, Human
ccugagcccaggg

SEQ ID NO: 1289129 - RNA, 14 nt, Human
ccugagcccaggga

SEQ ID NO: 1289130 - RNA, 21 nt, Human
ccugaggagucugagguccug

SEQ ID NO: 1289131 - RNA, 19 nt, Human
ccugaggacugauuucaga

SEQ ID NO: 1289132 - RNA, 23 nt, Human
ccugaggacugauuucagaguga

SEQ ID NO: 1289133 - RNA, 13 nt, Human
ccugaggagucug

SEQ ID NO: 1289134 - RNA, 14 nt, Human
ccugaggagucuga

SEQ ID NO: 1289135 - RNA, 16 nt, Human
ccugaggagucugagg

SEQ ID NO: 1289136 - RNA, 17 nt, Human
ccugaggagucugaggu

SEQ ID NO: 1289137 - RNA, 18 nt, Human
ccugaggagucugagguc

SEQ ID NO: 1289138 - RNA, 19 nt, Human
ccugaggagucugaggucc

SEQ ID NO: 1289139 - RNA, 20 nt, Human
ccugaggagucugagguccu

SEQ ID NO: 1289140 - RNA, 22 nt, Human
ccugaggagucugagguccuga

SEQ ID NO: 1289141 - RNA, 16 nt, Human
ccugagccccagggag

SEQ ID NO: 1289142 - RNA, 18 nt, Human
ccugaggaacccuuacag

SEQ ID NO: 1289143 - RNA, 13 nt, Human
ccugaggaacugu

SEQ ID NO: 1289144 - RNA, 19 nt, Human
ccugaggacagaugccucc

SEQ ID NO: 1289145 - RNA, 16 nt, Human
ccugacagaaggacuc

SEQ ID NO: 1289146 - RNA, 14 nt, Human
ccugacacugcugg

SEQ ID NO: 1289147 - RNA, 15 nt, Human
ccugacacugcugga

SEQ ID NO: 1289148 - RNA, 13 nt, Human
ccugacacuuuaa

SEQ ID NO: 1289149 - RNA, 14 nt, Human
ccugacacuuuaau

SEQ ID NO: 1289150 - RNA, 15 nt, Human
ccugacacuuuaauu

SEQ ID NO: 1289151 - RNA, 18 nt, Human
ccugacacaccaggcgcu

SEQ ID NO: 1289152 - RNA, 14 nt, Human
ccugacacacuaac

SEQ ID NO: 1289153 - RNA, 23 nt, Human
ccugacacacuaaccaagcugag

SEQ ID NO: 1289154 - RNA, 20 nt, Human
ccugacacacuaaccaagcu

SEQ ID NO: 1289155 - RNA, 13 nt, Human
ccugacacccuuc

SEQ ID NO: 1289156 - RNA, 14 nt, Human
ccugacacccuucu

SEQ ID NO: 1289157 - RNA, 18 nt, Human
ccugacacccuucuccca

SEQ ID NO: 1289158 - RNA, 23 nt, Human
ccugacacccuucucccacucuc

SEQ ID NO: 1289159 - RNA, 13 nt, Human
ccugacacucccu

SEQ ID NO: 1289160 - RNA, 12 nt, Human
ccugacacugca

SEQ ID NO: 1289161 - RNA, 18 nt, Human
ccugacauuccuugcuga

SEQ ID NO: 1289162 - RNA, 17 nt, Human
ccugacauuccuugcug

SEQ ID NO: 1289163 - RNA, 17 nt, Human
ccugacauguccuucug

SEQ ID NO: 1289164 - RNA, 14 nt, Human
ccugagcaacucuu

SEQ ID NO: 1289165 - RNA, 15 nt, Human
ccugagcaacucuug

SEQ ID NO: 1289166 - RNA, 18 nt, Human
ccugagcaacucuugauu

SEQ ID NO: 1289167 - RNA, 23 nt, Human
ccugagcaacucuugauuaucca

SEQ ID NO: 1289168 - RNA, 23 nt, Human
ccugaccaaacagccaacuagcc

SEQ ID NO: 1289169 - RNA, 22 nt, Human
ccugacaggugaggucuguucc

SEQ ID NO: 1289170 - RNA, 23 nt, Human
ccugacaggugaggucuguuccu

SEQ ID NO: 1289171 - RNA, 18 nt, Human
ccugacaucaaaaaaggc

SEQ ID NO: 1289172 - RNA, 19 nt, Human
ccugacaucaaaaaaggca

SEQ ID NO: 1289173 - RNA, 21 nt, Human
ccugacaucaaaaaaggcagu

SEQ ID NO: 1289174 - RNA, 13 nt, Human
ccucuccacacag

SEQ ID NO: 1289175 - RNA, 17 nt, Human
ccucuccacacagugcu

SEQ ID NO: 1289176 - RNA, 18 nt, Human
ccucuccacacagugcuc

SEQ ID NO: 1289177 - RNA, 23 nt, Human
ccucuccacacagugcucaaggc

SEQ ID NO: 1289178 - RNA, 22 nt, Human
ccucuccaccaucgucuucuug

SEQ ID NO: 1289179 - RNA, 18 nt, Human
ccugacaaccacuggucu

SEQ ID NO: 1289180 - RNA, 19 nt, Human
ccugacaaccacuggucug

SEQ ID NO: 1289181 - RNA, 14 nt, Human
ccugacacaccagg

SEQ ID NO: 1289182 - RNA, 15 nt, Human
ccugacacaccaggc

SEQ ID NO: 1289183 - RNA, 17 nt, Human
ccugacacaccaggcgc

SEQ ID NO: 1289184 - RNA, 20 nt, Human
ccuggugcacuggccccacc

SEQ ID NO: 1289185 - RNA, 14 nt, Human
ccuggugaucacgu

SEQ ID NO: 1289186 - RNA, 12 nt, Human
ccuggugccacc

SEQ ID NO: 1289187 - RNA, 19 nt, Human
ccuggugcacuggccccac

SEQ ID NO: 1289188 - RNA, 17 nt, Human
ccuggugcacuggcccc

SEQ ID NO: 1289189 - RNA, 13 nt, Human
ccuggugccaccu

SEQ ID NO: 1289190 - RNA, 13 nt, Human
ccugguccccucc

SEQ ID NO: 1289191 - RNA, 15 nt, Human
ccugguccccuccuu

SEQ ID NO: 1289192 - RNA, 23 nt, Human
ccuggugacaucagguuuuuccc

SEQ ID NO: 1289193 - RNA, 18 nt, Human
ccugguccccuccuuccc

SEQ ID NO: 1289194 - RNA, 15 nt, Human
ccuggucaccuagga

SEQ ID NO: 1289195 - RNA, 17 nt, Human
ccuggucaccuaggaag

SEQ ID NO: 1289196 - RNA, 21 nt, Human
ccuggucaccuaggaagccuc

SEQ ID NO: 1289197 - RNA, 21 nt, Human
ccuggucacaggacucugccu

SEQ ID NO: 1289198 - RNA, 18 nt, Human
ccugguauauccaaaagc

SEQ ID NO: 1289199 - RNA, 20 nt, Human
ccugguauauccaaaagcuu

SEQ ID NO: 1289200 - RNA, 22 nt, Human
ccuggucacaggacucugccuc

SEQ ID NO: 1289201 - RNA, 23 nt, Human
ccuggucacaggacucugccucc

SEQ ID NO: 1289202 - RNA, 14 nt, Human
ccuggguggcuacu

SEQ ID NO: 1289203 - RNA, 15 nt, Human
ccuggguggcuacuc

SEQ ID NO: 1289204 - RNA, 17 nt, Human
ccuggguggcuacucug

SEQ ID NO: 1289205 - RNA, 19 nt, Human
ccuggguggcuacucugug

SEQ ID NO: 1289206 - RNA, 20 nt, Human
ccuggguggcuacucugugc

SEQ ID NO: 1289207 - RNA, 21 nt, Human
ccuggguggcuacucugugcc

SEQ ID NO: 1289208 - RNA, 22 nt, Human
ccuggguggcuacucugugcca

SEQ ID NO: 1289209 - RNA, 23 nt, Human
ccuggguggcuacucugugccag

SEQ ID NO: 1289210 - RNA, 17 nt, Human
ccuggguugcagacagg

SEQ ID NO: 1289211 - RNA, 16 nt, Human
ccuggguugcagacag

SEQ ID NO: 1289212 - RNA, 19 nt, Human
ccuggguuugguguauggu

SEQ ID NO: 1289213 - RNA, 19 nt, Human
ccuggguuuuguauucucu

SEQ ID NO: 1289214 - RNA, 20 nt, Human
ccuggguuuuguauucucug

SEQ ID NO: 1289215 - RNA, 21 nt, Human
ccuggguuuuguauucucuga

SEQ ID NO: 1289216 - RNA, 22 nt, Human
ccuggguuuuguauucucugag

SEQ ID NO: 1289217 - RNA, 23 nt, Human
ccuggguuuuguauucucugagc

SEQ ID NO: 1289218 - RNA, 18 nt, Human
ccugguaauagcuguaaa

SEQ ID NO: 1289219 - RNA, 14 nt, Human
ccugguacccuccu

SEQ ID NO: 1289220 - RNA, 15 nt, Human
ccugguacccuccug

SEQ ID NO: 1289221 - RNA, 17 nt, Human
ccugguacccuccuggc

SEQ ID NO: 1289222 - RNA, 13 nt, Human
ccugguacucccu

SEQ ID NO: 1289223 - RNA, 20 nt, Human
ccugguacucccucucagga

SEQ ID NO: 1289224 - RNA, 17 nt, Human
ccugguagaauagauau

SEQ ID NO: 1289225 - RNA, 20 nt, Human
ccugguagaccacugccaua

SEQ ID NO: 1289226 - RNA, 18 nt, Human
ccugguagaccacugcca

SEQ ID NO: 1289227 - RNA, 12 nt, Human
ccugggcaggag

SEQ ID NO: 1289228 - RNA, 23 nt, Human
ccuggcuuuucacugcuggcugc

SEQ ID NO: 1289229 - RNA, 24 nt, Human
ccuggcuuuucacugcuggcugcc

SEQ ID NO: 1289230 - RNA, 20 nt, Human
ccuggcuuuucacugcuggc

SEQ ID NO: 1289231 - RNA, 21 nt, Human
ccuggcuuuucacugcuggcu

SEQ ID NO: 1289232 - RNA, 22 nt, Human
ccuggcuuuucacugcuggcug

SEQ ID NO: 1289233 - RNA, 20 nt, Human
ccuggcugggacguggcuca

SEQ ID NO: 1289234 - RNA, 21 nt, Human
ccuggcugggacguggcucag

SEQ ID NO: 1289235 - RNA, 22 nt, Human
ccuggcugggacguggcucagc

SEQ ID NO: 1289236 - RNA, 24 nt, Human
ccuggcugggacguggcucagcca

SEQ ID NO: 1289237 - RNA, 20 nt, Human
ccuggcuggcugagggcagu

SEQ ID NO: 1289238 - RNA, 16 nt, Human
ccuggcugucugaggc

SEQ ID NO: 1289239 - RNA, 15 nt, Human
ccuggcuucccaucc

SEQ ID NO: 1289240 - RNA, 19 nt, Human
ccuggcuucccauccccag

SEQ ID NO: 1289241 - RNA, 20 nt, Human
ccuggcuucccauccccagc

SEQ ID NO: 1289242 - RNA, 21 nt, Human
ccuggcuucccauccccagcg

SEQ ID NO: 1289243 - RNA, 22 nt, Human
ccuggcuucccauccccagcga

SEQ ID NO: 1289244 - RNA, 23 nt, Human
ccuggcuucccauccccagcgau

SEQ ID NO: 1289245 - RNA, 14 nt, Human
ccugggcaggaggg

SEQ ID NO: 1289246 - RNA, 18 nt, Human
ccuggggguucuuucuuc

SEQ ID NO: 1289247 - RNA, 15 nt, Human
ccugggggugccagg

SEQ ID NO: 1289248 - RNA, 16 nt, Human
ccugggggugccagga

SEQ ID NO: 1289249 - RNA, 14 nt, Human
ccugggggugccag

SEQ ID NO: 1289250 - RNA, 21 nt, Human
ccuggggguucuuucuuccuc

SEQ ID NO: 1289251 - RNA, 22 nt, Human
ccuggggguucuuucuuccucu

SEQ ID NO: 1289252 - RNA, 23 nt, Human
ccuggggguucuuucuuccucug

SEQ ID NO: 1289253 - RNA, 21 nt, Human
ccugggguauaaaacuuuccu

SEQ ID NO: 1289254 - RNA, 22 nt, Human
ccugggucccaggacccuggac

SEQ ID NO: 1289255 - RNA, 15 nt, Human
ccugggucccaggac

SEQ ID NO: 1289256 - RNA, 13 nt, Human
ccugggugacauu

SEQ ID NO: 1289257 - RNA, 14 nt, Human
ccugggugacauuu

SEQ ID NO: 1289258 - RNA, 15 nt, Human
ccugggugacauuug

SEQ ID NO: 1289259 - RNA, 22 nt, Human
ccuggaaggacauccauguucc

SEQ ID NO: 1289260 - RNA, 17 nt, Human
ccuggaagggagguggg

SEQ ID NO: 1289261 - RNA, 20 nt, Human
ccuggaaugaguugaggcca

SEQ ID NO: 1289262 - RNA, 16 nt, Human
ccuggacacucagacc

SEQ ID NO: 1289263 - RNA, 17 nt, Human
ccuggacacucagaccu

SEQ ID NO: 1289264 - RNA, 13 nt, Human
ccuggacagcugu

SEQ ID NO: 1289265 - RNA, 14 nt, Human
ccuggacagcugug

SEQ ID NO: 1289266 - RNA, 15 nt, Human
ccuggacagcugugc

SEQ ID NO: 1289267 - RNA, 16 nt, Human
ccuggacagcugugcc

SEQ ID NO: 1289268 - RNA, 17 nt, Human
ccuggacagcugugccu

SEQ ID NO: 1289269 - RNA, 20 nt, Human
ccuggacagcugugccucgc

SEQ ID NO: 1289270 - RNA, 18 nt, Human
ccuggacagcugugccuc

SEQ ID NO: 1289271 - RNA, 19 nt, Human
ccuggacagcugugccucg

SEQ ID NO: 1289272 - RNA, 18 nt, Human
ccuggagacugcccagcu

SEQ ID NO: 1289273 - RNA, 19 nt, Human
ccuggagacuuagggcacc

SEQ ID NO: 1289274 - RNA, 23 nt, Human
ccuggagacuuagggcaccaggg

SEQ ID NO: 1289275 - RNA, 13 nt, Human
ccuggagauccuc

SEQ ID NO: 1289276 - RNA, 15 nt, Human
ccuggagauccuccu

SEQ ID NO: 1289277 - RNA, 16 nt, Human
ccuggagauccuccug

SEQ ID NO: 1289278 - RNA, 17 nt, Human
ccuggagauccuccugc

SEQ ID NO: 1289279 - RNA, 18 nt, Human
ccuggagauccuccugca

SEQ ID NO: 1289280 - RNA, 19 nt, Human
ccuggagauccuccugcag

SEQ ID NO: 1289281 - RNA, 23 nt, Human
ccuggcacuaacguugagccccu

SEQ ID NO: 1289282 - RNA, 12 nt, Human
ccuggcagagau

SEQ ID NO: 1289283 - RNA, 19 nt, Human
ccuggcagagaugccuccc

SEQ ID NO: 1289284 - RNA, 12 nt, Human
ccuggccagaca

SEQ ID NO: 1289285 - RNA, 13 nt, Human
ccuggccagacac

SEQ ID NO: 1289286 - RNA, 14 nt, Human
ccuggccagacaca

SEQ ID NO: 1289287 - RNA, 15 nt, Human
ccuggccagacacag

SEQ ID NO: 1289288 - RNA, 16 nt, Human
ccuggccagacacagg

SEQ ID NO: 1289289 - RNA, 18 nt, Human
ccuggccagacacaggcc

SEQ ID NO: 1289290 - RNA, 19 nt, Human
ccuggccagacacaggccc

SEQ ID NO: 1289291 - RNA, 23 nt, Human
ccuggccagacacaggcccuccc

SEQ ID NO: 1289292 - RNA, 22 nt, Human
ccuggcagccgugccuucagcu

SEQ ID NO: 1289293 - RNA, 12 nt, Human
ccuggcagcucu

SEQ ID NO: 1289294 - RNA, 13 nt, Human
ccuggcagcucug

SEQ ID NO: 1289295 - RNA, 14 nt, Human
ccuggcagcucugg

SEQ ID NO: 1289296 - RNA, 15 nt, Human
ccuggcagcucugga

SEQ ID NO: 1289297 - RNA, 17 nt, Human
ccuggcagcucuggaca

SEQ ID NO: 1289298 - RNA, 19 nt, Human
ccuggcagcucuggacagc

SEQ ID NO: 1289299 - RNA, 20 nt, Human
ccuggcagcucuggacagcc

SEQ ID NO: 1289300 - RNA, 21 nt, Human
ccuggcagcucuggacagccc

SEQ ID NO: 1289301 - RNA, 23 nt, Human
ccuggcagcucuggacagcccca

SEQ ID NO: 1289302 - RNA, 17 nt, Human
ccuggcucccacaggcc

SEQ ID NO: 1289303 - RNA, 23 nt, Human
ccuggcucccacaggcccuuccu

SEQ ID NO: 1289304 - RNA, 18 nt, Human
ccuggcugcagccugcgc

SEQ ID NO: 1289305 - RNA, 20 nt, Human
ccuggcugcugaucgccuuc

SEQ ID NO: 1289306 - RNA, 21 nt, Human
ccuggcugcugaucgccuucc

SEQ ID NO: 1289307 - RNA, 23 nt, Human
ccuggcugcugaucgccuucccc

SEQ ID NO: 1289308 - RNA, 22 nt, Human
ccuggcugcugaucgccuuccc

SEQ ID NO: 1289309 - RNA, 13 nt, Human
ccuggcuggcuga

SEQ ID NO: 1289310 - RNA, 17 nt, Human
ccuggcuggcugagggc

SEQ ID NO: 1289311 - RNA, 18 nt, Human
ccuggcuggcugagggca

SEQ ID NO: 1289312 - RNA, 19 nt, Human
ccuggcuggcugagggcag

SEQ ID NO: 1289313 - RNA, 19 nt, Human
ccugguccccuccuuccca

SEQ ID NO: 1289314 - RNA, 22 nt, Human
ccugccucaccagcccuggcaa

SEQ ID NO: 1289315 - RNA, 12 nt, Human
ccugccuggagg

SEQ ID NO: 1289316 - RNA, 13 nt, Human
ccugccuggagga

SEQ ID NO: 1289317 - RNA, 19 nt, Human
ccugccuauuaucugucag

SEQ ID NO: 1289318 - RNA, 16 nt, Human
ccugccucaccacgga

SEQ ID NO: 1289319 - RNA, 14 nt, Human
ccugccuggaggac

SEQ ID NO: 1289320 - RNA, 17 nt, Human
ccugccuggaggaccug

SEQ ID NO: 1289321 - RNA, 19 nt, Human
ccugccuggaggaccugag

SEQ ID NO: 1289322 - RNA, 20 nt, Human
ccugccuggaggaccugagc

SEQ ID NO: 1289323 - RNA, 21 nt, Human
ccugccuggaggaccugagcc

SEQ ID NO: 1289324 - RNA, 22 nt, Human
ccugccuggaggaccugagccu

SEQ ID NO: 1289325 - RNA, 24 nt, Human
ccugccuggaggaccugagccugc

SEQ ID NO: 1289326 - RNA, 16 nt, Human
ccugccuuaucuugca

SEQ ID NO: 1289327 - RNA, 23 nt, Human
ccugccuggaggaccugagccug

SEQ ID NO: 1289328 - RNA, 13 nt, Human
ccugccggcuccu

SEQ ID NO: 1289329 - RNA, 14 nt, Human
ccugccccccagcc

SEQ ID NO: 1289330 - RNA, 23 nt, Human
ccugcgggugaacaaagcagcca

SEQ ID NO: 1289331 - RNA, 24 nt, Human
ccugcgggugaacaaagcagccac

SEQ ID NO: 1289332 - RNA, 20 nt, Human
ccugcggguggggcuugggg

SEQ ID NO: 1289333 - RNA, 21 nt, Human
ccugcggguggggcuuggggc

SEQ ID NO: 1289334 - RNA, 24 nt, Human
ccugcggguggggcuuggggcuca

SEQ ID NO: 1289335 - RNA, 23 nt, Human
ccugcgguagaugggagggaggc

SEQ ID NO: 1289336 - RNA, 18 nt, Human
ccugcgggucacaggagg

SEQ ID NO: 1289337 - RNA, 22 nt, Human
ccugcgggucacaggagggagg

SEQ ID NO: 1289338 - RNA, 20 nt, Human
ccugcggcccaauccaaggu

SEQ ID NO: 1289339 - RNA, 22 nt, Human
ccugccuuuuaguuccugugca

SEQ ID NO: 1289340 - RNA, 20 nt, Human
ccugccuuuuaguuccugug

SEQ ID NO: 1289341 - RNA, 13 nt, Human
ccugccuuuccau

SEQ ID NO: 1289342 - RNA, 16 nt, Human
ccugccuuuccaucca

SEQ ID NO: 1289343 - RNA, 15 nt, Human
ccugcgaaaaccccc

SEQ ID NO: 1289344 - RNA, 20 nt, Human
ccugcgccaccgcccagaga

SEQ ID NO: 1289345 - RNA, 14 nt, Human
ccugccuuccuccu

SEQ ID NO: 1289346 - RNA, 16 nt, Human
ccugccuuccuccugg

SEQ ID NO: 1289347 - RNA, 17 nt, Human
ccugccuuccuccuggg

SEQ ID NO: 1289348 - RNA, 22 nt, Human
ccugccuuccuccugggcccuc

SEQ ID NO: 1289349 - RNA, 19 nt, Human
ccugccuugaaaaagacau

SEQ ID NO: 1289350 - RNA, 19 nt, Human
ccugccuuggccucccaag

SEQ ID NO: 1289351 - RNA, 20 nt, Human
ccugcuuuuuauggccugug

SEQ ID NO: 1289352 - RNA, 12 nt, Human
ccugcuuuucaa

SEQ ID NO: 1289353 - RNA, 13 nt, Human
ccugcuuuucaau

SEQ ID NO: 1289354 - RNA, 23 nt, Human
ccuggaaaucaggguuaguauug

SEQ ID NO: 1289355 - RNA, 18 nt, Human
ccuggaacugucucucau

SEQ ID NO: 1289356 - RNA, 20 nt, Human
ccuggaacugucucucauga

SEQ ID NO: 1289357 - RNA, 13 nt, Human
ccuggaacuuggg

SEQ ID NO: 1289358 - RNA, 16 nt, Human
ccuggaacuuggggag

SEQ ID NO: 1289359 - RNA, 17 nt, Human
ccuggaacuuggggagu

SEQ ID NO: 1289360 - RNA, 16 nt, Human
ccuggaagagcagccc

SEQ ID NO: 1289361 - RNA, 17 nt, Human
ccuggaagagcagcccu

SEQ ID NO: 1289362 - RNA, 15 nt, Human
ccuggaagccagcuu

SEQ ID NO: 1289363 - RNA, 17 nt, Human
ccuggaagccagcuuuc

SEQ ID NO: 1289364 - RNA, 23 nt, Human
ccuggaagcauuuguuucuacuu

SEQ ID NO: 1289365 - RNA, 20 nt, Human
ccuggaaggacauccauguu

SEQ ID NO: 1289366 - RNA, 19 nt, Human
ccugcugugaaagaaguaa

SEQ ID NO: 1289367 - RNA, 15 nt, Human
ccugcugagucccag

SEQ ID NO: 1289368 - RNA, 24 nt, Human
ccugcugagcucugagaggcccug

SEQ ID NO: 1289369 - RNA, 22 nt, Human
ccugcugagcucugagaggccc

SEQ ID NO: 1289370 - RNA, 20 nt, Human
ccugcuuugggcugcccugg

SEQ ID NO: 1289371 - RNA, 21 nt, Human
ccugcuuugggcugcccuggu

SEQ ID NO: 1289372 - RNA, 22 nt, Human
ccugcuuugggcugcccuggug

SEQ ID NO: 1289373 - RNA, 23 nt, Human
ccugcuuugggcugcccuggugc

SEQ ID NO: 1289374 - RNA, 18 nt, Human
ccugcuuugggcuugggc

SEQ ID NO: 1289375 - RNA, 18 nt, Human
ccugcucguccccaagug

SEQ ID NO: 1289376 - RNA, 15 nt, Human
ccugcucgcucccug

SEQ ID NO: 1289377 - RNA, 12 nt, Human
ccugcucuccuc

SEQ ID NO: 1289378 - RNA, 15 nt, Human
ccugcucuccucuuc

SEQ ID NO: 1289379 - RNA, 16 nt, Human
ccugcucuccucuucu

SEQ ID NO: 1289380 - RNA, 16 nt, Human
ccugcucuccucuugc

SEQ ID NO: 1289381 - RNA, 18 nt, Human
ccugcucuccucuugcca

SEQ ID NO: 1289382 - RNA, 19 nt, Human
ccugcucuccucuugccac

SEQ ID NO: 1289383 - RNA, 21 nt, Human
ccugcucuccucuugccacug

SEQ ID NO: 1289384 - RNA, 22 nt, Human
ccugcucuccucuugccacugc

SEQ ID NO: 1289385 - RNA, 13 nt, Human
ccugcugaccugu

SEQ ID NO: 1289386 - RNA, 14 nt, Human
ccugcugaccugug

SEQ ID NO: 1289387 - RNA, 15 nt, Human
ccugcugaccugugc

SEQ ID NO: 1289388 - RNA, 16 nt, Human
ccugcugaccugugca

SEQ ID NO: 1289389 - RNA, 18 nt, Human
ccugcugaccugugcaca

SEQ ID NO: 1289390 - RNA, 11 nt, Human
ccugcugagcu

SEQ ID NO: 1289391 - RNA, 12 nt, Human
ccugcugagcuc

SEQ ID NO: 1289392 - RNA, 13 nt, Human
ccugcugagcucu

SEQ ID NO: 1289393 - RNA, 14 nt, Human
ccugcugagcucug

SEQ ID NO: 1289394 - RNA, 15 nt, Human
ccugcugagcucuga

SEQ ID NO: 1289395 - RNA, 16 nt, Human
ccugcugagcucugag

SEQ ID NO: 1289396 - RNA, 17 nt, Human
ccugcugagcucugaga

SEQ ID NO: 1289397 - RNA, 18 nt, Human
ccugcugagcucugagag

SEQ ID NO: 1289398 - RNA, 19 nt, Human
ccugcugagcucugagagg

SEQ ID NO: 1289399 - RNA, 20 nt, Human
ccugcugagcucugagaggc

SEQ ID NO: 1289400 - RNA, 21 nt, Human
ccugcugagcucugagaggcc

SEQ ID NO: 1289401 - RNA, 17 nt, Human
ccugcuaggccagagcc

SEQ ID NO: 1289402 - RNA, 18 nt, Human
ccugcuaggccagagccc

SEQ ID NO: 1289403 - RNA, 21 nt, Human
ccugcuaggccagagcccacu

SEQ ID NO: 1289404 - RNA, 19 nt, Human
ccugcuaggccagagccca

SEQ ID NO: 1289405 - RNA, 15 nt, Human
ccugcuauuugaagu

SEQ ID NO: 1289406 - RNA, 19 nt, Human
ccugcucaaucccugagga

SEQ ID NO: 1289407 - RNA, 19 nt, Human
ccugcucacgucaaaugca

SEQ ID NO: 1289408 - RNA, 16 nt, Human
ccugcucagcccugca

SEQ ID NO: 1289409 - RNA, 19 nt, Human
ccugcucagcccugcacca

SEQ ID NO: 1289410 - RNA, 20 nt, Human
ccugcucagcccugcaccau

SEQ ID NO: 1289411 - RNA, 13 nt, Human
ccugcucauccac

SEQ ID NO: 1289412 - RNA, 17 nt, Human
ccugcucauccacucua

SEQ ID NO: 1289413 - RNA, 11 nt, Human
ccugcuccaga

SEQ ID NO: 1289414 - RNA, 12 nt, Human
ccugcuccagac

SEQ ID NO: 1289415 - RNA, 13 nt, Human
ccugcuccagacc

SEQ ID NO: 1289416 - RNA, 14 nt, Human
ccugcuccagaccu

SEQ ID NO: 1289417 - RNA, 15 nt, Human
ccugcuccagaccug

SEQ ID NO: 1289418 - RNA, 20 nt, Human
ccucucaauauucaauaaag

SEQ ID NO: 1289419 - RNA, 18 nt, Human
ccucucaauauucaauaa

SEQ ID NO: 1289420 - RNA, 15 nt, Human
ccucucaacacccag

SEQ ID NO: 1289421 - RNA, 22 nt, Human
ccucucaauauucaauaaagcu

SEQ ID NO: 1289422 - RNA, 18 nt, Human
ccucucauuuagccuguc

SEQ ID NO: 1289423 - RNA, 19 nt, Human
ccucucauuuagccugucc

SEQ ID NO: 1289424 - RNA, 20 nt, Human
ccucucauuuagccuguccu

SEQ ID NO: 1289425 - RNA, 22 nt, Human
ccucuagcugugggggugaggg

SEQ ID NO: 1289426 - RNA, 15 nt, Human
ccucuagguccccau

SEQ ID NO: 1289427 - RNA, 22 nt, Human
ccucuagguccccauacuccua

SEQ ID NO: 1289428 - RNA, 22 nt, Human
ccucuaguuuuuucuuccuuuu

SEQ ID NO: 1289429 - RNA, 18 nt, Human
ccucuccacucaugugac

SEQ ID NO: 1289430 - RNA, 23 nt, Human
ccuccuuccucuuuuccuuccca

SEQ ID NO: 1289431 - RNA, 13 nt, Human
ccuccuuccucuu

SEQ ID NO: 1289432 - RNA, 14 nt, Human
ccuccugugcucag

SEQ ID NO: 1289433 - RNA, 15 nt, Human
ccuccugugcucagc

SEQ ID NO: 1289434 - RNA, 16 nt, Human
ccuccugugcucagcc

SEQ ID NO: 1289435 - RNA, 17 nt, Human
ccuccugugcucagccc

SEQ ID NO: 1289436 - RNA, 18 nt, Human
ccuccugugcucagcccu

SEQ ID NO: 1289437 - RNA, 19 nt, Human
ccuccugugcucagcccug

SEQ ID NO: 1289438 - RNA, 21 nt, Human
ccuccugugcucagcccugag

SEQ ID NO: 1289439 - RNA, 13 nt, Human
ccuccuucccucu

SEQ ID NO: 1289440 - RNA, 15 nt, Human
ccuccuucccucucu

SEQ ID NO: 1289441 - RNA, 20 nt, Human
ccuccuucccucucuggaga

SEQ ID NO: 1289442 - RNA, 13 nt, Human
ccuccuuccuaaa

SEQ ID NO: 1289443 - RNA, 16 nt, Human
ccucggggaugugucc

SEQ ID NO: 1289444 - RNA, 13 nt, Human
ccucguuuguguu

SEQ ID NO: 1289445 - RNA, 14 nt, Human
ccucguuuguguuc

SEQ ID NO: 1289446 - RNA, 15 nt, Human
ccucguuuguguucu

SEQ ID NO: 1289447 - RNA, 16 nt, Human
ccucuaacagcaccaa

SEQ ID NO: 1289448 - RNA, 14 nt, Human
ccucuaacagcacc

SEQ ID NO: 1289449 - RNA, 15 nt, Human
ccucuaacagcacca

SEQ ID NO: 1289450 - RNA, 22 nt, Human
ccucuagagaaauaagaucuuu

SEQ ID NO: 1289451 - RNA, 14 nt, Human
ccucuagagcagac

SEQ ID NO: 1289452 - RNA, 15 nt, Human
ccucuagagcagacu

SEQ ID NO: 1289453 - RNA, 18 nt, Human
ccucccugccccucccuu

SEQ ID NO: 1289454 - RNA, 21 nt, Human
ccucccugccccucccuucaa

SEQ ID NO: 1289455 - RNA, 22 nt, Human
ccucccugccccucccuucaac

SEQ ID NO: 1289456 - RNA, 24 nt, Human
ccucccugccccucccuucaacca

SEQ ID NO: 1289457 - RNA, 12 nt, Human
ccuccucagccu

SEQ ID NO: 1289458 - RNA, 13 nt, Human
ccuccucagccug

SEQ ID NO: 1289459 - RNA, 14 nt, Human
ccuccucagccuga

SEQ ID NO: 1289460 - RNA, 15 nt, Human
ccuccucagccugaa

SEQ ID NO: 1289461 - RNA, 22 nt, Human
ccuccucagccugaaccccagg

SEQ ID NO: 1289462 - RNA, 17 nt, Human
ccuccucaggcacacag

SEQ ID NO: 1289463 - RNA, 19 nt, Human
ccuccucaggcacacagcu

SEQ ID NO: 1289464 - RNA, 21 nt, Human
ccuccccuugggcccacaccu

SEQ ID NO: 1289465 - RNA, 13 nt, Human
ccucccccacuuu

SEQ ID NO: 1289466 - RNA, 12 nt, Human
ccuccccuggag

SEQ ID NO: 1289467 - RNA, 14 nt, Human
ccuccccuggaggg

SEQ ID NO: 1289468 - RNA, 22 nt, Human
ccuccccuggagggggaauggc

SEQ ID NO: 1289469 - RNA, 18 nt, Human
ccuccccuuaaaggggag

SEQ ID NO: 1289470 - RNA, 13 nt, Human
ccuccccuugccu

SEQ ID NO: 1289471 - RNA, 12 nt, Human
ccuccccuuggg

SEQ ID NO: 1289472 - RNA, 14 nt, Human
ccuccccuugccug

SEQ ID NO: 1289473 - RNA, 24 nt, Human
ccuccccuugggcccacaccuccu

SEQ ID NO: 1289474 - RNA, 15 nt, Human
ccuccugacacccuu

SEQ ID NO: 1289475 - RNA, 18 nt, Human
ccuccugacacccuucuc

SEQ ID NO: 1289476 - RNA, 19 nt, Human
ccuccugacacccuucucc

SEQ ID NO: 1289477 - RNA, 22 nt, Human
ccuccugacacccuucucccac

SEQ ID NO: 1289478 - RNA, 12 nt, Human
ccuccugagaaa

SEQ ID NO: 1289479 - RNA, 12 nt, Human
ccuccugccucu

SEQ ID NO: 1289480 - RNA, 13 nt, Human
ccuccugccucua

SEQ ID NO: 1289481 - RNA, 18 nt, Human
ccuccugccucuacuggg

SEQ ID NO: 1289482 - RNA, 11 nt, Human
ccuccugcuca

SEQ ID NO: 1289483 - RNA, 21 nt, Human
ccuccucaggcacacagcuac

SEQ ID NO: 1289484 - RNA, 13 nt, Human
ccuccucaucccg

SEQ ID NO: 1289485 - RNA, 20 nt, Human
ccuccucaucccguguucuc

SEQ ID NO: 1289486 - RNA, 23 nt, Human
ccuccucaucccguguucuccuu

SEQ ID NO: 1289487 - RNA, 12 nt, Human
ccuccucaugua

SEQ ID NO: 1289488 - RNA, 20 nt, Human
ccuccucauguacauacccu

SEQ ID NO: 1289489 - RNA, 21 nt, Human
ccuccucauguacauacccug

SEQ ID NO: 1289490 - RNA, 22 nt, Human
ccuccucugugaccaaugucuu

SEQ ID NO: 1289491 - RNA, 12 nt, Human
ccuccucuguga

SEQ ID NO: 1289492 - RNA, 12 nt, Human
ccuccaccucaa

SEQ ID NO: 1289493 - RNA, 13 nt, Human
ccuccaccuccug

SEQ ID NO: 1289494 - RNA, 18 nt, Human
ccuccaccgcagaaggaa

SEQ ID NO: 1289495 - RNA, 17 nt, Human
ccuccacguucugcuca

SEQ ID NO: 1289496 - RNA, 18 nt, Human
ccuccacguucugcucau

SEQ ID NO: 1289497 - RNA, 21 nt, Human
ccuccacguucugcucaucau

SEQ ID NO: 1289498 - RNA, 17 nt, Human
ccuccagagacaacagg

SEQ ID NO: 1289499 - RNA, 13 nt, Human
ccuccagccccug

SEQ ID NO: 1289500 - RNA, 12 nt, Human
ccuccagccccu

SEQ ID NO: 1289501 - RNA, 13 nt, Human
ccuccagggacag

SEQ ID NO: 1289502 - RNA, 15 nt, Human
ccuccagggacagca

SEQ ID NO: 1289503 - RNA, 18 nt, Human
ccuccaucuaaacugccc

SEQ ID NO: 1289504 - RNA, 14 nt, Human
ccuccaugcugccu

SEQ ID NO: 1289505 - RNA, 19 nt, Human
ccuccaugacugcacagua

SEQ ID NO: 1289506 - RNA, 15 nt, Human
ccuccaugcugccuc

SEQ ID NO: 1289507 - RNA, 16 nt, Human
ccuccaugcugccucc

SEQ ID NO: 1289508 - RNA, 18 nt, Human
ccucccaaagugcugaga

SEQ ID NO: 1289509 - RNA, 21 nt, Human
ccucaucuccccaucauuggu

SEQ ID NO: 1289510 - RNA, 17 nt, Human
ccucauccuccuucuuc

SEQ ID NO: 1289511 - RNA, 17 nt, Human
ccucaucucucugccca

SEQ ID NO: 1289512 - RNA, 19 nt, Human
ccucaucucucugcccaac

SEQ ID NO: 1289513 - RNA, 16 nt, Human
ccucaucaaggacacg

SEQ ID NO: 1289514 - RNA, 22 nt, Human
ccucauccaccccaucccuccc

SEQ ID NO: 1289515 - RNA, 14 nt, Human
ccucaucccgagca

SEQ ID NO: 1289516 - RNA, 20 nt, Human
ccucaucccgagcaccucca

SEQ ID NO: 1289517 - RNA, 20 nt, Human
ccucaucccguguucuccuu

SEQ ID NO: 1289518 - RNA, 23 nt, Human
ccuccaaucccaccaacccucag

SEQ ID NO: 1289519 - RNA, 17 nt, Human
ccucaucuucuucacca

SEQ ID NO: 1289520 - RNA, 13 nt, Human
ccucaugaaugua

SEQ ID NO: 1289521 - RNA, 13 nt, Human
ccuccacaccugc

SEQ ID NO: 1289522 - RNA, 14 nt, Human
ccuccacaccugcg

SEQ ID NO: 1289523 - RNA, 15 nt, Human
ccuccacaccugcgg

SEQ ID NO: 1289524 - RNA, 20 nt, Human
ccucaucucucugcccaacc

SEQ ID NO: 1289525 - RNA, 15 nt, Human
ccucaucugucccuc

SEQ ID NO: 1289526 - RNA, 17 nt, Human
ccucaucugucccuccg

SEQ ID NO: 1289527 - RNA, 15 nt, Human
ccucaucuucuucac

SEQ ID NO: 1289528 - RNA, 18 nt, Human
ccucaucuucuucaccau

SEQ ID NO: 1289529 - RNA, 17 nt, Human
ccuccacaccugcggcc

SEQ ID NO: 1289530 - RNA, 16 nt, Human
ccuccacaccugcggc

SEQ ID NO: 1289531 - RNA, 14 nt, Human
ccuccacauccucc

SEQ ID NO: 1289532 - RNA, 15 nt, Human
ccuccacauccucca

SEQ ID NO: 1289533 - RNA, 16 nt, Human
ccuccacauccuccac

SEQ ID NO: 1289534 - RNA, 20 nt, Human
ccuccacauccuccacguuc

SEQ ID NO: 1289535 - RNA, 20 nt, Human
ccuaugcaugguuucagcac

SEQ ID NO: 1289536 - RNA, 21 nt, Human
ccuaugcaugguuucagcacu

SEQ ID NO: 1289537 - RNA, 22 nt, Human
ccuaugcaugguuucagcacua

SEQ ID NO: 1289538 - RNA, 13 nt, Human
ccuauggagagcc

SEQ ID NO: 1289539 - RNA, 14 nt, Human
ccuauggagagccc

SEQ ID NO: 1289540 - RNA, 15 nt, Human
ccuauggagagcccu

SEQ ID NO: 1289541 - RNA, 16 nt, Human
ccuauggagagcccug

SEQ ID NO: 1289542 - RNA, 17 nt, Human
ccucagugacccuggcu

SEQ ID NO: 1289543 - RNA, 18 nt, Human
ccucagugacccuggcuc

SEQ ID NO: 1289544 - RNA, 19 nt, Human
ccucagugacccuggcucc

SEQ ID NO: 1289545 - RNA, 20 nt, Human
ccucagugacccuggcuccu

SEQ ID NO: 1289546 - RNA, 21 nt, Human
ccucagugacccuggcuccuu

SEQ ID NO: 1289547 - RNA, 19 nt, Human
ccuaugcagagguccacaa

SEQ ID NO: 1289548 - RNA, 11 nt, Human
ccuaugcaugg

SEQ ID NO: 1289549 - RNA, 14 nt, Human
ccuaugcaugguuu

SEQ ID NO: 1289550 - RNA, 18 nt, Human
ccuaugcaugguuucagc

SEQ ID NO: 1289551 - RNA, 19 nt, Human
ccuaugcaugguuucagca

SEQ ID NO: 1289552 - RNA, 23 nt, Human
ccuaugcaugguuucagcacuag

SEQ ID NO: 1289553 - RNA, 12 nt, Human
ccuaugcuuuga

SEQ ID NO: 1289554 - RNA, 17 nt, Human
ccucauagcccucaccc

SEQ ID NO: 1289555 - RNA, 18 nt, Human
ccucauagcccucacccu

SEQ ID NO: 1289556 - RNA, 21 nt, Human
ccucauagcccucacccuggg

SEQ ID NO: 1289557 - RNA, 22 nt, Human
ccucauagcccucacccugggg

SEQ ID NO: 1289558 - RNA, 17 nt, Human
ccuauggagagcccugg

SEQ ID NO: 1289559 - RNA, 17 nt, Human
ccggcuugccacacccc

SEQ ID NO: 1289560 - RNA, 19 nt, Human
ccgggacaccuaggcuagg

SEQ ID NO: 1289561 - RNA, 20 nt, Human
ccgggacaccuaggcuaggg

SEQ ID NO: 1289562 - RNA, 16 nt, Human
ccggcuuuguggcacu

SEQ ID NO: 1289563 - RNA, 23 nt, Human
ccgcuuggagcuauuuuccaggc

SEQ ID NO: 1289564 - RNA, 21 nt, Human
ccgcuuggcgaugccagccaa

SEQ ID NO: 1289565 - RNA, 20 nt, Human
ccgcuuggcgaugccagcca

SEQ ID NO: 1289566 - RNA, 20 nt, Human
ccgcugccacguuggagaag

SEQ ID NO: 1289567 - RNA, 15 nt, Human
ccgcucagcccuccc

SEQ ID NO: 1289568 - RNA, 19 nt, Human
ccgcucagcccucccugcc

SEQ ID NO: 1289569 - RNA, 21 nt, Human
ccgcucagcccucccugcccc

SEQ ID NO: 1289570 - RNA, 22 nt, Human
ccgcucagcccucccugccccu

SEQ ID NO: 1289571 - RNA, 20 nt, Human
ccgcucaggcugaccacuuu

SEQ ID NO: 1289572 - RNA, 23 nt, Human
ccgcugagcgaggagaugcuccu

SEQ ID NO: 1289573 - RNA, 19 nt, Human
ccgguaagagcaaaagaau

SEQ ID NO: 1289574 - RNA, 16 nt, Human
ccgugcucgccccagc

SEQ ID NO: 1289575 - RNA, 17 nt, Human
ccgugcucgccccagca

SEQ ID NO: 1289576 - RNA, 15 nt, Human
ccggggaaaggcaag

SEQ ID NO: 1289577 - RNA, 14 nt, Human
ccgggucugccucu

SEQ ID NO: 1289578 - RNA, 22 nt, Human
ccggguguccccaacagcgccc

SEQ ID NO: 1289579 - RNA, 23 nt, Human
ccggguguccccaacagcgccca

SEQ ID NO: 1289580 - RNA, 21 nt, Human
ccgggaagugagggcucacuc

SEQ ID NO: 1289581 - RNA, 20 nt, Human
ccgggaccacccugagccgg

SEQ ID NO: 1289582 - RNA, 17 nt, Human
ccgggaccuggugcugc

SEQ ID NO: 1289583 - RNA, 16 nt, Human
ccgggcguggugguga

SEQ ID NO: 1289584 - RNA, 21 nt, Human
ccgggaccacccugagccggc

SEQ ID NO: 1289585 - RNA, 13 nt, Human
ccgggcugggagc

SEQ ID NO: 1289586 - RNA, 18 nt, Human
ccgggcugggagcucugc

SEQ ID NO: 1289587 - RNA, 19 nt, Human
ccgggcugggagcucugca

SEQ ID NO: 1289588 - RNA, 16 nt, Human
ccgcuacaccacucug

SEQ ID NO: 1289589 - RNA, 17 nt, Human
ccgcuacaccacucugg

SEQ ID NO: 1289590 - RNA, 19 nt, Human
ccgcuacaccacucuggca

SEQ ID NO: 1289591 - RNA, 20 nt, Human
ccgcuacaccacucuggcag

SEQ ID NO: 1289592 - RNA, 21 nt, Human
ccgcuacaccacucuggcagc

SEQ ID NO: 1289593 - RNA, 11 nt, Human
ccgcucagccc

SEQ ID NO: 1289594 - RNA, 12 nt, Human
ccgcucagcccu

SEQ ID NO: 1289595 - RNA, 13 nt, Human
ccgcucagcccuc

SEQ ID NO: 1289596 - RNA, 16 nt, Human
ccgcgucuacccuggg

SEQ ID NO: 1289597 - RNA, 22 nt, Human
ccgcgugcggaggggacagagc

SEQ ID NO: 1289598 - RNA, 14 nt, Human
ccgcuaaaagaaac

SEQ ID NO: 1289599 - RNA, 18 nt, Human
ccgcuaaaagaaacuuuc

SEQ ID NO: 1289600 - RNA, 13 nt, Human
ccgcgucuacccu

SEQ ID NO: 1289601 - RNA, 15 nt, Human
ccgcgucuacccugg

SEQ ID NO: 1289602 - RNA, 17 nt, Human
ccgcgucuacccuggga

SEQ ID NO: 1289603 - RNA, 13 nt, Human
ccgcaccccccaa

SEQ ID NO: 1289604 - RNA, 17 nt, Human
ccgccuuggccuguguu

SEQ ID NO: 1289605 - RNA, 22 nt, Human
ccgcgauguggaacugcugcca

SEQ ID NO: 1289606 - RNA, 23 nt, Human
ccgcgauguggaacugcugccac

SEQ ID NO: 1289607 - RNA, 22 nt, Human
ccgaggccuaccccgcagacac

SEQ ID NO: 1289608 - RNA, 19 nt, Human
ccgagucauucguucugug

SEQ ID NO: 1289609 - RNA, 20 nt, Human
ccgagucauucguucugugg

SEQ ID NO: 1289610 - RNA, 12 nt, Human
ccgaguccaagc

SEQ ID NO: 1289611 - RNA, 13 nt, Human
ccgaguccaagcu

SEQ ID NO: 1289612 - RNA, 15 nt, Human
ccgaguccaagcugg

SEQ ID NO: 1289613 - RNA, 13 nt, Human
ccgauuguaacuc

SEQ ID NO: 1289614 - RNA, 16 nt, Human
ccgauuguaacucaaa

SEQ ID NO: 1289615 - RNA, 13 nt, Human
cccuggugacauc

SEQ ID NO: 1289616 - RNA, 16 nt, Human
cccugguuuccugccc

SEQ ID NO: 1289617 - RNA, 17 nt, Human
cccugguuuccugcccu

SEQ ID NO: 1289618 - RNA, 23 nt, Human
ccgaggaggugucucaggcugcc

SEQ ID NO: 1289619 - RNA, 15 nt, Human
ccgaggcagggaagg

SEQ ID NO: 1289620 - RNA, 18 nt, Human
ccgaggaggugucucagg

SEQ ID NO: 1289621 - RNA, 20 nt, Human
ccgaggaggugucucaggcu

SEQ ID NO: 1289622 - RNA, 21 nt, Human
ccgaggaggugucucaggcug

SEQ ID NO: 1289623 - RNA, 18 nt, Human
cccugguuuccugcccug

SEQ ID NO: 1289624 - RNA, 19 nt, Human
cccugguuuccugcccugg

SEQ ID NO: 1289625 - RNA, 19 nt, Human
ccuaaaagaaacccugcac

SEQ ID NO: 1289626 - RNA, 22 nt, Human
ccuaaaagugggcuugauucug

SEQ ID NO: 1289627 - RNA, 14 nt, Human
ccgugguccuuugg

SEQ ID NO: 1289628 - RNA, 12 nt, Human
ccguguccaccc

SEQ ID NO: 1289629 - RNA, 18 nt, Human
ccguguccacccccauac

SEQ ID NO: 1289630 - RNA, 23 nt, Human
ccgugugagaagugaaugcuggg

SEQ ID NO: 1289631 - RNA, 22 nt, Human
ccgugugagaagugaaugcugg

SEQ ID NO: 1289632 - RNA, 15 nt, Human
ccguguccaccccca

SEQ ID NO: 1289633 - RNA, 19 nt, Human
ccuaaauaauaaaaauaaa

SEQ ID NO: 1289634 - RNA, 15 nt, Human
ccuacaagacacagu

SEQ ID NO: 1289635 - RNA, 18 nt, Human
ccuaaauauauuuuaaga

SEQ ID NO: 1289636 - RNA, 16 nt, Human
ccuaaauauauuuuaa

SEQ ID NO: 1289637 - RNA, 20 nt, Human
ccgugugggagaccggccug

SEQ ID NO: 1289638 - RNA, 22 nt, Human
ccuaugauguauacugccacua

SEQ ID NO: 1289639 - RNA, 20 nt, Human
ccuaguuuucuccucccagg

SEQ ID NO: 1289640 - RNA, 18 nt, Human
ccuauaccuguguuucuu

SEQ ID NO: 1289641 - RNA, 22 nt, Human
ccuauacgcagcgugcuuuaaa

SEQ ID NO: 1289642 - RNA, 13 nt, Human
ccuauacugcuug

SEQ ID NO: 1289643 - RNA, 22 nt, Human
ccuauacugcuuggagcugagc

SEQ ID NO: 1289644 - RNA, 23 nt, Human
ccuauacugcuuggagcugagca

SEQ ID NO: 1289645 - RNA, 19 nt, Human
ccuauacuguaguauucuu

SEQ ID NO: 1289646 - RNA, 15 nt, Human
ccuaguucuagaaaa

SEQ ID NO: 1289647 - RNA, 17 nt, Human
ccuaguucuagaaaaac

SEQ ID NO: 1289648 - RNA, 18 nt, Human
ccuaguucuagaaaaaca

SEQ ID NO: 1289649 - RNA, 13 nt, Human
ccuaguucuucau

SEQ ID NO: 1289650 - RNA, 12 nt, Human
ccuaguuuucca

SEQ ID NO: 1289651 - RNA, 13 nt, Human
ccuaguuuuccau

SEQ ID NO: 1289652 - RNA, 15 nt, Human
ccuaguuuuccaugc

SEQ ID NO: 1289653 - RNA, 15 nt, Human
ccuaguuuucuccuc

SEQ ID NO: 1289654 - RNA, 16 nt, Human
ccuaguuuucuccucc

SEQ ID NO: 1289655 - RNA, 18 nt, Human
ccuaguuuucuccuccca

SEQ ID NO: 1289656 - RNA, 19 nt, Human
ccuaguuuucuccucccag

SEQ ID NO: 1289657 - RNA, 22 nt, Human
ccuaccgagucucuucuccacu

SEQ ID NO: 1289658 - RNA, 23 nt, Human
ccuaccgagucucuucuccacug

SEQ ID NO: 1289659 - RNA, 18 nt, Human
ccuacacucaccugcacu

SEQ ID NO: 1289660 - RNA, 13 nt, Human
ccuacagaaaaac

SEQ ID NO: 1289661 - RNA, 14 nt, Human
ccuacagaaaaacc

SEQ ID NO: 1289662 - RNA, 19 nt, Human
ccuacagaaaaaccuuggg

SEQ ID NO: 1289663 - RNA, 17 nt, Human
ccuacagaaaaaccuug

SEQ ID NO: 1289664 - RNA, 13 nt, Human
ccuacuuccugug

SEQ ID NO: 1289665 - RNA, 15 nt, Human
ccuacuuccugugac

SEQ ID NO: 1289666 - RNA, 16 nt, Human
ccuacuucuuuugcuc

SEQ ID NO: 1289667 - RNA, 22 nt, Human
ccuacuucuuuugcucuuagcu

SEQ ID NO: 1289668 - RNA, 14 nt, Human
ccuacuuugacuuu

SEQ ID NO: 1289669 - RNA, 15 nt, Human
ccuacuuugacuuuu

SEQ ID NO: 1289670 - RNA, 21 nt, Human
ccuacuuugacuuuuugcauu

SEQ ID NO: 1289671 - RNA, 16 nt, Human
ccuagaaacaacacug

SEQ ID NO: 1289672 - RNA, 15 nt, Human
ccuaggcuccacccc

SEQ ID NO: 1289673 - RNA, 17 nt, Human
ccuaggcuccaccccau

SEQ ID NO: 1289674 - RNA, 18 nt, Human
ccuaggcuccaccccauc

SEQ ID NO: 1289675 - RNA, 15 nt, Human
ccuagaaacaacacu

SEQ ID NO: 1289676 - RNA, 11 nt, Human
ccuaggcugca

SEQ ID NO: 1289677 - RNA, 23 nt, Human
ccuagggaggcauggucugcccu

SEQ ID NO: 1289678 - RNA, 21 nt, Human
cccaccucccucaaccucauc

SEQ ID NO: 1289679 - RNA, 23 nt, Human
cccaccgggcugggagcucugca

SEQ ID NO: 1289680 - RNA, 18 nt, Human
cccaccgggccacuccuu

SEQ ID NO: 1289681 - RNA, 19 nt, Human
cccaccgggccacuccuuc

SEQ ID NO: 1289682 - RNA, 22 nt, Human
cccaccgggccacuccuuccug

SEQ ID NO: 1289683 - RNA, 23 nt, Human
cccaccgggccacuccuuccugc

SEQ ID NO: 1289684 - RNA, 16 nt, Human
cccaccuccccuuggg

SEQ ID NO: 1289685 - RNA, 15 nt, Human
cccaccuccugacac

SEQ ID NO: 1289686 - RNA, 18 nt, Human
cccaccugacacaccagg

SEQ ID NO: 1289687 - RNA, 13 nt, Human
cccaccagggucc

SEQ ID NO: 1289688 - RNA, 17 nt, Human
cccaccgggccacuccu

SEQ ID NO: 1289689 - RNA, 16 nt, Human
cccaccagaugcugaa

SEQ ID NO: 1289690 - RNA, 16 nt, Human
cccacgacacugcagc

SEQ ID NO: 1289691 - RNA, 13 nt, Human
cccacgagggcug

SEQ ID NO: 1289692 - RNA, 14 nt, Human
cccacgagggcugg

SEQ ID NO: 1289693 - RNA, 13 nt, Human
cccacuugccucu

SEQ ID NO: 1289694 - RNA, 14 nt, Human
cccacuugccucuu

SEQ ID NO: 1289695 - RNA, 15 nt, Human
cccacuugccucuuc

SEQ ID NO: 1289696 - RNA, 21 nt, Human
cccacuugccucuuccuugaa

SEQ ID NO: 1289697 - RNA, 14 nt, Human
cccacuuguccuua

SEQ ID NO: 1289698 - RNA, 18 nt, Human
cccacuuguccuuagccu

SEQ ID NO: 1289699 - RNA, 13 nt, Human
cccacaagaaaug

SEQ ID NO: 1289700 - RNA, 15 nt, Human
cccacaagccugagg

SEQ ID NO: 1289701 - RNA, 20 nt, Human
cccacaagaaaugaaagcag

SEQ ID NO: 1289702 - RNA, 19 nt, Human
cccacaacccaaaagguuu

SEQ ID NO: 1289703 - RNA, 20 nt, Human
cccacaagccucugcccagg

SEQ ID NO: 1289704 - RNA, 13 nt, Human
cccacaagccuga

SEQ ID NO: 1289705 - RNA, 21 nt, Human
cccacaagugcccuccaggcu

SEQ ID NO: 1289706 - RNA, 19 nt, Human
cccacaggacauuucucua

SEQ ID NO: 1289707 - RNA, 20 nt, Human
cccacaggacauuucucuaa

SEQ ID NO: 1289708 - RNA, 14 nt, Human
cccacauuaaagaa

SEQ ID NO: 1289709 - RNA, 22 nt, Human
cccacauuggaagagcagcacc

SEQ ID NO: 1289710 - RNA, 20 nt, Human
cccacauuggaagagcagca

SEQ ID NO: 1289711 - RNA, 16 nt, Human
cccaccaacccucagg

SEQ ID NO: 1289712 - RNA, 17 nt, Human
cccaccaacccucaggg

SEQ ID NO: 1289713 - RNA, 18 nt, Human
cccaccaacccucagggc

SEQ ID NO: 1289714 - RNA, 19 nt, Human
cccaccaacccucagggca

SEQ ID NO: 1289715 - RNA, 20 nt, Human
cccacaggaagccugcaguc

SEQ ID NO: 1289716 - RNA, 22 nt, Human
cccacaggaagccugcaguccu

SEQ ID NO: 1289717 - RNA, 23 nt, Human
cccacaggaagccugcaguccug

SEQ ID NO: 1289718 - RNA, 22 nt, Human
cccacaagccucugcccaggca

SEQ ID NO: 1289719 - RNA, 23 nt, Human
cccgagucauucguucuguggag

SEQ ID NO: 1289720 - RNA, 22 nt, Human
cccucucucauacccucccucc

SEQ ID NO: 1289721 - RNA, 20 nt, Human
cccucucugcagacuuccca

SEQ ID NO: 1289722 - RNA, 14 nt, Human
cccucucugcucug

SEQ ID NO: 1289723 - RNA, 18 nt, Human
cccucucucauacccucc

SEQ ID NO: 1289724 - RNA, 20 nt, Human
cccucccccccaugcacugu

SEQ ID NO: 1289725 - RNA, 15 nt, Human
cccucucugcucugc

SEQ ID NO: 1289726 - RNA, 16 nt, Human
cccucucugcucugcg

SEQ ID NO: 1289727 - RNA, 13 nt, Human
cccucucuggaga

SEQ ID NO: 1289728 - RNA, 14 nt, Human
cccucucuggagaa

SEQ ID NO: 1289729 - RNA, 13 nt, Human
cccucugaaauac

SEQ ID NO: 1289730 - RNA, 14 nt, Human
cccucugaccugca

SEQ ID NO: 1289731 - RNA, 15 nt, Human
cccucugaccugcac

SEQ ID NO: 1289732 - RNA, 16 nt, Human
cccucugaccugcacu

SEQ ID NO: 1289733 - RNA, 17 nt, Human
cccucugaccugcacug

SEQ ID NO: 1289734 - RNA, 19 nt, Human
cccucugaccugcacuggg

SEQ ID NO: 1289735 - RNA, 14 nt, Human
cccucugcugcugu

SEQ ID NO: 1289736 - RNA, 15 nt, Human
cccucugcugcuguc

SEQ ID NO: 1289737 - RNA, 12 nt, Human
cccucuggaggg

SEQ ID NO: 1289738 - RNA, 21 nt, Human
cccucuggagggguguggcuc

SEQ ID NO: 1289739 - RNA, 22 nt, Human
cccucuggagggguguggcucc

SEQ ID NO: 1289740 - RNA, 18 nt, Human
cccuccaccgcagaagga

SEQ ID NO: 1289741 - RNA, 21 nt, Human
cccuccaccgcagaaggaagg

SEQ ID NO: 1289742 - RNA, 23 nt, Human
cccuccacauuucccccuagccu

SEQ ID NO: 1289743 - RNA, 22 nt, Human
cccuauccuacuuccccuuccu

SEQ ID NO: 1289744 - RNA, 16 nt, Human
cccuauccaaucaauc

SEQ ID NO: 1289745 - RNA, 12 nt, Human
cccuagguguuu

SEQ ID NO: 1289746 - RNA, 15 nt, Human
cccuagguguuuugu

SEQ ID NO: 1289747 - RNA, 16 nt, Human
cccuagguguuuuguu

SEQ ID NO: 1289748 - RNA, 22 nt, Human
cccuagguguuuuguucaccau

SEQ ID NO: 1289749 - RNA, 19 nt, Human
cccuaguucuaccucaggc

SEQ ID NO: 1289750 - RNA, 23 nt, Human
cccuauacugcuuggagcugagc

SEQ ID NO: 1289751 - RNA, 19 nt, Human
cccuauacuguaguauucu

SEQ ID NO: 1289752 - RNA, 19 nt, Human
cccuccaccgcagaaggaa

SEQ ID NO: 1289753 - RNA, 13 nt, Human
cccuccagagaca

SEQ ID NO: 1289754 - RNA, 21 nt, Human
cccuccccaacugaccaccuu

SEQ ID NO: 1289755 - RNA, 15 nt, Human
cccucccccccaugc

SEQ ID NO: 1289756 - RNA, 18 nt, Human
cccucccccccaugcacu

SEQ ID NO: 1289757 - RNA, 18 nt, Human
cccugccaccugucuguc

SEQ ID NO: 1289758 - RNA, 13 nt, Human
cccugccacucac

SEQ ID NO: 1289759 - RNA, 18 nt, Human
cccugccacucacuaggc

SEQ ID NO: 1289760 - RNA, 19 nt, Human
cccugccacucacuaggcc

SEQ ID NO: 1289761 - RNA, 17 nt, Human
cccugccaccugucugu

SEQ ID NO: 1289762 - RNA, 16 nt, Human
cccugccaccugucug

SEQ ID NO: 1289763 - RNA, 15 nt, Human
cccugccaccugucu

SEQ ID NO: 1289764 - RNA, 14 nt, Human
cccugccaccuguc

SEQ ID NO: 1289765 - RNA, 13 nt, Human
cccugccaccugu

SEQ ID NO: 1289766 - RNA, 20 nt, Human
cccugccaccuccugccuca

SEQ ID NO: 1289767 - RNA, 23 nt, Human
cccugcaccaugcugcuggggaa

SEQ ID NO: 1289768 - RNA, 16 nt, Human
cccugcacuguaaaau

SEQ ID NO: 1289769 - RNA, 20 nt, Human
cccugcacuguaaaaugugg

SEQ ID NO: 1289770 - RNA, 17 nt, Human
cccugcacuguaaaaug

SEQ ID NO: 1289771 - RNA, 23 nt, Human
cccugcacaaagcccuuccaugu

SEQ ID NO: 1289772 - RNA, 20 nt, Human
cccugcacagugacuucuga

SEQ ID NO: 1289773 - RNA, 22 nt, Human
cccugcacagugacuucugaga

SEQ ID NO: 1289774 - RNA, 13 nt, Human
cccugcacaguug

SEQ ID NO: 1289775 - RNA, 16 nt, Human
cccugcaaagcccagc

SEQ ID NO: 1289776 - RNA, 17 nt, Human
cccugcaaagcccagcu

SEQ ID NO: 1289777 - RNA, 19 nt, Human
cccugcaaagcccagcuug

SEQ ID NO: 1289778 - RNA, 20 nt, Human
cccugcaaagcccagcuuga

SEQ ID NO: 1289779 - RNA, 15 nt, Human
cccugcaaagcccag

SEQ ID NO: 1289780 - RNA, 12 nt, Human
cccugaggccua

SEQ ID NO: 1289781 - RNA, 16 nt, Human
cccugaggccuagacu

SEQ ID NO: 1289782 - RNA, 19 nt, Human
cccugaggccuagacucug

SEQ ID NO: 1289783 - RNA, 18 nt, Human
cccucuggucgcuccugc

SEQ ID NO: 1289784 - RNA, 19 nt, Human
cccucuggucgcuccugcc

SEQ ID NO: 1289785 - RNA, 20 nt, Human
cccucuggucgcuccugccc

SEQ ID NO: 1289786 - RNA, 22 nt, Human
cccucuggucgcuccugcccac

SEQ ID NO: 1289787 - RNA, 20 nt, Human
cccucuguccaggcacugag

SEQ ID NO: 1289788 - RNA, 24 nt, Human
cccucuguccaggcacugagauac

SEQ ID NO: 1289789 - RNA, 18 nt, Human
cccucuguguauuugcuu

SEQ ID NO: 1289790 - RNA, 17 nt, Human
cccugcuuugggcugcc

SEQ ID NO: 1289791 - RNA, 18 nt, Human
cccugcuuugggcugccc

SEQ ID NO: 1289792 - RNA, 19 nt, Human
cccugcuuugggcugcccu

SEQ ID NO: 1289793 - RNA, 20 nt, Human
cccugcuuugggcugcccug

SEQ ID NO: 1289794 - RNA, 22 nt, Human
cccugcuuugggcugcccuggu

SEQ ID NO: 1289795 - RNA, 21 nt, Human
cccuggaaggacauccauguu

SEQ ID NO: 1289796 - RNA, 23 nt, Human
cccuggaaugaguugaggccacu

SEQ ID NO: 1289797 - RNA, 16 nt, Human
cccuggacccagccag

SEQ ID NO: 1289798 - RNA, 18 nt, Human
cccuggacccagccagaa

SEQ ID NO: 1289799 - RNA, 20 nt, Human
cccugccacucacuaggccc

SEQ ID NO: 1289800 - RNA, 15 nt, Human
cccugggaggcucug

SEQ ID NO: 1289801 - RNA, 22 nt, Human
cccugggagaaucgcuccugca

SEQ ID NO: 1289802 - RNA, 24 nt, Human
cccugggagaaucgcuccugcagc

SEQ ID NO: 1289803 - RNA, 13 nt, Human
cccugggcccugg

SEQ ID NO: 1289804 - RNA, 16 nt, Human
cccugggcccugggcu

SEQ ID NO: 1289805 - RNA, 18 nt, Human
cccugggcccugggcugg

SEQ ID NO: 1289806 - RNA, 19 nt, Human
cccugggcccugggcugga

SEQ ID NO: 1289807 - RNA, 11 nt, Human
cccugggccug

SEQ ID NO: 1289808 - RNA, 13 nt, Human
cccugggccugcc

SEQ ID NO: 1289809 - RNA, 19 nt, Human
cccugggccugccucacca

SEQ ID NO: 1289810 - RNA, 13 nt, Human
cccugggccugcu

SEQ ID NO: 1289811 - RNA, 14 nt, Human
cccugggccugcug

SEQ ID NO: 1289812 - RNA, 15 nt, Human
cccugggccugcugc

SEQ ID NO: 1289813 - RNA, 16 nt, Human
cccugggccugcugcu

SEQ ID NO: 1289814 - RNA, 17 nt, Human
cccugggccugcugcug

SEQ ID NO: 1289815 - RNA, 19 nt, Human
cccugggccugcugcugag

SEQ ID NO: 1289816 - RNA, 20 nt, Human
cccugggccugcugcugaga

SEQ ID NO: 1289817 - RNA, 13 nt, Human
cccugggccuugg

SEQ ID NO: 1289818 - RNA, 18 nt, Human
cccugggccuugggcucc

SEQ ID NO: 1289819 - RNA, 15 nt, Human
cccuggacugugugc

SEQ ID NO: 1289820 - RNA, 21 nt, Human
cccuggacugugugcucagga

SEQ ID NO: 1289821 - RNA, 18 nt, Human
cccuggcuuuucacugcu

SEQ ID NO: 1289822 - RNA, 19 nt, Human
cccuggcuuuucacugcug

SEQ ID NO: 1289823 - RNA, 22 nt, Human
cccuggcuuuucacugcuggcu

SEQ ID NO: 1289824 - RNA, 18 nt, Human
cccugggaggcagugaug

SEQ ID NO: 1289825 - RNA, 18 nt, Human
cccuggucccucugcagu

SEQ ID NO: 1289826 - RNA, 14 nt, Human
cccugguccccucc

SEQ ID NO: 1289827 - RNA, 21 nt, Human
cccugguccccuccuucccaa

SEQ ID NO: 1289828 - RNA, 14 nt, Human
cccuggucccuugu

SEQ ID NO: 1289829 - RNA, 16 nt, Human
cccugguaauagcugu

SEQ ID NO: 1289830 - RNA, 19 nt, Human
cccugguaauagcuguaaa

SEQ ID NO: 1289831 - RNA, 14 nt, Human
cccugggccuuggg

SEQ ID NO: 1289832 - RNA, 11 nt, Human
cccuggucccu

SEQ ID NO: 1289833 - RNA, 13 nt, Human
cccgccucagccu

SEQ ID NO: 1289834 - RNA, 12 nt, Human
cccgccugcccu

SEQ ID NO: 1289835 - RNA, 21 nt, Human
cccgagucauucguucugugg

SEQ ID NO: 1289836 - RNA, 20 nt, Human
cccagaaaagaaagcuacag

SEQ ID NO: 1289837 - RNA, 13 nt, Human
cccagaaaagaaa

SEQ ID NO: 1289838 - RNA, 22 nt, Human
cccggggaaaggcaagguccgg

SEQ ID NO: 1289839 - RNA, 18 nt, Human
cccggugcccaagaauag

SEQ ID NO: 1289840 - RNA, 21 nt, Human
cccggggugcccacaggccgc

SEQ ID NO: 1289841 - RNA, 16 nt, Human
cccggggccagcacuu

SEQ ID NO: 1289842 - RNA, 14 nt, Human
cccggggccagcac

SEQ ID NO: 1289843 - RNA, 23 nt, Human
cccggggugagggggggcucccu

SEQ ID NO: 1289844 - RNA, 15 nt, Human
cccgugggguuccuc

SEQ ID NO: 1289845 - RNA, 22 nt, Human
cccgucucugguuccuccccuc

SEQ ID NO: 1289846 - RNA, 17 nt, Human
cccgucuggcccaccag

SEQ ID NO: 1289847 - RNA, 13 nt, Human
cccguccugccug

SEQ ID NO: 1289848 - RNA, 14 nt, Human
cccguccugccugu

SEQ ID NO: 1289849 - RNA, 15 nt, Human
cccguccugccugug

SEQ ID NO: 1289850 - RNA, 16 nt, Human
cccguccugccugugg

SEQ ID NO: 1289851 - RNA, 17 nt, Human
cccguccugccuguggc

SEQ ID NO: 1289852 - RNA, 12 nt, Human
cccgucucagug

SEQ ID NO: 1289853 - RNA, 13 nt, Human
cccgucucagugu

SEQ ID NO: 1289854 - RNA, 23 nt, Human
cccuaaugcgcaggcuggcccug

SEQ ID NO: 1289855 - RNA, 14 nt, Human
cccuacauguauug

SEQ ID NO: 1289856 - RNA, 17 nt, Human
cccuaaugcgcaggcug

SEQ ID NO: 1289857 - RNA, 21 nt, Human
cccuaaugcgcaggcuggccc

SEQ ID NO: 1289858 - RNA, 22 nt, Human
cccuaaugcgcaggcuggcccu

SEQ ID NO: 1289859 - RNA, 22 nt, Human
cccuaaucuauggucgggagac

SEQ ID NO: 1289860 - RNA, 18 nt, Human
cccuaccgagucucuucu

SEQ ID NO: 1289861 - RNA, 11 nt, Human
cccuacccucu

SEQ ID NO: 1289862 - RNA, 13 nt, Human
cccuacccucuag

SEQ ID NO: 1289863 - RNA, 21 nt, Human
cccuaccgagucucuucucca

SEQ ID NO: 1289864 - RNA, 14 nt, Human
cccuacccucuaga

SEQ ID NO: 1289865 - RNA, 15 nt, Human
cccuacccucuagag

SEQ ID NO: 1289866 - RNA, 14 nt, Human
cccuacccuggacu

SEQ ID NO: 1289867 - RNA, 14 nt, Human
cccuaccugcccca

SEQ ID NO: 1289868 - RNA, 14 nt, Human
cccuaccugugccu

SEQ ID NO: 1289869 - RNA, 16 nt, Human
cccuaccugccccacu

SEQ ID NO: 1289870 - RNA, 11 nt, Human
cccuagccuug

SEQ ID NO: 1289871 - RNA, 14 nt, Human
cccuagccuugcuu

SEQ ID NO: 1289872 - RNA, 19 nt, Human
cccuagcgcuaucucccug

SEQ ID NO: 1289873 - RNA, 13 nt, Human
ccauggcccugcc

SEQ ID NO: 1289874 - RNA, 22 nt, Human
ccaucugcgugacaauaaaaca

SEQ ID NO: 1289875 - RNA, 20 nt, Human
ccaucugcgugacaauaaaa

SEQ ID NO: 1289876 - RNA, 21 nt, Human
ccaugggaaaugucaacaagu

SEQ ID NO: 1289877 - RNA, 22 nt, Human
ccauggccugcaaacugggaac

SEQ ID NO: 1289878 - RNA, 16 nt, Human
ccauggccugcaaacu

SEQ ID NO: 1289879 - RNA, 18 nt, Human
ccauggccugcaaacugg

SEQ ID NO: 1289880 - RNA, 21 nt, Human
ccauggccugcaaacugggaa

SEQ ID NO: 1289881 - RNA, 15 nt, Human
ccaucuaaacugccc

SEQ ID NO: 1289882 - RNA, 16 nt, Human
ccaucuaaacugcccc

SEQ ID NO: 1289883 - RNA, 21 nt, Human
ccaucguugcccccauuucug

SEQ ID NO: 1289884 - RNA, 14 nt, Human
ccauauuggccagu

SEQ ID NO: 1289885 - RNA, 18 nt, Human
ccauccuacccccugugc

SEQ ID NO: 1289886 - RNA, 15 nt, Human
ccauauuuaccucag

SEQ ID NO: 1289887 - RNA, 16 nt, Human
ccauauuuaccucagc

SEQ ID NO: 1289888 - RNA, 14 nt, Human
ccauauuguaaaac

SEQ ID NO: 1289889 - RNA, 18 nt, Human
ccauauuguaaaacaggu

SEQ ID NO: 1289890 - RNA, 17 nt, Human
ccauauuuaccucagcc

SEQ ID NO: 1289891 - RNA, 14 nt, Human
ccaucuaaacugcc

SEQ ID NO: 1289892 - RNA, 14 nt, Human
ccaucgucuucuug

SEQ ID NO: 1289893 - RNA, 16 nt, Human
ccauccuaggcugaca

SEQ ID NO: 1289894 - RNA, 17 nt, Human
ccauccuaggcugacac

SEQ ID NO: 1289895 - RNA, 18 nt, Human
ccauucauuccauucugg

SEQ ID NO: 1289896 - RNA, 20 nt, Human
ccauucacuucauaauccag

SEQ ID NO: 1289897 - RNA, 13 nt, Human
ccauguuucaaau

SEQ ID NO: 1289898 - RNA, 13 nt, Human
ccauguuggcuag

SEQ ID NO: 1289899 - RNA, 21 nt, Human
ccaugggaggccuuucccuaa

SEQ ID NO: 1289900 - RNA, 11 nt, Human
ccaugggacca

SEQ ID NO: 1289901 - RNA, 22 nt, Human
ccaugggagcugguuagaaaug

SEQ ID NO: 1289902 - RNA, 19 nt, Human
ccaugggacagggaggacg

SEQ ID NO: 1289903 - RNA, 16 nt, Human
ccaugggacagggagg

SEQ ID NO: 1289904 - RNA, 18 nt, Human
ccauguuggccaggcugg

SEQ ID NO: 1289905 - RNA, 21 nt, Human
ccauguuggccaggcugcucu

SEQ ID NO: 1289906 - RNA, 18 nt, Human
ccauguuggccaggcugc

SEQ ID NO: 1289907 - RNA, 15 nt, Human
ccaugggaccacaac

SEQ ID NO: 1289908 - RNA, 14 nt, Human
ccaugggaggccuu

SEQ ID NO: 1289909 - RNA, 19 nt, Human
ccaugggaggccuuucccu

SEQ ID NO: 1289910 - RNA, 14 nt, Human
ccauucauuccauu

SEQ ID NO: 1289911 - RNA, 13 nt, Human
ccauucauuccau

SEQ ID NO: 1289912 - RNA, 23 nt, Human
ccauuuggauccuguguggagag

SEQ ID NO: 1289913 - RNA, 16 nt, Human
ccauuuggcaucccug

SEQ ID NO: 1289914 - RNA, 13 nt, Human
ccauuuguucaua

SEQ ID NO: 1289915 - RNA, 21 nt, Human
ccauuuguguacacagucagc

SEQ ID NO: 1289916 - RNA, 19 nt, Human
ccauuuggcaucccugggc

SEQ ID NO: 1289917 - RNA, 18 nt, Human
ccauuuggcaucccuggg

SEQ ID NO: 1289918 - RNA, 13 nt, Human
ccauuuguacuga

SEQ ID NO: 1289919 - RNA, 16 nt, Human
cccaaagcuuuccugc

SEQ ID NO: 1289920 - RNA, 17 nt, Human
cccaaagcuuuccugcc

SEQ ID NO: 1289921 - RNA, 20 nt, Human
cccaaagcuuuccugcccca

SEQ ID NO: 1289922 - RNA, 15 nt, Human
cccaaaggacgcacu

SEQ ID NO: 1289923 - RNA, 19 nt, Human
cccaaaggacgcacugagc

SEQ ID NO: 1289924 - RNA, 18 nt, Human
cccaaaggacgcacugag

SEQ ID NO: 1289925 - RNA, 19 nt, Human
cccaaaggcuuugcccugc

SEQ ID NO: 1289926 - RNA, 14 nt, Human
cccaaagcuuuccu

SEQ ID NO: 1289927 - RNA, 15 nt, Human
cccaaagcuuuccug

SEQ ID NO: 1289928 - RNA, 15 nt, Human
cccaaagugcugaga

SEQ ID NO: 1289929 - RNA, 20 nt, Human
cccaaagugcugagauuaca

SEQ ID NO: 1289930 - RNA, 23 nt, Human
cccaaaguuguuguaaccugcug

SEQ ID NO: 1289931 - RNA, 14 nt, Human
cccaaaugagccau

SEQ ID NO: 1289932 - RNA, 18 nt, Human
cccaacccguggaggcug

SEQ ID NO: 1289933 - RNA, 19 nt, Human
cccaacccguggaggcugc

SEQ ID NO: 1289934 - RNA, 20 nt, Human
cccaacccguggaggcugcu

SEQ ID NO: 1289935 - RNA, 21 nt, Human
cccaacccguggaggcugcuc

SEQ ID NO: 1289936 - RNA, 23 nt, Human
cccaacccguggaggcugcucgg

SEQ ID NO: 1289937 - RNA, 22 nt, Human
cccaacccguggaggcugcucg

SEQ ID NO: 1289938 - RNA, 15 nt, Human
cccaacccuggcacc

SEQ ID NO: 1289939 - RNA, 17 nt, Human
cccaacccuucccucac

SEQ ID NO: 1289940 - RNA, 13 nt, Human
cccaaccugcucu

SEQ ID NO: 1289941 - RNA, 17 nt, Human
cccaaggcucugagcaa

SEQ ID NO: 1289942 - RNA, 19 nt, Human
cccaaggcucccggaauuc

SEQ ID NO: 1289943 - RNA, 18 nt, Human
cccaagggaggcugcugc

SEQ ID NO: 1289944 - RNA, 16 nt, Human
cccaagggaggcugcu

SEQ ID NO: 1289945 - RNA, 17 nt, Human
cccaauccucccagaaa

SEQ ID NO: 1289946 - RNA, 18 nt, Human
ccagguuggagugcagug

SEQ ID NO: 1289947 - RNA, 14 nt, Human
ccagguuggcucug

SEQ ID NO: 1289948 - RNA, 16 nt, Human
ccagguuggcucugcc

SEQ ID NO: 1289949 - RNA, 17 nt, Human
ccagguuggcucugcca

SEQ ID NO: 1289950 - RNA, 18 nt, Human
ccagguuggcucugccag

SEQ ID NO: 1289951 - RNA, 15 nt, Human
ccagguuccacagag

SEQ ID NO: 1289952 - RNA, 18 nt, Human
ccagguuccacagaggac

SEQ ID NO: 1289953 - RNA, 21 nt, Human
ccagguucuccguuagcuccu

SEQ ID NO: 1289954 - RNA, 22 nt, Human
ccagguucuccguuagcuccug

SEQ ID NO: 1289955 - RNA, 23 nt, Human
ccagguucuccguuagcuccugu

SEQ ID NO: 1289956 - RNA, 24 nt, Human
ccagguucuccguuagcuccugug

SEQ ID NO: 1289957 - RNA, 12 nt, Human
ccagucugugga

SEQ ID NO: 1289958 - RNA, 13 nt, Human
ccagucuguggau

SEQ ID NO: 1289959 - RNA, 21 nt, Human
ccagucuguggaucagagaug

SEQ ID NO: 1289960 - RNA, 16 nt, Human
ccaggguugaccccag

SEQ ID NO: 1289961 - RNA, 18 nt, Human
ccaggguugaccccagag

SEQ ID NO: 1289962 - RNA, 21 nt, Human
ccaggguugaccccagaggau

SEQ ID NO: 1289963 - RNA, 13 nt, Human
ccaggguuuuaac

SEQ ID NO: 1289964 - RNA, 16 nt, Human
ccaggguuuuaacuuu

SEQ ID NO: 1289965 - RNA, 21 nt, Human
ccagggcuggaaugauuucag

SEQ ID NO: 1289966 - RNA, 20 nt, Human
ccagggcuccugcacuuacu

SEQ ID NO: 1289967 - RNA, 21 nt, Human
ccagggcuccagccccucuug

SEQ ID NO: 1289968 - RNA, 19 nt, Human
ccagggcccagagcccagc

SEQ ID NO: 1289969 - RNA, 21 nt, Human
ccagggcccagagcccagcuc

SEQ ID NO: 1289970 - RNA, 22 nt, Human
ccagggcccagagcccagcucc

SEQ ID NO: 1289971 - RNA, 23 nt, Human
ccagggcccagagcccagcucca

SEQ ID NO: 1289972 - RNA, 19 nt, Human
ccagggcuccagccccucu

SEQ ID NO: 1289973 - RNA, 12 nt, Human
ccagggcuccug

SEQ ID NO: 1289974 - RNA, 13 nt, Human
ccagggcuccugc

SEQ ID NO: 1289975 - RNA, 14 nt, Human
ccagggcuccugca

SEQ ID NO: 1289976 - RNA, 22 nt, Human
ccagggagagggggcugguggg

SEQ ID NO: 1289977 - RNA, 15 nt, Human
ccagggccagccucu

SEQ ID NO: 1289978 - RNA, 14 nt, Human
ccagggccagccuc

SEQ ID NO: 1289979 - RNA, 13 nt, Human
ccagggcccagag

SEQ ID NO: 1289980 - RNA, 14 nt, Human
ccagggcccagagc

SEQ ID NO: 1289981 - RNA, 15 nt, Human
ccagggcccagagcc

SEQ ID NO: 1289982 - RNA, 16 nt, Human
ccagggcccagagccc

SEQ ID NO: 1289983 - RNA, 17 nt, Human
ccagggcccagagccca

SEQ ID NO: 1289984 - RNA, 18 nt, Human
ccagggcccagagcccag

SEQ ID NO: 1289985 - RNA, 23 nt, Human
ccaggcuguguuuggcuuucagg

SEQ ID NO: 1289986 - RNA, 14 nt, Human
ccagggagagccca

SEQ ID NO: 1289987 - RNA, 15 nt, Human
ccagggagagcccag

SEQ ID NO: 1289988 - RNA, 17 nt, Human
ccagggagagcccagga

SEQ ID NO: 1289989 - RNA, 18 nt, Human
ccagggagagcccaggag

SEQ ID NO: 1289990 - RNA, 19 nt, Human
ccagggagagcccaggagc

SEQ ID NO: 1289991 - RNA, 20 nt, Human
ccagggagagcccaggagcu

SEQ ID NO: 1289992 - RNA, 23 nt, Human
ccagggagagcccaggagcuccc

SEQ ID NO: 1289993 - RNA, 21 nt, Human
ccagggagagcccaggagcuc

SEQ ID NO: 1289994 - RNA, 13 nt, Human
ccagggagagggg

SEQ ID NO: 1289995 - RNA, 18 nt, Human
ccagggagagggggcugg

SEQ ID NO: 1289996 - RNA, 24 nt, Human
ccaggcuaauuuuuuuguauuuua

SEQ ID NO: 1289997 - RNA, 18 nt, Human
ccaggcgccccuuccccc

SEQ ID NO: 1289998 - RNA, 19 nt, Human
ccaggcgccccuucccccu

SEQ ID NO: 1289999 - RNA, 16 nt, Human
ccaggcgcuaauucaa

SEQ ID NO: 1290000 - RNA, 21 nt, Human
ccaggccgggaaaaagcccac

SEQ ID NO: 1290001 - RNA, 18 nt, Human
ccaggcccaaggcucccg

SEQ ID NO: 1290002 - RNA, 17 nt, Human
ccaggcccacugugccu

SEQ ID NO: 1290003 - RNA, 18 nt, Human
ccaggcccagccgacccc

SEQ ID NO: 1290004 - RNA, 22 nt, Human
ccaggcccacugugccucagag

SEQ ID NO: 1290005 - RNA, 14 nt, Human
ccaggcccaaggcu

SEQ ID NO: 1290006 - RNA, 15 nt, Human
ccaggcccaaggcuc

SEQ ID NO: 1290007 - RNA, 17 nt, Human
ccaggcccaaggcuccc

SEQ ID NO: 1290008 - RNA, 19 nt, Human
ccaggcccaaggcucccgg

SEQ ID NO: 1290009 - RNA, 18 nt, Human
ccaggagcuccagugucc

SEQ ID NO: 1290010 - RNA, 20 nt, Human
ccaggagcuccaguguccug

SEQ ID NO: 1290011 - RNA, 21 nt, Human
ccaggagcuccaguguccuga

SEQ ID NO: 1290012 - RNA, 23 nt, Human
ccaggagcuccaguguccugagc

SEQ ID NO: 1290013 - RNA, 14 nt, Human
ccaggagcuccccu

SEQ ID NO: 1290014 - RNA, 19 nt, Human
ccaggagcuccccucccca

SEQ ID NO: 1290015 - RNA, 20 nt, Human
ccaggagcuccccuccccaa

SEQ ID NO: 1290016 - RNA, 13 nt, Human
ccaggccaggacu

SEQ ID NO: 1290017 - RNA, 17 nt, Human
ccaggccaggacucugc

SEQ ID NO: 1290018 - RNA, 18 nt, Human
ccaggccaggacucugca

SEQ ID NO: 1290019 - RNA, 19 nt, Human
ccaggccaggacucugcag

SEQ ID NO: 1290020 - RNA, 20 nt, Human
ccaggccaggacucugcagc

SEQ ID NO: 1290021 - RNA, 21 nt, Human
ccaggccaggacucugcagcc

SEQ ID NO: 1290022 - RNA, 22 nt, Human
ccaggccaggacucugcagccu

SEQ ID NO: 1290023 - RNA, 18 nt, Human
ccaggccaggcauguggc

SEQ ID NO: 1290024 - RNA, 23 nt, Human
ccaggccaggacucugcagccuc

SEQ ID NO: 1290025 - RNA, 16 nt, Human
ccaggagccugugccu

SEQ ID NO: 1290026 - RNA, 17 nt, Human
ccaggagccugugccuc

SEQ ID NO: 1290027 - RNA, 12 nt, Human
ccaggagcucca

SEQ ID NO: 1290028 - RNA, 13 nt, Human
ccaggagcuccag

SEQ ID NO: 1290029 - RNA, 14 nt, Human
ccaggagcuccagu

SEQ ID NO: 1290030 - RNA, 17 nt, Human
ccaggagcuccaguguc

SEQ ID NO: 1290031 - RNA, 13 nt, Human
ccaggagacaggu

SEQ ID NO: 1290032 - RNA, 15 nt, Human
ccagccuccaugcug

SEQ ID NO: 1290033 - RNA, 16 nt, Human
ccagccuccaugcugc

SEQ ID NO: 1290034 - RNA, 13 nt, Human
ccagccucccuga

SEQ ID NO: 1290035 - RNA, 15 nt, Human
ccagccucccugaag

SEQ ID NO: 1290036 - RNA, 17 nt, Human
ccagccucccugaagcc

SEQ ID NO: 1290037 - RNA, 21 nt, Human
ccagccucccugaagccuuug

SEQ ID NO: 1290038 - RNA, 17 nt, Human
ccaggagaagcucagcu

SEQ ID NO: 1290039 - RNA, 18 nt, Human
ccaggagaagcucagcug

SEQ ID NO: 1290040 - RNA, 21 nt, Human
ccaggagaagcucagcugcau

SEQ ID NO: 1290041 - RNA, 22 nt, Human
ccaggagaagcucagcugcauu

SEQ ID NO: 1290042 - RNA, 20 nt, Human
ccaggagaaggccaauuccu

SEQ ID NO: 1290043 - RNA, 21 nt, Human
ccauaguaugggacuggccuc

SEQ ID NO: 1290044 - RNA, 12 nt, Human
ccauaggucacc

SEQ ID NO: 1290045 - RNA, 15 nt, Human
ccauagguagaaugu

SEQ ID NO: 1290046 - RNA, 13 nt, Human
ccaguguuuaaaa

SEQ ID NO: 1290047 - RNA, 17 nt, Human
ccaguuaaucuugcuuu

SEQ ID NO: 1290048 - RNA, 16 nt, Human
ccaguuaauuuuucca

SEQ ID NO: 1290049 - RNA, 18 nt, Human
ccaguuaauuuuuccaac

SEQ ID NO: 1290050 - RNA, 19 nt, Human
ccaguuaaucuugcuuucu

SEQ ID NO: 1290051 - RNA, 17 nt, Human
ccaguuagccucugcag

SEQ ID NO: 1290052 - RNA, 22 nt, Human
ccaguuagccucugcaggaugu

SEQ ID NO: 1290053 - RNA, 21 nt, Human
ccaguguguggcuuucagagc

SEQ ID NO: 1290054 - RNA, 22 nt, Human
ccaguguguggcuuucagagcc

SEQ ID NO: 1290055 - RNA, 23 nt, Human
ccaguguguggcuuucagagccu

SEQ ID NO: 1290056 - RNA, 17 nt, Human
ccaguguuagggaaggg

SEQ ID NO: 1290057 - RNA, 20 nt, Human
ccaguguuagggaagggccu

SEQ ID NO: 1290058 - RNA, 17 nt, Human
ccaguuaaaaaaaauuu

SEQ ID NO: 1290059 - RNA, 24 nt, Human
ccagugcccugaucccagagagcc

SEQ ID NO: 1290060 - RNA, 20 nt, Human
ccagugucauuucucaucca

SEQ ID NO: 1290061 - RNA, 19 nt, Human
ccaguguccugagccccag

SEQ ID NO: 1290062 - RNA, 22 nt, Human
ccaguguccugagccccaggga

SEQ ID NO: 1290063 - RNA, 23 nt, Human
ccaguguccugagccccagggag

SEQ ID NO: 1290064 - RNA, 18 nt, Human
ccaguguccugagcucag

SEQ ID NO: 1290065 - RNA, 19 nt, Human
ccaguguccugagcucagc

SEQ ID NO: 1290066 - RNA, 20 nt, Human
ccaguguccugagcucagcg

SEQ ID NO: 1290067 - RNA, 23 nt, Human
ccaguguccugagcucagcgugg

SEQ ID NO: 1290068 - RNA, 22 nt, Human
ccaguguccugagcucagcgug

SEQ ID NO: 1290069 - RNA, 16 nt, Human
ccaguguguggcuuuc

SEQ ID NO: 1290070 - RNA, 18 nt, Human
ccaguguguggcuuucag

SEQ ID NO: 1290071 - RNA, 16 nt, Human
ccagucuguggaucag

SEQ ID NO: 1290072 - RNA, 14 nt, Human
ccagugcccccacu

SEQ ID NO: 1290073 - RNA, 16 nt, Human
ccagugcccccacuga

SEQ ID NO: 1290074 - RNA, 18 nt, Human
ccagugcccccacugacc

SEQ ID NO: 1290075 - RNA, 23 nt, Human
ccagugcccucuccccucagccu

SEQ ID NO: 1290076 - RNA, 14 nt, Human
ccagugcccugagc

SEQ ID NO: 1290077 - RNA, 15 nt, Human
ccagugcccugagcc

SEQ ID NO: 1290078 - RNA, 16 nt, Human
ccagugcccugagcca

SEQ ID NO: 1290079 - RNA, 17 nt, Human
ccagugcccugagccag

SEQ ID NO: 1290080 - RNA, 18 nt, Human
ccagugcccugagccagg

SEQ ID NO: 1290081 - RNA, 21 nt, Human
ccagugcccugagccaggguc

SEQ ID NO: 1290082 - RNA, 16 nt, Human
ccagugcccugauccc

SEQ ID NO: 1290083 - RNA, 17 nt, Human
ccagugcccugauccca

SEQ ID NO: 1290084 - RNA, 18 nt, Human
ccagugcccugaucccag

SEQ ID NO: 1290085 - RNA, 23 nt, Human
ccagcauaauacuugcuuuggaa

SEQ ID NO: 1290086 - RNA, 11 nt, Human
ccagcaucugg

SEQ ID NO: 1290087 - RNA, 12 nt, Human
ccagcaucuggg

SEQ ID NO: 1290088 - RNA, 13 nt, Human
ccagcaucugggc

SEQ ID NO: 1290089 - RNA, 14 nt, Human
ccagcaucugggcc

SEQ ID NO: 1290090 - RNA, 15 nt, Human
ccagcaucugggccu

SEQ ID NO: 1290091 - RNA, 17 nt, Human
ccagcaucugggccuug

SEQ ID NO: 1290092 - RNA, 21 nt, Human
ccagcaucugggccuuggccu

SEQ ID NO: 1290093 - RNA, 14 nt, Human
ccagcauuccagcc

SEQ ID NO: 1290094 - RNA, 15 nt, Human
ccagcauuccagccc

SEQ ID NO: 1290095 - RNA, 16 nt, Human
ccagcauuccagcccc

SEQ ID NO: 1290096 - RNA, 17 nt, Human
ccagcauuccagccccu

SEQ ID NO: 1290097 - RNA, 18 nt, Human
ccagcauuccagccccuc

SEQ ID NO: 1290098 - RNA, 19 nt, Human
ccagcauuccagccccucu

SEQ ID NO: 1290099 - RNA, 20 nt, Human
ccagcauuccagccccucug

SEQ ID NO: 1290100 - RNA, 21 nt, Human
ccagcauuccagccccucugg

SEQ ID NO: 1290101 - RNA, 22 nt, Human
ccagcauuccagccccucuggu

SEQ ID NO: 1290102 - RNA, 14 nt, Human
ccagcauucccagg

SEQ ID NO: 1290103 - RNA, 15 nt, Human
ccagcauucccaggu

SEQ ID NO: 1290104 - RNA, 20 nt, Human
ccagcacucgcuagcagugg

SEQ ID NO: 1290105 - RNA, 12 nt, Human
ccagcacugcuu

SEQ ID NO: 1290106 - RNA, 15 nt, Human
ccagcacugcuugag

SEQ ID NO: 1290107 - RNA, 18 nt, Human
ccagcacugcuugaggaa

SEQ ID NO: 1290108 - RNA, 19 nt, Human
ccagcacugcuugaggaaa

SEQ ID NO: 1290109 - RNA, 22 nt, Human
ccagcacugcuugaggaaaaca

SEQ ID NO: 1290110 - RNA, 15 nt, Human
ccagcaggugcugac

SEQ ID NO: 1290111 - RNA, 18 nt, Human
ccagcaggugcugacuuc

SEQ ID NO: 1290112 - RNA, 14 nt, Human
ccagccaagcucug

SEQ ID NO: 1290113 - RNA, 20 nt, Human
ccagccaagcucugcagucc

SEQ ID NO: 1290114 - RNA, 16 nt, Human
ccagcauuucccuucc

SEQ ID NO: 1290115 - RNA, 21 nt, Human
ccagcauuucccuuccuuccu

SEQ ID NO: 1290116 - RNA, 17 nt, Human
ccagcauucccagguag

SEQ ID NO: 1290117 - RNA, 19 nt, Human
ccagcauucccagguaggc

SEQ ID NO: 1290118 - RNA, 21 nt, Human
ccagcauucccagguaggcca

SEQ ID NO: 1290119 - RNA, 22 nt, Human
ccagccagcgucggucugugcc

SEQ ID NO: 1290120 - RNA, 14 nt, Human
ccagccaggcccag

SEQ ID NO: 1290121 - RNA, 16 nt, Human
ccagccaggcccagcc

SEQ ID NO: 1290122 - RNA, 22 nt, Human
ccagccaggcccagccgacccc

SEQ ID NO: 1290123 - RNA, 18 nt, Human
ccagccaggcccagccga

SEQ ID NO: 1290124 - RNA, 20 nt, Human
ccagccaggcccagccgacc

SEQ ID NO: 1290125 - RNA, 21 nt, Human
ccagccaggcccagccgaccc

SEQ ID NO: 1290126 - RNA, 14 nt, Human
ccagccucagcucu

SEQ ID NO: 1290127 - RNA, 15 nt, Human
ccagccgacccccuc

SEQ ID NO: 1290128 - RNA, 18 nt, Human
ccagccgagcaggaggcc

SEQ ID NO: 1290129 - RNA, 21 nt, Human
ccagccuccaagcuccaucuc

SEQ ID NO: 1290130 - RNA, 14 nt, Human
ccagccgacccccu

SEQ ID NO: 1290131 - RNA, 17 nt, Human
ccagccgacccccucuc

SEQ ID NO: 1290132 - RNA, 21 nt, Human
ccagcccuccuuaucaaagga

SEQ ID NO: 1290133 - RNA, 13 nt, Human
ccagccccagcca

SEQ ID NO: 1290134 - RNA, 15 nt, Human
ccagccccagccagg

SEQ ID NO: 1290135 - RNA, 16 nt, Human
ccagccccagccaggg

SEQ ID NO: 1290136 - RNA, 13 nt, Human
ccagcccucaucc

SEQ ID NO: 1290137 - RNA, 14 nt, Human
ccagcccucauccc

SEQ ID NO: 1290138 - RNA, 19 nt, Human
ccagccagggcucaaucuc

SEQ ID NO: 1290139 - RNA, 15 nt, Human
ccagccagggcucaa

SEQ ID NO: 1290140 - RNA, 19 nt, Human
ccagccccacuccucugcu

SEQ ID NO: 1290141 - RNA, 18 nt, Human
ccagccccacuccucugc

SEQ ID NO: 1290142 - RNA, 23 nt, Human
ccagcaauuacaacggagucaaa

SEQ ID NO: 1290143 - RNA, 16 nt, Human
ccagcaauucuccugc

SEQ ID NO: 1290144 - RNA, 18 nt, Human
ccagcaauucuccugccu

SEQ ID NO: 1290145 - RNA, 19 nt, Human
ccagcaauucuccugccuc

SEQ ID NO: 1290146 - RNA, 20 nt, Human
ccagcaauucuccugccuca

SEQ ID NO: 1290147 - RNA, 21 nt, Human
ccagcaauucuccugccucag

SEQ ID NO: 1290148 - RNA, 17 nt, Human
ccagauuagagccugua

SEQ ID NO: 1290149 - RNA, 20 nt, Human
ccagcaagcggggauguccc

SEQ ID NO: 1290150 - RNA, 22 nt, Human
ccagcaagcggggaugucccug

SEQ ID NO: 1290151 - RNA, 15 nt, Human
ccagaccauggacac

SEQ ID NO: 1290152 - RNA, 18 nt, Human
ccagaccauugucucaga

SEQ ID NO: 1290153 - RNA, 21 nt, Human
ccagaccauugucucagagca

SEQ ID NO: 1290154 - RNA, 19 nt, Human
ccacuguacuugcucuuga

SEQ ID NO: 1290155 - RNA, 18 nt, Human
ccacuguacuugcucuug

SEQ ID NO: 1290156 - RNA, 17 nt, Human
ccacuguacuugcucuu

SEQ ID NO: 1290157 - RNA, 16 nt, Human
ccacuggcuggacaaa

SEQ ID NO: 1290158 - RNA, 11 nt, Human
ccacuggcucc

SEQ ID NO: 1290159 - RNA, 20 nt, Human
ccacuguacuugcucuugau

SEQ ID NO: 1290160 - RNA, 14 nt, Human
ccagacacccagga

SEQ ID NO: 1290161 - RNA, 15 nt, Human
ccagacacccaggac

SEQ ID NO: 1290162 - RNA, 16 nt, Human
ccagacacccaggacu

SEQ ID NO: 1290163 - RNA, 16 nt, Human
ccagagcacugcucca

SEQ ID NO: 1290164 - RNA, 20 nt, Human
ccagagcaccugcugucugg

SEQ ID NO: 1290165 - RNA, 17 nt, Human
ccagagcaccugcuguc

SEQ ID NO: 1290166 - RNA, 18 nt, Human
ccagagcaccugcugucu

SEQ ID NO: 1290167 - RNA, 19 nt, Human
ccagagcaccugcugucug

SEQ ID NO: 1290168 - RNA, 13 nt, Human
ccagagcaaaaua

SEQ ID NO: 1290169 - RNA, 20 nt, Human
ccagagauccaaaagaagcc

SEQ ID NO: 1290170 - RNA, 17 nt, Human
ccagaggaaggggccag

SEQ ID NO: 1290171 - RNA, 19 nt, Human
ccagaggaaggggccagag

SEQ ID NO: 1290172 - RNA, 22 nt, Human
ccagaggaaggggccagaggcu

SEQ ID NO: 1290173 - RNA, 16 nt, Human
ccagaggagccaccag

SEQ ID NO: 1290174 - RNA, 17 nt, Human
ccagaggagccaccagu

SEQ ID NO: 1290175 - RNA, 19 nt, Human
ccagaggagccaccaguuc

SEQ ID NO: 1290176 - RNA, 21 nt, Human
ccagaggagccaccaguucuc

SEQ ID NO: 1290177 - RNA, 21 nt, Human
ccagaggauugcugccccauc

SEQ ID NO: 1290178 - RNA, 15 nt, Human
ccagaggccaaggag

SEQ ID NO: 1290179 - RNA, 14 nt, Human
ccagaggcccccag

SEQ ID NO: 1290180 - RNA, 15 nt, Human
ccagaggcccccagc

SEQ ID NO: 1290181 - RNA, 18 nt, Human
ccagaggcccccagccca

SEQ ID NO: 1290182 - RNA, 19 nt, Human
ccagaggcccccagcccag

SEQ ID NO: 1290183 - RNA, 21 nt, Human
ccagaggcccccagcccaggg

SEQ ID NO: 1290184 - RNA, 22 nt, Human
ccagaggcccccagcccagggc

SEQ ID NO: 1290185 - RNA, 19 nt, Human
ccagaggcuauuauuuuca

SEQ ID NO: 1290186 - RNA, 11 nt, Human
ccagaggcucg

SEQ ID NO: 1290187 - RNA, 19 nt, Human
ccagaggccaaggaggccu

SEQ ID NO: 1290188 - RNA, 12 nt, Human
ccagaggcuggg

SEQ ID NO: 1290189 - RNA, 15 nt, Human
ccagaggcuggguuc

SEQ ID NO: 1290190 - RNA, 22 nt, Human
ccagauuuaugcauauuauuuu

SEQ ID NO: 1290191 - RNA, 13 nt, Human
ccagauuuaugca

SEQ ID NO: 1290192 - RNA, 16 nt, Human
ccagaggcuggguuca

SEQ ID NO: 1290193 - RNA, 16 nt, Human
ccagaugcagcucaag

SEQ ID NO: 1290194 - RNA, 14 nt, Human
ccagaugcagggca

SEQ ID NO: 1290195 - RNA, 15 nt, Human
ccagaugcagggcag

SEQ ID NO: 1290196 - RNA, 18 nt, Human
ccagaugcagggcaguca

SEQ ID NO: 1290197 - RNA, 18 nt, Human
ccagaugccccuuucugg

SEQ ID NO: 1290198 - RNA, 17 nt, Human
ccagaugccccuuucug

SEQ ID NO: 1290199 - RNA, 14 nt, Human
ccagaugcugaaaa

SEQ ID NO: 1290200 - RNA, 14 nt, Human
ccagaugcuuuccu

SEQ ID NO: 1290201 - RNA, 22 nt, Human
ccacugccuuugaccugccucc

SEQ ID NO: 1290202 - RNA, 14 nt, Human
ccacugccuuugac

SEQ ID NO: 1290203 - RNA, 22 nt, Human
ccacugccuucgcuucuugccu

SEQ ID NO: 1290204 - RNA, 23 nt, Human
ccacugccuucgcuucuugccuc

SEQ ID NO: 1290205 - RNA, 11 nt, Human
ccacugccucu

SEQ ID NO: 1290206 - RNA, 15 nt, Human
ccacugccuucgcuu

SEQ ID NO: 1290207 - RNA, 16 nt, Human
ccacugccuucgcuuc

SEQ ID NO: 1290208 - RNA, 18 nt, Human
ccacugccuucgcuucuu

SEQ ID NO: 1290209 - RNA, 11 nt, Human
ccacuggagca

SEQ ID NO: 1290210 - RNA, 23 nt, Human
ccacuggcuggacaaacugcacc

SEQ ID NO: 1290211 - RNA, 18 nt, Human
ccacuggagcagaagggg

SEQ ID NO: 1290212 - RNA, 12 nt, Human
ccacucccucac

SEQ ID NO: 1290213 - RNA, 13 nt, Human
ccacucccucaca

SEQ ID NO: 1290214 - RNA, 14 nt, Human
ccacucccucacaa

SEQ ID NO: 1290215 - RNA, 18 nt, Human
ccacucccuccuaaccua

SEQ ID NO: 1290216 - RNA, 17 nt, Human
ccacugcccccugcugc

SEQ ID NO: 1290217 - RNA, 19 nt, Human
ccacugcccccugcugcca

SEQ ID NO: 1290218 - RNA, 20 nt, Human
ccacugcccccugcugccau

SEQ ID NO: 1290219 - RNA, 14 nt, Human
ccacucacaacagc

SEQ ID NO: 1290220 - RNA, 20 nt, Human
ccacucacaacagcugccug

SEQ ID NO: 1290221 - RNA, 17 nt, Human
ccacuccagaccccugg

SEQ ID NO: 1290222 - RNA, 19 nt, Human
ccacuccagaccccuggcu

SEQ ID NO: 1290223 - RNA, 20 nt, Human
ccacuccagaccccuggcuu

SEQ ID NO: 1290224 - RNA, 18 nt, Human
ccacuccaagcccagccc

SEQ ID NO: 1290225 - RNA, 19 nt, Human
ccacucaugugacucuuuc

SEQ ID NO: 1290226 - RNA, 22 nt, Human
ccacucaugugacucuuuccaa

SEQ ID NO: 1290227 - RNA, 22 nt, Human
ccacucacuaggcccccacuug

SEQ ID NO: 1290228 - RNA, 18 nt, Human
ccacucacuaggccccca

SEQ ID NO: 1290229 - RNA, 23 nt, Human
ccacguucugcucaucauucucu

SEQ ID NO: 1290230 - RNA, 20 nt, Human
ccacguuggagaagcccgug

SEQ ID NO: 1290231 - RNA, 21 nt, Human
ccacguuggagaagcccgugu

SEQ ID NO: 1290232 - RNA, 21 nt, Human
ccacuaaccuugccugguaca

SEQ ID NO: 1290233 - RNA, 17 nt, Human
ccacuaaccuugccugg

SEQ ID NO: 1290234 - RNA, 20 nt, Human
ccaccucccucaaccucauc

SEQ ID NO: 1290235 - RNA, 18 nt, Human
ccaccucccucaaccuca

SEQ ID NO: 1290236 - RNA, 15 nt, Human
ccaccuccccuuggg

SEQ ID NO: 1290237 - RNA, 16 nt, Human
ccaccuccccuugggc

SEQ ID NO: 1290238 - RNA, 20 nt, Human
ccaccugaauaaagaaugaa

SEQ ID NO: 1290239 - RNA, 16 nt, Human
ccaccugacacaccag

SEQ ID NO: 1290240 - RNA, 17 nt, Human
ccaccugacacaccagg

SEQ ID NO: 1290241 - RNA, 20 nt, Human
ccaccugacauuccuugcug

SEQ ID NO: 1290242 - RNA, 20 nt, Human
ccaccugaggaacugucucg

SEQ ID NO: 1290243 - RNA, 20 nt, Human
ccaccugacacaccaggcgc

SEQ ID NO: 1290244 - RNA, 23 nt, Human
ccaccugacacaccaggcgcuaa

SEQ ID NO: 1290245 - RNA, 16 nt, Human
ccaccuccccccacaa

SEQ ID NO: 1290246 - RNA, 14 nt, Human
ccaccugcccaacc

SEQ ID NO: 1290247 - RNA, 19 nt, Human
ccaccugcuagugugaauu

SEQ ID NO: 1290248 - RNA, 22 nt, Human
ccaccugcuagugugaauuaaa

SEQ ID NO: 1290249 - RNA, 22 nt, Human
ccacggaccaaagggagucugc

SEQ ID NO: 1290250 - RNA, 12 nt, Human
ccacggagccac

SEQ ID NO: 1290251 - RNA, 20 nt, Human
ccacggagccacuccucuga

SEQ ID NO: 1290252 - RNA, 21 nt, Human
ccacggagccacuccucugac

SEQ ID NO: 1290253 - RNA, 15 nt, Human
ccacggcaccugggc

SEQ ID NO: 1290254 - RNA, 20 nt, Human
ccacggcaccugggcccugg

SEQ ID NO: 1290255 - RNA, 19 nt, Human
ccacggcaccugggcccug

SEQ ID NO: 1290256 - RNA, 22 nt, Human
ccacccucguggacaccugccc

SEQ ID NO: 1290257 - RNA, 21 nt, Human
ccacccucguggacaccugcc

SEQ ID NO: 1290258 - RNA, 12 nt, Human
ccacccucacug

SEQ ID NO: 1290259 - RNA, 14 nt, Human
ccacccucacuggc

SEQ ID NO: 1290260 - RNA, 17 nt, Human
ccacccucacuggcucu

SEQ ID NO: 1290261 - RNA, 19 nt, Human
ccacccucacuggcucucc

SEQ ID NO: 1290262 - RNA, 21 nt, Human
ccacccucacuggcucuccug

SEQ ID NO: 1290263 - RNA, 23 nt, Human
ccaccccuuucuagaccaauaaa

SEQ ID NO: 1290264 - RNA, 22 nt, Human
ccacccagaaugagacauccag

SEQ ID NO: 1290265 - RNA, 17 nt, Human
ccacccagaggcagcag

SEQ ID NO: 1290266 - RNA, 11 nt, Human
ccacccagagg

SEQ ID NO: 1290267 - RNA, 16 nt, Human
ccaccccgccugcccu

SEQ ID NO: 1290268 - RNA, 22 nt, Human
ccaaaccacuuuuugcagcuuu

SEQ ID NO: 1290269 - RNA, 14 nt, Human
ccaaaccacuuuuu

SEQ ID NO: 1290270 - RNA, 16 nt, Human
ccaaaccaggacccug

SEQ ID NO: 1290271 - RNA, 11 nt, Human
ccaaaccacuu

SEQ ID NO: 1290272 - RNA, 23 nt, Human
ccacacccuguacuguucugugu

SEQ ID NO: 1290273 - RNA, 16 nt, Human
ccacacccacacucag

SEQ ID NO: 1290274 - RNA, 14 nt, Human
ccacacuccagcug

SEQ ID NO: 1290275 - RNA, 17 nt, Human
ccacacuccagcuggga

SEQ ID NO: 1290276 - RNA, 13 nt, Human
ccacacuccagcu

SEQ ID NO: 1290277 - RNA, 11 nt, Human
ccacaccuccu

SEQ ID NO: 1290278 - RNA, 15 nt, Human
ccacaccuccuuccc

SEQ ID NO: 1290279 - RNA, 16 nt, Human
ccacaccuccuucccu

SEQ ID NO: 1290280 - RNA, 19 nt, Human
ccacaccuccuucccucuc

SEQ ID NO: 1290281 - RNA, 22 nt, Human
ccacccaauucaaaacauugug

SEQ ID NO: 1290282 - RNA, 15 nt, Human
ccacccacuucugca

SEQ ID NO: 1290283 - RNA, 17 nt, Human
ccacccacuucugcacu

SEQ ID NO: 1290284 - RNA, 14 nt, Human
ccaccaagccuuga

SEQ ID NO: 1290285 - RNA, 12 nt, Human
ccaccaagccuu

SEQ ID NO: 1290286 - RNA, 13 nt, Human
ccaccaagccuug

SEQ ID NO: 1290287 - RNA, 24 nt, Human
ccacaugauucugauguacucuaa

SEQ ID NO: 1290288 - RNA, 23 nt, Human
ccacauagugaugguuccccugu

SEQ ID NO: 1290289 - RNA, 14 nt, Human
ccacaucaaagagg

SEQ ID NO: 1290290 - RNA, 15 nt, Human
ccacauacccugacc

SEQ ID NO: 1290291 - RNA, 12 nt, Human
ccacacugcaca

SEQ ID NO: 1290292 - RNA, 14 nt, Human
ccacacugcacaau

SEQ ID NO: 1290293 - RNA, 13 nt, Human
ccacaccugcggc

SEQ ID NO: 1290294 - RNA, 19 nt, Human
ccacauagugaugguuccc

SEQ ID NO: 1290295 - RNA, 21 nt, Human
ccacauagugaugguuccccu

SEQ ID NO: 1290296 - RNA, 22 nt, Human
ccacauagugaugguuccccug

SEQ ID NO: 1290297 - RNA, 22 nt, Human
cauuauucguagauauuggaca

SEQ ID NO: 1290298 - RNA, 15 nt, Human
cauuagaaauauuuu

SEQ ID NO: 1290299 - RNA, 18 nt, Human
cauuauuggaauauaauu

SEQ ID NO: 1290300 - RNA, 23 nt, Human
cauuacuauaagaacuuugagcu

SEQ ID NO: 1290301 - RNA, 17 nt, Human
cauuacugaaaacuuca

SEQ ID NO: 1290302 - RNA, 13 nt, Human
cauuacugcaugc

SEQ ID NO: 1290303 - RNA, 16 nt, Human
cauuacugcaugcacu

SEQ ID NO: 1290304 - RNA, 23 nt, Human
cauuacugcaugcacuucuuaca

SEQ ID NO: 1290305 - RNA, 23 nt, Human
cauuacuguacaggguuaucugc

SEQ ID NO: 1290306 - RNA, 17 nt, Human
cauuacuauaagaacuu

SEQ ID NO: 1290307 - RNA, 14 nt, Human
cauuagaaauauuu

SEQ ID NO: 1290308 - RNA, 18 nt, Human
cauuagaaauauuuuaaa

SEQ ID NO: 1290309 - RNA, 19 nt, Human
cauuagaagacaauugaca

SEQ ID NO: 1290310 - RNA, 14 nt, Human
cauuagaauuauuu

SEQ ID NO: 1290311 - RNA, 19 nt, Human
cauuagaauuauuuaaaca

SEQ ID NO: 1290312 - RNA, 20 nt, Human
cauucaaauguauuacagug

SEQ ID NO: 1290313 - RNA, 14 nt, Human
cauuauuuuccaga

SEQ ID NO: 1290314 - RNA, 23 nt, Human
cauucaaaauaggguauauuuuc

SEQ ID NO: 1290315 - RNA, 12 nt, Human
cauucaacaaga

SEQ ID NO: 1290316 - RNA, 18 nt, Human
cauucaacagagacugaa

SEQ ID NO: 1290317 - RNA, 16 nt, Human
cauucaagucagcucu

SEQ ID NO: 1290318 - RNA, 17 nt, Human
cauucaagucagcucuu

SEQ ID NO: 1290319 - RNA, 17 nt, Human
cauucaaguguaaaaua

SEQ ID NO: 1290320 - RNA, 14 nt, Human
cauucaagauuccc

SEQ ID NO: 1290321 - RNA, 22 nt, Human
cauucaaguguaaaauauuuug

SEQ ID NO: 1290322 - RNA, 23 nt, Human
cauucaaguguaaaauauuuuga

SEQ ID NO: 1290323 - RNA, 18 nt, Human
cauucaaguguaaaauau

SEQ ID NO: 1290324 - RNA, 19 nt, Human
cauucaaguguaaaauauu

SEQ ID NO: 1290325 - RNA, 20 nt, Human
cauucaaguguaaaauauuu

SEQ ID NO: 1290326 - RNA, 21 nt, Human
cauucaaguguaaaauauuuu

SEQ ID NO: 1290327 - RNA, 22 nt, Human
cauucacaguucuuugggccag

SEQ ID NO: 1290328 - RNA, 23 nt, Human
cauucacaguucuuugggccaga

SEQ ID NO: 1290329 - RNA, 17 nt, Human
cauucacaucgcagauu

SEQ ID NO: 1290330 - RNA, 13 nt, Human
cauucaccugccc

SEQ ID NO: 1290331 - RNA, 15 nt, Human
cauuaaacaugacuc

SEQ ID NO: 1290332 - RNA, 19 nt, Human
cauuaaaccaucucccugg

SEQ ID NO: 1290333 - RNA, 18 nt, Human
cauuaacucauuagacug

SEQ ID NO: 1290334 - RNA, 15 nt, Human
cauuaacucauuaga

SEQ ID NO: 1290335 - RNA, 17 nt, Human
cauuacaaguauuuuua

SEQ ID NO: 1290336 - RNA, 21 nt, Human
cauucagauaugauucaaaug

SEQ ID NO: 1290337 - RNA, 17 nt, Human
cauucagaagaaaaaga

SEQ ID NO: 1290338 - RNA, 13 nt, Human
cauucaggaauuc

SEQ ID NO: 1290339 - RNA, 19 nt, Human
cauucaggaauucuuggag

SEQ ID NO: 1290340 - RNA, 17 nt, Human
cauucaggacugcuggu

SEQ ID NO: 1290341 - RNA, 20 nt, Human
cauucacuucacugugcugu

SEQ ID NO: 1290342 - RNA, 19 nt, Human
cauucacuucacugugcug

SEQ ID NO: 1290343 - RNA, 14 nt, Human
cauucacuucauaa

SEQ ID NO: 1290344 - RNA, 15 nt, Human
cauucacuucauaau

SEQ ID NO: 1290345 - RNA, 13 nt, Human
cauucagaagaaa

SEQ ID NO: 1290346 - RNA, 18 nt, Human
cauucagaagaaaaagaa

SEQ ID NO: 1290347 - RNA, 18 nt, Human
cauucacuucacugugcu

SEQ ID NO: 1290348 - RNA, 17 nt, Human
cauucacuucacugugc

SEQ ID NO: 1290349 - RNA, 14 nt, Human
cauucacuucacug

SEQ ID NO: 1290350 - RNA, 11 nt, Human
cauucacuuca

SEQ ID NO: 1290351 - RNA, 15 nt, Human
cauucaccugcccca

SEQ ID NO: 1290352 - RNA, 16 nt, Human
cauucaccugccccaa

SEQ ID NO: 1290353 - RNA, 19 nt, Human
cauucaccugccccaacuc

SEQ ID NO: 1290354 - RNA, 19 nt, Human
cauucauuuucuggguguu

SEQ ID NO: 1290355 - RNA, 17 nt, Human
cauucauuuuuguuguu

SEQ ID NO: 1290356 - RNA, 16 nt, Human
cauuccaaagaacagc

SEQ ID NO: 1290357 - RNA, 17 nt, Human
cauucauuccauucugg

SEQ ID NO: 1290358 - RNA, 16 nt, Human
cauucauuccauucug

SEQ ID NO: 1290359 - RNA, 20 nt, Human
cauucauuuagcuaaacgga

SEQ ID NO: 1290360 - RNA, 15 nt, Human
cauucauuccauucu

SEQ ID NO: 1290361 - RNA, 21 nt, Human
cauucauuagucauguuuauc

SEQ ID NO: 1290362 - RNA, 22 nt, Human
cauuccaacuaucucauuucca

SEQ ID NO: 1290363 - RNA, 21 nt, Human
cauuccaacucguauagcaug

SEQ ID NO: 1290364 - RNA, 22 nt, Human
cauuccaccuucccaugcccug

SEQ ID NO: 1290365 - RNA, 17 nt, Human
cauuccaccuucccaug

SEQ ID NO: 1290366 - RNA, 14 nt, Human
cauuccaagacucu

SEQ ID NO: 1290367 - RNA, 17 nt, Human
cauuccaagacucuaga

SEQ ID NO: 1290368 - RNA, 14 nt, Human
cauuccauccuuga

SEQ ID NO: 1290369 - RNA, 12 nt, Human
cauuccauccuu

SEQ ID NO: 1290370 - RNA, 15 nt, Human
cauuccaugugccca

SEQ ID NO: 1290371 - RNA, 16 nt, Human
cauuccaugugcccag

SEQ ID NO: 1290372 - RNA, 17 nt, Human
cauuccaugugcccagu

SEQ ID NO: 1290373 - RNA, 18 nt, Human
cauuccaugugcccaguu

SEQ ID NO: 1290374 - RNA, 22 nt, Human
cauuccagccccucuggucgcu

SEQ ID NO: 1290375 - RNA, 18 nt, Human
cauuccaagacucuagag

SEQ ID NO: 1290376 - RNA, 13 nt, Human
cauuccagccccu

SEQ ID NO: 1290377 - RNA, 15 nt, Human
cauuccagccccucu

SEQ ID NO: 1290378 - RNA, 18 nt, Human
cauuccagccccucuggu

SEQ ID NO: 1290379 - RNA, 19 nt, Human
cauuccagccccucugguc

SEQ ID NO: 1290380 - RNA, 14 nt, Human
cauuccauucugga

SEQ ID NO: 1290381 - RNA, 21 nt, Human
cauuccaugugcccaguuaau

SEQ ID NO: 1290382 - RNA, 15 nt, Human
cauuccauucuggaa

SEQ ID NO: 1290383 - RNA, 13 nt, Human
cauuccccauggg

SEQ ID NO: 1290384 - RNA, 11 nt, Human
cauucccaggu

SEQ ID NO: 1290385 - RNA, 17 nt, Human
cauuccccgucucuggu

SEQ ID NO: 1290386 - RNA, 13 nt, Human
cauucccccagug

SEQ ID NO: 1290387 - RNA, 14 nt, Human
cauucccccagugc

SEQ ID NO: 1290388 - RNA, 15 nt, Human
cauucccccagugcg

SEQ ID NO: 1290389 - RNA, 16 nt, Human
cauucccgcaguggga

SEQ ID NO: 1290390 - RNA, 19 nt, Human
cauucccgcagugggagca

SEQ ID NO: 1290391 - RNA, 20 nt, Human
cauucccgcagugggagcaa

SEQ ID NO: 1290392 - RNA, 22 nt, Human
cauucccgcagugggagcaaac

SEQ ID NO: 1290393 - RNA, 15 nt, Human
cauuccauaaauguc

SEQ ID NO: 1290394 - RNA, 20 nt, Human
cauuccgcagcccccacccc

SEQ ID NO: 1290395 - RNA, 13 nt, Human
cauuccgcagccc

SEQ ID NO: 1290396 - RNA, 13 nt, Human
cauuccuccaggu

SEQ ID NO: 1290397 - RNA, 12 nt, Human
cauuccuccagg

SEQ ID NO: 1290398 - RNA, 19 nt, Human
cauuccucccauucaagau

SEQ ID NO: 1290399 - RNA, 18 nt, Human
cauuccucccauucaaga

SEQ ID NO: 1290400 - RNA, 14 nt, Human
cauuccucugcccu

SEQ ID NO: 1290401 - RNA, 17 nt, Human
cauuccucaugaaugua

SEQ ID NO: 1290402 - RNA, 18 nt, Human
cauuccucaugaauguaa

SEQ ID NO: 1290403 - RNA, 19 nt, Human
cauuccucaugaauguaaa

SEQ ID NO: 1290404 - RNA, 21 nt, Human
cauuccucaugaauguaaauu

SEQ ID NO: 1290405 - RNA, 14 nt, Human
cauuccugaacagg

SEQ ID NO: 1290406 - RNA, 13 nt, Human
cauuccugaagaa

SEQ ID NO: 1290407 - RNA, 16 nt, Human
cauuccugaagaacca

SEQ ID NO: 1290408 - RNA, 17 nt, Human
cauuccugaagaaccag

SEQ ID NO: 1290409 - RNA, 20 nt, Human
cauuccugaagaaccagucc

SEQ ID NO: 1290410 - RNA, 21 nt, Human
cauuccugaagaaccaguccc

SEQ ID NO: 1290411 - RNA, 21 nt, Human
cauuccugggaaauauucccu

SEQ ID NO: 1290412 - RNA, 15 nt, Human
cauucugaaugcuuc

SEQ ID NO: 1290413 - RNA, 16 nt, Human
cauucugaaugcuucu

SEQ ID NO: 1290414 - RNA, 18 nt, Human
cauucugaaugcuucuaa

SEQ ID NO: 1290415 - RNA, 12 nt, Human
cauucugacucg

SEQ ID NO: 1290416 - RNA, 16 nt, Human
cauucugacucgguuu

SEQ ID NO: 1290417 - RNA, 19 nt, Human
cauucugacucgguuucuc

SEQ ID NO: 1290418 - RNA, 21 nt, Human
cauucugacucgguuucucca

SEQ ID NO: 1290419 - RNA, 23 nt, Human
cauucugacucgguuucuccaaa

SEQ ID NO: 1290420 - RNA, 23 nt, Human
cauucugauucgaaugacacugu

SEQ ID NO: 1290421 - RNA, 22 nt, Human
cauucugauucgaaugacacug

SEQ ID NO: 1290422 - RNA, 11 nt, Human
cauucugcaag

SEQ ID NO: 1290423 - RNA, 17 nt, Human
cauucugcaaguauacu

SEQ ID NO: 1290424 - RNA, 17 nt, Human
cauucugccucucuagg

SEQ ID NO: 1290425 - RNA, 18 nt, Human
cauucugccucucuagga

SEQ ID NO: 1290426 - RNA, 16 nt, Human
cauucuggaagugacu

SEQ ID NO: 1290427 - RNA, 14 nt, Human
cauucugcuccuuc

SEQ ID NO: 1290428 - RNA, 16 nt, Human
cauucuggaccucugg

SEQ ID NO: 1290429 - RNA, 12 nt, Human
cauucuggaagu

SEQ ID NO: 1290430 - RNA, 16 nt, Human
cauucugcuccuuccc

SEQ ID NO: 1290431 - RNA, 17 nt, Human
cauucuggaccucuggg

SEQ ID NO: 1290432 - RNA, 13 nt, Human
cauucuggaauaa

SEQ ID NO: 1290433 - RNA, 15 nt, Human
cauucugucuugaag

SEQ ID NO: 1290434 - RNA, 17 nt, Human
cauucuucaagauccca

SEQ ID NO: 1290435 - RNA, 13 nt, Human
cauucuucaagau

SEQ ID NO: 1290436 - RNA, 12 nt, Human
cauucuucaaga

SEQ ID NO: 1290437 - RNA, 21 nt, Human
cauucuuauuucaugaaaauu

SEQ ID NO: 1290438 - RNA, 13 nt, Human
cauucuuccuagu

SEQ ID NO: 1290439 - RNA, 18 nt, Human
cauucuuccuaguuuucu

SEQ ID NO: 1290440 - RNA, 21 nt, Human
cauucuuccuaguuuucuccu

SEQ ID NO: 1290441 - RNA, 16 nt, Human
cauucuucucuguugu

SEQ ID NO: 1290442 - RNA, 18 nt, Human
cauucuucucuguugucg

SEQ ID NO: 1290443 - RNA, 21 nt, Human
cauucuucucuguugucguaa

SEQ ID NO: 1290444 - RNA, 19 nt, Human
cauucuucugagcacuguu

SEQ ID NO: 1290445 - RNA, 18 nt, Human
cauucuucugagcacugu

SEQ ID NO: 1290446 - RNA, 12 nt, Human
cauucuuuccca

SEQ ID NO: 1290447 - RNA, 14 nt, Human
cauucuuucccaac

SEQ ID NO: 1290448 - RNA, 16 nt, Human
cauugaaaagagcuga

SEQ ID NO: 1290449 - RNA, 23 nt, Human
cauuuuaccuuugacaaagguaa

SEQ ID NO: 1290450 - RNA, 15 nt, Human
cauuugcuuuuugug

SEQ ID NO: 1290451 - RNA, 19 nt, Human
cauuugcuuuuugugauau

SEQ ID NO: 1290452 - RNA, 16 nt, Human
cauuugcuuuuucacc

SEQ ID NO: 1290453 - RNA, 17 nt, Human
cauuugcuguuuuaaac

SEQ ID NO: 1290454 - RNA, 18 nt, Human
cauuuuacauuaaauuuu

SEQ ID NO: 1290455 - RNA, 15 nt, Human
cauuucuuuuuggga

SEQ ID NO: 1290456 - RNA, 22 nt, Human
cauuucuuuuugggagagacuu

SEQ ID NO: 1290457 - RNA, 22 nt, Human
cauuugcaagggaaaagucucu

SEQ ID NO: 1290458 - RNA, 14 nt, Human
cauuugcagggucc

SEQ ID NO: 1290459 - RNA, 19 nt, Human
cauuugcaggguccucuuc

SEQ ID NO: 1290460 - RNA, 20 nt, Human
cauuugcaggguccucuucu

SEQ ID NO: 1290461 - RNA, 22 nt, Human
cauuugcaggguccucuucugg

SEQ ID NO: 1290462 - RNA, 14 nt, Human
cauuugcauuuguu

SEQ ID NO: 1290463 - RNA, 13 nt, Human
cauuugcauuugu

SEQ ID NO: 1290464 - RNA, 20 nt, Human
cauuugcugaauagcuacua

SEQ ID NO: 1290465 - RNA, 15 nt, Human
cauuugcuguuuuaa

SEQ ID NO: 1290466 - RNA, 16 nt, Human
cauuugcuguuuuaaa

SEQ ID NO: 1290467 - RNA, 14 nt, Human
cauuugcuuuggaa

SEQ ID NO: 1290468 - RNA, 15 nt, Human
cauuugcuuuggaag

SEQ ID NO: 1290469 - RNA, 16 nt, Human
cauuuuuacaauguaa

SEQ ID NO: 1290470 - RNA, 18 nt, Human
cauuuuuaccaucacuga

SEQ ID NO: 1290471 - RNA, 19 nt, Human
cauuuuuacaauguaauua

SEQ ID NO: 1290472 - RNA, 20 nt, Human
cauuuuuacaauguaauuau

SEQ ID NO: 1290473 - RNA, 20 nt, Human
cauuuuuacuauuguuacau

SEQ ID NO: 1290474 - RNA, 23 nt, Human
ccaaaauguaggcuuaguuugug

SEQ ID NO: 1290475 - RNA, 15 nt, Human
ccaaaaugugccuau

SEQ ID NO: 1290476 - RNA, 17 nt, Human
ccaaaauguugaaauau

SEQ ID NO: 1290477 - RNA, 17 nt, Human
ccaaaauguugcugaaa

SEQ ID NO: 1290478 - RNA, 15 nt, Human
ccaaacaccuuccag

SEQ ID NO: 1290479 - RNA, 19 nt, Human
ccaaacaccuuccagcucc

SEQ ID NO: 1290480 - RNA, 20 nt, Human
ccaaacaccuuccagcuccu

SEQ ID NO: 1290481 - RNA, 23 nt, Human
ccaaaauuagccaguaauccugu

SEQ ID NO: 1290482 - RNA, 20 nt, Human
ccaaaauguuggucauuuua

SEQ ID NO: 1290483 - RNA, 21 nt, Human
ccaaaauguuggucauuuuau

SEQ ID NO: 1290484 - RNA, 17 nt, Human
cauuuucugcaucucca

SEQ ID NO: 1290485 - RNA, 16 nt, Human
cauuuucugcaucucc

SEQ ID NO: 1290486 - RNA, 14 nt, Human
cauuuucugcaucu

SEQ ID NO: 1290487 - RNA, 10 nt, Human
cauuuucugg

SEQ ID NO: 1290488 - RNA, 14 nt, Human
cauuuucuaagaaa

SEQ ID NO: 1290489 - RNA, 17 nt, Human
cauuuucuaagaaacau

SEQ ID NO: 1290490 - RNA, 12 nt, Human
cauuuucucccu

SEQ ID NO: 1290491 - RNA, 13 nt, Human
cauuuucucccug

SEQ ID NO: 1290492 - RNA, 17 nt, Human
cauuuucucccuggauu

SEQ ID NO: 1290493 - RNA, 12 nt, Human
cauuuucucuaa

SEQ ID NO: 1290494 - RNA, 14 nt, Human
cauuuucucucagg

SEQ ID NO: 1290495 - RNA, 23 nt, Human
cauuuucuaagaaacauuuauau

SEQ ID NO: 1290496 - RNA, 21 nt, Human
cauugaauucuugguugagga

SEQ ID NO: 1290497 - RNA, 22 nt, Human
cauugaauucuugguugaggaa

SEQ ID NO: 1290498 - RNA, 23 nt, Human
cauugaauucuugguugaggaaa

SEQ ID NO: 1290499 - RNA, 19 nt, Human
cauugagcuugcaugcuug

SEQ ID NO: 1290500 - RNA, 18 nt, Human
cauugaguugguuacuuc

SEQ ID NO: 1290501 - RNA, 16 nt, Human
cauugaguugguuacu

SEQ ID NO: 1290502 - RNA, 15 nt, Human
cauugaaaagagcug

SEQ ID NO: 1290503 - RNA, 22 nt, Human
cauugaacacaaacuguaaaua

SEQ ID NO: 1290504 - RNA, 13 nt, Human
cauugaaggcuua

SEQ ID NO: 1290505 - RNA, 14 nt, Human
cauugaaggcuuaa

SEQ ID NO: 1290506 - RNA, 22 nt, Human
cauugaauggcuauguuuuuaa

SEQ ID NO: 1290507 - RNA, 21 nt, Human
cauugugggauguucagcacu

SEQ ID NO: 1290508 - RNA, 22 nt, Human
cauugugggauguucagcacug

SEQ ID NO: 1290509 - RNA, 14 nt, Human
cauuguguuaccug

SEQ ID NO: 1290510 - RNA, 14 nt, Human
cauuguuaccucua

SEQ ID NO: 1290511 - RNA, 21 nt, Human
cauuguuauauaaucauuauu

SEQ ID NO: 1290512 - RNA, 13 nt, Human
cauuuaaaacaga

SEQ ID NO: 1290513 - RNA, 17 nt, Human
cauuuaaaacagacacu

SEQ ID NO: 1290514 - RNA, 18 nt, Human
cauuuaaaacagacacug

SEQ ID NO: 1290515 - RNA, 23 nt, Human
cauuuaaaacagacacuggcaug

SEQ ID NO: 1290516 - RNA, 18 nt, Human
cauuguuaccucuauaua

SEQ ID NO: 1290517 - RNA, 17 nt, Human
cauuguuauauaaucau

SEQ ID NO: 1290518 - RNA, 19 nt, Human
cauuuaaaacauuaaaaua

SEQ ID NO: 1290519 - RNA, 20 nt, Human
cauuuaaaacauuaaaauau

SEQ ID NO: 1290520 - RNA, 18 nt, Human
cauuuaaauacagucuuc

SEQ ID NO: 1290521 - RNA, 20 nt, Human
cauuuaaauacagucuucca

SEQ ID NO: 1290522 - RNA, 18 nt, Human
cauuuaaauuuuuuuccu

SEQ ID NO: 1290523 - RNA, 19 nt, Human
cauuuaaccccccuguaca

SEQ ID NO: 1290524 - RNA, 20 nt, Human
cauuuaaccccccuguacac

SEQ ID NO: 1290525 - RNA, 23 nt, Human
cauuuaaccccccuguacacaac

SEQ ID NO: 1290526 - RNA, 15 nt, Human
cauuuacaaacugaa

SEQ ID NO: 1290527 - RNA, 16 nt, Human
cauuuacaaacugaag

SEQ ID NO: 1290528 - RNA, 19 nt, Human
cauuuacaaacugaagagu

SEQ ID NO: 1290529 - RNA, 16 nt, Human
cauuuacauguuuuaa

SEQ ID NO: 1290530 - RNA, 21 nt, Human
cauguuaaccccuccacucuu

SEQ ID NO: 1290531 - RNA, 15 nt, Human
cauguuuauuuuucu

SEQ ID NO: 1290532 - RNA, 18 nt, Human
cauguuuauuuuucuugu

SEQ ID NO: 1290533 - RNA, 19 nt, Human
cauguuuauuuuucuuguc

SEQ ID NO: 1290534 - RNA, 20 nt, Human
cauguuuauuuuucuugucu

SEQ ID NO: 1290535 - RNA, 12 nt, Human
cauguuuccagc

SEQ ID NO: 1290536 - RNA, 13 nt, Human
cauguuuccagca

SEQ ID NO: 1290537 - RNA, 15 nt, Human
cauguuuccagcauu

SEQ ID NO: 1290538 - RNA, 16 nt, Human
cauguuuccagcauuc

SEQ ID NO: 1290539 - RNA, 17 nt, Human
cauguuuccagcauucc

SEQ ID NO: 1290540 - RNA, 20 nt, Human
cauguuuccagcauucccag

SEQ ID NO: 1290541 - RNA, 22 nt, Human
cauguuuccagcauucccaggu

SEQ ID NO: 1290542 - RNA, 13 nt, Human
cauguuuccucua

SEQ ID NO: 1290543 - RNA, 21 nt, Human
cauguuuccucuaguucuuug

SEQ ID NO: 1290544 - RNA, 14 nt, Human
cauguguuuauccu

SEQ ID NO: 1290545 - RNA, 18 nt, Human
cauguguuggcagccucu

SEQ ID NO: 1290546 - RNA, 23 nt, Human
cauguguguuaacccagugcuuu

SEQ ID NO: 1290547 - RNA, 15 nt, Human
cauguguuauguuuu

SEQ ID NO: 1290548 - RNA, 18 nt, Human
cauguguuuacuuuaugu

SEQ ID NO: 1290549 - RNA, 14 nt, Human
caugugucccagaa

SEQ ID NO: 1290550 - RNA, 17 nt, Human
caugugucccagaagau

SEQ ID NO: 1290551 - RNA, 15 nt, Human
cauguguccugguuc

SEQ ID NO: 1290552 - RNA, 21 nt, Human
cauguguccugguucccguuu

SEQ ID NO: 1290553 - RNA, 21 nt, Human
caugugucccagaagaugacu

SEQ ID NO: 1290554 - RNA, 22 nt, Human
cauguguguuaacccagugcuu

SEQ ID NO: 1290555 - RNA, 16 nt, Human
cauguguuaaguauuu

SEQ ID NO: 1290556 - RNA, 16 nt, Human
cauguguuauguuuuc

SEQ ID NO: 1290557 - RNA, 20 nt, Human
caugugcuaguaauuggaaa

SEQ ID NO: 1290558 - RNA, 18 nt, Human
caugugcugcccuacagc

SEQ ID NO: 1290559 - RNA, 13 nt, Human
cauguguauaaaa

SEQ ID NO: 1290560 - RNA, 14 nt, Human
cauguguauaaaaa

SEQ ID NO: 1290561 - RNA, 17 nt, Human
cauguguauaaaaauaa

SEQ ID NO: 1290562 - RNA, 13 nt, Human
caugugucccaga

SEQ ID NO: 1290563 - RNA, 14 nt, Human
caugugcccaguua

SEQ ID NO: 1290564 - RNA, 20 nt, Human
caugugagcaugucacuucc

SEQ ID NO: 1290565 - RNA, 14 nt, Human
caugucucgacuca

SEQ ID NO: 1290566 - RNA, 14 nt, Human
caugugacucuuuc

SEQ ID NO: 1290567 - RNA, 14 nt, Human
caugucuucucccu

SEQ ID NO: 1290568 - RNA, 16 nt, Human
caugugacucuuucca

SEQ ID NO: 1290569 - RNA, 17 nt, Human
caugugacucuuuccaa

SEQ ID NO: 1290570 - RNA, 15 nt, Human
caugucuucucccug

SEQ ID NO: 1290571 - RNA, 14 nt, Human
cauggucacacacu

SEQ ID NO: 1290572 - RNA, 15 nt, Human
cauggucacacacug

SEQ ID NO: 1290573 - RNA, 13 nt, Human
cauggucugcccu

SEQ ID NO: 1290574 - RNA, 16 nt, Human
cauggucugcccucug

SEQ ID NO: 1290575 - RNA, 15 nt, Human
cauggucugcccucu

SEQ ID NO: 1290576 - RNA, 13 nt, Human
cauggugcuagga

SEQ ID NO: 1290577 - RNA, 17 nt, Human
cauggugcuaggaagag

SEQ ID NO: 1290578 - RNA, 22 nt, Human
cauggugcuaggaagaggagug

SEQ ID NO: 1290579 - RNA, 22 nt, Human
cauggugcugggagaggcagcc

SEQ ID NO: 1290580 - RNA, 15 nt, Human
cauggugcugggaga

SEQ ID NO: 1290581 - RNA, 21 nt, Human
caugguggguccaugggcaga

SEQ ID NO: 1290582 - RNA, 22 nt, Human
caugguggguccaugggcagag

SEQ ID NO: 1290583 - RNA, 13 nt, Human
caugguuucagca

SEQ ID NO: 1290584 - RNA, 15 nt, Human
caugguuucagcacu

SEQ ID NO: 1290585 - RNA, 16 nt, Human
caugguuucagcacua

SEQ ID NO: 1290586 - RNA, 23 nt, Human
cauguacugcauuauuugagaag

SEQ ID NO: 1290587 - RNA, 22 nt, Human
cauguacugcauuauuugagaa

SEQ ID NO: 1290588 - RNA, 17 nt, Human
cauguacugcauuauuu

SEQ ID NO: 1290589 - RNA, 16 nt, Human
cauguacugcauuauu

SEQ ID NO: 1290590 - RNA, 15 nt, Human
cauguacugcauuau

SEQ ID NO: 1290591 - RNA, 23 nt, Human
cauguacugagccuuguaauucu

SEQ ID NO: 1290592 - RNA, 19 nt, Human
cauguacugagccuuguaa

SEQ ID NO: 1290593 - RNA, 22 nt, Human
cauguacugagccuuguaauuc

SEQ ID NO: 1290594 - RNA, 21 nt, Human
caugucguggacacacacaga

SEQ ID NO: 1290595 - RNA, 16 nt, Human
caugucuauucagcuu

SEQ ID NO: 1290596 - RNA, 17 nt, Human
caugucuauucagcuuc

SEQ ID NO: 1290597 - RNA, 15 nt, Human
cauguaaacugugca

SEQ ID NO: 1290598 - RNA, 16 nt, Human
cauguaaacugugcac

SEQ ID NO: 1290599 - RNA, 14 nt, Human
cauguaaauaauac

SEQ ID NO: 1290600 - RNA, 20 nt, Human
cauguacaugaagaagcuaa

SEQ ID NO: 1290601 - RNA, 20 nt, Human
cauguuucuuuguaaugaaa

SEQ ID NO: 1290602 - RNA, 20 nt, Human
cauguuugcaccuuucuagu

SEQ ID NO: 1290603 - RNA, 22 nt, Human
cauguuugcaccuuucuaguug

SEQ ID NO: 1290604 - RNA, 21 nt, Human
cauguuugcaccuuucuaguu

SEQ ID NO: 1290605 - RNA, 22 nt, Human
cauguuuggaaggggucuguag

SEQ ID NO: 1290606 - RNA, 23 nt, Human
cauuaaaccaucucccuggugcu

SEQ ID NO: 1290607 - RNA, 22 nt, Human
cauuaaaaaugcauauacuuua

SEQ ID NO: 1290608 - RNA, 13 nt, Human
cauuaaaagaaua

SEQ ID NO: 1290609 - RNA, 11 nt, Human
cauuaaaauau

SEQ ID NO: 1290610 - RNA, 14 nt, Human
cauuaaaauauaau

SEQ ID NO: 1290611 - RNA, 14 nt, Human
caugcagaaagcau

SEQ ID NO: 1290612 - RNA, 17 nt, Human
caugcacuuggcugcau

SEQ ID NO: 1290613 - RNA, 19 nt, Human
caugcagaacaaaugaaga

SEQ ID NO: 1290614 - RNA, 20 nt, Human
caugcagaacaaaugaagac

SEQ ID NO: 1290615 - RNA, 22 nt, Human
caugcacugugaaggacccuug

SEQ ID NO: 1290616 - RNA, 19 nt, Human
caugcacuguucccccugu

SEQ ID NO: 1290617 - RNA, 23 nt, Human
caugcacuguucccccugugcag

SEQ ID NO: 1290618 - RNA, 15 nt, Human
caugcacugauguug

SEQ ID NO: 1290619 - RNA, 20 nt, Human
caugcacugauguuguguuu

SEQ ID NO: 1290620 - RNA, 10 nt, Human
caugcacugu

SEQ ID NO: 1290621 - RNA, 13 nt, Human
caugcacugugaa

SEQ ID NO: 1290622 - RNA, 14 nt, Human
caugcacugugaag

SEQ ID NO: 1290623 - RNA, 16 nt, Human
caugcacugugaagga

SEQ ID NO: 1290624 - RNA, 17 nt, Human
caugcacugugaaggac

SEQ ID NO: 1290625 - RNA, 18 nt, Human
caugcacugugaaggacc

SEQ ID NO: 1290626 - RNA, 20 nt, Human
caugcacugugaaggacccu

SEQ ID NO: 1290627 - RNA, 14 nt, Human
caugcagcaucuaa

SEQ ID NO: 1290628 - RNA, 23 nt, Human
caugcgcucagggccaugcugag

SEQ ID NO: 1290629 - RNA, 21 nt, Human
caugcugugugacucaaacca

SEQ ID NO: 1290630 - RNA, 17 nt, Human
caugcugugugacucaa

SEQ ID NO: 1290631 - RNA, 15 nt, Human
caugcuguucaugaa

SEQ ID NO: 1290632 - RNA, 14 nt, Human
caugcugugugacu

SEQ ID NO: 1290633 - RNA, 21 nt, Human
cauggaaauucccuucaucug

SEQ ID NO: 1290634 - RNA, 15 nt, Human
cauggaaauuuaaag

SEQ ID NO: 1290635 - RNA, 16 nt, Human
cauggaaauuuaaagc

SEQ ID NO: 1290636 - RNA, 17 nt, Human
cauggaaauuuaaagca

SEQ ID NO: 1290637 - RNA, 18 nt, Human
cauggaaauuuaaagcag

SEQ ID NO: 1290638 - RNA, 21 nt, Human
cauggaaauuuaaagcagguu

SEQ ID NO: 1290639 - RNA, 20 nt, Human
cauggaauuggagcucgugg

SEQ ID NO: 1290640 - RNA, 19 nt, Human
cauggaaauuuaaagcagg

SEQ ID NO: 1290641 - RNA, 14 nt, Human
cauggacaauggac

SEQ ID NO: 1290642 - RNA, 15 nt, Human
cauggacaauggacc

SEQ ID NO: 1290643 - RNA, 17 nt, Human
cauggacaauggaccgg

SEQ ID NO: 1290644 - RNA, 18 nt, Human
cauggacaauggaccgga

SEQ ID NO: 1290645 - RNA, 20 nt, Human
cauggacaauggaccggaga

SEQ ID NO: 1290646 - RNA, 16 nt, Human
caugcuguucaugaaa

SEQ ID NO: 1290647 - RNA, 18 nt, Human
caugcuguucaugaaaga

SEQ ID NO: 1290648 - RNA, 22 nt, Human
caugcugugugacucaaaccaa

SEQ ID NO: 1290649 - RNA, 14 nt, Human
caugcuguuauuua

SEQ ID NO: 1290650 - RNA, 20 nt, Human
caugcuguucaugaaagauu

SEQ ID NO: 1290651 - RNA, 23 nt, Human
cauggaaacaagaugaaauucca

SEQ ID NO: 1290652 - RNA, 21 nt, Human
cauggacacuacacccagcaa

SEQ ID NO: 1290653 - RNA, 20 nt, Human
cauggacacuacacccagca

SEQ ID NO: 1290654 - RNA, 19 nt, Human
cauggacacuacacccagc

SEQ ID NO: 1290655 - RNA, 18 nt, Human
cauggacacuacacccag

SEQ ID NO: 1290656 - RNA, 17 nt, Human
cauggacacuacaccca

SEQ ID NO: 1290657 - RNA, 16 nt, Human
cauggacacuacaccc

SEQ ID NO: 1290658 - RNA, 23 nt, Human
cauggacaauggaccggagagug

SEQ ID NO: 1290659 - RNA, 16 nt, Human
cauggacucuguccug

SEQ ID NO: 1290660 - RNA, 17 nt, Human
cauggacucuguccuga

SEQ ID NO: 1290661 - RNA, 23 nt, Human
cauggacucuguccugaaggccu

SEQ ID NO: 1290662 - RNA, 22 nt, Human
cauggacuucugccagcauaau

SEQ ID NO: 1290663 - RNA, 19 nt, Human
cauggacucuguccugaag

SEQ ID NO: 1290664 - RNA, 15 nt, Human
cauggagcugggcua

SEQ ID NO: 1290665 - RNA, 16 nt, Human
caugggauuauuagaa

SEQ ID NO: 1290666 - RNA, 14 nt, Human
caugggaggcucac

SEQ ID NO: 1290667 - RNA, 21 nt, Human
caugggaggccuuucccuaag

SEQ ID NO: 1290668 - RNA, 15 nt, Human
caugggcagagccca

SEQ ID NO: 1290669 - RNA, 17 nt, Human
caugggcagagcccaag

SEQ ID NO: 1290670 - RNA, 18 nt, Human
cauggagggagggagugg

SEQ ID NO: 1290671 - RNA, 22 nt, Human
cauggagggagggagugguuug

SEQ ID NO: 1290672 - RNA, 13 nt, Human
cauggagguucua

SEQ ID NO: 1290673 - RNA, 15 nt, Human
cauggagguucuaag

SEQ ID NO: 1290674 - RNA, 16 nt, Human
cauggagguucuaagg

SEQ ID NO: 1290675 - RNA, 19 nt, Human
cauggcagauguaggaggg

SEQ ID NO: 1290676 - RNA, 20 nt, Human
cauggcagauguaggaggga

SEQ ID NO: 1290677 - RNA, 23 nt, Human
cauggcagauguaggagggacug

SEQ ID NO: 1290678 - RNA, 21 nt, Human
cauggcagauguaggagggac

SEQ ID NO: 1290679 - RNA, 13 nt, Human
cauggcagggggc

SEQ ID NO: 1290680 - RNA, 14 nt, Human
cauggcagggggcu

SEQ ID NO: 1290681 - RNA, 17 nt, Human
cauggcagggggcugcu

SEQ ID NO: 1290682 - RNA, 18 nt, Human
cauggcagggggcugcug

SEQ ID NO: 1290683 - RNA, 19 nt, Human
cauggcagggggcugcugc

SEQ ID NO: 1290684 - RNA, 20 nt, Human
cauggcagggggcugcugcu

SEQ ID NO: 1290685 - RNA, 12 nt, Human
cauggcaguggg

SEQ ID NO: 1290686 - RNA, 23 nt, Human
cauggcagugggaaaaauguagg

SEQ ID NO: 1290687 - RNA, 17 nt, Human
caugggaccacaacuau

SEQ ID NO: 1290688 - RNA, 13 nt, Human
caugggagccggg

SEQ ID NO: 1290689 - RNA, 22 nt, Human
caugggagccgggucugccucu

SEQ ID NO: 1290690 - RNA, 21 nt, Human
caugggagcugguuagaaaug

SEQ ID NO: 1290691 - RNA, 19 nt, Human
caugggaggccuuucccua

SEQ ID NO: 1290692 - RNA, 12 nt, Human
cauggggaggag

SEQ ID NO: 1290693 - RNA, 15 nt, Human
cauggggaggaggag

SEQ ID NO: 1290694 - RNA, 19 nt, Human
cauggggaggaggaggguc

SEQ ID NO: 1290695 - RNA, 18 nt, Human
cauggggaggaggagggu

SEQ ID NO: 1290696 - RNA, 16 nt, Human
cauggguagccugggu

SEQ ID NO: 1290697 - RNA, 20 nt, Human
cauggguauaguucaugucu

SEQ ID NO: 1290698 - RNA, 15 nt, Human
cauggguagccuggg

SEQ ID NO: 1290699 - RNA, 16 nt, Human
cauggucacacacuga

SEQ ID NO: 1290700 - RNA, 13 nt, Human
caugauaaaugau

SEQ ID NO: 1290701 - RNA, 16 nt, Human
caugauaauucagcag

SEQ ID NO: 1290702 - RNA, 21 nt, Human
caugaguuggggucuggcagc

SEQ ID NO: 1290703 - RNA, 23 nt, Human
caugaguuggggucuggcagccu

SEQ ID NO: 1290704 - RNA, 18 nt, Human
caugaguuccagaaagua

SEQ ID NO: 1290705 - RNA, 19 nt, Human
caugaguuccagaaaguaa

SEQ ID NO: 1290706 - RNA, 20 nt, Human
caugaguuccagaaaguaaa

SEQ ID NO: 1290707 - RNA, 21 nt, Human
caugaucccuguguugucucu

SEQ ID NO: 1290708 - RNA, 22 nt, Human
caugaucccuguguugucucua

SEQ ID NO: 1290709 - RNA, 18 nt, Human
caugauaaugaacagaac

SEQ ID NO: 1290710 - RNA, 20 nt, Human
caugaugacuuaguacaaag

SEQ ID NO: 1290711 - RNA, 22 nt, Human
caugaugacuuaguacaaaguu

SEQ ID NO: 1290712 - RNA, 23 nt, Human
caugaugacuuaguacaaaguuu

SEQ ID NO: 1290713 - RNA, 14 nt, Human
caugcacugauguu

SEQ ID NO: 1290714 - RNA, 18 nt, Human
caugagucacuacgccug

SEQ ID NO: 1290715 - RNA, 19 nt, Human
caugagguacugagaguga

SEQ ID NO: 1290716 - RNA, 15 nt, Human
caugagggguuccuc

SEQ ID NO: 1290717 - RNA, 18 nt, Human
caugagggguuccucccc

SEQ ID NO: 1290718 - RNA, 21 nt, Human
caugagggguuccuccccucc

SEQ ID NO: 1290719 - RNA, 22 nt, Human
caugagggguuccuccccucca

SEQ ID NO: 1290720 - RNA, 14 nt, Human
caugagugaauaaa

SEQ ID NO: 1290721 - RNA, 23 nt, Human
caugagcuccuuaaggcucuuuu

SEQ ID NO: 1290722 - RNA, 20 nt, Human
caugaggacucuauucuuua

SEQ ID NO: 1290723 - RNA, 21 nt, Human
caugaggacucuauucuuuaa

SEQ ID NO: 1290724 - RNA, 19 nt, Human
caugaggagauucugccuu

SEQ ID NO: 1290725 - RNA, 20 nt, Human
caugaggagauucugccuuu

SEQ ID NO: 1290726 - RNA, 21 nt, Human
caugaggagauucugccuuug

SEQ ID NO: 1290727 - RNA, 23 nt, Human
caugaggagauucugccuuugcc

SEQ ID NO: 1290728 - RNA, 16 nt, Human
caugagguacugagag

SEQ ID NO: 1290729 - RNA, 18 nt, Human
caugaggccacuggagac

SEQ ID NO: 1290730 - RNA, 22 nt, Human
caugagaugauacauccaaagc

SEQ ID NO: 1290731 - RNA, 19 nt, Human
caugagaccacuguuauca

SEQ ID NO: 1290732 - RNA, 17 nt, Human
caugagaccacuguuau

SEQ ID NO: 1290733 - RNA, 12 nt, Human
caugacugcuug

SEQ ID NO: 1290734 - RNA, 13 nt, Human
caugacugcuugc

SEQ ID NO: 1290735 - RNA, 14 nt, Human
caugacugcuugcc

SEQ ID NO: 1290736 - RNA, 16 nt, Human
caugacugcuugcccu

SEQ ID NO: 1290737 - RNA, 21 nt, Human
caugacugcuugcccuaagca

SEQ ID NO: 1290738 - RNA, 18 nt, Human
caugacugcuugcccuaa

SEQ ID NO: 1290739 - RNA, 13 nt, Human
caugagaaauaca

SEQ ID NO: 1290740 - RNA, 18 nt, Human
caugagaaauacaaaaau

SEQ ID NO: 1290741 - RNA, 22 nt, Human
caugagaaauacaaaaauacuc

SEQ ID NO: 1290742 - RNA, 16 nt, Human
caugagaacaaacaga

SEQ ID NO: 1290743 - RNA, 12 nt, Human
caugagaaucua

SEQ ID NO: 1290744 - RNA, 19 nt, Human
caugagaaucuauauuuaa

SEQ ID NO: 1290745 - RNA, 19 nt, Human
caugaagauguagaggaga

SEQ ID NO: 1290746 - RNA, 17 nt, Human
caugaagauauuuuucc

SEQ ID NO: 1290747 - RNA, 18 nt, Human
caugaagauucuuuccca

SEQ ID NO: 1290748 - RNA, 21 nt, Human
caugaagccacgggugccaga

SEQ ID NO: 1290749 - RNA, 18 nt, Human
caugaagauguagaggag

SEQ ID NO: 1290750 - RNA, 20 nt, Human
caugaagaccuuuuucugca

SEQ ID NO: 1290751 - RNA, 19 nt, Human
caugaagaccuuuuucugc

SEQ ID NO: 1290752 - RNA, 17 nt, Human
caugaagaccuuuuucu

SEQ ID NO: 1290753 - RNA, 18 nt, Human
caugaagagauuuuucau

SEQ ID NO: 1290754 - RNA, 20 nt, Human
caugacucguauaugucuca

SEQ ID NO: 1290755 - RNA, 20 nt, Human
caugacgcaaagagagauuu

SEQ ID NO: 1290756 - RNA, 14 nt, Human
caugacuauggaua

SEQ ID NO: 1290757 - RNA, 17 nt, Human
caugacucggggguggg

SEQ ID NO: 1290758 - RNA, 23 nt, Human
caugacucguauaugucucaggu

SEQ ID NO: 1290759 - RNA, 22 nt, Human
caugaagccacgggugccagaa

SEQ ID NO: 1290760 - RNA, 13 nt, Human
caugaccuccagc

SEQ ID NO: 1290761 - RNA, 14 nt, Human
caugaccuccagcu

SEQ ID NO: 1290762 - RNA, 15 nt, Human
caugaccuccagcuu

SEQ ID NO: 1290763 - RNA, 17 nt, Human
caugaccuccagcuuuc

SEQ ID NO: 1290764 - RNA, 20 nt, Human
caugaccuccagcuuuccug

SEQ ID NO: 1290765 - RNA, 21 nt, Human
caugaccuccagcuuuccugu

SEQ ID NO: 1290766 - RNA, 22 nt, Human
caugaccuccagcuuuccugua

SEQ ID NO: 1290767 - RNA, 14 nt, Human
caugaaagauucaa

SEQ ID NO: 1290768 - RNA, 22 nt, Human
caugaaauauagaucaguuaua

SEQ ID NO: 1290769 - RNA, 19 nt, Human
caugaaacagaaacaaaaa

SEQ ID NO: 1290770 - RNA, 15 nt, Human
caugaaaauucagaa

SEQ ID NO: 1290771 - RNA, 13 nt, Human
caugaaacagaaa

SEQ ID NO: 1290772 - RNA, 15 nt, Human
caugaaacagaaaca

SEQ ID NO: 1290773 - RNA, 20 nt, Human
caugaaccucaagcugcauc

SEQ ID NO: 1290774 - RNA, 17 nt, Human
caugaacuuagauuuua

SEQ ID NO: 1290775 - RNA, 20 nt, Human
caugaacuuagauuuuacau

SEQ ID NO: 1290776 - RNA, 22 nt, Human
caugaagaccuuuuucugcacu

SEQ ID NO: 1290777 - RNA, 15 nt, Human
caugaagaccuuuuu

SEQ ID NO: 1290778 - RNA, 19 nt, Human
caugaaccucaagcugcau

SEQ ID NO: 1290779 - RNA, 19 nt, Human
caucuuuuguauuaagaaa

SEQ ID NO: 1290780 - RNA, 13 nt, Human
caucuuuuguauu

SEQ ID NO: 1290781 - RNA, 14 nt, Human
caucuuuuguauua

SEQ ID NO: 1290782 - RNA, 15 nt, Human
caucuuuuguauuaa

SEQ ID NO: 1290783 - RNA, 18 nt, Human
caucuuuuguauuaagaa

SEQ ID NO: 1290784 - RNA, 22 nt, Human
caucuuuuguauuaagaaagga

SEQ ID NO: 1290785 - RNA, 22 nt, Human
caucuuuacaaaacuacaugag

SEQ ID NO: 1290786 - RNA, 13 nt, Human
caucuuucccucc

SEQ ID NO: 1290787 - RNA, 14 nt, Human
caucuuucccuccu

SEQ ID NO: 1290788 - RNA, 15 nt, Human
caucuuucccuccuu

SEQ ID NO: 1290789 - RNA, 16 nt, Human
caucuuucccuccuug

SEQ ID NO: 1290790 - RNA, 17 nt, Human
caucuuucccuccuugg

SEQ ID NO: 1290791 - RNA, 18 nt, Human
caucuuucccuccuuggu

SEQ ID NO: 1290792 - RNA, 21 nt, Human
caucuuucccuccuuggugau

SEQ ID NO: 1290793 - RNA, 11 nt, Human
caucuuugaaa

SEQ ID NO: 1290794 - RNA, 12 nt, Human
caucuuugaaau

SEQ ID NO: 1290795 - RNA, 18 nt, Human
caucuuugaaauuaugua

SEQ ID NO: 1290796 - RNA, 21 nt, Human
caucuuugaaauuauguaaau

SEQ ID NO: 1290797 - RNA, 22 nt, Human
caucuuugaaauuauguaaauu

SEQ ID NO: 1290798 - RNA, 10 nt, Human
caucuuuaag

SEQ ID NO: 1290799 - RNA, 14 nt, Human
caucuucuucacca

SEQ ID NO: 1290800 - RNA, 19 nt, Human
caucuucuucaccauuugg

SEQ ID NO: 1290801 - RNA, 13 nt, Human
caucucuaccuuc

SEQ ID NO: 1290802 - RNA, 18 nt, Human
caucucuaccuucucccc

SEQ ID NO: 1290803 - RNA, 19 nt, Human
caucucuaccuucucccca

SEQ ID NO: 1290804 - RNA, 21 nt, Human
caucucuaccuucuccccagc

SEQ ID NO: 1290805 - RNA, 20 nt, Human
caucucuaccuucuccccag

SEQ ID NO: 1290806 - RNA, 13 nt, Human
caucucucugccc

SEQ ID NO: 1290807 - RNA, 15 nt, Human
caucucucugcccaa

SEQ ID NO: 1290808 - RNA, 16 nt, Human
caucucucugcccaac

SEQ ID NO: 1290809 - RNA, 18 nt, Human
caucucucugcccaaccc

SEQ ID NO: 1290810 - RNA, 12 nt, Human
caucucugggcu

SEQ ID NO: 1290811 - RNA, 14 nt, Human
caucucugggcugg

SEQ ID NO: 1290812 - RNA, 18 nt, Human
caucucugggcuggauga

SEQ ID NO: 1290813 - RNA, 19 nt, Human
caucucugggcuggaugag

SEQ ID NO: 1290814 - RNA, 22 nt, Human
caucucugggcuggaugagcuc

SEQ ID NO: 1290815 - RNA, 19 nt, Human
caucuccugccuuccuccu

SEQ ID NO: 1290816 - RNA, 22 nt, Human
caucuccugccuuccuccuggg

SEQ ID NO: 1290817 - RNA, 20 nt, Human
caucucccuggugcuuaugc

SEQ ID NO: 1290818 - RNA, 18 nt, Human
cauccuacccccugugcc

SEQ ID NO: 1290819 - RNA, 19 nt, Human
cauccuacccccugugccu

SEQ ID NO: 1290820 - RNA, 23 nt, Human
cauccuaccacaaugcagugccu

SEQ ID NO: 1290821 - RNA, 14 nt, Human
caucucccuggugc

SEQ ID NO: 1290822 - RNA, 15 nt, Human
caucucccuggugcu

SEQ ID NO: 1290823 - RNA, 16 nt, Human
caucucccuggugcuu

SEQ ID NO: 1290824 - RNA, 19 nt, Human
caucucccuggugcuuaug

SEQ ID NO: 1290825 - RNA, 23 nt, Human
caucucccuggugcuuaugcucu

SEQ ID NO: 1290826 - RNA, 17 nt, Human
caucucccuuuuccaug

SEQ ID NO: 1290827 - RNA, 16 nt, Human
caucuccugccuuccu

SEQ ID NO: 1290828 - RNA, 15 nt, Human
cauccuacccccugu

SEQ ID NO: 1290829 - RNA, 21 nt, Human
cauccuaccacaaugcagugc

SEQ ID NO: 1290830 - RNA, 19 nt, Human
cauccuacaagacacagug

SEQ ID NO: 1290831 - RNA, 18 nt, Human
cauccuacaagacacagu

SEQ ID NO: 1290832 - RNA, 20 nt, Human
cauccgcaggugcugguccc

SEQ ID NO: 1290833 - RNA, 15 nt, Human
caucaucucagcuca

SEQ ID NO: 1290834 - RNA, 14 nt, Human
caucaucucagcuc

SEQ ID NO: 1290835 - RNA, 13 nt, Human
caucaucuccugc

SEQ ID NO: 1290836 - RNA, 20 nt, Human
caucaucuccugccuuccuc

SEQ ID NO: 1290837 - RNA, 21 nt, Human
caucaucuccugccuuccucc

SEQ ID NO: 1290838 - RNA, 13 nt, Human
caucaucugggaa

SEQ ID NO: 1290839 - RNA, 22 nt, Human
caucaucugggaacuugucaca

SEQ ID NO: 1290840 - RNA, 23 nt, Human
caucaucugggaacuugucacag

SEQ ID NO: 1290841 - RNA, 13 nt, Human
caucauccucugg

SEQ ID NO: 1290842 - RNA, 14 nt, Human
caucauccucuggc

SEQ ID NO: 1290843 - RNA, 15 nt, Human
caucauccucuggcu

SEQ ID NO: 1290844 - RNA, 15 nt, Human
caucaucauggccag

SEQ ID NO: 1290845 - RNA, 18 nt, Human
caucaucauggccagcug

SEQ ID NO: 1290846 - RNA, 24 nt, Human
caucaucauggccagcuggaggca

SEQ ID NO: 1290847 - RNA, 13 nt, Human
caucauggccagc

SEQ ID NO: 1290848 - RNA, 14 nt, Human
caucauggccagcu

SEQ ID NO: 1290849 - RNA, 15 nt, Human
caucauggccagcug

SEQ ID NO: 1290850 - RNA, 21 nt, Human
caucauggccagcuggaggca

SEQ ID NO: 1290851 - RNA, 15 nt, Human
caucauggcuaucug

SEQ ID NO: 1290852 - RNA, 13 nt, Human
caucaugccucug

SEQ ID NO: 1290853 - RNA, 14 nt, Human
caucaugccucuga

SEQ ID NO: 1290854 - RNA, 15 nt, Human
caucaugccucugag

SEQ ID NO: 1290855 - RNA, 16 nt, Human
caucaugccucugagg

SEQ ID NO: 1290856 - RNA, 17 nt, Human
caucaugccucugaggc

SEQ ID NO: 1290857 - RNA, 18 nt, Human
caucaugccucugaggcc

SEQ ID NO: 1290858 - RNA, 19 nt, Human
caucaugccucugaggcca

SEQ ID NO: 1290859 - RNA, 20 nt, Human
caucaugccucugaggccag

SEQ ID NO: 1290860 - RNA, 22 nt, Human
caucaugccucugaggccagcc

SEQ ID NO: 1290861 - RNA, 23 nt, Human
caucaugccucugaggccagccu

SEQ ID NO: 1290862 - RNA, 13 nt, Human
caucaccacaguu

SEQ ID NO: 1290863 - RNA, 14 nt, Human
caucaccuacucac

SEQ ID NO: 1290864 - RNA, 14 nt, Human
caucaacugaauga

SEQ ID NO: 1290865 - RNA, 20 nt, Human
caucaccuacucacacaggc

SEQ ID NO: 1290866 - RNA, 21 nt, Human
caucaccuacucacacaggca

SEQ ID NO: 1290867 - RNA, 16 nt, Human
caucaccucagauggc

SEQ ID NO: 1290868 - RNA, 17 nt, Human
caucaccucagauggca

SEQ ID NO: 1290869 - RNA, 22 nt, Human
caucaccucagauggcagcuuu

SEQ ID NO: 1290870 - RNA, 20 nt, Human
caucaccucagauggcagcu

SEQ ID NO: 1290871 - RNA, 15 nt, Human
caucaccuuagacca

SEQ ID NO: 1290872 - RNA, 17 nt, Human
caucaccuuagaccacc

SEQ ID NO: 1290873 - RNA, 18 nt, Human
caucaccuuagaccacca

SEQ ID NO: 1290874 - RNA, 23 nt, Human
caucaccuuagaccaccaagccu

SEQ ID NO: 1290875 - RNA, 22 nt, Human
caucaccuuagaccaccaagcc

SEQ ID NO: 1290876 - RNA, 19 nt, Human
caucacguuagcuguccca

SEQ ID NO: 1290877 - RNA, 20 nt, Human
caucacucuagguuuuacag

SEQ ID NO: 1290878 - RNA, 16 nt, Human
caucacugaguuuucc

SEQ ID NO: 1290879 - RNA, 23 nt, Human
caucacugaguuuuccauggcag

SEQ ID NO: 1290880 - RNA, 17 nt, Human
caucacugaguuuucca

SEQ ID NO: 1290881 - RNA, 11 nt, Human
caucaggcuuu

SEQ ID NO: 1290882 - RNA, 15 nt, Human
caucaggcuuucuuu

SEQ ID NO: 1290883 - RNA, 15 nt, Human
caucaggcuuucuua

SEQ ID NO: 1290884 - RNA, 19 nt, Human
caucaggguaggcuggagu

SEQ ID NO: 1290885 - RNA, 15 nt, Human
caucagugcucccuc

SEQ ID NO: 1290886 - RNA, 16 nt, Human
caucagugcucccuca

SEQ ID NO: 1290887 - RNA, 24 nt, Human
caucagugcucccucacaugucag

SEQ ID NO: 1290888 - RNA, 18 nt, Human
caucccuuaccugggaaa

SEQ ID NO: 1290889 - RNA, 22 nt, Human
caucccugggccuugggcuccg

SEQ ID NO: 1290890 - RNA, 16 nt, Human
caucccuuugcccaga

SEQ ID NO: 1290891 - RNA, 15 nt, Human
caucccuuuuucaau

SEQ ID NO: 1290892 - RNA, 13 nt, Human
cauccgcaggugc

SEQ ID NO: 1290893 - RNA, 14 nt, Human
cauccgcaggugcu

SEQ ID NO: 1290894 - RNA, 13 nt, Human
caucccuccuggg

SEQ ID NO: 1290895 - RNA, 15 nt, Human
cauccaugccucaga

SEQ ID NO: 1290896 - RNA, 12 nt, Human
caucccuggccc

SEQ ID NO: 1290897 - RNA, 13 nt, Human
caucccuggcccc

SEQ ID NO: 1290898 - RNA, 20 nt, Human
caucccuggcccccucccug

SEQ ID NO: 1290899 - RNA, 21 nt, Human
caucccuggcccccucccugg

SEQ ID NO: 1290900 - RNA, 22 nt, Human
caucccuggcccccucccugga

SEQ ID NO: 1290901 - RNA, 23 nt, Human
caucccuggcccccucccuggau

SEQ ID NO: 1290902 - RNA, 11 nt, Human
caucccugggc

SEQ ID NO: 1290903 - RNA, 12 nt, Human
caucccugggcc

SEQ ID NO: 1290904 - RNA, 13 nt, Human
caucccugggccu

SEQ ID NO: 1290905 - RNA, 14 nt, Human
caucccugggccug

SEQ ID NO: 1290906 - RNA, 15 nt, Human
caucccugggccugc

SEQ ID NO: 1290907 - RNA, 16 nt, Human
caucccugggccugcu

SEQ ID NO: 1290908 - RNA, 17 nt, Human
caucccugggccugcug

SEQ ID NO: 1290909 - RNA, 18 nt, Human
caucccugggccugcugc

SEQ ID NO: 1290910 - RNA, 19 nt, Human
caucccugggccugcugcu

SEQ ID NO: 1290911 - RNA, 20 nt, Human
caucccugggccugcugcug

SEQ ID NO: 1290912 - RNA, 21 nt, Human
caucccugggccugcugcuga

SEQ ID NO: 1290913 - RNA, 22 nt, Human
caucccugggccugcugcugag

SEQ ID NO: 1290914 - RNA, 23 nt, Human
caucccugggccugcugcugaga

SEQ ID NO: 1290915 - RNA, 17 nt, Human
caucccugggccuuggg

SEQ ID NO: 1290916 - RNA, 21 nt, Human
caucccugggccuugggcucc

SEQ ID NO: 1290917 - RNA, 15 nt, Human
caucauucucugucu

SEQ ID NO: 1290918 - RNA, 16 nt, Human
caucauucucugucuc

SEQ ID NO: 1290919 - RNA, 17 nt, Human
caucauucucugucuca

SEQ ID NO: 1290920 - RNA, 19 nt, Human
caucauucacuucacugug

SEQ ID NO: 1290921 - RNA, 12 nt, Human
caucauucucug

SEQ ID NO: 1290922 - RNA, 14 nt, Human
caucauucucuguc

SEQ ID NO: 1290923 - RNA, 20 nt, Human
caucauucacuucacugugc

SEQ ID NO: 1290924 - RNA, 18 nt, Human
caucauucacuucacugu

SEQ ID NO: 1290925 - RNA, 17 nt, Human
caucauucacuucacug

SEQ ID NO: 1290926 - RNA, 16 nt, Human
caucauucacuucacu

SEQ ID NO: 1290927 - RNA, 15 nt, Human
caucauuauuuaugu

SEQ ID NO: 1290928 - RNA, 19 nt, Human
caucauuauuuauguauug

SEQ ID NO: 1290929 - RNA, 14 nt, Human
caucauuauuuaug

SEQ ID NO: 1290930 - RNA, 21 nt, Human
cauccagagucccugccugga

SEQ ID NO: 1290931 - RNA, 14 nt, Human
cauccagucuauuc

SEQ ID NO: 1290932 - RNA, 13 nt, Human
cauccaguucaug

SEQ ID NO: 1290933 - RNA, 12 nt, Human
cauccauccagg

SEQ ID NO: 1290934 - RNA, 13 nt, Human
cauccaucaucau

SEQ ID NO: 1290935 - RNA, 14 nt, Human
cauccaucaucaug

SEQ ID NO: 1290936 - RNA, 14 nt, Human
cauccaugccucag

SEQ ID NO: 1290937 - RNA, 17 nt, Human
cauccaugccucagaag

SEQ ID NO: 1290938 - RNA, 13 nt, Human
cauccagaguccc

SEQ ID NO: 1290939 - RNA, 17 nt, Human
cauccagagucccugcc

SEQ ID NO: 1290940 - RNA, 18 nt, Human
cauccagagucccugccu

SEQ ID NO: 1290941 - RNA, 20 nt, Human
cauccagagucccugccugg

SEQ ID NO: 1290942 - RNA, 19 nt, Human
cauauuguuacugguacca

SEQ ID NO: 1290943 - RNA, 19 nt, Human
cauauuguugcauugcuuu

SEQ ID NO: 1290944 - RNA, 13 nt, Human
cauauuguuacug

SEQ ID NO: 1290945 - RNA, 14 nt, Human
cauauuguguguaa

SEQ ID NO: 1290946 - RNA, 13 nt, Human
cauauuguugaaa

SEQ ID NO: 1290947 - RNA, 16 nt, Human
cauauuguugaaaggu

SEQ ID NO: 1290948 - RNA, 16 nt, Human
cauauuuaccucagcc

SEQ ID NO: 1290949 - RNA, 13 nt, Human
cauauuuguaaaa

SEQ ID NO: 1290950 - RNA, 14 nt, Human
cauauuuguaaaau

SEQ ID NO: 1290951 - RNA, 15 nt, Human
cauauuuguaaaaug

SEQ ID NO: 1290952 - RNA, 16 nt, Human
cauauuuguaaaauga

SEQ ID NO: 1290953 - RNA, 18 nt, Human
cauauuuguaaaaugaca

SEQ ID NO: 1290954 - RNA, 19 nt, Human
cauauuuguaaaaugacaa

SEQ ID NO: 1290955 - RNA, 21 nt, Human
cauaugaacagcuguucaguu

SEQ ID NO: 1290956 - RNA, 13 nt, Human
cauauuguaaaac

SEQ ID NO: 1290957 - RNA, 16 nt, Human
cauauuguaaaacagg

SEQ ID NO: 1290958 - RNA, 17 nt, Human
cauauuguaaaacaggu

SEQ ID NO: 1290959 - RNA, 19 nt, Human
cauauuguaaaacagguag

SEQ ID NO: 1290960 - RNA, 18 nt, Human
cauauugugauucugccu

SEQ ID NO: 1290961 - RNA, 20 nt, Human
cauauugugauucugccuuu

SEQ ID NO: 1290962 - RNA, 23 nt, Human
cauauaagggaaguaguuaucau

SEQ ID NO: 1290963 - RNA, 17 nt, Human
cauauaugaggacuugu

SEQ ID NO: 1290964 - RNA, 15 nt, Human
cauauauaacaaugc

SEQ ID NO: 1290965 - RNA, 20 nt, Human
cauauauaacaaugcuguau

SEQ ID NO: 1290966 - RNA, 18 nt, Human
cauagugaugguuccccu

SEQ ID NO: 1290967 - RNA, 19 nt, Human
cauagugaugguuccccug

SEQ ID NO: 1290968 - RNA, 22 nt, Human
cauagugaugguuccccuguuc

SEQ ID NO: 1290969 - RNA, 17 nt, Human
cauauaaauagaaugua

SEQ ID NO: 1290970 - RNA, 22 nt, Human
cauauaaauagaauguaaaugu

SEQ ID NO: 1290971 - RNA, 21 nt, Human
cauauaaauagaauguaaaug

SEQ ID NO: 1290972 - RNA, 20 nt, Human
cauauaaauagaauguaaau

SEQ ID NO: 1290973 - RNA, 13 nt, Human
cauauauaacaau

SEQ ID NO: 1290974 - RNA, 19 nt, Human
cauauaagggaaguaguua

SEQ ID NO: 1290975 - RNA, 16 nt, Human
cauauaagugauugcu

SEQ ID NO: 1290976 - RNA, 22 nt, Human
cauaguaccaaucauuuuaauu

SEQ ID NO: 1290977 - RNA, 21 nt, Human
cauaguaacuucuuauggaau

SEQ ID NO: 1290978 - RNA, 22 nt, Human
cauaguaacuucuuauggaauu

SEQ ID NO: 1290979 - RNA, 23 nt, Human
cauaguaacuucuuauggaauug

SEQ ID NO: 1290980 - RNA, 24 nt, Human
cauaguaacuucuuauggaauuga

SEQ ID NO: 1290981 - RNA, 16 nt, Human
cauaguaccaaucauu

SEQ ID NO: 1290982 - RNA, 18 nt, Human
cauaguaccaaucauuuu

SEQ ID NO: 1290983 - RNA, 16 nt, Human
cauaguagaacgcuau

SEQ ID NO: 1290984 - RNA, 18 nt, Human
cauaguauucaugacuau

SEQ ID NO: 1290985 - RNA, 23 nt, Human
cauagucauguaagcugaaaaua

SEQ ID NO: 1290986 - RNA, 14 nt, Human
cagugcucuuuucu

SEQ ID NO: 1290987 - RNA, 23 nt, Human
cagugcucuuuucuccucacugu

SEQ ID NO: 1290988 - RNA, 23 nt, Human
cagugcugaccagacagccuccc

SEQ ID NO: 1290989 - RNA, 19 nt, Human
cagugcugauguagcaugc

SEQ ID NO: 1290990 - RNA, 12 nt, Human
cagugcugugcu

SEQ ID NO: 1290991 - RNA, 16 nt, Human
cagugcugugcugugc

SEQ ID NO: 1290992 - RNA, 19 nt, Human
cagugcugugcugugcuau

SEQ ID NO: 1290993 - RNA, 22 nt, Human
cagugcugugcugugcuauggu

SEQ ID NO: 1290994 - RNA, 15 nt, Human
cagugcuucccgagu

SEQ ID NO: 1290995 - RNA, 10 nt, Human
caucaacuga

SEQ ID NO: 1290996 - RNA, 12 nt, Human
caucaacugaau

SEQ ID NO: 1290997 - RNA, 23 nt, Human
cauauuuguuuaugguaaaaaau

SEQ ID NO: 1290998 - RNA, 13 nt, Human
cauauuuuaaaau

SEQ ID NO: 1290999 - RNA, 19 nt, Human
cauauuuuaaaauuuguuc

SEQ ID NO: 1291000 - RNA, 16 nt, Human
cauauuuuaaacagag

SEQ ID NO: 1291001 - RNA, 17 nt, Human
cauauuuuaaacagagg

SEQ ID NO: 1291002 - RNA, 13 nt, Human
caucaacaaaaau

SEQ ID NO: 1291003 - RNA, 15 nt, Human
caucaacaaaaauug

SEQ ID NO: 1291004 - RNA, 18 nt, Human
cauauuuuaaacagagga

SEQ ID NO: 1291005 - RNA, 18 nt, Human
caggucccuaauaaagcu

SEQ ID NO: 1291006 - RNA, 17 nt, Human
caggucccuaauaaagc

SEQ ID NO: 1291007 - RNA, 16 nt, Human
caggucccuaauaaag

SEQ ID NO: 1291008 - RNA, 15 nt, Human
caggucccuaauaaa

SEQ ID NO: 1291009 - RNA, 14 nt, Human
caggucccuaauaa

SEQ ID NO: 1291010 - RNA, 13 nt, Human
caggucccuaaua

SEQ ID NO: 1291011 - RNA, 12 nt, Human
caggucccuaau

SEQ ID NO: 1291012 - RNA, 11 nt, Human
caggucccuaa

SEQ ID NO: 1291013 - RNA, 23 nt, Human
cagguccagcucuggaggggagg

SEQ ID NO: 1291014 - RNA, 13 nt, Human
cagguccaggcug

SEQ ID NO: 1291015 - RNA, 17 nt, Human
cagguccaaugagcuuu

SEQ ID NO: 1291016 - RNA, 18 nt, Human
cagguccaaugagcuuuc

SEQ ID NO: 1291017 - RNA, 19 nt, Human
cagguccaaugagcuuucu

SEQ ID NO: 1291018 - RNA, 21 nt, Human
cagguccaaugagcuuucuga

SEQ ID NO: 1291019 - RNA, 22 nt, Human
cagguccaaugagcuuucugaa

SEQ ID NO: 1291020 - RNA, 13 nt, Human
cagguccagcucu

SEQ ID NO: 1291021 - RNA, 14 nt, Human
cagguccagcucug

SEQ ID NO: 1291022 - RNA, 16 nt, Human
cagguccagcucugga

SEQ ID NO: 1291023 - RNA, 17 nt, Human
cagguccagcucuggag

SEQ ID NO: 1291024 - RNA, 19 nt, Human
cagguccagcucuggaggg

SEQ ID NO: 1291025 - RNA, 16 nt, Human
caggucagccacuguu

SEQ ID NO: 1291026 - RNA, 15 nt, Human
caggucagccacugu

SEQ ID NO: 1291027 - RNA, 14 nt, Human
cagguccaaugagc

SEQ ID NO: 1291028 - RNA, 17 nt, Human
cagguaaucgaccugcc

SEQ ID NO: 1291029 - RNA, 18 nt, Human
cagguaaucgaccugccu

SEQ ID NO: 1291030 - RNA, 19 nt, Human
cagguaaucgaccugccuc

SEQ ID NO: 1291031 - RNA, 20 nt, Human
cagguaaucgaccugccucg

SEQ ID NO: 1291032 - RNA, 20 nt, Human
cagguaaaacagggccacau

SEQ ID NO: 1291033 - RNA, 15 nt, Human
cagguaauacaaacu

SEQ ID NO: 1291034 - RNA, 21 nt, Human
cagguacuuguaaauuauuaa

SEQ ID NO: 1291035 - RNA, 20 nt, Human
cagguagaauuaucuaauuu

SEQ ID NO: 1291036 - RNA, 22 nt, Human
cagguagaauuaucuaauuuau

SEQ ID NO: 1291037 - RNA, 23 nt, Human
cagguagaauuaucuaauuuaua

SEQ ID NO: 1291038 - RNA, 18 nt, Human
cagguagcugaaagggga

SEQ ID NO: 1291039 - RNA, 14 nt, Human
cagguaggaggcaa

SEQ ID NO: 1291040 - RNA, 23 nt, Human
cagguaggaggcaaauaucuuga

SEQ ID NO: 1291041 - RNA, 14 nt, Human
cagguaggccaagg

SEQ ID NO: 1291042 - RNA, 22 nt, Human
cagguaggccaagguguccuac

SEQ ID NO: 1291043 - RNA, 18 nt, Human
cagguaggggccccucuc

SEQ ID NO: 1291044 - RNA, 19 nt, Human
cagguaggggccccucuca

SEQ ID NO: 1291045 - RNA, 22 nt, Human
cagguaggggccccucucagcc

SEQ ID NO: 1291046 - RNA, 23 nt, Human
cagguaggggccccucucagccc

SEQ ID NO: 1291047 - RNA, 14 nt, Human
cagguauaccucac

SEQ ID NO: 1291048 - RNA, 15 nt, Human
cagguauaccucacu

SEQ ID NO: 1291049 - RNA, 17 nt, Human
cagguauagacuccuga

SEQ ID NO: 1291050 - RNA, 16 nt, Human
cagguauaccucacuu

SEQ ID NO: 1291051 - RNA, 15 nt, Human
cagguauauacuuug

SEQ ID NO: 1291052 - RNA, 18 nt, Human
cagguauauacuuugaaa

SEQ ID NO: 1291053 - RNA, 22 nt, Human
cagguauauacuuugaaaggag

SEQ ID NO: 1291054 - RNA, 15 nt, Human
cagguauccaaaaau

SEQ ID NO: 1291055 - RNA, 22 nt, Human
caggucccuaauaaagcugugu

SEQ ID NO: 1291056 - RNA, 21 nt, Human
caggucccuaauaaagcugug

SEQ ID NO: 1291057 - RNA, 20 nt, Human
caggucccuaauaaagcugu

SEQ ID NO: 1291058 - RNA, 19 nt, Human
caggucccuaauaaagcug

SEQ ID NO: 1291059 - RNA, 21 nt, Human
caggucccaaauggcccuggg

SEQ ID NO: 1291060 - RNA, 16 nt, Human
cagguccaggcugugu

SEQ ID NO: 1291061 - RNA, 16 nt, Human
caggucccuccccuuc

SEQ ID NO: 1291062 - RNA, 14 nt, Human
caggucccucucau

SEQ ID NO: 1291063 - RNA, 16 nt, Human
caggucccucucauuu

SEQ ID NO: 1291064 - RNA, 15 nt, Human
cagguccucagagaa

SEQ ID NO: 1291065 - RNA, 20 nt, Human
cagguccucagagaauuucu

SEQ ID NO: 1291066 - RNA, 20 nt, Human
cagguccucaguguccucag

SEQ ID NO: 1291067 - RNA, 13 nt, Human
cagguccuggugg

SEQ ID NO: 1291068 - RNA, 14 nt, Human
cagguccugguggg

SEQ ID NO: 1291069 - RNA, 18 nt, Human
cagguccugguggggcag

SEQ ID NO: 1291070 - RNA, 19 nt, Human
cagguccugguggggcagc

SEQ ID NO: 1291071 - RNA, 20 nt, Human
cagguccugguggggcagcu

SEQ ID NO: 1291072 - RNA, 21 nt, Human
cagguccugguggggcagcuc

SEQ ID NO: 1291073 - RNA, 23 nt, Human
cagguccugguggggcagcuccu

SEQ ID NO: 1291074 - RNA, 12 nt, Human
caggucuagacu

SEQ ID NO: 1291075 - RNA, 21 nt, Human
caggucugaagcucaacucuc

SEQ ID NO: 1291076 - RNA, 19 nt, Human
caggugacugucuggggag

SEQ ID NO: 1291077 - RNA, 18 nt, Human
caggugaggucagcacau

SEQ ID NO: 1291078 - RNA, 20 nt, Human
caggucuucaucgaaucuac

SEQ ID NO: 1291079 - RNA, 17 nt, Human
caggugaaaggaaauua

SEQ ID NO: 1291080 - RNA, 15 nt, Human
cagguggccacucca

SEQ ID NO: 1291081 - RNA, 17 nt, Human
cagguggccaaguuccu

SEQ ID NO: 1291082 - RNA, 22 nt, Human
cagguggaucuauuucauguuu

SEQ ID NO: 1291083 - RNA, 13 nt, Human
caggugcuggggc

SEQ ID NO: 1291084 - RNA, 17 nt, Human
caggugcuggggccugg

SEQ ID NO: 1291085 - RNA, 18 nt, Human
caggugcuggggccuggu

SEQ ID NO: 1291086 - RNA, 14 nt, Human
caggugcugguccc

SEQ ID NO: 1291087 - RNA, 15 nt, Human
caggugcuggucccg

SEQ ID NO: 1291088 - RNA, 16 nt, Human
cagguggccacuccag

SEQ ID NO: 1291089 - RNA, 19 nt, Human
cagguggccacuccagacc

SEQ ID NO: 1291090 - RNA, 21 nt, Human
cagguggccacuccagacccc

SEQ ID NO: 1291091 - RNA, 18 nt, Human
cagguggccaaguuccuc

SEQ ID NO: 1291092 - RNA, 19 nt, Human
cagguggccaaguuccucu

SEQ ID NO: 1291093 - RNA, 20 nt, Human
cagguggccaaguuccucua

SEQ ID NO: 1291094 - RNA, 22 nt, Human
cagguggcucugaggugccugu

SEQ ID NO: 1291095 - RNA, 15 nt, Human
cagguggcccuacug

SEQ ID NO: 1291096 - RNA, 16 nt, Human
caggguaggcuggagu

SEQ ID NO: 1291097 - RNA, 13 nt, Human
caggguaugaaga

SEQ ID NO: 1291098 - RNA, 17 nt, Human
caggguaugaagagugu

SEQ ID NO: 1291099 - RNA, 18 nt, Human
caggguauggacuaucug

SEQ ID NO: 1291100 - RNA, 23 nt, Human
caggguauggacuaucugucugg

SEQ ID NO: 1291101 - RNA, 21 nt, Human
cagggucaaaguguuuucucu

SEQ ID NO: 1291102 - RNA, 23 nt, Human
cagggucaaaguguuuucucuga

SEQ ID NO: 1291103 - RNA, 21 nt, Human
caggguaacuaacuaaaacaa

SEQ ID NO: 1291104 - RNA, 22 nt, Human
caggguaacuaacuaaaacaaa

SEQ ID NO: 1291105 - RNA, 19 nt, Human
caggguaacuaacuaaaac

SEQ ID NO: 1291106 - RNA, 12 nt, Human
caggguaacuaa

SEQ ID NO: 1291107 - RNA, 15 nt, Human
cagggguuagagcag

SEQ ID NO: 1291108 - RNA, 13 nt, Human
cagggguuucucg

SEQ ID NO: 1291109 - RNA, 21 nt, Human
caggguccaacauagagccgg

SEQ ID NO: 1291110 - RNA, 13 nt, Human
cagggucccacag

SEQ ID NO: 1291111 - RNA, 17 nt, Human
cagggucccacagccac

SEQ ID NO: 1291112 - RNA, 18 nt, Human
cagggucccacagccacg

SEQ ID NO: 1291113 - RNA, 19 nt, Human
cagggucccacagccacgu

SEQ ID NO: 1291114 - RNA, 13 nt, Human
cagggucccucug

SEQ ID NO: 1291115 - RNA, 15 nt, Human
cagggucccucugug

SEQ ID NO: 1291116 - RNA, 16 nt, Human
cagggucccucugugu

SEQ ID NO: 1291117 - RNA, 20 nt, Human
caggguccucuucugggccu

SEQ ID NO: 1291118 - RNA, 13 nt, Human
caggguccuggga

SEQ ID NO: 1291119 - RNA, 14 nt, Human
caggguccuuuuga

SEQ ID NO: 1291120 - RNA, 19 nt, Human
caggguccuuuugacacug

SEQ ID NO: 1291121 - RNA, 21 nt, Human
caggguccuuuugacacugcu

SEQ ID NO: 1291122 - RNA, 22 nt, Human
caggguccuuuugacacugcuc

SEQ ID NO: 1291123 - RNA, 23 nt, Human
caggguccuuuugacacugcucu

SEQ ID NO: 1291124 - RNA, 17 nt, Human
caggguuuuaacuuugu

SEQ ID NO: 1291125 - RNA, 14 nt, Human
caggguccugggag

SEQ ID NO: 1291126 - RNA, 14 nt, Human
cagguaaaacaggg

SEQ ID NO: 1291127 - RNA, 15 nt, Human
cagguaaaacagggc

SEQ ID NO: 1291128 - RNA, 23 nt, Human
cagguaaaacagggccacauaga

SEQ ID NO: 1291129 - RNA, 16 nt, Human
cagggggugugucugc

SEQ ID NO: 1291130 - RNA, 20 nt, Human
cagggggucuggcugguguu

SEQ ID NO: 1291131 - RNA, 23 nt, Human
caggggucugagcuccagcuccu

SEQ ID NO: 1291132 - RNA, 19 nt, Human
caggggucugagcuccagc

SEQ ID NO: 1291133 - RNA, 21 nt, Human
caggggucugagcuccagcuc

SEQ ID NO: 1291134 - RNA, 19 nt, Human
cagguggggagacugggcu

SEQ ID NO: 1291135 - RNA, 20 nt, Human
cagguggggagacugggcug

SEQ ID NO: 1291136 - RNA, 22 nt, Human
cagguggggagacugggcugag

SEQ ID NO: 1291137 - RNA, 23 nt, Human
cagguggggagacugggcugagg

SEQ ID NO: 1291138 - RNA, 20 nt, Human
caguaauuguguuuacauuu

SEQ ID NO: 1291139 - RNA, 18 nt, Human
caguaauuguguuuacau

SEQ ID NO: 1291140 - RNA, 17 nt, Human
caguaauuguguuuaca

SEQ ID NO: 1291141 - RNA, 17 nt, Human
caguaauuugaggacaa

SEQ ID NO: 1291142 - RNA, 14 nt, Human
caguaauuuagaaa

SEQ ID NO: 1291143 - RNA, 23 nt, Human
caguacacugucagcagggacug

SEQ ID NO: 1291144 - RNA, 23 nt, Human
caguaauccuguaggaagguacu

SEQ ID NO: 1291145 - RNA, 21 nt, Human
caguaauugguccgaucuuug

SEQ ID NO: 1291146 - RNA, 21 nt, Human
caguaauccuguaggaaggua

SEQ ID NO: 1291147 - RNA, 17 nt, Human
caguaauccuguaggaa

SEQ ID NO: 1291148 - RNA, 16 nt, Human
caguaauccuguagga

SEQ ID NO: 1291149 - RNA, 13 nt, Human
caguaauccugua

SEQ ID NO: 1291150 - RNA, 12 nt, Human
caguaauccugu

SEQ ID NO: 1291151 - RNA, 12 nt, Human
caguaccacaug

SEQ ID NO: 1291152 - RNA, 23 nt, Human
caguaccauuuaauggggaggac

SEQ ID NO: 1291153 - RNA, 17 nt, Human
caguaccccauggagcu

SEQ ID NO: 1291154 - RNA, 23 nt, Human
caguaccccauggagcugggcua

SEQ ID NO: 1291155 - RNA, 14 nt, Human
caguacccucucag

SEQ ID NO: 1291156 - RNA, 15 nt, Human
caguacccucucagc

SEQ ID NO: 1291157 - RNA, 16 nt, Human
caguacccucucagcu

SEQ ID NO: 1291158 - RNA, 19 nt, Human
caguacccucucagcucca

SEQ ID NO: 1291159 - RNA, 20 nt, Human
caguacccucucagcuccag

SEQ ID NO: 1291160 - RNA, 22 nt, Human
caguacccucucagcuccaggu

SEQ ID NO: 1291161 - RNA, 24 nt, Human
caguacccucucagcuccaggugg

SEQ ID NO: 1291162 - RNA, 20 nt, Human
caguaccuagcuggcucugu

SEQ ID NO: 1291163 - RNA, 14 nt, Human
caguaccugagggu

SEQ ID NO: 1291164 - RNA, 15 nt, Human
caguaccugaggguc

SEQ ID NO: 1291165 - RNA, 21 nt, Human
caguaccugagggucuguagg

SEQ ID NO: 1291166 - RNA, 23 nt, Human
caguaccugagggucuguagguu

SEQ ID NO: 1291167 - RNA, 22 nt, Human
caguaccugagggucuguaggu

SEQ ID NO: 1291168 - RNA, 23 nt, Human
caguaccuucaaacuagggccaa

SEQ ID NO: 1291169 - RNA, 15 nt, Human
cagguuauaacagug

SEQ ID NO: 1291170 - RNA, 16 nt, Human
cagguuauaacagugu

SEQ ID NO: 1291171 - RNA, 17 nt, Human
cagguuauaacaguguu

SEQ ID NO: 1291172 - RNA, 15 nt, Human
cagguuccacagagg

SEQ ID NO: 1291173 - RNA, 19 nt, Human
cagguuccacagaggacac

SEQ ID NO: 1291174 - RNA, 14 nt, Human
cagguucccaagcu

SEQ ID NO: 1291175 - RNA, 15 nt, Human
cagguucccaagcuc

SEQ ID NO: 1291176 - RNA, 17 nt, Human
cagguucccaagcucag

SEQ ID NO: 1291177 - RNA, 14 nt, Human
cagguucccacuua

SEQ ID NO: 1291178 - RNA, 15 nt, Human
cagguucccucccag

SEQ ID NO: 1291179 - RNA, 16 nt, Human
cagguucccucccaga

SEQ ID NO: 1291180 - RNA, 18 nt, Human
cagguucccucccagagg

SEQ ID NO: 1291181 - RNA, 23 nt, Human
cagguucccucccagaggagcca

SEQ ID NO: 1291182 - RNA, 20 nt, Human
cagguucuccguuagcuccu

SEQ ID NO: 1291183 - RNA, 15 nt, Human
caguaacaggcucaa

SEQ ID NO: 1291184 - RNA, 18 nt, Human
caguaacgcgucuuccug

SEQ ID NO: 1291185 - RNA, 19 nt, Human
caguaacgcgucuuccuga

SEQ ID NO: 1291186 - RNA, 20 nt, Human
caguaacgcgucuuccugag

SEQ ID NO: 1291187 - RNA, 21 nt, Human
caguaacgcgucuuccugagu

SEQ ID NO: 1291188 - RNA, 14 nt, Human
caguaacucaucug

SEQ ID NO: 1291189 - RNA, 16 nt, Human
caguaacucaucuguc

SEQ ID NO: 1291190 - RNA, 18 nt, Human
caguaacuguuuuuuaag

SEQ ID NO: 1291191 - RNA, 9 nt, Human
caguaacug

SEQ ID NO: 1291192 - RNA, 10 nt, Human
caguaacugu

SEQ ID NO: 1291193 - RNA, 18 nt, Human
caggugugagccaccacg

SEQ ID NO: 1291194 - RNA, 21 nt, Human
caggugugagccaccacgccc

SEQ ID NO: 1291195 - RNA, 17 nt, Human
cagguguuaacauucca

SEQ ID NO: 1291196 - RNA, 18 nt, Human
cagguguuaacauuccaa

SEQ ID NO: 1291197 - RNA, 19 nt, Human
cagguguuaacauuccaag

SEQ ID NO: 1291198 - RNA, 20 nt, Human
cagguguuaacauuccaaga

SEQ ID NO: 1291199 - RNA, 22 nt, Human
cagguguuacuguaauuccuca

SEQ ID NO: 1291200 - RNA, 13 nt, Human
cagguguugccaa

SEQ ID NO: 1291201 - RNA, 14 nt, Human
cagguguugccaaa

SEQ ID NO: 1291202 - RNA, 14 nt, Human
cagguuaagaaaau

SEQ ID NO: 1291203 - RNA, 15 nt, Human
cagucaggaaagaga

SEQ ID NO: 1291204 - RNA, 18 nt, Human
cagucaggaaagagaacu

SEQ ID NO: 1291205 - RNA, 22 nt, Human
cagucaggaaagagaacuucca

SEQ ID NO: 1291206 - RNA, 21 nt, Human
cagucaggaaaggaaucauuu

SEQ ID NO: 1291207 - RNA, 14 nt, Human
cagucaggcccagg

SEQ ID NO: 1291208 - RNA, 15 nt, Human
cagucauaacuaaau

SEQ ID NO: 1291209 - RNA, 21 nt, Human
caguauggguuagggaaaaca

SEQ ID NO: 1291210 - RNA, 16 nt, Human
caguauggguuaggga

SEQ ID NO: 1291211 - RNA, 19 nt, Human
caguauggggguuguaaau

SEQ ID NO: 1291212 - RNA, 20 nt, Human
caguauggggguuguaaauu

SEQ ID NO: 1291213 - RNA, 21 nt, Human
caguauggggguuguaaauug

SEQ ID NO: 1291214 - RNA, 23 nt, Human
caguauggggguuguaaauuggc

SEQ ID NO: 1291215 - RNA, 23 nt, Human
caguauggguuagggaaaacauu

SEQ ID NO: 1291216 - RNA, 19 nt, Human
caguauguucaaagucaaa

SEQ ID NO: 1291217 - RNA, 12 nt, Human
cagucacugcuc

SEQ ID NO: 1291218 - RNA, 17 nt, Human
cagucauucagauauga

SEQ ID NO: 1291219 - RNA, 20 nt, Human
cagucauucagauaugauuc

SEQ ID NO: 1291220 - RNA, 13 nt, Human
cagucauuggcug

SEQ ID NO: 1291221 - RNA, 17 nt, Human
cagucauuggcugucuc

SEQ ID NO: 1291222 - RNA, 21 nt, Human
cagucauuggcugucuccuag

SEQ ID NO: 1291223 - RNA, 13 nt, Human
caguccacaaaau

SEQ ID NO: 1291224 - RNA, 20 nt, Human
caguccaccugaggaacugu

SEQ ID NO: 1291225 - RNA, 23 nt, Human
caguccaccugaggaacugucuc

SEQ ID NO: 1291226 - RNA, 18 nt, Human
caguccacuucugacagc

SEQ ID NO: 1291227 - RNA, 20 nt, Human
caguccacuucugacagccu

SEQ ID NO: 1291228 - RNA, 21 nt, Human
caguccacuucugacagccuc

SEQ ID NO: 1291229 - RNA, 23 nt, Human
caguccaggaugcuaacaucuaa

SEQ ID NO: 1291230 - RNA, 15 nt, Human
caguccaggcugccg

SEQ ID NO: 1291231 - RNA, 18 nt, Human
caguccaggcugccgugg

SEQ ID NO: 1291232 - RNA, 13 nt, Human
caguccaugaaga

SEQ ID NO: 1291233 - RNA, 18 nt, Human
caguccaguccuaucugg

SEQ ID NO: 1291234 - RNA, 20 nt, Human
caguccaguccuaucugggc

SEQ ID NO: 1291235 - RNA, 21 nt, Human
caguccaguccuaucugggcu

SEQ ID NO: 1291236 - RNA, 22 nt, Human
caguccaguccuaucugggcuu

SEQ ID NO: 1291237 - RNA, 23 nt, Human
caguccaguccuaucugggcuuc

SEQ ID NO: 1291238 - RNA, 19 nt, Human
cagucccaagcggugucuc

SEQ ID NO: 1291239 - RNA, 21 nt, Human
cagucccaagcggugucucuc

SEQ ID NO: 1291240 - RNA, 15 nt, Human
cagucccagagcagg

SEQ ID NO: 1291241 - RNA, 14 nt, Human
cagucccagagcag

SEQ ID NO: 1291242 - RNA, 20 nt, Human
cagucccagcggugggaccu

SEQ ID NO: 1291243 - RNA, 22 nt, Human
caguaggggcuuauaauaaagg

SEQ ID NO: 1291244 - RNA, 22 nt, Human
caguaggugcccagaauaaguu

SEQ ID NO: 1291245 - RNA, 19 nt, Human
caguaggggcuuauaauaa

SEQ ID NO: 1291246 - RNA, 22 nt, Human
caguaggagcccagcucugaaa

SEQ ID NO: 1291247 - RNA, 20 nt, Human
caguagguuauuuagcuugg

SEQ ID NO: 1291248 - RNA, 22 nt, Human
caguagguuauuuagcuuggga

SEQ ID NO: 1291249 - RNA, 12 nt, Human
caguagugauag

SEQ ID NO: 1291250 - RNA, 23 nt, Human
caguagucuugaugaccaaaguc

SEQ ID NO: 1291251 - RNA, 14 nt, Human
caguaguucacaua

SEQ ID NO: 1291252 - RNA, 22 nt, Human
caguaguucacauacaaaucau

SEQ ID NO: 1291253 - RNA, 18 nt, Human
caguaguucucaaagugu

SEQ ID NO: 1291254 - RNA, 16 nt, Human
caguacuuugugcauu

SEQ ID NO: 1291255 - RNA, 18 nt, Human
caguacuuugugcauucu

SEQ ID NO: 1291256 - RNA, 20 nt, Human
caguagaccuuguuacuucu

SEQ ID NO: 1291257 - RNA, 23 nt, Human
caguagaggcuauggacagggca

SEQ ID NO: 1291258 - RNA, 15 nt, Human
caguagauugcagaa

SEQ ID NO: 1291259 - RNA, 16 nt, Human
caguagauugcagaaa

SEQ ID NO: 1291260 - RNA, 18 nt, Human
caguagauugcagaaaau

SEQ ID NO: 1291261 - RNA, 16 nt, Human
caguagauuuuccaaa

SEQ ID NO: 1291262 - RNA, 18 nt, Human
caguagauuuuccaaaug

SEQ ID NO: 1291263 - RNA, 18 nt, Human
caguagcacaaguuauuu

SEQ ID NO: 1291264 - RNA, 21 nt, Human
caguagcacaaguuauuuaaa

SEQ ID NO: 1291265 - RNA, 23 nt, Human
caguagcacaaguuauuuaaauc

SEQ ID NO: 1291266 - RNA, 12 nt, Human
caguaggagccc

SEQ ID NO: 1291267 - RNA, 14 nt, Human
caguaggagcccag

SEQ ID NO: 1291268 - RNA, 15 nt, Human
caguaggagcccagc

SEQ ID NO: 1291269 - RNA, 21 nt, Human
caguaggagcccagcucugaa

SEQ ID NO: 1291270 - RNA, 22 nt, Human
caguaucucuucagucucuaua

SEQ ID NO: 1291271 - RNA, 19 nt, Human
caguaucucuucagucucu

SEQ ID NO: 1291272 - RNA, 16 nt, Human
caguaucucaaacaau

SEQ ID NO: 1291273 - RNA, 13 nt, Human
caguaugaaaaua

SEQ ID NO: 1291274 - RNA, 12 nt, Human
caguauggcagc

SEQ ID NO: 1291275 - RNA, 14 nt, Human
caguaugaaaauaa

SEQ ID NO: 1291276 - RNA, 19 nt, Human
caguaugaauuauucaauu

SEQ ID NO: 1291277 - RNA, 18 nt, Human
caguauggggguuguaaa

SEQ ID NO: 1291278 - RNA, 17 nt, Human
caguaucucuucagucu

SEQ ID NO: 1291279 - RNA, 16 nt, Human
caguaucucuucaguc

SEQ ID NO: 1291280 - RNA, 15 nt, Human
caguaucucuucagu

SEQ ID NO: 1291281 - RNA, 14 nt, Human
caguaucucuucag

SEQ ID NO: 1291282 - RNA, 19 nt, Human
caguaucggcacuguacaa

SEQ ID NO: 1291283 - RNA, 20 nt, Human
caguaucggcacuguacaaa

SEQ ID NO: 1291284 - RNA, 16 nt, Human
caguaucggcacugua

SEQ ID NO: 1291285 - RNA, 15 nt, Human
caguaucggcacugu

SEQ ID NO: 1291286 - RNA, 14 nt, Human
caguaucggcacug

SEQ ID NO: 1291287 - RNA, 17 nt, Human
caguaucaugcccugug

SEQ ID NO: 1291288 - RNA, 19 nt, Human
caguaucaugcccugugca

SEQ ID NO: 1291289 - RNA, 20 nt, Human
caguaucaugcccugugcaa

SEQ ID NO: 1291290 - RNA, 16 nt, Human
caguauccacuuugca

SEQ ID NO: 1291291 - RNA, 23 nt, Human
caguauaauugaguuuucagugg

SEQ ID NO: 1291292 - RNA, 13 nt, Human
caguaucaugccc

SEQ ID NO: 1291293 - RNA, 16 nt, Human
caguaucaugcccugu

SEQ ID NO: 1291294 - RNA, 23 nt, Human
caguccccgugaaggagagcccu

SEQ ID NO: 1291295 - RNA, 13 nt, Human
cagucccuccaca

SEQ ID NO: 1291296 - RNA, 19 nt, Human
caguccgucaaaacagauu

SEQ ID NO: 1291297 - RNA, 15 nt, Human
caguccuaucugggc

SEQ ID NO: 1291298 - RNA, 16 nt, Human
caguccuaucugggcu

SEQ ID NO: 1291299 - RNA, 17 nt, Human
caguccuaucugggcuu

SEQ ID NO: 1291300 - RNA, 20 nt, Human
caguccuaucugggcuuccu

SEQ ID NO: 1291301 - RNA, 21 nt, Human
caguccuaucugggcuuccug

SEQ ID NO: 1291302 - RNA, 22 nt, Human
caguccuaucugggcuuccugg

SEQ ID NO: 1291303 - RNA, 14 nt, Human
caguccccuucccu

SEQ ID NO: 1291304 - RNA, 19 nt, Human
caguccccuucccuccaag

SEQ ID NO: 1291305 - RNA, 13 nt, Human
caguccccuuccc

SEQ ID NO: 1291306 - RNA, 16 nt, Human
cagucccccugcccca

SEQ ID NO: 1291307 - RNA, 17 nt, Human
cagucccccugccccag

SEQ ID NO: 1291308 - RNA, 14 nt, Human
caguccccccaccc

SEQ ID NO: 1291309 - RNA, 20 nt, Human
caguccccccacccucauuc

SEQ ID NO: 1291310 - RNA, 20 nt, Human
cagugaaagaaaauaacaau

SEQ ID NO: 1291311 - RNA, 16 nt, Human
cagugaaagaaaauaa

SEQ ID NO: 1291312 - RNA, 14 nt, Human
cagugaaaaacuau

SEQ ID NO: 1291313 - RNA, 17 nt, Human
cagugaaaaacuauuaa

SEQ ID NO: 1291314 - RNA, 12 nt, Human
caguccuguccu

SEQ ID NO: 1291315 - RNA, 15 nt, Human
cagucuguggaucag

SEQ ID NO: 1291316 - RNA, 15 nt, Human
cagucuuccauuugc

SEQ ID NO: 1291317 - RNA, 17 nt, Human
cagucuuccauuugcaa

SEQ ID NO: 1291318 - RNA, 18 nt, Human
cagucuuccauuugcaag

SEQ ID NO: 1291319 - RNA, 21 nt, Human
cagucuuccauuugcaaggga

SEQ ID NO: 1291320 - RNA, 13 nt, Human
cagucuuccugac

SEQ ID NO: 1291321 - RNA, 16 nt, Human
cagucuuccugacacu

SEQ ID NO: 1291322 - RNA, 17 nt, Human
cagucuuccugacacuu

SEQ ID NO: 1291323 - RNA, 18 nt, Human
cagucuuccugacacuuu

SEQ ID NO: 1291324 - RNA, 21 nt, Human
cagucuuccugacacuuuaau

SEQ ID NO: 1291325 - RNA, 22 nt, Human
caguccugaucagagccguggu

SEQ ID NO: 1291326 - RNA, 17 nt, Human
caguccuggaagccagc

SEQ ID NO: 1291327 - RNA, 22 nt, Human
caguccuggaagccagcuuucc

SEQ ID NO: 1291328 - RNA, 12 nt, Human
cagugagccuga

SEQ ID NO: 1291329 - RNA, 21 nt, Human
cagugagggagggcugucauc

SEQ ID NO: 1291330 - RNA, 23 nt, Human
cagugaggguaaguauuuuccug

SEQ ID NO: 1291331 - RNA, 15 nt, Human
cagugagacagcucu

SEQ ID NO: 1291332 - RNA, 13 nt, Human
cagugacuucuga

SEQ ID NO: 1291333 - RNA, 15 nt, Human
cagugacuucugaga

SEQ ID NO: 1291334 - RNA, 16 nt, Human
cagugacuucugagau

SEQ ID NO: 1291335 - RNA, 17 nt, Human
cagugacuucugagauc

SEQ ID NO: 1291336 - RNA, 21 nt, Human
cagugagagaguggcuggggc

SEQ ID NO: 1291337 - RNA, 22 nt, Human
cagugagagaguggcuggggca

SEQ ID NO: 1291338 - RNA, 23 nt, Human
cagugagagaguggcuggggcau

SEQ ID NO: 1291339 - RNA, 15 nt, Human
cagugacagcuagga

SEQ ID NO: 1291340 - RNA, 12 nt, Human
cagugacagcua

SEQ ID NO: 1291341 - RNA, 13 nt, Human
cagugacccuggc

SEQ ID NO: 1291342 - RNA, 16 nt, Human
cagugacccuggcucc

SEQ ID NO: 1291343 - RNA, 17 nt, Human
cagugacccuggcuccu

SEQ ID NO: 1291344 - RNA, 13 nt, Human
cagugaagacaga

SEQ ID NO: 1291345 - RNA, 14 nt, Human
cagugaagacagaa

SEQ ID NO: 1291346 - RNA, 15 nt, Human
cagugaagacagaag

SEQ ID NO: 1291347 - RNA, 16 nt, Human
cagugaagacagaagu

SEQ ID NO: 1291348 - RNA, 15 nt, Human
cagugaagacuauga

SEQ ID NO: 1291349 - RNA, 21 nt, Human
cagugaagagccacugccauu

SEQ ID NO: 1291350 - RNA, 14 nt, Human
cagugaaguugcug

SEQ ID NO: 1291351 - RNA, 15 nt, Human
cagugaaguugcugc

SEQ ID NO: 1291352 - RNA, 16 nt, Human
cagugaaguugcugcu

SEQ ID NO: 1291353 - RNA, 17 nt, Human
cagugaaguugcugcuu

SEQ ID NO: 1291354 - RNA, 18 nt, Human
cagugaaguugcugcuuc

SEQ ID NO: 1291355 - RNA, 19 nt, Human
cagugaaguugcugcuucu

SEQ ID NO: 1291356 - RNA, 23 nt, Human
cagugaaguugcugcuucuccca

SEQ ID NO: 1291357 - RNA, 17 nt, Human
cagugaaugauucagug

SEQ ID NO: 1291358 - RNA, 18 nt, Human
cagugaaugauucagugu

SEQ ID NO: 1291359 - RNA, 20 nt, Human
cagugaaugauucaguguua

SEQ ID NO: 1291360 - RNA, 20 nt, Human
cagugaauuguguaggagag

SEQ ID NO: 1291361 - RNA, 15 nt, Human
cagugacagacaggc

SEQ ID NO: 1291362 - RNA, 16 nt, Human
cagugacagacaggcu

SEQ ID NO: 1291363 - RNA, 17 nt, Human
cagugacagacaggcuc

SEQ ID NO: 1291364 - RNA, 18 nt, Human
cagugacagacaggcucu

SEQ ID NO: 1291365 - RNA, 22 nt, Human
cagugauuaccagggacugagg

SEQ ID NO: 1291366 - RNA, 18 nt, Human
cagugauuaccagggacu

SEQ ID NO: 1291367 - RNA, 17 nt, Human
cagugauuaccagggac

SEQ ID NO: 1291368 - RNA, 15 nt, Human
cagugcccuccagga

SEQ ID NO: 1291369 - RNA, 17 nt, Human
cagugcccucauuuuau

SEQ ID NO: 1291370 - RNA, 19 nt, Human
cagugcccucauuuuaugu

SEQ ID NO: 1291371 - RNA, 13 nt, Human
cagugcccucucc

SEQ ID NO: 1291372 - RNA, 22 nt, Human
cagugcccucuccccucagccu

SEQ ID NO: 1291373 - RNA, 13 nt, Human
cagugcccugagc

SEQ ID NO: 1291374 - RNA, 14 nt, Human
cagugcccugagcc

SEQ ID NO: 1291375 - RNA, 15 nt, Human
cagugcccugagcca

SEQ ID NO: 1291376 - RNA, 12 nt, Human
cagugcccccac

SEQ ID NO: 1291377 - RNA, 15 nt, Human
cagugcccccacuga

SEQ ID NO: 1291378 - RNA, 17 nt, Human
cagugcccccacugacc

SEQ ID NO: 1291379 - RNA, 20 nt, Human
cagugcccccacugaccaga

SEQ ID NO: 1291380 - RNA, 21 nt, Human
cagugcccccacugaccagaa

SEQ ID NO: 1291381 - RNA, 22 nt, Human
cagugcccccacugaccagaac

SEQ ID NO: 1291382 - RNA, 23 nt, Human
cagugcccccacugaccagaacu

SEQ ID NO: 1291383 - RNA, 15 nt, Human
cagugcccugauccc

SEQ ID NO: 1291384 - RNA, 16 nt, Human
cagugcccugagccag

SEQ ID NO: 1291385 - RNA, 22 nt, Human
cagugccuuccuguuuuucaca

SEQ ID NO: 1291386 - RNA, 23 nt, Human
cagugccuuucuucucuccagug

SEQ ID NO: 1291387 - RNA, 12 nt, Human
cagugcggccag

SEQ ID NO: 1291388 - RNA, 14 nt, Human
cagugcucccucac

SEQ ID NO: 1291389 - RNA, 15 nt, Human
cagggggcaagagga

SEQ ID NO: 1291390 - RNA, 18 nt, Human
cagggggagcugggccug

SEQ ID NO: 1291391 - RNA, 19 nt, Human
cagggggagcugggccugg

SEQ ID NO: 1291392 - RNA, 18 nt, Human
caggggcugucccggagg

SEQ ID NO: 1291393 - RNA, 15 nt, Human
caggggcuuccuggu

SEQ ID NO: 1291394 - RNA, 16 nt, Human
caggggcuuccuggug

SEQ ID NO: 1291395 - RNA, 17 nt, Human
caggggcuuccuggugc

SEQ ID NO: 1291396 - RNA, 20 nt, Human
caggggcuuccuggugcugg

SEQ ID NO: 1291397 - RNA, 13 nt, Human
caggggcuugacu

SEQ ID NO: 1291398 - RNA, 16 nt, Human
caggggcuugacuuuu

SEQ ID NO: 1291399 - RNA, 19 nt, Human
cagggggaagguggggucc

SEQ ID NO: 1291400 - RNA, 22 nt, Human
cagggggagcugggccuggucu

SEQ ID NO: 1291401 - RNA, 23 nt, Human
cagggggccccuuugcugacccu

SEQ ID NO: 1291402 - RNA, 12 nt, Human
cagggggcugcu

SEQ ID NO: 1291403 - RNA, 13 nt, Human
cagggggcugcug

SEQ ID NO: 1291404 - RNA, 14 nt, Human
cagggggcugcugc

SEQ ID NO: 1291405 - RNA, 15 nt, Human
cagggggcugcugcu

SEQ ID NO: 1291406 - RNA, 18 nt, Human
cagggggcugcugcuggg

SEQ ID NO: 1291407 - RNA, 20 nt, Human
cagggggcugcugcugggcu

SEQ ID NO: 1291408 - RNA, 23 nt, Human
cagggggcugcugcugggcucag

SEQ ID NO: 1291409 - RNA, 21 nt, Human
cagggggcugcugcugggcuc

SEQ ID NO: 1291410 - RNA, 15 nt, Human
caggggggugaggag

SEQ ID NO: 1291411 - RNA, 18 nt, Human
caggggggugaggagcug

SEQ ID NO: 1291412 - RNA, 19 nt, Human
caggggggugaggagcugg

SEQ ID NO: 1291413 - RNA, 13 nt, Human
cagggggucuggc

SEQ ID NO: 1291414 - RNA, 14 nt, Human
cagggggucuggcu

SEQ ID NO: 1291415 - RNA, 16 nt, Human
cagggggucuggcugg

SEQ ID NO: 1291416 - RNA, 17 nt, Human
cagggggucuggcuggu

SEQ ID NO: 1291417 - RNA, 18 nt, Human
cagggggucuggcuggug

SEQ ID NO: 1291418 - RNA, 19 nt, Human
cagggggucuggcuggugu

SEQ ID NO: 1291419 - RNA, 11 nt, Human
caggggacagg

SEQ ID NO: 1291420 - RNA, 16 nt, Human
caggggacaggauggu

SEQ ID NO: 1291421 - RNA, 16 nt, Human
cagggcgggcagaggg

SEQ ID NO: 1291422 - RNA, 17 nt, Human
cagggcgggcagagggc

SEQ ID NO: 1291423 - RNA, 19 nt, Human
cagggcgggcagagggcug

SEQ ID NO: 1291424 - RNA, 20 nt, Human
cagggcgggcagagggcugg

SEQ ID NO: 1291425 - RNA, 21 nt, Human
cagggcgggcagagggcugga

SEQ ID NO: 1291426 - RNA, 22 nt, Human
cagggcgggcagagggcuggag

SEQ ID NO: 1291427 - RNA, 15 nt, Human
cagggcggggguggc

SEQ ID NO: 1291428 - RNA, 16 nt, Human
caggggacaggagucc

SEQ ID NO: 1291429 - RNA, 22 nt, Human
caggggacaggaguccacuuug

SEQ ID NO: 1291430 - RNA, 16 nt, Human
caggggagcagagggg

SEQ ID NO: 1291431 - RNA, 20 nt, Human
caggggagcagaggggcaga

SEQ ID NO: 1291432 - RNA, 21 nt, Human
caggggagcagaggggcagag

SEQ ID NO: 1291433 - RNA, 22 nt, Human
caggggagcagaggggcagagg

SEQ ID NO: 1291434 - RNA, 14 nt, Human
cagggccugucuca

SEQ ID NO: 1291435 - RNA, 14 nt, Human
caggggcagcccca

SEQ ID NO: 1291436 - RNA, 18 nt, Human
caggggcagccccaggcc

SEQ ID NO: 1291437 - RNA, 22 nt, Human
caggggcccgcgauguggaacu

SEQ ID NO: 1291438 - RNA, 12 nt, Human
caggggccugga

SEQ ID NO: 1291439 - RNA, 13 nt, Human
caggggccuggag

SEQ ID NO: 1291440 - RNA, 14 nt, Human
caggggccuggaga

SEQ ID NO: 1291441 - RNA, 15 nt, Human
caggggccuggagau

SEQ ID NO: 1291442 - RNA, 22 nt, Human
caggggccuggagauccuccug

SEQ ID NO: 1291443 - RNA, 23 nt, Human
caggggccuggagauccuccugc

SEQ ID NO: 1291444 - RNA, 16 nt, Human
caggggccugcccagu

SEQ ID NO: 1291445 - RNA, 14 nt, Human
caggggcucccucc

SEQ ID NO: 1291446 - RNA, 21 nt, Human
caggggcucccuccgccccca

SEQ ID NO: 1291447 - RNA, 18 nt, Human
caggggcucccuccgccc

SEQ ID NO: 1291448 - RNA, 13 nt, Human
caggggcugcuuc

SEQ ID NO: 1291449 - RNA, 16 nt, Human
caggggcugcuuccuc

SEQ ID NO: 1291450 - RNA, 18 nt, Human
caggggcugcuuccuccu

SEQ ID NO: 1291451 - RNA, 19 nt, Human
caggggcugcuuccuccug

SEQ ID NO: 1291452 - RNA, 20 nt, Human
caggggcugcuuccuccugg

SEQ ID NO: 1291453 - RNA, 22 nt, Human
caggggcugcuuccuccuggaa

SEQ ID NO: 1291454 - RNA, 23 nt, Human
cagggaccggcggaccccagcca

SEQ ID NO: 1291455 - RNA, 21 nt, Human
cagggaccgcccccugucucu

SEQ ID NO: 1291456 - RNA, 14 nt, Human
cagggaccauggcu

SEQ ID NO: 1291457 - RNA, 12 nt, Human
cagggacucagg

SEQ ID NO: 1291458 - RNA, 21 nt, Human
cagggacucaucuuucccucc

SEQ ID NO: 1291459 - RNA, 22 nt, Human
cagggacucaucuuucccuccu

SEQ ID NO: 1291460 - RNA, 23 nt, Human
cagggacucaucuuucccuccuu

SEQ ID NO: 1291461 - RNA, 19 nt, Human
cagggacagaggccccagc

SEQ ID NO: 1291462 - RNA, 21 nt, Human
cagggacagaggccccagccu

SEQ ID NO: 1291463 - RNA, 23 nt, Human
cagggacagaggccccagccucc

SEQ ID NO: 1291464 - RNA, 14 nt, Human
cagggacagcaacu

SEQ ID NO: 1291465 - RNA, 16 nt, Human
cagggaccacacccug

SEQ ID NO: 1291466 - RNA, 22 nt, Human
cagggaccacacccuguacugu

SEQ ID NO: 1291467 - RNA, 15 nt, Human
cagggcaaggccauu

SEQ ID NO: 1291468 - RNA, 18 nt, Human
cagggcaaugaugaauga

SEQ ID NO: 1291469 - RNA, 12 nt, Human
cagggcaaagcc

SEQ ID NO: 1291470 - RNA, 13 nt, Human
cagggcaaagcca

SEQ ID NO: 1291471 - RNA, 14 nt, Human
cagggcaaagccag

SEQ ID NO: 1291472 - RNA, 16 nt, Human
cagggcaaagccaggu

SEQ ID NO: 1291473 - RNA, 17 nt, Human
cagggcaaagccagguc

SEQ ID NO: 1291474 - RNA, 18 nt, Human
cagggcaaagccaggucc

SEQ ID NO: 1291475 - RNA, 20 nt, Human
cagggcaaagccaggucccu

SEQ ID NO: 1291476 - RNA, 22 nt, Human
cagggcaaagccaggucccucu

SEQ ID NO: 1291477 - RNA, 23 nt, Human
cagggcaaagccaggucccucuc

SEQ ID NO: 1291478 - RNA, 21 nt, Human
cagggacuucaggaucaaguc

SEQ ID NO: 1291479 - RNA, 12 nt, Human
cagggagaagcu

SEQ ID NO: 1291480 - RNA, 13 nt, Human
cagggagaagcuc

SEQ ID NO: 1291481 - RNA, 12 nt, Human
cagggauguggg

SEQ ID NO: 1291482 - RNA, 13 nt, Human
cagggaugugggu

SEQ ID NO: 1291483 - RNA, 20 nt, Human
cagggauguggguuccacag

SEQ ID NO: 1291484 - RNA, 21 nt, Human
cagggauguggguuccacaga

SEQ ID NO: 1291485 - RNA, 17 nt, Human
cagggauuaaccucugc

SEQ ID NO: 1291486 - RNA, 18 nt, Human
cagggauuaaccucugca

SEQ ID NO: 1291487 - RNA, 19 nt, Human
cagggauuaaccucugcac

SEQ ID NO: 1291488 - RNA, 20 nt, Human
cagggauuaaccucugcacu

SEQ ID NO: 1291489 - RNA, 22 nt, Human
cagggauguggguuccacagac

SEQ ID NO: 1291490 - RNA, 12 nt, Human
cagggcacagga

SEQ ID NO: 1291491 - RNA, 13 nt, Human
cagggcacaggag

SEQ ID NO: 1291492 - RNA, 14 nt, Human
cagggcacaggagc

SEQ ID NO: 1291493 - RNA, 15 nt, Human
cagggcacaggagcu

SEQ ID NO: 1291494 - RNA, 16 nt, Human
cagggcacaggagcua

SEQ ID NO: 1291495 - RNA, 18 nt, Human
cagggcacaggagcuacc

SEQ ID NO: 1291496 - RNA, 19 nt, Human
cagggcacaggagcuaccu

SEQ ID NO: 1291497 - RNA, 20 nt, Human
cagggcacaggagcuaccug

SEQ ID NO: 1291498 - RNA, 22 nt, Human
cagggcacaggagcuaccugug

SEQ ID NO: 1291499 - RNA, 21 nt, Human
cagggcacaggagcuaccugu

SEQ ID NO: 1291500 - RNA, 13 nt, Human
cagggcagaguga

SEQ ID NO: 1291501 - RNA, 19 nt, Human
cagggcagagugagaccca

SEQ ID NO: 1291502 - RNA, 12 nt, Human
cagggcagccag

SEQ ID NO: 1291503 - RNA, 13 nt, Human
cagggcagccagg

SEQ ID NO: 1291504 - RNA, 14 nt, Human
cagggcagccaggg

SEQ ID NO: 1291505 - RNA, 15 nt, Human
cagggcagccaggga

SEQ ID NO: 1291506 - RNA, 16 nt, Human
cagggcagccagggag

SEQ ID NO: 1291507 - RNA, 17 nt, Human
cagggcagccagggaga

SEQ ID NO: 1291508 - RNA, 18 nt, Human
cagggcagccagggagag

SEQ ID NO: 1291509 - RNA, 20 nt, Human
cagggcagccagggagagcc

SEQ ID NO: 1291510 - RNA, 22 nt, Human
cagggcagccagggagagccca

SEQ ID NO: 1291511 - RNA, 23 nt, Human
cagggcagccagggagagcccag

SEQ ID NO: 1291512 - RNA, 13 nt, Human
cagggcagcgcca

SEQ ID NO: 1291513 - RNA, 14 nt, Human
cagggcagcgccag

SEQ ID NO: 1291514 - RNA, 15 nt, Human
cagggcagcgccagg

SEQ ID NO: 1291515 - RNA, 16 nt, Human
cagggcagcgccaggc

SEQ ID NO: 1291516 - RNA, 17 nt, Human
cagggcagcgccaggcu

SEQ ID NO: 1291517 - RNA, 18 nt, Human
cagggcagcgccaggcug

SEQ ID NO: 1291518 - RNA, 19 nt, Human
cagggcagcgccaggcuga

SEQ ID NO: 1291519 - RNA, 22 nt, Human
cagggcagcgccaggcugacca

SEQ ID NO: 1291520 - RNA, 20 nt, Human
cagggcauggccagguggcc

SEQ ID NO: 1291521 - RNA, 17 nt, Human
cagggcaucucugggcu

SEQ ID NO: 1291522 - RNA, 18 nt, Human
cagggcaucucugggcug

SEQ ID NO: 1291523 - RNA, 19 nt, Human
cagggcaucucugggcugg

SEQ ID NO: 1291524 - RNA, 20 nt, Human
cagggcaucucugggcugga

SEQ ID NO: 1291525 - RNA, 24 nt, Human
cagggcaucucugggcuggaugag

SEQ ID NO: 1291526 - RNA, 15 nt, Human
cagggcaugccacgu

SEQ ID NO: 1291527 - RNA, 13 nt, Human
cagggcagggccc

SEQ ID NO: 1291528 - RNA, 14 nt, Human
cagggcaguaccug

SEQ ID NO: 1291529 - RNA, 15 nt, Human
cagggcaguaccuga

SEQ ID NO: 1291530 - RNA, 19 nt, Human
cagggcaguaccugagggu

SEQ ID NO: 1291531 - RNA, 21 nt, Human
cagggcagucauuggcugucu

SEQ ID NO: 1291532 - RNA, 23 nt, Human
cagggcaguaccugagggucugu

SEQ ID NO: 1291533 - RNA, 16 nt, Human
cagggcaucucugggc

SEQ ID NO: 1291534 - RNA, 16 nt, Human
cagggccacgcuccag

SEQ ID NO: 1291535 - RNA, 17 nt, Human
cagggccacgcuccagc

SEQ ID NO: 1291536 - RNA, 18 nt, Human
cagggccacgcuccagcu

SEQ ID NO: 1291537 - RNA, 20 nt, Human
cagggccacgcuccagcugc

SEQ ID NO: 1291538 - RNA, 22 nt, Human
cagggccacgcuccagcugccc

SEQ ID NO: 1291539 - RNA, 23 nt, Human
cagggccacgcuccagcugcccc

SEQ ID NO: 1291540 - RNA, 14 nt, Human
cagggccagccucu

SEQ ID NO: 1291541 - RNA, 19 nt, Human
cagggccagccucuagagc

SEQ ID NO: 1291542 - RNA, 15 nt, Human
cagggccagccucua

SEQ ID NO: 1291543 - RNA, 17 nt, Human
cagggccaggccucucc

SEQ ID NO: 1291544 - RNA, 14 nt, Human
cagggccaugcuga

SEQ ID NO: 1291545 - RNA, 16 nt, Human
cagggccaugcugagg

SEQ ID NO: 1291546 - RNA, 17 nt, Human
cagggccaugcugaggc

SEQ ID NO: 1291547 - RNA, 18 nt, Human
cagggccaugcugaggcc

SEQ ID NO: 1291548 - RNA, 21 nt, Human
cagggccaugcugaggccugg

SEQ ID NO: 1291549 - RNA, 23 nt, Human
cagggccaugcugaggccugggc

SEQ ID NO: 1291550 - RNA, 22 nt, Human
cagggccaugcugaggccuggg

SEQ ID NO: 1291551 - RNA, 12 nt, Human
cagggcccagag

SEQ ID NO: 1291552 - RNA, 13 nt, Human
cagggcccagagc

SEQ ID NO: 1291553 - RNA, 14 nt, Human
cagggcccagagcc

SEQ ID NO: 1291554 - RNA, 15 nt, Human
cagggcccagagccc

SEQ ID NO: 1291555 - RNA, 16 nt, Human
cagggcccagagccca

SEQ ID NO: 1291556 - RNA, 18 nt, Human
cagggcccagagcccagc

SEQ ID NO: 1291557 - RNA, 19 nt, Human
cagggcccagagcccagcu

SEQ ID NO: 1291558 - RNA, 21 nt, Human
cagggcccagagcccagcucc

SEQ ID NO: 1291559 - RNA, 22 nt, Human
cagggcccagagcccagcucca

SEQ ID NO: 1291560 - RNA, 20 nt, Human
cagggccccaggcauugcca

SEQ ID NO: 1291561 - RNA, 15 nt, Human
cagggcccccaucuc

SEQ ID NO: 1291562 - RNA, 16 nt, Human
cagggcccccaucuca

SEQ ID NO: 1291563 - RNA, 21 nt, Human
cagggcccccaucucaugccc

SEQ ID NO: 1291564 - RNA, 18 nt, Human
cagggccccucacccugc

SEQ ID NO: 1291565 - RNA, 21 nt, Human
cagggccccucacccugccuu

SEQ ID NO: 1291566 - RNA, 22 nt, Human
cagggccccucacccugccuua

SEQ ID NO: 1291567 - RNA, 15 nt, Human
cagggccccucuccc

SEQ ID NO: 1291568 - RNA, 22 nt, Human
cagggccccucuccccagggaa

SEQ ID NO: 1291569 - RNA, 12 nt, Human
cagggccgggga

SEQ ID NO: 1291570 - RNA, 20 nt, Human
cagggccggggaacuggcca

SEQ ID NO: 1291571 - RNA, 22 nt, Human
cagggccggggaacuggccaag

SEQ ID NO: 1291572 - RNA, 23 nt, Human
cagggccggggaacuggccaagc

SEQ ID NO: 1291573 - RNA, 24 nt, Human
cagggccggggaacuggccaagcu

SEQ ID NO: 1291574 - RNA, 14 nt, Human
caggcuuuuguuuc

SEQ ID NO: 1291575 - RNA, 15 nt, Human
cagggaaaauaggca

SEQ ID NO: 1291576 - RNA, 18 nt, Human
cagggaaaauaggcagga

SEQ ID NO: 1291577 - RNA, 18 nt, Human
cagggaacgugauuagug

SEQ ID NO: 1291578 - RNA, 15 nt, Human
cagggaagcagcagc

SEQ ID NO: 1291579 - RNA, 17 nt, Human
cagggaagcagcagccu

SEQ ID NO: 1291580 - RNA, 19 nt, Human
cagggaacgugauuaguga

SEQ ID NO: 1291581 - RNA, 20 nt, Human
cagggaacauggggaggagg

SEQ ID NO: 1291582 - RNA, 18 nt, Human
cagggaacauggggagga

SEQ ID NO: 1291583 - RNA, 20 nt, Human
cagggaaaauuauuugcaua

SEQ ID NO: 1291584 - RNA, 14 nt, Human
cagggacagaggcc

SEQ ID NO: 1291585 - RNA, 16 nt, Human
cagggacagaggcccc

SEQ ID NO: 1291586 - RNA, 18 nt, Human
cagggacagaggccccag

SEQ ID NO: 1291587 - RNA, 18 nt, Human
cagggaauuaggccccca

SEQ ID NO: 1291588 - RNA, 22 nt, Human
cagggacaccugggagaaaucu

SEQ ID NO: 1291589 - RNA, 17 nt, Human
cagggacaccugggaga

SEQ ID NO: 1291590 - RNA, 13 nt, Human
cagggaaggaucc

SEQ ID NO: 1291591 - RNA, 20 nt, Human
cagggaaggaggagccuguc

SEQ ID NO: 1291592 - RNA, 21 nt, Human
cagggaaggaggagccugucc

SEQ ID NO: 1291593 - RNA, 22 nt, Human
cagggaaggaggagccuguccu

SEQ ID NO: 1291594 - RNA, 23 nt, Human
cagggaaggaggagccuguccug

SEQ ID NO: 1291595 - RNA, 18 nt, Human
cagggaaggaucccauga

SEQ ID NO: 1291596 - RNA, 12 nt, Human
cagggaaggcag

SEQ ID NO: 1291597 - RNA, 13 nt, Human
cagggaaggcagg

SEQ ID NO: 1291598 - RNA, 14 nt, Human
cagggaaggcaggc

SEQ ID NO: 1291599 - RNA, 15 nt, Human
cagggaaggcaggca

SEQ ID NO: 1291600 - RNA, 14 nt, Human
cagggaaggaggag

SEQ ID NO: 1291601 - RNA, 15 nt, Human
cagggaaggaggagc

SEQ ID NO: 1291602 - RNA, 16 nt, Human
cagggaaggaggagcc

SEQ ID NO: 1291603 - RNA, 18 nt, Human
cagggaaggaggagccug

SEQ ID NO: 1291604 - RNA, 15 nt, Human
cagggaaggggacaa

SEQ ID NO: 1291605 - RNA, 17 nt, Human
cagggaaggggacaagg

SEQ ID NO: 1291606 - RNA, 16 nt, Human
cagggaaggcaggcag

SEQ ID NO: 1291607 - RNA, 17 nt, Human
cagggaaggcaggcagg

SEQ ID NO: 1291608 - RNA, 18 nt, Human
cagggaaggcaggcaggg

SEQ ID NO: 1291609 - RNA, 20 nt, Human
cagggaaggcaggcagggcu

SEQ ID NO: 1291610 - RNA, 21 nt, Human
cagggaaggcaggcagggcuc

SEQ ID NO: 1291611 - RNA, 22 nt, Human
cagggaaggcaggcagggcucu

SEQ ID NO: 1291612 - RNA, 23 nt, Human
cagggaaggcaggcagggcucuc

SEQ ID NO: 1291613 - RNA, 13 nt, Human
caggcuagaugua

SEQ ID NO: 1291614 - RNA, 19 nt, Human
caggcuagauguauguacu

SEQ ID NO: 1291615 - RNA, 14 nt, Human
caggccgcccugcg

SEQ ID NO: 1291616 - RNA, 11 nt, Human
caggcucagag

SEQ ID NO: 1291617 - RNA, 15 nt, Human
caggcucagagggug

SEQ ID NO: 1291618 - RNA, 14 nt, Human
caggcucaggcagg

SEQ ID NO: 1291619 - RNA, 15 nt, Human
caggcucaggcaggg

SEQ ID NO: 1291620 - RNA, 19 nt, Human
caggcucaggcaggggccu

SEQ ID NO: 1291621 - RNA, 18 nt, Human
caggcucaaacaaugaca

SEQ ID NO: 1291622 - RNA, 18 nt, Human
caggcuccugccaccacg

SEQ ID NO: 1291623 - RNA, 13 nt, Human
caggcuccugcca

SEQ ID NO: 1291624 - RNA, 14 nt, Human
caggcuccugccac

SEQ ID NO: 1291625 - RNA, 15 nt, Human
caggcuccugccacc

SEQ ID NO: 1291626 - RNA, 16 nt, Human
caggcuccugccacca

SEQ ID NO: 1291627 - RNA, 21 nt, Human
caggcucaggcaggggccucc

SEQ ID NO: 1291628 - RNA, 14 nt, Human
caggcucccaggga

SEQ ID NO: 1291629 - RNA, 16 nt, Human
caggcucccagggaca

SEQ ID NO: 1291630 - RNA, 19 nt, Human
caggcucccagggacaccu

SEQ ID NO: 1291631 - RNA, 22 nt, Human
caggcucccagggacaccuggg

SEQ ID NO: 1291632 - RNA, 23 nt, Human
caggcucccagggacaccuggga

SEQ ID NO: 1291633 - RNA, 14 nt, Human
caggcucggccugc

SEQ ID NO: 1291634 - RNA, 15 nt, Human
caggcucggccugcc

SEQ ID NO: 1291635 - RNA, 16 nt, Human
caggcucggccugccc

SEQ ID NO: 1291636 - RNA, 19 nt, Human
caggcucggccugccccca

SEQ ID NO: 1291637 - RNA, 20 nt, Human
caggcucggccugcccccac

SEQ ID NO: 1291638 - RNA, 23 nt, Human
caggcucggccugcccccacccc

SEQ ID NO: 1291639 - RNA, 21 nt, Human
caggcucguggacugaguggg

SEQ ID NO: 1291640 - RNA, 12 nt, Human
caggcucucuuu

SEQ ID NO: 1291641 - RNA, 15 nt, Human
caggcccuuccucuc

SEQ ID NO: 1291642 - RNA, 22 nt, Human
caggcccuggccuccccugcca

SEQ ID NO: 1291643 - RNA, 21 nt, Human
caggcccuuauuuucaagaaa

SEQ ID NO: 1291644 - RNA, 16 nt, Human
caggcccuuccucucc

SEQ ID NO: 1291645 - RNA, 17 nt, Human
caggcccuuccucucca

SEQ ID NO: 1291646 - RNA, 14 nt, Human
caggcccuggccuc

SEQ ID NO: 1291647 - RNA, 15 nt, Human
caggcccuggccucc

SEQ ID NO: 1291648 - RNA, 17 nt, Human
caggcccuggccucccc

SEQ ID NO: 1291649 - RNA, 18 nt, Human
caggcccuggccuccccu

SEQ ID NO: 1291650 - RNA, 20 nt, Human
caggcccuggccuccccugc

SEQ ID NO: 1291651 - RNA, 19 nt, Human
caggcccuuccucuccacu

SEQ ID NO: 1291652 - RNA, 20 nt, Human
caggcccuuccucuccacug

SEQ ID NO: 1291653 - RNA, 21 nt, Human
caggcccuuccucuccacugc

SEQ ID NO: 1291654 - RNA, 23 nt, Human
caggcccuuccucuccacugccu

SEQ ID NO: 1291655 - RNA, 16 nt, Human
caggcccggcagggcg

SEQ ID NO: 1291656 - RNA, 22 nt, Human
caggcccucccuguuccccaga

SEQ ID NO: 1291657 - RNA, 23 nt, Human
caggcccucccuguuccccagag

SEQ ID NO: 1291658 - RNA, 21 nt, Human
caggcugggucgcccuggacu

SEQ ID NO: 1291659 - RNA, 23 nt, Human
caggcugggucgcccuggacugu

SEQ ID NO: 1291660 - RNA, 17 nt, Human
caggcuggcccugcccu

SEQ ID NO: 1291661 - RNA, 21 nt, Human
caggcuggccaguccaggcug

SEQ ID NO: 1291662 - RNA, 16 nt, Human
caggcuggucuaaaac

SEQ ID NO: 1291663 - RNA, 12 nt, Human
caggcuggcccu

SEQ ID NO: 1291664 - RNA, 14 nt, Human
caggcuggcccugc

SEQ ID NO: 1291665 - RNA, 15 nt, Human
caggcuggcccugcc

SEQ ID NO: 1291666 - RNA, 16 nt, Human
caggcuggcccugccc

SEQ ID NO: 1291667 - RNA, 14 nt, Human
caggcuggccaguc

SEQ ID NO: 1291668 - RNA, 16 nt, Human
caggcuggccagucca

SEQ ID NO: 1291669 - RNA, 18 nt, Human
caggcuggccaguccagg

SEQ ID NO: 1291670 - RNA, 19 nt, Human
caggcuggccaguccaggc

SEQ ID NO: 1291671 - RNA, 16 nt, Human
caggcuggagugcagu

SEQ ID NO: 1291672 - RNA, 20 nt, Human
caggcuggaagauagcugug

SEQ ID NO: 1291673 - RNA, 19 nt, Human
caggcuggaagauagcugu

SEQ ID NO: 1291674 - RNA, 12 nt, Human
caggcuggccag

SEQ ID NO: 1291675 - RNA, 12 nt, Human
caggcugcucuu

SEQ ID NO: 1291676 - RNA, 20 nt, Human
caggcugcucuugaacuccu

SEQ ID NO: 1291677 - RNA, 23 nt, Human
caggcugcucuugaacuccugac

SEQ ID NO: 1291678 - RNA, 12 nt, Human
caggcucuucuc

SEQ ID NO: 1291679 - RNA, 21 nt, Human
caggcucuuagcagcuuccag

SEQ ID NO: 1291680 - RNA, 22 nt, Human
caggcucuuagcagcuuccaga

SEQ ID NO: 1291681 - RNA, 14 nt, Human
caggcucuucuccu

SEQ ID NO: 1291682 - RNA, 15 nt, Human
caggcucuucuccuu

SEQ ID NO: 1291683 - RNA, 12 nt, Human
caggcucuuagc

SEQ ID NO: 1291684 - RNA, 15 nt, Human
caggcucuuagcagc

SEQ ID NO: 1291685 - RNA, 18 nt, Human
caggcucuuagcagcuuc

SEQ ID NO: 1291686 - RNA, 18 nt, Human
caggcucuucuccuuuca

SEQ ID NO: 1291687 - RNA, 22 nt, Human
caggcucuucuccuuucacaac

SEQ ID NO: 1291688 - RNA, 18 nt, Human
caggcugaagcagguucc

SEQ ID NO: 1291689 - RNA, 14 nt, Human
caggcugaccacag

SEQ ID NO: 1291690 - RNA, 12 nt, Human
caggcugagccu

SEQ ID NO: 1291691 - RNA, 22 nt, Human
caggcugaccacagcacagcca

SEQ ID NO: 1291692 - RNA, 15 nt, Human
caggcugaccacagc

SEQ ID NO: 1291693 - RNA, 17 nt, Human
caggcugaccacagcac

SEQ ID NO: 1291694 - RNA, 20 nt, Human
caggcugaccacagcacagc

SEQ ID NO: 1291695 - RNA, 21 nt, Human
caggcugaccacagcacagcc

SEQ ID NO: 1291696 - RNA, 13 nt, Human
caggcugagccuc

SEQ ID NO: 1291697 - RNA, 14 nt, Human
caggcugagccuca

SEQ ID NO: 1291698 - RNA, 15 nt, Human
caggcugagccucag

SEQ ID NO: 1291699 - RNA, 16 nt, Human
caggcugagccucagu

SEQ ID NO: 1291700 - RNA, 17 nt, Human
caggcugagccucaguc

SEQ ID NO: 1291701 - RNA, 21 nt, Human
caggcugagccucagucuccc

SEQ ID NO: 1291702 - RNA, 22 nt, Human
caggcugagguccugaucagcu

SEQ ID NO: 1291703 - RNA, 17 nt, Human
caggcugauuucuaggu

SEQ ID NO: 1291704 - RNA, 16 nt, Human
caggcugauuucuagg

SEQ ID NO: 1291705 - RNA, 16 nt, Human
caggcugccguggggc

SEQ ID NO: 1291706 - RNA, 16 nt, Human
caggcugccucccuug

SEQ ID NO: 1291707 - RNA, 11 nt, Human
caggcugccug

SEQ ID NO: 1291708 - RNA, 12 nt, Human
caggcugccuga

SEQ ID NO: 1291709 - RNA, 13 nt, Human
caggcugccugag

SEQ ID NO: 1291710 - RNA, 14 nt, Human
caggcugccugagu

SEQ ID NO: 1291711 - RNA, 15 nt, Human
caggcugccugaguc

SEQ ID NO: 1291712 - RNA, 23 nt, Human
caggcuuuuuuaucaugugaaau

SEQ ID NO: 1291713 - RNA, 15 nt, Human
caggcuugccugcag

SEQ ID NO: 1291714 - RNA, 16 nt, Human
caggcuugccugcagg

SEQ ID NO: 1291715 - RNA, 17 nt, Human
caggcuugccugcaggc

SEQ ID NO: 1291716 - RNA, 18 nt, Human
caggcuugccugcaggca

SEQ ID NO: 1291717 - RNA, 16 nt, Human
caggcuucugagcagc

SEQ ID NO: 1291718 - RNA, 21 nt, Human
caggcuucugagcagcgagcc

SEQ ID NO: 1291719 - RNA, 23 nt, Human
caggcuucugagcagcgagccug

SEQ ID NO: 1291720 - RNA, 14 nt, Human
caggcuucugcugg

SEQ ID NO: 1291721 - RNA, 17 nt, Human
caggcuucugcuggggc

SEQ ID NO: 1291722 - RNA, 19 nt, Human
caggcuucugcuggggccu

SEQ ID NO: 1291723 - RNA, 20 nt, Human
caggcuggucucgaacuccu

SEQ ID NO: 1291724 - RNA, 22 nt, Human
caggcuggucucgaacuccuga

SEQ ID NO: 1291725 - RNA, 17 nt, Human
caggcuggucuaaaacu

SEQ ID NO: 1291726 - RNA, 18 nt, Human
caggcuggucuaaaacuc

SEQ ID NO: 1291727 - RNA, 23 nt, Human
caggcuggucucgaacuccugac

SEQ ID NO: 1291728 - RNA, 21 nt, Human
caggcuguaggaaaucuaguu

SEQ ID NO: 1291729 - RNA, 14 nt, Human
caggcugugaguuu

SEQ ID NO: 1291730 - RNA, 22 nt, Human
caggcuguguuuggcuuucagg

SEQ ID NO: 1291731 - RNA, 14 nt, Human
caggcaggagcccu

SEQ ID NO: 1291732 - RNA, 18 nt, Human
caggcaggcucccaggga

SEQ ID NO: 1291733 - RNA, 16 nt, Human
caggcaggcucccagg

SEQ ID NO: 1291734 - RNA, 11 nt, Human
caggcagggcu

SEQ ID NO: 1291735 - RNA, 12 nt, Human
caggcagggcuc

SEQ ID NO: 1291736 - RNA, 13 nt, Human
caggcagggcucu

SEQ ID NO: 1291737 - RNA, 14 nt, Human
caggcagggcucuc

SEQ ID NO: 1291738 - RNA, 15 nt, Human
caggcagggcucucc

SEQ ID NO: 1291739 - RNA, 16 nt, Human
caggcagggcucuccu

SEQ ID NO: 1291740 - RNA, 17 nt, Human
caggcagggcucuccug

SEQ ID NO: 1291741 - RNA, 18 nt, Human
caggcagggcucuccugg

SEQ ID NO: 1291742 - RNA, 21 nt, Human
caggcaggggccuccaugggc

SEQ ID NO: 1291743 - RNA, 18 nt, Human
caggcaggggccuccaug

SEQ ID NO: 1291744 - RNA, 19 nt, Human
caggcagggcucuccuggc

SEQ ID NO: 1291745 - RNA, 20 nt, Human
caggcagggcucuccuggcu

SEQ ID NO: 1291746 - RNA, 23 nt, Human
caggcagggcucuccuggcuucc

SEQ ID NO: 1291747 - RNA, 21 nt, Human
caggcagggcucuccuggcuu

SEQ ID NO: 1291748 - RNA, 13 nt, Human
caggcaggggccu

SEQ ID NO: 1291749 - RNA, 15 nt, Human
caggcaggggccucc

SEQ ID NO: 1291750 - RNA, 16 nt, Human
caggcaggggccucca

SEQ ID NO: 1291751 - RNA, 12 nt, Human
caggcagccagu

SEQ ID NO: 1291752 - RNA, 15 nt, Human
caggcagccagugcc

SEQ ID NO: 1291753 - RNA, 19 nt, Human
caggcagccagugcccuga

SEQ ID NO: 1291754 - RNA, 20 nt, Human
caggcagccagugcccugag

SEQ ID NO: 1291755 - RNA, 24 nt, Human
caggcagccagugcccugagccag

SEQ ID NO: 1291756 - RNA, 13 nt, Human
caggcagccucug

SEQ ID NO: 1291757 - RNA, 23 nt, Human
caggcagccagugcccugagcca

SEQ ID NO: 1291758 - RNA, 14 nt, Human
caggcagccucugg

SEQ ID NO: 1291759 - RNA, 15 nt, Human
caggcagccucuggg

SEQ ID NO: 1291760 - RNA, 16 nt, Human
caggcagccucugggg

SEQ ID NO: 1291761 - RNA, 19 nt, Human
caggcagccucuggggggu

SEQ ID NO: 1291762 - RNA, 20 nt, Human
caggcaggaaggcugagagg

SEQ ID NO: 1291763 - RNA, 13 nt, Human
caggcaggaacaa

SEQ ID NO: 1291764 - RNA, 20 nt, Human
caggcaggaacaaacagggc

SEQ ID NO: 1291765 - RNA, 19 nt, Human
caggcagcuuuuucucucc

SEQ ID NO: 1291766 - RNA, 22 nt, Human
caggcagcuuuuucucucccac

SEQ ID NO: 1291767 - RNA, 13 nt, Human
caggauugcgaga

SEQ ID NO: 1291768 - RNA, 16 nt, Human
caggauugcgagagau

SEQ ID NO: 1291769 - RNA, 17 nt, Human
caggauugcgagagaug

SEQ ID NO: 1291770 - RNA, 18 nt, Human
caggauugcgagagaugu

SEQ ID NO: 1291771 - RNA, 19 nt, Human
caggauugcgagagaugug

SEQ ID NO: 1291772 - RNA, 20 nt, Human
caggauugcgagagaugugu

SEQ ID NO: 1291773 - RNA, 21 nt, Human
caggauugcgagagaugugug

SEQ ID NO: 1291774 - RNA, 22 nt, Human
caggauugcgagagaugugugu

SEQ ID NO: 1291775 - RNA, 23 nt, Human
caggauugcgagagauguguguu

SEQ ID NO: 1291776 - RNA, 14 nt, Human
caggauuggggaag

SEQ ID NO: 1291777 - RNA, 15 nt, Human
caggauuggggaaga

SEQ ID NO: 1291778 - RNA, 20 nt, Human
caggauuggggaagagagcc

SEQ ID NO: 1291779 - RNA, 24 nt, Human
caggauuggggaagagagccugca

SEQ ID NO: 1291780 - RNA, 14 nt, Human
caggcaaaauccuu

SEQ ID NO: 1291781 - RNA, 18 nt, Human
caggcaaaauccuugcuu

SEQ ID NO: 1291782 - RNA, 22 nt, Human
caggcaacgcacaaaacagaaa

SEQ ID NO: 1291783 - RNA, 21 nt, Human
caggcagccagcaucugggcc

SEQ ID NO: 1291784 - RNA, 17 nt, Human
caggcaaggcuguggac

SEQ ID NO: 1291785 - RNA, 13 nt, Human
caggcaaggcugu

SEQ ID NO: 1291786 - RNA, 14 nt, Human
caggcaaggcugug

SEQ ID NO: 1291787 - RNA, 19 nt, Human
caggcauugccaagggcuu

SEQ ID NO: 1291788 - RNA, 15 nt, Human
caggcauuggauauu

SEQ ID NO: 1291789 - RNA, 14 nt, Human
caggcauuuccugg

SEQ ID NO: 1291790 - RNA, 15 nt, Human
caggcauuuccuggg

SEQ ID NO: 1291791 - RNA, 16 nt, Human
caggcauuuccugggu

SEQ ID NO: 1291792 - RNA, 20 nt, Human
caggcaucggggagccggga

SEQ ID NO: 1291793 - RNA, 21 nt, Human
caggcaucggggagccgggag

SEQ ID NO: 1291794 - RNA, 12 nt, Human
caggcauccucc

SEQ ID NO: 1291795 - RNA, 15 nt, Human
caggcagggugcagu

SEQ ID NO: 1291796 - RNA, 20 nt, Human
caggcaggucugaagcucaa

SEQ ID NO: 1291797 - RNA, 13 nt, Human
caggauccaggcc

SEQ ID NO: 1291798 - RNA, 17 nt, Human
caggauccaagcuaagc

SEQ ID NO: 1291799 - RNA, 17 nt, Human
caggaucaguuaacuau

SEQ ID NO: 1291800 - RNA, 22 nt, Human
caggauccccaaggcacuugag

SEQ ID NO: 1291801 - RNA, 12 nt, Human
caggaucuauuu

SEQ ID NO: 1291802 - RNA, 18 nt, Human
caggaucuauuuuuggag

SEQ ID NO: 1291803 - RNA, 19 nt, Human
caggaucuauuuuuggagg

SEQ ID NO: 1291804 - RNA, 20 nt, Human
caggaucuauuuuuggaggu

SEQ ID NO: 1291805 - RNA, 21 nt, Human
caggaucuauuuuuggagguu

SEQ ID NO: 1291806 - RNA, 17 nt, Human
caggaucucaccaggca

SEQ ID NO: 1291807 - RNA, 18 nt, Human
caggaucucaccaggcag

SEQ ID NO: 1291808 - RNA, 22 nt, Human
caggaucucaccaggcagccuc

SEQ ID NO: 1291809 - RNA, 21 nt, Human
caggauauucucacagcucca

SEQ ID NO: 1291810 - RNA, 14 nt, Human
caggauagagacug

SEQ ID NO: 1291811 - RNA, 16 nt, Human
caggauagagacugga

SEQ ID NO: 1291812 - RNA, 15 nt, Human
caggaucaguuaacu

SEQ ID NO: 1291813 - RNA, 20 nt, Human
caggaugaugacuauggaaa

SEQ ID NO: 1291814 - RNA, 18 nt, Human
caggaugaugacuaugga

SEQ ID NO: 1291815 - RNA, 18 nt, Human
caggaugagggaaaagaa

SEQ ID NO: 1291816 - RNA, 22 nt, Human
caggaugagggaaaagaaaaag

SEQ ID NO: 1291817 - RNA, 22 nt, Human
caggaugaugacuauggaaaga

SEQ ID NO: 1291818 - RNA, 23 nt, Human
caggaugcuaacaucuaaaaaua

SEQ ID NO: 1291819 - RNA, 18 nt, Human
caggauggucuccaucuc

SEQ ID NO: 1291820 - RNA, 14 nt, Human
caggauggcgcagg

SEQ ID NO: 1291821 - RNA, 23 nt, Human
caggaugggguauggauucuaaa

SEQ ID NO: 1291822 - RNA, 21 nt, Human
caggauggcaaccagaccauu

SEQ ID NO: 1291823 - RNA, 23 nt, Human
caggauggcgcaggaacucaaua

SEQ ID NO: 1291824 - RNA, 21 nt, Human
caggaugguucccuugaugaa

SEQ ID NO: 1291825 - RNA, 23 nt, Human
caggaugguucccuugaugaaga

SEQ ID NO: 1291826 - RNA, 19 nt, Human
caggauguacaaggacagc

SEQ ID NO: 1291827 - RNA, 15 nt, Human
caggauguguuugcu

SEQ ID NO: 1291828 - RNA, 18 nt, Human
caggauguguuugcuuuc

SEQ ID NO: 1291829 - RNA, 20 nt, Human
caggauguguuugcuuucug

SEQ ID NO: 1291830 - RNA, 21 nt, Human
caggccccgugaggcaauggg

SEQ ID NO: 1291831 - RNA, 16 nt, Human
caggcccccgccuugg

SEQ ID NO: 1291832 - RNA, 17 nt, Human
caggcccccgccuuggc

SEQ ID NO: 1291833 - RNA, 20 nt, Human
caggcccccgccuuggccug

SEQ ID NO: 1291834 - RNA, 21 nt, Human
caggcccccgccuuggccugu

SEQ ID NO: 1291835 - RNA, 17 nt, Human
caggcccccaccuggcu

SEQ ID NO: 1291836 - RNA, 18 nt, Human
caggcccccaccuggcuc

SEQ ID NO: 1291837 - RNA, 19 nt, Human
caggcccccaccuggcuca

SEQ ID NO: 1291838 - RNA, 21 nt, Human
caggccauuccccgucucugg

SEQ ID NO: 1291839 - RNA, 16 nt, Human
caggcccaaggcuccc

SEQ ID NO: 1291840 - RNA, 13 nt, Human
caggcccacagua

SEQ ID NO: 1291841 - RNA, 17 nt, Human
caggcccaaggcucccg

SEQ ID NO: 1291842 - RNA, 15 nt, Human
caggcccacugugcc

SEQ ID NO: 1291843 - RNA, 16 nt, Human
caggcccacugugccu

SEQ ID NO: 1291844 - RNA, 19 nt, Human
caggcccacugugccucag

SEQ ID NO: 1291845 - RNA, 17 nt, Human
caggcccacugugccuc

SEQ ID NO: 1291846 - RNA, 16 nt, Human
caggcccagccgaccc

SEQ ID NO: 1291847 - RNA, 19 nt, Human
caggcccagccgacccccu

SEQ ID NO: 1291848 - RNA, 20 nt, Human
caggcccagccgacccccuc

SEQ ID NO: 1291849 - RNA, 22 nt, Human
caggcccagccgacccccucuc

SEQ ID NO: 1291850 - RNA, 21 nt, Human
caggcccagccgacccccucu

SEQ ID NO: 1291851 - RNA, 15 nt, Human
caggccccaggaaag

SEQ ID NO: 1291852 - RNA, 14 nt, Human
caggccccaugacc

SEQ ID NO: 1291853 - RNA, 16 nt, Human
caggccccaugaccuc

SEQ ID NO: 1291854 - RNA, 17 nt, Human
caggccccaugaccucc

SEQ ID NO: 1291855 - RNA, 18 nt, Human
caggccccaugaccucca

SEQ ID NO: 1291856 - RNA, 19 nt, Human
caggccccaugaccuccag

SEQ ID NO: 1291857 - RNA, 20 nt, Human
caggccccaugaccuccagc

SEQ ID NO: 1291858 - RNA, 22 nt, Human
caggccccaugaccuccagcuu

SEQ ID NO: 1291859 - RNA, 17 nt, Human
caggcauuuccugggug

SEQ ID NO: 1291860 - RNA, 18 nt, Human
caggcauuuccugggugg

SEQ ID NO: 1291861 - RNA, 19 nt, Human
caggcauuuccuggguggc

SEQ ID NO: 1291862 - RNA, 22 nt, Human
caggccaaagagucuccaguuu

SEQ ID NO: 1291863 - RNA, 19 nt, Human
caggccaaaggggaccugg

SEQ ID NO: 1291864 - RNA, 21 nt, Human
caggccaaaggggaccuggaa

SEQ ID NO: 1291865 - RNA, 22 nt, Human
caggccaaaggggaccuggaag

SEQ ID NO: 1291866 - RNA, 17 nt, Human
caggccaagaaacgucu

SEQ ID NO: 1291867 - RNA, 16 nt, Human
caggccacacuucaaa

SEQ ID NO: 1291868 - RNA, 21 nt, Human
caggccacacuucaaacuacu

SEQ ID NO: 1291869 - RNA, 18 nt, Human
caggccacacuucaaacu

SEQ ID NO: 1291870 - RNA, 18 nt, Human
caggccauuccccgucuc

SEQ ID NO: 1291871 - RNA, 21 nt, Human
caggagcccugggaggcucug

SEQ ID NO: 1291872 - RNA, 11 nt, Human
caggagccugg

SEQ ID NO: 1291873 - RNA, 12 nt, Human
caggagccuggc

SEQ ID NO: 1291874 - RNA, 11 nt, Human
caggagccugu

SEQ ID NO: 1291875 - RNA, 15 nt, Human
caggagccugugccu

SEQ ID NO: 1291876 - RNA, 16 nt, Human
caggagccugugccuc

SEQ ID NO: 1291877 - RNA, 14 nt, Human
caggagccugugac

SEQ ID NO: 1291878 - RNA, 17 nt, Human
caggagcuaccugugug

SEQ ID NO: 1291879 - RNA, 18 nt, Human
caggagcuaccugugugg

SEQ ID NO: 1291880 - RNA, 22 nt, Human
caggagcuaccuguguggacag

SEQ ID NO: 1291881 - RNA, 23 nt, Human
caggagcuaccuguguggacagg

SEQ ID NO: 1291882 - RNA, 21 nt, Human
caggagcuccaguguccugag

SEQ ID NO: 1291883 - RNA, 23 nt, Human
caggagcuccaguguccugagcu

SEQ ID NO: 1291884 - RNA, 22 nt, Human
caggagcuccaguguccugagc

SEQ ID NO: 1291885 - RNA, 13 nt, Human
caggagcuccccu

SEQ ID NO: 1291886 - RNA, 14 nt, Human
caggagcuccccuc

SEQ ID NO: 1291887 - RNA, 16 nt, Human
caggagcuccccuccc

SEQ ID NO: 1291888 - RNA, 18 nt, Human
caggagcuccccucccca

SEQ ID NO: 1291889 - RNA, 21 nt, Human
caggagcuccccuccccaacu

SEQ ID NO: 1291890 - RNA, 22 nt, Human
caggagcuccccuccccaacug

SEQ ID NO: 1291891 - RNA, 13 nt, Human
caggaguagcuga

SEQ ID NO: 1291892 - RNA, 14 nt, Human
caggaguagcugag

SEQ ID NO: 1291893 - RNA, 15 nt, Human
caggaguagcugagc

SEQ ID NO: 1291894 - RNA, 16 nt, Human
caggaguagcugagcu

SEQ ID NO: 1291895 - RNA, 17 nt, Human
caggaguagcugagcuc

SEQ ID NO: 1291896 - RNA, 20 nt, Human
caggaguagcugagcucaca

SEQ ID NO: 1291897 - RNA, 18 nt, Human
caggaguagcugagcuca

SEQ ID NO: 1291898 - RNA, 14 nt, Human
caggaguccacuuu

SEQ ID NO: 1291899 - RNA, 18 nt, Human
caggaguccacuuuguuu

SEQ ID NO: 1291900 - RNA, 19 nt, Human
caggagcccugggaggcuc

SEQ ID NO: 1291901 - RNA, 18 nt, Human
caggagcccugggaggcu

SEQ ID NO: 1291902 - RNA, 16 nt, Human
caggagcccugggagg

SEQ ID NO: 1291903 - RNA, 14 nt, Human
caggagcccuggga

SEQ ID NO: 1291904 - RNA, 11 nt, Human
caggagcccug

SEQ ID NO: 1291905 - RNA, 19 nt, Human
caggagcacggcucugucc

SEQ ID NO: 1291906 - RNA, 23 nt, Human
caggagacagguuagcugcuccc

SEQ ID NO: 1291907 - RNA, 20 nt, Human
caggagaagcucagcugcau

SEQ ID NO: 1291908 - RNA, 17 nt, Human
caggagaagcucagcug

SEQ ID NO: 1291909 - RNA, 19 nt, Human
caggagaagcucagcugca

SEQ ID NO: 1291910 - RNA, 19 nt, Human
caggagaaggccaauuccu

SEQ ID NO: 1291911 - RNA, 21 nt, Human
caggagaaggccaauuccuau

SEQ ID NO: 1291912 - RNA, 22 nt, Human
caggagaaggccaauuccuaua

SEQ ID NO: 1291913 - RNA, 19 nt, Human
caggagagaguugaaccua

SEQ ID NO: 1291914 - RNA, 15 nt, Human
caggacuguuucaaa

SEQ ID NO: 1291915 - RNA, 17 nt, Human
caggacuguuucaaaca

SEQ ID NO: 1291916 - RNA, 22 nt, Human
caggacugggagcccccagccu

SEQ ID NO: 1291917 - RNA, 16 nt, Human
caggacuugaaagaaa

SEQ ID NO: 1291918 - RNA, 14 nt, Human
caggagaagaaaga

SEQ ID NO: 1291919 - RNA, 20 nt, Human
caggagaagaaagaggugac

SEQ ID NO: 1291920 - RNA, 21 nt, Human
caggagaagaaagaggugacc

SEQ ID NO: 1291921 - RNA, 13 nt, Human
caggagaagcuca

SEQ ID NO: 1291922 - RNA, 14 nt, Human
caggagaagcucag

SEQ ID NO: 1291923 - RNA, 15 nt, Human
caggagaagcucagc

SEQ ID NO: 1291924 - RNA, 16 nt, Human
caggagaagcucagcu

SEQ ID NO: 1291925 - RNA, 16 nt, Human
caggagcacggcucug

SEQ ID NO: 1291926 - RNA, 17 nt, Human
caggagcacggcucugu

SEQ ID NO: 1291927 - RNA, 12 nt, Human
caggacucugcc

SEQ ID NO: 1291928 - RNA, 13 nt, Human
caggacucugccu

SEQ ID NO: 1291929 - RNA, 15 nt, Human
caggacucugccucc

SEQ ID NO: 1291930 - RNA, 16 nt, Human
caggacucugccuccu

SEQ ID NO: 1291931 - RNA, 11 nt, Human
caggacucugc

SEQ ID NO: 1291932 - RNA, 13 nt, Human
caggacucugcag

SEQ ID NO: 1291933 - RNA, 14 nt, Human
caggacucugcagc

SEQ ID NO: 1291934 - RNA, 15 nt, Human
caggacucugcagcc

SEQ ID NO: 1291935 - RNA, 16 nt, Human
caggacucugcagccu

SEQ ID NO: 1291936 - RNA, 17 nt, Human
caggacucugcagccuc

SEQ ID NO: 1291937 - RNA, 18 nt, Human
caggacucugcagccuca

SEQ ID NO: 1291938 - RNA, 19 nt, Human
caggacucugcagccucag

SEQ ID NO: 1291939 - RNA, 20 nt, Human
caggacucugcagccucaga

SEQ ID NO: 1291940 - RNA, 21 nt, Human
caggacucugcagccucagag

SEQ ID NO: 1291941 - RNA, 12 nt, Human
caggacugaugu

SEQ ID NO: 1291942 - RNA, 17 nt, Human
caggacugaugucuccu

SEQ ID NO: 1291943 - RNA, 23 nt, Human
caggacugaugucuccuaagcac

SEQ ID NO: 1291944 - RNA, 18 nt, Human
caggacugaugucuccua

SEQ ID NO: 1291945 - RNA, 13 nt, Human
caggacugggagc

SEQ ID NO: 1291946 - RNA, 14 nt, Human
caggacugggagcc

SEQ ID NO: 1291947 - RNA, 18 nt, Human
caggacugggagccccca

SEQ ID NO: 1291948 - RNA, 21 nt, Human
caggacugggagcccccagcc

SEQ ID NO: 1291949 - RNA, 23 nt, Human
caggacugggagcccccagccug

SEQ ID NO: 1291950 - RNA, 17 nt, Human
caggacuaacacucaga

SEQ ID NO: 1291951 - RNA, 19 nt, Human
caggacuaacacucagaag

SEQ ID NO: 1291952 - RNA, 20 nt, Human
caggacuaacacucagaagc

SEQ ID NO: 1291953 - RNA, 21 nt, Human
caggacuaacacucagaagcc

SEQ ID NO: 1291954 - RNA, 22 nt, Human
caggacuaacacucagaagccu

SEQ ID NO: 1291955 - RNA, 23 nt, Human
caggacuaacacucagaagccug

SEQ ID NO: 1291956 - RNA, 20 nt, Human
caggacuauauuugggccug

SEQ ID NO: 1291957 - RNA, 16 nt, Human
caggacuccaggccca

SEQ ID NO: 1291958 - RNA, 17 nt, Human
caggacuccaggcccaa

SEQ ID NO: 1291959 - RNA, 18 nt, Human
caggacuccaggcccaag

SEQ ID NO: 1291960 - RNA, 21 nt, Human
caggacuccaggcccaaggcu

SEQ ID NO: 1291961 - RNA, 19 nt, Human
caggacuccaggcccaagg

SEQ ID NO: 1291962 - RNA, 19 nt, Human
caggaguuucguuuucaaa

SEQ ID NO: 1291963 - RNA, 16 nt, Human
caggaguuggaagugu

SEQ ID NO: 1291964 - RNA, 18 nt, Human
caggaguggguggggagu

SEQ ID NO: 1291965 - RNA, 14 nt, Human
caggaguggguggg

SEQ ID NO: 1291966 - RNA, 16 nt, Human
caggagugggugggga

SEQ ID NO: 1291967 - RNA, 17 nt, Human
caggaguggguggggag

SEQ ID NO: 1291968 - RNA, 17 nt, Human
caggaguguccucuucc

SEQ ID NO: 1291969 - RNA, 19 nt, Human
caggaguguccucuucccu

SEQ ID NO: 1291970 - RNA, 21 nt, Human
caggaguguccucuucccucu

SEQ ID NO: 1291971 - RNA, 13 nt, Human
caggagugugugu

SEQ ID NO: 1291972 - RNA, 13 nt, Human
caggauagacuuu

SEQ ID NO: 1291973 - RNA, 19 nt, Human
caggauagagacuggaaca

SEQ ID NO: 1291974 - RNA, 15 nt, Human
caggauacuggcaca

SEQ ID NO: 1291975 - RNA, 17 nt, Human
caggauacuggcacaga

SEQ ID NO: 1291976 - RNA, 18 nt, Human
caggauacuggcacagag

SEQ ID NO: 1291977 - RNA, 19 nt, Human
caggauacuggcacagagg

SEQ ID NO: 1291978 - RNA, 20 nt, Human
caggauacuggcacagaggu

SEQ ID NO: 1291979 - RNA, 19 nt, Human
caggaucucaccaggcagc

SEQ ID NO: 1291980 - RNA, 18 nt, Human
caggaagaucccccagaa

SEQ ID NO: 1291981 - RNA, 17 nt, Human
caggaagaucccccaga

SEQ ID NO: 1291982 - RNA, 17 nt, Human
caggaagagaaggagca

SEQ ID NO: 1291983 - RNA, 15 nt, Human
caggaagagaaggag

SEQ ID NO: 1291984 - RNA, 14 nt, Human
caggaagagaagga

SEQ ID NO: 1291985 - RNA, 19 nt, Human
caggaagaucccccagaaa

SEQ ID NO: 1291986 - RNA, 14 nt, Human
caggaagcagcuuu

SEQ ID NO: 1291987 - RNA, 15 nt, Human
caggaaccgaggcag

SEQ ID NO: 1291988 - RNA, 17 nt, Human
caggaaccgaggcaggg

SEQ ID NO: 1291989 - RNA, 18 nt, Human
caggaaccgaggcaggga

SEQ ID NO: 1291990 - RNA, 15 nt, Human
caggaacguuuagcu

SEQ ID NO: 1291991 - RNA, 12 nt, Human
caggaacugggc

SEQ ID NO: 1291992 - RNA, 13 nt, Human
caggaacugggcc

SEQ ID NO: 1291993 - RNA, 16 nt, Human
caggaagcccaauugc

SEQ ID NO: 1291994 - RNA, 18 nt, Human
caggaagcccaauugcug

SEQ ID NO: 1291995 - RNA, 15 nt, Human
caggaagccguccug

SEQ ID NO: 1291996 - RNA, 18 nt, Human
caggaagccguccuggcg

SEQ ID NO: 1291997 - RNA, 13 nt, Human
caggaagccugca

SEQ ID NO: 1291998 - RNA, 19 nt, Human
caggaagccugcaguccug

SEQ ID NO: 1291999 - RNA, 21 nt, Human
caggaagccugcaguccugga

SEQ ID NO: 1292000 - RNA, 14 nt, Human
caggaagccuuccc

SEQ ID NO: 1292001 - RNA, 21 nt, Human
caggaagcuuuggugagaacc

SEQ ID NO: 1292002 - RNA, 23 nt, Human
caggaagcuuuggugagaaccug

SEQ ID NO: 1292003 - RNA, 22 nt, Human
caggaagcuuuggugagaaccu

SEQ ID NO: 1292004 - RNA, 16 nt, Human
caggaaggacuaugaa

SEQ ID NO: 1292005 - RNA, 19 nt, Human
caggaaggacuaugaaaag

SEQ ID NO: 1292006 - RNA, 21 nt, Human
caggaaucaguuuaaaagcac

SEQ ID NO: 1292007 - RNA, 16 nt, Human
caggaaucaguuuaaa

SEQ ID NO: 1292008 - RNA, 14 nt, Human
caggaaucuuaagg

SEQ ID NO: 1292009 - RNA, 15 nt, Human
caggaaucuuaaggu

SEQ ID NO: 1292010 - RNA, 16 nt, Human
caggaauuucccagga

SEQ ID NO: 1292011 - RNA, 17 nt, Human
caggaauuucccaggac

SEQ ID NO: 1292012 - RNA, 18 nt, Human
caggaauuucccaggacc

SEQ ID NO: 1292013 - RNA, 19 nt, Human
caggaauuucccaggaccc

SEQ ID NO: 1292014 - RNA, 20 nt, Human
caggaauuucccaggacccu

SEQ ID NO: 1292015 - RNA, 21 nt, Human
caggaauuucccaggacccug

SEQ ID NO: 1292016 - RNA, 21 nt, Human
caggaauucuuggagaaaaug

SEQ ID NO: 1292017 - RNA, 14 nt, Human
caggacaagcaugg

SEQ ID NO: 1292018 - RNA, 12 nt, Human
caggacacaggc

SEQ ID NO: 1292019 - RNA, 13 nt, Human
caggacacaggcc

SEQ ID NO: 1292020 - RNA, 14 nt, Human
caggacacaggccu

SEQ ID NO: 1292021 - RNA, 15 nt, Human
caggacacaggccug

SEQ ID NO: 1292022 - RNA, 16 nt, Human
caggacacaggccugu

SEQ ID NO: 1292023 - RNA, 17 nt, Human
caggacacaggccugug

SEQ ID NO: 1292024 - RNA, 18 nt, Human
caggacacaggccugugu

SEQ ID NO: 1292025 - RNA, 19 nt, Human
caggacacaggccugugua

SEQ ID NO: 1292026 - RNA, 20 nt, Human
caggacacaggccuguguag

SEQ ID NO: 1292027 - RNA, 22 nt, Human
caggacacaggccuguguagcu

SEQ ID NO: 1292028 - RNA, 14 nt, Human
caggaccuggcugc

SEQ ID NO: 1292029 - RNA, 16 nt, Human
caggaccuggcugcca

SEQ ID NO: 1292030 - RNA, 17 nt, Human
caggaccuggcugccau

SEQ ID NO: 1292031 - RNA, 18 nt, Human
caggaccuggcugccaua

SEQ ID NO: 1292032 - RNA, 20 nt, Human
caggaccuucgggcugugcc

SEQ ID NO: 1292033 - RNA, 21 nt, Human
caggaccuucgggcugugccc

SEQ ID NO: 1292034 - RNA, 22 nt, Human
caggaccuucgggcugugcccg

SEQ ID NO: 1292035 - RNA, 19 nt, Human
caggaaggcugagaggaga

SEQ ID NO: 1292036 - RNA, 20 nt, Human
caggaaggagcugccuggac

SEQ ID NO: 1292037 - RNA, 21 nt, Human
caggaaggagcugccuggacc

SEQ ID NO: 1292038 - RNA, 22 nt, Human
caggaaggagcugccuggaccc

SEQ ID NO: 1292039 - RNA, 13 nt, Human
caggaaggcuugu

SEQ ID NO: 1292040 - RNA, 12 nt, Human
caggaaggagcu

SEQ ID NO: 1292041 - RNA, 13 nt, Human
caggaaggagcug

SEQ ID NO: 1292042 - RNA, 14 nt, Human
caggaaggagcugc

SEQ ID NO: 1292043 - RNA, 15 nt, Human
caggaaggagcugcc

SEQ ID NO: 1292044 - RNA, 16 nt, Human
caggaaggagcugccu

SEQ ID NO: 1292045 - RNA, 17 nt, Human
caggaaggagcugccug

SEQ ID NO: 1292046 - RNA, 18 nt, Human
caggaaggagcugccugg

SEQ ID NO: 1292047 - RNA, 19 nt, Human
caggaaggagcugccugga

SEQ ID NO: 1292048 - RNA, 22 nt, Human
caggaaggcuuguugugcuuuu

SEQ ID NO: 1292049 - RNA, 15 nt, Human
caggaaguagaggag

SEQ ID NO: 1292050 - RNA, 16 nt, Human
caggaaguagaggagg

SEQ ID NO: 1292051 - RNA, 17 nt, Human
caggaauauuuuccaaa

SEQ ID NO: 1292052 - RNA, 19 nt, Human
cagcuguaugauucccagc

SEQ ID NO: 1292053 - RNA, 16 nt, Human
cagcuguaaucuauga

SEQ ID NO: 1292054 - RNA, 14 nt, Human
cagcuguauagcug

SEQ ID NO: 1292055 - RNA, 13 nt, Human
cagcuuccuucag

SEQ ID NO: 1292056 - RNA, 14 nt, Human
cagcuuccuucaga

SEQ ID NO: 1292057 - RNA, 15 nt, Human
cagcuuccuucagag

SEQ ID NO: 1292058 - RNA, 16 nt, Human
cagcuuccuucagaga

SEQ ID NO: 1292059 - RNA, 19 nt, Human
cagcuuccuucagagagca

SEQ ID NO: 1292060 - RNA, 20 nt, Human
cagcuuccuucagagagcag

SEQ ID NO: 1292061 - RNA, 20 nt, Human
cagcuucguuuauuuucaag

SEQ ID NO: 1292062 - RNA, 22 nt, Human
cagcuucguuuauuuucaagaa

SEQ ID NO: 1292063 - RNA, 18 nt, Human
cagcuucucauccugcag

SEQ ID NO: 1292064 - RNA, 19 nt, Human
cagcuucucauccugcagg

SEQ ID NO: 1292065 - RNA, 20 nt, Human
cagcuucucauccugcaggc

SEQ ID NO: 1292066 - RNA, 21 nt, Human
cagcuucucauccugcaggca

SEQ ID NO: 1292067 - RNA, 21 nt, Human
cagcuuccuucagagagcagu

SEQ ID NO: 1292068 - RNA, 14 nt, Human
cagcuucugccccc

SEQ ID NO: 1292069 - RNA, 16 nt, Human
cagcuucugcccccug

SEQ ID NO: 1292070 - RNA, 20 nt, Human
cagcuucugcccccugcaga

SEQ ID NO: 1292071 - RNA, 19 nt, Human
cagcuucugcccccugcag

SEQ ID NO: 1292072 - RNA, 15 nt, Human
cagcuugaccugagg

SEQ ID NO: 1292073 - RNA, 16 nt, Human
cagcuugaccugaggc

SEQ ID NO: 1292074 - RNA, 17 nt, Human
cagcuugaccugaggcu

SEQ ID NO: 1292075 - RNA, 19 nt, Human
cagcuugaccugaggcugu

SEQ ID NO: 1292076 - RNA, 20 nt, Human
cagcuugaccugaggcugug

SEQ ID NO: 1292077 - RNA, 21 nt, Human
cagcuugaccugaggcugugg

SEQ ID NO: 1292078 - RNA, 22 nt, Human
cagcuugaccugaggcuguggu

SEQ ID NO: 1292079 - RNA, 23 nt, Human
cagcuugaccugaggcugugguc

SEQ ID NO: 1292080 - RNA, 20 nt, Human
cagcuuuucccaaaagccca

SEQ ID NO: 1292081 - RNA, 18 nt, Human
cagcuuuucccaaaagcc

SEQ ID NO: 1292082 - RNA, 13 nt, Human
cagcuuuucaaac

SEQ ID NO: 1292083 - RNA, 18 nt, Human
cagcuuuuaaaagauuuu

SEQ ID NO: 1292084 - RNA, 11 nt, Human
cagcuuuucaa

SEQ ID NO: 1292085 - RNA, 23 nt, Human
cagcuuuuggauuggacaaaaug

SEQ ID NO: 1292086 - RNA, 17 nt, Human
cagcuuuuuaccaaguu

SEQ ID NO: 1292087 - RNA, 12 nt, Human
cagcuuuugcaa

SEQ ID NO: 1292088 - RNA, 18 nt, Human
caggaaccacaagacugc

SEQ ID NO: 1292089 - RNA, 14 nt, Human
cagcuuugauauuu

SEQ ID NO: 1292090 - RNA, 20 nt, Human
cagcuuugcucauauuuccc

SEQ ID NO: 1292091 - RNA, 21 nt, Human
cagcuuugcucauauuuccca

SEQ ID NO: 1292092 - RNA, 16 nt, Human
cagcuuugcucauauu

SEQ ID NO: 1292093 - RNA, 22 nt, Human
cagcuuugcuaccaaagcaccu

SEQ ID NO: 1292094 - RNA, 11 nt, Human
cagcuuugcua

SEQ ID NO: 1292095 - RNA, 14 nt, Human
cagcuuuagccaag

SEQ ID NO: 1292096 - RNA, 18 nt, Human
cagcuuguuuacaugcuu

SEQ ID NO: 1292097 - RNA, 22 nt, Human
cagcuuuaaaaaauuaaucugg

SEQ ID NO: 1292098 - RNA, 14 nt, Human
cagcuuguuuacau

SEQ ID NO: 1292099 - RNA, 15 nt, Human
cagcuuguuuacaug

SEQ ID NO: 1292100 - RNA, 21 nt, Human
cagcuuguuuacaugcuuauu

SEQ ID NO: 1292101 - RNA, 18 nt, Human
cagcuuguggcaagugaa

SEQ ID NO: 1292102 - RNA, 20 nt, Human
cagcuuguggcaagugaauu

SEQ ID NO: 1292103 - RNA, 21 nt, Human
cagcuuguggcaagugaauuu

SEQ ID NO: 1292104 - RNA, 13 nt, Human
cagcuuguuuaca

SEQ ID NO: 1292105 - RNA, 21 nt, Human
cagcuuuauggagauauaauu

SEQ ID NO: 1292106 - RNA, 18 nt, Human
cagcuuuagaaucccagc

SEQ ID NO: 1292107 - RNA, 23 nt, Human
cagcuuuccccaugucucgacuc

SEQ ID NO: 1292108 - RNA, 23 nt, Human
cagcuuuccucaaaacuucagac

SEQ ID NO: 1292109 - RNA, 17 nt, Human
cagcuuucccugccucu

SEQ ID NO: 1292110 - RNA, 19 nt, Human
cagcuuucccugccucuca

SEQ ID NO: 1292111 - RNA, 14 nt, Human
cagcuuuccuguau

SEQ ID NO: 1292112 - RNA, 12 nt, Human
cagcuuguagcc

SEQ ID NO: 1292113 - RNA, 15 nt, Human
cagcuuguagccagc

SEQ ID NO: 1292114 - RNA, 16 nt, Human
cagcuuguagccagcc

SEQ ID NO: 1292115 - RNA, 17 nt, Human
cagcuuguagccagccg

SEQ ID NO: 1292116 - RNA, 18 nt, Human
cagcuuguagccagccgg

SEQ ID NO: 1292117 - RNA, 21 nt, Human
cagcuuguagccagccggggc

SEQ ID NO: 1292118 - RNA, 19 nt, Human
cagcuuguagccagccggg

SEQ ID NO: 1292119 - RNA, 18 nt, Human
cagcucucaguugcagcc

SEQ ID NO: 1292120 - RNA, 15 nt, Human
cagcucuacuggucu

SEQ ID NO: 1292121 - RNA, 20 nt, Human
cagcucuagacacugccaca

SEQ ID NO: 1292122 - RNA, 13 nt, Human
cagcuccuuccug

SEQ ID NO: 1292123 - RNA, 14 nt, Human
cagcuccuuccugg

SEQ ID NO: 1292124 - RNA, 16 nt, Human
cagcuccuuccuggag

SEQ ID NO: 1292125 - RNA, 13 nt, Human
cagcuccuuuggg

SEQ ID NO: 1292126 - RNA, 18 nt, Human
cagcucugaaaccagugu

SEQ ID NO: 1292127 - RNA, 19 nt, Human
cagcucugaaaccaguguu

SEQ ID NO: 1292128 - RNA, 12 nt, Human
cagcucugaaag

SEQ ID NO: 1292129 - RNA, 16 nt, Human
cagcucugaaagagaa

SEQ ID NO: 1292130 - RNA, 14 nt, Human
cagcucugacauuc

SEQ ID NO: 1292131 - RNA, 20 nt, Human
cagcucugacauucugauuc

SEQ ID NO: 1292132 - RNA, 20 nt, Human
cagcucugcauacucauuag

SEQ ID NO: 1292133 - RNA, 21 nt, Human
cagcucugacauucugauucg

SEQ ID NO: 1292134 - RNA, 17 nt, Human
cagcucuggacagcccc

SEQ ID NO: 1292135 - RNA, 18 nt, Human
cagcucuggacagcccca

SEQ ID NO: 1292136 - RNA, 21 nt, Human
cagcucuggacagccccaccc

SEQ ID NO: 1292137 - RNA, 23 nt, Human
cagcucuggacagccccacccug

SEQ ID NO: 1292138 - RNA, 11 nt, Human
cagcucuggag

SEQ ID NO: 1292139 - RNA, 12 nt, Human
cagcucagcacu

SEQ ID NO: 1292140 - RNA, 14 nt, Human
cagcucagcacugc

SEQ ID NO: 1292141 - RNA, 15 nt, Human
cagcucagcacugcc

SEQ ID NO: 1292142 - RNA, 20 nt, Human
cagcucagcacugccugcuc

SEQ ID NO: 1292143 - RNA, 21 nt, Human
cagcucagcacugccugcucc

SEQ ID NO: 1292144 - RNA, 12 nt, Human
cagcucaggaca

SEQ ID NO: 1292145 - RNA, 13 nt, Human
cagcucaggacag

SEQ ID NO: 1292146 - RNA, 16 nt, Human
cagcucaggacagaug

SEQ ID NO: 1292147 - RNA, 18 nt, Human
cagcucaggacagaugcc

SEQ ID NO: 1292148 - RNA, 19 nt, Human
cagcucaggacagaugcca

SEQ ID NO: 1292149 - RNA, 22 nt, Human
cagcucaggacagaugccacac

SEQ ID NO: 1292150 - RNA, 22 nt, Human
cagcucauccaugccucagaag

SEQ ID NO: 1292151 - RNA, 21 nt, Human
cagcucauccaugccucagaa

SEQ ID NO: 1292152 - RNA, 14 nt, Human
cagcuccaaccugc

SEQ ID NO: 1292153 - RNA, 15 nt, Human
cagcuccucugucuc

SEQ ID NO: 1292154 - RNA, 18 nt, Human
cagcuccucugucucgag

SEQ ID NO: 1292155 - RNA, 19 nt, Human
cagcuccucugucucgagc

SEQ ID NO: 1292156 - RNA, 15 nt, Human
cagcuccugaccagu

SEQ ID NO: 1292157 - RNA, 19 nt, Human
cagcuccugaccaguugca

SEQ ID NO: 1292158 - RNA, 20 nt, Human
cagcuccugaccaguugcag

SEQ ID NO: 1292159 - RNA, 22 nt, Human
cagcuccugaccaguugcaguc

SEQ ID NO: 1292160 - RNA, 15 nt, Human
cagcuccuguaacau

SEQ ID NO: 1292161 - RNA, 18 nt, Human
cagcucuggaggggaggg

SEQ ID NO: 1292162 - RNA, 12 nt, Human
cagcucugggcc

SEQ ID NO: 1292163 - RNA, 19 nt, Human
cagcucugggccauucucc

SEQ ID NO: 1292164 - RNA, 22 nt, Human
cagcucugggccauucuccaca

SEQ ID NO: 1292165 - RNA, 23 nt, Human
cagcucugggccauucuccacag

SEQ ID NO: 1292166 - RNA, 16 nt, Human
cagcucuguucuuccu

SEQ ID NO: 1292167 - RNA, 20 nt, Human
cagcucuguucuuccucagc

SEQ ID NO: 1292168 - RNA, 21 nt, Human
cagcucuguucuuccucagcc

SEQ ID NO: 1292169 - RNA, 22 nt, Human
cagcucuguucuuccucagcca

SEQ ID NO: 1292170 - RNA, 23 nt, Human
cagcucuguucuuccucagccag

SEQ ID NO: 1292171 - RNA, 22 nt, Human
cagcuggggccaggcugggucg

SEQ ID NO: 1292172 - RNA, 21 nt, Human
cagcuggggccaggcuggguc

SEQ ID NO: 1292173 - RNA, 14 nt, Human
cagcuggggugcag

SEQ ID NO: 1292174 - RNA, 15 nt, Human
cagcuggggugcagg

SEQ ID NO: 1292175 - RNA, 16 nt, Human
cagcuggggugcaggg

SEQ ID NO: 1292176 - RNA, 17 nt, Human
cagcuggggugcaggga

SEQ ID NO: 1292177 - RNA, 18 nt, Human
cagcuggggugcagggau

SEQ ID NO: 1292178 - RNA, 19 nt, Human
cagcuggggugcagggaug

SEQ ID NO: 1292179 - RNA, 14 nt, Human
cagcugggucaggc

SEQ ID NO: 1292180 - RNA, 15 nt, Human
cagcugggucaggca

SEQ ID NO: 1292181 - RNA, 16 nt, Human
cagcugggucaggcag

SEQ ID NO: 1292182 - RNA, 18 nt, Human
cagcugggucaggcaggg

SEQ ID NO: 1292183 - RNA, 20 nt, Human
cagcugggucaggcagggug

SEQ ID NO: 1292184 - RNA, 23 nt, Human
cagcuggggugcagggauguggg

SEQ ID NO: 1292185 - RNA, 17 nt, Human
cagcuggguuggaaaac

SEQ ID NO: 1292186 - RNA, 16 nt, Human
cagcuggguuggaaaa

SEQ ID NO: 1292187 - RNA, 18 nt, Human
cagcuguaugauucccag

SEQ ID NO: 1292188 - RNA, 20 nt, Human
cagcugguguagcuacagag

SEQ ID NO: 1292189 - RNA, 21 nt, Human
cagcugguguagcuacagaga

SEQ ID NO: 1292190 - RNA, 22 nt, Human
cagcugguguagcuacagagaa

SEQ ID NO: 1292191 - RNA, 23 nt, Human
cagcugguguagcuacagagaaa

SEQ ID NO: 1292192 - RNA, 11 nt, Human
cagcuggugua

SEQ ID NO: 1292193 - RNA, 14 nt, Human
cagcugguguagcu

SEQ ID NO: 1292194 - RNA, 15 nt, Human
cagcugguguagcua

SEQ ID NO: 1292195 - RNA, 19 nt, Human
cagcugguguagcuacaga

SEQ ID NO: 1292196 - RNA, 20 nt, Human
cagcuggggccaggcugggu

SEQ ID NO: 1292197 - RNA, 19 nt, Human
cagcuggggccaggcuggg

SEQ ID NO: 1292198 - RNA, 18 nt, Human
cagcuggggccaggcugg

SEQ ID NO: 1292199 - RNA, 17 nt, Human
cagcugggcucugcaau

SEQ ID NO: 1292200 - RNA, 23 nt, Human
cagcugggaucacauguggacuu

SEQ ID NO: 1292201 - RNA, 15 nt, Human
cagcugggcucugca

SEQ ID NO: 1292202 - RNA, 16 nt, Human
cagcugggcucugcaa

SEQ ID NO: 1292203 - RNA, 12 nt, Human
cagcuggcucua

SEQ ID NO: 1292204 - RNA, 16 nt, Human
cagcuggcucuacuuc

SEQ ID NO: 1292205 - RNA, 22 nt, Human
cagcuggcucuacuuccccaug

SEQ ID NO: 1292206 - RNA, 18 nt, Human
cagcuggcucuacuuccc

SEQ ID NO: 1292207 - RNA, 19 nt, Human
cagcuggccgggagccuga

SEQ ID NO: 1292208 - RNA, 23 nt, Human
cagcuggaugagaauuugagugc

SEQ ID NO: 1292209 - RNA, 16 nt, Human
cagcuggacccugacc

SEQ ID NO: 1292210 - RNA, 17 nt, Human
cagcuggacccugacca

SEQ ID NO: 1292211 - RNA, 23 nt, Human
cagcuggacccugaccagcuccc

SEQ ID NO: 1292212 - RNA, 16 nt, Human
cagcuggagaagaccc

SEQ ID NO: 1292213 - RNA, 18 nt, Human
cagcuggacccugaccag

SEQ ID NO: 1292214 - RNA, 13 nt, Human
cagcuggaggcag

SEQ ID NO: 1292215 - RNA, 14 nt, Human
cagcuggaggcagg

SEQ ID NO: 1292216 - RNA, 15 nt, Human
cagcuggaggcaggg

SEQ ID NO: 1292217 - RNA, 22 nt, Human
cagcuggaggcaggggcuuccu

SEQ ID NO: 1292218 - RNA, 23 nt, Human
cagcuggaggcaggggcuuccug

SEQ ID NO: 1292219 - RNA, 21 nt, Human
cagcugcucaauaaaguacaa

SEQ ID NO: 1292220 - RNA, 23 nt, Human
cagcugcuccgaggacccaggaa

SEQ ID NO: 1292221 - RNA, 13 nt, Human
cagcugacuaaac

SEQ ID NO: 1292222 - RNA, 18 nt, Human
cagcugacuaaacuuuuu

SEQ ID NO: 1292223 - RNA, 16 nt, Human
cagccuucuacugcuc

SEQ ID NO: 1292224 - RNA, 19 nt, Human
cagccuuagcucucccaac

SEQ ID NO: 1292225 - RNA, 23 nt, Human
cagccuucagacagagaggacug

SEQ ID NO: 1292226 - RNA, 21 nt, Human
cagccuuagcucucccaacuc

SEQ ID NO: 1292227 - RNA, 13 nt, Human
cagccuugccaga

SEQ ID NO: 1292228 - RNA, 14 nt, Human
cagccuugccagag

SEQ ID NO: 1292229 - RNA, 15 nt, Human
cagccuugccagaga

SEQ ID NO: 1292230 - RNA, 16 nt, Human
cagccuugccagagau

SEQ ID NO: 1292231 - RNA, 14 nt, Human
cagccuuuguuccc

SEQ ID NO: 1292232 - RNA, 15 nt, Human
cagccuuuguucccc

SEQ ID NO: 1292233 - RNA, 16 nt, Human
cagccuuuguucccca

SEQ ID NO: 1292234 - RNA, 18 nt, Human
cagccuuuguuccccacu

SEQ ID NO: 1292235 - RNA, 20 nt, Human
cagccuuuguuccccacugg

SEQ ID NO: 1292236 - RNA, 21 nt, Human
cagccuuuguuccccacugga

SEQ ID NO: 1292237 - RNA, 22 nt, Human
cagccuuuguuccccacuggag

SEQ ID NO: 1292238 - RNA, 23 nt, Human
cagccuuuguuccccacuggagc

SEQ ID NO: 1292239 - RNA, 20 nt, Human
cagccuuuuuguuucaauga

SEQ ID NO: 1292240 - RNA, 12 nt, Human
cagccugggaaa

SEQ ID NO: 1292241 - RNA, 20 nt, Human
cagccugggaaagccccugc

SEQ ID NO: 1292242 - RNA, 11 nt, Human
cagccugggcc

SEQ ID NO: 1292243 - RNA, 12 nt, Human
cagccugggccu

SEQ ID NO: 1292244 - RNA, 13 nt, Human
cagccugggccua

SEQ ID NO: 1292245 - RNA, 16 nt, Human
cagccugggccuaugg

SEQ ID NO: 1292246 - RNA, 17 nt, Human
cagccugggccuaugga

SEQ ID NO: 1292247 - RNA, 18 nt, Human
cagccugggccuauggag

SEQ ID NO: 1292248 - RNA, 20 nt, Human
cagccugggccuauggagag

SEQ ID NO: 1292249 - RNA, 21 nt, Human
cagccugggccuauggagagc

SEQ ID NO: 1292250 - RNA, 23 nt, Human
cagccugggccuauggagagccc

SEQ ID NO: 1292251 - RNA, 22 nt, Human
cagccugggccuauggagagcc

SEQ ID NO: 1292252 - RNA, 14 nt, Human
cagccugggcgcug

SEQ ID NO: 1292253 - RNA, 15 nt, Human
cagccugggcgcugg

SEQ ID NO: 1292254 - RNA, 16 nt, Human
cagccugggcgcuggu

SEQ ID NO: 1292255 - RNA, 19 nt, Human
cagccugggcgcugguccu

SEQ ID NO: 1292256 - RNA, 20 nt, Human
cagccugggcgcugguccuu

SEQ ID NO: 1292257 - RNA, 23 nt, Human
cagccugggcgcugguccuuucu

SEQ ID NO: 1292258 - RNA, 17 nt, Human
cagccuggggcuggccu

SEQ ID NO: 1292259 - RNA, 18 nt, Human
cagccuggggcuggccuc

SEQ ID NO: 1292260 - RNA, 21 nt, Human
cagccuggggcuggccuccca

SEQ ID NO: 1292261 - RNA, 15 nt, Human
cagccuggggucugg

SEQ ID NO: 1292262 - RNA, 19 nt, Human
cagccuggggucuggaguu

SEQ ID NO: 1292263 - RNA, 16 nt, Human
cagccugucagaucca

SEQ ID NO: 1292264 - RNA, 17 nt, Human
cagccugucagauccag

SEQ ID NO: 1292265 - RNA, 21 nt, Human
cagccugucagauccaggagc

SEQ ID NO: 1292266 - RNA, 22 nt, Human
cagccugucagauccaggagcu

SEQ ID NO: 1292267 - RNA, 23 nt, Human
cagccugucagauccaggagcuc

SEQ ID NO: 1292268 - RNA, 21 nt, Human
cagccucgccccuggcagaga

SEQ ID NO: 1292269 - RNA, 15 nt, Human
cagccuccugaguag

SEQ ID NO: 1292270 - RNA, 19 nt, Human
cagccucgccccuggcaga

SEQ ID NO: 1292271 - RNA, 20 nt, Human
cagccucgccccuggcagag

SEQ ID NO: 1292272 - RNA, 12 nt, Human
cagccucccuga

SEQ ID NO: 1292273 - RNA, 14 nt, Human
cagccucccugaag

SEQ ID NO: 1292274 - RNA, 16 nt, Human
cagccucccugaagcc

SEQ ID NO: 1292275 - RNA, 17 nt, Human
cagccucccugaagccu

SEQ ID NO: 1292276 - RNA, 18 nt, Human
cagccucccugaagccuu

SEQ ID NO: 1292277 - RNA, 23 nt, Human
cagccucuccacucaugugacuc

SEQ ID NO: 1292278 - RNA, 10 nt, Human
cagccuggca

SEQ ID NO: 1292279 - RNA, 13 nt, Human
cagccuggcacag

SEQ ID NO: 1292280 - RNA, 20 nt, Human
cagccuggcacagggcagug

SEQ ID NO: 1292281 - RNA, 21 nt, Human
cagccuggcacagggcagugg

SEQ ID NO: 1292282 - RNA, 23 nt, Human
cagccuggcuguggccuaaccug

SEQ ID NO: 1292283 - RNA, 15 nt, Human
cagccuggccuccug

SEQ ID NO: 1292284 - RNA, 16 nt, Human
cagccuggccuccugc

SEQ ID NO: 1292285 - RNA, 17 nt, Human
cagccuggccuccugcc

SEQ ID NO: 1292286 - RNA, 18 nt, Human
cagccuggccuccugccu

SEQ ID NO: 1292287 - RNA, 21 nt, Human
cagccuggccuccugccucua

SEQ ID NO: 1292288 - RNA, 20 nt, Human
cagccuggccuccugccucu

SEQ ID NO: 1292289 - RNA, 13 nt, Human
cagccuggccaga

SEQ ID NO: 1292290 - RNA, 14 nt, Human
cagccuggccagac

SEQ ID NO: 1292291 - RNA, 15 nt, Human
cagccuggccagaca

SEQ ID NO: 1292292 - RNA, 17 nt, Human
cagccuggccagacaca

SEQ ID NO: 1292293 - RNA, 18 nt, Human
cagccuggccagacacag

SEQ ID NO: 1292294 - RNA, 20 nt, Human
cagccuggccagacacaggc

SEQ ID NO: 1292295 - RNA, 12 nt, Human
cagccuggccca

SEQ ID NO: 1292296 - RNA, 20 nt, Human
cagccuggcccaccccaccc

SEQ ID NO: 1292297 - RNA, 11 nt, Human
cagccuggccu

SEQ ID NO: 1292298 - RNA, 12 nt, Human
cagccuggccuc

SEQ ID NO: 1292299 - RNA, 13 nt, Human
cagccuggccucc

SEQ ID NO: 1292300 - RNA, 14 nt, Human
cagccuggccuccu

SEQ ID NO: 1292301 - RNA, 15 nt, Human
cagcucacugcaacc

SEQ ID NO: 1292302 - RNA, 21 nt, Human
cagcucacugcaaccuucgcc

SEQ ID NO: 1292303 - RNA, 21 nt, Human
cagcucagaaguuucuucuuu

SEQ ID NO: 1292304 - RNA, 22 nt, Human
cagcucagaaguuucuucuuua

SEQ ID NO: 1292305 - RNA, 13 nt, Human
cagcucacugcaa

SEQ ID NO: 1292306 - RNA, 14 nt, Human
cagcucacugcaac

SEQ ID NO: 1292307 - RNA, 12 nt, Human
cagcucacugca

SEQ ID NO: 1292308 - RNA, 20 nt, Human
cagcucaauggacuggaagg

SEQ ID NO: 1292309 - RNA, 22 nt, Human
cagcucaagagaucccaaguag

SEQ ID NO: 1292310 - RNA, 16 nt, Human
cagcucaauggacugg

SEQ ID NO: 1292311 - RNA, 20 nt, Human
cagcuauguuauauugaaaa

SEQ ID NO: 1292312 - RNA, 21 nt, Human
cagcuauguuauauugaaaaa

SEQ ID NO: 1292313 - RNA, 14 nt, Human
cagcuauuuuguga

SEQ ID NO: 1292314 - RNA, 15 nt, Human
cagcuauuuugugaa

SEQ ID NO: 1292315 - RNA, 15 nt, Human
cagcucaagagaucc

SEQ ID NO: 1292316 - RNA, 16 nt, Human
cagcuaggaagagcag

SEQ ID NO: 1292317 - RNA, 20 nt, Human
cagcuaggaagagcaggacu

SEQ ID NO: 1292318 - RNA, 21 nt, Human
cagcuaggaagagcaggacuc

SEQ ID NO: 1292319 - RNA, 13 nt, Human
cagcuagugaccc

SEQ ID NO: 1292320 - RNA, 15 nt, Human
cagcuagugacccac

SEQ ID NO: 1292321 - RNA, 18 nt, Human
cagcuagugacccacaug

SEQ ID NO: 1292322 - RNA, 19 nt, Human
cagcuagugacccacaugc

SEQ ID NO: 1292323 - RNA, 20 nt, Human
cagcuagugacccacaugcc

SEQ ID NO: 1292324 - RNA, 21 nt, Human
cagcuagugacccacaugcca

SEQ ID NO: 1292325 - RNA, 22 nt, Human
cagcuagugacccacaugccau

SEQ ID NO: 1292326 - RNA, 21 nt, Human
cagcgagauaccccaccuccc

SEQ ID NO: 1292327 - RNA, 12 nt, Human
cagcgagccugc

SEQ ID NO: 1292328 - RNA, 13 nt, Human
cagcgagccugcu

SEQ ID NO: 1292329 - RNA, 12 nt, Human
cagcgacuggca

SEQ ID NO: 1292330 - RNA, 14 nt, Human
cagcgagccugcua

SEQ ID NO: 1292331 - RNA, 20 nt, Human
cagcgagcgcccagcuccug

SEQ ID NO: 1292332 - RNA, 16 nt, Human
cagcgaggaggcucca

SEQ ID NO: 1292333 - RNA, 17 nt, Human
cagcgaggaggcuccag

SEQ ID NO: 1292334 - RNA, 18 nt, Human
cagcgaggaggcuccaga

SEQ ID NO: 1292335 - RNA, 21 nt, Human
cagcgagcgcccagcuccuga

SEQ ID NO: 1292336 - RNA, 20 nt, Human
cagcgauucccucucccagg

SEQ ID NO: 1292337 - RNA, 21 nt, Human
cagcgauucccucucccaggc

SEQ ID NO: 1292338 - RNA, 22 nt, Human
cagcgauucccucucccaggcc

SEQ ID NO: 1292339 - RNA, 23 nt, Human
cagcgauucccucucccaggccc

SEQ ID NO: 1292340 - RNA, 18 nt, Human
cagcgaccuuccucaucc

SEQ ID NO: 1292341 - RNA, 17 nt, Human
cagcgacuccguuggcc

SEQ ID NO: 1292342 - RNA, 21 nt, Human
cagcgacuccguuggccacuc

SEQ ID NO: 1292343 - RNA, 22 nt, Human
cagcgacuccguuggccacucc

SEQ ID NO: 1292344 - RNA, 18 nt, Human
cagccuuuuuguuucaau

SEQ ID NO: 1292345 - RNA, 16 nt, Human
cagcgaccgcccccuc

SEQ ID NO: 1292346 - RNA, 17 nt, Human
cagcgaccgcccccucc

SEQ ID NO: 1292347 - RNA, 18 nt, Human
cagcgaccgcccccuccu

SEQ ID NO: 1292348 - RNA, 19 nt, Human
cagcuaaucagcauucuca

SEQ ID NO: 1292349 - RNA, 20 nt, Human
cagcuaagcucacguccuga

SEQ ID NO: 1292350 - RNA, 19 nt, Human
cagcuaagggguggggcug

SEQ ID NO: 1292351 - RNA, 21 nt, Human
cagcuaagggguggggcugcg

SEQ ID NO: 1292352 - RNA, 21 nt, Human
cagcuaauaacugaucucguu

SEQ ID NO: 1292353 - RNA, 12 nt, Human
cagcgccaggcu

SEQ ID NO: 1292354 - RNA, 13 nt, Human
cagcuaagaaccu

SEQ ID NO: 1292355 - RNA, 14 nt, Human
cagcuaagaaccug

SEQ ID NO: 1292356 - RNA, 16 nt, Human
cagcuaagaaccugga

SEQ ID NO: 1292357 - RNA, 18 nt, Human
cagcuaagaaccuggaac

SEQ ID NO: 1292358 - RNA, 19 nt, Human
cagcuaagaaccuggaacu

SEQ ID NO: 1292359 - RNA, 23 nt, Human
cagcuaagaaccuggaacuuggg

SEQ ID NO: 1292360 - RNA, 15 nt, Human
cagcuaagcuaggaa

SEQ ID NO: 1292361 - RNA, 18 nt, Human
cagcuaagcuaggaauga

SEQ ID NO: 1292362 - RNA, 13 nt, Human
cagcuaagcucac

SEQ ID NO: 1292363 - RNA, 14 nt, Human
cagcuaagcucacg

SEQ ID NO: 1292364 - RNA, 19 nt, Human
cagcuacuugggaggcuga

SEQ ID NO: 1292365 - RNA, 15 nt, Human
cagcuacuuccuccu

SEQ ID NO: 1292366 - RNA, 17 nt, Human
cagcuacuuccuccucc

SEQ ID NO: 1292367 - RNA, 21 nt, Human
cagcuacuuccuccuccccac

SEQ ID NO: 1292368 - RNA, 13 nt, Human
cagcuacucuccc

SEQ ID NO: 1292369 - RNA, 15 nt, Human
cagcuacucucccca

SEQ ID NO: 1292370 - RNA, 23 nt, Human
cagcuacucuccccacgagggcu

SEQ ID NO: 1292371 - RNA, 14 nt, Human
cagcuaauucuacu

SEQ ID NO: 1292372 - RNA, 22 nt, Human
cagcuaauucuacucacagugc

SEQ ID NO: 1292373 - RNA, 21 nt, Human
cagcuacccuuuuucuccagc

SEQ ID NO: 1292374 - RNA, 24 nt, Human
cagcuacccuuuuucuccagcugg

SEQ ID NO: 1292375 - RNA, 16 nt, Human
cagccuaguugaucag

SEQ ID NO: 1292376 - RNA, 21 nt, Human
cagccuagggcugagcugggg

SEQ ID NO: 1292377 - RNA, 14 nt, Human
cagccuccaagcuc

SEQ ID NO: 1292378 - RNA, 20 nt, Human
cagccuccaagcuccaucuc

SEQ ID NO: 1292379 - RNA, 21 nt, Human
cagccucagugacccuggcuc

SEQ ID NO: 1292380 - RNA, 12 nt, Human
cagccuccagag

SEQ ID NO: 1292381 - RNA, 21 nt, Human
cagccucagagacaucagccc

SEQ ID NO: 1292382 - RNA, 12 nt, Human
cagccucagaga

SEQ ID NO: 1292383 - RNA, 14 nt, Human
cagccucaggacug

SEQ ID NO: 1292384 - RNA, 16 nt, Human
cagccucaggacuggg

SEQ ID NO: 1292385 - RNA, 17 nt, Human
cagccucaggacuggga

SEQ ID NO: 1292386 - RNA, 18 nt, Human
cagccucaggacugggag

SEQ ID NO: 1292387 - RNA, 19 nt, Human
cagccucaggacugggagc

SEQ ID NO: 1292388 - RNA, 20 nt, Human
cagccucaggacugggagcc

SEQ ID NO: 1292389 - RNA, 21 nt, Human
cagccucaggacugggagccc

SEQ ID NO: 1292390 - RNA, 23 nt, Human
cagccucaggacugggagccccc

SEQ ID NO: 1292391 - RNA, 18 nt, Human
cagccuccccugccaggg

SEQ ID NO: 1292392 - RNA, 19 nt, Human
cagccuccccugccagggc

SEQ ID NO: 1292393 - RNA, 20 nt, Human
cagccuccccugccagggca

SEQ ID NO: 1292394 - RNA, 22 nt, Human
cagccuccccugccagggcagg

SEQ ID NO: 1292395 - RNA, 15 nt, Human
cagccucccaaagug

SEQ ID NO: 1292396 - RNA, 21 nt, Human
cagccucccaaagugcugaga

SEQ ID NO: 1292397 - RNA, 22 nt, Human
cagccucccaaagugcugagau

SEQ ID NO: 1292398 - RNA, 14 nt, Human
cagccucccaucca

SEQ ID NO: 1292399 - RNA, 16 nt, Human
cagccucccauccagg

SEQ ID NO: 1292400 - RNA, 18 nt, Human
cagccucccauccagggc

SEQ ID NO: 1292401 - RNA, 19 nt, Human
cagccucccauccagggcc

SEQ ID NO: 1292402 - RNA, 20 nt, Human
cagccucccauccagggccc

SEQ ID NO: 1292403 - RNA, 23 nt, Human
cagccucccauccagggccccca

SEQ ID NO: 1292404 - RNA, 23 nt, Human
cagccucccccuguccccucuau

SEQ ID NO: 1292405 - RNA, 16 nt, Human
cagccuccccugccag

SEQ ID NO: 1292406 - RNA, 17 nt, Human
cagccuccccugccagg

SEQ ID NO: 1292407 - RNA, 21 nt, Human
cagccuccauccuacccccug

SEQ ID NO: 1292408 - RNA, 14 nt, Human
cagccuccaugcug

SEQ ID NO: 1292409 - RNA, 18 nt, Human
cagccuccauccuacccc

SEQ ID NO: 1292410 - RNA, 15 nt, Human
cagccuccaugcugc

SEQ ID NO: 1292411 - RNA, 17 nt, Human
cagccuccaugcugccu

SEQ ID NO: 1292412 - RNA, 20 nt, Human
cagccuccaugcugccucca

SEQ ID NO: 1292413 - RNA, 14 nt, Human
cagccucccaaagu

SEQ ID NO: 1292414 - RNA, 20 nt, Human
cagcccugcugcugccugcc

SEQ ID NO: 1292415 - RNA, 21 nt, Human
cagcccugccuggaggaccug

SEQ ID NO: 1292416 - RNA, 13 nt, Human
cagcccugccugg

SEQ ID NO: 1292417 - RNA, 14 nt, Human
cagcccugccugga

SEQ ID NO: 1292418 - RNA, 15 nt, Human
cagcccugccuggag

SEQ ID NO: 1292419 - RNA, 16 nt, Human
cagcccugccuggagg

SEQ ID NO: 1292420 - RNA, 17 nt, Human
cagcccugccuggagga

SEQ ID NO: 1292421 - RNA, 19 nt, Human
cagcccugccuggaggacc

SEQ ID NO: 1292422 - RNA, 20 nt, Human
cagcccugccuggaggaccu

SEQ ID NO: 1292423 - RNA, 13 nt, Human
cagcccugcacca

SEQ ID NO: 1292424 - RNA, 15 nt, Human
cagcccugcaccaug

SEQ ID NO: 1292425 - RNA, 17 nt, Human
cagcccugcaccaugcu

SEQ ID NO: 1292426 - RNA, 23 nt, Human
cagcccugcaccaugcugcuggg

SEQ ID NO: 1292427 - RNA, 17 nt, Human
cagcccuccucugcacu

SEQ ID NO: 1292428 - RNA, 18 nt, Human
cagcccuccucugcacuc

SEQ ID NO: 1292429 - RNA, 23 nt, Human
cagcccugaggacagaugccucc

SEQ ID NO: 1292430 - RNA, 16 nt, Human
cagcccucccugcccc

SEQ ID NO: 1292431 - RNA, 17 nt, Human
cagcccucccugccccu

SEQ ID NO: 1292432 - RNA, 18 nt, Human
cagcccucccugccccuc

SEQ ID NO: 1292433 - RNA, 22 nt, Human
cagcccucccugccccucccuu

SEQ ID NO: 1292434 - RNA, 15 nt, Human
cagccgugggcccca

SEQ ID NO: 1292435 - RNA, 17 nt, Human
cagccgugggccccacc

SEQ ID NO: 1292436 - RNA, 14 nt, Human
cagccuacaggccu

SEQ ID NO: 1292437 - RNA, 16 nt, Human
cagccuacaggccuca

SEQ ID NO: 1292438 - RNA, 9 nt, Human
cagccgugc

SEQ ID NO: 1292439 - RNA, 14 nt, Human
cagccgugccuuca

SEQ ID NO: 1292440 - RNA, 17 nt, Human
cagccgugagcauguuu

SEQ ID NO: 1292441 - RNA, 16 nt, Human
cagccgugccuucagc

SEQ ID NO: 1292442 - RNA, 18 nt, Human
cagccgugccuucagcuc

SEQ ID NO: 1292443 - RNA, 20 nt, Human
cagccgugccuucagcucua

SEQ ID NO: 1292444 - RNA, 14 nt, Human
cagccgugagcaug

SEQ ID NO: 1292445 - RNA, 13 nt, Human
cagccgugggccc

SEQ ID NO: 1292446 - RNA, 11 nt, Human
cagcccugcuu

SEQ ID NO: 1292447 - RNA, 13 nt, Human
cagcccugcuuug

SEQ ID NO: 1292448 - RNA, 19 nt, Human
cagcccugcuuugggcugc

SEQ ID NO: 1292449 - RNA, 20 nt, Human
cagcccugcuuugggcugcc

SEQ ID NO: 1292450 - RNA, 21 nt, Human
cagcccugcuuugggcugccc

SEQ ID NO: 1292451 - RNA, 22 nt, Human
cagcccugcuuugggcugcccu

SEQ ID NO: 1292452 - RNA, 23 nt, Human
cagcccugcuuugggcugcccug

SEQ ID NO: 1292453 - RNA, 15 nt, Human
cagccggggcgagug

SEQ ID NO: 1292454 - RNA, 17 nt, Human
cagccggggcgaguggc

SEQ ID NO: 1292455 - RNA, 20 nt, Human
cagccggggcgaguggcacg

SEQ ID NO: 1292456 - RNA, 23 nt, Human
cagccccacaccagggccagccu

SEQ ID NO: 1292457 - RNA, 21 nt, Human
cagccccacaccagggccagc

SEQ ID NO: 1292458 - RNA, 14 nt, Human
cagccccaccccag

SEQ ID NO: 1292459 - RNA, 18 nt, Human
cagccccaccccagggca

SEQ ID NO: 1292460 - RNA, 20 nt, Human
cagccccaccccagggcagc

SEQ ID NO: 1292461 - RNA, 21 nt, Human
cagccccaccccagggcagcc

SEQ ID NO: 1292462 - RNA, 22 nt, Human
cagccccaccccagggcagcca

SEQ ID NO: 1292463 - RNA, 23 nt, Human
cagccccaccccagggcagccag

SEQ ID NO: 1292464 - RNA, 15 nt, Human
cagccccacccuggc

SEQ ID NO: 1292465 - RNA, 18 nt, Human
cagccccacccuggccua

SEQ ID NO: 1292466 - RNA, 17 nt, Human
cagccccacccuggccu

SEQ ID NO: 1292467 - RNA, 15 nt, Human
cagccccacuccucu

SEQ ID NO: 1292468 - RNA, 16 nt, Human
cagccccacuccucug

SEQ ID NO: 1292469 - RNA, 21 nt, Human
cagccccacuccucugcugac

SEQ ID NO: 1292470 - RNA, 18 nt, Human
cagccccacuccucugcu

SEQ ID NO: 1292471 - RNA, 15 nt, Human
cagccccagccaggg

SEQ ID NO: 1292472 - RNA, 13 nt, Human
cagccccuggccc

SEQ ID NO: 1292473 - RNA, 21 nt, Human
cagccccuggccccaggaccu

SEQ ID NO: 1292474 - RNA, 17 nt, Human
cagccccuuagacagag

SEQ ID NO: 1292475 - RNA, 21 nt, Human
cagccccuuagacagaggccc

SEQ ID NO: 1292476 - RNA, 18 nt, Human
cagccccuuagacagagg

SEQ ID NO: 1292477 - RNA, 12 nt, Human
cagccccuuucc

SEQ ID NO: 1292478 - RNA, 13 nt, Human
cagccccuuuccc

SEQ ID NO: 1292479 - RNA, 15 nt, Human
cagccccuuucccuu

SEQ ID NO: 1292480 - RNA, 23 nt, Human
cagccccuuucccuuguagcucc

SEQ ID NO: 1292481 - RNA, 14 nt, Human
cagcccgcacaccu

SEQ ID NO: 1292482 - RNA, 16 nt, Human
cagcccgcacaccugc

SEQ ID NO: 1292483 - RNA, 15 nt, Human
cagcccgcacaccug

SEQ ID NO: 1292484 - RNA, 19 nt, Human
cagcccgcccacuggguaa

SEQ ID NO: 1292485 - RNA, 16 nt, Human
cagcccuaaacaucau

SEQ ID NO: 1292486 - RNA, 14 nt, Human
cagcccuaaacauc

SEQ ID NO: 1292487 - RNA, 22 nt, Human
cagcccuccaucuaaacugccc

SEQ ID NO: 1292488 - RNA, 13 nt, Human
cagcccucauccc

SEQ ID NO: 1292489 - RNA, 14 nt, Human
cagcccucaucccg

SEQ ID NO: 1292490 - RNA, 23 nt, Human
cagcccuccaucuaaacugcccc

SEQ ID NO: 1292491 - RNA, 17 nt, Human
cagcccucaucccgagc

SEQ ID NO: 1292492 - RNA, 13 nt, Human
cagcccucccugc

SEQ ID NO: 1292493 - RNA, 15 nt, Human
cagcccucccugccc

SEQ ID NO: 1292494 - RNA, 18 nt, Human
cagcccuaggguggagag

SEQ ID NO: 1292495 - RNA, 16 nt, Human
cagcccucacacaccc

SEQ ID NO: 1292496 - RNA, 17 nt, Human
cagcccucacacacccu

SEQ ID NO: 1292497 - RNA, 19 nt, Human
cagcccucacacacccugu

SEQ ID NO: 1292498 - RNA, 18 nt, Human
cagccaacuauggccugu

SEQ ID NO: 1292499 - RNA, 18 nt, Human
cagccaacuagccccugg

SEQ ID NO: 1292500 - RNA, 19 nt, Human
cagccaacuagccccuggg

SEQ ID NO: 1292501 - RNA, 20 nt, Human
cagccaacuagccccugggg

SEQ ID NO: 1292502 - RNA, 22 nt, Human
cagccaacuagccccuggggug

SEQ ID NO: 1292503 - RNA, 22 nt, Human
cagccaaauuuaaaacuguugg

SEQ ID NO: 1292504 - RNA, 14 nt, Human
cagccaacuagccc

SEQ ID NO: 1292505 - RNA, 16 nt, Human
cagccaacuagccccu

SEQ ID NO: 1292506 - RNA, 17 nt, Human
cagccaacuagccccug

SEQ ID NO: 1292507 - RNA, 14 nt, Human
cagccaaauuuaaa

SEQ ID NO: 1292508 - RNA, 19 nt, Human
cagccaacacgcaccugcc

SEQ ID NO: 1292509 - RNA, 20 nt, Human
cagccaacacgcaccugccu

SEQ ID NO: 1292510 - RNA, 22 nt, Human
cagccaacacgcaccugccuca

SEQ ID NO: 1292511 - RNA, 23 nt, Human
cagccaacacgcaccugccucag

SEQ ID NO: 1292512 - RNA, 15 nt, Human
cagcauuucccuucc

SEQ ID NO: 1292513 - RNA, 16 nt, Human
cagcauuguauaugug

SEQ ID NO: 1292514 - RNA, 12 nt, Human
cagcauuucacu

SEQ ID NO: 1292515 - RNA, 13 nt, Human
cagcauuucacuu

SEQ ID NO: 1292516 - RNA, 20 nt, Human
cagcagggguuggggaaaca

SEQ ID NO: 1292517 - RNA, 14 nt, Human
cagcaucucagcuc

SEQ ID NO: 1292518 - RNA, 13 nt, Human
cagcaucucagcu

SEQ ID NO: 1292519 - RNA, 21 nt, Human
cagcaucggacaagaccccca

SEQ ID NO: 1292520 - RNA, 22 nt, Human
cagcaucggacaagacccccag

SEQ ID NO: 1292521 - RNA, 23 nt, Human
cagcauccgcaggugcugguccc

SEQ ID NO: 1292522 - RNA, 16 nt, Human
cagcaucuccaagcag

SEQ ID NO: 1292523 - RNA, 17 nt, Human
cagcaucuccaagcagc

SEQ ID NO: 1292524 - RNA, 18 nt, Human
cagcaucuccaagcagcu

SEQ ID NO: 1292525 - RNA, 21 nt, Human
cagcaucuccaagcagcuuag

SEQ ID NO: 1292526 - RNA, 22 nt, Human
cagcaucuccaagcagcuuaga

SEQ ID NO: 1292527 - RNA, 17 nt, Human
cagcaucucuaccuucu

SEQ ID NO: 1292528 - RNA, 20 nt, Human
cagcaucucuaccuucuccc

SEQ ID NO: 1292529 - RNA, 23 nt, Human
cagcaucucuaccuucuccccag

SEQ ID NO: 1292530 - RNA, 21 nt, Human
cagcaucucuaccuucucccc

SEQ ID NO: 1292531 - RNA, 13 nt, Human
cagcaucugggcc

SEQ ID NO: 1292532 - RNA, 14 nt, Human
cagcaucugggccu

SEQ ID NO: 1292533 - RNA, 15 nt, Human
cagcaucugggccuu

SEQ ID NO: 1292534 - RNA, 16 nt, Human
cagcaucugggccuug

SEQ ID NO: 1292535 - RNA, 19 nt, Human
cagcaucugggccuuggcc

SEQ ID NO: 1292536 - RNA, 20 nt, Human
cagcaucugggccuuggccu

SEQ ID NO: 1292537 - RNA, 22 nt, Human
cagcaucugggccuuggccugg

SEQ ID NO: 1292538 - RNA, 12 nt, Human
cagcaugaauuu

SEQ ID NO: 1292539 - RNA, 14 nt, Human
cagcaugaauuugu

SEQ ID NO: 1292540 - RNA, 14 nt, Human
cagcauucucacuc

SEQ ID NO: 1292541 - RNA, 12 nt, Human
cagcauucccag

SEQ ID NO: 1292542 - RNA, 13 nt, Human
cagcauucccagg

SEQ ID NO: 1292543 - RNA, 14 nt, Human
cagcauucccaggu

SEQ ID NO: 1292544 - RNA, 17 nt, Human
cagcauucccagguagg

SEQ ID NO: 1292545 - RNA, 14 nt, Human
cagcauuccagccc

SEQ ID NO: 1292546 - RNA, 16 nt, Human
cagcauuccagccccu

SEQ ID NO: 1292547 - RNA, 20 nt, Human
cagcauuccagccccucugg

SEQ ID NO: 1292548 - RNA, 21 nt, Human
cagcauuccagccccucuggu

SEQ ID NO: 1292549 - RNA, 15 nt, Human
cagcauucucacucc

SEQ ID NO: 1292550 - RNA, 18 nt, Human
cagcauucccagguaggc

SEQ ID NO: 1292551 - RNA, 20 nt, Human
cagcauucccagguaggcca

SEQ ID NO: 1292552 - RNA, 23 nt, Human
cagcauucccagguaggccaagg

SEQ ID NO: 1292553 - RNA, 18 nt, Human
cagcaugaauuuguaaug

SEQ ID NO: 1292554 - RNA, 17 nt, Human
cagcaugaauuuguaau

SEQ ID NO: 1292555 - RNA, 16 nt, Human
cagcaugcaauacaua

SEQ ID NO: 1292556 - RNA, 15 nt, Human
cagcauggcauccaa

SEQ ID NO: 1292557 - RNA, 22 nt, Human
cagcauggcauccaagacucuu

SEQ ID NO: 1292558 - RNA, 20 nt, Human
cagcauguacggauuuucag

SEQ ID NO: 1292559 - RNA, 21 nt, Human
cagcauguacggauuuucagu

SEQ ID NO: 1292560 - RNA, 22 nt, Human
cagcauguacggauuuucaguu

SEQ ID NO: 1292561 - RNA, 18 nt, Human
cagcaugucuauucagcu

SEQ ID NO: 1292562 - RNA, 21 nt, Human
cagcagccucgccccuggcag

SEQ ID NO: 1292563 - RNA, 22 nt, Human
cagcagccucgccccuggcaga

SEQ ID NO: 1292564 - RNA, 20 nt, Human
cagcagccuggggcuggccu

SEQ ID NO: 1292565 - RNA, 21 nt, Human
cagcagccuggggcuggccuc

SEQ ID NO: 1292566 - RNA, 21 nt, Human
cagcagcuuuagaaucccagc

SEQ ID NO: 1292567 - RNA, 15 nt, Human
cagcaggagggggga

SEQ ID NO: 1292568 - RNA, 18 nt, Human
cagcaggaggggggaggg

SEQ ID NO: 1292569 - RNA, 14 nt, Human
cagcaggcuggccu

SEQ ID NO: 1292570 - RNA, 21 nt, Human
cagcagggacuguaaacacag

SEQ ID NO: 1292571 - RNA, 22 nt, Human
cagcagggacuguaaacacaga

SEQ ID NO: 1292572 - RNA, 11 nt, Human
cagcagggcua

SEQ ID NO: 1292573 - RNA, 19 nt, Human
cagcagggcuacccugagc

SEQ ID NO: 1292574 - RNA, 21 nt, Human
cagcagggcuacccugagcug

SEQ ID NO: 1292575 - RNA, 23 nt, Human
cagccauccagggggcaagagga

SEQ ID NO: 1292576 - RNA, 21 nt, Human
cagccaucaccuuagaccacc

SEQ ID NO: 1292577 - RNA, 16 nt, Human
cagccaucaaaaugcu

SEQ ID NO: 1292578 - RNA, 17 nt, Human
cagccaucaaaaugcuu

SEQ ID NO: 1292579 - RNA, 18 nt, Human
cagccaucaagagacuga

SEQ ID NO: 1292580 - RNA, 21 nt, Human
cagccaucaagagacugaguc

SEQ ID NO: 1292581 - RNA, 19 nt, Human
cagccaucaccuuagacca

SEQ ID NO: 1292582 - RNA, 19 nt, Human
cagccauuggcuauuuaaa

SEQ ID NO: 1292583 - RNA, 20 nt, Human
cagccauuggcuauuuaaaa

SEQ ID NO: 1292584 - RNA, 16 nt, Human
cagcccacccccggca

SEQ ID NO: 1292585 - RNA, 17 nt, Human
cagcccacccccggcag

SEQ ID NO: 1292586 - RNA, 18 nt, Human
cagcccacccccggcagc

SEQ ID NO: 1292587 - RNA, 19 nt, Human
cagcccacauagugauggu

SEQ ID NO: 1292588 - RNA, 12 nt, Human
cagcccaccccc

SEQ ID NO: 1292589 - RNA, 22 nt, Human
cagccauuggcuauuuaaaacu

SEQ ID NO: 1292590 - RNA, 20 nt, Human
cagcccacccccggcagcag

SEQ ID NO: 1292591 - RNA, 22 nt, Human
cagcccacccccggcagcagcc

SEQ ID NO: 1292592 - RNA, 11 nt, Human
cagcccagaga

SEQ ID NO: 1292593 - RNA, 12 nt, Human
cagcccagagac

SEQ ID NO: 1292594 - RNA, 13 nt, Human
cagcccagagaca

SEQ ID NO: 1292595 - RNA, 21 nt, Human
cagcccagagacauacuugaa

SEQ ID NO: 1292596 - RNA, 22 nt, Human
cagcccagagacauacuugaag

SEQ ID NO: 1292597 - RNA, 12 nt, Human
cagcccagccag

SEQ ID NO: 1292598 - RNA, 13 nt, Human
cagcccagccagc

SEQ ID NO: 1292599 - RNA, 14 nt, Human
cagcccagccagcg

SEQ ID NO: 1292600 - RNA, 15 nt, Human
cagcccagccagcgu

SEQ ID NO: 1292601 - RNA, 20 nt, Human
cagcccagcccgcccacugg

SEQ ID NO: 1292602 - RNA, 16 nt, Human
cagcccagccccacuc

SEQ ID NO: 1292603 - RNA, 12 nt, Human
cagcccaggaag

SEQ ID NO: 1292604 - RNA, 20 nt, Human
cagcccaggaagucucaucu

SEQ ID NO: 1292605 - RNA, 22 nt, Human
cagcccaggaagucucaucugg

SEQ ID NO: 1292606 - RNA, 23 nt, Human
cagcccaggaagucucaucuggg

SEQ ID NO: 1292607 - RNA, 22 nt, Human
cagcccaggauacuggcacaga

SEQ ID NO: 1292608 - RNA, 16 nt, Human
cagcccagggcuccug

SEQ ID NO: 1292609 - RNA, 17 nt, Human
cagcccagggcuccugc

SEQ ID NO: 1292610 - RNA, 18 nt, Human
cagcccagggcuccugca

SEQ ID NO: 1292611 - RNA, 19 nt, Human
cagcccagggcuccugcac

SEQ ID NO: 1292612 - RNA, 21 nt, Human
cagcccagggcuccugcacuu

SEQ ID NO: 1292613 - RNA, 13 nt, Human
cagccccacacca

SEQ ID NO: 1292614 - RNA, 14 nt, Human
cagccccacaccag

SEQ ID NO: 1292615 - RNA, 16 nt, Human
cagccccacaccaggg

SEQ ID NO: 1292616 - RNA, 20 nt, Human
cagcccaggauacuggcaca

SEQ ID NO: 1292617 - RNA, 13 nt, Human
cagcccauggaga

SEQ ID NO: 1292618 - RNA, 21 nt, Human
cagcccauggagauugaccug

SEQ ID NO: 1292619 - RNA, 22 nt, Human
cagcccauggagauugaccugg

SEQ ID NO: 1292620 - RNA, 21 nt, Human
cagccacggggacucagcccu

SEQ ID NO: 1292621 - RNA, 22 nt, Human
cagccagucccguuucauuuag

SEQ ID NO: 1292622 - RNA, 17 nt, Human
cagccagugcccugagc

SEQ ID NO: 1292623 - RNA, 18 nt, Human
cagccagugcccugagcc

SEQ ID NO: 1292624 - RNA, 19 nt, Human
cagccagugcccugagcca

SEQ ID NO: 1292625 - RNA, 21 nt, Human
cagccagugcccugagccagg

SEQ ID NO: 1292626 - RNA, 13 nt, Human
cagccaucaaaau

SEQ ID NO: 1292627 - RNA, 14 nt, Human
cagccacacuucuc

SEQ ID NO: 1292628 - RNA, 16 nt, Human
cagccacacuucucag

SEQ ID NO: 1292629 - RNA, 17 nt, Human
cagccacacuucucagg

SEQ ID NO: 1292630 - RNA, 14 nt, Human
cagccaagcucugc

SEQ ID NO: 1292631 - RNA, 23 nt, Human
cagccaagguuuuauaaggcuga

SEQ ID NO: 1292632 - RNA, 22 nt, Human
cagccaagucgguuaguggaag

SEQ ID NO: 1292633 - RNA, 18 nt, Human
cagccacacuucucagga

SEQ ID NO: 1292634 - RNA, 19 nt, Human
cagccacacuucucaggac

SEQ ID NO: 1292635 - RNA, 20 nt, Human
cagccacacuucucaggaca

SEQ ID NO: 1292636 - RNA, 21 nt, Human
cagccacacuucucaggacac

SEQ ID NO: 1292637 - RNA, 12 nt, Human
cagccacccuga

SEQ ID NO: 1292638 - RNA, 14 nt, Human
cagccacccugagg

SEQ ID NO: 1292639 - RNA, 15 nt, Human
cagccacccugagga

SEQ ID NO: 1292640 - RNA, 16 nt, Human
cagccacccugaggag

SEQ ID NO: 1292641 - RNA, 18 nt, Human
cagccacccugaggaguc

SEQ ID NO: 1292642 - RNA, 19 nt, Human
cagccacccugaggagucu

SEQ ID NO: 1292643 - RNA, 20 nt, Human
cagccacccugaggagucug

SEQ ID NO: 1292644 - RNA, 21 nt, Human
cagccacccugaggagucuga

SEQ ID NO: 1292645 - RNA, 22 nt, Human
cagccacccugaggagucugag

SEQ ID NO: 1292646 - RNA, 14 nt, Human
cagccacccugagu

SEQ ID NO: 1292647 - RNA, 21 nt, Human
cagccaccgaagccgccugug

SEQ ID NO: 1292648 - RNA, 18 nt, Human
cagccacgaggugcaaca

SEQ ID NO: 1292649 - RNA, 16 nt, Human
cagccacccugaguug

SEQ ID NO: 1292650 - RNA, 23 nt, Human
cagcagagagguuugcaguccca

SEQ ID NO: 1292651 - RNA, 22 nt, Human
cagcagcaccugcccuaccugc

SEQ ID NO: 1292652 - RNA, 12 nt, Human
cagcagcaucuc

SEQ ID NO: 1292653 - RNA, 22 nt, Human
cagcagcaucucuaccuucucc

SEQ ID NO: 1292654 - RNA, 10 nt, Human
cagcagccag

SEQ ID NO: 1292655 - RNA, 11 nt, Human
cagcagccagc

SEQ ID NO: 1292656 - RNA, 12 nt, Human
cagcagccagcc

SEQ ID NO: 1292657 - RNA, 13 nt, Human
cagcagccagccc

SEQ ID NO: 1292658 - RNA, 14 nt, Human
cagcagccagcccu

SEQ ID NO: 1292659 - RNA, 15 nt, Human
cagcagccagcccug

SEQ ID NO: 1292660 - RNA, 16 nt, Human
cagcagccagcccugc

SEQ ID NO: 1292661 - RNA, 17 nt, Human
cagcagccagcccugcc

SEQ ID NO: 1292662 - RNA, 18 nt, Human
cagcagccagcccugccu

SEQ ID NO: 1292663 - RNA, 13 nt, Human
cagcagccccugc

SEQ ID NO: 1292664 - RNA, 16 nt, Human
cagcagccccugcaca

SEQ ID NO: 1292665 - RNA, 23 nt, Human
cagcagccccugcacaaagcccu

SEQ ID NO: 1292666 - RNA, 18 nt, Human
cagcagccucgccccugg

SEQ ID NO: 1292667 - RNA, 19 nt, Human
cagcagccucgccccuggc

SEQ ID NO: 1292668 - RNA, 23 nt, Human
cagcagccucgccccuggcagag

SEQ ID NO: 1292669 - RNA, 19 nt, Human
cagcagccagcccugccug

SEQ ID NO: 1292670 - RNA, 20 nt, Human
cagcagccagcccugccugg

SEQ ID NO: 1292671 - RNA, 21 nt, Human
cagcagccagcccugccugga

SEQ ID NO: 1292672 - RNA, 22 nt, Human
cagcagccagcccugccuggag

SEQ ID NO: 1292673 - RNA, 23 nt, Human
cagcagccagcccugccuggagg

SEQ ID NO: 1292674 - RNA, 15 nt, Human
cagcagccccacacc

SEQ ID NO: 1292675 - RNA, 16 nt, Human
cagcagccccacacca

SEQ ID NO: 1292676 - RNA, 18 nt, Human
cagcagccccacaccagg

SEQ ID NO: 1292677 - RNA, 12 nt, Human
cagcagccccca

SEQ ID NO: 1292678 - RNA, 13 nt, Human
cagcagcccccag

SEQ ID NO: 1292679 - RNA, 20 nt, Human
cagcagcccccagcucccac

SEQ ID NO: 1292680 - RNA, 23 nt, Human
cagcagcccccagcucccaccuc

SEQ ID NO: 1292681 - RNA, 22 nt, Human
cagcacuuuagaauaugccuug

SEQ ID NO: 1292682 - RNA, 19 nt, Human
cagcacuuggcccuucuac

SEQ ID NO: 1292683 - RNA, 14 nt, Human
cagcacuuuagaau

SEQ ID NO: 1292684 - RNA, 18 nt, Human
cagcacuuguccagcuga

SEQ ID NO: 1292685 - RNA, 19 nt, Human
cagcacuuguccagcugag

SEQ ID NO: 1292686 - RNA, 13 nt, Human
cagcacuuauuua

SEQ ID NO: 1292687 - RNA, 13 nt, Human
cagcacuuccaug

SEQ ID NO: 1292688 - RNA, 12 nt, Human
cagcacuuccau

SEQ ID NO: 1292689 - RNA, 14 nt, Human
cagcacuuggcccu

SEQ ID NO: 1292690 - RNA, 15 nt, Human
cagcacuuggcccuu

SEQ ID NO: 1292691 - RNA, 16 nt, Human
cagcacuuggcccuuc

SEQ ID NO: 1292692 - RNA, 23 nt, Human
cagcacuuggggguucaggcccg

SEQ ID NO: 1292693 - RNA, 15 nt, Human
cagcacuuguccagc

SEQ ID NO: 1292694 - RNA, 17 nt, Human
cagcacuuguccagcug

SEQ ID NO: 1292695 - RNA, 12 nt, Human
cagcagacagag

SEQ ID NO: 1292696 - RNA, 14 nt, Human
cagcagacagagcc

SEQ ID NO: 1292697 - RNA, 15 nt, Human
cagcagacagagcca

SEQ ID NO: 1292698 - RNA, 16 nt, Human
cagcagacagagccag

SEQ ID NO: 1292699 - RNA, 17 nt, Human
cagcagacagagccagg

SEQ ID NO: 1292700 - RNA, 18 nt, Human
cagcagacagagccagga

SEQ ID NO: 1292701 - RNA, 20 nt, Human
cagcagacagagccaggaga

SEQ ID NO: 1292702 - RNA, 21 nt, Human
cagcagacagagccaggagaa

SEQ ID NO: 1292703 - RNA, 15 nt, Human
cagcagacucagcuc

SEQ ID NO: 1292704 - RNA, 17 nt, Human
cagcagacucagcucug

SEQ ID NO: 1292705 - RNA, 18 nt, Human
cagcagacucagcucuga

SEQ ID NO: 1292706 - RNA, 21 nt, Human
cagcagacucagcucugacau

SEQ ID NO: 1292707 - RNA, 23 nt, Human
cagcagacucagcucugacauuc

SEQ ID NO: 1292708 - RNA, 16 nt, Human
cagcaauuuaaauguu

SEQ ID NO: 1292709 - RNA, 20 nt, Human
cagcacaaauuaguuauaua

SEQ ID NO: 1292710 - RNA, 13 nt, Human
cagcaauuucuaa

SEQ ID NO: 1292711 - RNA, 13 nt, Human
cagcacaaggcca

SEQ ID NO: 1292712 - RNA, 16 nt, Human
cagcacaaggccaucu

SEQ ID NO: 1292713 - RNA, 13 nt, Human
cagcacacagggc

SEQ ID NO: 1292714 - RNA, 14 nt, Human
cagcacacagggca

SEQ ID NO: 1292715 - RNA, 15 nt, Human
cagcacacagggcag

SEQ ID NO: 1292716 - RNA, 12 nt, Human
cagcacuguccc

SEQ ID NO: 1292717 - RNA, 13 nt, Human
cagcacugucccu

SEQ ID NO: 1292718 - RNA, 14 nt, Human
cagcacugucccuu

SEQ ID NO: 1292719 - RNA, 16 nt, Human
cagcacugucccuugc

SEQ ID NO: 1292720 - RNA, 18 nt, Human
cagcacugucccuugccu

SEQ ID NO: 1292721 - RNA, 20 nt, Human
cagcacugucccuugccuca

SEQ ID NO: 1292722 - RNA, 18 nt, Human
cagcacacagggcaguga

SEQ ID NO: 1292723 - RNA, 15 nt, Human
cagcaauuuaaaugu

SEQ ID NO: 1292724 - RNA, 14 nt, Human
cagcaauuuaaaug

SEQ ID NO: 1292725 - RNA, 23 nt, Human
cagcaauuucuaauuuuuaagaa

SEQ ID NO: 1292726 - RNA, 19 nt, Human
cagcaauucuccugccuca

SEQ ID NO: 1292727 - RNA, 20 nt, Human
cagcaauucuccugccucag

SEQ ID NO: 1292728 - RNA, 15 nt, Human
cagcaauucuccugc

SEQ ID NO: 1292729 - RNA, 16 nt, Human
cagcaauucuccugcc

SEQ ID NO: 1292730 - RNA, 17 nt, Human
cagcaauucuccugccu

SEQ ID NO: 1292731 - RNA, 18 nt, Human
cagcaauucuccugccuc

SEQ ID NO: 1292732 - RNA, 22 nt, Human
cagcaauuacaacggagucaaa

SEQ ID NO: 1292733 - RNA, 15 nt, Human
cagcaauagagacgg

SEQ ID NO: 1292734 - RNA, 17 nt, Human
cagcaauagagacggga

SEQ ID NO: 1292735 - RNA, 23 nt, Human
cagcaaguuagaacuagccaaac

SEQ ID NO: 1292736 - RNA, 23 nt, Human
cagcaagacuucucuuugccuca

SEQ ID NO: 1292737 - RNA, 20 nt, Human
cagcaagacuucucuuugcc

SEQ ID NO: 1292738 - RNA, 14 nt, Human
cagcaaggcccgag

SEQ ID NO: 1292739 - RNA, 15 nt, Human
cagcaaggcccgagc

SEQ ID NO: 1292740 - RNA, 16 nt, Human
cagcaaggcccgagca

SEQ ID NO: 1292741 - RNA, 19 nt, Human
cagcaaggcccgagcagcu

SEQ ID NO: 1292742 - RNA, 20 nt, Human
cagcaaggcccgagcagcug

SEQ ID NO: 1292743 - RNA, 21 nt, Human
cagcaaggcccgagcagcuga

SEQ ID NO: 1292744 - RNA, 23 nt, Human
cagcaaggcccgagcagcugagc

SEQ ID NO: 1292745 - RNA, 22 nt, Human
cagcaaggcccgagcagcugag

SEQ ID NO: 1292746 - RNA, 20 nt, Human
cagcaacaauaaauagacac

SEQ ID NO: 1292747 - RNA, 19 nt, Human
cagcaacaauaaauagaca

SEQ ID NO: 1292748 - RNA, 14 nt, Human
cagcaacaauaaau

SEQ ID NO: 1292749 - RNA, 18 nt, Human
cagcaaauccuuugugaa

SEQ ID NO: 1292750 - RNA, 13 nt, Human
cagcaaaugcaaa

SEQ ID NO: 1292751 - RNA, 22 nt, Human
cagcaaaugcaaaaacucuuug

SEQ ID NO: 1292752 - RNA, 16 nt, Human
cagcaaauccuuugug

SEQ ID NO: 1292753 - RNA, 14 nt, Human
cagcaaagugguuc

SEQ ID NO: 1292754 - RNA, 23 nt, Human
cagcaaagcccccagagcccagg

SEQ ID NO: 1292755 - RNA, 13 nt, Human
cagcaaagccccc

SEQ ID NO: 1292756 - RNA, 14 nt, Human
cagcaaagccccca

SEQ ID NO: 1292757 - RNA, 15 nt, Human
cagcaaagcccccag

SEQ ID NO: 1292758 - RNA, 17 nt, Human
cagcaaagcccccagag

SEQ ID NO: 1292759 - RNA, 18 nt, Human
cagcaaagcccccagagc

SEQ ID NO: 1292760 - RNA, 22 nt, Human
cagcaaagcccccagagcccag

SEQ ID NO: 1292761 - RNA, 14 nt, Human
cagcaaacaggugc

SEQ ID NO: 1292762 - RNA, 14 nt, Human
cagcaaaccggggc

SEQ ID NO: 1292763 - RNA, 16 nt, Human
cagcaaaccggggccu

SEQ ID NO: 1292764 - RNA, 20 nt, Human
cagcaaacucuuuucccacu

SEQ ID NO: 1292765 - RNA, 12 nt, Human
cagcaaccccag

SEQ ID NO: 1292766 - RNA, 13 nt, Human
cagcaaccccagg

SEQ ID NO: 1292767 - RNA, 16 nt, Human
cagcaaccccaggcug

SEQ ID NO: 1292768 - RNA, 17 nt, Human
cagcaaccccaggcuga

SEQ ID NO: 1292769 - RNA, 20 nt, Human
cagcaacggcacagcuaauu

SEQ ID NO: 1292770 - RNA, 20 nt, Human
cagcaacuaucagacuaagc

SEQ ID NO: 1292771 - RNA, 21 nt, Human
cagcaacuaucagacuaagcc

SEQ ID NO: 1292772 - RNA, 23 nt, Human
cagcaacuaucagacuaagccag

SEQ ID NO: 1292773 - RNA, 17 nt, Human
cagcaacuuguccuagc

SEQ ID NO: 1292774 - RNA, 22 nt, Human
cagcaacuuguccuagcacaga

SEQ ID NO: 1292775 - RNA, 23 nt, Human
cagcaacuuguccuagcacagau

SEQ ID NO: 1292776 - RNA, 22 nt, Human
cagauuuuuuacagcugccugc

SEQ ID NO: 1292777 - RNA, 19 nt, Human
cagauuuuuuacagcugcc

SEQ ID NO: 1292778 - RNA, 16 nt, Human
cagauuuuuacacaug

SEQ ID NO: 1292779 - RNA, 23 nt, Human
cagauuuuguuggcauagcucug

SEQ ID NO: 1292780 - RNA, 14 nt, Human
cagauuuuccugaa

SEQ ID NO: 1292781 - RNA, 15 nt, Human
cagauuuuccugaaa

SEQ ID NO: 1292782 - RNA, 19 nt, Human
cagauuuucagcaaacucu

SEQ ID NO: 1292783 - RNA, 22 nt, Human
cagauuuucagcaaacucuuuu

SEQ ID NO: 1292784 - RNA, 13 nt, Human
cagauuuucagca

SEQ ID NO: 1292785 - RNA, 15 nt, Human
cagauuuucagcaaa

SEQ ID NO: 1292786 - RNA, 15 nt, Human
cagauucuugcaucc

SEQ ID NO: 1292787 - RNA, 14 nt, Human
cagauuccuuccca

SEQ ID NO: 1292788 - RNA, 13 nt, Human
cagauuccuuccc

SEQ ID NO: 1292789 - RNA, 18 nt, Human
cagauucccagagcaaaa

SEQ ID NO: 1292790 - RNA, 19 nt, Human
cagauucccagagcaaaau

SEQ ID NO: 1292791 - RNA, 21 nt, Human
cagauucccagagcaaaauaa

SEQ ID NO: 1292792 - RNA, 12 nt, Human
cagauuccuucc

SEQ ID NO: 1292793 - RNA, 15 nt, Human
cagauucagaaauga

SEQ ID NO: 1292794 - RNA, 17 nt, Human
cagauucagaaaugagg

SEQ ID NO: 1292795 - RNA, 21 nt, Human
cagauucagaaaugaggccau

SEQ ID NO: 1292796 - RNA, 14 nt, Human
cagauucccagagc

SEQ ID NO: 1292797 - RNA, 17 nt, Human
cagauucccagagcaaa

SEQ ID NO: 1292798 - RNA, 15 nt, Human
cagaugucuauauug

SEQ ID NO: 1292799 - RNA, 21 nt, Human
cagauguccaucagaugacaa

SEQ ID NO: 1292800 - RNA, 19 nt, Human
cagauguccaucagaugac

SEQ ID NO: 1292801 - RNA, 16 nt, Human
cagauguccaucagau

SEQ ID NO: 1292802 - RNA, 18 nt, Human
cagauguaggagggacug

SEQ ID NO: 1292803 - RNA, 24 nt, Human
cagauguaggagggacugucgcug

SEQ ID NO: 1292804 - RNA, 15 nt, Human
cagauguaggaggga

SEQ ID NO: 1292805 - RNA, 17 nt, Human
cagauguaggagggacu

SEQ ID NO: 1292806 - RNA, 14 nt, Human
cagaugugaaccau

SEQ ID NO: 1292807 - RNA, 17 nt, Human
cagaugugaaccauuaa

SEQ ID NO: 1292808 - RNA, 16 nt, Human
cagauggccagccccu

SEQ ID NO: 1292809 - RNA, 22 nt, Human
cagauggcauguguuuacuuua

SEQ ID NO: 1292810 - RNA, 19 nt, Human
cagauggcagcuuuuaaaa

SEQ ID NO: 1292811 - RNA, 12 nt, Human
cagauggcacuu

SEQ ID NO: 1292812 - RNA, 13 nt, Human
cagauggcagcuu

SEQ ID NO: 1292813 - RNA, 15 nt, Human
cagauggcagcuuuu

SEQ ID NO: 1292814 - RNA, 16 nt, Human
cagauggcagcuuuua

SEQ ID NO: 1292815 - RNA, 16 nt, Human
cagauggcauguguuu

SEQ ID NO: 1292816 - RNA, 14 nt, Human
cagaugcuuuccug

SEQ ID NO: 1292817 - RNA, 21 nt, Human
cagaugcuuuccugcacauua

SEQ ID NO: 1292818 - RNA, 19 nt, Human
cagauggaaaauucauuuu

SEQ ID NO: 1292819 - RNA, 21 nt, Human
cagauggaaaauucauuuuuu

SEQ ID NO: 1292820 - RNA, 15 nt, Human
cagaugcugugcaaa

SEQ ID NO: 1292821 - RNA, 14 nt, Human
cagaugcuccaaga

SEQ ID NO: 1292822 - RNA, 15 nt, Human
cagaugcuccaagau

SEQ ID NO: 1292823 - RNA, 16 nt, Human
cagaugcuccaagauu

SEQ ID NO: 1292824 - RNA, 18 nt, Human
cagaugcuccaagauucu

SEQ ID NO: 1292825 - RNA, 19 nt, Human
cagaugcuccaagauucua

SEQ ID NO: 1292826 - RNA, 20 nt, Human
cagaugcuccaagauucuag

SEQ ID NO: 1292827 - RNA, 21 nt, Human
cagaugcuccaagauucuaga

SEQ ID NO: 1292828 - RNA, 22 nt, Human
cagaugcuccaagauucuagau

SEQ ID NO: 1292829 - RNA, 23 nt, Human
cagaugcuccaagauucuagaug

SEQ ID NO: 1292830 - RNA, 17 nt, Human
cagaugcagggcaguca

SEQ ID NO: 1292831 - RNA, 15 nt, Human
cagaugccccuuucu

SEQ ID NO: 1292832 - RNA, 17 nt, Human
cagaugccccuuucugg

SEQ ID NO: 1292833 - RNA, 12 nt, Human
cagaugccuccu

SEQ ID NO: 1292834 - RNA, 17 nt, Human
cagaugccuccuuccuc

SEQ ID NO: 1292835 - RNA, 14 nt, Human
cagaugccuccuuc

SEQ ID NO: 1292836 - RNA, 18 nt, Human
cagccuccaugcugccuc

SEQ ID NO: 1292837 - RNA, 13 nt, Human
cagagccaggaag

SEQ ID NO: 1292838 - RNA, 12 nt, Human
cagagccacagu

SEQ ID NO: 1292839 - RNA, 13 nt, Human
cagagccacaguu

SEQ ID NO: 1292840 - RNA, 22 nt, Human
cagagccaccccuaaagagaua

SEQ ID NO: 1292841 - RNA, 20 nt, Human
cagagccaaggggcuucagg

SEQ ID NO: 1292842 - RNA, 21 nt, Human
cagagccaaggggcuucaggu

SEQ ID NO: 1292843 - RNA, 23 nt, Human
cagagccaggaagaucccccaga

SEQ ID NO: 1292844 - RNA, 12 nt, Human
cagagccaggag

SEQ ID NO: 1292845 - RNA, 13 nt, Human
cagagccaggaga

SEQ ID NO: 1292846 - RNA, 16 nt, Human
cagagccaggagaagc

SEQ ID NO: 1292847 - RNA, 17 nt, Human
cagagccaggagaagcu

SEQ ID NO: 1292848 - RNA, 20 nt, Human
cagagccaggagaagcucag

SEQ ID NO: 1292849 - RNA, 23 nt, Human
cagagccaggagaagcucagcug

SEQ ID NO: 1292850 - RNA, 21 nt, Human
cagagccaggaagauccccca

SEQ ID NO: 1292851 - RNA, 17 nt, Human
cagagccaggaagaucc

SEQ ID NO: 1292852 - RNA, 15 nt, Human
cagagccaggaagau

SEQ ID NO: 1292853 - RNA, 14 nt, Human
cagagccaggaaga

SEQ ID NO: 1292854 - RNA, 23 nt, Human
cagagccaggggggugaggagcu

SEQ ID NO: 1292855 - RNA, 18 nt, Human
cagagccaugucuucucc

SEQ ID NO: 1292856 - RNA, 20 nt, Human
cagagccaugucuucucccu

SEQ ID NO: 1292857 - RNA, 21 nt, Human
cagagccaugucuucucccug

SEQ ID NO: 1292858 - RNA, 15 nt, Human
cagagcacugcucca

SEQ ID NO: 1292859 - RNA, 21 nt, Human
cagagcaccugcugucugggu

SEQ ID NO: 1292860 - RNA, 13 nt, Human
cagagcacugcuc

SEQ ID NO: 1292861 - RNA, 13 nt, Human
cagagcccacucc

SEQ ID NO: 1292862 - RNA, 18 nt, Human
cagagcccacuccaucug

SEQ ID NO: 1292863 - RNA, 19 nt, Human
cagagcccacuccaucugg

SEQ ID NO: 1292864 - RNA, 11 nt, Human
cagagcccagc

SEQ ID NO: 1292865 - RNA, 13 nt, Human
cagagcccagcuc

SEQ ID NO: 1292866 - RNA, 14 nt, Human
cagagcccagcucc

SEQ ID NO: 1292867 - RNA, 13 nt, Human
cagagcccaggcu

SEQ ID NO: 1292868 - RNA, 14 nt, Human
cagagcccaggcuc

SEQ ID NO: 1292869 - RNA, 17 nt, Human
cagagcccaggcucggc

SEQ ID NO: 1292870 - RNA, 23 nt, Human
cagagcccaggcucggccugccc

SEQ ID NO: 1292871 - RNA, 19 nt, Human
cagagcccaggcucggccu

SEQ ID NO: 1292872 - RNA, 22 nt, Human
cagagccggggugggguggcug

SEQ ID NO: 1292873 - RNA, 19 nt, Human
cagagccgugguccuuugg

SEQ ID NO: 1292874 - RNA, 20 nt, Human
cagagccgugguccuuuggg

SEQ ID NO: 1292875 - RNA, 20 nt, Human
cagagccuccuuucuggcuu

SEQ ID NO: 1292876 - RNA, 23 nt, Human
cagagcccugugaggcugggucc

SEQ ID NO: 1292877 - RNA, 23 nt, Human
cagagccggggugggguggcugc

SEQ ID NO: 1292878 - RNA, 16 nt, Human
cagaggaaggggccag

SEQ ID NO: 1292879 - RNA, 18 nt, Human
cagaggagccaccaguuc

SEQ ID NO: 1292880 - RNA, 19 nt, Human
cagaggagccaccaguucu

SEQ ID NO: 1292881 - RNA, 20 nt, Human
cagaggagccaccaguucuc

SEQ ID NO: 1292882 - RNA, 15 nt, Human
cagaggacacagaga

SEQ ID NO: 1292883 - RNA, 17 nt, Human
cagaggacacagagaag

SEQ ID NO: 1292884 - RNA, 18 nt, Human
cagaggaaggggccagag

SEQ ID NO: 1292885 - RNA, 19 nt, Human
cagaggaaggggccagagg

SEQ ID NO: 1292886 - RNA, 20 nt, Human
cagaggaaggggccagaggc

SEQ ID NO: 1292887 - RNA, 21 nt, Human
cagaggaaggggccagaggcu

SEQ ID NO: 1292888 - RNA, 19 nt, Human
cagagaagaaagaacggaa

SEQ ID NO: 1292889 - RNA, 18 nt, Human
cagagaagaaagaacgga

SEQ ID NO: 1292890 - RNA, 14 nt, Human
cagagaagaaagaa

SEQ ID NO: 1292891 - RNA, 11 nt, Human
cagagaagcca

SEQ ID NO: 1292892 - RNA, 12 nt, Human
cagagaagccag

SEQ ID NO: 1292893 - RNA, 13 nt, Human
cagagaagccagc

SEQ ID NO: 1292894 - RNA, 14 nt, Human
cagagaagccagcu

SEQ ID NO: 1292895 - RNA, 15 nt, Human
cagagaagccagcuu

SEQ ID NO: 1292896 - RNA, 16 nt, Human
cagagaagccagcuug

SEQ ID NO: 1292897 - RNA, 17 nt, Human
cagagaagccagcuugu

SEQ ID NO: 1292898 - RNA, 13 nt, Human
cagagaagaaaga

SEQ ID NO: 1292899 - RNA, 16 nt, Human
cagagaacccagccca

SEQ ID NO: 1292900 - RNA, 19 nt, Human
cagagaaaggggagcccac

SEQ ID NO: 1292901 - RNA, 14 nt, Human
cagagaaccaggcu

SEQ ID NO: 1292902 - RNA, 11 nt, Human
cagagaaccca

SEQ ID NO: 1292903 - RNA, 22 nt, Human
cagagaacccagcccacccccg

SEQ ID NO: 1292904 - RNA, 18 nt, Human
cagagaagccagcuuguu

SEQ ID NO: 1292905 - RNA, 19 nt, Human
cagagaagccagcuuguuu

SEQ ID NO: 1292906 - RNA, 20 nt, Human
cagagaagccagcuuguuua

SEQ ID NO: 1292907 - RNA, 21 nt, Human
cagagaagccagcuuguuuac

SEQ ID NO: 1292908 - RNA, 12 nt, Human
cagagaagccau

SEQ ID NO: 1292909 - RNA, 13 nt, Human
cagagaagccauc

SEQ ID NO: 1292910 - RNA, 14 nt, Human
cagagaagccauca

SEQ ID NO: 1292911 - RNA, 18 nt, Human
cagagaagccaucaccuc

SEQ ID NO: 1292912 - RNA, 19 nt, Human
cagagaagccaucaccuca

SEQ ID NO: 1292913 - RNA, 21 nt, Human
cagagaagccaucaccucaga

SEQ ID NO: 1292914 - RNA, 22 nt, Human
cagagaagccaucaccucagau

SEQ ID NO: 1292915 - RNA, 11 nt, Human
cagagaagccu

SEQ ID NO: 1292916 - RNA, 12 nt, Human
cagagaagccuu

SEQ ID NO: 1292917 - RNA, 13 nt, Human
cagagaagccuuc

SEQ ID NO: 1292918 - RNA, 14 nt, Human
cagagaagccuuca

SEQ ID NO: 1292919 - RNA, 15 nt, Human
cagagaagccuucaa

SEQ ID NO: 1292920 - RNA, 16 nt, Human
cagagaagccuucaag

SEQ ID NO: 1292921 - RNA, 17 nt, Human
cagagaagccuucaagc

SEQ ID NO: 1292922 - RNA, 18 nt, Human
cagagaagccuucaagcu

SEQ ID NO: 1292923 - RNA, 19 nt, Human
cagagaagccuucaagcuc

SEQ ID NO: 1292924 - RNA, 20 nt, Human
cagagaagccuucaagcucu

SEQ ID NO: 1292925 - RNA, 21 nt, Human
cagagaagccuucaagcucug

SEQ ID NO: 1292926 - RNA, 22 nt, Human
cagagaagccuucaagcucuga

SEQ ID NO: 1292927 - RNA, 23 nt, Human
cagagaagccuucaagcucugag

SEQ ID NO: 1292928 - RNA, 13 nt, Human
cagagaagucaca

SEQ ID NO: 1292929 - RNA, 16 nt, Human
cagagaagucacaggg

SEQ ID NO: 1292930 - RNA, 18 nt, Human
cagagaagucacagggca

SEQ ID NO: 1292931 - RNA, 20 nt, Human
cagagaagucacagggcagu

SEQ ID NO: 1292932 - RNA, 19 nt, Human
cagagaagucacagggcag

SEQ ID NO: 1292933 - RNA, 13 nt, Human
cagagaauuucua

SEQ ID NO: 1292934 - RNA, 15 nt, Human
cagagaauuucuacc

SEQ ID NO: 1292935 - RNA, 16 nt, Human
cagagaauuucuacca

SEQ ID NO: 1292936 - RNA, 22 nt, Human
cagagaauuucuaccauuucag

SEQ ID NO: 1292937 - RNA, 14 nt, Human
cagagacaacaggu

SEQ ID NO: 1292938 - RNA, 23 nt, Human
cagagacaacagguaaaacaggg

SEQ ID NO: 1292939 - RNA, 22 nt, Human
cagagacaacagguaaaacagg

SEQ ID NO: 1292940 - RNA, 23 nt, Human
cagagaccaagauggcccauccu

SEQ ID NO: 1292941 - RNA, 18 nt, Human
cagagacaugcagagauu

SEQ ID NO: 1292942 - RNA, 12 nt, Human
cagagaccaggg

SEQ ID NO: 1292943 - RNA, 15 nt, Human
cagagacauacuuga

SEQ ID NO: 1292944 - RNA, 16 nt, Human
cagagacauacuugaa

SEQ ID NO: 1292945 - RNA, 17 nt, Human
cagagacauacuugaag

SEQ ID NO: 1292946 - RNA, 19 nt, Human
cagagacauacuugaaggg

SEQ ID NO: 1292947 - RNA, 20 nt, Human
cagagacauacuugaagggc

SEQ ID NO: 1292948 - RNA, 21 nt, Human
cagagacauacuugaagggcc

SEQ ID NO: 1292949 - RNA, 23 nt, Human
cagagacauacuugaagggccag

SEQ ID NO: 1292950 - RNA, 17 nt, Human
cagagacaucagcccuu

SEQ ID NO: 1292951 - RNA, 23 nt, Human
cagagacaucagcccuugggggu

SEQ ID NO: 1292952 - RNA, 14 nt, Human
cagagacaugcaga

SEQ ID NO: 1292953 - RNA, 16 nt, Human
cagagacaugcagaga

SEQ ID NO: 1292954 - RNA, 17 nt, Human
cagagacaugcagagau

SEQ ID NO: 1292955 - RNA, 17 nt, Human
cagagcaagaccccauc

SEQ ID NO: 1292956 - RNA, 16 nt, Human
cagagauucugaacua

SEQ ID NO: 1292957 - RNA, 14 nt, Human
cagagcaaaauaau

SEQ ID NO: 1292958 - RNA, 16 nt, Human
cagagcaaaauaauuu

SEQ ID NO: 1292959 - RNA, 24 nt, Human
cagagauuggguuuuuggacuucu

SEQ ID NO: 1292960 - RNA, 18 nt, Human
cagagcacagcagccccu

SEQ ID NO: 1292961 - RNA, 16 nt, Human
cagagcaccugcuguc

SEQ ID NO: 1292962 - RNA, 18 nt, Human
cagagcaccugcugucug

SEQ ID NO: 1292963 - RNA, 19 nt, Human
cagagcaccugcugucugg

SEQ ID NO: 1292964 - RNA, 13 nt, Human
cagagaguggcuc

SEQ ID NO: 1292965 - RNA, 14 nt, Human
cagagaguggcucc

SEQ ID NO: 1292966 - RNA, 15 nt, Human
cagagaguggcuccu

SEQ ID NO: 1292967 - RNA, 18 nt, Human
cagagaguggcuccuccc

SEQ ID NO: 1292968 - RNA, 16 nt, Human
cagagauaaagaccuu

SEQ ID NO: 1292969 - RNA, 19 nt, Human
cagagauccaaaagaagcc

SEQ ID NO: 1292970 - RNA, 20 nt, Human
cagagauccaaaagaagccc

SEQ ID NO: 1292971 - RNA, 21 nt, Human
cagagauccaaaagaagcccc

SEQ ID NO: 1292972 - RNA, 23 nt, Human
cagagauccaaaagaagccccca

SEQ ID NO: 1292973 - RNA, 20 nt, Human
cagagaugcaccaccaagcc

SEQ ID NO: 1292974 - RNA, 21 nt, Human
cagagaugcaccaccaagcca

SEQ ID NO: 1292975 - RNA, 23 nt, Human
cagagagugagagacauuaacuc

SEQ ID NO: 1292976 - RNA, 14 nt, Human
cagagaugccuccc

SEQ ID NO: 1292977 - RNA, 15 nt, Human
cagagaugccucccu

SEQ ID NO: 1292978 - RNA, 23 nt, Human
cagagaugccucccugagcuaga

SEQ ID NO: 1292979 - RNA, 16 nt, Human
cagagaugccucccug

SEQ ID NO: 1292980 - RNA, 13 nt, Human
cagagaccagggc

SEQ ID NO: 1292981 - RNA, 15 nt, Human
cagagaccagggcuc

SEQ ID NO: 1292982 - RNA, 21 nt, Human
cagagaccagggcuccagccc

SEQ ID NO: 1292983 - RNA, 12 nt, Human
cagagacccagc

SEQ ID NO: 1292984 - RNA, 13 nt, Human
cagagacccagcg

SEQ ID NO: 1292985 - RNA, 22 nt, Human
cagagacccagcggacacacgc

SEQ ID NO: 1292986 - RNA, 15 nt, Human
cagagacccagcgga

SEQ ID NO: 1292987 - RNA, 17 nt, Human
cagagaccuuccagaaa

SEQ ID NO: 1292988 - RNA, 23 nt, Human
cagaggcgcaugaauuugugaag

SEQ ID NO: 1292989 - RNA, 14 nt, Human
cagaggccugggcu

SEQ ID NO: 1292990 - RNA, 16 nt, Human
cagaggccugggcugg

SEQ ID NO: 1292991 - RNA, 17 nt, Human
cagaggcgcacugugac

SEQ ID NO: 1292992 - RNA, 18 nt, Human
cagaggcgcacugugacc

SEQ ID NO: 1292993 - RNA, 19 nt, Human
cagaggccugggcugggaa

SEQ ID NO: 1292994 - RNA, 20 nt, Human
cagaggcuauuauuuucacu

SEQ ID NO: 1292995 - RNA, 21 nt, Human
cagaggcucagauuguaauau

SEQ ID NO: 1292996 - RNA, 13 nt, Human
cagaggccccagc

SEQ ID NO: 1292997 - RNA, 14 nt, Human
cagaggccccagcc

SEQ ID NO: 1292998 - RNA, 16 nt, Human
cagaggccccagccuc

SEQ ID NO: 1292999 - RNA, 17 nt, Human
cagaggccccagccucc

SEQ ID NO: 1293000 - RNA, 16 nt, Human
cagaggcccccagccc

SEQ ID NO: 1293001 - RNA, 17 nt, Human
cagaggcccccagccca

SEQ ID NO: 1293002 - RNA, 19 nt, Human
cagaggcccccagcccagg

SEQ ID NO: 1293003 - RNA, 22 nt, Human
cagaggcccccagcccagggcu

SEQ ID NO: 1293004 - RNA, 23 nt, Human
cagaggcccccagcccagggcuc

SEQ ID NO: 1293005 - RNA, 24 nt, Human
cagaggcccccagcccagggcucc

SEQ ID NO: 1293006 - RNA, 12 nt, Human
cagaggcccuca

SEQ ID NO: 1293007 - RNA, 19 nt, Human
cagaggcccucgcugccag

SEQ ID NO: 1293008 - RNA, 20 nt, Human
cagaggcccucgcugccagc

SEQ ID NO: 1293009 - RNA, 21 nt, Human
cagaggcccucaagucuuucu

SEQ ID NO: 1293010 - RNA, 12 nt, Human
cagaggcugggu

SEQ ID NO: 1293011 - RNA, 13 nt, Human
cagaggcuggguu

SEQ ID NO: 1293012 - RNA, 14 nt, Human
cagaggcuggguuc

SEQ ID NO: 1293013 - RNA, 21 nt, Human
cagaggauugcugccccauca

SEQ ID NO: 1293014 - RNA, 21 nt, Human
cagaggcagcccgcacaccug

SEQ ID NO: 1293015 - RNA, 17 nt, Human
cagaggcaguaccuggg

SEQ ID NO: 1293016 - RNA, 21 nt, Human
cagaggcaguaccugggcaag

SEQ ID NO: 1293017 - RNA, 20 nt, Human
cagaggccagaggcccccag

SEQ ID NO: 1293018 - RNA, 14 nt, Human
cagaggccaaggag

SEQ ID NO: 1293019 - RNA, 20 nt, Human
cagaggcccacauuggaaga

SEQ ID NO: 1293020 - RNA, 14 nt, Human
cagaggcccaggcu

SEQ ID NO: 1293021 - RNA, 15 nt, Human
cagaggcccaggcug

SEQ ID NO: 1293022 - RNA, 16 nt, Human
cagaggcccaggcugc

SEQ ID NO: 1293023 - RNA, 17 nt, Human
cagaggcccaggcugcc

SEQ ID NO: 1293024 - RNA, 19 nt, Human
cagaggcccaggcugccgu

SEQ ID NO: 1293025 - RNA, 18 nt, Human
cagaggcccaggcugccg

SEQ ID NO: 1293026 - RNA, 20 nt, Human
cagagucuggugaagcucac

SEQ ID NO: 1293027 - RNA, 20 nt, Human
cagagugacauccaggagga

SEQ ID NO: 1293028 - RNA, 14 nt, Human
cagagugagaccca

SEQ ID NO: 1293029 - RNA, 15 nt, Human
cagagugagacccag

SEQ ID NO: 1293030 - RNA, 17 nt, Human
cagagugagacccagcc

SEQ ID NO: 1293031 - RNA, 20 nt, Human
cagagugagacccagcccuc

SEQ ID NO: 1293032 - RNA, 14 nt, Human
cagagggcacucug

SEQ ID NO: 1293033 - RNA, 18 nt, Human
cagagucccugccuggac

SEQ ID NO: 1293034 - RNA, 16 nt, Human
cagaguccuuaaaaug

SEQ ID NO: 1293035 - RNA, 14 nt, Human
cagagucccugccu

SEQ ID NO: 1293036 - RNA, 14 nt, Human
cagauaaucacaau

SEQ ID NO: 1293037 - RNA, 15 nt, Human
cagauaaucccugua

SEQ ID NO: 1293038 - RNA, 13 nt, Human
cagauaaugugaa

SEQ ID NO: 1293039 - RNA, 14 nt, Human
cagauaaugugaaa

SEQ ID NO: 1293040 - RNA, 16 nt, Human
cagauaaugugaaaau

SEQ ID NO: 1293041 - RNA, 22 nt, Human
cagauaacugaaaauuauuuaa

SEQ ID NO: 1293042 - RNA, 19 nt, Human
cagauaacugaaaauuauu

SEQ ID NO: 1293043 - RNA, 15 nt, Human
cagauaacuuagcuu

SEQ ID NO: 1293044 - RNA, 16 nt, Human
cagauaacuuagcuua

SEQ ID NO: 1293045 - RNA, 12 nt, Human
cagauaacuuuu

SEQ ID NO: 1293046 - RNA, 13 nt, Human
cagauaacuuuuu

SEQ ID NO: 1293047 - RNA, 20 nt, Human
cagauaacuuuuuuuuuucu

SEQ ID NO: 1293048 - RNA, 20 nt, Human
cagauaagguaaaaugccau

SEQ ID NO: 1293049 - RNA, 22 nt, Human
cagauaagguaaaaugccauga

SEQ ID NO: 1293050 - RNA, 22 nt, Human
cagauaaagguucaugcaaacu

SEQ ID NO: 1293051 - RNA, 23 nt, Human
cagauaaauaguuuaugauucca

SEQ ID NO: 1293052 - RNA, 14 nt, Human
cagauaaacaguag

SEQ ID NO: 1293053 - RNA, 18 nt, Human
cagaguguggacucuggu

SEQ ID NO: 1293054 - RNA, 12 nt, Human
cagaguuacagu

SEQ ID NO: 1293055 - RNA, 13 nt, Human
cagaguuacaguu

SEQ ID NO: 1293056 - RNA, 14 nt, Human
cagaguuacaguuc

SEQ ID NO: 1293057 - RNA, 15 nt, Human
cagaguuacaguucu

SEQ ID NO: 1293058 - RNA, 16 nt, Human
cagaguuacaguucug

SEQ ID NO: 1293059 - RNA, 17 nt, Human
cagaguuacaguucugu

SEQ ID NO: 1293060 - RNA, 18 nt, Human
cagaguuacaguucugug

SEQ ID NO: 1293061 - RNA, 19 nt, Human
cagaguuacaguucugugg

SEQ ID NO: 1293062 - RNA, 23 nt, Human
cagaguucuuuuugaaguauuua

SEQ ID NO: 1293063 - RNA, 20 nt, Human
cagaguugcugcaaaccuga

SEQ ID NO: 1293064 - RNA, 23 nt, Human
cagaucugauuuguaacccacug

SEQ ID NO: 1293065 - RNA, 14 nt, Human
cagaucuggaaccu

SEQ ID NO: 1293066 - RNA, 15 nt, Human
cagaucuggaaccuc

SEQ ID NO: 1293067 - RNA, 18 nt, Human
cagaucuggaaccucagc

SEQ ID NO: 1293068 - RNA, 19 nt, Human
cagaucuggaaccucagcc

SEQ ID NO: 1293069 - RNA, 20 nt, Human
cagaucuggaaccucagccu

SEQ ID NO: 1293070 - RNA, 21 nt, Human
cagaucuggaaccucagccug

SEQ ID NO: 1293071 - RNA, 22 nt, Human
cagaucuggaaccucagccugg

SEQ ID NO: 1293072 - RNA, 23 nt, Human
cagaucuggaaccucagccuggc

SEQ ID NO: 1293073 - RNA, 14 nt, Human
cagauccuggaaau

SEQ ID NO: 1293074 - RNA, 21 nt, Human
cagaucuagucaaucaagucu

SEQ ID NO: 1293075 - RNA, 16 nt, Human
cagaugcagcucaaga

SEQ ID NO: 1293076 - RNA, 13 nt, Human
cagaugcagggca

SEQ ID NO: 1293077 - RNA, 14 nt, Human
cagaugcagggcag

SEQ ID NO: 1293078 - RNA, 23 nt, Human
cagaugacaagaaaggcugcugu

SEQ ID NO: 1293079 - RNA, 16 nt, Human
cagaugaggcuuucca

SEQ ID NO: 1293080 - RNA, 14 nt, Human
cagaugagucacac

SEQ ID NO: 1293081 - RNA, 17 nt, Human
cagaugaaugccgugga

SEQ ID NO: 1293082 - RNA, 21 nt, Human
cagaccauggacacuacaccc

SEQ ID NO: 1293083 - RNA, 22 nt, Human
cagaccauggacacuacaccca

SEQ ID NO: 1293084 - RNA, 17 nt, Human
cagaccauugucucaga

SEQ ID NO: 1293085 - RNA, 13 nt, Human
cagaccccuggcu

SEQ ID NO: 1293086 - RNA, 14 nt, Human
cagaccccuggcuu

SEQ ID NO: 1293087 - RNA, 15 nt, Human
cagaccccuggcuuu

SEQ ID NO: 1293088 - RNA, 16 nt, Human
cagaccccuggcuuuu

SEQ ID NO: 1293089 - RNA, 18 nt, Human
cagaccccuggcuuuuca

SEQ ID NO: 1293090 - RNA, 14 nt, Human
cagaccauggacac

SEQ ID NO: 1293091 - RNA, 16 nt, Human
cagaccauaauguuac

SEQ ID NO: 1293092 - RNA, 19 nt, Human
cagaccagcaggcuggccu

SEQ ID NO: 1293093 - RNA, 23 nt, Human
cagaccacgcccguccugccugu

SEQ ID NO: 1293094 - RNA, 24 nt, Human
cagaccacgcccguccugccugug

SEQ ID NO: 1293095 - RNA, 13 nt, Human
cagaccacggcuc

SEQ ID NO: 1293096 - RNA, 15 nt, Human
cagaccacaugcccc

SEQ ID NO: 1293097 - RNA, 16 nt, Human
cagaccacaugcccca

SEQ ID NO: 1293098 - RNA, 16 nt, Human
cagaccacauugcuuu

SEQ ID NO: 1293099 - RNA, 13 nt, Human
cagaccaccccgc

SEQ ID NO: 1293100 - RNA, 15 nt, Human
cagaccaccccgccu

SEQ ID NO: 1293101 - RNA, 19 nt, Human
cagaccaccccgccugccc

SEQ ID NO: 1293102 - RNA, 22 nt, Human
cagaccaccccgccugcccuca

SEQ ID NO: 1293103 - RNA, 22 nt, Human
cagaccacgcccguccugccug

SEQ ID NO: 1293104 - RNA, 13 nt, Human
cagacauuuuaaa

SEQ ID NO: 1293105 - RNA, 14 nt, Human
cagacauugugcua

SEQ ID NO: 1293106 - RNA, 14 nt, Human
cagacauuggcacc

SEQ ID NO: 1293107 - RNA, 21 nt, Human
cagaccccuggcuuuucacug

SEQ ID NO: 1293108 - RNA, 22 nt, Human
cagaccccuggcuuuucacugc

SEQ ID NO: 1293109 - RNA, 23 nt, Human
cagaccccuggcuuuucacugcu

SEQ ID NO: 1293110 - RNA, 13 nt, Human
cagacccugcccu

SEQ ID NO: 1293111 - RNA, 15 nt, Human
cagacccugcccuug

SEQ ID NO: 1293112 - RNA, 13 nt, Human
cagacccuggagg

SEQ ID NO: 1293113 - RNA, 11 nt, Human
cagacccugga

SEQ ID NO: 1293114 - RNA, 14 nt, Human
cagacccuggaggc

SEQ ID NO: 1293115 - RNA, 18 nt, Human
cagacccuggaggcccca

SEQ ID NO: 1293116 - RNA, 19 nt, Human
cagacccuggaggccccaa

SEQ ID NO: 1293117 - RNA, 22 nt, Human
cagacccuggaggccccaaccc

SEQ ID NO: 1293118 - RNA, 22 nt, Human
cagaccuaggauuucaugauuu

SEQ ID NO: 1293119 - RNA, 18 nt, Human
cagagaaaggggagccca

SEQ ID NO: 1293120 - RNA, 12 nt, Human
cagagaaaaagg

SEQ ID NO: 1293121 - RNA, 20 nt, Human
cagacuuuuuuuaaauagua

SEQ ID NO: 1293122 - RNA, 17 nt, Human
cagagaaaaagggaggg

SEQ ID NO: 1293123 - RNA, 18 nt, Human
cagagaaaaagggagggg

SEQ ID NO: 1293124 - RNA, 13 nt, Human
cagagaaaccagc

SEQ ID NO: 1293125 - RNA, 14 nt, Human
cagagaaaccagcu

SEQ ID NO: 1293126 - RNA, 15 nt, Human
cagagaaaccagcuu

SEQ ID NO: 1293127 - RNA, 16 nt, Human
cagagaaaccagcuuc

SEQ ID NO: 1293128 - RNA, 17 nt, Human
cagagaaaccagcuucc

SEQ ID NO: 1293129 - RNA, 18 nt, Human
cagagaaaccagcuuccu

SEQ ID NO: 1293130 - RNA, 19 nt, Human
cagagaaaccagcuuccuu

SEQ ID NO: 1293131 - RNA, 21 nt, Human
cagagaaaccagcuuccuuca

SEQ ID NO: 1293132 - RNA, 23 nt, Human
cagagaaaccagcuuccuucaga

SEQ ID NO: 1293133 - RNA, 22 nt, Human
cagagaaaccagcuuccuucag

SEQ ID NO: 1293134 - RNA, 12 nt, Human
cagacuucccac

SEQ ID NO: 1293135 - RNA, 22 nt, Human
cagacuucccacggcuccucga

SEQ ID NO: 1293136 - RNA, 14 nt, Human
cagacucccauucc

SEQ ID NO: 1293137 - RNA, 17 nt, Human
cagacucccauuccuga

SEQ ID NO: 1293138 - RNA, 18 nt, Human
cagacucccauuccugaa

SEQ ID NO: 1293139 - RNA, 14 nt, Human
cagacucagacauu

SEQ ID NO: 1293140 - RNA, 14 nt, Human
cagacucagcucug

SEQ ID NO: 1293141 - RNA, 15 nt, Human
cagacucagcucuga

SEQ ID NO: 1293142 - RNA, 19 nt, Human
cagacucccauuccugaag

SEQ ID NO: 1293143 - RNA, 14 nt, Human
cagacuucccagcu

SEQ ID NO: 1293144 - RNA, 15 nt, Human
cagacuucccagcua

SEQ ID NO: 1293145 - RNA, 20 nt, Human
cagacuucccagcuaggaag

SEQ ID NO: 1293146 - RNA, 11 nt, Human
cagacuuguug

SEQ ID NO: 1293147 - RNA, 13 nt, Human
cagaccugauccu

SEQ ID NO: 1293148 - RNA, 14 nt, Human
cagaccugauccug

SEQ ID NO: 1293149 - RNA, 17 nt, Human
cagaccugauccuggag

SEQ ID NO: 1293150 - RNA, 20 nt, Human
cagaccugauccuggaggcc

SEQ ID NO: 1293151 - RNA, 22 nt, Human
cagaccugauccuggaggccca

SEQ ID NO: 1293152 - RNA, 23 nt, Human
cagaccugauccuggaggcccag

SEQ ID NO: 1293153 - RNA, 19 nt, Human
cagaccuguuagcagacag

SEQ ID NO: 1293154 - RNA, 20 nt, Human
cagaccuguuagcagacagg

SEQ ID NO: 1293155 - RNA, 15 nt, Human
cagaccuuuuuuagg

SEQ ID NO: 1293156 - RNA, 16 nt, Human
cagacgccugaggaac

SEQ ID NO: 1293157 - RNA, 13 nt, Human
cagacgccuggcu

SEQ ID NO: 1293158 - RNA, 14 nt, Human
cagacgccuggcug

SEQ ID NO: 1293159 - RNA, 15 nt, Human
cagacgccuggcugc

SEQ ID NO: 1293160 - RNA, 16 nt, Human
cagacgccuggcugcu

SEQ ID NO: 1293161 - RNA, 17 nt, Human
cagacgccuggcugcug

SEQ ID NO: 1293162 - RNA, 23 nt, Human
cagacgccuggcugcugaucgcc

SEQ ID NO: 1293163 - RNA, 17 nt, Human
cagacgcugcugucaca

SEQ ID NO: 1293164 - RNA, 18 nt, Human
cagacgcugcugucacaa

SEQ ID NO: 1293165 - RNA, 19 nt, Human
cagacggaaggguaaacaa

SEQ ID NO: 1293166 - RNA, 20 nt, Human
cagacggaaggguaaacaau

SEQ ID NO: 1293167 - RNA, 22 nt, Human
cagacggaaggguaaacaauau

SEQ ID NO: 1293168 - RNA, 14 nt, Human
cagacuaagccagc

SEQ ID NO: 1293169 - RNA, 15 nt, Human
cagacuaagccagca

SEQ ID NO: 1293170 - RNA, 18 nt, Human
cagacuaagccagcaccg

SEQ ID NO: 1293171 - RNA, 21 nt, Human
cagacuaagccagcaccggac

SEQ ID NO: 1293172 - RNA, 22 nt, Human
cagacuaagccagcaccggacc

SEQ ID NO: 1293173 - RNA, 23 nt, Human
cagacuaagccagcaccggacca

SEQ ID NO: 1293174 - RNA, 21 nt, Human
cagacuacagcuggggugcag

SEQ ID NO: 1293175 - RNA, 12 nt, Human
cagacuacagcu

SEQ ID NO: 1293176 - RNA, 21 nt, Human
cagacuagauggaccugccug

SEQ ID NO: 1293177 - RNA, 22 nt, Human
cagacuagauggaccugccugc

SEQ ID NO: 1293178 - RNA, 23 nt, Human
cagacuagauggaccugccugca

SEQ ID NO: 1293179 - RNA, 14 nt, Human
cagacuagauguag

SEQ ID NO: 1293180 - RNA, 15 nt, Human
cagacuagauguagu

SEQ ID NO: 1293181 - RNA, 19 nt, Human
cagacuagauguaguauuu

SEQ ID NO: 1293182 - RNA, 20 nt, Human
cagacuagauguaguauuuu

SEQ ID NO: 1293183 - RNA, 21 nt, Human
cagacuagauguaguauuuuu

SEQ ID NO: 1293184 - RNA, 15 nt, Human
cagacuauuuuuaga

SEQ ID NO: 1293185 - RNA, 20 nt, Human
cagacuauuuuuagauuuuc

SEQ ID NO: 1293186 - RNA, 22 nt, Human
cagacuauuuuuagauuuucuu

SEQ ID NO: 1293187 - RNA, 21 nt, Human
cagaaugagacauccagcaga

SEQ ID NO: 1293188 - RNA, 15 nt, Human
cagaaucucgcucug

SEQ ID NO: 1293189 - RNA, 11 nt, Human
cagaaugcugu

SEQ ID NO: 1293190 - RNA, 16 nt, Human
cagaaugcuguacauc

SEQ ID NO: 1293191 - RNA, 17 nt, Human
cagaaugcuguacaucu

SEQ ID NO: 1293192 - RNA, 18 nt, Human
cagaaugcuguacaucua

SEQ ID NO: 1293193 - RNA, 21 nt, Human
cagaaugcuguacaucuauuu

SEQ ID NO: 1293194 - RNA, 14 nt, Human
cagaauguauauua

SEQ ID NO: 1293195 - RNA, 21 nt, Human
cagaaugugauaaggaaauca

SEQ ID NO: 1293196 - RNA, 21 nt, Human
cagaaugucauuuugguacuu

SEQ ID NO: 1293197 - RNA, 16 nt, Human
cagaauguugauuaca

SEQ ID NO: 1293198 - RNA, 22 nt, Human
cagaauguugauuacagugcag

SEQ ID NO: 1293199 - RNA, 14 nt, Human
cagaauuaaacuuu

SEQ ID NO: 1293200 - RNA, 15 nt, Human
cagaauuaaacuuuu

SEQ ID NO: 1293201 - RNA, 16 nt, Human
cagaauuaaacuuuua

SEQ ID NO: 1293202 - RNA, 17 nt, Human
cagaauuaaacuuuuaa

SEQ ID NO: 1293203 - RNA, 23 nt, Human
cagaauuaaacuuuuaauucauu

SEQ ID NO: 1293204 - RNA, 23 nt, Human
cagaauuacuguaacugauuaca

SEQ ID NO: 1293205 - RNA, 19 nt, Human
cagaauuaaacuuuuaauu

SEQ ID NO: 1293206 - RNA, 14 nt, Human
cagaauuacuguaa

SEQ ID NO: 1293207 - RNA, 22 nt, Human
cagaauuacuguaacugauuac

SEQ ID NO: 1293208 - RNA, 18 nt, Human
cagaauuuaguguaucca

SEQ ID NO: 1293209 - RNA, 19 nt, Human
cagaauuuggguucugccu

SEQ ID NO: 1293210 - RNA, 20 nt, Human
cagaauuuuauacuuucccu

SEQ ID NO: 1293211 - RNA, 21 nt, Human
cagaauuuuauacuuucccua

SEQ ID NO: 1293212 - RNA, 22 nt, Human
cagaauuuuauacuuucccuac

SEQ ID NO: 1293213 - RNA, 23 nt, Human
cagaauuuuauacuuucccuacc

SEQ ID NO: 1293214 - RNA, 17 nt, Human
cagacaacacguuacua

SEQ ID NO: 1293215 - RNA, 21 nt, Human
cagacacaaagagacaaagcu

SEQ ID NO: 1293216 - RNA, 14 nt, Human
cagacacaggcccu

SEQ ID NO: 1293217 - RNA, 15 nt, Human
cagacacaggcccuc

SEQ ID NO: 1293218 - RNA, 18 nt, Human
cagacacaggcccucccu

SEQ ID NO: 1293219 - RNA, 12 nt, Human
cagacacccagg

SEQ ID NO: 1293220 - RNA, 13 nt, Human
cagacacccagga

SEQ ID NO: 1293221 - RNA, 14 nt, Human
cagacacccaggac

SEQ ID NO: 1293222 - RNA, 15 nt, Human
cagacacccaggacu

SEQ ID NO: 1293223 - RNA, 17 nt, Human
cagacacccaggacuua

SEQ ID NO: 1293224 - RNA, 22 nt, Human
cagacacugguuugaagaaugu

SEQ ID NO: 1293225 - RNA, 18 nt, Human
cagacaccuuggacaucc

SEQ ID NO: 1293226 - RNA, 14 nt, Human
cagacaccuuggac

SEQ ID NO: 1293227 - RNA, 14 nt, Human
cagacauaaaggaa

SEQ ID NO: 1293228 - RNA, 15 nt, Human
cagacauaaaggaaa

SEQ ID NO: 1293229 - RNA, 17 nt, Human
cagacauaaaggaaaag

SEQ ID NO: 1293230 - RNA, 19 nt, Human
cagacauaaaggaaaagac

SEQ ID NO: 1293231 - RNA, 19 nt, Human
cagacauagaauuaacaca

SEQ ID NO: 1293232 - RNA, 17 nt, Human
cagacauagaauuaaca

SEQ ID NO: 1293233 - RNA, 22 nt, Human
cagacauaaaggaaaagacaca

SEQ ID NO: 1293234 - RNA, 20 nt, Human
cagacauaaaggaaaagaca

SEQ ID NO: 1293235 - RNA, 17 nt, Human
cagacauccaaacuaaa

SEQ ID NO: 1293236 - RNA, 22 nt, Human
cagacauccaaacuaaaaggaa

SEQ ID NO: 1293237 - RNA, 18 nt, Human
cagacaugccacaaggac

SEQ ID NO: 1293238 - RNA, 20 nt, Human
cagacaucugagguuuuauu

SEQ ID NO: 1293239 - RNA, 23 nt, Human
cagaaacacccucacacugggac

SEQ ID NO: 1293240 - RNA, 22 nt, Human
cagaaacacccucacacuggga

SEQ ID NO: 1293241 - RNA, 21 nt, Human
cagaaacacccucacacuggg

SEQ ID NO: 1293242 - RNA, 20 nt, Human
cagaaacacccucacacugg

SEQ ID NO: 1293243 - RNA, 18 nt, Human
cagaaacacccucacacu

SEQ ID NO: 1293244 - RNA, 18 nt, Human
cagaaagcagaacaguga

SEQ ID NO: 1293245 - RNA, 24 nt, Human
cagaaagaaguggggacagagcag

SEQ ID NO: 1293246 - RNA, 22 nt, Human
cagaaagcaucccucacccauc

SEQ ID NO: 1293247 - RNA, 23 nt, Human
cagaaagcaguugagacaagaaa

SEQ ID NO: 1293248 - RNA, 22 nt, Human
cagaaagcaguugagacaagaa

SEQ ID NO: 1293249 - RNA, 19 nt, Human
cagaaagcagaacagugau

SEQ ID NO: 1293250 - RNA, 20 nt, Human
cagaaagccccacccaggcc

SEQ ID NO: 1293251 - RNA, 21 nt, Human
cagaaagccccacccaggcca

SEQ ID NO: 1293252 - RNA, 22 nt, Human
cagaaagccccacccaggccag

SEQ ID NO: 1293253 - RNA, 23 nt, Human
cagaaagccccacccaggccagg

SEQ ID NO: 1293254 - RNA, 19 nt, Human
cagaaagccugggugacau

SEQ ID NO: 1293255 - RNA, 22 nt, Human
cagaaagccugggugacauuug

SEQ ID NO: 1293256 - RNA, 14 nt, Human
cagaaagcugccug

SEQ ID NO: 1293257 - RNA, 15 nt, Human
cagaaagcugccugg

SEQ ID NO: 1293258 - RNA, 23 nt, Human
cagaacagugauuaccagggacu

SEQ ID NO: 1293259 - RNA, 16 nt, Human
cagaacauagacagaa

SEQ ID NO: 1293260 - RNA, 21 nt, Human
cagaacauagacagaagaaac

SEQ ID NO: 1293261 - RNA, 19 nt, Human
cagaacauagacagaagaa

SEQ ID NO: 1293262 - RNA, 15 nt, Human
cagaaccaauuauuu

SEQ ID NO: 1293263 - RNA, 20 nt, Human
cagaaccaauuauuuucauc

SEQ ID NO: 1293264 - RNA, 17 nt, Human
cagaaccaauuauuuuc

SEQ ID NO: 1293265 - RNA, 12 nt, Human
cagaaccacagg

SEQ ID NO: 1293266 - RNA, 20 nt, Human
cagaaccacagggcuauuuu

SEQ ID NO: 1293267 - RNA, 14 nt, Human
cagaaccacagggc

SEQ ID NO: 1293268 - RNA, 23 nt, Human
cagaaaagaaagcuacagaagaa

SEQ ID NO: 1293269 - RNA, 23 nt, Human
cagaaaacccuugggccagaagu

SEQ ID NO: 1293270 - RNA, 17 nt, Human
cagaaaaguugaauuuu

SEQ ID NO: 1293271 - RNA, 20 nt, Human
cagaaaaguugaauuuuaca

SEQ ID NO: 1293272 - RNA, 22 nt, Human
cagaaaaguugaauuuuacaug

SEQ ID NO: 1293273 - RNA, 19 nt, Human
cagaaaauaucccuccugu

SEQ ID NO: 1293274 - RNA, 23 nt, Human
cagaaaauaaggcacccaucugu

SEQ ID NO: 1293275 - RNA, 12 nt, Human
cagaaaauaagg

SEQ ID NO: 1293276 - RNA, 21 nt, Human
cagaaaauaaggcacccaucu

SEQ ID NO: 1293277 - RNA, 19 nt, Human
cagaaaaugaacacagcag

SEQ ID NO: 1293278 - RNA, 14 nt, Human
cagaaaauguugag

SEQ ID NO: 1293279 - RNA, 18 nt, Human
cagaaaauguugagaauc

SEQ ID NO: 1293280 - RNA, 23 nt, Human
cagaaaauguugagaaucccaaa

SEQ ID NO: 1293281 - RNA, 13 nt, Human
cagaaaauucugu

SEQ ID NO: 1293282 - RNA, 14 nt, Human
cagaaaauucugug

SEQ ID NO: 1293283 - RNA, 15 nt, Human
cagaaaauucugugc

SEQ ID NO: 1293284 - RNA, 23 nt, Human
cagaaaauucugugccuuguuuu

SEQ ID NO: 1293285 - RNA, 18 nt, Human
cagaaacaaaaacacuaa

SEQ ID NO: 1293286 - RNA, 20 nt, Human
cagaaacaaaaacacuaaaa

SEQ ID NO: 1293287 - RNA, 17 nt, Human
cagaaaauucugugccu

SEQ ID NO: 1293288 - RNA, 12 nt, Human
cacuuugcauaa

SEQ ID NO: 1293289 - RNA, 17 nt, Human
cacuuugcacagcucuc

SEQ ID NO: 1293290 - RNA, 14 nt, Human
cacuuugcacagcu

SEQ ID NO: 1293291 - RNA, 19 nt, Human
cacuuugcacugauauauc

SEQ ID NO: 1293292 - RNA, 22 nt, Human
cacuuugcacugauauaucaug

SEQ ID NO: 1293293 - RNA, 12 nt, Human
cacuuugcuuua

SEQ ID NO: 1293294 - RNA, 17 nt, Human
cacuuugcuuuaauaua

SEQ ID NO: 1293295 - RNA, 18 nt, Human
cacuuugcuuuaauauaa

SEQ ID NO: 1293296 - RNA, 19 nt, Human
cacuuugcuuuaauauaaa

SEQ ID NO: 1293297 - RNA, 20 nt, Human
cacuuugcuuuaauauaaau

SEQ ID NO: 1293298 - RNA, 18 nt, Human
cacuuuggcuuauaauuc

SEQ ID NO: 1293299 - RNA, 19 nt, Human
cacuugguaauuguacuaa

SEQ ID NO: 1293300 - RNA, 15 nt, Human
cacuugguaauugua

SEQ ID NO: 1293301 - RNA, 20 nt, Human
cacuuucuauccucuguaaa

SEQ ID NO: 1293302 - RNA, 19 nt, Human
cacuuucucaguuuucaua

SEQ ID NO: 1293303 - RNA, 23 nt, Human
cacuuucuuuuuuuucuauuuca

SEQ ID NO: 1293304 - RNA, 11 nt, Human
cacuuucuuau

SEQ ID NO: 1293305 - RNA, 23 nt, Human
cacuuuggcuuauaauucuuuca

SEQ ID NO: 1293306 - RNA, 15 nt, Human
cacuuuuugcagcuu

SEQ ID NO: 1293307 - RNA, 18 nt, Human
cacuuuuugcagcuuucu

SEQ ID NO: 1293308 - RNA, 14 nt, Human
cacuuuuugcagcu

SEQ ID NO: 1293309 - RNA, 14 nt, Human
cacuuuuugaggca

SEQ ID NO: 1293310 - RNA, 16 nt, Human
cacuuuuugaggcaaa

SEQ ID NO: 1293311 - RNA, 17 nt, Human
cacuuuuucucuuucca

SEQ ID NO: 1293312 - RNA, 20 nt, Human
cacuuuuugaggcaaaagaa

SEQ ID NO: 1293313 - RNA, 22 nt, Human
cagaaaaaccaacaucuacaaa

SEQ ID NO: 1293314 - RNA, 15 nt, Human
cagaaaaaccuuggg

SEQ ID NO: 1293315 - RNA, 18 nt, Human
cagaaaaauauguaccaa

SEQ ID NO: 1293316 - RNA, 22 nt, Human
cagaaaaauauguaccaagaau

SEQ ID NO: 1293317 - RNA, 13 nt, Human
cagaaaacaaaac

SEQ ID NO: 1293318 - RNA, 14 nt, Human
cagaaaacaaaacu

SEQ ID NO: 1293319 - RNA, 16 nt, Human
cagaaaacauguuucc

SEQ ID NO: 1293320 - RNA, 17 nt, Human
cagaaaacccuugggcc

SEQ ID NO: 1293321 - RNA, 19 nt, Human
cagaaaacccuugggccag

SEQ ID NO: 1293322 - RNA, 20 nt, Human
cagaaaacccuugggccaga

SEQ ID NO: 1293323 - RNA, 22 nt, Human
cagaaaacccuugggccagaag

SEQ ID NO: 1293324 - RNA, 16 nt, Human
cacuuuuccucccuca

SEQ ID NO: 1293325 - RNA, 17 nt, Human
cacuuuugacaaaggca

SEQ ID NO: 1293326 - RNA, 18 nt, Human
cacuuuugacaaaggcaa

SEQ ID NO: 1293327 - RNA, 18 nt, Human
cacuuuuauuuagcacca

SEQ ID NO: 1293328 - RNA, 12 nt, Human
cacuuuucccac

SEQ ID NO: 1293329 - RNA, 13 nt, Human
cacuuuucccacu

SEQ ID NO: 1293330 - RNA, 14 nt, Human
cacuuuucccacuc

SEQ ID NO: 1293331 - RNA, 15 nt, Human
cacuuuucccacucc

SEQ ID NO: 1293332 - RNA, 19 nt, Human
cacuuuucccacuccaagc

SEQ ID NO: 1293333 - RNA, 22 nt, Human
cacuuugguaccagauaacuuu

SEQ ID NO: 1293334 - RNA, 20 nt, Human
cacuuugucgcccaggcugg

SEQ ID NO: 1293335 - RNA, 20 nt, Human
cacuuuguuucguggggagg

SEQ ID NO: 1293336 - RNA, 21 nt, Human
cacuuuguuucguggggaggu

SEQ ID NO: 1293337 - RNA, 17 nt, Human
cacuuuuaaugaacaaa

SEQ ID NO: 1293338 - RNA, 13 nt, Human
cagaacuacuucu

SEQ ID NO: 1293339 - RNA, 13 nt, Human
cagaacuagaauu

SEQ ID NO: 1293340 - RNA, 19 nt, Human
cagaacuagaauuugauua

SEQ ID NO: 1293341 - RNA, 19 nt, Human
cagaacuaccaccugacau

SEQ ID NO: 1293342 - RNA, 18 nt, Human
cagaaccggagagccagc

SEQ ID NO: 1293343 - RNA, 22 nt, Human
cagaacccuuggagccaaugga

SEQ ID NO: 1293344 - RNA, 23 nt, Human
cagaaccccuacaugaaacagaa

SEQ ID NO: 1293345 - RNA, 19 nt, Human
cagaaccggagagccagcu

SEQ ID NO: 1293346 - RNA, 15 nt, Human
cagaacuagaauuug

SEQ ID NO: 1293347 - RNA, 20 nt, Human
cagaacucaaauggggccag

SEQ ID NO: 1293348 - RNA, 21 nt, Human
cagaacucaaauggggccaga

SEQ ID NO: 1293349 - RNA, 22 nt, Human
cagaacucaaauggggccagau

SEQ ID NO: 1293350 - RNA, 14 nt, Human
cagaacucuuucaa

SEQ ID NO: 1293351 - RNA, 15 nt, Human
cagaacucuuucaaa

SEQ ID NO: 1293352 - RNA, 16 nt, Human
cagaacucuuucaaaa

SEQ ID NO: 1293353 - RNA, 13 nt, Human
cagaacuucagaa

SEQ ID NO: 1293354 - RNA, 16 nt, Human
cagaacuucagaaaga

SEQ ID NO: 1293355 - RNA, 17 nt, Human
cagaacuucagaaagac

SEQ ID NO: 1293356 - RNA, 19 nt, Human
cagaacuucagaaagacuu

SEQ ID NO: 1293357 - RNA, 20 nt, Human
cagaacuucagaaagacuug

SEQ ID NO: 1293358 - RNA, 21 nt, Human
cagaacuugacccugagcuga

SEQ ID NO: 1293359 - RNA, 19 nt, Human
cagaacuugugcccucccu

SEQ ID NO: 1293360 - RNA, 14 nt, Human
cagaagaaacaagg

SEQ ID NO: 1293361 - RNA, 20 nt, Human
cagaagcaacccaaauguuc

SEQ ID NO: 1293362 - RNA, 19 nt, Human
cagaagcaacccaaauguu

SEQ ID NO: 1293363 - RNA, 14 nt, Human
cagaagaugacuga

SEQ ID NO: 1293364 - RNA, 22 nt, Human
cagaaggaaggcagggaggagg

SEQ ID NO: 1293365 - RNA, 20 nt, Human
cagaaggaaggcagggagga

SEQ ID NO: 1293366 - RNA, 15 nt, Human
cagaaggaaggcagg

SEQ ID NO: 1293367 - RNA, 11 nt, Human
cagaaggaagg

SEQ ID NO: 1293368 - RNA, 18 nt, Human
cagaaggcaaacccauca

SEQ ID NO: 1293369 - RNA, 21 nt, Human
cagaagcucccccagcaaagc

SEQ ID NO: 1293370 - RNA, 23 nt, Human
cagaagcucccccagcaaagccc

SEQ ID NO: 1293371 - RNA, 18 nt, Human
cagaagccugaugcugac

SEQ ID NO: 1293372 - RNA, 12 nt, Human
cagaagccuggg

SEQ ID NO: 1293373 - RNA, 13 nt, Human
cagaagccugggg

SEQ ID NO: 1293374 - RNA, 14 nt, Human
cagaagccuggggg

SEQ ID NO: 1293375 - RNA, 19 nt, Human
cagaagccugggggccugg

SEQ ID NO: 1293376 - RNA, 20 nt, Human
cagaagccugggggccuggc

SEQ ID NO: 1293377 - RNA, 21 nt, Human
cagaagccugggggccuggcu

SEQ ID NO: 1293378 - RNA, 22 nt, Human
cagaagccugggggccuggcug

SEQ ID NO: 1293379 - RNA, 23 nt, Human
cagaagccugggggccuggcugg

SEQ ID NO: 1293380 - RNA, 24 nt, Human
cagaagccugggggccuggcuggc

SEQ ID NO: 1293381 - RNA, 15 nt, Human
cagaagcucccccag

SEQ ID NO: 1293382 - RNA, 16 nt, Human
cagaagcucccccagc

SEQ ID NO: 1293383 - RNA, 17 nt, Human
cagaagcucccccagca

SEQ ID NO: 1293384 - RNA, 18 nt, Human
cagaagcucccccagcaa

SEQ ID NO: 1293385 - RNA, 19 nt, Human
cagaagcucccccagcaaa

SEQ ID NO: 1293386 - RNA, 15 nt, Human
cagaaguaccagacu

SEQ ID NO: 1293387 - RNA, 16 nt, Human
cagaaguaccagacua

SEQ ID NO: 1293388 - RNA, 20 nt, Human
cagaaguaccagacuagaug

SEQ ID NO: 1293389 - RNA, 14 nt, Human
cagaagucaucuug

SEQ ID NO: 1293390 - RNA, 16 nt, Human
cagaagucaucuugcu

SEQ ID NO: 1293391 - RNA, 17 nt, Human
cagaagucaucuugcua

SEQ ID NO: 1293392 - RNA, 20 nt, Human
cagaagucaucuugcuacca

SEQ ID NO: 1293393 - RNA, 22 nt, Human
cagaagucaucuugcuaccagu

SEQ ID NO: 1293394 - RNA, 13 nt, Human
cagaagggagggc

SEQ ID NO: 1293395 - RNA, 15 nt, Human
cagaagggagggcag

SEQ ID NO: 1293396 - RNA, 16 nt, Human
cagaagggagggcaga

SEQ ID NO: 1293397 - RNA, 17 nt, Human
cagaagggagggcagag

SEQ ID NO: 1293398 - RNA, 19 nt, Human
cagaagggagggcagagcu

SEQ ID NO: 1293399 - RNA, 21 nt, Human
cagaagggagggcagagcugg

SEQ ID NO: 1293400 - RNA, 22 nt, Human
cagaagggagggcagagcuggu

SEQ ID NO: 1293401 - RNA, 23 nt, Human
cagaagggagggcagagcuggug

SEQ ID NO: 1293402 - RNA, 17 nt, Human
cagaaggggagauggac

SEQ ID NO: 1293403 - RNA, 15 nt, Human
cagaagggggucucu

SEQ ID NO: 1293404 - RNA, 23 nt, Human
cagaagguugcucuagauugaga

SEQ ID NO: 1293405 - RNA, 23 nt, Human
cagagaauuucuaccauuucaga

SEQ ID NO: 1293406 - RNA, 15 nt, Human
cagaaaacaaaacug

SEQ ID NO: 1293407 - RNA, 16 nt, Human
cacucguguguuucua

SEQ ID NO: 1293408 - RNA, 15 nt, Human
cacucguguguuucu

SEQ ID NO: 1293409 - RNA, 13 nt, Human
cacucuaaagcaa

SEQ ID NO: 1293410 - RNA, 20 nt, Human
cacucgcuagcaguggcagg

SEQ ID NO: 1293411 - RNA, 13 nt, Human
cacucgucucccc

SEQ ID NO: 1293412 - RNA, 14 nt, Human
cacucgucuccccc

SEQ ID NO: 1293413 - RNA, 16 nt, Human
cacucgucucccccaa

SEQ ID NO: 1293414 - RNA, 19 nt, Human
cacucgaggucgggcagca

SEQ ID NO: 1293415 - RNA, 15 nt, Human
cacuccuuuuaaaga

SEQ ID NO: 1293416 - RNA, 13 nt, Human
cacucgacaugaa

SEQ ID NO: 1293417 - RNA, 15 nt, Human
cacuccuuccugccc

SEQ ID NO: 1293418 - RNA, 17 nt, Human
cacuccuuccugcccca

SEQ ID NO: 1293419 - RNA, 21 nt, Human
cacuccuuccugccccaacuc

SEQ ID NO: 1293420 - RNA, 16 nt, Human
cacucgcuagcagugg

SEQ ID NO: 1293421 - RNA, 21 nt, Human
cacucgcuagcaguggcaggc

SEQ ID NO: 1293422 - RNA, 12 nt, Human
cacuccuuccug

SEQ ID NO: 1293423 - RNA, 13 nt, Human
cacuccuuccugc

SEQ ID NO: 1293424 - RNA, 14 nt, Human
cacuccuuccugcc

SEQ ID NO: 1293425 - RNA, 19 nt, Human
cacucuagucaaugacaug

SEQ ID NO: 1293426 - RNA, 14 nt, Human
cacucuacuuagca

SEQ ID NO: 1293427 - RNA, 11 nt, Human
cacucuagauu

SEQ ID NO: 1293428 - RNA, 14 nt, Human
cacucuagauucca

SEQ ID NO: 1293429 - RNA, 18 nt, Human
cacucuagguuuuacaga

SEQ ID NO: 1293430 - RNA, 18 nt, Human
cacucuagucaaugacau

SEQ ID NO: 1293431 - RNA, 20 nt, Human
cacucuagucaaugacauga

SEQ ID NO: 1293432 - RNA, 16 nt, Human
cacucugaguguuuua

SEQ ID NO: 1293433 - RNA, 12 nt, Human
cacucugcucug

SEQ ID NO: 1293434 - RNA, 13 nt, Human
cacucugcucuga

SEQ ID NO: 1293435 - RNA, 14 nt, Human
cacucugcucugau

SEQ ID NO: 1293436 - RNA, 15 nt, Human
cacucugcucugaug

SEQ ID NO: 1293437 - RNA, 16 nt, Human
cacucugcucugaugc

SEQ ID NO: 1293438 - RNA, 12 nt, Human
cacucuggcagc

SEQ ID NO: 1293439 - RNA, 13 nt, Human
cacucuggcagcc

SEQ ID NO: 1293440 - RNA, 14 nt, Human
cacucuggcagcca

SEQ ID NO: 1293441 - RNA, 15 nt, Human
cacucuggcagccac

SEQ ID NO: 1293442 - RNA, 16 nt, Human
cacucuggcagccaca

SEQ ID NO: 1293443 - RNA, 17 nt, Human
cacucugcucugaugca

SEQ ID NO: 1293444 - RNA, 12 nt, Human
cacucugcuguu

SEQ ID NO: 1293445 - RNA, 12 nt, Human
cacucugcuucu

SEQ ID NO: 1293446 - RNA, 13 nt, Human
cacucugcuucuc

SEQ ID NO: 1293447 - RNA, 14 nt, Human
cacucugcuucucu

SEQ ID NO: 1293448 - RNA, 15 nt, Human
cacucugcuucucug

SEQ ID NO: 1293449 - RNA, 16 nt, Human
cacucugcuucucuga

SEQ ID NO: 1293450 - RNA, 17 nt, Human
cacucugcuucucugac

SEQ ID NO: 1293451 - RNA, 18 nt, Human
cacucugcuucucugacu

SEQ ID NO: 1293452 - RNA, 19 nt, Human
cacucugcuucucugacuu

SEQ ID NO: 1293453 - RNA, 21 nt, Human
cacucugcuucucugacuucu

SEQ ID NO: 1293454 - RNA, 16 nt, Human
cacucugcuuguuauu

SEQ ID NO: 1293455 - RNA, 13 nt, Human
cacucccucacaa

SEQ ID NO: 1293456 - RNA, 14 nt, Human
cacucccuccuaac

SEQ ID NO: 1293457 - RNA, 13 nt, Human
cacucccuugggc

SEQ ID NO: 1293458 - RNA, 16 nt, Human
cacucccuugggcucc

SEQ ID NO: 1293459 - RNA, 20 nt, Human
cacucccuugggcucccugu

SEQ ID NO: 1293460 - RNA, 13 nt, Human
cacuccuaccugg

SEQ ID NO: 1293461 - RNA, 14 nt, Human
cacuccuaccuggu

SEQ ID NO: 1293462 - RNA, 19 nt, Human
cacuccgagaggugggcca

SEQ ID NO: 1293463 - RNA, 12 nt, Human
cacuccucugac

SEQ ID NO: 1293464 - RNA, 13 nt, Human
cacuccucugacu

SEQ ID NO: 1293465 - RNA, 20 nt, Human
cacuccucugacucagggcu

SEQ ID NO: 1293466 - RNA, 21 nt, Human
cacuccucugacucagggcuc

SEQ ID NO: 1293467 - RNA, 23 nt, Human
cacuccucugacucagggcuccu

SEQ ID NO: 1293468 - RNA, 13 nt, Human
cacuccucugcug

SEQ ID NO: 1293469 - RNA, 14 nt, Human
cacuccucugcuga

SEQ ID NO: 1293470 - RNA, 16 nt, Human
cacuccucugcugacc

SEQ ID NO: 1293471 - RNA, 18 nt, Human
cacuccucugcugaccug

SEQ ID NO: 1293472 - RNA, 21 nt, Human
cacuccucugcugaccugcug

SEQ ID NO: 1293473 - RNA, 22 nt, Human
cacuccucugcugaccugcuga

SEQ ID NO: 1293474 - RNA, 18 nt, Human
cacucagucucucuucuc

SEQ ID NO: 1293475 - RNA, 18 nt, Human
cacucagccacccugagu

SEQ ID NO: 1293476 - RNA, 22 nt, Human
cacucaugugacucuuuccaac

SEQ ID NO: 1293477 - RNA, 16 nt, Human
cacucaugugacucuu

SEQ ID NO: 1293478 - RNA, 19 nt, Human
cacucaugcauuguccucu

SEQ ID NO: 1293479 - RNA, 20 nt, Human
cacucaucaauggggccagu

SEQ ID NO: 1293480 - RNA, 17 nt, Human
cacucaugcauuguccu

SEQ ID NO: 1293481 - RNA, 18 nt, Human
cacucaugcauuguccuc

SEQ ID NO: 1293482 - RNA, 17 nt, Human
cacuaagagagaaugag

SEQ ID NO: 1293483 - RNA, 14 nt, Human
cacuaaccuugccu

SEQ ID NO: 1293484 - RNA, 23 nt, Human
cacuaaccuugccugguacagua

SEQ ID NO: 1293485 - RNA, 21 nt, Human
cacuaacgguugaguuuugac

SEQ ID NO: 1293486 - RNA, 20 nt, Human
cacuaacguugagccccugg

SEQ ID NO: 1293487 - RNA, 16 nt, Human
cacuaacaugauuugg

SEQ ID NO: 1293488 - RNA, 21 nt, Human
cacuaaauugacacuuaaaaa

SEQ ID NO: 1293489 - RNA, 14 nt, Human
cacuaacagagugg

SEQ ID NO: 1293490 - RNA, 22 nt, Human
cacuaaccaagcugaguuuccu

SEQ ID NO: 1293491 - RNA, 23 nt, Human
cacuaaccaagcugaguuuccua

SEQ ID NO: 1293492 - RNA, 19 nt, Human
cacuaguauuucuaugaaa

SEQ ID NO: 1293493 - RNA, 18 nt, Human
cacuaucccggcugcccu

SEQ ID NO: 1293494 - RNA, 19 nt, Human
cacuaucccggcugcccuu

SEQ ID NO: 1293495 - RNA, 14 nt, Human
cacuaucuuucagc

SEQ ID NO: 1293496 - RNA, 21 nt, Human
cacucaaggcggugcuugaua

SEQ ID NO: 1293497 - RNA, 11 nt, Human
cacucaaggcg

SEQ ID NO: 1293498 - RNA, 17 nt, Human
cacucaaggcggugcuu

SEQ ID NO: 1293499 - RNA, 19 nt, Human
cacucaaggcggugcuuga

SEQ ID NO: 1293500 - RNA, 17 nt, Human
cacucacaacagcugcc

SEQ ID NO: 1293501 - RNA, 12 nt, Human
cacucaccugca

SEQ ID NO: 1293502 - RNA, 16 nt, Human
cacucacuaggccccc

SEQ ID NO: 1293503 - RNA, 17 nt, Human
cacucacuaggccccca

SEQ ID NO: 1293504 - RNA, 22 nt, Human
cacucacuaggcccccacuugc

SEQ ID NO: 1293505 - RNA, 13 nt, Human
cacucagaagccu

SEQ ID NO: 1293506 - RNA, 14 nt, Human
cacucagaagccug

SEQ ID NO: 1293507 - RNA, 15 nt, Human
cacucagaagccugg

SEQ ID NO: 1293508 - RNA, 16 nt, Human
cacucagaagccuggg

SEQ ID NO: 1293509 - RNA, 17 nt, Human
cacucagaagccugggg

SEQ ID NO: 1293510 - RNA, 19 nt, Human
cacucagaagccugggggc

SEQ ID NO: 1293511 - RNA, 22 nt, Human
cacucagaagccugggggccug

SEQ ID NO: 1293512 - RNA, 12 nt, Human
cacucagaccug

SEQ ID NO: 1293513 - RNA, 23 nt, Human
cacucagaagccugggggccugg

SEQ ID NO: 1293514 - RNA, 15 nt, Human
cacucagagacaugc

SEQ ID NO: 1293515 - RNA, 16 nt, Human
cacucagagacaugca

SEQ ID NO: 1293516 - RNA, 18 nt, Human
cacucagagacaugcaga

SEQ ID NO: 1293517 - RNA, 20 nt, Human
cacucagagacaugcagaga

SEQ ID NO: 1293518 - RNA, 12 nt, Human
cacucagcacaa

SEQ ID NO: 1293519 - RNA, 13 nt, Human
cacucagcacaag

SEQ ID NO: 1293520 - RNA, 15 nt, Human
cacucagcacaaggc

SEQ ID NO: 1293521 - RNA, 22 nt, Human
cacucagcacaaggccaucugg

SEQ ID NO: 1293522 - RNA, 18 nt, Human
cacucagauccuccucau

SEQ ID NO: 1293523 - RNA, 17 nt, Human
cacucagcacuuggccc

SEQ ID NO: 1293524 - RNA, 16 nt, Human
cacucagccacccuga

SEQ ID NO: 1293525 - RNA, 17 nt, Human
cacucagccacccugag

SEQ ID NO: 1293526 - RNA, 13 nt, Human
cacuaaacaaaga

SEQ ID NO: 1293527 - RNA, 19 nt, Human
cacuaaaacacacaggugc

SEQ ID NO: 1293528 - RNA, 21 nt, Human
cacuaaagcaggccuuuugau

SEQ ID NO: 1293529 - RNA, 16 nt, Human
cacgugggcucauaug

SEQ ID NO: 1293530 - RNA, 18 nt, Human
cacgugguaaaacacuug

SEQ ID NO: 1293531 - RNA, 22 nt, Human
cacguucuuacuaguuucccuu

SEQ ID NO: 1293532 - RNA, 15 nt, Human
cacguguguuuuucu

SEQ ID NO: 1293533 - RNA, 17 nt, Human
cacguguguuuuucuau

SEQ ID NO: 1293534 - RNA, 18 nt, Human
cacguguguuuuucuauu

SEQ ID NO: 1293535 - RNA, 19 nt, Human
cacguguguuuuucuauua

SEQ ID NO: 1293536 - RNA, 20 nt, Human
cacguguguuuuucuauuaa

SEQ ID NO: 1293537 - RNA, 22 nt, Human
cacguguguuuuucuauuaaaa

SEQ ID NO: 1293538 - RNA, 16 nt, Human
cacguguuugugcugu

SEQ ID NO: 1293539 - RNA, 23 nt, Human
cacguguguuuuucuauuaaaag

SEQ ID NO: 1293540 - RNA, 20 nt, Human
cacgucaaaugcauacaagu

SEQ ID NO: 1293541 - RNA, 13 nt, Human
cacguccugagaa

SEQ ID NO: 1293542 - RNA, 19 nt, Human
cacguccugagaaagcuca

SEQ ID NO: 1293543 - RNA, 13 nt, Human
cacgugacagccg

SEQ ID NO: 1293544 - RNA, 14 nt, Human
cacgugacacaaac

SEQ ID NO: 1293545 - RNA, 17 nt, Human
cacgugacacaaacaca

SEQ ID NO: 1293546 - RNA, 12 nt, Human
cacguggccucu

SEQ ID NO: 1293547 - RNA, 13 nt, Human
cacguggccucuu

SEQ ID NO: 1293548 - RNA, 17 nt, Human
cacguggccucuugagc

SEQ ID NO: 1293549 - RNA, 18 nt, Human
cacguggccucuugagca

SEQ ID NO: 1293550 - RNA, 20 nt, Human
cacguggccucuugagcagu

SEQ ID NO: 1293551 - RNA, 23 nt, Human
cacguggccucuugagcaguggc

SEQ ID NO: 1293552 - RNA, 15 nt, Human
cacgggggccaagga

SEQ ID NO: 1293553 - RNA, 22 nt, Human
cacggucggggcaucuggccug

SEQ ID NO: 1293554 - RNA, 20 nt, Human
cacggcuccucgagauccca

SEQ ID NO: 1293555 - RNA, 22 nt, Human
cacggcuccucgagaucccaac

SEQ ID NO: 1293556 - RNA, 17 nt, Human
cacggcucuguccccag

SEQ ID NO: 1293557 - RNA, 18 nt, Human
cacggcucuguccccagc

SEQ ID NO: 1293558 - RNA, 19 nt, Human
cacggcucuguccccagcc

SEQ ID NO: 1293559 - RNA, 20 nt, Human
cacggcucuguccccagccu

SEQ ID NO: 1293560 - RNA, 21 nt, Human
cacggcucuguccccagccug

SEQ ID NO: 1293561 - RNA, 17 nt, Human
cacggcugcgcacugug

SEQ ID NO: 1293562 - RNA, 16 nt, Human
cacggcugcgcacugu

SEQ ID NO: 1293563 - RNA, 14 nt, Human
cacgggccugucca

SEQ ID NO: 1293564 - RNA, 17 nt, Human
cacgggccuguccacag

SEQ ID NO: 1293565 - RNA, 18 nt, Human
cacgggccuguccacagg

SEQ ID NO: 1293566 - RNA, 24 nt, Human
cacgggccuguccacaggcuucug

SEQ ID NO: 1293567 - RNA, 14 nt, Human
cacgcuccuuccuc

SEQ ID NO: 1293568 - RNA, 19 nt, Human
cacgcucucuccaggcagg

SEQ ID NO: 1293569 - RNA, 23 nt, Human
cacgcucucuccaggcaggucug

SEQ ID NO: 1293570 - RNA, 16 nt, Human
cacgccuggcuaauuu

SEQ ID NO: 1293571 - RNA, 16 nt, Human
cacgcuagggcuggcu

SEQ ID NO: 1293572 - RNA, 12 nt, Human
cacgcuccagcu

SEQ ID NO: 1293573 - RNA, 13 nt, Human
cacgcuccagcug

SEQ ID NO: 1293574 - RNA, 14 nt, Human
cacgcuccagcugc

SEQ ID NO: 1293575 - RNA, 15 nt, Human
cacgcuccagcugcc

SEQ ID NO: 1293576 - RNA, 19 nt, Human
cacgcuccagcugccccgg

SEQ ID NO: 1293577 - RNA, 18 nt, Human
cacgcuccagcugccccg

SEQ ID NO: 1293578 - RNA, 13 nt, Human
cacgcacggcagc

SEQ ID NO: 1293579 - RNA, 15 nt, Human
cacgcaugcaguguu

SEQ ID NO: 1293580 - RNA, 11 nt, Human
cacgccacagc

SEQ ID NO: 1293581 - RNA, 12 nt, Human
cacgccacagcc

SEQ ID NO: 1293582 - RNA, 13 nt, Human
cacgccacagccc

SEQ ID NO: 1293583 - RNA, 14 nt, Human
cacgccacagcccu

SEQ ID NO: 1293584 - RNA, 14 nt, Human
cacgcccguccugc

SEQ ID NO: 1293585 - RNA, 15 nt, Human
cacgcccguccugcc

SEQ ID NO: 1293586 - RNA, 16 nt, Human
cacgcccguccugccu

SEQ ID NO: 1293587 - RNA, 19 nt, Human
cacgcccguccugccugug

SEQ ID NO: 1293588 - RNA, 20 nt, Human
cacgcccguccugccugugg

SEQ ID NO: 1293589 - RNA, 21 nt, Human
cacgcccguccugccuguggc

SEQ ID NO: 1293590 - RNA, 16 nt, Human
cacgcaccugccucag

SEQ ID NO: 1293591 - RNA, 12 nt, Human
cacgcaccugcc

SEQ ID NO: 1293592 - RNA, 15 nt, Human
cacgcaccugccuca

SEQ ID NO: 1293593 - RNA, 17 nt, Human
cacgacuggccagggcc

SEQ ID NO: 1293594 - RNA, 20 nt, Human
cacgagcuguuuacuaggga

SEQ ID NO: 1293595 - RNA, 22 nt, Human
cacgaggaaucugugggucugg

SEQ ID NO: 1293596 - RNA, 23 nt, Human
cacgaggaaucugugggucuggg

SEQ ID NO: 1293597 - RNA, 11 nt, Human
cacgagggcug

SEQ ID NO: 1293598 - RNA, 12 nt, Human
cacgagggcugg

SEQ ID NO: 1293599 - RNA, 13 nt, Human
cacgagggcuggc

SEQ ID NO: 1293600 - RNA, 17 nt, Human
cacgagggcuggcuggc

SEQ ID NO: 1293601 - RNA, 21 nt, Human
cacgagggcuggcuggccuca

SEQ ID NO: 1293602 - RNA, 22 nt, Human
cacgagggcuggcuggccucac

SEQ ID NO: 1293603 - RNA, 22 nt, Human
caccuguggaacauaaaaagga

SEQ ID NO: 1293604 - RNA, 19 nt, Human
caccugugcuucgggcccu

SEQ ID NO: 1293605 - RNA, 22 nt, Human
caccugucugucugucuguccc

SEQ ID NO: 1293606 - RNA, 16 nt, Human
caccugucugucuguc

SEQ ID NO: 1293607 - RNA, 22 nt, Human
caccuuagccugcccuccuuuc

SEQ ID NO: 1293608 - RNA, 20 nt, Human
caccuuagaccaccaagccu

SEQ ID NO: 1293609 - RNA, 21 nt, Human
caccuuagaccaccaagccuu

SEQ ID NO: 1293610 - RNA, 13 nt, Human
caccuuagcuggc

SEQ ID NO: 1293611 - RNA, 14 nt, Human
caccuuagaccacc

SEQ ID NO: 1293612 - RNA, 18 nt, Human
caccuuagaccaccaagc

SEQ ID NO: 1293613 - RNA, 19 nt, Human
caccuuagaccaccaagcc

SEQ ID NO: 1293614 - RNA, 23 nt, Human
caccuuagaccaccaagccuuga

SEQ ID NO: 1293615 - RNA, 19 nt, Human
caccuucaccuucauccau

SEQ ID NO: 1293616 - RNA, 14 nt, Human
caccuuccagcucc

SEQ ID NO: 1293617 - RNA, 15 nt, Human
caccuuccagcuccu

SEQ ID NO: 1293618 - RNA, 16 nt, Human
caccuuccagcuccug

SEQ ID NO: 1293619 - RNA, 18 nt, Human
caccuuccagcuccugua

SEQ ID NO: 1293620 - RNA, 18 nt, Human
caccuucccacuuuccca

SEQ ID NO: 1293621 - RNA, 13 nt, Human
caccuucccaugc

SEQ ID NO: 1293622 - RNA, 14 nt, Human
caccuucccaugcc

SEQ ID NO: 1293623 - RNA, 12 nt, Human
caccuucugagu

SEQ ID NO: 1293624 - RNA, 15 nt, Human
cacgacacugcagcc

SEQ ID NO: 1293625 - RNA, 15 nt, Human
cacgaccgccccagu

SEQ ID NO: 1293626 - RNA, 14 nt, Human
cacgacaguggaug

SEQ ID NO: 1293627 - RNA, 16 nt, Human
cacgacuggccagggc

SEQ ID NO: 1293628 - RNA, 13 nt, Human
cacgacugucucc

SEQ ID NO: 1293629 - RNA, 16 nt, Human
cacgacugucuccaug

SEQ ID NO: 1293630 - RNA, 16 nt, Human
cacugaugcuuagaug

SEQ ID NO: 1293631 - RNA, 14 nt, Human
cacugcaaccucug

SEQ ID NO: 1293632 - RNA, 19 nt, Human
cacugcaaccuccaccucg

SEQ ID NO: 1293633 - RNA, 17 nt, Human
cacugcaaccuccaccu

SEQ ID NO: 1293634 - RNA, 14 nt, Human
cacugcaaccucca

SEQ ID NO: 1293635 - RNA, 14 nt, Human
cacugcaaccuccg

SEQ ID NO: 1293636 - RNA, 19 nt, Human
cacugauguuguguuuuua

SEQ ID NO: 1293637 - RNA, 13 nt, Human
cacugcaaccucc

SEQ ID NO: 1293638 - RNA, 21 nt, Human
cacugcaaaccgccaccuccc

SEQ ID NO: 1293639 - RNA, 20 nt, Human
cacugcaaaccgccaccucc

SEQ ID NO: 1293640 - RNA, 13 nt, Human
cacugcaacauga

SEQ ID NO: 1293641 - RNA, 14 nt, Human
cacugcaaccuucg

SEQ ID NO: 1293642 - RNA, 22 nt, Human
cacugcaaccuucgccaccugg

SEQ ID NO: 1293643 - RNA, 23 nt, Human
cacugcaaccuucgccaccuggg

SEQ ID NO: 1293644 - RNA, 19 nt, Human
cacugcaaccuccaccucc

SEQ ID NO: 1293645 - RNA, 18 nt, Human
cacugcacagugcaucuc

SEQ ID NO: 1293646 - RNA, 19 nt, Human
cacugcacagugcaucuca

SEQ ID NO: 1293647 - RNA, 21 nt, Human
cacugcacagugcaucucagc

SEQ ID NO: 1293648 - RNA, 22 nt, Human
cacugcacagugcaucucagcc

SEQ ID NO: 1293649 - RNA, 20 nt, Human
cacugcaaucuccaccuccc

SEQ ID NO: 1293650 - RNA, 20 nt, Human
cacugcaauuggcaccgaag

SEQ ID NO: 1293651 - RNA, 18 nt, Human
cacugcacaauaacuccu

SEQ ID NO: 1293652 - RNA, 22 nt, Human
cacugcacaauaacuccuccca

SEQ ID NO: 1293653 - RNA, 23 nt, Human
cacugcacaauaacuccucccag

SEQ ID NO: 1293654 - RNA, 15 nt, Human
cacugagaccaaggc

SEQ ID NO: 1293655 - RNA, 23 nt, Human
cacugagaccccaggcuguuagg

SEQ ID NO: 1293656 - RNA, 17 nt, Human
cacugagaccaaggcuu

SEQ ID NO: 1293657 - RNA, 21 nt, Human
cacugagaggacagagagaaa

SEQ ID NO: 1293658 - RNA, 22 nt, Human
cacugagaggacagagagaaau

SEQ ID NO: 1293659 - RNA, 18 nt, Human
cacugagauaccagcgag

SEQ ID NO: 1293660 - RNA, 19 nt, Human
cacugagauaccagcgagg

SEQ ID NO: 1293661 - RNA, 23 nt, Human
cacugagauaccagcgaggaggc

SEQ ID NO: 1293662 - RNA, 19 nt, Human
cacugagcacuguuuucua

SEQ ID NO: 1293663 - RNA, 22 nt, Human
cacugagcacuguuuucuagug

SEQ ID NO: 1293664 - RNA, 18 nt, Human
cacugagcacuguuuucu

SEQ ID NO: 1293665 - RNA, 17 nt, Human
cacugagcacuguuuuc

SEQ ID NO: 1293666 - RNA, 16 nt, Human
cacugagcacuguuuu

SEQ ID NO: 1293667 - RNA, 15 nt, Human
cacugagcacuguuu

SEQ ID NO: 1293668 - RNA, 13 nt, Human
cacugagcacugu

SEQ ID NO: 1293669 - RNA, 20 nt, Human
cacugagcaacgcuauucca

SEQ ID NO: 1293670 - RNA, 19 nt, Human
cacugaugcugccccucau

SEQ ID NO: 1293671 - RNA, 15 nt, Human
cacugaugcuuagau

SEQ ID NO: 1293672 - RNA, 12 nt, Human
cacugaugcugc

SEQ ID NO: 1293673 - RNA, 17 nt, Human
cacugaugcugccccuc

SEQ ID NO: 1293674 - RNA, 14 nt, Human
cacugagggcaguc

SEQ ID NO: 1293675 - RNA, 20 nt, Human
cacugaggggggauccaguu

SEQ ID NO: 1293676 - RNA, 15 nt, Human
cacugaguuuuccau

SEQ ID NO: 1293677 - RNA, 21 nt, Human
cacugaguuuuccauggcagg

SEQ ID NO: 1293678 - RNA, 20 nt, Human
cacugauauaucaugaguga

SEQ ID NO: 1293679 - RNA, 22 nt, Human
cacugaguuuuccauggcagga

SEQ ID NO: 1293680 - RNA, 18 nt, Human
cacucuggcagccacacu

SEQ ID NO: 1293681 - RNA, 13 nt, Human
cacucuguaauug

SEQ ID NO: 1293682 - RNA, 14 nt, Human
cacucuguaauuga

SEQ ID NO: 1293683 - RNA, 23 nt, Human
cacucuguaauugaauauuauuc

SEQ ID NO: 1293684 - RNA, 20 nt, Human
cacucuguaauugcaaaaaa

SEQ ID NO: 1293685 - RNA, 14 nt, Human
cacugacugggacc

SEQ ID NO: 1293686 - RNA, 13 nt, Human
cacugaccagaac

SEQ ID NO: 1293687 - RNA, 14 nt, Human
cacugaccagaacu

SEQ ID NO: 1293688 - RNA, 15 nt, Human
cacugaccagaacua

SEQ ID NO: 1293689 - RNA, 17 nt, Human
cacucuguaauugcaaa

SEQ ID NO: 1293690 - RNA, 20 nt, Human
cacugacugggaccaggcac

SEQ ID NO: 1293691 - RNA, 20 nt, Human
cacugccuucucaacuccaa

SEQ ID NO: 1293692 - RNA, 18 nt, Human
cacugccuucgcuucuug

SEQ ID NO: 1293693 - RNA, 19 nt, Human
cacugccuucgcuucuugc

SEQ ID NO: 1293694 - RNA, 21 nt, Human
cacugccuucgcuucuugccu

SEQ ID NO: 1293695 - RNA, 23 nt, Human
cacugccuucgcuucuugccucu

SEQ ID NO: 1293696 - RNA, 12 nt, Human
cacugccuuuga

SEQ ID NO: 1293697 - RNA, 20 nt, Human
cacugccuucgauacaccgg

SEQ ID NO: 1293698 - RNA, 22 nt, Human
cacugccuucgauacaccgggc

SEQ ID NO: 1293699 - RNA, 19 nt, Human
cacugccugcucccauccu

SEQ ID NO: 1293700 - RNA, 20 nt, Human
cacugccugcucccauccug

SEQ ID NO: 1293701 - RNA, 21 nt, Human
cacugccugcucccauccugu

SEQ ID NO: 1293702 - RNA, 13 nt, Human
cacugccugcucc

SEQ ID NO: 1293703 - RNA, 14 nt, Human
cacugccugcuccc

SEQ ID NO: 1293704 - RNA, 20 nt, Human
cacugcucugaugaagagga

SEQ ID NO: 1293705 - RNA, 20 nt, Human
cacugcugauauuuucucua

SEQ ID NO: 1293706 - RNA, 15 nt, Human
cacugcugcccagcc

SEQ ID NO: 1293707 - RNA, 17 nt, Human
cacugcugcccagccuc

SEQ ID NO: 1293708 - RNA, 17 nt, Human
cacugcuggagaggccc

SEQ ID NO: 1293709 - RNA, 13 nt, Human
cacugcucacacu

SEQ ID NO: 1293710 - RNA, 15 nt, Human
cacugcucuaacagc

SEQ ID NO: 1293711 - RNA, 18 nt, Human
cacugcucuaacagcccu

SEQ ID NO: 1293712 - RNA, 19 nt, Human
cacugcucuaacagcccuc

SEQ ID NO: 1293713 - RNA, 23 nt, Human
cacugcacagugcaucucagccc

SEQ ID NO: 1293714 - RNA, 21 nt, Human
cacugccauuaaagaauauga

SEQ ID NO: 1293715 - RNA, 17 nt, Human
cacugcccauggacagg

SEQ ID NO: 1293716 - RNA, 18 nt, Human
cacugcccauggacaggc

SEQ ID NO: 1293717 - RNA, 17 nt, Human
cacugcccccugcugcc

SEQ ID NO: 1293718 - RNA, 19 nt, Human
cacugcccccugcugccau

SEQ ID NO: 1293719 - RNA, 20 nt, Human
cacugcccccugcugccaug

SEQ ID NO: 1293720 - RNA, 16 nt, Human
cacugccucuuccucc

SEQ ID NO: 1293721 - RNA, 19 nt, Human
cacugcccugguggcccuc

SEQ ID NO: 1293722 - RNA, 12 nt, Human
cacugcuggcug

SEQ ID NO: 1293723 - RNA, 13 nt, Human
cacugcuggcugc

SEQ ID NO: 1293724 - RNA, 14 nt, Human
cacugcuggcugcc

SEQ ID NO: 1293725 - RNA, 15 nt, Human
cacugcuggcugccu

SEQ ID NO: 1293726 - RNA, 16 nt, Human
cacugcuggcugccuu

SEQ ID NO: 1293727 - RNA, 21 nt, Human
cacugcuggcugccuuagaac

SEQ ID NO: 1293728 - RNA, 18 nt, Human
cacugcuguuauauuuca

SEQ ID NO: 1293729 - RNA, 21 nt, Human
cacugcuguuauauuucauca

SEQ ID NO: 1293730 - RNA, 17 nt, Human
cacugcuuccauuuaau

SEQ ID NO: 1293731 - RNA, 17 nt, Human
cacugcuugaacuaggc

SEQ ID NO: 1293732 - RNA, 13 nt, Human
cacugcuugagga

SEQ ID NO: 1293733 - RNA, 14 nt, Human
cacugcuugaggaa

SEQ ID NO: 1293734 - RNA, 20 nt, Human
cacugcuugaggaaaacaag

SEQ ID NO: 1293735 - RNA, 15 nt, Human
cacugcuugaggaaa

SEQ ID NO: 1293736 - RNA, 20 nt, Human
cacugcuugaacuaggcuga

SEQ ID NO: 1293737 - RNA, 13 nt, Human
cacugcuuuuccc

SEQ ID NO: 1293738 - RNA, 21 nt, Human
cacugcuuuucccuuugugag

SEQ ID NO: 1293739 - RNA, 15 nt, Human
cacuggacucaccuc

SEQ ID NO: 1293740 - RNA, 16 nt, Human
cacuggaccacugggc

SEQ ID NO: 1293741 - RNA, 18 nt, Human
cacuggacucaccucccc

SEQ ID NO: 1293742 - RNA, 19 nt, Human
cacuggagacgcauaugag

SEQ ID NO: 1293743 - RNA, 10 nt, Human
cacuggagca

SEQ ID NO: 1293744 - RNA, 13 nt, Human
cacuggagcacaa

SEQ ID NO: 1293745 - RNA, 12 nt, Human
cacuggagcaca

SEQ ID NO: 1293746 - RNA, 14 nt, Human
cacuggagcagaag

SEQ ID NO: 1293747 - RNA, 23 nt, Human
cacuggagcagaaggggagaugg

SEQ ID NO: 1293748 - RNA, 19 nt, Human
cacuggagcagaaggggag

SEQ ID NO: 1293749 - RNA, 19 nt, Human
cacuguacuugcucuugau

SEQ ID NO: 1293750 - RNA, 18 nt, Human
cacuguagaaugauuuca

SEQ ID NO: 1293751 - RNA, 18 nt, Human
cacuguacuugcucuuga

SEQ ID NO: 1293752 - RNA, 15 nt, Human
cacuguacuugcucu

SEQ ID NO: 1293753 - RNA, 17 nt, Human
cacuguagcucuaaaau

SEQ ID NO: 1293754 - RNA, 19 nt, Human
cacuguagcucuaaaaucu

SEQ ID NO: 1293755 - RNA, 19 nt, Human
cacuguaguaaauaaugcu

SEQ ID NO: 1293756 - RNA, 20 nt, Human
cacuguaguaaauaaugcuu

SEQ ID NO: 1293757 - RNA, 21 nt, Human
cacuguaguaaauaaugcuuu

SEQ ID NO: 1293758 - RNA, 22 nt, Human
cacuguaguaaauaaugcuuug

SEQ ID NO: 1293759 - RNA, 23 nt, Human
cacuguaguaaauaaugcuuuga

SEQ ID NO: 1293760 - RNA, 14 nt, Human
cacuguaguucuaa

SEQ ID NO: 1293761 - RNA, 15 nt, Human
cacuguaguucuaag

SEQ ID NO: 1293762 - RNA, 16 nt, Human
cacuguaguucuaaga

SEQ ID NO: 1293763 - RNA, 17 nt, Human
cacuguaguucuaagac

SEQ ID NO: 1293764 - RNA, 18 nt, Human
cacuguaguucuaagacu

SEQ ID NO: 1293765 - RNA, 20 nt, Human
cacuguaguucuaagacuca

SEQ ID NO: 1293766 - RNA, 14 nt, Human
cacuguauccaggu

SEQ ID NO: 1293767 - RNA, 15 nt, Human
cacuguaugagugga

SEQ ID NO: 1293768 - RNA, 13 nt, Human
cacuggcgaggag

SEQ ID NO: 1293769 - RNA, 16 nt, Human
cacuggccccacccuc

SEQ ID NO: 1293770 - RNA, 14 nt, Human
cacuggccccaccc

SEQ ID NO: 1293771 - RNA, 13 nt, Human
cacuggccccacc

SEQ ID NO: 1293772 - RNA, 13 nt, Human
cacuggccccuca

SEQ ID NO: 1293773 - RNA, 24 nt, Human
cacuggccccucaaaucguccagc

SEQ ID NO: 1293774 - RNA, 14 nt, Human
cacuggcucuccug

SEQ ID NO: 1293775 - RNA, 15 nt, Human
cacuggcucuccugg

SEQ ID NO: 1293776 - RNA, 21 nt, Human
cacuggcucuccuggcccugg

SEQ ID NO: 1293777 - RNA, 17 nt, Human
cacuggcucuccuggcc

SEQ ID NO: 1293778 - RNA, 12 nt, Human
cacuguaaaaug

SEQ ID NO: 1293779 - RNA, 13 nt, Human
cacuguaaaaugu

SEQ ID NO: 1293780 - RNA, 19 nt, Human
cacugucuuuaauucugua

SEQ ID NO: 1293781 - RNA, 18 nt, Human
cacugucuuuaauucugu

SEQ ID NO: 1293782 - RNA, 13 nt, Human
cacugugaaggac

SEQ ID NO: 1293783 - RNA, 14 nt, Human
cacugugaaggacc

SEQ ID NO: 1293784 - RNA, 14 nt, Human
cacuguacuaaccu

SEQ ID NO: 1293785 - RNA, 23 nt, Human
cacugugacccccagcuccggcc

SEQ ID NO: 1293786 - RNA, 17 nt, Human
cacugugaaggacccuu

SEQ ID NO: 1293787 - RNA, 15 nt, Human
cacugugaaggaccc

SEQ ID NO: 1293788 - RNA, 14 nt, Human
cacugugaccccca

SEQ ID NO: 1293789 - RNA, 15 nt, Human
cacugugacccccag

SEQ ID NO: 1293790 - RNA, 19 nt, Human
cacugugacccccagcucc

SEQ ID NO: 1293791 - RNA, 20 nt, Human
cacugugacccccagcuccg

SEQ ID NO: 1293792 - RNA, 22 nt, Human
cacugugacccccagcuccggc

SEQ ID NO: 1293793 - RNA, 21 nt, Human
cacugucaccacccugcucau

SEQ ID NO: 1293794 - RNA, 22 nt, Human
cacugucagcagggacuguaaa

SEQ ID NO: 1293795 - RNA, 12 nt, Human
cacugucccuug

SEQ ID NO: 1293796 - RNA, 17 nt, Human
cacugucccuugccuca

SEQ ID NO: 1293797 - RNA, 18 nt, Human
cacugucccuugccucaa

SEQ ID NO: 1293798 - RNA, 15 nt, Human
cacuguccugggccu

SEQ ID NO: 1293799 - RNA, 18 nt, Human
cacuguccugggccugca

SEQ ID NO: 1293800 - RNA, 22 nt, Human
cacuguggguagacacacauga

SEQ ID NO: 1293801 - RNA, 24 nt, Human
cacuguggguagacacacaugaag

SEQ ID NO: 1293802 - RNA, 17 nt, Human
cacuguguuccuuccgc

SEQ ID NO: 1293803 - RNA, 15 nt, Human
cacuguuaucaaaac

SEQ ID NO: 1293804 - RNA, 15 nt, Human
cacuguguuccuucc

SEQ ID NO: 1293805 - RNA, 17 nt, Human
cacuguucccccugugc

SEQ ID NO: 1293806 - RNA, 19 nt, Human
cacuguucccccugugcag

SEQ ID NO: 1293807 - RNA, 19 nt, Human
cacuguggguagacacaca

SEQ ID NO: 1293808 - RNA, 21 nt, Human
cacugugcuguuguuaugaug

SEQ ID NO: 1293809 - RNA, 23 nt, Human
cacugugcuguuguuaugaugug

SEQ ID NO: 1293810 - RNA, 20 nt, Human
cacugugcuguuguuaugau

SEQ ID NO: 1293811 - RNA, 19 nt, Human
cacugugcuguuguuauga

SEQ ID NO: 1293812 - RNA, 17 nt, Human
cacugugcuguuguuau

SEQ ID NO: 1293813 - RNA, 15 nt, Human
cacugugcuguuguu

SEQ ID NO: 1293814 - RNA, 14 nt, Human
cacugugcuguugu

SEQ ID NO: 1293815 - RNA, 20 nt, Human
cacugugcacaucugugucu

SEQ ID NO: 1293816 - RNA, 22 nt, Human
cacugugcacaucugugucuug

SEQ ID NO: 1293817 - RNA, 13 nt, Human
cacugugccucag

SEQ ID NO: 1293818 - RNA, 17 nt, Human
cacugugccucagagac

SEQ ID NO: 1293819 - RNA, 20 nt, Human
cacugugccucagagaccag

SEQ ID NO: 1293820 - RNA, 21 nt, Human
cacugugccucagagaccagg

SEQ ID NO: 1293821 - RNA, 22 nt, Human
cacugugccucagagaccaggg

SEQ ID NO: 1293822 - RNA, 14 nt, Human
cacuucaggcucuu

SEQ ID NO: 1293823 - RNA, 15 nt, Human
cacuucaggcucuuc

SEQ ID NO: 1293824 - RNA, 16 nt, Human
cacuucaggcucuucu

SEQ ID NO: 1293825 - RNA, 20 nt, Human
cacuucaggcucuucuccuu

SEQ ID NO: 1293826 - RNA, 23 nt, Human
cacuucaggcucuucuccuuuca

SEQ ID NO: 1293827 - RNA, 19 nt, Human
cacuucagggcuuuacucc

SEQ ID NO: 1293828 - RNA, 18 nt, Human
cacuucagguauaccuca

SEQ ID NO: 1293829 - RNA, 19 nt, Human
cacuucagguauaccucac

SEQ ID NO: 1293830 - RNA, 20 nt, Human
cacuucagguauaccucacu

SEQ ID NO: 1293831 - RNA, 14 nt, Human
cacuucauaaucca

SEQ ID NO: 1293832 - RNA, 15 nt, Human
cacuucauaauccag

SEQ ID NO: 1293833 - RNA, 22 nt, Human
cacuuauuggaacucugcuuga

SEQ ID NO: 1293834 - RNA, 20 nt, Human
cacuuauuuaugaaccugcc

SEQ ID NO: 1293835 - RNA, 11 nt, Human
cacuucaaacu

SEQ ID NO: 1293836 - RNA, 12 nt, Human
cacuucaaacua

SEQ ID NO: 1293837 - RNA, 14 nt, Human
cacuucaaacuacu

SEQ ID NO: 1293838 - RNA, 16 nt, Human
cacuguucuuagcuca

SEQ ID NO: 1293839 - RNA, 23 nt, Human
cacuguucuuagcucaaugagca

SEQ ID NO: 1293840 - RNA, 21 nt, Human
cacuguucuuagcucaaugag

SEQ ID NO: 1293841 - RNA, 15 nt, Human
cacuucacugugcug

SEQ ID NO: 1293842 - RNA, 13 nt, Human
cacuucacugugc

SEQ ID NO: 1293843 - RNA, 12 nt, Human
cacuucacugug

SEQ ID NO: 1293844 - RNA, 18 nt, Human
cacuucaaauucaaauaa

SEQ ID NO: 1293845 - RNA, 16 nt, Human
cacuucaaacuacuuu

SEQ ID NO: 1293846 - RNA, 13 nt, Human
cacuuccauggga

SEQ ID NO: 1293847 - RNA, 20 nt, Human
cacuuccauaaucuggacuc

SEQ ID NO: 1293848 - RNA, 18 nt, Human
cacuucccugcuuaaauu

SEQ ID NO: 1293849 - RNA, 21 nt, Human
cacuuccucucgcggcccuca

SEQ ID NO: 1293850 - RNA, 14 nt, Human
cacuucugcacuug

SEQ ID NO: 1293851 - RNA, 11 nt, Human
cacuucugcac

SEQ ID NO: 1293852 - RNA, 18 nt, Human
cacuucugggcuucaucu

SEQ ID NO: 1293853 - RNA, 13 nt, Human
cacuucucaggac

SEQ ID NO: 1293854 - RNA, 14 nt, Human
cacuucucaggaca

SEQ ID NO: 1293855 - RNA, 15 nt, Human
cacuucucaggacac

SEQ ID NO: 1293856 - RNA, 19 nt, Human
cacuucucaggacacaggc

SEQ ID NO: 1293857 - RNA, 23 nt, Human
cacuucucaggacacaggccugu

SEQ ID NO: 1293858 - RNA, 21 nt, Human
cacuucucaggacacaggccu

SEQ ID NO: 1293859 - RNA, 22 nt, Human
cacuucucaggacacaggccug

SEQ ID NO: 1293860 - RNA, 17 nt, Human
cacuucugacagccuca

SEQ ID NO: 1293861 - RNA, 19 nt, Human
cacuugaugacccccaacc

SEQ ID NO: 1293862 - RNA, 12 nt, Human
cacuugcaaccu

SEQ ID NO: 1293863 - RNA, 23 nt, Human
cacuugaacccgggaggcagagg

SEQ ID NO: 1293864 - RNA, 21 nt, Human
cacuugaacccgggaggcaga

SEQ ID NO: 1293865 - RNA, 20 nt, Human
cacuugaacccgggaggcag

SEQ ID NO: 1293866 - RNA, 20 nt, Human
cacuucugggcuucaucugg

SEQ ID NO: 1293867 - RNA, 19 nt, Human
cacuucuuacaauaauucu

SEQ ID NO: 1293868 - RNA, 16 nt, Human
cacuugccaaaaucca

SEQ ID NO: 1293869 - RNA, 12 nt, Human
cacuugccucuu

SEQ ID NO: 1293870 - RNA, 13 nt, Human
cacuugccucuuc

SEQ ID NO: 1293871 - RNA, 14 nt, Human
cacuugccucuucc

SEQ ID NO: 1293872 - RNA, 17 nt, Human
cacuugccucuuccuug

SEQ ID NO: 1293873 - RNA, 21 nt, Human
cacuugccucuuccuugaaga

SEQ ID NO: 1293874 - RNA, 22 nt, Human
cacuugcggauauucuggacug

SEQ ID NO: 1293875 - RNA, 17 nt, Human
cacuuggucugugagau

SEQ ID NO: 1293876 - RNA, 15 nt, Human
cacuuggucugugag

SEQ ID NO: 1293877 - RNA, 16 nt, Human
cacuugcuggaagacg

SEQ ID NO: 1293878 - RNA, 12 nt, Human
cacuuggcagcc

SEQ ID NO: 1293879 - RNA, 14 nt, Human
cacuuggcagccuu

SEQ ID NO: 1293880 - RNA, 15 nt, Human
cacuuggcagccuug

SEQ ID NO: 1293881 - RNA, 18 nt, Human
cacuuggcagccuuguga

SEQ ID NO: 1293882 - RNA, 16 nt, Human
cacuuggcagccuugu

SEQ ID NO: 1293883 - RNA, 23 nt, Human
cacuuggcugcauaaauguggua

SEQ ID NO: 1293884 - RNA, 20 nt, Human
cacuuggggcaccuugcucc

SEQ ID NO: 1293885 - RNA, 22 nt, Human
cacuuggggcaccuugcuccuc

SEQ ID NO: 1293886 - RNA, 20 nt, Human
cacuuggggguucaggcccg

SEQ ID NO: 1293887 - RNA, 13 nt, Human
caccucucaauau

SEQ ID NO: 1293888 - RNA, 15 nt, Human
caccgcagaaggaag

SEQ ID NO: 1293889 - RNA, 14 nt, Human
caccgcagaaggaa

SEQ ID NO: 1293890 - RNA, 19 nt, Human
caccggaccagccuggccc

SEQ ID NO: 1293891 - RNA, 22 nt, Human
caccggccccauuuacccaacu

SEQ ID NO: 1293892 - RNA, 16 nt, Human
caccggcucucaccug

SEQ ID NO: 1293893 - RNA, 21 nt, Human
caccggcucucaccuggcccu

SEQ ID NO: 1293894 - RNA, 17 nt, Human
caccggaccagccuggc

SEQ ID NO: 1293895 - RNA, 14 nt, Human
caccggggccuggg

SEQ ID NO: 1293896 - RNA, 21 nt, Human
caccggggccugggcaggagg

SEQ ID NO: 1293897 - RNA, 22 nt, Human
caccggggccugggcaggaggg

SEQ ID NO: 1293898 - RNA, 13 nt, Human
caccgggccugga

SEQ ID NO: 1293899 - RNA, 12 nt, Human
caccgggccacu

SEQ ID NO: 1293900 - RNA, 14 nt, Human
caccgggccacucc

SEQ ID NO: 1293901 - RNA, 15 nt, Human
caccggggccucgga

SEQ ID NO: 1293902 - RNA, 19 nt, Human
caccgggccacuccuuccu

SEQ ID NO: 1293903 - RNA, 21 nt, Human
caccgggccacuccuuccugc

SEQ ID NO: 1293904 - RNA, 23 nt, Human
caccgggccacuccuuccugccc

SEQ ID NO: 1293905 - RNA, 15 nt, Human
caccgugccuggcca

SEQ ID NO: 1293906 - RNA, 20 nt, Human
caccgugccuggccacgccc

SEQ ID NO: 1293907 - RNA, 24 nt, Human
caccgugcccagcccuaaacauca

SEQ ID NO: 1293908 - RNA, 15 nt, Human
caccgugggcaggga

SEQ ID NO: 1293909 - RNA, 13 nt, Human
caccgugggcucc

SEQ ID NO: 1293910 - RNA, 17 nt, Human
caccgugggcucccuga

SEQ ID NO: 1293911 - RNA, 18 nt, Human
caccgugggcucccugac

SEQ ID NO: 1293912 - RNA, 19 nt, Human
caccucccucaaccucauc

SEQ ID NO: 1293913 - RNA, 17 nt, Human
caccucccucaaccuca

SEQ ID NO: 1293914 - RNA, 15 nt, Human
caccucccucaaccu

SEQ ID NO: 1293915 - RNA, 21 nt, Human
caccucccuauacugcuugga

SEQ ID NO: 1293916 - RNA, 14 nt, Human
caccuccccuuggg

SEQ ID NO: 1293917 - RNA, 20 nt, Human
caccucccuauacugcuugg

SEQ ID NO: 1293918 - RNA, 14 nt, Human
caccucccccaucu

SEQ ID NO: 1293919 - RNA, 21 nt, Human
caccucccccaucucuucugg

SEQ ID NO: 1293920 - RNA, 23 nt, Human
caccuccccccacaagugcccuc

SEQ ID NO: 1293921 - RNA, 11 nt, Human
caccucaugga

SEQ ID NO: 1293922 - RNA, 12 nt, Human
caccucauggaa

SEQ ID NO: 1293923 - RNA, 14 nt, Human
caccucauggaauu

SEQ ID NO: 1293924 - RNA, 17 nt, Human
caccuccacauccucca

SEQ ID NO: 1293925 - RNA, 16 nt, Human
caccuccacauccucc

SEQ ID NO: 1293926 - RNA, 15 nt, Human
caccuccaucccaga

SEQ ID NO: 1293927 - RNA, 10 nt, Human
caccucccag

SEQ ID NO: 1293928 - RNA, 11 nt, Human
caccucccagg

SEQ ID NO: 1293929 - RNA, 12 nt, Human
caccucccagga

SEQ ID NO: 1293930 - RNA, 14 nt, Human
caccuccccagcau

SEQ ID NO: 1293931 - RNA, 16 nt, Human
caccuccccagcauuc

SEQ ID NO: 1293932 - RNA, 23 nt, Human
caccucucaauauucaauaaagc

SEQ ID NO: 1293933 - RNA, 22 nt, Human
caccucucaauauucaauaaag

SEQ ID NO: 1293934 - RNA, 21 nt, Human
caccucucaauauucaauaaa

SEQ ID NO: 1293935 - RNA, 22 nt, Human
caccucuagguccccauacucc

SEQ ID NO: 1293936 - RNA, 17 nt, Human
caccucuaacagcacca

SEQ ID NO: 1293937 - RNA, 20 nt, Human
caccucuaacagcaccaaau

SEQ ID NO: 1293938 - RNA, 22 nt, Human
caccucuaacagcaccaaauca

SEQ ID NO: 1293939 - RNA, 19 nt, Human
caccucgcagguucaagca

SEQ ID NO: 1293940 - RNA, 16 nt, Human
caccucuaacagcacc

SEQ ID NO: 1293941 - RNA, 22 nt, Human
caccuccuucccucucuggaga

SEQ ID NO: 1293942 - RNA, 19 nt, Human
caccuccugacacccuucu

SEQ ID NO: 1293943 - RNA, 20 nt, Human
caccuccuggguucaagcga

SEQ ID NO: 1293944 - RNA, 22 nt, Human
caccuccuggguucaagcgauu

SEQ ID NO: 1293945 - RNA, 13 nt, Human
caccuccuucccu

SEQ ID NO: 1293946 - RNA, 17 nt, Human
caccuccuucccucucu

SEQ ID NO: 1293947 - RNA, 21 nt, Human
caccucccucaaccucauccu

SEQ ID NO: 1293948 - RNA, 14 nt, Human
caccuccucagccu

SEQ ID NO: 1293949 - RNA, 14 nt, Human
caccuccucaugua

SEQ ID NO: 1293950 - RNA, 16 nt, Human
caccuccucagccuga

SEQ ID NO: 1293951 - RNA, 15 nt, Human
caccuccugccucag

SEQ ID NO: 1293952 - RNA, 13 nt, Human
caccuccugccuc

SEQ ID NO: 1293953 - RNA, 14 nt, Human
caccugucugucug

SEQ ID NO: 1293954 - RNA, 13 nt, Human
caccugucugucu

SEQ ID NO: 1293955 - RNA, 12 nt, Human
caccugucuguc

SEQ ID NO: 1293956 - RNA, 11 nt, Human
caccugucugu

SEQ ID NO: 1293957 - RNA, 15 nt, Human
caccugucccagaaa

SEQ ID NO: 1293958 - RNA, 14 nt, Human
caccugucccagaa

SEQ ID NO: 1293959 - RNA, 18 nt, Human
caccuguagcacuuacug

SEQ ID NO: 1293960 - RNA, 22 nt, Human
caccuguagcacuuacugguag

SEQ ID NO: 1293961 - RNA, 15 nt, Human
caccuguagcagcca

SEQ ID NO: 1293962 - RNA, 16 nt, Human
caccugggagaaaucu

SEQ ID NO: 1293963 - RNA, 17 nt, Human
caccugggagaaaucug

SEQ ID NO: 1293964 - RNA, 14 nt, Human
caccugggcccugg

SEQ ID NO: 1293965 - RNA, 17 nt, Human
caccugggcccuggggc

SEQ ID NO: 1293966 - RNA, 18 nt, Human
caccugggcccuggggcc

SEQ ID NO: 1293967 - RNA, 19 nt, Human
caccugggcccuggggccu

SEQ ID NO: 1293968 - RNA, 20 nt, Human
caccugggcccuggggccug

SEQ ID NO: 1293969 - RNA, 21 nt, Human
caccugggcccuggggccugu

SEQ ID NO: 1293970 - RNA, 22 nt, Human
caccugggcccuggggccugua

SEQ ID NO: 1293971 - RNA, 23 nt, Human
caccugggcccuggggccuguac

SEQ ID NO: 1293972 - RNA, 20 nt, Human
caccugguacucccucucag

SEQ ID NO: 1293973 - RNA, 15 nt, Human
caccugguggccaug

SEQ ID NO: 1293974 - RNA, 16 nt, Human
caccugguggccaugc

SEQ ID NO: 1293975 - RNA, 21 nt, Human
caccugguggccaugcuccuc

SEQ ID NO: 1293976 - RNA, 17 nt, Human
caccugguggccaugcu

SEQ ID NO: 1293977 - RNA, 14 nt, Human
caccuguaaaccug

SEQ ID NO: 1293978 - RNA, 15 nt, Human
caccuguaaaccuga

SEQ ID NO: 1293979 - RNA, 16 nt, Human
caccuguaaaccugag

SEQ ID NO: 1293980 - RNA, 20 nt, Human
caccuguaaugugcgaggga

SEQ ID NO: 1293981 - RNA, 20 nt, Human
caccugggauuacaagcaug

SEQ ID NO: 1293982 - RNA, 22 nt, Human
caccuggcccugcuuccugcuu

SEQ ID NO: 1293983 - RNA, 20 nt, Human
caccuggcccugcuuccugc

SEQ ID NO: 1293984 - RNA, 16 nt, Human
caccuggcucucaccu

SEQ ID NO: 1293985 - RNA, 17 nt, Human
caccuggcucucaccuc

SEQ ID NO: 1293986 - RNA, 18 nt, Human
caccuggcucucaccucu

SEQ ID NO: 1293987 - RNA, 19 nt, Human
caccuggcucucaccucua

SEQ ID NO: 1293988 - RNA, 11 nt, Human
caccuggaccc

SEQ ID NO: 1293989 - RNA, 12 nt, Human
caccuggacccc

SEQ ID NO: 1293990 - RNA, 15 nt, Human
caccuggaccccugc

SEQ ID NO: 1293991 - RNA, 16 nt, Human
caccuggaccccugca

SEQ ID NO: 1293992 - RNA, 17 nt, Human
caccuggaccccugcau

SEQ ID NO: 1293993 - RNA, 18 nt, Human
caccuggaccccugcauu

SEQ ID NO: 1293994 - RNA, 19 nt, Human
caccuggaccccugcauug

SEQ ID NO: 1293995 - RNA, 23 nt, Human
caccuggcaucgcaccauucuga

SEQ ID NO: 1293996 - RNA, 13 nt, Human
caccuggcccugc

SEQ ID NO: 1293997 - RNA, 15 nt, Human
caccuggcccugcuu

SEQ ID NO: 1293998 - RNA, 16 nt, Human
caccuggcccugcuuc

SEQ ID NO: 1293999 - RNA, 17 nt, Human
caccugaacugaacacc

SEQ ID NO: 1294000 - RNA, 19 nt, Human
caccugaacugaacaccau

SEQ ID NO: 1294001 - RNA, 16 nt, Human
caccugacacaccagg

SEQ ID NO: 1294002 - RNA, 17 nt, Human
caccugacacaccaggc

SEQ ID NO: 1294003 - RNA, 12 nt, Human
caccucugcugc

SEQ ID NO: 1294004 - RNA, 13 nt, Human
caccugaacugaa

SEQ ID NO: 1294005 - RNA, 23 nt, Human
caccugcugagaaaacaugccuc

SEQ ID NO: 1294006 - RNA, 23 nt, Human
caccugcugucuggguggcucac

SEQ ID NO: 1294007 - RNA, 21 nt, Human
caccuggaagcauuuguuucu

SEQ ID NO: 1294008 - RNA, 22 nt, Human
caccuggaagcauuuguuucua

SEQ ID NO: 1294009 - RNA, 20 nt, Human
caccugacacaccaggcgcu

SEQ ID NO: 1294010 - RNA, 14 nt, Human
caccugaggaacug

SEQ ID NO: 1294011 - RNA, 11 nt, Human
caccugaggaa

SEQ ID NO: 1294012 - RNA, 19 nt, Human
caccugagucacccuaccu

SEQ ID NO: 1294013 - RNA, 23 nt, Human
caccugagucacccuaccugugc

SEQ ID NO: 1294014 - RNA, 15 nt, Human
caccugcacuaacag

SEQ ID NO: 1294015 - RNA, 16 nt, Human
caccugcacuaacaga

SEQ ID NO: 1294016 - RNA, 21 nt, Human
caccugcacuaacagaguggc

SEQ ID NO: 1294017 - RNA, 13 nt, Human
caccgcagaagga

SEQ ID NO: 1294018 - RNA, 12 nt, Human
caccgagugggg

SEQ ID NO: 1294019 - RNA, 15 nt, Human
caccgacugaaaaua

SEQ ID NO: 1294020 - RNA, 18 nt, Human
cacccuugguuccuaacu

SEQ ID NO: 1294021 - RNA, 20 nt, Human
cacccuuugcugugaggcug

SEQ ID NO: 1294022 - RNA, 22 nt, Human
cacccuuugcugugaggcuguc

SEQ ID NO: 1294023 - RNA, 15 nt, Human
cacccuuuuccagcu

SEQ ID NO: 1294024 - RNA, 17 nt, Human
cacccuuuuccagcugg

SEQ ID NO: 1294025 - RNA, 21 nt, Human
cacccuuuuccagcuggauga

SEQ ID NO: 1294026 - RNA, 14 nt, Human
caccgaagcccaga

SEQ ID NO: 1294027 - RNA, 15 nt, Human
caccgaagcccagag

SEQ ID NO: 1294028 - RNA, 21 nt, Human
caccgaagcccagagggucug

SEQ ID NO: 1294029 - RNA, 19 nt, Human
cacccugucugccccgccc

SEQ ID NO: 1294030 - RNA, 18 nt, Human
cacccuguggucuuccuc

SEQ ID NO: 1294031 - RNA, 14 nt, Human
cacccuguuccugc

SEQ ID NO: 1294032 - RNA, 15 nt, Human
cacccuguuccugcu

SEQ ID NO: 1294033 - RNA, 16 nt, Human
cacccuguuccugcug

SEQ ID NO: 1294034 - RNA, 18 nt, Human
cacccuguuccugcugcu

SEQ ID NO: 1294035 - RNA, 17 nt, Human
cacccuguuccugcugc

SEQ ID NO: 1294036 - RNA, 13 nt, Human
cacccuucuccca

SEQ ID NO: 1294037 - RNA, 15 nt, Human
cacccuucucccacu

SEQ ID NO: 1294038 - RNA, 16 nt, Human
cacccuucucccacuc

SEQ ID NO: 1294039 - RNA, 17 nt, Human
cacccuucucccacucu

SEQ ID NO: 1294040 - RNA, 18 nt, Human
cacccuucucccacucuc

SEQ ID NO: 1294041 - RNA, 19 nt, Human
cacccuucucccacucucc

SEQ ID NO: 1294042 - RNA, 23 nt, Human
cacccuucucccacucuccuagg

SEQ ID NO: 1294043 - RNA, 21 nt, Human
cacccuucucccacucuccua

SEQ ID NO: 1294044 - RNA, 12 nt, Human
cacccucacacu

SEQ ID NO: 1294045 - RNA, 20 nt, Human
cacccucacuggcucuccug

SEQ ID NO: 1294046 - RNA, 14 nt, Human
cacccugucugccc

SEQ ID NO: 1294047 - RNA, 21 nt, Human
cacccucacuggcucuccugg

SEQ ID NO: 1294048 - RNA, 15 nt, Human
cacccggcugcagag

SEQ ID NO: 1294049 - RNA, 21 nt, Human
cacccggcugcagaggccaga

SEQ ID NO: 1294050 - RNA, 16 nt, Human
cacccuaccugugccu

SEQ ID NO: 1294051 - RNA, 12 nt, Human
caccccuaggac

SEQ ID NO: 1294052 - RNA, 13 nt, Human
caccccugcacag

SEQ ID NO: 1294053 - RNA, 18 nt, Human
aggaguuucguuuucaaa

SEQ ID NO: 1294054 - RNA, 23 nt, Human
aggaguuuauguuccauuaaacg

SEQ ID NO: 1294055 - RNA, 14 nt, Human
aggaguuuauguuc

SEQ ID NO: 1294056 - RNA, 18 nt, Human
aggagguccuuaggccuc

SEQ ID NO: 1294057 - RNA, 23 nt, Human
aggagguccuuaggccucugaga

SEQ ID NO: 1294058 - RNA, 14 nt, Human
aggaggugccacug

SEQ ID NO: 1294059 - RNA, 11 nt, Human
aggaguaacaa

SEQ ID NO: 1294060 - RNA, 13 nt, Human
aggaguagcugag

SEQ ID NO: 1294061 - RNA, 14 nt, Human
aggaguagcugagc

SEQ ID NO: 1294062 - RNA, 22 nt, Human
aggagucugagguccugagcac

SEQ ID NO: 1294063 - RNA, 23 nt, Human
aggagucugagguccugagcacu

SEQ ID NO: 1294064 - RNA, 15 nt, Human
aggaggugucucagg

SEQ ID NO: 1294065 - RNA, 19 nt, Human
aggaggugucucaggcugc

SEQ ID NO: 1294066 - RNA, 20 nt, Human
aggaggugucucaggcugcc

SEQ ID NO: 1294067 - RNA, 21 nt, Human
aggaggugucucaggcugccu

SEQ ID NO: 1294068 - RNA, 23 nt, Human
aggaggugucucaggcugccuga

SEQ ID NO: 1294069 - RNA, 22 nt, Human
aggaggugucucaggcugccug

SEQ ID NO: 1294070 - RNA, 19 nt, Human
aggaguaacaauacaaaug

SEQ ID NO: 1294071 - RNA, 13 nt, Human
aggaaguagagga

SEQ ID NO: 1294072 - RNA, 20 nt, Human
aggagacagguuagcugcuc

SEQ ID NO: 1294073 - RNA, 18 nt, Human
aggagacaguucaagaaa

SEQ ID NO: 1294074 - RNA, 14 nt, Human
aggaaguagaaaca

SEQ ID NO: 1294075 - RNA, 15 nt, Human
aggaaguagaaacaa

SEQ ID NO: 1294076 - RNA, 16 nt, Human
aggagagcccuucauu

SEQ ID NO: 1294077 - RNA, 21 nt, Human
aggagggucggugccuucaag

SEQ ID NO: 1294078 - RNA, 17 nt, Human
aggagggucggugccuu

SEQ ID NO: 1294079 - RNA, 14 nt, Human
aggagggugggaag

SEQ ID NO: 1294080 - RNA, 15 nt, Human
aggagggugggaagg

SEQ ID NO: 1294081 - RNA, 15 nt, Human
aggagggcaggcauc

SEQ ID NO: 1294082 - RNA, 16 nt, Human
aggagggucggugccu

SEQ ID NO: 1294083 - RNA, 15 nt, Human
aggagggaggugcuu

SEQ ID NO: 1294084 - RNA, 13 nt, Human
aggagggcaggca

SEQ ID NO: 1294085 - RNA, 17 nt, Human
aggauguguuugcuuuc

SEQ ID NO: 1294086 - RNA, 18 nt, Human
aggauguguuugcuuucu

SEQ ID NO: 1294087 - RNA, 19 nt, Human
aggauguguuugcuuucug

SEQ ID NO: 1294088 - RNA, 18 nt, Human
aggaugugauauauaagu

SEQ ID NO: 1294089 - RNA, 21 nt, Human
aggaugugauauauaagugua

SEQ ID NO: 1294090 - RNA, 20 nt, Human
aggaugugauuguggaaugg

SEQ ID NO: 1294091 - RNA, 14 nt, Human
aggaugugaauugu

SEQ ID NO: 1294092 - RNA, 20 nt, Human
aggauguggaaaccuccuuc

SEQ ID NO: 1294093 - RNA, 21 nt, Human
aggaugugucccaucuaggga

SEQ ID NO: 1294094 - RNA, 13 nt, Human
aggauguguuugc

SEQ ID NO: 1294095 - RNA, 19 nt, Human
aggauggucuuacagcagg

SEQ ID NO: 1294096 - RNA, 14 nt, Human
aggaugugauauau

SEQ ID NO: 1294097 - RNA, 18 nt, Human
aggauggucuuacagcag

SEQ ID NO: 1294098 - RNA, 13 nt, Human
aggauggcgcagg

SEQ ID NO: 1294099 - RNA, 20 nt, Human
aggaugggcaugguguucuc

SEQ ID NO: 1294100 - RNA, 23 nt, Human
aggcaugugucaccaugcccagc

SEQ ID NO: 1294101 - RNA, 17 nt, Human
aggcagauccaggacua

SEQ ID NO: 1294102 - RNA, 15 nt, Human
aggcagccagcaucu

SEQ ID NO: 1294103 - RNA, 16 nt, Human
aggcagccagcaucug

SEQ ID NO: 1294104 - RNA, 19 nt, Human
aggcaucggggagccggga

SEQ ID NO: 1294105 - RNA, 17 nt, Human
aggcaucgcaauguaag

SEQ ID NO: 1294106 - RNA, 20 nt, Human
aggcagccagcaucugggcc

SEQ ID NO: 1294107 - RNA, 13 nt, Human
aggcagccagcca

SEQ ID NO: 1294108 - RNA, 23 nt, Human
aggcaucgucaugcacaguauuu

SEQ ID NO: 1294109 - RNA, 19 nt, Human
aggcaucgucaugcacagu

SEQ ID NO: 1294110 - RNA, 14 nt, Human
aggcauuaaauuuu

SEQ ID NO: 1294111 - RNA, 22 nt, Human
aggcauuaaauuuuagcaaaga

SEQ ID NO: 1294112 - RNA, 15 nt, Human
aggcauucuggaccu

SEQ ID NO: 1294113 - RNA, 16 nt, Human
aggcauucuggaccuc

SEQ ID NO: 1294114 - RNA, 20 nt, Human
aggcauucuggaccucuggg

SEQ ID NO: 1294115 - RNA, 21 nt, Human
aggcauucuggaccucugggu

SEQ ID NO: 1294116 - RNA, 13 nt, Human
aggccagggcaga

SEQ ID NO: 1294117 - RNA, 15 nt, Human
aggccagggcagagu

SEQ ID NO: 1294118 - RNA, 22 nt, Human
aggcagaacucaucuagguaaa

SEQ ID NO: 1294119 - RNA, 22 nt, Human
aggcagaggccugggcugggaa

SEQ ID NO: 1294120 - RNA, 20 nt, Human
aggcagagguugcagugagc

SEQ ID NO: 1294121 - RNA, 11 nt, Human
aggcagaucca

SEQ ID NO: 1294122 - RNA, 15 nt, Human
aggcagauccaggac

SEQ ID NO: 1294123 - RNA, 16 nt, Human
aggcagauccaggacu

SEQ ID NO: 1294124 - RNA, 19 nt, Human
aggcacuugagggggaagg

SEQ ID NO: 1294125 - RNA, 15 nt, Human
aggcacuuggcagcc

SEQ ID NO: 1294126 - RNA, 17 nt, Human
aggcacuuggcagccuu

SEQ ID NO: 1294127 - RNA, 18 nt, Human
aggcacuuggcagccuug

SEQ ID NO: 1294128 - RNA, 14 nt, Human
agggacugagaaau

SEQ ID NO: 1294129 - RNA, 13 nt, Human
agggacugagaaa

SEQ ID NO: 1294130 - RNA, 15 nt, Human
agggacugagaaauu

SEQ ID NO: 1294131 - RNA, 17 nt, Human
agggacugagaaauuua

SEQ ID NO: 1294132 - RNA, 16 nt, Human
agggacugaccagcag

SEQ ID NO: 1294133 - RNA, 15 nt, Human
agggcuacccugagc

SEQ ID NO: 1294134 - RNA, 20 nt, Human
agggauucugguuccagggu

SEQ ID NO: 1294135 - RNA, 17 nt, Human
agggcuacccugagcug

SEQ ID NO: 1294136 - RNA, 18 nt, Human
agggcuacccugagcuga

SEQ ID NO: 1294137 - RNA, 20 nt, Human
agggcuacccugagcugagg

SEQ ID NO: 1294138 - RNA, 21 nt, Human
agggcuacccugagcugaggc

SEQ ID NO: 1294139 - RNA, 22 nt, Human
agggcuacccugagcugaggca

SEQ ID NO: 1294140 - RNA, 23 nt, Human
agggcuacccugagcugaggcag

SEQ ID NO: 1294141 - RNA, 22 nt, Human
agggcuagugacuuguguccca

SEQ ID NO: 1294142 - RNA, 24 nt, Human
agggcuagugacuugugucccaug

SEQ ID NO: 1294143 - RNA, 13 nt, Human
agggcucacucag

SEQ ID NO: 1294144 - RNA, 24 nt, Human
agggcucaaucucugggggcugag

SEQ ID NO: 1294145 - RNA, 15 nt, Human
agggauggacaucuu

SEQ ID NO: 1294146 - RNA, 17 nt, Human
agggauggacaucuugu

SEQ ID NO: 1294147 - RNA, 16 nt, Human
agggauggacaucuug

SEQ ID NO: 1294148 - RNA, 15 nt, Human
agggaugacuaaaau

SEQ ID NO: 1294149 - RNA, 22 nt, Human
agggaugacuaaaauauuuauu

SEQ ID NO: 1294150 - RNA, 22 nt, Human
aggcucuggagcccacuguacu

SEQ ID NO: 1294151 - RNA, 21 nt, Human
aggcuagguggguugaaagcc

SEQ ID NO: 1294152 - RNA, 23 nt, Human
aggcuagguggguugaaagccaa

SEQ ID NO: 1294153 - RNA, 15 nt, Human
aggcucugucuggaa

SEQ ID NO: 1294154 - RNA, 17 nt, Human
aggcucuguuccacaua

SEQ ID NO: 1294155 - RNA, 19 nt, Human
aggcucuuagcagcuucca

SEQ ID NO: 1294156 - RNA, 22 nt, Human
aggcucuuagcagcuuccagau

SEQ ID NO: 1294157 - RNA, 13 nt, Human
aggcucuucuccu

SEQ ID NO: 1294158 - RNA, 11 nt, Human
aggcugagccu

SEQ ID NO: 1294159 - RNA, 13 nt, Human
aggcugagccuca

SEQ ID NO: 1294160 - RNA, 14 nt, Human
aggcucuucuccuu

SEQ ID NO: 1294161 - RNA, 11 nt, Human
aggcugaggac

SEQ ID NO: 1294162 - RNA, 13 nt, Human
aggcugaggacuu

SEQ ID NO: 1294163 - RNA, 14 nt, Human
aggcuagggugggg

SEQ ID NO: 1294164 - RNA, 15 nt, Human
aggcuagggugggga

SEQ ID NO: 1294165 - RNA, 16 nt, Human
aggcuaggguggggag

SEQ ID NO: 1294166 - RNA, 19 nt, Human
aggcuaggguggggagaga

SEQ ID NO: 1294167 - RNA, 20 nt, Human
aggcugcauugaaaagagcu

SEQ ID NO: 1294168 - RNA, 21 nt, Human
aggcugcauugaaaagagcug

SEQ ID NO: 1294169 - RNA, 22 nt, Human
aggcugcauugaaaagagcuga

SEQ ID NO: 1294170 - RNA, 23 nt, Human
aggcuguuaaauacaggaaacag

SEQ ID NO: 1294171 - RNA, 20 nt, Human
aggcuguuaaauacaggaaa

SEQ ID NO: 1294172 - RNA, 14 nt, Human
aggcuuaaacccau

SEQ ID NO: 1294173 - RNA, 14 nt, Human
aggcuuacacccac

SEQ ID NO: 1294174 - RNA, 19 nt, Human
agggacaugcuuagcaguc

SEQ ID NO: 1294175 - RNA, 14 nt, Human
agggacaugcuuag

SEQ ID NO: 1294176 - RNA, 17 nt, Human
agcuguaugauucccag

SEQ ID NO: 1294177 - RNA, 18 nt, Human
agcuguaugauucccagc

SEQ ID NO: 1294178 - RNA, 16 nt, Human
agcugucaaggcucag

SEQ ID NO: 1294179 - RNA, 17 nt, Human
agcugguuagaaaugca

SEQ ID NO: 1294180 - RNA, 16 nt, Human
agcuguauugucugaa

SEQ ID NO: 1294181 - RNA, 18 nt, Human
aggaaaaaauaacaauga

SEQ ID NO: 1294182 - RNA, 19 nt, Human
aggaaaaccaagccguggc

SEQ ID NO: 1294183 - RNA, 13 nt, Human
aggaaaaacaggu

SEQ ID NO: 1294184 - RNA, 19 nt, Human
agcuuuuuucucugauaca

SEQ ID NO: 1294185 - RNA, 20 nt, Human
agcuuuuuucucugauacag

SEQ ID NO: 1294186 - RNA, 22 nt, Human
agcuuuuuucucugauacagaa

SEQ ID NO: 1294187 - RNA, 23 nt, Human
agcuuuuuucucugauacagaaa

SEQ ID NO: 1294188 - RNA, 22 nt, Human
agcuuugucacuguuucacuac

SEQ ID NO: 1294189 - RNA, 12 nt, Human
agcuuuguucuu

SEQ ID NO: 1294190 - RNA, 18 nt, Human
agcuuuguucuucuuaaa

SEQ ID NO: 1294191 - RNA, 15 nt, Human
aggaaaaaauaaaca

SEQ ID NO: 1294192 - RNA, 20 nt, Human
aggaaaaccaagccguggcu

SEQ ID NO: 1294193 - RNA, 21 nt, Human
aggaaaaccaagccguggcuu

SEQ ID NO: 1294194 - RNA, 22 nt, Human
aggaaaaccaagccguggcuuc

SEQ ID NO: 1294195 - RNA, 23 nt, Human
aggaaaaccaagccguggcuucc

SEQ ID NO: 1294196 - RNA, 14 nt, Human
aggaacuuccaggu

SEQ ID NO: 1294197 - RNA, 18 nt, Human
aggaagguacuguaugau

SEQ ID NO: 1294198 - RNA, 17 nt, Human
aggaagguacuguauga

SEQ ID NO: 1294199 - RNA, 15 nt, Human
aggaagguacuguau

SEQ ID NO: 1294200 - RNA, 14 nt, Human
aggaagguacugua

SEQ ID NO: 1294201 - RNA, 20 nt, Human
aggaagaauggugugggaga

SEQ ID NO: 1294202 - RNA, 15 nt, Human
aggaagguggauggc

SEQ ID NO: 1294203 - RNA, 16 nt, Human
aggaagguggauggcc

SEQ ID NO: 1294204 - RNA, 14 nt, Human
agcugacuuggcug

SEQ ID NO: 1294205 - RNA, 16 nt, Human
agcugacuuggcuggu

SEQ ID NO: 1294206 - RNA, 23 nt, Human
agcugacuaaacuuuuuuucugu

SEQ ID NO: 1294207 - RNA, 13 nt, Human
agcugacucacac

SEQ ID NO: 1294208 - RNA, 15 nt, Human
agcucuuggagcugu

SEQ ID NO: 1294209 - RNA, 18 nt, Human
agcucuuguugagccgug

SEQ ID NO: 1294210 - RNA, 16 nt, Human
agcuccucuccccagc

SEQ ID NO: 1294211 - RNA, 17 nt, Human
agcuccucuccccagcc

SEQ ID NO: 1294212 - RNA, 18 nt, Human
agcuccucuccccagccc

SEQ ID NO: 1294213 - RNA, 19 nt, Human
agcuccucuccccagccca

SEQ ID NO: 1294214 - RNA, 20 nt, Human
agcuccucuccccagcccag

SEQ ID NO: 1294215 - RNA, 21 nt, Human
agcuccucuccccagcccaga

SEQ ID NO: 1294216 - RNA, 22 nt, Human
agcuccucuccccagcccagag

SEQ ID NO: 1294217 - RNA, 23 nt, Human
agcuccucuccccagcccagaga

SEQ ID NO: 1294218 - RNA, 24 nt, Human
agcuccucuccccagcccagagac

SEQ ID NO: 1294219 - RNA, 19 nt, Human
agcugguguagcuacagag

SEQ ID NO: 1294220 - RNA, 20 nt, Human
agcugguguagcuacagaga

SEQ ID NO: 1294221 - RNA, 21 nt, Human
agcugguguagcuacagagaa

SEQ ID NO: 1294222 - RNA, 22 nt, Human
agcugguguagcuacagagaaa

SEQ ID NO: 1294223 - RNA, 23 nt, Human
agcugguguagcuacagagaaac

SEQ ID NO: 1294224 - RNA, 15 nt, Human
agcugguuagaaaug

SEQ ID NO: 1294225 - RNA, 19 nt, Human
agcuggugcggcuggccau

SEQ ID NO: 1294226 - RNA, 17 nt, Human
agcuggugcggcuggcc

SEQ ID NO: 1294227 - RNA, 13 nt, Human
agcugguguagcu

SEQ ID NO: 1294228 - RNA, 14 nt, Human
agcugguguagcua

SEQ ID NO: 1294229 - RNA, 17 nt, Human
agcugguguagcuacag

SEQ ID NO: 1294230 - RNA, 18 nt, Human
agcugguguagcuacaga

SEQ ID NO: 1294231 - RNA, 13 nt, Human
agcuggugcggcu

SEQ ID NO: 1294232 - RNA, 20 nt, Human
agcuggguuggaaaacagua

SEQ ID NO: 1294233 - RNA, 16 nt, Human
agcuggguuggaaaac

SEQ ID NO: 1294234 - RNA, 17 nt, Human
agcugacuuggcuggug

SEQ ID NO: 1294235 - RNA, 18 nt, Human
agcugacuuggcuggugu

SEQ ID NO: 1294236 - RNA, 22 nt, Human
agcugacuuggcugguguggua

SEQ ID NO: 1294237 - RNA, 19 nt, Human
agcugacuuggcuggugug

SEQ ID NO: 1294238 - RNA, 24 nt, Human
agcgauucuccugccucagccucc

SEQ ID NO: 1294239 - RNA, 23 nt, Human
agcgauucccucucccaggcccc

SEQ ID NO: 1294240 - RNA, 18 nt, Human
agcuaaacggauuccaaa

SEQ ID NO: 1294241 - RNA, 13 nt, Human
agcuaaauccuuu

SEQ ID NO: 1294242 - RNA, 20 nt, Human
agcuaaauaccucaaucagu

SEQ ID NO: 1294243 - RNA, 13 nt, Human
agcuaacagggaa

SEQ ID NO: 1294244 - RNA, 16 nt, Human
agcuaacagggaaggc

SEQ ID NO: 1294245 - RNA, 18 nt, Human
agcuaacagggaaggcag

SEQ ID NO: 1294246 - RNA, 19 nt, Human
agcuaacagggaaggcagg

SEQ ID NO: 1294247 - RNA, 20 nt, Human
agcuaacagggaaggcaggc

SEQ ID NO: 1294248 - RNA, 21 nt, Human
agcuaacagggaaggcaggca

SEQ ID NO: 1294249 - RNA, 23 nt, Human
agcuaacagggaaggcaggcagg

SEQ ID NO: 1294250 - RNA, 12 nt, Human
agcuaagaaccu

SEQ ID NO: 1294251 - RNA, 13 nt, Human
agcuaagaaccug

SEQ ID NO: 1294252 - RNA, 17 nt, Human
agcgacagugagacucu

SEQ ID NO: 1294253 - RNA, 15 nt, Human
agcgacagugagacu

SEQ ID NO: 1294254 - RNA, 13 nt, Human
agcgacagugaga

SEQ ID NO: 1294255 - RNA, 13 nt, Human
agcuacaaaugca

SEQ ID NO: 1294256 - RNA, 13 nt, Human
agcuacagagaaa

SEQ ID NO: 1294257 - RNA, 14 nt, Human
agcuacagagaaac

SEQ ID NO: 1294258 - RNA, 15 nt, Human
agcuacagagaaacc

SEQ ID NO: 1294259 - RNA, 18 nt, Human
agcucacaaggcagcaag

SEQ ID NO: 1294260 - RNA, 20 nt, Human
agcucacaaggcagcaaggc

SEQ ID NO: 1294261 - RNA, 19 nt, Human
agcucacaaggcagcaagg

SEQ ID NO: 1294262 - RNA, 14 nt, Human
agcuaagaaccugg

SEQ ID NO: 1294263 - RNA, 16 nt, Human
agcuaagaaccuggaa

SEQ ID NO: 1294264 - RNA, 17 nt, Human
agcuaagaaccuggaac

SEQ ID NO: 1294265 - RNA, 17 nt, Human
agcuaagcuaggaauga

SEQ ID NO: 1294266 - RNA, 18 nt, Human
agcuaagcuaggaaugaa

SEQ ID NO: 1294267 - RNA, 23 nt, Human
agcuaagcucacguccugagaaa

SEQ ID NO: 1294268 - RNA, 10 nt, Human
agcuaaggcu

SEQ ID NO: 1294269 - RNA, 13 nt, Human
agcuaaggcucua

SEQ ID NO: 1294270 - RNA, 15 nt, Human
agcuaaggcucuaug

SEQ ID NO: 1294271 - RNA, 18 nt, Human
agcuaaggcucuaugagu

SEQ ID NO: 1294272 - RNA, 20 nt, Human
agcuaaggcucuaugagucu

SEQ ID NO: 1294273 - RNA, 19 nt, Human
agcuaagggguggggcugc

SEQ ID NO: 1294274 - RNA, 19 nt, Human
agcuaagguuuagauaaau

SEQ ID NO: 1294275 - RNA, 18 nt, Human
agcuaagggguggggcug

SEQ ID NO: 1294276 - RNA, 16 nt, Human
agcuaauaaaaagcuu

SEQ ID NO: 1294277 - RNA, 17 nt, Human
agccugcugccugcuuu

SEQ ID NO: 1294278 - RNA, 10 nt, Human
agccuggacc

SEQ ID NO: 1294279 - RNA, 15 nt, Human
agccuggaccucuga

SEQ ID NO: 1294280 - RNA, 16 nt, Human
agccuggaccucugac

SEQ ID NO: 1294281 - RNA, 17 nt, Human
agccuggaccucugaca

SEQ ID NO: 1294282 - RNA, 18 nt, Human
agccuggaccucugacag

SEQ ID NO: 1294283 - RNA, 19 nt, Human
agccuggaccucugacagc

SEQ ID NO: 1294284 - RNA, 21 nt, Human
agccuggaccucugacagcag

SEQ ID NO: 1294285 - RNA, 24 nt, Human
agccuggaccucugacagcagcau

SEQ ID NO: 1294286 - RNA, 22 nt, Human
agccuggaccucugacagcagc

SEQ ID NO: 1294287 - RNA, 17 nt, Human
agccuggcacagggcag

SEQ ID NO: 1294288 - RNA, 18 nt, Human
agccuggcacagggcagu

SEQ ID NO: 1294289 - RNA, 20 nt, Human
agccuggcacagggcagugg

SEQ ID NO: 1294290 - RNA, 12 nt, Human
agccuggccaga

SEQ ID NO: 1294291 - RNA, 13 nt, Human
agccuggccagac

SEQ ID NO: 1294292 - RNA, 18 nt, Human
agccuggccuccugccuc

SEQ ID NO: 1294293 - RNA, 19 nt, Human
agccuggccuccugccucu

SEQ ID NO: 1294294 - RNA, 19 nt, Human
agccuggcuauguccuaau

SEQ ID NO: 1294295 - RNA, 20 nt, Human
agccuggccuccugccucua

SEQ ID NO: 1294296 - RNA, 14 nt, Human
agccuggccagaca

SEQ ID NO: 1294297 - RNA, 15 nt, Human
agccuggccagacac

SEQ ID NO: 1294298 - RNA, 16 nt, Human
agccuggccagacaca

SEQ ID NO: 1294299 - RNA, 18 nt, Human
agccuggccagacacagg

SEQ ID NO: 1294300 - RNA, 21 nt, Human
agccuggccagacacaggccc

SEQ ID NO: 1294301 - RNA, 22 nt, Human
agccuggccagacacaggcccu

SEQ ID NO: 1294302 - RNA, 16 nt, Human
agccuggccccauggu

SEQ ID NO: 1294303 - RNA, 17 nt, Human
agccuggccccaugguc

SEQ ID NO: 1294304 - RNA, 11 nt, Human
agccuggccuc

SEQ ID NO: 1294305 - RNA, 13 nt, Human
agccuggccuccu

SEQ ID NO: 1294306 - RNA, 14 nt, Human
agccuggccuccug

SEQ ID NO: 1294307 - RNA, 15 nt, Human
agccuggccuccugc

SEQ ID NO: 1294308 - RNA, 16 nt, Human
agccuggccuccugcc

SEQ ID NO: 1294309 - RNA, 17 nt, Human
agccuggccuccugccu

SEQ ID NO: 1294310 - RNA, 21 nt, Human
agccuuuuuguauaaaauaga

SEQ ID NO: 1294311 - RNA, 18 nt, Human
agccuuuuuguuucaaug

SEQ ID NO: 1294312 - RNA, 16 nt, Human
agccuuuuuuccccag

SEQ ID NO: 1294313 - RNA, 17 nt, Human
agccuuuuuuccccaga

SEQ ID NO: 1294314 - RNA, 19 nt, Human
agccuuuuuuccccagacu

SEQ ID NO: 1294315 - RNA, 20 nt, Human
agccuuuuuuccccagacuu

SEQ ID NO: 1294316 - RNA, 21 nt, Human
agccuuuuuuccccagacuug

SEQ ID NO: 1294317 - RNA, 23 nt, Human
agcgaaaaaaucagguggcuuuu

SEQ ID NO: 1294318 - RNA, 23 nt, Human
agccuuuuuuccccagacuuguu

SEQ ID NO: 1294319 - RNA, 15 nt, Human
agccuuucucucuuu

SEQ ID NO: 1294320 - RNA, 23 nt, Human
agccuuucucucuuuauacagcu

SEQ ID NO: 1294321 - RNA, 14 nt, Human
agauaugauucaaa

SEQ ID NO: 1294322 - RNA, 15 nt, Human
agauaugaaagcuga

SEQ ID NO: 1294323 - RNA, 15 nt, Human
agauaugauucaaau

SEQ ID NO: 1294324 - RNA, 16 nt, Human
agauaugauucaaaug

SEQ ID NO: 1294325 - RNA, 14 nt, Human
agauauauauucau

SEQ ID NO: 1294326 - RNA, 19 nt, Human
agauaucuuggacaaauca

SEQ ID NO: 1294327 - RNA, 21 nt, Human
agauaucuuggacaaaucaca

SEQ ID NO: 1294328 - RNA, 22 nt, Human
agauaucuuggacaaaucacau

SEQ ID NO: 1294329 - RNA, 18 nt, Human
agauaugaacauauuguu

SEQ ID NO: 1294330 - RNA, 20 nt, Human
agauagauaggucagugcaa

SEQ ID NO: 1294331 - RNA, 15 nt, Human
agauagcccuguccu

SEQ ID NO: 1294332 - RNA, 17 nt, Human
agauagcccuguccugg

SEQ ID NO: 1294333 - RNA, 20 nt, Human
agauagcccuguccuggugg

SEQ ID NO: 1294334 - RNA, 18 nt, Human
agauagcccuguccuggu

SEQ ID NO: 1294335 - RNA, 19 nt, Human
agauagcccuguccuggug

SEQ ID NO: 1294336 - RNA, 16 nt, Human
agauagcugugacuuc

SEQ ID NO: 1294337 - RNA, 14 nt, Human
agauagcugugacu

SEQ ID NO: 1294338 - RNA, 20 nt, Human
agaguucuuuuugaaguauu

SEQ ID NO: 1294339 - RNA, 21 nt, Human
agaguucuuuuugaaguauuu

SEQ ID NO: 1294340 - RNA, 22 nt, Human
agaguucuuuuugaaguauuua

SEQ ID NO: 1294341 - RNA, 12 nt, Human
agaguugaaccu

SEQ ID NO: 1294342 - RNA, 13 nt, Human
agaguugaaccua

SEQ ID NO: 1294343 - RNA, 12 nt, Human
agauagaaugac

SEQ ID NO: 1294344 - RNA, 15 nt, Human
agauagaaugacagu

SEQ ID NO: 1294345 - RNA, 16 nt, Human
agauagaaugacaguc

SEQ ID NO: 1294346 - RNA, 18 nt, Human
agagggucugggggcaca

SEQ ID NO: 1294347 - RNA, 14 nt, Human
agaguggggguggg

SEQ ID NO: 1294348 - RNA, 15 nt, Human
agaguggcuccuccc

SEQ ID NO: 1294349 - RNA, 12 nt, Human
agaguggcuccu

SEQ ID NO: 1294350 - RNA, 13 nt, Human
agaguggcuccuc

SEQ ID NO: 1294351 - RNA, 14 nt, Human
agaguggcuccucc

SEQ ID NO: 1294352 - RNA, 17 nt, Human
agauugagauguguuca

SEQ ID NO: 1294353 - RNA, 18 nt, Human
agauugagagaagagaca

SEQ ID NO: 1294354 - RNA, 19 nt, Human
agauugagagaagagacaa

SEQ ID NO: 1294355 - RNA, 13 nt, Human
agauugagagaau

SEQ ID NO: 1294356 - RNA, 15 nt, Human
agauugagagaauuu

SEQ ID NO: 1294357 - RNA, 17 nt, Human
agauugagcucucugcc

SEQ ID NO: 1294358 - RNA, 18 nt, Human
agauugagcucucugccc

SEQ ID NO: 1294359 - RNA, 17 nt, Human
agauugacgacaagugc

SEQ ID NO: 1294360 - RNA, 15 nt, Human
agauugacgacaagu

SEQ ID NO: 1294361 - RNA, 14 nt, Human
agauugauuguauu

SEQ ID NO: 1294362 - RNA, 15 nt, Human
agauugauuguauug

SEQ ID NO: 1294363 - RNA, 16 nt, Human
agauugauuguauugu

SEQ ID NO: 1294364 - RNA, 16 nt, Human
agauugcagaaaauuc

SEQ ID NO: 1294365 - RNA, 18 nt, Human
agauugcagaaaauucug

SEQ ID NO: 1294366 - RNA, 19 nt, Human
agauugcagaaaauucugu

SEQ ID NO: 1294367 - RNA, 20 nt, Human
agauugcagaaaauucugug

SEQ ID NO: 1294368 - RNA, 21 nt, Human
agauugcagaaaauucugugc

SEQ ID NO: 1294369 - RNA, 23 nt, Human
agauugcagaaaauucugugccu

SEQ ID NO: 1294370 - RNA, 13 nt, Human
agauugcugaaau

SEQ ID NO: 1294371 - RNA, 14 nt, Human
agauugcugaaauu

SEQ ID NO: 1294372 - RNA, 15 nt, Human
agcaaaaucuaccag

SEQ ID NO: 1294373 - RNA, 23 nt, Human
agcaaaauuuuuucucuaggaaa

SEQ ID NO: 1294374 - RNA, 13 nt, Human
agcaaacucuuuu

SEQ ID NO: 1294375 - RNA, 17 nt, Human
agcaaacucuuuuccca

SEQ ID NO: 1294376 - RNA, 15 nt, Human
agcaaacugcaugcc

SEQ ID NO: 1294377 - RNA, 19 nt, Human
agcaaacugcaugcccaga

SEQ ID NO: 1294378 - RNA, 22 nt, Human
agcaaacugcaugcccagagac

SEQ ID NO: 1294379 - RNA, 20 nt, Human
agcaaacugcaugcccagag

SEQ ID NO: 1294380 - RNA, 20 nt, Human
agcaaagauaucucaucucu

SEQ ID NO: 1294381 - RNA, 12 nt, Human
agcaaagcacag

SEQ ID NO: 1294382 - RNA, 13 nt, Human
agcaaagcacaga

SEQ ID NO: 1294383 - RNA, 15 nt, Human
agcaaagcacagaga

SEQ ID NO: 1294384 - RNA, 14 nt, Human
agcaaagcacagag

SEQ ID NO: 1294385 - RNA, 18 nt, Human
agcaacaauaaauagaca

SEQ ID NO: 1294386 - RNA, 13 nt, Human
agcaacaauaaau

SEQ ID NO: 1294387 - RNA, 12 nt, Human
agcaacaauaaa

SEQ ID NO: 1294388 - RNA, 15 nt, Human
agcaacaauuuauga

SEQ ID NO: 1294389 - RNA, 15 nt, Human
agcaaaucgaaugaa

SEQ ID NO: 1294390 - RNA, 20 nt, Human
agcaaauccuuugugaaaaa

SEQ ID NO: 1294391 - RNA, 12 nt, Human
agcaaauccuuu

SEQ ID NO: 1294392 - RNA, 17 nt, Human
agcaaaucgaaugaaau

SEQ ID NO: 1294393 - RNA, 23 nt, Human
agcaaaucaccacaaacuguaau

SEQ ID NO: 1294394 - RNA, 19 nt, Human
agcaaaucauuuguuuaaa

SEQ ID NO: 1294395 - RNA, 22 nt, Human
agcaaaucauuuguuuaaaaag

SEQ ID NO: 1294396 - RNA, 11 nt, Human
agcaaaucacc

SEQ ID NO: 1294397 - RNA, 18 nt, Human
agcaaaucaccacaaacu

SEQ ID NO: 1294398 - RNA, 21 nt, Human
agcaaaucaccacaaacugua

SEQ ID NO: 1294399 - RNA, 22 nt, Human
agcaaaucaccacaaacuguaa

SEQ ID NO: 1294400 - RNA, 23 nt, Human
agaucugauuuguaacccacuga

SEQ ID NO: 1294401 - RNA, 21 nt, Human
agaucugcagggggugugucu

SEQ ID NO: 1294402 - RNA, 18 nt, Human
agaucucugcuuuggaaa

SEQ ID NO: 1294403 - RNA, 23 nt, Human
agaucucugcuuuggaaaucaca

SEQ ID NO: 1294404 - RNA, 19 nt, Human
agaugaaugaagcaaaugu

SEQ ID NO: 1294405 - RNA, 16 nt, Human
agaugaaugccgugga

SEQ ID NO: 1294406 - RNA, 18 nt, Human
agaugacaagaaaggcug

SEQ ID NO: 1294407 - RNA, 20 nt, Human
agaugaccacuuuuuagaaa

SEQ ID NO: 1294408 - RNA, 17 nt, Human
agaugaauguccugaaa

SEQ ID NO: 1294409 - RNA, 18 nt, Human
agauggcugugccucugc

SEQ ID NO: 1294410 - RNA, 19 nt, Human
agauggcugugccucugcc

SEQ ID NO: 1294411 - RNA, 20 nt, Human
agauggcugugccucugccu

SEQ ID NO: 1294412 - RNA, 21 nt, Human
agauggcugugccucugccug

SEQ ID NO: 1294413 - RNA, 22 nt, Human
agauggcugugccucugccugu

SEQ ID NO: 1294414 - RNA, 15 nt, Human
agauucuaaagauuc

SEQ ID NO: 1294415 - RNA, 16 nt, Human
agauucuaaagauucu

SEQ ID NO: 1294416 - RNA, 17 nt, Human
agauucuaaagauucua

SEQ ID NO: 1294417 - RNA, 18 nt, Human
agauucuaaagauucuau

SEQ ID NO: 1294418 - RNA, 21 nt, Human
agauucuaaagauucuauagu

SEQ ID NO: 1294419 - RNA, 12 nt, Human
agauucuaaagg

SEQ ID NO: 1294420 - RNA, 19 nt, Human
agauucuauaguucuagac

SEQ ID NO: 1294421 - RNA, 20 nt, Human
agauucuauaguucuagaca

SEQ ID NO: 1294422 - RNA, 21 nt, Human
agauucuauaguucuagacau

SEQ ID NO: 1294423 - RNA, 12 nt, Human
agauucuuuccc

SEQ ID NO: 1294424 - RNA, 13 nt, Human
agauucuaaaggu

SEQ ID NO: 1294425 - RNA, 23 nt, Human
agauucuaaagguccacaggucu

SEQ ID NO: 1294426 - RNA, 10 nt, Human
agauucuaac

SEQ ID NO: 1294427 - RNA, 12 nt, Human
agauucuaacgg

SEQ ID NO: 1294428 - RNA, 13 nt, Human
agauucuaaugau

SEQ ID NO: 1294429 - RNA, 14 nt, Human
agauucuaaugaug

SEQ ID NO: 1294430 - RNA, 11 nt, Human
agauucuagau

SEQ ID NO: 1294431 - RNA, 12 nt, Human
agauucuagauc

SEQ ID NO: 1294432 - RNA, 14 nt, Human
agauucuagaucag

SEQ ID NO: 1294433 - RNA, 14 nt, Human
agauucuagaugau

SEQ ID NO: 1294434 - RNA, 15 nt, Human
agauucuauaguucu

SEQ ID NO: 1294435 - RNA, 16 nt, Human
agauucuauaguucua

SEQ ID NO: 1294436 - RNA, 18 nt, Human
agauucuauaguucuaga

SEQ ID NO: 1294437 - RNA, 17 nt, Human
agccaacuauggccugu

SEQ ID NO: 1294438 - RNA, 23 nt, Human
agcaucugggccuuggccuggag

SEQ ID NO: 1294439 - RNA, 15 nt, Human
agcaucugucccccu

SEQ ID NO: 1294440 - RNA, 16 nt, Human
agccaacuagccccug

SEQ ID NO: 1294441 - RNA, 17 nt, Human
agccaacuagccccugg

SEQ ID NO: 1294442 - RNA, 17 nt, Human
agccaacuaugauuauu

SEQ ID NO: 1294443 - RNA, 20 nt, Human
agccaacuaugauuauuaac

SEQ ID NO: 1294444 - RNA, 17 nt, Human
agcaucuccaagcagcu

SEQ ID NO: 1294445 - RNA, 14 nt, Human
agcaucucuaccuu

SEQ ID NO: 1294446 - RNA, 15 nt, Human
agcaucucuaccuuc

SEQ ID NO: 1294447 - RNA, 17 nt, Human
agcaucucuaccuucuc

SEQ ID NO: 1294448 - RNA, 18 nt, Human
agcaucucuaccuucucc

SEQ ID NO: 1294449 - RNA, 19 nt, Human
agcaucucuaccuucuccc

SEQ ID NO: 1294450 - RNA, 22 nt, Human
agcaucucuaccuucuccccag

SEQ ID NO: 1294451 - RNA, 23 nt, Human
agcaucucuaccuucuccccagc

SEQ ID NO: 1294452 - RNA, 13 nt, Human
agcaucuggcucu

SEQ ID NO: 1294453 - RNA, 16 nt, Human
agcaucuggcucuaau

SEQ ID NO: 1294454 - RNA, 18 nt, Human
agcaucuggcucuaauuc

SEQ ID NO: 1294455 - RNA, 13 nt, Human
agcaucugggccu

SEQ ID NO: 1294456 - RNA, 18 nt, Human
agcaucugggccuuggcc

SEQ ID NO: 1294457 - RNA, 19 nt, Human
agcaucugggccuuggccu

SEQ ID NO: 1294458 - RNA, 22 nt, Human
agcaucugggccuuggccugga

SEQ ID NO: 1294459 - RNA, 16 nt, Human
agccaagggaaccugu

SEQ ID NO: 1294460 - RNA, 17 nt, Human
agccaagggaaccugug

SEQ ID NO: 1294461 - RNA, 19 nt, Human
agccaagggaaccuguguc

SEQ ID NO: 1294462 - RNA, 20 nt, Human
agccaagggaaccugugucc

SEQ ID NO: 1294463 - RNA, 21 nt, Human
agccaagggaaccuguguccg

SEQ ID NO: 1294464 - RNA, 11 nt, Human
agccaagggau

SEQ ID NO: 1294465 - RNA, 14 nt, Human
agccaagggaugga

SEQ ID NO: 1294466 - RNA, 18 nt, Human
agccaagggauggacauc

SEQ ID NO: 1294467 - RNA, 20 nt, Human
agccaagggauggacaucuu

SEQ ID NO: 1294468 - RNA, 16 nt, Human
agccaaggggcuucag

SEQ ID NO: 1294469 - RNA, 23 nt, Human
agccaagggcaacagaucaguaa

SEQ ID NO: 1294470 - RNA, 22 nt, Human
agccaagguuuuauaaggcuga

SEQ ID NO: 1294471 - RNA, 22 nt, Human
agccaagggauggacaucuugu

SEQ ID NO: 1294472 - RNA, 15 nt, Human
agcaucucagcucau

SEQ ID NO: 1294473 - RNA, 16 nt, Human
agcaucuccaagcagc

SEQ ID NO: 1294474 - RNA, 22 nt, Human
agcaucggacaagacccccagc

SEQ ID NO: 1294475 - RNA, 23 nt, Human
agcaucggacaagacccccagca

SEQ ID NO: 1294476 - RNA, 12 nt, Human
agcaucuaaguu

SEQ ID NO: 1294477 - RNA, 20 nt, Human
agcaucuaaguuauaagacu

SEQ ID NO: 1294478 - RNA, 22 nt, Human
agcaucuaaguuauaagacucu

SEQ ID NO: 1294479 - RNA, 23 nt, Human
agcaucuaaguuauaagacucuc

SEQ ID NO: 1294480 - RNA, 19 nt, Human
agcaauuuaaauguuauga

SEQ ID NO: 1294481 - RNA, 17 nt, Human
agcaauuuaaauguuau

SEQ ID NO: 1294482 - RNA, 16 nt, Human
agcaauuuaaauguua

SEQ ID NO: 1294483 - RNA, 13 nt, Human
agcaauuuaaaug

SEQ ID NO: 1294484 - RNA, 16 nt, Human
agcaauucuuucaagu

SEQ ID NO: 1294485 - RNA, 17 nt, Human
agcaauucuccugccuc

SEQ ID NO: 1294486 - RNA, 18 nt, Human
agcaauucuccugccuca

SEQ ID NO: 1294487 - RNA, 19 nt, Human
agcaauucuccugccucag

SEQ ID NO: 1294488 - RNA, 20 nt, Human
agcaauucuccugccucagc

SEQ ID NO: 1294489 - RNA, 15 nt, Human
agcaauucuccugcc

SEQ ID NO: 1294490 - RNA, 13 nt, Human
agcaauuucuaau

SEQ ID NO: 1294491 - RNA, 12 nt, Human
agcacagagagu

SEQ ID NO: 1294492 - RNA, 19 nt, Human
agcacagagagucuggaua

SEQ ID NO: 1294493 - RNA, 17 nt, Human
agcacagagagucugga

SEQ ID NO: 1294494 - RNA, 15 nt, Human
agcacagauggccag

SEQ ID NO: 1294495 - RNA, 16 nt, Human
agcacagauggccagc

SEQ ID NO: 1294496 - RNA, 17 nt, Human
agcacagauggccagcc

SEQ ID NO: 1294497 - RNA, 20 nt, Human
agcacagauggccagccccu

SEQ ID NO: 1294498 - RNA, 14 nt, Human
agcacugccaccag

SEQ ID NO: 1294499 - RNA, 12 nt, Human
agcacugccagg

SEQ ID NO: 1294500 - RNA, 13 nt, Human
agcacugccagga

SEQ ID NO: 1294501 - RNA, 16 nt, Human
agcacuagccaaaccu

SEQ ID NO: 1294502 - RNA, 19 nt, Human
agcacuagccaaaccucac

SEQ ID NO: 1294503 - RNA, 20 nt, Human
agcacuagccaaaccucacc

SEQ ID NO: 1294504 - RNA, 19 nt, Human
agcacucgcuagcaguggc

SEQ ID NO: 1294505 - RNA, 23 nt, Human
agcagccugagcaacucuugauu

SEQ ID NO: 1294506 - RNA, 11 nt, Human
agcagccuuuc

SEQ ID NO: 1294507 - RNA, 19 nt, Human
agcagugauugucuuaaua

SEQ ID NO: 1294508 - RNA, 12 nt, Human
agcagugcuuuu

SEQ ID NO: 1294509 - RNA, 15 nt, Human
agcaguggcaggcag

SEQ ID NO: 1294510 - RNA, 22 nt, Human
agcaguggcaggcagaggccca

SEQ ID NO: 1294511 - RNA, 12 nt, Human
agcaguggccuu

SEQ ID NO: 1294512 - RNA, 19 nt, Human
agcaguggccuuauugcau

SEQ ID NO: 1294513 - RNA, 22 nt, Human
agcaguggcugguccagggcua

SEQ ID NO: 1294514 - RNA, 11 nt, Human
agcaguggcug

SEQ ID NO: 1294515 - RNA, 12 nt, Human
agcaguggcugg

SEQ ID NO: 1294516 - RNA, 13 nt, Human
agcaguggcuggu

SEQ ID NO: 1294517 - RNA, 16 nt, Human
agcaguggcuggucca

SEQ ID NO: 1294518 - RNA, 17 nt, Human
agcaguggcugguccag

SEQ ID NO: 1294519 - RNA, 18 nt, Human
agcaguggcugguccagg

SEQ ID NO: 1294520 - RNA, 19 nt, Human
agcaguggcugguccaggg

SEQ ID NO: 1294521 - RNA, 21 nt, Human
agcaguggcugguccagggcu

SEQ ID NO: 1294522 - RNA, 18 nt, Human
agacgaaacauuuguucu

SEQ ID NO: 1294523 - RNA, 20 nt, Human
agaccuuuuucugcacuaua

SEQ ID NO: 1294524 - RNA, 18 nt, Human
agaccuuuuucugcacua

SEQ ID NO: 1294525 - RNA, 14 nt, Human
agaccuuuuucugc

SEQ ID NO: 1294526 - RNA, 16 nt, Human
agaccuuuuuuaggaa

SEQ ID NO: 1294527 - RNA, 14 nt, Human
agaccuuuuuuagg

SEQ ID NO: 1294528 - RNA, 17 nt, Human
agacccaaaaggcagaa

SEQ ID NO: 1294529 - RNA, 23 nt, Human
agaccauggacacuacacccagc

SEQ ID NO: 1294530 - RNA, 22 nt, Human
agaccauggacacuacacccag

SEQ ID NO: 1294531 - RNA, 21 nt, Human
agaccauggacacuacaccca

SEQ ID NO: 1294532 - RNA, 12 nt, Human
agaccauggaca

SEQ ID NO: 1294533 - RNA, 17 nt, Human
agaccaccucucaauau

SEQ ID NO: 1294534 - RNA, 19 nt, Human
agaccacgcccguccugcc

SEQ ID NO: 1294535 - RNA, 12 nt, Human
agaccaccucuc

SEQ ID NO: 1294536 - RNA, 16 nt, Human
agaccaccccgccugc

SEQ ID NO: 1294537 - RNA, 20 nt, Human
agaccacgcccguccugccu

SEQ ID NO: 1294538 - RNA, 21 nt, Human
agaccacgcccguccugccug

SEQ ID NO: 1294539 - RNA, 23 nt, Human
agaccacgcccguccugccugug

SEQ ID NO: 1294540 - RNA, 24 nt, Human
agaccacgcccguccugccugugg

SEQ ID NO: 1294541 - RNA, 23 nt, Human
agacaauugagguaaguuuuuug

SEQ ID NO: 1294542 - RNA, 19 nt, Human
agacaauugacaacaguua

SEQ ID NO: 1294543 - RNA, 13 nt, Human
agacagcccucca

SEQ ID NO: 1294544 - RNA, 17 nt, Human
agacagcuccacccugg

SEQ ID NO: 1294545 - RNA, 11 nt, Human
agaccaccagg

SEQ ID NO: 1294546 - RNA, 14 nt, Human
agaccaccagggca

SEQ ID NO: 1294547 - RNA, 23 nt, Human
agaccaccagggcaucucugggc

SEQ ID NO: 1294548 - RNA, 14 nt, Human
agaccaccccgccu

SEQ ID NO: 1294549 - RNA, 12 nt, Human
agacuagaugua

SEQ ID NO: 1294550 - RNA, 13 nt, Human
agacuagauguag

SEQ ID NO: 1294551 - RNA, 14 nt, Human
agacuagauguagu

SEQ ID NO: 1294552 - RNA, 16 nt, Human
agacuagauguaguau

SEQ ID NO: 1294553 - RNA, 19 nt, Human
agacuagauguaguauuuu

SEQ ID NO: 1294554 - RNA, 23 nt, Human
agacuagauguaguauuuuuugu

SEQ ID NO: 1294555 - RNA, 16 nt, Human
agacuagauggaccug

SEQ ID NO: 1294556 - RNA, 19 nt, Human
agacaaggaaaaaauaaca

SEQ ID NO: 1294557 - RNA, 19 nt, Human
agacaaaacauacauuuug

SEQ ID NO: 1294558 - RNA, 15 nt, Human
agacaagccagaacu

SEQ ID NO: 1294559 - RNA, 16 nt, Human
agacaauugacaacag

SEQ ID NO: 1294560 - RNA, 17 nt, Human
agacaagccuggccuac

SEQ ID NO: 1294561 - RNA, 17 nt, Human
agacaagccagaacuug

SEQ ID NO: 1294562 - RNA, 23 nt, Human
agacaagugaugcuaaaaccuga

SEQ ID NO: 1294563 - RNA, 15 nt, Human
agaauuuugagcagg

SEQ ID NO: 1294564 - RNA, 22 nt, Human
agaauuuuauacuuucccuacc

SEQ ID NO: 1294565 - RNA, 21 nt, Human
agaauuuuauacuuucccuac

SEQ ID NO: 1294566 - RNA, 19 nt, Human
agacaaaaaacuauaugua

SEQ ID NO: 1294567 - RNA, 18 nt, Human
agaauuuuauacuuuccc

SEQ ID NO: 1294568 - RNA, 20 nt, Human
agaauuuuauacuuucccua

SEQ ID NO: 1294569 - RNA, 22 nt, Human
agagaggccauucuuucccaac

SEQ ID NO: 1294570 - RNA, 23 nt, Human
agagaggccauucuuucccaaca

SEQ ID NO: 1294571 - RNA, 12 nt, Human
agagaggccauu

SEQ ID NO: 1294572 - RNA, 17 nt, Human
agagccugcaggaucuc

SEQ ID NO: 1294573 - RNA, 23 nt, Human
agagcccacuccaucugguagaa

SEQ ID NO: 1294574 - RNA, 12 nt, Human
agagcccagcuc

SEQ ID NO: 1294575 - RNA, 13 nt, Human
agagcccagcucc

SEQ ID NO: 1294576 - RNA, 14 nt, Human
agagcccagcucca

SEQ ID NO: 1294577 - RNA, 15 nt, Human
agagcccagcuccaa

SEQ ID NO: 1294578 - RNA, 14 nt, Human
agagccugagggau

SEQ ID NO: 1294579 - RNA, 13 nt, Human
agagccugaggga

SEQ ID NO: 1294580 - RNA, 14 nt, Human
agagccugcaggau

SEQ ID NO: 1294581 - RNA, 16 nt, Human
agagccugcaggaucu

SEQ ID NO: 1294582 - RNA, 20 nt, Human
agagaaaaugcgguuauaaa

SEQ ID NO: 1294583 - RNA, 24 nt, Human
agacugaauagauaugaaagcuga

SEQ ID NO: 1294584 - RNA, 21 nt, Human
agacucuuuuccuucccuuuu

SEQ ID NO: 1294585 - RNA, 18 nt, Human
agacucuuuuccuucccu

SEQ ID NO: 1294586 - RNA, 21 nt, Human
agacugaauagauaugaaagc

SEQ ID NO: 1294587 - RNA, 22 nt, Human
agacugaauagauaugaaagcu

SEQ ID NO: 1294588 - RNA, 22 nt, Human
agacugacaguuuacagacgcu

SEQ ID NO: 1294589 - RNA, 13 nt, Human
agagaaacaguug

SEQ ID NO: 1294590 - RNA, 16 nt, Human
agagaaacaguuggua

SEQ ID NO: 1294591 - RNA, 12 nt, Human
agagaaaccagc

SEQ ID NO: 1294592 - RNA, 13 nt, Human
agagaaaccagcu

SEQ ID NO: 1294593 - RNA, 14 nt, Human
agagaaaccagcuu

SEQ ID NO: 1294594 - RNA, 15 nt, Human
agagaaaccagcuuc

SEQ ID NO: 1294595 - RNA, 17 nt, Human
agagaaaccagcuuccu

SEQ ID NO: 1294596 - RNA, 18 nt, Human
agagaaaccagcuuccuu

SEQ ID NO: 1294597 - RNA, 19 nt, Human
agagaaaccagcuuccuuc

SEQ ID NO: 1294598 - RNA, 20 nt, Human
agagaaaccagcuuccuuca

SEQ ID NO: 1294599 - RNA, 22 nt, Human
agagaaaccagcuuccuucaga

SEQ ID NO: 1294600 - RNA, 21 nt, Human
agagaaaccagcuuccuucag

SEQ ID NO: 1294601 - RNA, 15 nt, Human
agagaagucacaggg

SEQ ID NO: 1294602 - RNA, 18 nt, Human
agagaagucacagggcag

SEQ ID NO: 1294603 - RNA, 18 nt, Human
agagaaguauacauaagu

SEQ ID NO: 1294604 - RNA, 18 nt, Human
agagaacccagcccaccc

SEQ ID NO: 1294605 - RNA, 15 nt, Human
agagaacccagccca

SEQ ID NO: 1294606 - RNA, 14 nt, Human
agagaaauaugaag

SEQ ID NO: 1294607 - RNA, 23 nt, Human
agagaaauaagugcccucuccca

SEQ ID NO: 1294608 - RNA, 13 nt, Human
agagaaccaggcu

SEQ ID NO: 1294609 - RNA, 14 nt, Human
agagaacccagccc

SEQ ID NO: 1294610 - RNA, 19 nt, Human
agagaagucacagggcagu

SEQ ID NO: 1294611 - RNA, 20 nt, Human
agagaagucacagggcagua

SEQ ID NO: 1294612 - RNA, 23 nt, Human
agagaagucacagggcaguaccu

SEQ ID NO: 1294613 - RNA, 12 nt, Human
agagaaguugua

SEQ ID NO: 1294614 - RNA, 13 nt, Human
agagaauaaauug

SEQ ID NO: 1294615 - RNA, 12 nt, Human
agagaaucaaca

SEQ ID NO: 1294616 - RNA, 15 nt, Human
agagaaucaacauuu

SEQ ID NO: 1294617 - RNA, 20 nt, Human
agagaaucaacauuucucaa

SEQ ID NO: 1294618 - RNA, 21 nt, Human
agaagacugcauuauauuuau

SEQ ID NO: 1294619 - RNA, 20 nt, Human
agaaccaggcaacuugggaa

SEQ ID NO: 1294620 - RNA, 16 nt, Human
agaaccaggcuacaag

SEQ ID NO: 1294621 - RNA, 16 nt, Human
agaaccagucccccca

SEQ ID NO: 1294622 - RNA, 19 nt, Human
agaaccaguccccccaccc

SEQ ID NO: 1294623 - RNA, 20 nt, Human
agaaccaguccccccacccu

SEQ ID NO: 1294624 - RNA, 11 nt, Human
agaaccaaaga

SEQ ID NO: 1294625 - RNA, 19 nt, Human
agaaccaaagaagaaaguc

SEQ ID NO: 1294626 - RNA, 17 nt, Human
agaaccaggcaacuugg

SEQ ID NO: 1294627 - RNA, 22 nt, Human
agaaccacagggcuauuuuguu

SEQ ID NO: 1294628 - RNA, 16 nt, Human
agaaccaaagaagaaa

SEQ ID NO: 1294629 - RNA, 13 nt, Human
agaaccaaaucug

SEQ ID NO: 1294630 - RNA, 16 nt, Human
agaaccaaaucuggaa

SEQ ID NO: 1294631 - RNA, 18 nt, Human
agaaccaaaucuggaagc

SEQ ID NO: 1294632 - RNA, 24 nt, Human
agaagagcgagagaucaaagauga

SEQ ID NO: 1294633 - RNA, 14 nt, Human
agaagucucagcua

SEQ ID NO: 1294634 - RNA, 22 nt, Human
agaagucucagcuaagcucacg

SEQ ID NO: 1294635 - RNA, 15 nt, Human
agaagucucuuccag

SEQ ID NO: 1294636 - RNA, 21 nt, Human
agaauccuaggcuccacccca

SEQ ID NO: 1294637 - RNA, 22 nt, Human
agaaucccuuaacaguuguauu

SEQ ID NO: 1294638 - RNA, 23 nt, Human
agaagucacagggcaguaccuga

SEQ ID NO: 1294639 - RNA, 13 nt, Human
agaagucucagcu

SEQ ID NO: 1294640 - RNA, 14 nt, Human
agaagucacagggc

SEQ ID NO: 1294641 - RNA, 15 nt, Human
agaagucacagggca

SEQ ID NO: 1294642 - RNA, 16 nt, Human
agaagucacagggcag

SEQ ID NO: 1294643 - RNA, 17 nt, Human
agaagucacagggcagu

SEQ ID NO: 1294644 - RNA, 18 nt, Human
agaagucacagggcagua

SEQ ID NO: 1294645 - RNA, 19 nt, Human
agaagucacagggcaguac

SEQ ID NO: 1294646 - RNA, 21 nt, Human
agaagucacagggcaguaccu

SEQ ID NO: 1294647 - RNA, 15 nt, Human
agaagggagggcaga

SEQ ID NO: 1294648 - RNA, 16 nt, Human
agaagggagggcagag

SEQ ID NO: 1294649 - RNA, 19 nt, Human
agaagggagggcagagcug

SEQ ID NO: 1294650 - RNA, 21 nt, Human
agaagggagggcagagcuggu

SEQ ID NO: 1294651 - RNA, 22 nt, Human
agaagggagggcagagcuggug

SEQ ID NO: 1294652 - RNA, 23 nt, Human
agaagggagggcagagcuggugc

SEQ ID NO: 1294653 - RNA, 21 nt, Human
agaagggcugcuucccugaag

SEQ ID NO: 1294654 - RNA, 15 nt, Human
agaaggggagaugga

SEQ ID NO: 1294655 - RNA, 17 nt, Human
agaaugauuaugaauua

SEQ ID NO: 1294656 - RNA, 16 nt, Human
agaaugcacaagaaug

SEQ ID NO: 1294657 - RNA, 17 nt, Human
agaaugcacaagaaugg

SEQ ID NO: 1294658 - RNA, 16 nt, Human
agaaugaucugauuga

SEQ ID NO: 1294659 - RNA, 20 nt, Human
agaaugcacaagaauggauc

SEQ ID NO: 1294660 - RNA, 19 nt, Human
agaaugcacaagaauggau

SEQ ID NO: 1294661 - RNA, 17 nt, Human
agaaugaucugauugac

SEQ ID NO: 1294662 - RNA, 14 nt, Human
agaaugaucugauu

SEQ ID NO: 1294663 - RNA, 17 nt, Human
agaaucgaggugcuguu

SEQ ID NO: 1294664 - RNA, 18 nt, Human
agaaucuauauuuaacaa

SEQ ID NO: 1294665 - RNA, 17 nt, Human
agaaucugcaauucaaa

SEQ ID NO: 1294666 - RNA, 19 nt, Human
agaaucuugguuugccuuc

SEQ ID NO: 1294667 - RNA, 20 nt, Human
agaaucuugguuugccuucc

SEQ ID NO: 1294668 - RNA, 12 nt, Human
agaaugagccuc

SEQ ID NO: 1294669 - RNA, 14 nt, Human
agaaucuuuagaga

SEQ ID NO: 1294670 - RNA, 23 nt, Human
agaaucuuuagagaaguauacau

SEQ ID NO: 1294671 - RNA, 17 nt, Human
agaacaucccuccuggg

SEQ ID NO: 1294672 - RNA, 13 nt, Human
agaacaucccucc

SEQ ID NO: 1294673 - RNA, 20 nt, Human
agaacaucuguauacccucu

SEQ ID NO: 1294674 - RNA, 18 nt, Human
agaacauggccuaagggc

SEQ ID NO: 1294675 - RNA, 13 nt, Human
agaacaugugaga

SEQ ID NO: 1294676 - RNA, 22 nt, Human
agaacaugugagagguuugacu

SEQ ID NO: 1294677 - RNA, 22 nt, Human
agaacagugauuaccagggacu

SEQ ID NO: 1294678 - RNA, 19 nt, Human
agaacagggaaaauaggca

SEQ ID NO: 1294679 - RNA, 20 nt, Human
agaacagggaaaauaggcag

SEQ ID NO: 1294680 - RNA, 22 nt, Human
agaacagggaaaauaggcagga

SEQ ID NO: 1294681 - RNA, 19 nt, Human
agaacauagacagaagaaa

SEQ ID NO: 1294682 - RNA, 21 nt, Human
agaacauagacagaagaaaca

SEQ ID NO: 1294683 - RNA, 18 nt, Human
agaacagcagacucagcu

SEQ ID NO: 1294684 - RNA, 12 nt, Human
agaacaaaugaa

SEQ ID NO: 1294685 - RNA, 15 nt, Human
agaacaaaugaagac

SEQ ID NO: 1294686 - RNA, 10 nt, Human
agaacaaggc

SEQ ID NO: 1294687 - RNA, 15 nt, Human
agaacaaugugcuau

SEQ ID NO: 1294688 - RNA, 15 nt, Human
agaacaacuaccuga

SEQ ID NO: 1294689 - RNA, 12 nt, Human
agaacacacaca

SEQ ID NO: 1294690 - RNA, 14 nt, Human
agaacacacacacu

SEQ ID NO: 1294691 - RNA, 15 nt, Human
agaacacacacacuu

SEQ ID NO: 1294692 - RNA, 20 nt, Human
agaacacagcaauuccucag

SEQ ID NO: 1294693 - RNA, 11 nt, Human
agaacacaguu

SEQ ID NO: 1294694 - RNA, 17 nt, Human
agaacaccuaugcaaag

SEQ ID NO: 1294695 - RNA, 11 nt, Human
agaacacuaau

SEQ ID NO: 1294696 - RNA, 14 nt, Human
agaacacuaauuca

SEQ ID NO: 1294697 - RNA, 15 nt, Human
agaacacuaauucau

SEQ ID NO: 1294698 - RNA, 19 nt, Human
agaacacuaauucauaauc

SEQ ID NO: 1294699 - RNA, 16 nt, Human
agaacacuaauucaua

SEQ ID NO: 1294700 - RNA, 12 nt, Human
agaacacuuaug

SEQ ID NO: 1294701 - RNA, 17 nt, Human
aucccccagaaaagaaa

SEQ ID NO: 1294702 - RNA, 15 nt, Human
auccccccaucuugc

SEQ ID NO: 1294703 - RNA, 17 nt, Human
auccccccaucuugcuu

SEQ ID NO: 1294704 - RNA, 20 nt, Human
auccccccaucuugcuuccc

SEQ ID NO: 1294705 - RNA, 12 nt, Human
aucccccagaaa

SEQ ID NO: 1294706 - RNA, 17 nt, Human
auccagggggcaagagg

SEQ ID NO: 1294707 - RNA, 23 nt, Human
auccagggaggcugguccuaugg

SEQ ID NO: 1294708 - RNA, 12 nt, Human
auccuugaagau

SEQ ID NO: 1294709 - RNA, 17 nt, Human
auccuuccucacaccag

SEQ ID NO: 1294710 - RNA, 14 nt, Human
aucgaccugccucg

SEQ ID NO: 1294711 - RNA, 18 nt, Human
aucgaaucuacuaauucc

SEQ ID NO: 1294712 - RNA, 20 nt, Human
aucgaaucuacuaauuccac

SEQ ID NO: 1294713 - RNA, 21 nt, Human
aucgacuuguuuuugcacaug

SEQ ID NO: 1294714 - RNA, 13 nt, Human
aucgaaugaaauu

SEQ ID NO: 1294715 - RNA, 14 nt, Human
aucgaaugaaauua

SEQ ID NO: 1294716 - RNA, 14 nt, Human
auccuugaagguau

SEQ ID NO: 1294717 - RNA, 15 nt, Human
auccuugaagguaua

SEQ ID NO: 1294718 - RNA, 15 nt, Human
aucgaaccguuuuga

SEQ ID NO: 1294719 - RNA, 23 nt, Human
auccaggccggcuugccacaccc

SEQ ID NO: 1294720 - RNA, 12 nt, Human
auccagggacag

SEQ ID NO: 1294721 - RNA, 13 nt, Human
auccagggacaga

SEQ ID NO: 1294722 - RNA, 14 nt, Human
auccagggacagag

SEQ ID NO: 1294723 - RNA, 16 nt, Human
auccagggacagaggc

SEQ ID NO: 1294724 - RNA, 19 nt, Human
auccagggacagaggcccc

SEQ ID NO: 1294725 - RNA, 20 nt, Human
auccagggacagaggcccca

SEQ ID NO: 1294726 - RNA, 21 nt, Human
auccagggacagaggccccag

SEQ ID NO: 1294727 - RNA, 14 nt, Human
auccaggccggcuu

SEQ ID NO: 1294728 - RNA, 21 nt, Human
auccagccuggggcugaggcu

SEQ ID NO: 1294729 - RNA, 17 nt, Human
auccagccuggggucug

SEQ ID NO: 1294730 - RNA, 15 nt, Human
auccagcuauguuau

SEQ ID NO: 1294731 - RNA, 22 nt, Human
auccaggcagauccaggacuau

SEQ ID NO: 1294732 - RNA, 12 nt, Human
auccacuuugca

SEQ ID NO: 1294733 - RNA, 19 nt, Human
auccagccuggggcugagg

SEQ ID NO: 1294734 - RNA, 12 nt, Human
auccagccuggg

SEQ ID NO: 1294735 - RNA, 23 nt, Human
auccagccuaacuuacauucuua

SEQ ID NO: 1294736 - RNA, 23 nt, Human
auccacuuuaucuugaauaaugu

SEQ ID NO: 1294737 - RNA, 23 nt, Human
aucaugccucugaggccagccug

SEQ ID NO: 1294738 - RNA, 14 nt, Human
aucaugccucugag

SEQ ID NO: 1294739 - RNA, 15 nt, Human
aucaugccucugagg

SEQ ID NO: 1294740 - RNA, 16 nt, Human
aucaugccucugaggc

SEQ ID NO: 1294741 - RNA, 17 nt, Human
aucaugccucugaggcc

SEQ ID NO: 1294742 - RNA, 19 nt, Human
aucaugccucugaggccag

SEQ ID NO: 1294743 - RNA, 20 nt, Human
aucaugccucugaggccagc

SEQ ID NO: 1294744 - RNA, 22 nt, Human
aucaugccucugaggccagccu

SEQ ID NO: 1294745 - RNA, 21 nt, Human
aucaucuaccuagauuuaaua

SEQ ID NO: 1294746 - RNA, 23 nt, Human
aucaugagugaauaaaugucuug

SEQ ID NO: 1294747 - RNA, 21 nt, Human
aucaugcauguccuguaaagg

SEQ ID NO: 1294748 - RNA, 12 nt, Human
aucaugcccugu

SEQ ID NO: 1294749 - RNA, 13 nt, Human
aucaaauacauuu

SEQ ID NO: 1294750 - RNA, 14 nt, Human
aucaaauacauuua

SEQ ID NO: 1294751 - RNA, 13 nt, Human
aucauccucuggc

SEQ ID NO: 1294752 - RNA, 15 nt, Human
aucauccucuggcuu

SEQ ID NO: 1294753 - RNA, 21 nt, Human
aucauccuuuagguaagaagu

SEQ ID NO: 1294754 - RNA, 19 nt, Human
auauuuuuuucugaaauuu

SEQ ID NO: 1294755 - RNA, 22 nt, Human
auauuuuuuuucuuuuuaccca

SEQ ID NO: 1294756 - RNA, 18 nt, Human
auauuuuuuuuuaagcuc

SEQ ID NO: 1294757 - RNA, 21 nt, Human
auauuuuuuuuuaagcucuga

SEQ ID NO: 1294758 - RNA, 23 nt, Human
auauuuuuuuuuaagcucugagc

SEQ ID NO: 1294759 - RNA, 19 nt, Human
aucaaaaaaggcaguuacc

SEQ ID NO: 1294760 - RNA, 14 nt, Human
aucaaaagaaagaa

SEQ ID NO: 1294761 - RNA, 15 nt, Human
aucaaaacuuucuuu

SEQ ID NO: 1294762 - RNA, 21 nt, Human
aucaaaacuuucuuuucugga

SEQ ID NO: 1294763 - RNA, 14 nt, Human
auauuuuuuucuga

SEQ ID NO: 1294764 - RNA, 16 nt, Human
auauuuuuuucugaaa

SEQ ID NO: 1294765 - RNA, 18 nt, Human
auauuuuuuucugaaauu

SEQ ID NO: 1294766 - RNA, 22 nt, Human
aucaaacccuagccuugcuugu

SEQ ID NO: 1294767 - RNA, 12 nt, Human
aucaaaggacac

SEQ ID NO: 1294768 - RNA, 18 nt, Human
aucaaaagggccaaagaa

SEQ ID NO: 1294769 - RNA, 22 nt, Human
aucaaaagggccaaagaaccaa

SEQ ID NO: 1294770 - RNA, 14 nt, Human
aucaaacauuuuga

SEQ ID NO: 1294771 - RNA, 15 nt, Human
aucaaacauuuugaa

SEQ ID NO: 1294772 - RNA, 16 nt, Human
aucaaacauuuugaaa

SEQ ID NO: 1294773 - RNA, 17 nt, Human
aucaaacccuagccuug

SEQ ID NO: 1294774 - RNA, 18 nt, Human
aucaaacccuagccuugc

SEQ ID NO: 1294775 - RNA, 20 nt, Human
aucaaacccuagccuugcuu

SEQ ID NO: 1294776 - RNA, 21 nt, Human
aucaaacccuagccuugcuug

SEQ ID NO: 1294777 - RNA, 16 nt, Human
augaaacuuuuggaag

SEQ ID NO: 1294778 - RNA, 20 nt, Human
augaagccuccuuagaaaaa

SEQ ID NO: 1294779 - RNA, 17 nt, Human
augaaacuagaaagcag

SEQ ID NO: 1294780 - RNA, 23 nt, Human
augaaacuagaaagcagagauuu

SEQ ID NO: 1294781 - RNA, 14 nt, Human
augaauacauuucc

SEQ ID NO: 1294782 - RNA, 21 nt, Human
augaauacauuuccaaaaugg

SEQ ID NO: 1294783 - RNA, 24 nt, Human
augaauaccuuagugcaguuauuu

SEQ ID NO: 1294784 - RNA, 21 nt, Human
augaauacuguauuuuguauu

SEQ ID NO: 1294785 - RNA, 12 nt, Human
augaauacuuug

SEQ ID NO: 1294786 - RNA, 17 nt, Human
augaauaaagacaccua

SEQ ID NO: 1294787 - RNA, 13 nt, Human
augaaguacucau

SEQ ID NO: 1294788 - RNA, 13 nt, Human
augaagcuguugu

SEQ ID NO: 1294789 - RNA, 17 nt, Human
augaggccagaccaugg

SEQ ID NO: 1294790 - RNA, 15 nt, Human
augaggccauggacu

SEQ ID NO: 1294791 - RNA, 21 nt, Human
augaggccauggacucugucc

SEQ ID NO: 1294792 - RNA, 14 nt, Human
augaggccagacca

SEQ ID NO: 1294793 - RNA, 13 nt, Human
augaggccagacc

SEQ ID NO: 1294794 - RNA, 12 nt, Human
augaggccagac

SEQ ID NO: 1294795 - RNA, 15 nt, Human
augaggccacuggag

SEQ ID NO: 1294796 - RNA, 23 nt, Human
augagcuuucugaacagcuggug

SEQ ID NO: 1294797 - RNA, 14 nt, Human
augaggcccuccac

SEQ ID NO: 1294798 - RNA, 15 nt, Human
augaggcccuccaca

SEQ ID NO: 1294799 - RNA, 20 nt, Human
augaggcccuccacaccugc

SEQ ID NO: 1294800 - RNA, 19 nt, Human
augaggcccuccacaccug

SEQ ID NO: 1294801 - RNA, 16 nt, Human
augagcucuucauguu

SEQ ID NO: 1294802 - RNA, 12 nt, Human
augagcuuucug

SEQ ID NO: 1294803 - RNA, 13 nt, Human
augagcuuucuga

SEQ ID NO: 1294804 - RNA, 14 nt, Human
augagcuuucugaa

SEQ ID NO: 1294805 - RNA, 15 nt, Human
augagcuuucugaac

SEQ ID NO: 1294806 - RNA, 17 nt, Human
augagcuuucugaacag

SEQ ID NO: 1294807 - RNA, 18 nt, Human
augagcuuucugaacagc

SEQ ID NO: 1294808 - RNA, 19 nt, Human
augagcuuucugaacagcu

SEQ ID NO: 1294809 - RNA, 20 nt, Human
augagcuuucugaacagcug

SEQ ID NO: 1294810 - RNA, 21 nt, Human
augagcuuucugaacagcugg

SEQ ID NO: 1294811 - RNA, 22 nt, Human
augagcuuucugaacagcuggu

SEQ ID NO: 1294812 - RNA, 21 nt, Human
augagcuuugucuacuucaaa

SEQ ID NO: 1294813 - RNA, 12 nt, Human
augaauauaaaa

SEQ ID NO: 1294814 - RNA, 19 nt, Human
aucuaggauuuuaagggaa

SEQ ID NO: 1294815 - RNA, 18 nt, Human
aucuaggcaacauaguau

SEQ ID NO: 1294816 - RNA, 11 nt, Human
aucuaggauuu

SEQ ID NO: 1294817 - RNA, 15 nt, Human
augagggaaaagaaa

SEQ ID NO: 1294818 - RNA, 13 nt, Human
augagggaaaaga

SEQ ID NO: 1294819 - RNA, 14 nt, Human
augagggaaaagaa

SEQ ID NO: 1294820 - RNA, 13 nt, Human
augaggcuuucca

SEQ ID NO: 1294821 - RNA, 20 nt, Human
augggacauuugcucaugga

SEQ ID NO: 1294822 - RNA, 15 nt, Human
augggacagggagga

SEQ ID NO: 1294823 - RNA, 17 nt, Human
augggaacaauugaagu

SEQ ID NO: 1294824 - RNA, 23 nt, Human
auggcuuccuggcaauagucaaa

SEQ ID NO: 1294825 - RNA, 18 nt, Human
auggagugcaccaaagag

SEQ ID NO: 1294826 - RNA, 19 nt, Human
auggagugcaccaaagaga

SEQ ID NO: 1294827 - RNA, 20 nt, Human
auggagugcaccaaagagaa

SEQ ID NO: 1294828 - RNA, 12 nt, Human
auggagugcugu

SEQ ID NO: 1294829 - RNA, 13 nt, Human
auggagugcuguu

SEQ ID NO: 1294830 - RNA, 18 nt, Human
auggagugcuguuuuguu

SEQ ID NO: 1294831 - RNA, 19 nt, Human
auggagugcuguuuuguua

SEQ ID NO: 1294832 - RNA, 20 nt, Human
auggagugcuguuuuguuau

SEQ ID NO: 1294833 - RNA, 21 nt, Human
auggagugcuguuuuguuaua

SEQ ID NO: 1294834 - RNA, 17 nt, Human
auggaguggcagcccag

SEQ ID NO: 1294835 - RNA, 18 nt, Human
auggaguggcagcccagc

SEQ ID NO: 1294836 - RNA, 20 nt, Human
auggaguggcagcccagcca

SEQ ID NO: 1294837 - RNA, 22 nt, Human
auggaguggcagcccagccagc

SEQ ID NO: 1294838 - RNA, 16 nt, Human
auggaguguacaagua

SEQ ID NO: 1294839 - RNA, 13 nt, Human
auggaguuucuaa

SEQ ID NO: 1294840 - RNA, 14 nt, Human
auggaguuucuaag

SEQ ID NO: 1294841 - RNA, 16 nt, Human
auggaguuucuaaggu

SEQ ID NO: 1294842 - RNA, 15 nt, Human
auggaguuucuaagg

SEQ ID NO: 1294843 - RNA, 19 nt, Human
augcucuuauuucaucauu

SEQ ID NO: 1294844 - RNA, 17 nt, Human
augcucuuauuucauca

SEQ ID NO: 1294845 - RNA, 15 nt, Human
augcucuuauuucau

SEQ ID NO: 1294846 - RNA, 16 nt, Human
augcucuuaauugcca

SEQ ID NO: 1294847 - RNA, 19 nt, Human
augcucuuaauugccaccu

SEQ ID NO: 1294848 - RNA, 23 nt, Human
augcucuuaauugccaccucuaa

SEQ ID NO: 1294849 - RNA, 15 nt, Human
augcucuuaauugcc

SEQ ID NO: 1294850 - RNA, 17 nt, Human
augcuuugaaacagaaa

SEQ ID NO: 1294851 - RNA, 18 nt, Human
augcuuugaaacagaaaa

SEQ ID NO: 1294852 - RNA, 21 nt, Human
augcuuugaaauugaaccuuu

SEQ ID NO: 1294853 - RNA, 19 nt, Human
augcuuugaaauugaaccu

SEQ ID NO: 1294854 - RNA, 18 nt, Human
augcucuuauuucaucau

SEQ ID NO: 1294855 - RNA, 16 nt, Human
augcuuugaaacagaa

SEQ ID NO: 1294856 - RNA, 16 nt, Human
auggagagcccuggga

SEQ ID NO: 1294857 - RNA, 19 nt, Human
auggagauucaguuuucau

SEQ ID NO: 1294858 - RNA, 13 nt, Human
auggagagcccug

SEQ ID NO: 1294859 - RNA, 15 nt, Human
auggagagcccuggg

SEQ ID NO: 1294860 - RNA, 18 nt, Human
auggagagcccugggacc

SEQ ID NO: 1294861 - RNA, 20 nt, Human
auggagauucaguuuucauu

SEQ ID NO: 1294862 - RNA, 17 nt, Human
auggagauugaccugga

SEQ ID NO: 1294863 - RNA, 20 nt, Human
auggagauugaccuggaugg

SEQ ID NO: 1294864 - RNA, 17 nt, Human
auggagugcaccaaaga

SEQ ID NO: 1294865 - RNA, 24 nt, Human
augcauauuauuuuauguugcaua

SEQ ID NO: 1294866 - RNA, 12 nt, Human
augcauauuugu

SEQ ID NO: 1294867 - RNA, 17 nt, Human
augcauacacucucaaa

SEQ ID NO: 1294868 - RNA, 23 nt, Human
augcauauuuuuuuucuuuuuac

SEQ ID NO: 1294869 - RNA, 16 nt, Human
augcauauuuguuuau

SEQ ID NO: 1294870 - RNA, 14 nt, Human
augcaucagaaagg

SEQ ID NO: 1294871 - RNA, 15 nt, Human
augcaucagaaaggg

SEQ ID NO: 1294872 - RNA, 18 nt, Human
augcaucagaaagggagg

SEQ ID NO: 1294873 - RNA, 20 nt, Human
augcaucagaaagggagggc

SEQ ID NO: 1294874 - RNA, 23 nt, Human
augcauggagggcugcccuguac

SEQ ID NO: 1294875 - RNA, 16 nt, Human
augcauggugccccag

SEQ ID NO: 1294876 - RNA, 17 nt, Human
augcauggugccccagg

SEQ ID NO: 1294877 - RNA, 18 nt, Human
augcauggugccccagga

SEQ ID NO: 1294878 - RNA, 19 nt, Human
augcauggugccccaggac

SEQ ID NO: 1294879 - RNA, 20 nt, Human
augcauggugccccaggacc

SEQ ID NO: 1294880 - RNA, 14 nt, Human
augcauacaaguuu

SEQ ID NO: 1294881 - RNA, 14 nt, Human
augcauaaaugcau

SEQ ID NO: 1294882 - RNA, 17 nt, Human
augcauguccuguaaag

SEQ ID NO: 1294883 - RNA, 21 nt, Human
augcauggugccccaggacca

SEQ ID NO: 1294884 - RNA, 22 nt, Human
augcauggugccccaggaccag

SEQ ID NO: 1294885 - RNA, 13 nt, Human
augcaugguuuca

SEQ ID NO: 1294886 - RNA, 16 nt, Human
augcaugguuucagca

SEQ ID NO: 1294887 - RNA, 17 nt, Human
augcaugguuucagcac

SEQ ID NO: 1294888 - RNA, 18 nt, Human
augcaugguuucagcacu

SEQ ID NO: 1294889 - RNA, 19 nt, Human
augcaugguuucagcacua

SEQ ID NO: 1294890 - RNA, 20 nt, Human
augcaugguuucagcacuag

SEQ ID NO: 1294891 - RNA, 16 nt, Human
augcauguccuguaaa

SEQ ID NO: 1294892 - RNA, 20 nt, Human
agucuggauaacuuccacag

SEQ ID NO: 1294893 - RNA, 23 nt, Human
agucuggauaacuuccacagggu

SEQ ID NO: 1294894 - RNA, 21 nt, Human
agucuggauaacuuccacagg

SEQ ID NO: 1294895 - RNA, 15 nt, Human
agucuggugaagcuc

SEQ ID NO: 1294896 - RNA, 12 nt, Human
agucuguccuug

SEQ ID NO: 1294897 - RNA, 13 nt, Human
agucuguccuuga

SEQ ID NO: 1294898 - RNA, 21 nt, Human
agucugugagauucauucaug

SEQ ID NO: 1294899 - RNA, 18 nt, Human
agucugugagauucauuc

SEQ ID NO: 1294900 - RNA, 13 nt, Human
agugaauaaaugu

SEQ ID NO: 1294901 - RNA, 19 nt, Human
agucgauagagcuguauua

SEQ ID NO: 1294902 - RNA, 24 nt, Human
aguccuuaaaauguaagauuauag

SEQ ID NO: 1294903 - RNA, 14 nt, Human
aguccuuggccugc

SEQ ID NO: 1294904 - RNA, 16 nt, Human
aguccuuuuuuuccau

SEQ ID NO: 1294905 - RNA, 21 nt, Human
aguccuuuuuuuccaucuuua

SEQ ID NO: 1294906 - RNA, 22 nt, Human
aguccugugaaugccacugccu

SEQ ID NO: 1294907 - RNA, 19 nt, Human
agucauuugcugagcaugu

SEQ ID NO: 1294908 - RNA, 22 nt, Human
agucauuugcugagcauguacu

SEQ ID NO: 1294909 - RNA, 19 nt, Human
aguaucaugcccugugcaa

SEQ ID NO: 1294910 - RNA, 15 nt, Human
aguaucaugcccugu

SEQ ID NO: 1294911 - RNA, 20 nt, Human
aguaucaucagauagcaucu

SEQ ID NO: 1294912 - RNA, 15 nt, Human
agugauuaccaggga

SEQ ID NO: 1294913 - RNA, 23 nt, Human
agugcuaacaugaagaccuuuuu

SEQ ID NO: 1294914 - RNA, 13 nt, Human
agugcuaagguuc

SEQ ID NO: 1294915 - RNA, 14 nt, Human
agugcuaagguucu

SEQ ID NO: 1294916 - RNA, 15 nt, Human
agugcuaagguucua

SEQ ID NO: 1294917 - RNA, 22 nt, Human
agugcuaacaugaagaccuuuu

SEQ ID NO: 1294918 - RNA, 19 nt, Human
agugcuaacaugaagaccu

SEQ ID NO: 1294919 - RNA, 17 nt, Human
agugcuaacaugaagac

SEQ ID NO: 1294920 - RNA, 16 nt, Human
agugcuaacaugaaga

SEQ ID NO: 1294921 - RNA, 16 nt, Human
agugcuaagguucuaa

SEQ ID NO: 1294922 - RNA, 17 nt, Human
agugcuaagguucuaag

SEQ ID NO: 1294923 - RNA, 18 nt, Human
agugcuaagguucuaagg

SEQ ID NO: 1294924 - RNA, 21 nt, Human
agugcuaagguucuaaggccu

SEQ ID NO: 1294925 - RNA, 16 nt, Human
agugcuacagggucca

SEQ ID NO: 1294926 - RNA, 19 nt, Human
agugccuuccuguuuuuca

SEQ ID NO: 1294927 - RNA, 13 nt, Human
agugccuuucagg

SEQ ID NO: 1294928 - RNA, 17 nt, Human
agugccuuucaggaucu

SEQ ID NO: 1294929 - RNA, 19 nt, Human
agugccuuucaggaucuau

SEQ ID NO: 1294930 - RNA, 21 nt, Human
agugccuuucaggaucuauuu

SEQ ID NO: 1294931 - RNA, 15 nt, Human
agugcguccacgagc

SEQ ID NO: 1294932 - RNA, 16 nt, Human
agugcggguccggcag

SEQ ID NO: 1294933 - RNA, 19 nt, Human
agugcgguuuacucacugc

SEQ ID NO: 1294934 - RNA, 13 nt, Human
agugauuaccagg

SEQ ID NO: 1294935 - RNA, 16 nt, Human
agugaaugauucagug

SEQ ID NO: 1294936 - RNA, 17 nt, Human
agugaaugauucagugu

SEQ ID NO: 1294937 - RNA, 19 nt, Human
agugaaugauucaguguua

SEQ ID NO: 1294938 - RNA, 14 nt, Human
agugaauaaauguc

SEQ ID NO: 1294939 - RNA, 17 nt, Human
agugaauaaaugucuug

SEQ ID NO: 1294940 - RNA, 16 nt, Human
agugaauacugcuaca

SEQ ID NO: 1294941 - RNA, 20 nt, Human
agugaauacugcuacagcaa

SEQ ID NO: 1294942 - RNA, 13 nt, Human
agugaaugauuca

SEQ ID NO: 1294943 - RNA, 11 nt, Human
agugacagcua

SEQ ID NO: 1294944 - RNA, 15 nt, Human
agugaaugcugggac

SEQ ID NO: 1294945 - RNA, 14 nt, Human
agugaaugcuggga

SEQ ID NO: 1294946 - RNA, 22 nt, Human
aguauauugauccagaaagaaa

SEQ ID NO: 1294947 - RNA, 21 nt, Human
aguauauugauaaccuugaaa

SEQ ID NO: 1294948 - RNA, 20 nt, Human
aguacuggcugauggaguaa

SEQ ID NO: 1294949 - RNA, 15 nt, Human
aguaccugagggucu

SEQ ID NO: 1294950 - RNA, 16 nt, Human
aguaccugagggucug

SEQ ID NO: 1294951 - RNA, 19 nt, Human
aguaccugagggucuguag

SEQ ID NO: 1294952 - RNA, 21 nt, Human
aguaccugagggucuguaggu

SEQ ID NO: 1294953 - RNA, 22 nt, Human
aguaccugagggucuguagguu

SEQ ID NO: 1294954 - RNA, 13 nt, Human
aguaccugggcaa

SEQ ID NO: 1294955 - RNA, 19 nt, Human
aguaccugggcaagcuggc

SEQ ID NO: 1294956 - RNA, 18 nt, Human
aguaccugggcaagcugg

SEQ ID NO: 1294957 - RNA, 19 nt, Human
aguaccuuuuauaucccau

SEQ ID NO: 1294958 - RNA, 16 nt, Human
aguacgaaccuacagu

SEQ ID NO: 1294959 - RNA, 18 nt, Human
aguacgaaccuacaguuu

SEQ ID NO: 1294960 - RNA, 13 nt, Human
aguacuccacacu

SEQ ID NO: 1294961 - RNA, 14 nt, Human
aguacuccacacug

SEQ ID NO: 1294962 - RNA, 15 nt, Human
aguacuccacacugc

SEQ ID NO: 1294963 - RNA, 16 nt, Human
aguacuccacacugca

SEQ ID NO: 1294964 - RNA, 18 nt, Human
aguacuccacacugcaca

SEQ ID NO: 1294965 - RNA, 19 nt, Human
aguacuccacacugcacaa

SEQ ID NO: 1294966 - RNA, 20 nt, Human
aguacuccacacugcacaau

SEQ ID NO: 1294967 - RNA, 19 nt, Human
aguaacuacaguuagggcu

SEQ ID NO: 1294968 - RNA, 17 nt, Human
aguaacuacaguuaggg

SEQ ID NO: 1294969 - RNA, 19 nt, Human
aguaacgcgucuuccugag

SEQ ID NO: 1294970 - RNA, 22 nt, Human
aguaacgcgucuuccugagugg

SEQ ID NO: 1294971 - RNA, 16 nt, Human
aguaacgcgucuuccu

SEQ ID NO: 1294972 - RNA, 17 nt, Human
aguaacgcgucuuccug

SEQ ID NO: 1294973 - RNA, 18 nt, Human
aguaacgcgucuuccuga

SEQ ID NO: 1294974 - RNA, 14 nt, Human
aguaacucaucugu

SEQ ID NO: 1294975 - RNA, 17 nt, Human
aguaacucauugcucug

SEQ ID NO: 1294976 - RNA, 11 nt, Human
aguaacuguuu

SEQ ID NO: 1294977 - RNA, 23 nt, Human
aguaacuguuuuuuaagucucuc

SEQ ID NO: 1294978 - RNA, 17 nt, Human
aguaacuucuuauggaa

SEQ ID NO: 1294979 - RNA, 19 nt, Human
aguaacuucuuauggaauu

SEQ ID NO: 1294980 - RNA, 17 nt, Human
aguaacuguuuuuuaag

SEQ ID NO: 1294981 - RNA, 13 nt, Human
aguaccugagggu

SEQ ID NO: 1294982 - RNA, 15 nt, Human
aguaaauacaauuuu

SEQ ID NO: 1294983 - RNA, 22 nt, Human
aguaaagaacguggucagagua

SEQ ID NO: 1294984 - RNA, 16 nt, Human
aguaaagaauuauuuu

SEQ ID NO: 1294985 - RNA, 15 nt, Human
aguaaagaauuauuu

SEQ ID NO: 1294986 - RNA, 16 nt, Human
aguaaagguuaaaaau

SEQ ID NO: 1294987 - RNA, 16 nt, Human
aguaaagucaaggaga

SEQ ID NO: 1294988 - RNA, 18 nt, Human
aguaaagucaaggagaaa

SEQ ID NO: 1294989 - RNA, 14 nt, Human
aguaaauaaugcuu

SEQ ID NO: 1294990 - RNA, 23 nt, Human
aguaaacaauaaaaguguccauu

SEQ ID NO: 1294991 - RNA, 15 nt, Human
aguaaaccacugaaa

SEQ ID NO: 1294992 - RNA, 17 nt, Human
aguaaaccacugaaaaa

SEQ ID NO: 1294993 - RNA, 23 nt, Human
aguaaaccacugaaaaaauauau

SEQ ID NO: 1294994 - RNA, 14 nt, Human
aguaaacuuuuugu

SEQ ID NO: 1294995 - RNA, 17 nt, Human
aggggccagaggcucgu

SEQ ID NO: 1294996 - RNA, 12 nt, Human
aggggccagagg

SEQ ID NO: 1294997 - RNA, 13 nt, Human
aggggccagaggc

SEQ ID NO: 1294998 - RNA, 14 nt, Human
aggggccagaggcu

SEQ ID NO: 1294999 - RNA, 15 nt, Human
aggggccagaggcuc

SEQ ID NO: 1295000 - RNA, 13 nt, Human
auaaaaagaauga

SEQ ID NO: 1295001 - RNA, 14 nt, Human
auaaaaagaucacu

SEQ ID NO: 1295002 - RNA, 14 nt, Human
auaaaaagaaaggc

SEQ ID NO: 1295003 - RNA, 13 nt, Human
auaaaaaaugguu

SEQ ID NO: 1295004 - RNA, 17 nt, Human
auaaaaaagaucccaaa

SEQ ID NO: 1295005 - RNA, 11 nt, Human
auaaaaaagau

SEQ ID NO: 1295006 - RNA, 15 nt, Human
auaaaaaagauccca

SEQ ID NO: 1295007 - RNA, 16 nt, Human
auaaaaaagaucccaa

SEQ ID NO: 1295008 - RNA, 16 nt, Human
auaaaagacagugaaa

SEQ ID NO: 1295009 - RNA, 22 nt, Human
auaaaaagaucacuuucucagu

SEQ ID NO: 1295010 - RNA, 18 nt, Human
auaaaaagaucacuuucu

SEQ ID NO: 1295011 - RNA, 17 nt, Human
auaaaaaugaucuaaac

SEQ ID NO: 1295012 - RNA, 12 nt, Human
auaaaaauguuu

SEQ ID NO: 1295013 - RNA, 16 nt, Human
auaaaaaugaucuaaa

SEQ ID NO: 1295014 - RNA, 12 nt, Human
auaaaacaggua

SEQ ID NO: 1295015 - RNA, 16 nt, Human
aguuugaugaggcccu

SEQ ID NO: 1295016 - RNA, 17 nt, Human
aguuugaugaggcccuc

SEQ ID NO: 1295017 - RNA, 18 nt, Human
aguuugaugaggcccucc

SEQ ID NO: 1295018 - RNA, 17 nt, Human
aguuucugggaccucag

SEQ ID NO: 1295019 - RNA, 20 nt, Human
aguuucugucguuaaaaaca

SEQ ID NO: 1295020 - RNA, 22 nt, Human
aguuucugucguuaaaaacaga

SEQ ID NO: 1295021 - RNA, 23 nt, Human
aguuucugucguuaaaaacagau

SEQ ID NO: 1295022 - RNA, 20 nt, Human
aguuaacuauugcauuuaua

SEQ ID NO: 1295023 - RNA, 24 nt, Human
aguuaacuauugcauuuauaugua

SEQ ID NO: 1295024 - RNA, 14 nt, Human
aguuaauuuaaagu

SEQ ID NO: 1295025 - RNA, 15 nt, Human
aguuaauuuuuccaa

SEQ ID NO: 1295026 - RNA, 17 nt, Human
aguuaauuuuuccaacu

SEQ ID NO: 1295027 - RNA, 23 nt, Human
aguuaauuuuuccaacuacuaau

SEQ ID NO: 1295028 - RNA, 19 nt, Human
aguuaacuauugcauuuau

SEQ ID NO: 1295029 - RNA, 17 nt, Human
aguuaacuauugcauuu

SEQ ID NO: 1295030 - RNA, 15 nt, Human
aguuaacuauugcau

SEQ ID NO: 1295031 - RNA, 20 nt, Human
aguuaacaccuuuaaagugu

SEQ ID NO: 1295032 - RNA, 19 nt, Human
aguuaacagacaacacguu

SEQ ID NO: 1295033 - RNA, 18 nt, Human
aguguuuuaugagaaagc

SEQ ID NO: 1295034 - RNA, 21 nt, Human
aguguuuuaugagaaagccuu

SEQ ID NO: 1295035 - RNA, 14 nt, Human
aguguuuucucuga

SEQ ID NO: 1295036 - RNA, 13 nt, Human
aguguuuucuggg

SEQ ID NO: 1295037 - RNA, 15 nt, Human
aguguuuucugggau

SEQ ID NO: 1295038 - RNA, 15 nt, Human
aguguuuucucugaa

SEQ ID NO: 1295039 - RNA, 12 nt, Human
aguuaaauguag

SEQ ID NO: 1295040 - RNA, 12 nt, Human
aguuaacacacu

SEQ ID NO: 1295041 - RNA, 13 nt, Human
aguuaacacacua

SEQ ID NO: 1295042 - RNA, 16 nt, Human
aguuaacacacuaccg

SEQ ID NO: 1295043 - RNA, 22 nt, Human
aguuaacacacuaccgaaugug

SEQ ID NO: 1295044 - RNA, 11 nt, Human
aguguuucuuu

SEQ ID NO: 1295045 - RNA, 21 nt, Human
aguggccaagagaugcagugc

SEQ ID NO: 1295046 - RNA, 18 nt, Human
aguggccaagaagcagug

SEQ ID NO: 1295047 - RNA, 19 nt, Human
aguggcccauggcauuuua

SEQ ID NO: 1295048 - RNA, 19 nt, Human
aguggcaucaucucagcuc

SEQ ID NO: 1295049 - RNA, 20 nt, Human
aguggcaucaucucagcuca

SEQ ID NO: 1295050 - RNA, 14 nt, Human
agugcucccucaca

SEQ ID NO: 1295051 - RNA, 17 nt, Human
agugcucccucacaugu

SEQ ID NO: 1295052 - RNA, 17 nt, Human
agugcucauuucaggau

SEQ ID NO: 1295053 - RNA, 11 nt, Human
agugcucccuc

SEQ ID NO: 1295054 - RNA, 16 nt, Human
agugcucaaggccagc

SEQ ID NO: 1295055 - RNA, 14 nt, Human
agugcucaaggcca

SEQ ID NO: 1295056 - RNA, 18 nt, Human
aguuacacaugaucauaa

SEQ ID NO: 1295057 - RNA, 18 nt, Human
aguucauauguaccaugu

SEQ ID NO: 1295058 - RNA, 22 nt, Human
aguucauauguaccauguacau

SEQ ID NO: 1295059 - RNA, 17 nt, Human
aguucauccauucuauu

SEQ ID NO: 1295060 - RNA, 18 nt, Human
aguuccagaagugugacu

SEQ ID NO: 1295061 - RNA, 14 nt, Human
aguuccagaagugu

SEQ ID NO: 1295062 - RNA, 21 nt, Human
aguucuuugggccagacaugc

SEQ ID NO: 1295063 - RNA, 19 nt, Human
aguucuuuguucauagccc

SEQ ID NO: 1295064 - RNA, 20 nt, Human
aguuccaagagucuaaagau

SEQ ID NO: 1295065 - RNA, 13 nt, Human
aguuccacugaga

SEQ ID NO: 1295066 - RNA, 15 nt, Human
aguuccacugagacc

SEQ ID NO: 1295067 - RNA, 20 nt, Human
aguuccacuuauagccucug

SEQ ID NO: 1295068 - RNA, 15 nt, Human
aguuccagaaaguaa

SEQ ID NO: 1295069 - RNA, 16 nt, Human
aguuccagaaaguaaa

SEQ ID NO: 1295070 - RNA, 21 nt, Human
aguucuuuguucauagcccag

SEQ ID NO: 1295071 - RNA, 22 nt, Human
aguucuuuguucauagcccagu

SEQ ID NO: 1295072 - RNA, 14 nt, Human
aguugaagcaaauc

SEQ ID NO: 1295073 - RNA, 19 nt, Human
aguucuuuuugaaguauuu

SEQ ID NO: 1295074 - RNA, 12 nt, Human
aguugaauauug

SEQ ID NO: 1295075 - RNA, 19 nt, Human
aguuguuccuuaagucaga

SEQ ID NO: 1295076 - RNA, 21 nt, Human
aguuguucgggccaaggaccu

SEQ ID NO: 1295077 - RNA, 20 nt, Human
aguuguuagauuaagaaaua

SEQ ID NO: 1295078 - RNA, 18 nt, Human
auaagcuuaugcuuaaau

SEQ ID NO: 1295079 - RNA, 19 nt, Human
auaagguuuuaauuuagua

SEQ ID NO: 1295080 - RNA, 13 nt, Human
auaagcuauuuga

SEQ ID NO: 1295081 - RNA, 15 nt, Human
auaagcuauuugaug

SEQ ID NO: 1295082 - RNA, 16 nt, Human
auaagcuauuugaugu

SEQ ID NO: 1295083 - RNA, 18 nt, Human
auaagcuauuugauguaa

SEQ ID NO: 1295084 - RNA, 22 nt, Human
auaagcuauuugauguaauacu

SEQ ID NO: 1295085 - RNA, 23 nt, Human
auaagcuauuugauguaauacuu

SEQ ID NO: 1295086 - RNA, 16 nt, Human
auaagcuauuuuucua

SEQ ID NO: 1295087 - RNA, 18 nt, Human
auaagcuauuuuucuaac

SEQ ID NO: 1295088 - RNA, 15 nt, Human
auaaguggugugugu

SEQ ID NO: 1295089 - RNA, 18 nt, Human
auaauguguaguucaugu

SEQ ID NO: 1295090 - RNA, 19 nt, Human
auaauguguaguucaugua

SEQ ID NO: 1295091 - RNA, 23 nt, Human
auaauguguaguucauguaaaua

SEQ ID NO: 1295092 - RNA, 20 nt, Human
auaauguguaguucauguaa

SEQ ID NO: 1295093 - RNA, 22 nt, Human
auaaguggacaaauuuugaguu

SEQ ID NO: 1295094 - RNA, 13 nt, Human
auaaguaaguuug

SEQ ID NO: 1295095 - RNA, 12 nt, Human
auaagugcccuc

SEQ ID NO: 1295096 - RNA, 24 nt, Human
auaaagacguuuuauaagcaucau

SEQ ID NO: 1295097 - RNA, 16 nt, Human
auaaagauauuguuca

SEQ ID NO: 1295098 - RNA, 20 nt, Human
auaaaacaucuuugaaauua

SEQ ID NO: 1295099 - RNA, 20 nt, Human
auaaaagaugaaagagcagu

SEQ ID NO: 1295100 - RNA, 14 nt, Human
auaaagaccacuuu

SEQ ID NO: 1295101 - RNA, 16 nt, Human
auaaagacguuuuaua

SEQ ID NO: 1295102 - RNA, 20 nt, Human
auaaagacguuuuauaagca

SEQ ID NO: 1295103 - RNA, 21 nt, Human
auaaagacguuuuauaagcau

SEQ ID NO: 1295104 - RNA, 22 nt, Human
auaaagacguuuuauaagcauc

SEQ ID NO: 1295105 - RNA, 14 nt, Human
auacaccgggccug

SEQ ID NO: 1295106 - RNA, 18 nt, Human
auacaccgggccuggaga

SEQ ID NO: 1295107 - RNA, 24 nt, Human
auacacccaagaugggcaucuuuu

SEQ ID NO: 1295108 - RNA, 17 nt, Human
auacacuguguaaauac

SEQ ID NO: 1295109 - RNA, 18 nt, Human
auacacuguguaaauacc

SEQ ID NO: 1295110 - RNA, 11 nt, Human
auacacugugu

SEQ ID NO: 1295111 - RNA, 11 nt, Human
auacuguugca

SEQ ID NO: 1295112 - RNA, 12 nt, Human
auacuguugcac

SEQ ID NO: 1295113 - RNA, 13 nt, Human
auacuguugcacg

SEQ ID NO: 1295114 - RNA, 14 nt, Human
auacuguugcacgu

SEQ ID NO: 1295115 - RNA, 15 nt, Human
auacuguugcacgug

SEQ ID NO: 1295116 - RNA, 18 nt, Human
auacuguugcacgugugu

SEQ ID NO: 1295117 - RNA, 19 nt, Human
auacuguugcacguguguu

SEQ ID NO: 1295118 - RNA, 21 nt, Human
auacuugaacguuuucuaauu

SEQ ID NO: 1295119 - RNA, 16 nt, Human
auacuugaagggccag

SEQ ID NO: 1295120 - RNA, 17 nt, Human
auacuugaagggccaga

SEQ ID NO: 1295121 - RNA, 18 nt, Human
auacuugaagggccagag

SEQ ID NO: 1295122 - RNA, 19 nt, Human
auacuugaagggccagagc

SEQ ID NO: 1295123 - RNA, 20 nt, Human
auacuugaagggccagagcc

SEQ ID NO: 1295124 - RNA, 21 nt, Human
auacuugaagggccagagcca

SEQ ID NO: 1295125 - RNA, 22 nt, Human
auacuugaagggccagagccag

SEQ ID NO: 1295126 - RNA, 19 nt, Human
auacuugaacguuuucuaa

SEQ ID NO: 1295127 - RNA, 20 nt, Human
auacuuuuacaaguaacaaa

SEQ ID NO: 1295128 - RNA, 21 nt, Human
auacuuuuacaaguaacaaaa

SEQ ID NO: 1295129 - RNA, 15 nt, Human
auacuuuuacucugc

SEQ ID NO: 1295130 - RNA, 16 nt, Human
auacuuuuacucugcc

SEQ ID NO: 1295131 - RNA, 20 nt, Human
auacuuuuacucugccuaca

SEQ ID NO: 1295132 - RNA, 16 nt, Human
auacuuuugcccuuug

SEQ ID NO: 1295133 - RNA, 19 nt, Human
auacuuuuuaaauguaaag

SEQ ID NO: 1295134 - RNA, 13 nt, Human
auacuuuuuacaa

SEQ ID NO: 1295135 - RNA, 20 nt, Human
auacuuuuuacaauuaaaaa

SEQ ID NO: 1295136 - RNA, 17 nt, Human
auacuuuuacucugccu

SEQ ID NO: 1295137 - RNA, 21 nt, Human
auacuuuuuuuucuuuaaaaa

SEQ ID NO: 1295138 - RNA, 12 nt, Human
acccucaugcug

SEQ ID NO: 1295139 - RNA, 16 nt, Human
acccucaucuuucuuc

SEQ ID NO: 1295140 - RNA, 19 nt, Human
acccucaucuuucuuccaa

SEQ ID NO: 1295141 - RNA, 13 nt, Human
acccucaucuuuc

SEQ ID NO: 1295142 - RNA, 14 nt, Human
acccucaucuuucu

SEQ ID NO: 1295143 - RNA, 13 nt, Human
acccucaugcugu

SEQ ID NO: 1295144 - RNA, 18 nt, Human
acccucauacacagaaac

SEQ ID NO: 1295145 - RNA, 12 nt, Human
acccuggaggca

SEQ ID NO: 1295146 - RNA, 17 nt, Human
acccuggaggcaccugg

SEQ ID NO: 1295147 - RNA, 20 nt, Human
acccuggaggcaccuggugg

SEQ ID NO: 1295148 - RNA, 21 nt, Human
acccuggaggccccaacccug

SEQ ID NO: 1295149 - RNA, 18 nt, Human
acccuggcacccagggug

SEQ ID NO: 1295150 - RNA, 14 nt, Human
acccuggccccucu

SEQ ID NO: 1295151 - RNA, 15 nt, Human
acccuggccccucuc

SEQ ID NO: 1295152 - RNA, 18 nt, Human
acccucagagccaccccu

SEQ ID NO: 1295153 - RNA, 18 nt, Human
acccucagggcaaagcca

SEQ ID NO: 1295154 - RNA, 19 nt, Human
acccucagggcaaagccag

SEQ ID NO: 1295155 - RNA, 21 nt, Human
acccucagggcaaagccaggu

SEQ ID NO: 1295156 - RNA, 18 nt, Human
acccugggcccugggcug

SEQ ID NO: 1295157 - RNA, 20 nt, Human
acccugggcccugggcugga

SEQ ID NO: 1295158 - RNA, 22 nt, Human
acccugggcccugggcuggaau

SEQ ID NO: 1295159 - RNA, 15 nt, Human
acccuggcuccuugu

SEQ ID NO: 1295160 - RNA, 16 nt, Human
acccuggccccucucc

SEQ ID NO: 1295161 - RNA, 17 nt, Human
acccuggccccucuccc

SEQ ID NO: 1295162 - RNA, 18 nt, Human
acccuggccccucucccu

SEQ ID NO: 1295163 - RNA, 19 nt, Human
acccuggccccucucccuu

SEQ ID NO: 1295164 - RNA, 18 nt, Human
acccuggccgaguccaag

SEQ ID NO: 1295165 - RNA, 21 nt, Human
acccuggccgaguccaagcug

SEQ ID NO: 1295166 - RNA, 22 nt, Human
acccuggccgaguccaagcugg

SEQ ID NO: 1295167 - RNA, 16 nt, Human
acccuggccgcccccu

SEQ ID NO: 1295168 - RNA, 17 nt, Human
acccuggccgcccccug

SEQ ID NO: 1295169 - RNA, 19 nt, Human
acccuggccgcccccugcc

SEQ ID NO: 1295170 - RNA, 22 nt, Human
acccuggccgcccccugccccc

SEQ ID NO: 1295171 - RNA, 23 nt, Human
acccuggccuagaccagcagaca

SEQ ID NO: 1295172 - RNA, 14 nt, Human
acccugggcccugg

SEQ ID NO: 1295173 - RNA, 15 nt, Human
acccugggcccuggg

SEQ ID NO: 1295174 - RNA, 17 nt, Human
acccugggcccugggcu

SEQ ID NO: 1295175 - RNA, 21 nt, Human
acccugucugccccgcccuca

SEQ ID NO: 1295176 - RNA, 13 nt, Human
acccugucugccc

SEQ ID NO: 1295177 - RNA, 21 nt, Human
acccugucucuacuaaaaaua

SEQ ID NO: 1295178 - RNA, 11 nt, Human
acccuguccuc

SEQ ID NO: 1295179 - RNA, 15 nt, Human
acccuggugggccaa

SEQ ID NO: 1295180 - RNA, 20 nt, Human
acccuguacuguucuguguc

SEQ ID NO: 1295181 - RNA, 22 nt, Human
acccuguacuguucugugucuu

SEQ ID NO: 1295182 - RNA, 13 nt, Human
acccuagcaaaag

SEQ ID NO: 1295183 - RNA, 18 nt, Human
acccuacuucuuuugcuc

SEQ ID NO: 1295184 - RNA, 14 nt, Human
acccuacuucuuuu

SEQ ID NO: 1295185 - RNA, 12 nt, Human
acccuagccuug

SEQ ID NO: 1295186 - RNA, 15 nt, Human
acccuagccuugcuu

SEQ ID NO: 1295187 - RNA, 17 nt, Human
acccuaaccaaguuccu

SEQ ID NO: 1295188 - RNA, 16 nt, Human
acccuaaccaaguucc

SEQ ID NO: 1295189 - RNA, 13 nt, Human
acccuaccugugc

SEQ ID NO: 1295190 - RNA, 16 nt, Human
acccuaccugugccug

SEQ ID NO: 1295191 - RNA, 17 nt, Human
acccuaccugugccuga

SEQ ID NO: 1295192 - RNA, 15 nt, Human
acccuaaccaaguuc

SEQ ID NO: 1295193 - RNA, 14 nt, Human
acccuaaccaaguu

SEQ ID NO: 1295194 - RNA, 13 nt, Human
acccuaaccaagu

SEQ ID NO: 1295195 - RNA, 16 nt, Human
acccuaaaucuugacu

SEQ ID NO: 1295196 - RNA, 20 nt, Human
acccuaaauaauaaaaauaa

SEQ ID NO: 1295197 - RNA, 16 nt, Human
acccuaaauaauaaaa

SEQ ID NO: 1295198 - RNA, 15 nt, Human
acccguggaggcugc

SEQ ID NO: 1295199 - RNA, 17 nt, Human
acccguggaggcugcuc

SEQ ID NO: 1295200 - RNA, 13 nt, Human
acccguucaacuu

SEQ ID NO: 1295201 - RNA, 21 nt, Human
acccguucaacuuuuccuuug

SEQ ID NO: 1295202 - RNA, 16 nt, Human
acccguucacauuuuu

SEQ ID NO: 1295203 - RNA, 16 nt, Human
acccguucauggggga

SEQ ID NO: 1295204 - RNA, 17 nt, Human
acccguucaugggggag

SEQ ID NO: 1295205 - RNA, 23 nt, Human
acccguucaugggggagggggca

SEQ ID NO: 1295206 - RNA, 18 nt, Human
acccguucaugggggagg

SEQ ID NO: 1295207 - RNA, 15 nt, Human
acccucacacuggga

SEQ ID NO: 1295208 - RNA, 15 nt, Human
acccucacuggcucu

SEQ ID NO: 1295209 - RNA, 19 nt, Human
acccucacuggcucuccug

SEQ ID NO: 1295210 - RNA, 11 nt, Human
acccucagagc

SEQ ID NO: 1295211 - RNA, 22 nt, Human
acccucacuggcucuccuggcc

SEQ ID NO: 1295212 - RNA, 21 nt, Human
acccucacuggcucuccuggc

SEQ ID NO: 1295213 - RNA, 14 nt, Human
acccuaugggucua

SEQ ID NO: 1295214 - RNA, 16 nt, Human
acccuaugggucuagg

SEQ ID NO: 1295215 - RNA, 19 nt, Human
acccuaugggucuaggaca

SEQ ID NO: 1295216 - RNA, 23 nt, Human
acccuaugggucuaggacacagu

SEQ ID NO: 1295217 - RNA, 17 nt, Human
acccuagccuugcuugu

SEQ ID NO: 1295218 - RNA, 15 nt, Human
acccuaguucuaccu

SEQ ID NO: 1295219 - RNA, 21 nt, Human
acccuaguucuaccucaggca

SEQ ID NO: 1295220 - RNA, 23 nt, Human
acccuauauuuugcauaguacca

SEQ ID NO: 1295221 - RNA, 18 nt, Human
acccgugccaaguccagg

SEQ ID NO: 1295222 - RNA, 21 nt, Human
acccgugccaaguccaggucc

SEQ ID NO: 1295223 - RNA, 22 nt, Human
acccgugccaaguccagguccu

SEQ ID NO: 1295224 - RNA, 23 nt, Human
acccgugccaaguccagguccug

SEQ ID NO: 1295225 - RNA, 13 nt, Human
acccguggaggcu

SEQ ID NO: 1295226 - RNA, 16 nt, Human
accucaggcagcucaa

SEQ ID NO: 1295227 - RNA, 17 nt, Human
accucaggcagcucaag

SEQ ID NO: 1295228 - RNA, 15 nt, Human
accucaguaauuuag

SEQ ID NO: 1295229 - RNA, 17 nt, Human
accucaguaauuuagaa

SEQ ID NO: 1295230 - RNA, 21 nt, Human
accucaguaauuuagaaauca

SEQ ID NO: 1295231 - RNA, 23 nt, Human
accucagugccuuccuguuuuuc

SEQ ID NO: 1295232 - RNA, 11 nt, Human
accucagccug

SEQ ID NO: 1295233 - RNA, 16 nt, Human
accguggcccuuccug

SEQ ID NO: 1295234 - RNA, 13 nt, Human
accucagccuggc

SEQ ID NO: 1295235 - RNA, 14 nt, Human
accucagccuggcc

SEQ ID NO: 1295236 - RNA, 15 nt, Human
accucagccuggcca

SEQ ID NO: 1295237 - RNA, 16 nt, Human
accucagccuggccag

SEQ ID NO: 1295238 - RNA, 17 nt, Human
accucagccuggccaga

SEQ ID NO: 1295239 - RNA, 19 nt, Human
accucagccuggccagaca

SEQ ID NO: 1295240 - RNA, 20 nt, Human
accucagccuggccagacac

SEQ ID NO: 1295241 - RNA, 21 nt, Human
accucagccuggccagacaca

SEQ ID NO: 1295242 - RNA, 12 nt, Human
accucagccugg

SEQ ID NO: 1295243 - RNA, 13 nt, Human
accucagccuggg

SEQ ID NO: 1295244 - RNA, 14 nt, Human
accucagccugggc

SEQ ID NO: 1295245 - RNA, 15 nt, Human
accucagccugggcg

SEQ ID NO: 1295246 - RNA, 17 nt, Human
accucagccugggcgcu

SEQ ID NO: 1295247 - RNA, 12 nt, Human
accucaggcagc

SEQ ID NO: 1295248 - RNA, 15 nt, Human
accucaggcagcuca

SEQ ID NO: 1295249 - RNA, 13 nt, Human
accggggccuggg

SEQ ID NO: 1295250 - RNA, 23 nt, Human
accgggcugggagcucugcagag

SEQ ID NO: 1295251 - RNA, 21 nt, Human
accgggcugggagcucugcag

SEQ ID NO: 1295252 - RNA, 21 nt, Human
accgggccacuccuuccugcc

SEQ ID NO: 1295253 - RNA, 12 nt, Human
accgggccacuc

SEQ ID NO: 1295254 - RNA, 19 nt, Human
accgggccacuccuuccug

SEQ ID NO: 1295255 - RNA, 20 nt, Human
accgggccacuccuuccugc

SEQ ID NO: 1295256 - RNA, 17 nt, Human
accguggcccuuccugg

SEQ ID NO: 1295257 - RNA, 19 nt, Human
accggggccugggcaggag

SEQ ID NO: 1295258 - RNA, 19 nt, Human
accgugccuggccacgccc

SEQ ID NO: 1295259 - RNA, 21 nt, Human
accuccaaagcuucccacggc

SEQ ID NO: 1295260 - RNA, 19 nt, Human
accuccaaagcuucccacg

SEQ ID NO: 1295261 - RNA, 13 nt, Human
acgucuuaaauau

SEQ ID NO: 1295262 - RNA, 14 nt, Human
acgucuuaaauauu

SEQ ID NO: 1295263 - RNA, 12 nt, Human
acgucuucuaaa

SEQ ID NO: 1295264 - RNA, 13 nt, Human
acgugacacaaac

SEQ ID NO: 1295265 - RNA, 19 nt, Human
acgugacacaaacacacac

SEQ ID NO: 1295266 - RNA, 20 nt, Human
acgugacacaaacacacaca

SEQ ID NO: 1295267 - RNA, 23 nt, Human
acggacaaaaccccccagauauc

SEQ ID NO: 1295268 - RNA, 14 nt, Human
acgcuuaaauacag

SEQ ID NO: 1295269 - RNA, 12 nt, Human
acgcagcccugc

SEQ ID NO: 1295270 - RNA, 22 nt, Human
acgcagcccugcuuugggcugc

SEQ ID NO: 1295271 - RNA, 23 nt, Human
acgcagcccugcuuugggcugcc

SEQ ID NO: 1295272 - RNA, 22 nt, Human
acgcaccaccaugccaggcuaa

SEQ ID NO: 1295273 - RNA, 14 nt, Human
acgcaccugccuca

SEQ ID NO: 1295274 - RNA, 15 nt, Human
acgcaccugccucag

SEQ ID NO: 1295275 - RNA, 16 nt, Human
acgcaccugccucagg

SEQ ID NO: 1295276 - RNA, 18 nt, Human
acgauuuuuaaaauguac

SEQ ID NO: 1295277 - RNA, 16 nt, Human
acgcaaagagagauuu

SEQ ID NO: 1295278 - RNA, 17 nt, Human
acgcaaagagagauuuu

SEQ ID NO: 1295279 - RNA, 15 nt, Human
acgcaaguucccagu

SEQ ID NO: 1295280 - RNA, 18 nt, Human
acgugcucugugggucuc

SEQ ID NO: 1295281 - RNA, 23 nt, Human
acgugcucuuuguuuugugucuc

SEQ ID NO: 1295282 - RNA, 19 nt, Human
acgugcucuuuguuuugug

SEQ ID NO: 1295283 - RNA, 20 nt, Human
acuaauguguaagacaaaaa

SEQ ID NO: 1295284 - RNA, 21 nt, Human
acuaauggcaugagaaauaca

SEQ ID NO: 1295285 - RNA, 22 nt, Human
acuaauggcaugagaaauacaa

SEQ ID NO: 1295286 - RNA, 18 nt, Human
acuaauucauaaucacuc

SEQ ID NO: 1295287 - RNA, 13 nt, Human
acuaauuccacac

SEQ ID NO: 1295288 - RNA, 23 nt, Human
acuaaugccuuacucuucuugaa

SEQ ID NO: 1295289 - RNA, 24 nt, Human
acuaaugccuuacucuucuugaaa

SEQ ID NO: 1295290 - RNA, 12 nt, Human
acuaauggcaug

SEQ ID NO: 1295291 - RNA, 13 nt, Human
acuaauggcauga

SEQ ID NO: 1295292 - RNA, 16 nt, Human
acuaauggcaugagaa

SEQ ID NO: 1295293 - RNA, 23 nt, Human
accuguggaacauaaaaaggaca

SEQ ID NO: 1295294 - RNA, 10 nt, Human
accuguggau

SEQ ID NO: 1295295 - RNA, 20 nt, Human
accuguggaacauaaaaagg

SEQ ID NO: 1295296 - RNA, 23 nt, Human
accugugcuucgggcccuuccca

SEQ ID NO: 1295297 - RNA, 19 nt, Human
accugugcuucgggcccuu

SEQ ID NO: 1295298 - RNA, 22 nt, Human
accugugcuucgggcccuuccc

SEQ ID NO: 1295299 - RNA, 13 nt, Human
accuguggauauu

SEQ ID NO: 1295300 - RNA, 14 nt, Human
accuguggauauuu

SEQ ID NO: 1295301 - RNA, 22 nt, Human
accuugcugcaagcacagcccu

SEQ ID NO: 1295302 - RNA, 23 nt, Human
accuugcugcaagcacagcccuu

SEQ ID NO: 1295303 - RNA, 15 nt, Human
accuguaagugucuu

SEQ ID NO: 1295304 - RNA, 11 nt, Human
accuguaauca

SEQ ID NO: 1295305 - RNA, 19 nt, Human
accugugcacaccccacuc

SEQ ID NO: 1295306 - RNA, 22 nt, Human
accucuguauuugaaucagccu

SEQ ID NO: 1295307 - RNA, 22 nt, Human
accuuggcaccagacacccagg

SEQ ID NO: 1295308 - RNA, 19 nt, Human
accuugcuuugauggaaua

SEQ ID NO: 1295309 - RNA, 18 nt, Human
accuuggacauccuccuc

SEQ ID NO: 1295310 - RNA, 19 nt, Human
accuuggacauccuccucc

SEQ ID NO: 1295311 - RNA, 14 nt, Human
accuuggcaccaga

SEQ ID NO: 1295312 - RNA, 16 nt, Human
accuuggcaccagaca

SEQ ID NO: 1295313 - RNA, 17 nt, Human
accuuggcaccagacac

SEQ ID NO: 1295314 - RNA, 18 nt, Human
accuuggcaccagacacc

SEQ ID NO: 1295315 - RNA, 13 nt, Human
acugaauuaugaa

SEQ ID NO: 1295316 - RNA, 14 nt, Human
acugaauuaugaaa

SEQ ID NO: 1295317 - RNA, 15 nt, Human
acugaauuaugaaac

SEQ ID NO: 1295318 - RNA, 20 nt, Human
acugaauuaugaaacuuuug

SEQ ID NO: 1295319 - RNA, 12 nt, Human
acugaaugaggu

SEQ ID NO: 1295320 - RNA, 20 nt, Human
acugaaugaggucagcaugu

SEQ ID NO: 1295321 - RNA, 14 nt, Human
acugaaugucauug

SEQ ID NO: 1295322 - RNA, 17 nt, Human
acucuacccauauuaca

SEQ ID NO: 1295323 - RNA, 19 nt, Human
acucuacccauauuacaga

SEQ ID NO: 1295324 - RNA, 17 nt, Human
acugacaagcuccauuu

SEQ ID NO: 1295325 - RNA, 20 nt, Human
acugacaagcuccauuuaaa

SEQ ID NO: 1295326 - RNA, 18 nt, Human
acugacaagccaucuuga

SEQ ID NO: 1295327 - RNA, 13 nt, Human
acugacacacacg

SEQ ID NO: 1295328 - RNA, 14 nt, Human
acugacagaggggg

SEQ ID NO: 1295329 - RNA, 12 nt, Human
acugacaugugg

SEQ ID NO: 1295330 - RNA, 18 nt, Human
acugacauguggggccag

SEQ ID NO: 1295331 - RNA, 14 nt, Human
acugauuacugccu

SEQ ID NO: 1295332 - RNA, 17 nt, Human
acugaugucuccuaagc

SEQ ID NO: 1295333 - RNA, 14 nt, Human
acugaugucuccua

SEQ ID NO: 1295334 - RNA, 14 nt, Human
acugaucucguuuu

SEQ ID NO: 1295335 - RNA, 13 nt, Human
acugaugucuccu

SEQ ID NO: 1295336 - RNA, 19 nt, Human
acugauaugggucuugaua

SEQ ID NO: 1295337 - RNA, 22 nt, Human
acugacauguggggccagguca

SEQ ID NO: 1295338 - RNA, 15 nt, Human
acugaucacaaaaac

SEQ ID NO: 1295339 - RNA, 13 nt, Human
acugauguugugu

SEQ ID NO: 1295340 - RNA, 17 nt, Human
acugauguuguguuuuu

SEQ ID NO: 1295341 - RNA, 18 nt, Human
acugauguuguguuuuua

SEQ ID NO: 1295342 - RNA, 14 nt, Human
acucguuaauuugu

SEQ ID NO: 1295343 - RNA, 19 nt, Human
acucguuaauuuguagugu

SEQ ID NO: 1295344 - RNA, 15 nt, Human
acucuaaaauuauaa

SEQ ID NO: 1295345 - RNA, 21 nt, Human
acucuaaaauuauaaaugaca

SEQ ID NO: 1295346 - RNA, 14 nt, Human
acucguuuuuuaca

SEQ ID NO: 1295347 - RNA, 20 nt, Human
acuccgugcuuaaccaaaga

SEQ ID NO: 1295348 - RNA, 15 nt, Human
acuccguuggccacu

SEQ ID NO: 1295349 - RNA, 17 nt, Human
acuccguuggccacucc

SEQ ID NO: 1295350 - RNA, 19 nt, Human
acuccguaacagauuuugu

SEQ ID NO: 1295351 - RNA, 18 nt, Human
acuccguuggccacuccg

SEQ ID NO: 1295352 - RNA, 21 nt, Human
acuccguuggccacuccgaga

SEQ ID NO: 1295353 - RNA, 16 nt, Human
acucccaccugacaca

SEQ ID NO: 1295354 - RNA, 13 nt, Human
acucccauuccug

SEQ ID NO: 1295355 - RNA, 16 nt, Human
acucccauuccugaag

SEQ ID NO: 1295356 - RNA, 20 nt, Human
acucccauuccugaagaacc

SEQ ID NO: 1295357 - RNA, 15 nt, Human
acucccaagcuggac

SEQ ID NO: 1295358 - RNA, 14 nt, Human
acucccaccugaca

SEQ ID NO: 1295359 - RNA, 14 nt, Human
acuccauguuggcu

SEQ ID NO: 1295360 - RNA, 20 nt, Human
acuccauguuggcuagccuc

SEQ ID NO: 1295361 - RNA, 14 nt, Human
acucccuuucaaca

SEQ ID NO: 1295362 - RNA, 14 nt, Human
acucccuuucagug

SEQ ID NO: 1295363 - RNA, 22 nt, Human
acuccgagaggugggccagucu

SEQ ID NO: 1295364 - RNA, 23 nt, Human
acuccgagaggugggccagucug

SEQ ID NO: 1295365 - RNA, 18 nt, Human
acucccugccccccagcc

SEQ ID NO: 1295366 - RNA, 13 nt, Human
acucccucucagg

SEQ ID NO: 1295367 - RNA, 21 nt, Human
acucccucucaggauccaagc

SEQ ID NO: 1295368 - RNA, 22 nt, Human
acucccauuccugaagaaccag

SEQ ID NO: 1295369 - RNA, 16 nt, Human
acuccccaacccccaa

SEQ ID NO: 1295370 - RNA, 15 nt, Human
acuccccaaccccca

SEQ ID NO: 1295371 - RNA, 20 nt, Human
acuucuugcuucuuucuaga

SEQ ID NO: 1295372 - RNA, 15 nt, Human
acuucuuguguguau

SEQ ID NO: 1295373 - RNA, 19 nt, Human
acuucuuguguguaugcac

SEQ ID NO: 1295374 - RNA, 19 nt, Human
acuucuugcuggucuaguc

SEQ ID NO: 1295375 - RNA, 11 nt, Human
acuucuugcuu

SEQ ID NO: 1295376 - RNA, 18 nt, Human
acuucuugcuucuuucua

SEQ ID NO: 1295377 - RNA, 19 nt, Human
acuucuugcuucuuucuag

SEQ ID NO: 1295378 - RNA, 17 nt, Human
acuucagcgguuuauau

SEQ ID NO: 1295379 - RNA, 20 nt, Human
acuucuugaaggugcugacg

SEQ ID NO: 1295380 - RNA, 21 nt, Human
acuucagacauagaauuaaca

SEQ ID NO: 1295381 - RNA, 21 nt, Human
acuucaaacuacuuugcugcu

SEQ ID NO: 1295382 - RNA, 16 nt, Human
acuugaaaauuaacau

SEQ ID NO: 1295383 - RNA, 14 nt, Human
acuugaaaauuaac

SEQ ID NO: 1295384 - RNA, 12 nt, Human
acuugaaaauua

SEQ ID NO: 1295385 - RNA, 23 nt, Human
acuucuuuuuucaaaagaaaguc

SEQ ID NO: 1295386 - RNA, 22 nt, Human
acuucuuuuuucaaaagaaagu

SEQ ID NO: 1295387 - RNA, 21 nt, Human
acuucuuuuuucaaaagaaag

SEQ ID NO: 1295388 - RNA, 13 nt, Human
acuuggucuguga

SEQ ID NO: 1295389 - RNA, 19 nt, Human
acuuggggguucaggcccg

SEQ ID NO: 1295390 - RNA, 20 nt, Human
acuuggggguucaggcccgg

SEQ ID NO: 1295391 - RNA, 16 nt, Human
acuugguaauuguacu

SEQ ID NO: 1295392 - RNA, 13 nt, Human
acuuguaauuaug

SEQ ID NO: 1295393 - RNA, 15 nt, Human
acuuguaauuaugga

SEQ ID NO: 1295394 - RNA, 16 nt, Human
acuuguaauuauggag

SEQ ID NO: 1295395 - RNA, 18 nt, Human
acuuguaauuuuuuuaau

SEQ ID NO: 1295396 - RNA, 14 nt, Human
acuuguacaaaaua

SEQ ID NO: 1295397 - RNA, 18 nt, Human
acuuguacaaaauaaaca

SEQ ID NO: 1295398 - RNA, 20 nt, Human
acuuguacaaaauaaacaaa

SEQ ID NO: 1295399 - RNA, 17 nt, Human
acuucaaauccuugaag

SEQ ID NO: 1295400 - RNA, 20 nt, Human
acuuaaaauauuccugcauu

SEQ ID NO: 1295401 - RNA, 18 nt, Human
acuucaaacuacuuugcu

SEQ ID NO: 1295402 - RNA, 18 nt, Human
acuucaaauccuugaaga

SEQ ID NO: 1295403 - RNA, 19 nt, Human
acuucaaauccuugaagau

SEQ ID NO: 1295404 - RNA, 22 nt, Human
acuuaaaaaugguuuaaauggu

SEQ ID NO: 1295405 - RNA, 20 nt, Human
acuguuucacuacucagcau

SEQ ID NO: 1295406 - RNA, 19 nt, Human
acuguuuuucggacaguuu

SEQ ID NO: 1295407 - RNA, 18 nt, Human
acuguuuuucggacaguu

SEQ ID NO: 1295408 - RNA, 13 nt, Human
acuguuuuuuaag

SEQ ID NO: 1295409 - RNA, 15 nt, Human
acuguuuuuuaaguc

SEQ ID NO: 1295410 - RNA, 16 nt, Human
acuggagugugcgugg

SEQ ID NO: 1295411 - RNA, 17 nt, Human
acuggagugugcguggu

SEQ ID NO: 1295412 - RNA, 12 nt, Human
acugguggcccg

SEQ ID NO: 1295413 - RNA, 23 nt, Human
acuggugcaaguugaggacuucu

SEQ ID NO: 1295414 - RNA, 17 nt, Human
acuguaaaauaauaacu

SEQ ID NO: 1295415 - RNA, 15 nt, Human
acugccuauuuuaau

SEQ ID NO: 1295416 - RNA, 18 nt, Human
acugccgucagugcugug

SEQ ID NO: 1295417 - RNA, 13 nt, Human
acugccuagaaac

SEQ ID NO: 1295418 - RNA, 14 nt, Human
acugccuagaaaca

SEQ ID NO: 1295419 - RNA, 15 nt, Human
acugccuagaaacaa

SEQ ID NO: 1295420 - RNA, 16 nt, Human
acugccuagaaacaac

SEQ ID NO: 1295421 - RNA, 19 nt, Human
acugccuagaaacaacacu

SEQ ID NO: 1295422 - RNA, 20 nt, Human
acugccuagaaacaacacug

SEQ ID NO: 1295423 - RNA, 21 nt, Human
acugccuagaaacaacacugu

SEQ ID NO: 1295424 - RNA, 22 nt, Human
acugccuagaaacaacacugua

SEQ ID NO: 1295425 - RNA, 23 nt, Human
acugccuagaaacaacacuguag

SEQ ID NO: 1295426 - RNA, 16 nt, Human
acuggaaaacagaaca

SEQ ID NO: 1295427 - RNA, 17 nt, Human
acuggaaaacagaacac

SEQ ID NO: 1295428 - RNA, 18 nt, Human
acuggaaaacagaacacu

SEQ ID NO: 1295429 - RNA, 19 nt, Human
acuggaaaacagaacacuu

SEQ ID NO: 1295430 - RNA, 20 nt, Human
acuggaaaacagaacacuua

SEQ ID NO: 1295431 - RNA, 23 nt, Human
acuggaaaacagaacacuuaugu

SEQ ID NO: 1295432 - RNA, 23 nt, Human
acuggaaagcuuuucuauuuuaa

SEQ ID NO: 1295433 - RNA, 12 nt, Human
acuggaaagaag

SEQ ID NO: 1295434 - RNA, 12 nt, Human
acuggaacucuc

SEQ ID NO: 1295435 - RNA, 22 nt, Human
acuggaacacuagacaagccag

SEQ ID NO: 1295436 - RNA, 16 nt, Human
acuggaacacuagaca

SEQ ID NO: 1295437 - RNA, 19 nt, Human
acugcccaggccugccugu

SEQ ID NO: 1295438 - RNA, 16 nt, Human
acugcccauggacagg

SEQ ID NO: 1295439 - RNA, 11 nt, Human
acugcccuggu

SEQ ID NO: 1295440 - RNA, 17 nt, Human
acugcccaggcacugca

SEQ ID NO: 1295441 - RNA, 15 nt, Human
acugccguaauuuaa

SEQ ID NO: 1295442 - RNA, 16 nt, Human
acugccguaauuuaac

SEQ ID NO: 1295443 - RNA, 17 nt, Human
acugccguaauuuaacu

SEQ ID NO: 1295444 - RNA, 20 nt, Human
acugccgucagugcugugcu

SEQ ID NO: 1295445 - RNA, 16 nt, Human
acugucuuuuuucuaa

SEQ ID NO: 1295446 - RNA, 13 nt, Human
acuguaaagaugu

SEQ ID NO: 1295447 - RNA, 15 nt, Human
acuguaacauucagg

SEQ ID NO: 1295448 - RNA, 18 nt, Human
acuguaaauaaaaagaaa

SEQ ID NO: 1295449 - RNA, 16 nt, Human
acuguaaaauguggga

SEQ ID NO: 1295450 - RNA, 21 nt, Human
acuguaaaaugugggauuaug

SEQ ID NO: 1295451 - RNA, 22 nt, Human
acuguaaaaugugggauuaugg

SEQ ID NO: 1295452 - RNA, 13 nt, Human
acuguaaacacag

SEQ ID NO: 1295453 - RNA, 16 nt, Human
acuguaaacacagaca

SEQ ID NO: 1295454 - RNA, 14 nt, Human
acuguaaacacaga

SEQ ID NO: 1295455 - RNA, 20 nt, Human
acugguggcccgacagccug

SEQ ID NO: 1295456 - RNA, 23 nt, Human
acugucuuuuuucuaaaguaaaa

SEQ ID NO: 1295457 - RNA, 22 nt, Human
acugucuuuuuucuaaaguaaa

SEQ ID NO: 1295458 - RNA, 16 nt, Human
acuguaacugauuaca

SEQ ID NO: 1295459 - RNA, 19 nt, Human
acugugccucagagaccag

SEQ ID NO: 1295460 - RNA, 18 nt, Human
acugugccucagagacca

SEQ ID NO: 1295461 - RNA, 15 nt, Human
acugugccucagaga

SEQ ID NO: 1295462 - RNA, 16 nt, Human
acugugccauguguuu

SEQ ID NO: 1295463 - RNA, 23 nt, Human
acagugaucaaguuauuuuuaau

SEQ ID NO: 1295464 - RNA, 18 nt, Human
acagugauauuggaacuu

SEQ ID NO: 1295465 - RNA, 18 nt, Human
acaggcacugcccuggug

SEQ ID NO: 1295466 - RNA, 23 nt, Human
acaggcacugcccugguggcccu

SEQ ID NO: 1295467 - RNA, 13 nt, Human
acaggcacuuggc

SEQ ID NO: 1295468 - RNA, 16 nt, Human
acaggcacuuggcagc

SEQ ID NO: 1295469 - RNA, 20 nt, Human
acaggcacuuggcagccuug

SEQ ID NO: 1295470 - RNA, 15 nt, Human
acaggcacugcccug

SEQ ID NO: 1295471 - RNA, 16 nt, Human
acaggcacugcccugg

SEQ ID NO: 1295472 - RNA, 20 nt, Human
acagugauuaccagggacug

SEQ ID NO: 1295473 - RNA, 19 nt, Human
acagugauuaccagggacu

SEQ ID NO: 1295474 - RNA, 15 nt, Human
acagugcaucucagc

SEQ ID NO: 1295475 - RNA, 17 nt, Human
acagugcaucucagccc

SEQ ID NO: 1295476 - RNA, 18 nt, Human
acagugcaucucagccca

SEQ ID NO: 1295477 - RNA, 15 nt, Human
acagugcucuuuucu

SEQ ID NO: 1295478 - RNA, 16 nt, Human
acagugcucuuuucuc

SEQ ID NO: 1295479 - RNA, 17 nt, Human
acagugcucuuuucucc

SEQ ID NO: 1295480 - RNA, 21 nt, Human
acagugcucuuuucuccucac

SEQ ID NO: 1295481 - RNA, 20 nt, Human
acagugcugaccagacagcc

SEQ ID NO: 1295482 - RNA, 21 nt, Human
acagugcuuuuaagugaaaau

SEQ ID NO: 1295483 - RNA, 16 nt, Human
acaguggaacuacauu

SEQ ID NO: 1295484 - RNA, 18 nt, Human
acaguggaacuacauuag

SEQ ID NO: 1295485 - RNA, 15 nt, Human
acaguggaucacaaa

SEQ ID NO: 1295486 - RNA, 17 nt, Human
acaguggaucacaaagu

SEQ ID NO: 1295487 - RNA, 18 nt, Human
acaguggaucacaaagug

SEQ ID NO: 1295488 - RNA, 21 nt, Human
acaguggcucacgccuguaau

SEQ ID NO: 1295489 - RNA, 24 nt, Human
acaggaugguucccuugaugaaga

SEQ ID NO: 1295490 - RNA, 22 nt, Human
acaggauguguuugcuuucuga

SEQ ID NO: 1295491 - RNA, 16 nt, Human
acaggauguguuugcu

SEQ ID NO: 1295492 - RNA, 18 nt, Human
acaggauguguuugcuuu

SEQ ID NO: 1295493 - RNA, 19 nt, Human
acaggauguguuugcuuuc

SEQ ID NO: 1295494 - RNA, 20 nt, Human
acaggauguguuugcuuucu

SEQ ID NO: 1295495 - RNA, 21 nt, Human
acaggauguguuugcuuucug

SEQ ID NO: 1295496 - RNA, 15 nt, Human
acauuugcucaugga

SEQ ID NO: 1295497 - RNA, 16 nt, Human
acauuugcucauggaa

SEQ ID NO: 1295498 - RNA, 16 nt, Human
acauuuguauaaaaua

SEQ ID NO: 1295499 - RNA, 19 nt, Human
acauuuguauaaaauaauu

SEQ ID NO: 1295500 - RNA, 21 nt, Human
acauuuguauaaaauaauuuu

SEQ ID NO: 1295501 - RNA, 16 nt, Human
accaacccucagggca

SEQ ID NO: 1295502 - RNA, 21 nt, Human
accaacccucagggcaaagcc

SEQ ID NO: 1295503 - RNA, 18 nt, Human
accaccccgccugcccuc

SEQ ID NO: 1295504 - RNA, 14 nt, Human
accaagccguggcu

SEQ ID NO: 1295505 - RNA, 19 nt, Human
accaaccugaagacaccgu

SEQ ID NO: 1295506 - RNA, 15 nt, Human
accaagccguggcuu

SEQ ID NO: 1295507 - RNA, 16 nt, Human
accaagccguggcuuc

SEQ ID NO: 1295508 - RNA, 17 nt, Human
accaagccguggcuucc

SEQ ID NO: 1295509 - RNA, 18 nt, Human
accaagccguggcuuccc

SEQ ID NO: 1295510 - RNA, 12 nt, Human
accaccagcugu

SEQ ID NO: 1295511 - RNA, 13 nt, Human
accaccagcugug

SEQ ID NO: 1295512 - RNA, 15 nt, Human
accaccagcuguguc

SEQ ID NO: 1295513 - RNA, 17 nt, Human
accaccagcugugucca

SEQ ID NO: 1295514 - RNA, 17 nt, Human
accaccagggcaucucu

SEQ ID NO: 1295515 - RNA, 20 nt, Human
accaccagggcaucucuggg

SEQ ID NO: 1295516 - RNA, 21 nt, Human
accaccagggcaucucugggc

SEQ ID NO: 1295517 - RNA, 22 nt, Human
accaccagggcaucucugggcu

SEQ ID NO: 1295518 - RNA, 20 nt, Human
acaucccuuaccugggaaag

SEQ ID NO: 1295519 - RNA, 18 nt, Human
acaucccugggccugcug

SEQ ID NO: 1295520 - RNA, 19 nt, Human
acaucccugggccugcugc

SEQ ID NO: 1295521 - RNA, 20 nt, Human
acaucccugggccugcugcu

SEQ ID NO: 1295522 - RNA, 21 nt, Human
acaucccugggccugcugcug

SEQ ID NO: 1295523 - RNA, 18 nt, Human
acaugcacuuggcugcau

SEQ ID NO: 1295524 - RNA, 22 nt, Human
acaugcacuuggcugcauaaau

SEQ ID NO: 1295525 - RNA, 19 nt, Human
acauccaaagcagacagcu

SEQ ID NO: 1295526 - RNA, 21 nt, Human
acaucauuucuuuuugggaga

SEQ ID NO: 1295527 - RNA, 12 nt, Human
acaucccugggc

SEQ ID NO: 1295528 - RNA, 13 nt, Human
acaucccugggcc

SEQ ID NO: 1295529 - RNA, 14 nt, Human
acaucccugggccu

SEQ ID NO: 1295530 - RNA, 15 nt, Human
acaucccugggccug

SEQ ID NO: 1295531 - RNA, 16 nt, Human
acaucccugggccugc

SEQ ID NO: 1295532 - RNA, 17 nt, Human
acaucccugggccugcu

SEQ ID NO: 1295533 - RNA, 17 nt, Human
acaugcgguagccagca

SEQ ID NO: 1295534 - RNA, 18 nt, Human
acaugcgguagccagcac

SEQ ID NO: 1295535 - RNA, 22 nt, Human
acaugugccagggcaaugauga

SEQ ID NO: 1295536 - RNA, 18 nt, Human
acaugugcugcccuacag

SEQ ID NO: 1295537 - RNA, 16 nt, Human
acauguggggccaggu

SEQ ID NO: 1295538 - RNA, 18 nt, Human
acauguggggccagguca

SEQ ID NO: 1295539 - RNA, 20 nt, Human
acauaaguauuuaauucaug

SEQ ID NO: 1295540 - RNA, 19 nt, Human
acauaaguuuaggauaaaa

SEQ ID NO: 1295541 - RNA, 12 nt, Human
acauaacugaaa

SEQ ID NO: 1295542 - RNA, 20 nt, Human
acauaacugaaaaugugcua

SEQ ID NO: 1295543 - RNA, 16 nt, Human
acauaaccacugcuuc

SEQ ID NO: 1295544 - RNA, 23 nt, Human
acauaaucuucugccuucucaug

SEQ ID NO: 1295545 - RNA, 21 nt, Human
acauacaccuaugucauuuca

SEQ ID NO: 1295546 - RNA, 18 nt, Human
acauacagaauuacugua

SEQ ID NO: 1295547 - RNA, 19 nt, Human
acauacagaauuacuguaa

SEQ ID NO: 1295548 - RNA, 20 nt, Human
acauacagaauuacuguaac

SEQ ID NO: 1295549 - RNA, 15 nt, Human
acaucauucuugaga

SEQ ID NO: 1295550 - RNA, 11 nt, Human
acaucauuucu

SEQ ID NO: 1295551 - RNA, 12 nt, Human
acaucauuucuu

SEQ ID NO: 1295552 - RNA, 13 nt, Human
acaucauuucuuu

SEQ ID NO: 1295553 - RNA, 22 nt, Human
acaucauuucuuuuugggagag

SEQ ID NO: 1295554 - RNA, 21 nt, Human
acauccaaaauaguuaagaca

SEQ ID NO: 1295555 - RNA, 15 nt, Human
acauccaaagcagac

SEQ ID NO: 1295556 - RNA, 16 nt, Human
acauccaaagcagaca

SEQ ID NO: 1295557 - RNA, 17 nt, Human
acauccaaagcagacag

SEQ ID NO: 1295558 - RNA, 18 nt, Human
acauccaaagcagacagc

SEQ ID NO: 1295559 - RNA, 17 nt, Human
acauguguuggcagccu

SEQ ID NO: 1295560 - RNA, 20 nt, Human
acauguguuaaguauuuuca

SEQ ID NO: 1295561 - RNA, 21 nt, Human
acauguuugcaccuuucuagu

SEQ ID NO: 1295562 - RNA, 16 nt, Human
acauguuuuaaagaaa

SEQ ID NO: 1295563 - RNA, 22 nt, Human
acauguuugcaccuuucuaguu

SEQ ID NO: 1295564 - RNA, 14 nt, Human
aauuauauguugua

SEQ ID NO: 1295565 - RNA, 23 nt, Human
aauuauagcucuaauguuugcau

SEQ ID NO: 1295566 - RNA, 22 nt, Human
aauuauagugauguaaucuuga

SEQ ID NO: 1295567 - RNA, 13 nt, Human
aauuauaguuucu

SEQ ID NO: 1295568 - RNA, 14 nt, Human
aauuauaguuucug

SEQ ID NO: 1295569 - RNA, 15 nt, Human
aauuauaguuucuga

SEQ ID NO: 1295570 - RNA, 16 nt, Human
aauuauaguuucugag

SEQ ID NO: 1295571 - RNA, 17 nt, Human
aauuauaguuucugagg

SEQ ID NO: 1295572 - RNA, 21 nt, Human
aauuauaguuucugaggcuuu

SEQ ID NO: 1295573 - RNA, 14 nt, Human
aauuauauaacugu

SEQ ID NO: 1295574 - RNA, 17 nt, Human
aauuauauaacuguauu

SEQ ID NO: 1295575 - RNA, 19 nt, Human
aauuauauaacuguauuug

SEQ ID NO: 1295576 - RNA, 21 nt, Human
aauuauauaacuguauuugaa

SEQ ID NO: 1295577 - RNA, 19 nt, Human
aauuauacccccugcaaag

SEQ ID NO: 1295578 - RNA, 22 nt, Human
aauuauagcucuaauguuugca

SEQ ID NO: 1295579 - RNA, 20 nt, Human
aauuauagcucuaauguuug

SEQ ID NO: 1295580 - RNA, 19 nt, Human
aauuauagcucuaauguuu

SEQ ID NO: 1295581 - RNA, 18 nt, Human
aauuauagcucuaauguu

SEQ ID NO: 1295582 - RNA, 17 nt, Human
aauuauagcucuaaugu

SEQ ID NO: 1295583 - RNA, 22 nt, Human
aauuaucuauagcuaaguacac

SEQ ID NO: 1295584 - RNA, 15 nt, Human
aauuaucuauagcua

SEQ ID NO: 1295585 - RNA, 19 nt, Human
aauuaucuaauuuauaaaa

SEQ ID NO: 1295586 - RNA, 14 nt, Human
aauuaucuaauuua

SEQ ID NO: 1295587 - RNA, 15 nt, Human
aauuaucuaauuuau

SEQ ID NO: 1295588 - RNA, 18 nt, Human
aauuaucuaauuuauaaa

SEQ ID NO: 1295589 - RNA, 13 nt, Human
aauuauccaggaa

SEQ ID NO: 1295590 - RNA, 22 nt, Human
aauuaucaggcaaauuugcauu

SEQ ID NO: 1295591 - RNA, 12 nt, Human
aauuaugaaacu

SEQ ID NO: 1295592 - RNA, 13 nt, Human
aauuaugaaacuu

SEQ ID NO: 1295593 - RNA, 15 nt, Human
aauuaugaaacuuuu

SEQ ID NO: 1295594 - RNA, 23 nt, Human
aauuaucuauagcuaaguacaca

SEQ ID NO: 1295595 - RNA, 15 nt, Human
aauuaugaagauuua

SEQ ID NO: 1295596 - RNA, 18 nt, Human
aauuaugaaacuuuugga

SEQ ID NO: 1295597 - RNA, 17 nt, Human
aauuaugccuuuuuuga

SEQ ID NO: 1295598 - RNA, 19 nt, Human
aauuaugccuuuuuugauc

SEQ ID NO: 1295599 - RNA, 21 nt, Human
aauuauggaaaaaaaauauuc

SEQ ID NO: 1295600 - RNA, 12 nt, Human
aauuauguaaau

SEQ ID NO: 1295601 - RNA, 15 nt, Human
aauuauguaaauuau

SEQ ID NO: 1295602 - RNA, 17 nt, Human
aauuauguaaauuaugu

SEQ ID NO: 1295603 - RNA, 17 nt, Human
aauuauguaaauuauca

SEQ ID NO: 1295604 - RNA, 12 nt, Human
aauuauguagcu

SEQ ID NO: 1295605 - RNA, 13 nt, Human
aauuauguagcuc

SEQ ID NO: 1295606 - RNA, 16 nt, Human
aauuauguagcucuuu

SEQ ID NO: 1295607 - RNA, 22 nt, Human
aauuauguagcucuuugucagg

SEQ ID NO: 1295608 - RNA, 15 nt, Human
aauucggugugcacc

SEQ ID NO: 1295609 - RNA, 16 nt, Human
aauucugugccuuguu

SEQ ID NO: 1295610 - RNA, 16 nt, Human
aauucugcucagauag

SEQ ID NO: 1295611 - RNA, 21 nt, Human
aauucuggcugguagagcagg

SEQ ID NO: 1295612 - RNA, 17 nt, Human
aauucugaguuuugugu

SEQ ID NO: 1295613 - RNA, 23 nt, Human
aauucugaguuuuguguuuguug

SEQ ID NO: 1295614 - RNA, 16 nt, Human
aauugggccagcuuuu

SEQ ID NO: 1295615 - RNA, 11 nt, Human
aauuggauuuc

SEQ ID NO: 1295616 - RNA, 15 nt, Human
aauuggauuuccuaa

SEQ ID NO: 1295617 - RNA, 17 nt, Human
aauuggauuuccuaaua

SEQ ID NO: 1295618 - RNA, 20 nt, Human
aauuggcaccgaagcccaga

SEQ ID NO: 1295619 - RNA, 23 nt, Human
aauuggcauggaaauuuaaagca

SEQ ID NO: 1295620 - RNA, 21 nt, Human
aauugggagcuugggaaugga

SEQ ID NO: 1295621 - RNA, 23 nt, Human
aauucuaccaaggucuucuuaau

SEQ ID NO: 1295622 - RNA, 22 nt, Human
aauucuagcuuugagcuuaaga

SEQ ID NO: 1295623 - RNA, 13 nt, Human
aauucguguguuu

SEQ ID NO: 1295624 - RNA, 22 nt, Human
aauucguguguuuuuuuaugaa

SEQ ID NO: 1295625 - RNA, 12 nt, Human
aauucuaaaaug

SEQ ID NO: 1295626 - RNA, 14 nt, Human
aauucuaaaaugau

SEQ ID NO: 1295627 - RNA, 13 nt, Human
aauucuaaaugaa

SEQ ID NO: 1295628 - RNA, 17 nt, Human
aauucuaacccagguau

SEQ ID NO: 1295629 - RNA, 19 nt, Human
aauucuaaaugaauguuua

SEQ ID NO: 1295630 - RNA, 16 nt, Human
aauucuauaaggccau

SEQ ID NO: 1295631 - RNA, 22 nt, Human
aauucuauaaggccauaaaaca

SEQ ID NO: 1295632 - RNA, 13 nt, Human
aauucuaugccug

SEQ ID NO: 1295633 - RNA, 15 nt, Human
aauucuaugccuguc

SEQ ID NO: 1295634 - RNA, 15 nt, Human
aauucuauuaaagug

SEQ ID NO: 1295635 - RNA, 23 nt, Human
aauucuauuaaagugcuaagguu

SEQ ID NO: 1295636 - RNA, 14 nt, Human
aauucuccugccuc

SEQ ID NO: 1295637 - RNA, 18 nt, Human
aauucucauuaaaagaau

SEQ ID NO: 1295638 - RNA, 15 nt, Human
aauucuccugccuca

SEQ ID NO: 1295639 - RNA, 16 nt, Human
aauucuccugccucag

SEQ ID NO: 1295640 - RNA, 12 nt, Human
aauucuccugga

SEQ ID NO: 1295641 - RNA, 13 nt, Human
aauucuccuggag

SEQ ID NO: 1295642 - RNA, 15 nt, Human
aauucuccuggaggu

SEQ ID NO: 1295643 - RNA, 17 nt, Human
aauuuccugggagcuuu

SEQ ID NO: 1295644 - RNA, 12 nt, Human
aauuuccuggga

SEQ ID NO: 1295645 - RNA, 15 nt, Human
aauuuccugggagcu

SEQ ID NO: 1295646 - RNA, 14 nt, Human
aauuguacagccgg

SEQ ID NO: 1295647 - RNA, 16 nt, Human
aauuguacuaaagcca

SEQ ID NO: 1295648 - RNA, 17 nt, Human
aauuguacuaaagccaa

SEQ ID NO: 1295649 - RNA, 19 nt, Human
aauugggccagcuuuucaa

SEQ ID NO: 1295650 - RNA, 20 nt, Human
aauugggccagcuuuucaaa

SEQ ID NO: 1295651 - RNA, 13 nt, Human
aauuguaaucuga

SEQ ID NO: 1295652 - RNA, 11 nt, Human
aauuguaauag

SEQ ID NO: 1295653 - RNA, 12 nt, Human
aauuucccagga

SEQ ID NO: 1295654 - RNA, 14 nt, Human
aauuucccaggacc

SEQ ID NO: 1295655 - RNA, 15 nt, Human
aauuucccaggaccc

SEQ ID NO: 1295656 - RNA, 16 nt, Human
aauuucccaggacccu

SEQ ID NO: 1295657 - RNA, 17 nt, Human
aauuucccaggacccug

SEQ ID NO: 1295658 - RNA, 21 nt, Human
aauuucccaggacccugaagg

SEQ ID NO: 1295659 - RNA, 22 nt, Human
aauuucccaggacccugaaggg

SEQ ID NO: 1295660 - RNA, 21 nt, Human
acacgcacggcagccacagcu

SEQ ID NO: 1295661 - RNA, 13 nt, Human
acacgcaccugcc

SEQ ID NO: 1295662 - RNA, 14 nt, Human
acacgcaccugccu

SEQ ID NO: 1295663 - RNA, 16 nt, Human
acacgcaccugccuca

SEQ ID NO: 1295664 - RNA, 17 nt, Human
acacgcaccugccucag

SEQ ID NO: 1295665 - RNA, 14 nt, Human
acacuaaaaauaaa

SEQ ID NO: 1295666 - RNA, 23 nt, Human
acacguggccaagagaaacuucc

SEQ ID NO: 1295667 - RNA, 19 nt, Human
acacguaucccaccugaca

SEQ ID NO: 1295668 - RNA, 19 nt, Human
acacguauuugaauggccu

SEQ ID NO: 1295669 - RNA, 22 nt, Human
acacguauuugaauggccuuca

SEQ ID NO: 1295670 - RNA, 17 nt, Human
acacgugacacaaacac

SEQ ID NO: 1295671 - RNA, 16 nt, Human
acaccaagcacagcag

SEQ ID NO: 1295672 - RNA, 18 nt, Human
acaccaagcacagcagcc

SEQ ID NO: 1295673 - RNA, 19 nt, Human
acaccaagcacagcagccu

SEQ ID NO: 1295674 - RNA, 20 nt, Human
acaccaagcacagcagccug

SEQ ID NO: 1295675 - RNA, 21 nt, Human
acaccaagcacagcagccugg

SEQ ID NO: 1295676 - RNA, 15 nt, Human
acaccaauauucaua

SEQ ID NO: 1295677 - RNA, 17 nt, Human
acacagcauuguauaug

SEQ ID NO: 1295678 - RNA, 18 nt, Human
acacagcauuguauaugu

SEQ ID NO: 1295679 - RNA, 20 nt, Human
acacagcauuguauauguga

SEQ ID NO: 1295680 - RNA, 18 nt, Human
acacagaaaauguugaga

SEQ ID NO: 1295681 - RNA, 19 nt, Human
acacagaaaauguugagaa

SEQ ID NO: 1295682 - RNA, 20 nt, Human
acacagaaaauguugagaau

SEQ ID NO: 1295683 - RNA, 20 nt, Human
acaaguguaaugaauaccuu

SEQ ID NO: 1295684 - RNA, 16 nt, Human
acaaguuauuuaaauc

SEQ ID NO: 1295685 - RNA, 16 nt, Human
acaaguguaaugaaua

SEQ ID NO: 1295686 - RNA, 13 nt, Human
acaaguguaauga

SEQ ID NO: 1295687 - RNA, 18 nt, Human
acaaguggacucagggca

SEQ ID NO: 1295688 - RNA, 19 nt, Human
acaaguggacucagggcag

SEQ ID NO: 1295689 - RNA, 19 nt, Human
acaagugcccuccaggcuu

SEQ ID NO: 1295690 - RNA, 14 nt, Human
acaagugcugaaca

SEQ ID NO: 1295691 - RNA, 15 nt, Human
acaaguggacucagg

SEQ ID NO: 1295692 - RNA, 23 nt, Human
acaagguccucugucagucacag

SEQ ID NO: 1295693 - RNA, 16 nt, Human
acaaggucuuuaaagu

SEQ ID NO: 1295694 - RNA, 14 nt, Human
acaagugcccucca

SEQ ID NO: 1295695 - RNA, 14 nt, Human
acaaccaugucauu

SEQ ID NO: 1295696 - RNA, 19 nt, Human
acaacucacuccuuuuaaa

SEQ ID NO: 1295697 - RNA, 14 nt, Human
acaacucauacacu

SEQ ID NO: 1295698 - RNA, 21 nt, Human
acaacucacuccuuuuaaaga

SEQ ID NO: 1295699 - RNA, 21 nt, Human
acaacugccucgaaacacaga

SEQ ID NO: 1295700 - RNA, 22 nt, Human
acaacugccucgaaacacagaa

SEQ ID NO: 1295701 - RNA, 17 nt, Human
acaacugcucccaccuc

SEQ ID NO: 1295702 - RNA, 16 nt, Human
acaacuggcaggcagg

SEQ ID NO: 1295703 - RNA, 19 nt, Human
acaacuggcaggcaggcuc

SEQ ID NO: 1295704 - RNA, 22 nt, Human
acaaacugcaccaguugcugcu

SEQ ID NO: 1295705 - RNA, 13 nt, Human
acaaacuguaaau

SEQ ID NO: 1295706 - RNA, 16 nt, Human
acaaacuguaauacaa

SEQ ID NO: 1295707 - RNA, 17 nt, Human
acaaacuguaauacaau

SEQ ID NO: 1295708 - RNA, 14 nt, Human
acaaacaugacccu

SEQ ID NO: 1295709 - RNA, 21 nt, Human
acaaacucguuuuuuacaaag

SEQ ID NO: 1295710 - RNA, 20 nt, Human
acaaacucguuuuuuacaaa

SEQ ID NO: 1295711 - RNA, 11 nt, Human
acaaacugaag

SEQ ID NO: 1295712 - RNA, 19 nt, Human
acaaacuguaauacaauga

SEQ ID NO: 1295713 - RNA, 15 nt, Human
acaaacuguguaacu

SEQ ID NO: 1295714 - RNA, 16 nt, Human
acaaacuguguaacug

SEQ ID NO: 1295715 - RNA, 16 nt, Human
acaacauguuuccagc

SEQ ID NO: 1295716 - RNA, 21 nt, Human
acaacauguuuccagcauucc

SEQ ID NO: 1295717 - RNA, 19 nt, Human
acaacauguuuccagcauu

SEQ ID NO: 1295718 - RNA, 14 nt, Human
acaacauuucuaua

SEQ ID NO: 1295719 - RNA, 20 nt, Human
acaacauuucuauagccaaa

SEQ ID NO: 1295720 - RNA, 22 nt, Human
acaacauuucuauagccaaaaa

SEQ ID NO: 1295721 - RNA, 16 nt, Human
acaaccaauggaaugu

SEQ ID NO: 1295722 - RNA, 15 nt, Human
acaaccacuggucug

SEQ ID NO: 1295723 - RNA, 22 nt, Human
acaaccaugucauuucagaagu

SEQ ID NO: 1295724 - RNA, 14 nt, Human
acaaccauuccaga

SEQ ID NO: 1295725 - RNA, 14 nt, Human
acaaacaauaccug

SEQ ID NO: 1295726 - RNA, 13 nt, Human
acaaacaaugaaa

SEQ ID NO: 1295727 - RNA, 12 nt, Human
acaaacaaauuu

SEQ ID NO: 1295728 - RNA, 13 nt, Human
acaaacaaauuuu

SEQ ID NO: 1295729 - RNA, 17 nt, Human
acaaacacacacaaaag

SEQ ID NO: 1295730 - RNA, 15 nt, Human
acaaacaccucccag

SEQ ID NO: 1295731 - RNA, 20 nt, Human
acaaacagggcugccuucug

SEQ ID NO: 1295732 - RNA, 18 nt, Human
aacaucuuuaaggggagg

SEQ ID NO: 1295733 - RNA, 12 nt, Human
aacaucuuuaag

SEQ ID NO: 1295734 - RNA, 22 nt, Human
aacaucuuugaaauuauguaaa

SEQ ID NO: 1295735 - RNA, 14 nt, Human
aacaggcucagagg

SEQ ID NO: 1295736 - RNA, 21 nt, Human
aacaggcacuuggcagccuug

SEQ ID NO: 1295737 - RNA, 14 nt, Human
aacaggccucaggg

SEQ ID NO: 1295738 - RNA, 15 nt, Human
aacaggccucagggc

SEQ ID NO: 1295739 - RNA, 20 nt, Human
aacaggccucagggcuccuu

SEQ ID NO: 1295740 - RNA, 20 nt, Human
aacaugacuccauagaccuu

SEQ ID NO: 1295741 - RNA, 18 nt, Human
aacaugaggccacuggag

SEQ ID NO: 1295742 - RNA, 22 nt, Human
aacaugaagaccuuuuucugca

SEQ ID NO: 1295743 - RNA, 18 nt, Human
aacaugaagaccuuuuuc

SEQ ID NO: 1295744 - RNA, 20 nt, Human
aacaugacccuaaaucuuga

SEQ ID NO: 1295745 - RNA, 23 nt, Human
aacaugaagaccuuuuucugcac

SEQ ID NO: 1295746 - RNA, 14 nt, Human
aacaugaagaccuu

SEQ ID NO: 1295747 - RNA, 21 nt, Human
aacaucuuugaaauuauguaa

SEQ ID NO: 1295748 - RNA, 16 nt, Human
aacaggcacugcccug

SEQ ID NO: 1295749 - RNA, 17 nt, Human
aacaggcacugcccugg

SEQ ID NO: 1295750 - RNA, 18 nt, Human
aacaggcacugcccuggu

SEQ ID NO: 1295751 - RNA, 13 nt, Human
aacaggcacuugg

SEQ ID NO: 1295752 - RNA, 18 nt, Human
aacaggcacuuggcagcc

SEQ ID NO: 1295753 - RNA, 18 nt, Human
aacagccugacaacauuu

SEQ ID NO: 1295754 - RNA, 19 nt, Human
aacagccaacuagccccug

SEQ ID NO: 1295755 - RNA, 17 nt, Human
aacagcccuccucugca

SEQ ID NO: 1295756 - RNA, 19 nt, Human
aacagcccuccucugcacu

SEQ ID NO: 1295757 - RNA, 23 nt, Human
aaauucuucugaacucaaacuga

SEQ ID NO: 1295758 - RNA, 18 nt, Human
aaccuuuguuugcaucug

SEQ ID NO: 1295759 - RNA, 14 nt, Human
aaccuuugugcccu

SEQ ID NO: 1295760 - RNA, 16 nt, Human
aaccuuugugcccuau

SEQ ID NO: 1295761 - RNA, 12 nt, Human
aaccuuuuuaaa

SEQ ID NO: 1295762 - RNA, 13 nt, Human
aacauggcuuuga

SEQ ID NO: 1295763 - RNA, 19 nt, Human
aacccucagagccaccccu

SEQ ID NO: 1295764 - RNA, 23 nt, Human
aacaugguuaccaugucuuucuc

SEQ ID NO: 1295765 - RNA, 10 nt, Human
aacccucagg

SEQ ID NO: 1295766 - RNA, 11 nt, Human
aacccucaggg

SEQ ID NO: 1295767 - RNA, 20 nt, Human
aacccucagggcaaagccag

SEQ ID NO: 1295768 - RNA, 18 nt, Human
aacccucagggcaaagcc

SEQ ID NO: 1295769 - RNA, 18 nt, Human
aacccucuguuccuuccc

SEQ ID NO: 1295770 - RNA, 17 nt, Human
aaccguagaugauuuca

SEQ ID NO: 1295771 - RNA, 16 nt, Human
aaccgucuguuaugcu

SEQ ID NO: 1295772 - RNA, 18 nt, Human
aaccgucuguuaugcugu

SEQ ID NO: 1295773 - RNA, 22 nt, Human
aaccgucuguuaugcugugaca

SEQ ID NO: 1295774 - RNA, 11 nt, Human
aaccguggccc

SEQ ID NO: 1295775 - RNA, 17 nt, Human
aaccguggcccuuccug

SEQ ID NO: 1295776 - RNA, 18 nt, Human
aaccguggcccuuccugg

SEQ ID NO: 1295777 - RNA, 21 nt, Human
aaccguggcccuuccuggaca

SEQ ID NO: 1295778 - RNA, 19 nt, Human
aaccguggcccuuccugga

SEQ ID NO: 1295779 - RNA, 17 nt, Human
aaccuaaaacucuuucg

SEQ ID NO: 1295780 - RNA, 17 nt, Human
aaccguuuugaagcuac

SEQ ID NO: 1295781 - RNA, 18 nt, Human
aaccguuuugaagcuacu

SEQ ID NO: 1295782 - RNA, 22 nt, Human
aaauguugacaugggacauuug

SEQ ID NO: 1295783 - RNA, 17 nt, Human
aaauguucaucaaugaa

SEQ ID NO: 1295784 - RNA, 13 nt, Human
aaauguucaucaa

SEQ ID NO: 1295785 - RNA, 13 nt, Human
aaauguucacuuu

SEQ ID NO: 1295786 - RNA, 16 nt, Human
aaauguucacuuuuga

SEQ ID NO: 1295787 - RNA, 15 nt, Human
aaauguucagaaggu

SEQ ID NO: 1295788 - RNA, 21 nt, Human
aaauguucagaagguugcucu

SEQ ID NO: 1295789 - RNA, 21 nt, Human
aaauguuauuuuuuaauuauu

SEQ ID NO: 1295790 - RNA, 23 nt, Human
aaauguugacaugggacauuugc

SEQ ID NO: 1295791 - RNA, 11 nt, Human
aaauguugcug

SEQ ID NO: 1295792 - RNA, 19 nt, Human
aaauguugcugaaaaaugg

SEQ ID NO: 1295793 - RNA, 19 nt, Human
aaauguugagaaucccaaa

SEQ ID NO: 1295794 - RNA, 20 nt, Human
aaauguuuuuaauaaaagaa

SEQ ID NO: 1295795 - RNA, 21 nt, Human
aaauguuuuuaauaaaagaaa

SEQ ID NO: 1295796 - RNA, 22 nt, Human
aaauguuuuuaauaaaagaaaa

SEQ ID NO: 1295797 - RNA, 12 nt, Human
aaauguuuuugg

SEQ ID NO: 1295798 - RNA, 14 nt, Human
aaauguuuuugguc

SEQ ID NO: 1295799 - RNA, 21 nt, Human
aaauguuuuuggucuuuuaua

SEQ ID NO: 1295800 - RNA, 23 nt, Human
aaauguuuuuggucuuuuauaau

SEQ ID NO: 1295801 - RNA, 16 nt, Human
aaauggccauuugcuu

SEQ ID NO: 1295802 - RNA, 13 nt, Human
aaauggccauuug

SEQ ID NO: 1295803 - RNA, 22 nt, Human
aaauauuguuuuacaauaguuc

SEQ ID NO: 1295804 - RNA, 16 nt, Human
aaauagcaaaagaaga

SEQ ID NO: 1295805 - RNA, 21 nt, Human
aaauagauaagaguagaaacu

SEQ ID NO: 1295806 - RNA, 17 nt, Human
aaauagcaaaagaagaa

SEQ ID NO: 1295807 - RNA, 21 nt, Human
aaauauuuauuuuaauaaugu

SEQ ID NO: 1295808 - RNA, 22 nt, Human
aaauauuuagauguaauuuugu

SEQ ID NO: 1295809 - RNA, 14 nt, Human
aaauauuuguacau

SEQ ID NO: 1295810 - RNA, 15 nt, Human
aaauauuuguacaua

SEQ ID NO: 1295811 - RNA, 22 nt, Human
aaauauuuguacauaguuauuu

SEQ ID NO: 1295812 - RNA, 19 nt, Human
aaauauuuuaaaaucagcu

SEQ ID NO: 1295813 - RNA, 14 nt, Human
aaauauuuuaaaga

SEQ ID NO: 1295814 - RNA, 18 nt, Human
aaauauuuuaaagaauug

SEQ ID NO: 1295815 - RNA, 15 nt, Human
aaauauuuuaaagaa

SEQ ID NO: 1295816 - RNA, 16 nt, Human
aaauauuuuaaagaau

SEQ ID NO: 1295817 - RNA, 17 nt, Human
aaauauuuuaaagaauu

SEQ ID NO: 1295818 - RNA, 16 nt, Human
aaauauuuugcuaguu

SEQ ID NO: 1295819 - RNA, 18 nt, Human
aaaugcuuuuuauuucug

SEQ ID NO: 1295820 - RNA, 19 nt, Human
aaaugcuuagaaauucagc

SEQ ID NO: 1295821 - RNA, 14 nt, Human
aaaugaaaaaauau

SEQ ID NO: 1295822 - RNA, 18 nt, Human
aaaucuuuuauaggauuu

SEQ ID NO: 1295823 - RNA, 11 nt, Human
aaaucuuuuac

SEQ ID NO: 1295824 - RNA, 23 nt, Human
aaaugcuggcuauagaugucuuu

SEQ ID NO: 1295825 - RNA, 18 nt, Human
aaaucucaauauuucaga

SEQ ID NO: 1295826 - RNA, 16 nt, Human
aaaucaaaaucucucc

SEQ ID NO: 1295827 - RNA, 17 nt, Human
aaaucaaaaucucucca

SEQ ID NO: 1295828 - RNA, 20 nt, Human
aaaucaaaaucucuccacuu

SEQ ID NO: 1295829 - RNA, 22 nt, Human
aaauauuuuuggucauuguaau

SEQ ID NO: 1295830 - RNA, 21 nt, Human
aaauauuuuuucuuuucuauu

SEQ ID NO: 1295831 - RNA, 22 nt, Human
aaaucaaaagggccaaagaacc

SEQ ID NO: 1295832 - RNA, 13 nt, Human
aaaucaaaaucuc

SEQ ID NO: 1295833 - RNA, 14 nt, Human
aaaucaaaaucucu

SEQ ID NO: 1295834 - RNA, 15 nt, Human
aaaucaaaaucucuc

SEQ ID NO: 1295835 - RNA, 16 nt, Human
aaaucucaauucuucc

SEQ ID NO: 1295836 - RNA, 13 nt, Human
aaagccugcucaa

SEQ ID NO: 1295837 - RNA, 20 nt, Human
aaagccuggguuugguguau

SEQ ID NO: 1295838 - RNA, 23 nt, Human
aaagccuggguuugguguauggu

SEQ ID NO: 1295839 - RNA, 17 nt, Human
aaagccuguucauggca

SEQ ID NO: 1295840 - RNA, 18 nt, Human
aaagccuguucauggcag

SEQ ID NO: 1295841 - RNA, 12 nt, Human
aaaggaugugau

SEQ ID NO: 1295842 - RNA, 14 nt, Human
aaaggaugugauau

SEQ ID NO: 1295843 - RNA, 17 nt, Human
aaaggaugugauauaua

SEQ ID NO: 1295844 - RNA, 19 nt, Human
aaaggaugugauauauaag

SEQ ID NO: 1295845 - RNA, 23 nt, Human
aaaggaugugauauauaagugua

SEQ ID NO: 1295846 - RNA, 13 nt, Human
aaaggaugugauu

SEQ ID NO: 1295847 - RNA, 15 nt, Human
aaaagaaaauuuuug

SEQ ID NO: 1295848 - RNA, 11 nt, Human
aaaagaaaauu

SEQ ID NO: 1295849 - RNA, 22 nt, Human
aaaagaaaaucuuuauaaaugu

SEQ ID NO: 1295850 - RNA, 17 nt, Human
aaaagaaagaaaaucag

SEQ ID NO: 1295851 - RNA, 16 nt, Human
aaaagaaaagucaagg

SEQ ID NO: 1295852 - RNA, 13 nt, Human
aaaagaaaaagau

SEQ ID NO: 1295853 - RNA, 12 nt, Human
aaaagaaacuuu

SEQ ID NO: 1295854 - RNA, 18 nt, Human
aaaagaaaggcuguuaaa

SEQ ID NO: 1295855 - RNA, 11 nt, Human
aaaagaaaggc

SEQ ID NO: 1295856 - RNA, 12 nt, Human
aaaagaagaagu

SEQ ID NO: 1295857 - RNA, 19 nt, Human
aaaagaagcccggcuccug

SEQ ID NO: 1295858 - RNA, 20 nt, Human
aaaagacaaggaaaaaauaa

SEQ ID NO: 1295859 - RNA, 14 nt, Human
aaaagaagaaguuu

SEQ ID NO: 1295860 - RNA, 11 nt, Human
aaaagaaguaa

SEQ ID NO: 1295861 - RNA, 11 nt, Human
aaaagaaugau

SEQ ID NO: 1295862 - RNA, 13 nt, Human
aaaagaauuguug

SEQ ID NO: 1295863 - RNA, 22 nt, Human
aaaagaauuguuggggguuuuu

SEQ ID NO: 1295864 - RNA, 20 nt, Human
aaaagacacacuuguccaca

SEQ ID NO: 1295865 - RNA, 13 nt, Human
aaaagacauucag

SEQ ID NO: 1295866 - RNA, 15 nt, Human
aaaagacauucagga

SEQ ID NO: 1295867 - RNA, 13 nt, Human
aaaagacucaucc

SEQ ID NO: 1295868 - RNA, 21 nt, Human
aaaacacuaaaaauaaaaaug

SEQ ID NO: 1295869 - RNA, 13 nt, Human
aaaacacugugca

SEQ ID NO: 1295870 - RNA, 14 nt, Human
aaaacagaacacuu

SEQ ID NO: 1295871 - RNA, 13 nt, Human
aaaacagaagccu

SEQ ID NO: 1295872 - RNA, 17 nt, Human
aaaacagacacuggcau

SEQ ID NO: 1295873 - RNA, 17 nt, Human
aaaacaggcacugcccu

SEQ ID NO: 1295874 - RNA, 18 nt, Human
aaaacaggcacugcccug

SEQ ID NO: 1295875 - RNA, 23 nt, Human
aaaacaggcacugcccugguggc

SEQ ID NO: 1295876 - RNA, 18 nt, Human
aaaacagggccacauaga

SEQ ID NO: 1295877 - RNA, 23 nt, Human
aaaacagggccacauagaugcug

SEQ ID NO: 1295878 - RNA, 12 nt, Human
aaaacagguaga

SEQ ID NO: 1295879 - RNA, 17 nt, Human
aaaacagguagaauuau

SEQ ID NO: 1295880 - RNA, 22 nt, Human
aaaacagguagaauuaucuaau

SEQ ID NO: 1295881 - RNA, 11 nt, Human
aaaacuuugga

SEQ ID NO: 1295882 - RNA, 16 nt, Human
aaaacuuuggaaccag

SEQ ID NO: 1295883 - RNA, 17 nt, Human
aaaacuuuggaaccaga

SEQ ID NO: 1295884 - RNA, 19 nt, Human
aaaacuuuggaaccagacu

SEQ ID NO: 1295885 - RNA, 12 nt, Human
aaaagauaaaca

SEQ ID NO: 1295886 - RNA, 19 nt, Human
aaaagauaaacacaagauu

SEQ ID NO: 1295887 - RNA, 17 nt, Human
aaaagauaaacacaaga

SEQ ID NO: 1295888 - RNA, 10 nt, Human
aaaagacuca

SEQ ID NO: 1295889 - RNA, 11 nt, Human
aaaagacucau

SEQ ID NO: 1295890 - RNA, 12 nt, Human
aaaagacucauc

SEQ ID NO: 1295891 - RNA, 15 nt, Human
aaaagacuuguuucu

SEQ ID NO: 1295892 - RNA, 10 nt, Human
aaaagauccc

SEQ ID NO: 1295893 - RNA, 23 nt, Human
aaaagaucuguuuugaaggcaaa

SEQ ID NO: 1295894 - RNA, 14 nt, Human
aaaaguugcuauuu

SEQ ID NO: 1295895 - RNA, 18 nt, Human
aaaaguugaauuuuacau

SEQ ID NO: 1295896 - RNA, 14 nt, Human
aaaaguugcagcug

SEQ ID NO: 1295897 - RNA, 15 nt, Human
aaaaguugcagcugu

SEQ ID NO: 1295898 - RNA, 18 nt, Human
aaaaguugcagcuguuuu

SEQ ID NO: 1295899 - RNA, 21 nt, Human
aaaaguugcagcuguuuuguu

SEQ ID NO: 1295900 - RNA, 22 nt, Human
aaaaguugcuauuugaacuuuu

SEQ ID NO: 1295901 - RNA, 13 nt, Human
aaaauaaaaaugg

SEQ ID NO: 1295902 - RNA, 22 nt, Human
aaaauaaaacccguugauuacu

SEQ ID NO: 1295903 - RNA, 18 nt, Human
aaaaucagcuauuuugug

SEQ ID NO: 1295904 - RNA, 13 nt, Human
aaaagugaaauaa

SEQ ID NO: 1295905 - RNA, 15 nt, Human
aaaagugaagacaga

SEQ ID NO: 1295906 - RNA, 13 nt, Human
aaagccaugcugg

SEQ ID NO: 1295907 - RNA, 19 nt, Human
aaagccugaguacuccaca

SEQ ID NO: 1295908 - RNA, 12 nt, Human
aaagccugcuca

SEQ ID NO: 1295909 - RNA, 17 nt, Human
aaagccugggugacauu

SEQ ID NO: 1295910 - RNA, 18 nt, Human
aaagccugggugacauuu

SEQ ID NO: 1295911 - RNA, 21 nt, Human
aaagaucuguuuugaaggcaa

SEQ ID NO: 1295912 - RNA, 16 nt, Human
aaagaucuguuuugaa

SEQ ID NO: 1295913 - RNA, 21 nt, Human
aaagaucuguccucagccuug

SEQ ID NO: 1295914 - RNA, 13 nt, Human
aaagaucuguuuu

SEQ ID NO: 1295915 - RNA, 13 nt, Human
aaagaucccaaau

SEQ ID NO: 1295916 - RNA, 18 nt, Human
aaagaucuguccucagcc

SEQ ID NO: 1295917 - RNA, 19 nt, Human
aaagaucuguccucagccu

SEQ ID NO: 1295918 - RNA, 20 nt, Human
aaagaucuguccucagccuu

SEQ ID NO: 1295919 - RNA, 10 nt, Human
aaagaaaaaa

SEQ ID NO: 1295920 - RNA, 23 nt, Human
aaagaaaaaaaaccaucaaguug

SEQ ID NO: 1295921 - RNA, 17 nt, Human
aaagaaaaaaauguauu

SEQ ID NO: 1295922 - RNA, 22 nt, Human
aaagaaaaaaauguauuuuaug

SEQ ID NO: 1295923 - RNA, 18 nt, Human
aaagaaaaaaauguauuu

SEQ ID NO: 1295924 - RNA, 13 nt, Human
aaagaaaaaaauu

SEQ ID NO: 1295925 - RNA, 15 nt, Human
aaagaaaaaaauuga

SEQ ID NO: 1295926 - RNA, 16 nt, Human
aaagaaaaaaauugaa

SEQ ID NO: 1295927 - RNA, 18 nt, Human
aaagaaaaaaauugaaau

SEQ ID NO: 1295928 - RNA, 19 nt, Human
aaagaaaaaaauugaaaug

SEQ ID NO: 1295929 - RNA, 22 nt, Human
aaagaaaaaaauugaaauguaa

SEQ ID NO: 1295930 - RNA, 21 nt, Human
aaagaaaaaaauugaaaugua

SEQ ID NO: 1295931 - RNA, 16 nt, Human
aaagauauuuuuaucu

SEQ ID NO: 1295932 - RNA, 19 nt, Human
aaaccaguguuagggaagg

SEQ ID NO: 1295933 - RNA, 15 nt, Human
aaacccaauccaaau

SEQ ID NO: 1295934 - RNA, 20 nt, Human
aaaccagguccaaugagcuu

SEQ ID NO: 1295935 - RNA, 22 nt, Human
aaaccagguccaaugagcuuuc

SEQ ID NO: 1295936 - RNA, 24 nt, Human
aaaccagguccaaugagcuuucug

SEQ ID NO: 1295937 - RNA, 22 nt, Human
aaaccgaacugauguaaguaaa

SEQ ID NO: 1295938 - RNA, 18 nt, Human
aaacccaccugcuagugu

SEQ ID NO: 1295939 - RNA, 13 nt, Human
aaaccgccagcuc

SEQ ID NO: 1295940 - RNA, 14 nt, Human
aaaccgccagcucu

SEQ ID NO: 1295941 - RNA, 15 nt, Human
aaaccgccagcucug

SEQ ID NO: 1295942 - RNA, 18 nt, Human
aaaccgccagcucuguuc

SEQ ID NO: 1295943 - RNA, 18 nt, Human
aaacucuguuacacuuuu

SEQ ID NO: 1295944 - RNA, 22 nt, Human
aaacucuguuacacuuuuugga

SEQ ID NO: 1295945 - RNA, 19 nt, Human
aaacucuguugcaagugca

SEQ ID NO: 1295946 - RNA, 20 nt, Human
aaacucuguugcaagugcaa

SEQ ID NO: 1295947 - RNA, 23 nt, Human
aaacuuuuuuucuguaccaguua

SEQ ID NO: 1295948 - RNA, 11 nt, Human
aaagaaaaaaa

SEQ ID NO: 1295949 - RNA, 20 nt, Human
aaaaucuauuuuguaacuuu

SEQ ID NO: 1295950 - RNA, 13 nt, Human
aagcuacuuauug

SEQ ID NO: 1295951 - RNA, 22 nt, Human
aagcuacugugugugugaauga

SEQ ID NO: 1295952 - RNA, 23 nt, Human
aagcuacugugugugugaaugaa

SEQ ID NO: 1295953 - RNA, 21 nt, Human
aagcggugucucuccugcccc

SEQ ID NO: 1295954 - RNA, 19 nt, Human
aagcgauucucuugccuca

SEQ ID NO: 1295955 - RNA, 20 nt, Human
aagcgauucucuugccucaa

SEQ ID NO: 1295956 - RNA, 14 nt, Human
aagcggugucucuc

SEQ ID NO: 1295957 - RNA, 15 nt, Human
aagcgaaaaaaucag

SEQ ID NO: 1295958 - RNA, 14 nt, Human
aagcgauucuccug

SEQ ID NO: 1295959 - RNA, 10 nt, Human
aagccuuugu

SEQ ID NO: 1295960 - RNA, 20 nt, Human
aagccaguuuggguaaaaua

SEQ ID NO: 1295961 - RNA, 23 nt, Human
aagccaguuuggguaaaauacuu

SEQ ID NO: 1295962 - RNA, 21 nt, Human
aagccagguuccacagaggac

SEQ ID NO: 1295963 - RNA, 23 nt, Human
aagccagguuccacagaggacac

SEQ ID NO: 1295964 - RNA, 17 nt, Human
aagccaggucccucuca

SEQ ID NO: 1295965 - RNA, 24 nt, Human
aagccaggaauuucccaggacccu

SEQ ID NO: 1295966 - RNA, 13 nt, Human
aagccaggucccu

SEQ ID NO: 1295967 - RNA, 15 nt, Human
aagccaggucccucu

SEQ ID NO: 1295968 - RNA, 16 nt, Human
aagccaggucccucuc

SEQ ID NO: 1295969 - RNA, 20 nt, Human
aagaguuugaugaggcccuc

SEQ ID NO: 1295970 - RNA, 19 nt, Human
aagauaaggucugaauaau

SEQ ID NO: 1295971 - RNA, 12 nt, Human
aagauaauuaua

SEQ ID NO: 1295972 - RNA, 15 nt, Human
aagauaauucacugu

SEQ ID NO: 1295973 - RNA, 20 nt, Human
aagauacagaacucuuucaa

SEQ ID NO: 1295974 - RNA, 22 nt, Human
aagauacagaacucuuucaaaa

SEQ ID NO: 1295975 - RNA, 18 nt, Human
aagcuagacacaugaagg

SEQ ID NO: 1295976 - RNA, 20 nt, Human
aagcuagacacaugaaggua

SEQ ID NO: 1295977 - RNA, 22 nt, Human
aagcuagacacaugaagguaaa

SEQ ID NO: 1295978 - RNA, 19 nt, Human
aagcuagaauugaguguuu

SEQ ID NO: 1295979 - RNA, 15 nt, Human
aagcuagacacauga

SEQ ID NO: 1295980 - RNA, 16 nt, Human
aagcuagacacaugaa

SEQ ID NO: 1295981 - RNA, 17 nt, Human
aagcuagacacaugaag

SEQ ID NO: 1295982 - RNA, 21 nt, Human
aagcuagacacaugaagguaa

SEQ ID NO: 1295983 - RNA, 18 nt, Human
aagcugaguauuaaaaug

SEQ ID NO: 1295984 - RNA, 19 nt, Human
aagcugaguauuaaaaugu

SEQ ID NO: 1295985 - RNA, 22 nt, Human
aagcugaguuaggugucugucc

SEQ ID NO: 1295986 - RNA, 23 nt, Human
aagcugaguuaggugucuguccu

SEQ ID NO: 1295987 - RNA, 13 nt, Human
aagcugaguuucc

SEQ ID NO: 1295988 - RNA, 14 nt, Human
aagcugaguuuccu

SEQ ID NO: 1295989 - RNA, 15 nt, Human
aagcugaguuuccua

SEQ ID NO: 1295990 - RNA, 22 nt, Human
aagcugaguuuccuaugggaac

SEQ ID NO: 1295991 - RNA, 16 nt, Human
aagcugauuaaaugac

SEQ ID NO: 1295992 - RNA, 15 nt, Human
aagcugauuaaauga

SEQ ID NO: 1295993 - RNA, 18 nt, Human
aagcugauuuuuuuuaau

SEQ ID NO: 1295994 - RNA, 14 nt, Human
aaggacuuuguaca

SEQ ID NO: 1295995 - RNA, 15 nt, Human
aaggacuuuguacau

SEQ ID NO: 1295996 - RNA, 17 nt, Human
aaggacuuuguacauuu

SEQ ID NO: 1295997 - RNA, 15 nt, Human
aaggagaaccagcac

SEQ ID NO: 1295998 - RNA, 22 nt, Human
aaggcaacaaaagaagcccggc

SEQ ID NO: 1295999 - RNA, 21 nt, Human
aaggcaacaaaagaagcccgg

SEQ ID NO: 1296000 - RNA, 18 nt, Human
aaggcaagcacuuguggg

SEQ ID NO: 1296001 - RNA, 19 nt, Human
aaggcagggaggaggcaga

SEQ ID NO: 1296002 - RNA, 19 nt, Human
aaggcagggagggccuggg

SEQ ID NO: 1296003 - RNA, 22 nt, Human
aaggcagggagggccugggccc

SEQ ID NO: 1296004 - RNA, 21 nt, Human
aaggcauacgagagcagaggu

SEQ ID NO: 1296005 - RNA, 22 nt, Human
aaggcauacgagagcagagguc

SEQ ID NO: 1296006 - RNA, 22 nt, Human
aaggcaguuaccauuaaaccau

SEQ ID NO: 1296007 - RNA, 23 nt, Human
aaggcaguuaccauuaaaccauc

SEQ ID NO: 1296008 - RNA, 15 nt, Human
aaggcaguuugcaaa

SEQ ID NO: 1296009 - RNA, 15 nt, Human
aaggcaguuuucuaa

SEQ ID NO: 1296010 - RNA, 19 nt, Human
aaggcaguuugcaaaaaau

SEQ ID NO: 1296011 - RNA, 17 nt, Human
aaggcauacgagagcag

SEQ ID NO: 1296012 - RNA, 22 nt, Human
aagagaucaggaagagaaggag

SEQ ID NO: 1296013 - RNA, 16 nt, Human
aagagaucaggaagag

SEQ ID NO: 1296014 - RNA, 15 nt, Human
aagagaucaggaaga

SEQ ID NO: 1296015 - RNA, 14 nt, Human
aagagauacagagg

SEQ ID NO: 1296016 - RNA, 16 nt, Human
aagagauaacuguaaa

SEQ ID NO: 1296017 - RNA, 14 nt, Human
aagagacagugaua

SEQ ID NO: 1296018 - RNA, 11 nt, Human
aagagaaaaag

SEQ ID NO: 1296019 - RNA, 20 nt, Human
aagagaaacaguugguaacu

SEQ ID NO: 1296020 - RNA, 13 nt, Human
aagagaaacuucc

SEQ ID NO: 1296021 - RNA, 20 nt, Human
aagacagaaccacagggcua

SEQ ID NO: 1296022 - RNA, 16 nt, Human
aagacagaaguuugca

SEQ ID NO: 1296023 - RNA, 18 nt, Human
aagacagaaguuugcacu

SEQ ID NO: 1296024 - RNA, 12 nt, Human
aagacaugaagc

SEQ ID NO: 1296025 - RNA, 14 nt, Human
aagacaugauuucc

SEQ ID NO: 1296026 - RNA, 15 nt, Human
aagacaugauuuccu

SEQ ID NO: 1296027 - RNA, 16 nt, Human
aagacaugauuuccuu

SEQ ID NO: 1296028 - RNA, 20 nt, Human
aagacaugauuuccuugaau

SEQ ID NO: 1296029 - RNA, 21 nt, Human
aagacaugauuuccuugaaug

SEQ ID NO: 1296030 - RNA, 14 nt, Human
aagaacggaagaag

SEQ ID NO: 1296031 - RNA, 14 nt, Human
aagaaccuggaacu

SEQ ID NO: 1296032 - RNA, 11 nt, Human
aagaacaugug

SEQ ID NO: 1296033 - RNA, 16 nt, Human
aagaaccaaagaagaa

SEQ ID NO: 1296034 - RNA, 17 nt, Human
aagaaccagucccccca

SEQ ID NO: 1296035 - RNA, 20 nt, Human
aagaaccaguccccccaccc

SEQ ID NO: 1296036 - RNA, 14 nt, Human
aagaacuagcauaa

SEQ ID NO: 1296037 - RNA, 16 nt, Human
aacgcagcccugcuuu

SEQ ID NO: 1296038 - RNA, 22 nt, Human
aacgcaucuaguuccccuguuu

SEQ ID NO: 1296039 - RNA, 23 nt, Human
aacgcaucuaguuccccuguuua

SEQ ID NO: 1296040 - RNA, 11 nt, Human
aagaacugaaa

SEQ ID NO: 1296041 - RNA, 13 nt, Human
aagaaccacuugu

SEQ ID NO: 1296042 - RNA, 13 nt, Human
aagaacucucugg

SEQ ID NO: 1296043 - RNA, 12 nt, Human
aagaacugaaau

SEQ ID NO: 1296044 - RNA, 13 nt, Human
aagaacugaaauc

SEQ ID NO: 1296045 - RNA, 15 nt, Human
aagaacugaaaucau

SEQ ID NO: 1296046 - RNA, 14 nt, Human
aagaacucucugga

SEQ ID NO: 1296047 - RNA, 18 nt, Human
aagaacugcaggcccugg

SEQ ID NO: 1296048 - RNA, 22 nt, Human
aagaacugcaggcccuggccuc

SEQ ID NO: 1296049 - RNA, 23 nt, Human
aagaacugcaggcccuggccucc

SEQ ID NO: 1296050 - RNA, 21 nt, Human
aagacaaggaaaaaauaacaa

SEQ ID NO: 1296051 - RNA, 20 nt, Human
aagaagacugcauuauauuu

SEQ ID NO: 1296052 - RNA, 20 nt, Human
aagaagaccugagaauguau

SEQ ID NO: 1296053 - RNA, 21 nt, Human
aagaagaccugagaauguauc

SEQ ID NO: 1296054 - RNA, 15 nt, Human
aagaagacugcauua

SEQ ID NO: 1296055 - RNA, 15 nt, Human
aagaagacaaacuuu

SEQ ID NO: 1296056 - RNA, 19 nt, Human
aagaagacaaacuuugcau

SEQ ID NO: 1296057 - RNA, 16 nt, Human
aagaagacaaacuuug

SEQ ID NO: 1296058 - RNA, 20 nt, Human
aagaacuuugagcuacugcc

SEQ ID NO: 1296059 - RNA, 17 nt, Human
aagaacuuuaaauugug

SEQ ID NO: 1296060 - RNA, 13 nt, Human
aagaacuuugagc

SEQ ID NO: 1296061 - RNA, 18 nt, Human
aagaacuuugagcuacug

SEQ ID NO: 1296062 - RNA, 13 nt, Human
aagaagaagggca

SEQ ID NO: 1296063 - RNA, 22 nt, Human
aagacaagaacuccccuuuuuu

SEQ ID NO: 1296064 - RNA, 23 nt, Human
aagacaagugaugcuaaaaccug

SEQ ID NO: 1296065 - RNA, 13 nt, Human
aagacaauauaau

SEQ ID NO: 1296066 - RNA, 21 nt, Human
aagacacauuuuuuaggaaau

SEQ ID NO: 1296067 - RNA, 18 nt, Human
aagacaccguucauucag

SEQ ID NO: 1296068 - RNA, 14 nt, Human
aagaguucaagaaa

SEQ ID NO: 1296069 - RNA, 16 nt, Human
aagaguucaagaaaua

SEQ ID NO: 1296070 - RNA, 14 nt, Human
aagaguuggcuggu

SEQ ID NO: 1296071 - RNA, 15 nt, Human
aagaguuuaaaauca

SEQ ID NO: 1296072 - RNA, 13 nt, Human
aagagucuaaaga

SEQ ID NO: 1296073 - RNA, 14 nt, Human
aagagucuaaagau

SEQ ID NO: 1296074 - RNA, 24 nt, Human
aagagucuaaagauggaguuucua

SEQ ID NO: 1296075 - RNA, 18 nt, Human
aagaguccauuguuuaaa

SEQ ID NO: 1296076 - RNA, 21 nt, Human
aagaguccauuguuuaaaaau

SEQ ID NO: 1296077 - RNA, 16 nt, Human
aauaaacacucuugaa

SEQ ID NO: 1296078 - RNA, 11 nt, Human
aauaaacacuc

SEQ ID NO: 1296079 - RNA, 14 nt, Human
aaguuuaauaaauu

SEQ ID NO: 1296080 - RNA, 17 nt, Human
aaguuuaauaaauuuau

SEQ ID NO: 1296081 - RNA, 19 nt, Human
aauaaacacucuugaaaaa

SEQ ID NO: 1296082 - RNA, 10 nt, Human
aauaaaccau

SEQ ID NO: 1296083 - RNA, 13 nt, Human
aauaaacuuuaau

SEQ ID NO: 1296084 - RNA, 13 nt, Human
aauaaagaaaaga

SEQ ID NO: 1296085 - RNA, 14 nt, Human
aauaaagaaaagau

SEQ ID NO: 1296086 - RNA, 12 nt, Human
aaguugaauuuu

SEQ ID NO: 1296087 - RNA, 23 nt, Human
aaguuggaguuuuguuuccucug

SEQ ID NO: 1296088 - RNA, 21 nt, Human
aaguuggggacacauguauuu

SEQ ID NO: 1296089 - RNA, 17 nt, Human
aaguugggcuugcuauu

SEQ ID NO: 1296090 - RNA, 20 nt, Human
aaguugggcuugcuauucug

SEQ ID NO: 1296091 - RNA, 21 nt, Human
aaguugggcuugcuauucugu

SEQ ID NO: 1296092 - RNA, 17 nt, Human
aaguuguaaaguaugua

SEQ ID NO: 1296093 - RNA, 14 nt, Human
aaguuguaaaguau

SEQ ID NO: 1296094 - RNA, 19 nt, Human
aaguggccaagaagcagug

SEQ ID NO: 1296095 - RNA, 17 nt, Human
aaguggacucagggcag

SEQ ID NO: 1296096 - RNA, 12 nt, Human
aauaaagcaauu

SEQ ID NO: 1296097 - RNA, 11 nt, Human
aauaaagcaau

SEQ ID NO: 1296098 - RNA, 17 nt, Human
aauaaagaauggaaagc

SEQ ID NO: 1296099 - RNA, 15 nt, Human
aauaaagaaaagaug

SEQ ID NO: 1296100 - RNA, 16 nt, Human
aauaaagaaaagaugc

SEQ ID NO: 1296101 - RNA, 20 nt, Human
aauaaagaaaagaugcacuu

SEQ ID NO: 1296102 - RNA, 17 nt, Human
aauaaagaaaagaugca

SEQ ID NO: 1296103 - RNA, 12 nt, Human
aauaaagaaugg

SEQ ID NO: 1296104 - RNA, 17 nt, Human
aauaaugugcacugaau

SEQ ID NO: 1296105 - RNA, 14 nt, Human
aauaauguguaguu

SEQ ID NO: 1296106 - RNA, 19 nt, Human
aauaauguguaguucaugu

SEQ ID NO: 1296107 - RNA, 22 nt, Human
aauaauguguaguucauguaaa

SEQ ID NO: 1296108 - RNA, 20 nt, Human
aauaauguguaguucaugua

SEQ ID NO: 1296109 - RNA, 21 nt, Human
aauaauguguaguucauguaa

SEQ ID NO: 1296110 - RNA, 17 nt, Human
aaucucaauucuucccu

SEQ ID NO: 1296111 - RNA, 15 nt, Human
aaucucacauauaca

SEQ ID NO: 1296112 - RNA, 23 nt, Human
aaucucacauauacaaguagcuu

SEQ ID NO: 1296113 - RNA, 16 nt, Human
aaucucaauauuucag

SEQ ID NO: 1296114 - RNA, 22 nt, Human
aaucucaguugauuuucuggau

SEQ ID NO: 1296115 - RNA, 16 nt, Human
aaucucaguugauuuu

SEQ ID NO: 1296116 - RNA, 21 nt, Human
aaucucaguugauuuucugga

SEQ ID NO: 1296117 - RNA, 12 nt, Human
aaucugacccag

SEQ ID NO: 1296118 - RNA, 13 nt, Human
aaucugacccagu

SEQ ID NO: 1296119 - RNA, 14 nt, Human
aaucugacccagug

SEQ ID NO: 1296120 - RNA, 15 nt, Human
aaucugacccagugc

SEQ ID NO: 1296121 - RNA, 17 nt, Human
aaucugacccagugccc

SEQ ID NO: 1296122 - RNA, 14 nt, Human
aaugaagcaaugcu

SEQ ID NO: 1296123 - RNA, 12 nt, Human
aaugaagaucua

SEQ ID NO: 1296124 - RNA, 24 nt, Human
aaugaagaucuaaauaaaaugcua

SEQ ID NO: 1296125 - RNA, 23 nt, Human
aaugaagcaaaugucaugcugcc

SEQ ID NO: 1296126 - RNA, 22 nt, Human
aaugaagccauaugaacagcug

SEQ ID NO: 1296127 - RNA, 20 nt, Human
aaugaagauacugaaauaaa

SEQ ID NO: 1296128 - RNA, 20 nt, Human
aaugaauacuuuauaaagga

SEQ ID NO: 1296129 - RNA, 13 nt, Human
aaugaauaccuua

SEQ ID NO: 1296130 - RNA, 12 nt, Human
aaugaauaccuu

SEQ ID NO: 1296131 - RNA, 14 nt, Human
aaugauggcaauuu

SEQ ID NO: 1296132 - RNA, 17 nt, Human
aaugauggcaauuuugu

SEQ ID NO: 1296133 - RNA, 20 nt, Human
aaugauguauguugaagccu

SEQ ID NO: 1296134 - RNA, 18 nt, Human
aaugauggcaauuuugua

SEQ ID NO: 1296135 - RNA, 19 nt, Human
aaugauggcaauuuuguaa

SEQ ID NO: 1296136 - RNA, 16 nt, Human
aauauauaucaaauau

SEQ ID NO: 1296137 - RNA, 11 nt, Human
aauaugucagu

SEQ ID NO: 1296138 - RNA, 12 nt, Human
aauauguccugg

SEQ ID NO: 1296139 - RNA, 13 nt, Human
aauauguccuggg

SEQ ID NO: 1296140 - RNA, 13 nt, Human
aauauuaaaucug

SEQ ID NO: 1296141 - RNA, 21 nt, Human
aauauuaaaucugcuggaguu

SEQ ID NO: 1296142 - RNA, 22 nt, Human
aaucaaugcuauaacuauguug

SEQ ID NO: 1296143 - RNA, 14 nt, Human
aaucaaucuugcau

SEQ ID NO: 1296144 - RNA, 16 nt, Human
aaucaaucuugcaugu

SEQ ID NO: 1296145 - RNA, 14 nt, Human
aaucaauuaaaagu

SEQ ID NO: 1296146 - RNA, 18 nt, Human
aaucaaucuugcauguaa

SEQ ID NO: 1296147 - RNA, 16 nt, Human
aaucacgcuuuccuga

SEQ ID NO: 1296148 - RNA, 17 nt, Human
aaucacgcuuuuugaaa

SEQ ID NO: 1296149 - RNA, 18 nt, Human
aaucacgcuuuuugaaaa

SEQ ID NO: 1296150 - RNA, 14 nt, Human
aaucacgcuuuuug

SEQ ID NO: 1296151 - RNA, 15 nt, Human
aaucacgcuuuuuga

SEQ ID NO: 1296152 - RNA, 16 nt, Human
aaucacgcuuuuugaa

SEQ ID NO: 1296153 - RNA, 20 nt, Human
aaucacgcuuuuugaaaaag

SEQ ID NO: 1296154 - RNA, 22 nt, Human
aauauuaagguaguuauucaca

SEQ ID NO: 1296155 - RNA, 20 nt, Human
aauauuacagauaaaaugua

SEQ ID NO: 1296156 - RNA, 13 nt, Human
aauauuagaaaca

SEQ ID NO: 1296157 - RNA, 18 nt, Human
aaucaaaagggccaaaga

SEQ ID NO: 1296158 - RNA, 19 nt, Human
aaucaaaagggccaaagaa

SEQ ID NO: 1296159 - RNA, 23 nt, Human
aaucaaaagggccaaagaaccaa

SEQ ID NO: 1296160 - RNA, 20 nt, Human
aaucaaaagggccaaagaac

SEQ ID NO: 1296161 - RNA, 12 nt, Human
aaucaaaaucuc

SEQ ID NO: 1296162 - RNA, 15 nt, Human
aaucaaaaucucucc

SEQ ID NO: 1296163 - RNA, 16 nt, Human
aaucaaaaucucucca

SEQ ID NO: 1296164 - RNA, 19 nt, Human
aaucaaaaucucuccacuu

SEQ ID NO: 1296165 - RNA, 13 nt, Human
aaucaaacauuuu

SEQ ID NO: 1296166 - RNA, 16 nt, Human
aaucaaacauuuucug

SEQ ID NO: 1296167 - RNA, 17 nt, Human
aaucaaacauuuucugg

SEQ ID NO: 1296168 - RNA, 23 nt, Human
aaucaaacauuuugaaagucugu

SEQ ID NO: 1296169 - RNA, 15 nt, Human
aaucaaacauuuuga

SEQ ID NO: 1296170 - RNA, 12 nt, Human
aaucaauaauau

SEQ ID NO: 1296171 - RNA, 20 nt, Human
aaucaaucuugcauguaacg

SEQ ID NO: 1296172 - RNA, 13 nt, Human
gccaggccgggaa

SEQ ID NO: 1296173 - RNA, 14 nt, Human
gccaggccucuccc

SEQ ID NO: 1296174 - RNA, 23 nt, Human
gccaggccucucccuccuccagg

SEQ ID NO: 1296175 - RNA, 21 nt, Human
gccagccacggggacucagcc

SEQ ID NO: 1296176 - RNA, 20 nt, Human
gccagccaagcucugcaguc

SEQ ID NO: 1296177 - RNA, 21 nt, Human
gccagccaagcucugcagucc

SEQ ID NO: 1296178 - RNA, 15 nt, Human
gccagccaagcucug

SEQ ID NO: 1296179 - RNA, 16 nt, Human
gccagccaagcucugc

SEQ ID NO: 1296180 - RNA, 19 nt, Human
gccagccaagcucugcagu

SEQ ID NO: 1296181 - RNA, 15 nt, Human
gccaggaggacccag

SEQ ID NO: 1296182 - RNA, 16 nt, Human
gccaggaggacccagg

SEQ ID NO: 1296183 - RNA, 17 nt, Human
gccaggaggacccaggg

SEQ ID NO: 1296184 - RNA, 19 nt, Human
gccaggaggacccagggcu

SEQ ID NO: 1296185 - RNA, 22 nt, Human
gccaggaggacccagggcucug

SEQ ID NO: 1296186 - RNA, 13 nt, Human
gccaggagggaca

SEQ ID NO: 1296187 - RNA, 19 nt, Human
gccaggagggacaaaggag

SEQ ID NO: 1296188 - RNA, 20 nt, Human
gccaggauggaacacggcca

SEQ ID NO: 1296189 - RNA, 22 nt, Human
gccaggauggaacacggccaca

SEQ ID NO: 1296190 - RNA, 21 nt, Human
gccaggagggacaaaggagcc

SEQ ID NO: 1296191 - RNA, 22 nt, Human
gccaggagggacaaaggagccu

SEQ ID NO: 1296192 - RNA, 23 nt, Human
gccaggagggacaaaggagccug

SEQ ID NO: 1296193 - RNA, 17 nt, Human
gccaggaggugccacug

SEQ ID NO: 1296194 - RNA, 18 nt, Human
gccaggaggugccacugg

SEQ ID NO: 1296195 - RNA, 17 nt, Human
gccagaccauggacacu

SEQ ID NO: 1296196 - RNA, 16 nt, Human
gccagaccauggacac

SEQ ID NO: 1296197 - RNA, 13 nt, Human
gccagaccaugga

SEQ ID NO: 1296198 - RNA, 16 nt, Human
gccagaccagcaggcu

SEQ ID NO: 1296199 - RNA, 18 nt, Human
gccagaccagcaggcugg

SEQ ID NO: 1296200 - RNA, 12 nt, Human
gccagauuuuuu

SEQ ID NO: 1296201 - RNA, 13 nt, Human
gccagauuuuuua

SEQ ID NO: 1296202 - RNA, 23 nt, Human
gccagauuuuuuaaaauuuauau

SEQ ID NO: 1296203 - RNA, 16 nt, Human
gccagauuuuuuaaaa

SEQ ID NO: 1296204 - RNA, 12 nt, Human
gccagcacacag

SEQ ID NO: 1296205 - RNA, 13 nt, Human
gccagcacacagg

SEQ ID NO: 1296206 - RNA, 15 nt, Human
gccagcacacagggc

SEQ ID NO: 1296207 - RNA, 16 nt, Human
gccagcacacagggca

SEQ ID NO: 1296208 - RNA, 17 nt, Human
gccagcacacagggcag

SEQ ID NO: 1296209 - RNA, 18 nt, Human
gccagcacacagggcagu

SEQ ID NO: 1296210 - RNA, 22 nt, Human
gccagcacacagggcagugagg

SEQ ID NO: 1296211 - RNA, 15 nt, Human
gccagcaccggacca

SEQ ID NO: 1296212 - RNA, 18 nt, Human
gccagcaccggaccagcc

SEQ ID NO: 1296213 - RNA, 19 nt, Human
gccagcaccggaccagccu

SEQ ID NO: 1296214 - RNA, 20 nt, Human
gccagcaccggaccagccug

SEQ ID NO: 1296215 - RNA, 22 nt, Human
gccagacaucaacagauaaaua

SEQ ID NO: 1296216 - RNA, 18 nt, Human
gccagacaugccacaagg

SEQ ID NO: 1296217 - RNA, 15 nt, Human
gccagaauuucaaac

SEQ ID NO: 1296218 - RNA, 16 nt, Human
gccagacacaggcccu

SEQ ID NO: 1296219 - RNA, 17 nt, Human
gccagacacaggcccuc

SEQ ID NO: 1296220 - RNA, 14 nt, Human
gccagaagcuacug

SEQ ID NO: 1296221 - RNA, 14 nt, Human
gccagaaguaccag

SEQ ID NO: 1296222 - RNA, 17 nt, Human
gccagaaguaccagacu

SEQ ID NO: 1296223 - RNA, 18 nt, Human
gccagaaguaccagacua

SEQ ID NO: 1296224 - RNA, 21 nt, Human
gccagaaguaccagacuagau

SEQ ID NO: 1296225 - RNA, 21 nt, Human
gccagcaccggaccagccugg

SEQ ID NO: 1296226 - RNA, 22 nt, Human
gccagcaccggaccagccuggc

SEQ ID NO: 1296227 - RNA, 14 nt, Human
gccagcaccuggca

SEQ ID NO: 1296228 - RNA, 23 nt, Human
gccagcacucgcuagcaguggca

SEQ ID NO: 1296229 - RNA, 18 nt, Human
gccagcacucgcuagcag

SEQ ID NO: 1296230 - RNA, 14 nt, Human
gccagcacuugucc

SEQ ID NO: 1296231 - RNA, 19 nt, Human
gccagcacuuguccagcug

SEQ ID NO: 1296232 - RNA, 20 nt, Human
gccagcacuuguccagcuga

SEQ ID NO: 1296233 - RNA, 13 nt, Human
gccagcagcaccu

SEQ ID NO: 1296234 - RNA, 14 nt, Human
gccagcagcaccug

SEQ ID NO: 1296235 - RNA, 16 nt, Human
gccagcagcaccugcc

SEQ ID NO: 1296236 - RNA, 19 nt, Human
gccagcagcaccugcccua

SEQ ID NO: 1296237 - RNA, 13 nt, Human
gccagcaucuggg

SEQ ID NO: 1296238 - RNA, 15 nt, Human
gccagcaucugggcc

SEQ ID NO: 1296239 - RNA, 14 nt, Human
gccagcaucugggc

SEQ ID NO: 1296240 - RNA, 16 nt, Human
gccauaugauuuacau

SEQ ID NO: 1296241 - RNA, 17 nt, Human
gccauaugauuuacauu

SEQ ID NO: 1296242 - RNA, 14 nt, Human
gccauauuaaauuu

SEQ ID NO: 1296243 - RNA, 16 nt, Human
gccauauuaaauuuuu

SEQ ID NO: 1296244 - RNA, 20 nt, Human
gccauauuaaauuuuuuguu

SEQ ID NO: 1296245 - RNA, 23 nt, Human
gccauauuaaauuuuuuguugac

SEQ ID NO: 1296246 - RNA, 14 nt, Human
gccaugucuucucc

SEQ ID NO: 1296247 - RNA, 22 nt, Human
gccaugucuucucccuggaaug

SEQ ID NO: 1296248 - RNA, 17 nt, Human
gccaugucaaacaaaua

SEQ ID NO: 1296249 - RNA, 14 nt, Human
gccauguccaaaga

SEQ ID NO: 1296250 - RNA, 15 nt, Human
gccauguccaaagag

SEQ ID NO: 1296251 - RNA, 18 nt, Human
gccauguccaaagaggcu

SEQ ID NO: 1296252 - RNA, 19 nt, Human
gccauguccaaagaggcug

SEQ ID NO: 1296253 - RNA, 22 nt, Human
gccauguccaaagaggcugccc

SEQ ID NO: 1296254 - RNA, 20 nt, Human
gccauucuccugccucagcc

SEQ ID NO: 1296255 - RNA, 17 nt, Human
gccauucuccacagcaa

SEQ ID NO: 1296256 - RNA, 19 nt, Human
gcccacgacacugcagccc

SEQ ID NO: 1296257 - RNA, 15 nt, Human
gcccacgacacugca

SEQ ID NO: 1296258 - RNA, 21 nt, Human
gccauucacuucauaauccag

SEQ ID NO: 1296259 - RNA, 22 nt, Human
gccauucacuucauaauccagu

SEQ ID NO: 1296260 - RNA, 21 nt, Human
gccaugucuucucccuggaau

SEQ ID NO: 1296261 - RNA, 17 nt, Human
gccauuccccgucucug

SEQ ID NO: 1296262 - RNA, 18 nt, Human
gccauuccccgucucugg

SEQ ID NO: 1296263 - RNA, 18 nt, Human
gcacuuggagacuuguau

SEQ ID NO: 1296264 - RNA, 13 nt, Human
gcacuuggcagcc

SEQ ID NO: 1296265 - RNA, 13 nt, Human
gcacuuggcccuu

SEQ ID NO: 1296266 - RNA, 15 nt, Human
gcacuuggcugcaua

SEQ ID NO: 1296267 - RNA, 16 nt, Human
gcacuuggcagccuug

SEQ ID NO: 1296268 - RNA, 17 nt, Human
gcacuuggggcaccuug

SEQ ID NO: 1296269 - RNA, 21 nt, Human
gcacuuggggcaccuugcucc

SEQ ID NO: 1296270 - RNA, 16 nt, Human
gccacccucaugcugu

SEQ ID NO: 1296271 - RNA, 15 nt, Human
gccacccucaugcug

SEQ ID NO: 1296272 - RNA, 12 nt, Human
gccacccugagg

SEQ ID NO: 1296273 - RNA, 13 nt, Human
gccacccugagga

SEQ ID NO: 1296274 - RNA, 14 nt, Human
gccacccugaggag

SEQ ID NO: 1296275 - RNA, 16 nt, Human
gccacccugaggaguc

SEQ ID NO: 1296276 - RNA, 19 nt, Human
gccacccugaggagucuga

SEQ ID NO: 1296277 - RNA, 20 nt, Human
gccacccugaggagucugag

SEQ ID NO: 1296278 - RNA, 22 nt, Human
gccacccugaggagucugaggu

SEQ ID NO: 1296279 - RNA, 23 nt, Human
gccacccugaggagucugagguc

SEQ ID NO: 1296280 - RNA, 13 nt, Human
gccacccucaugc

SEQ ID NO: 1296281 - RNA, 14 nt, Human
gccacccagcccca

SEQ ID NO: 1296282 - RNA, 15 nt, Human
gccacccagccccag

SEQ ID NO: 1296283 - RNA, 23 nt, Human
gccacccagccccagccagggcu

SEQ ID NO: 1296284 - RNA, 12 nt, Human
gccacccaggau

SEQ ID NO: 1296285 - RNA, 13 nt, Human
gccacccaggauc

SEQ ID NO: 1296286 - RNA, 19 nt, Human
gccacugccauuaaagaau

SEQ ID NO: 1296287 - RNA, 12 nt, Human
gccacuggggcu

SEQ ID NO: 1296288 - RNA, 14 nt, Human
gccacuggggcuca

SEQ ID NO: 1296289 - RNA, 15 nt, Human
gccacuggggcucag

SEQ ID NO: 1296290 - RNA, 16 nt, Human
gccacuggggcucaga

SEQ ID NO: 1296291 - RNA, 17 nt, Human
gccacuggggcucagag

SEQ ID NO: 1296292 - RNA, 18 nt, Human
gccacuggggcucagagc

SEQ ID NO: 1296293 - RNA, 19 nt, Human
gccacuggggcucagagcc

SEQ ID NO: 1296294 - RNA, 15 nt, Human
gccacuguguuccuu

SEQ ID NO: 1296295 - RNA, 16 nt, Human
gccacuguguuccuuc

SEQ ID NO: 1296296 - RNA, 12 nt, Human
gccacugccucu

SEQ ID NO: 1296297 - RNA, 13 nt, Human
gccacugccucuu

SEQ ID NO: 1296298 - RNA, 16 nt, Human
gccacugccucuuccu

SEQ ID NO: 1296299 - RNA, 17 nt, Human
gccacugccucuuccuc

SEQ ID NO: 1296300 - RNA, 18 nt, Human
gccacugccuucgcuucu

SEQ ID NO: 1296301 - RNA, 23 nt, Human
gccacugccuucgcuucuugccu

SEQ ID NO: 1296302 - RNA, 22 nt, Human
gccacugccuucgcuucuugcc

SEQ ID NO: 1296303 - RNA, 22 nt, Human
gccacuggagugugcguggugg

SEQ ID NO: 1296304 - RNA, 23 nt, Human
gccacugcuuuucccuuugugag

SEQ ID NO: 1296305 - RNA, 21 nt, Human
gccacuugaugacccccaacc

SEQ ID NO: 1296306 - RNA, 18 nt, Human
gccacuguguuccuuccg

SEQ ID NO: 1296307 - RNA, 20 nt, Human
gccacuguguuccuuccgcu

SEQ ID NO: 1296308 - RNA, 18 nt, Human
gccacuuaaaauguucac

SEQ ID NO: 1296309 - RNA, 13 nt, Human
gccacuuaaugua

SEQ ID NO: 1296310 - RNA, 16 nt, Human
gccacuuaauguaugu

SEQ ID NO: 1296311 - RNA, 18 nt, Human
gccacuuaauguauguua

SEQ ID NO: 1296312 - RNA, 19 nt, Human
gccacuuaauguauguuac

SEQ ID NO: 1296313 - RNA, 16 nt, Human
gccacuguuguuuugg

SEQ ID NO: 1296314 - RNA, 14 nt, Human
gccaccaagaggga

SEQ ID NO: 1296315 - RNA, 19 nt, Human
gccaccaagagggacgccu

SEQ ID NO: 1296316 - RNA, 13 nt, Human
gccaccacgcccg

SEQ ID NO: 1296317 - RNA, 22 nt, Human
gccaccaagagggacgccuggg

SEQ ID NO: 1296318 - RNA, 14 nt, Human
gccaccacgcccgg

SEQ ID NO: 1296319 - RNA, 12 nt, Human
gccaccaggcca

SEQ ID NO: 1296320 - RNA, 15 nt, Human
gccaccaggccaccu

SEQ ID NO: 1296321 - RNA, 18 nt, Human
gccaccaggccaccuccc

SEQ ID NO: 1296322 - RNA, 20 nt, Human
gccaccaggccaccucccca

SEQ ID NO: 1296323 - RNA, 11 nt, Human
gccaccaguuc

SEQ ID NO: 1296324 - RNA, 13 nt, Human
gccaccaguucuc

SEQ ID NO: 1296325 - RNA, 19 nt, Human
gccaccaguucucaugggu

SEQ ID NO: 1296326 - RNA, 13 nt, Human
gccaccaugcccg

SEQ ID NO: 1296327 - RNA, 15 nt, Human
gccacaugggaggcu

SEQ ID NO: 1296328 - RNA, 14 nt, Human
gccacauuuggaau

SEQ ID NO: 1296329 - RNA, 22 nt, Human
gccacauuuggaauacuuuuug

SEQ ID NO: 1296330 - RNA, 19 nt, Human
gccacauuuggaauacuuu

SEQ ID NO: 1296331 - RNA, 20 nt, Human
gcccaugggagcugguuaga

SEQ ID NO: 1296332 - RNA, 23 nt, Human
gcccacuagacccacuggacuca

SEQ ID NO: 1296333 - RNA, 15 nt, Human
gcccacuccaucugg

SEQ ID NO: 1296334 - RNA, 18 nt, Human
gcccacuccaucugguag

SEQ ID NO: 1296335 - RNA, 17 nt, Human
gcccacuagacccacug

SEQ ID NO: 1296336 - RNA, 19 nt, Human
gcccacuccaucugguaga

SEQ ID NO: 1296337 - RNA, 22 nt, Human
gcccccaguaucucuucagucu

SEQ ID NO: 1296338 - RNA, 19 nt, Human
gcccccaggguccugggag

SEQ ID NO: 1296339 - RNA, 14 nt, Human
gcccccagguaggg

SEQ ID NO: 1296340 - RNA, 14 nt, Human
gcccccucugcccu

SEQ ID NO: 1296341 - RNA, 17 nt, Human
gcccccaucauccucug

SEQ ID NO: 1296342 - RNA, 18 nt, Human
gcccccaucauccucugg

SEQ ID NO: 1296343 - RNA, 13 nt, Human
gcccccaucucau

SEQ ID NO: 1296344 - RNA, 18 nt, Human
gcccccaucucaugcccc

SEQ ID NO: 1296345 - RNA, 18 nt, Human
gcccccuccgcccugcca

SEQ ID NO: 1296346 - RNA, 20 nt, Human
gcccccuccgcccugccacu

SEQ ID NO: 1296347 - RNA, 22 nt, Human
gcccccuccgcccugccacuca

SEQ ID NO: 1296348 - RNA, 16 nt, Human
gcccccuccucuagcu

SEQ ID NO: 1296349 - RNA, 19 nt, Human
gcccccuccucuagcugug

SEQ ID NO: 1296350 - RNA, 20 nt, Human
gcccccuccucuagcugugg

SEQ ID NO: 1296351 - RNA, 21 nt, Human
gcccccuccucuagcuguggg

SEQ ID NO: 1296352 - RNA, 19 nt, Human
gcccccaucauccucuggc

SEQ ID NO: 1296353 - RNA, 13 nt, Human
gccccuggcagag

SEQ ID NO: 1296354 - RNA, 17 nt, Human
gccccuggcagagaugc

SEQ ID NO: 1296355 - RNA, 21 nt, Human
gccccuggcagagaugccucc

SEQ ID NO: 1296356 - RNA, 22 nt, Human
gccccuggcagagaugccuccc

SEQ ID NO: 1296357 - RNA, 23 nt, Human
gccccuggcagagaugccucccu

SEQ ID NO: 1296358 - RNA, 17 nt, Human
gcccuagacuggugcua

SEQ ID NO: 1296359 - RNA, 15 nt, Human
gcccuacagcacccu

SEQ ID NO: 1296360 - RNA, 21 nt, Human
gcccuaccugccccacuuguc

SEQ ID NO: 1296361 - RNA, 16 nt, Human
gcccuaccugccccac

SEQ ID NO: 1296362 - RNA, 18 nt, Human
gcccuaccugccccacuu

SEQ ID NO: 1296363 - RNA, 12 nt, Human
gcccuacuggga

SEQ ID NO: 1296364 - RNA, 18 nt, Human
gcccugcugcugccugcc

SEQ ID NO: 1296365 - RNA, 21 nt, Human
gcccugcugagucccaggcug

SEQ ID NO: 1296366 - RNA, 22 nt, Human
gcccugcugagucccaggcuga

SEQ ID NO: 1296367 - RNA, 23 nt, Human
gcccugcugagucccaggcugag

SEQ ID NO: 1296368 - RNA, 13 nt, Human
gcccugcugcccu

SEQ ID NO: 1296369 - RNA, 14 nt, Human
gcccugcugcccuc

SEQ ID NO: 1296370 - RNA, 15 nt, Human
gcccugcugcccucc

SEQ ID NO: 1296371 - RNA, 17 nt, Human
gcccugcugcccucccc

SEQ ID NO: 1296372 - RNA, 16 nt, Human
gcccugcugaguccca

SEQ ID NO: 1296373 - RNA, 15 nt, Human
gccgcugagcgagga

SEQ ID NO: 1296374 - RNA, 17 nt, Human
gccgcugagcgaggaga

SEQ ID NO: 1296375 - RNA, 16 nt, Human
gccgcugaguggcagg

SEQ ID NO: 1296376 - RNA, 12 nt, Human
gccgcugccacg

SEQ ID NO: 1296377 - RNA, 19 nt, Human
gccgcuuggcgaugccagc

SEQ ID NO: 1296378 - RNA, 12 nt, Human
gccggccagccc

SEQ ID NO: 1296379 - RNA, 14 nt, Human
gccggccagccccu

SEQ ID NO: 1296380 - RNA, 14 nt, Human
gccuggccuccugc

SEQ ID NO: 1296381 - RNA, 15 nt, Human
gccuggccuccugcc

SEQ ID NO: 1296382 - RNA, 16 nt, Human
gccuggccuccugccu

SEQ ID NO: 1296383 - RNA, 19 nt, Human
gccuggccuccugccucua

SEQ ID NO: 1296384 - RNA, 22 nt, Human
gccuggccuccugccucuacug

SEQ ID NO: 1296385 - RNA, 16 nt, Human
gccugggaaagccccu

SEQ ID NO: 1296386 - RNA, 18 nt, Human
gccugggaaagccccugc

SEQ ID NO: 1296387 - RNA, 16 nt, Human
gccugggacaacugcu

SEQ ID NO: 1296388 - RNA, 22 nt, Human
gccugggacaacugcucccacc

SEQ ID NO: 1296389 - RNA, 19 nt, Human
gccugggacaacugcuccc

SEQ ID NO: 1296390 - RNA, 10 nt, Human
gccugggagg

SEQ ID NO: 1296391 - RNA, 20 nt, Human
gccuguguccaugcgcucag

SEQ ID NO: 1296392 - RNA, 21 nt, Human
gccuguguccaugcgcucagg

SEQ ID NO: 1296393 - RNA, 23 nt, Human
gccuguguccaugcgcucagggc

SEQ ID NO: 1296394 - RNA, 22 nt, Human
gccugccuccccugccucacca

SEQ ID NO: 1296395 - RNA, 17 nt, Human
gccugccuguucccauu

SEQ ID NO: 1296396 - RNA, 14 nt, Human
gccugccuuuccau

SEQ ID NO: 1296397 - RNA, 23 nt, Human
gccugccuuuccauccauggcca

SEQ ID NO: 1296398 - RNA, 21 nt, Human
gccugcgccaccgcccagaga

SEQ ID NO: 1296399 - RNA, 22 nt, Human
gccugccuuuccauccauggcc

SEQ ID NO: 1296400 - RNA, 14 nt, Human
gccucuucugggag

SEQ ID NO: 1296401 - RNA, 15 nt, Human
gccucuucugggagg

SEQ ID NO: 1296402 - RNA, 18 nt, Human
gccucuucugggagggca

SEQ ID NO: 1296403 - RNA, 22 nt, Human
gccucuuccucccucauuccac

SEQ ID NO: 1296404 - RNA, 12 nt, Human
gccucuuccucc

SEQ ID NO: 1296405 - RNA, 11 nt, Human
gccucugugcu

SEQ ID NO: 1296406 - RNA, 12 nt, Human
gccucugugcug

SEQ ID NO: 1296407 - RNA, 14 nt, Human
gccucugugcugug

SEQ ID NO: 1296408 - RNA, 17 nt, Human
gccucugugcugugugu

SEQ ID NO: 1296409 - RNA, 18 nt, Human
gccucugugcugugugug

SEQ ID NO: 1296410 - RNA, 18 nt, Human
gccucugucuucuggacu

SEQ ID NO: 1296411 - RNA, 13 nt, Human
gccucuugaccag

SEQ ID NO: 1296412 - RNA, 14 nt, Human
gccucuugaccagg

SEQ ID NO: 1296413 - RNA, 15 nt, Human
gccucuugaccaggc

SEQ ID NO: 1296414 - RNA, 16 nt, Human
gccucuugaccaggcu

SEQ ID NO: 1296415 - RNA, 17 nt, Human
gccucuugaccaggcug

SEQ ID NO: 1296416 - RNA, 20 nt, Human
gccucuugaccaggcugccu

SEQ ID NO: 1296417 - RNA, 18 nt, Human
gccucuugagcaguggcu

SEQ ID NO: 1296418 - RNA, 19 nt, Human
gccucuugagcaguggcug

SEQ ID NO: 1296419 - RNA, 20 nt, Human
gccucuugagcaguggcugg

SEQ ID NO: 1296420 - RNA, 21 nt, Human
gccucuugagcaguggcuggu

SEQ ID NO: 1296421 - RNA, 22 nt, Human
gccucuugaccaggcugccucc

SEQ ID NO: 1296422 - RNA, 12 nt, Human
gccugccgagca

SEQ ID NO: 1296423 - RNA, 14 nt, Human
gccugccgagcaac

SEQ ID NO: 1296424 - RNA, 16 nt, Human
gccugccgagcaaccg

SEQ ID NO: 1296425 - RNA, 20 nt, Human
gccugccgagcaaccguggc

SEQ ID NO: 1296426 - RNA, 19 nt, Human
gccugccgagcaaccgugg

SEQ ID NO: 1296427 - RNA, 12 nt, Human
gccugccucacc

SEQ ID NO: 1296428 - RNA, 21 nt, Human
gccuccuggcugucugaggcu

SEQ ID NO: 1296429 - RNA, 20 nt, Human
gccucugucuggcaaugcca

SEQ ID NO: 1296430 - RNA, 23 nt, Human
gccucugucuggcaaugccacag

SEQ ID NO: 1296431 - RNA, 19 nt, Human
gccucugucuucuggacug

SEQ ID NO: 1296432 - RNA, 12 nt, Human
gccuccucaucc

SEQ ID NO: 1296433 - RNA, 15 nt, Human
gccuccucaucccgu

SEQ ID NO: 1296434 - RNA, 17 nt, Human
gccuccucaucccgugu

SEQ ID NO: 1296435 - RNA, 22 nt, Human
gccuccucaucccguguucucc

SEQ ID NO: 1296436 - RNA, 11 nt, Human
gccuccucccu

SEQ ID NO: 1296437 - RNA, 12 nt, Human
gccuccucccuc

SEQ ID NO: 1296438 - RNA, 13 nt, Human
gccuccucccucc

SEQ ID NO: 1296439 - RNA, 14 nt, Human
gccuccucccuccc

SEQ ID NO: 1296440 - RNA, 16 nt, Human
gccuccucccucccuc

SEQ ID NO: 1296441 - RNA, 17 nt, Human
gccuccucccucccucu

SEQ ID NO: 1296442 - RNA, 19 nt, Human
gccuccucccucccucucc

SEQ ID NO: 1296443 - RNA, 20 nt, Human
gccuccucccucccucuccg

SEQ ID NO: 1296444 - RNA, 21 nt, Human
gccuccucccucccucuccga

SEQ ID NO: 1296445 - RNA, 13 nt, Human
gccuccugccggc

SEQ ID NO: 1296446 - RNA, 17 nt, Human
gccuccugccggcuccu

SEQ ID NO: 1296447 - RNA, 20 nt, Human
gccuccugccggcuccuugg

SEQ ID NO: 1296448 - RNA, 12 nt, Human
gccuccugccuc

SEQ ID NO: 1296449 - RNA, 13 nt, Human
gccuccugccucu

SEQ ID NO: 1296450 - RNA, 14 nt, Human
gccggccccaggcu

SEQ ID NO: 1296451 - RNA, 12 nt, Human
gccggccccagg

SEQ ID NO: 1296452 - RNA, 14 nt, Human
gccuaccccgcaga

SEQ ID NO: 1296453 - RNA, 17 nt, Human
gccuaccccgcagacac

SEQ ID NO: 1296454 - RNA, 21 nt, Human
gccuaccccgcagacaccuug

SEQ ID NO: 1296455 - RNA, 17 nt, Human
gccuacuccaaaauguu

SEQ ID NO: 1296456 - RNA, 17 nt, Human
gccuguguucuuccugg

SEQ ID NO: 1296457 - RNA, 18 nt, Human
gccuguguucuuccuggc

SEQ ID NO: 1296458 - RNA, 20 nt, Human
gccuguguucuuccuggccg

SEQ ID NO: 1296459 - RNA, 21 nt, Human
gccuguuagcaugcuggugag

SEQ ID NO: 1296460 - RNA, 15 nt, Human
gccuguucauggcag

SEQ ID NO: 1296461 - RNA, 16 nt, Human
gccuguucauggcaga

SEQ ID NO: 1296462 - RNA, 20 nt, Human
gcuaggaagagcaggacucc

SEQ ID NO: 1296463 - RNA, 17 nt, Human
gcuaggaagaggagugg

SEQ ID NO: 1296464 - RNA, 12 nt, Human
gcuaggaagagg

SEQ ID NO: 1296465 - RNA, 15 nt, Human
gcuaggagcaaagcc

SEQ ID NO: 1296466 - RNA, 16 nt, Human
gcuaggagcaaagccu

SEQ ID NO: 1296467 - RNA, 17 nt, Human
gcuaggagcaaagccug

SEQ ID NO: 1296468 - RNA, 18 nt, Human
gcuaggagcaaagccugu

SEQ ID NO: 1296469 - RNA, 19 nt, Human
gcuaggagcaaagccuguu

SEQ ID NO: 1296470 - RNA, 16 nt, Human
gcuaguaucaaaagaa

SEQ ID NO: 1296471 - RNA, 16 nt, Human
gcuaggccagagccca

SEQ ID NO: 1296472 - RNA, 17 nt, Human
gcuaggccagagcccac

SEQ ID NO: 1296473 - RNA, 19 nt, Human
gcuaggccagagcccacuc

SEQ ID NO: 1296474 - RNA, 16 nt, Human
gcuauugucaccaggg

SEQ ID NO: 1296475 - RNA, 18 nt, Human
gcuaugucccaggaauca

SEQ ID NO: 1296476 - RNA, 18 nt, Human
gcuauggugcucugucua

SEQ ID NO: 1296477 - RNA, 13 nt, Human
gcuaugguuuucu

SEQ ID NO: 1296478 - RNA, 20 nt, Human
gcuauugucaccagggcugg

SEQ ID NO: 1296479 - RNA, 21 nt, Human
gcuauugucaccagggcugga

SEQ ID NO: 1296480 - RNA, 14 nt, Human
gcuauuuaaaacuu

SEQ ID NO: 1296481 - RNA, 13 nt, Human
gcuauuuaaaacu

SEQ ID NO: 1296482 - RNA, 14 nt, Human
gcuauuucaucuau

SEQ ID NO: 1296483 - RNA, 15 nt, Human
gcuauuucaucuauu

SEQ ID NO: 1296484 - RNA, 18 nt, Human
gcucaggagcccugggag

SEQ ID NO: 1296485 - RNA, 15 nt, Human
gcucaggagcccugg

SEQ ID NO: 1296486 - RNA, 21 nt, Human
gcucaggagcccugggaggcu

SEQ ID NO: 1296487 - RNA, 23 nt, Human
gcucagggccaugcugaggccug

SEQ ID NO: 1296488 - RNA, 17 nt, Human
gcucagggggcgccugu

SEQ ID NO: 1296489 - RNA, 16 nt, Human
gcucagguacuuguaa

SEQ ID NO: 1296490 - RNA, 15 nt, Human
gcucaggucccuggg

SEQ ID NO: 1296491 - RNA, 14 nt, Human
gcucaggagcccug

SEQ ID NO: 1296492 - RNA, 18 nt, Human
gcucaccuugugcugggg

SEQ ID NO: 1296493 - RNA, 20 nt, Human
gcucacguccugagaaagcu

SEQ ID NO: 1296494 - RNA, 21 nt, Human
gcucaggugcuggggccuggu

SEQ ID NO: 1296495 - RNA, 19 nt, Human
gcucaggucccuggggcua

SEQ ID NO: 1296496 - RNA, 21 nt, Human
gcucaggucacauaaaacuuu

SEQ ID NO: 1296497 - RNA, 17 nt, Human
gcucaggugcuggggcc

SEQ ID NO: 1296498 - RNA, 20 nt, Human
gcucuacagcuaaucagcau

SEQ ID NO: 1296499 - RNA, 22 nt, Human
gcucuacagcuaaucagcauuc

SEQ ID NO: 1296500 - RNA, 15 nt, Human
gcucuaauucacagu

SEQ ID NO: 1296501 - RNA, 16 nt, Human
gcucuaauucacagug

SEQ ID NO: 1296502 - RNA, 18 nt, Human
gcucuaauucacagugcu

SEQ ID NO: 1296503 - RNA, 19 nt, Human
gcucuaauucacagugcuc

SEQ ID NO: 1296504 - RNA, 19 nt, Human
gcucuaauguuugcauaua

SEQ ID NO: 1296505 - RNA, 16 nt, Human
gcucuacaucuucugc

SEQ ID NO: 1296506 - RNA, 17 nt, Human
gcucuacaucuucugcc

SEQ ID NO: 1296507 - RNA, 14 nt, Human
gcuccccacucugc

SEQ ID NO: 1296508 - RNA, 16 nt, Human
gcuccccacucugcuc

SEQ ID NO: 1296509 - RNA, 17 nt, Human
gcuccccacucugcucu

SEQ ID NO: 1296510 - RNA, 18 nt, Human
gcuccccacucugcucug

SEQ ID NO: 1296511 - RNA, 19 nt, Human
gcuccccacucugcucuga

SEQ ID NO: 1296512 - RNA, 22 nt, Human
gcuccccacucugcucugaugc

SEQ ID NO: 1296513 - RNA, 20 nt, Human
gcuccccacucugcucugau

SEQ ID NO: 1296514 - RNA, 19 nt, Human
gcuccccuaaagccucaaa

SEQ ID NO: 1296515 - RNA, 14 nt, Human
gcuccccuccccaa

SEQ ID NO: 1296516 - RNA, 22 nt, Human
gcuccugccaccacgcccggcu

SEQ ID NO: 1296517 - RNA, 24 nt, Human
gcuccugaccaguugcagucacuc

SEQ ID NO: 1296518 - RNA, 21 nt, Human
gcuccugaccaguugcaguca

SEQ ID NO: 1296519 - RNA, 12 nt, Human
gcuccugcccac

SEQ ID NO: 1296520 - RNA, 21 nt, Human
gcuccucugucucgagcgccc

SEQ ID NO: 1296521 - RNA, 22 nt, Human
gcuccucugucucgagcgcccu

SEQ ID NO: 1296522 - RNA, 23 nt, Human
gcuccucugucucgagcgcccug

SEQ ID NO: 1296523 - RNA, 22 nt, Human
gcuccucuuccaugcugugcgc

SEQ ID NO: 1296524 - RNA, 14 nt, Human
gcuccucuucccca

SEQ ID NO: 1296525 - RNA, 15 nt, Human
gcuccucuuccccag

SEQ ID NO: 1296526 - RNA, 16 nt, Human
gcuccucuuccccaga

SEQ ID NO: 1296527 - RNA, 23 nt, Human
gcuccucuuccccagacgccugg

SEQ ID NO: 1296528 - RNA, 16 nt, Human
gcuccugacacugcug

SEQ ID NO: 1296529 - RNA, 17 nt, Human
gcuccugacacugcugg

SEQ ID NO: 1296530 - RNA, 18 nt, Human
gcuccugacacugcugga

SEQ ID NO: 1296531 - RNA, 19 nt, Human
gcuccugacacugcuggag

SEQ ID NO: 1296532 - RNA, 15 nt, Human
gcuccugaccaguug

SEQ ID NO: 1296533 - RNA, 19 nt, Human
gcuccugaccaguugcagu

SEQ ID NO: 1296534 - RNA, 20 nt, Human
gcuccugaccaguugcaguc

SEQ ID NO: 1296535 - RNA, 21 nt, Human
gcuccccuccccaacugacca

SEQ ID NO: 1296536 - RNA, 12 nt, Human
gcuccucugcuu

SEQ ID NO: 1296537 - RNA, 13 nt, Human
gcuccucugucuc

SEQ ID NO: 1296538 - RNA, 17 nt, Human
gcuccucugucucgagc

SEQ ID NO: 1296539 - RNA, 18 nt, Human
gcucuaauguuugcauau

SEQ ID NO: 1296540 - RNA, 17 nt, Human
gcucuaauguuugcaua

SEQ ID NO: 1296541 - RNA, 16 nt, Human
gcucuaauguuugcau

SEQ ID NO: 1296542 - RNA, 15 nt, Human
gcucuaauguuugca

SEQ ID NO: 1296543 - RNA, 23 nt, Human
gcucuaacgccugagcccaggga

SEQ ID NO: 1296544 - RNA, 22 nt, Human
gcucuaacgccugagcccaggg

SEQ ID NO: 1296545 - RNA, 12 nt, Human
gcucuaauacau

SEQ ID NO: 1296546 - RNA, 16 nt, Human
gcucggggugcacagg

SEQ ID NO: 1296547 - RNA, 20 nt, Human
gcucuaacgccugagcccag

SEQ ID NO: 1296548 - RNA, 21 nt, Human
gcucuaacgccugagcccagg

SEQ ID NO: 1296549 - RNA, 14 nt, Human
gcucggccugcccc

SEQ ID NO: 1296550 - RNA, 15 nt, Human
gcucggccugccccc

SEQ ID NO: 1296551 - RNA, 17 nt, Human
gcucggccugcccccac

SEQ ID NO: 1296552 - RNA, 21 nt, Human
gcucggccugcccccacccca

SEQ ID NO: 1296553 - RNA, 22 nt, Human
gcuccugcuaacggugcucagg

SEQ ID NO: 1296554 - RNA, 23 nt, Human
gcuccugcuaacggugcucaggg

SEQ ID NO: 1296555 - RNA, 13 nt, Human
gcucgcucccugc

SEQ ID NO: 1296556 - RNA, 15 nt, Human
gcucggaggaagccc

SEQ ID NO: 1296557 - RNA, 23 nt, Human
gcucuggagcccacuguacuugc

SEQ ID NO: 1296558 - RNA, 13 nt, Human
gcucuggagggga

SEQ ID NO: 1296559 - RNA, 15 nt, Human
gcucuggaggggagg

SEQ ID NO: 1296560 - RNA, 16 nt, Human
gcucuggaggggaggg

SEQ ID NO: 1296561 - RNA, 20 nt, Human
gcucugagcaaauguggcuc

SEQ ID NO: 1296562 - RNA, 21 nt, Human
gcucugagcaaauguggcucc

SEQ ID NO: 1296563 - RNA, 17 nt, Human
gcucugagaggcccugg

SEQ ID NO: 1296564 - RNA, 18 nt, Human
gcucugagaggcccugga

SEQ ID NO: 1296565 - RNA, 20 nt, Human
gcucugagaggcccuggauc

SEQ ID NO: 1296566 - RNA, 23 nt, Human
gcucugagaggcccuggaucagc

SEQ ID NO: 1296567 - RNA, 13 nt, Human
gcucugagagucu

SEQ ID NO: 1296568 - RNA, 14 nt, Human
gcucugagagucua

SEQ ID NO: 1296569 - RNA, 18 nt, Human
gcucugagagucuagauu

SEQ ID NO: 1296570 - RNA, 20 nt, Human
gcucugagagucuagauucu

SEQ ID NO: 1296571 - RNA, 21 nt, Human
gcucugagagucuagauucuc

SEQ ID NO: 1296572 - RNA, 18 nt, Human
gcucugcaauuccccucu

SEQ ID NO: 1296573 - RNA, 23 nt, Human
gcucugcaauuccccucugcugc

SEQ ID NO: 1296574 - RNA, 11 nt, Human
gcucugagaac

SEQ ID NO: 1296575 - RNA, 10 nt, Human
gcucugagaa

SEQ ID NO: 1296576 - RNA, 15 nt, Human
gcucugagaggcccu

SEQ ID NO: 1296577 - RNA, 16 nt, Human
gcucugagaggcccug

SEQ ID NO: 1296578 - RNA, 19 nt, Human
gcucugucgcccaggcugg

SEQ ID NO: 1296579 - RNA, 23 nt, Human
gcucugucgcccaggcuggagug

SEQ ID NO: 1296580 - RNA, 20 nt, Human
gcucuguuaauaaucucaca

SEQ ID NO: 1296581 - RNA, 14 nt, Human
gcucuguucuuccu

SEQ ID NO: 1296582 - RNA, 18 nt, Human
gcucuguucuuccucagc

SEQ ID NO: 1296583 - RNA, 19 nt, Human
gcucuguucuuccucagcc

SEQ ID NO: 1296584 - RNA, 20 nt, Human
gcucuguucuuccucagcca

SEQ ID NO: 1296585 - RNA, 21 nt, Human
gcucuguucuuccucagccag

SEQ ID NO: 1296586 - RNA, 22 nt, Human
gcucuguucuuccucagccagc

SEQ ID NO: 1296587 - RNA, 23 nt, Human
gcucuguucuuccucagccagcc

SEQ ID NO: 1296588 - RNA, 18 nt, Human
gcucuggauaacaagacu

SEQ ID NO: 1296589 - RNA, 15 nt, Human
gcucuuauuucauca

SEQ ID NO: 1296590 - RNA, 14 nt, Human
gcucuuauuucauc

SEQ ID NO: 1296591 - RNA, 13 nt, Human
gcucuuauuucau

SEQ ID NO: 1296592 - RNA, 19 nt, Human
gcucuuagcagcuuccaga

SEQ ID NO: 1296593 - RNA, 17 nt, Human
gcucuuagcagcuucca

SEQ ID NO: 1296594 - RNA, 18 nt, Human
gcucuuagcagcuuccag

SEQ ID NO: 1296595 - RNA, 14 nt, Human
gcucuuaauugcca

SEQ ID NO: 1296596 - RNA, 13 nt, Human
gcucuuaauugcc

SEQ ID NO: 1296597 - RNA, 16 nt, Human
gcucuuagcagcuucc

SEQ ID NO: 1296598 - RNA, 14 nt, Human
gcucuucauguuuc

SEQ ID NO: 1296599 - RNA, 14 nt, Human
gcugaaauucuccu

SEQ ID NO: 1296600 - RNA, 15 nt, Human
gcugaaauucuccug

SEQ ID NO: 1296601 - RNA, 16 nt, Human
gcugaaauucuccugg

SEQ ID NO: 1296602 - RNA, 17 nt, Human
gcugaaauucuccugga

SEQ ID NO: 1296603 - RNA, 18 nt, Human
gcugaaauucuccuggag

SEQ ID NO: 1296604 - RNA, 15 nt, Human
gcugaaauuuuauau

SEQ ID NO: 1296605 - RNA, 17 nt, Human
gcugaaauuuuauaugc

SEQ ID NO: 1296606 - RNA, 16 nt, Human
gcugaauagcuucucc

SEQ ID NO: 1296607 - RNA, 17 nt, Human
gcugaauguugggacug

SEQ ID NO: 1296608 - RNA, 20 nt, Human
gcugaauguugggacugcua

SEQ ID NO: 1296609 - RNA, 23 nt, Human
gcugaauguugggacugcuaaau

SEQ ID NO: 1296610 - RNA, 13 nt, Human
gcugaauguuuuu

SEQ ID NO: 1296611 - RNA, 17 nt, Human
gcugaauguuuuucuaa

SEQ ID NO: 1296612 - RNA, 15 nt, Human
gcugaauguuuuucu

SEQ ID NO: 1296613 - RNA, 14 nt, Human
gcugagcgccagga

SEQ ID NO: 1296614 - RNA, 16 nt, Human
gcugagcucacaaggc

SEQ ID NO: 1296615 - RNA, 19 nt, Human
gcugagcucacaaggcagc

SEQ ID NO: 1296616 - RNA, 20 nt, Human
gcugagcucacaaggcagca

SEQ ID NO: 1296617 - RNA, 21 nt, Human
gcugagcucacaaggcagcaa

SEQ ID NO: 1296618 - RNA, 22 nt, Human
gcugagcucacaaggcagcaag

SEQ ID NO: 1296619 - RNA, 23 nt, Human
gcugagcucacaaggcagcaagg

SEQ ID NO: 1296620 - RNA, 14 nt, Human
gcugagcucucugu

SEQ ID NO: 1296621 - RNA, 13 nt, Human
gcugagcucugag

SEQ ID NO: 1296622 - RNA, 14 nt, Human
gcugagcucugaga

SEQ ID NO: 1296623 - RNA, 15 nt, Human
gcugagcucugagag

SEQ ID NO: 1296624 - RNA, 16 nt, Human
gcugagcucugagagg

SEQ ID NO: 1296625 - RNA, 17 nt, Human
gcugagcucugagaggc

SEQ ID NO: 1296626 - RNA, 18 nt, Human
gcugagcucugagaggcc

SEQ ID NO: 1296627 - RNA, 20 nt, Human
gcuguaugucuuaaaaccug

SEQ ID NO: 1296628 - RNA, 17 nt, Human
gcuguauuaagccacuu

SEQ ID NO: 1296629 - RNA, 23 nt, Human
gcuguaaggauccggaaagaaga

SEQ ID NO: 1296630 - RNA, 13 nt, Human
gcuguaaggcucu

SEQ ID NO: 1296631 - RNA, 15 nt, Human
gcuguaaggcucuag

SEQ ID NO: 1296632 - RNA, 16 nt, Human
gcuguaaggcucuaga

SEQ ID NO: 1296633 - RNA, 17 nt, Human
gcuguaaggcucuagau

SEQ ID NO: 1296634 - RNA, 23 nt, Human
gcuguaaggcucuagaucauaag

SEQ ID NO: 1296635 - RNA, 22 nt, Human
gcuguaaucuaugaauucuaag

SEQ ID NO: 1296636 - RNA, 19 nt, Human
gcuguaauguuaauauuga

SEQ ID NO: 1296637 - RNA, 16 nt, Human
gcuguacacugcacga

SEQ ID NO: 1296638 - RNA, 12 nt, Human
gcuguacacugc

SEQ ID NO: 1296639 - RNA, 21 nt, Human
gcuguaacuacuuuauaacua

SEQ ID NO: 1296640 - RNA, 15 nt, Human
gcuguaacugccagg

SEQ ID NO: 1296641 - RNA, 12 nt, Human
gcugugaccugc

SEQ ID NO: 1296642 - RNA, 13 nt, Human
gcugugaccugcu

SEQ ID NO: 1296643 - RNA, 14 nt, Human
gcugugaccugcug

SEQ ID NO: 1296644 - RNA, 15 nt, Human
gcugugaccugcuga

SEQ ID NO: 1296645 - RNA, 16 nt, Human
gcugugaccugcugag

SEQ ID NO: 1296646 - RNA, 17 nt, Human
gcugugaccugcugagc

SEQ ID NO: 1296647 - RNA, 18 nt, Human
gcugugaccugcugagcu

SEQ ID NO: 1296648 - RNA, 19 nt, Human
gcugugaccugcugagcuc

SEQ ID NO: 1296649 - RNA, 20 nt, Human
gcugugaccugcugagcucu

SEQ ID NO: 1296650 - RNA, 23 nt, Human
gcugugaccugcugagcucugag

SEQ ID NO: 1296651 - RNA, 22 nt, Human
gcugugaccugcugagcucuga

SEQ ID NO: 1296652 - RNA, 17 nt, Human
gcugugcuuaugguacc

SEQ ID NO: 1296653 - RNA, 22 nt, Human
gcuguggaccauggaguggcag

SEQ ID NO: 1296654 - RNA, 14 nt, Human
gcuguggcaggcca

SEQ ID NO: 1296655 - RNA, 23 nt, Human
gcuguggcaggccagcugugguu

SEQ ID NO: 1296656 - RNA, 21 nt, Human
gcuguggcaugggugaagagg

SEQ ID NO: 1296657 - RNA, 12 nt, Human
gcuguggccagg

SEQ ID NO: 1296658 - RNA, 13 nt, Human
gcuguggccagga

SEQ ID NO: 1296659 - RNA, 14 nt, Human
gcuguggccaggag

SEQ ID NO: 1296660 - RNA, 13 nt, Human
gcuuaaaacuuug

SEQ ID NO: 1296661 - RNA, 18 nt, Human
gcuuaaaacuuugaaguu

SEQ ID NO: 1296662 - RNA, 18 nt, Human
gcuuaaagaauucaaauu

SEQ ID NO: 1296663 - RNA, 22 nt, Human
gcuuaaacccauauuguaaaac

SEQ ID NO: 1296664 - RNA, 17 nt, Human
gcuuaaaauaagcaggu

SEQ ID NO: 1296665 - RNA, 21 nt, Human
gcuuaaaauaagcagguggau

SEQ ID NO: 1296666 - RNA, 12 nt, Human
gcuuaaaauaca

SEQ ID NO: 1296667 - RNA, 13 nt, Human
gcuuaaaauacaa

SEQ ID NO: 1296668 - RNA, 14 nt, Human
gcuuaaaauacaag

SEQ ID NO: 1296669 - RNA, 18 nt, Human
gcuuaaaauacaagacug

SEQ ID NO: 1296670 - RNA, 19 nt, Human
gcuuaacagggaacgugau

SEQ ID NO: 1296671 - RNA, 15 nt, Human
gcuucaauuuauacc

SEQ ID NO: 1296672 - RNA, 14 nt, Human
gcuucccuuuccug

SEQ ID NO: 1296673 - RNA, 14 nt, Human
gcuucccugacuca

SEQ ID NO: 1296674 - RNA, 18 nt, Human
gcuucccugacucauucu

SEQ ID NO: 1296675 - RNA, 13 nt, Human
gcuucccugaagc

SEQ ID NO: 1296676 - RNA, 15 nt, Human
gcuucccugaagcuc

SEQ ID NO: 1296677 - RNA, 16 nt, Human
gcuucccugaagcucc

SEQ ID NO: 1296678 - RNA, 14 nt, Human
gcuuccuucauuuc

SEQ ID NO: 1296679 - RNA, 17 nt, Human
gcuuccuucauuuccuc

SEQ ID NO: 1296680 - RNA, 15 nt, Human
gcuucccgcucagcc

SEQ ID NO: 1296681 - RNA, 16 nt, Human
gcuucccgcucagccc

SEQ ID NO: 1296682 - RNA, 17 nt, Human
gcuucccgcucagcccu

SEQ ID NO: 1296683 - RNA, 18 nt, Human
gcuucccgcucagcccuc

SEQ ID NO: 1296684 - RNA, 23 nt, Human
gcuucccgcucagcccucccugc

SEQ ID NO: 1296685 - RNA, 13 nt, Human
gcuucccuaaucu

SEQ ID NO: 1296686 - RNA, 14 nt, Human
gcuucccuaaucua

SEQ ID NO: 1296687 - RNA, 20 nt, Human
gcuucccuccccucuaguuu

SEQ ID NO: 1296688 - RNA, 18 nt, Human
gcuucccaagggcugccg

SEQ ID NO: 1296689 - RNA, 13 nt, Human
gcuucccaucccc

SEQ ID NO: 1296690 - RNA, 16 nt, Human
gcuucccauccccagc

SEQ ID NO: 1296691 - RNA, 18 nt, Human
gcuucccauccccagcga

SEQ ID NO: 1296692 - RNA, 17 nt, Human
gcuucccauccccagcg

SEQ ID NO: 1296693 - RNA, 19 nt, Human
gcuugaaacccguggcgcu

SEQ ID NO: 1296694 - RNA, 19 nt, Human
gcuuggcgaugccagccaa

SEQ ID NO: 1296695 - RNA, 18 nt, Human
gcuuggcgaugccagcca

SEQ ID NO: 1296696 - RNA, 22 nt, Human
gcuugggaaaggugguguuucu

SEQ ID NO: 1296697 - RNA, 21 nt, Human
gcuugggaagacuccuagcug

SEQ ID NO: 1296698 - RNA, 12 nt, Human
gcuucuuucuag

SEQ ID NO: 1296699 - RNA, 15 nt, Human
gcuucuuucuagaaa

SEQ ID NO: 1296700 - RNA, 21 nt, Human
gcuucuuucuagaaagagaaa

SEQ ID NO: 1296701 - RNA, 18 nt, Human
gcuucgggcccuucccac

SEQ ID NO: 1296702 - RNA, 20 nt, Human
gcuucgggcccuucccacag

SEQ ID NO: 1296703 - RNA, 21 nt, Human
gcuucuugccucugugcugug

SEQ ID NO: 1296704 - RNA, 20 nt, Human
gcuucuugccucugugcugu

SEQ ID NO: 1296705 - RNA, 14 nt, Human
gcuugggccuaggc

SEQ ID NO: 1296706 - RNA, 18 nt, Human
gcuugggccuaggcugca

SEQ ID NO: 1296707 - RNA, 21 nt, Human
gcuugggccuaggcugcauug

SEQ ID NO: 1296708 - RNA, 19 nt, Human
gcuugggccuaggcugcau

SEQ ID NO: 1296709 - RNA, 16 nt, Human
gcuuggggcucacaca

SEQ ID NO: 1296710 - RNA, 20 nt, Human
gcuuggggcucacacaccug

SEQ ID NO: 1296711 - RNA, 15 nt, Human
gcuugggaauuuuau

SEQ ID NO: 1296712 - RNA, 14 nt, Human
gcuugggauuugcu

SEQ ID NO: 1296713 - RNA, 17 nt, Human
gcuugggauuugcugug

SEQ ID NO: 1296714 - RNA, 17 nt, Human
gcuugggcagcaucccc

SEQ ID NO: 1296715 - RNA, 15 nt, Human
gcuugggauuugcug

SEQ ID NO: 1296716 - RNA, 17 nt, Human
gcuuggggcuggagagg

SEQ ID NO: 1296717 - RNA, 22 nt, Human
gcuuggggggugaugagggcag

SEQ ID NO: 1296718 - RNA, 14 nt, Human
gcuuggggggugau

SEQ ID NO: 1296719 - RNA, 12 nt, Human
gcuggagugcag

SEQ ID NO: 1296720 - RNA, 15 nt, Human
gcuggaggagcccag

SEQ ID NO: 1296721 - RNA, 16 nt, Human
gcuggaggagcccagg

SEQ ID NO: 1296722 - RNA, 17 nt, Human
gcuggaggagcccaggc

SEQ ID NO: 1296723 - RNA, 20 nt, Human
gcuggaggagcccaggccag

SEQ ID NO: 1296724 - RNA, 22 nt, Human
gcuggaggagcccaggccagga

SEQ ID NO: 1296725 - RNA, 21 nt, Human
gcuggaggagcccaggccagg

SEQ ID NO: 1296726 - RNA, 17 nt, Human
gcuggagcucugcccau

SEQ ID NO: 1296727 - RNA, 13 nt, Human
gcuggaggagccc

SEQ ID NO: 1296728 - RNA, 14 nt, Human
gcuggaggagccca

SEQ ID NO: 1296729 - RNA, 21 nt, Human
gcuggacucucagucucugag

SEQ ID NO: 1296730 - RNA, 22 nt, Human
gcuggacucucagucucugagc

SEQ ID NO: 1296731 - RNA, 19 nt, Human
gcugggucgcccuggacug

SEQ ID NO: 1296732 - RNA, 17 nt, Human
gcugggugguacccucu

SEQ ID NO: 1296733 - RNA, 16 nt, Human
gcuggguucauuugug

SEQ ID NO: 1296734 - RNA, 18 nt, Human
gcugggucgcccuggacu

SEQ ID NO: 1296735 - RNA, 17 nt, Human
gcugggucgcccuggac

SEQ ID NO: 1296736 - RNA, 16 nt, Human
gcugggucgcccugga

SEQ ID NO: 1296737 - RNA, 14 nt, Human
gcuggagugcagug

SEQ ID NO: 1296738 - RNA, 22 nt, Human
gcugggauuacaggcuccugcc

SEQ ID NO: 1296739 - RNA, 23 nt, Human
gcugggauuacaggcuccugcca

SEQ ID NO: 1296740 - RNA, 18 nt, Human
gcugggauuacaggugug

SEQ ID NO: 1296741 - RNA, 17 nt, Human
gcugggauuacaggugu

SEQ ID NO: 1296742 - RNA, 16 nt, Human
gcugcugccugccugg

SEQ ID NO: 1296743 - RNA, 22 nt, Human
gcugcugcucuuggcuggaccc

SEQ ID NO: 1296744 - RNA, 12 nt, Human
gcugcugccugc

SEQ ID NO: 1296745 - RNA, 20 nt, Human
gcugcugaucgccuucccca

SEQ ID NO: 1296746 - RNA, 18 nt, Human
gcugcugcccauguuuca

SEQ ID NO: 1296747 - RNA, 13 nt, Human
gcugccuggaccc

SEQ ID NO: 1296748 - RNA, 18 nt, Human
gcugcucggggugcacag

SEQ ID NO: 1296749 - RNA, 19 nt, Human
gcugcucggggugcacagg

SEQ ID NO: 1296750 - RNA, 20 nt, Human
gcugcucggggugcacagga

SEQ ID NO: 1296751 - RNA, 21 nt, Human
gcugcucggggugcacaggag

SEQ ID NO: 1296752 - RNA, 22 nt, Human
gcugcucggggugcacaggagg

SEQ ID NO: 1296753 - RNA, 17 nt, Human
gcugcugaucgccuucc

SEQ ID NO: 1296754 - RNA, 20 nt, Human
gcugccuggaagagcagccc

SEQ ID NO: 1296755 - RNA, 12 nt, Human
gcugccuggacc

SEQ ID NO: 1296756 - RNA, 14 nt, Human
gcugccuggacccg

SEQ ID NO: 1296757 - RNA, 20 nt, Human
gcugccuagauucagggaaa

SEQ ID NO: 1296758 - RNA, 18 nt, Human
gcugccccaucagugcuc

SEQ ID NO: 1296759 - RNA, 16 nt, Human
gcugccgcgcagugug

SEQ ID NO: 1296760 - RNA, 17 nt, Human
gcugccggggcagcccc

SEQ ID NO: 1296761 - RNA, 19 nt, Human
gcugccggucgcccuuugc

SEQ ID NO: 1296762 - RNA, 19 nt, Human
gcugccggggcagcccccu

SEQ ID NO: 1296763 - RNA, 13 nt, Human
gcugccguggggc

SEQ ID NO: 1296764 - RNA, 22 nt, Human
gcugccguggggccgccgccuc

SEQ ID NO: 1296765 - RNA, 13 nt, Human
gcugccacugagg

SEQ ID NO: 1296766 - RNA, 12 nt, Human
gcugccacugag

SEQ ID NO: 1296767 - RNA, 17 nt, Human
gcugccagcucuguauc

SEQ ID NO: 1296768 - RNA, 18 nt, Human
gcugccagcucuguauca

SEQ ID NO: 1296769 - RNA, 13 nt, Human
gcugccaggagca

SEQ ID NO: 1296770 - RNA, 21 nt, Human
gcugagggcaguucgcagcca

SEQ ID NO: 1296771 - RNA, 22 nt, Human
gcugagggcaguucgcagccac

SEQ ID NO: 1296772 - RNA, 12 nt, Human
gcugagggcagu

SEQ ID NO: 1296773 - RNA, 20 nt, Human
gcugagggcaguucgcagcc

SEQ ID NO: 1296774 - RNA, 19 nt, Human
gcugagcucugagaggccc

SEQ ID NO: 1296775 - RNA, 20 nt, Human
gcugagcucugagaggcccu

SEQ ID NO: 1296776 - RNA, 21 nt, Human
gcugagcucugagaggcccug

SEQ ID NO: 1296777 - RNA, 22 nt, Human
gcugagcucugagaggcccugg

SEQ ID NO: 1296778 - RNA, 23 nt, Human
gcugagcucugagaggcccugga

SEQ ID NO: 1296779 - RNA, 12 nt, Human
gcugaggagcag

SEQ ID NO: 1296780 - RNA, 16 nt, Human
gcugaggagcagcagg

SEQ ID NO: 1296781 - RNA, 18 nt, Human
gcugaggaggcaccuaca

SEQ ID NO: 1296782 - RNA, 15 nt, Human
gcugaggcuggcaca

SEQ ID NO: 1296783 - RNA, 16 nt, Human
gcugaggcuggcacag

SEQ ID NO: 1296784 - RNA, 18 nt, Human
gcugaggcuggcacagga

SEQ ID NO: 1296785 - RNA, 14 nt, Human
gcugagggagccug

SEQ ID NO: 1296786 - RNA, 22 nt, Human
ggcugggaauggaggggcagag

SEQ ID NO: 1296787 - RNA, 21 nt, Human
ggcugggaauggaggggcaga

SEQ ID NO: 1296788 - RNA, 17 nt, Human
ggcugggaacagugugc

SEQ ID NO: 1296789 - RNA, 18 nt, Human
ggcugggacguggcucag

SEQ ID NO: 1296790 - RNA, 19 nt, Human
ggcugggacguggcucagc

SEQ ID NO: 1296791 - RNA, 23 nt, Human
ggcugggacguggcucagccagc

SEQ ID NO: 1296792 - RNA, 24 nt, Human
ggcuggcuccagaugcagggcagu

SEQ ID NO: 1296793 - RNA, 22 nt, Human
ggcuggcuccagaugcagggca

SEQ ID NO: 1296794 - RNA, 12 nt, Human
ggcuggcugagg

SEQ ID NO: 1296795 - RNA, 14 nt, Human
ggcuggcugagggc

SEQ ID NO: 1296796 - RNA, 15 nt, Human
ggcuggcugagggca

SEQ ID NO: 1296797 - RNA, 10 nt, Human
ggcuggcugg

SEQ ID NO: 1296798 - RNA, 13 nt, Human
ggcuggcuggccu

SEQ ID NO: 1296799 - RNA, 15 nt, Human
ggcuggcuggccuca

SEQ ID NO: 1296800 - RNA, 13 nt, Human
ggcuggcccugcc

SEQ ID NO: 1296801 - RNA, 14 nt, Human
ggcuggcccugccc

SEQ ID NO: 1296802 - RNA, 15 nt, Human
ggcuggcccugcccu

SEQ ID NO: 1296803 - RNA, 16 nt, Human
ggcuggcccugcccug

SEQ ID NO: 1296804 - RNA, 17 nt, Human
ggcuggcccugcccugg

SEQ ID NO: 1296805 - RNA, 13 nt, Human
ggcugccccucuc

SEQ ID NO: 1296806 - RNA, 13 nt, Human
ggcuggaugagcu

SEQ ID NO: 1296807 - RNA, 14 nt, Human
ggcuggaugagcuc

SEQ ID NO: 1296808 - RNA, 15 nt, Human
ggcuggaugagcucc

SEQ ID NO: 1296809 - RNA, 16 nt, Human
ggcuggaugagcuccc

SEQ ID NO: 1296810 - RNA, 18 nt, Human
ggcuggaugagcucccac

SEQ ID NO: 1296811 - RNA, 23 nt, Human
ggcuggaugagcucccacaagcc

SEQ ID NO: 1296812 - RNA, 19 nt, Human
ggcuggaugagcucccaca

SEQ ID NO: 1296813 - RNA, 13 nt, Human
ggcuggcacagga

SEQ ID NO: 1296814 - RNA, 14 nt, Human
ggcuggcacaggac

SEQ ID NO: 1296815 - RNA, 15 nt, Human
ggcuggcacaggaca

SEQ ID NO: 1296816 - RNA, 23 nt, Human
ggcuccuccaggguggcagcaac

SEQ ID NO: 1296817 - RNA, 17 nt, Human
ggcuccgugugggagac

SEQ ID NO: 1296818 - RNA, 17 nt, Human
ggcuccucccggugccc

SEQ ID NO: 1296819 - RNA, 20 nt, Human
ggcuccucgagaucccaaca

SEQ ID NO: 1296820 - RNA, 12 nt, Human
ggcuccugccac

SEQ ID NO: 1296821 - RNA, 9 nt, Human
ggcuccugc

SEQ ID NO: 1296822 - RNA, 13 nt, Human
ggcuccugccacc

SEQ ID NO: 1296823 - RNA, 17 nt, Human
ggcuccuauucaacaca

SEQ ID NO: 1296824 - RNA, 18 nt, Human
ggcuccgugugggagacc

SEQ ID NO: 1296825 - RNA, 14 nt, Human
ggcuccguguggga

SEQ ID NO: 1296826 - RNA, 15 nt, Human
ggcuccgugugggag

SEQ ID NO: 1296827 - RNA, 16 nt, Human
ggcuccgugugggaga

SEQ ID NO: 1296828 - RNA, 18 nt, Human
ggcucgaaucucugugcc

SEQ ID NO: 1296829 - RNA, 19 nt, Human
ggcucgaaucucugugccu

SEQ ID NO: 1296830 - RNA, 20 nt, Human
ggcucgaaucucugugccuu

SEQ ID NO: 1296831 - RNA, 20 nt, Human
ggcuccuugugggccugggc

SEQ ID NO: 1296832 - RNA, 12 nt, Human
ggcuccuuucca

SEQ ID NO: 1296833 - RNA, 22 nt, Human
ggcuccuugugggccugggcuc

SEQ ID NO: 1296834 - RNA, 13 nt, Human
ggcucgaaucucu

SEQ ID NO: 1296835 - RNA, 15 nt, Human
ggcucgaaucucugu

SEQ ID NO: 1296836 - RNA, 17 nt, Human
ggcucgaaucucugugc

SEQ ID NO: 1296837 - RNA, 22 nt, Human
ggcugcaguucgacucugugcu

SEQ ID NO: 1296838 - RNA, 23 nt, Human
ggcugcaguucgacucugugcug

SEQ ID NO: 1296839 - RNA, 21 nt, Human
ggcugaaaggaagcugugcgu

SEQ ID NO: 1296840 - RNA, 14 nt, Human
ggcugaaauucucc

SEQ ID NO: 1296841 - RNA, 16 nt, Human
ggcugaaauucuccug

SEQ ID NO: 1296842 - RNA, 17 nt, Human
ggcugaaauucuccugg

SEQ ID NO: 1296843 - RNA, 18 nt, Human
ggcugaaauucuccugga

SEQ ID NO: 1296844 - RNA, 19 nt, Human
ggcugaaauucuccuggag

SEQ ID NO: 1296845 - RNA, 21 nt, Human
ggcugaaauucuccuggaggu

SEQ ID NO: 1296846 - RNA, 22 nt, Human
ggcugaaauucuccuggagguc

SEQ ID NO: 1296847 - RNA, 16 nt, Human
aaaaaggacaucagca

SEQ ID NO: 1296848 - RNA, 15 nt, Human
aaaaagggaggggga

SEQ ID NO: 1296849 - RNA, 19 nt, Human
aaaaagcuuccaugauucu

SEQ ID NO: 1296850 - RNA, 20 nt, Human
aaaaagcuccaaaugcagcu

SEQ ID NO: 1296851 - RNA, 18 nt, Human
aaaaagcgaaaaaaucag

SEQ ID NO: 1296852 - RNA, 12 nt, Human
aaaaagcuuaaa

SEQ ID NO: 1296853 - RNA, 15 nt, Human
aaaaagcuuaaaacu

SEQ ID NO: 1296854 - RNA, 17 nt, Human
aaaaagcuuaaaacuuu

SEQ ID NO: 1296855 - RNA, 19 nt, Human
aaaaagcuuaaaacuuuga

SEQ ID NO: 1296856 - RNA, 20 nt, Human
aaaaagcuuaaaacuuugaa

SEQ ID NO: 1296857 - RNA, 13 nt, Human
aaaaagguuuaca

SEQ ID NO: 1296858 - RNA, 18 nt, Human
aaaaagguuuacagaauu

SEQ ID NO: 1296859 - RNA, 17 nt, Human
aaaaagugaaauaaugu

SEQ ID NO: 1296860 - RNA, 11 nt, Human
aaaaaagauga

SEQ ID NO: 1296861 - RNA, 13 nt, Human
aaaaaaaagcuuc

SEQ ID NO: 1296862 - RNA, 12 nt, Human
aaaaaaaauaca

SEQ ID NO: 1296863 - RNA, 14 nt, Human
aaaaaaaaguugca

SEQ ID NO: 1296864 - RNA, 13 nt, Human
aaaaaaaauuacu

SEQ ID NO: 1296865 - RNA, 20 nt, Human
aaaaaaguugcagcuguuuu

SEQ ID NO: 1296866 - RNA, 17 nt, Human
aaaaagcuaauaccagu

SEQ ID NO: 1296867 - RNA, 14 nt, Human
aaaaaaaaauguuc

SEQ ID NO: 1296868 - RNA, 12 nt, Human
aaaaaaaacagu

SEQ ID NO: 1296869 - RNA, 15 nt, Human
ggcuucaugccagcu

SEQ ID NO: 1296870 - RNA, 16 nt, Human
ggcuucagguccaggc

SEQ ID NO: 1296871 - RNA, 16 nt, Human
ggcuucaugccagcua

SEQ ID NO: 1296872 - RNA, 13 nt, Human
ggcuucaggucca

SEQ ID NO: 1296873 - RNA, 17 nt, Human
ggcuucccauccccagc

SEQ ID NO: 1296874 - RNA, 18 nt, Human
ggcuucccauccccagcg

SEQ ID NO: 1296875 - RNA, 12 nt, Human
ggcuucccaagg

SEQ ID NO: 1296876 - RNA, 20 nt, Human
ggcuucccaagggcugccgg

SEQ ID NO: 1296877 - RNA, 12 nt, Human
ggcuuccuggag

SEQ ID NO: 1296878 - RNA, 13 nt, Human
ggcuuccuggagc

SEQ ID NO: 1296879 - RNA, 14 nt, Human
ggcuuccuggagca

SEQ ID NO: 1296880 - RNA, 15 nt, Human
ggcuuccuggagcag

SEQ ID NO: 1296881 - RNA, 16 nt, Human
ggcuuccuggagcaga

SEQ ID NO: 1296882 - RNA, 21 nt, Human
ggcuuccuggagcagaagcag

SEQ ID NO: 1296883 - RNA, 11 nt, Human
ggcuuccuggu

SEQ ID NO: 1296884 - RNA, 12 nt, Human
ggcuuccuggug

SEQ ID NO: 1296885 - RNA, 13 nt, Human
ggcuuccuggugc

SEQ ID NO: 1296886 - RNA, 14 nt, Human
ggcuuccuggugcu

SEQ ID NO: 1296887 - RNA, 18 nt, Human
ggcuuccuggugcuggag

SEQ ID NO: 1296888 - RNA, 20 nt, Human
gggaaaaacuuuggaaccag

SEQ ID NO: 1296889 - RNA, 17 nt, Human
ggcuuccuggugcugga

SEQ ID NO: 1296890 - RNA, 17 nt, Human
gggaaaauuauuugcau

SEQ ID NO: 1296891 - RNA, 18 nt, Human
gggaaaauuauuugcaua

SEQ ID NO: 1296892 - RNA, 22 nt, Human
gggaaacagcaucuccaagcag

SEQ ID NO: 1296893 - RNA, 14 nt, Human
gggaaacuggccau

SEQ ID NO: 1296894 - RNA, 21 nt, Human
gggaaacuggccauggccugc

SEQ ID NO: 1296895 - RNA, 14 nt, Human
gggaaacuuggcuc

SEQ ID NO: 1296896 - RNA, 14 nt, Human
gggaaagcaaagca

SEQ ID NO: 1296897 - RNA, 18 nt, Human
ggcuggugugguacagag

SEQ ID NO: 1296898 - RNA, 19 nt, Human
ggcuggugugguacagaga

SEQ ID NO: 1296899 - RNA, 20 nt, Human
ggcuggugugguacagagaa

SEQ ID NO: 1296900 - RNA, 21 nt, Human
ggcuggugugguacagagaag

SEQ ID NO: 1296901 - RNA, 22 nt, Human
ggcuggugugguacagagaagc

SEQ ID NO: 1296902 - RNA, 23 nt, Human
ggcuggugugguacagagaagcc

SEQ ID NO: 1296903 - RNA, 16 nt, Human
ggcugguguuaacaga

SEQ ID NO: 1296904 - RNA, 17 nt, Human
ggcugguguuaacagaa

SEQ ID NO: 1296905 - RNA, 23 nt, Human
ggcuggugggugccuaggccugg

SEQ ID NO: 1296906 - RNA, 15 nt, Human
ggcuggugugguaca

SEQ ID NO: 1296907 - RNA, 16 nt, Human
ggcuggugugguacag

SEQ ID NO: 1296908 - RNA, 17 nt, Human
ggcuggugugguacaga

SEQ ID NO: 1296909 - RNA, 14 nt, Human
aaaaagugaaauaa

SEQ ID NO: 1296910 - RNA, 20 nt, Human
aaaaaguggguuuuuuaguu

SEQ ID NO: 1296911 - RNA, 22 nt, Human
aaaaaguggguuuuuuaguuga

SEQ ID NO: 1296912 - RNA, 12 nt, Human
aaaaagugucaa

SEQ ID NO: 1296913 - RNA, 23 nt, Human
aaaaaguggguuuuuuaguugaa

SEQ ID NO: 1296914 - RNA, 15 nt, Human
aaaaaguugcagcug

SEQ ID NO: 1296915 - RNA, 20 nt, Human
aaaaaguugcagcuguuuug

SEQ ID NO: 1296916 - RNA, 22 nt, Human
aaaaaguugcagcuguuuuguu

SEQ ID NO: 1296917 - RNA, 23 nt, Human
aaaaaguugcagcuguuuuguug

SEQ ID NO: 1296918 - RNA, 16 nt, Human
ggcuucagcugccagu

SEQ ID NO: 1296919 - RNA, 21 nt, Human
ggcugguguuaacagaaggga

SEQ ID NO: 1296920 - RNA, 14 nt, Human
ggcugucaucugug

SEQ ID NO: 1296921 - RNA, 17 nt, Human
ggcugucaucugugcac

SEQ ID NO: 1296922 - RNA, 19 nt, Human
aaaagggacugagaaauuu

SEQ ID NO: 1296923 - RNA, 13 nt, Human
aaaagguuuacag

SEQ ID NO: 1296924 - RNA, 14 nt, Human
aaaagguuuacaga

SEQ ID NO: 1296925 - RNA, 16 nt, Human
aaaagguuuacagaau

SEQ ID NO: 1296926 - RNA, 16 nt, Human
aaaagggacugagaaa

SEQ ID NO: 1296927 - RNA, 20 nt, Human
aaaaggcuagguacacagcu

SEQ ID NO: 1296928 - RNA, 14 nt, Human
gggcaggaguagcu

SEQ ID NO: 1296929 - RNA, 15 nt, Human
gggcaggaguagcug

SEQ ID NO: 1296930 - RNA, 19 nt, Human
gggcaggaguagcugagcu

SEQ ID NO: 1296931 - RNA, 14 nt, Human
aaaaggccuggggu

SEQ ID NO: 1296932 - RNA, 20 nt, Human
gggcaggaguagcugagcuc

SEQ ID NO: 1296933 - RNA, 13 nt, Human
aaaaggccugggg

SEQ ID NO: 1296934 - RNA, 16 nt, Human
gggcagagcuggugcg

SEQ ID NO: 1296935 - RNA, 15 nt, Human
gggcagcacaggagg

SEQ ID NO: 1296936 - RNA, 12 nt, Human
gggcagcagcca

SEQ ID NO: 1296937 - RNA, 13 nt, Human
gggcagcagccag

SEQ ID NO: 1296938 - RNA, 14 nt, Human
gggcagcagccagc

SEQ ID NO: 1296939 - RNA, 15 nt, Human
gggcagcagccagcc

SEQ ID NO: 1296940 - RNA, 17 nt, Human
gggcagcagccagcccu

SEQ ID NO: 1296941 - RNA, 18 nt, Human
gggcagcagccagcccug

SEQ ID NO: 1296942 - RNA, 19 nt, Human
gggcagcagccagcccugc

SEQ ID NO: 1296943 - RNA, 20 nt, Human
gggcagcagccagcccugcc

SEQ ID NO: 1296944 - RNA, 22 nt, Human
gggcagcagccagcccugccug

SEQ ID NO: 1296945 - RNA, 23 nt, Human
gggcagcagccagcccugccugg

SEQ ID NO: 1296946 - RNA, 14 nt, Human
gggcagcagggcua

SEQ ID NO: 1296947 - RNA, 11 nt, Human
gggcagccagg

SEQ ID NO: 1296948 - RNA, 20 nt, Human
gggcagccagggagagccca

SEQ ID NO: 1296949 - RNA, 14 nt, Human
gggcagccagggag

SEQ ID NO: 1296950 - RNA, 18 nt, Human
gggcagccagggagagcc

SEQ ID NO: 1296951 - RNA, 19 nt, Human
gggcagccagggagagccc

SEQ ID NO: 1296952 - RNA, 14 nt, Human
gggaggggcuccuu

SEQ ID NO: 1296953 - RNA, 15 nt, Human
gggaggggcuccuuu

SEQ ID NO: 1296954 - RNA, 15 nt, Human
gggagggggauccga

SEQ ID NO: 1296955 - RNA, 18 nt, Human
gggauuaugggucacagg

SEQ ID NO: 1296956 - RNA, 20 nt, Human
gggauuaugggucacaggaa

SEQ ID NO: 1296957 - RNA, 23 nt, Human
gggauuauuagaaucaaacauuu

SEQ ID NO: 1296958 - RNA, 22 nt, Human
gggauucaggaaaaggccuggg

SEQ ID NO: 1296959 - RNA, 21 nt, Human
gggauucaggaaaaggccugg

SEQ ID NO: 1296960 - RNA, 14 nt, Human
gggagggggagagg

SEQ ID NO: 1296961 - RNA, 12 nt, Human
gggagggcucug

SEQ ID NO: 1296962 - RNA, 14 nt, Human
gggagggcucugag

SEQ ID NO: 1296963 - RNA, 15 nt, Human
gggagggcucugagg

SEQ ID NO: 1296964 - RNA, 16 nt, Human
gggagggcucugaggc

SEQ ID NO: 1296965 - RNA, 18 nt, Human
gggagggcucugaggcgc

SEQ ID NO: 1296966 - RNA, 20 nt, Human
gggagggcucugaggcgccc

SEQ ID NO: 1296967 - RNA, 19 nt, Human
gggagggcucugaggcgcc

SEQ ID NO: 1296968 - RNA, 16 nt, Human
gggcagagccaggaag

SEQ ID NO: 1296969 - RNA, 14 nt, Human
gggcagagccagga

SEQ ID NO: 1296970 - RNA, 13 nt, Human
gggcagagccagg

SEQ ID NO: 1296971 - RNA, 12 nt, Human
gggcagagccca

SEQ ID NO: 1296972 - RNA, 14 nt, Human
gggcagagcccaag

SEQ ID NO: 1296973 - RNA, 16 nt, Human
gggcagcaauuuaaau

SEQ ID NO: 1296974 - RNA, 19 nt, Human
gggcagagcuggcucugag

SEQ ID NO: 1296975 - RNA, 13 nt, Human
gggcagagcuggu

SEQ ID NO: 1296976 - RNA, 15 nt, Human
gggcagagcuggugc

SEQ ID NO: 1296977 - RNA, 11 nt, Human
gggcagagcug

SEQ ID NO: 1296978 - RNA, 16 nt, Human
gggcagagcuggcucu

SEQ ID NO: 1296979 - RNA, 17 nt, Human
gggcagagcuggcucug

SEQ ID NO: 1296980 - RNA, 19 nt, Human
gggauucugguuccagggu

SEQ ID NO: 1296981 - RNA, 12 nt, Human
gggcaaagccag

SEQ ID NO: 1296982 - RNA, 14 nt, Human
aaaauauauacuaa

SEQ ID NO: 1296983 - RNA, 15 nt, Human
aaaauauauugaaua

SEQ ID NO: 1296984 - RNA, 14 nt, Human
aaaauauguaccaa

SEQ ID NO: 1296985 - RNA, 18 nt, Human
aaaauauauaucaaauau

SEQ ID NO: 1296986 - RNA, 17 nt, Human
aaaauauauacuaaaca

SEQ ID NO: 1296987 - RNA, 13 nt, Human
aaaauauauacua

SEQ ID NO: 1296988 - RNA, 13 nt, Human
aaaauauagcuaa

SEQ ID NO: 1296989 - RNA, 15 nt, Human
aaaauagcguucuug

SEQ ID NO: 1296990 - RNA, 16 nt, Human
aaaauagcguucuugu

SEQ ID NO: 1296991 - RNA, 17 nt, Human
aaaauagcguucuugua

SEQ ID NO: 1296992 - RNA, 18 nt, Human
aaaauagcguucuuguaa

SEQ ID NO: 1296993 - RNA, 19 nt, Human
aaaauagcguucuuguaau

SEQ ID NO: 1296994 - RNA, 20 nt, Human
aaaauagcguucuuguaauu

SEQ ID NO: 1296995 - RNA, 20 nt, Human
aaaauagcuaaauaccucaa

SEQ ID NO: 1296996 - RNA, 12 nt, Human
aaaauaggcagg

SEQ ID NO: 1296997 - RNA, 13 nt, Human
aaaauaggcagga

SEQ ID NO: 1296998 - RNA, 22 nt, Human
aaaauagggacuaucuaucuua

SEQ ID NO: 1296999 - RNA, 20 nt, Human
aaaauaggguauauuuuccu

SEQ ID NO: 1297000 - RNA, 21 nt, Human
aaaauaggguauauuuuccua

SEQ ID NO: 1297001 - RNA, 23 nt, Human
aaaauaguuaagacaugauuucc

SEQ ID NO: 1297002 - RNA, 13 nt, Human
aaaauaguuugga

SEQ ID NO: 1297003 - RNA, 16 nt, Human
aaaauaguuuggauau

SEQ ID NO: 1297004 - RNA, 19 nt, Human
aaaauaguuuggauaugua

SEQ ID NO: 1297005 - RNA, 22 nt, Human
aaaauaguuuggauauguaaaa

SEQ ID NO: 1297006 - RNA, 20 nt, Human
aaaauaguuuggauauguaa

SEQ ID NO: 1297007 - RNA, 13 nt, Human
aaaauauaaaaua

SEQ ID NO: 1297008 - RNA, 10 nt, Human
aaaauauaac

SEQ ID NO: 1297009 - RNA, 21 nt, Human
aaaauaauuuuuauauuugaa

SEQ ID NO: 1297010 - RNA, 23 nt, Human
aaaauaauuuuuauauuugaaau

SEQ ID NO: 1297011 - RNA, 23 nt, Human
aaaauaaaugucaccagguacuu

SEQ ID NO: 1297012 - RNA, 15 nt, Human
aaaauacaagacugc

SEQ ID NO: 1297013 - RNA, 14 nt, Human
aaaauacaagacug

SEQ ID NO: 1297014 - RNA, 16 nt, Human
aaaauacggugggggu

SEQ ID NO: 1297015 - RNA, 15 nt, Human
aaaauacuauucuga

SEQ ID NO: 1297016 - RNA, 17 nt, Human
aaaauagcaaaagaaga

SEQ ID NO: 1297017 - RNA, 14 nt, Human
aaaauaaauauauc

SEQ ID NO: 1297018 - RNA, 17 nt, Human
aaaauaaauauaucuac

SEQ ID NO: 1297019 - RNA, 18 nt, Human
aaaagguuuacagaauuu

SEQ ID NO: 1297020 - RNA, 14 nt, Human
aaaagguuuaugaa

SEQ ID NO: 1297021 - RNA, 19 nt, Human
aaaagguuuaugaaaaaga

SEQ ID NO: 1297022 - RNA, 20 nt, Human
aaaagguuuaugaaaaagaa

SEQ ID NO: 1297023 - RNA, 23 nt, Human
aaaagguuuaugaaaaagaagaa

SEQ ID NO: 1297024 - RNA, 13 nt, Human
aaaaguaauaaaa

SEQ ID NO: 1297025 - RNA, 15 nt, Human
aaaauaaagaaugga

SEQ ID NO: 1297026 - RNA, 16 nt, Human
aaaauaaagaauggaa

SEQ ID NO: 1297027 - RNA, 18 nt, Human
aaaagccuguuuaagaga

SEQ ID NO: 1297028 - RNA, 16 nt, Human
aaaagccuguuuaaga

SEQ ID NO: 1297029 - RNA, 11 nt, Human
aaaagccugcu

SEQ ID NO: 1297030 - RNA, 17 nt, Human
aaaagcgugagcuuaaa

SEQ ID NO: 1297031 - RNA, 19 nt, Human
aaaagcgugagcuuaaaau

SEQ ID NO: 1297032 - RNA, 21 nt, Human
aaaagcgugagcuuaaaauac

SEQ ID NO: 1297033 - RNA, 23 nt, Human
aaaagcgugagcuuaaaauacaa

SEQ ID NO: 1297034 - RNA, 21 nt, Human
aaaacuuuaugcuaagugaaa

SEQ ID NO: 1297035 - RNA, 11 nt, Human
aaaacugcucc

SEQ ID NO: 1297036 - RNA, 22 nt, Human
aaaacugcuccuccuccuguau

SEQ ID NO: 1297037 - RNA, 13 nt, Human
aaaacuuuaaagc

SEQ ID NO: 1297038 - RNA, 14 nt, Human
aaaacuuuccucgc

SEQ ID NO: 1297039 - RNA, 16 nt, Human
aaaacuuuccucgccu

SEQ ID NO: 1297040 - RNA, 20 nt, Human
aaaacuuuccucgccugaca

SEQ ID NO: 1297041 - RNA, 22 nt, Human
aaaagcuccauuuuuagugaaa

SEQ ID NO: 1297042 - RNA, 14 nt, Human
aaaagcuaagagaa

SEQ ID NO: 1297043 - RNA, 16 nt, Human
aaaagcuaauaccagu

SEQ ID NO: 1297044 - RNA, 14 nt, Human
aaaagcuagaauug

SEQ ID NO: 1297045 - RNA, 17 nt, Human
aaaagcuauaaagcagu

SEQ ID NO: 1297046 - RNA, 21 nt, Human
aaaagcuauaaagcaguauuu

SEQ ID NO: 1297047 - RNA, 20 nt, Human
aaaagcuauuuaaagcaucu

SEQ ID NO: 1297048 - RNA, 15 nt, Human
aaaagcuuacaaaua

SEQ ID NO: 1297049 - RNA, 21 nt, Human
aaaagcuuagcuuuagaaaca

SEQ ID NO: 1297050 - RNA, 23 nt, Human
aaaagcuuagcuuuagaaacagu

SEQ ID NO: 1297051 - RNA, 14 nt, Human
aaaagcuuccauga

SEQ ID NO: 1297052 - RNA, 17 nt, Human
gggacugcggaggaagg

SEQ ID NO: 1297053 - RNA, 16 nt, Human
gggacugcuaaauaaa

SEQ ID NO: 1297054 - RNA, 15 nt, Human
gggacugcuaaauaa

SEQ ID NO: 1297055 - RNA, 13 nt, Human
gggacuguaaguu

SEQ ID NO: 1297056 - RNA, 15 nt, Human
gggacugucgcugcu

SEQ ID NO: 1297057 - RNA, 17 nt, Human
gggacugucgcugcuuc

SEQ ID NO: 1297058 - RNA, 14 nt, Human
gggagacugggcug

SEQ ID NO: 1297059 - RNA, 16 nt, Human
gggagacugggcugag

SEQ ID NO: 1297060 - RNA, 19 nt, Human
gggagacugggcugaggga

SEQ ID NO: 1297061 - RNA, 20 nt, Human
gggagacugggcugagggag

SEQ ID NO: 1297062 - RNA, 13 nt, Human
gggagggccuggg

SEQ ID NO: 1297063 - RNA, 21 nt, Human
gggagggcggcaggggccugg

SEQ ID NO: 1297064 - RNA, 22 nt, Human
gggagggcggcaggggccugga

SEQ ID NO: 1297065 - RNA, 15 nt, Human
gggagggcagagcug

SEQ ID NO: 1297066 - RNA, 18 nt, Human
gggagggcagagcuggug

SEQ ID NO: 1297067 - RNA, 20 nt, Human
gggagggcagagcuggugcg

SEQ ID NO: 1297068 - RNA, 11 nt, Human
gggagggcagc

SEQ ID NO: 1297069 - RNA, 13 nt, Human
gggagggcagcag

SEQ ID NO: 1297070 - RNA, 20 nt, Human
gggaggcagagguugcagug

SEQ ID NO: 1297071 - RNA, 21 nt, Human
aaaaauuaaaccggaccaucu

SEQ ID NO: 1297072 - RNA, 12 nt, Human
aaaaauuaaaau

SEQ ID NO: 1297073 - RNA, 23 nt, Human
aaaaauguuuuuggucuuuuaua

SEQ ID NO: 1297074 - RNA, 12 nt, Human
aaaaaugucuua

SEQ ID NO: 1297075 - RNA, 20 nt, Human
aaaaauguucuauuuuaauu

SEQ ID NO: 1297076 - RNA, 17 nt, Human
aaaaauguauuuuaugu

SEQ ID NO: 1297077 - RNA, 17 nt, Human
aaaaaucuuccaauuua

SEQ ID NO: 1297078 - RNA, 14 nt, Human
aaaaaugaucuaaa

SEQ ID NO: 1297079 - RNA, 20 nt, Human
aaaaaugauuucaguagcac

SEQ ID NO: 1297080 - RNA, 16 nt, Human
aaaaaugauuucagua

SEQ ID NO: 1297081 - RNA, 21 nt, Human
gggaaaugguacuguacagcu

SEQ ID NO: 1297082 - RNA, 14 nt, Human
gggaacaauuuggc

SEQ ID NO: 1297083 - RNA, 21 nt, Human
gggaacaauuuggcaauuuug

SEQ ID NO: 1297084 - RNA, 22 nt, Human
gggaacacuggggacuuggccu

SEQ ID NO: 1297085 - RNA, 20 nt, Human
gggaaagcaaagcacagaga

SEQ ID NO: 1297086 - RNA, 16 nt, Human
gggaaagccccugccc

SEQ ID NO: 1297087 - RNA, 22 nt, Human
gggaaaucaaaagggccaaaga

SEQ ID NO: 1297088 - RNA, 15 nt, Human
gggaacacuggggac

SEQ ID NO: 1297089 - RNA, 19 nt, Human
aaaaauuaucuauagcuaa

SEQ ID NO: 1297090 - RNA, 16 nt, Human
aaaaauuacuuaguau

SEQ ID NO: 1297091 - RNA, 19 nt, Human
aaaacugcucauaugaugu

SEQ ID NO: 1297092 - RNA, 17 nt, Human
aaaacuacuucuuuuuu

SEQ ID NO: 1297093 - RNA, 14 nt, Human
aaaacugcauuuca

SEQ ID NO: 1297094 - RNA, 19 nt, Human
aaaaccaagccguggcuuc

SEQ ID NO: 1297095 - RNA, 13 nt, Human
aaaacuaaaaacu

SEQ ID NO: 1297096 - RNA, 16 nt, Human
aaaacuaaaaacuaga

SEQ ID NO: 1297097 - RNA, 22 nt, Human
aaaacuacaaccaauggaaugu

SEQ ID NO: 1297098 - RNA, 21 nt, Human
aaaacuacaaaucaaguauuu

SEQ ID NO: 1297099 - RNA, 19 nt, Human
aaaauuuuuaaucuuuaau

SEQ ID NO: 1297100 - RNA, 19 nt, Human
aaaauuuuuucucuaggaa

SEQ ID NO: 1297101 - RNA, 22 nt, Human
aaaauuuuuucucuaggaaaua

SEQ ID NO: 1297102 - RNA, 16 nt, Human
aaaauuuuuaaucuuu

SEQ ID NO: 1297103 - RNA, 20 nt, Human
aaaauuguuaauuuuuccua

SEQ ID NO: 1297104 - RNA, 13 nt, Human
aaaauugugauca

SEQ ID NO: 1297105 - RNA, 17 nt, Human
aaaauguauaugcacuu

SEQ ID NO: 1297106 - RNA, 13 nt, Human
aaacaaagaaauu

SEQ ID NO: 1297107 - RNA, 15 nt, Human
aaaauguaugcaugu

SEQ ID NO: 1297108 - RNA, 20 nt, Human
aaacaaacucguuuuuuaca

SEQ ID NO: 1297109 - RNA, 18 nt, Human
aaacaaagaguucaagaa

SEQ ID NO: 1297110 - RNA, 16 nt, Human
aaacaaagcaauucuu

SEQ ID NO: 1297111 - RNA, 12 nt, Human
aaacaaagaugu

SEQ ID NO: 1297112 - RNA, 12 nt, Human
aaacaacacugu

SEQ ID NO: 1297113 - RNA, 17 nt, Human
aaacaaggaugaauuaa

SEQ ID NO: 1297114 - RNA, 15 nt, Human
aaacaaccaugucau

SEQ ID NO: 1297115 - RNA, 17 nt, Human
aaacaacucuuugagaa

SEQ ID NO: 1297116 - RNA, 17 nt, Human
aaacaaccaugucauuu

SEQ ID NO: 1297117 - RNA, 13 nt, Human
aaacaagaaaaau

SEQ ID NO: 1297118 - RNA, 17 nt, Human
aaacaagaaaaauaaag

SEQ ID NO: 1297119 - RNA, 18 nt, Human
aaacaagaaaaauaaaga

SEQ ID NO: 1297120 - RNA, 19 nt, Human
aaacaagaaaaauaaagaa

SEQ ID NO: 1297121 - RNA, 20 nt, Human
aaacaagaaaaauaaagaaa

SEQ ID NO: 1297122 - RNA, 12 nt, Human
aaaauggaauac

SEQ ID NO: 1297123 - RNA, 22 nt, Human
aaaauggaggccauugugugag

SEQ ID NO: 1297124 - RNA, 21 nt, Human
aaaauggcaggggguggaauu

SEQ ID NO: 1297125 - RNA, 19 nt, Human
aaaauggccauuugcuuuu

SEQ ID NO: 1297126 - RNA, 12 nt, Human
aaaauguaggag

SEQ ID NO: 1297127 - RNA, 17 nt, Human
aaaauguaggagacugu

SEQ ID NO: 1297128 - RNA, 21 nt, Human
aaaauguaggcuuaguuugug

SEQ ID NO: 1297129 - RNA, 14 nt, Human
aaaauguauaugca

SEQ ID NO: 1297130 - RNA, 19 nt, Human
aaaauauuauuuuauuaua

SEQ ID NO: 1297131 - RNA, 14 nt, Human
aaaauauucaauaa

SEQ ID NO: 1297132 - RNA, 18 nt, Human
gggcugcuuccuccugga

SEQ ID NO: 1297133 - RNA, 19 nt, Human
gggcugcuuccuccuggaa

SEQ ID NO: 1297134 - RNA, 20 nt, Human
gggcugcuuccuccuggaaa

SEQ ID NO: 1297135 - RNA, 13 nt, Human
gggcuggaggagc

SEQ ID NO: 1297136 - RNA, 14 nt, Human
gggcuggaggagcc

SEQ ID NO: 1297137 - RNA, 15 nt, Human
gggcuggaggagccc

SEQ ID NO: 1297138 - RNA, 16 nt, Human
gggcuggaggagccca

SEQ ID NO: 1297139 - RNA, 17 nt, Human
gggcuggaggagcccag

SEQ ID NO: 1297140 - RNA, 18 nt, Human
gggcuggaggagcccagg

SEQ ID NO: 1297141 - RNA, 22 nt, Human
gggcuggaggagcccaggccag

SEQ ID NO: 1297142 - RNA, 23 nt, Human
gggcuggaggagcccaggccagg

SEQ ID NO: 1297143 - RNA, 14 nt, Human
gggcuggaggccca

SEQ ID NO: 1297144 - RNA, 15 nt, Human
gggcuggaggcccag

SEQ ID NO: 1297145 - RNA, 16 nt, Human
gggcuggaggcccagg

SEQ ID NO: 1297146 - RNA, 19 nt, Human
gggcuggaggcccaggcug

SEQ ID NO: 1297147 - RNA, 18 nt, Human
gggcuggaugagcuccca

SEQ ID NO: 1297148 - RNA, 15 nt, Human
gggcuggaugagcuc

SEQ ID NO: 1297149 - RNA, 14 nt, Human
aaacacaacuauau

SEQ ID NO: 1297150 - RNA, 23 nt, Human
aaacaaguauuuguuaauuuaga

SEQ ID NO: 1297151 - RNA, 19 nt, Human
aaacaagucagucauucag

SEQ ID NO: 1297152 - RNA, 16 nt, Human
aaacaagguuuucagu

SEQ ID NO: 1297153 - RNA, 12 nt, Human
aaacaaguauuu

SEQ ID NO: 1297154 - RNA, 13 nt, Human
aaacaaguauuug

SEQ ID NO: 1297155 - RNA, 22 nt, Human
aaacaaguauuuguuaauuuag

SEQ ID NO: 1297156 - RNA, 21 nt, Human
aaacacaagauugguguuuuu

SEQ ID NO: 1297157 - RNA, 15 nt, Human
aaacacaagauuggu

SEQ ID NO: 1297158 - RNA, 16 nt, Human
aaacaguugguaacuu

SEQ ID NO: 1297159 - RNA, 18 nt, Human
aaacaguugguaacuuuu

SEQ ID NO: 1297160 - RNA, 19 nt, Human
aaacaguugguaacuuuug

SEQ ID NO: 1297161 - RNA, 22 nt, Human
aaacaguugguaacuuuuguga

SEQ ID NO: 1297162 - RNA, 13 nt, Human
aaacauauauaac

SEQ ID NO: 1297163 - RNA, 20 nt, Human
aaacauaaucuucugccuuc

SEQ ID NO: 1297164 - RNA, 16 nt, Human
aaacauauauaacaau

SEQ ID NO: 1297165 - RNA, 19 nt, Human
aaacauauauaacaaugcu

SEQ ID NO: 1297166 - RNA, 21 nt, Human
aaacauauauaacaaugcugu

SEQ ID NO: 1297167 - RNA, 14 nt, Human
ggggccaggcuggg

SEQ ID NO: 1297168 - RNA, 16 nt, Human
ggggaccuggaaggga

SEQ ID NO: 1297169 - RNA, 16 nt, Human
ggggccaggcuggguc

SEQ ID NO: 1297170 - RNA, 17 nt, Human
ggggaagacaguggccc

SEQ ID NO: 1297171 - RNA, 18 nt, Human
ggggaaagcaaagcacag

SEQ ID NO: 1297172 - RNA, 21 nt, Human
ggggaaagcaaagcacagaga

SEQ ID NO: 1297173 - RNA, 17 nt, Human
ggggaaaggcaaggucc

SEQ ID NO: 1297174 - RNA, 22 nt, Human
ggggaaaggcaagguccggccc

SEQ ID NO: 1297175 - RNA, 18 nt, Human
ggggaacucagauccagg

SEQ ID NO: 1297176 - RNA, 21 nt, Human
ggggaacucagauccagggac

SEQ ID NO: 1297177 - RNA, 23 nt, Human
ggggucucuucugaauaaagcaa

SEQ ID NO: 1297178 - RNA, 20 nt, Human
ggggucuggaguugaucugg

SEQ ID NO: 1297179 - RNA, 21 nt, Human
ggggucuggaguugaucugga

SEQ ID NO: 1297180 - RNA, 13 nt, Human
ggggucuggcugg

SEQ ID NO: 1297181 - RNA, 16 nt, Human
ggggucuggcuggugu

SEQ ID NO: 1297182 - RNA, 21 nt, Human
ggggucuggcugguguuaaca

SEQ ID NO: 1297183 - RNA, 18 nt, Human
ggggucguggagagcuag

SEQ ID NO: 1297184 - RNA, 19 nt, Human
ggggucguggagagcuagg

SEQ ID NO: 1297185 - RNA, 12 nt, Human
ggggccugggca

SEQ ID NO: 1297186 - RNA, 11 nt, Human
ggggccuggcu

SEQ ID NO: 1297187 - RNA, 22 nt, Human
ggggccuggcuggcugagggca

SEQ ID NO: 1297188 - RNA, 21 nt, Human
ggggaacuggccaagcugagg

SEQ ID NO: 1297189 - RNA, 13 nt, Human
ggggaacuggcca

SEQ ID NO: 1297190 - RNA, 12 nt, Human
ggggaagacagu

SEQ ID NO: 1297191 - RNA, 16 nt, Human
ggggaagacaguggcc

SEQ ID NO: 1297192 - RNA, 15 nt, Human
ggggccugggcagga

SEQ ID NO: 1297193 - RNA, 19 nt, Human
ggggccuggcuggcugagg

SEQ ID NO: 1297194 - RNA, 12 nt, Human
ggggccugggag

SEQ ID NO: 1297195 - RNA, 14 nt, Human
ggggccuguacugc

SEQ ID NO: 1297196 - RNA, 15 nt, Human
ggggccuguacugcc

SEQ ID NO: 1297197 - RNA, 17 nt, Human
ggggccuguacugccug

SEQ ID NO: 1297198 - RNA, 18 nt, Human
ggggccuguacugccugc

SEQ ID NO: 1297199 - RNA, 19 nt, Human
ggggccuguacugccugcu

SEQ ID NO: 1297200 - RNA, 12 nt, Human
ggguaggcagga

SEQ ID NO: 1297201 - RNA, 13 nt, Human
ggguaggcaggau

SEQ ID NO: 1297202 - RNA, 14 nt, Human
ggguaggcuggagu

SEQ ID NO: 1297203 - RNA, 18 nt, Human
ggguagggggcuggagga

SEQ ID NO: 1297204 - RNA, 15 nt, Human
ggguaggguaaauca

SEQ ID NO: 1297205 - RNA, 22 nt, Human
ggguaggguaaaucaguaagag

SEQ ID NO: 1297206 - RNA, 19 nt, Human
ggguaggagggugggaagg

SEQ ID NO: 1297207 - RNA, 20 nt, Human
ggguaggcaggauuggggaa

SEQ ID NO: 1297208 - RNA, 23 nt, Human
ggguauaaaacuuuccucgccug

SEQ ID NO: 1297209 - RNA, 19 nt, Human
gggucagacgccugaggaa

SEQ ID NO: 1297210 - RNA, 18 nt, Human
aaaccaaaucacugaacu

SEQ ID NO: 1297211 - RNA, 14 nt, Human
aaaccaagccgugg

SEQ ID NO: 1297212 - RNA, 16 nt, Human
aaaccaagccguggcu

SEQ ID NO: 1297213 - RNA, 21 nt, Human
aaacauuuauuuugacauaaa

SEQ ID NO: 1297214 - RNA, 20 nt, Human
aaacauuuauuuugacauaa

SEQ ID NO: 1297215 - RNA, 14 nt, Human
aaacauuaaaauau

SEQ ID NO: 1297216 - RNA, 14 nt, Human
aaacauuuauuuug

SEQ ID NO: 1297217 - RNA, 17 nt, Human
aaacauuuauuuugaca

SEQ ID NO: 1297218 - RNA, 18 nt, Human
aaacauuuauuuugacau

SEQ ID NO: 1297219 - RNA, 23 nt, Human
aaacauguuucuuuguaaugaaa

SEQ ID NO: 1297220 - RNA, 22 nt, Human
aaacauguuucuuuguaaugaa

SEQ ID NO: 1297221 - RNA, 19 nt, Human
aaacauguuucuuuguaau

SEQ ID NO: 1297222 - RNA, 19 nt, Human
aaacauguuuccacuauug

SEQ ID NO: 1297223 - RNA, 12 nt, Human
aaacauguuucc

SEQ ID NO: 1297224 - RNA, 20 nt, Human
aaacauguuuauuuuucuug

SEQ ID NO: 1297225 - RNA, 21 nt, Human
aaacauguuuauuuuucuugu

SEQ ID NO: 1297226 - RNA, 12 nt, Human
gggucaggccuu

SEQ ID NO: 1297227 - RNA, 19 nt, Human
gggucaggccuuugagcuc

SEQ ID NO: 1297228 - RNA, 13 nt, Human
gggucguggagag

SEQ ID NO: 1297229 - RNA, 18 nt, Human
gggucguggagagcuagg

SEQ ID NO: 1297230 - RNA, 23 nt, Human
aaacggccucacuaggcuucugg

SEQ ID NO: 1297231 - RNA, 21 nt, Human
aaaccacauuggagauguuua

SEQ ID NO: 1297232 - RNA, 15 nt, Human
aaacuacauauugua

SEQ ID NO: 1297233 - RNA, 21 nt, Human
aaacuacaaccaauggaaugu

SEQ ID NO: 1297234 - RNA, 16 nt, Human
aaacuaagaugugcag

SEQ ID NO: 1297235 - RNA, 15 nt, Human
aaacuaauaauugca

SEQ ID NO: 1297236 - RNA, 11 nt, Human
aaacuaaucca

SEQ ID NO: 1297237 - RNA, 12 nt, Human
aaacgugaaaau

SEQ ID NO: 1297238 - RNA, 21 nt, Human
aaacugcccccucugcccugc

SEQ ID NO: 1297239 - RNA, 10 nt, Human
aaacuggaga

SEQ ID NO: 1297240 - RNA, 11 nt, Human
aaacuggagac

SEQ ID NO: 1297241 - RNA, 21 nt, Human
aaacuggagacugugugugcc

SEQ ID NO: 1297242 - RNA, 13 nt, Human
aaacugcccccuc

SEQ ID NO: 1297243 - RNA, 17 nt, Human
aaacugcccccucugcc

SEQ ID NO: 1297244 - RNA, 19 nt, Human
aaacugcccccucugcccu

SEQ ID NO: 1297245 - RNA, 20 nt, Human
aaacugcccccucugcccug

SEQ ID NO: 1297246 - RNA, 12 nt, Human
aaacuggagacu

SEQ ID NO: 1297247 - RNA, 18 nt, Human
aaacuggccauggccugc

SEQ ID NO: 1297248 - RNA, 18 nt, Human
aaacugggaaccccuuuc

SEQ ID NO: 1297249 - RNA, 17 nt, Human
aaacuguaauacaauga

SEQ ID NO: 1297250 - RNA, 11 nt, Human
aaacuguacag

SEQ ID NO: 1297251 - RNA, 12 nt, Human
aaacuguacagu

SEQ ID NO: 1297252 - RNA, 12 nt, Human
aaacugcccccu

SEQ ID NO: 1297253 - RNA, 14 nt, Human
aaacuccugugacc

SEQ ID NO: 1297254 - RNA, 15 nt, Human
aaacuccaccuuccc

SEQ ID NO: 1297255 - RNA, 15 nt, Human
aaacuccagaugcca

SEQ ID NO: 1297256 - RNA, 22 nt, Human
aaacuccagaugccacaaugga

SEQ ID NO: 1297257 - RNA, 23 nt, Human
aaacucccacuugucaugugaca

SEQ ID NO: 1297258 - RNA, 16 nt, Human
aaacuacuuugcugcu

SEQ ID NO: 1297259 - RNA, 22 nt, Human
aaacuagaggugagaaauuuaa

SEQ ID NO: 1297260 - RNA, 22 nt, Human
aaacuagaaagcagagauuuuc

SEQ ID NO: 1297261 - RNA, 23 nt, Human
aaacuagaaagcagagauuuuca

SEQ ID NO: 1297262 - RNA, 20 nt, Human
aaacuacuuugcugcuaaua

SEQ ID NO: 1297263 - RNA, 18 nt, Human
aaagagaacuuccagauc

SEQ ID NO: 1297264 - RNA, 13 nt, Human
aaagagaaacacg

SEQ ID NO: 1297265 - RNA, 15 nt, Human
aaagagacaaagcuu

SEQ ID NO: 1297266 - RNA, 13 nt, Human
aaagagacaguga

SEQ ID NO: 1297267 - RNA, 15 nt, Human
aaagagacagugaua

SEQ ID NO: 1297268 - RNA, 21 nt, Human
aaagagacagugauauuggaa

SEQ ID NO: 1297269 - RNA, 12 nt, Human
aaagacuuaagc

SEQ ID NO: 1297270 - RNA, 18 nt, Human
aaagacuugguugguagg

SEQ ID NO: 1297271 - RNA, 20 nt, Human
aaagacuugguugguagggu

SEQ ID NO: 1297272 - RNA, 12 nt, Human
aaagagaaacac

SEQ ID NO: 1297273 - RNA, 19 nt, Human
aaagagaaacaguugguaa

SEQ ID NO: 1297274 - RNA, 22 nt, Human
aaagagaaacaguugguaacuu

SEQ ID NO: 1297275 - RNA, 10 nt, Human
aaagacucau

SEQ ID NO: 1297276 - RNA, 14 nt, Human
aaagacucauccgu

SEQ ID NO: 1297277 - RNA, 15 nt, Human
aaagacucauccguc

SEQ ID NO: 1297278 - RNA, 17 nt, Human
aaagaauggaaggugga

SEQ ID NO: 1297279 - RNA, 17 nt, Human
aaagaauggcagaaaag

SEQ ID NO: 1297280 - RNA, 15 nt, Human
aaagaauucaaauuu

SEQ ID NO: 1297281 - RNA, 19 nt, Human
aaagaauugugguuuauau

SEQ ID NO: 1297282 - RNA, 16 nt, Human
aaagaauucaaauuuu

SEQ ID NO: 1297283 - RNA, 15 nt, Human
aaagaauuauuuugu

SEQ ID NO: 1297284 - RNA, 22 nt, Human
aaagaauuguuggggguuuuuu

SEQ ID NO: 1297285 - RNA, 20 nt, Human
aaagaauuguuggggguuuu

SEQ ID NO: 1297286 - RNA, 13 nt, Human
aaagagagauuuu

SEQ ID NO: 1297287 - RNA, 14 nt, Human
aaagagagauuuuu

SEQ ID NO: 1297288 - RNA, 15 nt, Human
aaagagagauuuuuu

SEQ ID NO: 1297289 - RNA, 19 nt, Human
aaagaugcacuuugcuuua

SEQ ID NO: 1297290 - RNA, 21 nt, Human
aaagaugcacuuugcuuuaau

SEQ ID NO: 1297291 - RNA, 23 nt, Human
aaagaugcacuuugcuuuaauau

SEQ ID NO: 1297292 - RNA, 22 nt, Human
aaagaugcacuuugcuuuaaua

SEQ ID NO: 1297293 - RNA, 14 nt, Human
aaagaugccacauu

SEQ ID NO: 1297294 - RNA, 12 nt, Human
aaagaugcacuu

SEQ ID NO: 1297295 - RNA, 17 nt, Human
aaagaugcacuuugcuu

SEQ ID NO: 1297296 - RNA, 20 nt, Human
aaagaugagcuuugucuacu

SEQ ID NO: 1297297 - RNA, 16 nt, Human
aaagauguucuggaua

SEQ ID NO: 1297298 - RNA, 12 nt, Human
aaagauucuaua

SEQ ID NO: 1297299 - RNA, 18 nt, Human
aaagauucuauaguucua

SEQ ID NO: 1297300 - RNA, 19 nt, Human
aaagauucuauaguucuag

SEQ ID NO: 1297301 - RNA, 20 nt, Human
aaagauucuauaguucuaga

SEQ ID NO: 1297302 - RNA, 22 nt, Human
aaacuuuaaagcguuugcacag

SEQ ID NO: 1297303 - RNA, 20 nt, Human
aaacuuuucuuaaaaaguua

SEQ ID NO: 1297304 - RNA, 12 nt, Human
aaacuuuuuuau

SEQ ID NO: 1297305 - RNA, 17 nt, Human
aaacuuuuuuauuuaaa

SEQ ID NO: 1297306 - RNA, 19 nt, Human
aaacuuuuuuauuuaaaaa

SEQ ID NO: 1297307 - RNA, 15 nt, Human
aaacuuuuuuucugu

SEQ ID NO: 1297308 - RNA, 19 nt, Human
aaacuuuuuuucuguacca

SEQ ID NO: 1297309 - RNA, 22 nt, Human
aaacuuuuuuucuguaccaguu

SEQ ID NO: 1297310 - RNA, 13 nt, Human
aaacuuuaauaua

SEQ ID NO: 1297311 - RNA, 23 nt, Human
ggucccacaucccugggccugcu

SEQ ID NO: 1297312 - RNA, 21 nt, Human
ggucccacaucccugggccug

SEQ ID NO: 1297313 - RNA, 22 nt, Human
ggucccacaucccugggccugc

SEQ ID NO: 1297314 - RNA, 16 nt, Human
ggucccacaucccugg

SEQ ID NO: 1297315 - RNA, 17 nt, Human
ggucccacaucccuggg

SEQ ID NO: 1297316 - RNA, 19 nt, Human
ggucccacaucccugggcc

SEQ ID NO: 1297317 - RNA, 20 nt, Human
ggucccacaucccugggccu

SEQ ID NO: 1297318 - RNA, 14 nt, Human
ggucccacagccac

SEQ ID NO: 1297319 - RNA, 19 nt, Human
gguccaaugagcuuucuga

SEQ ID NO: 1297320 - RNA, 22 nt, Human
gguccaaugagcuuucugaaca

SEQ ID NO: 1297321 - RNA, 17 nt, Human
gguccaugggcagagcc

SEQ ID NO: 1297322 - RNA, 18 nt, Human
gguccaugggcagagccc

SEQ ID NO: 1297323 - RNA, 17 nt, Human
gguauucguuaucuaau

SEQ ID NO: 1297324 - RNA, 21 nt, Human
gguauggcguaaguacagaga

SEQ ID NO: 1297325 - RNA, 22 nt, Human
gguauggcguaaguacagagaa

SEQ ID NO: 1297326 - RNA, 16 nt, Human
ggucaugggccacugc

SEQ ID NO: 1297327 - RNA, 16 nt, Human
gguccaaugagcuuuc

SEQ ID NO: 1297328 - RNA, 17 nt, Human
gguccaaugagcuuucu

SEQ ID NO: 1297329 - RNA, 18 nt, Human
gguccaaugagcuuucug

SEQ ID NO: 1297330 - RNA, 21 nt, Human
gguccaaugcucaggugcugg

SEQ ID NO: 1297331 - RNA, 18 nt, Human
gguauaaguggugugugu

SEQ ID NO: 1297332 - RNA, 20 nt, Human
gguaguuuuuucaucuucag

SEQ ID NO: 1297333 - RNA, 20 nt, Human
gguauggcguaaguacagag

SEQ ID NO: 1297334 - RNA, 23 nt, Human
gguauggcguaaguacagagaag

SEQ ID NO: 1297335 - RNA, 21 nt, Human
gguauaaaacuuuccucgccu

SEQ ID NO: 1297336 - RNA, 22 nt, Human
gguauaaaacuuuccucgccug

SEQ ID NO: 1297337 - RNA, 13 nt, Human
aaacuguacagug

SEQ ID NO: 1297338 - RNA, 16 nt, Human
aaacuguacagugucu

SEQ ID NO: 1297339 - RNA, 18 nt, Human
aaacuguacagugucuuu

SEQ ID NO: 1297340 - RNA, 21 nt, Human
gguaguaccuuuuauauccca

SEQ ID NO: 1297341 - RNA, 15 nt, Human
gguagucucacugcu

SEQ ID NO: 1297342 - RNA, 20 nt, Human
gguagucucacugcuugaac

SEQ ID NO: 1297343 - RNA, 17 nt, Human
ggugcacuggccccacc

SEQ ID NO: 1297344 - RNA, 14 nt, Human
ggugcacaggaggg

SEQ ID NO: 1297345 - RNA, 12 nt, Human
ggugcacaggag

SEQ ID NO: 1297346 - RNA, 13 nt, Human
ggugcacaggagg

SEQ ID NO: 1297347 - RNA, 15 nt, Human
ggugcacaggagggg

SEQ ID NO: 1297348 - RNA, 18 nt, Human
ggugcaaaguucccuacu

SEQ ID NO: 1297349 - RNA, 18 nt, Human
ggugauuccgcagugaga

SEQ ID NO: 1297350 - RNA, 22 nt, Human
ggugcacagcacaaauuaguua

SEQ ID NO: 1297351 - RNA, 13 nt, Human
ggugcacugggag

SEQ ID NO: 1297352 - RNA, 14 nt, Human
ggugcacugggagg

SEQ ID NO: 1297353 - RNA, 22 nt, Human
ggugaugagggcagcagccagc

SEQ ID NO: 1297354 - RNA, 19 nt, Human
ggugaugagggcagcagcc

SEQ ID NO: 1297355 - RNA, 22 nt, Human
ggugauuguaugaaguuugaau

SEQ ID NO: 1297356 - RNA, 18 nt, Human
ggugauuuaagggcccag

SEQ ID NO: 1297357 - RNA, 16 nt, Human
ggucuguuggcaggcu

SEQ ID NO: 1297358 - RNA, 18 nt, Human
ggucuguuggcaggcugg

SEQ ID NO: 1297359 - RNA, 23 nt, Human
ggucuuggaacuugccugccuuu

SEQ ID NO: 1297360 - RNA, 17 nt, Human
ggucuuggaacuugccu

SEQ ID NO: 1297361 - RNA, 21 nt, Human
ggugauccacucgccuucauc

SEQ ID NO: 1297362 - RNA, 21 nt, Human
ggugauccauguaacugccua

SEQ ID NO: 1297363 - RNA, 20 nt, Human
ggugauccauguaacugccu

SEQ ID NO: 1297364 - RNA, 17 nt, Human
ggugaucugggauuagg

SEQ ID NO: 1297365 - RNA, 13 nt, Human
ggugaugagggca

SEQ ID NO: 1297366 - RNA, 15 nt, Human
ggugaugagggcagc

SEQ ID NO: 1297367 - RNA, 16 nt, Human
ggugaugagggcagca

SEQ ID NO: 1297368 - RNA, 17 nt, Human
ggugaugagggcagcag

SEQ ID NO: 1297369 - RNA, 16 nt, Human
ggucuuuuauaauucu

SEQ ID NO: 1297370 - RNA, 17 nt, Human
ggucuguucuguuucaa

SEQ ID NO: 1297371 - RNA, 24 nt, Human
ggucugugagaugcuagaacuccc

SEQ ID NO: 1297372 - RNA, 14 nt, Human
ggucugugagaugc

SEQ ID NO: 1297373 - RNA, 13 nt, Human
aaagauuuuuuaa

SEQ ID NO: 1297374 - RNA, 14 nt, Human
aaagauuuuuuaau

SEQ ID NO: 1297375 - RNA, 19 nt, Human
aaagauuuuuuaauaauuu

SEQ ID NO: 1297376 - RNA, 20 nt, Human
aaagauuuuuuaauaauuua

SEQ ID NO: 1297377 - RNA, 22 nt, Human
aaagauuuuuuaauaauuuaga

SEQ ID NO: 1297378 - RNA, 21 nt, Human
aaagauuuuuuaauaauuuag

SEQ ID NO: 1297379 - RNA, 23 nt, Human
aaagauuuuuuuuuuuucucuca

SEQ ID NO: 1297380 - RNA, 14 nt, Human
aaagcaaaaaagaa

SEQ ID NO: 1297381 - RNA, 15 nt, Human
aaagcaaaaaagaaa

SEQ ID NO: 1297382 - RNA, 21 nt, Human
aaagcaaaaaagaaaaccuuu

SEQ ID NO: 1297383 - RNA, 16 nt, Human
aaagcaaaaaagaaaa

SEQ ID NO: 1297384 - RNA, 15 nt, Human
ggucuggcagccucc

SEQ ID NO: 1297385 - RNA, 22 nt, Human
ggucuggcagccucccauccag

SEQ ID NO: 1297386 - RNA, 12 nt, Human
ggucuggcuggu

SEQ ID NO: 1297387 - RNA, 13 nt, Human
ggucuggcuggug

SEQ ID NO: 1297388 - RNA, 14 nt, Human
ggucuggcuggugu

SEQ ID NO: 1297389 - RNA, 15 nt, Human
ggucuggcugguguu

SEQ ID NO: 1297390 - RNA, 20 nt, Human
ggucuggcugguguuaacag

SEQ ID NO: 1297391 - RNA, 23 nt, Human
ggucuggcugguguuaacagaag

SEQ ID NO: 1297392 - RNA, 19 nt, Human
ggucugggagucacacagu

SEQ ID NO: 1297393 - RNA, 20 nt, Human
ggucugggagucacacagug

SEQ ID NO: 1297394 - RNA, 21 nt, Human
ggucugggggcacaagacuga

SEQ ID NO: 1297395 - RNA, 20 nt, Human
ggucugggggcacaagacug

SEQ ID NO: 1297396 - RNA, 15 nt, Human
ggucugguugggcag

SEQ ID NO: 1297397 - RNA, 14 nt, Human
ggucuguagggauu

SEQ ID NO: 1297398 - RNA, 15 nt, Human
ggucuguagguugca

SEQ ID NO: 1297399 - RNA, 18 nt, Human
ggucuguagguugcacac

SEQ ID NO: 1297400 - RNA, 19 nt, Human
ggucuguagguugcacacu

SEQ ID NO: 1297401 - RNA, 20 nt, Human
ggucuguagguugcacacuu

SEQ ID NO: 1297402 - RNA, 16 nt, Human
aaagcuacuuauugua

SEQ ID NO: 1297403 - RNA, 17 nt, Human
aaagcuacuuauuguag

SEQ ID NO: 1297404 - RNA, 23 nt, Human
aaagcgugagcuuaaaauacaag

SEQ ID NO: 1297405 - RNA, 14 nt, Human
aaagcguuugcaca

SEQ ID NO: 1297406 - RNA, 14 nt, Human
aaagcuaaaauaaa

SEQ ID NO: 1297407 - RNA, 16 nt, Human
aaagcuaaaauaaaga

SEQ ID NO: 1297408 - RNA, 21 nt, Human
aaagcuaaaauaaagaaauag

SEQ ID NO: 1297409 - RNA, 21 nt, Human
aaagcgugagcuuaaaauaca

SEQ ID NO: 1297410 - RNA, 22 nt, Human
aaagcgugagcuuaaaauacaa

SEQ ID NO: 1297411 - RNA, 23 nt, Human
ggugcccagaauaaguuauugca

SEQ ID NO: 1297412 - RNA, 13 nt, Human
ggugcccacaggc

SEQ ID NO: 1297413 - RNA, 14 nt, Human
ggugcccacaggcc

SEQ ID NO: 1297414 - RNA, 23 nt, Human
ggugcccacagugucaggcacug

SEQ ID NO: 1297415 - RNA, 14 nt, Human
ggugcccaagccag

SEQ ID NO: 1297416 - RNA, 17 nt, Human
ggugcccaagccagagg

SEQ ID NO: 1297417 - RNA, 18 nt, Human
ggugcccaagccagaggc

SEQ ID NO: 1297418 - RNA, 21 nt, Human
ggugcccaagccagaggcugg

SEQ ID NO: 1297419 - RNA, 22 nt, Human
ggugcccaagccagaggcuggg

SEQ ID NO: 1297420 - RNA, 23 nt, Human
ggugcccaagccagaggcugggu

SEQ ID NO: 1297421 - RNA, 17 nt, Human
aaagcuauauaagacaa

SEQ ID NO: 1297422 - RNA, 20 nt, Human
aaagcuauaaagcaguauuu

SEQ ID NO: 1297423 - RNA, 16 nt, Human
aaagcuucacaguacc

SEQ ID NO: 1297424 - RNA, 17 nt, Human
aaagcuucagugcugcc

SEQ ID NO: 1297425 - RNA, 20 nt, Human
aaagcuucagugcugccgau

SEQ ID NO: 1297426 - RNA, 17 nt, Human
aaagcuuccaugauucu

SEQ ID NO: 1297427 - RNA, 18 nt, Human
aaagcuuccaugauucua

SEQ ID NO: 1297428 - RNA, 20 nt, Human
aaagcuuccaugauucuauu

SEQ ID NO: 1297429 - RNA, 19 nt, Human
aaagcuuuuuauuccuccu

SEQ ID NO: 1297430 - RNA, 15 nt, Human
aaaggaaaaacaaac

SEQ ID NO: 1297431 - RNA, 19 nt, Human
aaagcuugcaacaaaauuc

SEQ ID NO: 1297432 - RNA, 15 nt, Human
aaaggacaucagcaa

SEQ ID NO: 1297433 - RNA, 15 nt, Human
aaaggacgcacugag

SEQ ID NO: 1297434 - RNA, 16 nt, Human
aaaggacaucagcaaa

SEQ ID NO: 1297435 - RNA, 14 nt, Human
aaaggacaucagca

SEQ ID NO: 1297436 - RNA, 12 nt, Human
aaaggaaaagac

SEQ ID NO: 1297437 - RNA, 13 nt, Human
aaaggaauuuaaa

SEQ ID NO: 1297438 - RNA, 16 nt, Human
aaaggaaagaaaacau

SEQ ID NO: 1297439 - RNA, 17 nt, Human
aaaggaaucauuucuau

SEQ ID NO: 1297440 - RNA, 15 nt, Human
aaaggaaagaaaaca

SEQ ID NO: 1297441 - RNA, 16 nt, Human
aaagcuuuugucuaca

SEQ ID NO: 1297442 - RNA, 13 nt, Human
aaaggaaaagaca

SEQ ID NO: 1297443 - RNA, 13 nt, Human
gcuuguagccagc

SEQ ID NO: 1297444 - RNA, 14 nt, Human
gcuuguagccagcc

SEQ ID NO: 1297445 - RNA, 17 nt, Human
ggaccccagccauccag

SEQ ID NO: 1297446 - RNA, 23 nt, Human
ggaccccugcauuggaacuggag

SEQ ID NO: 1297447 - RNA, 11 nt, Human
ggaccccugca

SEQ ID NO: 1297448 - RNA, 12 nt, Human
ggaccccugcau

SEQ ID NO: 1297449 - RNA, 18 nt, Human
ggaccccccuuucacagg

SEQ ID NO: 1297450 - RNA, 21 nt, Human
ggaccccccuuucacaggcag

SEQ ID NO: 1297451 - RNA, 22 nt, Human
ggaccccccuuucacaggcagc

SEQ ID NO: 1297452 - RNA, 20 nt, Human
ggacccggaggggccuggca

SEQ ID NO: 1297453 - RNA, 21 nt, Human
ggacccggaggggccuggcag

SEQ ID NO: 1297454 - RNA, 17 nt, Human
ggacccguucauggggg

SEQ ID NO: 1297455 - RNA, 19 nt, Human
ggacccguucaugggggag

SEQ ID NO: 1297456 - RNA, 18 nt, Human
ggaccgcccccugucucu

SEQ ID NO: 1297457 - RNA, 19 nt, Human
ggaccgcuacaccacucug

SEQ ID NO: 1297458 - RNA, 20 nt, Human
ggaccgcuacaccacucugg

SEQ ID NO: 1297459 - RNA, 21 nt, Human
ggaccgcuacaccacucuggc

SEQ ID NO: 1297460 - RNA, 22 nt, Human
ggaccgcuacaccacucuggca

SEQ ID NO: 1297461 - RNA, 17 nt, Human
ggaccggagaguggggg

SEQ ID NO: 1297462 - RNA, 19 nt, Human
ggaccggagagugggggug

SEQ ID NO: 1297463 - RNA, 17 nt, Human
ggaccuaaauggccuca

SEQ ID NO: 1297464 - RNA, 22 nt, Human
ggaccuaaauggccucaugugg

SEQ ID NO: 1297465 - RNA, 23 nt, Human
ggacuuccuguccagcuccaacc

SEQ ID NO: 1297466 - RNA, 14 nt, Human
ggacuucuggggua

SEQ ID NO: 1297467 - RNA, 22 nt, Human
ggacuucugggguaaguggucu

SEQ ID NO: 1297468 - RNA, 13 nt, Human
ggacuuggccucu

SEQ ID NO: 1297469 - RNA, 17 nt, Human
ggacuuggccucucucu

SEQ ID NO: 1297470 - RNA, 15 nt, Human
ggacuuggccucucu

SEQ ID NO: 1297471 - RNA, 18 nt, Human
ggacuuuuauuuccagug

SEQ ID NO: 1297472 - RNA, 16 nt, Human
ggacuugugucucugu

SEQ ID NO: 1297473 - RNA, 12 nt, Human
ggacuuuguaca

SEQ ID NO: 1297474 - RNA, 13 nt, Human
ggacuuuucugca

SEQ ID NO: 1297475 - RNA, 12 nt, Human
ggacuugugucu

SEQ ID NO: 1297476 - RNA, 20 nt, Human
ggagaaccaaaucuggaagc

SEQ ID NO: 1297477 - RNA, 13 nt, Human
ggagaacuagaga

SEQ ID NO: 1297478 - RNA, 13 nt, Human
ggagacugggcug

SEQ ID NO: 1297479 - RNA, 17 nt, Human
ggagacugggcugaggg

SEQ ID NO: 1297480 - RNA, 20 nt, Human
ggagacugggcugagggagc

SEQ ID NO: 1297481 - RNA, 16 nt, Human
ggagacugucucaaga

SEQ ID NO: 1297482 - RNA, 23 nt, Human
ggagacugggcugagggagccug

SEQ ID NO: 1297483 - RNA, 19 nt, Human
ggagacugucuggcccccc

SEQ ID NO: 1297484 - RNA, 20 nt, Human
ggagacugucuggccccccu

SEQ ID NO: 1297485 - RNA, 18 nt, Human
ggagacugugugugcccu

SEQ ID NO: 1297486 - RNA, 19 nt, Human
ggagacugugugugcccuc

SEQ ID NO: 1297487 - RNA, 20 nt, Human
ggagacugugugugcccucu

SEQ ID NO: 1297488 - RNA, 21 nt, Human
ggagacugugugugcccucug

SEQ ID NO: 1297489 - RNA, 23 nt, Human
ggacugugugcucaggagcccug

SEQ ID NO: 1297490 - RNA, 15 nt, Human
ggacucagccuucag

SEQ ID NO: 1297491 - RNA, 13 nt, Human
ggacuguuucaaa

SEQ ID NO: 1297492 - RNA, 22 nt, Human
ggacugugugcucaggagcccu

SEQ ID NO: 1297493 - RNA, 17 nt, Human
ggacuuagcugggagaa

SEQ ID NO: 1297494 - RNA, 23 nt, Human
ggacuuagaaaaccagcucagca

SEQ ID NO: 1297495 - RNA, 23 nt, Human
ggacuuaagcaucuggcucuaau

SEQ ID NO: 1297496 - RNA, 19 nt, Human
ggacuuagaaaaccagcuc

SEQ ID NO: 1297497 - RNA, 22 nt, Human
ggacuuagaaaaccagcucagc

SEQ ID NO: 1297498 - RNA, 11 nt, Human
ggacuuccugu

SEQ ID NO: 1297499 - RNA, 18 nt, Human
ggacuuccuguccagcuc

SEQ ID NO: 1297500 - RNA, 19 nt, Human
ggacuuccuguccagcucc

SEQ ID NO: 1297501 - RNA, 20 nt, Human
ggacuuccuguccagcucca

SEQ ID NO: 1297502 - RNA, 21 nt, Human
ggacuuccuguccagcuccaa

SEQ ID NO: 1297503 - RNA, 16 nt, Human
ggacuaggguccuggg

SEQ ID NO: 1297504 - RNA, 20 nt, Human
ggacuauauuugggccugcu

SEQ ID NO: 1297505 - RNA, 18 nt, Human
ggaccggagagugggggu

SEQ ID NO: 1297506 - RNA, 17 nt, Human
ggaccuagggaggcaug

SEQ ID NO: 1297507 - RNA, 22 nt, Human
ggaccuagggaggcauggucug

SEQ ID NO: 1297508 - RNA, 23 nt, Human
ggaccuagggaggcauggucugc

SEQ ID NO: 1297509 - RNA, 13 nt, Human
ggaccucaccaag

SEQ ID NO: 1297510 - RNA, 21 nt, Human
ggagagccagcuaaggggugg

SEQ ID NO: 1297511 - RNA, 12 nt, Human
ggagagcccagg

SEQ ID NO: 1297512 - RNA, 13 nt, Human
ggagagcccagga

SEQ ID NO: 1297513 - RNA, 15 nt, Human
ggagagcccaggagc

SEQ ID NO: 1297514 - RNA, 20 nt, Human
ggagagcccaggagcucccc

SEQ ID NO: 1297515 - RNA, 21 nt, Human
ggagagcccaggagcuccccu

SEQ ID NO: 1297516 - RNA, 22 nt, Human
ggagagcccaggagcuccccuc

SEQ ID NO: 1297517 - RNA, 11 nt, Human
ggagagcccug

SEQ ID NO: 1297518 - RNA, 12 nt, Human
ggagagcccugg

SEQ ID NO: 1297519 - RNA, 14 nt, Human
ggagagcccuggga

SEQ ID NO: 1297520 - RNA, 13 nt, Human
ggagagcccuggg

SEQ ID NO: 1297521 - RNA, 15 nt, Human
ggagagacgggcccu

SEQ ID NO: 1297522 - RNA, 17 nt, Human
ggagagacgggcccugg

SEQ ID NO: 1297523 - RNA, 22 nt, Human
ggagacuuagggcaccaggggu

SEQ ID NO: 1297524 - RNA, 12 nt, Human
ggagagacuugu

SEQ ID NO: 1297525 - RNA, 14 nt, Human
ggagagagacucca

SEQ ID NO: 1297526 - RNA, 17 nt, Human
ggagagaguugaaccua

SEQ ID NO: 1297527 - RNA, 20 nt, Human
ggagagaguugaaccuaaac

SEQ ID NO: 1297528 - RNA, 22 nt, Human
ggagagccaccaagagggacgc

SEQ ID NO: 1297529 - RNA, 19 nt, Human
ggagcagagcugauggaga

SEQ ID NO: 1297530 - RNA, 15 nt, Human
ggagcagaccacccc

SEQ ID NO: 1297531 - RNA, 23 nt, Human
ggagcagaaaacccuugggccag

SEQ ID NO: 1297532 - RNA, 14 nt, Human
ggagcagaagcagc

SEQ ID NO: 1297533 - RNA, 15 nt, Human
ggagcccacuguacu

SEQ ID NO: 1297534 - RNA, 22 nt, Human
ggagccaugcgcccccuccgcc

SEQ ID NO: 1297535 - RNA, 23 nt, Human
ggagccaugcgcccccuccgccc

SEQ ID NO: 1297536 - RNA, 16 nt, Human
ggagcaggcagccagc

SEQ ID NO: 1297537 - RNA, 13 nt, Human
ggagcaggcagcc

SEQ ID NO: 1297538 - RNA, 23 nt, Human
ggagcagagcugauggagaagga

SEQ ID NO: 1297539 - RNA, 12 nt, Human
ggagcagagggg

SEQ ID NO: 1297540 - RNA, 19 nt, Human
ggagcagaggggcagaggc

SEQ ID NO: 1297541 - RNA, 21 nt, Human
ggagcagaggggcagaggccc

SEQ ID NO: 1297542 - RNA, 12 nt, Human
ggagcagcagga

SEQ ID NO: 1297543 - RNA, 19 nt, Human
ggagcagcaggagggggga

SEQ ID NO: 1297544 - RNA, 21 nt, Human
ggagcagcaggaggggggagg

SEQ ID NO: 1297545 - RNA, 21 nt, Human
ggaggcucuggagcccacugu

SEQ ID NO: 1297546 - RNA, 19 nt, Human
ggaggcccaguucacccug

SEQ ID NO: 1297547 - RNA, 22 nt, Human
ggaggcccaggcugggaacuca

SEQ ID NO: 1297548 - RNA, 22 nt, Human
ggaggccccaacccuguccucc

SEQ ID NO: 1297549 - RNA, 19 nt, Human
ggaggcugagaugggagaa

SEQ ID NO: 1297550 - RNA, 15 nt, Human
ggaggcugagauggg

SEQ ID NO: 1297551 - RNA, 18 nt, Human
ggaggucgguagguucag

SEQ ID NO: 1297552 - RNA, 13 nt, Human
ggaggugucucag

SEQ ID NO: 1297553 - RNA, 16 nt, Human
ggaggugucucaggcu

SEQ ID NO: 1297554 - RNA, 17 nt, Human
ggaggugucucaggcug

SEQ ID NO: 1297555 - RNA, 12 nt, Human
ggagguucuaag

SEQ ID NO: 1297556 - RNA, 23 nt, Human
ggagguucuaaggccuaggauuc

SEQ ID NO: 1297557 - RNA, 18 nt, Human
ggaggugucucaggcugc

SEQ ID NO: 1297558 - RNA, 20 nt, Human
ggaggugucucaggcugccu

SEQ ID NO: 1297559 - RNA, 22 nt, Human
ggaggugucucaggcugccuga

SEQ ID NO: 1297560 - RNA, 18 nt, Human
ggagguguggagccgagg

SEQ ID NO: 1297561 - RNA, 22 nt, Human
ggagcccacuguacuugcucuu

SEQ ID NO: 1297562 - RNA, 14 nt, Human
ggagccauuugaga

SEQ ID NO: 1297563 - RNA, 17 nt, Human
ggagcccacgacacugc

SEQ ID NO: 1297564 - RNA, 21 nt, Human
ggagcccacgacacugcagcc

SEQ ID NO: 1297565 - RNA, 18 nt, Human
ggagcccacuguacuugc

SEQ ID NO: 1297566 - RNA, 12 nt, Human
ggagcccacugu

SEQ ID NO: 1297567 - RNA, 20 nt, Human
ggagcccacgcucacccccu

SEQ ID NO: 1297568 - RNA, 17 nt, Human
ggagccccagcuacccu

SEQ ID NO: 1297569 - RNA, 18 nt, Human
ggagccccagcuacccuu

SEQ ID NO: 1297570 - RNA, 16 nt, Human
ggagccccauuccugg

SEQ ID NO: 1297571 - RNA, 17 nt, Human
ggagccccauuccuggg

SEQ ID NO: 1297572 - RNA, 14 nt, Human
ggagcccccacccu

SEQ ID NO: 1297573 - RNA, 20 nt, Human
ggagcuccacucugcuucuc

SEQ ID NO: 1297574 - RNA, 15 nt, Human
ggagcccccacccug

SEQ ID NO: 1297575 - RNA, 13 nt, Human
ggagcuccagccu

SEQ ID NO: 1297576 - RNA, 15 nt, Human
ggagcuccagccuga

SEQ ID NO: 1297577 - RNA, 16 nt, Human
ggagcuccagccugac

SEQ ID NO: 1297578 - RNA, 18 nt, Human
ggagcuccagccugacau

SEQ ID NO: 1297579 - RNA, 17 nt, Human
ggagcuccaguguccug

SEQ ID NO: 1297580 - RNA, 19 nt, Human
ggagcuccaguguccugag

SEQ ID NO: 1297581 - RNA, 20 nt, Human
ggagcuccaguguccugagc

SEQ ID NO: 1297582 - RNA, 13 nt, Human
ggagcuccccucc

SEQ ID NO: 1297583 - RNA, 16 nt, Human
ggagcuccccucccca

SEQ ID NO: 1297584 - RNA, 17 nt, Human
ggagcuccccuccccaa

SEQ ID NO: 1297585 - RNA, 15 nt, Human
ggagcuugggaaugg

SEQ ID NO: 1297586 - RNA, 16 nt, Human
ggagcuuugacucagg

SEQ ID NO: 1297587 - RNA, 19 nt, Human
ggagcuuugacucaggagc

SEQ ID NO: 1297588 - RNA, 20 nt, Human
ggaggcucuggagcccacug

SEQ ID NO: 1297589 - RNA, 17 nt, Human
ggaggcucuggagccca

SEQ ID NO: 1297590 - RNA, 17 nt, Human
ggaggccauugugugag

SEQ ID NO: 1297591 - RNA, 14 nt, Human
ggaggcccaggcug

SEQ ID NO: 1297592 - RNA, 16 nt, Human
ggaggcccaggcuggg

SEQ ID NO: 1297593 - RNA, 20 nt, Human
ggaggcccaggcugggaacu

SEQ ID NO: 1297594 - RNA, 13 nt, Human
ggaggcccaguuc

SEQ ID NO: 1297595 - RNA, 19 nt, Human
ggaggaaccagagugcuga

SEQ ID NO: 1297596 - RNA, 20 nt, Human
ggaggaaaaccaagccgugg

SEQ ID NO: 1297597 - RNA, 22 nt, Human
ggagcuuugacucaggagccug

SEQ ID NO: 1297598 - RNA, 20 nt, Human
ggagcuuugacucaggagcc

SEQ ID NO: 1297599 - RNA, 21 nt, Human
ggaggaaaaccaagccguggc

SEQ ID NO: 1297600 - RNA, 22 nt, Human
ggaggaaaaccaagccguggcu

SEQ ID NO: 1297601 - RNA, 19 nt, Human
ggaggcaggggcuuccugg

SEQ ID NO: 1297602 - RNA, 21 nt, Human
ggaggcaggggcuuccuggug

SEQ ID NO: 1297603 - RNA, 16 nt, Human
ggaggcaucagugucc

SEQ ID NO: 1297604 - RNA, 11 nt, Human
ggaggaagccc

SEQ ID NO: 1297605 - RNA, 19 nt, Human
ggccagguggccacuccag

SEQ ID NO: 1297606 - RNA, 14 nt, Human
ggccaguccaggcu

SEQ ID NO: 1297607 - RNA, 15 nt, Human
ggccaguccaggcug

SEQ ID NO: 1297608 - RNA, 16 nt, Human
ggccaguccaggcugc

SEQ ID NO: 1297609 - RNA, 21 nt, Human
ggccagccgcgcaucagacug

SEQ ID NO: 1297610 - RNA, 21 nt, Human
ggccaguccaggcugccgugg

SEQ ID NO: 1297611 - RNA, 21 nt, Human
ggccaaggaugccccgucccc

SEQ ID NO: 1297612 - RNA, 14 nt, Human
ggccaacaaagaac

SEQ ID NO: 1297613 - RNA, 15 nt, Human
ggccaagguguccua

SEQ ID NO: 1297614 - RNA, 19 nt, Human
ggccaagguguccuacaga

SEQ ID NO: 1297615 - RNA, 12 nt, Human
ggccagauccag

SEQ ID NO: 1297616 - RNA, 13 nt, Human
ggccagauccagc

SEQ ID NO: 1297617 - RNA, 16 nt, Human
ggccagauccagccug

SEQ ID NO: 1297618 - RNA, 15 nt, Human
ggccagccccuuaga

SEQ ID NO: 1297619 - RNA, 19 nt, Human
ggccagccccuuagacaga

SEQ ID NO: 1297620 - RNA, 20 nt, Human
ggccagccccuuagacagag

SEQ ID NO: 1297621 - RNA, 23 nt, Human
ggccagccccuuagacagaggcc

SEQ ID NO: 1297622 - RNA, 21 nt, Human
ggccagccccuuagacagagg

SEQ ID NO: 1297623 - RNA, 22 nt, Human
ggccagccgcgcaucagacugu

SEQ ID NO: 1297624 - RNA, 11 nt, Human
ggcauuuccua

SEQ ID NO: 1297625 - RNA, 11 nt, Human
ggccaaagaac

SEQ ID NO: 1297626 - RNA, 22 nt, Human
ggccaaagaaccaaagaagaaa

SEQ ID NO: 1297627 - RNA, 17 nt, Human
ggccaaagaaccaaaga

SEQ ID NO: 1297628 - RNA, 16 nt, Human
ggccaaagagucucca

SEQ ID NO: 1297629 - RNA, 19 nt, Human
ggccaaaggggaccuggaa

SEQ ID NO: 1297630 - RNA, 20 nt, Human
ggccaaaggggaccuggaag

SEQ ID NO: 1297631 - RNA, 21 nt, Human
ggccaaaggggaccuggaagg

SEQ ID NO: 1297632 - RNA, 18 nt, Human
ggcauucuggaccucugg

SEQ ID NO: 1297633 - RNA, 20 nt, Human
ggcauucuggaccucugggu

SEQ ID NO: 1297634 - RNA, 19 nt, Human
ggcauucuggaccucuggg

SEQ ID NO: 1297635 - RNA, 19 nt, Human
ggccuccaugggccccagg

SEQ ID NO: 1297636 - RNA, 16 nt, Human
ggccucccaaagugcu

SEQ ID NO: 1297637 - RNA, 19 nt, Human
ggcccuuccucuccacugc

SEQ ID NO: 1297638 - RNA, 22 nt, Human
ggcccuuccucuccacugccuu

SEQ ID NO: 1297639 - RNA, 23 nt, Human
ggcccucccuguuccccagagaa

SEQ ID NO: 1297640 - RNA, 23 nt, Human
ggcccuuccucuccacugccuuc

SEQ ID NO: 1297641 - RNA, 12 nt, Human
ggcccuuccugg

SEQ ID NO: 1297642 - RNA, 13 nt, Human
ggcccuuccugga

SEQ ID NO: 1297643 - RNA, 14 nt, Human
ggcccuuccuggac

SEQ ID NO: 1297644 - RNA, 15 nt, Human
ggcccuuccuggaca

SEQ ID NO: 1297645 - RNA, 16 nt, Human
ggcccuuccuggacag

SEQ ID NO: 1297646 - RNA, 17 nt, Human
ggcccuuccuggacagc

SEQ ID NO: 1297647 - RNA, 19 nt, Human
ggcccuuccuggacagcug

SEQ ID NO: 1297648 - RNA, 20 nt, Human
ggcccuuccuggacagcugu

SEQ ID NO: 1297649 - RNA, 21 nt, Human
ggcccuuccuggacagcugug

SEQ ID NO: 1297650 - RNA, 22 nt, Human
ggcccuuccuggacagcugugc

SEQ ID NO: 1297651 - RNA, 23 nt, Human
ggcccuuccuggacagcugugcc

SEQ ID NO: 1297652 - RNA, 18 nt, Human
ggccuccaugggccccag

SEQ ID NO: 1297653 - RNA, 11 nt, Human
ggccuccccca

SEQ ID NO: 1297654 - RNA, 12 nt, Human
ggccucccccac

SEQ ID NO: 1297655 - RNA, 13 nt, Human
ggccucccccacu

SEQ ID NO: 1297656 - RNA, 14 nt, Human
ggccucccccacuu

SEQ ID NO: 1297657 - RNA, 15 nt, Human
ggccuccccugccac

SEQ ID NO: 1297658 - RNA, 17 nt, Human
ggccuccccugccacca

SEQ ID NO: 1297659 - RNA, 19 nt, Human
ggccuccccugccaccagg

SEQ ID NO: 1297660 - RNA, 22 nt, Human
ggccuccccugccaccaggcca

SEQ ID NO: 1297661 - RNA, 15 nt, Human
ggccucccccacuuu

SEQ ID NO: 1297662 - RNA, 21 nt, Human
ggccuccguccaggagccugg

SEQ ID NO: 1297663 - RNA, 16 nt, Human
ggcccagccgaccccc

SEQ ID NO: 1297664 - RNA, 18 nt, Human
ggcccagccgacccccuc

SEQ ID NO: 1297665 - RNA, 19 nt, Human
ggcccagccgacccccucu

SEQ ID NO: 1297666 - RNA, 11 nt, Human
ggcccagccuu

SEQ ID NO: 1297667 - RNA, 12 nt, Human
ggcccagccuuu

SEQ ID NO: 1297668 - RNA, 23 nt, Human
ggcccagccuuuguuccccacug

SEQ ID NO: 1297669 - RNA, 19 nt, Human
ggcccagccuuuguucccc

SEQ ID NO: 1297670 - RNA, 11 nt, Human
ggcccaggcug

SEQ ID NO: 1297671 - RNA, 13 nt, Human
ggcccaggcugcc

SEQ ID NO: 1297672 - RNA, 14 nt, Human
ggcccaggcuggga

SEQ ID NO: 1297673 - RNA, 15 nt, Human
ggcccaggcugccgu

SEQ ID NO: 1297674 - RNA, 14 nt, Human
ggcccagggcccag

SEQ ID NO: 1297675 - RNA, 16 nt, Human
ggcccgacagccuggc

SEQ ID NO: 1297676 - RNA, 17 nt, Human
ggcccgacagccuggca

SEQ ID NO: 1297677 - RNA, 14 nt, Human
ggccccaugaccuc

SEQ ID NO: 1297678 - RNA, 16 nt, Human
ggccccaugaccucca

SEQ ID NO: 1297679 - RNA, 18 nt, Human
ggccccaugaccuccagc

SEQ ID NO: 1297680 - RNA, 13 nt, Human
ggcccgagcagcu

SEQ ID NO: 1297681 - RNA, 14 nt, Human
ggcccgagcagcug

SEQ ID NO: 1297682 - RNA, 15 nt, Human
ggcccgagcagcuga

SEQ ID NO: 1297683 - RNA, 16 nt, Human
ggcccgagcagcugag

SEQ ID NO: 1297684 - RNA, 18 nt, Human
ggcccgagcagcugagca

SEQ ID NO: 1297685 - RNA, 20 nt, Human
ggcccgagcagcugagcagg

SEQ ID NO: 1297686 - RNA, 23 nt, Human
ggcccgagcagcugagcagggcc

SEQ ID NO: 1297687 - RNA, 22 nt, Human
ggcccgagcagcugagcagggc

SEQ ID NO: 1297688 - RNA, 23 nt, Human
ggcccgcgauguggaacugcugc

SEQ ID NO: 1297689 - RNA, 21 nt, Human
ggcccucaguagucccugcac

SEQ ID NO: 1297690 - RNA, 14 nt, Human
ggcccuccacaccu

SEQ ID NO: 1297691 - RNA, 15 nt, Human
ggcccuccacaccug

SEQ ID NO: 1297692 - RNA, 16 nt, Human
ggcccuccacaccugc

SEQ ID NO: 1297693 - RNA, 17 nt, Human
ggcccuccacaccugcg

SEQ ID NO: 1297694 - RNA, 21 nt, Human
ggcccuccacaccugcggccc

SEQ ID NO: 1297695 - RNA, 19 nt, Human
ggcccuccacaccugcggc

SEQ ID NO: 1297696 - RNA, 19 nt, Human
ggcccucccuguuccccag

SEQ ID NO: 1297697 - RNA, 20 nt, Human
ggcccucccuguuccccaga

SEQ ID NO: 1297698 - RNA, 21 nt, Human
ggcccucccuguuccccagag

SEQ ID NO: 1297699 - RNA, 22 nt, Human
ggcccucccuguuccccagaga

SEQ ID NO: 1297700 - RNA, 15 nt, Human
ggcccagggcccaga

SEQ ID NO: 1297701 - RNA, 21 nt, Human
ggcccaucaggguaggcugga

SEQ ID NO: 1297702 - RNA, 19 nt, Human
ggccccaacccuguccucc

SEQ ID NO: 1297703 - RNA, 18 nt, Human
ggccccaacccuguccuc

SEQ ID NO: 1297704 - RNA, 18 nt, Human
ggccccaggaaaggccca

SEQ ID NO: 1297705 - RNA, 16 nt, Human
ggccccaggaccuggc

SEQ ID NO: 1297706 - RNA, 21 nt, Human
ggccccaggaccuggcugcca

SEQ ID NO: 1297707 - RNA, 22 nt, Human
ggccccaggcauugccaagggc

SEQ ID NO: 1297708 - RNA, 18 nt, Human
ggcaacagaucaguaaag

SEQ ID NO: 1297709 - RNA, 14 nt, Human
ggcaacagaucugg

SEQ ID NO: 1297710 - RNA, 15 nt, Human
ggcaacagaucugga

SEQ ID NO: 1297711 - RNA, 19 nt, Human
ggcaacagaucuggaaccu

SEQ ID NO: 1297712 - RNA, 14 nt, Human
ggcaacaucuuuau

SEQ ID NO: 1297713 - RNA, 20 nt, Human
ggcaacagaucaguaaagaa

SEQ ID NO: 1297714 - RNA, 22 nt, Human
ggaugguucccuugaugaagaa

SEQ ID NO: 1297715 - RNA, 23 nt, Human
ggaugguucccuugaugaagaag

SEQ ID NO: 1297716 - RNA, 16 nt, Human
ggauguguccugacac

SEQ ID NO: 1297717 - RNA, 20 nt, Human
ggauguucagcacugucccu

SEQ ID NO: 1297718 - RNA, 23 nt, Human
ggauguucagcacugucccuugc

SEQ ID NO: 1297719 - RNA, 15 nt, Human
ggaugugacaguggc

SEQ ID NO: 1297720 - RNA, 18 nt, Human
ggaugugauuguggaaug

SEQ ID NO: 1297721 - RNA, 16 nt, Human
ggaugugacaguggcg

SEQ ID NO: 1297722 - RNA, 19 nt, Human
ggauguggguuccacagac

SEQ ID NO: 1297723 - RNA, 14 nt, Human
ggauguguccugac

SEQ ID NO: 1297724 - RNA, 15 nt, Human
ggauguguccugaca

SEQ ID NO: 1297725 - RNA, 21 nt, Human
ggaugagaauuugagugcucu

SEQ ID NO: 1297726 - RNA, 23 nt, Human
ggaugagaauuugagugcucuga

SEQ ID NO: 1297727 - RNA, 20 nt, Human
ggauuaacccacuagcucuu

SEQ ID NO: 1297728 - RNA, 15 nt, Human
ggauuaaccucugca

SEQ ID NO: 1297729 - RNA, 16 nt, Human
ggauuaaccucugcac

SEQ ID NO: 1297730 - RNA, 17 nt, Human
ggauuaaccucugcacu

SEQ ID NO: 1297731 - RNA, 18 nt, Human
ggauuaaccucugcacua

SEQ ID NO: 1297732 - RNA, 16 nt, Human
ggcaaaauccuugcuu

SEQ ID NO: 1297733 - RNA, 13 nt, Human
ggcaaaauugcaa

SEQ ID NO: 1297734 - RNA, 13 nt, Human
ggcaaacccauca

SEQ ID NO: 1297735 - RNA, 22 nt, Human
ggcaaagcacgaaauguuauuu

SEQ ID NO: 1297736 - RNA, 14 nt, Human
ggcaaagccagguc

SEQ ID NO: 1297737 - RNA, 11 nt, Human
ggcaaagccag

SEQ ID NO: 1297738 - RNA, 16 nt, Human
ggcaaaggaaggugga

SEQ ID NO: 1297739 - RNA, 17 nt, Human
ggcaaaggaagguggau

SEQ ID NO: 1297740 - RNA, 19 nt, Human
ggcaaaggaagguggaugg

SEQ ID NO: 1297741 - RNA, 12 nt, Human
ggcaaauaaaag

SEQ ID NO: 1297742 - RNA, 16 nt, Human
ggcaaauaucuugaaa

SEQ ID NO: 1297743 - RNA, 19 nt, Human
ggcaacaaaagaagcccgg

SEQ ID NO: 1297744 - RNA, 14 nt, Human
ggcaacacagaggc

SEQ ID NO: 1297745 - RNA, 20 nt, Human
ggcagagaagaaagaacgga

SEQ ID NO: 1297746 - RNA, 20 nt, Human
ggcagacucuuuaugcuugc

SEQ ID NO: 1297747 - RNA, 22 nt, Human
ggcagacucuuuaugcuugcaa

SEQ ID NO: 1297748 - RNA, 17 nt, Human
ggcagaaggcaaaccca

SEQ ID NO: 1297749 - RNA, 17 nt, Human
ggcagaaguguuuuuua

SEQ ID NO: 1297750 - RNA, 18 nt, Human
ggcagccgugccuucagc

SEQ ID NO: 1297751 - RNA, 17 nt, Human
ggcagccagggagagcc

SEQ ID NO: 1297752 - RNA, 18 nt, Human
ggcagccagggagagccc

SEQ ID NO: 1297753 - RNA, 19 nt, Human
ggcagccagggagagccca

SEQ ID NO: 1297754 - RNA, 20 nt, Human
ggcagccagggagagcccag

SEQ ID NO: 1297755 - RNA, 19 nt, Human
ggcagccgugccuucagcu

SEQ ID NO: 1297756 - RNA, 21 nt, Human
ggcagccgugccuucagcucu

SEQ ID NO: 1297757 - RNA, 16 nt, Human
ggcagagaugccuccc

SEQ ID NO: 1297758 - RNA, 22 nt, Human
ggcagagaugccucccugagcu

SEQ ID NO: 1297759 - RNA, 18 nt, Human
ggcagagaugccucccug

SEQ ID NO: 1297760 - RNA, 12 nt, Human
ggcagccaggga

SEQ ID NO: 1297761 - RNA, 13 nt, Human
ggcagccagggag

SEQ ID NO: 1297762 - RNA, 23 nt, Human
ggcaggcaucggggagccgggag

SEQ ID NO: 1297763 - RNA, 13 nt, Human
ggcaggcagggcu

SEQ ID NO: 1297764 - RNA, 14 nt, Human
ggcaggcagggcuc

SEQ ID NO: 1297765 - RNA, 15 nt, Human
ggcaggcagggcucu

SEQ ID NO: 1297766 - RNA, 19 nt, Human
ggcaggcagggcucuccug

SEQ ID NO: 1297767 - RNA, 23 nt, Human
ggcaggcagaggcccaggcugcc

SEQ ID NO: 1297768 - RNA, 20 nt, Human
ggcaggcagaggcccaggcu

SEQ ID NO: 1297769 - RNA, 18 nt, Human
ggcaggcaggcucccagg

SEQ ID NO: 1297770 - RNA, 21 nt, Human
ggcaggaccuucgggcugugc

SEQ ID NO: 1297771 - RNA, 23 nt, Human
ggcaggaccuucgggcugugccc

SEQ ID NO: 1297772 - RNA, 17 nt, Human
ggcaggcagaggcccag

SEQ ID NO: 1297773 - RNA, 22 nt, Human
ggcagccgugccuucagcucua

SEQ ID NO: 1297774 - RNA, 22 nt, Human
ggcagccgugggccccacccuc

SEQ ID NO: 1297775 - RNA, 14 nt, Human
ggcagccucccauc

SEQ ID NO: 1297776 - RNA, 21 nt, Human
ggcagccucccauccagggcc

SEQ ID NO: 1297777 - RNA, 22 nt, Human
ggcagccucccauccagggccc

SEQ ID NO: 1297778 - RNA, 13 nt, Human
ggcagccucuggg

SEQ ID NO: 1297779 - RNA, 12 nt, Human
ggcagccucugg

SEQ ID NO: 1297780 - RNA, 23 nt, Human
ggcaggcagggcucuccuggcuu

SEQ ID NO: 1297781 - RNA, 22 nt, Human
ggcaggcagggcucuccuggcu

SEQ ID NO: 1297782 - RNA, 15 nt, Human
ggcaggccaccuggc

SEQ ID NO: 1297783 - RNA, 18 nt, Human
ggcaggccaccuggcucu

SEQ ID NO: 1297784 - RNA, 19 nt, Human
ggcaggccaccuggcucuc

SEQ ID NO: 1297785 - RNA, 15 nt, Human
ggcaggccagcugug

SEQ ID NO: 1297786 - RNA, 10 nt, Human
ggcaggcugg

SEQ ID NO: 1297787 - RNA, 11 nt, Human
ggcaggcuggc

SEQ ID NO: 1297788 - RNA, 12 nt, Human
ggcaggcuggcc

SEQ ID NO: 1297789 - RNA, 13 nt, Human
ggcaggcuggcca

SEQ ID NO: 1297790 - RNA, 17 nt, Human
ggcaggcuggccagucc

SEQ ID NO: 1297791 - RNA, 20 nt, Human
ggcaggcuggccaguccagg

SEQ ID NO: 1297792 - RNA, 12 nt, Human
ggcaggcugggc

SEQ ID NO: 1297793 - RNA, 13 nt, Human
ggcaggcugggcc

SEQ ID NO: 1297794 - RNA, 15 nt, Human
cuuagcagcuuccag

SEQ ID NO: 1297795 - RNA, 16 nt, Human
cuuagcagcuuccaga

SEQ ID NO: 1297796 - RNA, 17 nt, Human
cuuagcagcuuccagau

SEQ ID NO: 1297797 - RNA, 18 nt, Human
cuuagcagcuuccagauu

SEQ ID NO: 1297798 - RNA, 16 nt, Human
cuuauggaauugauuu

SEQ ID NO: 1297799 - RNA, 17 nt, Human
cuuauggaauugauuug

SEQ ID NO: 1297800 - RNA, 19 nt, Human
cuuauggaauugauuugca

SEQ ID NO: 1297801 - RNA, 20 nt, Human
cuuauggaauugauuugcau

SEQ ID NO: 1297802 - RNA, 21 nt, Human
cuuauggaauugauuugcauu

SEQ ID NO: 1297803 - RNA, 23 nt, Human
cuuauggaauugauuugcauuga

SEQ ID NO: 1297804 - RNA, 14 nt, Human
cuuauggauguccc

SEQ ID NO: 1297805 - RNA, 16 nt, Human
cuuauggaugucccca

SEQ ID NO: 1297806 - RNA, 17 nt, Human
cuuauggauguccccag

SEQ ID NO: 1297807 - RNA, 18 nt, Human
cuuauggauguccccagc

SEQ ID NO: 1297808 - RNA, 14 nt, Human
cuuauggaauugau

SEQ ID NO: 1297809 - RNA, 21 nt, Human
cuuauggauguccccagcaga

SEQ ID NO: 1297810 - RNA, 20 nt, Human
cuuauggauguccccagcag

SEQ ID NO: 1297811 - RNA, 19 nt, Human
cuuaugguaccagaugcag

SEQ ID NO: 1297812 - RNA, 13 nt, Human
cuuaugguaccag

SEQ ID NO: 1297813 - RNA, 17 nt, Human
cuuauuagagugucuuu

SEQ ID NO: 1297814 - RNA, 21 nt, Human
cuuauuaacaauuaggcagac

SEQ ID NO: 1297815 - RNA, 15 nt, Human
cuuccaugucgccuc

SEQ ID NO: 1297816 - RNA, 16 nt, Human
cuuccaugucgccucu

SEQ ID NO: 1297817 - RNA, 14 nt, Human
cuuccaugauucua

SEQ ID NO: 1297818 - RNA, 17 nt, Human
cuuccaugauucuauuu

SEQ ID NO: 1297819 - RNA, 14 nt, Human
cuuccaugcugugc

SEQ ID NO: 1297820 - RNA, 15 nt, Human
cuuccaugcugugcg

SEQ ID NO: 1297821 - RNA, 17 nt, Human
cuuccaugucgccucug

SEQ ID NO: 1297822 - RNA, 18 nt, Human
cuuccaugucgccucugc

SEQ ID NO: 1297823 - RNA, 19 nt, Human
cuuccaugucgccucugca

SEQ ID NO: 1297824 - RNA, 20 nt, Human
cuuccaugucgccucugcau

SEQ ID NO: 1297825 - RNA, 23 nt, Human
cuucaugcauggaaauucccuuc

SEQ ID NO: 1297826 - RNA, 21 nt, Human
cuucaugcauggaaauucccu

SEQ ID NO: 1297827 - RNA, 14 nt, Human
cuucaugccagcua

SEQ ID NO: 1297828 - RNA, 15 nt, Human
cuucaugccagcuac

SEQ ID NO: 1297829 - RNA, 16 nt, Human
cuucaugccagcuacu

SEQ ID NO: 1297830 - RNA, 23 nt, Human
cuucaugcugucuacacuaagag

SEQ ID NO: 1297831 - RNA, 13 nt, Human
cuucauggauggg

SEQ ID NO: 1297832 - RNA, 11 nt, Human
cuucauccucu

SEQ ID NO: 1297833 - RNA, 15 nt, Human
cuucaucgaaucuac

SEQ ID NO: 1297834 - RNA, 17 nt, Human
cuucaucgaaucuacua

SEQ ID NO: 1297835 - RNA, 22 nt, Human
cuucaucucccaaagugcuggg

SEQ ID NO: 1297836 - RNA, 13 nt, Human
cuucaucucccac

SEQ ID NO: 1297837 - RNA, 19 nt, Human
cuucaucucccaccuagca

SEQ ID NO: 1297838 - RNA, 20 nt, Human
cuucaucucccaccuagcag

SEQ ID NO: 1297839 - RNA, 17 nt, Human
cuucaguuaagccuuug

SEQ ID NO: 1297840 - RNA, 17 nt, Human
cuucaguguauggaaau

SEQ ID NO: 1297841 - RNA, 18 nt, Human
cuucaguuaagccuuugg

SEQ ID NO: 1297842 - RNA, 20 nt, Human
cuucaguguauggaaauaaa

SEQ ID NO: 1297843 - RNA, 17 nt, Human
cuucaguuaugauuuuu

SEQ ID NO: 1297844 - RNA, 19 nt, Human
cuucaucccacuccaacuc

SEQ ID NO: 1297845 - RNA, 13 nt, Human
cuucacugugcug

SEQ ID NO: 1297846 - RNA, 14 nt, Human
cuucacugugcugu

SEQ ID NO: 1297847 - RNA, 17 nt, Human
cuucaccuucaccuuca

SEQ ID NO: 1297848 - RNA, 13 nt, Human
cuuauugccucac

SEQ ID NO: 1297849 - RNA, 14 nt, Human
cuuauugccucacu

SEQ ID NO: 1297850 - RNA, 19 nt, Human
cuuauugccucacuucagg

SEQ ID NO: 1297851 - RNA, 20 nt, Human
cuucagacagagaggacugu

SEQ ID NO: 1297852 - RNA, 11 nt, Human
cuucagacaua

SEQ ID NO: 1297853 - RNA, 12 nt, Human
cuucagaaagac

SEQ ID NO: 1297854 - RNA, 19 nt, Human
cuucagacagagaggacug

SEQ ID NO: 1297855 - RNA, 11 nt, Human
cuucagaaaga

SEQ ID NO: 1297856 - RNA, 15 nt, Human
cuguucacucuacuu

SEQ ID NO: 1297857 - RNA, 16 nt, Human
cuguucacuuuuccuc

SEQ ID NO: 1297858 - RNA, 17 nt, Human
cuguucacuuuuccucc

SEQ ID NO: 1297859 - RNA, 18 nt, Human
cuguucacuuuuccuccc

SEQ ID NO: 1297860 - RNA, 15 nt, Human
cugugaccaaugucu

SEQ ID NO: 1297861 - RNA, 16 nt, Human
cugugaccaaugucuu

SEQ ID NO: 1297862 - RNA, 17 nt, Human
cugugaccaaugucuug

SEQ ID NO: 1297863 - RNA, 14 nt, Human
cugugaccacaaca

SEQ ID NO: 1297864 - RNA, 16 nt, Human
cugugaccacaacaug

SEQ ID NO: 1297865 - RNA, 17 nt, Human
cugugaccacaacauga

SEQ ID NO: 1297866 - RNA, 17 nt, Human
cugugacuucagcucug

SEQ ID NO: 1297867 - RNA, 23 nt, Human
cugugaccugcugagcucugaga

SEQ ID NO: 1297868 - RNA, 22 nt, Human
cugugacuucagcucuguuuua

SEQ ID NO: 1297869 - RNA, 22 nt, Human
cugugcguguguguguguguau

SEQ ID NO: 1297870 - RNA, 19 nt, Human
cugugcuauggugcucugu

SEQ ID NO: 1297871 - RNA, 21 nt, Human
cugugcuauggugcucugucu

SEQ ID NO: 1297872 - RNA, 13 nt, Human
cugugcucagccc

SEQ ID NO: 1297873 - RNA, 15 nt, Human
cugugcucagcccug

SEQ ID NO: 1297874 - RNA, 19 nt, Human
cugugcucagcccugagga

SEQ ID NO: 1297875 - RNA, 16 nt, Human
cugugcucagcccuga

SEQ ID NO: 1297876 - RNA, 11 nt, Human
cuguguaacug

SEQ ID NO: 1297877 - RNA, 13 nt, Human
cuguguaacugcc

SEQ ID NO: 1297878 - RNA, 15 nt, Human
cuguguaacugccca

SEQ ID NO: 1297879 - RNA, 16 nt, Human
cuguguaacugcccaa

SEQ ID NO: 1297880 - RNA, 13 nt, Human
cuguguaagauuu

SEQ ID NO: 1297881 - RNA, 23 nt, Human
cuguguaagggccagaaauaucu

SEQ ID NO: 1297882 - RNA, 18 nt, Human
cuguguaauuagugccac

SEQ ID NO: 1297883 - RNA, 18 nt, Human
cuguguaagauuuguuuu

SEQ ID NO: 1297884 - RNA, 17 nt, Human
cuguguacauaacugaa

SEQ ID NO: 1297885 - RNA, 19 nt, Human
cuguguacauaacugaaaa

SEQ ID NO: 1297886 - RNA, 20 nt, Human
cuguguacauaacugaaaau

SEQ ID NO: 1297887 - RNA, 22 nt, Human
cuguguacauaacugaaaaugu

SEQ ID NO: 1297888 - RNA, 15 nt, Human
cuguguacugcaguu

SEQ ID NO: 1297889 - RNA, 16 nt, Human
cugugucuaagauucu

SEQ ID NO: 1297890 - RNA, 17 nt, Human
cugugucuaagauucua

SEQ ID NO: 1297891 - RNA, 18 nt, Human
cugugucuaagauucuag

SEQ ID NO: 1297892 - RNA, 19 nt, Human
cugugucuaagauucuaga

SEQ ID NO: 1297893 - RNA, 20 nt, Human
cugugucuaagauucuagau

SEQ ID NO: 1297894 - RNA, 21 nt, Human
cugugucuaagauucuagauc

SEQ ID NO: 1297895 - RNA, 15 nt, Human
cuguugcugccucau

SEQ ID NO: 1297896 - RNA, 16 nt, Human
cuguugcugccucaug

SEQ ID NO: 1297897 - RNA, 17 nt, Human
cuguugcugccucaugc

SEQ ID NO: 1297898 - RNA, 17 nt, Human
cuuacacauuaagcaaa

SEQ ID NO: 1297899 - RNA, 11 nt, Human
cuuacacccac

SEQ ID NO: 1297900 - RNA, 20 nt, Human
cuuacacccacaguggaaag

SEQ ID NO: 1297901 - RNA, 13 nt, Human
cuuaaacaaaaau

SEQ ID NO: 1297902 - RNA, 19 nt, Human
cuuaaacaaaaauuaaaau

SEQ ID NO: 1297903 - RNA, 15 nt, Human
cuuaaagcuuucaga

SEQ ID NO: 1297904 - RNA, 13 nt, Human
cuuaaaggggaga

SEQ ID NO: 1297905 - RNA, 16 nt, Human
cuuaaagugccaguau

SEQ ID NO: 1297906 - RNA, 22 nt, Human
cuuaaagugccaguauuuuaaa

SEQ ID NO: 1297907 - RNA, 23 nt, Human
cuguuggaauggauuuuucuuua

SEQ ID NO: 1297908 - RNA, 18 nt, Human
cuuaaaauauuccugcau

SEQ ID NO: 1297909 - RNA, 20 nt, Human
cuuaaaauauuccugcauuu

SEQ ID NO: 1297910 - RNA, 20 nt, Human
cuguugggagagggcgcagg

SEQ ID NO: 1297911 - RNA, 22 nt, Human
cuguugggagagggcgcaggcc

SEQ ID NO: 1297912 - RNA, 24 nt, Human
cuuaaaauguucacuuuugacaaa

SEQ ID NO: 1297913 - RNA, 18 nt, Human
cuuacagcaaauccuuug

SEQ ID NO: 1297914 - RNA, 12 nt, Human
cuuacagcaggc

SEQ ID NO: 1297915 - RNA, 16 nt, Human
cuuacagcaaauccuu

SEQ ID NO: 1297916 - RNA, 13 nt, Human
cuuacagcaggca

SEQ ID NO: 1297917 - RNA, 20 nt, Human
cuuagauguuccaguaaucu

SEQ ID NO: 1297918 - RNA, 14 nt, Human
cuuagauguucuaa

SEQ ID NO: 1297919 - RNA, 18 nt, Human
cuuagauguucuaagucu

SEQ ID NO: 1297920 - RNA, 11 nt, Human
cuuagauucuc

SEQ ID NO: 1297921 - RNA, 20 nt, Human
cuuagauucucugugucuaa

SEQ ID NO: 1297922 - RNA, 22 nt, Human
cuuagauucucugugucuaaga

SEQ ID NO: 1297923 - RNA, 24 nt, Human
cuuagauucucugugucuaagauu

SEQ ID NO: 1297924 - RNA, 13 nt, Human
cuuagauuucaua

SEQ ID NO: 1297925 - RNA, 14 nt, Human
cuuagauuucauag

SEQ ID NO: 1297926 - RNA, 21 nt, Human
cuuagauuucauaguucagaa

SEQ ID NO: 1297927 - RNA, 12 nt, Human
cuuagauuuuac

SEQ ID NO: 1297928 - RNA, 13 nt, Human
cuuagauuuuaca

SEQ ID NO: 1297929 - RNA, 15 nt, Human
cuuagauuuuacaug

SEQ ID NO: 1297930 - RNA, 16 nt, Human
cuuagauuuuacauga

SEQ ID NO: 1297931 - RNA, 19 nt, Human
cuuagauuuuacaugaagu

SEQ ID NO: 1297932 - RNA, 20 nt, Human
cuuagauuuuacaugaagua

SEQ ID NO: 1297933 - RNA, 23 nt, Human
cuugugauccacucgccucagcc

SEQ ID NO: 1297934 - RNA, 20 nt, Human
cuugugaugucauacagaga

SEQ ID NO: 1297935 - RNA, 21 nt, Human
cuugugaugucauacagagaa

SEQ ID NO: 1297936 - RNA, 22 nt, Human
cuugugaugucauacagagaag

SEQ ID NO: 1297937 - RNA, 24 nt, Human
cuugugaugucauacagagaaguc

SEQ ID NO: 1297938 - RNA, 23 nt, Human
cuuuaaagugacuaauggcauga

SEQ ID NO: 1297939 - RNA, 13 nt, Human
cuuuaaaguucuu

SEQ ID NO: 1297940 - RNA, 13 nt, Human
cuuuaaauugugu

SEQ ID NO: 1297941 - RNA, 15 nt, Human
cuuuaacaacauguu

SEQ ID NO: 1297942 - RNA, 16 nt, Human
cuuuaacaacauguuu

SEQ ID NO: 1297943 - RNA, 19 nt, Human
cuuuaacaacauguuucca

SEQ ID NO: 1297944 - RNA, 22 nt, Human
cuuuaacaacauguuuccagca

SEQ ID NO: 1297945 - RNA, 16 nt, Human
cuuuacaaaacaaacu

SEQ ID NO: 1297946 - RNA, 18 nt, Human
cuuuacaaaacaaacuca

SEQ ID NO: 1297947 - RNA, 23 nt, Human
cuuuacaaaacaaacucauucau

SEQ ID NO: 1297948 - RNA, 20 nt, Human
cuuuacacaauagaauuaua

SEQ ID NO: 1297949 - RNA, 16 nt, Human
cuuuaaugauaugcuu

SEQ ID NO: 1297950 - RNA, 20 nt, Human
cuuuaaggggaggaaccaga

SEQ ID NO: 1297951 - RNA, 22 nt, Human
cuuuaacucccauuaccaugua

SEQ ID NO: 1297952 - RNA, 17 nt, Human
cuuuaacucccauuacc

SEQ ID NO: 1297953 - RNA, 21 nt, Human
cuuuaacucccauuaccaugu

SEQ ID NO: 1297954 - RNA, 18 nt, Human
cuuuaacugacaagccau

SEQ ID NO: 1297955 - RNA, 12 nt, Human
cuuuaauauaaa

SEQ ID NO: 1297956 - RNA, 14 nt, Human
cuuuaauauaaaug

SEQ ID NO: 1297957 - RNA, 15 nt, Human
cuuuaauauaaaugc

SEQ ID NO: 1297958 - RNA, 16 nt, Human
cuuuaauauaaaugca

SEQ ID NO: 1297959 - RNA, 20 nt, Human
cuuuaauauaaaugcaaaua

SEQ ID NO: 1297960 - RNA, 18 nt, Human
cuuuaauauaaaugcaaa

SEQ ID NO: 1297961 - RNA, 19 nt, Human
cuuuaauauaaaugcaaau

SEQ ID NO: 1297962 - RNA, 14 nt, Human
cuuucagaauaugu

SEQ ID NO: 1297963 - RNA, 16 nt, Human
cuuucagaauauguca

SEQ ID NO: 1297964 - RNA, 21 nt, Human
cuuucagaauaugucagugcu

SEQ ID NO: 1297965 - RNA, 11 nt, Human
cuuucagagcc

SEQ ID NO: 1297966 - RNA, 12 nt, Human
cuuucagagccu

SEQ ID NO: 1297967 - RNA, 13 nt, Human
cuuucagagccuc

SEQ ID NO: 1297968 - RNA, 14 nt, Human
cuuucagagccucc

SEQ ID NO: 1297969 - RNA, 21 nt, Human
cuuugagcuuaaucuuugaaa

SEQ ID NO: 1297970 - RNA, 16 nt, Human
cuuugagcuuaagaau

SEQ ID NO: 1297971 - RNA, 22 nt, Human
cuuugagcuacugccgucagug

SEQ ID NO: 1297972 - RNA, 21 nt, Human
cuuugagugcaguccugauca

SEQ ID NO: 1297973 - RNA, 14 nt, Human
cuuugauguuccuu

SEQ ID NO: 1297974 - RNA, 20 nt, Human
cuuugauuaaagacuccagu

SEQ ID NO: 1297975 - RNA, 16 nt, Human
cuuugauguuccuucc

SEQ ID NO: 1297976 - RNA, 12 nt, Human
cuuugauucaua

SEQ ID NO: 1297977 - RNA, 19 nt, Human
cuuugauucauaguaacuu

SEQ ID NO: 1297978 - RNA, 21 nt, Human
cuuugauucauaguaacuucu

SEQ ID NO: 1297979 - RNA, 22 nt, Human
cuuucggggagaggcugaggac

SEQ ID NO: 1297980 - RNA, 17 nt, Human
cuuucggauccagggag

SEQ ID NO: 1297981 - RNA, 14 nt, Human
cuuucgggccaugu

SEQ ID NO: 1297982 - RNA, 20 nt, Human
cuuucgggccauguugcccc

SEQ ID NO: 1297983 - RNA, 17 nt, Human
cuuucuaaugugugaau

SEQ ID NO: 1297984 - RNA, 14 nt, Human
cuuucuaguugaaa

SEQ ID NO: 1297985 - RNA, 16 nt, Human
cuuucuaguugaaaau

SEQ ID NO: 1297986 - RNA, 18 nt, Human
cuuucuaguugaaaauaa

SEQ ID NO: 1297987 - RNA, 21 nt, Human
cuuucuaguugaaaauaaagu

SEQ ID NO: 1297988 - RNA, 16 nt, Human
cuuucuauccucugua

SEQ ID NO: 1297989 - RNA, 17 nt, Human
cuuucuauccucuguaa

SEQ ID NO: 1297990 - RNA, 18 nt, Human
cuuucuccuuuaauugua

SEQ ID NO: 1297991 - RNA, 21 nt, Human
cuuuuaguaaagucaaggaga

SEQ ID NO: 1297992 - RNA, 19 nt, Human
cuuuuauuuagcaccaggg

SEQ ID NO: 1297993 - RNA, 16 nt, Human
cuuuuacuuuucuucu

SEQ ID NO: 1297994 - RNA, 15 nt, Human
cuuugguaccagaua

SEQ ID NO: 1297995 - RNA, 20 nt, Human
cuuugguaccagauaacuuu

SEQ ID NO: 1297996 - RNA, 18 nt, Human
cuuugggcuucagcugcc

SEQ ID NO: 1297997 - RNA, 21 nt, Human
cuuugggcuucagcugccagu

SEQ ID NO: 1297998 - RNA, 16 nt, Human
cuuugggcuugggccu

SEQ ID NO: 1297999 - RNA, 18 nt, Human
cuuuggggcuaauuuaac

SEQ ID NO: 1298000 - RNA, 14 nt, Human
cuuugguagaaaag

SEQ ID NO: 1298001 - RNA, 14 nt, Human
cuuugguccuucaa

SEQ ID NO: 1298002 - RNA, 15 nt, Human
cuuuggucucuugcu

SEQ ID NO: 1298003 - RNA, 16 nt, Human
cuuuggucucuugcuu

SEQ ID NO: 1298004 - RNA, 17 nt, Human
cuuuggucucuugcuug

SEQ ID NO: 1298005 - RNA, 19 nt, Human
cuuuggugagaaccugggu

SEQ ID NO: 1298006 - RNA, 22 nt, Human
cuuuucaaauagggucuaacuc

SEQ ID NO: 1298007 - RNA, 18 nt, Human
cuuggccaugcagaaagc

SEQ ID NO: 1298008 - RNA, 15 nt, Human
cuuggccaugcagaa

SEQ ID NO: 1298009 - RNA, 16 nt, Human
cuuggccacagccagg

SEQ ID NO: 1298010 - RNA, 18 nt, Human
cuuggccacagccagggg

SEQ ID NO: 1298011 - RNA, 20 nt, Human
cuuggccaugggaggccuuu

SEQ ID NO: 1298012 - RNA, 16 nt, Human
cuuggccaugggaggc

SEQ ID NO: 1298013 - RNA, 19 nt, Human
cuuggccaugggaggccuu

SEQ ID NO: 1298014 - RNA, 23 nt, Human
cuuggccaugggaggccuuuccc

SEQ ID NO: 1298015 - RNA, 12 nt, Human
cuugaaugaaaa

SEQ ID NO: 1298016 - RNA, 14 nt, Human
cuugacaacuggca

SEQ ID NO: 1298017 - RNA, 20 nt, Human
cuugacaacuggcaggcagg

SEQ ID NO: 1298018 - RNA, 16 nt, Human
cuugacaacuggcagg

SEQ ID NO: 1298019 - RNA, 13 nt, Human
cuugacaccugcu

SEQ ID NO: 1298020 - RNA, 15 nt, Human
cuugacaccugcuga

SEQ ID NO: 1298021 - RNA, 22 nt, Human
cuugacaccugcugagaaaaca

SEQ ID NO: 1298022 - RNA, 17 nt, Human
cuugccucaaugccagu

SEQ ID NO: 1298023 - RNA, 12 nt, Human
cuugccugcagg

SEQ ID NO: 1298024 - RNA, 15 nt, Human
cuugcuccuccuucu

SEQ ID NO: 1298025 - RNA, 18 nt, Human
cuugcuccuccuucugcu

SEQ ID NO: 1298026 - RNA, 17 nt, Human
cuugccucaaccuccca

SEQ ID NO: 1298027 - RNA, 18 nt, Human
cuugccucaaccucccaa

SEQ ID NO: 1298028 - RNA, 15 nt, Human
cuugccucaaugcca

SEQ ID NO: 1298029 - RNA, 13 nt, Human
cuugccucugugc

SEQ ID NO: 1298030 - RNA, 14 nt, Human
cuugccucugugcu

SEQ ID NO: 1298031 - RNA, 15 nt, Human
cuugccucugugcug

SEQ ID NO: 1298032 - RNA, 16 nt, Human
cuugccucugugcugu

SEQ ID NO: 1298033 - RNA, 19 nt, Human
cuugccucugugcugugug

SEQ ID NO: 1298034 - RNA, 20 nt, Human
cuugccucugugcugugugu

SEQ ID NO: 1298035 - RNA, 12 nt, Human
cuugccucuucc

SEQ ID NO: 1298036 - RNA, 13 nt, Human
cuugccucuuccu

SEQ ID NO: 1298037 - RNA, 16 nt, Human
cuugccucuuccuuga

SEQ ID NO: 1298038 - RNA, 18 nt, Human
cuugccucuuccuugaag

SEQ ID NO: 1298039 - RNA, 15 nt, Human
cuucuguuuuauaau

SEQ ID NO: 1298040 - RNA, 20 nt, Human
cuucuguuuuauaauuuugu

SEQ ID NO: 1298041 - RNA, 22 nt, Human
cuucugagacgucaugaggaga

SEQ ID NO: 1298042 - RNA, 11 nt, Human
cuucugagacg

SEQ ID NO: 1298043 - RNA, 15 nt, Human
cuucugagcacuguu

SEQ ID NO: 1298044 - RNA, 23 nt, Human
cuucugagcacuguuuauacacu

SEQ ID NO: 1298045 - RNA, 18 nt, Human
cuucugagcagcgagccu

SEQ ID NO: 1298046 - RNA, 20 nt, Human
cuucugagcagcgagccugc

SEQ ID NO: 1298047 - RNA, 21 nt, Human
cuucugagcagcgagccugcu

SEQ ID NO: 1298048 - RNA, 22 nt, Human
cuucugagcagcgagccugcua

SEQ ID NO: 1298049 - RNA, 22 nt, Human
cuucugagcccgguaagagcaa

SEQ ID NO: 1298050 - RNA, 16 nt, Human
cuucugagcuauuuca

SEQ ID NO: 1298051 - RNA, 17 nt, Human
cuucugagcuauuucau

SEQ ID NO: 1298052 - RNA, 18 nt, Human
cuucugagcuauuucauc

SEQ ID NO: 1298053 - RNA, 20 nt, Human
cuucugagcuauuucaucua

SEQ ID NO: 1298054 - RNA, 12 nt, Human
cuucugagcucc

SEQ ID NO: 1298055 - RNA, 14 nt, Human
cuucuuaaaguauu

SEQ ID NO: 1298056 - RNA, 19 nt, Human
cuucuuaaaguauucuucu

SEQ ID NO: 1298057 - RNA, 23 nt, Human
cuggacugugugcucaggagccc

SEQ ID NO: 1298058 - RNA, 18 nt, Human
cuggacuuaagcaucugg

SEQ ID NO: 1298059 - RNA, 22 nt, Human
cuggacuuaagcaucuggcucu

SEQ ID NO: 1298060 - RNA, 23 nt, Human
cuggacuuaagcaucuggcucua

SEQ ID NO: 1298061 - RNA, 22 nt, Human
cuggacugugugcucaggagcc

SEQ ID NO: 1298062 - RNA, 19 nt, Human
cuggacugugugcucagga

SEQ ID NO: 1298063 - RNA, 13 nt, Human
cugcuuaauucaa

SEQ ID NO: 1298064 - RNA, 12 nt, Human
cugcuuaauuca

SEQ ID NO: 1298065 - RNA, 13 nt, Human
cuggaucucccug

SEQ ID NO: 1298066 - RNA, 15 nt, Human
cuggaguugaucugg

SEQ ID NO: 1298067 - RNA, 16 nt, Human
cuggaguugaucugga

SEQ ID NO: 1298068 - RNA, 17 nt, Human
cuggaguugaucuggaa

SEQ ID NO: 1298069 - RNA, 18 nt, Human
cuggaguugaucuggaac

SEQ ID NO: 1298070 - RNA, 16 nt, Human
cuggaugauacuaaua

SEQ ID NO: 1298071 - RNA, 18 nt, Human
cuggaugauacuaauaaa

SEQ ID NO: 1298072 - RNA, 15 nt, Human
cuggaugacauuaaa

SEQ ID NO: 1298073 - RNA, 14 nt, Human
cuggaugagcuccc

SEQ ID NO: 1298074 - RNA, 15 nt, Human
cuggaugagcuccca

SEQ ID NO: 1298075 - RNA, 20 nt, Human
cuggaugagcucccacaagc

SEQ ID NO: 1298076 - RNA, 14 nt, Human
cuggaugauacuaa

SEQ ID NO: 1298077 - RNA, 15 nt, Human
cuggaugauacuaau

SEQ ID NO: 1298078 - RNA, 23 nt, Human
cuggaugauacuaauaaacuaau

SEQ ID NO: 1298079 - RNA, 22 nt, Human
cuggaugauacuaauaaacuaa

SEQ ID NO: 1298080 - RNA, 18 nt, Human
cugcugucgcucucaguu

SEQ ID NO: 1298081 - RNA, 12 nt, Human
cugcugucuggg

SEQ ID NO: 1298082 - RNA, 13 nt, Human
cugcugucugggu

SEQ ID NO: 1298083 - RNA, 14 nt, Human
cugcugucugggug

SEQ ID NO: 1298084 - RNA, 15 nt, Human
cugcugucugggugc

SEQ ID NO: 1298085 - RNA, 16 nt, Human
cugcugucugggugcu

SEQ ID NO: 1298086 - RNA, 21 nt, Human
cugcugucugggugcuacugg

SEQ ID NO: 1298087 - RNA, 15 nt, Human
cugcugugaaagaag

SEQ ID NO: 1298088 - RNA, 19 nt, Human
cugcugucuggguggcuca

SEQ ID NO: 1298089 - RNA, 21 nt, Human
cugcugucuggguggcucacu

SEQ ID NO: 1298090 - RNA, 21 nt, Human
cugcugugauacgaugcuuca

SEQ ID NO: 1298091 - RNA, 12 nt, Human
cugcuguggcca

SEQ ID NO: 1298092 - RNA, 14 nt, Human
cugcuguggccagg

SEQ ID NO: 1298093 - RNA, 15 nt, Human
cugcuguggccagga

SEQ ID NO: 1298094 - RNA, 16 nt, Human
cugcuguggccaggag

SEQ ID NO: 1298095 - RNA, 17 nt, Human
cugcuguggccaggagg

SEQ ID NO: 1298096 - RNA, 21 nt, Human
cugcuguggccaggaggugcc

SEQ ID NO: 1298097 - RNA, 18 nt, Human
cugcuguggccaggaggu

SEQ ID NO: 1298098 - RNA, 19 nt, Human
cugcugagucccaggcuga

SEQ ID NO: 1298099 - RNA, 23 nt, Human
cugcugagucccaggcugagccu

SEQ ID NO: 1298100 - RNA, 18 nt, Human
cugcucacgucaaaugca

SEQ ID NO: 1298101 - RNA, 14 nt, Human
cugcugauauuuuc

SEQ ID NO: 1298102 - RNA, 17 nt, Human
cugcugauauuuucucu

SEQ ID NO: 1298103 - RNA, 18 nt, Human
cugcugauauuuucucua

SEQ ID NO: 1298104 - RNA, 19 nt, Human
cugcugauauuuucucuag

SEQ ID NO: 1298105 - RNA, 16 nt, Human
cugcugaucgccuucc

SEQ ID NO: 1298106 - RNA, 17 nt, Human
cugcugaucgccuuccc

SEQ ID NO: 1298107 - RNA, 18 nt, Human
cugcugaucgccuucccc

SEQ ID NO: 1298108 - RNA, 19 nt, Human
cugcugaucgccuucccca

SEQ ID NO: 1298109 - RNA, 19 nt, Human
cugggugguacccucugga

SEQ ID NO: 1298110 - RNA, 17 nt, Human
cugggugguggccuggu

SEQ ID NO: 1298111 - RNA, 14 nt, Human
cugggugguggccu

SEQ ID NO: 1298112 - RNA, 19 nt, Human
cuggguguaaaaccuggag

SEQ ID NO: 1298113 - RNA, 21 nt, Human
cuggguguaaaaccuggagau

SEQ ID NO: 1298114 - RNA, 20 nt, Human
cuggguguaaaaccuggaga

SEQ ID NO: 1298115 - RNA, 15 nt, Human
cuggugccaauuuca

SEQ ID NO: 1298116 - RNA, 16 nt, Human
cuggugccaauuucaa

SEQ ID NO: 1298117 - RNA, 18 nt, Human
cuggugccaauuucaagu

SEQ ID NO: 1298118 - RNA, 20 nt, Human
cuggugccaauuucaaguuc

SEQ ID NO: 1298119 - RNA, 21 nt, Human
cuggugccucaccccuugcca

SEQ ID NO: 1298120 - RNA, 14 nt, Human
cuggugccuccaga

SEQ ID NO: 1298121 - RNA, 16 nt, Human
cuggugccuccagagg

SEQ ID NO: 1298122 - RNA, 15 nt, Human
cuggugccuccagag

SEQ ID NO: 1298123 - RNA, 14 nt, Human
cuggugcggcuggc

SEQ ID NO: 1298124 - RNA, 15 nt, Human
cuggugcggcuggcc

SEQ ID NO: 1298125 - RNA, 18 nt, Human
cuggugcggcuggccaug

SEQ ID NO: 1298126 - RNA, 12 nt, Human
cuggugccaccu

SEQ ID NO: 1298127 - RNA, 19 nt, Human
cuggugcggcuggccaugg

SEQ ID NO: 1298128 - RNA, 20 nt, Human
cuggugcggcuggccaugga

SEQ ID NO: 1298129 - RNA, 21 nt, Human
cuggugcggcuggccauggag

SEQ ID NO: 1298130 - RNA, 12 nt, Human
cuggggccuggg

SEQ ID NO: 1298131 - RNA, 13 nt, Human
cuggggccuggga

SEQ ID NO: 1298132 - RNA, 15 nt, Human
cuggggccugggaca

SEQ ID NO: 1298133 - RNA, 16 nt, Human
cuggggccugggacaa

SEQ ID NO: 1298134 - RNA, 14 nt, Human
cuggggccuguacu

SEQ ID NO: 1298135 - RNA, 16 nt, Human
cuggggccuguacugc

SEQ ID NO: 1298136 - RNA, 17 nt, Human
cuggggccuguacugcc

SEQ ID NO: 1298137 - RNA, 19 nt, Human
cuggggacagguccucagu

SEQ ID NO: 1298138 - RNA, 12 nt, Human
cuggggacaggu

SEQ ID NO: 1298139 - RNA, 20 nt, Human
cuggggaccugguacccucc

SEQ ID NO: 1298140 - RNA, 22 nt, Human
cuggggaccugguacccuccug

SEQ ID NO: 1298141 - RNA, 14 nt, Human
cuggggacuuggcc

SEQ ID NO: 1298142 - RNA, 15 nt, Human
cuggggacuuggccu

SEQ ID NO: 1298143 - RNA, 17 nt, Human
cuggggacuuggccucu

SEQ ID NO: 1298144 - RNA, 18 nt, Human
cuggggacuuggccucuc

SEQ ID NO: 1298145 - RNA, 19 nt, Human
cuggggacuuggccucucu

SEQ ID NO: 1298146 - RNA, 13 nt, Human
cuggggacuugug

SEQ ID NO: 1298147 - RNA, 17 nt, Human
cuggggacuugugucug

SEQ ID NO: 1298148 - RNA, 18 nt, Human
cuggggacuugugucugc

SEQ ID NO: 1298149 - RNA, 14 nt, Human
cugggugcuacugg

SEQ ID NO: 1298150 - RNA, 17 nt, Human
cugggugcuacugggga

SEQ ID NO: 1298151 - RNA, 18 nt, Human
cugggugcuacuggggaa

SEQ ID NO: 1298152 - RNA, 21 nt, Human
cugggugcuacuggggaaacu

SEQ ID NO: 1298153 - RNA, 18 nt, Human
cuggggccuguacugccu

SEQ ID NO: 1298154 - RNA, 19 nt, Human
cuggggccuguacugccug

SEQ ID NO: 1298155 - RNA, 20 nt, Human
cuggggccuguacugccugc

SEQ ID NO: 1298156 - RNA, 21 nt, Human
cuggggccuguacugccugcu

SEQ ID NO: 1298157 - RNA, 22 nt, Human
cuggggccuguacugccugcuu

SEQ ID NO: 1298158 - RNA, 23 nt, Human
cuggggccuguacugccugcuug

SEQ ID NO: 1298159 - RNA, 14 nt, Human
cugggugacauuug

SEQ ID NO: 1298160 - RNA, 13 nt, Human
cugggcaggaggg

SEQ ID NO: 1298161 - RNA, 23 nt, Human
cugggcaugagggguuccucccc

SEQ ID NO: 1298162 - RNA, 22 nt, Human
cugggcaugagggguuccuccc

SEQ ID NO: 1298163 - RNA, 17 nt, Human
cugggccauguccaaag

SEQ ID NO: 1298164 - RNA, 18 nt, Human
cugggccauguccaaaga

SEQ ID NO: 1298165 - RNA, 19 nt, Human
cugggccauguccaaagag

SEQ ID NO: 1298166 - RNA, 22 nt, Human
cugggccauguccaaagaggcu

SEQ ID NO: 1298167 - RNA, 23 nt, Human
cugggccauguccaaagaggcug

SEQ ID NO: 1298168 - RNA, 19 nt, Human
cugggccauucuccacagc

SEQ ID NO: 1298169 - RNA, 20 nt, Human
cugggccauucuccacagca

SEQ ID NO: 1298170 - RNA, 21 nt, Human
cugggccauucuccacagcaa

SEQ ID NO: 1298171 - RNA, 22 nt, Human
cugggccauucuccacagcaac

SEQ ID NO: 1298172 - RNA, 13 nt, Human
cugggagaaaucu

SEQ ID NO: 1298173 - RNA, 18 nt, Human
cugggagaaaucuggcuu

SEQ ID NO: 1298174 - RNA, 19 nt, Human
cugggagaaaucuggcuuc

SEQ ID NO: 1298175 - RNA, 20 nt, Human
cugggagaaaucuggcuucu

SEQ ID NO: 1298176 - RNA, 21 nt, Human
cugggagaaaucuggcuucug

SEQ ID NO: 1298177 - RNA, 16 nt, Human
cugggagaaaugaaaa

SEQ ID NO: 1298178 - RNA, 21 nt, Human
cugggacguggcucagccagc

SEQ ID NO: 1298179 - RNA, 23 nt, Human
cugggacguggcucagccagcac

SEQ ID NO: 1298180 - RNA, 17 nt, Human
cugggagaaaugaaaaa

SEQ ID NO: 1298181 - RNA, 20 nt, Human
cugggacguggcucagccag

SEQ ID NO: 1298182 - RNA, 13 nt, Human
cuggcucucaccu

SEQ ID NO: 1298183 - RNA, 14 nt, Human
cuggcucucaccuc

SEQ ID NO: 1298184 - RNA, 16 nt, Human
cuggcucucaccucua

SEQ ID NO: 1298185 - RNA, 19 nt, Human
cuggcucucaccucuaggu

SEQ ID NO: 1298186 - RNA, 22 nt, Human
cuggcucucaccucuagguccc

SEQ ID NO: 1298187 - RNA, 20 nt, Human
cuggcuccguccaggagccu

SEQ ID NO: 1298188 - RNA, 18 nt, Human
cuggcuccuugugccaga

SEQ ID NO: 1298189 - RNA, 21 nt, Human
cuggcuccuugugccagagaa

SEQ ID NO: 1298190 - RNA, 15 nt, Human
cuggcucuaauucac

SEQ ID NO: 1298191 - RNA, 19 nt, Human
cuggcucuaauucacagug

SEQ ID NO: 1298192 - RNA, 20 nt, Human
cuggcucuaauucacagugc

SEQ ID NO: 1298193 - RNA, 22 nt, Human
cuggcucuaauucacagugcuc

SEQ ID NO: 1298194 - RNA, 23 nt, Human
cuggcucuaauucacagugcucu

SEQ ID NO: 1298195 - RNA, 18 nt, Human
cuggcuauagaugucuuu

SEQ ID NO: 1298196 - RNA, 19 nt, Human
cuggcuauagaugucuuuu

SEQ ID NO: 1298197 - RNA, 23 nt, Human
cuggcuauagaugucuuuuccca

SEQ ID NO: 1298198 - RNA, 13 nt, Human
cuggcccugcuuc

SEQ ID NO: 1298199 - RNA, 17 nt, Human
cuggcccugcuuccugc

SEQ ID NO: 1298200 - RNA, 21 nt, Human
cuggcccugcuuccugcuugc

SEQ ID NO: 1298201 - RNA, 22 nt, Human
cuggcccugcuuccugcuugcc

SEQ ID NO: 1298202 - RNA, 21 nt, Human
cuggcccugggagaaucgcuc

SEQ ID NO: 1298203 - RNA, 23 nt, Human
cuggcccugcuuccugcuugcca

SEQ ID NO: 1298204 - RNA, 21 nt, Human
cuggcccuugcuuaccucuca

SEQ ID NO: 1298205 - RNA, 16 nt, Human
cuggccgaguccaagc

SEQ ID NO: 1298206 - RNA, 11 nt, Human
cugccagggca

SEQ ID NO: 1298207 - RNA, 12 nt, Human
cugccagggcag

SEQ ID NO: 1298208 - RNA, 13 nt, Human
cugccagggcagg

SEQ ID NO: 1298209 - RNA, 15 nt, Human
cugccagggcagggc

SEQ ID NO: 1298210 - RNA, 16 nt, Human
cugccagggcagggcc

SEQ ID NO: 1298211 - RNA, 16 nt, Human
cugccagggccccucu

SEQ ID NO: 1298212 - RNA, 17 nt, Human
cugccagucccccugcc

SEQ ID NO: 1298213 - RNA, 17 nt, Human
cugccagggccccucuc

SEQ ID NO: 1298214 - RNA, 18 nt, Human
cugccagggccccucucc

SEQ ID NO: 1298215 - RNA, 19 nt, Human
cugccagggccccucuccc

SEQ ID NO: 1298216 - RNA, 20 nt, Human
cugccagggccccucucccc

SEQ ID NO: 1298217 - RNA, 20 nt, Human
cugccagucccccugcccca

SEQ ID NO: 1298218 - RNA, 21 nt, Human
cugccagucccccugccccag

SEQ ID NO: 1298219 - RNA, 22 nt, Human
cugccagucccccugccccagg

SEQ ID NO: 1298220 - RNA, 21 nt, Human
cugccagggccccucucccca

SEQ ID NO: 1298221 - RNA, 23 nt, Human
cugccagggccccucuccccagg

SEQ ID NO: 1298222 - RNA, 16 nt, Human
cugccaguccuguccu

SEQ ID NO: 1298223 - RNA, 12 nt, Human
cugccagugaca

SEQ ID NO: 1298224 - RNA, 16 nt, Human
cugccagugacagaca

SEQ ID NO: 1298225 - RNA, 19 nt, Human
cugccagugacagacaggc

SEQ ID NO: 1298226 - RNA, 21 nt, Human
cugccagugacagacaggcuc

SEQ ID NO: 1298227 - RNA, 23 nt, Human
cugccagugacagacaggcucuu

SEQ ID NO: 1298228 - RNA, 17 nt, Human
cugccaguguccugagc

SEQ ID NO: 1298229 - RNA, 23 nt, Human
cugccaguguccugagccccagg

SEQ ID NO: 1298230 - RNA, 18 nt, Human
cugccauaugauuuacau

SEQ ID NO: 1298231 - RNA, 14 nt, Human
cugccauauuaaau

SEQ ID NO: 1298232 - RNA, 23 nt, Human
cugcccccaccccauucccgcag

SEQ ID NO: 1298233 - RNA, 22 nt, Human
cugcccccaccccauucccgca

SEQ ID NO: 1298234 - RNA, 14 nt, Human
cugcccccagagcc

SEQ ID NO: 1298235 - RNA, 16 nt, Human
cugcccccagagccac

SEQ ID NO: 1298236 - RNA, 17 nt, Human
cugcccccagagccaca

SEQ ID NO: 1298237 - RNA, 18 nt, Human
cugcccccagagccacag

SEQ ID NO: 1298238 - RNA, 20 nt, Human
cugcccccagagccacaguu

SEQ ID NO: 1298239 - RNA, 19 nt, Human
cugcccccagagccacagu

SEQ ID NO: 1298240 - RNA, 13 nt, Human
cugccccccagcc

SEQ ID NO: 1298241 - RNA, 16 nt, Human
cugccccccagccucu

SEQ ID NO: 1298242 - RNA, 19 nt, Human
cugccccccagccucuggc

SEQ ID NO: 1298243 - RNA, 21 nt, Human
cugccccccagccucuggcau

SEQ ID NO: 1298244 - RNA, 12 nt, Human
cugccccccagc

SEQ ID NO: 1298245 - RNA, 14 nt, Human
cugccccgcccuca

SEQ ID NO: 1298246 - RNA, 22 nt, Human
cugccccggccccucccccuga

SEQ ID NO: 1298247 - RNA, 15 nt, Human
cugccccgcccucau

SEQ ID NO: 1298248 - RNA, 19 nt, Human
cugccccuccucucugccc

SEQ ID NO: 1298249 - RNA, 17 nt, Human
cugccccuacccuggac

SEQ ID NO: 1298250 - RNA, 14 nt, Human
cugccccucccuuc

SEQ ID NO: 1298251 - RNA, 17 nt, Human
cugccccucccuucaac

SEQ ID NO: 1298252 - RNA, 21 nt, Human
cugccccuacccuggacuugc

SEQ ID NO: 1298253 - RNA, 13 nt, Human
cugccccucccuu

SEQ ID NO: 1298254 - RNA, 17 nt, Human
cugccccuccucucugc

SEQ ID NO: 1298255 - RNA, 18 nt, Human
cugccccuccucucugcc

SEQ ID NO: 1298256 - RNA, 20 nt, Human
cugccccuccucucugcccu

SEQ ID NO: 1298257 - RNA, 16 nt, Human
cugcaaccuccaccuc

SEQ ID NO: 1298258 - RNA, 14 nt, Human
cugcaaccuccacc

SEQ ID NO: 1298259 - RNA, 17 nt, Human
cugcaaccuccaccucc

SEQ ID NO: 1298260 - RNA, 17 nt, Human
cugcaaccuucgccacc

SEQ ID NO: 1298261 - RNA, 19 nt, Human
cugcaaccuucgccaccug

SEQ ID NO: 1298262 - RNA, 20 nt, Human
cugcaaccuucgccaccugg

SEQ ID NO: 1298263 - RNA, 22 nt, Human
cugcaaccuucgccaccugggu

SEQ ID NO: 1298264 - RNA, 19 nt, Human
cugcaacuuguaaaugugg

SEQ ID NO: 1298265 - RNA, 18 nt, Human
cugcaacuuguaaaugug

SEQ ID NO: 1298266 - RNA, 15 nt, Human
cugcaacucaaggac

SEQ ID NO: 1298267 - RNA, 23 nt, Human
cugcaacucaaggacuuugcagc

SEQ ID NO: 1298268 - RNA, 18 nt, Human
cugcaaaucaggcuuuug

SEQ ID NO: 1298269 - RNA, 20 nt, Human
cugcaaaucaggcuuuuguu

SEQ ID NO: 1298270 - RNA, 13 nt, Human
cugcaaccuccac

SEQ ID NO: 1298271 - RNA, 19 nt, Human
cugcaaauacuguauauuc

SEQ ID NO: 1298272 - RNA, 15 nt, Human
cugcaaaucaggcuu

SEQ ID NO: 1298273 - RNA, 14 nt, Human
cugcaagcacagcc

SEQ ID NO: 1298274 - RNA, 17 nt, Human
cugcaagcacagcccuu

SEQ ID NO: 1298275 - RNA, 16 nt, Human
cugcaagguacucugg

SEQ ID NO: 1298276 - RNA, 17 nt, Human
cugcaagguacucuggu

SEQ ID NO: 1298277 - RNA, 18 nt, Human
cugcaagguacucuggug

SEQ ID NO: 1298278 - RNA, 19 nt, Human
cugcaagguacucugguga

SEQ ID NO: 1298279 - RNA, 17 nt, Human
cugcaaggucuuugguu

SEQ ID NO: 1298280 - RNA, 14 nt, Human
cugcaccggggccu

SEQ ID NO: 1298281 - RNA, 16 nt, Human
cugcaccggggccugg

SEQ ID NO: 1298282 - RNA, 19 nt, Human
cugcaagucaguccaggau

SEQ ID NO: 1298283 - RNA, 18 nt, Human
cugcaccggggccugggc

SEQ ID NO: 1298284 - RNA, 19 nt, Human
cugcaccggggccugggca

SEQ ID NO: 1298285 - RNA, 15 nt, Human
cucuuauaucuauau

SEQ ID NO: 1298286 - RNA, 18 nt, Human
cucuuauaucuauauuuu

SEQ ID NO: 1298287 - RNA, 13 nt, Human
cucuuaugcugua

SEQ ID NO: 1298288 - RNA, 17 nt, Human
cucuuaugcuguaccca

SEQ ID NO: 1298289 - RNA, 19 nt, Human
cucuuaugcuguacccagu

SEQ ID NO: 1298290 - RNA, 20 nt, Human
cucuuaugcuguacccaguu

SEQ ID NO: 1298291 - RNA, 19 nt, Human
cucuuauggauguccccag

SEQ ID NO: 1298292 - RNA, 21 nt, Human
cucuuauggauguccccagca

SEQ ID NO: 1298293 - RNA, 22 nt, Human
cucuuauggauguccccagcag

SEQ ID NO: 1298294 - RNA, 12 nt, Human
cugaugcugaca

SEQ ID NO: 1298295 - RNA, 14 nt, Human
cugaugcugccccu

SEQ ID NO: 1298296 - RNA, 21 nt, Human
cugaugauuuagagugcuguc

SEQ ID NO: 1298297 - RNA, 12 nt, Human
cugaugcagcuu

SEQ ID NO: 1298298 - RNA, 16 nt, Human
cugaugcagcuuauac

SEQ ID NO: 1298299 - RNA, 14 nt, Human
cugaugcaucagaa

SEQ ID NO: 1298300 - RNA, 17 nt, Human
cugaugcaucagaaagg

SEQ ID NO: 1298301 - RNA, 18 nt, Human
cugaugcaucagaaaggg

SEQ ID NO: 1298302 - RNA, 21 nt, Human
cugaugcaucagaaagggagg

SEQ ID NO: 1298303 - RNA, 22 nt, Human
cugaugcaucagaaagggaggg

SEQ ID NO: 1298304 - RNA, 23 nt, Human
cugaugcaucagaaagggagggc

SEQ ID NO: 1298305 - RNA, 17 nt, Human
cugauggagaaggaagg

SEQ ID NO: 1298306 - RNA, 15 nt, Human
cugauggagccuucc

SEQ ID NO: 1298307 - RNA, 16 nt, Human
cugauggagaaggaag

SEQ ID NO: 1298308 - RNA, 15 nt, Human
cugauggagaaggaa

SEQ ID NO: 1298309 - RNA, 14 nt, Human
cugauggagaagga

SEQ ID NO: 1298310 - RNA, 13 nt, Human
cugauggagaagg

SEQ ID NO: 1298311 - RNA, 18 nt, Human
cugcaaagcccagcuuga

SEQ ID NO: 1298312 - RNA, 23 nt, Human
cugaugggguggaaggcauggcg

SEQ ID NO: 1298313 - RNA, 21 nt, Human
cugaugggguggaaggcaugg

SEQ ID NO: 1298314 - RNA, 22 nt, Human
cugcacgaauggaagaggcacc

SEQ ID NO: 1298315 - RNA, 15 nt, Human
cugcacgugcgggug

SEQ ID NO: 1298316 - RNA, 17 nt, Human
cugcacuaacagagugg

SEQ ID NO: 1298317 - RNA, 14 nt, Human
cugcacuauaugca

SEQ ID NO: 1298318 - RNA, 16 nt, Human
cugcacuacugacaug

SEQ ID NO: 1298319 - RNA, 14 nt, Human
cugcacuacugaca

SEQ ID NO: 1298320 - RNA, 16 nt, Human
cugcacuccagccuga

SEQ ID NO: 1298321 - RNA, 20 nt, Human
cugcacuccagccugagcga

SEQ ID NO: 1298322 - RNA, 17 nt, Human
cugcacuccagccugag

SEQ ID NO: 1298323 - RNA, 17 nt, Human
cugcacucaaccuuaag

SEQ ID NO: 1298324 - RNA, 12 nt, Human
cugcagccucag

SEQ ID NO: 1298325 - RNA, 13 nt, Human
cugcagccucaga

SEQ ID NO: 1298326 - RNA, 14 nt, Human
cugcagccucagag

SEQ ID NO: 1298327 - RNA, 13 nt, Human
cugcagccucagg

SEQ ID NO: 1298328 - RNA, 14 nt, Human
cugcagccucagga

SEQ ID NO: 1298329 - RNA, 16 nt, Human
cugcagccucaggacu

SEQ ID NO: 1298330 - RNA, 17 nt, Human
cugcagccucaggacug

SEQ ID NO: 1298331 - RNA, 18 nt, Human
cugcagccucaggacugg

SEQ ID NO: 1298332 - RNA, 19 nt, Human
cugcagccucaggacuggg

SEQ ID NO: 1298333 - RNA, 20 nt, Human
cugcagccucaggacuggga

SEQ ID NO: 1298334 - RNA, 21 nt, Human
cugcagccucaggacugggag

SEQ ID NO: 1298335 - RNA, 11 nt, Human
cugcagccucc

SEQ ID NO: 1298336 - RNA, 22 nt, Human
cugcagccucaggacugggagc

SEQ ID NO: 1298337 - RNA, 11 nt, Human
cugcagcuugu

SEQ ID NO: 1298338 - RNA, 16 nt, Human
cugcagcuuguagcca

SEQ ID NO: 1298339 - RNA, 17 nt, Human
cugcagcuuguagccag

SEQ ID NO: 1298340 - RNA, 18 nt, Human
cugcagcuuguagccagc

SEQ ID NO: 1298341 - RNA, 19 nt, Human
cugcagcuuguagccagcc

SEQ ID NO: 1298342 - RNA, 20 nt, Human
cugcagcuuguagccagccg

SEQ ID NO: 1298343 - RNA, 21 nt, Human
cugcagcuuguagccagccgg

SEQ ID NO: 1298344 - RNA, 22 nt, Human
cugcagcuuguagccagccggg

SEQ ID NO: 1298345 - RNA, 13 nt, Human
cugcaggaaggag

SEQ ID NO: 1298346 - RNA, 14 nt, Human
cugcaggaaggagc

SEQ ID NO: 1298347 - RNA, 15 nt, Human
cugcaggaaggagcu

SEQ ID NO: 1298348 - RNA, 16 nt, Human
cugcaggaaggagcug

SEQ ID NO: 1298349 - RNA, 17 nt, Human
cugcaggaaggagcugc

SEQ ID NO: 1298350 - RNA, 18 nt, Human
cugcaggaaggagcugcc

SEQ ID NO: 1298351 - RNA, 19 nt, Human
cugcaggaaggagcugccu

SEQ ID NO: 1298352 - RNA, 20 nt, Human
cugcaggaaggagcugccug

SEQ ID NO: 1298353 - RNA, 21 nt, Human
cugcaggaaggagcugccugg

SEQ ID NO: 1298354 - RNA, 22 nt, Human
cugcaggaaggagcugccugga

SEQ ID NO: 1298355 - RNA, 23 nt, Human
cugcaggaaggagcugccuggac

SEQ ID NO: 1298356 - RNA, 14 nt, Human
cugcaggaaucuuu

SEQ ID NO: 1298357 - RNA, 20 nt, Human
cugcaggaucucaccaggca

SEQ ID NO: 1298358 - RNA, 21 nt, Human
cugcaggaucucaccaggcag

SEQ ID NO: 1298359 - RNA, 14 nt, Human
cugcaggcaggaac

SEQ ID NO: 1298360 - RNA, 15 nt, Human
cugcaggcaggaaca

SEQ ID NO: 1298361 - RNA, 22 nt, Human
cugcaggcaggaacaaacaggg

SEQ ID NO: 1298362 - RNA, 13 nt, Human
cugcaggcccugg

SEQ ID NO: 1298363 - RNA, 14 nt, Human
cugcaggcccuggc

SEQ ID NO: 1298364 - RNA, 15 nt, Human
cugcaggcccuggcc

SEQ ID NO: 1298365 - RNA, 16 nt, Human
cugcaggcccuggccu

SEQ ID NO: 1298366 - RNA, 17 nt, Human
cugcaggcccuggccuc

SEQ ID NO: 1298367 - RNA, 18 nt, Human
cugcaggcccuggccucc

SEQ ID NO: 1298368 - RNA, 19 nt, Human
cugcaggcccuggccuccc

SEQ ID NO: 1298369 - RNA, 20 nt, Human
gaagcaaugcuucaucccuu

SEQ ID NO: 1298370 - RNA, 22 nt, Human
gaagcaaccucaguaauuuaga

SEQ ID NO: 1298371 - RNA, 16 nt, Human
gaagcaagcuuaaugg

SEQ ID NO: 1298372 - RNA, 23 nt, Human
gaagcaacccaaauguucaucaa

SEQ ID NO: 1298373 - RNA, 17 nt, Human
gaagcaaaucgaaugaa

SEQ ID NO: 1298374 - RNA, 21 nt, Human
gaagcaaaugucaugcugccu

SEQ ID NO: 1298375 - RNA, 22 nt, Human
gaagcaaaugucaugcugccuu

SEQ ID NO: 1298376 - RNA, 20 nt, Human
gaagcaaguaaaaaggcuaa

SEQ ID NO: 1298377 - RNA, 23 nt, Human
gaagcaaaugucaugcugccuua

SEQ ID NO: 1298378 - RNA, 20 nt, Human
gaagcaaccucaguaauuua

SEQ ID NO: 1298379 - RNA, 14 nt, Human
gaagcaaaauuuuu

SEQ ID NO: 1298380 - RNA, 12 nt, Human
gaagacaaacuu

SEQ ID NO: 1298381 - RNA, 14 nt, Human
gaagacaauugaca

SEQ ID NO: 1298382 - RNA, 18 nt, Human
gaagacaauugacaacag

SEQ ID NO: 1298383 - RNA, 12 nt, Human
gaagacacagac

SEQ ID NO: 1298384 - RNA, 21 nt, Human
gaagacacagacugcgauuug

SEQ ID NO: 1298385 - RNA, 23 nt, Human
gaagacaaaacauacauuuugua

SEQ ID NO: 1298386 - RNA, 19 nt, Human
gaagacaaaacauacauuu

SEQ ID NO: 1298387 - RNA, 14 nt, Human
gaacugaaaucaua

SEQ ID NO: 1298388 - RNA, 20 nt, Human
gaacucugacaacagacuuc

SEQ ID NO: 1298389 - RNA, 22 nt, Human
gaacuccuugauuuuagccuuc

SEQ ID NO: 1298390 - RNA, 12 nt, Human
gaaccgaggcag

SEQ ID NO: 1298391 - RNA, 15 nt, Human
gaaccgaggcaggga

SEQ ID NO: 1298392 - RNA, 15 nt, Human
gaacuccuugauuuu

SEQ ID NO: 1298393 - RNA, 20 nt, Human
gaacccuaaauaauaaaaau

SEQ ID NO: 1298394 - RNA, 23 nt, Human
gaacccuuaaacaguugcacagc

SEQ ID NO: 1298395 - RNA, 19 nt, Human
gaacccucuguuccuuccc

SEQ ID NO: 1298396 - RNA, 16 nt, Human
gaacccugcccacucc

SEQ ID NO: 1298397 - RNA, 16 nt, Human
gaacuggccaagcuga

SEQ ID NO: 1298398 - RNA, 18 nt, Human
gaacuggccaagcugagg

SEQ ID NO: 1298399 - RNA, 23 nt, Human
gaagaauacuucucauuuuuuaa

SEQ ID NO: 1298400 - RNA, 21 nt, Human
gaagaaucucaucucagugaa

SEQ ID NO: 1298401 - RNA, 23 nt, Human
gaagaaugcacaagaauggauca

SEQ ID NO: 1298402 - RNA, 24 nt, Human
gaagaaugcuuaaucagauagaua

SEQ ID NO: 1298403 - RNA, 20 nt, Human
gaagaaugcacaagaaugga

SEQ ID NO: 1298404 - RNA, 22 nt, Human
gaagaauguuaagacuugacag

SEQ ID NO: 1298405 - RNA, 12 nt, Human
gaagaauuccag

SEQ ID NO: 1298406 - RNA, 13 nt, Human
gaagaauuauuuu

SEQ ID NO: 1298407 - RNA, 16 nt, Human
gaacugcugccacuga

SEQ ID NO: 1298408 - RNA, 17 nt, Human
gaacugcugccacugag

SEQ ID NO: 1298409 - RNA, 11 nt, Human
gaacuggaggc

SEQ ID NO: 1298410 - RNA, 16 nt, Human
gaacuggaggcaggga

SEQ ID NO: 1298411 - RNA, 14 nt, Human
gaacuggccaagcu

SEQ ID NO: 1298412 - RNA, 15 nt, Human
gaacuggccaagcug

SEQ ID NO: 1298413 - RNA, 12 nt, Human
gaacucugaaau

SEQ ID NO: 1298414 - RNA, 12 nt, Human
gaacugaacacc

SEQ ID NO: 1298415 - RNA, 21 nt, Human
gaacugaacaccauugaaggc

SEQ ID NO: 1298416 - RNA, 22 nt, Human
gaacugaacaccauugaaggcu

SEQ ID NO: 1298417 - RNA, 23 nt, Human
gaacugaacaccauugaaggcuu

SEQ ID NO: 1298418 - RNA, 12 nt, Human
gaacugaacuca

SEQ ID NO: 1298419 - RNA, 19 nt, Human
gaacugaagggggcggccu

SEQ ID NO: 1298420 - RNA, 22 nt, Human
gaacugcuagucaagugcgucc

SEQ ID NO: 1298421 - RNA, 13 nt, Human
gaacugcugccac

SEQ ID NO: 1298422 - RNA, 14 nt, Human
gaacugcugccacu

SEQ ID NO: 1298423 - RNA, 15 nt, Human
gaacugcugccacug

SEQ ID NO: 1298424 - RNA, 23 nt, Human
gaaguugacuuauaguacaugau

SEQ ID NO: 1298425 - RNA, 21 nt, Human
gaaguugacuuauaguacaug

SEQ ID NO: 1298426 - RNA, 19 nt, Human
gaaguuagcuuuaacuuaa

SEQ ID NO: 1298427 - RNA, 17 nt, Human
gaaguuagcuuuaacuu

SEQ ID NO: 1298428 - RNA, 15 nt, Human
gaaguuaguuuguau

SEQ ID NO: 1298429 - RNA, 16 nt, Human
gaaguuaguuuguaua

SEQ ID NO: 1298430 - RNA, 17 nt, Human
gaaguuaguuuguauau

SEQ ID NO: 1298431 - RNA, 21 nt, Human
gaaguugcugcuucucccagg

SEQ ID NO: 1298432 - RNA, 12 nt, Human
gaaguugcugcu

SEQ ID NO: 1298433 - RNA, 14 nt, Human
gaaguugcugcuuc

SEQ ID NO: 1298434 - RNA, 15 nt, Human
gaaggggacccuccg

SEQ ID NO: 1298435 - RNA, 20 nt, Human
gaauauuagugaccucagcu

SEQ ID NO: 1298436 - RNA, 19 nt, Human
gaauauaauuguuuuaucu

SEQ ID NO: 1298437 - RNA, 20 nt, Human
gaauauaauuguuuuaucug

SEQ ID NO: 1298438 - RNA, 22 nt, Human
gaauauacagcaggugcucaau

SEQ ID NO: 1298439 - RNA, 21 nt, Human
gaauaugucagugcugaugua

SEQ ID NO: 1298440 - RNA, 17 nt, Human
gaauauuaucuucauaa

SEQ ID NO: 1298441 - RNA, 13 nt, Human
gaauauuguccau

SEQ ID NO: 1298442 - RNA, 20 nt, Human
gaagcuaucguaaaauuaag

SEQ ID NO: 1298443 - RNA, 22 nt, Human
gaagcuagacacaugaagguaa

SEQ ID NO: 1298444 - RNA, 14 nt, Human
gaagcuagucuuuu

SEQ ID NO: 1298445 - RNA, 16 nt, Human
gaagcuagucuuuugc

SEQ ID NO: 1298446 - RNA, 20 nt, Human
gaagcuauuuuuuucaguuu

SEQ ID NO: 1298447 - RNA, 21 nt, Human
gaagcuagacacaugaaggua

SEQ ID NO: 1298448 - RNA, 23 nt, Human
gaagcuagacacaugaagguaaa

SEQ ID NO: 1298449 - RNA, 17 nt, Human
gaagcuccucuccccag

SEQ ID NO: 1298450 - RNA, 19 nt, Human
gaagcuccucuccccagcc

SEQ ID NO: 1298451 - RNA, 20 nt, Human
gaagcuccucuccccagccc

SEQ ID NO: 1298452 - RNA, 21 nt, Human
gaagcuccucuccccagccca

SEQ ID NO: 1298453 - RNA, 22 nt, Human
gaagcuccucuccccagcccag

SEQ ID NO: 1298454 - RNA, 23 nt, Human
gaagcuccucuccccagcccaga

SEQ ID NO: 1298455 - RNA, 20 nt, Human
gaagcucuuggagcugugag

SEQ ID NO: 1298456 - RNA, 16 nt, Human
gaaggcuucucucugu

SEQ ID NO: 1298457 - RNA, 14 nt, Human
gaagggccagagcc

SEQ ID NO: 1298458 - RNA, 15 nt, Human
gaagggccagagcca

SEQ ID NO: 1298459 - RNA, 16 nt, Human
gaagggccagagccag

SEQ ID NO: 1298460 - RNA, 17 nt, Human
gaagggccagagccagg

SEQ ID NO: 1298461 - RNA, 18 nt, Human
gaagggccagagccaggg

SEQ ID NO: 1298462 - RNA, 15 nt, Human
gaaggcuugggauuu

SEQ ID NO: 1298463 - RNA, 22 nt, Human
gaagggccugcccaguugcacu

SEQ ID NO: 1298464 - RNA, 22 nt, Human
gaagggcugcuucccugaagcu

SEQ ID NO: 1298465 - RNA, 16 nt, Human
gacauuugcucaugga

SEQ ID NO: 1298466 - RNA, 17 nt, Human
gacauuugcucauggaa

SEQ ID NO: 1298467 - RNA, 13 nt, Human
gacauuucucuaa

SEQ ID NO: 1298468 - RNA, 16 nt, Human
gacauuucucuaagag

SEQ ID NO: 1298469 - RNA, 23 nt, Human
gacauugaccuauuuccagaaau

SEQ ID NO: 1298470 - RNA, 22 nt, Human
gacauucugaaugcuucuaagu

SEQ ID NO: 1298471 - RNA, 13 nt, Human
gacauucugauuc

SEQ ID NO: 1298472 - RNA, 23 nt, Human
gacauucugauucgaaugacacu

SEQ ID NO: 1298473 - RNA, 22 nt, Human
gacauucugauucgaaugacac

SEQ ID NO: 1298474 - RNA, 16 nt, Human
gacauuccuugcugaa

SEQ ID NO: 1298475 - RNA, 12 nt, Human
gacauucugaau

SEQ ID NO: 1298476 - RNA, 14 nt, Human
gacauucugaaugc

SEQ ID NO: 1298477 - RNA, 15 nt, Human
gacauucugaaugcu

SEQ ID NO: 1298478 - RNA, 19 nt, Human
gacauucugaaugcuucua

SEQ ID NO: 1298479 - RNA, 20 nt, Human
gacauucugaaugcuucuaa

SEQ ID NO: 1298480 - RNA, 21 nt, Human
gacagugagacucugucucag

SEQ ID NO: 1298481 - RNA, 19 nt, Human
gacagugauauuggaacuu

SEQ ID NO: 1298482 - RNA, 21 nt, Human
gacauucaccugccccaacuc

SEQ ID NO: 1298483 - RNA, 22 nt, Human
gaccagcuuuucccaaaagccc

SEQ ID NO: 1298484 - RNA, 23 nt, Human
gaccagcugcuccgaggacccag

SEQ ID NO: 1298485 - RNA, 13 nt, Human
gaccagcucagga

SEQ ID NO: 1298486 - RNA, 14 nt, Human
gaccagcucaggac

SEQ ID NO: 1298487 - RNA, 22 nt, Human
gaccagcucaggacagaugcca

SEQ ID NO: 1298488 - RNA, 13 nt, Human
gaccagcuccccc

SEQ ID NO: 1298489 - RNA, 18 nt, Human
gaccagcucccccucccu

SEQ ID NO: 1298490 - RNA, 19 nt, Human
gaccagcucccccucccuc

SEQ ID NO: 1298491 - RNA, 20 nt, Human
gaccagcucccccucccucc

SEQ ID NO: 1298492 - RNA, 21 nt, Human
gaccagcucccccucccuccc

SEQ ID NO: 1298493 - RNA, 13 nt, Human
gaccagcugcucc

SEQ ID NO: 1298494 - RNA, 15 nt, Human
gaccagcugcuccga

SEQ ID NO: 1298495 - RNA, 19 nt, Human
gaccagcugcuccgaggac

SEQ ID NO: 1298496 - RNA, 20 nt, Human
gaccagcugcuccgaggacc

SEQ ID NO: 1298497 - RNA, 21 nt, Human
gaccagcugcuccgaggaccc

SEQ ID NO: 1298498 - RNA, 14 nt, Human
gaccagccuggccc

SEQ ID NO: 1298499 - RNA, 16 nt, Human
gaccagccuggcccac

SEQ ID NO: 1298500 - RNA, 15 nt, Human
gaccagccuggccca

SEQ ID NO: 1298501 - RNA, 12 nt, Human
gaccagcucagg

SEQ ID NO: 1298502 - RNA, 13 nt, Human
gaccauacuaauu

SEQ ID NO: 1298503 - RNA, 21 nt, Human
gaccagggcuccagccccucu

SEQ ID NO: 1298504 - RNA, 11 nt, Human
gaccagggcuc

SEQ ID NO: 1298505 - RNA, 18 nt, Human
gaccagggcuccagcccc

SEQ ID NO: 1298506 - RNA, 20 nt, Human
gaccauaauguuacauuauu

SEQ ID NO: 1298507 - RNA, 17 nt, Human
gacagaaccacagggcu

SEQ ID NO: 1298508 - RNA, 20 nt, Human
gacagaaccccuacaugaaa

SEQ ID NO: 1298509 - RNA, 15 nt, Human
gacacacugaagaag

SEQ ID NO: 1298510 - RNA, 16 nt, Human
gacacacugaagaagc

SEQ ID NO: 1298511 - RNA, 11 nt, Human
gacacagaaaa

SEQ ID NO: 1298512 - RNA, 16 nt, Human
gacacagaaaauguug

SEQ ID NO: 1298513 - RNA, 18 nt, Human
gacacagaaaauguugag

SEQ ID NO: 1298514 - RNA, 16 nt, Human
gaccaucugauuaaaa

SEQ ID NO: 1298515 - RNA, 21 nt, Human
gaccaugcucaucugcugguc

SEQ ID NO: 1298516 - RNA, 22 nt, Human
gaccucuccccuggaacugucu

SEQ ID NO: 1298517 - RNA, 14 nt, Human
gaccucugacagca

SEQ ID NO: 1298518 - RNA, 15 nt, Human
gaccucugacagcag

SEQ ID NO: 1298519 - RNA, 16 nt, Human
gaccucugacagcagc

SEQ ID NO: 1298520 - RNA, 17 nt, Human
gaccucugacagcagca

SEQ ID NO: 1298521 - RNA, 15 nt, Human
gaccucuggguuggg

SEQ ID NO: 1298522 - RNA, 15 nt, Human
gaccugaaauuccaa

SEQ ID NO: 1298523 - RNA, 17 nt, Human
gaccugaaauuccaaag

SEQ ID NO: 1298524 - RNA, 19 nt, Human
gaccugaaauuccaaaguc

SEQ ID NO: 1298525 - RNA, 12 nt, Human
gaccugaagaau

SEQ ID NO: 1298526 - RNA, 24 nt, Human
gaccugaaggguugacuuuaccca

SEQ ID NO: 1298527 - RNA, 23 nt, Human
gaccugaaauuccaaagucucua

SEQ ID NO: 1298528 - RNA, 16 nt, Human
gaccugagaauguauc

SEQ ID NO: 1298529 - RNA, 16 nt, Human
gaccugagaccugaag

SEQ ID NO: 1298530 - RNA, 11 nt, Human
gaccugagccu

SEQ ID NO: 1298531 - RNA, 12 nt, Human
gaccugagccug

SEQ ID NO: 1298532 - RNA, 13 nt, Human
gaccugagccugc

SEQ ID NO: 1298533 - RNA, 14 nt, Human
gaccugagccugcc

SEQ ID NO: 1298534 - RNA, 15 nt, Human
gaccugagccugccg

SEQ ID NO: 1298535 - RNA, 16 nt, Human
gaccugagccugccga

SEQ ID NO: 1298536 - RNA, 17 nt, Human
gaccugagccugccgag

SEQ ID NO: 1298537 - RNA, 18 nt, Human
gaccugagccugccgagc

SEQ ID NO: 1298538 - RNA, 19 nt, Human
gacgccugggggugccagg

SEQ ID NO: 1298539 - RNA, 21 nt, Human
gacgccugggggugccaggac

SEQ ID NO: 1298540 - RNA, 17 nt, Human
gacgcucucuggccuuc

SEQ ID NO: 1298541 - RNA, 16 nt, Human
gacgcucucuggccuu

SEQ ID NO: 1298542 - RNA, 19 nt, Human
gacuuuaacauaagcuauu

SEQ ID NO: 1298543 - RNA, 21 nt, Human
gacuuuacccauuuggguggg

SEQ ID NO: 1298544 - RNA, 19 nt, Human
gacuuuauagaucagccag

SEQ ID NO: 1298545 - RNA, 17 nt, Human
gacuuuauguaguuuuu

SEQ ID NO: 1298546 - RNA, 14 nt, Human
gacucuuaagaaga

SEQ ID NO: 1298547 - RNA, 15 nt, Human
gacucuuaagaagac

SEQ ID NO: 1298548 - RNA, 13 nt, Human
gacucugugcugg

SEQ ID NO: 1298549 - RNA, 14 nt, Human
gacucugugcuggc

SEQ ID NO: 1298550 - RNA, 16 nt, Human
gacucugugcuggcca

SEQ ID NO: 1298551 - RNA, 17 nt, Human
gacucugugcuggccag

SEQ ID NO: 1298552 - RNA, 18 nt, Human
gacucugugcuggccagc

SEQ ID NO: 1298553 - RNA, 21 nt, Human
gacucuuaagaagacugcauu

SEQ ID NO: 1298554 - RNA, 21 nt, Human
gacucugugcuggccagcgag

SEQ ID NO: 1298555 - RNA, 17 nt, Human
gacucuucugagcaccu

SEQ ID NO: 1298556 - RNA, 11 nt, Human
gacucuugccu

SEQ ID NO: 1298557 - RNA, 21 nt, Human
gacucuugccuguuucccagg

SEQ ID NO: 1298558 - RNA, 19 nt, Human
gacugaaaauauuguuuua

SEQ ID NO: 1298559 - RNA, 15 nt, Human
gacucaccuccccca

SEQ ID NO: 1298560 - RNA, 22 nt, Human
gacucaccucccccaucucuuc

SEQ ID NO: 1298561 - RNA, 12 nt, Human
gacucugccucc

SEQ ID NO: 1298562 - RNA, 16 nt, Human
gacucugccuccucuu

SEQ ID NO: 1298563 - RNA, 13 nt, Human
gacucugcagccu

SEQ ID NO: 1298564 - RNA, 14 nt, Human
gacucugcagccuc

SEQ ID NO: 1298565 - RNA, 15 nt, Human
gacucugcagccuca

SEQ ID NO: 1298566 - RNA, 16 nt, Human
gacucugcagccucag

SEQ ID NO: 1298567 - RNA, 18 nt, Human
gacucugcagccucagag

SEQ ID NO: 1298568 - RNA, 22 nt, Human
gacugugugcucaggagcccug

SEQ ID NO: 1298569 - RNA, 15 nt, Human
gacugugauucagaa

SEQ ID NO: 1298570 - RNA, 15 nt, Human
gacugugugugcccu

SEQ ID NO: 1298571 - RNA, 17 nt, Human
gacugugugugcccucu

SEQ ID NO: 1298572 - RNA, 21 nt, Human
gacugugugugcccucugggc

SEQ ID NO: 1298573 - RNA, 18 nt, Human
gacugugugugcccucug

SEQ ID NO: 1298574 - RNA, 21 nt, Human
gacuguuguuaucuguuugag

SEQ ID NO: 1298575 - RNA, 14 nt, Human
gacuuuaacauaag

SEQ ID NO: 1298576 - RNA, 18 nt, Human
gacuuuaacauaagcuau

SEQ ID NO: 1298577 - RNA, 13 nt, Human
gacuguuucaaac

SEQ ID NO: 1298578 - RNA, 13 nt, Human
gacuguuuggaaa

SEQ ID NO: 1298579 - RNA, 18 nt, Human
gacuuguuuuugcacaug

SEQ ID NO: 1298580 - RNA, 20 nt, Human
gacuguuguuaucuguuuga

SEQ ID NO: 1298581 - RNA, 19 nt, Human
gacuguuguuaucuguuug

SEQ ID NO: 1298582 - RNA, 14 nt, Human
gacuguuguuaucu

SEQ ID NO: 1298583 - RNA, 20 nt, Human
gacugaauuaugaaacuuuu

SEQ ID NO: 1298584 - RNA, 23 nt, Human
gacuguacuccucccaggcgccc

SEQ ID NO: 1298585 - RNA, 14 nt, Human
gacugaauuaugaa

SEQ ID NO: 1298586 - RNA, 13 nt, Human
gacuguagggagg

SEQ ID NO: 1298587 - RNA, 22 nt, Human
gacuguagggagggcggcaggg

SEQ ID NO: 1298588 - RNA, 23 nt, Human
gacuguagggagggcggcagggg

SEQ ID NO: 1298589 - RNA, 19 nt, Human
gacugucuggccccccugg

SEQ ID NO: 1298590 - RNA, 15 nt, Human
gacugucuggggagc

SEQ ID NO: 1298591 - RNA, 14 nt, Human
gacugucuggggag

SEQ ID NO: 1298592 - RNA, 19 nt, Human
gaggggccgaugcccagag

SEQ ID NO: 1298593 - RNA, 9 nt, Human
gagggcugc

SEQ ID NO: 1298594 - RNA, 13 nt, Human
gagggcucugagg

SEQ ID NO: 1298595 - RNA, 14 nt, Human
gagggcucugaggc

SEQ ID NO: 1298596 - RNA, 15 nt, Human
gagggcucugaggcg

SEQ ID NO: 1298597 - RNA, 16 nt, Human
gagggcugccuuugga

SEQ ID NO: 1298598 - RNA, 13 nt, Human
gagggcugcccug

SEQ ID NO: 1298599 - RNA, 20 nt, Human
gaggcugaggcuggcacagg

SEQ ID NO: 1298600 - RNA, 15 nt, Human
gaggcugaggcuggc

SEQ ID NO: 1298601 - RNA, 16 nt, Human
gaggcugaggcuggca

SEQ ID NO: 1298602 - RNA, 19 nt, Human
gaggcugaggcuggcacag

SEQ ID NO: 1298603 - RNA, 10 nt, Human
gagggcugga

SEQ ID NO: 1298604 - RNA, 16 nt, Human
gagggcuggaggccca

SEQ ID NO: 1298605 - RNA, 17 nt, Human
gagggcuggaggcccag

SEQ ID NO: 1298606 - RNA, 19 nt, Human
gagggcuggaggcccaggc

SEQ ID NO: 1298607 - RNA, 20 nt, Human
gagggcuggaggcccaggcu

SEQ ID NO: 1298608 - RNA, 23 nt, Human
gagggcuggaggcccaggcuggg

SEQ ID NO: 1298609 - RNA, 10 nt, Human
gagggcuggc

SEQ ID NO: 1298610 - RNA, 13 nt, Human
gagggcuggcugg

SEQ ID NO: 1298611 - RNA, 14 nt, Human
gagggcuggcuggc

SEQ ID NO: 1298612 - RNA, 16 nt, Human
gagggcuggcuggccu

SEQ ID NO: 1298613 - RNA, 18 nt, Human
gagggcuggcuggccuca

SEQ ID NO: 1298614 - RNA, 18 nt, Human
gaggccagaccauggaca

SEQ ID NO: 1298615 - RNA, 12 nt, Human
gaggccagacca

SEQ ID NO: 1298616 - RNA, 17 nt, Human
gaggcaucgcaauguaa

SEQ ID NO: 1298617 - RNA, 18 nt, Human
gaggccacacucagcaca

SEQ ID NO: 1298618 - RNA, 21 nt, Human
gaggccacacucagcacaagg

SEQ ID NO: 1298619 - RNA, 12 nt, Human
gaggcuccacuu

SEQ ID NO: 1298620 - RNA, 12 nt, Human
gaggcucagguc

SEQ ID NO: 1298621 - RNA, 14 nt, Human
gaggcuccagaggg

SEQ ID NO: 1298622 - RNA, 23 nt, Human
gaggcuccacuuggucugugaga

SEQ ID NO: 1298623 - RNA, 14 nt, Human
gaggcugaggccug

SEQ ID NO: 1298624 - RNA, 16 nt, Human
gaggcugaggccugga

SEQ ID NO: 1298625 - RNA, 18 nt, Human
gaggcugaggccuggacu

SEQ ID NO: 1298626 - RNA, 19 nt, Human
gaggcugaggccuggacuu

SEQ ID NO: 1298627 - RNA, 19 nt, Human
gaggcuccacuuggucugu

SEQ ID NO: 1298628 - RNA, 22 nt, Human
gaggcuagguggguugaaagcc

SEQ ID NO: 1298629 - RNA, 20 nt, Human
gaggcuauuauuuucacugu

SEQ ID NO: 1298630 - RNA, 14 nt, Human
gaggcucagauugu

SEQ ID NO: 1298631 - RNA, 10 nt, Human
gaggcucagg

SEQ ID NO: 1298632 - RNA, 23 nt, Human
gaggcaggggcuuccuggugcug

SEQ ID NO: 1298633 - RNA, 22 nt, Human
gaggcaguaccugggcaagcug

SEQ ID NO: 1298634 - RNA, 23 nt, Human
gaggcaguaccugggcaagcugg

SEQ ID NO: 1298635 - RNA, 17 nt, Human
gaggcaggggcuuccug

SEQ ID NO: 1298636 - RNA, 18 nt, Human
gaggcaggggcuuccugg

SEQ ID NO: 1298637 - RNA, 20 nt, Human
gaggcaggggcuuccuggug

SEQ ID NO: 1298638 - RNA, 21 nt, Human
gaggcaggggcuuccuggugc

SEQ ID NO: 1298639 - RNA, 20 nt, Human
gaggacgcucucuggccuuc

SEQ ID NO: 1298640 - RNA, 16 nt, Human
gaggcaggggcuuccu

SEQ ID NO: 1298641 - RNA, 15 nt, Human
gaggacgcucucugg

SEQ ID NO: 1298642 - RNA, 21 nt, Human
gaggaccugagccugccgagc

SEQ ID NO: 1298643 - RNA, 12 nt, Human
gaggaccugagc

SEQ ID NO: 1298644 - RNA, 13 nt, Human
gaggaccugagcc

SEQ ID NO: 1298645 - RNA, 14 nt, Human
gaggaccugagccu

SEQ ID NO: 1298646 - RNA, 15 nt, Human
gaggaccugagccug

SEQ ID NO: 1298647 - RNA, 16 nt, Human
gaggaccugagccugc

SEQ ID NO: 1298648 - RNA, 17 nt, Human
gaggaccugagccugcc

SEQ ID NO: 1298649 - RNA, 18 nt, Human
gaggaccugagccugccg

SEQ ID NO: 1298650 - RNA, 22 nt, Human
gaggaccugagccugccgagca

SEQ ID NO: 1298651 - RNA, 21 nt, Human
gagcuggagaugaggccagac

SEQ ID NO: 1298652 - RNA, 20 nt, Human
gagcuggagaugaggccaga

SEQ ID NO: 1298653 - RNA, 17 nt, Human
gagcuggaccucaccaa

SEQ ID NO: 1298654 - RNA, 16 nt, Human
gagcgaguggagucug

SEQ ID NO: 1298655 - RNA, 20 nt, Human
gagcgaguggagucugccac

SEQ ID NO: 1298656 - RNA, 23 nt, Human
gagcgaguggagucugccaccca

SEQ ID NO: 1298657 - RNA, 21 nt, Human
gagcgcacagggagugcacau

SEQ ID NO: 1298658 - RNA, 21 nt, Human
gagcgcccacuagacccacug

SEQ ID NO: 1298659 - RNA, 23 nt, Human
gagcgcccagcuccugacacugc

SEQ ID NO: 1298660 - RNA, 12 nt, Human
gagcgcccugca

SEQ ID NO: 1298661 - RNA, 13 nt, Human
gagcgcccugcag

SEQ ID NO: 1298662 - RNA, 14 nt, Human
gagcgcccugcaga

SEQ ID NO: 1298663 - RNA, 16 nt, Human
gagcgcccugcagacc

SEQ ID NO: 1298664 - RNA, 19 nt, Human
gagcgcccugcagacccug

SEQ ID NO: 1298665 - RNA, 20 nt, Human
gagcgcccugcagacccugc

SEQ ID NO: 1298666 - RNA, 21 nt, Human
gagcgcccugcagacccugcc

SEQ ID NO: 1298667 - RNA, 23 nt, Human
gagcgcccugcagacccugcccu

SEQ ID NO: 1298668 - RNA, 22 nt, Human
gagcgcccugcagacccugccc

SEQ ID NO: 1298669 - RNA, 19 nt, Human
gagcgccuccauccaaggc

SEQ ID NO: 1298670 - RNA, 23 nt, Human
gagcgccuccauccaaggccagg

SEQ ID NO: 1298671 - RNA, 16 nt, Human
gaguuuaaauuguaau

SEQ ID NO: 1298672 - RNA, 14 nt, Human
gaguuuaaaaucau

SEQ ID NO: 1298673 - RNA, 20 nt, Human
gaguuuaaaaucaucagaaa

SEQ ID NO: 1298674 - RNA, 18 nt, Human
gaguugcugcaaaccuga

SEQ ID NO: 1298675 - RNA, 22 nt, Human
gaguugcuuuucagcugagguu

SEQ ID NO: 1298676 - RNA, 15 nt, Human
gaguuggaaucacug

SEQ ID NO: 1298677 - RNA, 15 nt, Human
gaggugagaccaccu

SEQ ID NO: 1298678 - RNA, 22 nt, Human
gaggugaccccagggcacagga

SEQ ID NO: 1298679 - RNA, 23 nt, Human
gaggugaccccagggcacaggag

SEQ ID NO: 1298680 - RNA, 17 nt, Human
gaggugaccccagggca

SEQ ID NO: 1298681 - RNA, 18 nt, Human
gaggugaccccagggcac

SEQ ID NO: 1298682 - RNA, 19 nt, Human
gaggugaccccagggcaca

SEQ ID NO: 1298683 - RNA, 21 nt, Human
gaggugaccccagggcacagg

SEQ ID NO: 1298684 - RNA, 16 nt, Human
gaggugagaccaccuc

SEQ ID NO: 1298685 - RNA, 14 nt, Human
gaggugcacuggga

SEQ ID NO: 1298686 - RNA, 22 nt, Human
gaggugcuucuaguucugccag

SEQ ID NO: 1298687 - RNA, 23 nt, Human
gaggugcuucuaguucugccagg

SEQ ID NO: 1298688 - RNA, 17 nt, Human
gagucacuacgccuggc

SEQ ID NO: 1298689 - RNA, 22 nt, Human
gagucagacauuuuaagauggu

SEQ ID NO: 1298690 - RNA, 15 nt, Human
gagucagagccaugu

SEQ ID NO: 1298691 - RNA, 23 nt, Human
gagucaggacuugaacccagguc

SEQ ID NO: 1298692 - RNA, 17 nt, Human
gaguccaucagccucca

SEQ ID NO: 1298693 - RNA, 14 nt, Human
gagugaguggcccu

SEQ ID NO: 1298694 - RNA, 19 nt, Human
gagugauagucuuuugcuu

SEQ ID NO: 1298695 - RNA, 16 nt, Human
gagugacuacacacag

SEQ ID NO: 1298696 - RNA, 15 nt, Human
gagugacucaagaag

SEQ ID NO: 1298697 - RNA, 23 nt, Human
gagugacucaagaagugaagaau

SEQ ID NO: 1298698 - RNA, 14 nt, Human
gagugcaccaaaga

SEQ ID NO: 1298699 - RNA, 17 nt, Human
gagugcaccaaagagaa

SEQ ID NO: 1298700 - RNA, 15 nt, Human
gagugcaccaaagag

SEQ ID NO: 1298701 - RNA, 21 nt, Human
gaguggagucugccacccagg

SEQ ID NO: 1298702 - RNA, 17 nt, Human
gaguugaucuggaaccc

SEQ ID NO: 1298703 - RNA, 19 nt, Human
gaguugaucuggaacccag

SEQ ID NO: 1298704 - RNA, 20 nt, Human
gaguugaucuggaacccaga

SEQ ID NO: 1298705 - RNA, 21 nt, Human
gaguugaucuggaacccagac

SEQ ID NO: 1298706 - RNA, 19 nt, Human
gaguggagucugccaccca

SEQ ID NO: 1298707 - RNA, 20 nt, Human
gaguggagucugccacccag

SEQ ID NO: 1298708 - RNA, 14 nt, Human
gaguggcagcccag

SEQ ID NO: 1298709 - RNA, 15 nt, Human
gaguggcagcccagc

SEQ ID NO: 1298710 - RNA, 16 nt, Human
gaguggcagcccagcc

SEQ ID NO: 1298711 - RNA, 18 nt, Human
gaguggcagcccagccag

SEQ ID NO: 1298712 - RNA, 21 nt, Human
gaguggcagcccagccagcgu

SEQ ID NO: 1298713 - RNA, 22 nt, Human
gaguggcagcccagccagcguc

SEQ ID NO: 1298714 - RNA, 14 nt, Human
gaguggcaggggac

SEQ ID NO: 1298715 - RNA, 16 nt, Human
gaguggcaggggacag

SEQ ID NO: 1298716 - RNA, 19 nt, Human
gaguggcaggggacaggag

SEQ ID NO: 1298717 - RNA, 23 nt, Human
gaguggcaggggacaggagucca

SEQ ID NO: 1298718 - RNA, 14 nt, Human
gaguugaucuggaa

SEQ ID NO: 1298719 - RNA, 16 nt, Human
gaguugaucuggaacc

SEQ ID NO: 1298720 - RNA, 21 nt, Human
gagguccuuaggccucugaga

SEQ ID NO: 1298721 - RNA, 19 nt, Human
gagguccuuaggccucuga

SEQ ID NO: 1298722 - RNA, 21 nt, Human
gaggucgguagguucagccaa

SEQ ID NO: 1298723 - RNA, 22 nt, Human
gaggucgguagguucagccaag

SEQ ID NO: 1298724 - RNA, 23 nt, Human
gaggucgguagguucagccaagg

SEQ ID NO: 1298725 - RNA, 13 nt, Human
gaggucuaaucua

SEQ ID NO: 1298726 - RNA, 15 nt, Human
gaggugaccccaggg

SEQ ID NO: 1298727 - RNA, 16 nt, Human
gaggugaccccagggc

SEQ ID NO: 1298728 - RNA, 21 nt, Human
gaggucucagccccuuucccu

SEQ ID NO: 1298729 - RNA, 13 nt, Human
gaggucucagccc

SEQ ID NO: 1298730 - RNA, 21 nt, Human
gauuuuuuucccaauugagaa

SEQ ID NO: 1298731 - RNA, 14 nt, Human
gauuuuuuccaaaa

SEQ ID NO: 1298732 - RNA, 18 nt, Human
gauuuuuuccuucaaagu

SEQ ID NO: 1298733 - RNA, 21 nt, Human
gauuuuuuccuucaaaguuua

SEQ ID NO: 1298734 - RNA, 15 nt, Human
gauuuuuuuuucaua

SEQ ID NO: 1298735 - RNA, 20 nt, Human
gcaaguauuagaauaccaca

SEQ ID NO: 1298736 - RNA, 18 nt, Human
gcaagucagaauagaaau

SEQ ID NO: 1298737 - RNA, 15 nt, Human
gcaaguucccaguug

SEQ ID NO: 1298738 - RNA, 13 nt, Human
gcaaguucccagu

SEQ ID NO: 1298739 - RNA, 20 nt, Human
gcaauauacuggaaagcuuu

SEQ ID NO: 1298740 - RNA, 20 nt, Human
gcacagugcaucucagccca

SEQ ID NO: 1298741 - RNA, 21 nt, Human
gcacagugcaucucagcccac

SEQ ID NO: 1298742 - RNA, 14 nt, Human
gcacaccccacucc

SEQ ID NO: 1298743 - RNA, 17 nt, Human
gcacauaguagaacgcu

SEQ ID NO: 1298744 - RNA, 23 nt, Human
gcacauauggaauuuugcaaaga

SEQ ID NO: 1298745 - RNA, 18 nt, Human
gcacaauaacuccuccca

SEQ ID NO: 1298746 - RNA, 19 nt, Human
gcacaauaacuccucccag

SEQ ID NO: 1298747 - RNA, 20 nt, Human
gcacaauaacuccucccagg

SEQ ID NO: 1298748 - RNA, 21 nt, Human
gcacaauaacuccucccaggg

SEQ ID NO: 1298749 - RNA, 22 nt, Human
gcacaauaacuccucccagggu

SEQ ID NO: 1298750 - RNA, 21 nt, Human
gcacaaguguaaugaauaccu

SEQ ID NO: 1298751 - RNA, 19 nt, Human
gcacaaguguaaugaauac

SEQ ID NO: 1298752 - RNA, 17 nt, Human
gcacaaguguaaugaau

SEQ ID NO: 1298753 - RNA, 14 nt, Human
gcacaaguguaaug

SEQ ID NO: 1298754 - RNA, 16 nt, Human
gcacaauaaaaauguu

SEQ ID NO: 1298755 - RNA, 17 nt, Human
gcacaauaaaaauguuu

SEQ ID NO: 1298756 - RNA, 17 nt, Human
gcacaaguuauuuaaau

SEQ ID NO: 1298757 - RNA, 18 nt, Human
gcacaauaaauggcugua

SEQ ID NO: 1298758 - RNA, 19 nt, Human
gcacaauaaauggcuguaa

SEQ ID NO: 1298759 - RNA, 13 nt, Human
gcacaucccugga

SEQ ID NO: 1298760 - RNA, 14 nt, Human
gcaccggggccugg

SEQ ID NO: 1298761 - RNA, 18 nt, Human
gcacaucucaacaggccu

SEQ ID NO: 1298762 - RNA, 19 nt, Human
gcacaucucaacaggccuc

SEQ ID NO: 1298763 - RNA, 22 nt, Human
gcacaucucaacaggccucagg

SEQ ID NO: 1298764 - RNA, 16 nt, Human
gcaccggggccugggc

SEQ ID NO: 1298765 - RNA, 21 nt, Human
gcaccuaccaccacgcccggc

SEQ ID NO: 1298766 - RNA, 19 nt, Human
gcaccggggccugggcagg

SEQ ID NO: 1298767 - RNA, 21 nt, Human
gcacaucucaacaggccucag

SEQ ID NO: 1298768 - RNA, 22 nt, Human
gcaccuaccaccacgcccggcu

SEQ ID NO: 1298769 - RNA, 14 nt, Human
gcaccuacuuacau

SEQ ID NO: 1298770 - RNA, 17 nt, Human
gcacucgcuagcagugg

SEQ ID NO: 1298771 - RNA, 20 nt, Human
gcacucgcuagcaguggcag

SEQ ID NO: 1298772 - RNA, 22 nt, Human
gcacuugcgguuccggcaugga

SEQ ID NO: 1298773 - RNA, 15 nt, Human
gcacuugcuggaaga

SEQ ID NO: 1298774 - RNA, 15 nt, Human
gauucugcaguaaau

SEQ ID NO: 1298775 - RNA, 16 nt, Human
gauucugcaguaaauc

SEQ ID NO: 1298776 - RNA, 16 nt, Human
gauuuaccacuugugu

SEQ ID NO: 1298777 - RNA, 15 nt, Human
gauuuacgcucauug

SEQ ID NO: 1298778 - RNA, 20 nt, Human
gauuuaggagaagccaggaa

SEQ ID NO: 1298779 - RNA, 13 nt, Human
gauuuaguuucag

SEQ ID NO: 1298780 - RNA, 14 nt, Human
gauuuaguuucagu

SEQ ID NO: 1298781 - RNA, 15 nt, Human
gauuuaguuucagua

SEQ ID NO: 1298782 - RNA, 16 nt, Human
gauuuaguuucaguag

SEQ ID NO: 1298783 - RNA, 20 nt, Human
gauuuuuuacagcugccugc

SEQ ID NO: 1298784 - RNA, 15 nt, Human
gauuuauuaaagaaa

SEQ ID NO: 1298785 - RNA, 16 nt, Human
gauuuauuaaagaaaa

SEQ ID NO: 1298786 - RNA, 19 nt, Human
gauuuauuaaagaaaaaaa

SEQ ID NO: 1298787 - RNA, 19 nt, Human
gauuuuuuaauaauuuaga

SEQ ID NO: 1298788 - RNA, 17 nt, Human
gauuuauuaaagaaaaa

SEQ ID NO: 1298789 - RNA, 11 nt, Human
gauuuuuucca

SEQ ID NO: 1298790 - RNA, 12 nt, Human
gauuuuuuccaa

SEQ ID NO: 1298791 - RNA, 13 nt, Human
gauuuuuuccaaa

SEQ ID NO: 1298792 - RNA, 15 nt, Human
gauuuaucacacaaa

SEQ ID NO: 1298793 - RNA, 17 nt, Human
gauuuaucacacaaagc

SEQ ID NO: 1298794 - RNA, 20 nt, Human
gauuuaucacacaaagcaga

SEQ ID NO: 1298795 - RNA, 19 nt, Human
gauuuaucacacaaagcag

SEQ ID NO: 1298796 - RNA, 12 nt, Human
gauuuauuaaag

SEQ ID NO: 1298797 - RNA, 13 nt, Human
gauuuauuaaaga

SEQ ID NO: 1298798 - RNA, 14 nt, Human
gauuuauuaaagaa

SEQ ID NO: 1298799 - RNA, 22 nt, Human
gauucugguuccagggucccuc

SEQ ID NO: 1298800 - RNA, 17 nt, Human
gauucugguuccagggu

SEQ ID NO: 1298801 - RNA, 18 nt, Human
gauucugcaguaaaucuu

SEQ ID NO: 1298802 - RNA, 19 nt, Human
gauucugcaguaaaucuuu

SEQ ID NO: 1298803 - RNA, 21 nt, Human
gauucugcaguaaaucuuuua

SEQ ID NO: 1298804 - RNA, 12 nt, Human
gauucugccuuu

SEQ ID NO: 1298805 - RNA, 15 nt, Human
gauucugccuuugcc

SEQ ID NO: 1298806 - RNA, 17 nt, Human
gauucugccuuugccag

SEQ ID NO: 1298807 - RNA, 17 nt, Human
gauucugcuggccucug

SEQ ID NO: 1298808 - RNA, 19 nt, Human
gauucugcuggccucugcg

SEQ ID NO: 1298809 - RNA, 22 nt, Human
gauucugcuggccucugcgagu

SEQ ID NO: 1298810 - RNA, 15 nt, Human
gauuuaccacuugug

SEQ ID NO: 1298811 - RNA, 14 nt, Human
gauucuuccaucug

SEQ ID NO: 1298812 - RNA, 14 nt, Human
gauuauauuaugaa

SEQ ID NO: 1298813 - RNA, 13 nt, Human
gauuauagauucu

SEQ ID NO: 1298814 - RNA, 14 nt, Human
gauuauagauucua

SEQ ID NO: 1298815 - RNA, 15 nt, Human
gauuauagauucuaa

SEQ ID NO: 1298816 - RNA, 17 nt, Human
gauuauagauucuaaag

SEQ ID NO: 1298817 - RNA, 18 nt, Human
gauuauagauucuaaaga

SEQ ID NO: 1298818 - RNA, 22 nt, Human
gauuauagauucuaaagauucu

SEQ ID NO: 1298819 - RNA, 20 nt, Human
gauuauaggcaccuaccacc

SEQ ID NO: 1298820 - RNA, 13 nt, Human
gauuaucguuuuc

SEQ ID NO: 1298821 - RNA, 21 nt, Human
gauuaucguuuucuuaaagug

SEQ ID NO: 1298822 - RNA, 20 nt, Human
gauuaucguuuucuuaaagu

SEQ ID NO: 1298823 - RNA, 14 nt, Human
gauuaugggucaca

SEQ ID NO: 1298824 - RNA, 20 nt, Human
gauguauguugaagccuuug

SEQ ID NO: 1298825 - RNA, 16 nt, Human
gauguaggagggacug

SEQ ID NO: 1298826 - RNA, 14 nt, Human
gauguaggagggac

SEQ ID NO: 1298827 - RNA, 13 nt, Human
gauguaguauuuu

SEQ ID NO: 1298828 - RNA, 21 nt, Human
gauguauguugaagccuuugu

SEQ ID NO: 1298829 - RNA, 15 nt, Human
gaugucaauuucugu

SEQ ID NO: 1298830 - RNA, 18 nt, Human
gaugucaauuucuguguu

SEQ ID NO: 1298831 - RNA, 13 nt, Human
gauuauucagugu

SEQ ID NO: 1298832 - RNA, 14 nt, Human
gauuauucaguguc

SEQ ID NO: 1298833 - RNA, 15 nt, Human
gauuauucaguguca

SEQ ID NO: 1298834 - RNA, 13 nt, Human
gauuaugggucac

SEQ ID NO: 1298835 - RNA, 15 nt, Human
gauggagaaggaagg

SEQ ID NO: 1298836 - RNA, 16 nt, Human
gauggagaaggaaggc

SEQ ID NO: 1298837 - RNA, 14 nt, Human
gauggagaaggaag

SEQ ID NO: 1298838 - RNA, 13 nt, Human
gauggagaaggaa

SEQ ID NO: 1298839 - RNA, 12 nt, Human
gauggagaagga

SEQ ID NO: 1298840 - RNA, 13 nt, Human
gauggacaucuug

SEQ ID NO: 1298841 - RNA, 18 nt, Human
gaugauacauccaaagca

SEQ ID NO: 1298842 - RNA, 14 nt, Human
gaugcugauggagc

SEQ ID NO: 1298843 - RNA, 12 nt, Human
gaugcugccccu

SEQ ID NO: 1298844 - RNA, 13 nt, Human
gaugcugccccuc

SEQ ID NO: 1298845 - RNA, 18 nt, Human
gauguagaggagaaacug

SEQ ID NO: 1298846 - RNA, 13 nt, Human
gauguaaagaugu

SEQ ID NO: 1298847 - RNA, 17 nt, Human
gauguaaaaucuuguca

SEQ ID NO: 1298848 - RNA, 12 nt, Human
gauguaaagaug

SEQ ID NO: 1298849 - RNA, 18 nt, Human
gauguagcagaauauuuc

SEQ ID NO: 1298850 - RNA, 13 nt, Human
gauguaggaggga

SEQ ID NO: 1298851 - RNA, 13 nt, Human
gauguaaaaucuu

SEQ ID NO: 1298852 - RNA, 14 nt, Human
gauguaaaaucuug

SEQ ID NO: 1298853 - RNA, 15 nt, Human
gauguaaaaucuugu

SEQ ID NO: 1298854 - RNA, 16 nt, Human
gauguaaaaucuuguc

SEQ ID NO: 1298855 - RNA, 20 nt, Human
gauguaaaaucuugucaugu

SEQ ID NO: 1298856 - RNA, 21 nt, Human
gaugagggcagcagccagccc

SEQ ID NO: 1298857 - RNA, 20 nt, Human
gaugagggcagcagccagcc

SEQ ID NO: 1298858 - RNA, 12 nt, Human
gaugagggcagc

SEQ ID NO: 1298859 - RNA, 13 nt, Human
gaugagggcagca

SEQ ID NO: 1298860 - RNA, 14 nt, Human
gaugagggcagcag

SEQ ID NO: 1298861 - RNA, 15 nt, Human
gaugagggcagcagc

SEQ ID NO: 1298862 - RNA, 16 nt, Human
gaugagggcagcagcc

SEQ ID NO: 1298863 - RNA, 17 nt, Human
gaugagggcagcagcca

SEQ ID NO: 1298864 - RNA, 18 nt, Human
gaugagggcagcagccag

SEQ ID NO: 1298865 - RNA, 16 nt, Human
gaugauaaacgacuuu

SEQ ID NO: 1298866 - RNA, 19 nt, Human
gaugauaaagagacaguga

SEQ ID NO: 1298867 - RNA, 13 nt, Human
cucugcagguccc

SEQ ID NO: 1298868 - RNA, 12 nt, Human
cucugcagccuc

SEQ ID NO: 1298869 - RNA, 13 nt, Human
cucugcagccuca

SEQ ID NO: 1298870 - RNA, 14 nt, Human
cucugcagccucag

SEQ ID NO: 1298871 - RNA, 15 nt, Human
cucugcagccucaga

SEQ ID NO: 1298872 - RNA, 16 nt, Human
cucugcagccucagag

SEQ ID NO: 1298873 - RNA, 19 nt, Human
cucugcagccucagagaca

SEQ ID NO: 1298874 - RNA, 12 nt, Human
cucugcucugau

SEQ ID NO: 1298875 - RNA, 13 nt, Human
cucugcucugcgu

SEQ ID NO: 1298876 - RNA, 15 nt, Human
cucugcucugaugca

SEQ ID NO: 1298877 - RNA, 14 nt, Human
cucugcucugaugc

SEQ ID NO: 1298878 - RNA, 13 nt, Human
cucugcugaccug

SEQ ID NO: 1298879 - RNA, 17 nt, Human
cucugcugaccugcuga

SEQ ID NO: 1298880 - RNA, 16 nt, Human
cucugcugaccugcug

SEQ ID NO: 1298881 - RNA, 16 nt, Human
cucugcugcugucccu

SEQ ID NO: 1298882 - RNA, 21 nt, Human
cucugcugcugucccuccccc

SEQ ID NO: 1298883 - RNA, 22 nt, Human
cucugcugcugucccucccccu

SEQ ID NO: 1298884 - RNA, 12 nt, Human
cucuguccccag

SEQ ID NO: 1298885 - RNA, 13 nt, Human
cucuguccccagc

SEQ ID NO: 1298886 - RNA, 14 nt, Human
cucuguccccagcc

SEQ ID NO: 1298887 - RNA, 16 nt, Human
cucuguccccagccug

SEQ ID NO: 1298888 - RNA, 17 nt, Human
cucuguccccagccugg

SEQ ID NO: 1298889 - RNA, 19 nt, Human
cucuguccugaaggccuga

SEQ ID NO: 1298890 - RNA, 12 nt, Human
cucuguccugaa

SEQ ID NO: 1298891 - RNA, 13 nt, Human
cucuguccugaag

SEQ ID NO: 1298892 - RNA, 17 nt, Human
cucuguccugaaggccu

SEQ ID NO: 1298893 - RNA, 22 nt, Human
cucuguccugaaggccugaggu

SEQ ID NO: 1298894 - RNA, 13 nt, Human
cucuuagcugucu

SEQ ID NO: 1298895 - RNA, 22 nt, Human
cucuuagggacagucaaaacca

SEQ ID NO: 1298896 - RNA, 18 nt, Human
cucuuagucuagguccuu

SEQ ID NO: 1298897 - RNA, 20 nt, Human
cucugcacacccuccagaga

SEQ ID NO: 1298898 - RNA, 22 nt, Human
cucugcacacccuccagagaca

SEQ ID NO: 1298899 - RNA, 16 nt, Human
cucuccccaugauguu

SEQ ID NO: 1298900 - RNA, 19 nt, Human
cucuauguucuaagaagug

SEQ ID NO: 1298901 - RNA, 19 nt, Human
cucuauggggcauccucuu

SEQ ID NO: 1298902 - RNA, 19 nt, Human
cucuccccccgccugccac

SEQ ID NO: 1298903 - RNA, 14 nt, Human
cucucccugcaugg

SEQ ID NO: 1298904 - RNA, 16 nt, Human
cucucuggccuucggc

SEQ ID NO: 1298905 - RNA, 14 nt, Human
cucucuggccuucg

SEQ ID NO: 1298906 - RNA, 19 nt, Human
cucucugugggcuggcagu

SEQ ID NO: 1298907 - RNA, 19 nt, Human
cucucuuagggacagucaa

SEQ ID NO: 1298908 - RNA, 23 nt, Human
cucucuuauugccucacuucagg

SEQ ID NO: 1298909 - RNA, 16 nt, Human
cucucuucucuccagc

SEQ ID NO: 1298910 - RNA, 17 nt, Human
cucuauguaucaaaugu

SEQ ID NO: 1298911 - RNA, 16 nt, Human
cucguggacaccugcc

SEQ ID NO: 1298912 - RNA, 15 nt, Human
cucguggacaccugc

SEQ ID NO: 1298913 - RNA, 20 nt, Human
cucuaugaacucuguuuucu

SEQ ID NO: 1298914 - RNA, 13 nt, Human
cucuaugagucua

SEQ ID NO: 1298915 - RNA, 14 nt, Human
cucuaugagucuag

SEQ ID NO: 1298916 - RNA, 15 nt, Human
cucuaugagucuaga

SEQ ID NO: 1298917 - RNA, 16 nt, Human
cucuaugagucuagau

SEQ ID NO: 1298918 - RNA, 17 nt, Human
cucuaugagucuagaug

SEQ ID NO: 1298919 - RNA, 19 nt, Human
cucuaugagucuagauguu

SEQ ID NO: 1298920 - RNA, 14 nt, Human
cucguggacaccug

SEQ ID NO: 1298921 - RNA, 12 nt, Human
cucguggacacc

SEQ ID NO: 1298922 - RNA, 17 nt, Human
cucgucucuuuuacccu

SEQ ID NO: 1298923 - RNA, 14 nt, Human
cucguccucguuug

SEQ ID NO: 1298924 - RNA, 19 nt, Human
cucguccucguuuguguuc

SEQ ID NO: 1298925 - RNA, 23 nt, Human
cucgucucuuuuacccuggcccc

SEQ ID NO: 1298926 - RNA, 20 nt, Human
cuccuuucacaaccuucugu

SEQ ID NO: 1298927 - RNA, 13 nt, Human
cuccuuuaauugu

SEQ ID NO: 1298928 - RNA, 18 nt, Human
cucccccccaugcacugu

SEQ ID NO: 1298929 - RNA, 17 nt, Human
cucccaggcaaggcugu

SEQ ID NO: 1298930 - RNA, 18 nt, Human
cucccaggcaaggcugug

SEQ ID NO: 1298931 - RNA, 22 nt, Human
cucccaggcaaggcuguggacc

SEQ ID NO: 1298932 - RNA, 16 nt, Human
cucccaggcacugucu

SEQ ID NO: 1298933 - RNA, 19 nt, Human
cucccaggagacaguucaa

SEQ ID NO: 1298934 - RNA, 15 nt, Human
cucccaggaccacag

SEQ ID NO: 1298935 - RNA, 15 nt, Human
cucccaggcaaggcu

SEQ ID NO: 1298936 - RNA, 18 nt, Human
cucccaggaacugggcca

SEQ ID NO: 1298937 - RNA, 21 nt, Human
cucccaggaccacaggcucag

SEQ ID NO: 1298938 - RNA, 16 nt, Human
cucccaggagacaguu

SEQ ID NO: 1298939 - RNA, 11 nt, Human
cucccccugcc

SEQ ID NO: 1298940 - RNA, 20 nt, Human
cucccccccaugcacuguga

SEQ ID NO: 1298941 - RNA, 21 nt, Human
cucccccccaugcacugugaa

SEQ ID NO: 1298942 - RNA, 17 nt, Human
cucccaggcacugucuu

SEQ ID NO: 1298943 - RNA, 17 nt, Human
cuccccccgccugccac

SEQ ID NO: 1298944 - RNA, 18 nt, Human
cucccucccagagcaccu

SEQ ID NO: 1298945 - RNA, 20 nt, Human
cucccucccagagcaccugc

SEQ ID NO: 1298946 - RNA, 21 nt, Human
cucccucccagagcaccugcu

SEQ ID NO: 1298947 - RNA, 16 nt, Human
cuccccuaaagccuca

SEQ ID NO: 1298948 - RNA, 23 nt, Human
cuccccuaaagccucaaaacaaa

SEQ ID NO: 1298949 - RNA, 17 nt, Human
cucccucucaggaucca

SEQ ID NO: 1298950 - RNA, 19 nt, Human
cucccucuccgacucacac

SEQ ID NO: 1298951 - RNA, 18 nt, Human
cucccucucaacacccag

SEQ ID NO: 1298952 - RNA, 19 nt, Human
cucccucucaacacccagu

SEQ ID NO: 1298953 - RNA, 20 nt, Human
cucccugaaguaagcaaaga

SEQ ID NO: 1298954 - RNA, 11 nt, Human
cucccucuccg

SEQ ID NO: 1298955 - RNA, 18 nt, Human
cucccugaagccuuugca

SEQ ID NO: 1298956 - RNA, 14 nt, Human
cuccagguggcucu

SEQ ID NO: 1298957 - RNA, 17 nt, Human
cuccagguggcucugag

SEQ ID NO: 1298958 - RNA, 15 nt, Human
cucccacaggcccuu

SEQ ID NO: 1298959 - RNA, 14 nt, Human
cucccacaggcccu

SEQ ID NO: 1298960 - RNA, 16 nt, Human
cucccacaggcccuuc

SEQ ID NO: 1298961 - RNA, 20 nt, Human
cucccacaggcccuuccucu

SEQ ID NO: 1298962 - RNA, 21 nt, Human
cucccacaggcccuuccucuc

SEQ ID NO: 1298963 - RNA, 21 nt, Human
cucccacagucccaucugcuu

SEQ ID NO: 1298964 - RNA, 20 nt, Human
cucccacagucccaucugcu

SEQ ID NO: 1298965 - RNA, 16 nt, Human
cucccacucuccuagg

SEQ ID NO: 1298966 - RNA, 17 nt, Human
cucccacucuccuaggc

SEQ ID NO: 1298967 - RNA, 21 nt, Human
cucccacucuccuaggcauuc

SEQ ID NO: 1298968 - RNA, 15 nt, Human
cucccagagcaccug

SEQ ID NO: 1298969 - RNA, 18 nt, Human
cucccagagcaccugcug

SEQ ID NO: 1298970 - RNA, 20 nt, Human
cucccagagcaccugcuguc

SEQ ID NO: 1298971 - RNA, 19 nt, Human
cucccagagcaccugcugu

SEQ ID NO: 1298972 - RNA, 15 nt, Human
cucccagaggagcca

SEQ ID NO: 1298973 - RNA, 14 nt, Human
cucaugugacucuu

SEQ ID NO: 1298974 - RNA, 16 nt, Human
cucauguacauacccu

SEQ ID NO: 1298975 - RNA, 20 nt, Human
cucauggccccucugaccug

SEQ ID NO: 1298976 - RNA, 14 nt, Human
cucauggguggcac

SEQ ID NO: 1298977 - RNA, 15 nt, Human
cucauggguggcacu

SEQ ID NO: 1298978 - RNA, 19 nt, Human
cucauggguggcacucagu

SEQ ID NO: 1298979 - RNA, 23 nt, Human
cucauggguggcacucagucucu

SEQ ID NO: 1298980 - RNA, 11 nt, Human
cuccucugcug

SEQ ID NO: 1298981 - RNA, 12 nt, Human
cuccucugcuga

SEQ ID NO: 1298982 - RNA, 14 nt, Human
cuccucugcugacc

SEQ ID NO: 1298983 - RNA, 16 nt, Human
cuccucugcugaccug

SEQ ID NO: 1298984 - RNA, 19 nt, Human
cuccucugcugaccugcug

SEQ ID NO: 1298985 - RNA, 20 nt, Human
cuccucugcugaccugcuga

SEQ ID NO: 1298986 - RNA, 21 nt, Human
cuccucugcugaccugcugac

SEQ ID NO: 1298987 - RNA, 12 nt, Human
cuccucugucca

SEQ ID NO: 1298988 - RNA, 15 nt, Human
cuccucuguccaggc

SEQ ID NO: 1298989 - RNA, 16 nt, Human
cuccucuuccaugcug

SEQ ID NO: 1298990 - RNA, 18 nt, Human
cuccucuuccaugcugug

SEQ ID NO: 1298991 - RNA, 20 nt, Human
cuccucuuccaugcugugcg

SEQ ID NO: 1298992 - RNA, 13 nt, Human
cuccucuucccca

SEQ ID NO: 1298993 - RNA, 14 nt, Human
cuccucuuccccag

SEQ ID NO: 1298994 - RNA, 15 nt, Human
cuccucuuccccaga

SEQ ID NO: 1298995 - RNA, 17 nt, Human
cuccucuuccccagacg

SEQ ID NO: 1298996 - RNA, 17 nt, Human
cuccucuucuacucacu

SEQ ID NO: 1298997 - RNA, 18 nt, Human
cuccucuugccacugccu

SEQ ID NO: 1298998 - RNA, 14 nt, Human
cuccuggcccagcc

SEQ ID NO: 1298999 - RNA, 15 nt, Human
cuccuggcccagccu

SEQ ID NO: 1299000 - RNA, 12 nt, Human
cuccucuugcca

SEQ ID NO: 1299001 - RNA, 23 nt, Human
cuccucuucuacucacuuuuccc

SEQ ID NO: 1299002 - RNA, 15 nt, Human
cuccucuugccacug

SEQ ID NO: 1299003 - RNA, 16 nt, Human
cuccucuugccacugc

SEQ ID NO: 1299004 - RNA, 18 nt, Human
cuccuggcccagccuuug

SEQ ID NO: 1299005 - RNA, 22 nt, Human
cuccuggcucuugauacccccc

SEQ ID NO: 1299006 - RNA, 15 nt, Human
cuccugggcccucuc

SEQ ID NO: 1299007 - RNA, 17 nt, Human
cuccugggcccucucug

SEQ ID NO: 1299008 - RNA, 19 nt, Human
cuccugggcccucucugcu

SEQ ID NO: 1299009 - RNA, 20 nt, Human
cuccugggcccucucugcuc

SEQ ID NO: 1299010 - RNA, 20 nt, Human
cuccuguaacauacuggccu

SEQ ID NO: 1299011 - RNA, 22 nt, Human
cuccuguaacauacuggccugg

SEQ ID NO: 1299012 - RNA, 23 nt, Human
cuccuguaacauacuggccugga

SEQ ID NO: 1299013 - RNA, 13 nt, Human
cuccuguccccug

SEQ ID NO: 1299014 - RNA, 14 nt, Human
cuccuguccccugc

SEQ ID NO: 1299015 - RNA, 15 nt, Human
cuccuguccccugcu

SEQ ID NO: 1299016 - RNA, 21 nt, Human
cuccuguccccugcuacaccu

SEQ ID NO: 1299017 - RNA, 18 nt, Human
cuccuguccccugcuaca

SEQ ID NO: 1299018 - RNA, 14 nt, Human
cuccuggggguucu

SEQ ID NO: 1299019 - RNA, 21 nt, Human
cuccugggcccucucugcucu

SEQ ID NO: 1299020 - RNA, 22 nt, Human
cuccugggcccucucugcucug

SEQ ID NO: 1299021 - RNA, 16 nt, Human
cuccuggcccagccuu

SEQ ID NO: 1299022 - RNA, 23 nt, Human
cuccuggguuuuguauucucuga

SEQ ID NO: 1299023 - RNA, 17 nt, Human
cuccuggucaccuagga

SEQ ID NO: 1299024 - RNA, 18 nt, Human
cuccuggucaccuaggaa

SEQ ID NO: 1299025 - RNA, 15 nt, Human
cuccuggugccaccu

SEQ ID NO: 1299026 - RNA, 16 nt, Human
cuccuuucacaaccuu

SEQ ID NO: 1299027 - RNA, 17 nt, Human
cuccuuucacaaccuuc

SEQ ID NO: 1299028 - RNA, 13 nt, Human
cuccuuucacaac

SEQ ID NO: 1299029 - RNA, 15 nt, Human
cuccuuuaauuguaa

SEQ ID NO: 1299030 - RNA, 18 nt, Human
cuccuugugggccugggc

SEQ ID NO: 1299031 - RNA, 19 nt, Human
cuccuugugggccugggcu

SEQ ID NO: 1299032 - RNA, 21 nt, Human
cuccuugugggccugggcucc

SEQ ID NO: 1299033 - RNA, 14 nt, Human
cuccuugugccaga

SEQ ID NO: 1299034 - RNA, 16 nt, Human
cuccuugugggccugg

SEQ ID NO: 1299035 - RNA, 16 nt, Human
cuccugucucccuccu

SEQ ID NO: 1299036 - RNA, 22 nt, Human
cuccucugcccgggagcucagg

SEQ ID NO: 1299037 - RNA, 24 nt, Human
cuccucugcccgggagcucaggaa

SEQ ID NO: 1299038 - RNA, 13 nt, Human
cuccucugacuca

SEQ ID NO: 1299039 - RNA, 18 nt, Human
cuccucugacucagggcu

SEQ ID NO: 1299040 - RNA, 19 nt, Human
cuccucugacucagggcuc

SEQ ID NO: 1299041 - RNA, 20 nt, Human
cuccucugacucagggcucc

SEQ ID NO: 1299042 - RNA, 22 nt, Human
cuccucugacucagggcuccug

SEQ ID NO: 1299043 - RNA, 12 nt, Human
cuccucugcacu

SEQ ID NO: 1299044 - RNA, 13 nt, Human
cuccucugcacuc

SEQ ID NO: 1299045 - RNA, 13 nt, Human
cuccuaccuggua

SEQ ID NO: 1299046 - RNA, 14 nt, Human
cuccuaccucugcu

SEQ ID NO: 1299047 - RNA, 23 nt, Human
cuccggaggacucaccacugccc

SEQ ID NO: 1299048 - RNA, 17 nt, Human
cuccggaggacucacca

SEQ ID NO: 1299049 - RNA, 16 nt, Human
cucagccucucgaagu

SEQ ID NO: 1299050 - RNA, 15 nt, Human
cucagccucuccccu

SEQ ID NO: 1299051 - RNA, 21 nt, Human
cucagccucuccccugccugc

SEQ ID NO: 1299052 - RNA, 19 nt, Human
cucagccugaaccccaggg

SEQ ID NO: 1299053 - RNA, 13 nt, Human
cucagccuggcca

SEQ ID NO: 1299054 - RNA, 14 nt, Human
cucagccuggccag

SEQ ID NO: 1299055 - RNA, 15 nt, Human
cucagccuggccaga

SEQ ID NO: 1299056 - RNA, 16 nt, Human
cucagccuggccagac

SEQ ID NO: 1299057 - RNA, 17 nt, Human
cucagccuggccagaca

SEQ ID NO: 1299058 - RNA, 19 nt, Human
cucagccuggccagacaca

SEQ ID NO: 1299059 - RNA, 20 nt, Human
cucagccuggccagacacag

SEQ ID NO: 1299060 - RNA, 16 nt, Human
cucagccugaacccca

SEQ ID NO: 1299061 - RNA, 11 nt, Human
cucagccuggg

SEQ ID NO: 1299062 - RNA, 12 nt, Human
cucagccugggc

SEQ ID NO: 1299063 - RNA, 14 nt, Human
cucagccugggcgc

SEQ ID NO: 1299064 - RNA, 15 nt, Human
cucagccugggcgcu

SEQ ID NO: 1299065 - RNA, 16 nt, Human
cucagccugggcgcug

SEQ ID NO: 1299066 - RNA, 21 nt, Human
cucagccugggcgcugguccu

SEQ ID NO: 1299067 - RNA, 20 nt, Human
cucaggccaagaaacgucuu

SEQ ID NO: 1299068 - RNA, 22 nt, Human
cucaggcccccaccuggcucac

SEQ ID NO: 1299069 - RNA, 17 nt, Human
cucaggcugaccacuuu

SEQ ID NO: 1299070 - RNA, 12 nt, Human
cucaggcugccu

SEQ ID NO: 1299071 - RNA, 13 nt, Human
cucaggcugccug

SEQ ID NO: 1299072 - RNA, 14 nt, Human
cucaggcugccuga

SEQ ID NO: 1299073 - RNA, 15 nt, Human
cucaggcugccugag

SEQ ID NO: 1299074 - RNA, 21 nt, Human
cucaggcugccugagucguga

SEQ ID NO: 1299075 - RNA, 16 nt, Human
cucaggcugccugagu

SEQ ID NO: 1299076 - RNA, 22 nt, Human
cucaccuugugcuggggacagg

SEQ ID NO: 1299077 - RNA, 22 nt, Human
cucacgccuguaaucccagcau

SEQ ID NO: 1299078 - RNA, 18 nt, Human
cucacggccacacagcug

SEQ ID NO: 1299079 - RNA, 21 nt, Human
cucacggccacacagcugccg

SEQ ID NO: 1299080 - RNA, 19 nt, Human
cucacggccacacagcugc

SEQ ID NO: 1299081 - RNA, 14 nt, Human
cucacgucaaaugc

SEQ ID NO: 1299082 - RNA, 14 nt, Human
cucacguccugaga

SEQ ID NO: 1299083 - RNA, 15 nt, Human
cucacguccugagaa

SEQ ID NO: 1299084 - RNA, 15 nt, Human
cucacuaauucauua

SEQ ID NO: 1299085 - RNA, 15 nt, Human
cucacuaggccccca

SEQ ID NO: 1299086 - RNA, 18 nt, Human
cucacuaggcccccacuu

SEQ ID NO: 1299087 - RNA, 22 nt, Human
cucacuaggcccccacuugccu

SEQ ID NO: 1299088 - RNA, 22 nt, Human
cucagaaagugccugacacacu

SEQ ID NO: 1299089 - RNA, 13 nt, Human
cucagaagccugg

SEQ ID NO: 1299090 - RNA, 14 nt, Human
cucagaagccuggg

SEQ ID NO: 1299091 - RNA, 15 nt, Human
cucagaagccugggg

SEQ ID NO: 1299092 - RNA, 16 nt, Human
cucagaagccuggggg

SEQ ID NO: 1299093 - RNA, 17 nt, Human
cucagaagccugggggc

SEQ ID NO: 1299094 - RNA, 20 nt, Human
cucagaagccugggggccug

SEQ ID NO: 1299095 - RNA, 21 nt, Human
cucagaagccugggggccugg

SEQ ID NO: 1299096 - RNA, 22 nt, Human
cucagaagccugggggccuggc

SEQ ID NO: 1299097 - RNA, 23 nt, Human
cucagaagccugggggccuggcu

SEQ ID NO: 1299098 - RNA, 15 nt, Human
cucagacccuuucuu

SEQ ID NO: 1299099 - RNA, 14 nt, Human
cucagacccuuucu

SEQ ID NO: 1299100 - RNA, 19 nt, Human
cucagacucuaagaaagaa

SEQ ID NO: 1299101 - RNA, 14 nt, Human
cucagacucuaaga

SEQ ID NO: 1299102 - RNA, 18 nt, Human
cucagacucuaagaaaga

SEQ ID NO: 1299103 - RNA, 14 nt, Human
cucagacuggggca

SEQ ID NO: 1299104 - RNA, 12 nt, Human
cucagcccugag

SEQ ID NO: 1299105 - RNA, 13 nt, Human
cucagcccugagg

SEQ ID NO: 1299106 - RNA, 17 nt, Human
cucagcccugaggacag

SEQ ID NO: 1299107 - RNA, 16 nt, Human
cucagcccugaggaca

SEQ ID NO: 1299108 - RNA, 15 nt, Human
cucagcccugcacca

SEQ ID NO: 1299109 - RNA, 20 nt, Human
cucagcccugcaccaugcug

SEQ ID NO: 1299110 - RNA, 16 nt, Human
cucagcccugcaccau

SEQ ID NO: 1299111 - RNA, 14 nt, Human
cucagguguugcca

SEQ ID NO: 1299112 - RNA, 22 nt, Human
cucagguugucugaagucacug

SEQ ID NO: 1299113 - RNA, 15 nt, Human
cucagguguugccaa

SEQ ID NO: 1299114 - RNA, 14 nt, Human
cucagguugucuga

SEQ ID NO: 1299115 - RNA, 16 nt, Human
cucaguagucccugca

SEQ ID NO: 1299116 - RNA, 13 nt, Human
cucaguagucccu

SEQ ID NO: 1299117 - RNA, 17 nt, Human
cucaguaugaauuauuc

SEQ ID NO: 1299118 - RNA, 16 nt, Human
cucaguccaugaagau

SEQ ID NO: 1299119 - RNA, 15 nt, Human
cucagugaagaauac

SEQ ID NO: 1299120 - RNA, 18 nt, Human
cucagugaagaauacuuc

SEQ ID NO: 1299121 - RNA, 14 nt, Human
cucagugaagacua

SEQ ID NO: 1299122 - RNA, 15 nt, Human
cucagugaaguugcu

SEQ ID NO: 1299123 - RNA, 16 nt, Human
cucagugaaguugcug

SEQ ID NO: 1299124 - RNA, 18 nt, Human
cucagugaaguugcugcu

SEQ ID NO: 1299125 - RNA, 19 nt, Human
cucagugaaguugcugcuu

SEQ ID NO: 1299126 - RNA, 20 nt, Human
cucagugaaguugcugcuuc

SEQ ID NO: 1299127 - RNA, 21 nt, Human
cucagugaaguugcugcuucu

SEQ ID NO: 1299128 - RNA, 20 nt, Human
cucagugacccuggcuccuu

SEQ ID NO: 1299129 - RNA, 19 nt, Human
cucagugacccuggcuccu

SEQ ID NO: 1299130 - RNA, 15 nt, Human
cucaugaauguaaau

SEQ ID NO: 1299131 - RNA, 16 nt, Human
cucaugaauguaaauu

SEQ ID NO: 1299132 - RNA, 22 nt, Human
cucaugaauguaaauuuguacu

SEQ ID NO: 1299133 - RNA, 21 nt, Human
cucaugaauguaaauuuguac

SEQ ID NO: 1299134 - RNA, 16 nt, Human
cucaugcaaaucaauu

SEQ ID NO: 1299135 - RNA, 19 nt, Human
cucaugcaaaucaauuacu

SEQ ID NO: 1299136 - RNA, 20 nt, Human
cucaugcaaaucaauuacug

SEQ ID NO: 1299137 - RNA, 15 nt, Human
cucauggccccucug

SEQ ID NO: 1299138 - RNA, 17 nt, Human
cucauggccccucugac

SEQ ID NO: 1299139 - RNA, 19 nt, Human
cucauggccccucugaccu

SEQ ID NO: 1299140 - RNA, 14 nt, Human
cucaauuagugugg

SEQ ID NO: 1299141 - RNA, 12 nt, Human
cucaauuccaac

SEQ ID NO: 1299142 - RNA, 16 nt, Human
cucaauuccaacaguu

SEQ ID NO: 1299143 - RNA, 21 nt, Human
cucaauuccaacaguuuaaug

SEQ ID NO: 1299144 - RNA, 19 nt, Human
cucaaugagcauguuuaga

SEQ ID NO: 1299145 - RNA, 16 nt, Human
cucaaucagucucaga

SEQ ID NO: 1299146 - RNA, 15 nt, Human
cucaaucccugagga

SEQ ID NO: 1299147 - RNA, 12 nt, Human
cucaaugagcau

SEQ ID NO: 1299148 - RNA, 13 nt, Human
cucaaugagcaug

SEQ ID NO: 1299149 - RNA, 14 nt, Human
cucaaugagcaugu

SEQ ID NO: 1299150 - RNA, 15 nt, Human
cucaaugagcauguu

SEQ ID NO: 1299151 - RNA, 14 nt, Human
cucaauggacugga

SEQ ID NO: 1299152 - RNA, 17 nt, Human
cucaauggacuggaagg

SEQ ID NO: 1299153 - RNA, 20 nt, Human
cucaauggacuggaagggga

SEQ ID NO: 1299154 - RNA, 22 nt, Human
cucaaguugauuagaaagacca

SEQ ID NO: 1299155 - RNA, 16 nt, Human
cuauuaaaagacucau

SEQ ID NO: 1299156 - RNA, 17 nt, Human
cuauuaaaagacucauc

SEQ ID NO: 1299157 - RNA, 13 nt, Human
cucaaguucuaag

SEQ ID NO: 1299158 - RNA, 14 nt, Human
cucaaguucuaaga

SEQ ID NO: 1299159 - RNA, 15 nt, Human
cucaaguucuaagau

SEQ ID NO: 1299160 - RNA, 18 nt, Human
cucaaguucuaagauucu

SEQ ID NO: 1299161 - RNA, 19 nt, Human
cucaaguucuaagauucua

SEQ ID NO: 1299162 - RNA, 20 nt, Human
cucaaguucuaagauucuaa

SEQ ID NO: 1299163 - RNA, 13 nt, Human
cuauguuuuacca

SEQ ID NO: 1299164 - RNA, 18 nt, Human
cuauguuuugacauuuuu

SEQ ID NO: 1299165 - RNA, 19 nt, Human
cuauguuuugacauuuuua

SEQ ID NO: 1299166 - RNA, 16 nt, Human
cuauguuuuuaaugua

SEQ ID NO: 1299167 - RNA, 14 nt, Human
cuauguuuuuaaug

SEQ ID NO: 1299168 - RNA, 20 nt, Human
cuauguuuuuguucaaagcc

SEQ ID NO: 1299169 - RNA, 22 nt, Human
cuauguuuuuguucaaagccag

SEQ ID NO: 1299170 - RNA, 15 nt, Human
cuauguuuuuaaugu

SEQ ID NO: 1299171 - RNA, 11 nt, Human
cuauuaaaaga

SEQ ID NO: 1299172 - RNA, 12 nt, Human
cuauuaaaagac

SEQ ID NO: 1299173 - RNA, 13 nt, Human
cuauuaaaagacu

SEQ ID NO: 1299174 - RNA, 14 nt, Human
cuauuaaaagacuc

SEQ ID NO: 1299175 - RNA, 15 nt, Human
cuauuaaaagacuca

SEQ ID NO: 1299176 - RNA, 18 nt, Human
cuauuaaaagacucaucc

SEQ ID NO: 1299177 - RNA, 17 nt, Human
cuaucguaaaauuaaga

SEQ ID NO: 1299178 - RNA, 18 nt, Human
cuaucucauuuccaagca

SEQ ID NO: 1299179 - RNA, 16 nt, Human
cuauguccuaauaaua

SEQ ID NO: 1299180 - RNA, 19 nt, Human
cuaucuccagcggcccugu

SEQ ID NO: 1299181 - RNA, 15 nt, Human
cuaugucccaggaau

SEQ ID NO: 1299182 - RNA, 21 nt, Human
cuaucuccagcggcccuguca

SEQ ID NO: 1299183 - RNA, 18 nt, Human
cuauguucuaagaaguga

SEQ ID NO: 1299184 - RNA, 18 nt, Human
cuaucaugucaaacguga

SEQ ID NO: 1299185 - RNA, 18 nt, Human
cuaucccuaggcacuuaa

SEQ ID NO: 1299186 - RNA, 20 nt, Human
cuauccggacagagcacguu

SEQ ID NO: 1299187 - RNA, 17 nt, Human
cuauccuacuuccccuu

SEQ ID NO: 1299188 - RNA, 15 nt, Human
cuauccucucuuccu

SEQ ID NO: 1299189 - RNA, 16 nt, Human
cuauccucucuuccuc

SEQ ID NO: 1299190 - RNA, 12 nt, Human
cuauccucugua

SEQ ID NO: 1299191 - RNA, 13 nt, Human
cuauccucuguaa

SEQ ID NO: 1299192 - RNA, 20 nt, Human
cuauccucucuuccucuucc

SEQ ID NO: 1299193 - RNA, 17 nt, Human
cuaucaccuauuuccau

SEQ ID NO: 1299194 - RNA, 19 nt, Human
cuaucagaguugcugcaaa

SEQ ID NO: 1299195 - RNA, 18 nt, Human
cuaucagacuaagccagc

SEQ ID NO: 1299196 - RNA, 13 nt, Human
cuacaaaacauua

SEQ ID NO: 1299197 - RNA, 23 nt, Human
cguuaucuaauagggcaauuaau

SEQ ID NO: 1299198 - RNA, 19 nt, Human
cguucaacuuuuccuuuga

SEQ ID NO: 1299199 - RNA, 14 nt, Human
cguguuucugacuc

SEQ ID NO: 1299200 - RNA, 15 nt, Human
cguguuucugacucu

SEQ ID NO: 1299201 - RNA, 20 nt, Human
cguguuucugacucugagcu

SEQ ID NO: 1299202 - RNA, 13 nt, Human
cguuagcuccugu

SEQ ID NO: 1299203 - RNA, 14 nt, Human
cguuagcuccugug

SEQ ID NO: 1299204 - RNA, 15 nt, Human
cguuagcuccugugg

SEQ ID NO: 1299205 - RNA, 16 nt, Human
cguuagcuccuguggc

SEQ ID NO: 1299206 - RNA, 17 nt, Human
cguuagcuccuguggcc

SEQ ID NO: 1299207 - RNA, 22 nt, Human
cuaaagauucuauaguucuaga

SEQ ID NO: 1299208 - RNA, 23 nt, Human
cuaaagauucuauaguucuagac

SEQ ID NO: 1299209 - RNA, 13 nt, Human
cuaaagcaggccu

SEQ ID NO: 1299210 - RNA, 11 nt, Human
cuaaagccaaa

SEQ ID NO: 1299211 - RNA, 18 nt, Human
cuaaagccaaacauauau

SEQ ID NO: 1299212 - RNA, 20 nt, Human
cgugagcugagcaggccaca

SEQ ID NO: 1299213 - RNA, 17 nt, Human
cguguguuuuucuauua

SEQ ID NO: 1299214 - RNA, 18 nt, Human
cguguguuuuucuauuaa

SEQ ID NO: 1299215 - RNA, 21 nt, Human
cguguguuuuucuauuaaaag

SEQ ID NO: 1299216 - RNA, 23 nt, Human
cguguguuuuucuauuaaaagac

SEQ ID NO: 1299217 - RNA, 15 nt, Human
cguguucaauauuuu

SEQ ID NO: 1299218 - RNA, 16 nt, Human
cguguucuccuuuucc

SEQ ID NO: 1299219 - RNA, 23 nt, Human
cuaaaguaaaaacaaagaaauua

SEQ ID NO: 1299220 - RNA, 16 nt, Human
cuaaagccucaaaaca

SEQ ID NO: 1299221 - RNA, 12 nt, Human
cuaaagccuuua

SEQ ID NO: 1299222 - RNA, 14 nt, Human
cuaaagccuuuauu

SEQ ID NO: 1299223 - RNA, 12 nt, Human
cuaaagcucuga

SEQ ID NO: 1299224 - RNA, 14 nt, Human
cuaaagcucugaca

SEQ ID NO: 1299225 - RNA, 12 nt, Human
cuaacgccugag

SEQ ID NO: 1299226 - RNA, 13 nt, Human
cuaacgccugagc

SEQ ID NO: 1299227 - RNA, 14 nt, Human
cuaacgccugagcc

SEQ ID NO: 1299228 - RNA, 15 nt, Human
cuaacgccugagccc

SEQ ID NO: 1299229 - RNA, 17 nt, Human
cuaacgccugagcccag

SEQ ID NO: 1299230 - RNA, 18 nt, Human
cuaacgccugagcccagg

SEQ ID NO: 1299231 - RNA, 19 nt, Human
cuaacgccugagcccaggg

SEQ ID NO: 1299232 - RNA, 20 nt, Human
cuaacgccugagcccaggga

SEQ ID NO: 1299233 - RNA, 21 nt, Human
cuaacgccugagcccagggag

SEQ ID NO: 1299234 - RNA, 22 nt, Human
cuaacgccugagcccagggagg

SEQ ID NO: 1299235 - RNA, 22 nt, Human
cuaacggucuguucuguuucaa

SEQ ID NO: 1299236 - RNA, 16 nt, Human
cuaacggugcucaggg

SEQ ID NO: 1299237 - RNA, 19 nt, Human
cuaacggugcucagggggc

SEQ ID NO: 1299238 - RNA, 17 nt, Human
cuaacguugagccccug

SEQ ID NO: 1299239 - RNA, 20 nt, Human
cuaacuaaaacaaagccacu

SEQ ID NO: 1299240 - RNA, 13 nt, Human
cuaacuaaaacaa

SEQ ID NO: 1299241 - RNA, 17 nt, Human
cuaacggugcucagggg

SEQ ID NO: 1299242 - RNA, 22 nt, Human
cuaacguugagccccuggaggc

SEQ ID NO: 1299243 - RNA, 19 nt, Human
cuaacuacaaagguuuaaa

SEQ ID NO: 1299244 - RNA, 15 nt, Human
cuaacuuggcucaca

SEQ ID NO: 1299245 - RNA, 20 nt, Human
cuaagaaauaugcacaauag

SEQ ID NO: 1299246 - RNA, 16 nt, Human
cuaagaaauugaauac

SEQ ID NO: 1299247 - RNA, 21 nt, Human
cuaagaaauugaauacuuuga

SEQ ID NO: 1299248 - RNA, 14 nt, Human
cuaagaaccuggaa

SEQ ID NO: 1299249 - RNA, 15 nt, Human
cuaagaaccuggaac

SEQ ID NO: 1299250 - RNA, 16 nt, Human
cuaagaaccuggaacu

SEQ ID NO: 1299251 - RNA, 13 nt, Human
cgugacacaaaca

SEQ ID NO: 1299252 - RNA, 17 nt, Human
cgugacaauaaaacauu

SEQ ID NO: 1299253 - RNA, 19 nt, Human
cgugacaauaaaacauuaa

SEQ ID NO: 1299254 - RNA, 14 nt, Human
cgugagccaccucg

SEQ ID NO: 1299255 - RNA, 14 nt, Human
cgugagcugagcag

SEQ ID NO: 1299256 - RNA, 17 nt, Human
cgugagcugagcaggcc

SEQ ID NO: 1299257 - RNA, 22 nt, Human
cgugagcuuaaaauacaagacu

SEQ ID NO: 1299258 - RNA, 19 nt, Human
cuaaguacacaauaagcaa

SEQ ID NO: 1299259 - RNA, 20 nt, Human
cuaaguacacaauaagcaaa

SEQ ID NO: 1299260 - RNA, 19 nt, Human
cuaaguccaguguuucuuu

SEQ ID NO: 1299261 - RNA, 21 nt, Human
cuaaguccaguccaguccuau

SEQ ID NO: 1299262 - RNA, 17 nt, Human
cuaagucaacuuagcau

SEQ ID NO: 1299263 - RNA, 23 nt, Human
cuaaguccaguccaguccuaucu

SEQ ID NO: 1299264 - RNA, 12 nt, Human
cuaaguuucuaa

SEQ ID NO: 1299265 - RNA, 13 nt, Human
cuaaguuucuaag

SEQ ID NO: 1299266 - RNA, 14 nt, Human
cuaaguuucuaaga

SEQ ID NO: 1299267 - RNA, 15 nt, Human
cuaaguuucuaagau

SEQ ID NO: 1299268 - RNA, 17 nt, Human
cuaaguuucuaagauuc

SEQ ID NO: 1299269 - RNA, 18 nt, Human
cuaaguuucuaagauucu

SEQ ID NO: 1299270 - RNA, 19 nt, Human
cuaaguuucuaagauucua

SEQ ID NO: 1299271 - RNA, 21 nt, Human
cuaaguuucuaagauucuaaa

SEQ ID NO: 1299272 - RNA, 22 nt, Human
cuaaguuucuaagauucuaaag

SEQ ID NO: 1299273 - RNA, 23 nt, Human
cuaaguuucuaagauucuaaagg

SEQ ID NO: 1299274 - RNA, 12 nt, Human
cuaauuugcauu

SEQ ID NO: 1299275 - RNA, 13 nt, Human
cuaauuugcauua

SEQ ID NO: 1299276 - RNA, 14 nt, Human
cuaauuugcauuaa

SEQ ID NO: 1299277 - RNA, 19 nt, Human
cuaauuugcauuaaauuca

SEQ ID NO: 1299278 - RNA, 21 nt, Human
cuaauuugcauuaaauucaca

SEQ ID NO: 1299279 - RNA, 22 nt, Human
cuaauuugcauuaaauucacaa

SEQ ID NO: 1299280 - RNA, 22 nt, Human
cuaauuuguaggaaaaagcaag

SEQ ID NO: 1299281 - RNA, 19 nt, Human
cuaauuuguuuuggauaua

SEQ ID NO: 1299282 - RNA, 12 nt, Human
cuaauuuuuaag

SEQ ID NO: 1299283 - RNA, 16 nt, Human
cuaagaauaaacauuu

SEQ ID NO: 1299284 - RNA, 17 nt, Human
cuaagaauaaacauuug

SEQ ID NO: 1299285 - RNA, 18 nt, Human
cuaagaauaaacauuugu

SEQ ID NO: 1299286 - RNA, 20 nt, Human
cuaagaauaaacauuuguua

SEQ ID NO: 1299287 - RNA, 22 nt, Human
cuaagaaguacauuguuaccuc

SEQ ID NO: 1299288 - RNA, 13 nt, Human
cuaagacucaaau

SEQ ID NO: 1299289 - RNA, 16 nt, Human
cuaagacucaaauguu

SEQ ID NO: 1299290 - RNA, 17 nt, Human
cuaagacucaaauguuc

SEQ ID NO: 1299291 - RNA, 19 nt, Human
cuaagacucaaauguucua

SEQ ID NO: 1299292 - RNA, 20 nt, Human
cuaagacucaaauguucuaa

SEQ ID NO: 1299293 - RNA, 21 nt, Human
cuaagacucaaauguucuaag

SEQ ID NO: 1299294 - RNA, 22 nt, Human
cuaagacucaaauguucuaagu

SEQ ID NO: 1299295 - RNA, 17 nt, Human
cuaagacuuacucuaag

SEQ ID NO: 1299296 - RNA, 18 nt, Human
cuaagacuuacucuaaga

SEQ ID NO: 1299297 - RNA, 19 nt, Human
cuaagacuuacucuaagau

SEQ ID NO: 1299298 - RNA, 22 nt, Human
cuaagacuuacucuaagaucuu

SEQ ID NO: 1299299 - RNA, 13 nt, Human
cuaagacuuccua

SEQ ID NO: 1299300 - RNA, 15 nt, Human
cuaagacuuuacuua

SEQ ID NO: 1299301 - RNA, 23 nt, Human
cuaagacuuacucuaagaucuua

SEQ ID NO: 1299302 - RNA, 13 nt, Human
cuaagagaaguag

SEQ ID NO: 1299303 - RNA, 15 nt, Human
cuaagagaaguagaa

SEQ ID NO: 1299304 - RNA, 17 nt, Human
cuaagagaaguagaaau

SEQ ID NO: 1299305 - RNA, 19 nt, Human
cuaagagaaguagaaauca

SEQ ID NO: 1299306 - RNA, 14 nt, Human
cgcugaguggcagg

SEQ ID NO: 1299307 - RNA, 16 nt, Human
cgcugaguggcagggg

SEQ ID NO: 1299308 - RNA, 13 nt, Human
cgcugaguggcag

SEQ ID NO: 1299309 - RNA, 20 nt, Human
cgcucugucgcccaggcugg

SEQ ID NO: 1299310 - RNA, 21 nt, Human
cgcucuuggcagguacucagc

SEQ ID NO: 1299311 - RNA, 13 nt, Human
cgcucuuugagaa

SEQ ID NO: 1299312 - RNA, 17 nt, Human
cgccugcccucauggcc

SEQ ID NO: 1299313 - RNA, 20 nt, Human
cgccugcccucauggccccu

SEQ ID NO: 1299314 - RNA, 22 nt, Human
cgccugcccucauggccccucu

SEQ ID NO: 1299315 - RNA, 20 nt, Human
cgcugaguggcaggggacag

SEQ ID NO: 1299316 - RNA, 15 nt, Human
cgagugcucauuuca

SEQ ID NO: 1299317 - RNA, 22 nt, Human
cgcaggcuggcccugcccuggu

SEQ ID NO: 1299318 - RNA, 19 nt, Human
cgcaguccacuucugacag

SEQ ID NO: 1299319 - RNA, 20 nt, Human
cgcaguccacuucugacagc

SEQ ID NO: 1299320 - RNA, 23 nt, Human
cgcaguccacuucugacagccuc

SEQ ID NO: 1299321 - RNA, 20 nt, Human
cgagucucuucuccacugga

SEQ ID NO: 1299322 - RNA, 21 nt, Human
cgagucucuucuccacuggau

SEQ ID NO: 1299323 - RNA, 14 nt, Human
cgccacagcccuuu

SEQ ID NO: 1299324 - RNA, 17 nt, Human
cgccacagcccuuuugu

SEQ ID NO: 1299325 - RNA, 19 nt, Human
cgccacagcccuuuugucu

SEQ ID NO: 1299326 - RNA, 21 nt, Human
cgccacagcccuuuugucucu

SEQ ID NO: 1299327 - RNA, 20 nt, Human
cgccacagcccuuuugucuc

SEQ ID NO: 1299328 - RNA, 22 nt, Human
cgcaguccacuucugacagccu

SEQ ID NO: 1299329 - RNA, 22 nt, Human
cgcagugggagcaaacugcaug

SEQ ID NO: 1299330 - RNA, 23 nt, Human
cgcagugggagcaaacugcaugc

SEQ ID NO: 1299331 - RNA, 16 nt, Human
cgcaguguggaggcca

SEQ ID NO: 1299332 - RNA, 17 nt, Human
cgagucucuucuccacu

SEQ ID NO: 1299333 - RNA, 18 nt, Human
cgagucucuucuccacug

SEQ ID NO: 1299334 - RNA, 18 nt, Human
cgaggggugucuugggca

SEQ ID NO: 1299335 - RNA, 19 nt, Human
cgaggggugucuugggcag

SEQ ID NO: 1299336 - RNA, 11 nt, Human
cgagggcuggc

SEQ ID NO: 1299337 - RNA, 21 nt, Human
cgagggcagggaccacacccu

SEQ ID NO: 1299338 - RNA, 14 nt, Human
cgagggcuggcugg

SEQ ID NO: 1299339 - RNA, 15 nt, Human
cgagggcuggcuggc

SEQ ID NO: 1299340 - RNA, 17 nt, Human
cgagggcuggcuggccu

SEQ ID NO: 1299341 - RNA, 19 nt, Human
cgagggcuggcuggccuca

SEQ ID NO: 1299342 - RNA, 23 nt, Human
cgagggcuggcuggccucaccca

SEQ ID NO: 1299343 - RNA, 12 nt, Human
ccuuuucccaac

SEQ ID NO: 1299344 - RNA, 11 nt, Human
ccuuuucauag

SEQ ID NO: 1299345 - RNA, 18 nt, Human
ccuuuucauaggucugaa

SEQ ID NO: 1299346 - RNA, 19 nt, Human
ccuuuucauaggucugaaa

SEQ ID NO: 1299347 - RNA, 22 nt, Human
ccuuuucauaggucugaaauuu

SEQ ID NO: 1299348 - RNA, 20 nt, Human
ccuuucccuuguagcuccuc

SEQ ID NO: 1299349 - RNA, 22 nt, Human
ccuuuccuggacacucagaccu

SEQ ID NO: 1299350 - RNA, 16 nt, Human
ccuuuucaugauuuua

SEQ ID NO: 1299351 - RNA, 12 nt, Human
ccuuuuccaugc

SEQ ID NO: 1299352 - RNA, 23 nt, Human
ccuuuucccaaaauguugaaaua

SEQ ID NO: 1299353 - RNA, 16 nt, Human
cgggcugggagcucug

SEQ ID NO: 1299354 - RNA, 20 nt, Human
cgggcugggagcucugcaga

SEQ ID NO: 1299355 - RNA, 16 nt, Human
cgggccuggagaacua

SEQ ID NO: 1299356 - RNA, 20 nt, Human
cgggccuggagaacuagaga

SEQ ID NO: 1299357 - RNA, 16 nt, Human
cgggccuguccacagg

SEQ ID NO: 1299358 - RNA, 15 nt, Human
cgggccuguccacag

SEQ ID NO: 1299359 - RNA, 18 nt, Human
cgggccacuccuuccugc

SEQ ID NO: 1299360 - RNA, 19 nt, Human
cggcuaauuuuuauauuuu

SEQ ID NO: 1299361 - RNA, 19 nt, Human
cgggccacuccuuccugcc

SEQ ID NO: 1299362 - RNA, 20 nt, Human
cgggccacuccuuccugccc

SEQ ID NO: 1299363 - RNA, 22 nt, Human
cgggccacuccuuccugcccca

SEQ ID NO: 1299364 - RNA, 21 nt, Human
cgggccacuccuuccugcccc

SEQ ID NO: 1299365 - RNA, 21 nt, Human
cgggcccuucccacaggacau

SEQ ID NO: 1299366 - RNA, 16 nt, Human
cguaaguacagagaag

SEQ ID NO: 1299367 - RNA, 17 nt, Human
cguaaguacagagaagc

SEQ ID NO: 1299368 - RNA, 18 nt, Human
cguaaguacagagaagcc

SEQ ID NO: 1299369 - RNA, 19 nt, Human
cguaaguacagagaagcca

SEQ ID NO: 1299370 - RNA, 21 nt, Human
cguaaguacagagaagccauc

SEQ ID NO: 1299371 - RNA, 20 nt, Human
cguaaguacagagaagccau

SEQ ID NO: 1299372 - RNA, 17 nt, Human
cguacguaauaagguuu

SEQ ID NO: 1299373 - RNA, 20 nt, Human
cguacguaauaagguuuuaa

SEQ ID NO: 1299374 - RNA, 14 nt, Human
cguacugcagccuc

SEQ ID NO: 1299375 - RNA, 15 nt, Human
cguacugcagccucc

SEQ ID NO: 1299376 - RNA, 20 nt, Human
cgguggcucacgccuguaau

SEQ ID NO: 1299377 - RNA, 12 nt, Human
cgggcugugccc

SEQ ID NO: 1299378 - RNA, 14 nt, Human
cguaaaguacuugu

SEQ ID NO: 1299379 - RNA, 18 nt, Human
cguaaaguacuuguaguu

SEQ ID NO: 1299380 - RNA, 16 nt, Human
cguaaaguacuuguag

SEQ ID NO: 1299381 - RNA, 14 nt, Human
cguaagauuuccuu

SEQ ID NO: 1299382 - RNA, 13 nt, Human
cguaaguacagag

SEQ ID NO: 1299383 - RNA, 14 nt, Human
cguaaguacagaga

SEQ ID NO: 1299384 - RNA, 15 nt, Human
cguaaguacagagaa

SEQ ID NO: 1299385 - RNA, 16 nt, Human
cggaggggccuggcag

SEQ ID NO: 1299386 - RNA, 15 nt, Human
cggaggggccuggca

SEQ ID NO: 1299387 - RNA, 23 nt, Human
cggaguccuguguuugugagucg

SEQ ID NO: 1299388 - RNA, 15 nt, Human
cggagucguggggug

SEQ ID NO: 1299389 - RNA, 18 nt, Human
cggcuaauuuuuguauuu

SEQ ID NO: 1299390 - RNA, 13 nt, Human
cggagagccagcu

SEQ ID NO: 1299391 - RNA, 14 nt, Human
cggagagugggggu

SEQ ID NO: 1299392 - RNA, 14 nt, Human
cggaggcggugggc

SEQ ID NO: 1299393 - RNA, 17 nt, Human
cggaggcggugggccug

SEQ ID NO: 1299394 - RNA, 14 nt, Human
ccuugcauaauggu

SEQ ID NO: 1299395 - RNA, 23 nt, Human
ccuuuauuuguuaauaguuccug

SEQ ID NO: 1299396 - RNA, 14 nt, Human
ccuuuauucuggca

SEQ ID NO: 1299397 - RNA, 19 nt, Human
ccuuuauuuccacugugca

SEQ ID NO: 1299398 - RNA, 21 nt, Human
ccuuuauuuuuggcguggcug

SEQ ID NO: 1299399 - RNA, 17 nt, Human
ccuuucccuaagccagc

SEQ ID NO: 1299400 - RNA, 15 nt, Human
ccuuucccuaagcca

SEQ ID NO: 1299401 - RNA, 19 nt, Human
ccuuucccuuguagcuccu

SEQ ID NO: 1299402 - RNA, 12 nt, Human
ccuugccagaga

SEQ ID NO: 1299403 - RNA, 13 nt, Human
ccuugccagagau

SEQ ID NO: 1299404 - RNA, 16 nt, Human
ccuugccagagaucca

SEQ ID NO: 1299405 - RNA, 11 nt, Human
ccuugccuggu

SEQ ID NO: 1299406 - RNA, 12 nt, Human
ccuugccuggua

SEQ ID NO: 1299407 - RNA, 15 nt, Human
ccuugccugguacag

SEQ ID NO: 1299408 - RNA, 14 nt, Human
ccuugccugugcca

SEQ ID NO: 1299409 - RNA, 17 nt, Human
ccuugccugguacagua

SEQ ID NO: 1299410 - RNA, 15 nt, Human
ccuugcggcuccuca

SEQ ID NO: 1299411 - RNA, 16 nt, Human
ccuugcggcuccucag

SEQ ID NO: 1299412 - RNA, 17 nt, Human
ccuugcggcuccucagg

SEQ ID NO: 1299413 - RNA, 18 nt, Human
ccuugcggcuccucaggg

SEQ ID NO: 1299414 - RNA, 19 nt, Human
ccuugcggcuccucaggga

SEQ ID NO: 1299415 - RNA, 20 nt, Human
ccuugcggcuccucagggac

SEQ ID NO: 1299416 - RNA, 21 nt, Human
ccuugcuccuccuucugcugc

SEQ ID NO: 1299417 - RNA, 13 nt, Human
ccuucccugcugu

SEQ ID NO: 1299418 - RNA, 18 nt, Human
ccuucccucucuggagaa

SEQ ID NO: 1299419 - RNA, 15 nt, Human
ccuucccucucugga

SEQ ID NO: 1299420 - RNA, 13 nt, Human
ccuucccuccaag

SEQ ID NO: 1299421 - RNA, 24 nt, Human
ccuucccucaccuuggcaccagac

SEQ ID NO: 1299422 - RNA, 14 nt, Human
ccuucccucucugg

SEQ ID NO: 1299423 - RNA, 13 nt, Human
ccuucccugugcc

SEQ ID NO: 1299424 - RNA, 17 nt, Human
ccuucccugugccuccu

SEQ ID NO: 1299425 - RNA, 20 nt, Human
ccuucccugugccuccuccc

SEQ ID NO: 1299426 - RNA, 22 nt, Human
ccuucccuguuuuccccccaag

SEQ ID NO: 1299427 - RNA, 18 nt, Human
ccuuccuaauuccacagc

SEQ ID NO: 1299428 - RNA, 22 nt, Human
ccuuccgccacuggggcucaga

SEQ ID NO: 1299429 - RNA, 16 nt, Human
ccuuccgcuuggagcu

SEQ ID NO: 1299430 - RNA, 19 nt, Human
ccuuccuaauuccacagcu

SEQ ID NO: 1299431 - RNA, 20 nt, Human
ccuuccuaauuccacagcug

SEQ ID NO: 1299432 - RNA, 22 nt, Human
ccuucccuuuucuguucuaguu

SEQ ID NO: 1299433 - RNA, 18 nt, Human
ccuucccuuuucuguucu

SEQ ID NO: 1299434 - RNA, 13 nt, Human
ccuuccgccacug

SEQ ID NO: 1299435 - RNA, 14 nt, Human
ccuuccgccacugg

SEQ ID NO: 1299436 - RNA, 16 nt, Human
ccuuccgccacugggg

SEQ ID NO: 1299437 - RNA, 18 nt, Human
ccuuccgccacuggggcu

SEQ ID NO: 1299438 - RNA, 19 nt, Human
ccuucccccuccaauccca

SEQ ID NO: 1299439 - RNA, 13 nt, Human
ccuucccauggag

SEQ ID NO: 1299440 - RNA, 16 nt, Human
ccuucccauggaggga

SEQ ID NO: 1299441 - RNA, 21 nt, Human
ccuuccccuuauccucccugu

SEQ ID NO: 1299442 - RNA, 20 nt, Human
ccuuccccuuauccucccug

SEQ ID NO: 1299443 - RNA, 23 nt, Human
ccuucccucaccuuggcaccaga

SEQ ID NO: 1299444 - RNA, 16 nt, Human
ccuuccucuccacugc

SEQ ID NO: 1299445 - RNA, 17 nt, Human
ccuuccucuccacugcc

SEQ ID NO: 1299446 - RNA, 14 nt, Human
ccuuccucuccacu

SEQ ID NO: 1299447 - RNA, 15 nt, Human
ccuuccucuccacug

SEQ ID NO: 1299448 - RNA, 12 nt, Human
ccuuccuccugg

SEQ ID NO: 1299449 - RNA, 13 nt, Human
ccuuccuccuggg

SEQ ID NO: 1299450 - RNA, 21 nt, Human
ccuuccuaauuccacagcugc

SEQ ID NO: 1299451 - RNA, 23 nt, Human
ccuuccuaaauuuuccuguccuc

SEQ ID NO: 1299452 - RNA, 16 nt, Human
ccuuccucauccaccc

SEQ ID NO: 1299453 - RNA, 17 nt, Human
ccuuccucauccacccc

SEQ ID NO: 1299454 - RNA, 18 nt, Human
ccuuccucauccacccca

SEQ ID NO: 1299455 - RNA, 19 nt, Human
ccuuccucauccaccccau

SEQ ID NO: 1299456 - RNA, 20 nt, Human
ccuuccucauccaccccauc

SEQ ID NO: 1299457 - RNA, 21 nt, Human
ccuuccucauccaccccaucc

SEQ ID NO: 1299458 - RNA, 20 nt, Human
ccuuccucuccacugccuuc

SEQ ID NO: 1299459 - RNA, 14 nt, Human
ccuucucucucccu

SEQ ID NO: 1299460 - RNA, 19 nt, Human
ccuucucuguucauuuccu

SEQ ID NO: 1299461 - RNA, 21 nt, Human
ccuucucuguucauuuccuca

SEQ ID NO: 1299462 - RNA, 17 nt, Human
ccuucucuucacaguca

SEQ ID NO: 1299463 - RNA, 13 nt, Human
ccuucucuguuca

SEQ ID NO: 1299464 - RNA, 17 nt, Human
ccuucucuguucauuuc

SEQ ID NO: 1299465 - RNA, 18 nt, Human
ccuucucuguucauuucc

SEQ ID NO: 1299466 - RNA, 18 nt, Human
ccugcugcugccugccug

SEQ ID NO: 1299467 - RNA, 17 nt, Human
ccugcugcugucugggu

SEQ ID NO: 1299468 - RNA, 19 nt, Human
ccugcugcugucugggugc

SEQ ID NO: 1299469 - RNA, 23 nt, Human
ccugcugcugucugggugcuacu

SEQ ID NO: 1299470 - RNA, 17 nt, Human
ccugcugcugccugccu

SEQ ID NO: 1299471 - RNA, 16 nt, Human
ccugcugcugccugcc

SEQ ID NO: 1299472 - RNA, 15 nt, Human
ccugcugcugccugc

SEQ ID NO: 1299473 - RNA, 14 nt, Human
ccugcugcccuccc

SEQ ID NO: 1299474 - RNA, 20 nt, Human
ccugcugcugucugggugcu

SEQ ID NO: 1299475 - RNA, 21 nt, Human
ccuguucacucuacuuagcau

SEQ ID NO: 1299476 - RNA, 15 nt, Human
ccuguuagcagacag

SEQ ID NO: 1299477 - RNA, 16 nt, Human
ccuguuagcagacagg

SEQ ID NO: 1299478 - RNA, 17 nt, Human
ccuguuaccuacuuuga

SEQ ID NO: 1299479 - RNA, 18 nt, Human
ccuguuaccuacuuugac

SEQ ID NO: 1299480 - RNA, 19 nt, Human
ccuguuaccuacuuugacu

SEQ ID NO: 1299481 - RNA, 12 nt, Human
ccuguucccauu

SEQ ID NO: 1299482 - RNA, 22 nt, Human
ccuguucaugccgacgcuugca

SEQ ID NO: 1299483 - RNA, 18 nt, Human
ccuguucauggcagaugu

SEQ ID NO: 1299484 - RNA, 13 nt, Human
ccuguuccccaga

SEQ ID NO: 1299485 - RNA, 15 nt, Human
ccuguuccccagaga

SEQ ID NO: 1299486 - RNA, 16 nt, Human
ccuguuccccagagaa

SEQ ID NO: 1299487 - RNA, 23 nt, Human
ccuguuccccagagaaaggggag

SEQ ID NO: 1299488 - RNA, 14 nt, Human
ccuguuccugcugc

SEQ ID NO: 1299489 - RNA, 15 nt, Human
ccuguuccugcugcu

SEQ ID NO: 1299490 - RNA, 16 nt, Human
ccuguucugcuuuccu

SEQ ID NO: 1299491 - RNA, 14 nt, Human
ccuguucacaccag

SEQ ID NO: 1299492 - RNA, 17 nt, Human
ccuguugagcaucacag

SEQ ID NO: 1299493 - RNA, 12 nt, Human
ccuguugggaga

SEQ ID NO: 1299494 - RNA, 13 nt, Human
ccuuagccuggac

SEQ ID NO: 1299495 - RNA, 14 nt, Human
ccuuagccuggacc

SEQ ID NO: 1299496 - RNA, 15 nt, Human
ccuuagccuggaccu

SEQ ID NO: 1299497 - RNA, 17 nt, Human
ccuuagccuggaccucu

SEQ ID NO: 1299498 - RNA, 19 nt, Human
ccuuagccuggaccucuga

SEQ ID NO: 1299499 - RNA, 21 nt, Human
ccuuagccuggaccucugaca

SEQ ID NO: 1299500 - RNA, 19 nt, Human
ccuuagcuggcauuacagc

SEQ ID NO: 1299501 - RNA, 22 nt, Human
ccuuagcuggcauuacagcugg

SEQ ID NO: 1299502 - RNA, 13 nt, Human
ccuuaucuugcac

SEQ ID NO: 1299503 - RNA, 17 nt, Human
ccuuaugacugccaaga

SEQ ID NO: 1299504 - RNA, 19 nt, Human
ccuuauccucccuguaacu

SEQ ID NO: 1299505 - RNA, 16 nt, Human
ccuuaucgaaacucau

SEQ ID NO: 1299506 - RNA, 14 nt, Human
ccuuaucaaaggac

SEQ ID NO: 1299507 - RNA, 18 nt, Human
ccuuaucaaaggacacca

SEQ ID NO: 1299508 - RNA, 14 nt, Human
ccuuauccccacuu

SEQ ID NO: 1299509 - RNA, 13 nt, Human
ccuuauccucccu

SEQ ID NO: 1299510 - RNA, 16 nt, Human
ccuuauccucccugua

SEQ ID NO: 1299511 - RNA, 17 nt, Human
ccuuauccucccuguaa

SEQ ID NO: 1299512 - RNA, 20 nt, Human
ccuuauccucccuguaacuu

SEQ ID NO: 1299513 - RNA, 20 nt, Human
ccuuaggugauccacucgcc

SEQ ID NO: 1299514 - RNA, 14 nt, Human
ccuuaggccucuga

SEQ ID NO: 1299515 - RNA, 16 nt, Human
ccuuaggccucugaga

SEQ ID NO: 1299516 - RNA, 23 nt, Human
ccuuaggaagagccuuccaccca

SEQ ID NO: 1299517 - RNA, 15 nt, Human
ccuuaggaagagccu

SEQ ID NO: 1299518 - RNA, 13 nt, Human
ccuuaucaaagga

SEQ ID NO: 1299519 - RNA, 21 nt, Human
ccuuauaguuacuguguaauu

SEQ ID NO: 1299520 - RNA, 14 nt, Human
ccuuauaguuacug

SEQ ID NO: 1299521 - RNA, 20 nt, Human
ccuuagugcaguuauuugcu

SEQ ID NO: 1299522 - RNA, 15 nt, Human
ccuuagugcaguuau

SEQ ID NO: 1299523 - RNA, 14 nt, Human
ccuuagucucaguu

SEQ ID NO: 1299524 - RNA, 20 nt, Human
ccuuagucucaguuugugug

SEQ ID NO: 1299525 - RNA, 14 nt, Human
ccuuauucagggaa

SEQ ID NO: 1299526 - RNA, 18 nt, Human
ccuuauugcuguccugga

SEQ ID NO: 1299527 - RNA, 19 nt, Human
ccuuauugcuguccuggag

SEQ ID NO: 1299528 - RNA, 23 nt, Human
ccuucccaagugagucucucugg

SEQ ID NO: 1299529 - RNA, 17 nt, Human
ccuucccaauccagugg

SEQ ID NO: 1299530 - RNA, 15 nt, Human
ccuucccaugcccug

SEQ ID NO: 1299531 - RNA, 14 nt, Human
ccuucccaucgcug

SEQ ID NO: 1299532 - RNA, 15 nt, Human
ccuucccaucgcugu

SEQ ID NO: 1299533 - RNA, 12 nt, Human
ccuucccagagg

SEQ ID NO: 1299534 - RNA, 17 nt, Human
ccuucccagaggggccu

SEQ ID NO: 1299535 - RNA, 19 nt, Human
ccuucccagaggggccugc

SEQ ID NO: 1299536 - RNA, 20 nt, Human
ccuucccagaggggccugcc

SEQ ID NO: 1299537 - RNA, 22 nt, Human
ccuucccagaggggccugccac

SEQ ID NO: 1299538 - RNA, 24 nt, Human
ccuucccagaggggccugccaccu

SEQ ID NO: 1299539 - RNA, 16 nt, Human
ccuuauuagagugucu

SEQ ID NO: 1299540 - RNA, 21 nt, Human
ccuuauuagagugucuuucca

SEQ ID NO: 1299541 - RNA, 14 nt, Human
ccagagacuuuagg

SEQ ID NO: 1299542 - RNA, 20 nt, Human
ccagagacauacuugaaggg

SEQ ID NO: 1299543 - RNA, 22 nt, Human
ccagagacauacuugaagggcc

SEQ ID NO: 1299544 - RNA, 23 nt, Human
ccagagacauacuugaagggcca

SEQ ID NO: 1299545 - RNA, 12 nt, Human
ccagagacccag

SEQ ID NO: 1299546 - RNA, 13 nt, Human
ccagagacccagc

SEQ ID NO: 1299547 - RNA, 14 nt, Human
ccagagacccagcg

SEQ ID NO: 1299548 - RNA, 21 nt, Human
ccagagacccagcggacacac

SEQ ID NO: 1299549 - RNA, 16 nt, Human
ccagagacccagcgga

SEQ ID NO: 1299550 - RNA, 19 nt, Human
ccagagacacagcccccac

SEQ ID NO: 1299551 - RNA, 17 nt, Human
ccagagacauacuugaa

SEQ ID NO: 1299552 - RNA, 18 nt, Human
ccagagacauacuugaag

SEQ ID NO: 1299553 - RNA, 23 nt, Human
ccagacuucccacggcuccucga

SEQ ID NO: 1299554 - RNA, 22 nt, Human
ccagacuagauggaccugccug

SEQ ID NO: 1299555 - RNA, 21 nt, Human
ccagacucguucuucugggaa

SEQ ID NO: 1299556 - RNA, 13 nt, Human
ccagacucuugcc

SEQ ID NO: 1299557 - RNA, 18 nt, Human
ccagacucuugccuguuu

SEQ ID NO: 1299558 - RNA, 22 nt, Human
ccagacugcuuccaauuuucug

SEQ ID NO: 1299559 - RNA, 15 nt, Human
ccagacucuugccug

SEQ ID NO: 1299560 - RNA, 18 nt, Human
ccagagaaaaagggaggg

SEQ ID NO: 1299561 - RNA, 22 nt, Human
ccagacuuguuggcguaggcua

SEQ ID NO: 1299562 - RNA, 16 nt, Human
ccagagaaaggggagc

SEQ ID NO: 1299563 - RNA, 19 nt, Human
ccagagaaaggggagccca

SEQ ID NO: 1299564 - RNA, 20 nt, Human
ccagagaaaggggagcccac

SEQ ID NO: 1299565 - RNA, 23 nt, Human
ccagagaaaggggagcccacugu

SEQ ID NO: 1299566 - RNA, 13 nt, Human
ccagagaacccag

SEQ ID NO: 1299567 - RNA, 23 nt, Human
ccagagaacccagcccacccccg

SEQ ID NO: 1299568 - RNA, 18 nt, Human
ccagaugcacaucccugg

SEQ ID NO: 1299569 - RNA, 12 nt, Human
ccagauaacuua

SEQ ID NO: 1299570 - RNA, 13 nt, Human
ccagauaacuuuu

SEQ ID NO: 1299571 - RNA, 22 nt, Human
ccagauacggacagagaccaag

SEQ ID NO: 1299572 - RNA, 17 nt, Human
ccagauaguguagcuga

SEQ ID NO: 1299573 - RNA, 18 nt, Human
ccagauaucaucuaccua

SEQ ID NO: 1299574 - RNA, 20 nt, Human
ccagauaguguagcugagga

SEQ ID NO: 1299575 - RNA, 23 nt, Human
ccagaucugauuuguaacccacu

SEQ ID NO: 1299576 - RNA, 13 nt, Human
ccagaggggccug

SEQ ID NO: 1299577 - RNA, 15 nt, Human
ccagaggggccugcc

SEQ ID NO: 1299578 - RNA, 17 nt, Human
ccagaggggccugccac

SEQ ID NO: 1299579 - RNA, 18 nt, Human
ccagaggggccugccacc

SEQ ID NO: 1299580 - RNA, 12 nt, Human
ccagagagcccg

SEQ ID NO: 1299581 - RNA, 13 nt, Human
ccagagagcccga

SEQ ID NO: 1299582 - RNA, 20 nt, Human
ccagagagcccgaggaggug

SEQ ID NO: 1299583 - RNA, 15 nt, Human
ccagagagcccgagg

SEQ ID NO: 1299584 - RNA, 19 nt, Human
ccagagagcccgaggaggu

SEQ ID NO: 1299585 - RNA, 20 nt, Human
ccagaggggccugccaccug

SEQ ID NO: 1299586 - RNA, 22 nt, Human
ccagaggggccugccaccugga

SEQ ID NO: 1299587 - RNA, 23 nt, Human
ccagaggggccugccaccuggac

SEQ ID NO: 1299588 - RNA, 14 nt, Human
ccagagggucuggg

SEQ ID NO: 1299589 - RNA, 17 nt, Human
ccagagggucugggggc

SEQ ID NO: 1299590 - RNA, 18 nt, Human
ccagagggucugggggca

SEQ ID NO: 1299591 - RNA, 15 nt, Human
ccacucuuucuuuca

SEQ ID NO: 1299592 - RNA, 15 nt, Human
ccacugaaaaaauau

SEQ ID NO: 1299593 - RNA, 17 nt, Human
ccacugaaaaaauauau

SEQ ID NO: 1299594 - RNA, 19 nt, Human
ccacugaaaaaauauaugu

SEQ ID NO: 1299595 - RNA, 21 nt, Human
ccacucuggcagccacacuuc

SEQ ID NO: 1299596 - RNA, 22 nt, Human
ccacucuggcagccacacuucu

SEQ ID NO: 1299597 - RNA, 11 nt, Human
ccacucuguaa

SEQ ID NO: 1299598 - RNA, 12 nt, Human
ccacucuguaau

SEQ ID NO: 1299599 - RNA, 13 nt, Human
ccacucuguaauu

SEQ ID NO: 1299600 - RNA, 14 nt, Human
ccacucuguaauug

SEQ ID NO: 1299601 - RNA, 19 nt, Human
ccacucuguaauugcaaaa

SEQ ID NO: 1299602 - RNA, 13 nt, Human
ccacugaccagaa

SEQ ID NO: 1299603 - RNA, 17 nt, Human
ccacugagaggacagag

SEQ ID NO: 1299604 - RNA, 18 nt, Human
ccacugagaggacagaga

SEQ ID NO: 1299605 - RNA, 13 nt, Human
ccacugagggcag

SEQ ID NO: 1299606 - RNA, 12 nt, Human
ccacucuggcag

SEQ ID NO: 1299607 - RNA, 13 nt, Human
ccacucuggcagc

SEQ ID NO: 1299608 - RNA, 14 nt, Human
ccacucuggcagcc

SEQ ID NO: 1299609 - RNA, 15 nt, Human
ccacucuggcagcca

SEQ ID NO: 1299610 - RNA, 16 nt, Human
ccacucuggcagccac

SEQ ID NO: 1299611 - RNA, 17 nt, Human
ccacucuggcagccaca

SEQ ID NO: 1299612 - RNA, 18 nt, Human
ccacucuggcagccacac

SEQ ID NO: 1299613 - RNA, 19 nt, Human
ccacucuggcagccacacu

SEQ ID NO: 1299614 - RNA, 12 nt, Human
ccacuuggucug

SEQ ID NO: 1299615 - RNA, 12 nt, Human
ccacuuggcauu

SEQ ID NO: 1299616 - RNA, 12 nt, Human
ccacuugccucu

SEQ ID NO: 1299617 - RNA, 13 nt, Human
ccacuugccucuu

SEQ ID NO: 1299618 - RNA, 16 nt, Human
ccacuugccucuuccu

SEQ ID NO: 1299619 - RNA, 17 nt, Human
ccacuugccucuuccuu

SEQ ID NO: 1299620 - RNA, 19 nt, Human
ccacuugccucuuccuuga

SEQ ID NO: 1299621 - RNA, 22 nt, Human
ccacuugccucuuccuugaaga

SEQ ID NO: 1299622 - RNA, 14 nt, Human
ccacuucugacagc

SEQ ID NO: 1299623 - RNA, 16 nt, Human
ccacuucugacagccu

SEQ ID NO: 1299624 - RNA, 18 nt, Human
ccacuucugacagccuca

SEQ ID NO: 1299625 - RNA, 19 nt, Human
ccacuucugacagccucag

SEQ ID NO: 1299626 - RNA, 13 nt, Human
ccacuucugcacu

SEQ ID NO: 1299627 - RNA, 12 nt, Human
ccacuucugcac

SEQ ID NO: 1299628 - RNA, 24 nt, Human
ccacuuucaaucuucaauccuuga

SEQ ID NO: 1299629 - RNA, 12 nt, Human
ccacuuucagcu

SEQ ID NO: 1299630 - RNA, 13 nt, Human
ccacuuucagcug

SEQ ID NO: 1299631 - RNA, 14 nt, Human
ccacuuucagcugu

SEQ ID NO: 1299632 - RNA, 20 nt, Human
ccacuuuaaaauaucuacau

SEQ ID NO: 1299633 - RNA, 15 nt, Human
ccacuuucagcuguc

SEQ ID NO: 1299634 - RNA, 16 nt, Human
ccacuuucagcugucu

SEQ ID NO: 1299635 - RNA, 17 nt, Human
ccacuuucagcugucuu

SEQ ID NO: 1299636 - RNA, 20 nt, Human
ccacuuugcacagcucuccg

SEQ ID NO: 1299637 - RNA, 13 nt, Human
ccacuuucuuucu

SEQ ID NO: 1299638 - RNA, 16 nt, Human
ccacuuucuuucuuuc

SEQ ID NO: 1299639 - RNA, 22 nt, Human
ccacuuuguuucguggggaggu

SEQ ID NO: 1299640 - RNA, 22 nt, Human
ccacuuggucugugagaugcua

SEQ ID NO: 1299641 - RNA, 20 nt, Human
ccacuuggucugugagaugc

SEQ ID NO: 1299642 - RNA, 15 nt, Human
ccacuuguccgcugg

SEQ ID NO: 1299643 - RNA, 21 nt, Human
ccacuuguccgcuggguggua

SEQ ID NO: 1299644 - RNA, 18 nt, Human
ccacuuguccuuagccug

SEQ ID NO: 1299645 - RNA, 21 nt, Human
ccacuuguccuuagccuggac

SEQ ID NO: 1299646 - RNA, 22 nt, Human
ccacuuguccuuagccuggacc

SEQ ID NO: 1299647 - RNA, 19 nt, Human
ccacuuggucugugagaug

SEQ ID NO: 1299648 - RNA, 17 nt, Human
ccacuuggucugugaga

SEQ ID NO: 1299649 - RNA, 16 nt, Human
ccacuuggucugugag

SEQ ID NO: 1299650 - RNA, 15 nt, Human
ccacuuggucuguga

SEQ ID NO: 1299651 - RNA, 13 nt, Human
ccagaccugaggc

SEQ ID NO: 1299652 - RNA, 15 nt, Human
ccagaccugauccug

SEQ ID NO: 1299653 - RNA, 16 nt, Human
ccagaccugauccugg

SEQ ID NO: 1299654 - RNA, 17 nt, Human
ccagaccugauccugga

SEQ ID NO: 1299655 - RNA, 18 nt, Human
ccagaccugauccuggag

SEQ ID NO: 1299656 - RNA, 19 nt, Human
ccagaccugauccuggagg

SEQ ID NO: 1299657 - RNA, 20 nt, Human
ccagaccugauccuggaggc

SEQ ID NO: 1299658 - RNA, 21 nt, Human
ccagaccugauccuggaggcc

SEQ ID NO: 1299659 - RNA, 23 nt, Human
ccagaccugauccuggaggccca

SEQ ID NO: 1299660 - RNA, 16 nt, Human
ccagacuacuugggag

SEQ ID NO: 1299661 - RNA, 18 nt, Human
ccagacuagauguaguau

SEQ ID NO: 1299662 - RNA, 22 nt, Human
ccagacuagauguaguauuuuu

SEQ ID NO: 1299663 - RNA, 14 nt, Human
ccagacgccuggcu

SEQ ID NO: 1299664 - RNA, 24 nt, Human
ccagaccugauccuggaggcccag

SEQ ID NO: 1299665 - RNA, 14 nt, Human
ccagaccugaggcg

SEQ ID NO: 1299666 - RNA, 20 nt, Human
ccagaccuguuagcagacag

SEQ ID NO: 1299667 - RNA, 21 nt, Human
ccagaccuguuagcagacagg

SEQ ID NO: 1299668 - RNA, 23 nt, Human
ccagaccuguuagcagacaggcc

SEQ ID NO: 1299669 - RNA, 17 nt, Human
ccagacgccuggcugcu

SEQ ID NO: 1299670 - RNA, 18 nt, Human
ccaggcaggagcccuucu

SEQ ID NO: 1299671 - RNA, 12 nt, Human
ccaggcagccuc

SEQ ID NO: 1299672 - RNA, 16 nt, Human
ccaggcagccucuggg

SEQ ID NO: 1299673 - RNA, 17 nt, Human
ccaggcagccucugggg

SEQ ID NO: 1299674 - RNA, 17 nt, Human
ccaggauacuggcacag

SEQ ID NO: 1299675 - RNA, 15 nt, Human
ccaggauacuggcac

SEQ ID NO: 1299676 - RNA, 14 nt, Human
ccaggcagccucug

SEQ ID NO: 1299677 - RNA, 20 nt, Human
ccaggcucucuuugcccagu

SEQ ID NO: 1299678 - RNA, 13 nt, Human
ccaggcugaagca

SEQ ID NO: 1299679 - RNA, 20 nt, Human
ccaggcugaagcagguuccc

SEQ ID NO: 1299680 - RNA, 15 nt, Human
ccaggcugaccacag

SEQ ID NO: 1299681 - RNA, 16 nt, Human
ccaggcugaccacagc

SEQ ID NO: 1299682 - RNA, 17 nt, Human
ccaggcugaccacagca

SEQ ID NO: 1299683 - RNA, 18 nt, Human
ccaggcugaccacagcac

SEQ ID NO: 1299684 - RNA, 19 nt, Human
ccaggcugaccacagcaca

SEQ ID NO: 1299685 - RNA, 20 nt, Human
ccaggcugaccacagcacag

SEQ ID NO: 1299686 - RNA, 13 nt, Human
ccaguccuguccu

SEQ ID NO: 1299687 - RNA, 15 nt, Human
ccaggggccaugaau

SEQ ID NO: 1299688 - RNA, 16 nt, Human
ccaggggcagccccag

SEQ ID NO: 1299689 - RNA, 19 nt, Human
ccaggggcagccccaggcc

SEQ ID NO: 1299690 - RNA, 23 nt, Human
ccaggggcagccccaggccaaag

SEQ ID NO: 1299691 - RNA, 13 nt, Human
ccaggcugagccu

SEQ ID NO: 1299692 - RNA, 21 nt, Human
ccaggcugaccacagcacagc

SEQ ID NO: 1299693 - RNA, 23 nt, Human
ccaggcugaccacagcacagcca

SEQ ID NO: 1299694 - RNA, 14 nt, Human
ccaggcugagccuc

SEQ ID NO: 1299695 - RNA, 16 nt, Human
ccaggcugagccucag

SEQ ID NO: 1299696 - RNA, 17 nt, Human
ccaggcugagccucagu

SEQ ID NO: 1299697 - RNA, 19 nt, Human
ccaggcugagccucagucu

SEQ ID NO: 1299698 - RNA, 22 nt, Human
ccaggcugagccucagucuccc

SEQ ID NO: 1299699 - RNA, 15 nt, Human
ccaggcugagguccu

SEQ ID NO: 1299700 - RNA, 12 nt, Human
ccagcagacaga

SEQ ID NO: 1299701 - RNA, 13 nt, Human
ccagcagacagag

SEQ ID NO: 1299702 - RNA, 17 nt, Human
ccagcagacagagccag

SEQ ID NO: 1299703 - RNA, 21 nt, Human
ccagcagccccacaccagggc

SEQ ID NO: 1299704 - RNA, 16 nt, Human
ccagcagacagagcca

SEQ ID NO: 1299705 - RNA, 22 nt, Human
ccagcccccuaagagagcaccu

SEQ ID NO: 1299706 - RNA, 15 nt, Human
ccagcccccuccugg

SEQ ID NO: 1299707 - RNA, 18 nt, Human
ccagcccccuccuggugc

SEQ ID NO: 1299708 - RNA, 22 nt, Human
ccagcccccuccuggugccacc

SEQ ID NO: 1299709 - RNA, 14 nt, Human
ccagcccccugacc

SEQ ID NO: 1299710 - RNA, 19 nt, Human
ccagcccccugaccacuca

SEQ ID NO: 1299711 - RNA, 23 nt, Human
ccagcccccugaccacucagaga

SEQ ID NO: 1299712 - RNA, 22 nt, Human
ccagcccccugaccacucagag

SEQ ID NO: 1299713 - RNA, 13 nt, Human
ccagcgagcgccc

SEQ ID NO: 1299714 - RNA, 20 nt, Human
ccagcgagcgcccagcuccu

SEQ ID NO: 1299715 - RNA, 22 nt, Human
ccagcgagcgcccagcuccuga

SEQ ID NO: 1299716 - RNA, 16 nt, Human
ccagcgaggaggcucc

SEQ ID NO: 1299717 - RNA, 17 nt, Human
ccagcgagggcgugucu

SEQ ID NO: 1299718 - RNA, 18 nt, Human
ccagcgauucccucuccc

SEQ ID NO: 1299719 - RNA, 19 nt, Human
ccagcgauucccucuccca

SEQ ID NO: 1299720 - RNA, 21 nt, Human
ccagcgauucccucucccagg

SEQ ID NO: 1299721 - RNA, 22 nt, Human
ccagcgauucccucucccaggc

SEQ ID NO: 1299722 - RNA, 23 nt, Human
ccagcgauucccucucccaggcc

SEQ ID NO: 1299723 - RNA, 14 nt, Human
ccagcuuguuuaca

SEQ ID NO: 1299724 - RNA, 19 nt, Human
ccagcuuguuuacaugcuu

SEQ ID NO: 1299725 - RNA, 13 nt, Human
ccagcggacacac

SEQ ID NO: 1299726 - RNA, 14 nt, Human
ccagcggacacacg

SEQ ID NO: 1299727 - RNA, 15 nt, Human
ccagcggcccuguca

SEQ ID NO: 1299728 - RNA, 15 nt, Human
ccagcggugggaccu

SEQ ID NO: 1299729 - RNA, 13 nt, Human
ccagcguccuccu

SEQ ID NO: 1299730 - RNA, 19 nt, Human
ccagcguccuccucuguga

SEQ ID NO: 1299731 - RNA, 17 nt, Human
ccagcguccuccucugu

SEQ ID NO: 1299732 - RNA, 17 nt, Human
ccccagccauccagggg

SEQ ID NO: 1299733 - RNA, 16 nt, Human
ccccagccagggcuca

SEQ ID NO: 1299734 - RNA, 16 nt, Human
ccccauucuuccuagu

SEQ ID NO: 1299735 - RNA, 21 nt, Human
ccccauucuuccuaguuuucu

SEQ ID NO: 1299736 - RNA, 23 nt, Human
ccccauucuuccuaguuuucucc

SEQ ID NO: 1299737 - RNA, 20 nt, Human
cccauucuuccuaguuuucu

SEQ ID NO: 1299738 - RNA, 11 nt, Human
ccccagcacuu

SEQ ID NO: 1299739 - RNA, 18 nt, Human
ccccagcaggugcugacu

SEQ ID NO: 1299740 - RNA, 19 nt, Human
ccccagcauuccagccccu

SEQ ID NO: 1299741 - RNA, 16 nt, Human
cccccuucaagccugu

SEQ ID NO: 1299742 - RNA, 15 nt, Human
ccccauuguggucac

SEQ ID NO: 1299743 - RNA, 18 nt, Human
ccccauuuagguuucuga

SEQ ID NO: 1299744 - RNA, 18 nt, Human
ccccgccugcccucaugg

SEQ ID NO: 1299745 - RNA, 21 nt, Human
ccccgcguggaacucgugucu

SEQ ID NO: 1299746 - RNA, 12 nt, Human
cccauucuuccu

SEQ ID NO: 1299747 - RNA, 21 nt, Human
cccauucuuccuaguuuucuc

SEQ ID NO: 1299748 - RNA, 23 nt, Human
cccagcuggggccaggcuggguc

SEQ ID NO: 1299749 - RNA, 22 nt, Human
cccagcuggggccaggcugggu

SEQ ID NO: 1299750 - RNA, 17 nt, Human
cccagcugggucaggca

SEQ ID NO: 1299751 - RNA, 19 nt, Human
cccagcugggucaggcagg

SEQ ID NO: 1299752 - RNA, 11 nt, Human
cccagggcaca

SEQ ID NO: 1299753 - RNA, 18 nt, Human
cccagggaggccgaagcu

SEQ ID NO: 1299754 - RNA, 19 nt, Human
cccaucauccucuggcuug

SEQ ID NO: 1299755 - RNA, 13 nt, Human
cccauccagggcc

SEQ ID NO: 1299756 - RNA, 14 nt, Human
cccauccaguucau

SEQ ID NO: 1299757 - RNA, 21 nt, Human
cccauccaguucaugagaauc

SEQ ID NO: 1299758 - RNA, 13 nt, Human
cccagggcacagg

SEQ ID NO: 1299759 - RNA, 14 nt, Human
cccagggcacagga

SEQ ID NO: 1299760 - RNA, 15 nt, Human
cccagggcacaggag

SEQ ID NO: 1299761 - RNA, 16 nt, Human
cccagggcacaggagc

SEQ ID NO: 1299762 - RNA, 17 nt, Human
cccagggcacaggagcu

SEQ ID NO: 1299763 - RNA, 18 nt, Human
cccagggcacaggagcua

SEQ ID NO: 1299764 - RNA, 22 nt, Human
cccagggcacaggagcuaccug

SEQ ID NO: 1299765 - RNA, 13 nt, Human
cccagggcagcca

SEQ ID NO: 1299766 - RNA, 18 nt, Human
cccagggcagccagggag

SEQ ID NO: 1299767 - RNA, 15 nt, Human
cccagggcagccagg

SEQ ID NO: 1299768 - RNA, 14 nt, Human
cccaucauccucug

SEQ ID NO: 1299769 - RNA, 16 nt, Human
cccaucauccucuggc

SEQ ID NO: 1299770 - RNA, 14 nt, Human
cccauccccagcga

SEQ ID NO: 1299771 - RNA, 14 nt, Human
cccaucccaugcug

SEQ ID NO: 1299772 - RNA, 13 nt, Human
cccauccccagcg

SEQ ID NO: 1299773 - RNA, 18 nt, Human
cccauccccagcgauucc

SEQ ID NO: 1299774 - RNA, 11 nt, Human
cccagcccaga

SEQ ID NO: 1299775 - RNA, 12 nt, Human
cccagcccagag

SEQ ID NO: 1299776 - RNA, 13 nt, Human
cccagcccagaga

SEQ ID NO: 1299777 - RNA, 14 nt, Human
cccagcccagagac

SEQ ID NO: 1299778 - RNA, 15 nt, Human
cccagcccagagaca

SEQ ID NO: 1299779 - RNA, 16 nt, Human
cccagcccagagacau

SEQ ID NO: 1299780 - RNA, 11 nt, Human
cccagcccagg

SEQ ID NO: 1299781 - RNA, 18 nt, Human
cccagcccagggcuccug

SEQ ID NO: 1299782 - RNA, 15 nt, Human
cccagcccauggaga

SEQ ID NO: 1299783 - RNA, 18 nt, Human
cccagcauuccagccccu

SEQ ID NO: 1299784 - RNA, 19 nt, Human
cccagcauuccagccccuc

SEQ ID NO: 1299785 - RNA, 20 nt, Human
cccagcauuccagccccucu

SEQ ID NO: 1299786 - RNA, 22 nt, Human
cccagcauuccagccccucugg

SEQ ID NO: 1299787 - RNA, 20 nt, Human
ccauugugccuaaguccagu

SEQ ID NO: 1299788 - RNA, 20 nt, Human
ccauuguggccuaagaggcu

SEQ ID NO: 1299789 - RNA, 17 nt, Human
ccauugugcauucuaga

SEQ ID NO: 1299790 - RNA, 12 nt, Human
ccauugugcauu

SEQ ID NO: 1299791 - RNA, 22 nt, Human
ccauuguggucacaggaaguag

SEQ ID NO: 1299792 - RNA, 19 nt, Human
ccauuguagcgucuuucuu

SEQ ID NO: 1299793 - RNA, 19 nt, Human
ccauuguccaauccuaugu

SEQ ID NO: 1299794 - RNA, 20 nt, Human
ccauuguagcgucuuucuuu

SEQ ID NO: 1299795 - RNA, 15 nt, Human
ccauugucucagagc

SEQ ID NO: 1299796 - RNA, 14 nt, Human
ccauugguccaaga

SEQ ID NO: 1299797 - RNA, 14 nt, Human
cccaaccugcucuc

SEQ ID NO: 1299798 - RNA, 21 nt, Human
cccaaccugcucuccucuugc

SEQ ID NO: 1299799 - RNA, 20 nt, Human
ccauuuaaacagauguccau

SEQ ID NO: 1299800 - RNA, 16 nt, Human
cccaaccugcucuccu

SEQ ID NO: 1299801 - RNA, 17 nt, Human
cccaaccugcucuccuc

SEQ ID NO: 1299802 - RNA, 19 nt, Human
cccaaccugcucuccucuu

SEQ ID NO: 1299803 - RNA, 15 nt, Human
ccauuguuuaaaaau

SEQ ID NO: 1299804 - RNA, 23 nt, Human
ccauuguuuaaaaaucuuaaugu

SEQ ID NO: 1299805 - RNA, 23 nt, Human
cccaaccugcucuccucuugcca

SEQ ID NO: 1299806 - RNA, 21 nt, Human
cccaaccugcucuccucuucu

SEQ ID NO: 1299807 - RNA, 20 nt, Human
cccaacucuccccugaccug

SEQ ID NO: 1299808 - RNA, 12 nt, Human
cccaacgcucca

SEQ ID NO: 1299809 - RNA, 23 nt, Human
cccaacucuugcacagucacugc

SEQ ID NO: 1299810 - RNA, 12 nt, Human
cccaacugacca

SEQ ID NO: 1299811 - RNA, 16 nt, Human
cccaagcggugucucu

SEQ ID NO: 1299812 - RNA, 17 nt, Human
cccaagcggugucucuc

SEQ ID NO: 1299813 - RNA, 12 nt, Human
cccaagcucaga

SEQ ID NO: 1299814 - RNA, 19 nt, Human
cccaagcuguuuucuucua

SEQ ID NO: 1299815 - RNA, 20 nt, Human
cccaagaauagaugcugacu

SEQ ID NO: 1299816 - RNA, 21 nt, Human
cccaagaauagaugcugacug

SEQ ID NO: 1299817 - RNA, 14 nt, Human
cccaagccagaggc

SEQ ID NO: 1299818 - RNA, 15 nt, Human
cccaagccagaggcu

SEQ ID NO: 1299819 - RNA, 23 nt, Human
cccaagccuacuuuugccauuga

SEQ ID NO: 1299820 - RNA, 16 nt, Human
cccaagccagaggcug

SEQ ID NO: 1299821 - RNA, 16 nt, Human
cccaagccuggcaagg

SEQ ID NO: 1299822 - RNA, 18 nt, Human
cccaccauuuggcauccc

SEQ ID NO: 1299823 - RNA, 23 nt, Human
cccaccauuuggcaucccugggc

SEQ ID NO: 1299824 - RNA, 20 nt, Human
cccaccauuuggcaucccug

SEQ ID NO: 1299825 - RNA, 23 nt, Human
cccacuguacuugcucuugaugc

SEQ ID NO: 1299826 - RNA, 18 nt, Human
cccacccuguuccugcug

SEQ ID NO: 1299827 - RNA, 19 nt, Human
cccacccuguuccugcugc

SEQ ID NO: 1299828 - RNA, 20 nt, Human
cccacccuguuccugcugcu

SEQ ID NO: 1299829 - RNA, 19 nt, Human
cccacuguaucuaggcaac

SEQ ID NO: 1299830 - RNA, 19 nt, Human
cccacuguacuugcucuug

SEQ ID NO: 1299831 - RNA, 18 nt, Human
cccacuguacuugcucuu

SEQ ID NO: 1299832 - RNA, 13 nt, Human
cccaccccuagga

SEQ ID NO: 1299833 - RNA, 13 nt, Human
cccacccugggcc

SEQ ID NO: 1299834 - RNA, 14 nt, Human
cccacccugggccc

SEQ ID NO: 1299835 - RNA, 18 nt, Human
cccacccuggugggccaa

SEQ ID NO: 1299836 - RNA, 12 nt, Human
cccacccuguuc

SEQ ID NO: 1299837 - RNA, 14 nt, Human
cccacccuguuccu

SEQ ID NO: 1299838 - RNA, 15 nt, Human
cccacccuguuccug

SEQ ID NO: 1299839 - RNA, 16 nt, Human
cccacccuguuccugc

SEQ ID NO: 1299840 - RNA, 17 nt, Human
cccacccuguuccugcu

SEQ ID NO: 1299841 - RNA, 22 nt, Human
cccacuguccugggccugcaga

SEQ ID NO: 1299842 - RNA, 15 nt, Human
cccacuguccugggc

SEQ ID NO: 1299843 - RNA, 16 nt, Human
cccacuguccugggcc

SEQ ID NO: 1299844 - RNA, 18 nt, Human
ccaugggcacugugggua

SEQ ID NO: 1299845 - RNA, 14 nt, Human
ccaugggcagagcc

SEQ ID NO: 1299846 - RNA, 16 nt, Human
ccaugggcagagccca

SEQ ID NO: 1299847 - RNA, 21 nt, Human
ccaugagcuccuuaaggcucu

SEQ ID NO: 1299848 - RNA, 23 nt, Human
ccaugacccugccucucccaggc

SEQ ID NO: 1299849 - RNA, 14 nt, Human
ccaugaccuccagc

SEQ ID NO: 1299850 - RNA, 15 nt, Human
ccaugaccuccagcu

SEQ ID NO: 1299851 - RNA, 20 nt, Human
ccaugaccuccagcuuuccu

SEQ ID NO: 1299852 - RNA, 22 nt, Human
ccaugaccuccagcuuuccugu

SEQ ID NO: 1299853 - RNA, 21 nt, Human
ccaugacgcaaagagagauuu

SEQ ID NO: 1299854 - RNA, 22 nt, Human
ccaugacgcaaagagagauuuu

SEQ ID NO: 1299855 - RNA, 21 nt, Human
ccaugaccuccagcuuuccug

SEQ ID NO: 1299856 - RNA, 12 nt, Human
ccaugacugcuu

SEQ ID NO: 1299857 - RNA, 13 nt, Human
ccaugacugcuug

SEQ ID NO: 1299858 - RNA, 19 nt, Human
ccaugacugcuugcccuaa

SEQ ID NO: 1299859 - RNA, 22 nt, Human
ccaugacugcuugcccuaagca

SEQ ID NO: 1299860 - RNA, 21 nt, Human
ccaugacugcuugcccuaagc

SEQ ID NO: 1299861 - RNA, 23 nt, Human
ccaugagaugauacauccaaagc

SEQ ID NO: 1299862 - RNA, 14 nt, Human
ccaugucucgacuc

SEQ ID NO: 1299863 - RNA, 15 nt, Human
ccaugucucgacuca

SEQ ID NO: 1299864 - RNA, 20 nt, Human
ccaugucucugagcauuaga

SEQ ID NO: 1299865 - RNA, 13 nt, Human
ccaugucuucucc

SEQ ID NO: 1299866 - RNA, 15 nt, Human
ccaugucuucucccu

SEQ ID NO: 1299867 - RNA, 16 nt, Human
ccaugucuucucccug

SEQ ID NO: 1299868 - RNA, 19 nt, Human
ccaugucuucucccuggaa

SEQ ID NO: 1299869 - RNA, 20 nt, Human
ccaugucuucucccuggaau

SEQ ID NO: 1299870 - RNA, 13 nt, Human
ccaugucuuucuc

SEQ ID NO: 1299871 - RNA, 17 nt, Human
ccaugggcagagcccaa

SEQ ID NO: 1299872 - RNA, 14 nt, Human
ccaugggcagagga

SEQ ID NO: 1299873 - RNA, 12 nt, Human
ccauggggaggg

SEQ ID NO: 1299874 - RNA, 18 nt, Human
ccauggggagggauucug

SEQ ID NO: 1299875 - RNA, 20 nt, Human
ccauggggagggauucuggu

SEQ ID NO: 1299876 - RNA, 16 nt, Human
ccauggguagccuggg

SEQ ID NO: 1299877 - RNA, 23 nt, Human
ccugccuggacuuggccccugcc

SEQ ID NO: 1299878 - RNA, 11 nt, Human
ccugccuggag

SEQ ID NO: 1299879 - RNA, 19 nt, Human
ccugccuggaccagccucu

SEQ ID NO: 1299880 - RNA, 12 nt, Human
ccugccuggacc

SEQ ID NO: 1299881 - RNA, 18 nt, Human
ccugccugcucgcucccu

SEQ ID NO: 1299882 - RNA, 14 nt, Human
ccugccucuuaaau

SEQ ID NO: 1299883 - RNA, 21 nt, Human
ccugccucuuaaauaaaccuu

SEQ ID NO: 1299884 - RNA, 16 nt, Human
ccugccugcccuggug

SEQ ID NO: 1299885 - RNA, 21 nt, Human
ccugccucucugcaggucccu

SEQ ID NO: 1299886 - RNA, 20 nt, Human
ccugccucucugcagguccc

SEQ ID NO: 1299887 - RNA, 23 nt, Human
ccugccuccugccggcuccuugg

SEQ ID NO: 1299888 - RNA, 22 nt, Human
ccugcugccauguggacuggug

SEQ ID NO: 1299889 - RNA, 11 nt, Human
ccugcugcccu

SEQ ID NO: 1299890 - RNA, 12 nt, Human
ccugcugcccuc

SEQ ID NO: 1299891 - RNA, 13 nt, Human
ccugcugcccucc

SEQ ID NO: 1299892 - RNA, 18 nt, Human
ccugcugcccucccccuc

SEQ ID NO: 1299893 - RNA, 17 nt, Human
ccugccucucugcaggu

SEQ ID NO: 1299894 - RNA, 19 nt, Human
ccucuuuggcuccccugua

SEQ ID NO: 1299895 - RNA, 20 nt, Human
ccucuuuggcuccccuguac

SEQ ID NO: 1299896 - RNA, 14 nt, Human
ccugaccugugagc

SEQ ID NO: 1299897 - RNA, 18 nt, Human
ccugaccugugagcccag

SEQ ID NO: 1299898 - RNA, 19 nt, Human
ccugaccugugagcccagc

SEQ ID NO: 1299899 - RNA, 20 nt, Human
ccugaccugugagcccagcu

SEQ ID NO: 1299900 - RNA, 21 nt, Human
ccugaccugugagcccagcug

SEQ ID NO: 1299901 - RNA, 22 nt, Human
ccugaccugugagcccagcugg

SEQ ID NO: 1299902 - RNA, 19 nt, Human
ccugacuagggagccaugu

SEQ ID NO: 1299903 - RNA, 13 nt, Human
ccugacucauucu

SEQ ID NO: 1299904 - RNA, 14 nt, Human
ccugaggcuguggu

SEQ ID NO: 1299905 - RNA, 15 nt, Human
ccugaggcugugguc

SEQ ID NO: 1299906 - RNA, 14 nt, Human
ccugagugcuugcu

SEQ ID NO: 1299907 - RNA, 15 nt, Human
ccugagugcuugcuu

SEQ ID NO: 1299908 - RNA, 17 nt, Human
ccugagugcuugcuuuu

SEQ ID NO: 1299909 - RNA, 19 nt, Human
ccugagugcuugcuuuuca

SEQ ID NO: 1299910 - RNA, 14 nt, Human
ccugaguggugcca

SEQ ID NO: 1299911 - RNA, 16 nt, Human
ccugaguggugccaaa

SEQ ID NO: 1299912 - RNA, 15 nt, Human
ccucugccugucucc

SEQ ID NO: 1299913 - RNA, 19 nt, Human
ccucugccugucuccccca

SEQ ID NO: 1299914 - RNA, 14 nt, Human
ccucuuuggcuccc

SEQ ID NO: 1299915 - RNA, 18 nt, Human
ccucuuuggcuccccugu

SEQ ID NO: 1299916 - RNA, 23 nt, Human
ccucuuggggaguuuaggguggg

SEQ ID NO: 1299917 - RNA, 22 nt, Human
ccucuuggggaguuuagggugg

SEQ ID NO: 1299918 - RNA, 14 nt, Human
ccucuuggagaagu

SEQ ID NO: 1299919 - RNA, 18 nt, Human
ccucuuggagaagucuca

SEQ ID NO: 1299920 - RNA, 19 nt, Human
ccucuuggagaagucucag

SEQ ID NO: 1299921 - RNA, 20 nt, Human
ccucuuggagaagucucagc

SEQ ID NO: 1299922 - RNA, 21 nt, Human
ccucuuggagaagucucagcu

SEQ ID NO: 1299923 - RNA, 22 nt, Human
ccucuuggagaagucucagcua

SEQ ID NO: 1299924 - RNA, 13 nt, Human
ccucuuggccuga

SEQ ID NO: 1299925 - RNA, 16 nt, Human
ccucuucugggccuga

SEQ ID NO: 1299926 - RNA, 13 nt, Human
ccucuugaccagg

SEQ ID NO: 1299927 - RNA, 15 nt, Human
ccucuugaccaggcu

SEQ ID NO: 1299928 - RNA, 14 nt, Human
ccucuugaccaggc

SEQ ID NO: 1299929 - RNA, 13 nt, Human
ccucuucugggag

SEQ ID NO: 1299930 - RNA, 17 nt, Human
ccucuucugggagggca

SEQ ID NO: 1299931 - RNA, 18 nt, Human
ccucuucugggagggcag

SEQ ID NO: 1299932 - RNA, 21 nt, Human
ccucuucugggagggcagcag

SEQ ID NO: 1299933 - RNA, 19 nt, Human
ccucgccggaucugaggga

SEQ ID NO: 1299934 - RNA, 13 nt, Human
ccucgccugacaa

SEQ ID NO: 1299935 - RNA, 18 nt, Human
ccucgccggaucugaggg

SEQ ID NO: 1299936 - RNA, 17 nt, Human
ccucgcuccccacucug

SEQ ID NO: 1299937 - RNA, 18 nt, Human
ccucgcuccccacucugc

SEQ ID NO: 1299938 - RNA, 19 nt, Human
ccucgcuccccacucugcu

SEQ ID NO: 1299939 - RNA, 21 nt, Human
ccucgcuccccacucugcucu

SEQ ID NO: 1299940 - RNA, 22 nt, Human
ccucgcuccccacucugcucug

SEQ ID NO: 1299941 - RNA, 23 nt, Human
ccucgcuccccacucugcucuga

SEQ ID NO: 1299942 - RNA, 13 nt, Human
ccucgcugccagc

SEQ ID NO: 1299943 - RNA, 14 nt, Human
ccucgcugccagcu

SEQ ID NO: 1299944 - RNA, 19 nt, Human
ccucgcugccagcucugua

SEQ ID NO: 1299945 - RNA, 20 nt, Human
ccucgcugccagcucuguau

SEQ ID NO: 1299946 - RNA, 13 nt, Human
ccucgggccugcu

SEQ ID NO: 1299947 - RNA, 13 nt, Human
ccucuccuuccug

SEQ ID NO: 1299948 - RNA, 15 nt, Human
ccucuccuuccugug

SEQ ID NO: 1299949 - RNA, 23 nt, Human
ccucuccuucaugacagccucca

SEQ ID NO: 1299950 - RNA, 16 nt, Human
ccucucgagggcaggg

SEQ ID NO: 1299951 - RNA, 14 nt, Human
ccucucgcggcccu

SEQ ID NO: 1299952 - RNA, 20 nt, Human
ccucucgcuccucaaccccu

SEQ ID NO: 1299953 - RNA, 23 nt, Human
ccucucgcuccucaaccccuccc

SEQ ID NO: 1299954 - RNA, 17 nt, Human
ccucucugcaggucccu

SEQ ID NO: 1299955 - RNA, 16 nt, Human
ccucucugcagguccc

SEQ ID NO: 1299956 - RNA, 23 nt, Human
ccucucguaagauuuccuucuuu

SEQ ID NO: 1299957 - RNA, 22 nt, Human
ccucucgcuccucaaccccucc

SEQ ID NO: 1299958 - RNA, 19 nt, Human
ccucucguaagauuuccuu

SEQ ID NO: 1299959 - RNA, 22 nt, Human
ccucucguaagauuuccuucuu

SEQ ID NO: 1299960 - RNA, 15 nt, Human
ccucucuacagucuc

SEQ ID NO: 1299961 - RNA, 20 nt, Human
ccucucuacagucucgucuc

SEQ ID NO: 1299962 - RNA, 17 nt, Human
ccucucuauccucucuu

SEQ ID NO: 1299963 - RNA, 19 nt, Human
ccucucuauccucucuucc

SEQ ID NO: 1299964 - RNA, 19 nt, Human
ccucucugcaggucccuaa

SEQ ID NO: 1299965 - RNA, 18 nt, Human
ccucucugcaggucccua

SEQ ID NO: 1299966 - RNA, 20 nt, Human
ccucucugcaggucccuaau

SEQ ID NO: 1299967 - RNA, 21 nt, Human
ccucugcccgggagcucagga

SEQ ID NO: 1299968 - RNA, 22 nt, Human
ccucugcccgggagcucaggaa

SEQ ID NO: 1299969 - RNA, 20 nt, Human
ccucucuauccucucuuccu

SEQ ID NO: 1299970 - RNA, 21 nt, Human
ccucucuauccucucuuccuc

SEQ ID NO: 1299971 - RNA, 15 nt, Human
ccucugcccuuccug

SEQ ID NO: 1299972 - RNA, 19 nt, Human
ccucugcccuuccugcagg

SEQ ID NO: 1299973 - RNA, 11 nt, Human
ccucugcccug

SEQ ID NO: 1299974 - RNA, 12 nt, Human
ccucugcccugc

SEQ ID NO: 1299975 - RNA, 13 nt, Human
ccucugcccugcg

SEQ ID NO: 1299976 - RNA, 14 nt, Human
ccucugcccugcgg

SEQ ID NO: 1299977 - RNA, 14 nt, Human
ccuccgccauccac

SEQ ID NO: 1299978 - RNA, 18 nt, Human
ccuccgggaccuggugcu

SEQ ID NO: 1299979 - RNA, 13 nt, Human
ccuccgccucccg

SEQ ID NO: 1299980 - RNA, 16 nt, Human
ccuccgccucccgggu

SEQ ID NO: 1299981 - RNA, 15 nt, Human
ccuccgccauccacc

SEQ ID NO: 1299982 - RNA, 12 nt, Human
ccuccgcccugc

SEQ ID NO: 1299983 - RNA, 13 nt, Human
ccuccgcccugcc

SEQ ID NO: 1299984 - RNA, 14 nt, Human
ccuccgcccugcca

SEQ ID NO: 1299985 - RNA, 15 nt, Human
ccuccgcccugccac

SEQ ID NO: 1299986 - RNA, 16 nt, Human
ccuccgcccugccacu

SEQ ID NO: 1299987 - RNA, 18 nt, Human
ccuccgcccugccacuca

SEQ ID NO: 1299988 - RNA, 18 nt, Human
ccuccguccaggagccug

SEQ ID NO: 1299989 - RNA, 15 nt, Human
ccuccguccccugcc

SEQ ID NO: 1299990 - RNA, 15 nt, Human
ccuccuuucuggcuu

SEQ ID NO: 1299991 - RNA, 12 nt, Human
ccucccuggaug

SEQ ID NO: 1299992 - RNA, 14 nt, Human
ccucccuguaacuu

SEQ ID NO: 1299993 - RNA, 11 nt, Human
ccucccuguaa

SEQ ID NO: 1299994 - RNA, 18 nt, Human
ccucccuguuccccagag

SEQ ID NO: 1299995 - RNA, 19 nt, Human
ccucccuguuccccagaga

SEQ ID NO: 1299996 - RNA, 20 nt, Human
ccucccuguuccccagagaa

SEQ ID NO: 1299997 - RNA, 15 nt, Human
ccucaugaauguaaa

SEQ ID NO: 1299998 - RNA, 16 nt, Human
ccucaugaauguaaau

SEQ ID NO: 1299999 - RNA, 17 nt, Human
ccucaugaauguaaauu

SEQ ID NO: 1300000 - RNA, 19 nt, Human
ccucaugaauguaaauuug

SEQ ID NO: 1300001 - RNA, 20 nt, Human
ccucaugaauguaaauuugu

SEQ ID NO: 1300002 - RNA, 23 nt, Human
ccucaugaauguaaauuuguacu

SEQ ID NO: 1300003 - RNA, 22 nt, Human
ccucaugaauguaaauuuguac

SEQ ID NO: 1300004 - RNA, 11 nt, Human
ccucccagaaa

SEQ ID NO: 1300005 - RNA, 19 nt, Human
ccucccagaaagcaaaccu

SEQ ID NO: 1300006 - RNA, 16 nt, Human
ccucccagagcaccug

SEQ ID NO: 1300007 - RNA, 17 nt, Human
ccucccagagcaccugc

SEQ ID NO: 1300008 - RNA, 21 nt, Human
ccucccagagcaccugcuguc

SEQ ID NO: 1300009 - RNA, 20 nt, Human
ccucccagaggagccaccag

SEQ ID NO: 1300010 - RNA, 21 nt, Human
ccucccagaggagccaccagu

SEQ ID NO: 1300011 - RNA, 23 nt, Human
ccucccagaggagccaccaguuc

SEQ ID NO: 1300012 - RNA, 20 nt, Human
ccucccagagcaccugcugu

SEQ ID NO: 1300013 - RNA, 22 nt, Human
ccuccccagcauuccagccccu

SEQ ID NO: 1300014 - RNA, 18 nt, Human
ccucagccuccugaguag

SEQ ID NO: 1300015 - RNA, 15 nt, Human
ccuaggaagccucag

SEQ ID NO: 1300016 - RNA, 17 nt, Human
ccuaggaagccucagau

SEQ ID NO: 1300017 - RNA, 22 nt, Human
ccuaggaagccucagauuccuu

SEQ ID NO: 1300018 - RNA, 12 nt, Human
ccucagccucuc

SEQ ID NO: 1300019 - RNA, 19 nt, Human
ccucagccugaaccccagg

SEQ ID NO: 1300020 - RNA, 22 nt, Human
ccucagccugaaccccagggcu

SEQ ID NO: 1300021 - RNA, 21 nt, Human
ccucagccugaaccccagggc

SEQ ID NO: 1300022 - RNA, 11 nt, Human
ccucagccugg

SEQ ID NO: 1300023 - RNA, 12 nt, Human
ccucagccuggc

SEQ ID NO: 1300024 - RNA, 13 nt, Human
ccucagccuggcc

SEQ ID NO: 1300025 - RNA, 14 nt, Human
ccucagccuggcca

SEQ ID NO: 1300026 - RNA, 15 nt, Human
ccucagccuggccag

SEQ ID NO: 1300027 - RNA, 16 nt, Human
ccucagccuggccaga

SEQ ID NO: 1300028 - RNA, 17 nt, Human
ccucagccuggccagac

SEQ ID NO: 1300029 - RNA, 18 nt, Human
ccucagccuggccagaca

SEQ ID NO: 1300030 - RNA, 19 nt, Human
ccucaggaggcaggaccuu

SEQ ID NO: 1300031 - RNA, 19 nt, Human
ccucagccuggccagacac

SEQ ID NO: 1300032 - RNA, 22 nt, Human
ccucaggcaaucugcccgccug

SEQ ID NO: 1300033 - RNA, 15 nt, Human
ccucaggcacacagc

SEQ ID NO: 1300034 - RNA, 16 nt, Human
ccucaggcacacagcu

SEQ ID NO: 1300035 - RNA, 20 nt, Human
ccucaggcacacagcuacuc

SEQ ID NO: 1300036 - RNA, 17 nt, Human
ccucaggcacacagcua

SEQ ID NO: 1300037 - RNA, 13 nt, Human
ccucaggcagcuc

SEQ ID NO: 1300038 - RNA, 14 nt, Human
ccucaggcagcuca

SEQ ID NO: 1300039 - RNA, 15 nt, Human
ccucaggcagcucaa

SEQ ID NO: 1300040 - RNA, 10 nt, Human
ccuagccuug

SEQ ID NO: 1300041 - RNA, 14 nt, Human
ccuagccuugcuug

SEQ ID NO: 1300042 - RNA, 15 nt, Human
ccuagccuugcuugu

SEQ ID NO: 1300043 - RNA, 21 nt, Human
ccuagcgcuaucucccugccu

SEQ ID NO: 1300044 - RNA, 17 nt, Human
ccuagcgggauggggcu

SEQ ID NO: 1300045 - RNA, 20 nt, Human
ccuagcgggauggggcuccc

SEQ ID NO: 1300046 - RNA, 14 nt, Human
ccuagcugaauguu

SEQ ID NO: 1300047 - RNA, 19 nt, Human
ccuagcugaauguuuuucu

SEQ ID NO: 1300048 - RNA, 20 nt, Human
ccuagcugaauguuuuucua

SEQ ID NO: 1300049 - RNA, 21 nt, Human
ccuagcugaauguuuuucuaa

SEQ ID NO: 1300050 - RNA, 22 nt, Human
ccuagcugaauguuuuucuaaa

SEQ ID NO: 1300051 - RNA, 13 nt, Human
ccuagcuggcucu

SEQ ID NO: 1300052 - RNA, 14 nt, Human
ccuagcuggcucug

SEQ ID NO: 1300053 - RNA, 15 nt, Human
ccuagcuggcucugu

SEQ ID NO: 1300054 - RNA, 17 nt, Human
ccuagcuggcucuguga

SEQ ID NO: 1300055 - RNA, 13 nt, Human
ccuagcuguccuu

SEQ ID NO: 1300056 - RNA, 18 nt, Human
ccuagcuguccuuuuucc

SEQ ID NO: 1300057 - RNA, 19 nt, Human
ccuagcuguccuuuuuccu

SEQ ID NO: 1300058 - RNA, 20 nt, Human
ccuagcuguccuuuuuccuc

SEQ ID NO: 1300059 - RNA, 21 nt, Human
ccuagcugugaccucuccccu

SEQ ID NO: 1300060 - RNA, 22 nt, Human
ccuagcuguccuuuuuccucuc

SEQ ID NO: 1300061 - RNA, 16 nt, Human
ccuagcugugugaaua

SEQ ID NO: 1300062 - RNA, 22 nt, Human
ccuagcugugugaauaccugcu

SEQ ID NO: 1300063 - RNA, 13 nt, Human
ccuaggaagccuc

SEQ ID NO: 1300064 - RNA, 18 nt, Human
cccugcccugccaccugu

SEQ ID NO: 1300065 - RNA, 17 nt, Human
cccugcccugccaccug

SEQ ID NO: 1300066 - RNA, 15 nt, Human
cccugcccugccacc

SEQ ID NO: 1300067 - RNA, 11 nt, Human
cccugcccugg

SEQ ID NO: 1300068 - RNA, 12 nt, Human
cccugcccuggu

SEQ ID NO: 1300069 - RNA, 23 nt, Human
cccugcccugguuuccugcccug

SEQ ID NO: 1300070 - RNA, 22 nt, Human
cccugcccugguuuccugcccu

SEQ ID NO: 1300071 - RNA, 15 nt, Human
cccuggaucagaaca

SEQ ID NO: 1300072 - RNA, 17 nt, Human
cccuggaucagaacagg

SEQ ID NO: 1300073 - RNA, 16 nt, Human
cccuggaucagcgugg

SEQ ID NO: 1300074 - RNA, 19 nt, Human
cccuggaucagcguggccu

SEQ ID NO: 1300075 - RNA, 20 nt, Human
cccuggaucagcguggccuu

SEQ ID NO: 1300076 - RNA, 21 nt, Human
cccuggaucagcguggccuug

SEQ ID NO: 1300077 - RNA, 19 nt, Human
cccuggauccaucaggcca

SEQ ID NO: 1300078 - RNA, 16 nt, Human
cccuggauuuuuacca

SEQ ID NO: 1300079 - RNA, 24 nt, Human
cccuggauuuuuaccagucucaca

SEQ ID NO: 1300080 - RNA, 20 nt, Human
cccuggauuuuuaccagucu

SEQ ID NO: 1300081 - RNA, 20 nt, Human
cccuggccgaguccaagcug

SEQ ID NO: 1300082 - RNA, 15 nt, Human
cccuggccgcccccu

SEQ ID NO: 1300083 - RNA, 16 nt, Human
cccuggccuagaccag

SEQ ID NO: 1300084 - RNA, 11 nt, Human
cccuggccucc

SEQ ID NO: 1300085 - RNA, 13 nt, Human
cccuggccucccc

SEQ ID NO: 1300086 - RNA, 14 nt, Human
cccuggccuccccu

SEQ ID NO: 1300087 - RNA, 20 nt, Human
cccuggcucccacaggcccu

SEQ ID NO: 1300088 - RNA, 20 nt, Human
cccuggcuccuugugccaga

SEQ ID NO: 1300089 - RNA, 19 nt, Human
cccuggccuccccugccac

SEQ ID NO: 1300090 - RNA, 20 nt, Human
cccuggccuccccugccacc

SEQ ID NO: 1300091 - RNA, 15 nt, Human
cccuggccuccccca

SEQ ID NO: 1300092 - RNA, 22 nt, Human
cccuggcuccuugugccagaga

SEQ ID NO: 1300093 - RNA, 13 nt, Human
cccugcccaugcu

SEQ ID NO: 1300094 - RNA, 14 nt, Human
cccugccccccagc

SEQ ID NO: 1300095 - RNA, 12 nt, Human
cccugcccccca

SEQ ID NO: 1300096 - RNA, 15 nt, Human
cccugccccccagcc

SEQ ID NO: 1300097 - RNA, 20 nt, Human
cccugccccccagcccuccu

SEQ ID NO: 1300098 - RNA, 17 nt, Human
cccugccccucccuuca

SEQ ID NO: 1300099 - RNA, 16 nt, Human
cccugcccccugcagg

SEQ ID NO: 1300100 - RNA, 17 nt, Human
cccugcccccugcagga

SEQ ID NO: 1300101 - RNA, 19 nt, Human
cccugcccccugcaggaag

SEQ ID NO: 1300102 - RNA, 16 nt, Human
cccugccccccagccu

SEQ ID NO: 1300103 - RNA, 19 nt, Human
cccugccccccagccucug

SEQ ID NO: 1300104 - RNA, 21 nt, Human
cccugccccccagccucuggc

SEQ ID NO: 1300105 - RNA, 14 nt, Human
cccugcccccugca

SEQ ID NO: 1300106 - RNA, 15 nt, Human
cccugcccccugcag

SEQ ID NO: 1300107 - RNA, 18 nt, Human
cccugccccucccuucaa

SEQ ID NO: 1300108 - RNA, 19 nt, Human
cccugccccucccuucaac

SEQ ID NO: 1300109 - RNA, 23 nt, Human
cccugccccucccuucaaccauu

SEQ ID NO: 1300110 - RNA, 18 nt, Human
cccugcccccugcaggaa

SEQ ID NO: 1300111 - RNA, 19 nt, Human
cccugccccuccucucccu

SEQ ID NO: 1300112 - RNA, 11 nt, Human
cccugagcuga

SEQ ID NO: 1300113 - RNA, 14 nt, Human
cccugagcugacca

SEQ ID NO: 1300114 - RNA, 13 nt, Human
cccugagcugagg

SEQ ID NO: 1300115 - RNA, 14 nt, Human
cccugagcugaggc

SEQ ID NO: 1300116 - RNA, 16 nt, Human
cccugagcugaggcag

SEQ ID NO: 1300117 - RNA, 17 nt, Human
cccugagcugaggcagc

SEQ ID NO: 1300118 - RNA, 19 nt, Human
cccugagcugaggcagcag

SEQ ID NO: 1300119 - RNA, 21 nt, Human
cccugagcugaggcagcagug

SEQ ID NO: 1300120 - RNA, 18 nt, Human
cccugagccagggucucc

SEQ ID NO: 1300121 - RNA, 19 nt, Human
cccugagccagggucucca

SEQ ID NO: 1300122 - RNA, 21 nt, Human
cccugagccagggucuccaga

SEQ ID NO: 1300123 - RNA, 20 nt, Human
cccugagccagggucuccag

SEQ ID NO: 1300124 - RNA, 12 nt, Human
cccugagccggc

SEQ ID NO: 1300125 - RNA, 19 nt, Human
cccugagcgaguggagucu

SEQ ID NO: 1300126 - RNA, 20 nt, Human
cccugagcuagaacccucug

SEQ ID NO: 1300127 - RNA, 20 nt, Human
cccugaccugugagcccagc

SEQ ID NO: 1300128 - RNA, 15 nt, Human
cccugacucauucug

SEQ ID NO: 1300129 - RNA, 19 nt, Human
cccugacucauucugaagg

SEQ ID NO: 1300130 - RNA, 21 nt, Human
cccugacucauucugaaggag

SEQ ID NO: 1300131 - RNA, 13 nt, Human
cccugacugggag

SEQ ID NO: 1300132 - RNA, 19 nt, Human
cccugaccacucagagaca

SEQ ID NO: 1300133 - RNA, 22 nt, Human
cccugaccacucagagacaugc

SEQ ID NO: 1300134 - RNA, 23 nt, Human
cccugaccacucagagacaugca

SEQ ID NO: 1300135 - RNA, 15 nt, Human
cccugaccagcuccc

SEQ ID NO: 1300136 - RNA, 20 nt, Human
cccugaccagcucccccucc

SEQ ID NO: 1300137 - RNA, 16 nt, Human
cccugaccagcucccc

SEQ ID NO: 1300138 - RNA, 16 nt, Human
cccugaccuggccccc

SEQ ID NO: 1300139 - RNA, 19 nt, Human
cccugaccuggcccccuca

SEQ ID NO: 1300140 - RNA, 16 nt, Human
cccugaccugugagcc

SEQ ID NO: 1300141 - RNA, 20 nt, Human
cccugaauuuaaauagcuuu

SEQ ID NO: 1300142 - RNA, 14 nt, Human
cccugaccacucag

SEQ ID NO: 1300143 - RNA, 15 nt, Human
cccugaccacucaga

SEQ ID NO: 1300144 - RNA, 16 nt, Human
cccugaccacucagag

SEQ ID NO: 1300145 - RNA, 17 nt, Human
cccugaccacucagaga

SEQ ID NO: 1300146 - RNA, 17 nt, Human
cccugaaggggccauga

SEQ ID NO: 1300147 - RNA, 20 nt, Human
cccugaagugagcacagccu

SEQ ID NO: 1300148 - RNA, 14 nt, Human
cccugaacaagaau

SEQ ID NO: 1300149 - RNA, 17 nt, Human
cccucggggaugugucc

SEQ ID NO: 1300150 - RNA, 18 nt, Human
cccucggggauguguccu

SEQ ID NO: 1300151 - RNA, 20 nt, Human
cccucggggauguguccuga

SEQ ID NO: 1300152 - RNA, 14 nt, Human
cccucgcugccagc

SEQ ID NO: 1300153 - RNA, 11 nt, Human
cccuccuccug

SEQ ID NO: 1300154 - RNA, 16 nt, Human
cccuccuccuggacuc

SEQ ID NO: 1300155 - RNA, 18 nt, Human
cccuccuccuggacuccu

SEQ ID NO: 1300156 - RNA, 17 nt, Human
cccuccgcucuguagug

SEQ ID NO: 1300157 - RNA, 13 nt, Human
cccuccuaaccua

SEQ ID NO: 1300158 - RNA, 14 nt, Human
cccuccucucugcc

SEQ ID NO: 1300159 - RNA, 18 nt, Human
cccuccucuagcuguggg

SEQ ID NO: 1300160 - RNA, 19 nt, Human
cccuccucuagcugugggg

SEQ ID NO: 1300161 - RNA, 17 nt, Human
cccuccucuccaccauc

SEQ ID NO: 1300162 - RNA, 14 nt, Human
cccuccgcccugcc

SEQ ID NO: 1300163 - RNA, 15 nt, Human
cccuccgcccugcca

SEQ ID NO: 1300164 - RNA, 16 nt, Human
cccuccgcccugccac

SEQ ID NO: 1300165 - RNA, 19 nt, Human
cccuccgcccugccacuca

SEQ ID NO: 1300166 - RNA, 15 nt, Human
ccuaagaauaaacau

SEQ ID NO: 1300167 - RNA, 15 nt, Human
ccuaagagagcaccu

SEQ ID NO: 1300168 - RNA, 12 nt, Human
ccuaagaggcug

SEQ ID NO: 1300169 - RNA, 13 nt, Human
ccuaagaggcugc

SEQ ID NO: 1300170 - RNA, 14 nt, Human
ccuaagaggcugcc

SEQ ID NO: 1300171 - RNA, 15 nt, Human
ccuaagaggcugccc

SEQ ID NO: 1300172 - RNA, 16 nt, Human
ccuaagaggcugcccu

SEQ ID NO: 1300173 - RNA, 20 nt, Human
ccuaaucuauggucgggaga

SEQ ID NO: 1300174 - RNA, 16 nt, Human
ccuaauccccuucucc

SEQ ID NO: 1300175 - RNA, 18 nt, Human
ccuaauccaggcagaucc

SEQ ID NO: 1300176 - RNA, 19 nt, Human
ccuaauccaggcagaucca

SEQ ID NO: 1300177 - RNA, 20 nt, Human
ccuaauccaggcagauccag

SEQ ID NO: 1300178 - RNA, 21 nt, Human
ccuaauccaggcagauccagg

SEQ ID NO: 1300179 - RNA, 18 nt, Human
ccuaauccccuucucccc

SEQ ID NO: 1300180 - RNA, 20 nt, Human
ccuagcagcaccguucugug

SEQ ID NO: 1300181 - RNA, 21 nt, Human
ccuagcagcaccguucugugc

SEQ ID NO: 1300182 - RNA, 23 nt, Human
ccuagcagcaccguucugugcac

SEQ ID NO: 1300183 - RNA, 20 nt, Human
ccuaaugcgcaggcuggccc

SEQ ID NO: 1300184 - RNA, 22 nt, Human
ccuaaugacaucaccacaguuu

SEQ ID NO: 1300185 - RNA, 12 nt, Human
ccuagcagcacc

SEQ ID NO: 1300186 - RNA, 20 nt, Human
ccuagcccucucacauuuau

SEQ ID NO: 1300187 - RNA, 16 nt, Human
ccguccugccuguggc

SEQ ID NO: 1300188 - RNA, 20 nt, Human
ccuaacgaaguauccuucag

SEQ ID NO: 1300189 - RNA, 14 nt, Human
ccuaacucuucuuu

SEQ ID NO: 1300190 - RNA, 15 nt, Human
ccuaacucuucuuuc

SEQ ID NO: 1300191 - RNA, 17 nt, Human
ccuaacucuucuuucau

SEQ ID NO: 1300192 - RNA, 17 nt, Human
ccuaagaaucuuuagag

SEQ ID NO: 1300193 - RNA, 13 nt, Human
ccggcauggacaa

SEQ ID NO: 1300194 - RNA, 17 nt, Human
ccggcauggacaaugga

SEQ ID NO: 1300195 - RNA, 18 nt, Human
ccggcauggacaauggac

SEQ ID NO: 1300196 - RNA, 22 nt, Human
ccggcauggacaauggaccgga

SEQ ID NO: 1300197 - RNA, 23 nt, Human
ccgaaggugaggagcuugaaacc

SEQ ID NO: 1300198 - RNA, 13 nt, Human
ccgaagucuuuug

SEQ ID NO: 1300199 - RNA, 15 nt, Human
ccgaccaccugccca

SEQ ID NO: 1300200 - RNA, 11 nt, Human
cccuuccugga

SEQ ID NO: 1300201 - RNA, 22 nt, Human
cccugugcagccgcugagcgag

SEQ ID NO: 1300202 - RNA, 13 nt, Human
cccuuccuggaca

SEQ ID NO: 1300203 - RNA, 14 nt, Human
cccuuccuggacag

SEQ ID NO: 1300204 - RNA, 16 nt, Human
cccuuccuggacagcu

SEQ ID NO: 1300205 - RNA, 17 nt, Human
cccuuccuggacagcug

SEQ ID NO: 1300206 - RNA, 18 nt, Human
cccuuccuggacagcugu

SEQ ID NO: 1300207 - RNA, 19 nt, Human
cccuuccuggacagcugug

SEQ ID NO: 1300208 - RNA, 20 nt, Human
cccuuccuggacagcugugc

SEQ ID NO: 1300209 - RNA, 22 nt, Human
cccuuccuggacagcugugccu

SEQ ID NO: 1300210 - RNA, 23 nt, Human
cccuuccuggacagcugugccuc

SEQ ID NO: 1300211 - RNA, 15 nt, Human
ccgaaaaucauauaa

SEQ ID NO: 1300212 - RNA, 23 nt, Human
ccgcccacaggaagccugcaguc

SEQ ID NO: 1300213 - RNA, 22 nt, Human
ccgcccagagacccaagcugcc

SEQ ID NO: 1300214 - RNA, 23 nt, Human
ccgcccagcggcuugccugccug

SEQ ID NO: 1300215 - RNA, 23 nt, Human
cccuguccuggugguauuuucaa

SEQ ID NO: 1300216 - RNA, 13 nt, Human
cccuguccuggug

SEQ ID NO: 1300217 - RNA, 14 nt, Human
cccuguccuggugg

SEQ ID NO: 1300218 - RNA, 17 nt, Human
cccuguccuuagccuag

SEQ ID NO: 1300219 - RNA, 22 nt, Human
cccugugcaaccucuuggccug

SEQ ID NO: 1300220 - RNA, 17 nt, Human
caucagaaacacccuca

SEQ ID NO: 1300221 - RNA, 19 nt, Human
caucagaaacacccucaca

SEQ ID NO: 1300222 - RNA, 20 nt, Human
caucagaaaggaaaaacaaa

SEQ ID NO: 1300223 - RNA, 18 nt, Human
caucagaaaggaaaaaca

SEQ ID NO: 1300224 - RNA, 12 nt, Human
caucagaaaggg

SEQ ID NO: 1300225 - RNA, 16 nt, Human
caucagaaagggaggg

SEQ ID NO: 1300226 - RNA, 17 nt, Human
caucagaaagggagggc

SEQ ID NO: 1300227 - RNA, 18 nt, Human
caucagaaagggagggcu

SEQ ID NO: 1300228 - RNA, 20 nt, Human
caucagaaagggagggcucu

SEQ ID NO: 1300229 - RNA, 19 nt, Human
caucacuuguacaaaauaa

SEQ ID NO: 1300230 - RNA, 15 nt, Human
caucacuuugaccua

SEQ ID NO: 1300231 - RNA, 16 nt, Human
caucuggauuccagag

SEQ ID NO: 1300232 - RNA, 20 nt, Human
caucuggcaacaucuuuauc

SEQ ID NO: 1300233 - RNA, 18 nt, Human
caucuaaccucaucuucu

SEQ ID NO: 1300234 - RNA, 19 nt, Human
caucuaaccucaucuucuu

SEQ ID NO: 1300235 - RNA, 12 nt, Human
caucuggccugg

SEQ ID NO: 1300236 - RNA, 13 nt, Human
caucuggccuggc

SEQ ID NO: 1300237 - RNA, 14 nt, Human
caucuggccuggcc

SEQ ID NO: 1300238 - RNA, 15 nt, Human
caucuggccuggcca

SEQ ID NO: 1300239 - RNA, 17 nt, Human
caucuggccuggccagu

SEQ ID NO: 1300240 - RNA, 18 nt, Human
caucuggccuggccagug

SEQ ID NO: 1300241 - RNA, 14 nt, Human
caucuggcucuaau

SEQ ID NO: 1300242 - RNA, 20 nt, Human
caucugguagaagggaaagc

SEQ ID NO: 1300243 - RNA, 22 nt, Human
caucuguaaaucuacacacggu

SEQ ID NO: 1300244 - RNA, 18 nt, Human
caucuggcucuaauucac

SEQ ID NO: 1300245 - RNA, 23 nt, Human
caucugguagaagggaaagccca

SEQ ID NO: 1300246 - RNA, 22 nt, Human
caucugguugaacucugguggc

SEQ ID NO: 1300247 - RNA, 18 nt, Human
caucuguauacccucugu

SEQ ID NO: 1300248 - RNA, 19 nt, Human
caucuguauacccucuguu

SEQ ID NO: 1300249 - RNA, 20 nt, Human
caucuguauacccucuguuu

SEQ ID NO: 1300250 - RNA, 21 nt, Human
caucuguauacccucuguuuc

SEQ ID NO: 1300251 - RNA, 19 nt, Human
cauccugaggcuccacuug

SEQ ID NO: 1300252 - RNA, 18 nt, Human
cauccugaggcuccacuu

SEQ ID NO: 1300253 - RNA, 12 nt, Human
cauccugcaggc

SEQ ID NO: 1300254 - RNA, 15 nt, Human
caucuaaacugcccc

SEQ ID NO: 1300255 - RNA, 21 nt, Human
caucuaaacugcccccucugc

SEQ ID NO: 1300256 - RNA, 17 nt, Human
caucuaaacuaagaugu

SEQ ID NO: 1300257 - RNA, 18 nt, Human
caucuaaacuaagaugug

SEQ ID NO: 1300258 - RNA, 15 nt, Human
caucuaaccucaucu

SEQ ID NO: 1300259 - RNA, 15 nt, Human
caucguugcccccau

SEQ ID NO: 1300260 - RNA, 23 nt, Human
caucuaaaaauagacuuaaaucu

SEQ ID NO: 1300261 - RNA, 20 nt, Human
cauccucuuccauauggauc

SEQ ID NO: 1300262 - RNA, 17 nt, Human
caucccagacagguccc

SEQ ID NO: 1300263 - RNA, 21 nt, Human
caucccagacaggucccuccc

SEQ ID NO: 1300264 - RNA, 23 nt, Human
caucccagacaggucccuccccu

SEQ ID NO: 1300265 - RNA, 15 nt, Human
cauccucuuuuucca

SEQ ID NO: 1300266 - RNA, 19 nt, Human
cauccugaccagcugcucc

SEQ ID NO: 1300267 - RNA, 23 nt, Human
caucccaaaaucauaagauauuu

SEQ ID NO: 1300268 - RNA, 23 nt, Human
caucccacucacaacagcugccu

SEQ ID NO: 1300269 - RNA, 13 nt, Human
caucccacugcca

SEQ ID NO: 1300270 - RNA, 16 nt, Human
cauccauucuccugag

SEQ ID NO: 1300271 - RNA, 21 nt, Human
cauccauucucacagguccca

SEQ ID NO: 1300272 - RNA, 21 nt, Human
caucagaaagggagggcucug

SEQ ID NO: 1300273 - RNA, 22 nt, Human
caucagaaagggagggcucuga

SEQ ID NO: 1300274 - RNA, 24 nt, Human
caucagaaagggagggcucugagg

SEQ ID NO: 1300275 - RNA, 23 nt, Human
caucagaaagggagggcucugag

SEQ ID NO: 1300276 - RNA, 21 nt, Human
cauauuauuuuauguugcaua

SEQ ID NO: 1300277 - RNA, 21 nt, Human
cauauguaccauguacaugaa

SEQ ID NO: 1300278 - RNA, 15 nt, Human
cauauguaccaugua

SEQ ID NO: 1300279 - RNA, 16 nt, Human
cauauguugaauacuu

SEQ ID NO: 1300280 - RNA, 17 nt, Human
cauauguugaauacuuu

SEQ ID NO: 1300281 - RNA, 18 nt, Human
cauauguugaauacuuuu

SEQ ID NO: 1300282 - RNA, 19 nt, Human
cauauguugaauacuuuuu

SEQ ID NO: 1300283 - RNA, 16 nt, Human
cauagguuuaauaauu

SEQ ID NO: 1300284 - RNA, 21 nt, Human
cauaggucugaaauuuuucuu

SEQ ID NO: 1300285 - RNA, 18 nt, Human
cauaggugauccauguaa

SEQ ID NO: 1300286 - RNA, 20 nt, Human
cauaggugauccauguaacu

SEQ ID NO: 1300287 - RNA, 23 nt, Human
cauaggugauccauguaacugcc

SEQ ID NO: 1300288 - RNA, 21 nt, Human
cauaggugauccauguaacug

SEQ ID NO: 1300289 - RNA, 20 nt, Human
cauagcagcuuauucacaag

SEQ ID NO: 1300290 - RNA, 17 nt, Human
cauagguagaauguaaa

SEQ ID NO: 1300291 - RNA, 23 nt, Human
cauagguagaauguaaagcuugu

SEQ ID NO: 1300292 - RNA, 19 nt, Human
cauagcagcuuauucacaa

SEQ ID NO: 1300293 - RNA, 18 nt, Human
cauaauuauuauuuggcc

SEQ ID NO: 1300294 - RNA, 14 nt, Human
cauaauucacucug

SEQ ID NO: 1300295 - RNA, 17 nt, Human
cauaauucacucugagu

SEQ ID NO: 1300296 - RNA, 21 nt, Human
cauaauucacucugaguguuu

SEQ ID NO: 1300297 - RNA, 23 nt, Human
cauaauucacucugaguguuuua

SEQ ID NO: 1300298 - RNA, 18 nt, Human
cauaauguuacauuauua

SEQ ID NO: 1300299 - RNA, 18 nt, Human
cauaauguuucuggauuu

SEQ ID NO: 1300300 - RNA, 21 nt, Human
cauaauguuucuggauuucau

SEQ ID NO: 1300301 - RNA, 22 nt, Human
cauaauguuucuggauuucaua

SEQ ID NO: 1300302 - RNA, 23 nt, Human
cauaauguuucuggauuucauac

SEQ ID NO: 1300303 - RNA, 21 nt, Human
cauaauuauccaggaagggaa

SEQ ID NO: 1300304 - RNA, 22 nt, Human
cauacagagaagucacagggca

SEQ ID NO: 1300305 - RNA, 14 nt, Human
caguuuuaacugug

SEQ ID NO: 1300306 - RNA, 15 nt, Human
caguuuuaacugugg

SEQ ID NO: 1300307 - RNA, 16 nt, Human
caguuuuaacugugga

SEQ ID NO: 1300308 - RNA, 17 nt, Human
caguuuuaacuguggau

SEQ ID NO: 1300309 - RNA, 18 nt, Human
caguuuuaacuguggaua

SEQ ID NO: 1300310 - RNA, 20 nt, Human
caguuuuaacuguggauauu

SEQ ID NO: 1300311 - RNA, 22 nt, Human
caguuuuaacuguggauauugu

SEQ ID NO: 1300312 - RNA, 23 nt, Human
caguuuuaacuguggauauuguu

SEQ ID NO: 1300313 - RNA, 15 nt, Human
caguuuuaucauuuu

SEQ ID NO: 1300314 - RNA, 12 nt, Human
caguuuucauaa

SEQ ID NO: 1300315 - RNA, 19 nt, Human
caguuuuccuaugcuuuga

SEQ ID NO: 1300316 - RNA, 17 nt, Human
cauaauguuacauuauu

SEQ ID NO: 1300317 - RNA, 19 nt, Human
caguuuauuugaaccaaua

SEQ ID NO: 1300318 - RNA, 18 nt, Human
caguuuauuugaaccaau

SEQ ID NO: 1300319 - RNA, 14 nt, Human
caguuuauuuguug

SEQ ID NO: 1300320 - RNA, 19 nt, Human
caguuuaucauucaagugu

SEQ ID NO: 1300321 - RNA, 12 nt, Human
caguuguucuuu

SEQ ID NO: 1300322 - RNA, 13 nt, Human
caguuguucuuuu

SEQ ID NO: 1300323 - RNA, 14 nt, Human
caguuuaucauuca

SEQ ID NO: 1300324 - RNA, 15 nt, Human
caguuuaucauucaa

SEQ ID NO: 1300325 - RNA, 16 nt, Human
caguuuaucauucaag

SEQ ID NO: 1300326 - RNA, 18 nt, Human
caguuuaucauucaagug

SEQ ID NO: 1300327 - RNA, 12 nt, Human
caguuuuaacug

SEQ ID NO: 1300328 - RNA, 13 nt, Human
caguuuuaacugu

SEQ ID NO: 1300329 - RNA, 14 nt, Human
caguuucacagaaa

SEQ ID NO: 1300330 - RNA, 15 nt, Human
caguuucacagaaaa

SEQ ID NO: 1300331 - RNA, 17 nt, Human
caguuucacagaaaaua

SEQ ID NO: 1300332 - RNA, 21 nt, Human
caguuucacagaaaauaaggc

SEQ ID NO: 1300333 - RNA, 23 nt, Human
caguuucauaaaaggagaaccag

SEQ ID NO: 1300334 - RNA, 14 nt, Human
caguuuccuuggga

SEQ ID NO: 1300335 - RNA, 17 nt, Human
caguuucuaaacuggag

SEQ ID NO: 1300336 - RNA, 18 nt, Human
caguuucuaaacuggaga

SEQ ID NO: 1300337 - RNA, 19 nt, Human
caguuucuaaacuggagac

SEQ ID NO: 1300338 - RNA, 20 nt, Human
caguuucuaaacuggagacu

SEQ ID NO: 1300339 - RNA, 13 nt, Human
caguuugaaauaa

SEQ ID NO: 1300340 - RNA, 20 nt, Human
caguuugaaauaagcuauuu

SEQ ID NO: 1300341 - RNA, 15 nt, Human
caguucaaagcagga

SEQ ID NO: 1300342 - RNA, 14 nt, Human
caguucaagaaagc

SEQ ID NO: 1300343 - RNA, 13 nt, Human
caguucacccuga

SEQ ID NO: 1300344 - RNA, 22 nt, Human
caguuauuauauuuacaaaugg

SEQ ID NO: 1300345 - RNA, 22 nt, Human
caguuaucuaaguuaauuuaaa

SEQ ID NO: 1300346 - RNA, 22 nt, Human
caguuaugauuuuuuuuucaua

SEQ ID NO: 1300347 - RNA, 23 nt, Human
caguucauauguaccauguacau

SEQ ID NO: 1300348 - RNA, 17 nt, Human
caguucauuagaaauau

SEQ ID NO: 1300349 - RNA, 20 nt, Human
caguucauuagaaauauuuu

SEQ ID NO: 1300350 - RNA, 18 nt, Human
caguucauugcacuuuga

SEQ ID NO: 1300351 - RNA, 15 nt, Human
caguucauugcacuu

SEQ ID NO: 1300352 - RNA, 18 nt, Human
caguucccacauuaaaga

SEQ ID NO: 1300353 - RNA, 19 nt, Human
caguucccacauuaaagaa

SEQ ID NO: 1300354 - RNA, 17 nt, Human
cagucucuauaccaaua

SEQ ID NO: 1300355 - RNA, 13 nt, Human
cagucucgucucu

SEQ ID NO: 1300356 - RNA, 17 nt, Human
cagucuauucacagaag

SEQ ID NO: 1300357 - RNA, 22 nt, Human
cagucucacaugauuccagcca

SEQ ID NO: 1300358 - RNA, 23 nt, Human
cagucucuauaccaauaaaguga

SEQ ID NO: 1300359 - RNA, 14 nt, Human
cagucucucuucuc

SEQ ID NO: 1300360 - RNA, 17 nt, Human
cagucucucuucucucc

SEQ ID NO: 1300361 - RNA, 22 nt, Human
cagucucuauaccaauaaagug

SEQ ID NO: 1300362 - RNA, 21 nt, Human
cagucucuauaccaauaaagu

SEQ ID NO: 1300363 - RNA, 20 nt, Human
cagucucuauaccaauaaag

SEQ ID NO: 1300364 - RNA, 19 nt, Human
cagucucuauaccaauaaa

SEQ ID NO: 1300365 - RNA, 15 nt, Human
cagucgugccugugu

SEQ ID NO: 1300366 - RNA, 17 nt, Human
cagucgugccugugucc

SEQ ID NO: 1300367 - RNA, 14 nt, Human
cagucguucccagu

SEQ ID NO: 1300368 - RNA, 16 nt, Human
cagucguucccagugu

SEQ ID NO: 1300369 - RNA, 22 nt, Human
cagucuaaagcugguuuaaugu

SEQ ID NO: 1300370 - RNA, 21 nt, Human
caguuauuauauuuacaaaug

SEQ ID NO: 1300371 - RNA, 17 nt, Human
caguuauuauauuuaca

SEQ ID NO: 1300372 - RNA, 21 nt, Human
caguuauaaguagcaggccaa

SEQ ID NO: 1300373 - RNA, 15 nt, Human
caguuauauuuugca

SEQ ID NO: 1300374 - RNA, 16 nt, Human
caguuauauuuugcag

SEQ ID NO: 1300375 - RNA, 18 nt, Human
caguuauauuuugcaguu

SEQ ID NO: 1300376 - RNA, 16 nt, Human
caguuaucuaaguuaa

SEQ ID NO: 1300377 - RNA, 22 nt, Human
cagucucucuucucuccagcug

SEQ ID NO: 1300378 - RNA, 12 nt, Human
cagucucugagc

SEQ ID NO: 1300379 - RNA, 16 nt, Human
cagugauugucuuaau

SEQ ID NO: 1300380 - RNA, 20 nt, Human
cagugauugucuuaauauug

SEQ ID NO: 1300381 - RNA, 14 nt, Human
cagugcaacacugg

SEQ ID NO: 1300382 - RNA, 15 nt, Human
cagugcaacacuggu

SEQ ID NO: 1300383 - RNA, 15 nt, Human
cagugguaaaaaggc

SEQ ID NO: 1300384 - RNA, 13 nt, Human
cagugguaagcua

SEQ ID NO: 1300385 - RNA, 21 nt, Human
ccaacuccagaaagugacaag

SEQ ID NO: 1300386 - RNA, 20 nt, Human
ccaaaucacugaacuuugcu

SEQ ID NO: 1300387 - RNA, 14 nt, Human
ccaacucaccugag

SEQ ID NO: 1300388 - RNA, 22 nt, Human
ccaacuccgugugguaagcaac

SEQ ID NO: 1300389 - RNA, 15 nt, Human
ccaacuauggccugu

SEQ ID NO: 1300390 - RNA, 14 nt, Human
ccaacuauggccug

SEQ ID NO: 1300391 - RNA, 16 nt, Human
ccaacuauggccugug

SEQ ID NO: 1300392 - RNA, 15 nt, Human
ccaaagugcugagau

SEQ ID NO: 1300393 - RNA, 16 nt, Human
ccaaaucaaaaucucu

SEQ ID NO: 1300394 - RNA, 19 nt, Human
ccaaaucaaaaucucucca

SEQ ID NO: 1300395 - RNA, 20 nt, Human
ccaaaucaaaaucucuccac

SEQ ID NO: 1300396 - RNA, 21 nt, Human
ccaauggagacugucucaaga

SEQ ID NO: 1300397 - RNA, 20 nt, Human
ccaauggaaugugauguuca

SEQ ID NO: 1300398 - RNA, 22 nt, Human
ccaauggaaugugauguucaug

SEQ ID NO: 1300399 - RNA, 22 nt, Human
ccaauuauuuucauccuugucu

SEQ ID NO: 1300400 - RNA, 14 nt, Human
ccaauucagacagg

SEQ ID NO: 1300401 - RNA, 16 nt, Human
ccaauucagacaggca

SEQ ID NO: 1300402 - RNA, 14 nt, Human
ccaaggaaaggcac

SEQ ID NO: 1300403 - RNA, 14 nt, Human
ccaaggaccugaga

SEQ ID NO: 1300404 - RNA, 17 nt, Human
ccaaggagucacugaga

SEQ ID NO: 1300405 - RNA, 19 nt, Human
ccaaggagucacugagacc

SEQ ID NO: 1300406 - RNA, 22 nt, Human
ccaaggagucacugagaccaag

SEQ ID NO: 1300407 - RNA, 19 nt, Human
ccaaaguccugggauuaca

SEQ ID NO: 1300408 - RNA, 19 nt, Human
ccaaagucauaauugcauu

SEQ ID NO: 1300409 - RNA, 14 nt, Human
ccaaagucucuaau

SEQ ID NO: 1300410 - RNA, 15 nt, Human
ccaaagucucuaauu

SEQ ID NO: 1300411 - RNA, 16 nt, Human
ccaaagucucuaauuc

SEQ ID NO: 1300412 - RNA, 18 nt, Human
ccaaagucucuaauucua

SEQ ID NO: 1300413 - RNA, 13 nt, Human
ccaaagucauaau

SEQ ID NO: 1300414 - RNA, 17 nt, Human
ccaaagucauaauugca

SEQ ID NO: 1300415 - RNA, 16 nt, Human
cauuggagauguuuag

SEQ ID NO: 1300416 - RNA, 19 nt, Human
cauuggaagagcagcaccu

SEQ ID NO: 1300417 - RNA, 16 nt, Human
cauuggaauguucuca

SEQ ID NO: 1300418 - RNA, 19 nt, Human
cauuggaauguucucagau

SEQ ID NO: 1300419 - RNA, 16 nt, Human
cauuggacccuuccau

SEQ ID NO: 1300420 - RNA, 17 nt, Human
cauuggacccuuccaug

SEQ ID NO: 1300421 - RNA, 18 nt, Human
cauuggaauguucucaga

SEQ ID NO: 1300422 - RNA, 18 nt, Human
cauuggauauuuuuuacu

SEQ ID NO: 1300423 - RNA, 11 nt, Human
cauuggauauu

SEQ ID NO: 1300424 - RNA, 20 nt, Human
cauuggaagagcagcaccuc

SEQ ID NO: 1300425 - RNA, 13 nt, Human
cauugguccaaga

SEQ ID NO: 1300426 - RNA, 14 nt, Human
cauugguccaagau

SEQ ID NO: 1300427 - RNA, 23 nt, Human
cauugggguaguuguguuucaac

SEQ ID NO: 1300428 - RNA, 15 nt, Human
cauuuagguuucuga

SEQ ID NO: 1300429 - RNA, 15 nt, Human
cauuuagucauguga

SEQ ID NO: 1300430 - RNA, 17 nt, Human
cauuuagucaugugacc

SEQ ID NO: 1300431 - RNA, 17 nt, Human
cauuuaguuugauuauu

SEQ ID NO: 1300432 - RNA, 23 nt, Human
cauuuaguuugauuauucagugu

SEQ ID NO: 1300433 - RNA, 14 nt, Human
cauuuauauugaua

SEQ ID NO: 1300434 - RNA, 20 nt, Human
cauuuauauugauaagaucu

SEQ ID NO: 1300435 - RNA, 21 nt, Human
cauuuauauugauaagaucuu

SEQ ID NO: 1300436 - RNA, 12 nt, Human
ccaaaaaacuac

SEQ ID NO: 1300437 - RNA, 23 nt, Human
cauuuuuuuucuuugaauaaaug

SEQ ID NO: 1300438 - RNA, 15 nt, Human
cauuuuuuuucuuug

SEQ ID NO: 1300439 - RNA, 17 nt, Human
cauuuuuuuucuuugaa

SEQ ID NO: 1300440 - RNA, 21 nt, Human
cauuuuuuuucuuugaauaaa

SEQ ID NO: 1300441 - RNA, 22 nt, Human
cauuuuuuuucuuugaauaaau

SEQ ID NO: 1300442 - RNA, 19 nt, Human
ccaaaaaaaaauacaugcu

SEQ ID NO: 1300443 - RNA, 14 nt, Human
ccaaaaggcagaag

SEQ ID NO: 1300444 - RNA, 17 nt, Human
ccaaaaguuacauguuu

SEQ ID NO: 1300445 - RNA, 23 nt, Human
ccaaaagguuuaagaaauagaau

SEQ ID NO: 1300446 - RNA, 15 nt, Human
ccaaaagcuuuuuau

SEQ ID NO: 1300447 - RNA, 19 nt, Human
ccaaaagguuuaagaaaua

SEQ ID NO: 1300448 - RNA, 17 nt, Human
cauuuguauaaaauaau

SEQ ID NO: 1300449 - RNA, 13 nt, Human
cauuuguagguag

SEQ ID NO: 1300450 - RNA, 18 nt, Human
cauuuguucauauuaaga

SEQ ID NO: 1300451 - RNA, 14 nt, Human
cauuuguucauauu

SEQ ID NO: 1300452 - RNA, 13 nt, Human
cauuuguucauau

SEQ ID NO: 1300453 - RNA, 14 nt, Human
cauuuguauaaaau

SEQ ID NO: 1300454 - RNA, 16 nt, Human
cauuuguauaaaauaa

SEQ ID NO: 1300455 - RNA, 23 nt, Human
cauuuguuucuuucucugaggac

SEQ ID NO: 1300456 - RNA, 15 nt, Human
cauuuguuucuacuu

SEQ ID NO: 1300457 - RNA, 19 nt, Human
cauuuguucauauuaagaa

SEQ ID NO: 1300458 - RNA, 17 nt, Human
cauuuguugguuuauca

SEQ ID NO: 1300459 - RNA, 20 nt, Human
cauuuguucauauuaagaau

SEQ ID NO: 1300460 - RNA, 16 nt, Human
cauuuguuggaaugaa

SEQ ID NO: 1300461 - RNA, 17 nt, Human
cauuuguuuauguaauu

SEQ ID NO: 1300462 - RNA, 18 nt, Human
cauuuguuuauguaauuu

SEQ ID NO: 1300463 - RNA, 19 nt, Human
cauuuguuuauguaauuuc

SEQ ID NO: 1300464 - RNA, 20 nt, Human
cauuuguuuauguaauuuca

SEQ ID NO: 1300465 - RNA, 21 nt, Human
cauuuguuucuuucucugagg

SEQ ID NO: 1300466 - RNA, 22 nt, Human
cauuuguuucuuucucugagga

SEQ ID NO: 1300467 - RNA, 14 nt, Human
cauuuggguccagg

SEQ ID NO: 1300468 - RNA, 15 nt, Human
cauuuggguccagga

SEQ ID NO: 1300469 - RNA, 16 nt, Human
cauuuggguccaggag

SEQ ID NO: 1300470 - RNA, 17 nt, Human
cauuuggguccaggagg

SEQ ID NO: 1300471 - RNA, 18 nt, Human
cauuuggguccaggagga

SEQ ID NO: 1300472 - RNA, 16 nt, Human
cauuuggcaucccugg

SEQ ID NO: 1300473 - RNA, 20 nt, Human
cauuuggcaucccugggccu

SEQ ID NO: 1300474 - RNA, 18 nt, Human
cauuugggagacauguga

SEQ ID NO: 1300475 - RNA, 20 nt, Human
cauuugggagacaugugaca

SEQ ID NO: 1300476 - RNA, 18 nt, Human
cauuuggcaucccugggc

SEQ ID NO: 1300477 - RNA, 23 nt, Human
cauuugggaguuuuuaugagaaa

SEQ ID NO: 1300478 - RNA, 14 nt, Human
cauuuaucuauaau

SEQ ID NO: 1300479 - RNA, 16 nt, Human
cauuuaucuauaauuu

SEQ ID NO: 1300480 - RNA, 21 nt, Human
cauuuaucuauaauuuaccua

SEQ ID NO: 1300481 - RNA, 22 nt, Human
cauuuaucuauaauuuaccuaa

SEQ ID NO: 1300482 - RNA, 20 nt, Human
cauuuaucuaaauauggacu

SEQ ID NO: 1300483 - RNA, 16 nt, Human
cauuuaugaagcaagc

SEQ ID NO: 1300484 - RNA, 17 nt, Human
cauuuaugagcucuuca

SEQ ID NO: 1300485 - RNA, 20 nt, Human
cauuuaugagcucuucaugu

SEQ ID NO: 1300486 - RNA, 23 nt, Human
cauuuaugagcucuucauguuuc

SEQ ID NO: 1300487 - RNA, 21 nt, Human
caugaauauuuaguguucaua

SEQ ID NO: 1300488 - RNA, 12 nt, Human
caucuguccccc

SEQ ID NO: 1300489 - RNA, 13 nt, Human
caucugucccccu

SEQ ID NO: 1300490 - RNA, 15 nt, Human
caucugucccccuuu

SEQ ID NO: 1300491 - RNA, 16 nt, Human
caucugucccuccggg

SEQ ID NO: 1300492 - RNA, 19 nt, Human
caugaaucugcacaucugu

SEQ ID NO: 1300493 - RNA, 13 nt, Human
caugaauguaaau

SEQ ID NO: 1300494 - RNA, 14 nt, Human
caugaauguaaauu

SEQ ID NO: 1300495 - RNA, 20 nt, Human
caugaauuuuagcuuuugug

SEQ ID NO: 1300496 - RNA, 16 nt, Human
caugacaacuucuaau

SEQ ID NO: 1300497 - RNA, 19 nt, Human
caugaauuuuagcuuuugu

SEQ ID NO: 1300498 - RNA, 16 nt, Human
caugaauguaaauuug

SEQ ID NO: 1300499 - RNA, 17 nt, Human
caugaauguaaauuugu

SEQ ID NO: 1300500 - RNA, 22 nt, Human
caugaauguaaauuuguacuau

SEQ ID NO: 1300501 - RNA, 19 nt, Human
caugaauguaaauuuguac

SEQ ID NO: 1300502 - RNA, 15 nt, Human
caugaauuuuagcuu

SEQ ID NO: 1300503 - RNA, 16 nt, Human
caugaauuuuagcuuu

SEQ ID NO: 1300504 - RNA, 17 nt, Human
caugaauuuuagcuuuu

SEQ ID NO: 1300505 - RNA, 18 nt, Human
caugaauuuuagcuuuug

SEQ ID NO: 1300506 - RNA, 14 nt, Human
caugcaaacucuuu

SEQ ID NO: 1300507 - RNA, 20 nt, Human
caugauggcaacagaucugg

SEQ ID NO: 1300508 - RNA, 22 nt, Human
caugaugccucugucuucugga

SEQ ID NO: 1300509 - RNA, 23 nt, Human
caugaugccucugucuucuggac

SEQ ID NO: 1300510 - RNA, 16 nt, Human
caugaugccucugucu

SEQ ID NO: 1300511 - RNA, 17 nt, Human
caugaugccucugucuu

SEQ ID NO: 1300512 - RNA, 20 nt, Human
caugaugccucugucuucug

SEQ ID NO: 1300513 - RNA, 15 nt, Human
caugauggcaacaga

SEQ ID NO: 1300514 - RNA, 19 nt, Human
caugauggcaacagaucug

SEQ ID NO: 1300515 - RNA, 16 nt, Human
cauggcccugccaugc

SEQ ID NO: 1300516 - RNA, 15 nt, Human
cauggcccugagcga

SEQ ID NO: 1300517 - RNA, 17 nt, Human
cauggcccugagcgagu

SEQ ID NO: 1300518 - RNA, 12 nt, Human
cauggccccucu

SEQ ID NO: 1300519 - RNA, 13 nt, Human
cauggccccucug

SEQ ID NO: 1300520 - RNA, 16 nt, Human
cauggccccucugacc

SEQ ID NO: 1300521 - RNA, 17 nt, Human
cauggccccucugaccu

SEQ ID NO: 1300522 - RNA, 18 nt, Human
cauggccccucugaccug

SEQ ID NO: 1300523 - RNA, 15 nt, Human
cauggccagguggcc

SEQ ID NO: 1300524 - RNA, 20 nt, Human
caugggaaaugucaacaagu

SEQ ID NO: 1300525 - RNA, 14 nt, Human
cauggccgugaacu

SEQ ID NO: 1300526 - RNA, 18 nt, Human
cauuauuacuuuugcugu

SEQ ID NO: 1300527 - RNA, 13 nt, Human
cauucugaaugcu

SEQ ID NO: 1300528 - RNA, 11 nt, Human
cauucugaaug

SEQ ID NO: 1300529 - RNA, 14 nt, Human
cauucucugucuca

SEQ ID NO: 1300530 - RNA, 19 nt, Human
cauucucugucucauccau

SEQ ID NO: 1300531 - RNA, 23 nt, Human
cauucucugucucauccaucauc

SEQ ID NO: 1300532 - RNA, 16 nt, Human
cauucugaaggagccc

SEQ ID NO: 1300533 - RNA, 23 nt, Human
cauuauuacuuuugcuguaaugu

SEQ ID NO: 1300534 - RNA, 13 nt, Human
cauuauuaucaac

SEQ ID NO: 1300535 - RNA, 21 nt, Human
cauuauuaaguaacuuauuua

SEQ ID NO: 1300536 - RNA, 12 nt, Human
cauuauuacuuu

SEQ ID NO: 1300537 - RNA, 16 nt, Human
cauuauuacuuuugcu

SEQ ID NO: 1300538 - RNA, 21 nt, Human
cauuaucgagcagcauuuuau

SEQ ID NO: 1300539 - RNA, 18 nt, Human
cauguuggccaggcuggu

SEQ ID NO: 1300540 - RNA, 14 nt, Human
cauguucugucccu

SEQ ID NO: 1300541 - RNA, 18 nt, Human
cauguucugucccuugcc

SEQ ID NO: 1300542 - RNA, 19 nt, Human
cauguugaagccacugccu

SEQ ID NO: 1300543 - RNA, 22 nt, Human
cauguugaagccacugccuuca

SEQ ID NO: 1300544 - RNA, 19 nt, Human
cauuauauuucuauuuuau

SEQ ID NO: 1300545 - RNA, 21 nt, Human
cauguccaaagaggcugcccc

SEQ ID NO: 1300546 - RNA, 17 nt, Human
cauguauugcacauugu

SEQ ID NO: 1300547 - RNA, 18 nt, Human
cauguauugcacauugua

SEQ ID NO: 1300548 - RNA, 21 nt, Human
cauguauugcacauuguaaaa

SEQ ID NO: 1300549 - RNA, 18 nt, Human
caugucauuucagaaguu

SEQ ID NO: 1300550 - RNA, 12 nt, Human
cauguccaaaga

SEQ ID NO: 1300551 - RNA, 13 nt, Human
cauguccaaagag

SEQ ID NO: 1300552 - RNA, 14 nt, Human
cauguccaaagagg

SEQ ID NO: 1300553 - RNA, 15 nt, Human
cauguccaaagaggc

SEQ ID NO: 1300554 - RNA, 16 nt, Human
cauguccaaagaggcu

SEQ ID NO: 1300555 - RNA, 17 nt, Human
cauguccaaagaggcug

SEQ ID NO: 1300556 - RNA, 18 nt, Human
cauguccaaagaggcugc

SEQ ID NO: 1300557 - RNA, 19 nt, Human
cauguccaaagaggcugcc

SEQ ID NO: 1300558 - RNA, 20 nt, Human
cauguccaaagaggcugccc

SEQ ID NO: 1300559 - RNA, 17 nt, Human
cagauuucugaggaaau

SEQ ID NO: 1300560 - RNA, 15 nt, Human
cagauuucugaggaa

SEQ ID NO: 1300561 - RNA, 14 nt, Human
cagauuucugagga

SEQ ID NO: 1300562 - RNA, 14 nt, Human
cagauuuccagccu

SEQ ID NO: 1300563 - RNA, 14 nt, Human
cagcaccagaaugu

SEQ ID NO: 1300564 - RNA, 12 nt, Human
cagcaccuccuc

SEQ ID NO: 1300565 - RNA, 14 nt, Human
cagcaccuccucag

SEQ ID NO: 1300566 - RNA, 15 nt, Human
cagcaccuccucagc

SEQ ID NO: 1300567 - RNA, 16 nt, Human
cagcaccuccucagcc

SEQ ID NO: 1300568 - RNA, 17 nt, Human
cagcaccuccucagccu

SEQ ID NO: 1300569 - RNA, 18 nt, Human
cagcaccuccucagccug

SEQ ID NO: 1300570 - RNA, 19 nt, Human
cagcaccuccucagccuga

SEQ ID NO: 1300571 - RNA, 13 nt, Human
cagcaccugcccu

SEQ ID NO: 1300572 - RNA, 13 nt, Human
cagauuuaugcau

SEQ ID NO: 1300573 - RNA, 14 nt, Human
cagauugucagcuc

SEQ ID NO: 1300574 - RNA, 13 nt, Human
cagauuguuugca

SEQ ID NO: 1300575 - RNA, 16 nt, Human
cagauuuauuccuuug

SEQ ID NO: 1300576 - RNA, 22 nt, Human
cagauuuauuccuuuguuacuu

SEQ ID NO: 1300577 - RNA, 18 nt, Human
cagcacgggggccaagga

SEQ ID NO: 1300578 - RNA, 12 nt, Human
cagcaccuggca

SEQ ID NO: 1300579 - RNA, 12 nt, Human
cagcaccugccc

SEQ ID NO: 1300580 - RNA, 15 nt, Human
cagcacuagccaaac

SEQ ID NO: 1300581 - RNA, 17 nt, Human
cagcacuagccaaaccu

SEQ ID NO: 1300582 - RNA, 21 nt, Human
cagcacuagccaaaccucacc

SEQ ID NO: 1300583 - RNA, 16 nt, Human
cagccagaccagcagg

SEQ ID NO: 1300584 - RNA, 22 nt, Human
cagccagcccugccuggaggac

SEQ ID NO: 1300585 - RNA, 21 nt, Human
cagccagcccugccuggagga

SEQ ID NO: 1300586 - RNA, 13 nt, Human
cagccaggcccag

SEQ ID NO: 1300587 - RNA, 21 nt, Human
cagccaggcccagccgacccc

SEQ ID NO: 1300588 - RNA, 15 nt, Human
cagccaggcccagcc

SEQ ID NO: 1300589 - RNA, 17 nt, Human
cagccaggcccagccga

SEQ ID NO: 1300590 - RNA, 12 nt, Human
cagccagcccug

SEQ ID NO: 1300591 - RNA, 13 nt, Human
cagccagcccugc

SEQ ID NO: 1300592 - RNA, 14 nt, Human
cagccagcccugcc

SEQ ID NO: 1300593 - RNA, 15 nt, Human
cagccagcccugccu

SEQ ID NO: 1300594 - RNA, 16 nt, Human
cagccagcccugccug

SEQ ID NO: 1300595 - RNA, 17 nt, Human
cagccagcccugccugg

SEQ ID NO: 1300596 - RNA, 18 nt, Human
cagccagcccugccugga

SEQ ID NO: 1300597 - RNA, 19 nt, Human
cagccagcccugccuggag

SEQ ID NO: 1300598 - RNA, 20 nt, Human
cagccagcccugccuggagg

SEQ ID NO: 1300599 - RNA, 13 nt, Human
cagccagcaucug

SEQ ID NO: 1300600 - RNA, 14 nt, Human
cagccagcaucugg

SEQ ID NO: 1300601 - RNA, 15 nt, Human
cagccagcaucuggg

SEQ ID NO: 1300602 - RNA, 16 nt, Human
cagccagcaucugggc

SEQ ID NO: 1300603 - RNA, 17 nt, Human
cagccagcaucugggcc

SEQ ID NO: 1300604 - RNA, 14 nt, Human
cagauaugauucaa

SEQ ID NO: 1300605 - RNA, 15 nt, Human
cagauaugauucaaa

SEQ ID NO: 1300606 - RNA, 18 nt, Human
cagauauauuuucuuucu

SEQ ID NO: 1300607 - RNA, 20 nt, Human
cagauaucuuggacaaauca

SEQ ID NO: 1300608 - RNA, 12 nt, Human
cagauccaggac

SEQ ID NO: 1300609 - RNA, 13 nt, Human
cagauccaggacu

SEQ ID NO: 1300610 - RNA, 14 nt, Human
cagauccaggagcu

SEQ ID NO: 1300611 - RNA, 17 nt, Human
cagauccaggagcucca

SEQ ID NO: 1300612 - RNA, 18 nt, Human
cagauccaggagcuccag

SEQ ID NO: 1300613 - RNA, 19 nt, Human
cagauccaggagcuccagu

SEQ ID NO: 1300614 - RNA, 13 nt, Human
cagauccagggac

SEQ ID NO: 1300615 - RNA, 14 nt, Human
cagauccagggaca

SEQ ID NO: 1300616 - RNA, 15 nt, Human
cagauccagggacag

SEQ ID NO: 1300617 - RNA, 23 nt, Human
cagauccagggacagaggcccca

SEQ ID NO: 1300618 - RNA, 14 nt, Human
cagauccccaagcc

SEQ ID NO: 1300619 - RNA, 15 nt, Human
cagauccccaagccu

SEQ ID NO: 1300620 - RNA, 20 nt, Human
cagauccaggagcuccagug

SEQ ID NO: 1300621 - RNA, 18 nt, Human
cagauaguguagcugagg

SEQ ID NO: 1300622 - RNA, 20 nt, Human
cagauaguguagcugaggag

SEQ ID NO: 1300623 - RNA, 15 nt, Human
cagauauauauucau

SEQ ID NO: 1300624 - RNA, 22 nt, Human
cagagcugauggagaaggaagg

SEQ ID NO: 1300625 - RNA, 23 nt, Human
cagaggggccugccaccuggacc

SEQ ID NO: 1300626 - RNA, 19 nt, Human
cagagcugauggagaagga

SEQ ID NO: 1300627 - RNA, 16 nt, Human
cagagcuaucauuaug

SEQ ID NO: 1300628 - RNA, 21 nt, Human
cagagcugauggagaaggaag

SEQ ID NO: 1300629 - RNA, 20 nt, Human
cagagcugauggagaaggaa

SEQ ID NO: 1300630 - RNA, 18 nt, Human
cagagagguuugcagucc

SEQ ID NO: 1300631 - RNA, 23 nt, Human
cagagagguuugcagucccaagc

SEQ ID NO: 1300632 - RNA, 20 nt, Human
cagagagguuugcaguccca

SEQ ID NO: 1300633 - RNA, 17 nt, Human
cagagacuuuagggggu

SEQ ID NO: 1300634 - RNA, 20 nt, Human
cagagagaaauaagugcccu

SEQ ID NO: 1300635 - RNA, 16 nt, Human
cagagagaauggcuuu

SEQ ID NO: 1300636 - RNA, 14 nt, Human
cagacagcccucca

SEQ ID NO: 1300637 - RNA, 13 nt, Human
cagacagagccag

SEQ ID NO: 1300638 - RNA, 14 nt, Human
cagacagagccagg

SEQ ID NO: 1300639 - RNA, 15 nt, Human
cagacagagccagga

SEQ ID NO: 1300640 - RNA, 16 nt, Human
cagacagagccaggag

SEQ ID NO: 1300641 - RNA, 17 nt, Human
cagacagagccaggaga

SEQ ID NO: 1300642 - RNA, 18 nt, Human
cagacagagccaggagaa

SEQ ID NO: 1300643 - RNA, 20 nt, Human
cagacagagccaggagaagc

SEQ ID NO: 1300644 - RNA, 14 nt, Human
cagacagagcccug

SEQ ID NO: 1300645 - RNA, 23 nt, Human
cagacagagccaggagaagcuca

SEQ ID NO: 1300646 - RNA, 11 nt, Human
cagacagauga

SEQ ID NO: 1300647 - RNA, 17 nt, Human
cagacagaugaggcuuu

SEQ ID NO: 1300648 - RNA, 18 nt, Human
cagacagaugaggcuuuc

SEQ ID NO: 1300649 - RNA, 21 nt, Human
cagacagcuccacccuggccg

SEQ ID NO: 1300650 - RNA, 18 nt, Human
cagacaggcaaauaaaag

SEQ ID NO: 1300651 - RNA, 15 nt, Human
cagacaggccccgug

SEQ ID NO: 1300652 - RNA, 20 nt, Human
cagacaggccccgugaggca

SEQ ID NO: 1300653 - RNA, 14 nt, Human
cagacaggcucuua

SEQ ID NO: 1300654 - RNA, 18 nt, Human
cagacaggcucuuagcag

SEQ ID NO: 1300655 - RNA, 20 nt, Human
cagacaggcucuuagcagcu

SEQ ID NO: 1300656 - RNA, 22 nt, Human
cagacaggcucuuagcagcuuc

SEQ ID NO: 1300657 - RNA, 22 nt, Human
cagacagggaauuaggccccca

SEQ ID NO: 1300658 - RNA, 23 nt, Human
cagacuccuucaacaauucuaaa

SEQ ID NO: 1300659 - RNA, 16 nt, Human
cagacaggucccuccc

SEQ ID NO: 1300660 - RNA, 19 nt, Human
cagacaguguuuucuggga

SEQ ID NO: 1300661 - RNA, 20 nt, Human
cagacucccauuccugaaga

SEQ ID NO: 1300662 - RNA, 18 nt, Human
cagacuccuucaacaauu

SEQ ID NO: 1300663 - RNA, 19 nt, Human
cagacucggaaucuauuuu

SEQ ID NO: 1300664 - RNA, 23 nt, Human
cagacucggaaucuauuuucuca

SEQ ID NO: 1300665 - RNA, 14 nt, Human
cagacucuaagaaa

SEQ ID NO: 1300666 - RNA, 17 nt, Human
cagacucuaagaaagaa

SEQ ID NO: 1300667 - RNA, 18 nt, Human
cagacucuaagaaagaac

SEQ ID NO: 1300668 - RNA, 13 nt, Human
cagacucuugccu

SEQ ID NO: 1300669 - RNA, 18 nt, Human
cagacucuugccuguuuc

SEQ ID NO: 1300670 - RNA, 15 nt, Human
cagacucuuuaugcu

SEQ ID NO: 1300671 - RNA, 19 nt, Human
cagacucuuuaugcuugca

SEQ ID NO: 1300672 - RNA, 18 nt, Human
cagacucuuuaugcuugc

SEQ ID NO: 1300673 - RNA, 23 nt, Human
cagacugacaguuuacagacgcu

SEQ ID NO: 1300674 - RNA, 14 nt, Human
cagacugcuuccaa

SEQ ID NO: 1300675 - RNA, 20 nt, Human
cagacugcuuccaauuuucu

SEQ ID NO: 1300676 - RNA, 18 nt, Human
cagacugcgauuuguccc

SEQ ID NO: 1300677 - RNA, 22 nt, Human
cagggagacuggguaggaaaga

SEQ ID NO: 1300678 - RNA, 10 nt, Human
caggcugggc

SEQ ID NO: 1300679 - RNA, 13 nt, Human
cagggagagccca

SEQ ID NO: 1300680 - RNA, 14 nt, Human
cagggagagcccag

SEQ ID NO: 1300681 - RNA, 15 nt, Human
cagggagagcccagg

SEQ ID NO: 1300682 - RNA, 16 nt, Human
cagggagagcccagga

SEQ ID NO: 1300683 - RNA, 20 nt, Human
cagggagagcccaggagcuc

SEQ ID NO: 1300684 - RNA, 19 nt, Human
cagggagagcccaggagcu

SEQ ID NO: 1300685 - RNA, 17 nt, Human
cagggagagggggcugg

SEQ ID NO: 1300686 - RNA, 14 nt, Human
cagggcuacccuga

SEQ ID NO: 1300687 - RNA, 16 nt, Human
cagggcuacccugagc

SEQ ID NO: 1300688 - RNA, 18 nt, Human
cagggcuacccugagcug

SEQ ID NO: 1300689 - RNA, 19 nt, Human
cagggcuacccugagcuga

SEQ ID NO: 1300690 - RNA, 22 nt, Human
cagggcuacccugagcugaggc

SEQ ID NO: 1300691 - RNA, 23 nt, Human
cagggcuacccugagcugaggca

SEQ ID NO: 1300692 - RNA, 24 nt, Human
cagggcuacccugagcugaggcag

SEQ ID NO: 1300693 - RNA, 14 nt, Human
cagggcuagugacu

SEQ ID NO: 1300694 - RNA, 15 nt, Human
cagggcuagugacuu

SEQ ID NO: 1300695 - RNA, 18 nt, Human
cagggcuagugacuugug

SEQ ID NO: 1300696 - RNA, 11 nt, Human
cagggcuccug

SEQ ID NO: 1300697 - RNA, 12 nt, Human
cagggcuccugc

SEQ ID NO: 1300698 - RNA, 14 nt, Human
cagggcuccugcac

SEQ ID NO: 1300699 - RNA, 12 nt, Human
cagggcuccugg

SEQ ID NO: 1300700 - RNA, 13 nt, Human
cagggcuccuggg

SEQ ID NO: 1300701 - RNA, 14 nt, Human
cagggcuccuugug

SEQ ID NO: 1300702 - RNA, 21 nt, Human
cagggcuccuugugggccugg

SEQ ID NO: 1300703 - RNA, 23 nt, Human
cagggcuccuugugggccugggc

SEQ ID NO: 1300704 - RNA, 14 nt, Human
cagggcucuccugg

SEQ ID NO: 1300705 - RNA, 15 nt, Human
cagggcucuccuggc

SEQ ID NO: 1300706 - RNA, 16 nt, Human
cagggcucuccuggcu

SEQ ID NO: 1300707 - RNA, 17 nt, Human
cagggcucuccuggcuu

SEQ ID NO: 1300708 - RNA, 19 nt, Human
cagggcucuccuggcuucc

SEQ ID NO: 1300709 - RNA, 18 nt, Human
cagggcucuccuggcuuc

SEQ ID NO: 1300710 - RNA, 15 nt, Human
cagggcuucuaguuu

SEQ ID NO: 1300711 - RNA, 22 nt, Human
cagggcuuuacuccguaacaga

SEQ ID NO: 1300712 - RNA, 20 nt, Human
caggccggcuugccacaccc

SEQ ID NO: 1300713 - RNA, 13 nt, Human
caggccgggaaaa

SEQ ID NO: 1300714 - RNA, 13 nt, Human
caggcuaauuuuu

SEQ ID NO: 1300715 - RNA, 22 nt, Human
caggcuaauuuuuuuguauuuu

SEQ ID NO: 1300716 - RNA, 21 nt, Human
caggcgugagccaccgugccu

SEQ ID NO: 1300717 - RNA, 18 nt, Human
caggcgugagccaccucg

SEQ ID NO: 1300718 - RNA, 18 nt, Human
caggccuuugagaaaggg

SEQ ID NO: 1300719 - RNA, 17 nt, Human
caggccuuugagcucag

SEQ ID NO: 1300720 - RNA, 16 nt, Human
caggccuuugagcuca

SEQ ID NO: 1300721 - RNA, 16 nt, Human
caggccuguguagcug

SEQ ID NO: 1300722 - RNA, 18 nt, Human
caggccuguguagcugug

SEQ ID NO: 1300723 - RNA, 19 nt, Human
caggccuguguagcuguga

SEQ ID NO: 1300724 - RNA, 20 nt, Human
caggccuguguagcugugac

SEQ ID NO: 1300725 - RNA, 21 nt, Human
caggccuguguagcugugacc

SEQ ID NO: 1300726 - RNA, 22 nt, Human
caggccuguguagcugugaccu

SEQ ID NO: 1300727 - RNA, 23 nt, Human
caggccuguguagcugugaccug

SEQ ID NO: 1300728 - RNA, 22 nt, Human
caggccucucccuccuccagga

SEQ ID NO: 1300729 - RNA, 15 nt, Human
caggccugaaagagg

SEQ ID NO: 1300730 - RNA, 20 nt, Human
caggccugaaagaggcugag

SEQ ID NO: 1300731 - RNA, 22 nt, Human
caggccugaaagaggcugaggc

SEQ ID NO: 1300732 - RNA, 15 nt, Human
caggccuguccaaca

SEQ ID NO: 1300733 - RNA, 17 nt, Human
caggccgugacgucugg

SEQ ID NO: 1300734 - RNA, 18 nt, Human
caggccgugacgucuggg

SEQ ID NO: 1300735 - RNA, 19 nt, Human
caggccgugacgucugggu

SEQ ID NO: 1300736 - RNA, 20 nt, Human
caggccgugacgucugggug

SEQ ID NO: 1300737 - RNA, 22 nt, Human
caggcacugagauaccagcgag

SEQ ID NO: 1300738 - RNA, 12 nt, Human
caggccagcugu

SEQ ID NO: 1300739 - RNA, 13 nt, Human
caggccagcugug

SEQ ID NO: 1300740 - RNA, 13 nt, Human
caggccaggacuc

SEQ ID NO: 1300741 - RNA, 14 nt, Human
caggccaggacucu

SEQ ID NO: 1300742 - RNA, 15 nt, Human
caggccaggacucug

SEQ ID NO: 1300743 - RNA, 16 nt, Human
caggccaggacucugc

SEQ ID NO: 1300744 - RNA, 17 nt, Human
caggccaggacucugca

SEQ ID NO: 1300745 - RNA, 18 nt, Human
caggccaggacucugcag

SEQ ID NO: 1300746 - RNA, 19 nt, Human
caggccaggacucugcagc

SEQ ID NO: 1300747 - RNA, 20 nt, Human
caggccaggacucugcagcc

SEQ ID NO: 1300748 - RNA, 21 nt, Human
caggccaggacucugcagccu

SEQ ID NO: 1300749 - RNA, 23 nt, Human
caggccaggacucugcagccuca

SEQ ID NO: 1300750 - RNA, 16 nt, Human
caggagggacaaagga

SEQ ID NO: 1300751 - RNA, 12 nt, Human
caggccaggcau

SEQ ID NO: 1300752 - RNA, 12 nt, Human
caggaccagcuc

SEQ ID NO: 1300753 - RNA, 14 nt, Human
caggaccagcucag

SEQ ID NO: 1300754 - RNA, 13 nt, Human
caggaccagcuca

SEQ ID NO: 1300755 - RNA, 21 nt, Human
caggaccagucaaccugggca

SEQ ID NO: 1300756 - RNA, 18 nt, Human
caggaccagucccagagc

SEQ ID NO: 1300757 - RNA, 19 nt, Human
caggaccagucccagagca

SEQ ID NO: 1300758 - RNA, 20 nt, Human
caggaccagucccagagcag

SEQ ID NO: 1300759 - RNA, 13 nt, Human
caggacccagagg

SEQ ID NO: 1300760 - RNA, 14 nt, Human
caggacccagagga

SEQ ID NO: 1300761 - RNA, 15 nt, Human
caggacccagaggaa

SEQ ID NO: 1300762 - RNA, 16 nt, Human
caggacccagaggaag

SEQ ID NO: 1300763 - RNA, 12 nt, Human
caggacauuucu

SEQ ID NO: 1300764 - RNA, 14 nt, Human
caggacauuucucu

SEQ ID NO: 1300765 - RNA, 18 nt, Human
caggacauuucucuaaga

SEQ ID NO: 1300766 - RNA, 12 nt, Human
caggaccacagg

SEQ ID NO: 1300767 - RNA, 14 nt, Human
caggaccacaggcu

SEQ ID NO: 1300768 - RNA, 15 nt, Human
caggaccacaggcuc

SEQ ID NO: 1300769 - RNA, 16 nt, Human
caggaccacaggcuca

SEQ ID NO: 1300770 - RNA, 17 nt, Human
caggaccacaggcucag

SEQ ID NO: 1300771 - RNA, 18 nt, Human
caggaccacaggcucagg

SEQ ID NO: 1300772 - RNA, 19 nt, Human
caggaccacaggcucaggc

SEQ ID NO: 1300773 - RNA, 21 nt, Human
caggaccacaggcucaggcag

SEQ ID NO: 1300774 - RNA, 23 nt, Human
caggaccacaggcucaggcaggg

SEQ ID NO: 1300775 - RNA, 15 nt, Human
caggaccagaagcuc

SEQ ID NO: 1300776 - RNA, 13 nt, Human
caggaccagaagc

SEQ ID NO: 1300777 - RNA, 19 nt, Human
caggaggacccagggcucu

SEQ ID NO: 1300778 - RNA, 16 nt, Human
caggaggaauacugaa

SEQ ID NO: 1300779 - RNA, 15 nt, Human
caggaggacccaggg

SEQ ID NO: 1300780 - RNA, 16 nt, Human
caggaggacccagggc

SEQ ID NO: 1300781 - RNA, 17 nt, Human
caggaggacccagggcu

SEQ ID NO: 1300782 - RNA, 18 nt, Human
caggaggacccagggcuc

SEQ ID NO: 1300783 - RNA, 20 nt, Human
caggaggacccagggcucug

SEQ ID NO: 1300784 - RNA, 18 nt, Human
caggagggacaaaggagc

SEQ ID NO: 1300785 - RNA, 14 nt, Human
caggaggccuagga

SEQ ID NO: 1300786 - RNA, 20 nt, Human
cagcuguaugauucccagcc

SEQ ID NO: 1300787 - RNA, 16 nt, Human
cagcugucaaggcuca

SEQ ID NO: 1300788 - RNA, 18 nt, Human
cagcugucaucaauuaaa

SEQ ID NO: 1300789 - RNA, 14 nt, Human
cagcugucccccca

SEQ ID NO: 1300790 - RNA, 15 nt, Human
cagcuguccccccac

SEQ ID NO: 1300791 - RNA, 16 nt, Human
cagcuguccccccacu

SEQ ID NO: 1300792 - RNA, 14 nt, Human
cagcuuauugucua

SEQ ID NO: 1300793 - RNA, 19 nt, Human
cagcuguccccccacuccc

SEQ ID NO: 1300794 - RNA, 17 nt, Human
cagcuguccccccacuc

SEQ ID NO: 1300795 - RNA, 20 nt, Human
cagcuuauugucuagugaaa

SEQ ID NO: 1300796 - RNA, 23 nt, Human
caggaaacaguugcauguaguaa

SEQ ID NO: 1300797 - RNA, 18 nt, Human
caggaaacuccugugacc

SEQ ID NO: 1300798 - RNA, 19 nt, Human
caggaaacuccugugacca

SEQ ID NO: 1300799 - RNA, 21 nt, Human
caggaaacuccugugaccaca

SEQ ID NO: 1300800 - RNA, 16 nt, Human
caggaaagagaacuuc

SEQ ID NO: 1300801 - RNA, 20 nt, Human
caggaaagagaacuuccaga

SEQ ID NO: 1300802 - RNA, 17 nt, Human
cagcugagagaaaauaa

SEQ ID NO: 1300803 - RNA, 14 nt, Human
cagcugagaggcug

SEQ ID NO: 1300804 - RNA, 13 nt, Human
cagcugagcaggg

SEQ ID NO: 1300805 - RNA, 14 nt, Human
cagcugagcagggc

SEQ ID NO: 1300806 - RNA, 15 nt, Human
cagcugagcagggcc

SEQ ID NO: 1300807 - RNA, 20 nt, Human
cagcugagcagggccgggga

SEQ ID NO: 1300808 - RNA, 18 nt, Human
cagcugagcgccaggaug

SEQ ID NO: 1300809 - RNA, 16 nt, Human
cagcugagcagggccg

SEQ ID NO: 1300810 - RNA, 14 nt, Human
cagcugagcgccag

SEQ ID NO: 1300811 - RNA, 16 nt, Human
cagcugagcgccagga

SEQ ID NO: 1300812 - RNA, 22 nt, Human
cagcugccggucgcccuuugcu

SEQ ID NO: 1300813 - RNA, 19 nt, Human
cagcuaaagcaauaugcau

SEQ ID NO: 1300814 - RNA, 22 nt, Human
cagcggagguguggagccgagg

SEQ ID NO: 1300815 - RNA, 14 nt, Human
cagcggcaucaggc

SEQ ID NO: 1300816 - RNA, 20 nt, Human
cagcgcugucaggauugcga

SEQ ID NO: 1300817 - RNA, 21 nt, Human
cagcgcugucaggauugcgag

SEQ ID NO: 1300818 - RNA, 12 nt, Human
cagcuaaagcaa

SEQ ID NO: 1300819 - RNA, 23 nt, Human
cagcgcuccugcuaacggugcuc

SEQ ID NO: 1300820 - RNA, 13 nt, Human
caccugcccugcc

SEQ ID NO: 1300821 - RNA, 12 nt, Human
caccugcccugc

SEQ ID NO: 1300822 - RNA, 13 nt, Human
caccugcccuacc

SEQ ID NO: 1300823 - RNA, 14 nt, Human
caccugcccuaccu

SEQ ID NO: 1300824 - RNA, 18 nt, Human
caccuaggcuaggguggg

SEQ ID NO: 1300825 - RNA, 19 nt, Human
caccuaggcuagggugggg

SEQ ID NO: 1300826 - RNA, 23 nt, Human
cacccuguacuguucugugucuu

SEQ ID NO: 1300827 - RNA, 12 nt, Human
cacccugggccc

SEQ ID NO: 1300828 - RNA, 14 nt, Human
cacccugggcccug

SEQ ID NO: 1300829 - RNA, 17 nt, Human
cacccugggcccugggc

SEQ ID NO: 1300830 - RNA, 21 nt, Human
cacccugggcccugggcugga

SEQ ID NO: 1300831 - RNA, 22 nt, Human
cacccugggcccugggcuggaa

SEQ ID NO: 1300832 - RNA, 19 nt, Human
cacccuggccuagaccagc

SEQ ID NO: 1300833 - RNA, 15 nt, Human
cacccuggugggcca

SEQ ID NO: 1300834 - RNA, 16 nt, Human
cacccuggugggccaa

SEQ ID NO: 1300835 - RNA, 16 nt, Human
cacccuguacuguucu

SEQ ID NO: 1300836 - RNA, 17 nt, Human
cacccuguacuguucug

SEQ ID NO: 1300837 - RNA, 21 nt, Human
cacccuguacuguucuguguc

SEQ ID NO: 1300838 - RNA, 20 nt, Human
cacccucguggacaccugcc

SEQ ID NO: 1300839 - RNA, 19 nt, Human
cacccucguggacaccugc

SEQ ID NO: 1300840 - RNA, 18 nt, Human
cacccucguggacaccug

SEQ ID NO: 1300841 - RNA, 17 nt, Human
cacccucguggacaccu

SEQ ID NO: 1300842 - RNA, 22 nt, Human
cacccucggggauguguccuga

SEQ ID NO: 1300843 - RNA, 12 nt, Human
cacccugagccg

SEQ ID NO: 1300844 - RNA, 14 nt, Human
cacccugagccggc

SEQ ID NO: 1300845 - RNA, 15 nt, Human
cacccugaggagucu

SEQ ID NO: 1300846 - RNA, 16 nt, Human
cacccugaggagucug

SEQ ID NO: 1300847 - RNA, 18 nt, Human
cacccugaggagucugag

SEQ ID NO: 1300848 - RNA, 21 nt, Human
cacccugaggagucugagguc

SEQ ID NO: 1300849 - RNA, 22 nt, Human
cacccugaggagucugaggucc

SEQ ID NO: 1300850 - RNA, 17 nt, Human
cacccugauaggaagag

SEQ ID NO: 1300851 - RNA, 22 nt, Human
cacccugauuuaggagaagcca

SEQ ID NO: 1300852 - RNA, 12 nt, Human
cacccugccuua

SEQ ID NO: 1300853 - RNA, 13 nt, Human
cacccugccuuau

SEQ ID NO: 1300854 - RNA, 18 nt, Human
cacccugccuuaucuugc

SEQ ID NO: 1300855 - RNA, 19 nt, Human
cacccugccuuaucuugca

SEQ ID NO: 1300856 - RNA, 15 nt, Human
cacccuggauuugca

SEQ ID NO: 1300857 - RNA, 11 nt, Human
cacccuggccu

SEQ ID NO: 1300858 - RNA, 23 nt, Human
cacccuggccuagaccagcagac

SEQ ID NO: 1300859 - RNA, 21 nt, Human
cacccuggccgaguccaagcu

SEQ ID NO: 1300860 - RNA, 22 nt, Human
cacccuggccgaguccaagcug

SEQ ID NO: 1300861 - RNA, 11 nt, Human
cacccuggagg

SEQ ID NO: 1300862 - RNA, 21 nt, Human
cacccucggggauguguccug

SEQ ID NO: 1300863 - RNA, 16 nt, Human
caccugcccugcccug

SEQ ID NO: 1300864 - RNA, 14 nt, Human
caccugcccugccc

SEQ ID NO: 1300865 - RNA, 20 nt, Human
caccugcccuaccugcccca

SEQ ID NO: 1300866 - RNA, 23 nt, Human
cacugaagaagcaccaaucauga

SEQ ID NO: 1300867 - RNA, 17 nt, Human
cacucccaccugacaca

SEQ ID NO: 1300868 - RNA, 17 nt, Human
cacucccacaugggccc

SEQ ID NO: 1300869 - RNA, 17 nt, Human
cacugaagcuuuuuagu

SEQ ID NO: 1300870 - RNA, 21 nt, Human
cacuccagugagacagcucug

SEQ ID NO: 1300871 - RNA, 12 nt, Human
cacuccagccug

SEQ ID NO: 1300872 - RNA, 17 nt, Human
cacuccagaccccuggc

SEQ ID NO: 1300873 - RNA, 15 nt, Human
cacuacauucauuua

SEQ ID NO: 1300874 - RNA, 14 nt, Human
cacuagacaagcca

SEQ ID NO: 1300875 - RNA, 16 nt, Human
cacuagacaagccaga

SEQ ID NO: 1300876 - RNA, 17 nt, Human
cacuagacaagccagaa

SEQ ID NO: 1300877 - RNA, 16 nt, Human
cacuagacccacugga

SEQ ID NO: 1300878 - RNA, 19 nt, Human
cacuagacaagccagaacu

SEQ ID NO: 1300879 - RNA, 21 nt, Human
cacuagacaagccagaacuug

SEQ ID NO: 1300880 - RNA, 12 nt, Human
cacuagccaaac

SEQ ID NO: 1300881 - RNA, 14 nt, Human
cacuccagaccccu

SEQ ID NO: 1300882 - RNA, 16 nt, Human
cacuccagaccccugg

SEQ ID NO: 1300883 - RNA, 19 nt, Human
cacuagcccaaugaaauga

SEQ ID NO: 1300884 - RNA, 14 nt, Human
cacuagccaaaccu

SEQ ID NO: 1300885 - RNA, 16 nt, Human
cacuagccaaaccuca

SEQ ID NO: 1300886 - RNA, 22 nt, Human
cacuagccaaaccucaccaacu

SEQ ID NO: 1300887 - RNA, 19 nt, Human
cacuagccaaaccucacca

SEQ ID NO: 1300888 - RNA, 16 nt, Human
cacuagcccaaugaaa

SEQ ID NO: 1300889 - RNA, 23 nt, Human
cacuagcccaaugaaaugaauua

SEQ ID NO: 1300890 - RNA, 13 nt, Human
cacgcuuuuguga

SEQ ID NO: 1300891 - RNA, 20 nt, Human
cacggaccaaagggagucug

SEQ ID NO: 1300892 - RNA, 21 nt, Human
cacggaccaaagggagucugc

SEQ ID NO: 1300893 - RNA, 23 nt, Human
cacggaccaaagggagucugcca

SEQ ID NO: 1300894 - RNA, 15 nt, Human
cacggagccacuccu

SEQ ID NO: 1300895 - RNA, 16 nt, Human
cacggagccacuccuc

SEQ ID NO: 1300896 - RNA, 17 nt, Human
cacggagccacuccucu

SEQ ID NO: 1300897 - RNA, 18 nt, Human
cacggagccacuccucug

SEQ ID NO: 1300898 - RNA, 19 nt, Human
cacggagccacuccucuga

SEQ ID NO: 1300899 - RNA, 21 nt, Human
cacggagccacuccucugacu

SEQ ID NO: 1300900 - RNA, 23 nt, Human
cacggagccacuccucugacuca

SEQ ID NO: 1300901 - RNA, 14 nt, Human
cacgcuuuccugaa

SEQ ID NO: 1300902 - RNA, 16 nt, Human
cacaugaaguccaagc

SEQ ID NO: 1300903 - RNA, 15 nt, Human
cacaugaacuuagau

SEQ ID NO: 1300904 - RNA, 21 nt, Human
cacaugaacuuagauuuuaca

SEQ ID NO: 1300905 - RNA, 23 nt, Human
cacaugaacuuagauuuuacaug

SEQ ID NO: 1300906 - RNA, 13 nt, Human
caccaggaagccg

SEQ ID NO: 1300907 - RNA, 16 nt, Human
caccaggacuagggcu

SEQ ID NO: 1300908 - RNA, 13 nt, Human
cacccagcaauag

SEQ ID NO: 1300909 - RNA, 20 nt, Human
cacccagaugccccuuucug

SEQ ID NO: 1300910 - RNA, 15 nt, Human
cacccagacauaaag

SEQ ID NO: 1300911 - RNA, 20 nt, Human
cacccagacauaaaggaaaa

SEQ ID NO: 1300912 - RNA, 21 nt, Human
cacccagacauaaaggaaaag

SEQ ID NO: 1300913 - RNA, 23 nt, Human
cacccagacauaaaggaaaagac

SEQ ID NO: 1300914 - RNA, 14 nt, Human
cacccacuucugca

SEQ ID NO: 1300915 - RNA, 16 nt, Human
cacccacuucugcacu

SEQ ID NO: 1300916 - RNA, 15 nt, Human
cacccacuucugcac

SEQ ID NO: 1300917 - RNA, 22 nt, Human
caccaggauagagacuggaaca

SEQ ID NO: 1300918 - RNA, 13 nt, Human
caccaggcagccu

SEQ ID NO: 1300919 - RNA, 14 nt, Human
caccaggcagccuc

SEQ ID NO: 1300920 - RNA, 20 nt, Human
cacccagguuggagugcagu

SEQ ID NO: 1300921 - RNA, 13 nt, Human
cacccaggggcag

SEQ ID NO: 1300922 - RNA, 14 nt, Human
cacccaggggcagc

SEQ ID NO: 1300923 - RNA, 16 nt, Human
cacccaggggcagccc

SEQ ID NO: 1300924 - RNA, 20 nt, Human
cacccaggcuggacugcaau

SEQ ID NO: 1300925 - RNA, 12 nt, Human
cacccaggccag

SEQ ID NO: 1300926 - RNA, 20 nt, Human
cacccaggcuggagugcagu

SEQ ID NO: 1300927 - RNA, 16 nt, Human
cacccagcaauagaga

SEQ ID NO: 1300928 - RNA, 16 nt, Human
cacccagugcccucuc

SEQ ID NO: 1300929 - RNA, 23 nt, Human
cacccagugcccucuccccucag

SEQ ID NO: 1300930 - RNA, 22 nt, Human
cacccaguuuccuugggaguug

SEQ ID NO: 1300931 - RNA, 11 nt, Human
cacccaucugu

SEQ ID NO: 1300932 - RNA, 18 nt, Human
cacccaucugucugccaa

SEQ ID NO: 1300933 - RNA, 21 nt, Human
caaguuccuuggccaugcaga

SEQ ID NO: 1300934 - RNA, 20 nt, Human
caaguuccucuaacuuggcu

SEQ ID NO: 1300935 - RNA, 15 nt, Human
caaguucgucuguug

SEQ ID NO: 1300936 - RNA, 16 nt, Human
caaguucgucuguugu

SEQ ID NO: 1300937 - RNA, 12 nt, Human
caaguucuaaga

SEQ ID NO: 1300938 - RNA, 13 nt, Human
caaguucuaagau

SEQ ID NO: 1300939 - RNA, 14 nt, Human
caaguucuaagauu

SEQ ID NO: 1300940 - RNA, 15 nt, Human
caaguucuaagauuc

SEQ ID NO: 1300941 - RNA, 20 nt, Human
caaguuauuuuuaauuuggu

SEQ ID NO: 1300942 - RNA, 17 nt, Human
caaguucaugcagcugu

SEQ ID NO: 1300943 - RNA, 18 nt, Human
caaguuccaaguugcuaa

SEQ ID NO: 1300944 - RNA, 19 nt, Human
caaguucccaguuggagcu

SEQ ID NO: 1300945 - RNA, 21 nt, Human
caaguuccucuaacuuggcuc

SEQ ID NO: 1300946 - RNA, 19 nt, Human
caaguauuugggaagugaa

SEQ ID NO: 1300947 - RNA, 22 nt, Human
caaguauuugggaagugaagac

SEQ ID NO: 1300948 - RNA, 16 nt, Human
caaguauuuguuaauu

SEQ ID NO: 1300949 - RNA, 19 nt, Human
caaguauuuguuaauuuag

SEQ ID NO: 1300950 - RNA, 20 nt, Human
caaguauuuguuaauuuaga

SEQ ID NO: 1300951 - RNA, 15 nt, Human
caaguuauuaauuuc

SEQ ID NO: 1300952 - RNA, 21 nt, Human
caaguuauuaauuucuucaca

SEQ ID NO: 1300953 - RNA, 15 nt, Human
caaguaaaaaggcua

SEQ ID NO: 1300954 - RNA, 10 nt, Human
caaguaaaaa

SEQ ID NO: 1300955 - RNA, 21 nt, Human
caagguuuuagguucuaaagu

SEQ ID NO: 1300956 - RNA, 23 nt, Human
caagguuuuagguucuaaaguuc

SEQ ID NO: 1300957 - RNA, 19 nt, Human
caagguuuuauaaggcuga

SEQ ID NO: 1300958 - RNA, 13 nt, Human
caagguuuuaggu

SEQ ID NO: 1300959 - RNA, 18 nt, Human
caagguuuuagguucuaa

SEQ ID NO: 1300960 - RNA, 20 nt, Human
caagguuuuagguucuaaag

SEQ ID NO: 1300961 - RNA, 14 nt, Human
caaggccaucuggg

SEQ ID NO: 1300962 - RNA, 17 nt, Human
caaggccaucugggcuc

SEQ ID NO: 1300963 - RNA, 14 nt, Human
caaguaacaaaaau

SEQ ID NO: 1300964 - RNA, 17 nt, Human
caaguaacaaaaauaaa

SEQ ID NO: 1300965 - RNA, 15 nt, Human
caaguaauacaaacu

SEQ ID NO: 1300966 - RNA, 15 nt, Human
caagcugaggugccc

SEQ ID NO: 1300967 - RNA, 17 nt, Human
caagcugaggugcccag

SEQ ID NO: 1300968 - RNA, 18 nt, Human
caagcugaggugcccagg

SEQ ID NO: 1300969 - RNA, 19 nt, Human
caagcugaggugcccagga

SEQ ID NO: 1300970 - RNA, 20 nt, Human
caagcugaggugcccaggag

SEQ ID NO: 1300971 - RNA, 21 nt, Human
caagcugaggugcccaggaga

SEQ ID NO: 1300972 - RNA, 20 nt, Human
caagcugaguauuaaaaugu

SEQ ID NO: 1300973 - RNA, 14 nt, Human
caagcugaguuucc

SEQ ID NO: 1300974 - RNA, 15 nt, Human
caagcugaguuuccu

SEQ ID NO: 1300975 - RNA, 16 nt, Human
caagcugaguuuccua

SEQ ID NO: 1300976 - RNA, 22 nt, Human
caagcugaguuuccuaugggaa

SEQ ID NO: 1300977 - RNA, 23 nt, Human
caagcugaguuuccuaugggaac

SEQ ID NO: 1300978 - RNA, 15 nt, Human
caagcugauuaaaug

SEQ ID NO: 1300979 - RNA, 19 nt, Human
caagcugauuaaaugacac

SEQ ID NO: 1300980 - RNA, 21 nt, Human
caagcuccaucuccacuccag

SEQ ID NO: 1300981 - RNA, 17 nt, Human
caagcuccaucuccacu

SEQ ID NO: 1300982 - RNA, 13 nt, Human
caagcucuuccuu

SEQ ID NO: 1300983 - RNA, 17 nt, Human
caaucagccuaguugau

SEQ ID NO: 1300984 - RNA, 15 nt, Human
caaucagcuccuucc

SEQ ID NO: 1300985 - RNA, 16 nt, Human
caaucagcuccuuccu

SEQ ID NO: 1300986 - RNA, 18 nt, Human
caaucagcuccuuccugg

SEQ ID NO: 1300987 - RNA, 13 nt, Human
caaugccaucauc

SEQ ID NO: 1300988 - RNA, 14 nt, Human
caaugccaucaucu

SEQ ID NO: 1300989 - RNA, 17 nt, Human
caaugcucaggugcugg

SEQ ID NO: 1300990 - RNA, 12 nt, Human
caauauuuuucu

SEQ ID NO: 1300991 - RNA, 17 nt, Human
caauauuuucuuuuccc

SEQ ID NO: 1300992 - RNA, 15 nt, Human
caaucaagucuguuu

SEQ ID NO: 1300993 - RNA, 18 nt, Human
caaucaagucuguuuacu

SEQ ID NO: 1300994 - RNA, 19 nt, Human
caaucaaucuugcauguaa

SEQ ID NO: 1300995 - RNA, 16 nt, Human
caaucaaucuugcaug

SEQ ID NO: 1300996 - RNA, 15 nt, Human
caauuggcaccgaag

SEQ ID NO: 1300997 - RNA, 19 nt, Human
caauuggcaccgaagccca

SEQ ID NO: 1300998 - RNA, 20 nt, Human
caauuggcaccgaagcccag

SEQ ID NO: 1300999 - RNA, 21 nt, Human
caauuggcaccgaagcccaga

SEQ ID NO: 1301000 - RNA, 17 nt, Human
caauugggagcugccaa

SEQ ID NO: 1301001 - RNA, 21 nt, Human
caauugggagcugccaagagu

SEQ ID NO: 1301002 - RNA, 20 nt, Human
caauugggagcugccaagag

SEQ ID NO: 1301003 - RNA, 14 nt, Human
caauauuuuuagau

SEQ ID NO: 1301004 - RNA, 13 nt, Human
caauuuauuugaa

SEQ ID NO: 1301005 - RNA, 15 nt, Human
caauuuauuugaaug

SEQ ID NO: 1301006 - RNA, 23 nt, Human
caauuuauuugaaugauuuuucu

SEQ ID NO: 1301007 - RNA, 15 nt, Human
caauuucaagguucu

SEQ ID NO: 1301008 - RNA, 16 nt, Human
caauuucaagguucua

SEQ ID NO: 1301009 - RNA, 11 nt, Human
caauuucaagu

SEQ ID NO: 1301010 - RNA, 19 nt, Human
caauuucaagguucuaacc

SEQ ID NO: 1301011 - RNA, 14 nt, Human
caauuucagacucc

SEQ ID NO: 1301012 - RNA, 12 nt, Human
cacaaggacuuc

SEQ ID NO: 1301013 - RNA, 14 nt, Human
cacaaggacuuccu

SEQ ID NO: 1301014 - RNA, 16 nt, Human
cacaaggacuuccugu

SEQ ID NO: 1301015 - RNA, 22 nt, Human
cacaaggacuuccuguccagcu

SEQ ID NO: 1301016 - RNA, 17 nt, Human
cacaaggauagaugcug

SEQ ID NO: 1301017 - RNA, 18 nt, Human
cacaaggauagaugcugg

SEQ ID NO: 1301018 - RNA, 21 nt, Human
cacaaggauagaugcuggccc

SEQ ID NO: 1301019 - RNA, 22 nt, Human
cacaaggauagaugcuggccca

SEQ ID NO: 1301020 - RNA, 15 nt, Human
cacaaggccaucugg

SEQ ID NO: 1301021 - RNA, 11 nt, Human
cacaaggcagc

SEQ ID NO: 1301022 - RNA, 14 nt, Human
cacaaggcagcaag

SEQ ID NO: 1301023 - RNA, 15 nt, Human
cacaaggcagcaagg

SEQ ID NO: 1301024 - RNA, 16 nt, Human
cacaaggcagcaaggc

SEQ ID NO: 1301025 - RNA, 17 nt, Human
cacaaggcagcaaggcc

SEQ ID NO: 1301026 - RNA, 18 nt, Human
cacaaggcagcaaggccc

SEQ ID NO: 1301027 - RNA, 22 nt, Human
cacaaggcagcaaggcccgagc

SEQ ID NO: 1301028 - RNA, 19 nt, Human
caacuauauuguuugcuaa

SEQ ID NO: 1301029 - RNA, 19 nt, Human
caacuaucucauuuccaag

SEQ ID NO: 1301030 - RNA, 13 nt, Human
caacuauggccug

SEQ ID NO: 1301031 - RNA, 21 nt, Human
caacuaucucauuuccaagca

SEQ ID NO: 1301032 - RNA, 21 nt, Human
caacuaucagacuaagccagc

SEQ ID NO: 1301033 - RNA, 13 nt, Human
caaccccaggcug

SEQ ID NO: 1301034 - RNA, 14 nt, Human
caacuauggccugu

SEQ ID NO: 1301035 - RNA, 16 nt, Human
caacuauggaucagaa

SEQ ID NO: 1301036 - RNA, 17 nt, Human
caacuauggaucagaau

SEQ ID NO: 1301037 - RNA, 14 nt, Human
caacuauuuucaga

SEQ ID NO: 1301038 - RNA, 12 nt, Human
caacuccagaaa

SEQ ID NO: 1301039 - RNA, 21 nt, Human
caacuauuuucagaugugaac

SEQ ID NO: 1301040 - RNA, 21 nt, Human
caacucccugccccccagccc

SEQ ID NO: 1301041 - RNA, 19 nt, Human
caacucccugccccccagc

SEQ ID NO: 1301042 - RNA, 20 nt, Human
caacucccugccccccagcc

SEQ ID NO: 1301043 - RNA, 17 nt, Human
caacuauuuucagaugu

SEQ ID NO: 1301044 - RNA, 18 nt, Human
caagaauagaugcugacu

SEQ ID NO: 1301045 - RNA, 22 nt, Human
caagaauaaucacgcuuuccug

SEQ ID NO: 1301046 - RNA, 23 nt, Human
caagaauaaucacgcuuuccuga

SEQ ID NO: 1301047 - RNA, 12 nt, Human
caagaaggauuu

SEQ ID NO: 1301048 - RNA, 16 nt, Human
caagaaggcaaaaaua

SEQ ID NO: 1301049 - RNA, 21 nt, Human
caagaauaaucacgcuuuccu

SEQ ID NO: 1301050 - RNA, 19 nt, Human
caagaauagcauuguaaaa

SEQ ID NO: 1301051 - RNA, 15 nt, Human
caagaaucagagaag

SEQ ID NO: 1301052 - RNA, 15 nt, Human
caagaauacuacuua

SEQ ID NO: 1301053 - RNA, 14 nt, Human
caagaauccacauu

SEQ ID NO: 1301054 - RNA, 18 nt, Human
caagaauccacauuucua

SEQ ID NO: 1301055 - RNA, 19 nt, Human
caagaauccacauuucuaa

SEQ ID NO: 1301056 - RNA, 21 nt, Human
caagaauccacauuucuaaaa

SEQ ID NO: 1301057 - RNA, 22 nt, Human
caagaauccacauuucuaaaau

SEQ ID NO: 1301058 - RNA, 14 nt, Human
caagacaugucugu

SEQ ID NO: 1301059 - RNA, 15 nt, Human
caagacaugucuguu

SEQ ID NO: 1301060 - RNA, 17 nt, Human
caagacaugucuguucu

SEQ ID NO: 1301061 - RNA, 19 nt, Human
caagcaaaugugaaucauu

SEQ ID NO: 1301062 - RNA, 17 nt, Human
caagcaaaugugaauca

SEQ ID NO: 1301063 - RNA, 15 nt, Human
caagcaaaugugaau

SEQ ID NO: 1301064 - RNA, 14 nt, Human
caagcaauccuccc

SEQ ID NO: 1301065 - RNA, 14 nt, Human
caagcaaguauuag

SEQ ID NO: 1301066 - RNA, 13 nt, Human
caagcaagaaaca

SEQ ID NO: 1301067 - RNA, 18 nt, Human
caagcaagaaacacuggg

SEQ ID NO: 1301068 - RNA, 15 nt, Human
caagaucccauuuga

SEQ ID NO: 1301069 - RNA, 13 nt, Human
caagaucccauuu

SEQ ID NO: 1301070 - RNA, 21 nt, Human
caagauauuuuaaaaucuguc

SEQ ID NO: 1301071 - RNA, 23 nt, Human
caagauauuuuaaaaucugucac

SEQ ID NO: 1301072 - RNA, 20 nt, Human
caagaugaaauuccauuugu

SEQ ID NO: 1301073 - RNA, 18 nt, Human
caagaugaaauuccauuu

SEQ ID NO: 1301074 - RNA, 18 nt, Human
caagaugaaggagaggca

SEQ ID NO: 1301075 - RNA, 18 nt, Human
caagcaccuagccucgcu

SEQ ID NO: 1301076 - RNA, 22 nt, Human
caagcaccaccaaacacagugu

SEQ ID NO: 1301077 - RNA, 12 nt, Human
caagcacagcag

SEQ ID NO: 1301078 - RNA, 13 nt, Human
caagcacagcagc

SEQ ID NO: 1301079 - RNA, 14 nt, Human
caagcacagcagcc

SEQ ID NO: 1301080 - RNA, 17 nt, Human
caagcacagcagccugg

SEQ ID NO: 1301081 - RNA, 14 nt, Human
caagcacagcccuu

SEQ ID NO: 1301082 - RNA, 19 nt, Human
auuuuuauauuugaaauau

SEQ ID NO: 1301083 - RNA, 15 nt, Human
auuuuuaaacaagua

SEQ ID NO: 1301084 - RNA, 16 nt, Human
auuuuuaaaauguaca

SEQ ID NO: 1301085 - RNA, 13 nt, Human
auuuuuaaacaag

SEQ ID NO: 1301086 - RNA, 14 nt, Human
auuuuuaaacaagu

SEQ ID NO: 1301087 - RNA, 17 nt, Human
auuuuuaugccaccuga

SEQ ID NO: 1301088 - RNA, 20 nt, Human
auuuuuaucaguuacacaug

SEQ ID NO: 1301089 - RNA, 16 nt, Human
auuuuuaaaacccauu

SEQ ID NO: 1301090 - RNA, 17 nt, Human
auuuuuaaaacccauuu

SEQ ID NO: 1301091 - RNA, 14 nt, Human
auuuuuaaaaugua

SEQ ID NO: 1301092 - RNA, 15 nt, Human
auuuuuuucugaauu

SEQ ID NO: 1301093 - RNA, 16 nt, Human
auuuuuuucugaaauu

SEQ ID NO: 1301094 - RNA, 17 nt, Human
auuuuuuucugaaauuu

SEQ ID NO: 1301095 - RNA, 16 nt, Human
auuuuuuuccuugcaa

SEQ ID NO: 1301096 - RNA, 19 nt, Human
auuuuuuucccaauugaga

SEQ ID NO: 1301097 - RNA, 18 nt, Human
auuuuuauuuuugcugag

SEQ ID NO: 1301098 - RNA, 13 nt, Human
auuuuuauuucuu

SEQ ID NO: 1301099 - RNA, 17 nt, Human
auuuuuauuucuuccua

SEQ ID NO: 1301100 - RNA, 22 nt, Human
auuuuuauuaauuuuaguuuuu

SEQ ID NO: 1301101 - RNA, 17 nt, Human
auuuuuauuaauuuuag

SEQ ID NO: 1301102 - RNA, 14 nt, Human
auuuuuuuuacauu

SEQ ID NO: 1301103 - RNA, 16 nt, Human
auuuuuuuuauuagua

SEQ ID NO: 1301104 - RNA, 20 nt, Human
auuuuuuuuauuaguauugu

SEQ ID NO: 1301105 - RNA, 14 nt, Human
auuuuuuuuaacau

SEQ ID NO: 1301106 - RNA, 18 nt, Human
auuuuuuuuaaguauuua

SEQ ID NO: 1301107 - RNA, 18 nt, Human
auuuuuuuuaacauuccu

SEQ ID NO: 1301108 - RNA, 16 nt, Human
auuuuuuuucuuugaa

SEQ ID NO: 1301109 - RNA, 21 nt, Human
auuuuuuuuucauacacuuau

SEQ ID NO: 1301110 - RNA, 19 nt, Human
auuuuuuuuucauacacuu

SEQ ID NO: 1301111 - RNA, 20 nt, Human
auuuuuuuuucauacacuua

SEQ ID NO: 1301112 - RNA, 22 nt, Human
caaaagauugcugaaauuuuau

SEQ ID NO: 1301113 - RNA, 20 nt, Human
auuuuuuuucuuugaauaaa

SEQ ID NO: 1301114 - RNA, 21 nt, Human
auuuuuuuucuuugaauaaau

SEQ ID NO: 1301115 - RNA, 15 nt, Human
auuuuuuuucuuuua

SEQ ID NO: 1301116 - RNA, 23 nt, Human
auuuuuuuuuaaagaagaaaaaa

SEQ ID NO: 1301117 - RNA, 19 nt, Human
auuuuuuuuuaagcucuga

SEQ ID NO: 1301118 - RNA, 20 nt, Human
auuuuuuuuuaagcucugag

SEQ ID NO: 1301119 - RNA, 21 nt, Human
auuuuuuuuuaagcucugagc

SEQ ID NO: 1301120 - RNA, 14 nt, Human
auuuuuuuuucaua

SEQ ID NO: 1301121 - RNA, 16 nt, Human
auuuuuuuuucauaca

SEQ ID NO: 1301122 - RNA, 19 nt, Human
caaaagcccauucauucca

SEQ ID NO: 1301123 - RNA, 15 nt, Human
caaaagcccauucau

SEQ ID NO: 1301124 - RNA, 21 nt, Human
caaaagguauuuuaaucacca

SEQ ID NO: 1301125 - RNA, 19 nt, Human
caaacauccucuuccauau

SEQ ID NO: 1301126 - RNA, 21 nt, Human
caaacauauauauacuauuaa

SEQ ID NO: 1301127 - RNA, 23 nt, Human
caaaccagauacggacagagacc

SEQ ID NO: 1301128 - RNA, 14 nt, Human
caaaccaggacccu

SEQ ID NO: 1301129 - RNA, 17 nt, Human
caaaccaguaucgcuca

SEQ ID NO: 1301130 - RNA, 21 nt, Human
caaacaugacccuaaaucuug

SEQ ID NO: 1301131 - RNA, 15 nt, Human
auuuugaaaaacugc

SEQ ID NO: 1301132 - RNA, 16 nt, Human
auuuucugguaaaaag

SEQ ID NO: 1301133 - RNA, 17 nt, Human
auuuucugguaaaaaga

SEQ ID NO: 1301134 - RNA, 22 nt, Human
auuuucuggauuccccaucuca

SEQ ID NO: 1301135 - RNA, 13 nt, Human
auuuugaaaaacu

SEQ ID NO: 1301136 - RNA, 18 nt, Human
auuuucuggaauacauga

SEQ ID NO: 1301137 - RNA, 19 nt, Human
auuuucuggaauacaugaa

SEQ ID NO: 1301138 - RNA, 22 nt, Human
auuuucuggaauacaugaaaua

SEQ ID NO: 1301139 - RNA, 18 nt, Human
auuuucuggccaguguuu

SEQ ID NO: 1301140 - RNA, 19 nt, Human
auuuucugcaucuccacuu

SEQ ID NO: 1301141 - RNA, 15 nt, Human
auuuucugcuacuuu

SEQ ID NO: 1301142 - RNA, 16 nt, Human
auuuucugcaucucca

SEQ ID NO: 1301143 - RNA, 15 nt, Human
auuuucugcaucucc

SEQ ID NO: 1301144 - RNA, 14 nt, Human
auuuucucccugga

SEQ ID NO: 1301145 - RNA, 18 nt, Human
auuuucucccuggauuuu

SEQ ID NO: 1301146 - RNA, 22 nt, Human
auuuucucccuggauuuuuacc

SEQ ID NO: 1301147 - RNA, 23 nt, Human
auuuucucccuggauuuuuacca

SEQ ID NO: 1301148 - RNA, 16 nt, Human
auuuucucucagguga

SEQ ID NO: 1301149 - RNA, 17 nt, Human
auuuucucucaggugaa

SEQ ID NO: 1301150 - RNA, 19 nt, Human
auuuucuauaauuuaaaua

SEQ ID NO: 1301151 - RNA, 23 nt, Human
auuuuaguuuuucauuaaauaaa

SEQ ID NO: 1301152 - RNA, 19 nt, Human
auuuuaguuuuucauuaaa

SEQ ID NO: 1301153 - RNA, 20 nt, Human
auuuuaguuuuucauuaaau

SEQ ID NO: 1301154 - RNA, 18 nt, Human
auuuucuauaauuuaaau

SEQ ID NO: 1301155 - RNA, 17 nt, Human
auuuucuauaauuuaaa

SEQ ID NO: 1301156 - RNA, 19 nt, Human
auuuguucuauagcuuuuc

SEQ ID NO: 1301157 - RNA, 13 nt, Human
auuuguucauauu

SEQ ID NO: 1301158 - RNA, 16 nt, Human
auuuguuauuuugcaa

SEQ ID NO: 1301159 - RNA, 13 nt, Human
auuuguuaaauug

SEQ ID NO: 1301160 - RNA, 18 nt, Human
auuuguuaauaguuccug

SEQ ID NO: 1301161 - RNA, 23 nt, Human
auuuguuaauuuagaaaacuuua

SEQ ID NO: 1301162 - RNA, 19 nt, Human
auuuguuaauuuagaaaac

SEQ ID NO: 1301163 - RNA, 17 nt, Human
auuuguuauuuugcaac

SEQ ID NO: 1301164 - RNA, 14 nt, Human
auuuguucccaaga

SEQ ID NO: 1301165 - RNA, 17 nt, Human
auuuguucccaagagca

SEQ ID NO: 1301166 - RNA, 13 nt, Human
auuuguucuugua

SEQ ID NO: 1301167 - RNA, 17 nt, Human
auuuguucuuguauuua

SEQ ID NO: 1301168 - RNA, 16 nt, Human
auuuguucuuguauuu

SEQ ID NO: 1301169 - RNA, 14 nt, Human
auuuguguugaaga

SEQ ID NO: 1301170 - RNA, 15 nt, Human
auuuguguugaagag

SEQ ID NO: 1301171 - RNA, 21 nt, Human
auuugcagcugagagaaaaua

SEQ ID NO: 1301172 - RNA, 18 nt, Human
auuuguguugaagagguu

SEQ ID NO: 1301173 - RNA, 22 nt, Human
auuuguguugaagagguuuuaa

SEQ ID NO: 1301174 - RNA, 13 nt, Human
auuuguguuuuaa

SEQ ID NO: 1301175 - RNA, 20 nt, Human
auuuguguuuuaauuuaaac

SEQ ID NO: 1301176 - RNA, 21 nt, Human
auuuguguuuuaauuuaaaca

SEQ ID NO: 1301177 - RNA, 20 nt, Human
auuuugaaagucuguccuug

SEQ ID NO: 1301178 - RNA, 15 nt, Human
auuuugaaagucugu

SEQ ID NO: 1301179 - RNA, 19 nt, Human
auuuugaaagucuguccuu

SEQ ID NO: 1301180 - RNA, 20 nt, Human
auuuugaaaucaugaagaua

SEQ ID NO: 1301181 - RNA, 16 nt, Human
auugagguaaguuuuu

SEQ ID NO: 1301182 - RNA, 14 nt, Human
auugagguaaguuu

SEQ ID NO: 1301183 - RNA, 21 nt, Human
auugaggcuugguuccuuccc

SEQ ID NO: 1301184 - RNA, 17 nt, Human
auugauaagaucuuuua

SEQ ID NO: 1301185 - RNA, 17 nt, Human
auuuaacuuuuaguaaa

SEQ ID NO: 1301186 - RNA, 23 nt, Human
auuuaacuuuuaguaaagucaag

SEQ ID NO: 1301187 - RNA, 15 nt, Human
auuuaagacacugaa

SEQ ID NO: 1301188 - RNA, 16 nt, Human
auuuaagacacugaaa

SEQ ID NO: 1301189 - RNA, 22 nt, Human
auuuaauagguuuggacaaaau

SEQ ID NO: 1301190 - RNA, 17 nt, Human
auuuaauagcaaagaau

SEQ ID NO: 1301191 - RNA, 18 nt, Human
auuuaauagcaaagaauu

SEQ ID NO: 1301192 - RNA, 15 nt, Human
auuuaagauaauuau

SEQ ID NO: 1301193 - RNA, 21 nt, Human
auuuaacuuuuaguaaaguca

SEQ ID NO: 1301194 - RNA, 23 nt, Human
auuuaagggggaaaaagugucaa

SEQ ID NO: 1301195 - RNA, 20 nt, Human
auuuaauagcaaagaauuga

SEQ ID NO: 1301196 - RNA, 12 nt, Human
auuuaauucaga

SEQ ID NO: 1301197 - RNA, 23 nt, Human
auuuaauauaaaguuuuauauau

SEQ ID NO: 1301198 - RNA, 18 nt, Human
auuuaauuugaaauaugg

SEQ ID NO: 1301199 - RNA, 14 nt, Human
auuuauauauguau

SEQ ID NO: 1301200 - RNA, 15 nt, Human
auuuauauauguauu

SEQ ID NO: 1301201 - RNA, 14 nt, Human
auuuauauauugaa

SEQ ID NO: 1301202 - RNA, 15 nt, Human
auuucaccuguaaac

SEQ ID NO: 1301203 - RNA, 16 nt, Human
auuucaccuguaaacc

SEQ ID NO: 1301204 - RNA, 18 nt, Human
auuucaccuguaaaccug

SEQ ID NO: 1301205 - RNA, 19 nt, Human
auuucaccuguaaaccuga

SEQ ID NO: 1301206 - RNA, 14 nt, Human
auuucaccuguaaa

SEQ ID NO: 1301207 - RNA, 19 nt, Human
auuucaggaggaauacuga

SEQ ID NO: 1301208 - RNA, 20 nt, Human
auuucaggaggaauacugaa

SEQ ID NO: 1301209 - RNA, 22 nt, Human
auuucaggaggaauacugaaca

SEQ ID NO: 1301210 - RNA, 19 nt, Human
auuucaggcauuggauauu

SEQ ID NO: 1301211 - RNA, 18 nt, Human
auuuauccugaaauuuca

SEQ ID NO: 1301212 - RNA, 19 nt, Human
auuuauccugaaauuucag

SEQ ID NO: 1301213 - RNA, 20 nt, Human
auuuauccugaaauuucaga

SEQ ID NO: 1301214 - RNA, 21 nt, Human
auuuauccugaaauuucagau

SEQ ID NO: 1301215 - RNA, 17 nt, Human
auuuaucgcagaccuuu

SEQ ID NO: 1301216 - RNA, 19 nt, Human
auuuaucgcugggaaauga

SEQ ID NO: 1301217 - RNA, 21 nt, Human
auuuaucgcugggaaaugaga

SEQ ID NO: 1301218 - RNA, 17 nt, Human
auuuaucuaaauaugga

SEQ ID NO: 1301219 - RNA, 10 nt, Human
auuuaucuau

SEQ ID NO: 1301220 - RNA, 11 nt, Human
auuuaucuaua

SEQ ID NO: 1301221 - RNA, 15 nt, Human
auuuaucuauaauuu

SEQ ID NO: 1301222 - RNA, 15 nt, Human
auuuaucuaaauaug

SEQ ID NO: 1301223 - RNA, 19 nt, Human
auuucacaacagccugaca

SEQ ID NO: 1301224 - RNA, 13 nt, Human
auuucugcauaug

SEQ ID NO: 1301225 - RNA, 14 nt, Human
auuucuuaacuucu

SEQ ID NO: 1301226 - RNA, 14 nt, Human
auuucuuaaacacu

SEQ ID NO: 1301227 - RNA, 21 nt, Human
auuucugaggugcacugggag

SEQ ID NO: 1301228 - RNA, 20 nt, Human
auuaaauuuuuuuuacauuu

SEQ ID NO: 1301229 - RNA, 18 nt, Human
auuaacaaaauguauguc

SEQ ID NO: 1301230 - RNA, 19 nt, Human
auuaacaaaauguaugucu

SEQ ID NO: 1301231 - RNA, 19 nt, Human
auuaaauuuuuuuuacauu

SEQ ID NO: 1301232 - RNA, 18 nt, Human
auuaaauuuuuuuuacau

SEQ ID NO: 1301233 - RNA, 17 nt, Human
auuaaauuuuuuuuaca

SEQ ID NO: 1301234 - RNA, 20 nt, Human
auuaaauuuuuuaaaaagca

SEQ ID NO: 1301235 - RNA, 17 nt, Human
auuaaauuuuuuguuga

SEQ ID NO: 1301236 - RNA, 18 nt, Human
auuaaauuuuuuguugac

SEQ ID NO: 1301237 - RNA, 19 nt, Human
auuaaauuuuuuguugaca

SEQ ID NO: 1301238 - RNA, 21 nt, Human
auuaacaugaauauuuagugu

SEQ ID NO: 1301239 - RNA, 12 nt, Human
auuaacauaccu

SEQ ID NO: 1301240 - RNA, 23 nt, Human
auuaacauaccuaagaaguacau

SEQ ID NO: 1301241 - RNA, 24 nt, Human
auuaacauaccuaagaaguacauu

SEQ ID NO: 1301242 - RNA, 18 nt, Human
auuaacauaggugaaagu

SEQ ID NO: 1301243 - RNA, 19 nt, Human
auuaacaauuaggcagacu

SEQ ID NO: 1301244 - RNA, 15 nt, Human
auuaauggaaauguu

SEQ ID NO: 1301245 - RNA, 14 nt, Human
auuaaugcccagac

SEQ ID NO: 1301246 - RNA, 13 nt, Human
auuaaugcccaga

SEQ ID NO: 1301247 - RNA, 13 nt, Human
auuaaugcacuuu

SEQ ID NO: 1301248 - RNA, 14 nt, Human
auuaaugcacuuuc

SEQ ID NO: 1301249 - RNA, 15 nt, Human
auuaaugcacuuucu

SEQ ID NO: 1301250 - RNA, 16 nt, Human
auuaaugcacuuucua

SEQ ID NO: 1301251 - RNA, 19 nt, Human
auuaauugggccagcuuuu

SEQ ID NO: 1301252 - RNA, 22 nt, Human
auuaauugggccagcuuuucaa

SEQ ID NO: 1301253 - RNA, 13 nt, Human
auuaauuguaauc

SEQ ID NO: 1301254 - RNA, 20 nt, Human
auuaauuguaaucugaauaa

SEQ ID NO: 1301255 - RNA, 16 nt, Human
auuaauuuaugcagaa

SEQ ID NO: 1301256 - RNA, 14 nt, Human
auuaauuucuucac

SEQ ID NO: 1301257 - RNA, 17 nt, Human
auuaauuuaugcagaau

SEQ ID NO: 1301258 - RNA, 15 nt, Human
auuacaggcuccugc

SEQ ID NO: 1301259 - RNA, 16 nt, Human
auuacaggcuccugcc

SEQ ID NO: 1301260 - RNA, 14 nt, Human
auuacacuugguaa

SEQ ID NO: 1301261 - RNA, 13 nt, Human
auuacagaaauuu

SEQ ID NO: 1301262 - RNA, 19 nt, Human
auuacacuugguaauugua

SEQ ID NO: 1301263 - RNA, 17 nt, Human
auuacaggcuccugcca

SEQ ID NO: 1301264 - RNA, 19 nt, Human
auuacaggcuccugccacc

SEQ ID NO: 1301265 - RNA, 13 nt, Human
auuacagguguga

SEQ ID NO: 1301266 - RNA, 15 nt, Human
auuacaggcuugagc

SEQ ID NO: 1301267 - RNA, 18 nt, Human
auuaauuuuaguuuuuca

SEQ ID NO: 1301268 - RNA, 19 nt, Human
auuacaaguauuuuuaauu

SEQ ID NO: 1301269 - RNA, 14 nt, Human
auuacaaguauuuu

SEQ ID NO: 1301270 - RNA, 14 nt, Human
auuacacccaaaga

SEQ ID NO: 1301271 - RNA, 22 nt, Human
auugaggacacugauauggguc

SEQ ID NO: 1301272 - RNA, 21 nt, Human
auugagcuggaccucaccaag

SEQ ID NO: 1301273 - RNA, 14 nt, Human
auugagcuugcaug

SEQ ID NO: 1301274 - RNA, 17 nt, Human
auucguuaucuaauagg

SEQ ID NO: 1301275 - RNA, 13 nt, Human
auucguucugugg

SEQ ID NO: 1301276 - RNA, 21 nt, Human
auucgguauccccccaucuug

SEQ ID NO: 1301277 - RNA, 21 nt, Human
auucggugugcaccaggguug

SEQ ID NO: 1301278 - RNA, 22 nt, Human
auucguagauauuggacaaaga

SEQ ID NO: 1301279 - RNA, 12 nt, Human
auucgugaaaac

SEQ ID NO: 1301280 - RNA, 19 nt, Human
auucgugaaaacacauuug

SEQ ID NO: 1301281 - RNA, 16 nt, Human
auucguguguuuuuuu

SEQ ID NO: 1301282 - RNA, 14 nt, Human
auucauuguguuac

SEQ ID NO: 1301283 - RNA, 14 nt, Human
auucauuuaaguca

SEQ ID NO: 1301284 - RNA, 22 nt, Human
auuccuuuguuacuucucuaau

SEQ ID NO: 1301285 - RNA, 16 nt, Human
auucgaaugacacugu

SEQ ID NO: 1301286 - RNA, 17 nt, Human
auucgccacacaguauu

SEQ ID NO: 1301287 - RNA, 18 nt, Human
auucgccacacaguauuu

SEQ ID NO: 1301288 - RNA, 19 nt, Human
auucgccacacaguauuuu

SEQ ID NO: 1301289 - RNA, 21 nt, Human
auucgcuacuaugauuuaauu

SEQ ID NO: 1301290 - RNA, 22 nt, Human
auucucugugucuaagauucua

SEQ ID NO: 1301291 - RNA, 23 nt, Human
auucucugugucuaagauucuag

SEQ ID NO: 1301292 - RNA, 15 nt, Human
auucucuuguauaag

SEQ ID NO: 1301293 - RNA, 18 nt, Human
auucucuuguauaagauc

SEQ ID NO: 1301294 - RNA, 13 nt, Human
auucuuucccaac

SEQ ID NO: 1301295 - RNA, 20 nt, Human
auucuuuccauuugcauuug

SEQ ID NO: 1301296 - RNA, 22 nt, Human
auucuuuccauuugcauuuguu

SEQ ID NO: 1301297 - RNA, 15 nt, Human
auucuuuccauuugc

SEQ ID NO: 1301298 - RNA, 16 nt, Human
auucuuuccauuugca

SEQ ID NO: 1301299 - RNA, 17 nt, Human
auucuuuccauuugcau

SEQ ID NO: 1301300 - RNA, 19 nt, Human
auucuuuccauuugcauuu

SEQ ID NO: 1301301 - RNA, 13 nt, Human
auucuuucaauac

SEQ ID NO: 1301302 - RNA, 16 nt, Human
auucuuucaauacaga

SEQ ID NO: 1301303 - RNA, 18 nt, Human
auucuuucaauacagaua

SEQ ID NO: 1301304 - RNA, 19 nt, Human
auucuuucaauacagauau

SEQ ID NO: 1301305 - RNA, 20 nt, Human
auucuuucaauacagauaua

SEQ ID NO: 1301306 - RNA, 22 nt, Human
auucuuucaauacagauauauu

SEQ ID NO: 1301307 - RNA, 21 nt, Human
auucuuucaauacagauauau

SEQ ID NO: 1301308 - RNA, 18 nt, Human
auucauuccauucuggaa

SEQ ID NO: 1301309 - RNA, 19 nt, Human
auucauuccauucuggaag

SEQ ID NO: 1301310 - RNA, 17 nt, Human
auucauuccauucugga

SEQ ID NO: 1301311 - RNA, 12 nt, Human
auucauuccauu

SEQ ID NO: 1301312 - RNA, 15 nt, Human
auucauuagucaugu

SEQ ID NO: 1301313 - RNA, 16 nt, Human
auucauuagucauguu

SEQ ID NO: 1301314 - RNA, 16 nt, Human
auucauaugcauauuu

SEQ ID NO: 1301315 - RNA, 18 nt, Human
auucauaugcauauuuuu

SEQ ID NO: 1301316 - RNA, 15 nt, Human
auucauaugcauauu

SEQ ID NO: 1301317 - RNA, 14 nt, Human
auucauaugcauau

SEQ ID NO: 1301318 - RNA, 13 nt, Human
auucauaugcaua

SEQ ID NO: 1301319 - RNA, 20 nt, Human
auucauagucuuuggagaaa

SEQ ID NO: 1301320 - RNA, 19 nt, Human
auucauaguaacuucuuau

SEQ ID NO: 1301321 - RNA, 13 nt, Human
auucaauaaagcu

SEQ ID NO: 1301322 - RNA, 12 nt, Human
auucaauaaagc

SEQ ID NO: 1301323 - RNA, 20 nt, Human
auucaaguguaaaauauuuu

SEQ ID NO: 1301324 - RNA, 21 nt, Human
auucaaguguaaaauauuuug

SEQ ID NO: 1301325 - RNA, 20 nt, Human
auuaugugacauuuuacauu

SEQ ID NO: 1301326 - RNA, 22 nt, Human
auucaaggaauuucuuaacuuc

SEQ ID NO: 1301327 - RNA, 23 nt, Human
auuaugugccagauuuaugcaua

SEQ ID NO: 1301328 - RNA, 21 nt, Human
auuaugugccagauuuaugca

SEQ ID NO: 1301329 - RNA, 13 nt, Human
auuaugugccaga

SEQ ID NO: 1301330 - RNA, 19 nt, Human
auuaugugacauuuuacau

SEQ ID NO: 1301331 - RNA, 13 nt, Human
auuaugugacauu

SEQ ID NO: 1301332 - RNA, 12 nt, Human
auuauguaaauu

SEQ ID NO: 1301333 - RNA, 12 nt, Human
auuauguagcuc

SEQ ID NO: 1301334 - RNA, 14 nt, Human
auuauguagcucuu

SEQ ID NO: 1301335 - RNA, 15 nt, Human
auuauguagcucuuu

SEQ ID NO: 1301336 - RNA, 19 nt, Human
auuauguagcucuuuguca

SEQ ID NO: 1301337 - RNA, 16 nt, Human
auuauguagcucuuug

SEQ ID NO: 1301338 - RNA, 21 nt, Human
auuagagggaggagaaugagc

SEQ ID NO: 1301339 - RNA, 16 nt, Human
auuagagugucuuucc

SEQ ID NO: 1301340 - RNA, 17 nt, Human
auuagagugucuuucca

SEQ ID NO: 1301341 - RNA, 23 nt, Human
auuagagugucuuuccacggagc

SEQ ID NO: 1301342 - RNA, 18 nt, Human
auuagauaaauguccauu

SEQ ID NO: 1301343 - RNA, 15 nt, Human
auuuaccacuugugu

SEQ ID NO: 1301344 - RNA, 16 nt, Human
auuuacaucauuucuu

SEQ ID NO: 1301345 - RNA, 22 nt, Human
auuuaccacuuguguuuugcaa

SEQ ID NO: 1301346 - RNA, 19 nt, Human
auuuacauguuuuaaagaa

SEQ ID NO: 1301347 - RNA, 15 nt, Human
auuuacauuuaauag

SEQ ID NO: 1301348 - RNA, 19 nt, Human
auuuaaauguaaagacaaa

SEQ ID NO: 1301349 - RNA, 13 nt, Human
auuuaaaucuguu

SEQ ID NO: 1301350 - RNA, 15 nt, Human
auuuacaggaacuuc

SEQ ID NO: 1301351 - RNA, 16 nt, Human
auuuacaggaacuuca

SEQ ID NO: 1301352 - RNA, 16 nt, Human
auuuaaauagcuuuuu

SEQ ID NO: 1301353 - RNA, 23 nt, Human
auuuaaaauagcaaaagaagaag

SEQ ID NO: 1301354 - RNA, 21 nt, Human
auuuaaauacagucuuccauu

SEQ ID NO: 1301355 - RNA, 16 nt, Human
auuguaguccuguaau

SEQ ID NO: 1301356 - RNA, 17 nt, Human
auuguagcauccuggaa

SEQ ID NO: 1301357 - RNA, 20 nt, Human
auuguagcauccuggaauau

SEQ ID NO: 1301358 - RNA, 21 nt, Human
auuguacuaaagccaaacaua

SEQ ID NO: 1301359 - RNA, 20 nt, Human
auuguagcgucuuucuuuuu

SEQ ID NO: 1301360 - RNA, 13 nt, Human
auuguaguaaucu

SEQ ID NO: 1301361 - RNA, 14 nt, Human
auuguagugcuuug

SEQ ID NO: 1301362 - RNA, 23 nt, Human
auuguagugcuuugagagagaaa

SEQ ID NO: 1301363 - RNA, 19 nt, Human
auuguuuuaucugaauuuu

SEQ ID NO: 1301364 - RNA, 17 nt, Human
auuuaaaaaaaaaccug

SEQ ID NO: 1301365 - RNA, 14 nt, Human
auuuaaaagccugc

SEQ ID NO: 1301366 - RNA, 15 nt, Human
auuuaaaagccugcu

SEQ ID NO: 1301367 - RNA, 17 nt, Human
auuuaaaagccugcuca

SEQ ID NO: 1301368 - RNA, 15 nt, Human
auuuaaaagugucaa

SEQ ID NO: 1301369 - RNA, 16 nt, Human
auuuaaaauaauuaua

SEQ ID NO: 1301370 - RNA, 13 nt, Human
auuuaaaauagca

SEQ ID NO: 1301371 - RNA, 15 nt, Human
auuuaaaauagcaaa

SEQ ID NO: 1301372 - RNA, 18 nt, Human
auuuaaaauagcaaaaga

SEQ ID NO: 1301373 - RNA, 20 nt, Human
auuuaaaauagcaaaagaag

SEQ ID NO: 1301374 - RNA, 21 nt, Human
auuuaaaauagcaaaagaaga

SEQ ID NO: 1301375 - RNA, 22 nt, Human
auuuaaaauagcaaaagaagaa

SEQ ID NO: 1301376 - RNA, 15 nt, Human
auuuauaaacuuuuu

SEQ ID NO: 1301377 - RNA, 22 nt, Human
auuuauaaauauauuuaagaua

SEQ ID NO: 1301378 - RNA, 20 nt, Human
auuuauaacguguucaauau

SEQ ID NO: 1301379 - RNA, 15 nt, Human
auuuaugguuguuaa

SEQ ID NO: 1301380 - RNA, 23 nt, Human
auuuaugguuguuaaaaauguca

SEQ ID NO: 1301381 - RNA, 14 nt, Human
auuuauguauggug

SEQ ID NO: 1301382 - RNA, 12 nt, Human
auuuauguauug

SEQ ID NO: 1301383 - RNA, 14 nt, Human
auuuauguauugug

SEQ ID NO: 1301384 - RNA, 17 nt, Human
auuuauguauugugcaa

SEQ ID NO: 1301385 - RNA, 18 nt, Human
auuuauguauugugcaau

SEQ ID NO: 1301386 - RNA, 19 nt, Human
auuuauguauugugcaaug

SEQ ID NO: 1301387 - RNA, 15 nt, Human
auuuauguccaggug

SEQ ID NO: 1301388 - RNA, 22 nt, Human
auuuauguauugugcaaugugu

SEQ ID NO: 1301389 - RNA, 17 nt, Human
auuuaguguucauaaau

SEQ ID NO: 1301390 - RNA, 13 nt, Human
auuuagaaaacuu

SEQ ID NO: 1301391 - RNA, 14 nt, Human
auuuagaaaacuuu

SEQ ID NO: 1301392 - RNA, 17 nt, Human
auuuagaaaacuuuaaa

SEQ ID NO: 1301393 - RNA, 16 nt, Human
auuuaguuguaaacca

SEQ ID NO: 1301394 - RNA, 15 nt, Human
auuuaguuguuguag

SEQ ID NO: 1301395 - RNA, 20 nt, Human
auuuaguuguuguagagaaa

SEQ ID NO: 1301396 - RNA, 19 nt, Human
auuuaguuguuguagagaa

SEQ ID NO: 1301397 - RNA, 18 nt, Human
auuuaguuguuguagaga

SEQ ID NO: 1301398 - RNA, 16 nt, Human
auuuaguguucauaaa

SEQ ID NO: 1301399 - RNA, 21 nt, Human
auuuauugcaggauggugucu

SEQ ID NO: 1301400 - RNA, 19 nt, Human
auuuauuacuguaagaaaa

SEQ ID NO: 1301401 - RNA, 20 nt, Human
auuuauuacuguaagaaaau

SEQ ID NO: 1301402 - RNA, 14 nt, Human
auuuauugguuuug

SEQ ID NO: 1301403 - RNA, 15 nt, Human
auuuauugguuuugc

SEQ ID NO: 1301404 - RNA, 16 nt, Human
auuuauuguauucugg

SEQ ID NO: 1301405 - RNA, 12 nt, Human
auuuauuuugac

SEQ ID NO: 1301406 - RNA, 13 nt, Human
auuuauuuugaca

SEQ ID NO: 1301407 - RNA, 14 nt, Human
auuuauuuugacau

SEQ ID NO: 1301408 - RNA, 21 nt, Human
auuuauuuugacauaaaguug

SEQ ID NO: 1301409 - RNA, 17 nt, Human
auuuauuuuuucuuuuc

SEQ ID NO: 1301410 - RNA, 22 nt, Human
auuuauuuuuucuuuucuuuac

SEQ ID NO: 1301411 - RNA, 20 nt, Human
auuucauguacugcauuauu

SEQ ID NO: 1301412 - RNA, 21 nt, Human
auuucauguacugcauuauuu

SEQ ID NO: 1301413 - RNA, 16 nt, Human
auuucauguuuuugau

SEQ ID NO: 1301414 - RNA, 16 nt, Human
auuucauguacugcau

SEQ ID NO: 1301415 - RNA, 12 nt, Human
auuucauguacu

SEQ ID NO: 1301416 - RNA, 15 nt, Human
auuucaugauuucau

SEQ ID NO: 1301417 - RNA, 18 nt, Human
auuucaugcuaucucugu

SEQ ID NO: 1301418 - RNA, 14 nt, Human
auuucaugaaaauu

SEQ ID NO: 1301419 - RNA, 15 nt, Human
auuucaugauuagaa

SEQ ID NO: 1301420 - RNA, 19 nt, Human
auuuccucuguaaucuauu

SEQ ID NO: 1301421 - RNA, 23 nt, Human
auuuccuugaauguggcuugaga

SEQ ID NO: 1301422 - RNA, 20 nt, Human
auuuccuaugauguauacug

SEQ ID NO: 1301423 - RNA, 21 nt, Human
auuuccuaugauguauacugc

SEQ ID NO: 1301424 - RNA, 19 nt, Human
auuuccuauuuuuggaaga

SEQ ID NO: 1301425 - RNA, 16 nt, Human
auuuccuccacaaauu

SEQ ID NO: 1301426 - RNA, 20 nt, Human
auuuccuccgucaccucaga

SEQ ID NO: 1301427 - RNA, 19 nt, Human
auuuccuuuuuuguuauua

SEQ ID NO: 1301428 - RNA, 17 nt, Human
auuucggauuuuuucca

SEQ ID NO: 1301429 - RNA, 19 nt, Human
auuucggauuuuuuccaaa

SEQ ID NO: 1301430 - RNA, 20 nt, Human
auuucggauuuuuuccaaaa

SEQ ID NO: 1301431 - RNA, 21 nt, Human
auuucgucuguuuauaaacau

SEQ ID NO: 1301432 - RNA, 14 nt, Human
auuucuaaaaucuu

SEQ ID NO: 1301433 - RNA, 17 nt, Human
auuucuuaacuucuugc

SEQ ID NO: 1301434 - RNA, 19 nt, Human
auuucuuaacuucuugcuu

SEQ ID NO: 1301435 - RNA, 21 nt, Human
auuuccuaaauauauuuuaag

SEQ ID NO: 1301436 - RNA, 17 nt, Human
auuuccuaauacuguca

SEQ ID NO: 1301437 - RNA, 21 nt, Human
auuuccuaauacugucauccu

SEQ ID NO: 1301438 - RNA, 16 nt, Human
auuuccuaugauguau

SEQ ID NO: 1301439 - RNA, 15 nt, Human
auuuccuaugaugua

SEQ ID NO: 1301440 - RNA, 14 nt, Human
auuuccuaugaugu

SEQ ID NO: 1301441 - RNA, 18 nt, Human
auuuccuaucaccuauuu

SEQ ID NO: 1301442 - RNA, 19 nt, Human
auuuccuaauuuugagaaa

SEQ ID NO: 1301443 - RNA, 14 nt, Human
auuuccuaaauaua

SEQ ID NO: 1301444 - RNA, 12 nt, Human
auuugguuuuca

SEQ ID NO: 1301445 - RNA, 14 nt, Human
auuugguuuucaca

SEQ ID NO: 1301446 - RNA, 15 nt, Human
auuugguuuucacau

SEQ ID NO: 1301447 - RNA, 17 nt, Human
auuuguaauagauguuu

SEQ ID NO: 1301448 - RNA, 22 nt, Human
auuuguaauagauguuugauag

SEQ ID NO: 1301449 - RNA, 19 nt, Human
auuuguaaugucuugagcu

SEQ ID NO: 1301450 - RNA, 20 nt, Human
auuuguaaugucuugagcuc

SEQ ID NO: 1301451 - RNA, 23 nt, Human
auuuguaaugucuugagcucuau

SEQ ID NO: 1301452 - RNA, 13 nt, Human
auuuguaauuaaa

SEQ ID NO: 1301453 - RNA, 19 nt, Human
auuuguaauuaaaagcaaa

SEQ ID NO: 1301454 - RNA, 21 nt, Human
auuuguaauuaaaagcaaauc

SEQ ID NO: 1301455 - RNA, 22 nt, Human
auuuguaauuaaaagcaaauca

SEQ ID NO: 1301456 - RNA, 23 nt, Human
auuuguaauuaaaagcaaaucau

SEQ ID NO: 1301457 - RNA, 21 nt, Human
auuuguacauaguuauuuauu

SEQ ID NO: 1301458 - RNA, 20 nt, Human
auuuggaucucuucuuaaug

SEQ ID NO: 1301459 - RNA, 15 nt, Human
auuuggauccugugu

SEQ ID NO: 1301460 - RNA, 18 nt, Human
auuuggauuuaaaagccu

SEQ ID NO: 1301461 - RNA, 20 nt, Human
auuuggauuuaaaagccugc

SEQ ID NO: 1301462 - RNA, 23 nt, Human
auuuggauuuaaaagccugcuca

SEQ ID NO: 1301463 - RNA, 20 nt, Human
auuuggcaucccugggccuu

SEQ ID NO: 1301464 - RNA, 19 nt, Human
auuuggcaaugccaucauc

SEQ ID NO: 1301465 - RNA, 14 nt, Human
auuuggcaucccug

SEQ ID NO: 1301466 - RNA, 16 nt, Human
auuuggcaucccuggg

SEQ ID NO: 1301467 - RNA, 16 nt, Human
auuugguucauuaauu

SEQ ID NO: 1301468 - RNA, 21 nt, Human
auuugguucauuaauucuaua

SEQ ID NO: 1301469 - RNA, 17 nt, Human
auuuggcaucccugggc

SEQ ID NO: 1301470 - RNA, 18 nt, Human
auuugauaugugaacagu

SEQ ID NO: 1301471 - RNA, 19 nt, Human
auuugauaugugaacaguu

SEQ ID NO: 1301472 - RNA, 17 nt, Human
auuugauauuuuuuaaa

SEQ ID NO: 1301473 - RNA, 18 nt, Human
auuugagagaaauaugaa

SEQ ID NO: 1301474 - RNA, 20 nt, Human
auuugauguggugaaaagca

SEQ ID NO: 1301475 - RNA, 13 nt, Human
auuugauguaaua

SEQ ID NO: 1301476 - RNA, 17 nt, Human
auuugauguaauacuuc

SEQ ID NO: 1301477 - RNA, 18 nt, Human
auuugauguaauacuucu

SEQ ID NO: 1301478 - RNA, 19 nt, Human
auuuggagggaagcucuug

SEQ ID NO: 1301479 - RNA, 23 nt, Human
auuuggagggaagcucuuggagc

SEQ ID NO: 1301480 - RNA, 21 nt, Human
auuuggaguguuccccuucca

SEQ ID NO: 1301481 - RNA, 16 nt, Human
auuucuuugaaaaaaa

SEQ ID NO: 1301482 - RNA, 18 nt, Human
auuugagaagcugcucaa

SEQ ID NO: 1301483 - RNA, 20 nt, Human
auuugagaagcugcucaacu

SEQ ID NO: 1301484 - RNA, 17 nt, Human
auuugagagaaauauga

SEQ ID NO: 1301485 - RNA, 12 nt, Human
auuucuuugaaa

SEQ ID NO: 1301486 - RNA, 15 nt, Human
auuucuuugaaaaaa

SEQ ID NO: 1301487 - RNA, 22 nt, Human
auuucuuugaaaaaaaauaaau

SEQ ID NO: 1301488 - RNA, 14 nt, Human
auuggaaacaaguc

SEQ ID NO: 1301489 - RNA, 19 nt, Human
auugcgagagauguguguu

SEQ ID NO: 1301490 - RNA, 17 nt, Human
auugccuuuuuucugua

SEQ ID NO: 1301491 - RNA, 18 nt, Human
auugccuuuuuucuguau

SEQ ID NO: 1301492 - RNA, 23 nt, Human
auugccuuuuuucuguauaaaug

SEQ ID NO: 1301493 - RNA, 13 nt, Human
auugcgagagaug

SEQ ID NO: 1301494 - RNA, 14 nt, Human
auugcgagagaugu

SEQ ID NO: 1301495 - RNA, 15 nt, Human
auugcgagagaugug

SEQ ID NO: 1301496 - RNA, 16 nt, Human
auugcgagagaugugu

SEQ ID NO: 1301497 - RNA, 17 nt, Human
auugcgagagaugugug

SEQ ID NO: 1301498 - RNA, 18 nt, Human
auugcgagagaugugugu

SEQ ID NO: 1301499 - RNA, 16 nt, Human
auuggaaauuuagcau

SEQ ID NO: 1301500 - RNA, 14 nt, Human
auuggaacuggagg

SEQ ID NO: 1301501 - RNA, 18 nt, Human
auuggaacuggaggcagg

SEQ ID NO: 1301502 - RNA, 15 nt, Human
auuggaacuggaggc

SEQ ID NO: 1301503 - RNA, 21 nt, Human
auuggaagagcagcaccuccu

SEQ ID NO: 1301504 - RNA, 22 nt, Human
auuggaagagcagcaccuccuc

SEQ ID NO: 1301505 - RNA, 24 nt, Human
auuggaagagcagcaccuccucag

SEQ ID NO: 1301506 - RNA, 15 nt, Human
auuggacccuuccau

SEQ ID NO: 1301507 - RNA, 16 nt, Human
auugcauuuccugaca

SEQ ID NO: 1301508 - RNA, 11 nt, Human
auugcauugac

SEQ ID NO: 1301509 - RNA, 14 nt, Human
auugcauugacuuu

SEQ ID NO: 1301510 - RNA, 15 nt, Human
auugcauugacuuuc

SEQ ID NO: 1301511 - RNA, 16 nt, Human
auugcaucaaagcauc

SEQ ID NO: 1301512 - RNA, 15 nt, Human
auugcaucucccaga

SEQ ID NO: 1301513 - RNA, 22 nt, Human
auugcaucucccagauaaugug

SEQ ID NO: 1301514 - RNA, 23 nt, Human
auugcaucucccagauaauguga

SEQ ID NO: 1301515 - RNA, 23 nt, Human
auuggggaagagagccugcagga

SEQ ID NO: 1301516 - RNA, 15 nt, Human
auuguacuaaagcca

SEQ ID NO: 1301517 - RNA, 22 nt, Human
auuguacuaaagccaaacauau

SEQ ID NO: 1301518 - RNA, 23 nt, Human
auuggccuguagaguugcugaga

SEQ ID NO: 1301519 - RNA, 16 nt, Human
auuggggaagagagcc

SEQ ID NO: 1301520 - RNA, 22 nt, Human
auuggggaagagagccugcagg

SEQ ID NO: 1301521 - RNA, 12 nt, Human
auuggccuguag

SEQ ID NO: 1301522 - RNA, 20 nt, Human
auuggccuguagaguugcug

SEQ ID NO: 1301523 - RNA, 21 nt, Human
auuggccuguagaguugcuga

SEQ ID NO: 1301524 - RNA, 22 nt, Human
auuggccuguagaguugcugag

SEQ ID NO: 1301525 - RNA, 17 nt, Human
auuggcuauuuaaaacu

SEQ ID NO: 1301526 - RNA, 18 nt, Human
auuggcuauuuaaaacuu

SEQ ID NO: 1301527 - RNA, 16 nt, Human
auuggagcucguggaa

SEQ ID NO: 1301528 - RNA, 17 nt, Human
auuggagcucgugggac

SEQ ID NO: 1301529 - RNA, 19 nt, Human
auuggagcucgugggacag

SEQ ID NO: 1301530 - RNA, 15 nt, Human
auuggcauggaaauu

SEQ ID NO: 1301531 - RNA, 21 nt, Human
auuggcauggaaauuuaaagc

SEQ ID NO: 1301532 - RNA, 23 nt, Human
auuggcauggaaauuuaaagcag

SEQ ID NO: 1301533 - RNA, 22 nt, Human
auuggcauggaaauuuaaagca

SEQ ID NO: 1301534 - RNA, 15 nt, Human
auugcacauuguaaa

SEQ ID NO: 1301535 - RNA, 15 nt, Human
auugcacguggccuc

SEQ ID NO: 1301536 - RNA, 16 nt, Human
auugcacguggccucu

SEQ ID NO: 1301537 - RNA, 17 nt, Human
auugcacguggccucuu

SEQ ID NO: 1301538 - RNA, 19 nt, Human
auugcacguggccucuuga

SEQ ID NO: 1301539 - RNA, 23 nt, Human
auugcacguggccucuugagcag

SEQ ID NO: 1301540 - RNA, 19 nt, Human
auugacaaaauguuauuuc

SEQ ID NO: 1301541 - RNA, 22 nt, Human
auugacaaaauguuauuucccu

SEQ ID NO: 1301542 - RNA, 17 nt, Human
auugacaaaauguuauu

SEQ ID NO: 1301543 - RNA, 16 nt, Human
auugacaaaauguuau

SEQ ID NO: 1301544 - RNA, 14 nt, Human
auugauuugaagaa

SEQ ID NO: 1301545 - RNA, 16 nt, Human
auugauuugaagaaca

SEQ ID NO: 1301546 - RNA, 12 nt, Human
auugauuugcau

SEQ ID NO: 1301547 - RNA, 13 nt, Human
auugauuugcauu

SEQ ID NO: 1301548 - RNA, 15 nt, Human
auugauuugcauuga

SEQ ID NO: 1301549 - RNA, 16 nt, Human
auugauuugcauugaa

SEQ ID NO: 1301550 - RNA, 20 nt, Human
auugauuugcauugaacaca

SEQ ID NO: 1301551 - RNA, 12 nt, Human
auugauuuuugg

SEQ ID NO: 1301552 - RNA, 12 nt, Human
auugauuuugaa

SEQ ID NO: 1301553 - RNA, 13 nt, Human
auugauuuugaac

SEQ ID NO: 1301554 - RNA, 19 nt, Human
auugauuuuuauaaauacu

SEQ ID NO: 1301555 - RNA, 15 nt, Human
auugacaaaauguua

SEQ ID NO: 1301556 - RNA, 14 nt, Human
auugacaaaauguu

SEQ ID NO: 1301557 - RNA, 13 nt, Human
auugacaaaaugu

SEQ ID NO: 1301558 - RNA, 21 nt, Human
auugaauuaucuugguugaaa

SEQ ID NO: 1301559 - RNA, 17 nt, Human
auugaauucauuucacu

SEQ ID NO: 1301560 - RNA, 18 nt, Human
auugaauucauuucacug

SEQ ID NO: 1301561 - RNA, 20 nt, Human
auugaauucuugguugagga

SEQ ID NO: 1301562 - RNA, 22 nt, Human
auugaauucuugguugaggaaa

SEQ ID NO: 1301563 - RNA, 23 nt, Human
auugaauucuugguugaggaaac

SEQ ID NO: 1301564 - RNA, 21 nt, Human
auugaauggcuauguuuuuaa

SEQ ID NO: 1301565 - RNA, 22 nt, Human
auugaauggcuauguuuuuaau

SEQ ID NO: 1301566 - RNA, 23 nt, Human
auugaauggcuauguuuuuaaug

SEQ ID NO: 1301567 - RNA, 13 nt, Human
auugaauuaucuu

SEQ ID NO: 1301568 - RNA, 15 nt, Human
auugaaguaaacuuu

SEQ ID NO: 1301569 - RNA, 22 nt, Human
auugaaguaaacuuuuuguucu

SEQ ID NO: 1301570 - RNA, 19 nt, Human
auugaaguauuuugcugga

SEQ ID NO: 1301571 - RNA, 16 nt, Human
auugaaguaaacuuuu

SEQ ID NO: 1301572 - RNA, 20 nt, Human
auugaagucaauuacucuau

SEQ ID NO: 1301573 - RNA, 13 nt, Human
auugaauacuuug

SEQ ID NO: 1301574 - RNA, 14 nt, Human
auugaauacuuuga

SEQ ID NO: 1301575 - RNA, 15 nt, Human
auugaauacuuugaa

SEQ ID NO: 1301576 - RNA, 16 nt, Human
auugaauacuuugaau

SEQ ID NO: 1301577 - RNA, 20 nt, Human
auugaauacuuugaaugugu

SEQ ID NO: 1301578 - RNA, 18 nt, Human
auugaauacuuugaaugu

SEQ ID NO: 1301579 - RNA, 21 nt, Human
auuccuauacgcagcgugcuu

SEQ ID NO: 1301580 - RNA, 14 nt, Human
auugaacacaaacu

SEQ ID NO: 1301581 - RNA, 15 nt, Human
auugaacacaaacug

SEQ ID NO: 1301582 - RNA, 16 nt, Human
auugaacacaaacugu

SEQ ID NO: 1301583 - RNA, 17 nt, Human
auugaacacaaacugua

SEQ ID NO: 1301584 - RNA, 18 nt, Human
auugaacacaaacuguaa

SEQ ID NO: 1301585 - RNA, 19 nt, Human
auugaacacaaacuguaaa

SEQ ID NO: 1301586 - RNA, 20 nt, Human
auugaacacaaacuguaaau

SEQ ID NO: 1301587 - RNA, 15 nt, Human
auugaaggcuuaaac

SEQ ID NO: 1301588 - RNA, 19 nt, Human
auugaaggcuuaaacccau

SEQ ID NO: 1301589 - RNA, 15 nt, Human
auguguguuuuaaaa

SEQ ID NO: 1301590 - RNA, 17 nt, Human
auguguuucacaguuug

SEQ ID NO: 1301591 - RNA, 18 nt, Human
auguguuucacaguuuga

SEQ ID NO: 1301592 - RNA, 20 nt, Human
auguguuucacaguuugaaa

SEQ ID NO: 1301593 - RNA, 21 nt, Human
auguguuucacaguuugaaau

SEQ ID NO: 1301594 - RNA, 22 nt, Human
auguguuucacaguuugaaaua

SEQ ID NO: 1301595 - RNA, 23 nt, Human
auguguguccacgacugucucca

SEQ ID NO: 1301596 - RNA, 15 nt, Human
auguguguugauacu

SEQ ID NO: 1301597 - RNA, 16 nt, Human
auguguguugauacug

SEQ ID NO: 1301598 - RNA, 17 nt, Human
auguguguugauacugu

SEQ ID NO: 1301599 - RNA, 18 nt, Human
auguguguugauacuguu

SEQ ID NO: 1301600 - RNA, 19 nt, Human
auguguguugauacuguug

SEQ ID NO: 1301601 - RNA, 20 nt, Human
auguguguugauacuguugc

SEQ ID NO: 1301602 - RNA, 21 nt, Human
auguguguugauacuguugca

SEQ ID NO: 1301603 - RNA, 23 nt, Human
auguguguugauacuguugcacg

SEQ ID NO: 1301604 - RNA, 22 nt, Human
auguguguugauacuguugcac

SEQ ID NO: 1301605 - RNA, 23 nt, Human
auguguuucacaguuugaaauaa

SEQ ID NO: 1301606 - RNA, 12 nt, Human
auguguuugcuu

SEQ ID NO: 1301607 - RNA, 15 nt, Human
auguguuugcuuucu

SEQ ID NO: 1301608 - RNA, 16 nt, Human
auguguuugcuuucug

SEQ ID NO: 1301609 - RNA, 17 nt, Human
auguguuugcuuucuga

SEQ ID NO: 1301610 - RNA, 15 nt, Human
auguuaaaaaaauaa

SEQ ID NO: 1301611 - RNA, 23 nt, Human
auguuaaacuuauaacccacuuu

SEQ ID NO: 1301612 - RNA, 21 nt, Human
auguguguccacgacugucuc

SEQ ID NO: 1301613 - RNA, 22 nt, Human
auguguguccacgacugucucc

SEQ ID NO: 1301614 - RNA, 15 nt, Human
auguguguauaugga

SEQ ID NO: 1301615 - RNA, 16 nt, Human
auguguguauauggac

SEQ ID NO: 1301616 - RNA, 21 nt, Human
augugcuuaacagggaacgug

SEQ ID NO: 1301617 - RNA, 16 nt, Human
augugcuuaacaggga

SEQ ID NO: 1301618 - RNA, 14 nt, Human
augugcuuugagaa

SEQ ID NO: 1301619 - RNA, 15 nt, Human
auguggaacugcugc

SEQ ID NO: 1301620 - RNA, 16 nt, Human
auguggaacugcugcc

SEQ ID NO: 1301621 - RNA, 17 nt, Human
auguggaacugcugcca

SEQ ID NO: 1301622 - RNA, 18 nt, Human
auguggaacugcugccac

SEQ ID NO: 1301623 - RNA, 19 nt, Human
auguggaacugcugccacu

SEQ ID NO: 1301624 - RNA, 23 nt, Human
auguggaacugcugccacugagg

SEQ ID NO: 1301625 - RNA, 21 nt, Human
augugcuaguaauuggaaagg

SEQ ID NO: 1301626 - RNA, 19 nt, Human
augugcuauacugcauacu

SEQ ID NO: 1301627 - RNA, 18 nt, Human
augugcuauacugcauac

SEQ ID NO: 1301628 - RNA, 17 nt, Human
augugcauucuccagcc

SEQ ID NO: 1301629 - RNA, 20 nt, Human
augugccagggcaaugauga

SEQ ID NO: 1301630 - RNA, 21 nt, Human
augugccagggcaaugaugaa

SEQ ID NO: 1301631 - RNA, 13 nt, Human
augugcagcauuu

SEQ ID NO: 1301632 - RNA, 17 nt, Human
augugcagcauuucacu

SEQ ID NO: 1301633 - RNA, 12 nt, Human
uuuguuuugcac

SEQ ID NO: 1301634 - RNA, 13 nt, Human
uuuguuuuguguc

SEQ ID NO: 1301635 - RNA, 15 nt, Human
uuuguuuugugucuc

SEQ ID NO: 1301636 - RNA, 14 nt, Human
uuuguuuugugucu

SEQ ID NO: 1301637 - RNA, 15 nt, Human
uuuguuuuguuuaca

SEQ ID NO: 1301638 - RNA, 17 nt, Human
uuuguuuuguuuuuaca

SEQ ID NO: 1301639 - RNA, 16 nt, Human
uuuguuuuuaaacugu

SEQ ID NO: 1301640 - RNA, 19 nt, Human
uuuguuuuuaaacuguaca

SEQ ID NO: 1301641 - RNA, 20 nt, Human
uuuguuuuuaaacuguacag

SEQ ID NO: 1301642 - RNA, 21 nt, Human
uuuguuuuuaaacuguacagu

SEQ ID NO: 1301643 - RNA, 23 nt, Human
uuuguuuuuaaacuguacagugu

SEQ ID NO: 1301644 - RNA, 12 nt, Human
uuuguuuuucau

SEQ ID NO: 1301645 - RNA, 17 nt, Human
uuuguuuuuccuuccaa

SEQ ID NO: 1301646 - RNA, 24 nt, Human
auguuaugacuauguaaacuacuu

SEQ ID NO: 1301647 - RNA, 18 nt, Human
auguuaugacuauguaaa

SEQ ID NO: 1301648 - RNA, 20 nt, Human
auguuaucuucucaaguucu

SEQ ID NO: 1301649 - RNA, 21 nt, Human
auguuaucuucucaaguucua

SEQ ID NO: 1301650 - RNA, 22 nt, Human
auguuaucuucucaaguucuaa

SEQ ID NO: 1301651 - RNA, 18 nt, Human
auguuaagacuugacagu

SEQ ID NO: 1301652 - RNA, 14 nt, Human
auguuacauuauua

SEQ ID NO: 1301653 - RNA, 12 nt, Human
auguuauuuccc

SEQ ID NO: 1301654 - RNA, 15 nt, Human
auguuauuuguaaua

SEQ ID NO: 1301655 - RNA, 19 nt, Human
auguuauuuguaauagaug

SEQ ID NO: 1301656 - RNA, 17 nt, Human
auguuauuuuuuaauua

SEQ ID NO: 1301657 - RNA, 19 nt, Human
auguuauuuuuuaauuauu

SEQ ID NO: 1301658 - RNA, 13 nt, Human
auguuauuaucug

SEQ ID NO: 1301659 - RNA, 23 nt, Human
auguuaacugacaagcuccauuu

SEQ ID NO: 1301660 - RNA, 16 nt, Human
auguuaagacuugaca

SEQ ID NO: 1301661 - RNA, 20 nt, Human
auguuaagacuugacagugg

SEQ ID NO: 1301662 - RNA, 24 nt, Human
auguuaaauaggcggggcuugccu

SEQ ID NO: 1301663 - RNA, 20 nt, Human
auguucuuuuaaaugauuga

SEQ ID NO: 1301664 - RNA, 19 nt, Human
auguucuuuggaaaguaca

SEQ ID NO: 1301665 - RNA, 13 nt, Human
auguucuuuggaa

SEQ ID NO: 1301666 - RNA, 14 nt, Human
auguucuuuggaaa

SEQ ID NO: 1301667 - RNA, 16 nt, Human
auguucuuuggaaagu

SEQ ID NO: 1301668 - RNA, 20 nt, Human
auguuauuuuuuaauuauua

SEQ ID NO: 1301669 - RNA, 14 nt, Human
auguucaaagucaa

SEQ ID NO: 1301670 - RNA, 23 nt, Human
auguucaaagucaaauaacuccu

SEQ ID NO: 1301671 - RNA, 14 nt, Human
auguucacuuuuga

SEQ ID NO: 1301672 - RNA, 18 nt, Human
auguucacuuuugacaaa

SEQ ID NO: 1301673 - RNA, 20 nt, Human
auguucacuuuugacaaagg

SEQ ID NO: 1301674 - RNA, 15 nt, Human
auguugaagccuuug

SEQ ID NO: 1301675 - RNA, 22 nt, Human
auguugaaauaugauguuaaaa

SEQ ID NO: 1301676 - RNA, 20 nt, Human
auguugcugaaaaaugggca

SEQ ID NO: 1301677 - RNA, 15 nt, Human
auguugcuggacugu

SEQ ID NO: 1301678 - RNA, 19 nt, Human
auguugcuggacugucaua

SEQ ID NO: 1301679 - RNA, 17 nt, Human
auguuggacaccuuuag

SEQ ID NO: 1301680 - RNA, 19 nt, Human
auguuggacaccuuuaggu

SEQ ID NO: 1301681 - RNA, 22 nt, Human
auguuggacaccuuuagguucu

SEQ ID NO: 1301682 - RNA, 23 nt, Human
auguuggacaccuuuagguucuu

SEQ ID NO: 1301683 - RNA, 16 nt, Human
uuuucuauaauuuaaa

SEQ ID NO: 1301684 - RNA, 22 nt, Human
uuuucuaguguaucaaaaugcu

SEQ ID NO: 1301685 - RNA, 17 nt, Human
uuuucuaguguaucaaa

SEQ ID NO: 1301686 - RNA, 13 nt, Human
uuuucuaguguau

SEQ ID NO: 1301687 - RNA, 12 nt, Human
uuuucuagugua

SEQ ID NO: 1301688 - RNA, 20 nt, Human
uuuuccagcuggaugagaau

SEQ ID NO: 1301689 - RNA, 21 nt, Human
uuuuccaggacuguuucaaac

SEQ ID NO: 1301690 - RNA, 17 nt, Human
uuuucucugauacagaa

SEQ ID NO: 1301691 - RNA, 21 nt, Human
uuuucucucaacaccaugauu

SEQ ID NO: 1301692 - RNA, 17 nt, Human
uuuucucugaacacauu

SEQ ID NO: 1301693 - RNA, 20 nt, Human
uuuucuaguguaucaaaaug

SEQ ID NO: 1301694 - RNA, 20 nt, Human
uuuucucuaggaaauauacu

SEQ ID NO: 1301695 - RNA, 10 nt, Human
uuuucucuca

SEQ ID NO: 1301696 - RNA, 15 nt, Human
uuuucucucaacacc

SEQ ID NO: 1301697 - RNA, 14 nt, Human
uuuucucugguaau

SEQ ID NO: 1301698 - RNA, 16 nt, Human
uuuucucugguaauau

SEQ ID NO: 1301699 - RNA, 21 nt, Human
uuuucucugguaauauugacu

SEQ ID NO: 1301700 - RNA, 20 nt, Human
uuuucaggcuagauguaugu

SEQ ID NO: 1301701 - RNA, 19 nt, Human
uuuucaguauuauauguac

SEQ ID NO: 1301702 - RNA, 19 nt, Human
uuuuccaaagagugauagu

SEQ ID NO: 1301703 - RNA, 11 nt, Human
uuuuccaaaug

SEQ ID NO: 1301704 - RNA, 22 nt, Human
uuuuccaaauguaauaaacuuu

SEQ ID NO: 1301705 - RNA, 14 nt, Human
uuuuccaacuacua

SEQ ID NO: 1301706 - RNA, 18 nt, Human
uuuuccaacuacuaauag

SEQ ID NO: 1301707 - RNA, 21 nt, Human
uuuuccaacuuggcugcagga

SEQ ID NO: 1301708 - RNA, 19 nt, Human
uuuuaguugcaacuuugua

SEQ ID NO: 1301709 - RNA, 20 nt, Human
uuuuaguuccugugcacagc

SEQ ID NO: 1301710 - RNA, 18 nt, Human
uuuuaguuccugugcaca

SEQ ID NO: 1301711 - RNA, 21 nt, Human
uuuuagacagucucacuuugu

SEQ ID NO: 1301712 - RNA, 12 nt, Human
uuuuagagaaaa

SEQ ID NO: 1301713 - RNA, 19 nt, Human
uuuuagugaacuugaaaua

SEQ ID NO: 1301714 - RNA, 18 nt, Human
uuuuagugauuuuaauaa

SEQ ID NO: 1301715 - RNA, 12 nt, Human
uuuuaguugaau

SEQ ID NO: 1301716 - RNA, 12 nt, Human
uuuuauuaauaa

SEQ ID NO: 1301717 - RNA, 19 nt, Human
uuuuauuaauaaacauucu

SEQ ID NO: 1301718 - RNA, 22 nt, Human
uuuuauuaauaaacauucuauc

SEQ ID NO: 1301719 - RNA, 11 nt, Human
uuuuauuaaug

SEQ ID NO: 1301720 - RNA, 13 nt, Human
uuuuauuaaugca

SEQ ID NO: 1301721 - RNA, 16 nt, Human
uuuuauugacacagaa

SEQ ID NO: 1301722 - RNA, 18 nt, Human
uuuuauugacacagaaaa

SEQ ID NO: 1301723 - RNA, 15 nt, Human
auguuuuuuuuuaaa

SEQ ID NO: 1301724 - RNA, 14 nt, Human
auguuuuucuaaag

SEQ ID NO: 1301725 - RNA, 12 nt, Human
auguuuuuugcc

SEQ ID NO: 1301726 - RNA, 18 nt, Human
auguuuuuugccacagcu

SEQ ID NO: 1301727 - RNA, 19 nt, Human
auguuuuuugccacagcuu

SEQ ID NO: 1301728 - RNA, 21 nt, Human
auguuuuuugccacagcuuuu

SEQ ID NO: 1301729 - RNA, 14 nt, Human
auuaaaaaaaaaga

SEQ ID NO: 1301730 - RNA, 20 nt, Human
auuaaaaaaaaagaucuguu

SEQ ID NO: 1301731 - RNA, 22 nt, Human
auguuuuuugccacagcuuuug

SEQ ID NO: 1301732 - RNA, 13 nt, Human
auuaaaaaagaua

SEQ ID NO: 1301733 - RNA, 14 nt, Human
auuaaaaaagauaa

SEQ ID NO: 1301734 - RNA, 17 nt, Human
auuaaaaaagauaaaca

SEQ ID NO: 1301735 - RNA, 15 nt, Human
auuaaaaaagauaaa

SEQ ID NO: 1301736 - RNA, 22 nt, Human
auguuuacacucuuuguaagag

SEQ ID NO: 1301737 - RNA, 16 nt, Human
auguuuuucuaaagga

SEQ ID NO: 1301738 - RNA, 15 nt, Human
auguuuuuaauaaaa

SEQ ID NO: 1301739 - RNA, 16 nt, Human
auguuuuuaauaaaag

SEQ ID NO: 1301740 - RNA, 19 nt, Human
auguuuuuaauaaaagaaa

SEQ ID NO: 1301741 - RNA, 12 nt, Human
auguuuuuaaug

SEQ ID NO: 1301742 - RNA, 13 nt, Human
auguuuuuaaugu

SEQ ID NO: 1301743 - RNA, 14 nt, Human
auguuuuuaaugua

SEQ ID NO: 1301744 - RNA, 19 nt, Human
auguuuuuaauguauagua

SEQ ID NO: 1301745 - RNA, 16 nt, Human
auguuuuuaauguaua

SEQ ID NO: 1301746 - RNA, 21 nt, Human
uuuucuuaaccagaucauugu

SEQ ID NO: 1301747 - RNA, 18 nt, Human
uuuucuuaaagugccagu

SEQ ID NO: 1301748 - RNA, 13 nt, Human
uuuucuuaaagug

SEQ ID NO: 1301749 - RNA, 16 nt, Human
uuuucuuaaagugcca

SEQ ID NO: 1301750 - RNA, 19 nt, Human
uuuucugcacuauaugcaa

SEQ ID NO: 1301751 - RNA, 13 nt, Human
uuuucugcacuau

SEQ ID NO: 1301752 - RNA, 12 nt, Human
uuuucugcacua

SEQ ID NO: 1301753 - RNA, 17 nt, Human
uuuucuggaauacauga

SEQ ID NO: 1301754 - RNA, 21 nt, Human
uuuucuggaauacaugaaaua

SEQ ID NO: 1301755 - RNA, 18 nt, Human
uuuucuggaauguaauca

SEQ ID NO: 1301756 - RNA, 19 nt, Human
auguuuacacucuuuguaa

SEQ ID NO: 1301757 - RNA, 21 nt, Human
auguuuacacucuuuguaaga

SEQ ID NO: 1301758 - RNA, 16 nt, Human
auguuuaaucauauaa

SEQ ID NO: 1301759 - RNA, 17 nt, Human
auguuuaaucauauaaa

SEQ ID NO: 1301760 - RNA, 16 nt, Human
auguuuacacucuuug

SEQ ID NO: 1301761 - RNA, 18 nt, Human
auguuuacacucuuugua

SEQ ID NO: 1301762 - RNA, 15 nt, Human
auguuuaaucauaua

SEQ ID NO: 1301763 - RNA, 14 nt, Human
auguuuaaucauau

SEQ ID NO: 1301764 - RNA, 14 nt, Human
auguuuaaaccuuu

SEQ ID NO: 1301765 - RNA, 17 nt, Human
auguuggccaggcuggu

SEQ ID NO: 1301766 - RNA, 19 nt, Human
auguuggccaggcuggucu

SEQ ID NO: 1301767 - RNA, 21 nt, Human
auguuggccaggcuggucuaa

SEQ ID NO: 1301768 - RNA, 19 nt, Human
auguugggaaacuuggcuc

SEQ ID NO: 1301769 - RNA, 20 nt, Human
auguugggaaacuuggcucg

SEQ ID NO: 1301770 - RNA, 12 nt, Human
auguugggacug

SEQ ID NO: 1301771 - RNA, 14 nt, Human
auguuuaaaacauc

SEQ ID NO: 1301772 - RNA, 18 nt, Human
auguuggucauuuuaugu

SEQ ID NO: 1301773 - RNA, 15 nt, Human
uuuguaguagcguuu

SEQ ID NO: 1301774 - RNA, 16 nt, Human
uuuguaggguuucuag

SEQ ID NO: 1301775 - RNA, 19 nt, Human
uuuguacauaguuauuuau

SEQ ID NO: 1301776 - RNA, 15 nt, Human
uuuguaggguuucua

SEQ ID NO: 1301777 - RNA, 19 nt, Human
uuuguaguagcguuuuuua

SEQ ID NO: 1301778 - RNA, 15 nt, Human
uuuguagugauuuuu

SEQ ID NO: 1301779 - RNA, 17 nt, Human
uuuguaguguuggagaa

SEQ ID NO: 1301780 - RNA, 17 nt, Human
uuuguaguagcguuuuu

SEQ ID NO: 1301781 - RNA, 22 nt, Human
uuuguagugauuuuuaugccac

SEQ ID NO: 1301782 - RNA, 17 nt, Human
augugaugaauacugua

SEQ ID NO: 1301783 - RNA, 19 nt, Human
augugaugaauacuguauu

SEQ ID NO: 1301784 - RNA, 18 nt, Human
uuuguaagguuuuuguag

SEQ ID NO: 1301785 - RNA, 22 nt, Human
uuuguaaguuagguaacuguau

SEQ ID NO: 1301786 - RNA, 16 nt, Human
uuuguaaguugaagca

SEQ ID NO: 1301787 - RNA, 20 nt, Human
uuuguaaguugaagcaaauc

SEQ ID NO: 1301788 - RNA, 18 nt, Human
augugauccuuuuggagu

SEQ ID NO: 1301789 - RNA, 16 nt, Human
augugauauucuaaga

SEQ ID NO: 1301790 - RNA, 19 nt, Human
augugaucauguguggaag

SEQ ID NO: 1301791 - RNA, 20 nt, Human
augugaucauguguggaagu

SEQ ID NO: 1301792 - RNA, 16 nt, Human
augugauauauaagug

SEQ ID NO: 1301793 - RNA, 17 nt, Human
augugauauauaagugu

SEQ ID NO: 1301794 - RNA, 19 nt, Human
augugauauauaaguguac

SEQ ID NO: 1301795 - RNA, 21 nt, Human
augugauauauaaguguacau

SEQ ID NO: 1301796 - RNA, 22 nt, Human
augugauauauaaguguacaua

SEQ ID NO: 1301797 - RNA, 23 nt, Human
augugauauauaaguguacauau

SEQ ID NO: 1301798 - RNA, 14 nt, Human
augugauauucuaa

SEQ ID NO: 1301799 - RNA, 15 nt, Human
augugauauucuaag

SEQ ID NO: 1301800 - RNA, 18 nt, Human
augugauauucuaagacu

SEQ ID NO: 1301801 - RNA, 20 nt, Human
uuugugauaugcacaaugua

SEQ ID NO: 1301802 - RNA, 22 nt, Human
uuugugauaugcacaauguaga

SEQ ID NO: 1301803 - RNA, 18 nt, Human
uuugugauggagugcugu

SEQ ID NO: 1301804 - RNA, 21 nt, Human
uuugugauggagugcuguuuu

SEQ ID NO: 1301805 - RNA, 15 nt, Human
uuugugauucaaucu

SEQ ID NO: 1301806 - RNA, 20 nt, Human
uuugugauucaaucuguaaa

SEQ ID NO: 1301807 - RNA, 13 nt, Human
uuugugcauucug

SEQ ID NO: 1301808 - RNA, 19 nt, Human
uuugugauggagugcuguu

SEQ ID NO: 1301809 - RNA, 22 nt, Human
uuugugcugaauguugggacug

SEQ ID NO: 1301810 - RNA, 22 nt, Human
uuuguuucaaugagguguccaa

SEQ ID NO: 1301811 - RNA, 12 nt, Human
uuugugcccuau

SEQ ID NO: 1301812 - RNA, 17 nt, Human
uuuguuucaaugaggug

SEQ ID NO: 1301813 - RNA, 12 nt, Human
uuuguuuccucu

SEQ ID NO: 1301814 - RNA, 17 nt, Human
uuuguuuccucuguuca

SEQ ID NO: 1301815 - RNA, 14 nt, Human
uuuguuuccuuugu

SEQ ID NO: 1301816 - RNA, 15 nt, Human
uuuguuuccuuuguu

SEQ ID NO: 1301817 - RNA, 11 nt, Human
uuuguuuguuu

SEQ ID NO: 1301818 - RNA, 15 nt, Human
uuuguuuguuuaauu

SEQ ID NO: 1301819 - RNA, 23 nt, Human
augucgucaaagcugaaauggac

SEQ ID NO: 1301820 - RNA, 19 nt, Human
augucguggacacacacag

SEQ ID NO: 1301821 - RNA, 20 nt, Human
augucguggacacacacaga

SEQ ID NO: 1301822 - RNA, 16 nt, Human
augugacagguaaacu

SEQ ID NO: 1301823 - RNA, 14 nt, Human
augugacaguggcg

SEQ ID NO: 1301824 - RNA, 13 nt, Human
augugacauuuau

SEQ ID NO: 1301825 - RNA, 14 nt, Human
augugacauuuaua

SEQ ID NO: 1301826 - RNA, 19 nt, Human
augugacauuuauauauug

SEQ ID NO: 1301827 - RNA, 16 nt, Human
augugagagguuugac

SEQ ID NO: 1301828 - RNA, 17 nt, Human
augugagagguuugacu

SEQ ID NO: 1301829 - RNA, 17 nt, Human
augugauaaggaaauca

SEQ ID NO: 1301830 - RNA, 20 nt, Human
augugauaaggaaaucaacu

SEQ ID NO: 1301831 - RNA, 18 nt, Human
augugauaaggaaaucaa

SEQ ID NO: 1301832 - RNA, 13 nt, Human
augugauauauaa

SEQ ID NO: 1301833 - RNA, 15 nt, Human
augugauauauaagu

SEQ ID NO: 1301834 - RNA, 13 nt, Human
augucauacagag

SEQ ID NO: 1301835 - RNA, 14 nt, Human
auguaucaaacugu

SEQ ID NO: 1301836 - RNA, 17 nt, Human
auguaucaaauacauuu

SEQ ID NO: 1301837 - RNA, 19 nt, Human
auguauauuuuauaucaau

SEQ ID NO: 1301838 - RNA, 14 nt, Human
augucauacagaga

SEQ ID NO: 1301839 - RNA, 15 nt, Human
augucauacagagaa

SEQ ID NO: 1301840 - RNA, 16 nt, Human
augucauacagagaag

SEQ ID NO: 1301841 - RNA, 17 nt, Human
augucauacagagaagu

SEQ ID NO: 1301842 - RNA, 18 nt, Human
augucauacagagaaguc

SEQ ID NO: 1301843 - RNA, 20 nt, Human
augucauacagagaagucac

SEQ ID NO: 1301844 - RNA, 22 nt, Human
augucaucacucuagguuuuac

SEQ ID NO: 1301845 - RNA, 13 nt, Human
augucaugcugcc

SEQ ID NO: 1301846 - RNA, 14 nt, Human
augucaugcugccu

SEQ ID NO: 1301847 - RNA, 15 nt, Human
augucaugcugccuu

SEQ ID NO: 1301848 - RNA, 21 nt, Human
augucauguguacaaaaguuu

SEQ ID NO: 1301849 - RNA, 13 nt, Human
augucauuaaaug

SEQ ID NO: 1301850 - RNA, 16 nt, Human
augucaugcugccuua

SEQ ID NO: 1301851 - RNA, 16 nt, Human
augucauuucagaagu

SEQ ID NO: 1301852 - RNA, 17 nt, Human
augucauuucagaaguu

SEQ ID NO: 1301853 - RNA, 15 nt, Human
augucauuucauuuc

SEQ ID NO: 1301854 - RNA, 18 nt, Human
augucauuucauuuccua

SEQ ID NO: 1301855 - RNA, 12 nt, Human
auguccaaagag

SEQ ID NO: 1301856 - RNA, 15 nt, Human
auguccaaagaggcu

SEQ ID NO: 1301857 - RNA, 16 nt, Human
auguccaaagaggcug

SEQ ID NO: 1301858 - RNA, 18 nt, Human
auguccaaagaggcugcc

SEQ ID NO: 1301859 - RNA, 19 nt, Human
auguccaaagaggcugccc

SEQ ID NO: 1301860 - RNA, 20 nt, Human
auguccaaagaggcugcccc

SEQ ID NO: 1301861 - RNA, 21 nt, Human
auguccaaagaggcugccccu

SEQ ID NO: 1301862 - RNA, 22 nt, Human
auguccaaagaggcugccccuc

SEQ ID NO: 1301863 - RNA, 16 nt, Human
auguccaacccgucug

SEQ ID NO: 1301864 - RNA, 19 nt, Human
auguauacuauaguaccag

SEQ ID NO: 1301865 - RNA, 21 nt, Human
auguauacugccacuaaccuu

SEQ ID NO: 1301866 - RNA, 15 nt, Human
auguauacugccacu

SEQ ID NO: 1301867 - RNA, 14 nt, Human
uuuggguccaggag

SEQ ID NO: 1301868 - RNA, 18 nt, Human
uuuggggugccccucucc

SEQ ID NO: 1301869 - RNA, 13 nt, Human
uuuggguccagga

SEQ ID NO: 1301870 - RNA, 15 nt, Human
uuuggguccaggagg

SEQ ID NO: 1301871 - RNA, 12 nt, Human
auguauaguaaa

SEQ ID NO: 1301872 - RNA, 15 nt, Human
auguauaguaaauca

SEQ ID NO: 1301873 - RNA, 16 nt, Human
auguauaguaaaucac

SEQ ID NO: 1301874 - RNA, 16 nt, Human
uuugggcuucagcugc

SEQ ID NO: 1301875 - RNA, 15 nt, Human
uuugggcuugggccu

SEQ ID NO: 1301876 - RNA, 20 nt, Human
uuugggcuucagcugccagu

SEQ ID NO: 1301877 - RNA, 20 nt, Human
uuugggggguuuucuugccu

SEQ ID NO: 1301878 - RNA, 21 nt, Human
uuugggcagcaauuuaaaugu

SEQ ID NO: 1301879 - RNA, 23 nt, Human
uuugggaguuuuuaugagaaacu

SEQ ID NO: 1301880 - RNA, 14 nt, Human
uuugggcugcccug

SEQ ID NO: 1301881 - RNA, 22 nt, Human
uuuggcugaaauucuccuggag

SEQ ID NO: 1301882 - RNA, 13 nt, Human
uuuggcuuucagg

SEQ ID NO: 1301883 - RNA, 15 nt, Human
uuugggaguuuuuau

SEQ ID NO: 1301884 - RNA, 20 nt, Human
uuuggcugaaauucuccugg

SEQ ID NO: 1301885 - RNA, 21 nt, Human
uuuggcugaaauucuccugga

SEQ ID NO: 1301886 - RNA, 14 nt, Human
uuuggauuugacau

SEQ ID NO: 1301887 - RNA, 20 nt, Human
uuuggauuuaaaagccugcu

SEQ ID NO: 1301888 - RNA, 19 nt, Human
uuugcuaagcauuccaacu

SEQ ID NO: 1301889 - RNA, 20 nt, Human
uuugcuggagcucugcccau

SEQ ID NO: 1301890 - RNA, 22 nt, Human
uuuggauuggacaaaaugacuu

SEQ ID NO: 1301891 - RNA, 14 nt, Human
uuuggauuguauau

SEQ ID NO: 1301892 - RNA, 16 nt, Human
uuuggauuugacauug

SEQ ID NO: 1301893 - RNA, 15 nt, Human
uuugcuaaagacaug

SEQ ID NO: 1301894 - RNA, 19 nt, Human
uuugcgugggagugugugc

SEQ ID NO: 1301895 - RNA, 14 nt, Human
uuugcuaaagacau

SEQ ID NO: 1301896 - RNA, 22 nt, Human
uuugcuguaauguuaauauuga

SEQ ID NO: 1301897 - RNA, 15 nt, Human
uuugauugauuugaa

SEQ ID NO: 1301898 - RNA, 14 nt, Human
uuugauuuaauguu

SEQ ID NO: 1301899 - RNA, 14 nt, Human
uuugauuucauuaa

SEQ ID NO: 1301900 - RNA, 20 nt, Human
uuugcaaaaaauguuuuugg

SEQ ID NO: 1301901 - RNA, 18 nt, Human
uuugcaaaaaauguuuuu

SEQ ID NO: 1301902 - RNA, 19 nt, Human
uuugcaaagaaagaaaaaa

SEQ ID NO: 1301903 - RNA, 15 nt, Human
uuugcgcuccuggcc

SEQ ID NO: 1301904 - RNA, 21 nt, Human
uuugcgcuccuggcccagccu

SEQ ID NO: 1301905 - RNA, 20 nt, Human
uuugagacagagucuuccuc

SEQ ID NO: 1301906 - RNA, 21 nt, Human
uuugagagaaauaugaagaac

SEQ ID NO: 1301907 - RNA, 13 nt, Human
uuugaccuuuuau

SEQ ID NO: 1301908 - RNA, 13 nt, Human
uuugagaaaguca

SEQ ID NO: 1301909 - RNA, 16 nt, Human
uuugacuuuucuguaa

SEQ ID NO: 1301910 - RNA, 17 nt, Human
uuugacuuuucuguaau

SEQ ID NO: 1301911 - RNA, 21 nt, Human
uuugagaaacaacaauuucua

SEQ ID NO: 1301912 - RNA, 12 nt, Human
uuugacuuuucu

SEQ ID NO: 1301913 - RNA, 13 nt, Human
uuugacuuuucug

SEQ ID NO: 1301914 - RNA, 14 nt, Human
uuugacuuuucugu

SEQ ID NO: 1301915 - RNA, 15 nt, Human
uuugacuuuucugua

SEQ ID NO: 1301916 - RNA, 15 nt, Human
uuugaugaguuguga

SEQ ID NO: 1301917 - RNA, 12 nt, Human
uuugaugauaaa

SEQ ID NO: 1301918 - RNA, 18 nt, Human
uuugaugaggcccuccac

SEQ ID NO: 1301919 - RNA, 19 nt, Human
uuucccuuccuuccucucc

SEQ ID NO: 1301920 - RNA, 19 nt, Human
uuucccuucaguacccucu

SEQ ID NO: 1301921 - RNA, 20 nt, Human
uuucccuucaguacccucuc

SEQ ID NO: 1301922 - RNA, 16 nt, Human
uuucccuacccucuag

SEQ ID NO: 1301923 - RNA, 17 nt, Human
uuucccuacugaagccc

SEQ ID NO: 1301924 - RNA, 23 nt, Human
uuucccuacugaagcccuuguga

SEQ ID NO: 1301925 - RNA, 11 nt, Human
uuucccuccuu

SEQ ID NO: 1301926 - RNA, 13 nt, Human
uuucccuccuugg

SEQ ID NO: 1301927 - RNA, 14 nt, Human
uuucccuccuuggu

SEQ ID NO: 1301928 - RNA, 16 nt, Human
uuucccugccucucau

SEQ ID NO: 1301929 - RNA, 12 nt, Human
uuucccuggucc

SEQ ID NO: 1301930 - RNA, 16 nt, Human
uuucccuucaguaccc

SEQ ID NO: 1301931 - RNA, 18 nt, Human
uuugacaaagguaaauca

SEQ ID NO: 1301932 - RNA, 20 nt, Human
uuugacaacguuucagcgac

SEQ ID NO: 1301933 - RNA, 20 nt, Human
uuugacaccucuuuuuucgu

SEQ ID NO: 1301934 - RNA, 15 nt, Human
uuugacacugcucua

SEQ ID NO: 1301935 - RNA, 15 nt, Human
auucagccuggcuuc

SEQ ID NO: 1301936 - RNA, 23 nt, Human
auucaaaaauuaucuauagcuaa

SEQ ID NO: 1301937 - RNA, 16 nt, Human
auucaaaaauuaucua

SEQ ID NO: 1301938 - RNA, 11 nt, Human
auucaaaacau

SEQ ID NO: 1301939 - RNA, 13 nt, Human
auucaaaaguucc

SEQ ID NO: 1301940 - RNA, 14 nt, Human
auucaaaaguucca

SEQ ID NO: 1301941 - RNA, 16 nt, Human
auucaaaaguuccaag

SEQ ID NO: 1301942 - RNA, 15 nt, Human
auuauucagugucac

SEQ ID NO: 1301943 - RNA, 20 nt, Human
auuauuggaauauaauuguu

SEQ ID NO: 1301944 - RNA, 18 nt, Human
auuauuguugcauuaaaa

SEQ ID NO: 1301945 - RNA, 11 nt, Human
auuauuuaaac

SEQ ID NO: 1301946 - RNA, 12 nt, Human
auuauuuaaaca

SEQ ID NO: 1301947 - RNA, 22 nt, Human
auuauuuaaaccgcuaaaagaa

SEQ ID NO: 1301948 - RNA, 17 nt, Human
auucaaaaguuccaaga

SEQ ID NO: 1301949 - RNA, 13 nt, Human
auucaaagguucu

SEQ ID NO: 1301950 - RNA, 14 nt, Human
auucaaagguucua

SEQ ID NO: 1301951 - RNA, 15 nt, Human
auucaaagguucuag

SEQ ID NO: 1301952 - RNA, 16 nt, Human
auucaaagguucuagg

SEQ ID NO: 1301953 - RNA, 17 nt, Human
auucaaagguucuaggu

SEQ ID NO: 1301954 - RNA, 18 nt, Human
auucaaagguucuagguu

SEQ ID NO: 1301955 - RNA, 21 nt, Human
auucaaagguucuagguuuca

SEQ ID NO: 1301956 - RNA, 22 nt, Human
auucacccccuuuccuggacac

SEQ ID NO: 1301957 - RNA, 16 nt, Human
auucacccccuuuccu

SEQ ID NO: 1301958 - RNA, 19 nt, Human
auucaccugccccaacucu

SEQ ID NO: 1301959 - RNA, 21 nt, Human
auucacucugaguguuuuaug

SEQ ID NO: 1301960 - RNA, 19 nt, Human
auuauaucaauuuccucau

SEQ ID NO: 1301961 - RNA, 13 nt, Human
auuaguuuugauu

SEQ ID NO: 1301962 - RNA, 15 nt, Human
auuauaaaugacaac

SEQ ID NO: 1301963 - RNA, 22 nt, Human
auuauaaccuuaauuuauuauu

SEQ ID NO: 1301964 - RNA, 14 nt, Human
auuauaaccuuaau

SEQ ID NO: 1301965 - RNA, 17 nt, Human
auuauaacuggaaagaa

SEQ ID NO: 1301966 - RNA, 12 nt, Human
auuauaacugua

SEQ ID NO: 1301967 - RNA, 14 nt, Human
auuauucacuagua

SEQ ID NO: 1301968 - RNA, 13 nt, Human
auuauucaguguc

SEQ ID NO: 1301969 - RNA, 14 nt, Human
auuauucaguguca

SEQ ID NO: 1301970 - RNA, 18 nt, Human
auuauauggaaauauaua

SEQ ID NO: 1301971 - RNA, 20 nt, Human
auuauauggaaauauauauu

SEQ ID NO: 1301972 - RNA, 21 nt, Human
auuauauggaaauauauauua

SEQ ID NO: 1301973 - RNA, 22 nt, Human
auuauauguacccucugaaaua

SEQ ID NO: 1301974 - RNA, 16 nt, Human
auuauauggaaauaua

SEQ ID NO: 1301975 - RNA, 17 nt, Human
auuauauggaaauauau

SEQ ID NO: 1301976 - RNA, 20 nt, Human
auuauauggcuugaguuuaa

SEQ ID NO: 1301977 - RNA, 14 nt, Human
auucagccuggcuu

SEQ ID NO: 1301978 - RNA, 20 nt, Human
auucagaaaauguucuguuu

SEQ ID NO: 1301979 - RNA, 13 nt, Human
auucagaaaugag

SEQ ID NO: 1301980 - RNA, 20 nt, Human
auucacuucacugugcuguu

SEQ ID NO: 1301981 - RNA, 18 nt, Human
auucacuucacugugcug

SEQ ID NO: 1301982 - RNA, 18 nt, Human
auucagaaaauguucugu

SEQ ID NO: 1301983 - RNA, 19 nt, Human
auucagaaaauguucuguu

SEQ ID NO: 1301984 - RNA, 22 nt, Human
auucagaaaauguucuguuugc

SEQ ID NO: 1301985 - RNA, 23 nt, Human
auucacuucacugugcuguuguu

SEQ ID NO: 1301986 - RNA, 17 nt, Human
auucacuucacugugcu

SEQ ID NO: 1301987 - RNA, 16 nt, Human
auucacuucacugugc

SEQ ID NO: 1301988 - RNA, 15 nt, Human
auucacuucacugug

SEQ ID NO: 1301989 - RNA, 16 nt, Human
auuccaagacucuaga

SEQ ID NO: 1301990 - RNA, 17 nt, Human
auuccaagacucuagag

SEQ ID NO: 1301991 - RNA, 18 nt, Human
auuccaagacucuagagu

SEQ ID NO: 1301992 - RNA, 14 nt, Human
auucagugucacug

SEQ ID NO: 1301993 - RNA, 19 nt, Human
auucaguguuaaaugugau

SEQ ID NO: 1301994 - RNA, 18 nt, Human
auucaggacuugaaagaa

SEQ ID NO: 1301995 - RNA, 22 nt, Human
auucaggcuacugcuucaaucu

SEQ ID NO: 1301996 - RNA, 19 nt, Human
auucaggacuugaaagaaa

SEQ ID NO: 1301997 - RNA, 20 nt, Human
auucagggaaagugggacag

SEQ ID NO: 1301998 - RNA, 14 nt, Human
auucagggaaggag

SEQ ID NO: 1301999 - RNA, 20 nt, Human
auucagggaaggaggagccu

SEQ ID NO: 1302000 - RNA, 23 nt, Human
auucagggaaggaggagccuguc

SEQ ID NO: 1302001 - RNA, 15 nt, Human
auucagguaauacaa

SEQ ID NO: 1302002 - RNA, 16 nt, Human
auucagguaauacaaa

SEQ ID NO: 1302003 - RNA, 17 nt, Human
auucagguaauacaaac

SEQ ID NO: 1302004 - RNA, 17 nt, Human
auuccaagugauugaaa

SEQ ID NO: 1302005 - RNA, 12 nt, Human
auuccacagcug

SEQ ID NO: 1302006 - RNA, 14 nt, Human
auuccaagucucca

SEQ ID NO: 1302007 - RNA, 13 nt, Human
auuccacagcugc

SEQ ID NO: 1302008 - RNA, 18 nt, Human
auuccagagaguggcucc

SEQ ID NO: 1302009 - RNA, 18 nt, Human
auuccagaccugaagaau

SEQ ID NO: 1302010 - RNA, 23 nt, Human
auuccagacugcuuccaauuuuc

SEQ ID NO: 1302011 - RNA, 14 nt, Human
auuccagaaugcug

SEQ ID NO: 1302012 - RNA, 15 nt, Human
auuccagaaugcugu

SEQ ID NO: 1302013 - RNA, 19 nt, Human
auuccagaaugcuguacau

SEQ ID NO: 1302014 - RNA, 20 nt, Human
auuccagaaugcuguacauc

SEQ ID NO: 1302015 - RNA, 23 nt, Human
auuccagaaugcuguacaucuau

SEQ ID NO: 1302016 - RNA, 17 nt, Human
auuccagaccugaagaa

SEQ ID NO: 1302017 - RNA, 22 nt, Human
auucccacccaauucaaaacau

SEQ ID NO: 1302018 - RNA, 16 nt, Human
auuccccaucucaggc

SEQ ID NO: 1302019 - RNA, 18 nt, Human
auuccccaucucaggcca

SEQ ID NO: 1302020 - RNA, 14 nt, Human
auuccccauucuuc

SEQ ID NO: 1302021 - RNA, 15 nt, Human
auuccccauucuucc

SEQ ID NO: 1302022 - RNA, 15 nt, Human
auuacuguaagaaaa

SEQ ID NO: 1302023 - RNA, 16 nt, Human
auuacuguaagaaaau

SEQ ID NO: 1302024 - RNA, 16 nt, Human
auuaaucaguucauua

SEQ ID NO: 1302025 - RNA, 15 nt, Human
auuacugguccaaaa

SEQ ID NO: 1302026 - RNA, 24 nt, Human
auuaagucugugagauucauucau

SEQ ID NO: 1302027 - RNA, 13 nt, Human
auuaaguucuuua

SEQ ID NO: 1302028 - RNA, 17 nt, Human
auuaauauuccucaguu

SEQ ID NO: 1302029 - RNA, 13 nt, Human
auuacuuguaaau

SEQ ID NO: 1302030 - RNA, 15 nt, Human
auuacuuguaaauau

SEQ ID NO: 1302031 - RNA, 16 nt, Human
auuacuuguaaauaua

SEQ ID NO: 1302032 - RNA, 17 nt, Human
auuacuuguaaauauaa

SEQ ID NO: 1302033 - RNA, 18 nt, Human
auuacuuguaaauauaaa

SEQ ID NO: 1302034 - RNA, 20 nt, Human
auuacuuguaaauauaaaga

SEQ ID NO: 1302035 - RNA, 21 nt, Human
auuacuuguaaauauaaagac

SEQ ID NO: 1302036 - RNA, 20 nt, Human
auuagacuggacagcuugug

SEQ ID NO: 1302037 - RNA, 19 nt, Human
auuagacuggacagcuugu

SEQ ID NO: 1302038 - RNA, 14 nt, Human
auuagacugugauu

SEQ ID NO: 1302039 - RNA, 18 nt, Human
auuagacugugauucaga

SEQ ID NO: 1302040 - RNA, 18 nt, Human
auuagacacuuuggaaga

SEQ ID NO: 1302041 - RNA, 13 nt, Human
auuagacagaaca

SEQ ID NO: 1302042 - RNA, 14 nt, Human
auuagacagaacac

SEQ ID NO: 1302043 - RNA, 17 nt, Human
auuagacagaacaccua

SEQ ID NO: 1302044 - RNA, 15 nt, Human
auuagacagaacacc

SEQ ID NO: 1302045 - RNA, 15 nt, Human
auuagacuggaacuu

SEQ ID NO: 1302046 - RNA, 22 nt, Human
auuagacuggaacuugaacuga

SEQ ID NO: 1302047 - RNA, 14 nt, Human
auuagacuggacag

SEQ ID NO: 1302048 - RNA, 15 nt, Human
auuagacuggacagc

SEQ ID NO: 1302049 - RNA, 16 nt, Human
auuagacuggacagcu

SEQ ID NO: 1302050 - RNA, 15 nt, Human
uuuuuauauaugugu

SEQ ID NO: 1302051 - RNA, 11 nt, Human
uuuuuacauuu

SEQ ID NO: 1302052 - RNA, 12 nt, Human
uuuuuacauuuu

SEQ ID NO: 1302053 - RNA, 17 nt, Human
uuuuuacaauguaauua

SEQ ID NO: 1302054 - RNA, 17 nt, Human
uuuuguuuuucauucag

SEQ ID NO: 1302055 - RNA, 12 nt, Human
uuuuuaauuauu

SEQ ID NO: 1302056 - RNA, 14 nt, Human
uuuuuaauuaauug

SEQ ID NO: 1302057 - RNA, 23 nt, Human
uuuuuaauuuacaaaaauauaaa

SEQ ID NO: 1302058 - RNA, 15 nt, Human
uuuuuacaaagcccu

SEQ ID NO: 1302059 - RNA, 22 nt, Human
uuuuuacaaauguuaaaaugug

SEQ ID NO: 1302060 - RNA, 23 nt, Human
uuuuuacaaauguuaaaaugugu

SEQ ID NO: 1302061 - RNA, 19 nt, Human
uuuuguuguuucuuaaaua

SEQ ID NO: 1302062 - RNA, 15 nt, Human
uuuuguuuuggcuga

SEQ ID NO: 1302063 - RNA, 21 nt, Human
uuuuguuggcauagcucuggg

SEQ ID NO: 1302064 - RNA, 21 nt, Human
uuuuguuguuucuuaaauaag

SEQ ID NO: 1302065 - RNA, 18 nt, Human
uuuuguuaucagucaaua

SEQ ID NO: 1302066 - RNA, 23 nt, Human
uuuuguucgcauggucacacacu

SEQ ID NO: 1302067 - RNA, 12 nt, Human
uuuuguugacau

SEQ ID NO: 1302068 - RNA, 13 nt, Human
uuuuguugacauu

SEQ ID NO: 1302069 - RNA, 18 nt, Human
uuuuguugacauucugaa

SEQ ID NO: 1302070 - RNA, 20 nt, Human
uuuuguugacauucugaaug

SEQ ID NO: 1302071 - RNA, 19 nt, Human
uuuuguugacauucugaau

SEQ ID NO: 1302072 - RNA, 13 nt, Human
uuuuguuggcaua

SEQ ID NO: 1302073 - RNA, 14 nt, Human
uuuugugaagcaaa

SEQ ID NO: 1302074 - RNA, 14 nt, Human
uuuugugaauuagg

SEQ ID NO: 1302075 - RNA, 20 nt, Human
uuuugugaugcaaauaaaua

SEQ ID NO: 1302076 - RNA, 21 nt, Human
uuuugugggggacuguaaguu

SEQ ID NO: 1302077 - RNA, 21 nt, Human
uuuugugucucuuauggaugu

SEQ ID NO: 1302078 - RNA, 20 nt, Human
uuuuguguguauuugcuaau

SEQ ID NO: 1302079 - RNA, 17 nt, Human
uuuuguguguauuugcu

SEQ ID NO: 1302080 - RNA, 16 nt, Human
uuuuguguuuguugua

SEQ ID NO: 1302081 - RNA, 13 nt, Human
uuuuggaauuugc

SEQ ID NO: 1302082 - RNA, 15 nt, Human
uuuuggacuucuggg

SEQ ID NO: 1302083 - RNA, 14 nt, Human
auuaaacaugacuc

SEQ ID NO: 1302084 - RNA, 21 nt, Human
uuuugcuuucgaacugcuagu

SEQ ID NO: 1302085 - RNA, 21 nt, Human
uuuugcuuuuggcaaaacucu

SEQ ID NO: 1302086 - RNA, 14 nt, Human
auuaaaauccucaa

SEQ ID NO: 1302087 - RNA, 16 nt, Human
auuaaaauccucaauc

SEQ ID NO: 1302088 - RNA, 21 nt, Human
auuaaaaugcuuacauuugaa

SEQ ID NO: 1302089 - RNA, 14 nt, Human
auuaaaaugcuucc

SEQ ID NO: 1302090 - RNA, 11 nt, Human
auuaaaaugua

SEQ ID NO: 1302091 - RNA, 23 nt, Human
auuaaaauguaugcauguugucu

SEQ ID NO: 1302092 - RNA, 15 nt, Human
auuaaaauguaugca

SEQ ID NO: 1302093 - RNA, 17 nt, Human
auuaaaauguaugcaug

SEQ ID NO: 1302094 - RNA, 16 nt, Human
uuuuugagacagaguc

SEQ ID NO: 1302095 - RNA, 13 nt, Human
uuuuugaggcaaa

SEQ ID NO: 1302096 - RNA, 15 nt, Human
uuuuugauaaagccu

SEQ ID NO: 1302097 - RNA, 13 nt, Human
uuuuugauacuaa

SEQ ID NO: 1302098 - RNA, 15 nt, Human
uuuuugauacuaagc

SEQ ID NO: 1302099 - RNA, 12 nt, Human
uuuuugauauag

SEQ ID NO: 1302100 - RNA, 16 nt, Human
uuuuugaucaaaaacu

SEQ ID NO: 1302101 - RNA, 20 nt, Human
uuuuugcacauguuuccucu

SEQ ID NO: 1302102 - RNA, 9 nt, Human
uuuuugcag

SEQ ID NO: 1302103 - RNA, 14 nt, Human
uuuuugcaguaacu

SEQ ID NO: 1302104 - RNA, 16 nt, Human
uuuuugcaguaacugu

SEQ ID NO: 1302105 - RNA, 17 nt, Human
uuuuugcauuuaaaaca

SEQ ID NO: 1302106 - RNA, 16 nt, Human
uuuuugccacagcuuu

SEQ ID NO: 1302107 - RNA, 22 nt, Human
uuuuuggaagaggacuccuuaa

SEQ ID NO: 1302108 - RNA, 15 nt, Human
uuuuuggaagugaaa

SEQ ID NO: 1302109 - RNA, 19 nt, Human
uuuuuggaagugaaaacuu

SEQ ID NO: 1302110 - RNA, 13 nt, Human
uuuuucaaaagaa

SEQ ID NO: 1302111 - RNA, 15 nt, Human
uuuuuauuucuuccu

SEQ ID NO: 1302112 - RNA, 19 nt, Human
uuuuuauuuccuaugaugu

SEQ ID NO: 1302113 - RNA, 12 nt, Human
uuuuuauuucug

SEQ ID NO: 1302114 - RNA, 17 nt, Human
uuuuuauauuugaaaua

SEQ ID NO: 1302115 - RNA, 12 nt, Human
uuuuuauuucuu

SEQ ID NO: 1302116 - RNA, 11 nt, Human
uuuuuguagua

SEQ ID NO: 1302117 - RNA, 18 nt, Human
uuuuuguauaaaauagac

SEQ ID NO: 1302118 - RNA, 21 nt, Human
uuuuuguauaguuaacacacu

SEQ ID NO: 1302119 - RNA, 22 nt, Human
uuuuuggucgaggaguaacaau

SEQ ID NO: 1302120 - RNA, 23 nt, Human
uuuuugggcagcaauuuaaaugu

SEQ ID NO: 1302121 - RNA, 21 nt, Human
uuuuugggcagcaauuuaaau

SEQ ID NO: 1302122 - RNA, 20 nt, Human
uuuuugggcagcaauuuaaa

SEQ ID NO: 1302123 - RNA, 22 nt, Human
uuuuugggggguuuucuugccu

SEQ ID NO: 1302124 - RNA, 21 nt, Human
uuuuugggggguuuucuugcc

SEQ ID NO: 1302125 - RNA, 22 nt, Human
uuuuugggaaaagaaaagucaa

SEQ ID NO: 1302126 - RNA, 20 nt, Human
uuuuuggcguggcugacuua

SEQ ID NO: 1302127 - RNA, 11 nt, Human
uuuuuguauuu

SEQ ID NO: 1302128 - RNA, 18 nt, Human
uuuuuguauaguuaacac

SEQ ID NO: 1302129 - RNA, 20 nt, Human
auuaagggccgauuuaauua

SEQ ID NO: 1302130 - RNA, 17 nt, Human
auuaagguaguuauuca

SEQ ID NO: 1302131 - RNA, 20 nt, Human
uugucaauaaaauccauaca

SEQ ID NO: 1302132 - RNA, 18 nt, Human
augaguuccagaaaguaa

SEQ ID NO: 1302133 - RNA, 18 nt, Human
augaguagcuuauacaau

SEQ ID NO: 1302134 - RNA, 22 nt, Human
uugucaaugcaguugucucugu

SEQ ID NO: 1302135 - RNA, 14 nt, Human
uugucacuuuuucu

SEQ ID NO: 1302136 - RNA, 16 nt, Human
uugucacuuuuucuga

SEQ ID NO: 1302137 - RNA, 23 nt, Human
uugucagggaguguucccuaucc

SEQ ID NO: 1302138 - RNA, 17 nt, Human
uugucaggagugugugu

SEQ ID NO: 1302139 - RNA, 19 nt, Human
uugucauuuuuuuucuuug

SEQ ID NO: 1302140 - RNA, 16 nt, Human
uuguagcauccuggaa

SEQ ID NO: 1302141 - RNA, 18 nt, Human
uuguagcauccuggaaua

SEQ ID NO: 1302142 - RNA, 13 nt, Human
uuguaauuuuaca

SEQ ID NO: 1302143 - RNA, 15 nt, Human
uuguaauuuuacacg

SEQ ID NO: 1302144 - RNA, 23 nt, Human
uuguaauuuuuuuaauuuacaaa

SEQ ID NO: 1302145 - RNA, 12 nt, Human
uuguacaaaaua

SEQ ID NO: 1302146 - RNA, 14 nt, Human
uuguacaaaauaaa

SEQ ID NO: 1302147 - RNA, 12 nt, Human
uuguagccagcc

SEQ ID NO: 1302148 - RNA, 15 nt, Human
uuguagccagccggg

SEQ ID NO: 1302149 - RNA, 21 nt, Human
uuguagcgucuuucuuuuuug

SEQ ID NO: 1302150 - RNA, 12 nt, Human
uuguagcuccuc

SEQ ID NO: 1302151 - RNA, 15 nt, Human
uuguagcuccucccc

SEQ ID NO: 1302152 - RNA, 14 nt, Human
uuguagcuggggcu

SEQ ID NO: 1302153 - RNA, 18 nt, Human
uuguagcuggggcuuuga

SEQ ID NO: 1302154 - RNA, 19 nt, Human
uuguagcuggggcuuugau

SEQ ID NO: 1302155 - RNA, 18 nt, Human
augagguacugagaguga

SEQ ID NO: 1302156 - RNA, 17 nt, Human
augagguacugagagug

SEQ ID NO: 1302157 - RNA, 15 nt, Human
augagguacugagag

SEQ ID NO: 1302158 - RNA, 21 nt, Human
augagguacaaccuguucugc

SEQ ID NO: 1302159 - RNA, 17 nt, Human
augaguaacauuugcug

SEQ ID NO: 1302160 - RNA, 16 nt, Human
augaguaacauuugcu

SEQ ID NO: 1302161 - RNA, 13 nt, Human
uuguccauugucc

SEQ ID NO: 1302162 - RNA, 19 nt, Human
uuguccagcugagcgccag

SEQ ID NO: 1302163 - RNA, 23 nt, Human
uugugaaucaagggucaggccuu

SEQ ID NO: 1302164 - RNA, 20 nt, Human
uugugaaucaagggucaggc

SEQ ID NO: 1302165 - RNA, 21 nt, Human
uugugaaucaagggucaggcc

SEQ ID NO: 1302166 - RNA, 21 nt, Human
uugugacagggcggggguggc

SEQ ID NO: 1302167 - RNA, 18 nt, Human
uugugaauuaggcuguaa

SEQ ID NO: 1302168 - RNA, 19 nt, Human
uugugaauuaggcuguaac

SEQ ID NO: 1302169 - RNA, 23 nt, Human
uugugaauuaggcuguaacuacu

SEQ ID NO: 1302170 - RNA, 13 nt, Human
uugugacaaaaaa

SEQ ID NO: 1302171 - RNA, 14 nt, Human
uugugacaaaaaau

SEQ ID NO: 1302172 - RNA, 16 nt, Human
uugugacaaaaaauua

SEQ ID NO: 1302173 - RNA, 22 nt, Human
uugugacaaaaaauuaaagcau

SEQ ID NO: 1302174 - RNA, 18 nt, Human
uugugaugucauacagag

SEQ ID NO: 1302175 - RNA, 20 nt, Human
uugugaugucauacagagaa

SEQ ID NO: 1302176 - RNA, 18 nt, Human
uugugaugugaguugcac

SEQ ID NO: 1302177 - RNA, 18 nt, Human
uugugaugucccaacuug

SEQ ID NO: 1302178 - RNA, 22 nt, Human
uugugaugucccaacuuguaaa

SEQ ID NO: 1302179 - RNA, 13 nt, Human
uugugauaugcac

SEQ ID NO: 1302180 - RNA, 21 nt, Human
uugugauaugcacaauguaga

SEQ ID NO: 1302181 - RNA, 16 nt, Human
uugugauaugcacaau

SEQ ID NO: 1302182 - RNA, 23 nt, Human
uugugaucagaccauaauguuac

SEQ ID NO: 1302183 - RNA, 16 nt, Human
uugugauggagugcug

SEQ ID NO: 1302184 - RNA, 17 nt, Human
uugugauggagugcugu

SEQ ID NO: 1302185 - RNA, 21 nt, Human
uugugaugucauacagagaag

SEQ ID NO: 1302186 - RNA, 17 nt, Human
uugugaugugcacguaa

SEQ ID NO: 1302187 - RNA, 19 nt, Human
uugugauuagacagaacac

SEQ ID NO: 1302188 - RNA, 18 nt, Human
uugugauuagacagaaca

SEQ ID NO: 1302189 - RNA, 19 nt, Human
uugugauucaaucuguaaa

SEQ ID NO: 1302190 - RNA, 23 nt, Human
uugugauucaaucuguaaacugu

SEQ ID NO: 1302191 - RNA, 14 nt, Human
uugugauucugccu

SEQ ID NO: 1302192 - RNA, 15 nt, Human
uugugauuggccugu

SEQ ID NO: 1302193 - RNA, 16 nt, Human
uugugauuggccugua

SEQ ID NO: 1302194 - RNA, 13 nt, Human
uuguguagccuuu

SEQ ID NO: 1302195 - RNA, 14 nt, Human
uuguguagccuuuu

SEQ ID NO: 1302196 - RNA, 16 nt, Human
uuguguauagaacugg

SEQ ID NO: 1302197 - RNA, 15 nt, Human
uuguguagccuuuuu

SEQ ID NO: 1302198 - RNA, 19 nt, Human
uuguguauuuacgcuuuga

SEQ ID NO: 1302199 - RNA, 20 nt, Human
uuguguauuuacgcuuugau

SEQ ID NO: 1302200 - RNA, 22 nt, Human
uuguguauuuacgcuuugauuc

SEQ ID NO: 1302201 - RNA, 23 nt, Human
uuguguauuuacgcuuugauuca

SEQ ID NO: 1302202 - RNA, 19 nt, Human
uugugucauguuuaagaaa

SEQ ID NO: 1302203 - RNA, 9 nt, Human
uuguguccc

SEQ ID NO: 1302204 - RNA, 18 nt, Human
uugugucccaugaucccu

SEQ ID NO: 1302205 - RNA, 18 nt, Human
uugugucccauuccccca

SEQ ID NO: 1302206 - RNA, 22 nt, Human
uugugucccauucccccagugc

SEQ ID NO: 1302207 - RNA, 16 nt, Human
uugugucccuaaugug

SEQ ID NO: 1302208 - RNA, 15 nt, Human
uugugucucuuaugg

SEQ ID NO: 1302209 - RNA, 19 nt, Human
uugugucuggcaguuuaua

SEQ ID NO: 1302210 - RNA, 19 nt, Human
uuguucaccauuauaauga

SEQ ID NO: 1302211 - RNA, 15 nt, Human
uuguucagcaugcaa

SEQ ID NO: 1302212 - RNA, 20 nt, Human
uuuaaaaaagaaacauuugg

SEQ ID NO: 1302213 - RNA, 21 nt, Human
uuuaaaaaacuaaaaacuaga

SEQ ID NO: 1302214 - RNA, 15 nt, Human
uuuaaaaaacuaaaa

SEQ ID NO: 1302215 - RNA, 23 nt, Human
uuuaaaaaaccacauggcacaga

SEQ ID NO: 1302216 - RNA, 14 nt, Human
uuuaaaaaacuaaa

SEQ ID NO: 1302217 - RNA, 11 nt, Human
uuuaaaaauaa

SEQ ID NO: 1302218 - RNA, 18 nt, Human
uuuaaaaauaagucaaca

SEQ ID NO: 1302219 - RNA, 20 nt, Human
uuuaaaaauaagucaacagu

SEQ ID NO: 1302220 - RNA, 21 nt, Human
uuuaaaaauaagucaacagua

SEQ ID NO: 1302221 - RNA, 22 nt, Human
uuuaaaaauaagucaacaguaa

SEQ ID NO: 1302222 - RNA, 15 nt, Human
uuuaaaaaccuugua

SEQ ID NO: 1302223 - RNA, 14 nt, Human
uuuaaaaagccagu

SEQ ID NO: 1302224 - RNA, 12 nt, Human
uuuaaaaaguaa

SEQ ID NO: 1302225 - RNA, 21 nt, Human
uuuaaauauaugcuaagucuu

SEQ ID NO: 1302226 - RNA, 23 nt, Human
uuuaaaaauaagucaacaguaaa

SEQ ID NO: 1302227 - RNA, 20 nt, Human
uuuaaaucuguuuuucuaac

SEQ ID NO: 1302228 - RNA, 13 nt, Human
uuuaaauguauac

SEQ ID NO: 1302229 - RNA, 12 nt, Human
uuuaaauguaua

SEQ ID NO: 1302230 - RNA, 15 nt, Human
uuuaaauguaaagau

SEQ ID NO: 1302231 - RNA, 18 nt, Human
uuuaaauguaaagauauu

SEQ ID NO: 1302232 - RNA, 12 nt, Human
uuuaaaucuguu

SEQ ID NO: 1302233 - RNA, 21 nt, Human
uuuaaaugaacaagagaagca

SEQ ID NO: 1302234 - RNA, 14 nt, Human
uuuaaaugaagaaa

SEQ ID NO: 1302235 - RNA, 18 nt, Human
uuuaaaugcauaaaugca

SEQ ID NO: 1302236 - RNA, 14 nt, Human
uuuaagagacagcc

SEQ ID NO: 1302237 - RNA, 23 nt, Human
uuuaaaugaacaagagaagcauu

SEQ ID NO: 1302238 - RNA, 22 nt, Human
uuuaaggguuuguggaaaauga

SEQ ID NO: 1302239 - RNA, 17 nt, Human
uuuaaggguuuguggaa

SEQ ID NO: 1302240 - RNA, 20 nt, Human
uuuaaggguuuguggaaaau

SEQ ID NO: 1302241 - RNA, 18 nt, Human
uuuaaaaaaauuccaagu

SEQ ID NO: 1302242 - RNA, 17 nt, Human
augcagagguccacaac

SEQ ID NO: 1302243 - RNA, 18 nt, Human
augcagagguccacaaca

SEQ ID NO: 1302244 - RNA, 15 nt, Human
augcagaaagcaucc

SEQ ID NO: 1302245 - RNA, 15 nt, Human
augcagaacaaauga

SEQ ID NO: 1302246 - RNA, 16 nt, Human
augcacugauguugug

SEQ ID NO: 1302247 - RNA, 19 nt, Human
augcagaacaaaugaagac

SEQ ID NO: 1302248 - RNA, 18 nt, Human
augcagaacaaaugaaga

SEQ ID NO: 1302249 - RNA, 19 nt, Human
augcagaacacauuucaaa

SEQ ID NO: 1302250 - RNA, 12 nt, Human
augcagaauguu

SEQ ID NO: 1302251 - RNA, 21 nt, Human
augcagaauguugauuacagu

SEQ ID NO: 1302252 - RNA, 19 nt, Human
augcagaauguugauuaca

SEQ ID NO: 1302253 - RNA, 16 nt, Human
augcagaaagcauccc

SEQ ID NO: 1302254 - RNA, 22 nt, Human
augcacuguucccccugugcag

SEQ ID NO: 1302255 - RNA, 12 nt, Human
augcacugugaa

SEQ ID NO: 1302256 - RNA, 13 nt, Human
augcacugugaag

SEQ ID NO: 1302257 - RNA, 18 nt, Human
augcacugugaaggaccc

SEQ ID NO: 1302258 - RNA, 19 nt, Human
augcacugugaaggacccu

SEQ ID NO: 1302259 - RNA, 20 nt, Human
augcacugugaaggacccuu

SEQ ID NO: 1302260 - RNA, 21 nt, Human
augcacuguucccccugugca

SEQ ID NO: 1302261 - RNA, 16 nt, Human
uuguucagcaugcaau

SEQ ID NO: 1302262 - RNA, 15 nt, Human
uuguucauagcccag

SEQ ID NO: 1302263 - RNA, 16 nt, Human
uuguucuguuaacuga

SEQ ID NO: 1302264 - RNA, 18 nt, Human
uuguucuguuaacugaau

SEQ ID NO: 1302265 - RNA, 17 nt, Human
uuguucuguuaacugaa

SEQ ID NO: 1302266 - RNA, 14 nt, Human
uuguucuucuuaaa

SEQ ID NO: 1302267 - RNA, 17 nt, Human
augauuuaauuugaaau

SEQ ID NO: 1302268 - RNA, 13 nt, Human
augauuuacauuu

SEQ ID NO: 1302269 - RNA, 18 nt, Human
augauuuagagugcuguc

SEQ ID NO: 1302270 - RNA, 13 nt, Human
augauuucauuca

SEQ ID NO: 1302271 - RNA, 14 nt, Human
augauuucauuuca

SEQ ID NO: 1302272 - RNA, 13 nt, Human
augauuuccuuga

SEQ ID NO: 1302273 - RNA, 15 nt, Human
augauuuccuugaau

SEQ ID NO: 1302274 - RNA, 16 nt, Human
augauuuccuugaaug

SEQ ID NO: 1302275 - RNA, 17 nt, Human
augauuuccuugaaugu

SEQ ID NO: 1302276 - RNA, 18 nt, Human
augauuuccuugaaugug

SEQ ID NO: 1302277 - RNA, 19 nt, Human
augauuuccuugaaugugg

SEQ ID NO: 1302278 - RNA, 20 nt, Human
augauuuccuugaauguggc

SEQ ID NO: 1302279 - RNA, 19 nt, Human
augauuuuucuuuacaaaa

SEQ ID NO: 1302280 - RNA, 15 nt, Human
augauuuuucuuuac

SEQ ID NO: 1302281 - RNA, 17 nt, Human
augauuuuuuuuucaua

SEQ ID NO: 1302282 - RNA, 21 nt, Human
augauuuuuuuuucauacacu

SEQ ID NO: 1302283 - RNA, 17 nt, Human
augauuuuucuuuacaa

SEQ ID NO: 1302284 - RNA, 17 nt, Human
augcaaaaacucuuuga

SEQ ID NO: 1302285 - RNA, 23 nt, Human
augcaaaaacucuuugagagggu

SEQ ID NO: 1302286 - RNA, 13 nt, Human
augcaaaagcaag

SEQ ID NO: 1302287 - RNA, 15 nt, Human
augccccugaauuua

SEQ ID NO: 1302288 - RNA, 20 nt, Human
augccccugaauuuaaauag

SEQ ID NO: 1302289 - RNA, 21 nt, Human
augccccgucccccucuggcu

SEQ ID NO: 1302290 - RNA, 14 nt, Human
augccaucaucucc

SEQ ID NO: 1302291 - RNA, 15 nt, Human
augccaucaucuccu

SEQ ID NO: 1302292 - RNA, 16 nt, Human
augccaucaucuccug

SEQ ID NO: 1302293 - RNA, 17 nt, Human
augccaguaacaggcuc

SEQ ID NO: 1302294 - RNA, 22 nt, Human
augccaguaacgcgucuuccug

SEQ ID NO: 1302295 - RNA, 23 nt, Human
augccaguaacgcgucuuccuga

SEQ ID NO: 1302296 - RNA, 16 nt, Human
augccagcuacuuccu

SEQ ID NO: 1302297 - RNA, 16 nt, Human
augccaggaccagucc

SEQ ID NO: 1302298 - RNA, 18 nt, Human
augccacugccuucgcuu

SEQ ID NO: 1302299 - RNA, 17 nt, Human
augccacugccuucgcu

SEQ ID NO: 1302300 - RNA, 17 nt, Human
augccagccaagcucug

SEQ ID NO: 1302301 - RNA, 18 nt, Human
augccagccaagcucugc

SEQ ID NO: 1302302 - RNA, 21 nt, Human
augccagccaagcucugcagu

SEQ ID NO: 1302303 - RNA, 22 nt, Human
augccagccaagcucugcaguc

SEQ ID NO: 1302304 - RNA, 20 nt, Human
augccuuuucccaacuccag

SEQ ID NO: 1302305 - RNA, 22 nt, Human
augccuuuucccaacuccagaa

SEQ ID NO: 1302306 - RNA, 16 nt, Human
augccccuggcuggga

SEQ ID NO: 1302307 - RNA, 14 nt, Human
augccccuuucugg

SEQ ID NO: 1302308 - RNA, 17 nt, Human
augcccggcuaauuuuu

SEQ ID NO: 1302309 - RNA, 14 nt, Human
augccuccuuccuc

SEQ ID NO: 1302310 - RNA, 16 nt, Human
augccuccuuccucuu

SEQ ID NO: 1302311 - RNA, 19 nt, Human
augcgagugcucauuucag

SEQ ID NO: 1302312 - RNA, 13 nt, Human
augcgcaggcugg

SEQ ID NO: 1302313 - RNA, 21 nt, Human
augccuuuucccaaaauguug

SEQ ID NO: 1302314 - RNA, 23 nt, Human
augccuuuucccaaaauguugaa

SEQ ID NO: 1302315 - RNA, 14 nt, Human
augcgcaggcuggc

SEQ ID NO: 1302316 - RNA, 18 nt, Human
augcgcaggcuggcccug

SEQ ID NO: 1302317 - RNA, 20 nt, Human
augcgcaggcuggcccugcc

SEQ ID NO: 1302318 - RNA, 22 nt, Human
augcgcaggcuggcccugcccu

SEQ ID NO: 1302319 - RNA, 12 nt, Human
augcgugugugu

SEQ ID NO: 1302320 - RNA, 23 nt, Human
uuuagugacuaaaccauugugca

SEQ ID NO: 1302321 - RNA, 16 nt, Human
uuuagugaacuugaaa

SEQ ID NO: 1302322 - RNA, 12 nt, Human
uuuagugacuaa

SEQ ID NO: 1302323 - RNA, 24 nt, Human
uuuagugguagcauauagauuguc

SEQ ID NO: 1302324 - RNA, 21 nt, Human
uuuauauguaccguaggcuuu

SEQ ID NO: 1302325 - RNA, 17 nt, Human
uuuauauguacaugaga

SEQ ID NO: 1302326 - RNA, 13 nt, Human
uuuaucacuuaaa

SEQ ID NO: 1302327 - RNA, 21 nt, Human
uuuauaugcuucuguuuuaua

SEQ ID NO: 1302328 - RNA, 13 nt, Human
uuuauauguacau

SEQ ID NO: 1302329 - RNA, 14 nt, Human
uuuauauguacaug

SEQ ID NO: 1302330 - RNA, 17 nt, Human
uuuagggguagcauuug

SEQ ID NO: 1302331 - RNA, 16 nt, Human
uuuagggaacaauuug

SEQ ID NO: 1302332 - RNA, 23 nt, Human
uuuaggagcuaaggcucuaugag

SEQ ID NO: 1302333 - RNA, 17 nt, Human
uuuaggauaaaauaaug

SEQ ID NO: 1302334 - RNA, 18 nt, Human
uuuaggcuauuuguaaau

SEQ ID NO: 1302335 - RNA, 17 nt, Human
uuuagggaacaauuugg

SEQ ID NO: 1302336 - RNA, 13 nt, Human
uuuaggagcagug

SEQ ID NO: 1302337 - RNA, 12 nt, Human
uuuaccucagcc

SEQ ID NO: 1302338 - RNA, 13 nt, Human
uuuaccucagccu

SEQ ID NO: 1302339 - RNA, 13 nt, Human
uuuacccuucagg

SEQ ID NO: 1302340 - RNA, 15 nt, Human
uuuaccuaagauuac

SEQ ID NO: 1302341 - RNA, 16 nt, Human
augcgugugugugugu

SEQ ID NO: 1302342 - RNA, 16 nt, Human
augcguguuucugacu

SEQ ID NO: 1302343 - RNA, 17 nt, Human
augcguguuucugacuc

SEQ ID NO: 1302344 - RNA, 14 nt, Human
augcuaaaaccuga

SEQ ID NO: 1302345 - RNA, 13 nt, Human
augcuaccaccag

SEQ ID NO: 1302346 - RNA, 14 nt, Human
augcuaccaccagc

SEQ ID NO: 1302347 - RNA, 15 nt, Human
augcuaccaccagcu

SEQ ID NO: 1302348 - RNA, 16 nt, Human
augcuaccaccagcug

SEQ ID NO: 1302349 - RNA, 22 nt, Human
augcuaccaccagcugugucca

SEQ ID NO: 1302350 - RNA, 17 nt, Human
augcuaccaccagcugu

SEQ ID NO: 1302351 - RNA, 15 nt, Human
uuuaccucagccugg

SEQ ID NO: 1302352 - RNA, 17 nt, Human
uuuacuccguaacagau

SEQ ID NO: 1302353 - RNA, 12 nt, Human
uuuacucugccu

SEQ ID NO: 1302354 - RNA, 13 nt, Human
uuuacucugccua

SEQ ID NO: 1302355 - RNA, 15 nt, Human
uuuacugcucugaga

SEQ ID NO: 1302356 - RNA, 17 nt, Human
uuuacugcucugagaau

SEQ ID NO: 1302357 - RNA, 13 nt, Human
uuucacauuggaa

SEQ ID NO: 1302358 - RNA, 17 nt, Human
uuucacauuagaagaca

SEQ ID NO: 1302359 - RNA, 18 nt, Human
uuucacauuagaagacaa

SEQ ID NO: 1302360 - RNA, 19 nt, Human
uuucacauuagaagacaau

SEQ ID NO: 1302361 - RNA, 14 nt, Human
uuucacauuggaaa

SEQ ID NO: 1302362 - RNA, 19 nt, Human
uuucacauuggaaacaagu

SEQ ID NO: 1302363 - RNA, 18 nt, Human
uuucaccuggaagcauuu

SEQ ID NO: 1302364 - RNA, 22 nt, Human
uuucaccuggaagcauuuguuu

SEQ ID NO: 1302365 - RNA, 13 nt, Human
uuucaccuguaaa

SEQ ID NO: 1302366 - RNA, 14 nt, Human
uuucaccuguaaac

SEQ ID NO: 1302367 - RNA, 17 nt, Human
uuucaccuguaaaccug

SEQ ID NO: 1302368 - RNA, 18 nt, Human
uuucaccuguaaaccuga

SEQ ID NO: 1302369 - RNA, 21 nt, Human
uuucagaaagaaguggggaca

SEQ ID NO: 1302370 - RNA, 16 nt, Human
uuucacuacucagcau

SEQ ID NO: 1302371 - RNA, 20 nt, Human
uuucacgccugaggcaauua

SEQ ID NO: 1302372 - RNA, 19 nt, Human
uuucaaacauauauaacaa

SEQ ID NO: 1302373 - RNA, 13 nt, Human
auggaauugauuu

SEQ ID NO: 1302374 - RNA, 14 nt, Human
auggaauugauuug

SEQ ID NO: 1302375 - RNA, 15 nt, Human
auggaauugauuugc

SEQ ID NO: 1302376 - RNA, 16 nt, Human
auggaauugauuugca

SEQ ID NO: 1302377 - RNA, 17 nt, Human
auggaauugauuugcau

SEQ ID NO: 1302378 - RNA, 21 nt, Human
uuucaugcuguucaugaaaga

SEQ ID NO: 1302379 - RNA, 15 nt, Human
uuucauccuugucuu

SEQ ID NO: 1302380 - RNA, 24 nt, Human
uuucaucauucacuucacugugcu

SEQ ID NO: 1302381 - RNA, 13 nt, Human
uuucaucauuuuu

SEQ ID NO: 1302382 - RNA, 16 nt, Human
uuucauccauaacuga

SEQ ID NO: 1302383 - RNA, 17 nt, Human
uuucauccauaacugaa

SEQ ID NO: 1302384 - RNA, 19 nt, Human
uuucauccauaacugaaca

SEQ ID NO: 1302385 - RNA, 20 nt, Human
uuucauccauaacugaacau

SEQ ID NO: 1302386 - RNA, 19 nt, Human
uuucauccuaaagaacaaa

SEQ ID NO: 1302387 - RNA, 22 nt, Human
uuucauccuaaagaacaaagua

SEQ ID NO: 1302388 - RNA, 12 nt, Human
uuucccaauuca

SEQ ID NO: 1302389 - RNA, 15 nt, Human
uuucccaauucacau

SEQ ID NO: 1302390 - RNA, 11 nt, Human
uuucccuaagc

SEQ ID NO: 1302391 - RNA, 20 nt, Human
uuucccuaagccagcugccc

SEQ ID NO: 1302392 - RNA, 22 nt, Human
uuucccuaagccagcugccccc

SEQ ID NO: 1302393 - RNA, 22 nt, Human
uuuccauucgugaaaacacauu

SEQ ID NO: 1302394 - RNA, 21 nt, Human
uuuccauuugcauuuguuuau

SEQ ID NO: 1302395 - RNA, 14 nt, Human
uuuccauuugcauu

SEQ ID NO: 1302396 - RNA, 22 nt, Human
uuucccaaagcaucccucuuag

SEQ ID NO: 1302397 - RNA, 20 nt, Human
uuuccauggcaggaaggcuu

SEQ ID NO: 1302398 - RNA, 12 nt, Human
uuucauguacug

SEQ ID NO: 1302399 - RNA, 11 nt, Human
uuucauguacu

SEQ ID NO: 1302400 - RNA, 21 nt, Human
uuuccauggcaggaaggcuug

SEQ ID NO: 1302401 - RNA, 19 nt, Human
uuuccaugggaccacaacu

SEQ ID NO: 1302402 - RNA, 22 nt, Human
uuuccaugggaccacaacuauu

SEQ ID NO: 1302403 - RNA, 15 nt, Human
uuuccauuacaagua

SEQ ID NO: 1302404 - RNA, 18 nt, Human
uuuccauuacaaguauuu

SEQ ID NO: 1302405 - RNA, 18 nt, Human
uuucauguaaacugugca

SEQ ID NO: 1302406 - RNA, 19 nt, Human
uuucauguaaacugugcac

SEQ ID NO: 1302407 - RNA, 12 nt, Human
uuucauguacaa

SEQ ID NO: 1302408 - RNA, 18 nt, Human
uuucauguacaagaugaa

SEQ ID NO: 1302409 - RNA, 23 nt, Human
augcuguauuuuaaaagaaugau

SEQ ID NO: 1302410 - RNA, 16 nt, Human
augcuuaaaauaagca

SEQ ID NO: 1302411 - RNA, 17 nt, Human
augcuuaaaauaagcag

SEQ ID NO: 1302412 - RNA, 22 nt, Human
augcuguauuuuaaaagaauga

SEQ ID NO: 1302413 - RNA, 21 nt, Human
augcuucuguuuuauaauuuu

SEQ ID NO: 1302414 - RNA, 20 nt, Human
augcuuaaagaauucaaauu

SEQ ID NO: 1302415 - RNA, 21 nt, Human
augcuuaaagaauucaaauuu

SEQ ID NO: 1302416 - RNA, 19 nt, Human
augcuuaaagaauucaaau

SEQ ID NO: 1302417 - RNA, 18 nt, Human
augcuuaaagaauucaaa

SEQ ID NO: 1302418 - RNA, 14 nt, Human
auggaaggggcuga

SEQ ID NO: 1302419 - RNA, 23 nt, Human
uuuaucagacucggaaucuauuu

SEQ ID NO: 1302420 - RNA, 18 nt, Human
augcucaggugcuggggc

SEQ ID NO: 1302421 - RNA, 19 nt, Human
augcucaggugcuggggcc

SEQ ID NO: 1302422 - RNA, 13 nt, Human
augcucaucugcu

SEQ ID NO: 1302423 - RNA, 14 nt, Human
augcucaucugcug

SEQ ID NO: 1302424 - RNA, 16 nt, Human
augcucaucugcuggu

SEQ ID NO: 1302425 - RNA, 15 nt, Human
augcuccaagauucu

SEQ ID NO: 1302426 - RNA, 13 nt, Human
augcuccucuucc

SEQ ID NO: 1302427 - RNA, 14 nt, Human
augcuccucuuccc

SEQ ID NO: 1302428 - RNA, 16 nt, Human
augcuccucuucccca

SEQ ID NO: 1302429 - RNA, 18 nt, Human
augcuccucuuccccaga

SEQ ID NO: 1302430 - RNA, 19 nt, Human
augcuccucuuccccagac

SEQ ID NO: 1302431 - RNA, 20 nt, Human
augcuccucuuccccagacg

SEQ ID NO: 1302432 - RNA, 23 nt, Human
augcuccucuuccccagacgccu

SEQ ID NO: 1302433 - RNA, 12 nt, Human
uuguaaugaaaa

SEQ ID NO: 1302434 - RNA, 14 nt, Human
uuguaaucacuguu

SEQ ID NO: 1302435 - RNA, 15 nt, Human
uuguaaucugaauaa

SEQ ID NO: 1302436 - RNA, 17 nt, Human
uuguaaucugaauaaag

SEQ ID NO: 1302437 - RNA, 14 nt, Human
uuguaauucuaaau

SEQ ID NO: 1302438 - RNA, 17 nt, Human
uuguaauucuaaaugaa

SEQ ID NO: 1302439 - RNA, 23 nt, Human
uuguaauucuaaaugaauguuua

SEQ ID NO: 1302440 - RNA, 16 nt, Human
uuguaauuuaaaauaa

SEQ ID NO: 1302441 - RNA, 22 nt, Human
uuguaauuuuacacgcuuuugu

SEQ ID NO: 1302442 - RNA, 22 nt, Human
uuguaagcaugcacaaauucug

SEQ ID NO: 1302443 - RNA, 14 nt, Human
uuguaauaaaaugu

SEQ ID NO: 1302444 - RNA, 15 nt, Human
uuguaauaauaaaga

SEQ ID NO: 1302445 - RNA, 21 nt, Human
uuguaauagauguuugauaga

SEQ ID NO: 1302446 - RNA, 14 nt, Human
uuguaauauguaaa

SEQ ID NO: 1302447 - RNA, 15 nt, Human
uuguaauauguaaau

SEQ ID NO: 1302448 - RNA, 20 nt, Human
uugguuuucacauuggaaac

SEQ ID NO: 1302449 - RNA, 13 nt, Human
uugguuuucuucu

SEQ ID NO: 1302450 - RNA, 14 nt, Human
uugguuuucuucuu

SEQ ID NO: 1302451 - RNA, 13 nt, Human
uuguaaauuguca

SEQ ID NO: 1302452 - RNA, 16 nt, Human
uugguuuugcuacaua

SEQ ID NO: 1302453 - RNA, 14 nt, Human
uuguaacccacuga

SEQ ID NO: 1302454 - RNA, 12 nt, Human
uuguaaccugcu

SEQ ID NO: 1302455 - RNA, 18 nt, Human
uuguaagacaaagguuuu

SEQ ID NO: 1302456 - RNA, 21 nt, Human
uuguaagacaaagguuuuccu

SEQ ID NO: 1302457 - RNA, 22 nt, Human
uuguaagacaaagguuuuccuc

SEQ ID NO: 1302458 - RNA, 20 nt, Human
uuguaagaguggaaccaaca

SEQ ID NO: 1302459 - RNA, 22 nt, Human
uuggggugccccucuccuucuu

SEQ ID NO: 1302460 - RNA, 17 nt, Human
uuggguaaaauacuuuu

SEQ ID NO: 1302461 - RNA, 23 nt, Human
uuggguagaaagagauacagagg

SEQ ID NO: 1302462 - RNA, 14 nt, Human
uuggguccaggagg

SEQ ID NO: 1302463 - RNA, 12 nt, Human
uuggguccagga

SEQ ID NO: 1302464 - RNA, 13 nt, Human
uuggguccaggag

SEQ ID NO: 1302465 - RNA, 14 nt, Human
uugguggccacaua

SEQ ID NO: 1302466 - RNA, 14 nt, Human
uugguuugccuucc

SEQ ID NO: 1302467 - RNA, 12 nt, Human
uugguguuuuuu

SEQ ID NO: 1302468 - RNA, 19 nt, Human
uuggccaugcagaaagcau

SEQ ID NO: 1302469 - RNA, 13 nt, Human
uuggccaugcaga

SEQ ID NO: 1302470 - RNA, 22 nt, Human
uuggccauauuuaccucagccu

SEQ ID NO: 1302471 - RNA, 21 nt, Human
uuggccauauuuaccucagcc

SEQ ID NO: 1302472 - RNA, 12 nt, Human
uuggccaucugc

SEQ ID NO: 1302473 - RNA, 14 nt, Human
uuggccaugggagg

SEQ ID NO: 1302474 - RNA, 14 nt, Human
uuggagcuucaugg

SEQ ID NO: 1302475 - RNA, 14 nt, Human
uuggaggaaguugg

SEQ ID NO: 1302476 - RNA, 13 nt, Human
augaaauauuaug

SEQ ID NO: 1302477 - RNA, 17 nt, Human
augaaauacuauuuaaa

SEQ ID NO: 1302478 - RNA, 18 nt, Human
augaaauauauuuaaaau

SEQ ID NO: 1302479 - RNA, 21 nt, Human
augaacagaacauagacagaa

SEQ ID NO: 1302480 - RNA, 12 nt, Human
augaacaaaugg

SEQ ID NO: 1302481 - RNA, 14 nt, Human
augaacaagagaag

SEQ ID NO: 1302482 - RNA, 18 nt, Human
augaacaagagaagcauu

SEQ ID NO: 1302483 - RNA, 14 nt, Human
augaagcaaugcuu

SEQ ID NO: 1302484 - RNA, 15 nt, Human
augaagaacugagga

SEQ ID NO: 1302485 - RNA, 19 nt, Human
augaagaaaaucacuuagg

SEQ ID NO: 1302486 - RNA, 14 nt, Human
augaagaaagugga

SEQ ID NO: 1302487 - RNA, 14 nt, Human
augaagaacugagg

SEQ ID NO: 1302488 - RNA, 16 nt, Human
augaacacuuaauaaa

SEQ ID NO: 1302489 - RNA, 16 nt, Human
augaacagaacauaga

SEQ ID NO: 1302490 - RNA, 18 nt, Human
augaacccgaggcugaga

SEQ ID NO: 1302491 - RNA, 23 nt, Human
augaaccucaagcugcaucuaga

SEQ ID NO: 1302492 - RNA, 15 nt, Human
augaagcaaugcuuc

SEQ ID NO: 1302493 - RNA, 21 nt, Human
augaagcaaaugucaugcugc

SEQ ID NO: 1302494 - RNA, 22 nt, Human
augaagcaaaugucaugcugcc

SEQ ID NO: 1302495 - RNA, 18 nt, Human
augaaucugcacaucugu

SEQ ID NO: 1302496 - RNA, 13 nt, Human
augaaugaauggc

SEQ ID NO: 1302497 - RNA, 15 nt, Human
aucuuauaauuuaaa

SEQ ID NO: 1302498 - RNA, 16 nt, Human
aucuuauaauuuaaaa

SEQ ID NO: 1302499 - RNA, 15 nt, Human
aucuuaauguaucaa

SEQ ID NO: 1302500 - RNA, 18 nt, Human
aucuuaauguaucaaacu

SEQ ID NO: 1302501 - RNA, 20 nt, Human
aucuuaauguaucaaacugu

SEQ ID NO: 1302502 - RNA, 16 nt, Human
aucuuaauuauuguac

SEQ ID NO: 1302503 - RNA, 22 nt, Human
aucuuggacaaaucacauauuu

SEQ ID NO: 1302504 - RNA, 16 nt, Human
aucuuggacaaaucac

SEQ ID NO: 1302505 - RNA, 16 nt, Human
aucuuggggggguggc

SEQ ID NO: 1302506 - RNA, 20 nt, Human
aucuuggggggguggccgcu

SEQ ID NO: 1302507 - RNA, 23 nt, Human
aucuuggggggguggccgcugag

SEQ ID NO: 1302508 - RNA, 13 nt, Human
uugcccccauuuc

SEQ ID NO: 1302509 - RNA, 14 nt, Human
uugccccccuggcc

SEQ ID NO: 1302510 - RNA, 15 nt, Human
uugccccccuggccu

SEQ ID NO: 1302511 - RNA, 16 nt, Human
uugccccccuggccuc

SEQ ID NO: 1302512 - RNA, 21 nt, Human
uugcccccgugagccaauccc

SEQ ID NO: 1302513 - RNA, 14 nt, Human
uugcccuaagcaga

SEQ ID NO: 1302514 - RNA, 15 nt, Human
uugcccuaagcagaa

SEQ ID NO: 1302515 - RNA, 16 nt, Human
uugcccuaagcagaaa

SEQ ID NO: 1302516 - RNA, 18 nt, Human
uugcccuaagcagaaagu

SEQ ID NO: 1302517 - RNA, 19 nt, Human
uugcccuaagcagaaagug

SEQ ID NO: 1302518 - RNA, 12 nt, Human
aucugucaguuc

SEQ ID NO: 1302519 - RNA, 16 nt, Human
aucugugcacugccca

SEQ ID NO: 1302520 - RNA, 16 nt, Human
aucugugcuguuucaa

SEQ ID NO: 1302521 - RNA, 21 nt, Human
aucugugcuguuucaaaguuc

SEQ ID NO: 1302522 - RNA, 23 nt, Human
aucugugggucugggagucacac

SEQ ID NO: 1302523 - RNA, 12 nt, Human
aucugugucuug

SEQ ID NO: 1302524 - RNA, 13 nt, Human
aucugugucuugu

SEQ ID NO: 1302525 - RNA, 14 nt, Human
aucugugucuuguu

SEQ ID NO: 1302526 - RNA, 14 nt, Human
aucuguuuuucuaa

SEQ ID NO: 1302527 - RNA, 19 nt, Human
aucuuaaaccuuaagauac

SEQ ID NO: 1302528 - RNA, 17 nt, Human
uuggagaagaacugaaa

SEQ ID NO: 1302529 - RNA, 22 nt, Human
uuggagaagaacugaaaucaua

SEQ ID NO: 1302530 - RNA, 15 nt, Human
uuggagaagaacuga

SEQ ID NO: 1302531 - RNA, 16 nt, Human
uuggacuugucccggg

SEQ ID NO: 1302532 - RNA, 20 nt, Human
uuggagauaaucuagaacac

SEQ ID NO: 1302533 - RNA, 22 nt, Human
uugcuuuguaagugaaaaacau

SEQ ID NO: 1302534 - RNA, 20 nt, Human
uuggagaagcccgugugaga

SEQ ID NO: 1302535 - RNA, 18 nt, Human
uuggagaagucucagcua

SEQ ID NO: 1302536 - RNA, 16 nt, Human
uuggagaagucucagc

SEQ ID NO: 1302537 - RNA, 21 nt, Human
uuggagaguuuccugaaacaa

SEQ ID NO: 1302538 - RNA, 16 nt, Human
uugcuuuuaaaaucca

SEQ ID NO: 1302539 - RNA, 20 nt, Human
uugcuuuguauuguauauua

SEQ ID NO: 1302540 - RNA, 13 nt, Human
uugcuuugcccuu

SEQ ID NO: 1302541 - RNA, 16 nt, Human
uugcuuuguaugcacu

SEQ ID NO: 1302542 - RNA, 12 nt, Human
uuggaaaauaaa

SEQ ID NO: 1302543 - RNA, 15 nt, Human
uuggaaaauaaauca

SEQ ID NO: 1302544 - RNA, 13 nt, Human
uuggacuucuggg

SEQ ID NO: 1302545 - RNA, 18 nt, Human
uugcucuugaugccuggc

SEQ ID NO: 1302546 - RNA, 17 nt, Human
uugcugaaaaaugggca

SEQ ID NO: 1302547 - RNA, 13 nt, Human
uugcugaaaaaug

SEQ ID NO: 1302548 - RNA, 17 nt, Human
uugcucuugaugccugg

SEQ ID NO: 1302549 - RNA, 14 nt, Human
uugcucuugaugcc

SEQ ID NO: 1302550 - RNA, 21 nt, Human
aucuuuaaaagaugcuuuuaa

SEQ ID NO: 1302551 - RNA, 14 nt, Human
aucuuuaaaccaau

SEQ ID NO: 1302552 - RNA, 20 nt, Human
aucuuuaaaagaugcuuuua

SEQ ID NO: 1302553 - RNA, 13 nt, Human
uugcuuuguaugc

SEQ ID NO: 1302554 - RNA, 17 nt, Human
uugcuuuggaaguuuua

SEQ ID NO: 1302555 - RNA, 21 nt, Human
uugcuuugaaguagcucuuuu

SEQ ID NO: 1302556 - RNA, 19 nt, Human
uugcuuaucaacuuccuaa

SEQ ID NO: 1302557 - RNA, 13 nt, Human
uugcuuaugacau

SEQ ID NO: 1302558 - RNA, 20 nt, Human
uugcuuauuuauuguauucu

SEQ ID NO: 1302559 - RNA, 13 nt, Human
uugcuucaugugu

SEQ ID NO: 1302560 - RNA, 18 nt, Human
uugcuucaugugucccag

SEQ ID NO: 1302561 - RNA, 20 nt, Human
uugcuucaugugucccagaa

SEQ ID NO: 1302562 - RNA, 19 nt, Human
uugcuucaugugucccaga

SEQ ID NO: 1302563 - RNA, 14 nt, Human
uugcuuccuccucc

SEQ ID NO: 1302564 - RNA, 15 nt, Human
uugcuuccuccuccc

SEQ ID NO: 1302565 - RNA, 17 nt, Human
uugcuuccuccucccca

SEQ ID NO: 1302566 - RNA, 15 nt, Human
uugcuuuauuccaga

SEQ ID NO: 1302567 - RNA, 17 nt, Human
uugcaacuuuguauaaa

SEQ ID NO: 1302568 - RNA, 16 nt, Human
uugcaacuuuguauaa

SEQ ID NO: 1302569 - RNA, 18 nt, Human
uugcaacuuuguauaaaa

SEQ ID NO: 1302570 - RNA, 22 nt, Human
uugcaagccagauuuuccugaa

SEQ ID NO: 1302571 - RNA, 14 nt, Human
uugauguuccuucc

SEQ ID NO: 1302572 - RNA, 19 nt, Human
uugauguuccuuccagugu

SEQ ID NO: 1302573 - RNA, 22 nt, Human
aucugagaaaagcuuugaaccc

SEQ ID NO: 1302574 - RNA, 15 nt, Human
aucucaaacaauuga

SEQ ID NO: 1302575 - RNA, 20 nt, Human
aucugacccagugcccccac

SEQ ID NO: 1302576 - RNA, 21 nt, Human
aucugacccagugcccccacu

SEQ ID NO: 1302577 - RNA, 21 nt, Human
aucugacccuaugggucuagg

SEQ ID NO: 1302578 - RNA, 18 nt, Human
aucugagaaaagcuuuga

SEQ ID NO: 1302579 - RNA, 21 nt, Human
aucugaauaaaguguaacaau

SEQ ID NO: 1302580 - RNA, 14 nt, Human
aucugacccagugc

SEQ ID NO: 1302581 - RNA, 18 nt, Human
aucugacccagugccccc

SEQ ID NO: 1302582 - RNA, 15 nt, Human
aucugaagcccuccc

SEQ ID NO: 1302583 - RNA, 18 nt, Human
aucugaagcccucccagg

SEQ ID NO: 1302584 - RNA, 16 nt, Human
aucucuuguuuaaauu

SEQ ID NO: 1302585 - RNA, 18 nt, Human
aucucaccaggcagccuc

SEQ ID NO: 1302586 - RNA, 19 nt, Human
aucucuuuuugcuuucgaa

SEQ ID NO: 1302587 - RNA, 15 nt, Human
aucucaacaggccuc

SEQ ID NO: 1302588 - RNA, 19 nt, Human
aucucaacaggccucaggg

SEQ ID NO: 1302589 - RNA, 20 nt, Human
aucucaacaggccucagggc

SEQ ID NO: 1302590 - RNA, 11 nt, Human
aucucacacuc

SEQ ID NO: 1302591 - RNA, 20 nt, Human
aucucacacucaugcauugu

SEQ ID NO: 1302592 - RNA, 22 nt, Human
aucucaacaggccucagggcuc

SEQ ID NO: 1302593 - RNA, 22 nt, Human
aucucacacucaugcauugucc

SEQ ID NO: 1302594 - RNA, 16 nt, Human
aucucacauauacaag

SEQ ID NO: 1302595 - RNA, 18 nt, Human
aucucacauauacaagua

SEQ ID NO: 1302596 - RNA, 15 nt, Human
aucucaccaggcagc

SEQ ID NO: 1302597 - RNA, 22 nt, Human
aucucaccaggcagccucuggg

SEQ ID NO: 1302598 - RNA, 15 nt, Human
uugcaauaucugaag

SEQ ID NO: 1302599 - RNA, 22 nt, Human
uugcaauaucugaagcccuccc

SEQ ID NO: 1302600 - RNA, 18 nt, Human
uugcaaucccuuaauauc

SEQ ID NO: 1302601 - RNA, 21 nt, Human
uugcaccccaaagcuuuccug

SEQ ID NO: 1302602 - RNA, 22 nt, Human
uugcaccccaaagcuuuccugc

SEQ ID NO: 1302603 - RNA, 13 nt, Human
uugcauguaguaa

SEQ ID NO: 1302604 - RNA, 17 nt, Human
uugcauguaguaacacu

SEQ ID NO: 1302605 - RNA, 19 nt, Human
uugcauguaguaacacuaa

SEQ ID NO: 1302606 - RNA, 21 nt, Human
uugcauguaguaacacuaaua

SEQ ID NO: 1302607 - RNA, 16 nt, Human
uugccaaauauguccu

SEQ ID NO: 1302608 - RNA, 17 nt, Human
uugccaaauauguccug

SEQ ID NO: 1302609 - RNA, 18 nt, Human
uugccaaauauguccugg

SEQ ID NO: 1302610 - RNA, 22 nt, Human
uugccaagcuccaagccccauc

SEQ ID NO: 1302611 - RNA, 16 nt, Human
uugccaaggcagaggc

SEQ ID NO: 1302612 - RNA, 21 nt, Human
uugccaagggcauaaauuauu

SEQ ID NO: 1302613 - RNA, 18 nt, Human
uugccaauagugucaucc

SEQ ID NO: 1302614 - RNA, 12 nt, Human
uugccacagcuu

SEQ ID NO: 1302615 - RNA, 13 nt, Human
uugccacagcuuu

SEQ ID NO: 1302616 - RNA, 18 nt, Human
uugccacagcuuuugcaa

SEQ ID NO: 1302617 - RNA, 14 nt, Human
uugccacagcuuuu

SEQ ID NO: 1302618 - RNA, 13 nt, Human
uugacaugggaca

SEQ ID NO: 1302619 - RNA, 23 nt, Human
uugacacuagcccaaugaaauga

SEQ ID NO: 1302620 - RNA, 20 nt, Human
aucccuuaauauccuaaaca

SEQ ID NO: 1302621 - RNA, 21 nt, Human
aucccuuaauauccuaaacau

SEQ ID NO: 1302622 - RNA, 16 nt, Human
aucccuucauacuuga

SEQ ID NO: 1302623 - RNA, 20 nt, Human
aucccuucauacuugaacgu

SEQ ID NO: 1302624 - RNA, 15 nt, Human
aucccuuuuucaaug

SEQ ID NO: 1302625 - RNA, 14 nt, Human
auccgaaucucuuu

SEQ ID NO: 1302626 - RNA, 16 nt, Human
uugacaauugggagcu

SEQ ID NO: 1302627 - RNA, 16 nt, Human
uugacacagaaaaugu

SEQ ID NO: 1302628 - RNA, 12 nt, Human
uugacaccugcu

SEQ ID NO: 1302629 - RNA, 19 nt, Human
uugagaaaaauauauacua

SEQ ID NO: 1302630 - RNA, 11 nt, Human
uugagaaaaau

SEQ ID NO: 1302631 - RNA, 17 nt, Human
uugacuuuuugcauuua

SEQ ID NO: 1302632 - RNA, 19 nt, Human
uugacuuuucuguaauuca

SEQ ID NO: 1302633 - RNA, 16 nt, Human
uugacuuuuugcauuu

SEQ ID NO: 1302634 - RNA, 12 nt, Human
uugacuuuuuau

SEQ ID NO: 1302635 - RNA, 13 nt, Human
uugacuuuucugu

SEQ ID NO: 1302636 - RNA, 18 nt, Human
uugacuuuucuguaauuc

SEQ ID NO: 1302637 - RNA, 13 nt, Human
uugacauucugaa

SEQ ID NO: 1302638 - RNA, 14 nt, Human
uugacauucugaau

SEQ ID NO: 1302639 - RNA, 15 nt, Human
uugacauucugaaug

SEQ ID NO: 1302640 - RNA, 16 nt, Human
uugacauucugaaugc

SEQ ID NO: 1302641 - RNA, 18 nt, Human
uugacauucugaaugcuu

SEQ ID NO: 1302642 - RNA, 20 nt, Human
uugacauucugaaugcuucu

SEQ ID NO: 1302643 - RNA, 14 nt, Human
uugacauugcguuu

SEQ ID NO: 1302644 - RNA, 18 nt, Human
uugacauugcguuugacc

SEQ ID NO: 1302645 - RNA, 10 nt, Human
uugagacaga

SEQ ID NO: 1302646 - RNA, 23 nt, Human
uugagaaucccaaauuugauuga

SEQ ID NO: 1302647 - RNA, 19 nt, Human
uugagcaguggcuggucca

SEQ ID NO: 1302648 - RNA, 15 nt, Human
uugagcaucacagaa

SEQ ID NO: 1302649 - RNA, 15 nt, Human
uugagcaucuguccc

SEQ ID NO: 1302650 - RNA, 16 nt, Human
uugagcaucacagaau

SEQ ID NO: 1302651 - RNA, 14 nt, Human
uugagugcucugau

SEQ ID NO: 1302652 - RNA, 15 nt, Human
uugagugcucugauc

SEQ ID NO: 1302653 - RNA, 23 nt, Human
uugagugggguuaucucuguguu

SEQ ID NO: 1302654 - RNA, 13 nt, Human
uugaguguuuaaa

SEQ ID NO: 1302655 - RNA, 13 nt, Human
uugauacuguugc

SEQ ID NO: 1302656 - RNA, 14 nt, Human
uugauacuguugca

SEQ ID NO: 1302657 - RNA, 15 nt, Human
uugauagaaaugcca

SEQ ID NO: 1302658 - RNA, 13 nt, Human
uugauagaaccau

SEQ ID NO: 1302659 - RNA, 15 nt, Human
uugauacuguugcac

SEQ ID NO: 1302660 - RNA, 16 nt, Human
uugauacuguugcacg

SEQ ID NO: 1302661 - RNA, 17 nt, Human
uugauacuguugcacgu

SEQ ID NO: 1302662 - RNA, 18 nt, Human
uugauacuguugcacgug

SEQ ID NO: 1302663 - RNA, 20 nt, Human
uugauacuguugcacgugug

SEQ ID NO: 1302664 - RNA, 13 nt, Human
aucuaauuuauaa

SEQ ID NO: 1302665 - RNA, 14 nt, Human
aucuaauuuauaaa

SEQ ID NO: 1302666 - RNA, 15 nt, Human
aucuaauuuauaaaa

SEQ ID NO: 1302667 - RNA, 19 nt, Human
aucuaauuuauaaaaaggu

SEQ ID NO: 1302668 - RNA, 23 nt, Human
aucuaauuuauaaaaagguguuu

SEQ ID NO: 1302669 - RNA, 15 nt, Human
aucuacuaauuccac

SEQ ID NO: 1302670 - RNA, 19 nt, Human
aucuacuaauuccacaccu

SEQ ID NO: 1302671 - RNA, 14 nt, Human
aucuaccccagacu

SEQ ID NO: 1302672 - RNA, 20 nt, Human
aucuaccccagacuagaugu

SEQ ID NO: 1302673 - RNA, 21 nt, Human
aucuaccccagacuagaugua

SEQ ID NO: 1302674 - RNA, 22 nt, Human
aucuaccccagacuagauguag

SEQ ID NO: 1302675 - RNA, 15 nt, Human
aucuaccuagauuua

SEQ ID NO: 1302676 - RNA, 21 nt, Human
aucuaccuagauuuaauauaa

SEQ ID NO: 1302677 - RNA, 15 nt, Human
aucuacucaaagcau

SEQ ID NO: 1302678 - RNA, 16 nt, Human
aucuagauaucgacuu

SEQ ID NO: 1302679 - RNA, 13 nt, Human
aucuauuuuugga

SEQ ID NO: 1302680 - RNA, 15 nt, Human
aucuauuuuuggagg

SEQ ID NO: 1302681 - RNA, 19 nt, Human
aucuauuuuuggcagucug

SEQ ID NO: 1302682 - RNA, 23 nt, Human
aucuauuuuuggcagucugaauu

SEQ ID NO: 1302683 - RNA, 21 nt, Human
aucuauuuuuggagguuuauu

SEQ ID NO: 1302684 - RNA, 14 nt, Human
auauuugaaauauu

SEQ ID NO: 1302685 - RNA, 19 nt, Human
auauuugaaauauugacuu

SEQ ID NO: 1302686 - RNA, 23 nt, Human
auauuugaaauauugacuuuuua

SEQ ID NO: 1302687 - RNA, 23 nt, Human
auauuucuguaauuauaucuaaa

SEQ ID NO: 1302688 - RNA, 16 nt, Human
auauuuguaaaaugac

SEQ ID NO: 1302689 - RNA, 17 nt, Human
auauuuguaaaaugaca

SEQ ID NO: 1302690 - RNA, 19 nt, Human
auauuuguaaaaugacaau

SEQ ID NO: 1302691 - RNA, 13 nt, Human
auauuuguaaaau

SEQ ID NO: 1302692 - RNA, 15 nt, Human
auauuuguaaaauga

SEQ ID NO: 1302693 - RNA, 13 nt, Human
auauuuguacaua

SEQ ID NO: 1302694 - RNA, 12 nt, Human
auauuuguacau

SEQ ID NO: 1302695 - RNA, 21 nt, Human
auauuugucaugcugggauuu

SEQ ID NO: 1302696 - RNA, 18 nt, Human
auauuugugacaaaaaau

SEQ ID NO: 1302697 - RNA, 15 nt, Human
auauuuguuauguag

SEQ ID NO: 1302698 - RNA, 16 nt, Human
auauuuguuuauggua

SEQ ID NO: 1302699 - RNA, 13 nt, Human
auauuuuaaaauu

SEQ ID NO: 1302700 - RNA, 15 nt, Human
auauuuuaaaauuug

SEQ ID NO: 1302701 - RNA, 17 nt, Human
auauuuuaaaauuuguu

SEQ ID NO: 1302702 - RNA, 18 nt, Human
auauuuuaaaauuuguuc

SEQ ID NO: 1302703 - RNA, 14 nt, Human
auauuuuaaacaga

SEQ ID NO: 1302704 - RNA, 14 nt, Human
auauuuuaaagaau

SEQ ID NO: 1302705 - RNA, 15 nt, Human
auauuuuaaagaauu

SEQ ID NO: 1302706 - RNA, 16 nt, Human
auauuuuaaagaauug

SEQ ID NO: 1302707 - RNA, 20 nt, Human
auauuuuaaagaauuguguc

SEQ ID NO: 1302708 - RNA, 13 nt, Human
auauuugaaauau

SEQ ID NO: 1302709 - RNA, 13 nt, Human
auauuucuauuuu

SEQ ID NO: 1302710 - RNA, 15 nt, Human
auauuucuauuuuau

SEQ ID NO: 1302711 - RNA, 21 nt, Human
auauuucuauuuuauuaugaa

SEQ ID NO: 1302712 - RNA, 23 nt, Human
auauuucuauuuuauuaugaaga

SEQ ID NO: 1302713 - RNA, 16 nt, Human
auauuuaaaaauaagu

SEQ ID NO: 1302714 - RNA, 16 nt, Human
auauuuaaaaguguca

SEQ ID NO: 1302715 - RNA, 16 nt, Human
auauuguugcauugcu

SEQ ID NO: 1302716 - RNA, 13 nt, Human
auauuuaaaaaua

SEQ ID NO: 1302717 - RNA, 14 nt, Human
auauuuaaaaauaa

SEQ ID NO: 1302718 - RNA, 17 nt, Human
auauuguguuuguguau

SEQ ID NO: 1302719 - RNA, 21 nt, Human
auauuguguuuguguauuuac

SEQ ID NO: 1302720 - RNA, 20 nt, Human
auauuguugcauugcuuuuu

SEQ ID NO: 1302721 - RNA, 18 nt, Human
auauugcugaaugcaaga

SEQ ID NO: 1302722 - RNA, 23 nt, Human
auauugccuaagaauaaacauuu

SEQ ID NO: 1302723 - RNA, 21 nt, Human
auauuguggguguuaauuuuu

SEQ ID NO: 1302724 - RNA, 13 nt, Human
auauuguguuugu

SEQ ID NO: 1302725 - RNA, 13 nt, Human
auauugauuuauu

SEQ ID NO: 1302726 - RNA, 15 nt, Human
auauugauuuauuaa

SEQ ID NO: 1302727 - RNA, 17 nt, Human
auauugccauuaugcuu

SEQ ID NO: 1302728 - RNA, 22 nt, Human
auauucucacagcuccaagaau

SEQ ID NO: 1302729 - RNA, 23 nt, Human
auauucucacagcuccaagaauu

SEQ ID NO: 1302730 - RNA, 17 nt, Human
auauuccuauugugcaa

SEQ ID NO: 1302731 - RNA, 22 nt, Human
auauuccuauugugcaauguaa

SEQ ID NO: 1302732 - RNA, 23 nt, Human
auauuccuauugugcaauguaaa

SEQ ID NO: 1302733 - RNA, 17 nt, Human
auauucccuagaaacuu

SEQ ID NO: 1302734 - RNA, 23 nt, Human
auauucccuagaaacuuccaaau

SEQ ID NO: 1302735 - RNA, 22 nt, Human
auauugauccagaaagaaaacu

SEQ ID NO: 1302736 - RNA, 15 nt, Human
auauugauccagaaa

SEQ ID NO: 1302737 - RNA, 16 nt, Human
auauugaaaaaauaga

SEQ ID NO: 1302738 - RNA, 12 nt, Human
auauuaaaucug

SEQ ID NO: 1302739 - RNA, 13 nt, Human
auauuaaaucugc

SEQ ID NO: 1302740 - RNA, 16 nt, Human
auauuaaauuuuuugu

SEQ ID NO: 1302741 - RNA, 18 nt, Human
auauuaaauuuuuuguug

SEQ ID NO: 1302742 - RNA, 18 nt, Human
auauuaaccagauauaua

SEQ ID NO: 1302743 - RNA, 19 nt, Human
auauuaaccagauauauau

SEQ ID NO: 1302744 - RNA, 14 nt, Human
auauuaagaaugau

SEQ ID NO: 1302745 - RNA, 13 nt, Human
auauuaagaauga

SEQ ID NO: 1302746 - RNA, 17 nt, Human
auauuaagaaugaucug

SEQ ID NO: 1302747 - RNA, 17 nt, Human
auauuaagguaguuauu

SEQ ID NO: 1302748 - RNA, 14 nt, Human
auauuaauauuccu

SEQ ID NO: 1302749 - RNA, 16 nt, Human
auauuaaugcccagac

SEQ ID NO: 1302750 - RNA, 16 nt, Human
uucaugucugcuauca

SEQ ID NO: 1302751 - RNA, 15 nt, Human
uucaugugucccaga

SEQ ID NO: 1302752 - RNA, 16 nt, Human
uucaugugucccagaa

SEQ ID NO: 1302753 - RNA, 13 nt, Human
uucauguuaguua

SEQ ID NO: 1302754 - RNA, 16 nt, Human
uucauguuaguuaccu

SEQ ID NO: 1302755 - RNA, 18 nt, Human
uucauguuaguuaccuua

SEQ ID NO: 1302756 - RNA, 22 nt, Human
uucauguuaguuaccuuauagu

SEQ ID NO: 1302757 - RNA, 18 nt, Human
uucaugugucccagaaga

SEQ ID NO: 1302758 - RNA, 18 nt, Human
auauuuucaugcuguuca

SEQ ID NO: 1302759 - RNA, 21 nt, Human
auauuuucaugcuguucauga

SEQ ID NO: 1302760 - RNA, 21 nt, Human
auauuuucaccauuugauuau

SEQ ID NO: 1302761 - RNA, 16 nt, Human
uuccuucagcacuuua

SEQ ID NO: 1302762 - RNA, 19 nt, Human
auauuuucaacgcagcccu

SEQ ID NO: 1302763 - RNA, 20 nt, Human
auauuuucaacgcagcccug

SEQ ID NO: 1302764 - RNA, 19 nt, Human
uuccuucagcacuuuagaa

SEQ ID NO: 1302765 - RNA, 17 nt, Human
uuccuguugucaagaau

SEQ ID NO: 1302766 - RNA, 16 nt, Human
uuccugggagcuuuug

SEQ ID NO: 1302767 - RNA, 16 nt, Human
uuccugggaacaucac

SEQ ID NO: 1302768 - RNA, 16 nt, Human
uuccuggguggcuacu

SEQ ID NO: 1302769 - RNA, 17 nt, Human
uuccuggguggcuacuc

SEQ ID NO: 1302770 - RNA, 23 nt, Human
uuccuggguggcuacucugugcc

SEQ ID NO: 1302771 - RNA, 15 nt, Human
uuccugggagcuuuu

SEQ ID NO: 1302772 - RNA, 22 nt, Human
uuccuguguguccaaaacugcc

SEQ ID NO: 1302773 - RNA, 11 nt, Human
uuccuggugcu

SEQ ID NO: 1302774 - RNA, 22 nt, Human
uuccuggguggcuacucugugc

SEQ ID NO: 1302775 - RNA, 22 nt, Human
uuccugguagaccacugccaua

SEQ ID NO: 1302776 - RNA, 19 nt, Human
uuccuggugccaauuucaa

SEQ ID NO: 1302777 - RNA, 20 nt, Human
uuccuggugccaauuucaag

SEQ ID NO: 1302778 - RNA, 21 nt, Human
uuccuguguguccaaaacugc

SEQ ID NO: 1302779 - RNA, 18 nt, Human
uuccucugucuccuaagc

SEQ ID NO: 1302780 - RNA, 22 nt, Human
uuccucuguucaaagcugccug

SEQ ID NO: 1302781 - RNA, 20 nt, Human
uuccucuucuauuuuguaaa

SEQ ID NO: 1302782 - RNA, 17 nt, Human
uuccucuaguucuuugu

SEQ ID NO: 1302783 - RNA, 22 nt, Human
uuccuaauaaaguucuguacuc

SEQ ID NO: 1302784 - RNA, 11 nt, Human
uuccuccuggg

SEQ ID NO: 1302785 - RNA, 14 nt, Human
uuccuccugggccc

SEQ ID NO: 1302786 - RNA, 15 nt, Human
uuccuccugggcccu

SEQ ID NO: 1302787 - RNA, 21 nt, Human
uuccuccugggcccucucugc

SEQ ID NO: 1302788 - RNA, 23 nt, Human
uuccuccugggcccucucugcuc

SEQ ID NO: 1302789 - RNA, 22 nt, Human
uuccucuaacuuggcucacacu

SEQ ID NO: 1302790 - RNA, 14 nt, Human
auauuuuaagacga

SEQ ID NO: 1302791 - RNA, 12 nt, Human
auauuuuaaaua

SEQ ID NO: 1302792 - RNA, 15 nt, Human
uuccuaauaaaguuc

SEQ ID NO: 1302793 - RNA, 16 nt, Human
uuccuaauaaaguucu

SEQ ID NO: 1302794 - RNA, 19 nt, Human
uuccuaauaaaguucugua

SEQ ID NO: 1302795 - RNA, 12 nt, Human
auauuuucuuuc

SEQ ID NO: 1302796 - RNA, 13 nt, Human
auauuuucuuucu

SEQ ID NO: 1302797 - RNA, 12 nt, Human
auauuuugaauc

SEQ ID NO: 1302798 - RNA, 13 nt, Human
auauuuugaauca

SEQ ID NO: 1302799 - RNA, 19 nt, Human
auauuuugaaucaauaaua

SEQ ID NO: 1302800 - RNA, 14 nt, Human
auauuuugaaucaa

SEQ ID NO: 1302801 - RNA, 13 nt, Human
auauuuucuuuuc

SEQ ID NO: 1302802 - RNA, 12 nt, Human
auauuuugcagu

SEQ ID NO: 1302803 - RNA, 13 nt, Human
aucaagagacuga

SEQ ID NO: 1302804 - RNA, 16 nt, Human
aucaaguauuugggaa

SEQ ID NO: 1302805 - RNA, 18 nt, Human
aucaauaauauauuuucu

SEQ ID NO: 1302806 - RNA, 20 nt, Human
aucaauaauauauuuucugu

SEQ ID NO: 1302807 - RNA, 21 nt, Human
aucaauaauauauuuucuguu

SEQ ID NO: 1302808 - RNA, 13 nt, Human
aucaaucaacuua

SEQ ID NO: 1302809 - RNA, 16 nt, Human
aucacaagauggaauu

SEQ ID NO: 1302810 - RNA, 13 nt, Human
aucacacaaagca

SEQ ID NO: 1302811 - RNA, 17 nt, Human
aucacuagcccuccuuu

SEQ ID NO: 1302812 - RNA, 14 nt, Human
aucacaaaguggaa

SEQ ID NO: 1302813 - RNA, 24 nt, Human
aucacaaaguggaacgaaaaugaa

SEQ ID NO: 1302814 - RNA, 15 nt, Human
aucacaaaguggaac

SEQ ID NO: 1302815 - RNA, 20 nt, Human
uuccuuuuaaaacacuucca

SEQ ID NO: 1302816 - RNA, 13 nt, Human
uuccuuugugcuu

SEQ ID NO: 1302817 - RNA, 21 nt, Human
uuccuuuuaaaacacuuccau

SEQ ID NO: 1302818 - RNA, 22 nt, Human
uuccuuuuaaaacacuuccaua

SEQ ID NO: 1302819 - RNA, 12 nt, Human
uuccuuuuaauu

SEQ ID NO: 1302820 - RNA, 12 nt, Human
uuccuuuuacuu

SEQ ID NO: 1302821 - RNA, 22 nt, Human
uuccuuuuacuuuucuucuauu

SEQ ID NO: 1302822 - RNA, 12 nt, Human
uuccuuuuauca

SEQ ID NO: 1302823 - RNA, 18 nt, Human
uuccuuuuacuuuucuuc

SEQ ID NO: 1302824 - RNA, 12 nt, Human
uuccuuuucacu

SEQ ID NO: 1302825 - RNA, 13 nt, Human
uuccuuuucacug

SEQ ID NO: 1302826 - RNA, 16 nt, Human
uuccuuuucacugcug

SEQ ID NO: 1302827 - RNA, 22 nt, Human
aucacuagcccuccuuuuucca

SEQ ID NO: 1302828 - RNA, 20 nt, Human
aucacuguuuagaacacaca

SEQ ID NO: 1302829 - RNA, 18 nt, Human
aucacuguuuagaacaca

SEQ ID NO: 1302830 - RNA, 14 nt, Human
aucauucauuuucu

SEQ ID NO: 1302831 - RNA, 22 nt, Human
aucauucacuucacugugcugu

SEQ ID NO: 1302832 - RNA, 19 nt, Human
aucauucacuucacugugc

SEQ ID NO: 1302833 - RNA, 17 nt, Human
aucauucacuucacugu

SEQ ID NO: 1302834 - RNA, 15 nt, Human
aucauuauuuaugua

SEQ ID NO: 1302835 - RNA, 17 nt, Human
aucauuauuuauguauu

SEQ ID NO: 1302836 - RNA, 12 nt, Human
aucauucaagug

SEQ ID NO: 1302837 - RNA, 14 nt, Human
aucauuauuuaugu

SEQ ID NO: 1302838 - RNA, 21 nt, Human
aucauucacuucacugugcug

SEQ ID NO: 1302839 - RNA, 15 nt, Human
aucauucauuuuugu

SEQ ID NO: 1302840 - RNA, 15 nt, Human
aucaucaagagaauu

SEQ ID NO: 1302841 - RNA, 16 nt, Human
aucaucaaguaauaca

SEQ ID NO: 1302842 - RNA, 21 nt, Human
aucaucaaguaauacaaacua

SEQ ID NO: 1302843 - RNA, 20 nt, Human
aucaucagaaaggaaaaaca

SEQ ID NO: 1302844 - RNA, 18 nt, Human
aucaucaaguaauacaaa

SEQ ID NO: 1302845 - RNA, 21 nt, Human
aucagaugcuccaagauucua

SEQ ID NO: 1302846 - RNA, 12 nt, Human
aucagaugacaa

SEQ ID NO: 1302847 - RNA, 20 nt, Human
aucagagugacauccaggag

SEQ ID NO: 1302848 - RNA, 17 nt, Human
aucagaguugcugcaaa

SEQ ID NO: 1302849 - RNA, 16 nt, Human
aucagagugacaucca

SEQ ID NO: 1302850 - RNA, 15 nt, Human
aucagauagcaucuu

SEQ ID NO: 1302851 - RNA, 20 nt, Human
aucagaugcuccaagauucu

SEQ ID NO: 1302852 - RNA, 13 nt, Human
aucagucaauauu

SEQ ID NO: 1302853 - RNA, 19 nt, Human
aucagucauaacuaaauaa

SEQ ID NO: 1302854 - RNA, 19 nt, Human
aucaguguaccauuugccu

SEQ ID NO: 1302855 - RNA, 13 nt, Human
aucauaaggcuuc

SEQ ID NO: 1302856 - RNA, 12 nt, Human
aucauagaaaug

SEQ ID NO: 1302857 - RNA, 15 nt, Human
aucauagaaauguaa

SEQ ID NO: 1302858 - RNA, 14 nt, Human
uucucaacuccaaa

SEQ ID NO: 1302859 - RNA, 18 nt, Human
uucucaacuccaaacuga

SEQ ID NO: 1302860 - RNA, 14 nt, Human
uucuaguuucucuu

SEQ ID NO: 1302861 - RNA, 13 nt, Human
uucuauaaggcca

SEQ ID NO: 1302862 - RNA, 14 nt, Human
uucuauaaggccau

SEQ ID NO: 1302863 - RNA, 21 nt, Human
uucuauaaggccauaaaacag

SEQ ID NO: 1302864 - RNA, 23 nt, Human
uucuauaaggccauaaaacaggu

SEQ ID NO: 1302865 - RNA, 21 nt, Human
uucuauaaguuuuauguuaaa

SEQ ID NO: 1302866 - RNA, 13 nt, Human
uucucaaguucua

SEQ ID NO: 1302867 - RNA, 14 nt, Human
uucucaaguucuaa

SEQ ID NO: 1302868 - RNA, 16 nt, Human
uucucaaguucuaaga

SEQ ID NO: 1302869 - RNA, 17 nt, Human
uucucaaguucuaagau

SEQ ID NO: 1302870 - RNA, 18 nt, Human
uucucaaguucuaagauu

SEQ ID NO: 1302871 - RNA, 20 nt, Human
uucucaaguucuaagauucu

SEQ ID NO: 1302872 - RNA, 22 nt, Human
uucucaaguucuaagauucuaa

SEQ ID NO: 1302873 - RNA, 23 nt, Human
uucucaaguucuaagauucuaau

SEQ ID NO: 1302874 - RNA, 13 nt, Human
uucucaauuccaa

SEQ ID NO: 1302875 - RNA, 14 nt, Human
uucucaauuccaac

SEQ ID NO: 1302876 - RNA, 17 nt, Human
uuccuuuugccgacccc

SEQ ID NO: 1302877 - RNA, 20 nt, Human
uuccuuuuuaauaugcuuaa

SEQ ID NO: 1302878 - RNA, 14 nt, Human
uuccuuuuucagau

SEQ ID NO: 1302879 - RNA, 17 nt, Human
uucuaguucugccagga

SEQ ID NO: 1302880 - RNA, 14 nt, Human
uucuaguugaaaau

SEQ ID NO: 1302881 - RNA, 17 nt, Human
uucuagguuucaaagau

SEQ ID NO: 1302882 - RNA, 15 nt, Human
uucuagguucuaaaa

SEQ ID NO: 1302883 - RNA, 13 nt, Human
uucuagguuucaa

SEQ ID NO: 1302884 - RNA, 20 nt, Human
uucuagguuucaaagaugcu

SEQ ID NO: 1302885 - RNA, 23 nt, Human
uucuaggcacuguaguucuaaga

SEQ ID NO: 1302886 - RNA, 21 nt, Human
uucuaggcacuguaguucuaa

SEQ ID NO: 1302887 - RNA, 14 nt, Human
uucuagguaggaaa

SEQ ID NO: 1302888 - RNA, 18 nt, Human
uucuagguaggaaaugug

SEQ ID NO: 1302889 - RNA, 20 nt, Human
uucucacagcuccaagaauu

SEQ ID NO: 1302890 - RNA, 17 nt, Human
uucucaauuccaacagu

SEQ ID NO: 1302891 - RNA, 18 nt, Human
uucucaauuccaacaguu

SEQ ID NO: 1302892 - RNA, 20 nt, Human
uucucaauuccaacaguuua

SEQ ID NO: 1302893 - RNA, 21 nt, Human
uucucacacuggucugcuguc

SEQ ID NO: 1302894 - RNA, 14 nt, Human
uucucaguuuucau

SEQ ID NO: 1302895 - RNA, 15 nt, Human
uucucaguuuucaua

SEQ ID NO: 1302896 - RNA, 12 nt, Human
uucucauaacuu

SEQ ID NO: 1302897 - RNA, 13 nt, Human
uucucaucaguag

SEQ ID NO: 1302898 - RNA, 12 nt, Human
uucucaucagua

SEQ ID NO: 1302899 - RNA, 15 nt, Human
uucucauccugcagg

SEQ ID NO: 1302900 - RNA, 19 nt, Human
aucagaaagggagggcucu

SEQ ID NO: 1302901 - RNA, 20 nt, Human
aucagaaagggagggcucug

SEQ ID NO: 1302902 - RNA, 21 nt, Human
aucagaaagggagggcucuga

SEQ ID NO: 1302903 - RNA, 23 nt, Human
aucagaaagggagggcucugagg

SEQ ID NO: 1302904 - RNA, 22 nt, Human
aucagaaagggagggcucugag

SEQ ID NO: 1302905 - RNA, 12 nt, Human
aucagaacagga

SEQ ID NO: 1302906 - RNA, 22 nt, Human
aucagaacucaaauggggccag

SEQ ID NO: 1302907 - RNA, 23 nt, Human
aucagaacucaaauggggccaga

SEQ ID NO: 1302908 - RNA, 18 nt, Human
aucagaagucaucuugcu

SEQ ID NO: 1302909 - RNA, 22 nt, Human
aucagagaugcaccaccaagcc

SEQ ID NO: 1302910 - RNA, 17 nt, Human
aucagagcgcacaggga

SEQ ID NO: 1302911 - RNA, 22 nt, Human
uucugguaugaacuugaggaca

SEQ ID NO: 1302912 - RNA, 22 nt, Human
uucugguaggaauagcauguca

SEQ ID NO: 1302913 - RNA, 14 nt, Human
uucugguccuuuuu

SEQ ID NO: 1302914 - RNA, 16 nt, Human
uucugguccuuuuugg

SEQ ID NO: 1302915 - RNA, 21 nt, Human
uucugguaugaacuugaggac

SEQ ID NO: 1302916 - RNA, 20 nt, Human
uucugguaggaauagcaugu

SEQ ID NO: 1302917 - RNA, 12 nt, Human
uucugccugcca

SEQ ID NO: 1302918 - RNA, 16 nt, Human
uucugguaaaaagaaa

SEQ ID NO: 1302919 - RNA, 19 nt, Human
uucuguaagaaaccuacug

SEQ ID NO: 1302920 - RNA, 14 nt, Human
uucuguaaagcaaa

SEQ ID NO: 1302921 - RNA, 22 nt, Human
uucuguaaauaaugugcacuga

SEQ ID NO: 1302922 - RNA, 15 nt, Human
uucuguaagaaaccu

SEQ ID NO: 1302923 - RNA, 23 nt, Human
uucuguaauuauaucuaaaauau

SEQ ID NO: 1302924 - RNA, 11 nt, Human
uucuguaauuc

SEQ ID NO: 1302925 - RNA, 16 nt, Human
uucuguaauucagguu

SEQ ID NO: 1302926 - RNA, 21 nt, Human
uucuguaauucagguuuuucc

SEQ ID NO: 1302927 - RNA, 22 nt, Human
uucuguaauucagguuuuuccu

SEQ ID NO: 1302928 - RNA, 13 nt, Human
uucuguaauugug

SEQ ID NO: 1302929 - RNA, 22 nt, Human
uucuguacaugcauugagcucu

SEQ ID NO: 1302930 - RNA, 11 nt, Human
uucuguaccag

SEQ ID NO: 1302931 - RNA, 12 nt, Human
uucuguaccagu

SEQ ID NO: 1302932 - RNA, 13 nt, Human
uucuguaccaguu

SEQ ID NO: 1302933 - RNA, 14 nt, Human
uucuguaccaguua

SEQ ID NO: 1302934 - RNA, 17 nt, Human
uucugccucucuaggac

SEQ ID NO: 1302935 - RNA, 18 nt, Human
uucugccucucuaggacc

SEQ ID NO: 1302936 - RNA, 12 nt, Human
uucugccaggag

SEQ ID NO: 1302937 - RNA, 14 nt, Human
uucugccuccccuu

SEQ ID NO: 1302938 - RNA, 14 nt, Human
uucugaagaagaug

SEQ ID NO: 1302939 - RNA, 16 nt, Human
uucugcaucuccacuu

SEQ ID NO: 1302940 - RNA, 23 nt, Human
uucugaacagcugguguagcuac

SEQ ID NO: 1302941 - RNA, 13 nt, Human
uucugaacuaaag

SEQ ID NO: 1302942 - RNA, 12 nt, Human
uucugaagaaga

SEQ ID NO: 1302943 - RNA, 13 nt, Human
uucugaagaagau

SEQ ID NO: 1302944 - RNA, 21 nt, Human
uucugaaauuuccugggagcu

SEQ ID NO: 1302945 - RNA, 12 nt, Human
uucugaacagcu

SEQ ID NO: 1302946 - RNA, 13 nt, Human
uucugaacagcug

SEQ ID NO: 1302947 - RNA, 14 nt, Human
uucugaacagcugg

SEQ ID NO: 1302948 - RNA, 15 nt, Human
uucugaacagcuggu

SEQ ID NO: 1302949 - RNA, 16 nt, Human
uucugaacagcuggug

SEQ ID NO: 1302950 - RNA, 18 nt, Human
uucugaacagcuggugua

SEQ ID NO: 1302951 - RNA, 22 nt, Human
uucugaacagcugguguagcua

SEQ ID NO: 1302952 - RNA, 22 nt, Human
uucugaacuaaagugcugcacu

SEQ ID NO: 1302953 - RNA, 17 nt, Human
uucucugucucauccau

SEQ ID NO: 1302954 - RNA, 18 nt, Human
uucucuguggcaaagcag

SEQ ID NO: 1302955 - RNA, 16 nt, Human
uucucugugucuaaga

SEQ ID NO: 1302956 - RNA, 17 nt, Human
uucucugugucuaagau

SEQ ID NO: 1302957 - RNA, 18 nt, Human
uucucugugucuaagauu

SEQ ID NO: 1302958 - RNA, 20 nt, Human
uucucugugucuaagauucu

SEQ ID NO: 1302959 - RNA, 21 nt, Human
uucucugugucuaagauucua

SEQ ID NO: 1302960 - RNA, 22 nt, Human
uucucugugucuaagauucuag

SEQ ID NO: 1302961 - RNA, 23 nt, Human
uucucugugucuaagauucuaga

SEQ ID NO: 1302962 - RNA, 20 nt, Human
uucucuguugucguaaagau

SEQ ID NO: 1302963 - RNA, 15 nt, Human
uucugaaaauauaac

SEQ ID NO: 1302964 - RNA, 22 nt, Human
uucucuguugucguaaagauuu

SEQ ID NO: 1302965 - RNA, 23 nt, Human
uucucuguugucguaaagauuug

SEQ ID NO: 1302966 - RNA, 20 nt, Human
aucauuuuaccuuugacaaa

SEQ ID NO: 1302967 - RNA, 18 nt, Human
aucauuuguuuaaaaagg

SEQ ID NO: 1302968 - RNA, 16 nt, Human
auccauguaacugccu

SEQ ID NO: 1302969 - RNA, 13 nt, Human
auccauguaacug

SEQ ID NO: 1302970 - RNA, 15 nt, Human
auccauucuccugag

SEQ ID NO: 1302971 - RNA, 11 nt, Human
aucccaacacu

SEQ ID NO: 1302972 - RNA, 15 nt, Human
aucccaacacugcca

SEQ ID NO: 1302973 - RNA, 16 nt, Human
aucccaacacugccag

SEQ ID NO: 1302974 - RNA, 17 nt, Human
aucccaacacugccagc

SEQ ID NO: 1302975 - RNA, 17 nt, Human
aucccaggauguacaag

SEQ ID NO: 1302976 - RNA, 17 nt, Human
aucccaaguagaaucuc

SEQ ID NO: 1302977 - RNA, 21 nt, Human
uucuguaccaguuaauuuuuc

SEQ ID NO: 1302978 - RNA, 18 nt, Human
uucuguacucaaauguag

SEQ ID NO: 1302979 - RNA, 23 nt, Human
aucauuucuuuuugggagagacu

SEQ ID NO: 1302980 - RNA, 18 nt, Human
aucauuuguuggaaugaa

SEQ ID NO: 1302981 - RNA, 13 nt, Human
aucauuuguuuaa

SEQ ID NO: 1302982 - RNA, 14 nt, Human
aucauuuguuuaaa

SEQ ID NO: 1302983 - RNA, 15 nt, Human
aucauuuguuuaaaa

SEQ ID NO: 1302984 - RNA, 17 nt, Human
auccaggguggugguga

SEQ ID NO: 1302985 - RNA, 14 nt, Human
aucauuuuaauuau

SEQ ID NO: 1302986 - RNA, 15 nt, Human
aucauuuuaauuauu

SEQ ID NO: 1302987 - RNA, 14 nt, Human
auccagguaaucca

SEQ ID NO: 1302988 - RNA, 13 nt, Human
aucccucaucugu

SEQ ID NO: 1302989 - RNA, 17 nt, Human
aucccucaucugucccu

SEQ ID NO: 1302990 - RNA, 15 nt, Human
aucccuccccaguuc

SEQ ID NO: 1302991 - RNA, 16 nt, Human
aucccuccccaguuca

SEQ ID NO: 1302992 - RNA, 18 nt, Human
aucccucccccccaugca

SEQ ID NO: 1302993 - RNA, 19 nt, Human
aucccucccccccaugcac

SEQ ID NO: 1302994 - RNA, 21 nt, Human
aucccucccccccaugcacug

SEQ ID NO: 1302995 - RNA, 22 nt, Human
aucccucccccccaugcacugu

SEQ ID NO: 1302996 - RNA, 12 nt, Human
aucccuccuguu

SEQ ID NO: 1302997 - RNA, 15 nt, Human
aucccuccuguuggg

SEQ ID NO: 1302998 - RNA, 13 nt, Human
aucccuccuguug

SEQ ID NO: 1302999 - RNA, 17 nt, Human
aucccucuacagagcuu

SEQ ID NO: 1303000 - RNA, 19 nt, Human
aucccuggcugggauccac

SEQ ID NO: 1303001 - RNA, 12 nt, Human
aucccuggcccc

SEQ ID NO: 1303002 - RNA, 16 nt, Human
aucccuggcccccucc

SEQ ID NO: 1303003 - RNA, 22 nt, Human
aucccuggcccccucccuggau

SEQ ID NO: 1303004 - RNA, 13 nt, Human
aucccugggccug

SEQ ID NO: 1303005 - RNA, 10 nt, Human
aucccuggcc

SEQ ID NO: 1303006 - RNA, 11 nt, Human
aucccuggccc

SEQ ID NO: 1303007 - RNA, 20 nt, Human
aucccucuacagagcuuccc

SEQ ID NO: 1303008 - RNA, 21 nt, Human
aucccucuacagagcuucccu

SEQ ID NO: 1303009 - RNA, 22 nt, Human
aucccucuacagagcuucccug

SEQ ID NO: 1303010 - RNA, 23 nt, Human
aucccucuacagagcuucccuga

SEQ ID NO: 1303011 - RNA, 14 nt, Human
aucccucuccuccc

SEQ ID NO: 1303012 - RNA, 14 nt, Human
aucccugggccugc

SEQ ID NO: 1303013 - RNA, 15 nt, Human
aucccugggccugcu

SEQ ID NO: 1303014 - RNA, 16 nt, Human
aucccugggccugcug

SEQ ID NO: 1303015 - RNA, 17 nt, Human
aucccugggccugcugc

SEQ ID NO: 1303016 - RNA, 18 nt, Human
aucccugggccugcugcu

SEQ ID NO: 1303017 - RNA, 20 nt, Human
aucccugggccugcugcuga

SEQ ID NO: 1303018 - RNA, 21 nt, Human
aucccugggccugcugcugag

SEQ ID NO: 1303019 - RNA, 22 nt, Human
aucccugggccugcugcugaga

SEQ ID NO: 1303020 - RNA, 20 nt, Human
aucccugggccuugggcucc

SEQ ID NO: 1303021 - RNA, 15 nt, Human
aucccugggccuugg

SEQ ID NO: 1303022 - RNA, 18 nt, Human
aucccuguguugucucua

SEQ ID NO: 1303023 - RNA, 16 nt, Human
uucaaaauuguuacaa

SEQ ID NO: 1303024 - RNA, 16 nt, Human
uucaaaauggagggaa

SEQ ID NO: 1303025 - RNA, 19 nt, Human
uucaaaauaggguauauuu

SEQ ID NO: 1303026 - RNA, 15 nt, Human
uucaaaauguuaucu

SEQ ID NO: 1303027 - RNA, 23 nt, Human
uucaaaauguuaucuucucaagu

SEQ ID NO: 1303028 - RNA, 20 nt, Human
uucaaaauaggguauauuuu

SEQ ID NO: 1303029 - RNA, 13 nt, Human
uucaaaaugauuu

SEQ ID NO: 1303030 - RNA, 19 nt, Human
uucaaaaugauuuccucug

SEQ ID NO: 1303031 - RNA, 22 nt, Human
uucaaaaugauuuccucuguaa

SEQ ID NO: 1303032 - RNA, 23 nt, Human
uucaaaaugauuuccucuguaau

SEQ ID NO: 1303033 - RNA, 17 nt, Human
uucaaaaugcuuuuuau

SEQ ID NO: 1303034 - RNA, 20 nt, Human
uucaaaaugcuuuuuauuau

SEQ ID NO: 1303035 - RNA, 15 nt, Human
uucaaacauauauaa

SEQ ID NO: 1303036 - RNA, 12 nt, Human
uucaaacuacuu

SEQ ID NO: 1303037 - RNA, 13 nt, Human
uucaaacuacuuu

SEQ ID NO: 1303038 - RNA, 22 nt, Human
uucaaacuacuuugcugcuaau

SEQ ID NO: 1303039 - RNA, 14 nt, Human
uucaacuuaacuau

SEQ ID NO: 1303040 - RNA, 19 nt, Human
uucaacuuauuaacaauua

SEQ ID NO: 1303041 - RNA, 20 nt, Human
uuauuuccuaugauguauac

SEQ ID NO: 1303042 - RNA, 22 nt, Human
uuauuuccuaugauguauacug

SEQ ID NO: 1303043 - RNA, 17 nt, Human
uuauuuccuaugaugua

SEQ ID NO: 1303044 - RNA, 11 nt, Human
uuauuuccuau

SEQ ID NO: 1303045 - RNA, 12 nt, Human
uuauuucugcau

SEQ ID NO: 1303046 - RNA, 13 nt, Human
uuauuucugcaua

SEQ ID NO: 1303047 - RNA, 15 nt, Human
uuauuucugcauaug

SEQ ID NO: 1303048 - RNA, 20 nt, Human
uuauuucugcauauguugaa

SEQ ID NO: 1303049 - RNA, 22 nt, Human
uuauuucugcauauguugaaua

SEQ ID NO: 1303050 - RNA, 18 nt, Human
uucaagugcuucuccagc

SEQ ID NO: 1303051 - RNA, 19 nt, Human
uucaaguguaaaauauuuu

SEQ ID NO: 1303052 - RNA, 23 nt, Human
uucaaguuccaaguugcuaauac

SEQ ID NO: 1303053 - RNA, 20 nt, Human
uucaagugauucucaugccu

SEQ ID NO: 1303054 - RNA, 22 nt, Human
uucaagugauucucaugccuca

SEQ ID NO: 1303055 - RNA, 17 nt, Human
uucaaggaauuucuuaa

SEQ ID NO: 1303056 - RNA, 19 nt, Human
uucaaggaauuucuuaacu

SEQ ID NO: 1303057 - RNA, 19 nt, Human
uucaaggaguaugcaggga

SEQ ID NO: 1303058 - RNA, 14 nt, Human
uucaaggcacucua

SEQ ID NO: 1303059 - RNA, 16 nt, Human
uucaaggcacucuaga

SEQ ID NO: 1303060 - RNA, 17 nt, Human
uucaaggcacucuagau

SEQ ID NO: 1303061 - RNA, 18 nt, Human
uucaaggcacucuagauu

SEQ ID NO: 1303062 - RNA, 19 nt, Human
uucaaggcacucuagauuc

SEQ ID NO: 1303063 - RNA, 21 nt, Human
uucaaggcacucuagauucca

SEQ ID NO: 1303064 - RNA, 22 nt, Human
uucaaggcacucuagauuccau

SEQ ID NO: 1303065 - RNA, 23 nt, Human
uucaagaaacugaggaauuuucu

SEQ ID NO: 1303066 - RNA, 22 nt, Human
uucaagaaagcuucaaacugca

SEQ ID NO: 1303067 - RNA, 12 nt, Human
uucaacuuuucc

SEQ ID NO: 1303068 - RNA, 12 nt, Human
uucaagaaacug

SEQ ID NO: 1303069 - RNA, 13 nt, Human
uucaagaaacuga

SEQ ID NO: 1303070 - RNA, 20 nt, Human
uucaagaaacugaggaauuu

SEQ ID NO: 1303071 - RNA, 23 nt, Human
auagggcaauuaauuccuucagc

SEQ ID NO: 1303072 - RNA, 22 nt, Human
auagggcaauuaauuccuucag

SEQ ID NO: 1303073 - RNA, 21 nt, Human
auagggcaauuaauuccuuca

SEQ ID NO: 1303074 - RNA, 22 nt, Human
auagggaaaauucuaacccagg

SEQ ID NO: 1303075 - RNA, 17 nt, Human
auagggcugagcucucu

SEQ ID NO: 1303076 - RNA, 14 nt, Human
auagggcugagcuc

SEQ ID NO: 1303077 - RNA, 14 nt, Human
auagggucuaacuc

SEQ ID NO: 1303078 - RNA, 22 nt, Human
auaggauuuauuuaaaauagca

SEQ ID NO: 1303079 - RNA, 13 nt, Human
auaggcaggaagc

SEQ ID NO: 1303080 - RNA, 20 nt, Human
auaggcaggaagcccaauug

SEQ ID NO: 1303081 - RNA, 12 nt, Human
auaggccagccg

SEQ ID NO: 1303082 - RNA, 16 nt, Human
auagggaaaauucuaa

SEQ ID NO: 1303083 - RNA, 17 nt, Human
auaggcacaggaaacca

SEQ ID NO: 1303084 - RNA, 22 nt, Human
auaggcaccuaccaccacgccc

SEQ ID NO: 1303085 - RNA, 23 nt, Human
auaggauuuauuuaaaauagcaa

SEQ ID NO: 1303086 - RNA, 22 nt, Human
auaggaauugacccacaagaaa

SEQ ID NO: 1303087 - RNA, 23 nt, Human
auaggaucauuuguuggaaugaa

SEQ ID NO: 1303088 - RNA, 16 nt, Human
auaggauuuauuuaaa

SEQ ID NO: 1303089 - RNA, 21 nt, Human
auaggauuuauuuaaaauagc

SEQ ID NO: 1303090 - RNA, 21 nt, Human
auaggaauugacccacaagaa

SEQ ID NO: 1303091 - RNA, 22 nt, Human
uucaccauguuggccaggcugc

SEQ ID NO: 1303092 - RNA, 22 nt, Human
uucaccauguuggccaggcugg

SEQ ID NO: 1303093 - RNA, 15 nt, Human
uucaccauuauaaug

SEQ ID NO: 1303094 - RNA, 20 nt, Human
uucaccauuauaaugaauuu

SEQ ID NO: 1303095 - RNA, 24 nt, Human
uucaccauuuggcaaugccaucau

SEQ ID NO: 1303096 - RNA, 18 nt, Human
uucaccauuauaaugaau

SEQ ID NO: 1303097 - RNA, 18 nt, Human
auagcuuaugaaaagaau

SEQ ID NO: 1303098 - RNA, 14 nt, Human
uucacauuggaaac

SEQ ID NO: 1303099 - RNA, 19 nt, Human
uucacauuuuccuuuucaa

SEQ ID NO: 1303100 - RNA, 17 nt, Human
uucacauuuuuguauuu

SEQ ID NO: 1303101 - RNA, 14 nt, Human
uucaccaaaucuug

SEQ ID NO: 1303102 - RNA, 18 nt, Human
uucaccagauuugcuaau

SEQ ID NO: 1303103 - RNA, 19 nt, Human
uucacauuguauucagagu

SEQ ID NO: 1303104 - RNA, 23 nt, Human
uucacauagcccacuuacauuua

SEQ ID NO: 1303105 - RNA, 13 nt, Human
uucacauuggaaa

SEQ ID NO: 1303106 - RNA, 12 nt, Human
uucaauaaagcu

SEQ ID NO: 1303107 - RNA, 13 nt, Human
uucaauaaagcug

SEQ ID NO: 1303108 - RNA, 13 nt, Human
uucacagcuccuc

SEQ ID NO: 1303109 - RNA, 15 nt, Human
uucacagcuccuccc

SEQ ID NO: 1303110 - RNA, 17 nt, Human
uucacagcuccucccac

SEQ ID NO: 1303111 - RNA, 12 nt, Human
uucacaggcagc

SEQ ID NO: 1303112 - RNA, 13 nt, Human
uucacaggcagcc

SEQ ID NO: 1303113 - RNA, 14 nt, Human
uucacaggcagcca

SEQ ID NO: 1303114 - RNA, 16 nt, Human
uucacaggcagccagu

SEQ ID NO: 1303115 - RNA, 19 nt, Human
uucacaggcagccagugcc

SEQ ID NO: 1303116 - RNA, 19 nt, Human
uucacaguacccaaacugc

SEQ ID NO: 1303117 - RNA, 23 nt, Human
uucacaguacccaaacugcuuuu

SEQ ID NO: 1303118 - RNA, 15 nt, Human
uucacagugcucuuu

SEQ ID NO: 1303119 - RNA, 18 nt, Human
auagcuaaguacacaaua

SEQ ID NO: 1303120 - RNA, 15 nt, Human
auagcuaaguacaca

SEQ ID NO: 1303121 - RNA, 14 nt, Human
auagcuaaguacac

SEQ ID NO: 1303122 - RNA, 13 nt, Human
auagcuaaguaca

SEQ ID NO: 1303123 - RNA, 18 nt, Human
auagcguucuuguaauuu

SEQ ID NO: 1303124 - RNA, 13 nt, Human
auagcuaaauacc

SEQ ID NO: 1303125 - RNA, 13 nt, Human
auagcguucuugu

SEQ ID NO: 1303126 - RNA, 14 nt, Human
auagcguucuugua

SEQ ID NO: 1303127 - RNA, 15 nt, Human
auagcguucuuguaa

SEQ ID NO: 1303128 - RNA, 17 nt, Human
auagcguucuuguaauu

SEQ ID NO: 1303129 - RNA, 17 nt, Human
auagcuacuaauuuuaa

SEQ ID NO: 1303130 - RNA, 14 nt, Human
auagcuacuaauuu

SEQ ID NO: 1303131 - RNA, 16 nt, Human
auaagaguagaaacug

SEQ ID NO: 1303132 - RNA, 16 nt, Human
auaagaguuggcuggu

SEQ ID NO: 1303133 - RNA, 15 nt, Human
auaagauauuuuuca

SEQ ID NO: 1303134 - RNA, 16 nt, Human
auaagauauuuuucau

SEQ ID NO: 1303135 - RNA, 12 nt, Human
uuagacagaggc

SEQ ID NO: 1303136 - RNA, 14 nt, Human
auaacuuccacagg

SEQ ID NO: 1303137 - RNA, 18 nt, Human
auaacuuccacagggucc

SEQ ID NO: 1303138 - RNA, 19 nt, Human
auaacuugagaccuaaucu

SEQ ID NO: 1303139 - RNA, 21 nt, Human
auaacuugagaccuaaucucu

SEQ ID NO: 1303140 - RNA, 16 nt, Human
auaacuuuaacuucug

SEQ ID NO: 1303141 - RNA, 17 nt, Human
auaacuuuaacuucugu

SEQ ID NO: 1303142 - RNA, 22 nt, Human
auaacuuuaacuucuguuuuac

SEQ ID NO: 1303143 - RNA, 15 nt, Human
auaagagcucaggau

SEQ ID NO: 1303144 - RNA, 18 nt, Human
auagcuacuaauuuuaaa

SEQ ID NO: 1303145 - RNA, 19 nt, Human
auagcucuggggugggcag

SEQ ID NO: 1303146 - RNA, 22 nt, Human
auagcucuggggugggcaguuu

SEQ ID NO: 1303147 - RNA, 22 nt, Human
auagcucuaauguuugcauaua

SEQ ID NO: 1303148 - RNA, 21 nt, Human
auagcucuaauguuugcauau

SEQ ID NO: 1303149 - RNA, 20 nt, Human
auagcucuaauguuugcaua

SEQ ID NO: 1303150 - RNA, 19 nt, Human
auagcucuaauguuugcau

SEQ ID NO: 1303151 - RNA, 12 nt, Human
auagcucugggg

SEQ ID NO: 1303152 - RNA, 13 nt, Human
auagcucuggggu

SEQ ID NO: 1303153 - RNA, 18 nt, Human
auagcucuaauguuugca

SEQ ID NO: 1303154 - RNA, 17 nt, Human
auagcucuaauguuugc

SEQ ID NO: 1303155 - RNA, 16 nt, Human
auagcucuaauguuug

SEQ ID NO: 1303156 - RNA, 15 nt, Human
auagcucuaauguuu

SEQ ID NO: 1303157 - RNA, 15 nt, Human
auagcucaugugcau

SEQ ID NO: 1303158 - RNA, 12 nt, Human
uuauuucaauau

SEQ ID NO: 1303159 - RNA, 22 nt, Human
uuauuucccuacauuaaacaug

SEQ ID NO: 1303160 - RNA, 19 nt, Human
uuauuucccuacauuaaac

SEQ ID NO: 1303161 - RNA, 15 nt, Human
uuauuucaugaaaau

SEQ ID NO: 1303162 - RNA, 19 nt, Human
uuauuucaugauuagaaau

SEQ ID NO: 1303163 - RNA, 12 nt, Human
uuauuuauguau

SEQ ID NO: 1303164 - RNA, 15 nt, Human
uuauuuauguauggu

SEQ ID NO: 1303165 - RNA, 21 nt, Human
uuauuuauguauggugcaaug

SEQ ID NO: 1303166 - RNA, 13 nt, Human
uuauuuauguauu

SEQ ID NO: 1303167 - RNA, 14 nt, Human
uuauuuauguauug

SEQ ID NO: 1303168 - RNA, 15 nt, Human
uuauuuauguauugu

SEQ ID NO: 1303169 - RNA, 21 nt, Human
uuauuuauguauugugcaaug

SEQ ID NO: 1303170 - RNA, 15 nt, Human
uuauuuauuggagau

SEQ ID NO: 1303171 - RNA, 15 nt, Human
uuauuuagauucacu

SEQ ID NO: 1303172 - RNA, 15 nt, Human
uuauuuaguauuuau

SEQ ID NO: 1303173 - RNA, 17 nt, Human
uuauuuagcaccaggga

SEQ ID NO: 1303174 - RNA, 16 nt, Human
uuauuuacauuuaaua

SEQ ID NO: 1303175 - RNA, 13 nt, Human
uuauuuacauuua

SEQ ID NO: 1303176 - RNA, 15 nt, Human
uuauuuacauuuaau

SEQ ID NO: 1303177 - RNA, 17 nt, Human
uuauuuaccccuccccu

SEQ ID NO: 1303178 - RNA, 14 nt, Human
auagcugaucaguu

SEQ ID NO: 1303179 - RNA, 17 nt, Human
auagcugcuuccagugu

SEQ ID NO: 1303180 - RNA, 15 nt, Human
auagcuguaaacuuc

SEQ ID NO: 1303181 - RNA, 15 nt, Human
auagcugcuuccagu

SEQ ID NO: 1303182 - RNA, 12 nt, Human
auagcugugacu

SEQ ID NO: 1303183 - RNA, 22 nt, Human
uuauuuaaaauagcaaaagaag

SEQ ID NO: 1303184 - RNA, 21 nt, Human
uuauuuaaaauagcaaaagaa

SEQ ID NO: 1303185 - RNA, 23 nt, Human
uuauuuaaaccgcuaaaagaaac

SEQ ID NO: 1303186 - RNA, 20 nt, Human
uuauuuaaacucuguugcaa

SEQ ID NO: 1303187 - RNA, 17 nt, Human
uuauuuaaaaaacuaaa

SEQ ID NO: 1303188 - RNA, 15 nt, Human
uuauuuaaaauagca

SEQ ID NO: 1303189 - RNA, 16 nt, Human
uuauuuaaaauagcaa

SEQ ID NO: 1303190 - RNA, 14 nt, Human
uuauuuaaaucugu

SEQ ID NO: 1303191 - RNA, 18 nt, Human
auauauucagccuggcuu

SEQ ID NO: 1303192 - RNA, 16 nt, Human
auauauuaucuuuuca

SEQ ID NO: 1303193 - RNA, 14 nt, Human
auauauuauuacuu

SEQ ID NO: 1303194 - RNA, 18 nt, Human
auauauuauuacuuguaa

SEQ ID NO: 1303195 - RNA, 13 nt, Human
auauauuauuaua

SEQ ID NO: 1303196 - RNA, 14 nt, Human
auauauuauuauaa

SEQ ID NO: 1303197 - RNA, 16 nt, Human
auauauuauuauaauc

SEQ ID NO: 1303198 - RNA, 18 nt, Human
auauauuauuauaaucuu

SEQ ID NO: 1303199 - RNA, 17 nt, Human
auaucgacuuguuuuug

SEQ ID NO: 1303200 - RNA, 14 nt, Human
auaucuaaaauauu

SEQ ID NO: 1303201 - RNA, 21 nt, Human
auaucuaaaauauuauuuuau

SEQ ID NO: 1303202 - RNA, 17 nt, Human
auaucuauauuuuacau

SEQ ID NO: 1303203 - RNA, 16 nt, Human
auaucuauauuuuaca

SEQ ID NO: 1303204 - RNA, 20 nt, Human
auaucuauauuuuacauaaa

SEQ ID NO: 1303205 - RNA, 22 nt, Human
auaucuauauuuuacauaaauu

SEQ ID NO: 1303206 - RNA, 16 nt, Human
auaucuagguuuauga

SEQ ID NO: 1303207 - RNA, 23 nt, Human
auaucuaccccagacuagaugua

SEQ ID NO: 1303208 - RNA, 21 nt, Human
auaucuaccccagacuagaug

SEQ ID NO: 1303209 - RNA, 20 nt, Human
uucaucauucacuucacugu

SEQ ID NO: 1303210 - RNA, 17 nt, Human
uucauauuuuaaacaga

SEQ ID NO: 1303211 - RNA, 22 nt, Human
uucauauuuuaaacagaggaua

SEQ ID NO: 1303212 - RNA, 19 nt, Human
uucaucauucacuucacug

SEQ ID NO: 1303213 - RNA, 17 nt, Human
uucauccaaguuaaaug

SEQ ID NO: 1303214 - RNA, 20 nt, Human
uucauccaaguuaaauguag

SEQ ID NO: 1303215 - RNA, 21 nt, Human
uucauauuuuaaacagaggau

SEQ ID NO: 1303216 - RNA, 14 nt, Human
uucaucauuuuuua

SEQ ID NO: 1303217 - RNA, 14 nt, Human
auauauuauacuug

SEQ ID NO: 1303218 - RNA, 17 nt, Human
auauauuauacuuguaa

SEQ ID NO: 1303219 - RNA, 19 nt, Human
auauauuauacuuguaauu

SEQ ID NO: 1303220 - RNA, 22 nt, Human
auauauuauacuuguaauuaug

SEQ ID NO: 1303221 - RNA, 14 nt, Human
auauauuauaugga

SEQ ID NO: 1303222 - RNA, 15 nt, Human
auauauuauauggaa

SEQ ID NO: 1303223 - RNA, 16 nt, Human
auauauuauauggaaa

SEQ ID NO: 1303224 - RNA, 20 nt, Human
auauauuauauggaaauaua

SEQ ID NO: 1303225 - RNA, 13 nt, Human
auauauuaucuuu

SEQ ID NO: 1303226 - RNA, 14 nt, Human
auauauuaucuuuu

SEQ ID NO: 1303227 - RNA, 15 nt, Human
auauauuaucuuuuc

SEQ ID NO: 1303228 - RNA, 21 nt, Human
uucaguacccucucagcucca

SEQ ID NO: 1303229 - RNA, 22 nt, Human
uucaguacccucucagcuccag

SEQ ID NO: 1303230 - RNA, 13 nt, Human
uucauacuugaac

SEQ ID NO: 1303231 - RNA, 18 nt, Human
uucauagagacuugggaa

SEQ ID NO: 1303232 - RNA, 13 nt, Human
uucauagcccagu

SEQ ID NO: 1303233 - RNA, 17 nt, Human
uucaguauuauauguac

SEQ ID NO: 1303234 - RNA, 22 nt, Human
uucauacuguaacauucaggaa

SEQ ID NO: 1303235 - RNA, 15 nt, Human
uucauacuugaacgu

SEQ ID NO: 1303236 - RNA, 15 nt, Human
auaucuauguuuuac

SEQ ID NO: 1303237 - RNA, 16 nt, Human
auaucuauguuuuacc

SEQ ID NO: 1303238 - RNA, 17 nt, Human
auaucuauguuuuacca

SEQ ID NO: 1303239 - RNA, 13 nt, Human
auaugauucaaau

SEQ ID NO: 1303240 - RNA, 22 nt, Human
auaugauucaaaugucuauaaa

SEQ ID NO: 1303241 - RNA, 19 nt, Human
auaucuuggacaaaucaca

SEQ ID NO: 1303242 - RNA, 20 nt, Human
auaucuuggacaaaucacau

SEQ ID NO: 1303243 - RNA, 15 nt, Human
auaucugaagcccuc

SEQ ID NO: 1303244 - RNA, 13 nt, Human
auaucuggccucu

SEQ ID NO: 1303245 - RNA, 19 nt, Human
auaucuggccucugcuuuc

SEQ ID NO: 1303246 - RNA, 16 nt, Human
auaucuguaaugguac

SEQ ID NO: 1303247 - RNA, 15 nt, Human
auaucuguaauggua

SEQ ID NO: 1303248 - RNA, 13 nt, Human
auaugugaacagu

SEQ ID NO: 1303249 - RNA, 11 nt, Human
auauguccugg

SEQ ID NO: 1303250 - RNA, 22 nt, Human
auaugucaagugcugugcaagg

SEQ ID NO: 1303251 - RNA, 14 nt, Human
auaugucagugcug

SEQ ID NO: 1303252 - RNA, 18 nt, Human
auaugucagugcugaugu

SEQ ID NO: 1303253 - RNA, 17 nt, Human
uucauggcagaaggcaa

SEQ ID NO: 1303254 - RNA, 23 nt, Human
uucauggcagauguaggagggac

SEQ ID NO: 1303255 - RNA, 14 nt, Human
uucauguaaacugu

SEQ ID NO: 1303256 - RNA, 17 nt, Human
uucauguaaacugugca

SEQ ID NO: 1303257 - RNA, 18 nt, Human
uucauguaaacugugcac

SEQ ID NO: 1303258 - RNA, 19 nt, Human
uucauguaaacugugcacc

SEQ ID NO: 1303259 - RNA, 18 nt, Human
uucauguaauccucaaga

SEQ ID NO: 1303260 - RNA, 21 nt, Human
uucauguacaagaugaaggag

SEQ ID NO: 1303261 - RNA, 17 nt, Human
uucauguacaagaugaa

SEQ ID NO: 1303262 - RNA, 12 nt, Human
auauguaugggu

SEQ ID NO: 1303263 - RNA, 17 nt, Human
auauguauggguagggu

SEQ ID NO: 1303264 - RNA, 23 nt, Human
auauguauggguaggguaaauca

SEQ ID NO: 1303265 - RNA, 14 nt, Human
auauguaugguuuu

SEQ ID NO: 1303266 - RNA, 15 nt, Human
auaugcacaauagca

SEQ ID NO: 1303267 - RNA, 17 nt, Human
auauaacaaugcuguau

SEQ ID NO: 1303268 - RNA, 19 nt, Human
auauaagcuuguauuccuu

SEQ ID NO: 1303269 - RNA, 22 nt, Human
auauaagggaaguaguuaucau

SEQ ID NO: 1303270 - RNA, 14 nt, Human
auauaagggaagua

SEQ ID NO: 1303271 - RNA, 23 nt, Human
auauaagggaaguaguuaucaug

SEQ ID NO: 1303272 - RNA, 12 nt, Human
auauaagcuuuu

SEQ ID NO: 1303273 - RNA, 12 nt, Human
auauaacaaugc

SEQ ID NO: 1303274 - RNA, 15 nt, Human
auauaacaaugcugu

SEQ ID NO: 1303275 - RNA, 17 nt, Human
auauauaacaaugcugu

SEQ ID NO: 1303276 - RNA, 18 nt, Human
auauauaacaaugcugua

SEQ ID NO: 1303277 - RNA, 19 nt, Human
auauauaacaaugcuguau

SEQ ID NO: 1303278 - RNA, 22 nt, Human
auauaguuagcuaauaaaaagc

SEQ ID NO: 1303279 - RNA, 17 nt, Human
auauaguuagcuaauaa

SEQ ID NO: 1303280 - RNA, 12 nt, Human
auauaguuuuac

SEQ ID NO: 1303281 - RNA, 13 nt, Human
auauaguuuuacu

SEQ ID NO: 1303282 - RNA, 16 nt, Human
auauaguuuuacuuuu

SEQ ID NO: 1303283 - RNA, 18 nt, Human
auauaguuuuacuuuuaa

SEQ ID NO: 1303284 - RNA, 23 nt, Human
auauaguuuuacuuuuaaacugu

SEQ ID NO: 1303285 - RNA, 18 nt, Human
auagucaaauugugugaa

SEQ ID NO: 1303286 - RNA, 23 nt, Human
auagguagaauguaaagcuuguc

SEQ ID NO: 1303287 - RNA, 20 nt, Human
auaggguuugugacagggcg

SEQ ID NO: 1303288 - RNA, 18 nt, Human
auagguagaauguaaagc

SEQ ID NO: 1303289 - RNA, 20 nt, Human
auagguagaauguaaagcuu

SEQ ID NO: 1303290 - RNA, 22 nt, Human
auagucauguaagcugaaaaua

SEQ ID NO: 1303291 - RNA, 17 nt, Human
auaguccagcuuuguuc

SEQ ID NO: 1303292 - RNA, 13 nt, Human
auaguuucugagg

SEQ ID NO: 1303293 - RNA, 14 nt, Human
auaguuucugaggc

SEQ ID NO: 1303294 - RNA, 19 nt, Human
auaguuucugaggcuuuau

SEQ ID NO: 1303295 - RNA, 18 nt, Human
auaguuuggauauguaaa

SEQ ID NO: 1303296 - RNA, 23 nt, Human
auaguuuggauauguaaaacauu

SEQ ID NO: 1303297 - RNA, 19 nt, Human
auaguuuggauauguaaaa

SEQ ID NO: 1303298 - RNA, 15 nt, Human
auaguuuuacuuuua

SEQ ID NO: 1303299 - RNA, 21 nt, Human
auaguuuuacuuuuaaacugu

SEQ ID NO: 1303300 - RNA, 22 nt, Human
auaguuuuacuuuuaaacugug

SEQ ID NO: 1303301 - RNA, 23 nt, Human
auaguuuuacuuuuaaacugugu

SEQ ID NO: 1303302 - RNA, 16 nt, Human
auaguuuuauuaauaa

SEQ ID NO: 1303303 - RNA, 14 nt, Human
auauaaaauaugaa

SEQ ID NO: 1303304 - RNA, 16 nt, Human
auauaaagacguuuua

SEQ ID NO: 1303305 - RNA, 22 nt, Human
auauaaagacguuuuauaagca

SEQ ID NO: 1303306 - RNA, 20 nt, Human
auauaaagacguuuuauaag

SEQ ID NO: 1303307 - RNA, 16 nt, Human
auauaaauauauauuc

SEQ ID NO: 1303308 - RNA, 16 nt, Human
auauaaauauuagaaa

SEQ ID NO: 1303309 - RNA, 22 nt, Human
auauaaauauuagaaacagcuu

SEQ ID NO: 1303310 - RNA, 16 nt, Human
auauaaauauauuauu

SEQ ID NO: 1303311 - RNA, 12 nt, Human
auauaaaugcaa

SEQ ID NO: 1303312 - RNA, 14 nt, Human
auauaaaugcaaau

SEQ ID NO: 1303313 - RNA, 15 nt, Human
auauaaaugcaaaua

SEQ ID NO: 1303314 - RNA, 17 nt, Human
auauaaaugcaaauaac

SEQ ID NO: 1303315 - RNA, 18 nt, Human
auauaaaugcaaauaaca

SEQ ID NO: 1303316 - RNA, 23 nt, Human
auauaaaugcaaauaacaaaugc

SEQ ID NO: 1303317 - RNA, 18 nt, Human
uucagaugugaaccauua

SEQ ID NO: 1303318 - RNA, 20 nt, Human
uucagcaaacucuuuuccca

SEQ ID NO: 1303319 - RNA, 19 nt, Human
uucagcaaagugguucccu

SEQ ID NO: 1303320 - RNA, 18 nt, Human
uucagcaagacuucucuu

SEQ ID NO: 1303321 - RNA, 18 nt, Human
uucagcaagauaaacauu

SEQ ID NO: 1303322 - RNA, 19 nt, Human
uucagcaagauaaacauua

SEQ ID NO: 1303323 - RNA, 15 nt, Human
uucagaugugaacca

SEQ ID NO: 1303324 - RNA, 16 nt, Human
uucagaugugaaccau

SEQ ID NO: 1303325 - RNA, 16 nt, Human
uucagaauuaaacuuu

SEQ ID NO: 1303326 - RNA, 17 nt, Human
uucagaauuaaacuuuu

SEQ ID NO: 1303327 - RNA, 13 nt, Human
uucagaauuuagu

SEQ ID NO: 1303328 - RNA, 15 nt, Human
uucagaauuuagugu

SEQ ID NO: 1303329 - RNA, 23 nt, Human
uucagaauuuuauacuuucccua

SEQ ID NO: 1303330 - RNA, 21 nt, Human
uucagaauuuaguguauccau

SEQ ID NO: 1303331 - RNA, 21 nt, Human
uucagcacuagccaaaccuca

SEQ ID NO: 1303332 - RNA, 23 nt, Human
uucagcacuagccaaaccucacc

SEQ ID NO: 1303333 - RNA, 13 nt, Human
uucagcacugucc

SEQ ID NO: 1303334 - RNA, 19 nt, Human
uucagcaaguuagaacuag

SEQ ID NO: 1303335 - RNA, 17 nt, Human
uucagcaccaagcaugu

SEQ ID NO: 1303336 - RNA, 22 nt, Human
uucagcaccaagcaugucccag

SEQ ID NO: 1303337 - RNA, 16 nt, Human
uucagcacuagccaaa

SEQ ID NO: 1303338 - RNA, 17 nt, Human
uucagcacuagccaaac

SEQ ID NO: 1303339 - RNA, 19 nt, Human
uucagcacuagccaaaccu

SEQ ID NO: 1303340 - RNA, 11 nt, Human
uucagccaagg

SEQ ID NO: 1303341 - RNA, 13 nt, Human
uucagcccaucuc

SEQ ID NO: 1303342 - RNA, 13 nt, Human
uucacugcuggcu

SEQ ID NO: 1303343 - RNA, 15 nt, Human
uucacugcuggcugc

SEQ ID NO: 1303344 - RNA, 16 nt, Human
uucacugcuggcugcc

SEQ ID NO: 1303345 - RNA, 17 nt, Human
uucacugcuggcugccu

SEQ ID NO: 1303346 - RNA, 18 nt, Human
uucacugcuggcugccuu

SEQ ID NO: 1303347 - RNA, 19 nt, Human
uucacugcuggcugccuua

SEQ ID NO: 1303348 - RNA, 15 nt, Human
uucacugcuguuaua

SEQ ID NO: 1303349 - RNA, 23 nt, Human
uucacugcuguuauauuucauca

SEQ ID NO: 1303350 - RNA, 14 nt, Human
uucacuggagcaca

SEQ ID NO: 1303351 - RNA, 15 nt, Human
uucacuggagcacaa

SEQ ID NO: 1303352 - RNA, 17 nt, Human
uucacuggagcacaaua

SEQ ID NO: 1303353 - RNA, 19 nt, Human
auauauacucaagaguggu

SEQ ID NO: 1303354 - RNA, 14 nt, Human
auauauacuauuaa

SEQ ID NO: 1303355 - RNA, 15 nt, Human
uucagaaagaagugg

SEQ ID NO: 1303356 - RNA, 16 nt, Human
uucagaaagacuuggu

SEQ ID NO: 1303357 - RNA, 15 nt, Human
uucagaaaauguucu

SEQ ID NO: 1303358 - RNA, 19 nt, Human
uucagaaaauguucuguuu

SEQ ID NO: 1303359 - RNA, 15 nt, Human
uucagaaguuaguuu

SEQ ID NO: 1303360 - RNA, 20 nt, Human
uucagaaguuaguuuguaua

SEQ ID NO: 1303361 - RNA, 21 nt, Human
uucagaauaugucagugcuga

SEQ ID NO: 1303362 - RNA, 15 nt, Human
uucacuguagaauga

SEQ ID NO: 1303363 - RNA, 22 nt, Human
uucacuguagaaugauuucaug

SEQ ID NO: 1303364 - RNA, 17 nt, Human
uucacuguagcucuaaa

SEQ ID NO: 1303365 - RNA, 15 nt, Human
uuacuguaagaaaau

SEQ ID NO: 1303366 - RNA, 18 nt, Human
uuacugguccaaaagauu

SEQ ID NO: 1303367 - RNA, 14 nt, Human
uuacugguccaaaa

SEQ ID NO: 1303368 - RNA, 15 nt, Human
uuacugguccaaaag

SEQ ID NO: 1303369 - RNA, 17 nt, Human
uuacugguccaaaagau

SEQ ID NO: 1303370 - RNA, 15 nt, Human
uuacuguaacugauu

SEQ ID NO: 1303371 - RNA, 15 nt, Human
uuacuguaauuccuc

SEQ ID NO: 1303372 - RNA, 17 nt, Human
uuagaaauaaagcaucu

SEQ ID NO: 1303373 - RNA, 22 nt, Human
uuagaaauaaagcaucucauuu

SEQ ID NO: 1303374 - RNA, 14 nt, Human
uuagacagaacacc

SEQ ID NO: 1303375 - RNA, 22 nt, Human
uuagacagaacaccuaugcaaa

SEQ ID NO: 1303376 - RNA, 17 nt, Human
uuagaagacaauugaca

SEQ ID NO: 1303377 - RNA, 13 nt, Human
uuagaagccugca

SEQ ID NO: 1303378 - RNA, 23 nt, Human
uuagaagccugcauaauguuucu

SEQ ID NO: 1303379 - RNA, 13 nt, Human
uuagaaccuuucu

SEQ ID NO: 1303380 - RNA, 12 nt, Human
uuacucacugcu

SEQ ID NO: 1303381 - RNA, 14 nt, Human
uuacugauauauuu

SEQ ID NO: 1303382 - RNA, 23 nt, Human
uuacugauauauuuuacaauuuu

SEQ ID NO: 1303383 - RNA, 20 nt, Human
uuacauaauucacucugagu

SEQ ID NO: 1303384 - RNA, 13 nt, Human
uuacaucauuucu

SEQ ID NO: 1303385 - RNA, 14 nt, Human
uuacaucauuucuu

SEQ ID NO: 1303386 - RNA, 18 nt, Human
uuaccugggcauucuugu

SEQ ID NO: 1303387 - RNA, 12 nt, Human
uuaccuguggau

SEQ ID NO: 1303388 - RNA, 13 nt, Human
uuaccuguggaua

SEQ ID NO: 1303389 - RNA, 20 nt, Human
uuaccuguggauauuuguau

SEQ ID NO: 1303390 - RNA, 18 nt, Human
auaaacacucuugaaaaa

SEQ ID NO: 1303391 - RNA, 22 nt, Human
auaaacacaucacagaugaaua

SEQ ID NO: 1303392 - RNA, 19 nt, Human
auaaaguguaacaauugug

SEQ ID NO: 1303393 - RNA, 14 nt, Human
auaaaguguaacaa

SEQ ID NO: 1303394 - RNA, 15 nt, Human
auaaaguucuguacu

SEQ ID NO: 1303395 - RNA, 16 nt, Human
auaaaguugauaaaga

SEQ ID NO: 1303396 - RNA, 21 nt, Human
auaaaguugauaaagauuuuu

SEQ ID NO: 1303397 - RNA, 17 nt, Human
auaaaguugauaaagau

SEQ ID NO: 1303398 - RNA, 20 nt, Human
auaaaguugauaaagauuuu

SEQ ID NO: 1303399 - RNA, 19 nt, Human
auaaauagaauguaaaugu

SEQ ID NO: 1303400 - RNA, 20 nt, Human
auaaauagaauguaaauguc

SEQ ID NO: 1303401 - RNA, 16 nt, Human
auaaauagaauguaaa

SEQ ID NO: 1303402 - RNA, 14 nt, Human
auaaauagaaugua

SEQ ID NO: 1303403 - RNA, 18 nt, Human
auaaauacugcaaaucag

SEQ ID NO: 1303404 - RNA, 13 nt, Human
auaaauauaucua

SEQ ID NO: 1303405 - RNA, 21 nt, Human
auaaauauaucuaccccagac

SEQ ID NO: 1303406 - RNA, 12 nt, Human
auaaauauauua

SEQ ID NO: 1303407 - RNA, 14 nt, Human
auaaauauauuauu

SEQ ID NO: 1303408 - RNA, 18 nt, Human
auaaauauauuauuacuu

SEQ ID NO: 1303409 - RNA, 22 nt, Human
auaaauauauuauuacuuguaa

SEQ ID NO: 1303410 - RNA, 23 nt, Human
auaaauauauuauuacuuguaaa

SEQ ID NO: 1303411 - RNA, 21 nt, Human
auaaauauccuuuaauugauc

SEQ ID NO: 1303412 - RNA, 14 nt, Human
auaaauauccuuua

SEQ ID NO: 1303413 - RNA, 19 nt, Human
uuacaguaggagcccagcu

SEQ ID NO: 1303414 - RNA, 15 nt, Human
uuacaggaacuucau

SEQ ID NO: 1303415 - RNA, 14 nt, Human
uuacagcugccugc

SEQ ID NO: 1303416 - RNA, 13 nt, Human
uuacagcugccug

SEQ ID NO: 1303417 - RNA, 18 nt, Human
auaaauguaccagagaga

SEQ ID NO: 1303418 - RNA, 15 nt, Human
auaaauguacauuaa

SEQ ID NO: 1303419 - RNA, 13 nt, Human
auaaauguaucau

SEQ ID NO: 1303420 - RNA, 17 nt, Human
auaaauguaucauagaa

SEQ ID NO: 1303421 - RNA, 21 nt, Human
auaaauguaucauagaaaugu

SEQ ID NO: 1303422 - RNA, 12 nt, Human
auaaaugucacu

SEQ ID NO: 1303423 - RNA, 19 nt, Human
auaaaugucacuuuuugag

SEQ ID NO: 1303424 - RNA, 14 nt, Human
auaacuaaauaaag

SEQ ID NO: 1303425 - RNA, 23 nt, Human
auaaaugucacuuuuugaggcaa

SEQ ID NO: 1303426 - RNA, 21 nt, Human
auaacuaacaaccaaagacua

SEQ ID NO: 1303427 - RNA, 15 nt, Human
auaacuaacaugucc

SEQ ID NO: 1303428 - RNA, 20 nt, Human
auaaaaggucggaccagcuu

SEQ ID NO: 1303429 - RNA, 16 nt, Human
auaaaauaauuuuuau

SEQ ID NO: 1303430 - RNA, 21 nt, Human
auaaaauaauuuuuauauuug

SEQ ID NO: 1303431 - RNA, 22 nt, Human
auaaaauaauuuuuauauuuga

SEQ ID NO: 1303432 - RNA, 18 nt, Human
auaaaauccauacauuug

SEQ ID NO: 1303433 - RNA, 19 nt, Human
auaaaauccauacauuugu

SEQ ID NO: 1303434 - RNA, 17 nt, Human
auaaaaugcuagguucu

SEQ ID NO: 1303435 - RNA, 19 nt, Human
auaaaaugcuagguucuac

SEQ ID NO: 1303436 - RNA, 18 nt, Human
auaaaaugcuagguucua

SEQ ID NO: 1303437 - RNA, 16 nt, Human
auaaaauguaaacugu

SEQ ID NO: 1303438 - RNA, 18 nt, Human
auaaaauguaaacuguuu

SEQ ID NO: 1303439 - RNA, 23 nt, Human
auaaaauguaaacuguuucuuua

SEQ ID NO: 1303440 - RNA, 11 nt, Human
auaaaauguac

SEQ ID NO: 1303441 - RNA, 18 nt, Human
uuaaguaaugauaacugg

SEQ ID NO: 1303442 - RNA, 17 nt, Human
uuaagugaaaauauagc

SEQ ID NO: 1303443 - RNA, 18 nt, Human
uuaaguaaggaauuuuau

SEQ ID NO: 1303444 - RNA, 22 nt, Human
uuaagaagacugcauuauauuu

SEQ ID NO: 1303445 - RNA, 12 nt, Human
uuaagaaggcaa

SEQ ID NO: 1303446 - RNA, 14 nt, Human
uuaagaaggcaaaa

SEQ ID NO: 1303447 - RNA, 20 nt, Human
uuaauuccuucagcacuuua

SEQ ID NO: 1303448 - RNA, 19 nt, Human
uuaauuccuucagcacuuu

SEQ ID NO: 1303449 - RNA, 17 nt, Human
uuaauuccuucagcacu

SEQ ID NO: 1303450 - RNA, 14 nt, Human
uuaaugaacaaaug

SEQ ID NO: 1303451 - RNA, 14 nt, Human
uuaaugaagaaagu

SEQ ID NO: 1303452 - RNA, 18 nt, Human
uuaaugaagaaaguggaa

SEQ ID NO: 1303453 - RNA, 23 nt, Human
uuaaugaagaaaguggaaaacaa

SEQ ID NO: 1303454 - RNA, 15 nt, Human
uuaaugaagaucuaa

SEQ ID NO: 1303455 - RNA, 17 nt, Human
uuaaugaagaucuaaau

SEQ ID NO: 1303456 - RNA, 18 nt, Human
uuaaugaagaucuaaaua

SEQ ID NO: 1303457 - RNA, 18 nt, Human
uuaauuuaaacaccuccu

SEQ ID NO: 1303458 - RNA, 17 nt, Human
uuaauaaacacucuuga

SEQ ID NO: 1303459 - RNA, 22 nt, Human
uuaaguugagauaguuuucauc

SEQ ID NO: 1303460 - RNA, 23 nt, Human
uuaaguugagauaguuuucaucc

SEQ ID NO: 1303461 - RNA, 18 nt, Human
uuaaguugcugaugaacu

SEQ ID NO: 1303462 - RNA, 13 nt, Human
uuaauaaacacuc

SEQ ID NO: 1303463 - RNA, 20 nt, Human
uuaaguuaguuccacugaga

SEQ ID NO: 1303464 - RNA, 22 nt, Human
uuaaguuauagugaauacugcu

SEQ ID NO: 1303465 - RNA, 11 nt, Human
uuaaguugaga

SEQ ID NO: 1303466 - RNA, 21 nt, Human
uuaaguugagauaguuuucau

SEQ ID NO: 1303467 - RNA, 20 nt, Human
auaaaauuuuuaaucuuuaa

SEQ ID NO: 1303468 - RNA, 19 nt, Human
auaaaauuauagcucuaau

SEQ ID NO: 1303469 - RNA, 13 nt, Human
auaaaauuuguug

SEQ ID NO: 1303470 - RNA, 16 nt, Human
auaaaauuuguugcau

SEQ ID NO: 1303471 - RNA, 13 nt, Human
auaaacaagaaaa

SEQ ID NO: 1303472 - RNA, 16 nt, Human
auaaacaagaaaaaua

SEQ ID NO: 1303473 - RNA, 17 nt, Human
auaaacaagaaaaauaa

SEQ ID NO: 1303474 - RNA, 19 nt, Human
auaaacaagaaaaauaaag

SEQ ID NO: 1303475 - RNA, 20 nt, Human
auaaacaagaaaaauaaaga

SEQ ID NO: 1303476 - RNA, 21 nt, Human
auaaacaagaaaaauaaagaa

SEQ ID NO: 1303477 - RNA, 22 nt, Human
auaaacaagaaaaauaaagaaa

SEQ ID NO: 1303478 - RNA, 18 nt, Human
uuacaaaaauauaaaaua

SEQ ID NO: 1303479 - RNA, 17 nt, Human
uuaauuuaauauuuacu

SEQ ID NO: 1303480 - RNA, 14 nt, Human
uuaauuuacaaaaa

SEQ ID NO: 1303481 - RNA, 22 nt, Human
uuaauuuacaaaaauauaaaau

SEQ ID NO: 1303482 - RNA, 23 nt, Human
uuaauuuacaaaaauauaaaaua

SEQ ID NO: 1303483 - RNA, 15 nt, Human
uuaauuuagaaaacu

SEQ ID NO: 1303484 - RNA, 16 nt, Human
uuaauuuagaaaacuu

SEQ ID NO: 1303485 - RNA, 17 nt, Human
uuaauuuaguaaaccaa

SEQ ID NO: 1303486 - RNA, 16 nt, Human
auaaaauuaaagcuga

SEQ ID NO: 1303487 - RNA, 17 nt, Human
uuacaaaacaaacucau

SEQ ID NO: 1303488 - RNA, 18 nt, Human
uuacaaaacaaacucauu

SEQ ID NO: 1303489 - RNA, 17 nt, Human
uuacaaaacuacaugag

SEQ ID NO: 1303490 - RNA, 18 nt, Human
uuacaaaacuacaugaga

SEQ ID NO: 1303491 - RNA, 20 nt, Human
uuacaaaacuacaugagaac

SEQ ID NO: 1303492 - RNA, 21 nt, Human
auaaaauuauagcucuaaugu

SEQ ID NO: 1303493 - RNA, 17 nt, Human
auaaaauuauagcucua

SEQ ID NO: 1303494 - RNA, 12 nt, Human
auaaaauuauag

SEQ ID NO: 1303495 - RNA, 16 nt, Human
uuaaaauuacaacuaa

SEQ ID NO: 1303496 - RNA, 13 nt, Human
uuaaaauguucac

SEQ ID NO: 1303497 - RNA, 20 nt, Human
uuaaaaaggcaguuugcaaa

SEQ ID NO: 1303498 - RNA, 22 nt, Human
uuaaaaaggcaguuugcaaaaa

SEQ ID NO: 1303499 - RNA, 16 nt, Human
uuaaaaagguuuacag

SEQ ID NO: 1303500 - RNA, 20 nt, Human
uuaaaaaguaauaaaauuca

SEQ ID NO: 1303501 - RNA, 18 nt, Human
uuaaaaaccuguucaagu

SEQ ID NO: 1303502 - RNA, 14 nt, Human
uuaaaaacugagug

SEQ ID NO: 1303503 - RNA, 21 nt, Human
uuaaaaaccuguucaagucua

SEQ ID NO: 1303504 - RNA, 13 nt, Human
uuaaaaagccagu

SEQ ID NO: 1303505 - RNA, 24 nt, Human
aguuuagggaacaauuuggcaauu

SEQ ID NO: 1303506 - RNA, 19 nt, Human
uuaaaauuuguucuuguau

SEQ ID NO: 1303507 - RNA, 12 nt, Human
uuaaaauuuguu

SEQ ID NO: 1303508 - RNA, 21 nt, Human
uuaaaggggagaccucagaag

SEQ ID NO: 1303509 - RNA, 23 nt, Human
uuaaaggggagaccucagaagua

SEQ ID NO: 1303510 - RNA, 13 nt, Human
uuaaauaaauuug

SEQ ID NO: 1303511 - RNA, 16 nt, Human
uuaaauaaauuugacu

SEQ ID NO: 1303512 - RNA, 17 nt, Human
uuaaauaaauuugacuu

SEQ ID NO: 1303513 - RNA, 14 nt, Human
uuaacaacauguuu

SEQ ID NO: 1303514 - RNA, 19 nt, Human
uuaacaacauguuuccagc

SEQ ID NO: 1303515 - RNA, 14 nt, Human
uuaacaacuugucu

SEQ ID NO: 1303516 - RNA, 14 nt, Human
uuaacaagaacuuu

SEQ ID NO: 1303517 - RNA, 22 nt, Human
uuaacaacauguuuccagcauu

SEQ ID NO: 1303518 - RNA, 19 nt, Human
uuaacagagucugaaccua

SEQ ID NO: 1303519 - RNA, 16 nt, Human
uuaacaguaucucaaa

SEQ ID NO: 1303520 - RNA, 18 nt, Human
uuaacaguuccuuucaaa

SEQ ID NO: 1303521 - RNA, 22 nt, Human
uuaacaguuccuuucaaaggag

SEQ ID NO: 1303522 - RNA, 13 nt, Human
uuaacaguuguau

SEQ ID NO: 1303523 - RNA, 15 nt, Human
uuaacaguuguauuu

SEQ ID NO: 1303524 - RNA, 13 nt, Human
uuaacauaagcua

SEQ ID NO: 1303525 - RNA, 14 nt, Human
uuaacauaagcuau

SEQ ID NO: 1303526 - RNA, 15 nt, Human
uuaacauaagcuauu

SEQ ID NO: 1303527 - RNA, 16 nt, Human
uuaacauaagcuauuu

SEQ ID NO: 1303528 - RNA, 18 nt, Human
uuaacauaagcuauuuuu

SEQ ID NO: 1303529 - RNA, 21 nt, Human
uuaacauaagcuauuuuucua

SEQ ID NO: 1303530 - RNA, 12 nt, Human
uuaacauaccua

SEQ ID NO: 1303531 - RNA, 22 nt, Human
uuaacauaccuaagaaguacau

SEQ ID NO: 1303532 - RNA, 17 nt, Human
uuaacauaccuaagaag

SEQ ID NO: 1303533 - RNA, 22 nt, Human
aguuucacagaaaauaaggcac

SEQ ID NO: 1303534 - RNA, 14 nt, Human
aguuucaauuuguu

SEQ ID NO: 1303535 - RNA, 17 nt, Human
aguuucacagaaaauaa

SEQ ID NO: 1303536 - RNA, 20 nt, Human
uuaaauuuuuuuuacauuuu

SEQ ID NO: 1303537 - RNA, 19 nt, Human
uuaaauuuuuuuuacauuu

SEQ ID NO: 1303538 - RNA, 18 nt, Human
uuaaauuuuuuuuacauu

SEQ ID NO: 1303539 - RNA, 18 nt, Human
uuaacaaauguaucacua

SEQ ID NO: 1303540 - RNA, 15 nt, Human
uuaaauuguguuuua

SEQ ID NO: 1303541 - RNA, 22 nt, Human
uuaaauaaauuugacuuuucug

SEQ ID NO: 1303542 - RNA, 15 nt, Human
uuaaauaagaaacuu

SEQ ID NO: 1303543 - RNA, 17 nt, Human
uuaaauaagaaacuuuu

SEQ ID NO: 1303544 - RNA, 13 nt, Human
uuaaauaagauuc

SEQ ID NO: 1303545 - RNA, 14 nt, Human
uuaaauaagauucu

SEQ ID NO: 1303546 - RNA, 15 nt, Human
uuaaauaagauucua

SEQ ID NO: 1303547 - RNA, 16 nt, Human
uuaaauaagauucuaa

SEQ ID NO: 1303548 - RNA, 17 nt, Human
uuaaauaagauucuaac

SEQ ID NO: 1303549 - RNA, 18 nt, Human
uuaaauaagauucuaacg

SEQ ID NO: 1303550 - RNA, 16 nt, Human
uuaaauuggaaagcag

SEQ ID NO: 1303551 - RNA, 17 nt, Human
uuaaauuggaaagcagg

SEQ ID NO: 1303552 - RNA, 15 nt, Human
aguuguuugugccuu

SEQ ID NO: 1303553 - RNA, 17 nt, Human
aguuuaauaaauuuauu

SEQ ID NO: 1303554 - RNA, 16 nt, Human
aguuuaaucagaggaa

SEQ ID NO: 1303555 - RNA, 22 nt, Human
aguuuaauggugccuucauuug

SEQ ID NO: 1303556 - RNA, 20 nt, Human
aguuuaauggugccuucauu

SEQ ID NO: 1303557 - RNA, 16 nt, Human
aguuuaggauaaaaua

SEQ ID NO: 1303558 - RNA, 12 nt, Human
aguuuagggugg

SEQ ID NO: 1303559 - RNA, 12 nt, Human
aguuuaaugaag

SEQ ID NO: 1303560 - RNA, 18 nt, Human
aguuuagggaacaauuug

SEQ ID NO: 1303561 - RNA, 21 nt, Human
aguuuagggaacaauuuggca

SEQ ID NO: 1303562 - RNA, 23 nt, Human
aguuuagggaacaauuuggcaau

SEQ ID NO: 1303563 - RNA, 13 nt, Human
aguuuaggguggg

SEQ ID NO: 1303564 - RNA, 14 nt, Human
aguuuagggugggg

SEQ ID NO: 1303565 - RNA, 13 nt, Human
aguugguaacuuu

SEQ ID NO: 1303566 - RNA, 12 nt, Human
aguuguaaagua

SEQ ID NO: 1303567 - RNA, 13 nt, Human
aguuguaaaguau

SEQ ID NO: 1303568 - RNA, 18 nt, Human
aguuguaaaguauguauu

SEQ ID NO: 1303569 - RNA, 18 nt, Human
aguuguaccgcaauguga

SEQ ID NO: 1303570 - RNA, 17 nt, Human
aguugcagucacucuag

SEQ ID NO: 1303571 - RNA, 13 nt, Human
aguugccuuuuau

SEQ ID NO: 1303572 - RNA, 10 nt, Human
aguugcagcc

SEQ ID NO: 1303573 - RNA, 14 nt, Human
aguugcagcuguuu

SEQ ID NO: 1303574 - RNA, 15 nt, Human
aguugcagcuguuuu

SEQ ID NO: 1303575 - RNA, 17 nt, Human
aguugcagcuguuuugu

SEQ ID NO: 1303576 - RNA, 21 nt, Human
aguugcagcuguuuuguugac

SEQ ID NO: 1303577 - RNA, 22 nt, Human
aguugcagcuguuuuguugaca

SEQ ID NO: 1303578 - RNA, 22 nt, Human
aguugcauagguuuaauaauuu

SEQ ID NO: 1303579 - RNA, 19 nt, Human
aguucuucgacuguuguua

SEQ ID NO: 1303580 - RNA, 18 nt, Human
aguucuucgacuguuguu

SEQ ID NO: 1303581 - RNA, 17 nt, Human
aguucuucgacuguugu

SEQ ID NO: 1303582 - RNA, 15 nt, Human
aguucuucgacuguu

SEQ ID NO: 1303583 - RNA, 15 nt, Human
aguugcacucaggug

SEQ ID NO: 1303584 - RNA, 18 nt, Human
aguugggacuacaggcgu

SEQ ID NO: 1303585 - RNA, 13 nt, Human
aguuggcuucuaa

SEQ ID NO: 1303586 - RNA, 17 nt, Human
aguuggcuuaccuggcc

SEQ ID NO: 1303587 - RNA, 18 nt, Human
aguuggcuuaccuggccc

SEQ ID NO: 1303588 - RNA, 22 nt, Human
aguuggccauauuuaccucagc

SEQ ID NO: 1303589 - RNA, 23 nt, Human
aguuggccauauuuaccucagcc

SEQ ID NO: 1303590 - RNA, 15 nt, Human
aguuggcuuaccugg

SEQ ID NO: 1303591 - RNA, 15 nt, Human
aguugcuauuugaac

SEQ ID NO: 1303592 - RNA, 12 nt, Human
aguugcugagag

SEQ ID NO: 1303593 - RNA, 16 nt, Human
aguugcugcaaaccug

SEQ ID NO: 1303594 - RNA, 17 nt, Human
aguugcugcaaaccuga

SEQ ID NO: 1303595 - RNA, 14 nt, Human
uguuuauuaaucuu

SEQ ID NO: 1303596 - RNA, 15 nt, Human
uguuuauuaaucuua

SEQ ID NO: 1303597 - RNA, 17 nt, Human
uguuuauuaaucuuagu

SEQ ID NO: 1303598 - RNA, 17 nt, Human
uguuuauguaauuucag

SEQ ID NO: 1303599 - RNA, 16 nt, Human
uguuuauaaacauugu

SEQ ID NO: 1303600 - RNA, 19 nt, Human
uguugccuugcauaauggu

SEQ ID NO: 1303601 - RNA, 14 nt, Human
uguugcguuccuuu

SEQ ID NO: 1303602 - RNA, 19 nt, Human
uguuucuuuguaaugaaaa

SEQ ID NO: 1303603 - RNA, 18 nt, Human
uguuucuuuguaaugaaa

SEQ ID NO: 1303604 - RNA, 12 nt, Human
uguuucuugccu

SEQ ID NO: 1303605 - RNA, 15 nt, Human
uguuucuuuaaaauu

SEQ ID NO: 1303606 - RNA, 20 nt, Human
uguuucuuucucugaggaca

SEQ ID NO: 1303607 - RNA, 21 nt, Human
uguuucuuucucugaggacaa

SEQ ID NO: 1303608 - RNA, 14 nt, Human
uguuucuugccuca

SEQ ID NO: 1303609 - RNA, 13 nt, Human
uguuuauuucagg

SEQ ID NO: 1303610 - RNA, 13 nt, Human
uguuucuguucca

SEQ ID NO: 1303611 - RNA, 16 nt, Human
uguuucuguuccaaau

SEQ ID NO: 1303612 - RNA, 15 nt, Human
uguuucuguuccaaa

SEQ ID NO: 1303613 - RNA, 15 nt, Human
uguuucuugccucau

SEQ ID NO: 1303614 - RNA, 15 nt, Human
uguuugaggaaagca

SEQ ID NO: 1303615 - RNA, 13 nt, Human
uguuugauagauu

SEQ ID NO: 1303616 - RNA, 14 nt, Human
uguuugacaccucu

SEQ ID NO: 1303617 - RNA, 18 nt, Human
uguuugagauucucaaag

SEQ ID NO: 1303618 - RNA, 14 nt, Human
uguuuugcaagcca

SEQ ID NO: 1303619 - RNA, 18 nt, Human
uguuuugcacagccaaau

SEQ ID NO: 1303620 - RNA, 12 nt, Human
aguucugccagg

SEQ ID NO: 1303621 - RNA, 21 nt, Human
aguucugcagauaaacaguag

SEQ ID NO: 1303622 - RNA, 16 nt, Human
aguucugcagauaaac

SEQ ID NO: 1303623 - RNA, 23 nt, Human
aguucuuacugcuuaauucaaau

SEQ ID NO: 1303624 - RNA, 19 nt, Human
aguucuuacugcuuaauuc

SEQ ID NO: 1303625 - RNA, 23 nt, Human
aguucuguacucaaauguagcca

SEQ ID NO: 1303626 - RNA, 13 nt, Human
aguucugccagga

SEQ ID NO: 1303627 - RNA, 14 nt, Human
aguucugccaggag

SEQ ID NO: 1303628 - RNA, 20 nt, Human
aguucugccaggagacaggu

SEQ ID NO: 1303629 - RNA, 12 nt, Human
aguucugcucca

SEQ ID NO: 1303630 - RNA, 14 nt, Human
aguucugcuccaga

SEQ ID NO: 1303631 - RNA, 15 nt, Human
aguucugcuccagac

SEQ ID NO: 1303632 - RNA, 17 nt, Human
aguucugcuccagacag

SEQ ID NO: 1303633 - RNA, 18 nt, Human
aguucugcuccagacagg

SEQ ID NO: 1303634 - RNA, 19 nt, Human
aguucugcuccagacaggg

SEQ ID NO: 1303635 - RNA, 16 nt, Human
aguucugcucugguug

SEQ ID NO: 1303636 - RNA, 13 nt, Human
uguuuggagacag

SEQ ID NO: 1303637 - RNA, 12 nt, Human
uguuuggaaaua

SEQ ID NO: 1303638 - RNA, 21 nt, Human
uguuuuauuuaaccucuaaau

SEQ ID NO: 1303639 - RNA, 14 nt, Human
uguuuuaugagaaa

SEQ ID NO: 1303640 - RNA, 15 nt, Human
uguuuuaugagaaag

SEQ ID NO: 1303641 - RNA, 19 nt, Human
uguuuuaugagaaagccuu

SEQ ID NO: 1303642 - RNA, 18 nt, Human
uguuugcaccuuucuagu

SEQ ID NO: 1303643 - RNA, 20 nt, Human
uguuugcaccuuucuaguug

SEQ ID NO: 1303644 - RNA, 23 nt, Human
uguuugcaccuuucuaguugaaa

SEQ ID NO: 1303645 - RNA, 22 nt, Human
uguuugcaccuuucuaguugaa

SEQ ID NO: 1303646 - RNA, 15 nt, Human
uguuugcuucaacug

SEQ ID NO: 1303647 - RNA, 21 nt, Human
uguuugcuucaugugucccag

SEQ ID NO: 1303648 - RNA, 22 nt, Human
uguuugcuucaugugucccaga

SEQ ID NO: 1303649 - RNA, 23 nt, Human
uguuugcuucaugugucccagaa

SEQ ID NO: 1303650 - RNA, 12 nt, Human
uguuugcuuucu

SEQ ID NO: 1303651 - RNA, 22 nt, Human
uguuugcuuucugaucaaggcc

SEQ ID NO: 1303652 - RNA, 13 nt, Human
uguuugcuuucug

SEQ ID NO: 1303653 - RNA, 18 nt, Human
uguuuggaauauugucca

SEQ ID NO: 1303654 - RNA, 16 nt, Human
uguuuucccacgagga

SEQ ID NO: 1303655 - RNA, 16 nt, Human
uguuuuaugagaaagc

SEQ ID NO: 1303656 - RNA, 11 nt, Human
uguuuucuucu

SEQ ID NO: 1303657 - RNA, 17 nt, Human
uguuuucuuuugguaaa

SEQ ID NO: 1303658 - RNA, 17 nt, Human
uguuuugaaggcaaaau

SEQ ID NO: 1303659 - RNA, 13 nt, Human
uguguugaagagg

SEQ ID NO: 1303660 - RNA, 15 nt, Human
uguguugauacauuc

SEQ ID NO: 1303661 - RNA, 15 nt, Human
uguguugauacuguu

SEQ ID NO: 1303662 - RNA, 16 nt, Human
uguguugauacuguug

SEQ ID NO: 1303663 - RNA, 17 nt, Human
uguguugauacuguugc

SEQ ID NO: 1303664 - RNA, 18 nt, Human
uguguugauacuguugca

SEQ ID NO: 1303665 - RNA, 19 nt, Human
uguguugauacuguugcac

SEQ ID NO: 1303666 - RNA, 20 nt, Human
uguguugauacuguugcacg

SEQ ID NO: 1303667 - RNA, 21 nt, Human
uguguugauacuguugcacgu

SEQ ID NO: 1303668 - RNA, 22 nt, Human
uguguugauacuguugcacgug

SEQ ID NO: 1303669 - RNA, 16 nt, Human
uguuaaauacaggaaa

SEQ ID NO: 1303670 - RNA, 21 nt, Human
uguguuaagcucugcuauuag

SEQ ID NO: 1303671 - RNA, 13 nt, Human
uguguguuuggaa

SEQ ID NO: 1303672 - RNA, 19 nt, Human
uguguuaagcucugcuauu

SEQ ID NO: 1303673 - RNA, 19 nt, Human
uguguucccauuucagcug

SEQ ID NO: 1303674 - RNA, 18 nt, Human
uguuaaauacaggaaaca

SEQ ID NO: 1303675 - RNA, 13 nt, Human
uguuaagcucugc

SEQ ID NO: 1303676 - RNA, 14 nt, Human
uguuaagcucugcu

SEQ ID NO: 1303677 - RNA, 20 nt, Human
uguuaagggaagaauuccag

SEQ ID NO: 1303678 - RNA, 15 nt, Human
uguuaaguauuuuca

SEQ ID NO: 1303679 - RNA, 17 nt, Human
uguuaaguauuuucaua

SEQ ID NO: 1303680 - RNA, 15 nt, Human
uguuaauuuagaaaa

SEQ ID NO: 1303681 - RNA, 17 nt, Human
uguuaauuuagaaaacu

SEQ ID NO: 1303682 - RNA, 18 nt, Human
uguuaauuuagaaaacuu

SEQ ID NO: 1303683 - RNA, 20 nt, Human
uguuaauuuagaaaacuuua

SEQ ID NO: 1303684 - RNA, 22 nt, Human
uguuaauuuagaaaacuuuaaa

SEQ ID NO: 1303685 - RNA, 13 nt, Human
uguuaauuuuuga

SEQ ID NO: 1303686 - RNA, 15 nt, Human
uguuaauuuuugaua

SEQ ID NO: 1303687 - RNA, 16 nt, Human
uguuaauuuuugauac

SEQ ID NO: 1303688 - RNA, 20 nt, Human
ugugugaaagguacuucaaa

SEQ ID NO: 1303689 - RNA, 18 nt, Human
ugugucuuucacagcucc

SEQ ID NO: 1303690 - RNA, 22 nt, Human
ugugucuuucacagcuccuccc

SEQ ID NO: 1303691 - RNA, 17 nt, Human
ugugugaaacuuucauu

SEQ ID NO: 1303692 - RNA, 11 nt, Human
ugugugugugc

SEQ ID NO: 1303693 - RNA, 13 nt, Human
ugugugugugaau

SEQ ID NO: 1303694 - RNA, 13 nt, Human
uguguaaguagau

SEQ ID NO: 1303695 - RNA, 17 nt, Human
uguguaagaaauacaga

SEQ ID NO: 1303696 - RNA, 12 nt, Human
uguguaagauuu

SEQ ID NO: 1303697 - RNA, 13 nt, Human
uguguaagauuug

SEQ ID NO: 1303698 - RNA, 14 nt, Human
ugugucuuuagaua

SEQ ID NO: 1303699 - RNA, 18 nt, Human
uguguaagacaaaaagcu

SEQ ID NO: 1303700 - RNA, 18 nt, Human
uguguaacugcccaaagc

SEQ ID NO: 1303701 - RNA, 21 nt, Human
uguguaacugcccaaagcagc

SEQ ID NO: 1303702 - RNA, 14 nt, Human
uguggguguuaauu

SEQ ID NO: 1303703 - RNA, 22 nt, Human
uguggguguuaauuuuugauac

SEQ ID NO: 1303704 - RNA, 15 nt, Human
uguggguuccacaga

SEQ ID NO: 1303705 - RNA, 16 nt, Human
uguggguuccacagac

SEQ ID NO: 1303706 - RNA, 15 nt, Human
uguggguuuuuauuu

SEQ ID NO: 1303707 - RNA, 23 nt, Human
uguggugugucccccucugucca

SEQ ID NO: 1303708 - RNA, 16 nt, Human
agugcuguuuuguuau

SEQ ID NO: 1303709 - RNA, 23 nt, Human
agugcugucuuaaacuaaaugug

SEQ ID NO: 1303710 - RNA, 18 nt, Human
agugcugugcaagguauu

SEQ ID NO: 1303711 - RNA, 17 nt, Human
agugcugugcugugcua

SEQ ID NO: 1303712 - RNA, 20 nt, Human
agugcuguuuauuaaucuua

SEQ ID NO: 1303713 - RNA, 21 nt, Human
agugcuguuuauuaaucuuag

SEQ ID NO: 1303714 - RNA, 22 nt, Human
agugcuguuuauuaaucuuagu

SEQ ID NO: 1303715 - RNA, 12 nt, Human
agugcugugcug

SEQ ID NO: 1303716 - RNA, 15 nt, Human
agugcuguuuuguua

SEQ ID NO: 1303717 - RNA, 19 nt, Human
agugcuguuuuguuauaua

SEQ ID NO: 1303718 - RNA, 19 nt, Human
agugcugaauuucccucuc

SEQ ID NO: 1303719 - RNA, 15 nt, Human
agugcugagauuaca

SEQ ID NO: 1303720 - RNA, 15 nt, Human
agugcugcacucaaa

SEQ ID NO: 1303721 - RNA, 15 nt, Human
agugcugaauuuccc

SEQ ID NO: 1303722 - RNA, 20 nt, Human
agugaguaauuuuggauuuu

SEQ ID NO: 1303723 - RNA, 17 nt, Human
agugaguaauuuuggau

SEQ ID NO: 1303724 - RNA, 16 nt, Human
agugaggugugucaca

SEQ ID NO: 1303725 - RNA, 22 nt, Human
agugaggugugucacaaugaga

SEQ ID NO: 1303726 - RNA, 20 nt, Human
agugcugagauuacaggcau

SEQ ID NO: 1303727 - RNA, 21 nt, Human
agugcugagauuacaggcaug

SEQ ID NO: 1303728 - RNA, 15 nt, Human
uguuauaaucuuuca

SEQ ID NO: 1303729 - RNA, 16 nt, Human
uguuauauauaaauau

SEQ ID NO: 1303730 - RNA, 17 nt, Human
uguuauauauaaauaua

SEQ ID NO: 1303731 - RNA, 18 nt, Human
uguuauauauaaauauau

SEQ ID NO: 1303732 - RNA, 22 nt, Human
uguuauauccugacaagauuau

SEQ ID NO: 1303733 - RNA, 16 nt, Human
uguuauacaauacaga

SEQ ID NO: 1303734 - RNA, 15 nt, Human
uguuauauaaucauu

SEQ ID NO: 1303735 - RNA, 16 nt, Human
uguuauauaaucauua

SEQ ID NO: 1303736 - RNA, 12 nt, Human
uguuauauaauu

SEQ ID NO: 1303737 - RNA, 15 nt, Human
uguuauauaauuuag

SEQ ID NO: 1303738 - RNA, 13 nt, Human
uguuauauauaaa

SEQ ID NO: 1303739 - RNA, 15 nt, Human
uguuauauauaaaua

SEQ ID NO: 1303740 - RNA, 13 nt, Human
uguucugucacca

SEQ ID NO: 1303741 - RNA, 23 nt, Human
uguucccaagagcaucaugccuc

SEQ ID NO: 1303742 - RNA, 18 nt, Human
uguuccaguaaucuaaua

SEQ ID NO: 1303743 - RNA, 15 nt, Human
uguuccauuaaacga

SEQ ID NO: 1303744 - RNA, 16 nt, Human
uguucccaagagcauc

SEQ ID NO: 1303745 - RNA, 22 nt, Human
uguucccaagagcaucaugccu

SEQ ID NO: 1303746 - RNA, 18 nt, Human
uguucugugauauaagug

SEQ ID NO: 1303747 - RNA, 15 nt, Human
uguucugugauauaa

SEQ ID NO: 1303748 - RNA, 16 nt, Human
uguucugucccuugcc

SEQ ID NO: 1303749 - RNA, 18 nt, Human
uguucugucccuugcccc

SEQ ID NO: 1303750 - RNA, 13 nt, Human
uguucugugucuu

SEQ ID NO: 1303751 - RNA, 14 nt, Human
uguucugugucuuu

SEQ ID NO: 1303752 - RNA, 16 nt, Human
uguucuguuaacugaa

SEQ ID NO: 1303753 - RNA, 17 nt, Human
uguucuguuaacugaau

SEQ ID NO: 1303754 - RNA, 18 nt, Human
uguucuguuaacugaaua

SEQ ID NO: 1303755 - RNA, 19 nt, Human
uguucuguuaacugaauac

SEQ ID NO: 1303756 - RNA, 21 nt, Human
uguucuguuaacugaauacca

SEQ ID NO: 1303757 - RNA, 23 nt, Human
uguucuguuaacugaauaccacu

SEQ ID NO: 1303758 - RNA, 22 nt, Human
uguucuguuaacugaauaccac

SEQ ID NO: 1303759 - RNA, 14 nt, Human
uguucuguuucaag

SEQ ID NO: 1303760 - RNA, 13 nt, Human
uguucuguuuugu

SEQ ID NO: 1303761 - RNA, 16 nt, Human
uguucuguuuuguuuc

SEQ ID NO: 1303762 - RNA, 17 nt, Human
uguugcaagugcaauaa

SEQ ID NO: 1303763 - RNA, 13 nt, Human
aguggacaggagu

SEQ ID NO: 1303764 - RNA, 19 nt, Human
aguggacaaauuuugaguu

SEQ ID NO: 1303765 - RNA, 14 nt, Human
uguuacaaauugua

SEQ ID NO: 1303766 - RNA, 13 nt, Human
agugugcaaggca

SEQ ID NO: 1303767 - RNA, 15 nt, Human
agugugcaaggcagc

SEQ ID NO: 1303768 - RNA, 15 nt, Human
aguggugugaucuca

SEQ ID NO: 1303769 - RNA, 14 nt, Human
aguguaaaauauuu

SEQ ID NO: 1303770 - RNA, 18 nt, Human
aguguaaaauauuuugaa

SEQ ID NO: 1303771 - RNA, 21 nt, Human
aguguaaaauauuuugaauca

SEQ ID NO: 1303772 - RNA, 15 nt, Human
aguguaacaauugug

SEQ ID NO: 1303773 - RNA, 18 nt, Human
aguguaacaauuguguag

SEQ ID NO: 1303774 - RNA, 23 nt, Human
aguguaacaauuguguagccuuu

SEQ ID NO: 1303775 - RNA, 22 nt, Human
aguguaacaauuguguagccuu

SEQ ID NO: 1303776 - RNA, 23 nt, Human
aguguaccgcgucuacccuggga

SEQ ID NO: 1303777 - RNA, 15 nt, Human
aguguagaaccuaau

SEQ ID NO: 1303778 - RNA, 20 nt, Human
aguguagaaccuaauucaau

SEQ ID NO: 1303779 - RNA, 21 nt, Human
ugugcugggagcuccacucug

SEQ ID NO: 1303780 - RNA, 21 nt, Human
uguggcagaguuacaguucug

SEQ ID NO: 1303781 - RNA, 23 nt, Human
uguggcagggguuagagcaggac

SEQ ID NO: 1303782 - RNA, 16 nt, Human
uguggcauccagaguc

SEQ ID NO: 1303783 - RNA, 20 nt, Human
uguggcagggguuagagcag

SEQ ID NO: 1303784 - RNA, 21 nt, Human
uguggcagggguuagagcagg

SEQ ID NO: 1303785 - RNA, 18 nt, Human
ugugcuggaauucuaaca

SEQ ID NO: 1303786 - RNA, 13 nt, Human
ugugcuggccagc

SEQ ID NO: 1303787 - RNA, 10 nt, Human
ugugcuggga

SEQ ID NO: 1303788 - RNA, 12 nt, Human
ugugcugggagc

SEQ ID NO: 1303789 - RNA, 17 nt, Human
ugugcugggagcuccac

SEQ ID NO: 1303790 - RNA, 12 nt, Human
ugugcccaguua

SEQ ID NO: 1303791 - RNA, 21 nt, Human
ugugcccaguuaaucuugcuu

SEQ ID NO: 1303792 - RNA, 22 nt, Human
ugugcccaguuaaucuugcuuu

SEQ ID NO: 1303793 - RNA, 18 nt, Human
ugugcccccaaccauuuc

SEQ ID NO: 1303794 - RNA, 23 nt, Human
ugugcccccaaccauuuccucag

SEQ ID NO: 1303795 - RNA, 16 nt, Human
ugugcccccagggucc

SEQ ID NO: 1303796 - RNA, 22 nt, Human
ugugcccccaggguccugggag

SEQ ID NO: 1303797 - RNA, 14 nt, Human
agugagggauuauc

SEQ ID NO: 1303798 - RNA, 21 nt, Human
uguggccaugacccugccucu

SEQ ID NO: 1303799 - RNA, 19 nt, Human
agugagggagggcugucau

SEQ ID NO: 1303800 - RNA, 23 nt, Human
uguggccaugacccugccucucc

SEQ ID NO: 1303801 - RNA, 19 nt, Human
uguggcauccagagucccu

SEQ ID NO: 1303802 - RNA, 21 nt, Human
uguggcauccagagucccugc

SEQ ID NO: 1303803 - RNA, 17 nt, Human
uguggcaugggugaaga

SEQ ID NO: 1303804 - RNA, 11 nt, Human
uguggccagga

SEQ ID NO: 1303805 - RNA, 12 nt, Human
uguggccaggag

SEQ ID NO: 1303806 - RNA, 14 nt, Human
uguggccaggaggu

SEQ ID NO: 1303807 - RNA, 13 nt, Human
uguggccaggagg

SEQ ID NO: 1303808 - RNA, 18 nt, Human
ugugccagauuuaugcau

SEQ ID NO: 1303809 - RNA, 18 nt, Human
ugugccagagccuggggc

SEQ ID NO: 1303810 - RNA, 20 nt, Human
ugugccagagccuggggcuc

SEQ ID NO: 1303811 - RNA, 22 nt, Human
ugugccagagccuggggcucua

SEQ ID NO: 1303812 - RNA, 21 nt, Human
ugugccagagccuggggcucu

SEQ ID NO: 1303813 - RNA, 20 nt, Human
ugugccagagaacccagccc

SEQ ID NO: 1303814 - RNA, 23 nt, Human
ugugccagagaacccagcccacc

SEQ ID NO: 1303815 - RNA, 12 nt, Human
ugugccagagcc

SEQ ID NO: 1303816 - RNA, 13 nt, Human
ugugccagagccu

SEQ ID NO: 1303817 - RNA, 14 nt, Human
ugugccagagccug

SEQ ID NO: 1303818 - RNA, 15 nt, Human
ugugccagagccugg

SEQ ID NO: 1303819 - RNA, 16 nt, Human
ugugccagagccuggg

SEQ ID NO: 1303820 - RNA, 17 nt, Human
ugugccagagccugggg

SEQ ID NO: 1303821 - RNA, 20 nt, Human
ugugccagauuuaugcauau

SEQ ID NO: 1303822 - RNA, 18 nt, Human
ugugccagggcaaugaug

SEQ ID NO: 1303823 - RNA, 21 nt, Human
ugugccagggcaaugaugaau

SEQ ID NO: 1303824 - RNA, 16 nt, Human
ugugccaugucaaaca

SEQ ID NO: 1303825 - RNA, 21 nt, Human
ugugccaugucaaacaaauag

SEQ ID NO: 1303826 - RNA, 17 nt, Human
agugaaagaaaauaaca

SEQ ID NO: 1303827 - RNA, 20 nt, Human
agugaaaggaagauaaacgu

SEQ ID NO: 1303828 - RNA, 13 nt, Human
agugaaauaaugu

SEQ ID NO: 1303829 - RNA, 15 nt, Human
agugaaauaaugugu

SEQ ID NO: 1303830 - RNA, 19 nt, Human
agugaaauaauguguaguu

SEQ ID NO: 1303831 - RNA, 16 nt, Human
agugaaauaaugugua

SEQ ID NO: 1303832 - RNA, 15 nt, Human
agugaaagaaaauaa

SEQ ID NO: 1303833 - RNA, 20 nt, Human
agugaacaaauuuacagaga

SEQ ID NO: 1303834 - RNA, 16 nt, Human
agugaacaaauuuaca

SEQ ID NO: 1303835 - RNA, 18 nt, Human
ugugaucauguguggaag

SEQ ID NO: 1303836 - RNA, 13 nt, Human
ugugaucgucuga

SEQ ID NO: 1303837 - RNA, 18 nt, Human
ugugaucugggucucuaa

SEQ ID NO: 1303838 - RNA, 14 nt, Human
ugugaugaauacug

SEQ ID NO: 1303839 - RNA, 16 nt, Human
ugugaugaauacugua

SEQ ID NO: 1303840 - RNA, 18 nt, Human
ugugaugaauacuguauu

SEQ ID NO: 1303841 - RNA, 14 nt, Human
ugugauuguggaau

SEQ ID NO: 1303842 - RNA, 17 nt, Human
ugugauuguggaaugga

SEQ ID NO: 1303843 - RNA, 20 nt, Human
ugugaacaguuguguuugaa

SEQ ID NO: 1303844 - RNA, 13 nt, Human
ugugaccugcuga

SEQ ID NO: 1303845 - RNA, 14 nt, Human
ugugaccugcugag

SEQ ID NO: 1303846 - RNA, 15 nt, Human
ugugaccugcugagc

SEQ ID NO: 1303847 - RNA, 16 nt, Human
ugugaccugcugagcu

SEQ ID NO: 1303848 - RNA, 17 nt, Human
ugugaccugcugagcuc

SEQ ID NO: 1303849 - RNA, 18 nt, Human
ugugaccugcugagcucu

SEQ ID NO: 1303850 - RNA, 22 nt, Human
ugugaccugcugagcucugaga

SEQ ID NO: 1303851 - RNA, 12 nt, Human
ugugacucuuuc

SEQ ID NO: 1303852 - RNA, 14 nt, Human
ugugacucuuucca

SEQ ID NO: 1303853 - RNA, 12 nt, Human
ugugaaauuauu

SEQ ID NO: 1303854 - RNA, 14 nt, Human
ugugaaauuuacau

SEQ ID NO: 1303855 - RNA, 20 nt, Human
ugugaaagggagaagugaca

SEQ ID NO: 1303856 - RNA, 18 nt, Human
agucacgcaugcaguguu

SEQ ID NO: 1303857 - RNA, 21 nt, Human
agucacggcugcgcacugugu

SEQ ID NO: 1303858 - RNA, 16 nt, Human
ugucacuuuuucugau

SEQ ID NO: 1303859 - RNA, 20 nt, Human
agucacggcugcgcacugug

SEQ ID NO: 1303860 - RNA, 12 nt, Human
ugucacuuuuug

SEQ ID NO: 1303861 - RNA, 15 nt, Human
ugucacuuuuugagg

SEQ ID NO: 1303862 - RNA, 17 nt, Human
ugucacuuuuugaggca

SEQ ID NO: 1303863 - RNA, 18 nt, Human
ugucacuuuuugaggcaa

SEQ ID NO: 1303864 - RNA, 19 nt, Human
ugucacuuuuugaggcaaa

SEQ ID NO: 1303865 - RNA, 21 nt, Human
ugucacuuuuugaggcaaaag

SEQ ID NO: 1303866 - RNA, 21 nt, Human
ugucagaacuagaauuugauu

SEQ ID NO: 1303867 - RNA, 15 nt, Human
ugucagacccuggag

SEQ ID NO: 1303868 - RNA, 17 nt, Human
ugucagacccuggaggc

SEQ ID NO: 1303869 - RNA, 16 nt, Human
ugucagacccuggagg

SEQ ID NO: 1303870 - RNA, 12 nt, Human
ugucuugggcag

SEQ ID NO: 1303871 - RNA, 13 nt, Human
ugucuugggcaga

SEQ ID NO: 1303872 - RNA, 16 nt, Human
ugucuugggcagagcu

SEQ ID NO: 1303873 - RNA, 21 nt, Human
ugucuugggcagagcuggcuc

SEQ ID NO: 1303874 - RNA, 22 nt, Human
ugucuugggcagagcuggcucu

SEQ ID NO: 1303875 - RNA, 22 nt, Human
agucucuauaccaauaaaguga

SEQ ID NO: 1303876 - RNA, 21 nt, Human
agucucuauaccaauaaagug

SEQ ID NO: 1303877 - RNA, 20 nt, Human
agucucuauaccaauaaagu

SEQ ID NO: 1303878 - RNA, 19 nt, Human
agucucuauaccaauaaag

SEQ ID NO: 1303879 - RNA, 17 nt, Human
agucucuauaccaauaa

SEQ ID NO: 1303880 - RNA, 15 nt, Human
agucucuauaccaau

SEQ ID NO: 1303881 - RNA, 19 nt, Human
agucucagugaagacuaug

SEQ ID NO: 1303882 - RNA, 10 nt, Human
agucucaguu

SEQ ID NO: 1303883 - RNA, 18 nt, Human
agucucaguuuguguguc

SEQ ID NO: 1303884 - RNA, 20 nt, Human
agucucaguuugugugucuu

SEQ ID NO: 1303885 - RNA, 21 nt, Human
agucucaguuugugugucuua

SEQ ID NO: 1303886 - RNA, 13 nt, Human
agucucuucucca

SEQ ID NO: 1303887 - RNA, 14 nt, Human
agucucuucuccac

SEQ ID NO: 1303888 - RNA, 15 nt, Human
agucucucuucucuc

SEQ ID NO: 1303889 - RNA, 16 nt, Human
agucucucuucucucc

SEQ ID NO: 1303890 - RNA, 18 nt, Human
agucucucuucucuccag

SEQ ID NO: 1303891 - RNA, 21 nt, Human
agucucucuucucuccagcug

SEQ ID NO: 1303892 - RNA, 14 nt, Human
agucucucuucucu

SEQ ID NO: 1303893 - RNA, 15 nt, Human
ugugagagguuugac

SEQ ID NO: 1303894 - RNA, 16 nt, Human
ugugagagguuugacu

SEQ ID NO: 1303895 - RNA, 15 nt, Human
ugugacucuuuccaa

SEQ ID NO: 1303896 - RNA, 17 nt, Human
ugugacucuuuccaacc

SEQ ID NO: 1303897 - RNA, 22 nt, Human
ugugagaugcuagaacucccuu

SEQ ID NO: 1303898 - RNA, 19 nt, Human
ugugagaugcuagaacucc

SEQ ID NO: 1303899 - RNA, 15 nt, Human
ugugagaugcuagaa

SEQ ID NO: 1303900 - RNA, 17 nt, Human
agucuuuggaacccuaa

SEQ ID NO: 1303901 - RNA, 15 nt, Human
agucuuugguucuaa

SEQ ID NO: 1303902 - RNA, 16 nt, Human
agucuuugguucuaag

SEQ ID NO: 1303903 - RNA, 20 nt, Human
agucuuucucuuucccuggu

SEQ ID NO: 1303904 - RNA, 17 nt, Human
agucuuugguucuaagg

SEQ ID NO: 1303905 - RNA, 18 nt, Human
agucuuugguucuaagga

SEQ ID NO: 1303906 - RNA, 14 nt, Human
agucuuucucuuuc

SEQ ID NO: 1303907 - RNA, 15 nt, Human
agucuuucucuuucc

SEQ ID NO: 1303908 - RNA, 17 nt, Human
agucuuucucuuucccu

SEQ ID NO: 1303909 - RNA, 19 nt, Human
agucuuucucuuucccugg

SEQ ID NO: 1303910 - RNA, 23 nt, Human
agucuuucucuuucccugguccc

SEQ ID NO: 1303911 - RNA, 15 nt, Human
agucucuucuccacu

SEQ ID NO: 1303912 - RNA, 16 nt, Human
agucucuucuccacug

SEQ ID NO: 1303913 - RNA, 18 nt, Human
agucucuucuccacugga

SEQ ID NO: 1303914 - RNA, 17 nt, Human
agucucuucuccacugg

SEQ ID NO: 1303915 - RNA, 14 nt, Human
uguaguguuggaga

SEQ ID NO: 1303916 - RNA, 18 nt, Human
uguaguauggccuguguc

SEQ ID NO: 1303917 - RNA, 15 nt, Human
uguagugcuacaggg

SEQ ID NO: 1303918 - RNA, 22 nt, Human
uguagugcuuugagagagaaag

SEQ ID NO: 1303919 - RNA, 15 nt, Human
uguagugcuuugaga

SEQ ID NO: 1303920 - RNA, 15 nt, Human
uguaguguuggagaa

SEQ ID NO: 1303921 - RNA, 16 nt, Human
uguaguguuggagaag

SEQ ID NO: 1303922 - RNA, 22 nt, Human
uguauauuuuaagaaauaacag

SEQ ID NO: 1303923 - RNA, 23 nt, Human
uguaucaaaaugcucuuauuuca

SEQ ID NO: 1303924 - RNA, 18 nt, Human
uguaucaaaaugcucuua

SEQ ID NO: 1303925 - RNA, 15 nt, Human
uguaucaaaaugcuc

SEQ ID NO: 1303926 - RNA, 14 nt, Human
uguaucaaaaugcu

SEQ ID NO: 1303927 - RNA, 13 nt, Human
uguaucaaaaugc

SEQ ID NO: 1303928 - RNA, 15 nt, Human
uguaugucuuaaaac

SEQ ID NO: 1303929 - RNA, 17 nt, Human
uguaugucuuaaaaccu

SEQ ID NO: 1303930 - RNA, 20 nt, Human
uguaucaaacuguauaacuu

SEQ ID NO: 1303931 - RNA, 14 nt, Human
uguaucaaauacau

SEQ ID NO: 1303932 - RNA, 21 nt, Human
uguaucaaauacauuuaaaac

SEQ ID NO: 1303933 - RNA, 23 nt, Human
uguaucaaauacauuuaaaacau

SEQ ID NO: 1303934 - RNA, 15 nt, Human
uguaucauagaaaug

SEQ ID NO: 1303935 - RNA, 16 nt, Human
uguaucauagaaaugu

SEQ ID NO: 1303936 - RNA, 17 nt, Human
uguaucauagaaaugua

SEQ ID NO: 1303937 - RNA, 22 nt, Human
uguauuacaaauccaaugaaau

SEQ ID NO: 1303938 - RNA, 18 nt, Human
uguauuccaagcauauaa

SEQ ID NO: 1303939 - RNA, 13 nt, Human
uguauuacaaauc

SEQ ID NO: 1303940 - RNA, 22 nt, Human
ugucaagggcagcuuugcucau

SEQ ID NO: 1303941 - RNA, 21 nt, Human
ugucaagggcagcuuugcuca

SEQ ID NO: 1303942 - RNA, 21 nt, Human
ugucaaggguucaagauuguu

SEQ ID NO: 1303943 - RNA, 18 nt, Human
ugucaagccauuuuuaca

SEQ ID NO: 1303944 - RNA, 20 nt, Human
ugucaagccauuuuuacauc

SEQ ID NO: 1303945 - RNA, 23 nt, Human
ugucaagccauuuuuacaucuaa

SEQ ID NO: 1303946 - RNA, 13 nt, Human
ugucaaacaaaua

SEQ ID NO: 1303947 - RNA, 21 nt, Human
ugucaaacaaauagucuauca

SEQ ID NO: 1303948 - RNA, 18 nt, Human
aguauuagaauaccacag

SEQ ID NO: 1303949 - RNA, 21 nt, Human
ugucaauaaaauccauacauu

SEQ ID NO: 1303950 - RNA, 23 nt, Human
ugucaaugcaguugucucuguuu

SEQ ID NO: 1303951 - RNA, 20 nt, Human
ugucaaugcaguugucucug

SEQ ID NO: 1303952 - RNA, 23 nt, Human
ugucaagggcagcuuugcucaua

SEQ ID NO: 1303953 - RNA, 17 nt, Human
aguauuucuaugaaaua

SEQ ID NO: 1303954 - RNA, 21 nt, Human
aguauugacaaaauguuauuu

SEQ ID NO: 1303955 - RNA, 18 nt, Human
aguauuucuaugaaauau

SEQ ID NO: 1303956 - RNA, 22 nt, Human
aguauuucuaugaaauauuaug

SEQ ID NO: 1303957 - RNA, 21 nt, Human
aguauuagaauaccacaggaa

SEQ ID NO: 1303958 - RNA, 12 nt, Human
aguauucuucuc

SEQ ID NO: 1303959 - RNA, 14 nt, Human
aguauucuucucuu

SEQ ID NO: 1303960 - RNA, 18 nt, Human
aguauugacaaaauguua

SEQ ID NO: 1303961 - RNA, 17 nt, Human
aguauugacaaaauguu

SEQ ID NO: 1303962 - RNA, 16 nt, Human
aguauugacaaaaugu

SEQ ID NO: 1303963 - RNA, 15 nt, Human
aguauugacaaaaug

SEQ ID NO: 1303964 - RNA, 14 nt, Human
aguauugacaaaau

SEQ ID NO: 1303965 - RNA, 13 nt, Human
aguauugacaaaa

SEQ ID NO: 1303966 - RNA, 12 nt, Human
aguauugacaaa

SEQ ID NO: 1303967 - RNA, 14 nt, Human
agucaccucaugga

SEQ ID NO: 1303968 - RNA, 15 nt, Human
agucaccucauggaa

SEQ ID NO: 1303969 - RNA, 17 nt, Human
agucaccucauggaauu

SEQ ID NO: 1303970 - RNA, 20 nt, Human
agucacccuaccugugccug

SEQ ID NO: 1303971 - RNA, 20 nt, Human
aguauugacaaaauguuauu

SEQ ID NO: 1303972 - RNA, 19 nt, Human
aguauugacaaaauguuau

SEQ ID NO: 1303973 - RNA, 17 nt, Human
agucacacaguguugga

SEQ ID NO: 1303974 - RNA, 19 nt, Human
agucacccuaccugugccu

SEQ ID NO: 1303975 - RNA, 23 nt, Human
uguacuugcucuugaugccuggc

SEQ ID NO: 1303976 - RNA, 22 nt, Human
uguacuugcucuugaugccugg

SEQ ID NO: 1303977 - RNA, 16 nt, Human
agguuuaugacaguaa

SEQ ID NO: 1303978 - RNA, 12 nt, Human
agguuuaugaca

SEQ ID NO: 1303979 - RNA, 21 nt, Human
agguuuaugaaaaagaagaau

SEQ ID NO: 1303980 - RNA, 14 nt, Human
agguuuaugaaaaa

SEQ ID NO: 1303981 - RNA, 16 nt, Human
agguuuaugaaaaaga

SEQ ID NO: 1303982 - RNA, 14 nt, Human
agguuuacagaauu

SEQ ID NO: 1303983 - RNA, 14 nt, Human
agguuuaugacagu

SEQ ID NO: 1303984 - RNA, 22 nt, Human
uguacuuggaguauuggggucu

SEQ ID NO: 1303985 - RNA, 23 nt, Human
uguagaaaauuuguuauuuugca

SEQ ID NO: 1303986 - RNA, 14 nt, Human
uguagaacacuaau

SEQ ID NO: 1303987 - RNA, 15 nt, Human
uguagaacacuaauu

SEQ ID NO: 1303988 - RNA, 17 nt, Human
uguagaacacuaauuca

SEQ ID NO: 1303989 - RNA, 14 nt, Human
uguagagcuucugg

SEQ ID NO: 1303990 - RNA, 16 nt, Human
uguagaggagaaacug

SEQ ID NO: 1303991 - RNA, 18 nt, Human
uguagaacacuaauucau

SEQ ID NO: 1303992 - RNA, 16 nt, Human
agguuuuaauuuagua

SEQ ID NO: 1303993 - RNA, 17 nt, Human
agguuuuaauuuaguaa

SEQ ID NO: 1303994 - RNA, 20 nt, Human
agguuuuaauuuaguaaacc

SEQ ID NO: 1303995 - RNA, 13 nt, Human
agguuuuacagau

SEQ ID NO: 1303996 - RNA, 14 nt, Human
agguuuuacagauu

SEQ ID NO: 1303997 - RNA, 14 nt, Human
agguuuuagguucu

SEQ ID NO: 1303998 - RNA, 22 nt, Human
agguuuuaauuuaguaaaccaa

SEQ ID NO: 1303999 - RNA, 15 nt, Human
agguuuuagguucua

SEQ ID NO: 1304000 - RNA, 13 nt, Human
aguaaaauccaca

SEQ ID NO: 1304001 - RNA, 19 nt, Human
agguuuuuguagugauuuu

SEQ ID NO: 1304002 - RNA, 19 nt, Human
agguuuuuguuuguuuccu

SEQ ID NO: 1304003 - RNA, 16 nt, Human
aguaaaagcaaaaaag

SEQ ID NO: 1304004 - RNA, 16 nt, Human
agguuuuagguucuaa

SEQ ID NO: 1304005 - RNA, 17 nt, Human
agguuuuagguucuaaa

SEQ ID NO: 1304006 - RNA, 18 nt, Human
agguuuuagguucuaaag

SEQ ID NO: 1304007 - RNA, 19 nt, Human
agguuuuagguucuaaagu

SEQ ID NO: 1304008 - RNA, 17 nt, Human
agguuuuauaaggcuga

SEQ ID NO: 1304009 - RNA, 23 nt, Human
agguuuuagguucuaaaguucua

SEQ ID NO: 1304010 - RNA, 20 nt, Human
agguuuuauuucauuuuuca

SEQ ID NO: 1304011 - RNA, 12 nt, Human
agguuuuuccuu

SEQ ID NO: 1304012 - RNA, 18 nt, Human
aguaaugauaacuggaaa

SEQ ID NO: 1304013 - RNA, 20 nt, Human
aguaaugauaacuggaaacu

SEQ ID NO: 1304014 - RNA, 17 nt, Human
aguaaugauaacuggaa

SEQ ID NO: 1304015 - RNA, 17 nt, Human
aguaaaauaauaauuuu

SEQ ID NO: 1304016 - RNA, 12 nt, Human
aguaaaagcaaa

SEQ ID NO: 1304017 - RNA, 14 nt, Human
aguaauagccuggg

SEQ ID NO: 1304018 - RNA, 22 nt, Human
aguacaugauaaaugauagaca

SEQ ID NO: 1304019 - RNA, 19 nt, Human
aguacauuguuaccucuau

SEQ ID NO: 1304020 - RNA, 14 nt, Human
aguacauuguuacc

SEQ ID NO: 1304021 - RNA, 14 nt, Human
aguaaugguguaga

SEQ ID NO: 1304022 - RNA, 15 nt, Human
aguaaugguguagaa

SEQ ID NO: 1304023 - RNA, 16 nt, Human
aguaaugguguagaac

SEQ ID NO: 1304024 - RNA, 18 nt, Human
aguaaugguguagaacac

SEQ ID NO: 1304025 - RNA, 19 nt, Human
aguaaugguguagaacacu

SEQ ID NO: 1304026 - RNA, 22 nt, Human
aguaaugguguagaacacuaau

SEQ ID NO: 1304027 - RNA, 23 nt, Human
aguaaugguguagaacacuaauu

SEQ ID NO: 1304028 - RNA, 21 nt, Human
aguagaaucucaguugauuuu

SEQ ID NO: 1304029 - RNA, 12 nt, Human
aguaccauuuaa

SEQ ID NO: 1304030 - RNA, 23 nt, Human
aguaccauuuaauggggaggaca

SEQ ID NO: 1304031 - RNA, 23 nt, Human
aguacccacucuggagcauuucu

SEQ ID NO: 1304032 - RNA, 19 nt, Human
aguacccguucacauuuuu

SEQ ID NO: 1304033 - RNA, 16 nt, Human
aguacccucucagcuc

SEQ ID NO: 1304034 - RNA, 18 nt, Human
aguacccucucagcucca

SEQ ID NO: 1304035 - RNA, 19 nt, Human
aguacccucucagcuccag

SEQ ID NO: 1304036 - RNA, 21 nt, Human
aguaccuagcuggcucuguga

SEQ ID NO: 1304037 - RNA, 23 nt, Human
uguaguagcguuuuuuaaaugua

SEQ ID NO: 1304038 - RNA, 20 nt, Human
uguaguaggcauuuuuacca

SEQ ID NO: 1304039 - RNA, 22 nt, Human
uguaguagcguuuuuuaaaugu

SEQ ID NO: 1304040 - RNA, 21 nt, Human
uguaguagcguuuuuuaaaug

SEQ ID NO: 1304041 - RNA, 16 nt, Human
uguaguagcguuuuuu

SEQ ID NO: 1304042 - RNA, 18 nt, Human
uguaguauuuuuuguaua

SEQ ID NO: 1304043 - RNA, 19 nt, Human
uguaguauuuuuuguauaa

SEQ ID NO: 1304044 - RNA, 20 nt, Human
uguaguauuuuuuguauaau

SEQ ID NO: 1304045 - RNA, 22 nt, Human
uguaggccaguaguucucaaag

SEQ ID NO: 1304046 - RNA, 17 nt, Human
uguaggcuuaguuugug

SEQ ID NO: 1304047 - RNA, 13 nt, Human
uguagggagggcg

SEQ ID NO: 1304048 - RNA, 19 nt, Human
uguaguaauugacaugugc

SEQ ID NO: 1304049 - RNA, 20 nt, Human
aguagcguuuuuuaaaugua

SEQ ID NO: 1304050 - RNA, 19 nt, Human
aguagcguuuuuuaaaugu

SEQ ID NO: 1304051 - RNA, 19 nt, Human
uguaggagggacugucgcu

SEQ ID NO: 1304052 - RNA, 14 nt, Human
uguaggagggacug

SEQ ID NO: 1304053 - RNA, 18 nt, Human
aguagcguuuuuuaaaug

SEQ ID NO: 1304054 - RNA, 23 nt, Human
aguagaccuuguuacuucugagg

SEQ ID NO: 1304055 - RNA, 15 nt, Human
aguagaauugcauug

SEQ ID NO: 1304056 - RNA, 14 nt, Human
aguagaauugcauu

SEQ ID NO: 1304057 - RNA, 14 nt, Human
aguagaaucucagu

SEQ ID NO: 1304058 - RNA, 20 nt, Human
aguagaccuuguuacuucug

SEQ ID NO: 1304059 - RNA, 21 nt, Human
aguagaccuuguuacuucuga

SEQ ID NO: 1304060 - RNA, 23 nt, Human
uguaaauaauacauuauauuucu

SEQ ID NO: 1304061 - RNA, 22 nt, Human
uguaaauaauacauuauauuuc

SEQ ID NO: 1304062 - RNA, 19 nt, Human
uguaaauaaagaacuagca

SEQ ID NO: 1304063 - RNA, 14 nt, Human
uguaaauaaaaaga

SEQ ID NO: 1304064 - RNA, 13 nt, Human
uguaaauauaaag

SEQ ID NO: 1304065 - RNA, 12 nt, Human
uguaaauauaaa

SEQ ID NO: 1304066 - RNA, 16 nt, Human
uguaaaggagucaaaa

SEQ ID NO: 1304067 - RNA, 19 nt, Human
uguaaaggagucaaaacua

SEQ ID NO: 1304068 - RNA, 21 nt, Human
uguaaaggagucaaaacuaca

SEQ ID NO: 1304069 - RNA, 19 nt, Human
uguaaaguauguauuauuu

SEQ ID NO: 1304070 - RNA, 22 nt, Human
uguaaacuguguauuccaagac

SEQ ID NO: 1304071 - RNA, 19 nt, Human
uguaaacuguuucuuuaaa

SEQ ID NO: 1304072 - RNA, 22 nt, Human
uguaaacuguuucuuuaaaauu

SEQ ID NO: 1304073 - RNA, 17 nt, Human
uguaaacuuuaucacuu

SEQ ID NO: 1304074 - RNA, 19 nt, Human
uguaaacuuuaucacuuaa

SEQ ID NO: 1304075 - RNA, 18 nt, Human
uguaaacuuuaucacuua

SEQ ID NO: 1304076 - RNA, 13 nt, Human
uguaaacuuuuug

SEQ ID NO: 1304077 - RNA, 12 nt, Human
ugguuuccugcc

SEQ ID NO: 1304078 - RNA, 13 nt, Human
ugguuuccugccc

SEQ ID NO: 1304079 - RNA, 17 nt, Human
ugguuaugaauacuuug

SEQ ID NO: 1304080 - RNA, 13 nt, Human
ugguuucccaaga

SEQ ID NO: 1304081 - RNA, 17 nt, Human
ugguuucccaagagcua

SEQ ID NO: 1304082 - RNA, 18 nt, Human
ugguuucccaagagcuac

SEQ ID NO: 1304083 - RNA, 14 nt, Human
ugguuuccugcccu

SEQ ID NO: 1304084 - RNA, 15 nt, Human
ugguuuccugcccug

SEQ ID NO: 1304085 - RNA, 20 nt, Human
ugguuuccugcccugggagg

SEQ ID NO: 1304086 - RNA, 18 nt, Human
ugguuugcagcgacuggc

SEQ ID NO: 1304087 - RNA, 15 nt, Human
ugguuugcagguggc

SEQ ID NO: 1304088 - RNA, 19 nt, Human
ugguuugcagcgacuggca

SEQ ID NO: 1304089 - RNA, 16 nt, Human
ugguuugccuuccaga

SEQ ID NO: 1304090 - RNA, 17 nt, Human
ugguuugccuuccagaa

SEQ ID NO: 1304091 - RNA, 14 nt, Human
agguguccuacaga

SEQ ID NO: 1304092 - RNA, 15 nt, Human
agguguccuacagaa

SEQ ID NO: 1304093 - RNA, 16 nt, Human
agguguccuacagaaa

SEQ ID NO: 1304094 - RNA, 17 nt, Human
agguguccuacagaaaa

SEQ ID NO: 1304095 - RNA, 18 nt, Human
agguguccuacagaaaaa

SEQ ID NO: 1304096 - RNA, 19 nt, Human
agguguccuacagaaaaac

SEQ ID NO: 1304097 - RNA, 20 nt, Human
agguguccuacagaaaaacc

SEQ ID NO: 1304098 - RNA, 13 nt, Human
aggugucucaggc

SEQ ID NO: 1304099 - RNA, 14 nt, Human
aggugucucaggcu

SEQ ID NO: 1304100 - RNA, 16 nt, Human
aggugucucaggcugc

SEQ ID NO: 1304101 - RNA, 17 nt, Human
aggugucucaggcugcc

SEQ ID NO: 1304102 - RNA, 18 nt, Human
aggugucucaggcugccu

SEQ ID NO: 1304103 - RNA, 19 nt, Human
aggugucucaggcugccug

SEQ ID NO: 1304104 - RNA, 20 nt, Human
aggugucucaggcugccuga

SEQ ID NO: 1304105 - RNA, 22 nt, Human
aggugucucaggcugccugagu

SEQ ID NO: 1304106 - RNA, 22 nt, Human
agguucuccaacaucacagccc

SEQ ID NO: 1304107 - RNA, 16 nt, Human
agguucuuacugcuug

SEQ ID NO: 1304108 - RNA, 14 nt, Human
agguucuuacugcu

SEQ ID NO: 1304109 - RNA, 20 nt, Human
agguguggagccgaggccua

SEQ ID NO: 1304110 - RNA, 23 nt, Human
agguguggcuuuaggagcagugg

SEQ ID NO: 1304111 - RNA, 17 nt, Human
agguguuaacauuccaa

SEQ ID NO: 1304112 - RNA, 17 nt, Human
agguucuagguuucaaa

SEQ ID NO: 1304113 - RNA, 19 nt, Human
agguucuagguuucaaaga

SEQ ID NO: 1304114 - RNA, 13 nt, Human
agguucuccaaca

SEQ ID NO: 1304115 - RNA, 21 nt, Human
agguucuccaacaucacagcc

SEQ ID NO: 1304116 - RNA, 19 nt, Human
agguucuccguuagcuccu

SEQ ID NO: 1304117 - RNA, 20 nt, Human
agguucuccguuagcuccug

SEQ ID NO: 1304118 - RNA, 21 nt, Human
agguucuccguuagcuccugu

SEQ ID NO: 1304119 - RNA, 22 nt, Human
agguucuccguuagcuccugug

SEQ ID NO: 1304120 - RNA, 17 nt, Human
aggugccugucccaccc

SEQ ID NO: 1304121 - RNA, 18 nt, Human
aggugccugucccacccc

SEQ ID NO: 1304122 - RNA, 15 nt, Human
aggugcauuuuuacu

SEQ ID NO: 1304123 - RNA, 13 nt, Human
aggugccacugga

SEQ ID NO: 1304124 - RNA, 12 nt, Human
aggugcccagga

SEQ ID NO: 1304125 - RNA, 13 nt, Human
aggugcccaggag

SEQ ID NO: 1304126 - RNA, 15 nt, Human
aggugcccaggagaa

SEQ ID NO: 1304127 - RNA, 14 nt, Human
aggugcccaggaga

SEQ ID NO: 1304128 - RNA, 18 nt, Human
aggugccacuggagugug

SEQ ID NO: 1304129 - RNA, 21 nt, Human
aggugcccagaauaaguuauu

SEQ ID NO: 1304130 - RNA, 16 nt, Human
aggugagaccaccucu

SEQ ID NO: 1304131 - RNA, 13 nt, Human
aggugagaaauuu

SEQ ID NO: 1304132 - RNA, 15 nt, Human
aggugagaccaccuc

SEQ ID NO: 1304133 - RNA, 14 nt, Human
aggugagaccaccu

SEQ ID NO: 1304134 - RNA, 14 nt, Human
aggugacugucugg

SEQ ID NO: 1304135 - RNA, 15 nt, Human
aggugacugucuggg

SEQ ID NO: 1304136 - RNA, 17 nt, Human
aggugacugucugggga

SEQ ID NO: 1304137 - RNA, 18 nt, Human
aggugacugucuggggag

SEQ ID NO: 1304138 - RNA, 21 nt, Human
aggugacugucuggggagcgg

SEQ ID NO: 1304139 - RNA, 19 nt, Human
aggugaccaaaucagugug

SEQ ID NO: 1304140 - RNA, 14 nt, Human
aggugaccccaggg

SEQ ID NO: 1304141 - RNA, 15 nt, Human
aggugaccccagggc

SEQ ID NO: 1304142 - RNA, 16 nt, Human
aggugaccccagggca

SEQ ID NO: 1304143 - RNA, 17 nt, Human
aggugaccccagggcac

SEQ ID NO: 1304144 - RNA, 18 nt, Human
aggugaccccagggcaca

SEQ ID NO: 1304145 - RNA, 19 nt, Human
aggugaccccagggcacag

SEQ ID NO: 1304146 - RNA, 24 nt, Human
aggugaccccagggcacaggagcu

SEQ ID NO: 1304147 - RNA, 21 nt, Human
aggugaccccagggcacagga

SEQ ID NO: 1304148 - RNA, 19 nt, Human
aggucuucuuaauauguuc

SEQ ID NO: 1304149 - RNA, 19 nt, Human
aggugaauagccauauuug

SEQ ID NO: 1304150 - RNA, 22 nt, Human
aggugaauagccauauuuguaa

SEQ ID NO: 1304151 - RNA, 21 nt, Human
aggugaauagccauauuugua

SEQ ID NO: 1304152 - RNA, 13 nt, Human
aggugaccccagg

SEQ ID NO: 1304153 - RNA, 19 nt, Human
aggugacaucggaaaaaua

SEQ ID NO: 1304154 - RNA, 20 nt, Human
aggucuucaucgaaucuacu

SEQ ID NO: 1304155 - RNA, 21 nt, Human
aggucuucaucgaaucuacua

SEQ ID NO: 1304156 - RNA, 15 nt, Human
agguccagcucugga

SEQ ID NO: 1304157 - RNA, 16 nt, Human
agguccagcucuggag

SEQ ID NO: 1304158 - RNA, 17 nt, Human
agguccagcucuggagg

SEQ ID NO: 1304159 - RNA, 18 nt, Human
agguccagcucuggaggg

SEQ ID NO: 1304160 - RNA, 13 nt, Human
agguccagcucug

SEQ ID NO: 1304161 - RNA, 14 nt, Human
agguccagcucugg

SEQ ID NO: 1304162 - RNA, 21 nt, Human
aggucagcacaucucaacagg

SEQ ID NO: 1304163 - RNA, 15 nt, Human
aggucagcaugucua

SEQ ID NO: 1304164 - RNA, 16 nt, Human
aggucagcaugucuau

SEQ ID NO: 1304165 - RNA, 15 nt, Human
aggucagccacuguu

SEQ ID NO: 1304166 - RNA, 14 nt, Human
agguccacaggucu

SEQ ID NO: 1304167 - RNA, 15 nt, Human
agguccacaggucua

SEQ ID NO: 1304168 - RNA, 18 nt, Human
agguccacaggucuagac

SEQ ID NO: 1304169 - RNA, 19 nt, Human
agguccacaggucuagacu

SEQ ID NO: 1304170 - RNA, 20 nt, Human
agguccacaggucuagacua

SEQ ID NO: 1304171 - RNA, 23 nt, Human
uggugcuucucagauuucugagg

SEQ ID NO: 1304172 - RNA, 13 nt, Human
uggugcugggaga

SEQ ID NO: 1304173 - RNA, 20 nt, Human
uggugcugggagaggcagcc

SEQ ID NO: 1304174 - RNA, 21 nt, Human
ugguggagaggcccggccucu

SEQ ID NO: 1304175 - RNA, 13 nt, Human
ugguggagggcca

SEQ ID NO: 1304176 - RNA, 21 nt, Human
ugguggaugauccccacgcca

SEQ ID NO: 1304177 - RNA, 15 nt, Human
ugguuaccaugucuu

SEQ ID NO: 1304178 - RNA, 13 nt, Human
ugguuagaaaagu

SEQ ID NO: 1304179 - RNA, 13 nt, Human
ugguuagaaaugc

SEQ ID NO: 1304180 - RNA, 14 nt, Human
ugguuagaaaugca

SEQ ID NO: 1304181 - RNA, 23 nt, Human
uggugugaccacugcagaagaca

SEQ ID NO: 1304182 - RNA, 15 nt, Human
ugguggcacaggccc

SEQ ID NO: 1304183 - RNA, 17 nt, Human
uggugucucuucuuuag

SEQ ID NO: 1304184 - RNA, 23 nt, Human
uggugucucuucuuuagaacagg

SEQ ID NO: 1304185 - RNA, 17 nt, Human
aggugaggucagcacau

SEQ ID NO: 1304186 - RNA, 17 nt, Human
aggugaggucuguuccu

SEQ ID NO: 1304187 - RNA, 24 nt, Human
uggugccuaguauugacaaaaugu

SEQ ID NO: 1304188 - RNA, 13 nt, Human
uggugccuccaga

SEQ ID NO: 1304189 - RNA, 22 nt, Human
uggugccuaguauugacaaaau

SEQ ID NO: 1304190 - RNA, 19 nt, Human
uggugccuaguauugacaa

SEQ ID NO: 1304191 - RNA, 15 nt, Human
uggugccuaguauug

SEQ ID NO: 1304192 - RNA, 12 nt, Human
uggugccuucau

SEQ ID NO: 1304193 - RNA, 14 nt, Human
uggugccuucauuu

SEQ ID NO: 1304194 - RNA, 14 nt, Human
uggugcggcuggcc

SEQ ID NO: 1304195 - RNA, 16 nt, Human
uggugcggcuggccau

SEQ ID NO: 1304196 - RNA, 22 nt, Human
uggugcggcuggccauggagaa

SEQ ID NO: 1304197 - RNA, 17 nt, Human
uggugcggcuggccaug

SEQ ID NO: 1304198 - RNA, 13 nt, Human
uggugcugccaca

SEQ ID NO: 1304199 - RNA, 18 nt, Human
uggugcugccacacuuca

SEQ ID NO: 1304200 - RNA, 21 nt, Human
ugggucgcccuggacugugug

SEQ ID NO: 1304201 - RNA, 12 nt, Human
ugggugacauuu

SEQ ID NO: 1304202 - RNA, 22 nt, Human
ugggugaggaucccugaaggcc

SEQ ID NO: 1304203 - RNA, 16 nt, Human
ugggugccuaggccug

SEQ ID NO: 1304204 - RNA, 17 nt, Human
ugggugccuaggccugg

SEQ ID NO: 1304205 - RNA, 21 nt, Human
ugggugccuaggccugggcag

SEQ ID NO: 1304206 - RNA, 23 nt, Human
ugggugccuaggccugggcagug

SEQ ID NO: 1304207 - RNA, 18 nt, Human
ugggucgcccuggacugu

SEQ ID NO: 1304208 - RNA, 16 nt, Human
ugggucgcccuggacu

SEQ ID NO: 1304209 - RNA, 13 nt, Human
ugggucccaggac

SEQ ID NO: 1304210 - RNA, 17 nt, Human
agggugggcuugugggg

SEQ ID NO: 1304211 - RNA, 22 nt, Human
agggugggcuuguggggccugg

SEQ ID NO: 1304212 - RNA, 18 nt, Human
uggguccaugggcagagc

SEQ ID NO: 1304213 - RNA, 21 nt, Human
aggguggggggggggcgcggc

SEQ ID NO: 1304214 - RNA, 23 nt, Human
agggugggcuuguggggccuggg

SEQ ID NO: 1304215 - RNA, 13 nt, Human
agggucugcucuu

SEQ ID NO: 1304216 - RNA, 14 nt, Human
agggucugcucuuu

SEQ ID NO: 1304217 - RNA, 17 nt, Human
agggucugcucuuucuc

SEQ ID NO: 1304218 - RNA, 20 nt, Human
agggucugcucuuucucugc

SEQ ID NO: 1304219 - RNA, 21 nt, Human
agggucugcucuuucucugcc

SEQ ID NO: 1304220 - RNA, 22 nt, Human
agggucugcucuuucucugcca

SEQ ID NO: 1304221 - RNA, 23 nt, Human
agggucugcucuuucucugccag

SEQ ID NO: 1304222 - RNA, 22 nt, Human
agggucugggggcacaagacug

SEQ ID NO: 1304223 - RNA, 23 nt, Human
agggucugggggcacaagacuga

SEQ ID NO: 1304224 - RNA, 19 nt, Human
agggucuguagguugcaca

SEQ ID NO: 1304225 - RNA, 20 nt, Human
agggucuguagguugcacac

SEQ ID NO: 1304226 - RNA, 22 nt, Human
agggucuguagguugcacacuu

SEQ ID NO: 1304227 - RNA, 21 nt, Human
agggucuguagguugcacacu

SEQ ID NO: 1304228 - RNA, 20 nt, Human
uggucacguuuggugcuucu

SEQ ID NO: 1304229 - RNA, 17 nt, Human
ugguagcuuuucccuuc

SEQ ID NO: 1304230 - RNA, 17 nt, Human
ugguagaccaaaauaaa

SEQ ID NO: 1304231 - RNA, 23 nt, Human
ugguagaccacugccauaugauu

SEQ ID NO: 1304232 - RNA, 17 nt, Human
ugguagaccacugccau

SEQ ID NO: 1304233 - RNA, 13 nt, Human
ugguaccagauaa

SEQ ID NO: 1304234 - RNA, 14 nt, Human
ugguaccagauaac

SEQ ID NO: 1304235 - RNA, 18 nt, Human
ugguaccagauaacuuuu

SEQ ID NO: 1304236 - RNA, 13 nt, Human
ugguaccagaugc

SEQ ID NO: 1304237 - RNA, 15 nt, Human
ugguacccuccuggc

SEQ ID NO: 1304238 - RNA, 16 nt, Human
ugguacccuccuggcu

SEQ ID NO: 1304239 - RNA, 21 nt, Human
ugguacccuccuggcucuuga

SEQ ID NO: 1304240 - RNA, 14 nt, Human
ugguacccucugga

SEQ ID NO: 1304241 - RNA, 17 nt, Human
ugggugcuacuggggaa

SEQ ID NO: 1304242 - RNA, 14 nt, Human
ugguaacugcuuuc

SEQ ID NO: 1304243 - RNA, 22 nt, Human
ugguaacugcuuucuguuccaa

SEQ ID NO: 1304244 - RNA, 14 nt, Human
ugguaacuuuugug

SEQ ID NO: 1304245 - RNA, 16 nt, Human
ugguaacuuuugugaa

SEQ ID NO: 1304246 - RNA, 24 nt, Human
ugguaacuuuugugaauuaggcug

SEQ ID NO: 1304247 - RNA, 16 nt, Human
aggggaauugaggaca

SEQ ID NO: 1304248 - RNA, 18 nt, Human
aggggagcaugggaagug

SEQ ID NO: 1304249 - RNA, 15 nt, Human
aggggaaucagaacu

SEQ ID NO: 1304250 - RNA, 16 nt, Human
aggggaaucagaacuc

SEQ ID NO: 1304251 - RNA, 13 nt, Human
aggggagcagagg

SEQ ID NO: 1304252 - RNA, 16 nt, Human
aggggagcagaggggc

SEQ ID NO: 1304253 - RNA, 20 nt, Human
aggggagcagaggggcagag

SEQ ID NO: 1304254 - RNA, 22 nt, Human
aggggagcagaggggcagaggc

SEQ ID NO: 1304255 - RNA, 12 nt, Human
aggggagcccac

SEQ ID NO: 1304256 - RNA, 13 nt, Human
aggggagcccacu

SEQ ID NO: 1304257 - RNA, 17 nt, Human
aggggagcccacugucc

SEQ ID NO: 1304258 - RNA, 21 nt, Human
aggggagcccacuguccuggg

SEQ ID NO: 1304259 - RNA, 24 nt, Human
aggggagcccacuguccugggccu

SEQ ID NO: 1304260 - RNA, 16 nt, Human
aggggcuccuuuccau

SEQ ID NO: 1304261 - RNA, 15 nt, Human
aggggcugcuuccuc

SEQ ID NO: 1304262 - RNA, 16 nt, Human
aggggcugcuuccucc

SEQ ID NO: 1304263 - RNA, 18 nt, Human
aggggcugcuuccuccug

SEQ ID NO: 1304264 - RNA, 20 nt, Human
aggggcugcuuccuccugga

SEQ ID NO: 1304265 - RNA, 21 nt, Human
aggggcugcuuccuccuggaa

SEQ ID NO: 1304266 - RNA, 23 nt, Human
agggggccccuuugcugacccuc

SEQ ID NO: 1304267 - RNA, 15 nt, Human
agggggcgccugugg

SEQ ID NO: 1304268 - RNA, 20 nt, Human
agggggcgccugugguucug

SEQ ID NO: 1304269 - RNA, 12 nt, Human
agggggcggccu

SEQ ID NO: 1304270 - RNA, 15 nt, Human
agggggcggccuaug

SEQ ID NO: 1304271 - RNA, 16 nt, Human
agggggcuaagacuuc

SEQ ID NO: 1304272 - RNA, 13 nt, Human
agggggcugcugc

SEQ ID NO: 1304273 - RNA, 14 nt, Human
agggggcugcugcu

SEQ ID NO: 1304274 - RNA, 19 nt, Human
agggggcugcugcugggcu

SEQ ID NO: 1304275 - RNA, 20 nt, Human
agggggcugcugcugggcuc

SEQ ID NO: 1304276 - RNA, 12 nt, Human
agggggcuggag

SEQ ID NO: 1304277 - RNA, 13 nt, Human
agggggcuggagg

SEQ ID NO: 1304278 - RNA, 18 nt, Human
aggguaacuaacuaaaac

SEQ ID NO: 1304279 - RNA, 11 nt, Human
aggguaaauca

SEQ ID NO: 1304280 - RNA, 13 nt, Human
aggguaaacaaua

SEQ ID NO: 1304281 - RNA, 14 nt, Human
aggguaaacaauau

SEQ ID NO: 1304282 - RNA, 23 nt, Human
aggguaaaucaguaagagguguu

SEQ ID NO: 1304283 - RNA, 16 nt, Human
agggguuggggaaaca

SEQ ID NO: 1304284 - RNA, 21 nt, Human
agggguugcuccgccuggccu

SEQ ID NO: 1304285 - RNA, 19 nt, Human
agggggcuggaggagccca

SEQ ID NO: 1304286 - RNA, 14 nt, Human
agggggcuggagga

SEQ ID NO: 1304287 - RNA, 16 nt, Human
agggggcuggaggagc

SEQ ID NO: 1304288 - RNA, 17 nt, Human
agggggcuggaggagcc

SEQ ID NO: 1304289 - RNA, 18 nt, Human
agggggcuggaggagccc

SEQ ID NO: 1304290 - RNA, 14 nt, Human
agggguaggggcug

SEQ ID NO: 1304291 - RNA, 15 nt, Human
agggguaggggcugg

SEQ ID NO: 1304292 - RNA, 16 nt, Human
agggguaggggcuggg

SEQ ID NO: 1304293 - RNA, 18 nt, Human
agggguaggggcugggaa

SEQ ID NO: 1304294 - RNA, 19 nt, Human
agggguaggggcugggaac

SEQ ID NO: 1304295 - RNA, 21 nt, Human
aggggucaaguuauuaauuuc

SEQ ID NO: 1304296 - RNA, 15 nt, Human
aggggucaaguuauu

SEQ ID NO: 1304297 - RNA, 23 nt, Human
uggggcuccuccaggguggcagc

SEQ ID NO: 1304298 - RNA, 21 nt, Human
uggggcucuaacgccugagcc

SEQ ID NO: 1304299 - RNA, 18 nt, Human
uggggccuguacugccug

SEQ ID NO: 1304300 - RNA, 19 nt, Human
uggggccuguacugccugc

SEQ ID NO: 1304301 - RNA, 20 nt, Human
uggggccuguacugccugcu

SEQ ID NO: 1304302 - RNA, 17 nt, Human
uggggcucacacaccug

SEQ ID NO: 1304303 - RNA, 13 nt, Human
uggggcucagagc

SEQ ID NO: 1304304 - RNA, 17 nt, Human
uggggcucagagccggg

SEQ ID NO: 1304305 - RNA, 12 nt, Human
uggggccuggga

SEQ ID NO: 1304306 - RNA, 13 nt, Human
uggggccugggac

SEQ ID NO: 1304307 - RNA, 14 nt, Human
uggggccugggaca

SEQ ID NO: 1304308 - RNA, 22 nt, Human
uggggccugggacaacugcucc

SEQ ID NO: 1304309 - RNA, 13 nt, Human
uggggccugggag

SEQ ID NO: 1304310 - RNA, 14 nt, Human
uggggccugggagg

SEQ ID NO: 1304311 - RNA, 14 nt, Human
uggggccugguucc

SEQ ID NO: 1304312 - RNA, 11 nt, Human
uggggccugua

SEQ ID NO: 1304313 - RNA, 22 nt, Human
uggggagggauucugguuccag

SEQ ID NO: 1304314 - RNA, 15 nt, Human
uggggaggggcugug

SEQ ID NO: 1304315 - RNA, 19 nt, Human
agggcuccuugugggccug

SEQ ID NO: 1304316 - RNA, 20 nt, Human
agggcuccuugugggccugg

SEQ ID NO: 1304317 - RNA, 21 nt, Human
agggcuccuugugggccuggg

SEQ ID NO: 1304318 - RNA, 22 nt, Human
agggcuccuugugggccugggc

SEQ ID NO: 1304319 - RNA, 23 nt, Human
agggcuccuugugggccugggcu

SEQ ID NO: 1304320 - RNA, 20 nt, Human
agggcucgaggggugggcug

SEQ ID NO: 1304321 - RNA, 18 nt, Human
agggcucgaggggugggc

SEQ ID NO: 1304322 - RNA, 12 nt, Human
agggcucuccug

SEQ ID NO: 1304323 - RNA, 14 nt, Human
agggcucuccuggc

SEQ ID NO: 1304324 - RNA, 15 nt, Human
agggcucuccuggcu

SEQ ID NO: 1304325 - RNA, 16 nt, Human
agggcucuccuggcuu

SEQ ID NO: 1304326 - RNA, 17 nt, Human
agggcucuccuggcuuc

SEQ ID NO: 1304327 - RNA, 11 nt, Human
agggcucugag

SEQ ID NO: 1304328 - RNA, 12 nt, Human
agggcucugagg

SEQ ID NO: 1304329 - RNA, 13 nt, Human
agggcucugaggc

SEQ ID NO: 1304330 - RNA, 16 nt, Human
agggcucugaggcgcc

SEQ ID NO: 1304331 - RNA, 13 nt, Human
uggggagagacgg

SEQ ID NO: 1304332 - RNA, 21 nt, Human
uggggagacugggcugaggga

SEQ ID NO: 1304333 - RNA, 14 nt, Human
agggcucugaggcg

SEQ ID NO: 1304334 - RNA, 17 nt, Human
uggggagacugggcuga

SEQ ID NO: 1304335 - RNA, 12 nt, Human
uggggaggagga

SEQ ID NO: 1304336 - RNA, 18 nt, Human
uggggagggauucugguu

SEQ ID NO: 1304337 - RNA, 19 nt, Human
uggggagcgggucugcucc

SEQ ID NO: 1304338 - RNA, 20 nt, Human
uggggagcgggucugcuccc

SEQ ID NO: 1304339 - RNA, 12 nt, Human
uggggaggacaa

SEQ ID NO: 1304340 - RNA, 13 nt, Human
uggggaggaggag

SEQ ID NO: 1304341 - RNA, 17 nt, Human
uggggagcaggcagcca

SEQ ID NO: 1304342 - RNA, 18 nt, Human
uggggagcccgucucagu

SEQ ID NO: 1304343 - RNA, 19 nt, Human
uggggagcccgucucagug

SEQ ID NO: 1304344 - RNA, 21 nt, Human
uggggagcccgucucaguguu

SEQ ID NO: 1304345 - RNA, 16 nt, Human
uggggagcaggcagcc

SEQ ID NO: 1304346 - RNA, 17 nt, Human
uggggagcgggucugcu

SEQ ID NO: 1304347 - RNA, 21 nt, Human
aggggaauaaacuguugaguc

SEQ ID NO: 1304348 - RNA, 21 nt, Human
aggggaagcagaaauccaagc

SEQ ID NO: 1304349 - RNA, 15 nt, Human
aggggaagaggccug

SEQ ID NO: 1304350 - RNA, 13 nt, Human
aggggaagagaag

SEQ ID NO: 1304351 - RNA, 14 nt, Human
aggggaagaggccu

SEQ ID NO: 1304352 - RNA, 18 nt, Human
agggcuuuguuuugcaca

SEQ ID NO: 1304353 - RNA, 12 nt, Human
ugggguggcugc

SEQ ID NO: 1304354 - RNA, 13 nt, Human
ugggguggcugca

SEQ ID NO: 1304355 - RNA, 14 nt, Human
ugggguggcugcag

SEQ ID NO: 1304356 - RNA, 16 nt, Human
ugggguggcugcagcc

SEQ ID NO: 1304357 - RNA, 18 nt, Human
ugggguggcugcagccuc

SEQ ID NO: 1304358 - RNA, 19 nt, Human
ugggguggcugcagccuca

SEQ ID NO: 1304359 - RNA, 20 nt, Human
ugggguggcugcagccucag

SEQ ID NO: 1304360 - RNA, 14 nt, Human
uggggucugacccc

SEQ ID NO: 1304361 - RNA, 21 nt, Human
uggggucuggaguugaucugg

SEQ ID NO: 1304362 - RNA, 14 nt, Human
uggggucuggcagc

SEQ ID NO: 1304363 - RNA, 17 nt, Human
uggggucuggcagccuc

SEQ ID NO: 1304364 - RNA, 18 nt, Human
uggggucuggcagccucc

SEQ ID NO: 1304365 - RNA, 22 nt, Human
uggggugacccggcacccccug

SEQ ID NO: 1304366 - RNA, 23 nt, Human
uggggugacccggcacccccugc

SEQ ID NO: 1304367 - RNA, 11 nt, Human
uggggugcagg

SEQ ID NO: 1304368 - RNA, 15 nt, Human
uggggugcagggaug

SEQ ID NO: 1304369 - RNA, 18 nt, Human
uggggugcagggaugugg

SEQ ID NO: 1304370 - RNA, 19 nt, Human
uggggugcagggauguggg

SEQ ID NO: 1304371 - RNA, 17 nt, Human
uggggcucuaacgccug

SEQ ID NO: 1304372 - RNA, 18 nt, Human
uggggcucuaacgccuga

SEQ ID NO: 1304373 - RNA, 19 nt, Human
uggggcucuaacgccugag

SEQ ID NO: 1304374 - RNA, 20 nt, Human
uggggcucuaacgccugagc

SEQ ID NO: 1304375 - RNA, 17 nt, Human
uggggcuggagaggaca

SEQ ID NO: 1304376 - RNA, 14 nt, Human
uggggcuggccucc

SEQ ID NO: 1304377 - RNA, 14 nt, Human
uggggucccagcag

SEQ ID NO: 1304378 - RNA, 15 nt, Human
uggggucccagcagc

SEQ ID NO: 1304379 - RNA, 21 nt, Human
uggggucccagcagcugccag

SEQ ID NO: 1304380 - RNA, 20 nt, Human
ugggguccuggagcagacca

SEQ ID NO: 1304381 - RNA, 20 nt, Human
agggaggaggcagagaagaa

SEQ ID NO: 1304382 - RNA, 23 nt, Human
agggaggacgcucucuggccuuc

SEQ ID NO: 1304383 - RNA, 22 nt, Human
agggaggacgcucucuggccuu

SEQ ID NO: 1304384 - RNA, 21 nt, Human
agggaggacgcucucuggccu

SEQ ID NO: 1304385 - RNA, 19 nt, Human
agggacaaguggacucagg

SEQ ID NO: 1304386 - RNA, 21 nt, Human
agggacaccugggagaaaucu

SEQ ID NO: 1304387 - RNA, 14 nt, Human
agggacaccuggga

SEQ ID NO: 1304388 - RNA, 16 nt, Human
agggacagaggcccca

SEQ ID NO: 1304389 - RNA, 12 nt, Human
agggagagccca

SEQ ID NO: 1304390 - RNA, 13 nt, Human
agggagagcccag

SEQ ID NO: 1304391 - RNA, 14 nt, Human
agggagagcccagg

SEQ ID NO: 1304392 - RNA, 18 nt, Human
agggagagcccaggagcu

SEQ ID NO: 1304393 - RNA, 21 nt, Human
agggagagcccaggagcuccc

SEQ ID NO: 1304394 - RNA, 19 nt, Human
agggagagcccaggagcuc

SEQ ID NO: 1304395 - RNA, 13 nt, Human
agggagagggggc

SEQ ID NO: 1304396 - RNA, 16 nt, Human
agggagagggggcugg

SEQ ID NO: 1304397 - RNA, 18 nt, Human
ugggagacugcugaguca

SEQ ID NO: 1304398 - RNA, 23 nt, Human
ugggagaccggccugccaggagg

SEQ ID NO: 1304399 - RNA, 12 nt, Human
ugggagagacuu

SEQ ID NO: 1304400 - RNA, 14 nt, Human
ugggagagacuugu

SEQ ID NO: 1304401 - RNA, 15 nt, Human
ugggagagacuuguu

SEQ ID NO: 1304402 - RNA, 21 nt, Human
ugggagagacuuguuuuggau

SEQ ID NO: 1304403 - RNA, 14 nt, Human
ugggagacauguga

SEQ ID NO: 1304404 - RNA, 15 nt, Human
ugggagacaugugac

SEQ ID NO: 1304405 - RNA, 16 nt, Human
ugggagacaugugaca

SEQ ID NO: 1304406 - RNA, 20 nt, Human
ugggagaccggccugccagg

SEQ ID NO: 1304407 - RNA, 21 nt, Human
ugggagaccggccugccagga

SEQ ID NO: 1304408 - RNA, 22 nt, Human
ugggagaccggccugccaggag

SEQ ID NO: 1304409 - RNA, 18 nt, Human
ugggagaccuguaaucau

SEQ ID NO: 1304410 - RNA, 21 nt, Human
ugggacguggcucagccagca

SEQ ID NO: 1304411 - RNA, 15 nt, Human
ugggacuaaaugccc

SEQ ID NO: 1304412 - RNA, 13 nt, Human
ugggacucagccu

SEQ ID NO: 1304413 - RNA, 17 nt, Human
ugggacucagccuucag

SEQ ID NO: 1304414 - RNA, 23 nt, Human
ugggacucagccuucagacagag

SEQ ID NO: 1304415 - RNA, 18 nt, Human
ugggacuaaaugcccugc

SEQ ID NO: 1304416 - RNA, 17 nt, Human
ugggacugcuaaauaaa

SEQ ID NO: 1304417 - RNA, 18 nt, Human
ugggacugcuaaauaaaa

SEQ ID NO: 1304418 - RNA, 13 nt, Human
ugggacuggccuc

SEQ ID NO: 1304419 - RNA, 23 nt, Human
ugggagaaucgcuccugcagccc

SEQ ID NO: 1304420 - RNA, 20 nt, Human
aggcccgcucuacaucuucu

SEQ ID NO: 1304421 - RNA, 18 nt, Human
aggcccucaagucuuucu

SEQ ID NO: 1304422 - RNA, 23 nt, Human
aggcccucaagucuuucucuuuc

SEQ ID NO: 1304423 - RNA, 16 nt, Human
aggcccuccacaccug

SEQ ID NO: 1304424 - RNA, 17 nt, Human
aggcccuccacaccugc

SEQ ID NO: 1304425 - RNA, 18 nt, Human
aggcccuccacaccugcg

SEQ ID NO: 1304426 - RNA, 19 nt, Human
aggcccuccacaccugcgg

SEQ ID NO: 1304427 - RNA, 20 nt, Human
aggcccuccacaccugcggc

SEQ ID NO: 1304428 - RNA, 21 nt, Human
aggcccuccacaccugcggcc

SEQ ID NO: 1304429 - RNA, 23 nt, Human
aggcccuccacaccugcggccca

SEQ ID NO: 1304430 - RNA, 20 nt, Human
aggcccucccuguuccccag

SEQ ID NO: 1304431 - RNA, 22 nt, Human
aggcccucccuguuccccagag

SEQ ID NO: 1304432 - RNA, 23 nt, Human
aggcccucccuguuccccagaga

SEQ ID NO: 1304433 - RNA, 15 nt, Human
aggcccucgcugcca

SEQ ID NO: 1304434 - RNA, 18 nt, Human
agggaacgugauuaguga

SEQ ID NO: 1304435 - RNA, 23 nt, Human
agggaacccagcucuaauacauu

SEQ ID NO: 1304436 - RNA, 22 nt, Human
agggaacccagcucuaauacau

SEQ ID NO: 1304437 - RNA, 14 nt, Human
agggaaccuguguc

SEQ ID NO: 1304438 - RNA, 21 nt, Human
agggaacaauuuggcaauuuu

SEQ ID NO: 1304439 - RNA, 23 nt, Human
agggaacaauuuggcaauuuugu

SEQ ID NO: 1304440 - RNA, 17 nt, Human
agggaaccacuuucuua

SEQ ID NO: 1304441 - RNA, 19 nt, Human
agggaagagacagcccagg

SEQ ID NO: 1304442 - RNA, 14 nt, Human
agggaagagacagc

SEQ ID NO: 1304443 - RNA, 18 nt, Human
agggaagcagcagccucg

SEQ ID NO: 1304444 - RNA, 17 nt, Human
agggaagcagcagccuc

SEQ ID NO: 1304445 - RNA, 14 nt, Human
agggaagcucuugg

SEQ ID NO: 1304446 - RNA, 15 nt, Human
agggaaggaucccau

SEQ ID NO: 1304447 - RNA, 22 nt, Human
agggaaggaucccaugagcucc

SEQ ID NO: 1304448 - RNA, 23 nt, Human
agggaaggaucccaugagcuccu

SEQ ID NO: 1304449 - RNA, 17 nt, Human
agggaaggaggagccug

SEQ ID NO: 1304450 - RNA, 19 nt, Human
agggaaggaggagccuguc

SEQ ID NO: 1304451 - RNA, 12 nt, Human
agggaaggcagg

SEQ ID NO: 1304452 - RNA, 14 nt, Human
agggaaggcaggca

SEQ ID NO: 1304453 - RNA, 15 nt, Human
agggaaggcaggcag

SEQ ID NO: 1304454 - RNA, 16 nt, Human
agggaaggcaggcagg

SEQ ID NO: 1304455 - RNA, 20 nt, Human
agggaaggcaggcagggcuc

SEQ ID NO: 1304456 - RNA, 18 nt, Human
agggaaggcaggcagggc

SEQ ID NO: 1304457 - RNA, 13 nt, Human
agggaaggggaca

SEQ ID NO: 1304458 - RNA, 22 nt, Human
agggaaggggacaaggacuagg

SEQ ID NO: 1304459 - RNA, 18 nt, Human
agggaagggccugccaca

SEQ ID NO: 1304460 - RNA, 20 nt, Human
agggaagggagccaagggau

SEQ ID NO: 1304461 - RNA, 19 nt, Human
agggaaggcuggacuaggc

SEQ ID NO: 1304462 - RNA, 12 nt, Human
agggaagggagc

SEQ ID NO: 1304463 - RNA, 13 nt, Human
agggaagggagcc

SEQ ID NO: 1304464 - RNA, 14 nt, Human
agggaagggagcca

SEQ ID NO: 1304465 - RNA, 15 nt, Human
agggaagggagccaa

SEQ ID NO: 1304466 - RNA, 16 nt, Human
agggaagggagccaag

SEQ ID NO: 1304467 - RNA, 19 nt, Human
agggaagggagccaaggga

SEQ ID NO: 1304468 - RNA, 13 nt, Human
agggaagggccug

SEQ ID NO: 1304469 - RNA, 14 nt, Human
agggaagggccugc

SEQ ID NO: 1304470 - RNA, 16 nt, Human
agggaagggccugcca

SEQ ID NO: 1304471 - RNA, 21 nt, Human
agggaauuucuucaacucccu

SEQ ID NO: 1304472 - RNA, 14 nt, Human
agggaaugugaaau

SEQ ID NO: 1304473 - RNA, 16 nt, Human
agggaauugcagagua

SEQ ID NO: 1304474 - RNA, 13 nt, Human
agggaaugugaaa

SEQ ID NO: 1304475 - RNA, 14 nt, Human
agggacaaaggagc

SEQ ID NO: 1304476 - RNA, 15 nt, Human
agggacaaaggagcc

SEQ ID NO: 1304477 - RNA, 16 nt, Human
agggacaaaggagccu

SEQ ID NO: 1304478 - RNA, 17 nt, Human
agggacaaaggagccug

SEQ ID NO: 1304479 - RNA, 18 nt, Human
agggacaaaggagccugu

SEQ ID NO: 1304480 - RNA, 19 nt, Human
agggacaaaggagccugug

SEQ ID NO: 1304481 - RNA, 20 nt, Human
agggacaaaggagccuguga

SEQ ID NO: 1304482 - RNA, 21 nt, Human
agggacaaaggagccugugaa

SEQ ID NO: 1304483 - RNA, 22 nt, Human
agggacaaguggacucagggca

SEQ ID NO: 1304484 - RNA, 20 nt, Human
agggaaguaguuaucauguu

SEQ ID NO: 1304485 - RNA, 17 nt, Human
agggaaguaguuaucau

SEQ ID NO: 1304486 - RNA, 15 nt, Human
agggaaguaguuauc

SEQ ID NO: 1304487 - RNA, 19 nt, Human
agggaauaagguacaagaa

SEQ ID NO: 1304488 - RNA, 19 nt, Human
ugggccccugccucucugc

SEQ ID NO: 1304489 - RNA, 15 nt, Human
ugggccccugccucu

SEQ ID NO: 1304490 - RNA, 20 nt, Human
ugggccccugccucucugca

SEQ ID NO: 1304491 - RNA, 17 nt, Human
agggaggcauggucugc

SEQ ID NO: 1304492 - RNA, 14 nt, Human
agggaggccgaagc

SEQ ID NO: 1304493 - RNA, 16 nt, Human
agggaggccgaagcua

SEQ ID NO: 1304494 - RNA, 23 nt, Human
agggaggccgaagcuaacaggga

SEQ ID NO: 1304495 - RNA, 15 nt, Human
agggaggcugcugcu

SEQ ID NO: 1304496 - RNA, 22 nt, Human
agggaggcugcugcugcucuug

SEQ ID NO: 1304497 - RNA, 14 nt, Human
agggaggcuggucc

SEQ ID NO: 1304498 - RNA, 15 nt, Human
agggaggcugguccu

SEQ ID NO: 1304499 - RNA, 19 nt, Human
ugggccccauguuaacccc

SEQ ID NO: 1304500 - RNA, 22 nt, Human
ugggccccaguuguauuuauuu

SEQ ID NO: 1304501 - RNA, 21 nt, Human
ugggccccaggggaacacugg

SEQ ID NO: 1304502 - RNA, 18 nt, Human
ugggccccaguuguauuu

SEQ ID NO: 1304503 - RNA, 24 nt, Human
ugggccauguccaaagaggcugcc

SEQ ID NO: 1304504 - RNA, 17 nt, Human
ugggccauguccaaaga

SEQ ID NO: 1304505 - RNA, 18 nt, Human
ugggccauguccaaagag

SEQ ID NO: 1304506 - RNA, 19 nt, Human
ugggccauguccaaagagg

SEQ ID NO: 1304507 - RNA, 23 nt, Human
ugggccauguccaaagaggcugc

SEQ ID NO: 1304508 - RNA, 16 nt, Human
ugggccagucugugga

SEQ ID NO: 1304509 - RNA, 20 nt, Human
ugggccagucuguggaucag

SEQ ID NO: 1304510 - RNA, 14 nt, Human
ugggccauguccaa

SEQ ID NO: 1304511 - RNA, 16 nt, Human
ugggcacuggauuagu

SEQ ID NO: 1304512 - RNA, 14 nt, Human
agggcaccaggggu

SEQ ID NO: 1304513 - RNA, 14 nt, Human
agggcacugguggc

SEQ ID NO: 1304514 - RNA, 19 nt, Human
agggcaccagggguuucuc

SEQ ID NO: 1304515 - RNA, 21 nt, Human
agggcaccagggguuucucgc

SEQ ID NO: 1304516 - RNA, 21 nt, Human
agggcacccuaguucuaccuc

SEQ ID NO: 1304517 - RNA, 18 nt, Human
agggcacugacggacuca

SEQ ID NO: 1304518 - RNA, 16 nt, Human
agggcacugguggccc

SEQ ID NO: 1304519 - RNA, 17 nt, Human
agggcagcgccaggcug

SEQ ID NO: 1304520 - RNA, 17 nt, Human
agggcauggccaggugg

SEQ ID NO: 1304521 - RNA, 20 nt, Human
agggccacaugggaggcuca

SEQ ID NO: 1304522 - RNA, 21 nt, Human
agggccacaugggaggcucac

SEQ ID NO: 1304523 - RNA, 15 nt, Human
agggccacgcuccag

SEQ ID NO: 1304524 - RNA, 16 nt, Human
agggccacgcuccagc

SEQ ID NO: 1304525 - RNA, 20 nt, Human
agggccacgcuccagcugcc

SEQ ID NO: 1304526 - RNA, 17 nt, Human
agggccacgcuccagcu

SEQ ID NO: 1304527 - RNA, 16 nt, Human
agggcaucucugggcu

SEQ ID NO: 1304528 - RNA, 17 nt, Human
agggcaucucugggcug

SEQ ID NO: 1304529 - RNA, 18 nt, Human
agggcaucucugggcugg

SEQ ID NO: 1304530 - RNA, 22 nt, Human
agggcaugccacgugggcucau

SEQ ID NO: 1304531 - RNA, 16 nt, Human
agggcagcuuugcuca

SEQ ID NO: 1304532 - RNA, 17 nt, Human
agggcagcuuugcucau

SEQ ID NO: 1304533 - RNA, 14 nt, Human
agggcaucucuggg

SEQ ID NO: 1304534 - RNA, 15 nt, Human
agggcaucucugggc

SEQ ID NO: 1304535 - RNA, 15 nt, Human
agggcccuccuuccu

SEQ ID NO: 1304536 - RNA, 18 nt, Human
agggcccugggccugccu

SEQ ID NO: 1304537 - RNA, 16 nt, Human
agggcccugggccugc

SEQ ID NO: 1304538 - RNA, 15 nt, Human
agggcccugugucug

SEQ ID NO: 1304539 - RNA, 20 nt, Human
agggccgacuaagagaaguu

SEQ ID NO: 1304540 - RNA, 19 nt, Human
agggccgacuaagagaagu

SEQ ID NO: 1304541 - RNA, 11 nt, Human
agggccagagc

SEQ ID NO: 1304542 - RNA, 12 nt, Human
agggccagagcc

SEQ ID NO: 1304543 - RNA, 13 nt, Human
agggccagagcca

SEQ ID NO: 1304544 - RNA, 14 nt, Human
agggccagagccag

SEQ ID NO: 1304545 - RNA, 15 nt, Human
agggccagagccagg

SEQ ID NO: 1304546 - RNA, 16 nt, Human
agggccagagccaggg

SEQ ID NO: 1304547 - RNA, 19 nt, Human
agggccaugcugaggccug

SEQ ID NO: 1304548 - RNA, 20 nt, Human
agggccaugcugaggccugg

SEQ ID NO: 1304549 - RNA, 21 nt, Human
agggccaugcugaggccuggg

SEQ ID NO: 1304550 - RNA, 22 nt, Human
agggccaugcugaggccugggc

SEQ ID NO: 1304551 - RNA, 23 nt, Human
agggccaugcugaggccugggcc

SEQ ID NO: 1304552 - RNA, 13 nt, Human
ugcuauuugaagu

SEQ ID NO: 1304553 - RNA, 14 nt, Human
ugcuauuuuucauc

SEQ ID NO: 1304554 - RNA, 19 nt, Human
ugcuauuuuucauccuaaa

SEQ ID NO: 1304555 - RNA, 17 nt, Human
ugcucaacuugcaaaau

SEQ ID NO: 1304556 - RNA, 20 nt, Human
ugcucaacuugcaaaaucag

SEQ ID NO: 1304557 - RNA, 16 nt, Human
ugcucaacuugcaaaa

SEQ ID NO: 1304558 - RNA, 13 nt, Human
ugcucaacuugca

SEQ ID NO: 1304559 - RNA, 23 nt, Human
aggaaaccaguuaggucucaaua

SEQ ID NO: 1304560 - RNA, 16 nt, Human
aggaaaauugaaugca

SEQ ID NO: 1304561 - RNA, 21 nt, Human
aggaaaauuuuagcgugcuca

SEQ ID NO: 1304562 - RNA, 19 nt, Human
aggaaacaaccaugucauu

SEQ ID NO: 1304563 - RNA, 14 nt, Human
aggaaaauugaaug

SEQ ID NO: 1304564 - RNA, 17 nt, Human
aggaaacaguugcaugu

SEQ ID NO: 1304565 - RNA, 19 nt, Human
aggaaacaguugcauguag

SEQ ID NO: 1304566 - RNA, 20 nt, Human
aggaaacaguugcauguagu

SEQ ID NO: 1304567 - RNA, 21 nt, Human
aggaaacaguugcauguagua

SEQ ID NO: 1304568 - RNA, 22 nt, Human
aggaaacaguugcauguaguaa

SEQ ID NO: 1304569 - RNA, 17 nt, Human
ugcucuugaugccuggc

SEQ ID NO: 1304570 - RNA, 15 nt, Human
ugcugagaaaacaug

SEQ ID NO: 1304571 - RNA, 17 nt, Human
ugcugagaaccuggccu

SEQ ID NO: 1304572 - RNA, 18 nt, Human
ugcugagaaccuggccuu

SEQ ID NO: 1304573 - RNA, 19 nt, Human
ugcugagaaccuggccuuc

SEQ ID NO: 1304574 - RNA, 20 nt, Human
ugcugagaaccuggccuuca

SEQ ID NO: 1304575 - RNA, 21 nt, Human
ugcugagaaccuggccuucag

SEQ ID NO: 1304576 - RNA, 15 nt, Human
ugcucuugaacuccu

SEQ ID NO: 1304577 - RNA, 14 nt, Human
ugcucuuauuucau

SEQ ID NO: 1304578 - RNA, 20 nt, Human
ugcucuugaacuccugaccu

SEQ ID NO: 1304579 - RNA, 22 nt, Human
ugcucuugaacuccugaccuca

SEQ ID NO: 1304580 - RNA, 22 nt, Human
ugcucugcgugucaccugugcu

SEQ ID NO: 1304581 - RNA, 23 nt, Human
ugcucugcgugucaccugugcuu

SEQ ID NO: 1304582 - RNA, 13 nt, Human
ugcucuuauuuca

SEQ ID NO: 1304583 - RNA, 14 nt, Human
ugcucuucaagaaa

SEQ ID NO: 1304584 - RNA, 18 nt, Human
ugcucuuagcugucugcu

SEQ ID NO: 1304585 - RNA, 21 nt, Human
ugcucccaaggggccugagca

SEQ ID NO: 1304586 - RNA, 22 nt, Human
ugcucccaaggggccugagcag

SEQ ID NO: 1304587 - RNA, 12 nt, Human
ugcucccaccuc

SEQ ID NO: 1304588 - RNA, 14 nt, Human
ugcucccaccuccu

SEQ ID NO: 1304589 - RNA, 15 nt, Human
ugcucccaccuccug

SEQ ID NO: 1304590 - RNA, 18 nt, Human
ugcucccaccuccugaca

SEQ ID NO: 1304591 - RNA, 23 nt, Human
ugcucccaccuccugacacccuu

SEQ ID NO: 1304592 - RNA, 11 nt, Human
ugcucugagaa

SEQ ID NO: 1304593 - RNA, 20 nt, Human
ugcucugagaauuguugaga

SEQ ID NO: 1304594 - RNA, 15 nt, Human
ugcucucuuucuguc

SEQ ID NO: 1304595 - RNA, 18 nt, Human
ugcucugaacacgaagcu

SEQ ID NO: 1304596 - RNA, 16 nt, Human
aggaagaucccccaga

SEQ ID NO: 1304597 - RNA, 14 nt, Human
aggaagagggacag

SEQ ID NO: 1304598 - RNA, 20 nt, Human
aggaagaggggaagcagaaa

SEQ ID NO: 1304599 - RNA, 15 nt, Human
aggaagagccuucca

SEQ ID NO: 1304600 - RNA, 17 nt, Human
aggaagagccuuccacc

SEQ ID NO: 1304601 - RNA, 19 nt, Human
aggaagagccuuccaccca

SEQ ID NO: 1304602 - RNA, 21 nt, Human
aggaagagccuuccacccagg

SEQ ID NO: 1304603 - RNA, 23 nt, Human
ugcugagccuguaaaauaaaagg

SEQ ID NO: 1304604 - RNA, 20 nt, Human
ugcugagauacauacagaau

SEQ ID NO: 1304605 - RNA, 10 nt, Human
ugcugagacu

SEQ ID NO: 1304606 - RNA, 22 nt, Human
ugcugagagggcucgaggggug

SEQ ID NO: 1304607 - RNA, 18 nt, Human
ugcugagauacauacaga

SEQ ID NO: 1304608 - RNA, 19 nt, Human
ugcugagauacauacagaa

SEQ ID NO: 1304609 - RNA, 20 nt, Human
ugcugagauuacagguguga

SEQ ID NO: 1304610 - RNA, 13 nt, Human
ugcugagcucuga

SEQ ID NO: 1304611 - RNA, 14 nt, Human
ugcugagcucugag

SEQ ID NO: 1304612 - RNA, 15 nt, Human
ugcugagcucugaga

SEQ ID NO: 1304613 - RNA, 17 nt, Human
ugcugagcucugagagg

SEQ ID NO: 1304614 - RNA, 21 nt, Human
ugcugagcucugagaggcccu

SEQ ID NO: 1304615 - RNA, 22 nt, Human
ugcugagcucugagaggcccug

SEQ ID NO: 1304616 - RNA, 23 nt, Human
ugcugagcucugagaggcccugg

SEQ ID NO: 1304617 - RNA, 13 nt, Human
ugcugaggccugg

SEQ ID NO: 1304618 - RNA, 14 nt, Human
ugcugaggccuggg

SEQ ID NO: 1304619 - RNA, 15 nt, Human
ugcugaggccugggc

SEQ ID NO: 1304620 - RNA, 16 nt, Human
ugcugaggccugggcc

SEQ ID NO: 1304621 - RNA, 17 nt, Human
ugcugaggccugggccg

SEQ ID NO: 1304622 - RNA, 16 nt, Human
aggaauuacgugcucu

SEQ ID NO: 1304623 - RNA, 22 nt, Human
aggaaggcagggaggaggcaga

SEQ ID NO: 1304624 - RNA, 20 nt, Human
aggaaggcagggaggaggca

SEQ ID NO: 1304625 - RNA, 18 nt, Human
aggaaggcagggaggagg

SEQ ID NO: 1304626 - RNA, 16 nt, Human
aggaaggcagggagga

SEQ ID NO: 1304627 - RNA, 15 nt, Human
aggaaggcugagagg

SEQ ID NO: 1304628 - RNA, 22 nt, Human
aggaaggaggacccaggacagg

SEQ ID NO: 1304629 - RNA, 17 nt, Human
aggaagaucccccagaa

SEQ ID NO: 1304630 - RNA, 18 nt, Human
aggaagaucccccagaaa

SEQ ID NO: 1304631 - RNA, 17 nt, Human
aggaagauuacucagua

SEQ ID NO: 1304632 - RNA, 19 nt, Human
aggaagcaaauagaagaga

SEQ ID NO: 1304633 - RNA, 18 nt, Human
aggaagcagcuuucccca

SEQ ID NO: 1304634 - RNA, 14 nt, Human
aggaagcagccaag

SEQ ID NO: 1304635 - RNA, 15 nt, Human
aggaagcauuguaaa

SEQ ID NO: 1304636 - RNA, 16 nt, Human
aggaagcauuguaaaa

SEQ ID NO: 1304637 - RNA, 17 nt, Human
aggaagcauuguaaaau

SEQ ID NO: 1304638 - RNA, 19 nt, Human
aggaagcauuguaaaauaa

SEQ ID NO: 1304639 - RNA, 21 nt, Human
aggaagcauuguaaaauaauu

SEQ ID NO: 1304640 - RNA, 22 nt, Human
aggaagcauuguaaaauaauuc

SEQ ID NO: 1304641 - RNA, 15 nt, Human
aggaagccaaagagu

SEQ ID NO: 1304642 - RNA, 20 nt, Human
ugcuaauuuugaaaaacugc

SEQ ID NO: 1304643 - RNA, 19 nt, Human
ugcuaauuuugaaaaacug

SEQ ID NO: 1304644 - RNA, 18 nt, Human
ugcuaauuuugaaaaacu

SEQ ID NO: 1304645 - RNA, 16 nt, Human
ugcuaauuuugaaaaa

SEQ ID NO: 1304646 - RNA, 22 nt, Human
ugcuacaccuauuaucccagcu

SEQ ID NO: 1304647 - RNA, 20 nt, Human
ugcuacaggguccaacauag

SEQ ID NO: 1304648 - RNA, 18 nt, Human
ugcuacaggguccaacau

SEQ ID NO: 1304649 - RNA, 13 nt, Human
ugcuaccaaagca

SEQ ID NO: 1304650 - RNA, 13 nt, Human
ugcuaccaccagc

SEQ ID NO: 1304651 - RNA, 14 nt, Human
ugcuaccaccagcu

SEQ ID NO: 1304652 - RNA, 15 nt, Human
ugcuaccaccagcug

SEQ ID NO: 1304653 - RNA, 16 nt, Human
ugcuaccaccagcugu

SEQ ID NO: 1304654 - RNA, 13 nt, Human
agcuuaacagugu

SEQ ID NO: 1304655 - RNA, 17 nt, Human
ugcuaccaccagcugug

SEQ ID NO: 1304656 - RNA, 18 nt, Human
ugcuaccaccagcugugu

SEQ ID NO: 1304657 - RNA, 20 nt, Human
ugcuaccaccagcugugucc

SEQ ID NO: 1304658 - RNA, 21 nt, Human
ugcuaccaccagcugugucca

SEQ ID NO: 1304659 - RNA, 22 nt, Human
ugcuaccaccagcuguguccaa

SEQ ID NO: 1304660 - RNA, 15 nt, Human
ugcuaccaguauuua

SEQ ID NO: 1304661 - RNA, 18 nt, Human
ugcuaccaguauuuagaa

SEQ ID NO: 1304662 - RNA, 22 nt, Human
ugcuaccaguauuuagaagcca

SEQ ID NO: 1304663 - RNA, 16 nt, Human
agcuguuuacuaggga

SEQ ID NO: 1304664 - RNA, 22 nt, Human
agcuguuuacuagggaucccuc

SEQ ID NO: 1304665 - RNA, 19 nt, Human
ugccuuuucccaacuccag

SEQ ID NO: 1304666 - RNA, 15 nt, Human
ugccuugucacgcca

SEQ ID NO: 1304667 - RNA, 19 nt, Human
ugccuuuugcaaccaggaa

SEQ ID NO: 1304668 - RNA, 13 nt, Human
ugccuugguuuuu

SEQ ID NO: 1304669 - RNA, 23 nt, Human
ugccuugguuuuuacugcucuga

SEQ ID NO: 1304670 - RNA, 15 nt, Human
ugcgguagccagcac

SEQ ID NO: 1304671 - RNA, 16 nt, Human
ugcgguagccagcaca

SEQ ID NO: 1304672 - RNA, 17 nt, Human
ugcgguagccagcacac

SEQ ID NO: 1304673 - RNA, 18 nt, Human
ugcgguagccagcacaca

SEQ ID NO: 1304674 - RNA, 18 nt, Human
ugcuaauauuuuccuccu

SEQ ID NO: 1304675 - RNA, 20 nt, Human
ugcuaauauuuuccuccuga

SEQ ID NO: 1304676 - RNA, 22 nt, Human
ugcuaaucagggaggucauuuu

SEQ ID NO: 1304677 - RNA, 23 nt, Human
ugcuaaucagggaggucauuuug

SEQ ID NO: 1304678 - RNA, 13 nt, Human
ugcuaaucuucuu

SEQ ID NO: 1304679 - RNA, 20 nt, Human
ugcuaaucuucuuaugcaau

SEQ ID NO: 1304680 - RNA, 22 nt, Human
ugcuaaucuucuuaugcaauuu

SEQ ID NO: 1304681 - RNA, 16 nt, Human
ugcuaaugucaaacca

SEQ ID NO: 1304682 - RNA, 18 nt, Human
ugcuaauuuauccugaaa

SEQ ID NO: 1304683 - RNA, 13 nt, Human
ugcuaauuuguuu

SEQ ID NO: 1304684 - RNA, 19 nt, Human
agcuuaauggcugauaauu

SEQ ID NO: 1304685 - RNA, 22 nt, Human
agcuuaauggcugauaauuuua

SEQ ID NO: 1304686 - RNA, 22 nt, Human
agcuuacaaauacuaaaaagaa

SEQ ID NO: 1304687 - RNA, 14 nt, Human
agcuugaccugagg

SEQ ID NO: 1304688 - RNA, 16 nt, Human
agcuugaccugaggcu

SEQ ID NO: 1304689 - RNA, 20 nt, Human
agcuugcccuggugccucac

SEQ ID NO: 1304690 - RNA, 22 nt, Human
agcuugauguuggaucucaaga

SEQ ID NO: 1304691 - RNA, 14 nt, Human
agcuuguagccagc

SEQ ID NO: 1304692 - RNA, 15 nt, Human
agcuuguagccagcc

SEQ ID NO: 1304693 - RNA, 16 nt, Human
agcuuguagccagccg

SEQ ID NO: 1304694 - RNA, 18 nt, Human
agcuuguggcaagugaau

SEQ ID NO: 1304695 - RNA, 17 nt, Human
agcuuguggcaagugaa

SEQ ID NO: 1304696 - RNA, 14 nt, Human
aggaaaagacacau

SEQ ID NO: 1304697 - RNA, 22 nt, Human
agcuuuggaaguuuagcucuga

SEQ ID NO: 1304698 - RNA, 19 nt, Human
agcuuuggaccuaauccaa

SEQ ID NO: 1304699 - RNA, 23 nt, Human
agcuuuggaaguuuagcucugag

SEQ ID NO: 1304700 - RNA, 18 nt, Human
agcuuuggaaguuuagcu

SEQ ID NO: 1304701 - RNA, 18 nt, Human
agcuuuggaccuaaucca

SEQ ID NO: 1304702 - RNA, 21 nt, Human
agcuuugcucauauuucccau

SEQ ID NO: 1304703 - RNA, 20 nt, Human
agcuuugcucauauuuccca

SEQ ID NO: 1304704 - RNA, 19 nt, Human
agcuuugcucauauuuccc

SEQ ID NO: 1304705 - RNA, 13 nt, Human
agcuuugcucaua

SEQ ID NO: 1304706 - RNA, 18 nt, Human
agcuuugcucuuugguag

SEQ ID NO: 1304707 - RNA, 21 nt, Human
agcuuugcucuuugguagaaa

SEQ ID NO: 1304708 - RNA, 23 nt, Human
agcuuugcucuuugguagaaaag

SEQ ID NO: 1304709 - RNA, 20 nt, Human
agcuuuccugccccaggccu

SEQ ID NO: 1304710 - RNA, 21 nt, Human
agcuuuccugccccaggccug

SEQ ID NO: 1304711 - RNA, 22 nt, Human
agcuuuccugccccaggccuga

SEQ ID NO: 1304712 - RNA, 23 nt, Human
agcuuuccugccccaggccugaa

SEQ ID NO: 1304713 - RNA, 10 nt, Human
agcuuugcua

SEQ ID NO: 1304714 - RNA, 16 nt, Human
agcuuugcuaccaaag

SEQ ID NO: 1304715 - RNA, 21 nt, Human
agcuuugcuaccaaagcaccu

SEQ ID NO: 1304716 - RNA, 10 nt, Human
agcuuugcuc

SEQ ID NO: 1304717 - RNA, 22 nt, Human
agcuuuccccaugucucgacuc

SEQ ID NO: 1304718 - RNA, 12 nt, Human
agcuuucccugc

SEQ ID NO: 1304719 - RNA, 16 nt, Human
agcuuucccugccucu

SEQ ID NO: 1304720 - RNA, 12 nt, Human
agcuuuccugcc

SEQ ID NO: 1304721 - RNA, 13 nt, Human
agcuuuccugccc

SEQ ID NO: 1304722 - RNA, 14 nt, Human
agcuuuccugcccc

SEQ ID NO: 1304723 - RNA, 15 nt, Human
agcuuuccugcccca

SEQ ID NO: 1304724 - RNA, 13 nt, Human
agcuuguuuacau

SEQ ID NO: 1304725 - RNA, 16 nt, Human
agcuuguuuacaugcu

SEQ ID NO: 1304726 - RNA, 18 nt, Human
agcuuguuuacaugcuua

SEQ ID NO: 1304727 - RNA, 19 nt, Human
agcuuguuuacaugcuuau

SEQ ID NO: 1304728 - RNA, 23 nt, Human
agcuuguuuacaugcuuauucca

SEQ ID NO: 1304729 - RNA, 16 nt, Human
agcuuucagaauaugu

SEQ ID NO: 1304730 - RNA, 17 nt, Human
agcuuucagaauauguc

SEQ ID NO: 1304731 - RNA, 22 nt, Human
agcuuucauguaaacugugcac

SEQ ID NO: 1304732 - RNA, 15 nt, Human
agcuuuccccagccc

SEQ ID NO: 1304733 - RNA, 13 nt, Human
ugccaucaucucc

SEQ ID NO: 1304734 - RNA, 15 nt, Human
ugccaucaucuccug

SEQ ID NO: 1304735 - RNA, 16 nt, Human
ugccaucaucuccugc

SEQ ID NO: 1304736 - RNA, 23 nt, Human
ugccaucaucuccugccuuccuc

SEQ ID NO: 1304737 - RNA, 14 nt, Human
agcuccaguguccu

SEQ ID NO: 1304738 - RNA, 15 nt, Human
agcuccaguguccug

SEQ ID NO: 1304739 - RNA, 16 nt, Human
agcuccaguguccuga

SEQ ID NO: 1304740 - RNA, 18 nt, Human
agcuccaguguccugagc

SEQ ID NO: 1304741 - RNA, 19 nt, Human
agcuccaguguccugagcu

SEQ ID NO: 1304742 - RNA, 20 nt, Human
agcuccaguguccugagcuc

SEQ ID NO: 1304743 - RNA, 21 nt, Human
agcuccaguguccugagcuca

SEQ ID NO: 1304744 - RNA, 22 nt, Human
agcuccaguguccugagcucag

SEQ ID NO: 1304745 - RNA, 13 nt, Human
ugccauauuuuca

SEQ ID NO: 1304746 - RNA, 14 nt, Human
ugccauauuuucac

SEQ ID NO: 1304747 - RNA, 17 nt, Human
ugccauauuuucaccau

SEQ ID NO: 1304748 - RNA, 16 nt, Human
agcuccaucuccacuc

SEQ ID NO: 1304749 - RNA, 13 nt, Human
agcuccaucucca

SEQ ID NO: 1304750 - RNA, 15 nt, Human
agcuccaucuccacu

SEQ ID NO: 1304751 - RNA, 23 nt, Human
agcuccaguguccugagcucagc

SEQ ID NO: 1304752 - RNA, 23 nt, Human
agcucccaggaccacaggcucag

SEQ ID NO: 1304753 - RNA, 22 nt, Human
agcuccuuugggcuucagcugc

SEQ ID NO: 1304754 - RNA, 23 nt, Human
agcucgauguggucacagcugua

SEQ ID NO: 1304755 - RNA, 22 nt, Human
agcucgauguggucacagcugu

SEQ ID NO: 1304756 - RNA, 13 nt, Human
agcucucugcccu

SEQ ID NO: 1304757 - RNA, 18 nt, Human
agcucugaaaccaguguu

SEQ ID NO: 1304758 - RNA, 19 nt, Human
agcucuggggugggcaguu

SEQ ID NO: 1304759 - RNA, 20 nt, Human
agcucuggggugggcaguuu

SEQ ID NO: 1304760 - RNA, 21 nt, Human
agcucuggggugggcaguuuu

SEQ ID NO: 1304761 - RNA, 22 nt, Human
agcucuggggugggcaguuuuu

SEQ ID NO: 1304762 - RNA, 19 nt, Human
agcucugaaaccaguguua

SEQ ID NO: 1304763 - RNA, 15 nt, Human
agcucugaaagagaa

SEQ ID NO: 1304764 - RNA, 22 nt, Human
agcucugaaagagaaacacgua

SEQ ID NO: 1304765 - RNA, 16 nt, Human
agcucugaaagagaaa

SEQ ID NO: 1304766 - RNA, 21 nt, Human
agcucugaagaacucucugga

SEQ ID NO: 1304767 - RNA, 22 nt, Human
agcucugaagaacucucuggaa

SEQ ID NO: 1304768 - RNA, 20 nt, Human
agcucugacauucugauucg

SEQ ID NO: 1304769 - RNA, 10 nt, Human
agcucugaga

SEQ ID NO: 1304770 - RNA, 13 nt, Human
agcucugagaggc

SEQ ID NO: 1304771 - RNA, 15 nt, Human
agcucugagaggccc

SEQ ID NO: 1304772 - RNA, 16 nt, Human
agcucugagaggcccu

SEQ ID NO: 1304773 - RNA, 17 nt, Human
agcucugagaggcccug

SEQ ID NO: 1304774 - RNA, 18 nt, Human
agcucugagaggcccugg

SEQ ID NO: 1304775 - RNA, 19 nt, Human
agcucugagaggcccugga

SEQ ID NO: 1304776 - RNA, 20 nt, Human
agcucugagaggcccuggau

SEQ ID NO: 1304777 - RNA, 21 nt, Human
agcucugagaggcccuggauc

SEQ ID NO: 1304778 - RNA, 14 nt, Human
agcucugggguggg

SEQ ID NO: 1304779 - RNA, 21 nt, Human
agcugcaagguacucugguga

SEQ ID NO: 1304780 - RNA, 23 nt, Human
agcugcaagguacucuggugagu

SEQ ID NO: 1304781 - RNA, 17 nt, Human
agcugcacugaugcugc

SEQ ID NO: 1304782 - RNA, 19 nt, Human
agcugcacugaugcugccc

SEQ ID NO: 1304783 - RNA, 20 nt, Human
agcugcacugaugcugcccc

SEQ ID NO: 1304784 - RNA, 22 nt, Human
agcugcacugaugcugccccuc

SEQ ID NO: 1304785 - RNA, 23 nt, Human
agcugccaggagcacggcucugu

SEQ ID NO: 1304786 - RNA, 15 nt, Human
agcugccaguguccu

SEQ ID NO: 1304787 - RNA, 24 nt, Human
agcugccaguguccugagccccag

SEQ ID NO: 1304788 - RNA, 14 nt, Human
agcugcccccagag

SEQ ID NO: 1304789 - RNA, 16 nt, Human
agcugcccccagagcc

SEQ ID NO: 1304790 - RNA, 17 nt, Human
agcugcccccagagcca

SEQ ID NO: 1304791 - RNA, 19 nt, Human
agcugcccccagagccaca

SEQ ID NO: 1304792 - RNA, 20 nt, Human
agcugcccccagagccacag

SEQ ID NO: 1304793 - RNA, 21 nt, Human
agcugcccccagagccacagu

SEQ ID NO: 1304794 - RNA, 16 nt, Human
agcugccccggccccu

SEQ ID NO: 1304795 - RNA, 17 nt, Human
agcugccccggccccuc

SEQ ID NO: 1304796 - RNA, 19 nt, Human
agcugccccggccccuccc

SEQ ID NO: 1304797 - RNA, 22 nt, Human
ugccgagaguccaucagccucc

SEQ ID NO: 1304798 - RNA, 15 nt, Human
ugccgagcaaccgug

SEQ ID NO: 1304799 - RNA, 17 nt, Human
ugccgagcaaccguggc

SEQ ID NO: 1304800 - RNA, 19 nt, Human
ugccgagcaaccguggccc

SEQ ID NO: 1304801 - RNA, 21 nt, Human
ugccgagcaaccguggcccuu

SEQ ID NO: 1304802 - RNA, 20 nt, Human
ugccgagcaaccguggcccu

SEQ ID NO: 1304803 - RNA, 21 nt, Human
ugccgauauacucuagaugaa

SEQ ID NO: 1304804 - RNA, 21 nt, Human
ugccugcuuuuuauggccugu

SEQ ID NO: 1304805 - RNA, 20 nt, Human
ugccugcuuuuuauggccug

SEQ ID NO: 1304806 - RNA, 22 nt, Human
ugccugcuuuuuauggccugug

SEQ ID NO: 1304807 - RNA, 18 nt, Human
ugccuggaagagcagccc

SEQ ID NO: 1304808 - RNA, 12 nt, Human
ugccucugccug

SEQ ID NO: 1304809 - RNA, 15 nt, Human
agcugcuuccagugu

SEQ ID NO: 1304810 - RNA, 14 nt, Human
agcugcuuccagug

SEQ ID NO: 1304811 - RNA, 11 nt, Human
ugccuggaccc

SEQ ID NO: 1304812 - RNA, 18 nt, Human
agcuggccgggagccuga

SEQ ID NO: 1304813 - RNA, 19 nt, Human
agcuggccgggagccugau

SEQ ID NO: 1304814 - RNA, 23 nt, Human
agcuggcggcuggggucccagca

SEQ ID NO: 1304815 - RNA, 22 nt, Human
agcuggcggcuggggucccagc

SEQ ID NO: 1304816 - RNA, 19 nt, Human
ugccuggaagagcagcccu

SEQ ID NO: 1304817 - RNA, 20 nt, Human
ugccuggaagagcagcccua

SEQ ID NO: 1304818 - RNA, 21 nt, Human
agcugugugaauaccugcuca

SEQ ID NO: 1304819 - RNA, 12 nt, Human
ugccugugccag

SEQ ID NO: 1304820 - RNA, 16 nt, Human
ugccugugccagguga

SEQ ID NO: 1304821 - RNA, 23 nt, Human
ugccugugccaggugaggucagc

SEQ ID NO: 1304822 - RNA, 19 nt, Human
ugccugugcuacaauucau

SEQ ID NO: 1304823 - RNA, 14 nt, Human
ugccuguucccauu

SEQ ID NO: 1304824 - RNA, 21 nt, Human
ugccuguguccaugcgcucag

SEQ ID NO: 1304825 - RNA, 22 nt, Human
ugccuguguccaugcgcucagg

SEQ ID NO: 1304826 - RNA, 14 nt, Human
ugccuguggccaug

SEQ ID NO: 1304827 - RNA, 11 nt, Human
ugccuguggcg

SEQ ID NO: 1304828 - RNA, 21 nt, Human
ugccuguggcgccgucuccag

SEQ ID NO: 1304829 - RNA, 22 nt, Human
ugccuguggcgccgucuccagg

SEQ ID NO: 1304830 - RNA, 23 nt, Human
ugccuguggcgccgucuccaggg

SEQ ID NO: 1304831 - RNA, 15 nt, Human
ugccuguguccaugc

SEQ ID NO: 1304832 - RNA, 19 nt, Human
ugccuguguccaugcgcuc

SEQ ID NO: 1304833 - RNA, 23 nt, Human
agcuggggugcagggaugugggu

SEQ ID NO: 1304834 - RNA, 14 nt, Human
agcugggucaggca

SEQ ID NO: 1304835 - RNA, 15 nt, Human
agcugggucaggcag

SEQ ID NO: 1304836 - RNA, 16 nt, Human
agcugugcgugugugu

SEQ ID NO: 1304837 - RNA, 17 nt, Human
agcugugcgugugugug

SEQ ID NO: 1304838 - RNA, 22 nt, Human
agcugugcuuaugguaccagau

SEQ ID NO: 1304839 - RNA, 18 nt, Human
agcuguggcagaguuaca

SEQ ID NO: 1304840 - RNA, 21 nt, Human
agcuguggcagaguuacaguu

SEQ ID NO: 1304841 - RNA, 22 nt, Human
agcuguggcagaguuacaguuc

SEQ ID NO: 1304842 - RNA, 19 nt, Human
agcugugcuuaugguacca

SEQ ID NO: 1304843 - RNA, 15 nt, Human
agcugugguuuucuu

SEQ ID NO: 1304844 - RNA, 21 nt, Human
agcuguguccaaaaccgccag

SEQ ID NO: 1304845 - RNA, 22 nt, Human
agcugugguuuucuuuugccau

SEQ ID NO: 1304846 - RNA, 17 nt, Human
uggagcucguggaacag

SEQ ID NO: 1304847 - RNA, 21 nt, Human
uggagcucguggaacaguuac

SEQ ID NO: 1304848 - RNA, 21 nt, Human
uggagcucgugggacagucac

SEQ ID NO: 1304849 - RNA, 17 nt, Human
uggagccaauggagacu

SEQ ID NO: 1304850 - RNA, 22 nt, Human
uggagccagccgagcaggaggc

SEQ ID NO: 1304851 - RNA, 17 nt, Human
uggagcagaggggcuga

SEQ ID NO: 1304852 - RNA, 17 nt, Human
uggagcauuucucauca

SEQ ID NO: 1304853 - RNA, 21 nt, Human
uggagcauuucucaucaguag

SEQ ID NO: 1304854 - RNA, 23 nt, Human
aggcacacaccaccacgccuggc

SEQ ID NO: 1304855 - RNA, 21 nt, Human
uggagccagccgagcaggagg

SEQ ID NO: 1304856 - RNA, 21 nt, Human
aggauugcgagagaugugugu

SEQ ID NO: 1304857 - RNA, 23 nt, Human
aggauugcgagagauguguguug

SEQ ID NO: 1304858 - RNA, 17 nt, Human
uggacuguuuucucucg

SEQ ID NO: 1304859 - RNA, 20 nt, Human
uggacuguuuucucucggcu

SEQ ID NO: 1304860 - RNA, 22 nt, Human
uggacuguuuucucucggcucc

SEQ ID NO: 1304861 - RNA, 19 nt, Human
uggacuuaagcaucuggcu

SEQ ID NO: 1304862 - RNA, 15 nt, Human
uggacuucuggggua

SEQ ID NO: 1304863 - RNA, 13 nt, Human
uggagaaaauggg

SEQ ID NO: 1304864 - RNA, 22 nt, Human
uggagaaaauggguuuauucac

SEQ ID NO: 1304865 - RNA, 13 nt, Human
uggagaaagcuga

SEQ ID NO: 1304866 - RNA, 15 nt, Human
uggagaaagcugacu

SEQ ID NO: 1304867 - RNA, 18 nt, Human
uggagaaagcugacuugg

SEQ ID NO: 1304868 - RNA, 23 nt, Human
uggagaaagcugacuuggcuggu

SEQ ID NO: 1304869 - RNA, 13 nt, Human
uggagaaagggcc

SEQ ID NO: 1304870 - RNA, 21 nt, Human
uggagaaagggcccugggccu

SEQ ID NO: 1304871 - RNA, 22 nt, Human
uggagaaagggcccugggccug

SEQ ID NO: 1304872 - RNA, 19 nt, Human
uggagcacaaagacccugg

SEQ ID NO: 1304873 - RNA, 20 nt, Human
uggagcacaauaaauggcug

SEQ ID NO: 1304874 - RNA, 22 nt, Human
uggagcacaauaaauggcugua

SEQ ID NO: 1304875 - RNA, 15 nt, Human
uggagcagaagcagc

SEQ ID NO: 1304876 - RNA, 14 nt, Human
uggagcagaagcag

SEQ ID NO: 1304877 - RNA, 13 nt, Human
uggagcagaccac

SEQ ID NO: 1304878 - RNA, 17 nt, Human
uggagcagaccaccccg

SEQ ID NO: 1304879 - RNA, 12 nt, Human
uggagcagaggg

SEQ ID NO: 1304880 - RNA, 13 nt, Human
uggagcagagggg

SEQ ID NO: 1304881 - RNA, 16 nt, Human
uggagcagaggggcug

SEQ ID NO: 1304882 - RNA, 19 nt, Human
aggcaguaauaaaaagauu

SEQ ID NO: 1304883 - RNA, 12 nt, Human
aggcaguuuucu

SEQ ID NO: 1304884 - RNA, 13 nt, Human
aggcaguuuucua

SEQ ID NO: 1304885 - RNA, 14 nt, Human
aggcaguuuucuaa

SEQ ID NO: 1304886 - RNA, 14 nt, Human
aggcaguuugcaaa

SEQ ID NO: 1304887 - RNA, 20 nt, Human
aggcauacgagagcagaggu

SEQ ID NO: 1304888 - RNA, 21 nt, Human
aggcauacgagagcagagguc

SEQ ID NO: 1304889 - RNA, 13 nt, Human
aggcauugccaag

SEQ ID NO: 1304890 - RNA, 14 nt, Human
aggcauugccaagg

SEQ ID NO: 1304891 - RNA, 16 nt, Human
aggcauugccaagggc

SEQ ID NO: 1304892 - RNA, 18 nt, Human
aggcauugccaagggcuu

SEQ ID NO: 1304893 - RNA, 20 nt, Human
aggcauugccaagggcuuug

SEQ ID NO: 1304894 - RNA, 21 nt, Human
aggcauugccaagggcuuugu

SEQ ID NO: 1304895 - RNA, 20 nt, Human
aggcauuuaggccaugggac

SEQ ID NO: 1304896 - RNA, 13 nt, Human
aggcauuggauau

SEQ ID NO: 1304897 - RNA, 14 nt, Human
aggcauuggauauu

SEQ ID NO: 1304898 - RNA, 12 nt, Human
aggcauuuccua

SEQ ID NO: 1304899 - RNA, 13 nt, Human
aggcauuuccugg

SEQ ID NO: 1304900 - RNA, 14 nt, Human
aggcauuuccuggg

SEQ ID NO: 1304901 - RNA, 15 nt, Human
aggcauuuccugggu

SEQ ID NO: 1304902 - RNA, 16 nt, Human
aggcauuuccugggug

SEQ ID NO: 1304903 - RNA, 17 nt, Human
aggcauuuccugggugg

SEQ ID NO: 1304904 - RNA, 20 nt, Human
aggcauuuccuggguggcua

SEQ ID NO: 1304905 - RNA, 18 nt, Human
aggcauuugcaggguccu

SEQ ID NO: 1304906 - RNA, 21 nt, Human
aggcauuugcaggguccucuu

SEQ ID NO: 1304907 - RNA, 11 nt, Human
aggcacacagc

SEQ ID NO: 1304908 - RNA, 15 nt, Human
aggcacacagcuacu

SEQ ID NO: 1304909 - RNA, 13 nt, Human
aggcacacagcua

SEQ ID NO: 1304910 - RNA, 20 nt, Human
aggcagcuuuuucucuccca

SEQ ID NO: 1304911 - RNA, 13 nt, Human
aggcaggaagccc

SEQ ID NO: 1304912 - RNA, 19 nt, Human
aggcaggaacaaacagggc

SEQ ID NO: 1304913 - RNA, 14 nt, Human
aggcaggauugaaa

SEQ ID NO: 1304914 - RNA, 16 nt, Human
aggcaggauugaaaau

SEQ ID NO: 1304915 - RNA, 18 nt, Human
aggcaggauugaaaaugu

SEQ ID NO: 1304916 - RNA, 22 nt, Human
aggcaggauugaaaauguccag

SEQ ID NO: 1304917 - RNA, 16 nt, Human
aggcaggauuggggaa

SEQ ID NO: 1304918 - RNA, 19 nt, Human
aggcaggauuggggaagag

SEQ ID NO: 1304919 - RNA, 23 nt, Human
aggcaggauuggggaagagagcc

SEQ ID NO: 1304920 - RNA, 20 nt, Human
aggcaggauuggggaagaga

SEQ ID NO: 1304921 - RNA, 13 nt, Human
aggcaggcagggc

SEQ ID NO: 1304922 - RNA, 14 nt, Human
aggcaggcagggcu

SEQ ID NO: 1304923 - RNA, 15 nt, Human
aggcaggcagggcuc

SEQ ID NO: 1304924 - RNA, 16 nt, Human
aggcaggcagggcucu

SEQ ID NO: 1304925 - RNA, 18 nt, Human
aggcaggcagggcucucc

SEQ ID NO: 1304926 - RNA, 20 nt, Human
aggcaggcagggcucuccug

SEQ ID NO: 1304927 - RNA, 15 nt, Human
aggcaggcucccagg

SEQ ID NO: 1304928 - RNA, 16 nt, Human
aggcaggcucccaggg

SEQ ID NO: 1304929 - RNA, 21 nt, Human
aggcagggaacauggggagga

SEQ ID NO: 1304930 - RNA, 12 nt, Human
aggcagggcucu

SEQ ID NO: 1304931 - RNA, 13 nt, Human
aggcagggcucuc

SEQ ID NO: 1304932 - RNA, 14 nt, Human
aggcagggcucucc

SEQ ID NO: 1304933 - RNA, 15 nt, Human
aggcagggcucuccu

SEQ ID NO: 1304934 - RNA, 17 nt, Human
aggcagggcucuccugg

SEQ ID NO: 1304935 - RNA, 18 nt, Human
aggcagggcucuccuggc

SEQ ID NO: 1304936 - RNA, 19 nt, Human
aggcagggcucuccuggcu

SEQ ID NO: 1304937 - RNA, 21 nt, Human
aggcagggcucuccuggcuuc

SEQ ID NO: 1304938 - RNA, 22 nt, Human
aggcagggcucuccuggcuucc

SEQ ID NO: 1304939 - RNA, 23 nt, Human
aggcagggcucuccuggcuuccc

SEQ ID NO: 1304940 - RNA, 16 nt, Human
aggcaggggccuccau

SEQ ID NO: 1304941 - RNA, 15 nt, Human
aggcaggggccucca

SEQ ID NO: 1304942 - RNA, 14 nt, Human
aggcaggggcuucc

SEQ ID NO: 1304943 - RNA, 15 nt, Human
aggcaggggcuuccu

SEQ ID NO: 1304944 - RNA, 16 nt, Human
aggcaggggcuuccug

SEQ ID NO: 1304945 - RNA, 17 nt, Human
aggcaggggcuuccugg

SEQ ID NO: 1304946 - RNA, 18 nt, Human
aggcaggggcuuccuggu

SEQ ID NO: 1304947 - RNA, 23 nt, Human
aggcagggggaaggugggguccu

SEQ ID NO: 1304948 - RNA, 12 nt, Human
uggauuccagag

SEQ ID NO: 1304949 - RNA, 18 nt, Human
uggauuccccaucucagg

SEQ ID NO: 1304950 - RNA, 22 nt, Human
uggauuccccaucucaggccag

SEQ ID NO: 1304951 - RNA, 19 nt, Human
uggauuccccaucucaggc

SEQ ID NO: 1304952 - RNA, 15 nt, Human
uggauucuaaaaugc

SEQ ID NO: 1304953 - RNA, 13 nt, Human
uggauucuaaaau

SEQ ID NO: 1304954 - RNA, 14 nt, Human
uggauucuuuccau

SEQ ID NO: 1304955 - RNA, 19 nt, Human
uggauugcaauaucugaag

SEQ ID NO: 1304956 - RNA, 20 nt, Human
uggauuggacaaaaugacuu

SEQ ID NO: 1304957 - RNA, 17 nt, Human
uggauugcacguggccu

SEQ ID NO: 1304958 - RNA, 21 nt, Human
uggauugcacguggccucuug

SEQ ID NO: 1304959 - RNA, 19 nt, Human
uggauuggacaaaaugacu

SEQ ID NO: 1304960 - RNA, 15 nt, Human
uggauuggacaaaau

SEQ ID NO: 1304961 - RNA, 13 nt, Human
uggauuggacaaa

SEQ ID NO: 1304962 - RNA, 15 nt, Human
uggaguugaucugga

SEQ ID NO: 1304963 - RNA, 17 nt, Human
uggaguugaucuggaac

SEQ ID NO: 1304964 - RNA, 19 nt, Human
uggaguugaucuggaaccc

SEQ ID NO: 1304965 - RNA, 13 nt, Human
uggauggaagggg

SEQ ID NO: 1304966 - RNA, 22 nt, Human
uggaguugaucuggaacccaga

SEQ ID NO: 1304967 - RNA, 13 nt, Human
uggagugcagugg

SEQ ID NO: 1304968 - RNA, 16 nt, Human
uggagugcaccaaaga

SEQ ID NO: 1304969 - RNA, 18 nt, Human
uggagugcaccaaagaga

SEQ ID NO: 1304970 - RNA, 16 nt, Human
uggagugcuguuuugu

SEQ ID NO: 1304971 - RNA, 17 nt, Human
uggagugcuguuuuguu

SEQ ID NO: 1304972 - RNA, 13 nt, Human
uggaguggcagcc

SEQ ID NO: 1304973 - RNA, 16 nt, Human
uggaguggcagcccag

SEQ ID NO: 1304974 - RNA, 17 nt, Human
uggaguggcagcccagc

SEQ ID NO: 1304975 - RNA, 18 nt, Human
uggaguggcagcccagcc

SEQ ID NO: 1304976 - RNA, 19 nt, Human
uggaguggcagcccagcca

SEQ ID NO: 1304977 - RNA, 20 nt, Human
uggaguggcagcccagccag

SEQ ID NO: 1304978 - RNA, 14 nt, Human
uggaguguaugacu

SEQ ID NO: 1304979 - RNA, 17 nt, Human
uggaguguaugacugca

SEQ ID NO: 1304980 - RNA, 19 nt, Human
uggaguguaugacugcaca

SEQ ID NO: 1304981 - RNA, 14 nt, Human
uggaguugaaaauc

SEQ ID NO: 1304982 - RNA, 19 nt, Human
uggaguguuccccuuccac

SEQ ID NO: 1304983 - RNA, 22 nt, Human
uggaguguuccccuuccacuga

SEQ ID NO: 1304984 - RNA, 20 nt, Human
uggaggucgguagguucagc

SEQ ID NO: 1304985 - RNA, 23 nt, Human
uggagguggaaaagcaacauuca

SEQ ID NO: 1304986 - RNA, 22 nt, Human
uggagucugccacccaggaucc

SEQ ID NO: 1304987 - RNA, 18 nt, Human
uggagucugccacccagg

SEQ ID NO: 1304988 - RNA, 16 nt, Human
uggagguuaaggcaua

SEQ ID NO: 1304989 - RNA, 17 nt, Human
uggagucugccacccag

SEQ ID NO: 1304990 - RNA, 15 nt, Human
aggcccggccucuca

SEQ ID NO: 1304991 - RNA, 15 nt, Human
aggcccgagcagcug

SEQ ID NO: 1304992 - RNA, 18 nt, Human
aggcccgagcagcugagc

SEQ ID NO: 1304993 - RNA, 19 nt, Human
aggcccgagcagcugagca

SEQ ID NO: 1304994 - RNA, 21 nt, Human
aggcccgagcagcugagcagg

SEQ ID NO: 1304995 - RNA, 22 nt, Human
aggcccgagcagcugagcaggg

SEQ ID NO: 1304996 - RNA, 13 nt, Human
aggcccggccucu

SEQ ID NO: 1304997 - RNA, 14 nt, Human
aggcccggccucuc

SEQ ID NO: 1304998 - RNA, 19 nt, Human
aggcccccgccuuggccug

SEQ ID NO: 1304999 - RNA, 23 nt, Human
aggcccccagcccagggcuccug

SEQ ID NO: 1305000 - RNA, 19 nt, Human
aggcccccaccuggcucac

SEQ ID NO: 1305001 - RNA, 18 nt, Human
aggcccccaucauccucu

SEQ ID NO: 1305002 - RNA, 19 nt, Human
aggcccccaucauccucug

SEQ ID NO: 1305003 - RNA, 20 nt, Human
aggcccccaucauccucugg

SEQ ID NO: 1305004 - RNA, 21 nt, Human
aggcccccaucauccucuggc

SEQ ID NO: 1305005 - RNA, 18 nt, Human
aggcccccgccuuggccu

SEQ ID NO: 1305006 - RNA, 16 nt, Human
aggcccacugugccuc

SEQ ID NO: 1305007 - RNA, 15 nt, Human
aggcccaaggcuccc

SEQ ID NO: 1305008 - RNA, 17 nt, Human
aggcccaaggcucccgg

SEQ ID NO: 1305009 - RNA, 19 nt, Human
aggcccacauuggaagagc

SEQ ID NO: 1305010 - RNA, 17 nt, Human
aggcccacauuggaaga

SEQ ID NO: 1305011 - RNA, 16 nt, Human
aggccccaugaccucc

SEQ ID NO: 1305012 - RNA, 17 nt, Human
aggccccaugaccucca

SEQ ID NO: 1305013 - RNA, 20 nt, Human
aggccccaugaccuccagcu

SEQ ID NO: 1305014 - RNA, 17 nt, Human
aggcccccaccuggcuc

SEQ ID NO: 1305015 - RNA, 18 nt, Human
aggcccccaccuggcuca

SEQ ID NO: 1305016 - RNA, 13 nt, Human
aggcccccacuug

SEQ ID NO: 1305017 - RNA, 17 nt, Human
aggcccccacuugccuc

SEQ ID NO: 1305018 - RNA, 18 nt, Human
aggcccccacuugccucu

SEQ ID NO: 1305019 - RNA, 20 nt, Human
aggcccccacuugccucuuc

SEQ ID NO: 1305020 - RNA, 14 nt, Human
aggcccccagccca

SEQ ID NO: 1305021 - RNA, 17 nt, Human
aggcccccagcccaggg

SEQ ID NO: 1305022 - RNA, 18 nt, Human
aggcccccagcccagggc

SEQ ID NO: 1305023 - RNA, 19 nt, Human
aggcccccagcccagggcu

SEQ ID NO: 1305024 - RNA, 22 nt, Human
aggcccccagcccagggcuccu

SEQ ID NO: 1305025 - RNA, 14 nt, Human
uggcaccagacacc

SEQ ID NO: 1305026 - RNA, 16 nt, Human
uggcaccagacaccca

SEQ ID NO: 1305027 - RNA, 17 nt, Human
uggcaccagacacccag

SEQ ID NO: 1305028 - RNA, 14 nt, Human
aggccaccucccca

SEQ ID NO: 1305029 - RNA, 15 nt, Human
aggccaccuccccag

SEQ ID NO: 1305030 - RNA, 14 nt, Human
aggccagccuggcc

SEQ ID NO: 1305031 - RNA, 15 nt, Human
aggccagccuggccu

SEQ ID NO: 1305032 - RNA, 16 nt, Human
aggccagccuggccuc

SEQ ID NO: 1305033 - RNA, 17 nt, Human
aggccagccuggccucc

SEQ ID NO: 1305034 - RNA, 18 nt, Human
aggccagccuggccuccu

SEQ ID NO: 1305035 - RNA, 19 nt, Human
aggccagccuggccuccug

SEQ ID NO: 1305036 - RNA, 20 nt, Human
aggccagccuggccuccugc

SEQ ID NO: 1305037 - RNA, 21 nt, Human
aggccagccuggccuccugcc

SEQ ID NO: 1305038 - RNA, 22 nt, Human
aggccagccuggccuccugccu

SEQ ID NO: 1305039 - RNA, 23 nt, Human
aggccagccuggccuccugccuc

SEQ ID NO: 1305040 - RNA, 17 nt, Human
aggccaccuccccagca

SEQ ID NO: 1305041 - RNA, 16 nt, Human
ugcuuuuuauggccug

SEQ ID NO: 1305042 - RNA, 15 nt, Human
ugcuuuuuauuucug

SEQ ID NO: 1305043 - RNA, 18 nt, Human
ugcuuuuuauuucugcau

SEQ ID NO: 1305044 - RNA, 19 nt, Human
ugcuuuuuauuucugcaua

SEQ ID NO: 1305045 - RNA, 15 nt, Human
ugcuuuuucaccaga

SEQ ID NO: 1305046 - RNA, 14 nt, Human
ugcuuuuuccaacu

SEQ ID NO: 1305047 - RNA, 21 nt, Human
ugcuuuuuccaacucagaaau

SEQ ID NO: 1305048 - RNA, 16 nt, Human
ugcuuuuuguguuuuu

SEQ ID NO: 1305049 - RNA, 12 nt, Human
uggaaauaaagu

SEQ ID NO: 1305050 - RNA, 14 nt, Human
uggaaauaaaguca

SEQ ID NO: 1305051 - RNA, 16 nt, Human
uggaaauaaagucaga

SEQ ID NO: 1305052 - RNA, 13 nt, Human
uggaaauaaaugu

SEQ ID NO: 1305053 - RNA, 15 nt, Human
uggaaauaaauguau

SEQ ID NO: 1305054 - RNA, 23 nt, Human
uggaaauaaauguaucauagaaa

SEQ ID NO: 1305055 - RNA, 16 nt, Human
uggaaauuggaagagc

SEQ ID NO: 1305056 - RNA, 17 nt, Human
uggaaauuggaagagca

SEQ ID NO: 1305057 - RNA, 18 nt, Human
uggaaauaaaucuuccua

SEQ ID NO: 1305058 - RNA, 12 nt, Human
uggaaauuuaaa

SEQ ID NO: 1305059 - RNA, 13 nt, Human
uggaaauuuaaag

SEQ ID NO: 1305060 - RNA, 14 nt, Human
uggaaauuuaaagc

SEQ ID NO: 1305061 - RNA, 16 nt, Human
uggaaauuuaaagcag

SEQ ID NO: 1305062 - RNA, 21 nt, Human
uggaaauuuaaagcagguucu

SEQ ID NO: 1305063 - RNA, 22 nt, Human
uggaaauuuaaagcagguucuu

SEQ ID NO: 1305064 - RNA, 15 nt, Human
uggaaauuuagcauu

SEQ ID NO: 1305065 - RNA, 18 nt, Human
uggaaauuuagcauugua

SEQ ID NO: 1305066 - RNA, 17 nt, Human
uggaaauuuagcauugu

SEQ ID NO: 1305067 - RNA, 22 nt, Human
uggaagagcagcaccuccucag

SEQ ID NO: 1305068 - RNA, 23 nt, Human
uggaagacgcaagggccugaugg

SEQ ID NO: 1305069 - RNA, 17 nt, Human
uggaagacgcaagggcc

SEQ ID NO: 1305070 - RNA, 16 nt, Human
uggaagagcagcaccu

SEQ ID NO: 1305071 - RNA, 20 nt, Human
uggaagagcagcaccuccuc

SEQ ID NO: 1305072 - RNA, 14 nt, Human
ugcuuugggcugcc

SEQ ID NO: 1305073 - RNA, 15 nt, Human
ugcuuugggcugccc

SEQ ID NO: 1305074 - RNA, 21 nt, Human
ugcuuuggaccuaaauggccu

SEQ ID NO: 1305075 - RNA, 22 nt, Human
ugcuuuggaccuaaauggccuc

SEQ ID NO: 1305076 - RNA, 23 nt, Human
ugcuuuggaccuaaauggccuca

SEQ ID NO: 1305077 - RNA, 15 nt, Human
ugcuuugggaagccg

SEQ ID NO: 1305078 - RNA, 21 nt, Human
ugcuugagccaggaggccugc

SEQ ID NO: 1305079 - RNA, 12 nt, Human
ugcuugaggaaa

SEQ ID NO: 1305080 - RNA, 16 nt, Human
ugcuugaggaaaacaa

SEQ ID NO: 1305081 - RNA, 13 nt, Human
ugcuugaggaaaa

SEQ ID NO: 1305082 - RNA, 18 nt, Human
ugcuuuggaccuaaaugg

SEQ ID NO: 1305083 - RNA, 16 nt, Human
ugcuuugggcugcccu

SEQ ID NO: 1305084 - RNA, 17 nt, Human
ugcuuugggcugcccug

SEQ ID NO: 1305085 - RNA, 18 nt, Human
aggaggacccaggacagg

SEQ ID NO: 1305086 - RNA, 16 nt, Human
aggaggacccagggcu

SEQ ID NO: 1305087 - RNA, 17 nt, Human
aggaggacccagggcuc

SEQ ID NO: 1305088 - RNA, 17 nt, Human
aggaggacccaggacag

SEQ ID NO: 1305089 - RNA, 16 nt, Human
aggaggacccaggaca

SEQ ID NO: 1305090 - RNA, 15 nt, Human
aggaggacccaggac

SEQ ID NO: 1305091 - RNA, 14 nt, Human
aggaggacccagga

SEQ ID NO: 1305092 - RNA, 13 nt, Human
aggaggacccagg

SEQ ID NO: 1305093 - RNA, 12 nt, Human
aggaggacccag

SEQ ID NO: 1305094 - RNA, 21 nt, Human
aggaggaauaagcucccaggg

SEQ ID NO: 1305095 - RNA, 14 nt, Human
aggaggaauacuga

SEQ ID NO: 1305096 - RNA, 18 nt, Human
aggaggaauacugaacau

SEQ ID NO: 1305097 - RNA, 15 nt, Human
aggaggaauacugaa

SEQ ID NO: 1305098 - RNA, 15 nt, Human
uggaagccagcuuuc

SEQ ID NO: 1305099 - RNA, 16 nt, Human
uggaagccagcuuucc

SEQ ID NO: 1305100 - RNA, 18 nt, Human
uggaagccagcuuucccu

SEQ ID NO: 1305101 - RNA, 16 nt, Human
uggaagccccugggcc

SEQ ID NO: 1305102 - RNA, 20 nt, Human
uggaagccccugggcccagu

SEQ ID NO: 1305103 - RNA, 18 nt, Human
aggaggacccagggcucu

SEQ ID NO: 1305104 - RNA, 13 nt, Human
aggaggagccugu

SEQ ID NO: 1305105 - RNA, 14 nt, Human
aggaggagccuguc

SEQ ID NO: 1305106 - RNA, 20 nt, Human
aggaggagccuguccugccu

SEQ ID NO: 1305107 - RNA, 21 nt, Human
aggaggagccuguccugccug

SEQ ID NO: 1305108 - RNA, 13 nt, Human
aggaggcuccaga

SEQ ID NO: 1305109 - RNA, 16 nt, Human
aggaggcuccagaggg

SEQ ID NO: 1305110 - RNA, 17 nt, Human
aggaggcuccagagggc

SEQ ID NO: 1305111 - RNA, 18 nt, Human
aggaggcuccagagggca

SEQ ID NO: 1305112 - RNA, 19 nt, Human
aggaggcuccagagggcac

SEQ ID NO: 1305113 - RNA, 15 nt, Human
aggauagaugcuggc

SEQ ID NO: 1305114 - RNA, 18 nt, Human
aggauagaugcuggccca

SEQ ID NO: 1305115 - RNA, 19 nt, Human
aggauagaugcuggcccag

SEQ ID NO: 1305116 - RNA, 20 nt, Human
aggauagaugcuggcccagg

SEQ ID NO: 1305117 - RNA, 21 nt, Human
aggauagaugcuggcccaggg

SEQ ID NO: 1305118 - RNA, 22 nt, Human
aggauagaugcuggcccagggc

SEQ ID NO: 1305119 - RNA, 11 nt, Human
aggauccaggc

SEQ ID NO: 1305120 - RNA, 21 nt, Human
aggaucauuuguuggaaugaa

SEQ ID NO: 1305121 - RNA, 18 nt, Human
aggaugaagggcccgaga

SEQ ID NO: 1305122 - RNA, 17 nt, Human
aggaucaguuaacuauu

SEQ ID NO: 1305123 - RNA, 20 nt, Human
aggaucauuuguuggaauga

SEQ ID NO: 1305124 - RNA, 23 nt, Human
aggaucaguuaacuauugcauuu

SEQ ID NO: 1305125 - RNA, 15 nt, Human
aggaucaguuaacua

SEQ ID NO: 1305126 - RNA, 17 nt, Human
aggauaucggcauuugu

SEQ ID NO: 1305127 - RNA, 21 nt, Human
aggauaucggcauuuguuucu

SEQ ID NO: 1305128 - RNA, 21 nt, Human
aggauugaaaauguccaggaa

SEQ ID NO: 1305129 - RNA, 24 nt, Human
aggauugaaaauguccaggaaagu

SEQ ID NO: 1305130 - RNA, 15 nt, Human
aggauugcgagagau

SEQ ID NO: 1305131 - RNA, 16 nt, Human
aggauugcgagagaug

SEQ ID NO: 1305132 - RNA, 17 nt, Human
aggauugcgagagaugu

SEQ ID NO: 1305133 - RNA, 18 nt, Human
aggauugcgagagaugug

SEQ ID NO: 1305134 - RNA, 19 nt, Human
aggauugcgagagaugugu

SEQ ID NO: 1305135 - RNA, 20 nt, Human
aggauugcgagagaugugug

SEQ ID NO: 1305136 - RNA, 13 nt, Human
aggacaagcaugg

SEQ ID NO: 1305137 - RNA, 11 nt, Human
aggacacaggc

SEQ ID NO: 1305138 - RNA, 12 nt, Human
aggacacaggcc

SEQ ID NO: 1305139 - RNA, 13 nt, Human
aggacacaggccu

SEQ ID NO: 1305140 - RNA, 14 nt, Human
aggacacaggccug

SEQ ID NO: 1305141 - RNA, 15 nt, Human
aggacacaggccugu

SEQ ID NO: 1305142 - RNA, 16 nt, Human
aggacacaggccugug

SEQ ID NO: 1305143 - RNA, 15 nt, Human
aggacacaguuccug

SEQ ID NO: 1305144 - RNA, 16 nt, Human
aggacacaguuccugg

SEQ ID NO: 1305145 - RNA, 21 nt, Human
aggacacaguuccugggaaca

SEQ ID NO: 1305146 - RNA, 18 nt, Human
aggacacaguuccuggga

SEQ ID NO: 1305147 - RNA, 18 nt, Human
aggaccuucgggcugugc

SEQ ID NO: 1305148 - RNA, 19 nt, Human
aggaccuucgggcugugcc

SEQ ID NO: 1305149 - RNA, 20 nt, Human
aggacgcucucuggccuucg

SEQ ID NO: 1305150 - RNA, 19 nt, Human
aggacgcucucuggccuuc

SEQ ID NO: 1305151 - RNA, 17 nt, Human
aggacgcucucuggccu

SEQ ID NO: 1305152 - RNA, 16 nt, Human
aggacgcucucuggcc

SEQ ID NO: 1305153 - RNA, 14 nt, Human
aggacgcucucugg

SEQ ID NO: 1305154 - RNA, 13 nt, Human
aggacgcucucug

SEQ ID NO: 1305155 - RNA, 20 nt, Human
aggaccuucgggcugugccc

SEQ ID NO: 1305156 - RNA, 21 nt, Human
aggaccuuuccaccacagcca

SEQ ID NO: 1305157 - RNA, 22 nt, Human
aggaccuuuccaccacagccag

SEQ ID NO: 1305158 - RNA, 14 nt, Human
aggacgcacugagc

SEQ ID NO: 1305159 - RNA, 15 nt, Human
aggacuaggguccug

SEQ ID NO: 1305160 - RNA, 17 nt, Human
aggacuaauagaaaagu

SEQ ID NO: 1305161 - RNA, 16 nt, Human
aggacuaggguccugg

SEQ ID NO: 1305162 - RNA, 18 nt, Human
aggacuaggguccugggg

SEQ ID NO: 1305163 - RNA, 19 nt, Human
aggacuaggguccugggga

SEQ ID NO: 1305164 - RNA, 20 nt, Human
aggacuauauuugggccugc

SEQ ID NO: 1305165 - RNA, 17 nt, Human
aggacucaccacugccc

SEQ ID NO: 1305166 - RNA, 14 nt, Human
aggacguacguaau

SEQ ID NO: 1305167 - RNA, 17 nt, Human
aggacuaacacucagaa

SEQ ID NO: 1305168 - RNA, 18 nt, Human
aggacuaacacucagaag

SEQ ID NO: 1305169 - RNA, 20 nt, Human
aggacuaacacucagaagcc

SEQ ID NO: 1305170 - RNA, 21 nt, Human
aggacuaacacucagaagccu

SEQ ID NO: 1305171 - RNA, 22 nt, Human
aggacuaacacucagaagccug

SEQ ID NO: 1305172 - RNA, 23 nt, Human
aggacuaacacucagaagccugg

SEQ ID NO: 1305173 - RNA, 14 nt, Human
aggacuaaccaugu

SEQ ID NO: 1305174 - RNA, 13 nt, Human
aggacuaauagaa

SEQ ID NO: 1305175 - RNA, 15 nt, Human
aggacuccaggccca

SEQ ID NO: 1305176 - RNA, 16 nt, Human
aggacuccaggcccaa

SEQ ID NO: 1305177 - RNA, 23 nt, Human
aggacuccaggcccaaggcuccc

SEQ ID NO: 1305178 - RNA, 20 nt, Human
aggacuccaggcccaaggcu

SEQ ID NO: 1305179 - RNA, 19 nt, Human
aggacuccuccuuuuucca

SEQ ID NO: 1305180 - RNA, 17 nt, Human
aggacuccuuaaauuug

SEQ ID NO: 1305181 - RNA, 21 nt, Human
aggacuccuccuuuuuccaug

SEQ ID NO: 1305182 - RNA, 14 nt, Human
aggacuccugaaaa

SEQ ID NO: 1305183 - RNA, 17 nt, Human
aggacuccugaaaaaaa

SEQ ID NO: 1305184 - RNA, 12 nt, Human
aggacucucagg

SEQ ID NO: 1305185 - RNA, 13 nt, Human
aggacucugcagc

SEQ ID NO: 1305186 - RNA, 14 nt, Human
aggacucugcagcc

SEQ ID NO: 1305187 - RNA, 15 nt, Human
aggacucugcagccu

SEQ ID NO: 1305188 - RNA, 16 nt, Human
aggacucugcagccuc

SEQ ID NO: 1305189 - RNA, 19 nt, Human
aggacucugcagccucaga

SEQ ID NO: 1305190 - RNA, 17 nt, Human
aggacucugcagccuca

SEQ ID NO: 1305191 - RNA, 23 nt, Human
aggagcccuucuauacccaccca

SEQ ID NO: 1305192 - RNA, 19 nt, Human
aggagcccccacccuguuc

SEQ ID NO: 1305193 - RNA, 22 nt, Human
aggagcccccacccuguuccug

SEQ ID NO: 1305194 - RNA, 16 nt, Human
aggagcacggcucugu

SEQ ID NO: 1305195 - RNA, 20 nt, Human
aggagcagcaggagggggga

SEQ ID NO: 1305196 - RNA, 15 nt, Human
aggagcacggcucug

SEQ ID NO: 1305197 - RNA, 23 nt, Human
aggagcacggcucuguccccagc

SEQ ID NO: 1305198 - RNA, 10 nt, Human
aggagcccag

SEQ ID NO: 1305199 - RNA, 13 nt, Human
aggagcccaggcc

SEQ ID NO: 1305200 - RNA, 14 nt, Human
aggagcccaggcca

SEQ ID NO: 1305201 - RNA, 15 nt, Human
aggagcccaggccag

SEQ ID NO: 1305202 - RNA, 16 nt, Human
aggagcccaggccagg

SEQ ID NO: 1305203 - RNA, 17 nt, Human
aggagcccaggccagga

SEQ ID NO: 1305204 - RNA, 18 nt, Human
aggagcccaggccaggac

SEQ ID NO: 1305205 - RNA, 19 nt, Human
aggagcccaggccaggacu

SEQ ID NO: 1305206 - RNA, 20 nt, Human
aggagcccaggccaggacuc

SEQ ID NO: 1305207 - RNA, 22 nt, Human
aggagcccaggccaggacucug

SEQ ID NO: 1305208 - RNA, 14 nt, Human
aggagccccagcua

SEQ ID NO: 1305209 - RNA, 15 nt, Human
aggagccccauuccu

SEQ ID NO: 1305210 - RNA, 16 nt, Human
aggagccccauuccug

SEQ ID NO: 1305211 - RNA, 18 nt, Human
aggagccccauuccuggg

SEQ ID NO: 1305212 - RNA, 19 nt, Human
aggagccccauuccuggga

SEQ ID NO: 1305213 - RNA, 21 nt, Human
aggagccccauuccugggaaa

SEQ ID NO: 1305214 - RNA, 12 nt, Human
aggagcccccac

SEQ ID NO: 1305215 - RNA, 17 nt, Human
aggagaugcuccuuggg

SEQ ID NO: 1305216 - RNA, 18 nt, Human
aggagaugcuccuugggc

SEQ ID NO: 1305217 - RNA, 22 nt, Human
aggagaugcuccuugggcccuu

SEQ ID NO: 1305218 - RNA, 13 nt, Human
aggacuugaaaga

SEQ ID NO: 1305219 - RNA, 16 nt, Human
aggacuugaaagaaau

SEQ ID NO: 1305220 - RNA, 13 nt, Human
aggacuugcccuc

SEQ ID NO: 1305221 - RNA, 23 nt, Human
aggacuugcccucgugguggaaa

SEQ ID NO: 1305222 - RNA, 22 nt, Human
aggagauccagggcaaggccau

SEQ ID NO: 1305223 - RNA, 16 nt, Human
aggagaugcuccuugg

SEQ ID NO: 1305224 - RNA, 22 nt, Human
aggacuuccuguccagcuccaa

SEQ ID NO: 1305225 - RNA, 23 nt, Human
aggacugggagcccccagccugu

SEQ ID NO: 1305226 - RNA, 20 nt, Human
aggacugcugguuuguaguu

SEQ ID NO: 1305227 - RNA, 16 nt, Human
aggacugggagccccc

SEQ ID NO: 1305228 - RNA, 18 nt, Human
aggacugggagcccccag

SEQ ID NO: 1305229 - RNA, 19 nt, Human
aggacugggagcccccagc

SEQ ID NO: 1305230 - RNA, 20 nt, Human
aggacugggagcccccagcc

SEQ ID NO: 1305231 - RNA, 21 nt, Human
aggacugggagcccccagccu

SEQ ID NO: 1305232 - RNA, 22 nt, Human
aggacugggagcccccagccug

SEQ ID NO: 1305233 - RNA, 12 nt, Human
aggacucugccu

SEQ ID NO: 1305234 - RNA, 13 nt, Human
aggacucugccuc

SEQ ID NO: 1305235 - RNA, 14 nt, Human
aggacucugccucc

SEQ ID NO: 1305236 - RNA, 16 nt, Human
aggacucugccuccuc

SEQ ID NO: 1305237 - RNA, 17 nt, Human
aggacucugccuccucu

SEQ ID NO: 1305238 - RNA, 18 nt, Human
aggacucugccuccucuu

SEQ ID NO: 1305239 - RNA, 19 nt, Human
aggacucugccuccucuuc

SEQ ID NO: 1305240 - RNA, 16 nt, Human
aggacugaugucuccu

SEQ ID NO: 1305241 - RNA, 17 nt, Human
aggacugaugucuccua

SEQ ID NO: 1305242 - RNA, 20 nt, Human
aggacugaugucuccuaagc

SEQ ID NO: 1305243 - RNA, 18 nt, Human
aggacugauuucagagug

SEQ ID NO: 1305244 - RNA, 19 nt, Human
aggagaaacuggaacucuc

SEQ ID NO: 1305245 - RNA, 18 nt, Human
aggagaaacuggaacucu

SEQ ID NO: 1305246 - RNA, 15 nt, Human
ugauuaaguaaugau

SEQ ID NO: 1305247 - RNA, 13 nt, Human
ugauuaaaugaca

SEQ ID NO: 1305248 - RNA, 14 nt, Human
ugauuaaaugacac

SEQ ID NO: 1305249 - RNA, 16 nt, Human
ugauuaaguaaugaua

SEQ ID NO: 1305250 - RNA, 18 nt, Human
ugauuaaauaagauucua

SEQ ID NO: 1305251 - RNA, 19 nt, Human
ugauuaaauaagauucuaa

SEQ ID NO: 1305252 - RNA, 20 nt, Human
ugauuaaauaagauucuaac

SEQ ID NO: 1305253 - RNA, 22 nt, Human
ugauuaaauaagauucuaacgg

SEQ ID NO: 1305254 - RNA, 17 nt, Human
ugauuaaauaagauucu

SEQ ID NO: 1305255 - RNA, 19 nt, Human
ugauggguuaguggaugga

SEQ ID NO: 1305256 - RNA, 23 nt, Human
ugauggguuaguggauggaaggg

SEQ ID NO: 1305257 - RNA, 21 nt, Human
ugaucuacuucuguaauugug

SEQ ID NO: 1305258 - RNA, 18 nt, Human
ugauggcaacagaucugg

SEQ ID NO: 1305259 - RNA, 19 nt, Human
ugauggcaacagaucugga

SEQ ID NO: 1305260 - RNA, 20 nt, Human
ugauggcagccauagugcau

SEQ ID NO: 1305261 - RNA, 23 nt, Human
ugauggcaacagaucuggaaccu

SEQ ID NO: 1305262 - RNA, 15 nt, Human
ugauggcaauuuugu

SEQ ID NO: 1305263 - RNA, 17 nt, Human
ugauggcaauuuuguaa

SEQ ID NO: 1305264 - RNA, 19 nt, Human
ugauggcuaacuuacaaag

SEQ ID NO: 1305265 - RNA, 17 nt, Human
ugauggcuuaugauagc

SEQ ID NO: 1305266 - RNA, 18 nt, Human
ugaugaaauguaaauacu

SEQ ID NO: 1305267 - RNA, 18 nt, Human
ugaucuacuucuguaauu

SEQ ID NO: 1305268 - RNA, 20 nt, Human
ugaucuacuucuguaauugu

SEQ ID NO: 1305269 - RNA, 17 nt, Human
ugaucuagagccaguua

SEQ ID NO: 1305270 - RNA, 17 nt, Human
ugauccauguaacugcc

SEQ ID NO: 1305271 - RNA, 18 nt, Human
ugauccauguaacugccu

SEQ ID NO: 1305272 - RNA, 19 nt, Human
ugauccauguaacugccua

SEQ ID NO: 1305273 - RNA, 20 nt, Human
ugauccauguaacugccuag

SEQ ID NO: 1305274 - RNA, 14 nt, Human
ugauccauuucuaa

SEQ ID NO: 1305275 - RNA, 15 nt, Human
ugauccauuucuaau

SEQ ID NO: 1305276 - RNA, 16 nt, Human
ugauccauuucuaauu

SEQ ID NO: 1305277 - RNA, 17 nt, Human
ugauccauuucuaauua

SEQ ID NO: 1305278 - RNA, 18 nt, Human
ugauccauuucuaauuau

SEQ ID NO: 1305279 - RNA, 21 nt, Human
ugauccauuucuaauuaugua

SEQ ID NO: 1305280 - RNA, 13 nt, Human
agccaccccugag

SEQ ID NO: 1305281 - RNA, 23 nt, Human
ugauccagaaagaaaacuuguau

SEQ ID NO: 1305282 - RNA, 13 nt, Human
ugauccagaaaga

SEQ ID NO: 1305283 - RNA, 18 nt, Human
ugauccacucgccuucau

SEQ ID NO: 1305284 - RNA, 14 nt, Human
ugauccacucgccu

SEQ ID NO: 1305285 - RNA, 22 nt, Human
ugauccuaaugaaugcauaaaa

SEQ ID NO: 1305286 - RNA, 15 nt, Human
ugaucuaauauccca

SEQ ID NO: 1305287 - RNA, 20 nt, Human
ugaucccuguguugucucua

SEQ ID NO: 1305288 - RNA, 19 nt, Human
ugaucccagagagcccgag

SEQ ID NO: 1305289 - RNA, 13 nt, Human
ugauccccacgcc

SEQ ID NO: 1305290 - RNA, 18 nt, Human
ugauccccacgccacagc

SEQ ID NO: 1305291 - RNA, 20 nt, Human
ugauccccacgccacagccc

SEQ ID NO: 1305292 - RNA, 19 nt, Human
ugauccccacgccacagcc

SEQ ID NO: 1305293 - RNA, 19 nt, Human
ugaucccuguguugucucu

SEQ ID NO: 1305294 - RNA, 21 nt, Human
agccaaacauauauauacuau

SEQ ID NO: 1305295 - RNA, 15 nt, Human
agccaaaccucacca

SEQ ID NO: 1305296 - RNA, 17 nt, Human
agccaaaccucaccaac

SEQ ID NO: 1305297 - RNA, 23 nt, Human
agccaaucccucaccuucugagu

SEQ ID NO: 1305298 - RNA, 16 nt, Human
agccaauucagacagg

SEQ ID NO: 1305299 - RNA, 17 nt, Human
agccaauucagacaggc

SEQ ID NO: 1305300 - RNA, 18 nt, Human
agccaauucagacaggca

SEQ ID NO: 1305301 - RNA, 13 nt, Human
agccacaccagga

SEQ ID NO: 1305302 - RNA, 14 nt, Human
agccacaccaggau

SEQ ID NO: 1305303 - RNA, 24 nt, Human
agccacaccaggauagagacugga

SEQ ID NO: 1305304 - RNA, 17 nt, Human
agccacaccaggauaga

SEQ ID NO: 1305305 - RNA, 17 nt, Human
agccacacuucucagga

SEQ ID NO: 1305306 - RNA, 18 nt, Human
agccacacuucucaggac

SEQ ID NO: 1305307 - RNA, 19 nt, Human
agccacacuucucaggaca

SEQ ID NO: 1305308 - RNA, 23 nt, Human
agccacacuucucaggacacagg

SEQ ID NO: 1305309 - RNA, 20 nt, Human
agccacacuucucaggacac

SEQ ID NO: 1305310 - RNA, 13 nt, Human
agccaccacgccc

SEQ ID NO: 1305311 - RNA, 12 nt, Human
agccaccaguuc

SEQ ID NO: 1305312 - RNA, 14 nt, Human
agccaccaguucuc

SEQ ID NO: 1305313 - RNA, 20 nt, Human
agccacaguuccccuaugug

SEQ ID NO: 1305314 - RNA, 15 nt, Human
agcaucccucaccca

SEQ ID NO: 1305315 - RNA, 17 nt, Human
agcauccccuugaacuc

SEQ ID NO: 1305316 - RNA, 20 nt, Human
agcauccccuugaacucuuc

SEQ ID NO: 1305317 - RNA, 15 nt, Human
agcaucaugccucug

SEQ ID NO: 1305318 - RNA, 16 nt, Human
agcaucaugccucuga

SEQ ID NO: 1305319 - RNA, 18 nt, Human
agcaucaugccucugagg

SEQ ID NO: 1305320 - RNA, 19 nt, Human
agcaucaugccucugaggc

SEQ ID NO: 1305321 - RNA, 21 nt, Human
agcaucaugccucugaggcca

SEQ ID NO: 1305322 - RNA, 22 nt, Human
agcaucaugccucugaggccag

SEQ ID NO: 1305323 - RNA, 23 nt, Human
agcaucaugccucugaggccagc

SEQ ID NO: 1305324 - RNA, 18 nt, Human
agcaucauuauuuaugua

SEQ ID NO: 1305325 - RNA, 19 nt, Human
agcaucauuauuuauguau

SEQ ID NO: 1305326 - RNA, 21 nt, Human
agcaucauuauuuauguauug

SEQ ID NO: 1305327 - RNA, 22 nt, Human
agcaucauuauuuauguauugu

SEQ ID NO: 1305328 - RNA, 14 nt, Human
agcauccuggaaua

SEQ ID NO: 1305329 - RNA, 15 nt, Human
agcauccuggaauau

SEQ ID NO: 1305330 - RNA, 13 nt, Human
agcauccuggaau

SEQ ID NO: 1305331 - RNA, 16 nt, Human
agcauccgcaggugcu

SEQ ID NO: 1305332 - RNA, 18 nt, Human
agcauccccuugaacucu

SEQ ID NO: 1305333 - RNA, 21 nt, Human
agcauccgcaggugcuggucc

SEQ ID NO: 1305334 - RNA, 21 nt, Human
agcaucaggccuagaggccug

SEQ ID NO: 1305335 - RNA, 22 nt, Human
agcaucaggguuaagaagacuu

SEQ ID NO: 1305336 - RNA, 16 nt, Human
agcaucaggccuagag

SEQ ID NO: 1305337 - RNA, 20 nt, Human
agcaucaucugggaacuugu

SEQ ID NO: 1305338 - RNA, 13 nt, Human
agcaucaugccuc

SEQ ID NO: 1305339 - RNA, 19 nt, Human
ugaucaccgacugaaaaua

SEQ ID NO: 1305340 - RNA, 17 nt, Human
ugaucaccgacugaaaa

SEQ ID NO: 1305341 - RNA, 21 nt, Human
ugaucaauuauaguuucugag

SEQ ID NO: 1305342 - RNA, 18 nt, Human
ugaucaauuauaguuucu

SEQ ID NO: 1305343 - RNA, 20 nt, Human
ugaucaauuauaguuucuga

SEQ ID NO: 1305344 - RNA, 22 nt, Human
ugaucaauuauaguuucugagg

SEQ ID NO: 1305345 - RNA, 17 nt, Human
ugauaccccccucuguc

SEQ ID NO: 1305346 - RNA, 18 nt, Human
ugauaccccccucugucu

SEQ ID NO: 1305347 - RNA, 19 nt, Human
ugauaccccccucugucuu

SEQ ID NO: 1305348 - RNA, 15 nt, Human
ugauacgaugcuuca

SEQ ID NO: 1305349 - RNA, 16 nt, Human
ugauacauccaaagca

SEQ ID NO: 1305350 - RNA, 22 nt, Human
ugauacauccaaagcagacagc

SEQ ID NO: 1305351 - RNA, 13 nt, Human
ugauacauuccca

SEQ ID NO: 1305352 - RNA, 14 nt, Human
ugauacauuuuugu

SEQ ID NO: 1305353 - RNA, 14 nt, Human
ugauaccagcugga

SEQ ID NO: 1305354 - RNA, 15 nt, Human
ugauaccccccucug

SEQ ID NO: 1305355 - RNA, 14 nt, Human
ugaucaccugcccu

SEQ ID NO: 1305356 - RNA, 17 nt, Human
agcauuuguguugaaga

SEQ ID NO: 1305357 - RNA, 18 nt, Human
agcauuuguguugaagag

SEQ ID NO: 1305358 - RNA, 14 nt, Human
agcauuuguuucua

SEQ ID NO: 1305359 - RNA, 19 nt, Human
agcauuuguuucuacuuug

SEQ ID NO: 1305360 - RNA, 17 nt, Human
agcauuuguuucuacuu

SEQ ID NO: 1305361 - RNA, 15 nt, Human
agcauuuagaaaacu

SEQ ID NO: 1305362 - RNA, 21 nt, Human
agcauuugacccuugcuguga

SEQ ID NO: 1305363 - RNA, 20 nt, Human
agcauuuucugcaucuccac

SEQ ID NO: 1305364 - RNA, 13 nt, Human
agcauuuuguaau

SEQ ID NO: 1305365 - RNA, 19 nt, Human
agcauuuucugcaucucca

SEQ ID NO: 1305366 - RNA, 18 nt, Human
agcauuuucugcaucucc

SEQ ID NO: 1305367 - RNA, 15 nt, Human
agcauuuucugcauc

SEQ ID NO: 1305368 - RNA, 18 nt, Human
agccaaacauccuacaag

SEQ ID NO: 1305369 - RNA, 12 nt, Human
agccaaaccagg

SEQ ID NO: 1305370 - RNA, 17 nt, Human
agcauuuuguaaguuga

SEQ ID NO: 1305371 - RNA, 14 nt, Human
agccaaaaauagcu

SEQ ID NO: 1305372 - RNA, 15 nt, Human
agccaaaaauagcua

SEQ ID NO: 1305373 - RNA, 18 nt, Human
agccaaaaauagcuaaau

SEQ ID NO: 1305374 - RNA, 22 nt, Human
agccaaaaauagcuaaauaccu

SEQ ID NO: 1305375 - RNA, 17 nt, Human
agccaaaauguaggcuu

SEQ ID NO: 1305376 - RNA, 22 nt, Human
agccaaaauguaggcuuaguuu

SEQ ID NO: 1305377 - RNA, 22 nt, Human
agcauuuagauguauagguuga

SEQ ID NO: 1305378 - RNA, 21 nt, Human
agcauuuaaccccccuguaca

SEQ ID NO: 1305379 - RNA, 22 nt, Human
agcauuuaaccccccuguacac

SEQ ID NO: 1305380 - RNA, 23 nt, Human
agcauuuaaccccccuguacaca

SEQ ID NO: 1305381 - RNA, 22 nt, Human
agcauucucacuccuaccuggu

SEQ ID NO: 1305382 - RNA, 14 nt, Human
agcauucucauugg

SEQ ID NO: 1305383 - RNA, 22 nt, Human
agcauucucauuggaaauuuag

SEQ ID NO: 1305384 - RNA, 12 nt, Human
agcauucugucu

SEQ ID NO: 1305385 - RNA, 18 nt, Human
agcauucucacuccuacc

SEQ ID NO: 1305386 - RNA, 20 nt, Human
agcauucucacuccuaccug

SEQ ID NO: 1305387 - RNA, 16 nt, Human
agcauuccagccccuc

SEQ ID NO: 1305388 - RNA, 19 nt, Human
agcauuccagccccucugg

SEQ ID NO: 1305389 - RNA, 20 nt, Human
agcauuccagccccucuggu

SEQ ID NO: 1305390 - RNA, 12 nt, Human
agcauucccagg

SEQ ID NO: 1305391 - RNA, 13 nt, Human
agcauucccaggu

SEQ ID NO: 1305392 - RNA, 19 nt, Human
agcauucccagguaggcca

SEQ ID NO: 1305393 - RNA, 21 nt, Human
agcauggucccacaucccugg

SEQ ID NO: 1305394 - RNA, 23 nt, Human
agcauggucccacaucccugggc

SEQ ID NO: 1305395 - RNA, 22 nt, Human
agcauggucccacaucccuggg

SEQ ID NO: 1305396 - RNA, 17 nt, Human
agcauuagauuucucau

SEQ ID NO: 1305397 - RNA, 18 nt, Human
agcauucacaacuuguuu

SEQ ID NO: 1305398 - RNA, 14 nt, Human
agcauucagaagaa

SEQ ID NO: 1305399 - RNA, 15 nt, Human
agcauucagaagaaa

SEQ ID NO: 1305400 - RNA, 17 nt, Human
agcauucagaagaaaaa

SEQ ID NO: 1305401 - RNA, 19 nt, Human
agcauucagaagaaaaaga

SEQ ID NO: 1305402 - RNA, 21 nt, Human
agcauucagaagaaaaagaag

SEQ ID NO: 1305403 - RNA, 15 nt, Human
agcauauagauuguc

SEQ ID NO: 1305404 - RNA, 15 nt, Human
ugaguaaugguguag

SEQ ID NO: 1305405 - RNA, 17 nt, Human
ugaguaaugguguagaa

SEQ ID NO: 1305406 - RNA, 18 nt, Human
ugaguaaugguguagaac

SEQ ID NO: 1305407 - RNA, 17 nt, Human
ugaguaauuuuggauuu

SEQ ID NO: 1305408 - RNA, 19 nt, Human
ugaguaaugguguagaaca

SEQ ID NO: 1305409 - RNA, 23 nt, Human
ugaguacagaguguggacucugg

SEQ ID NO: 1305410 - RNA, 20 nt, Human
agcauaggugauccauguaa

SEQ ID NO: 1305411 - RNA, 23 nt, Human
agcauaggugauccauguaacug

SEQ ID NO: 1305412 - RNA, 15 nt, Human
agcauaaaagaugaa

SEQ ID NO: 1305413 - RNA, 23 nt, Human
agcauaaaagaugaaagagcagu

SEQ ID NO: 1305414 - RNA, 17 nt, Human
agcauaaaagaugaaag

SEQ ID NO: 1305415 - RNA, 17 nt, Human
agcagucaggaaagaga

SEQ ID NO: 1305416 - RNA, 18 nt, Human
agcagucaggaaagagaa

SEQ ID NO: 1305417 - RNA, 12 nt, Human
agcaguauuuuu

SEQ ID NO: 1305418 - RNA, 18 nt, Human
agcagguugauaaaucau

SEQ ID NO: 1305419 - RNA, 14 nt, Human
agcagguuucaagg

SEQ ID NO: 1305420 - RNA, 23 nt, Human
agcagguucccaagcucagaggc

SEQ ID NO: 1305421 - RNA, 14 nt, Human
agcagguucuuguu

SEQ ID NO: 1305422 - RNA, 16 nt, Human
agcagguucccaagcu

SEQ ID NO: 1305423 - RNA, 17 nt, Human
agcagguucccaagcuc

SEQ ID NO: 1305424 - RNA, 18 nt, Human
agcagguucccaagcuca

SEQ ID NO: 1305425 - RNA, 19 nt, Human
agcagucaggaaagagaac

SEQ ID NO: 1305426 - RNA, 15 nt, Human
agcaguccccuuccc

SEQ ID NO: 1305427 - RNA, 16 nt, Human
agcaguccccuucccu

SEQ ID NO: 1305428 - RNA, 18 nt, Human
agcaguccccuucccucc

SEQ ID NO: 1305429 - RNA, 22 nt, Human
agcaguccccuucccuccaaga

SEQ ID NO: 1305430 - RNA, 12 nt, Human
agcaguccuugg

SEQ ID NO: 1305431 - RNA, 13 nt, Human
agcaguccuuggc

SEQ ID NO: 1305432 - RNA, 15 nt, Human
agcaguccuuggccu

SEQ ID NO: 1305433 - RNA, 16 nt, Human
agcaguccuuggccug

SEQ ID NO: 1305434 - RNA, 18 nt, Human
agcaguccuuggccugcu

SEQ ID NO: 1305435 - RNA, 14 nt, Human
agcagucgugccug

SEQ ID NO: 1305436 - RNA, 16 nt, Human
agcagucgugccugug

SEQ ID NO: 1305437 - RNA, 17 nt, Human
agcagucgugccugugu

SEQ ID NO: 1305438 - RNA, 22 nt, Human
agcaguccuuggccugcuaagg

SEQ ID NO: 1305439 - RNA, 19 nt, Human
agcagucgugccugugucc

SEQ ID NO: 1305440 - RNA, 14 nt, Human
agcaguuugcuuug

SEQ ID NO: 1305441 - RNA, 15 nt, Human
agcaguuugaaauug

SEQ ID NO: 1305442 - RNA, 20 nt, Human
ugagucacccuaccugugcc

SEQ ID NO: 1305443 - RNA, 22 nt, Human
ugagucacccuaccugugccug

SEQ ID NO: 1305444 - RNA, 19 nt, Human
ugaguaccccugcuuuggg

SEQ ID NO: 1305445 - RNA, 21 nt, Human
ugaguaccccugcuuugggcu

SEQ ID NO: 1305446 - RNA, 21 nt, Human
ugagucagagccaugucuucu

SEQ ID NO: 1305447 - RNA, 15 nt, Human
ugagugcaguccuga

SEQ ID NO: 1305448 - RNA, 13 nt, Human
ugaguggcagggg

SEQ ID NO: 1305449 - RNA, 21 nt, Human
ugaguggcaggggacaggagu

SEQ ID NO: 1305450 - RNA, 12 nt, Human
ugaguggcccuu

SEQ ID NO: 1305451 - RNA, 12 nt, Human
ugagugggaagc

SEQ ID NO: 1305452 - RNA, 13 nt, Human
ugagugggaagcc

SEQ ID NO: 1305453 - RNA, 14 nt, Human
ugagugggaagccc

SEQ ID NO: 1305454 - RNA, 15 nt, Human
ugauaauagauucuc

SEQ ID NO: 1305455 - RNA, 14 nt, Human
ugauaauagauucu

SEQ ID NO: 1305456 - RNA, 14 nt, Human
ugauaauuuuaaau

SEQ ID NO: 1305457 - RNA, 13 nt, Human
ugauaauuuuaaa

SEQ ID NO: 1305458 - RNA, 19 nt, Human
ugagugugcggcugugugu

SEQ ID NO: 1305459 - RNA, 22 nt, Human
ugagugugcggcugugugugca

SEQ ID NO: 1305460 - RNA, 18 nt, Human
ugaguuccagaaaguaaa

SEQ ID NO: 1305461 - RNA, 17 nt, Human
ugaguuccagaaaguaa

SEQ ID NO: 1305462 - RNA, 21 nt, Human
ugaguguuuuaugagaaagcc

SEQ ID NO: 1305463 - RNA, 19 nt, Human
ugaguguuuuaugagaaag

SEQ ID NO: 1305464 - RNA, 14 nt, Human
ugaguuacagaaau

SEQ ID NO: 1305465 - RNA, 17 nt, Human
ugacccagaggacagca

SEQ ID NO: 1305466 - RNA, 19 nt, Human
agcagcaccguucugugca

SEQ ID NO: 1305467 - RNA, 20 nt, Human
agcagcaccguucugugcac

SEQ ID NO: 1305468 - RNA, 13 nt, Human
agcagcaccuccu

SEQ ID NO: 1305469 - RNA, 14 nt, Human
agcagcaccuccuc

SEQ ID NO: 1305470 - RNA, 17 nt, Human
agcagcaccuccucagc

SEQ ID NO: 1305471 - RNA, 20 nt, Human
agcagcaccuccucagccug

SEQ ID NO: 1305472 - RNA, 21 nt, Human
agcagcaccuccucagccuga

SEQ ID NO: 1305473 - RNA, 14 nt, Human
agcagcaccugccc

SEQ ID NO: 1305474 - RNA, 16 nt, Human
agcagcaccugcccua

SEQ ID NO: 1305475 - RNA, 17 nt, Human
agcagcaccugcccuac

SEQ ID NO: 1305476 - RNA, 19 nt, Human
agcagcaccugcccuaccu

SEQ ID NO: 1305477 - RNA, 20 nt, Human
agcagcaccugcccuaccug

SEQ ID NO: 1305478 - RNA, 22 nt, Human
agcagcaccugcccuaccugcc

SEQ ID NO: 1305479 - RNA, 14 nt, Human
agcagcacuuauaa

SEQ ID NO: 1305480 - RNA, 15 nt, Human
agcagcacuuauaaa

SEQ ID NO: 1305481 - RNA, 18 nt, Human
agcagcacuuauaaauca

SEQ ID NO: 1305482 - RNA, 13 nt, Human
agcagcagccucg

SEQ ID NO: 1305483 - RNA, 15 nt, Human
agcagcaggaggggg

SEQ ID NO: 1305484 - RNA, 17 nt, Human
agcagcaggagggggga

SEQ ID NO: 1305485 - RNA, 18 nt, Human
agcagcaggaggggggag

SEQ ID NO: 1305486 - RNA, 21 nt, Human
agcagcaggaggggggaggga

SEQ ID NO: 1305487 - RNA, 22 nt, Human
agcagcaggaggggggagggaa

SEQ ID NO: 1305488 - RNA, 11 nt, Human
agcagcaucuc

SEQ ID NO: 1305489 - RNA, 20 nt, Human
agcagcaucucuaccuucuc

SEQ ID NO: 1305490 - RNA, 19 nt, Human
agcagcaucucuaccuucu

SEQ ID NO: 1305491 - RNA, 17 nt, Human
agcaggaaugggaagga

SEQ ID NO: 1305492 - RNA, 14 nt, Human
agcaggacuccagg

SEQ ID NO: 1305493 - RNA, 15 nt, Human
agcaggacuccaggc

SEQ ID NO: 1305494 - RNA, 18 nt, Human
agcaggacuccaggccca

SEQ ID NO: 1305495 - RNA, 19 nt, Human
agcaggacuccaggcccaa

SEQ ID NO: 1305496 - RNA, 23 nt, Human
agcaggacuccaggcccaaggcu

SEQ ID NO: 1305497 - RNA, 22 nt, Human
agcaggacuccaggcccaaggc

SEQ ID NO: 1305498 - RNA, 16 nt, Human
agcaggacugaugucu

SEQ ID NO: 1305499 - RNA, 22 nt, Human
agcaggacugaugucuccuaag

SEQ ID NO: 1305500 - RNA, 19 nt, Human
agcaggacugaugucuccu

SEQ ID NO: 1305501 - RNA, 16 nt, Human
agcaggaggccuagga

SEQ ID NO: 1305502 - RNA, 14 nt, Human
agcaggagggggga

SEQ ID NO: 1305503 - RNA, 16 nt, Human
agcaggaggggggagg

SEQ ID NO: 1305504 - RNA, 21 nt, Human
agcaggaggggggagggaagg

SEQ ID NO: 1305505 - RNA, 11 nt, Human
agcaggcagcc

SEQ ID NO: 1305506 - RNA, 12 nt, Human
agcaggcagcca

SEQ ID NO: 1305507 - RNA, 14 nt, Human
agcaggcagccagc

SEQ ID NO: 1305508 - RNA, 15 nt, Human
agcaggcagccagca

SEQ ID NO: 1305509 - RNA, 16 nt, Human
agcaggcagccagcau

SEQ ID NO: 1305510 - RNA, 17 nt, Human
agcaggcagccagcauc

SEQ ID NO: 1305511 - RNA, 19 nt, Human
agcaggcagccagcaucug

SEQ ID NO: 1305512 - RNA, 13 nt, Human
agcaggccacacu

SEQ ID NO: 1305513 - RNA, 23 nt, Human
agcaggccacacuucaaacuacu

SEQ ID NO: 1305514 - RNA, 24 nt, Human
agcaggccacacuucaaacuacuu

SEQ ID NO: 1305515 - RNA, 21 nt, Human
agcaggccuuuugauauuaaa

SEQ ID NO: 1305516 - RNA, 15 nt, Human
agcaggcugugaguu

SEQ ID NO: 1305517 - RNA, 16 nt, Human
agcagggacuguaaac

SEQ ID NO: 1305518 - RNA, 19 nt, Human
agcagggauuaaccucugc

SEQ ID NO: 1305519 - RNA, 20 nt, Human
agcagggauuaaccucugca

SEQ ID NO: 1305520 - RNA, 21 nt, Human
agcagggauuaaccucugcac

SEQ ID NO: 1305521 - RNA, 22 nt, Human
agcagggauuaaccucugcacu

SEQ ID NO: 1305522 - RNA, 14 nt, Human
agcagggccgggga

SEQ ID NO: 1305523 - RNA, 22 nt, Human
agcagggccggggaacuggcca

SEQ ID NO: 1305524 - RNA, 23 nt, Human
agcagggccggggaacuggccaa

SEQ ID NO: 1305525 - RNA, 23 nt, Human
agcagggcuacccugagcugagg

SEQ ID NO: 1305526 - RNA, 19 nt, Human
agcagggugggcuuguggg

SEQ ID NO: 1305527 - RNA, 13 nt, Human
agcaggugcugac

SEQ ID NO: 1305528 - RNA, 17 nt, Human
agccuccuuagaaaaaa

SEQ ID NO: 1305529 - RNA, 16 nt, Human
agccuccuuucuggcu

SEQ ID NO: 1305530 - RNA, 18 nt, Human
agccucgcaacccgugcc

SEQ ID NO: 1305531 - RNA, 19 nt, Human
agccucgcaacccgugcca

SEQ ID NO: 1305532 - RNA, 21 nt, Human
agccucgcaacccgugccaag

SEQ ID NO: 1305533 - RNA, 23 nt, Human
agccucgcaacccgugccaaguc

SEQ ID NO: 1305534 - RNA, 20 nt, Human
agccucgcccauccccuuga

SEQ ID NO: 1305535 - RNA, 14 nt, Human
agccucgccccugg

SEQ ID NO: 1305536 - RNA, 15 nt, Human
agccucgccccuggc

SEQ ID NO: 1305537 - RNA, 16 nt, Human
agccucgccccuggca

SEQ ID NO: 1305538 - RNA, 20 nt, Human
agccucgccccuggcagaga

SEQ ID NO: 1305539 - RNA, 16 nt, Human
agccucuccacucaug

SEQ ID NO: 1305540 - RNA, 22 nt, Human
agccucuagagcagacuacagc

SEQ ID NO: 1305541 - RNA, 18 nt, Human
agccucgccccuggcaga

SEQ ID NO: 1305542 - RNA, 19 nt, Human
agccucgccccuggcagag

SEQ ID NO: 1305543 - RNA, 19 nt, Human
agccucuagagcagacuac

SEQ ID NO: 1305544 - RNA, 23 nt, Human
agccucuagagcagacuacagcu

SEQ ID NO: 1305545 - RNA, 16 nt, Human
agccucuccccagguc

SEQ ID NO: 1305546 - RNA, 18 nt, Human
agccucuccccaggucca

SEQ ID NO: 1305547 - RNA, 22 nt, Human
agccucuccccagguccagcuc

SEQ ID NO: 1305548 - RNA, 23 nt, Human
agccucuccccagguccagcucu

SEQ ID NO: 1305549 - RNA, 13 nt, Human
ugcagacaggaau

SEQ ID NO: 1305550 - RNA, 15 nt, Human
ugcagacaggaaucu

SEQ ID NO: 1305551 - RNA, 16 nt, Human
ugcagacaggaaucuu

SEQ ID NO: 1305552 - RNA, 18 nt, Human
ugcagacaggaaucuuaa

SEQ ID NO: 1305553 - RNA, 20 nt, Human
ugcagacaggaaucuuaagg

SEQ ID NO: 1305554 - RNA, 22 nt, Human
ugcaggucccuaauaaagcugu

SEQ ID NO: 1305555 - RNA, 11 nt, Human
ugcaggucccu

SEQ ID NO: 1305556 - RNA, 19 nt, Human
ugcagguggccaaguuccu

SEQ ID NO: 1305557 - RNA, 13 nt, Human
ugcagguggggag

SEQ ID NO: 1305558 - RNA, 13 nt, Human
ugcagccucagga

SEQ ID NO: 1305559 - RNA, 16 nt, Human
ugcagccucaggacug

SEQ ID NO: 1305560 - RNA, 17 nt, Human
ugcagccucaggacugg

SEQ ID NO: 1305561 - RNA, 18 nt, Human
ugcagccucaggacuggg

SEQ ID NO: 1305562 - RNA, 19 nt, Human
ugcagccucaggacuggga

SEQ ID NO: 1305563 - RNA, 20 nt, Human
ugcagccucaggacugggag

SEQ ID NO: 1305564 - RNA, 22 nt, Human
ugcagccucaggacugggagcc

SEQ ID NO: 1305565 - RNA, 21 nt, Human
ugcagccucaggacugggagc

SEQ ID NO: 1305566 - RNA, 19 nt, Human
ugcagggggugugucugcu

SEQ ID NO: 1305567 - RNA, 22 nt, Human
ugcagggggugugucugcucag

SEQ ID NO: 1305568 - RNA, 15 nt, Human
ugcaggguccucuuc

SEQ ID NO: 1305569 - RNA, 19 nt, Human
ugcaggguccucuucuggg

SEQ ID NO: 1305570 - RNA, 22 nt, Human
ugcaggguccucuucugggccu

SEQ ID NO: 1305571 - RNA, 12 nt, Human
ugcagccucaga

SEQ ID NO: 1305572 - RNA, 14 nt, Human
ugcagccucagaga

SEQ ID NO: 1305573 - RNA, 20 nt, Human
ugcagccucagagacaucag

SEQ ID NO: 1305574 - RNA, 14 nt, Human
agccucuccccugc

SEQ ID NO: 1305575 - RNA, 19 nt, Human
agccucuccccugccugcc

SEQ ID NO: 1305576 - RNA, 21 nt, Human
agccucuccccugccugcccu

SEQ ID NO: 1305577 - RNA, 20 nt, Human
agccucuccccugccugccc

SEQ ID NO: 1305578 - RNA, 14 nt, Human
agccucugucuggc

SEQ ID NO: 1305579 - RNA, 17 nt, Human
agccucugucuggcaau

SEQ ID NO: 1305580 - RNA, 17 nt, Human
ugcauagaauaaaauuu

SEQ ID NO: 1305581 - RNA, 18 nt, Human
ugcauacuuuuuaaaugu

SEQ ID NO: 1305582 - RNA, 19 nt, Human
ugcauacuuuuuaaaugua

SEQ ID NO: 1305583 - RNA, 22 nt, Human
ugcauacuuuuuaaauguaaag

SEQ ID NO: 1305584 - RNA, 23 nt, Human
ugcauacuuuuuaaauguaaaga

SEQ ID NO: 1305585 - RNA, 19 nt, Human
ugcauacucauuaggaugg

SEQ ID NO: 1305586 - RNA, 20 nt, Human
ugcaguaucggcacuguaca

SEQ ID NO: 1305587 - RNA, 21 nt, Human
ugcaguaucggcacuguacaa

SEQ ID NO: 1305588 - RNA, 15 nt, Human
ugcaguaugaaaaua

SEQ ID NO: 1305589 - RNA, 16 nt, Human
ugcaguaugaaaauaa

SEQ ID NO: 1305590 - RNA, 16 nt, Human
ugcaguaucaugcccu

SEQ ID NO: 1305591 - RNA, 21 nt, Human
ugcaguaucaugcccugugca

SEQ ID NO: 1305592 - RNA, 20 nt, Human
ugcagguggccaaguuccuc

SEQ ID NO: 1305593 - RNA, 12 nt, Human
ugcagguuccca

SEQ ID NO: 1305594 - RNA, 13 nt, Human
ugcaguaaaucuu

SEQ ID NO: 1305595 - RNA, 11 nt, Human
ugcauggaaau

SEQ ID NO: 1305596 - RNA, 19 nt, Human
ugcaugcacuguucccccu

SEQ ID NO: 1305597 - RNA, 22 nt, Human
ugcaugcacuguucccccugug

SEQ ID NO: 1305598 - RNA, 14 nt, Human
ugcaugcccagaga

SEQ ID NO: 1305599 - RNA, 18 nt, Human
ugcaugcccagagaccca

SEQ ID NO: 1305600 - RNA, 23 nt, Human
ugcaugcccagagacccagcgga

SEQ ID NO: 1305601 - RNA, 20 nt, Human
ugcaugcccagagacccagc

SEQ ID NO: 1305602 - RNA, 13 nt, Human
ugcaucucagccc

SEQ ID NO: 1305603 - RNA, 14 nt, Human
ugcaucucagccca

SEQ ID NO: 1305604 - RNA, 15 nt, Human
ugcaucucagcccac

SEQ ID NO: 1305605 - RNA, 21 nt, Human
ugcaucuagaggcuuccuuca

SEQ ID NO: 1305606 - RNA, 23 nt, Human
ugcauggaaauucccuucaucug

SEQ ID NO: 1305607 - RNA, 19 nt, Human
ugcauggaaauucccuuca

SEQ ID NO: 1305608 - RNA, 14 nt, Human
ugcauggauuucuu

SEQ ID NO: 1305609 - RNA, 16 nt, Human
ugcauggauuucuuug

SEQ ID NO: 1305610 - RNA, 20 nt, Human
ugcauggauuucuuugaaaa

SEQ ID NO: 1305611 - RNA, 19 nt, Human
ugcauggcagggggcugcu

SEQ ID NO: 1305612 - RNA, 20 nt, Human
ugcauggcagggggcugcug

SEQ ID NO: 1305613 - RNA, 21 nt, Human
ugcauggcagggggcugcugc

SEQ ID NO: 1305614 - RNA, 22 nt, Human
ugcauggcagggggcugcugcu

SEQ ID NO: 1305615 - RNA, 23 nt, Human
ugcauggcagggggcugcugcug

SEQ ID NO: 1305616 - RNA, 11 nt, Human
ugcauggcauc

SEQ ID NO: 1305617 - RNA, 18 nt, Human
ugcauggcauccuccagc

SEQ ID NO: 1305618 - RNA, 20 nt, Human
ugcauggcauccuccagccc

SEQ ID NO: 1305619 - RNA, 21 nt, Human
ugcauggcauccuccagcccc

SEQ ID NO: 1305620 - RNA, 14 nt, Human
agccugagggaaag

SEQ ID NO: 1305621 - RNA, 15 nt, Human
agccugagggaaagg

SEQ ID NO: 1305622 - RNA, 19 nt, Human
agccugagggaaaggccag

SEQ ID NO: 1305623 - RNA, 20 nt, Human
agccugagggaaaggccagc

SEQ ID NO: 1305624 - RNA, 21 nt, Human
agccugagggaaaggccagca

SEQ ID NO: 1305625 - RNA, 22 nt, Human
agccugagggaaaggccagcac

SEQ ID NO: 1305626 - RNA, 23 nt, Human
agccugagggaaaggccagcacu

SEQ ID NO: 1305627 - RNA, 22 nt, Human
agccugaguacuccacacugca

SEQ ID NO: 1305628 - RNA, 16 nt, Human
agccugagucaccugc

SEQ ID NO: 1305629 - RNA, 19 nt, Human
agccugagucaccugcaga

SEQ ID NO: 1305630 - RNA, 19 nt, Human
agccugaguacuccacacu

SEQ ID NO: 1305631 - RNA, 18 nt, Human
agccugugaacccaggac

SEQ ID NO: 1305632 - RNA, 19 nt, Human
agccugugaacccaggaca

SEQ ID NO: 1305633 - RNA, 20 nt, Human
agccugugaacccaggacaa

SEQ ID NO: 1305634 - RNA, 22 nt, Human
agccugugaacccaggacaagc

SEQ ID NO: 1305635 - RNA, 22 nt, Human
agccugugacauacccccuccc

SEQ ID NO: 1305636 - RNA, 22 nt, Human
agccuguaaacuuuaucacuua

SEQ ID NO: 1305637 - RNA, 20 nt, Human
agccugucagauccaggagc

SEQ ID NO: 1305638 - RNA, 21 nt, Human
agccugucagauccaggagcu

SEQ ID NO: 1305639 - RNA, 22 nt, Human
agccugucagauccaggagcuc

SEQ ID NO: 1305640 - RNA, 14 nt, Human
agccuguccugccu

SEQ ID NO: 1305641 - RNA, 15 nt, Human
agccuguccugccug

SEQ ID NO: 1305642 - RNA, 16 nt, Human
agccuguccugccugu

SEQ ID NO: 1305643 - RNA, 17 nt, Human
agccuguccugccugug

SEQ ID NO: 1305644 - RNA, 24 nt, Human
agccuguccugccuguggccauga

SEQ ID NO: 1305645 - RNA, 20 nt, Human
agccuguccugccuguggcc

SEQ ID NO: 1305646 - RNA, 12 nt, Human
agccuguccugu

SEQ ID NO: 1305647 - RNA, 13 nt, Human
agccuguccuguc

SEQ ID NO: 1305648 - RNA, 14 nt, Human
agccuguccuguca

SEQ ID NO: 1305649 - RNA, 18 nt, Human
agccuguccugucaucau

SEQ ID NO: 1305650 - RNA, 15 nt, Human
agccugugaacccag

SEQ ID NO: 1305651 - RNA, 17 nt, Human
agccugugaacccagga

SEQ ID NO: 1305652 - RNA, 12 nt, Human
agccuugcuugu

SEQ ID NO: 1305653 - RNA, 16 nt, Human
agccuugggaccccug

SEQ ID NO: 1305654 - RNA, 19 nt, Human
agccuuggccucuuuccuc

SEQ ID NO: 1305655 - RNA, 16 nt, Human
agccuuggggauucuu

SEQ ID NO: 1305656 - RNA, 23 nt, Human
agccuuggggauucuuccaucug

SEQ ID NO: 1305657 - RNA, 12 nt, Human
agcgcccugcag

SEQ ID NO: 1305658 - RNA, 13 nt, Human
agcgcccugcaga

SEQ ID NO: 1305659 - RNA, 14 nt, Human
agcgcccugcagac

SEQ ID NO: 1305660 - RNA, 12 nt, Human
agccugugccuc

SEQ ID NO: 1305661 - RNA, 19 nt, Human
agccugugacauacccccu

SEQ ID NO: 1305662 - RNA, 18 nt, Human
agccuuaaucagguccuc

SEQ ID NO: 1305663 - RNA, 15 nt, Human
agccuucucuguuca

SEQ ID NO: 1305664 - RNA, 19 nt, Human
agccuucucuguucauuuc

SEQ ID NO: 1305665 - RNA, 20 nt, Human
agccuucucuguucauuucc

SEQ ID NO: 1305666 - RNA, 21 nt, Human
agccuucucuguucauuuccu

SEQ ID NO: 1305667 - RNA, 22 nt, Human
agccuucucuguucauuuccuc

SEQ ID NO: 1305668 - RNA, 23 nt, Human
agccuucucuguucauuuccuca

SEQ ID NO: 1305669 - RNA, 20 nt, Human
ugcauuuaaaacagacacug

SEQ ID NO: 1305670 - RNA, 22 nt, Human
ugcauuuaaaacagacacuggc

SEQ ID NO: 1305671 - RNA, 17 nt, Human
ugcauugugauuggccu

SEQ ID NO: 1305672 - RNA, 19 nt, Human
ugcauugugauuggccugu

SEQ ID NO: 1305673 - RNA, 15 nt, Human
ugcauuuaaaacaga

SEQ ID NO: 1305674 - RNA, 17 nt, Human
ugcauuuaaaacagaca

SEQ ID NO: 1305675 - RNA, 19 nt, Human
ugcauuuaaaacagacacu

SEQ ID NO: 1305676 - RNA, 16 nt, Human
agcgcccugcagaccc

SEQ ID NO: 1305677 - RNA, 17 nt, Human
agcgcccugcagacccu

SEQ ID NO: 1305678 - RNA, 18 nt, Human
agcgcccugcagacccug

SEQ ID NO: 1305679 - RNA, 19 nt, Human
agcgcccugcagacccugc

SEQ ID NO: 1305680 - RNA, 20 nt, Human
agcgcccugcagacccugcc

SEQ ID NO: 1305681 - RNA, 21 nt, Human
agcgcccugcagacccugccc

SEQ ID NO: 1305682 - RNA, 23 nt, Human
agcgcccugcagacccugcccuu

SEQ ID NO: 1305683 - RNA, 12 nt, Human
ugccacagcccu

SEQ ID NO: 1305684 - RNA, 14 nt, Human
ugccacagcccugu

SEQ ID NO: 1305685 - RNA, 16 nt, Human
ugccacagcccuguca

SEQ ID NO: 1305686 - RNA, 23 nt, Human
ugccaagccauggguagccuggg

SEQ ID NO: 1305687 - RNA, 13 nt, Human
ugccaagcuccaa

SEQ ID NO: 1305688 - RNA, 15 nt, Human
ugccaagcuccaagc

SEQ ID NO: 1305689 - RNA, 16 nt, Human
ugccaagcuccaagcc

SEQ ID NO: 1305690 - RNA, 23 nt, Human
ugccaagcuccaagccccaucuu

SEQ ID NO: 1305691 - RNA, 16 nt, Human
ugccaaggcagaggcc

SEQ ID NO: 1305692 - RNA, 17 nt, Human
ugccaaggcagaggccu

SEQ ID NO: 1305693 - RNA, 18 nt, Human
ugccaaggcagaggccug

SEQ ID NO: 1305694 - RNA, 19 nt, Human
ugccaaggcagaggccugg

SEQ ID NO: 1305695 - RNA, 22 nt, Human
ugccaaggcagaggccugggcu

SEQ ID NO: 1305696 - RNA, 21 nt, Human
ugccaauauuaaaucugcugg

SEQ ID NO: 1305697 - RNA, 11 nt, Human
ugccagccccu

SEQ ID NO: 1305698 - RNA, 19 nt, Human
ugccagccccugccauugu

SEQ ID NO: 1305699 - RNA, 17 nt, Human
ugccacagcccugucag

SEQ ID NO: 1305700 - RNA, 21 nt, Human
ugccacagcccugucagcaug

SEQ ID NO: 1305701 - RNA, 13 nt, Human
ugccacagccucc

SEQ ID NO: 1305702 - RNA, 17 nt, Human
ugccacagccuccccug

SEQ ID NO: 1305703 - RNA, 21 nt, Human
ugccacagccuccccugccag

SEQ ID NO: 1305704 - RNA, 22 nt, Human
ugccacagccuccccugccagg

SEQ ID NO: 1305705 - RNA, 22 nt, Human
ugccacagcccugucagcauga

SEQ ID NO: 1305706 - RNA, 11 nt, Human
ugccacagcuu

SEQ ID NO: 1305707 - RNA, 17 nt, Human
ugccacagcuuuugcaa

SEQ ID NO: 1305708 - RNA, 16 nt, Human
ugccacagcuuuugca

SEQ ID NO: 1305709 - RNA, 13 nt, Human
ugccauaauuacu

SEQ ID NO: 1305710 - RNA, 22 nt, Human
ugccaguuguccuccuuccggg

SEQ ID NO: 1305711 - RNA, 23 nt, Human
ugccaguguccugagccccaggg

SEQ ID NO: 1305712 - RNA, 16 nt, Human
ugccaguguccugagc

SEQ ID NO: 1305713 - RNA, 15 nt, Human
ugccaguuguccucc

SEQ ID NO: 1305714 - RNA, 19 nt, Human
ugccagcuacuuccuccuc

SEQ ID NO: 1305715 - RNA, 22 nt, Human
ugccagcucuguaucaggaccc

SEQ ID NO: 1305716 - RNA, 20 nt, Human
agcccugggaggcucuggag

SEQ ID NO: 1305717 - RNA, 18 nt, Human
agcccugggaggcucugg

SEQ ID NO: 1305718 - RNA, 22 nt, Human
agcccugcaccaugcugcuggg

SEQ ID NO: 1305719 - RNA, 12 nt, Human
agcccugccugg

SEQ ID NO: 1305720 - RNA, 13 nt, Human
agcccugccugga

SEQ ID NO: 1305721 - RNA, 14 nt, Human
agcccugccuggag

SEQ ID NO: 1305722 - RNA, 19 nt, Human
agcccugccuggaggaccu

SEQ ID NO: 1305723 - RNA, 15 nt, Human
agcccugccuggagg

SEQ ID NO: 1305724 - RNA, 16 nt, Human
agcccugccuggagga

SEQ ID NO: 1305725 - RNA, 17 nt, Human
agcccugccuggaggac

SEQ ID NO: 1305726 - RNA, 13 nt, Human
ugcacauguuucc

SEQ ID NO: 1305727 - RNA, 14 nt, Human
ugcacauguuuccu

SEQ ID NO: 1305728 - RNA, 16 nt, Human
ugcacauguuuccucu

SEQ ID NO: 1305729 - RNA, 17 nt, Human
ugcacauguuuccucua

SEQ ID NO: 1305730 - RNA, 18 nt, Human
ugcacauguuuccucuag

SEQ ID NO: 1305731 - RNA, 13 nt, Human
ugcacauuuauuu

SEQ ID NO: 1305732 - RNA, 22 nt, Human
ugcacauuuauuuccucccucu

SEQ ID NO: 1305733 - RNA, 16 nt, Human
ugcaccaaagagaaug

SEQ ID NO: 1305734 - RNA, 23 nt, Human
ugcaccaggguugaccccagagg

SEQ ID NO: 1305735 - RNA, 18 nt, Human
ugcaccccaaagcuuucc

SEQ ID NO: 1305736 - RNA, 19 nt, Human
ugcaccccaaagcuuuccu

SEQ ID NO: 1305737 - RNA, 20 nt, Human
ugcaccccaaagcuuuccug

SEQ ID NO: 1305738 - RNA, 21 nt, Human
ugcaccccaaagcuuuccugc

SEQ ID NO: 1305739 - RNA, 22 nt, Human
ugcaccccaaagcuuuccugcc

SEQ ID NO: 1305740 - RNA, 23 nt, Human
ugcaccccaaagcuuuccugccc

SEQ ID NO: 1305741 - RNA, 15 nt, Human
ugcacuccagccuga

SEQ ID NO: 1305742 - RNA, 17 nt, Human
ugcacuccagccugagc

SEQ ID NO: 1305743 - RNA, 16 nt, Human
agccccuuagacagag

SEQ ID NO: 1305744 - RNA, 12 nt, Human
agcccugcacca

SEQ ID NO: 1305745 - RNA, 13 nt, Human
agcccugcaccau

SEQ ID NO: 1305746 - RNA, 14 nt, Human
agcccugcaccaug

SEQ ID NO: 1305747 - RNA, 20 nt, Human
agcccugcaccaugcugcug

SEQ ID NO: 1305748 - RNA, 23 nt, Human
agccccgcguggaacucgugucu

SEQ ID NO: 1305749 - RNA, 18 nt, Human
agccccgugggguuccuc

SEQ ID NO: 1305750 - RNA, 12 nt, Human
agccccucuggu

SEQ ID NO: 1305751 - RNA, 13 nt, Human
agccccucugguc

SEQ ID NO: 1305752 - RNA, 16 nt, Human
agccccucuggucgcu

SEQ ID NO: 1305753 - RNA, 20 nt, Human
agccccucuggucgcuccug

SEQ ID NO: 1305754 - RNA, 16 nt, Human
agccccugggcccagu

SEQ ID NO: 1305755 - RNA, 14 nt, Human
agccccugggccca

SEQ ID NO: 1305756 - RNA, 21 nt, Human
agccccugggguggccaccag

SEQ ID NO: 1305757 - RNA, 22 nt, Human
agccccugggguggccaccagu

SEQ ID NO: 1305758 - RNA, 15 nt, Human
agccccugucauggu

SEQ ID NO: 1305759 - RNA, 23 nt, Human
ugcaaggccugguguuucuugau

SEQ ID NO: 1305760 - RNA, 21 nt, Human
ugcaaggccugguguuucuug

SEQ ID NO: 1305761 - RNA, 11 nt, Human
ugcaagggaaa

SEQ ID NO: 1305762 - RNA, 13 nt, Human
ugcaaggcaaaga

SEQ ID NO: 1305763 - RNA, 17 nt, Human
ugcaaggaccuaaaaca

SEQ ID NO: 1305764 - RNA, 14 nt, Human
ugcaaggcagccgu

SEQ ID NO: 1305765 - RNA, 15 nt, Human
ugcaaggcagccgug

SEQ ID NO: 1305766 - RNA, 16 nt, Human
ugcaaggcagccgugg

SEQ ID NO: 1305767 - RNA, 18 nt, Human
ugcaaggcagccgugggc

SEQ ID NO: 1305768 - RNA, 16 nt, Human
ugcaagguacucuggu

SEQ ID NO: 1305769 - RNA, 18 nt, Human
ugcaagguacucugguga

SEQ ID NO: 1305770 - RNA, 21 nt, Human
ugcaagguauuacacucugua

SEQ ID NO: 1305771 - RNA, 22 nt, Human
ugcaagguauuacacucuguaa

SEQ ID NO: 1305772 - RNA, 16 nt, Human
ugcaaggucuuugguu

SEQ ID NO: 1305773 - RNA, 17 nt, Human
ugcaaguauacuaggga

SEQ ID NO: 1305774 - RNA, 20 nt, Human
ugcaaguauacuagggagcc

SEQ ID NO: 1305775 - RNA, 11 nt, Human
ugcaaugaaca

SEQ ID NO: 1305776 - RNA, 23 nt, Human
agcccaggccaggacucugcagc

SEQ ID NO: 1305777 - RNA, 15 nt, Human
ugcaauaucugaagc

SEQ ID NO: 1305778 - RNA, 14 nt, Human
ugcaauaucugaag

SEQ ID NO: 1305779 - RNA, 15 nt, Human
ugcaaucccuuaaua

SEQ ID NO: 1305780 - RNA, 17 nt, Human
ugcaaguuaugaaauau

SEQ ID NO: 1305781 - RNA, 13 nt, Human
ugcaaguugagga

SEQ ID NO: 1305782 - RNA, 18 nt, Human
ugcaaguugaggacuucu

SEQ ID NO: 1305783 - RNA, 16 nt, Human
ugcaaguuuaucagua

SEQ ID NO: 1305784 - RNA, 19 nt, Human
ugcaaguugaggacuucuu

SEQ ID NO: 1305785 - RNA, 19 nt, Human
ugcaauaaaucugacccag

SEQ ID NO: 1305786 - RNA, 15 nt, Human
ugcaagccagauuuu

SEQ ID NO: 1305787 - RNA, 21 nt, Human
ugcaagccagauuuuccugaa

SEQ ID NO: 1305788 - RNA, 15 nt, Human
ugcaagcacagcccu

SEQ ID NO: 1305789 - RNA, 16 nt, Human
ugcaagcacagcccuu

SEQ ID NO: 1305790 - RNA, 12 nt, Human
ugcaaauuucau

SEQ ID NO: 1305791 - RNA, 13 nt, Human
ugcaacaaaauuc

SEQ ID NO: 1305792 - RNA, 12 nt, Human
ugcaacacuggu

SEQ ID NO: 1305793 - RNA, 22 nt, Human
ugcaacacuggucugcuguucc

SEQ ID NO: 1305794 - RNA, 16 nt, Human
ugcaacagacuugaau

SEQ ID NO: 1305795 - RNA, 17 nt, Human
ugcaaauaacaaaugcc

SEQ ID NO: 1305796 - RNA, 13 nt, Human
ugcaaauaacaaa

SEQ ID NO: 1305797 - RNA, 23 nt, Human
ugcaaauacuguauauucaggac

SEQ ID NO: 1305798 - RNA, 20 nt, Human
ugcaaaucaggcuuuuguuu

SEQ ID NO: 1305799 - RNA, 14 nt, Human
ugcaaaucuugaaa

SEQ ID NO: 1305800 - RNA, 21 nt, Human
ugcaaaugcuaugagaugcau

SEQ ID NO: 1305801 - RNA, 15 nt, Human
agccacgguguucug

SEQ ID NO: 1305802 - RNA, 19 nt, Human
agccacggggacucagccc

SEQ ID NO: 1305803 - RNA, 18 nt, Human
agccacgggugccagaag

SEQ ID NO: 1305804 - RNA, 16 nt, Human
ugauuuaucacacaaa

SEQ ID NO: 1305805 - RNA, 18 nt, Human
ugauuuaucacacaaagc

SEQ ID NO: 1305806 - RNA, 22 nt, Human
ugauuuaucugagucaacuccu

SEQ ID NO: 1305807 - RNA, 23 nt, Human
ugauuuauuaauauauauuaucu

SEQ ID NO: 1305808 - RNA, 13 nt, Human
ugauuucauuuca

SEQ ID NO: 1305809 - RNA, 17 nt, Human
ugauuucauuucaacug

SEQ ID NO: 1305810 - RNA, 12 nt, Human
ugauuugcauug

SEQ ID NO: 1305811 - RNA, 12 nt, Human
ugauuuggaaaa

SEQ ID NO: 1305812 - RNA, 15 nt, Human
ugauuugcauugaac

SEQ ID NO: 1305813 - RNA, 13 nt, Human
ugauuugcauuga

SEQ ID NO: 1305814 - RNA, 14 nt, Human
ugauuugcauugaa

SEQ ID NO: 1305815 - RNA, 18 nt, Human
ugauuugcauugaacaca

SEQ ID NO: 1305816 - RNA, 14 nt, Human
ugcaaagcccagcu

SEQ ID NO: 1305817 - RNA, 15 nt, Human
ugcaaagcccagcuu

SEQ ID NO: 1305818 - RNA, 17 nt, Human
ugcaaagcccagcuuga

SEQ ID NO: 1305819 - RNA, 23 nt, Human
ugcaaaguucccuacuuccugug

SEQ ID NO: 1305820 - RNA, 13 nt, Human
ugcaaauaaauau

SEQ ID NO: 1305821 - RNA, 23 nt, Human
ugcaaauaaauauccuuuaauug

SEQ ID NO: 1305822 - RNA, 17 nt, Human
ugcaaagucaggaauca

SEQ ID NO: 1305823 - RNA, 18 nt, Human
ugcaaagucaggaaucau

SEQ ID NO: 1305824 - RNA, 16 nt, Human
ugcaaagaaagaaaaa

SEQ ID NO: 1305825 - RNA, 22 nt, Human
ugcaaagaaagaaaaaaaacca

SEQ ID NO: 1305826 - RNA, 23 nt, Human
ugcaaagaaagaaaaaaaaccau

SEQ ID NO: 1305827 - RNA, 23 nt, Human
ugcaaagaucuguccucagccuu

SEQ ID NO: 1305828 - RNA, 12 nt, Human
ugcaaagaucug

SEQ ID NO: 1305829 - RNA, 18 nt, Human
agaugcaguucugaagaa

SEQ ID NO: 1305830 - RNA, 19 nt, Human
agaugcaguucugaagaag

SEQ ID NO: 1305831 - RNA, 20 nt, Human
agaugcaguucugaagaaga

SEQ ID NO: 1305832 - RNA, 13 nt, Human
agaugccucccug

SEQ ID NO: 1305833 - RNA, 13 nt, Human
agaugccuccuuc

SEQ ID NO: 1305834 - RNA, 16 nt, Human
agaugccuccuuccuc

SEQ ID NO: 1305835 - RNA, 15 nt, Human
agaugcuagaacucc

SEQ ID NO: 1305836 - RNA, 14 nt, Human
agaugcuagaacuc

SEQ ID NO: 1305837 - RNA, 20 nt, Human
agaugcuggcccagggccca

SEQ ID NO: 1305838 - RNA, 21 nt, Human
agaugcuggcccagggcccag

SEQ ID NO: 1305839 - RNA, 22 nt, Human
agaugcuggcccagggcccaga

SEQ ID NO: 1305840 - RNA, 23 nt, Human
agaugcuggcccagggcccagag

SEQ ID NO: 1305841 - RNA, 17 nt, Human
agaugcuggcuugggca

SEQ ID NO: 1305842 - RNA, 19 nt, Human
agaugcuggcuugggcagc

SEQ ID NO: 1305843 - RNA, 18 nt, Human
agaugcuggcuugggcag

SEQ ID NO: 1305844 - RNA, 15 nt, Human
agaugcacuuugcuu

SEQ ID NO: 1305845 - RNA, 22 nt, Human
agaugcacuuugcuuuaauaua

SEQ ID NO: 1305846 - RNA, 19 nt, Human
agaugcacuuugcuuuaau

SEQ ID NO: 1305847 - RNA, 18 nt, Human
agaucccaacacugccag

SEQ ID NO: 1305848 - RNA, 17 nt, Human
agauccaggagcuccag

SEQ ID NO: 1305849 - RNA, 14 nt, Human
agauccaggagcuc

SEQ ID NO: 1305850 - RNA, 15 nt, Human
agauccaggagcucc

SEQ ID NO: 1305851 - RNA, 16 nt, Human
agauccaggagcucca

SEQ ID NO: 1305852 - RNA, 19 nt, Human
agauccagggacagaggcc

SEQ ID NO: 1305853 - RNA, 22 nt, Human
agauccagggacagaggcccca

SEQ ID NO: 1305854 - RNA, 19 nt, Human
agaucccaacacugccagc

SEQ ID NO: 1305855 - RNA, 20 nt, Human
agaucccaacacugccagca

SEQ ID NO: 1305856 - RNA, 10 nt, Human
agaucccaaa

SEQ ID NO: 1305857 - RNA, 22 nt, Human
agaucccaaguagaaucucagu

SEQ ID NO: 1305858 - RNA, 23 nt, Human
agaugcaccaccaagccaaggga

SEQ ID NO: 1305859 - RNA, 15 nt, Human
ugacccacaugccau

SEQ ID NO: 1305860 - RNA, 14 nt, Human
ugacccacaugcca

SEQ ID NO: 1305861 - RNA, 17 nt, Human
ugacccacaagaaauga

SEQ ID NO: 1305862 - RNA, 20 nt, Human
agauguucuaagucuuucca

SEQ ID NO: 1305863 - RNA, 21 nt, Human
agauguucuaagucuuuccau

SEQ ID NO: 1305864 - RNA, 22 nt, Human
agauguucuaagucuuuccauu

SEQ ID NO: 1305865 - RNA, 16 nt, Human
agaugcugugagucuu

SEQ ID NO: 1305866 - RNA, 20 nt, Human
agaugcugugagucuuuggu

SEQ ID NO: 1305867 - RNA, 15 nt, Human
agaugugauauucua

SEQ ID NO: 1305868 - RNA, 16 nt, Human
agaugugauauucuaa

SEQ ID NO: 1305869 - RNA, 17 nt, Human
agaugugauauucuaag

SEQ ID NO: 1305870 - RNA, 18 nt, Human
agaugugauauucuaaga

SEQ ID NO: 1305871 - RNA, 19 nt, Human
agaugugauauucuaagac

SEQ ID NO: 1305872 - RNA, 20 nt, Human
agaugugauauucuaagacu

SEQ ID NO: 1305873 - RNA, 19 nt, Human
agaugugcagcauuucacu

SEQ ID NO: 1305874 - RNA, 15 nt, Human
agauguucacccaac

SEQ ID NO: 1305875 - RNA, 17 nt, Human
agauguucuaagucuuu

SEQ ID NO: 1305876 - RNA, 12 nt, Human
agaucauuguga

SEQ ID NO: 1305877 - RNA, 18 nt, Human
agaucaguguaccauuug

SEQ ID NO: 1305878 - RNA, 21 nt, Human
agaucaguguaccauuugccu

SEQ ID NO: 1305879 - RNA, 15 nt, Human
agaucaguaaagaac

SEQ ID NO: 1305880 - RNA, 13 nt, Human
agaucauaaggcu

SEQ ID NO: 1305881 - RNA, 16 nt, Human
agaucauaaggcuuca

SEQ ID NO: 1305882 - RNA, 19 nt, Human
agaucaggaagagaaggag

SEQ ID NO: 1305883 - RNA, 18 nt, Human
agaucaggaagagaagga

SEQ ID NO: 1305884 - RNA, 15 nt, Human
ugaccaaugucuuga

SEQ ID NO: 1305885 - RNA, 13 nt, Human
agaucaguaaaga

SEQ ID NO: 1305886 - RNA, 15 nt, Human
agaucaguguaccau

SEQ ID NO: 1305887 - RNA, 17 nt, Human
agaucaggaagagaagg

SEQ ID NO: 1305888 - RNA, 13 nt, Human
agaucaggaagag

SEQ ID NO: 1305889 - RNA, 13 nt, Human
ugaccaaugucuu

SEQ ID NO: 1305890 - RNA, 14 nt, Human
ugaccaaugucuug

SEQ ID NO: 1305891 - RNA, 16 nt, Human
ugacauaaaguugaua

SEQ ID NO: 1305892 - RNA, 14 nt, Human
ugacauaaaguuga

SEQ ID NO: 1305893 - RNA, 15 nt, Human
ugacauuuauauauu

SEQ ID NO: 1305894 - RNA, 16 nt, Human
ugacauuuauauauug

SEQ ID NO: 1305895 - RNA, 19 nt, Human
ugacauuuauauauugaau

SEQ ID NO: 1305896 - RNA, 16 nt, Human
ugacacaccaggcgcu

SEQ ID NO: 1305897 - RNA, 22 nt, Human
ugacacaccaggcgcuaauuca

SEQ ID NO: 1305898 - RNA, 23 nt, Human
ugacacaccaggcgcuaauucaa

SEQ ID NO: 1305899 - RNA, 12 nt, Human
ugacacacuaac

SEQ ID NO: 1305900 - RNA, 20 nt, Human
ugacacacuaaccaagcuga

SEQ ID NO: 1305901 - RNA, 18 nt, Human
ugacacagaaaauguuga

SEQ ID NO: 1305902 - RNA, 19 nt, Human
ugacacagaaaauguugag

SEQ ID NO: 1305903 - RNA, 23 nt, Human
ugacacagaaaauguugagaauc

SEQ ID NO: 1305904 - RNA, 22 nt, Human
ugacagcuaggaugugcauucu

SEQ ID NO: 1305905 - RNA, 20 nt, Human
ugacagcuaggaugugcauu

SEQ ID NO: 1305906 - RNA, 14 nt, Human
ugacaggccugucc

SEQ ID NO: 1305907 - RNA, 18 nt, Human
ugacaguggaacuacauu

SEQ ID NO: 1305908 - RNA, 16 nt, Human
ugacaguggaacuaca

SEQ ID NO: 1305909 - RNA, 16 nt, Human
ugacaguguugaaaau

SEQ ID NO: 1305910 - RNA, 19 nt, Human
ugacaguguugaaaauguu

SEQ ID NO: 1305911 - RNA, 14 nt, Human
ugacaguguuuuua

SEQ ID NO: 1305912 - RNA, 18 nt, Human
ugacaguggcguuuguaa

SEQ ID NO: 1305913 - RNA, 16 nt, Human
agaguuuagcuggaaa

SEQ ID NO: 1305914 - RNA, 17 nt, Human
agaguuuagcuggaaaa

SEQ ID NO: 1305915 - RNA, 14 nt, Human
agaguuuaaaauca

SEQ ID NO: 1305916 - RNA, 20 nt, Human
agaguugaugguuguacaua

SEQ ID NO: 1305917 - RNA, 21 nt, Human
agaguugcugagagggcucga

SEQ ID NO: 1305918 - RNA, 13 nt, Human
agaguuggccaua

SEQ ID NO: 1305919 - RNA, 15 nt, Human
agaguuggccauauu

SEQ ID NO: 1305920 - RNA, 14 nt, Human
agagugaacaaauu

SEQ ID NO: 1305921 - RNA, 23 nt, Human
agagucuggugaagcucacuucu

SEQ ID NO: 1305922 - RNA, 12 nt, Human
agagucugaaca

SEQ ID NO: 1305923 - RNA, 13 nt, Human
agagucugaacag

SEQ ID NO: 1305924 - RNA, 16 nt, Human
agagucugaacagcug

SEQ ID NO: 1305925 - RNA, 17 nt, Human
agagucugaacagcugu

SEQ ID NO: 1305926 - RNA, 16 nt, Human
agagucugaaccuauu

SEQ ID NO: 1305927 - RNA, 23 nt, Human
agagucuggauaacuuccacagg

SEQ ID NO: 1305928 - RNA, 18 nt, Human
agagucuggugaagcuca

SEQ ID NO: 1305929 - RNA, 21 nt, Human
ugaagcaaaugucaugcugcc

SEQ ID NO: 1305930 - RNA, 22 nt, Human
ugaagcaaaugucaugcugccu

SEQ ID NO: 1305931 - RNA, 15 nt, Human
ugaauguaaauuugu

SEQ ID NO: 1305932 - RNA, 16 nt, Human
ugaauguaaauuugua

SEQ ID NO: 1305933 - RNA, 18 nt, Human
ugaauguaaauuuguacu

SEQ ID NO: 1305934 - RNA, 19 nt, Human
ugaauguaaauuuguacua

SEQ ID NO: 1305935 - RNA, 20 nt, Human
ugaauguaaauuuguacuau

SEQ ID NO: 1305936 - RNA, 13 nt, Human
ugaaugugaagcc

SEQ ID NO: 1305937 - RNA, 14 nt, Human
ugaaugugaagccu

SEQ ID NO: 1305938 - RNA, 15 nt, Human
ugaaugugaagccuu

SEQ ID NO: 1305939 - RNA, 16 nt, Human
ugaaugugaagccuuc

SEQ ID NO: 1305940 - RNA, 17 nt, Human
ugaaugugaagccuucc

SEQ ID NO: 1305941 - RNA, 23 nt, Human
agaguccaucagccuccauccua

SEQ ID NO: 1305942 - RNA, 19 nt, Human
agaguccaagguuuaaaga

SEQ ID NO: 1305943 - RNA, 21 nt, Human
agaguccaagguuuaaagagu

SEQ ID NO: 1305944 - RNA, 14 nt, Human
agagucccugccug

SEQ ID NO: 1305945 - RNA, 17 nt, Human
agagucccugccuggac

SEQ ID NO: 1305946 - RNA, 19 nt, Human
agagucccagguuggcucu

SEQ ID NO: 1305947 - RNA, 20 nt, Human
agagucccagguuggcucug

SEQ ID NO: 1305948 - RNA, 18 nt, Human
ugaauguggcuugagaaa

SEQ ID NO: 1305949 - RNA, 16 nt, Human
ugaauguguuucacag

SEQ ID NO: 1305950 - RNA, 20 nt, Human
ugaauguguuucacaguuug

SEQ ID NO: 1305951 - RNA, 17 nt, Human
ugaauguguuucacagu

SEQ ID NO: 1305952 - RNA, 12 nt, Human
agauacugaaau

SEQ ID NO: 1305953 - RNA, 18 nt, Human
agauacuaaggacguugu

SEQ ID NO: 1305954 - RNA, 13 nt, Human
agauacugaaaua

SEQ ID NO: 1305955 - RNA, 15 nt, Human
agauacugaaauaaa

SEQ ID NO: 1305956 - RNA, 17 nt, Human
agauaaagguucaugca

SEQ ID NO: 1305957 - RNA, 17 nt, Human
agauaugggacauuuuu

SEQ ID NO: 1305958 - RNA, 11 nt, Human
agauauuaaug

SEQ ID NO: 1305959 - RNA, 15 nt, Human
agauauuaccaguuu

SEQ ID NO: 1305960 - RNA, 17 nt, Human
agauauuaaugcccaga

SEQ ID NO: 1305961 - RNA, 18 nt, Human
agauauuaaugcccagac

SEQ ID NO: 1305962 - RNA, 18 nt, Human
agauauuccuauugugca

SEQ ID NO: 1305963 - RNA, 14 nt, Human
agauauuggacaaa

SEQ ID NO: 1305964 - RNA, 17 nt, Human
agauauuggacaaagaa

SEQ ID NO: 1305965 - RNA, 16 nt, Human
agauauuggacaaaga

SEQ ID NO: 1305966 - RNA, 11 nt, Human
ugaauuucauc

SEQ ID NO: 1305967 - RNA, 16 nt, Human
ugaauuuuacauggcu

SEQ ID NO: 1305968 - RNA, 13 nt, Human
ugaauuucacugu

SEQ ID NO: 1305969 - RNA, 13 nt, Human
ugaauuuuagcuu

SEQ ID NO: 1305970 - RNA, 21 nt, Human
agaucaccaguguguggcuuu

SEQ ID NO: 1305971 - RNA, 14 nt, Human
ugaauuuuagcuuu

SEQ ID NO: 1305972 - RNA, 15 nt, Human
ugaauuuuagcuuuu

SEQ ID NO: 1305973 - RNA, 19 nt, Human
ugaauuuuagcuuuugugg

SEQ ID NO: 1305974 - RNA, 16 nt, Human
ugaauuuuagcuuuug

SEQ ID NO: 1305975 - RNA, 18 nt, Human
agauacucuuauuuuacu

SEQ ID NO: 1305976 - RNA, 15 nt, Human
ugaauuuuuuuuaac

SEQ ID NO: 1305977 - RNA, 16 nt, Human
ugaauuuuuuuuaaca

SEQ ID NO: 1305978 - RNA, 17 nt, Human
ugaauuuuuuuuaacau

SEQ ID NO: 1305979 - RNA, 18 nt, Human
ugaauuuuuuuuaacauu

SEQ ID NO: 1305980 - RNA, 19 nt, Human
ugaauuuuuuuuaacauuc

SEQ ID NO: 1305981 - RNA, 20 nt, Human
ugaauuuuuuuuaacauucc

SEQ ID NO: 1305982 - RNA, 21 nt, Human
ugaauuuuuuuuaacauuccu

SEQ ID NO: 1305983 - RNA, 16 nt, Human
ugaauuuuuuuuuccu

SEQ ID NO: 1305984 - RNA, 19 nt, Human
ugaauuuuuuuuuccuagc

SEQ ID NO: 1305985 - RNA, 20 nt, Human
ugaauuuuuuuuuccuagcc

SEQ ID NO: 1305986 - RNA, 22 nt, Human
ugaauuuuuuuuaacauuccuc

SEQ ID NO: 1305987 - RNA, 19 nt, Human
ugacaaaaaauuaaagcau

SEQ ID NO: 1305988 - RNA, 12 nt, Human
agagguuuuaaa

SEQ ID NO: 1305989 - RNA, 22 nt, Human
agagguuugacuagaugaugga

SEQ ID NO: 1305990 - RNA, 15 nt, Human
agagguuugcagucc

SEQ ID NO: 1305991 - RNA, 17 nt, Human
agagguuugcaguccca

SEQ ID NO: 1305992 - RNA, 20 nt, Human
agagguuugcagucccaagc

SEQ ID NO: 1305993 - RNA, 15 nt, Human
agaguagaauugcau

SEQ ID NO: 1305994 - RNA, 16 nt, Human
agaguagaauugcauu

SEQ ID NO: 1305995 - RNA, 22 nt, Human
ugaagcacagugaucaaguuau

SEQ ID NO: 1305996 - RNA, 23 nt, Human
ugaagcaaaugucaugcugccuu

SEQ ID NO: 1305997 - RNA, 20 nt, Human
ugaagcaaaucgaaugaaau

SEQ ID NO: 1305998 - RNA, 20 nt, Human
ugaagcaaaugucaugcugc

SEQ ID NO: 1305999 - RNA, 17 nt, Human
agaguagaauugcauug

SEQ ID NO: 1306000 - RNA, 18 nt, Human
agaguagaauugcauuga

SEQ ID NO: 1306001 - RNA, 22 nt, Human
ugaagcaaacucuaaaauuaua

SEQ ID NO: 1306002 - RNA, 15 nt, Human
agagguugcagugag

SEQ ID NO: 1306003 - RNA, 14 nt, Human
agagguugucugug

SEQ ID NO: 1306004 - RNA, 19 nt, Human
agagguccacaacacacag

SEQ ID NO: 1306005 - RNA, 13 nt, Human
agaggcugaggac

SEQ ID NO: 1306006 - RNA, 14 nt, Human
agaggcugaggccu

SEQ ID NO: 1306007 - RNA, 17 nt, Human
agaggcugaggccugga

SEQ ID NO: 1306008 - RNA, 18 nt, Human
agaggcugaggccuggac

SEQ ID NO: 1306009 - RNA, 19 nt, Human
agaggcugaggccuggacu

SEQ ID NO: 1306010 - RNA, 16 nt, Human
agaggcugaggcuggc

SEQ ID NO: 1306011 - RNA, 17 nt, Human
agagguauuuaucuuua

SEQ ID NO: 1306012 - RNA, 11 nt, Human
agaggcagccc

SEQ ID NO: 1306013 - RNA, 13 nt, Human
agaggcagcccag

SEQ ID NO: 1306014 - RNA, 14 nt, Human
agaggcagcccagg

SEQ ID NO: 1306015 - RNA, 16 nt, Human
agaggcagcccgcaca

SEQ ID NO: 1306016 - RNA, 19 nt, Human
agaggcagcccaggaaguc

SEQ ID NO: 1306017 - RNA, 21 nt, Human
agaggccauucuuucccaaca

SEQ ID NO: 1306018 - RNA, 15 nt, Human
agaggcccaggcugc

SEQ ID NO: 1306019 - RNA, 16 nt, Human
agaggcccaggcugcc

SEQ ID NO: 1306020 - RNA, 17 nt, Human
agaggcccaggcugccg

SEQ ID NO: 1306021 - RNA, 18 nt, Human
agaggcccaggcugccgu

SEQ ID NO: 1306022 - RNA, 19 nt, Human
agaggcccaggcugccguc

SEQ ID NO: 1306023 - RNA, 19 nt, Human
agaggcuauuauuuucacu

SEQ ID NO: 1306024 - RNA, 10 nt, Human
agaggcucag

SEQ ID NO: 1306025 - RNA, 18 nt, Human
agaggcucagauuguaau

SEQ ID NO: 1306026 - RNA, 22 nt, Human
agaggcucguugacuggcugug

SEQ ID NO: 1306027 - RNA, 22 nt, Human
agagcuggagaugaggccagac

SEQ ID NO: 1306028 - RNA, 23 nt, Human
agagcuggagaugaggccagacc

SEQ ID NO: 1306029 - RNA, 12 nt, Human
agagcuggcucu

SEQ ID NO: 1306030 - RNA, 21 nt, Human
agagcuggagaugaggccaga

SEQ ID NO: 1306031 - RNA, 15 nt, Human
agagcuuaacagugu

SEQ ID NO: 1306032 - RNA, 12 nt, Human
agagcuucccug

SEQ ID NO: 1306033 - RNA, 16 nt, Human
ugaacuuugcugagcc

SEQ ID NO: 1306034 - RNA, 17 nt, Human
ugaacuuuuuauugauu

SEQ ID NO: 1306035 - RNA, 15 nt, Human
ugaagaaaaucacuu

SEQ ID NO: 1306036 - RNA, 21 nt, Human
ugaagaaaaucacuuaggaaa

SEQ ID NO: 1306037 - RNA, 15 nt, Human
ugaacuuugcugagc

SEQ ID NO: 1306038 - RNA, 11 nt, Human
ugaacuuugcu

SEQ ID NO: 1306039 - RNA, 21 nt, Human
ugaacuaggauuguaguccca

SEQ ID NO: 1306040 - RNA, 17 nt, Human
ugaaccuuugugcccua

SEQ ID NO: 1306041 - RNA, 21 nt, Human
ugaaccuuugugcccuaucac

SEQ ID NO: 1306042 - RNA, 18 nt, Human
ugaaccuuugugcccuau

SEQ ID NO: 1306043 - RNA, 17 nt, Human
ugaacuaggcugagcaa

SEQ ID NO: 1306044 - RNA, 18 nt, Human
ugaacuaggcugagcaau

SEQ ID NO: 1306045 - RNA, 23 nt, Human
ugaacuaggguggugcauuuuug

SEQ ID NO: 1306046 - RNA, 14 nt, Human
ugaacucaaacuga

SEQ ID NO: 1306047 - RNA, 16 nt, Human
ugaacucaaacugagg

SEQ ID NO: 1306048 - RNA, 17 nt, Human
ugaacucaaacugagga

SEQ ID NO: 1306049 - RNA, 18 nt, Human
ugaacucaaacugaggaa

SEQ ID NO: 1306050 - RNA, 17 nt, Human
ugaacucaacuuugaca

SEQ ID NO: 1306051 - RNA, 18 nt, Human
ugaacucacuuuccuccu

SEQ ID NO: 1306052 - RNA, 20 nt, Human
ugaacaaauuuacagagaca

SEQ ID NO: 1306053 - RNA, 19 nt, Human
ugaacaaauuuacagagac

SEQ ID NO: 1306054 - RNA, 12 nt, Human
ugaaccugaaua

SEQ ID NO: 1306055 - RNA, 18 nt, Human
ugaaccugaugaaaauaa

SEQ ID NO: 1306056 - RNA, 23 nt, Human
ugaaccugaugaaaauaaagaau

SEQ ID NO: 1306057 - RNA, 12 nt, Human
ugaaccugcccu

SEQ ID NO: 1306058 - RNA, 16 nt, Human
agagcacugcuccagu

SEQ ID NO: 1306059 - RNA, 12 nt, Human
agagcacugcuc

SEQ ID NO: 1306060 - RNA, 15 nt, Human
agagcacugccacca

SEQ ID NO: 1306061 - RNA, 18 nt, Human
agagcacugccaccagua

SEQ ID NO: 1306062 - RNA, 17 nt, Human
agagcaccugcugucug

SEQ ID NO: 1306063 - RNA, 17 nt, Human
agagauuuuuuuuuaaa

SEQ ID NO: 1306064 - RNA, 20 nt, Human
agagauuuuuuuuuaaagaa

SEQ ID NO: 1306065 - RNA, 21 nt, Human
agagauuuuuuuuuaaagaag

SEQ ID NO: 1306066 - RNA, 18 nt, Human
agagcaaaauaauuuuaa

SEQ ID NO: 1306067 - RNA, 15 nt, Human
agagauuuucaacau

SEQ ID NO: 1306068 - RNA, 21 nt, Human
agagauuuucaacauuucaaa

SEQ ID NO: 1306069 - RNA, 13 nt, Human
agagauuuuucau

SEQ ID NO: 1306070 - RNA, 16 nt, Human
agagacagcccaggau

SEQ ID NO: 1306071 - RNA, 18 nt, Human
agagacagcccaggauac

SEQ ID NO: 1306072 - RNA, 22 nt, Human
ucuuuggagaaaugcuuagaaa

SEQ ID NO: 1306073 - RNA, 14 nt, Human
ucuuuggcuccccu

SEQ ID NO: 1306074 - RNA, 22 nt, Human
ucuuuggcuccccuguaccuuu

SEQ ID NO: 1306075 - RNA, 12 nt, Human
agagcagagguc

SEQ ID NO: 1306076 - RNA, 17 nt, Human
agagcagacuacagcug

SEQ ID NO: 1306077 - RNA, 22 nt, Human
agagcagggauuaaccucugca

SEQ ID NO: 1306078 - RNA, 24 nt, Human
agagcagggauuaaccucugcacu

SEQ ID NO: 1306079 - RNA, 18 nt, Human
agagcaggugcuggcucu

SEQ ID NO: 1306080 - RNA, 17 nt, Human
agagcaggugagauggg

SEQ ID NO: 1306081 - RNA, 20 nt, Human
agagcagugaagacuagaaa

SEQ ID NO: 1306082 - RNA, 15 nt, Human
agagccacugccauu

SEQ ID NO: 1306083 - RNA, 12 nt, Human
agagcagugcuu

SEQ ID NO: 1306084 - RNA, 13 nt, Human
agagcagugcuuu

SEQ ID NO: 1306085 - RNA, 15 nt, Human
agagcagugcuuuug

SEQ ID NO: 1306086 - RNA, 11 nt, Human
agagccacagu

SEQ ID NO: 1306087 - RNA, 15 nt, Human
agagccaccaagagg

SEQ ID NO: 1306088 - RNA, 19 nt, Human
agagccaccaagagggacg

SEQ ID NO: 1306089 - RNA, 19 nt, Human
ugaaauuuuaaaaauuguu

SEQ ID NO: 1306090 - RNA, 14 nt, Human
ugaaauuuuaaccu

SEQ ID NO: 1306091 - RNA, 20 nt, Human
ugaaauuuuaaccuaugaua

SEQ ID NO: 1306092 - RNA, 22 nt, Human
ugaaauuuuaaccuaugauauu

SEQ ID NO: 1306093 - RNA, 16 nt, Human
ugaaauuuuauaugcu

SEQ ID NO: 1306094 - RNA, 18 nt, Human
ugaaauuuuauaugcuua

SEQ ID NO: 1306095 - RNA, 22 nt, Human
ugaaauuuuauaugcuuacuga

SEQ ID NO: 1306096 - RNA, 15 nt, Human
ugaaauuguauuaca

SEQ ID NO: 1306097 - RNA, 18 nt, Human
ugaaauauuauguuaaaa

SEQ ID NO: 1306098 - RNA, 20 nt, Human
ugaaauaugauguuaaaaaa

SEQ ID NO: 1306099 - RNA, 16 nt, Human
ugaaauaugauguuaa

SEQ ID NO: 1306100 - RNA, 17 nt, Human
ugaaauauguauaacuu

SEQ ID NO: 1306101 - RNA, 23 nt, Human
ugaaauauguauaacuuuaacuu

SEQ ID NO: 1306102 - RNA, 22 nt, Human
ugaaauaagcuauuugauguaa

SEQ ID NO: 1306103 - RNA, 13 nt, Human
ugaaauaagcuau

SEQ ID NO: 1306104 - RNA, 14 nt, Human
ugaaauaagcuauu

SEQ ID NO: 1306105 - RNA, 16 nt, Human
ugaaauaagcuauuug

SEQ ID NO: 1306106 - RNA, 13 nt, Human
ugaaauaaugugu

SEQ ID NO: 1306107 - RNA, 14 nt, Human
ugaaauaaugugua

SEQ ID NO: 1306108 - RNA, 16 nt, Human
ugaaauaauguguagu

SEQ ID NO: 1306109 - RNA, 23 nt, Human
ugaaauaauguguaguucaugua

SEQ ID NO: 1306110 - RNA, 22 nt, Human
ugaaauaauguguaguucaugu

SEQ ID NO: 1306111 - RNA, 14 nt, Human
ugaaauauauuuaa

SEQ ID NO: 1306112 - RNA, 15 nt, Human
ugaaauauccugcuu

SEQ ID NO: 1306113 - RNA, 17 nt, Human
ugaaauauccugcuuga

SEQ ID NO: 1306114 - RNA, 18 nt, Human
agagcgugagcugagcag

SEQ ID NO: 1306115 - RNA, 19 nt, Human
agagcgagagaucaaagau

SEQ ID NO: 1306116 - RNA, 14 nt, Human
agagcgcacaggga

SEQ ID NO: 1306117 - RNA, 16 nt, Human
agagcgugagcugagc

SEQ ID NO: 1306118 - RNA, 20 nt, Human
agagcgugagcugagcaggc

SEQ ID NO: 1306119 - RNA, 23 nt, Human
ugaaauaagccagacaucaacag

SEQ ID NO: 1306120 - RNA, 20 nt, Human
ugaaauaagccagacaucaa

SEQ ID NO: 1306121 - RNA, 18 nt, Human
ugaaauaagccagacauc

SEQ ID NO: 1306122 - RNA, 17 nt, Human
ugaaauaagccagacau

SEQ ID NO: 1306123 - RNA, 15 nt, Human
ugaaaguuaauccac

SEQ ID NO: 1306124 - RNA, 19 nt, Human
ugaaagugggcaaaagcuu

SEQ ID NO: 1306125 - RNA, 22 nt, Human
ucugucccccuuuagaucucug

SEQ ID NO: 1306126 - RNA, 19 nt, Human
ucugugaagugagaccuuc

SEQ ID NO: 1306127 - RNA, 20 nt, Human
ucugugaagugagaccuucc

SEQ ID NO: 1306128 - RNA, 16 nt, Human
ucugugaccaaugucu

SEQ ID NO: 1306129 - RNA, 18 nt, Human
ucugugaccaaugucuug

SEQ ID NO: 1306130 - RNA, 20 nt, Human
ucuguauuuccccaacaugu

SEQ ID NO: 1306131 - RNA, 23 nt, Human
ucuguauuuccccaacauguaau

SEQ ID NO: 1306132 - RNA, 15 nt, Human
ucuguccccagccug

SEQ ID NO: 1306133 - RNA, 16 nt, Human
ucuguccccagccugg

SEQ ID NO: 1306134 - RNA, 23 nt, Human
ucugucccccuuuagaucucuga

SEQ ID NO: 1306135 - RNA, 23 nt, Human
ucugguaugaacuugaggacaca

SEQ ID NO: 1306136 - RNA, 22 nt, Human
ucugguaugaacuugaggacac

SEQ ID NO: 1306137 - RNA, 20 nt, Human
ucugguaggaauagcauguc

SEQ ID NO: 1306138 - RNA, 23 nt, Human
ucugguagaagggaaagcccaua

SEQ ID NO: 1306139 - RNA, 17 nt, Human
ucuguacugauucaauu

SEQ ID NO: 1306140 - RNA, 16 nt, Human
ucuguacugauucaau

SEQ ID NO: 1306141 - RNA, 15 nt, Human
ucuguacugauucaa

SEQ ID NO: 1306142 - RNA, 23 nt, Human
ucuguacugauucaauuugaugu

SEQ ID NO: 1306143 - RNA, 15 nt, Human
ucuguauauacuuuu

SEQ ID NO: 1306144 - RNA, 20 nt, Human
ucuguaucaggacccagagg

SEQ ID NO: 1306145 - RNA, 19 nt, Human
ucuguucuuccucagccag

SEQ ID NO: 1306146 - RNA, 18 nt, Human
ucuguucuuccucagcca

SEQ ID NO: 1306147 - RNA, 17 nt, Human
ucuguucugcacacagc

SEQ ID NO: 1306148 - RNA, 18 nt, Human
ucuguucugcacacagca

SEQ ID NO: 1306149 - RNA, 19 nt, Human
ucuguucugcacacagcac

SEQ ID NO: 1306150 - RNA, 16 nt, Human
ucuguucuguuucaag

SEQ ID NO: 1306151 - RNA, 15 nt, Human
ucuguucuuccucag

SEQ ID NO: 1306152 - RNA, 17 nt, Human
ucuguucuuccucagcc

SEQ ID NO: 1306153 - RNA, 19 nt, Human
ucugugaccaaugucuuga

SEQ ID NO: 1306154 - RNA, 13 nt, Human
ucugugccagagc

SEQ ID NO: 1306155 - RNA, 15 nt, Human
ucugugccagagccu

SEQ ID NO: 1306156 - RNA, 16 nt, Human
ucugugccagagccug

SEQ ID NO: 1306157 - RNA, 17 nt, Human
ucugugccagagccugg

SEQ ID NO: 1306158 - RNA, 18 nt, Human
ucugugccagagccuggg

SEQ ID NO: 1306159 - RNA, 19 nt, Human
ucugugccagagccugggg

SEQ ID NO: 1306160 - RNA, 20 nt, Human
ucugugccagagccuggggc

SEQ ID NO: 1306161 - RNA, 23 nt, Human
ucugugccagagccuggggcucu

SEQ ID NO: 1306162 - RNA, 22 nt, Human
ucugugccagagccuggggcuc

SEQ ID NO: 1306163 - RNA, 14 nt, Human
ucugugcuguuuca

SEQ ID NO: 1306164 - RNA, 18 nt, Human
ucugugcuguuucaaagu

SEQ ID NO: 1306165 - RNA, 19 nt, Human
ucuguggagguggaaaagc

SEQ ID NO: 1306166 - RNA, 23 nt, Human
ucugugggaugggaugguggagg

SEQ ID NO: 1306167 - RNA, 14 nt, Human
agaauuacuguaac

SEQ ID NO: 1306168 - RNA, 20 nt, Human
agaauuccaggguauggcca

SEQ ID NO: 1306169 - RNA, 12 nt, Human
ucugggcucuga

SEQ ID NO: 1306170 - RNA, 14 nt, Human
ucugggcucugagu

SEQ ID NO: 1306171 - RNA, 11 nt, Human
ucugggcugga

SEQ ID NO: 1306172 - RNA, 19 nt, Human
ucugggcuggaugagcucc

SEQ ID NO: 1306173 - RNA, 20 nt, Human
ucugggcuggaugagcuccc

SEQ ID NO: 1306174 - RNA, 19 nt, Human
ucugggcugucuauucuag

SEQ ID NO: 1306175 - RNA, 14 nt, Human
ucugggcugugggc

SEQ ID NO: 1306176 - RNA, 20 nt, Human
ucugggcuuauaucuggccu

SEQ ID NO: 1306177 - RNA, 21 nt, Human
ucugggcuuauaucuggccuc

SEQ ID NO: 1306178 - RNA, 13 nt, Human
ucugggcuuccug

SEQ ID NO: 1306179 - RNA, 14 nt, Human
ucugggcuuccugg

SEQ ID NO: 1306180 - RNA, 15 nt, Human
ucugggcuuccugga

SEQ ID NO: 1306181 - RNA, 22 nt, Human
ucuggguuccuuccucugagcc

SEQ ID NO: 1306182 - RNA, 23 nt, Human
ucuggguuccuuccucugagccu

SEQ ID NO: 1306183 - RNA, 15 nt, Human
ucuggguugccuuua

SEQ ID NO: 1306184 - RNA, 21 nt, Human
ucugguaauauugacuuguau

SEQ ID NO: 1306185 - RNA, 22 nt, Human
ucugguaauauugacuuguaua

SEQ ID NO: 1306186 - RNA, 18 nt, Human
ucugguagaagggaaagc

SEQ ID NO: 1306187 - RNA, 21 nt, Human
ucugguagaagggaaagccca

SEQ ID NO: 1306188 - RNA, 16 nt, Human
ucugggcuuccuggag

SEQ ID NO: 1306189 - RNA, 17 nt, Human
ucugggcuuccuggagc

SEQ ID NO: 1306190 - RNA, 19 nt, Human
ucugggcuuccuggagcag

SEQ ID NO: 1306191 - RNA, 18 nt, Human
ucugggcuuccuggagca

SEQ ID NO: 1306192 - RNA, 18 nt, Human
ucugggggcacaagacug

SEQ ID NO: 1306193 - RNA, 19 nt, Human
ucugggggcacaagacuga

SEQ ID NO: 1306194 - RNA, 15 nt, Human
ucugggggcugagga

SEQ ID NO: 1306195 - RNA, 19 nt, Human
ucugggggcugaggagcag

SEQ ID NO: 1306196 - RNA, 15 nt, Human
ucugggggcugcagu

SEQ ID NO: 1306197 - RNA, 13 nt, Human
ucugggggguggc

SEQ ID NO: 1306198 - RNA, 17 nt, Human
ucugggggguggccagg

SEQ ID NO: 1306199 - RNA, 18 nt, Human
ucugggggguggccaggc

SEQ ID NO: 1306200 - RNA, 19 nt, Human
ucugggggguggccaggcc

SEQ ID NO: 1306201 - RNA, 20 nt, Human
ucugggggguggccaggccg

SEQ ID NO: 1306202 - RNA, 21 nt, Human
ucugggguauggcguaaguac

SEQ ID NO: 1306203 - RNA, 17 nt, Human
ucuggggugggcaguuu

SEQ ID NO: 1306204 - RNA, 13 nt, Human
agaauuacuguaa

SEQ ID NO: 1306205 - RNA, 20 nt, Human
agaauuacuguaacugauua

SEQ ID NO: 1306206 - RNA, 16 nt, Human
agaaugucauuuuggu

SEQ ID NO: 1306207 - RNA, 20 nt, Human
agaaugucauuuugguacuu

SEQ ID NO: 1306208 - RNA, 23 nt, Human
agaaugucauuuugguacuuugg

SEQ ID NO: 1306209 - RNA, 21 nt, Human
agaaugugugucaauuuauaa

SEQ ID NO: 1306210 - RNA, 14 nt, Human
agaauguuaagacu

SEQ ID NO: 1306211 - RNA, 19 nt, Human
agaauguuaagacuugaca

SEQ ID NO: 1306212 - RNA, 21 nt, Human
agaauguuaagacuugacagu

SEQ ID NO: 1306213 - RNA, 14 nt, Human
agaaauuucacaua

SEQ ID NO: 1306214 - RNA, 19 nt, Human
agaacccagcccacccccg

SEQ ID NO: 1306215 - RNA, 19 nt, Human
agaaauucaauuuggauuu

SEQ ID NO: 1306216 - RNA, 22 nt, Human
agaaauucaauuuggauuuaaa

SEQ ID NO: 1306217 - RNA, 17 nt, Human
agaacccagcccacccc

SEQ ID NO: 1306218 - RNA, 17 nt, Human
agaaccccuacaugaaa

SEQ ID NO: 1306219 - RNA, 19 nt, Human
agaaccccuacaugaaaca

SEQ ID NO: 1306220 - RNA, 18 nt, Human
agaacccagcccaccccc

SEQ ID NO: 1306221 - RNA, 12 nt, Human
agacagaaaaaa

SEQ ID NO: 1306222 - RNA, 12 nt, Human
agacagaacacc

SEQ ID NO: 1306223 - RNA, 14 nt, Human
agacagaacaccua

SEQ ID NO: 1306224 - RNA, 18 nt, Human
agacagaacaccuaugca

SEQ ID NO: 1306225 - RNA, 15 nt, Human
agacagaaccacagg

SEQ ID NO: 1306226 - RNA, 19 nt, Human
agacagaaccacagggcua

SEQ ID NO: 1306227 - RNA, 22 nt, Human
agacacgcacggcagccacagc

SEQ ID NO: 1306228 - RNA, 12 nt, Human
agacaccaaagu

SEQ ID NO: 1306229 - RNA, 13 nt, Human
agacacuuuggaa

SEQ ID NO: 1306230 - RNA, 21 nt, Human
agacacgcacggcagccacag

SEQ ID NO: 1306231 - RNA, 20 nt, Human
agacacgcacggcagccaca

SEQ ID NO: 1306232 - RNA, 15 nt, Human
agacacgcacggcag

SEQ ID NO: 1306233 - RNA, 13 nt, Human
agacacgcacggc

SEQ ID NO: 1306234 - RNA, 17 nt, Human
agacagaaccccuacau

SEQ ID NO: 1306235 - RNA, 12 nt, Human
agacagaagaaa

SEQ ID NO: 1306236 - RNA, 14 nt, Human
agacagaagaaaca

SEQ ID NO: 1306237 - RNA, 15 nt, Human
agacagaagaaacaa

SEQ ID NO: 1306238 - RNA, 16 nt, Human
agacagaagaaacaag

SEQ ID NO: 1306239 - RNA, 17 nt, Human
agacagaagaaacaagg

SEQ ID NO: 1306240 - RNA, 13 nt, Human
agacacacuuguc

SEQ ID NO: 1306241 - RNA, 13 nt, Human
agacacaggcccu

SEQ ID NO: 1306242 - RNA, 17 nt, Human
agacacauuuuuuagga

SEQ ID NO: 1306243 - RNA, 20 nt, Human
agacacauuuuuuaggaaau

SEQ ID NO: 1306244 - RNA, 22 nt, Human
agacaccuuggacauccuccuc

SEQ ID NO: 1306245 - RNA, 16 nt, Human
agacacacugaagaag

SEQ ID NO: 1306246 - RNA, 13 nt, Human
agacacaccugag

SEQ ID NO: 1306247 - RNA, 14 nt, Human
agacacaccugagg

SEQ ID NO: 1306248 - RNA, 17 nt, Human
agacacacugaagaagc

SEQ ID NO: 1306249 - RNA, 12 nt, Human
ucuguuucaagg

SEQ ID NO: 1306250 - RNA, 23 nt, Human
ucuguuucaaggcacucuagauu

SEQ ID NO: 1306251 - RNA, 19 nt, Human
ucuuacugucuuuuuucua

SEQ ID NO: 1306252 - RNA, 12 nt, Human
ucuuacugcuug

SEQ ID NO: 1306253 - RNA, 20 nt, Human
ucuuacuuauuaucuucagg

SEQ ID NO: 1306254 - RNA, 15 nt, Human
ucuuacuuggaacug

SEQ ID NO: 1306255 - RNA, 22 nt, Human
ucuuacugcuuaauucaaauaa

SEQ ID NO: 1306256 - RNA, 15 nt, Human
ucuuacuauuucaca

SEQ ID NO: 1306257 - RNA, 13 nt, Human
ucuuacagcaggc

SEQ ID NO: 1306258 - RNA, 22 nt, Human
ucuuaccagaugcuuuccuguu

SEQ ID NO: 1306259 - RNA, 21 nt, Human
ucuuaccuguaugucuccagu

SEQ ID NO: 1306260 - RNA, 23 nt, Human
ucuuaccuguaugucuccaguau

SEQ ID NO: 1306261 - RNA, 23 nt, Human
ucuuagaugcaguucugaagaag

SEQ ID NO: 1306262 - RNA, 13 nt, Human
agacagugauauu

SEQ ID NO: 1306263 - RNA, 19 nt, Human
agacagugauauuggaacu

SEQ ID NO: 1306264 - RNA, 19 nt, Human
ucuuaauguacauagugcu

SEQ ID NO: 1306265 - RNA, 11 nt, Human
ucuuaauugcc

SEQ ID NO: 1306266 - RNA, 14 nt, Human
ucuuaauguacaua

SEQ ID NO: 1306267 - RNA, 13 nt, Human
ucuuaauguacau

SEQ ID NO: 1306268 - RNA, 15 nt, Human
ucuuaauguaucaaa

SEQ ID NO: 1306269 - RNA, 17 nt, Human
ucuuaauguaucaaacu

SEQ ID NO: 1306270 - RNA, 18 nt, Human
ucuuaauguaucaaacug

SEQ ID NO: 1306271 - RNA, 19 nt, Human
ucuuaauugccaccucuaa

SEQ ID NO: 1306272 - RNA, 19 nt, Human
ucuuacaauaauucuauga

SEQ ID NO: 1306273 - RNA, 14 nt, Human
agacaguucaagaa

SEQ ID NO: 1306274 - RNA, 15 nt, Human
agacaguucaagaaa

SEQ ID NO: 1306275 - RNA, 22 nt, Human
agacauuuuaaaaaauggucac

SEQ ID NO: 1306276 - RNA, 19 nt, Human
agacauuuuaaaaaauggu

SEQ ID NO: 1306277 - RNA, 15 nt, Human
agacauggagguucu

SEQ ID NO: 1306278 - RNA, 16 nt, Human
agacauggagguucua

SEQ ID NO: 1306279 - RNA, 17 nt, Human
agacauggagguucuaa

SEQ ID NO: 1306280 - RNA, 19 nt, Human
agacauggagguucuaagg

SEQ ID NO: 1306281 - RNA, 20 nt, Human
agacauggagguucuaaggc

SEQ ID NO: 1306282 - RNA, 21 nt, Human
agacauggagguucuaaggcc

SEQ ID NO: 1306283 - RNA, 14 nt, Human
agacauagaauuaa

SEQ ID NO: 1306284 - RNA, 20 nt, Human
agacauacuugaagggccag

SEQ ID NO: 1306285 - RNA, 21 nt, Human
agacauacuugaagggccaga

SEQ ID NO: 1306286 - RNA, 23 nt, Human
agacauacuugaagggccagagc

SEQ ID NO: 1306287 - RNA, 13 nt, Human
agacaugaagcca

SEQ ID NO: 1306288 - RNA, 15 nt, Human
agacaugauuuccuu

SEQ ID NO: 1306289 - RNA, 22 nt, Human
agacaugauuuccuugaaugug

SEQ ID NO: 1306290 - RNA, 14 nt, Human
agacaugcagagau

SEQ ID NO: 1306291 - RNA, 15 nt, Human
agacaugcagagauu

SEQ ID NO: 1306292 - RNA, 23 nt, Human
agacaugccacaaggacuuccug

SEQ ID NO: 1306293 - RNA, 24 nt, Human
ucuucuuaauguacauagugcuaa

SEQ ID NO: 1306294 - RNA, 16 nt, Human
ucuucuuaauguacau

SEQ ID NO: 1306295 - RNA, 17 nt, Human
ucuucuuaauguacaua

SEQ ID NO: 1306296 - RNA, 12 nt, Human
ucuucuuaugca

SEQ ID NO: 1306297 - RNA, 13 nt, Human
ucuucuucaccau

SEQ ID NO: 1306298 - RNA, 14 nt, Human
ucuucuucaccauu

SEQ ID NO: 1306299 - RNA, 15 nt, Human
ucuucuucaccauuu

SEQ ID NO: 1306300 - RNA, 14 nt, Human
ucuucuuccaggua

SEQ ID NO: 1306301 - RNA, 22 nt, Human
ucuucuucucguccucguuugu

SEQ ID NO: 1306302 - RNA, 13 nt, Human
ucuucuugaaauu

SEQ ID NO: 1306303 - RNA, 17 nt, Human
ucuucuugaaauuuuaa

SEQ ID NO: 1306304 - RNA, 13 nt, Human
agacauacuugaa

SEQ ID NO: 1306305 - RNA, 14 nt, Human
agacauacuugaag

SEQ ID NO: 1306306 - RNA, 16 nt, Human
agacauacuugaaggg

SEQ ID NO: 1306307 - RNA, 17 nt, Human
agacauacuugaagggc

SEQ ID NO: 1306308 - RNA, 19 nt, Human
agacauacuugaagggcca

SEQ ID NO: 1306309 - RNA, 18 nt, Human
ucuucugaauaaagcaau

SEQ ID NO: 1306310 - RNA, 15 nt, Human
ucuucugagcacugu

SEQ ID NO: 1306311 - RNA, 19 nt, Human
ucuucugagcuauuucauc

SEQ ID NO: 1306312 - RNA, 21 nt, Human
ucuucugagcuauuucaucua

SEQ ID NO: 1306313 - RNA, 16 nt, Human
ucuucugagcacuguu

SEQ ID NO: 1306314 - RNA, 17 nt, Human
ucuucugaauaaagcaa

SEQ ID NO: 1306315 - RNA, 16 nt, Human
ucuuauuucaugaaaa

SEQ ID NO: 1306316 - RNA, 18 nt, Human
ucuuauuucaugaaaauu

SEQ ID NO: 1306317 - RNA, 15 nt, Human
ucuuauucauuuucu

SEQ ID NO: 1306318 - RNA, 16 nt, Human
ucuuauucauuuucuc

SEQ ID NO: 1306319 - RNA, 20 nt, Human
ucuuauucccuuccugccag

SEQ ID NO: 1306320 - RNA, 14 nt, Human
ucuuauuucaugaa

SEQ ID NO: 1306321 - RNA, 23 nt, Human
ucuucugcauuuuucagagaaua

SEQ ID NO: 1306322 - RNA, 18 nt, Human
ucuucuggacugguuuuc

SEQ ID NO: 1306323 - RNA, 17 nt, Human
ucuucugggagggcagc

SEQ ID NO: 1306324 - RNA, 20 nt, Human
ucuucugggagggcagcagg

SEQ ID NO: 1306325 - RNA, 15 nt, Human
agaccgaucggcggc

SEQ ID NO: 1306326 - RNA, 17 nt, Human
agacccuuuuggguuuc

SEQ ID NO: 1306327 - RNA, 19 nt, Human
agacccuuuuggguuucug

SEQ ID NO: 1306328 - RNA, 15 nt, Human
agaccggccugccag

SEQ ID NO: 1306329 - RNA, 17 nt, Human
agaccggccugccagga

SEQ ID NO: 1306330 - RNA, 18 nt, Human
agaccggccugccaggag

SEQ ID NO: 1306331 - RNA, 19 nt, Human
agaccggccugccaggagg

SEQ ID NO: 1306332 - RNA, 20 nt, Human
agaccggccugccaggagga

SEQ ID NO: 1306333 - RNA, 23 nt, Human
agaccggccugccaggaggaccc

SEQ ID NO: 1306334 - RNA, 20 nt, Human
agacauuuuaaaaaaugguc

SEQ ID NO: 1306335 - RNA, 13 nt, Human
agaccaaaauaaa

SEQ ID NO: 1306336 - RNA, 15 nt, Human
agaccccuggcuuuu

SEQ ID NO: 1306337 - RNA, 21 nt, Human
agaccccuggcuuuucacugc

SEQ ID NO: 1306338 - RNA, 17 nt, Human
agacccuaaacauccau

SEQ ID NO: 1306339 - RNA, 20 nt, Human
agaccuacuguucuaaagcu

SEQ ID NO: 1306340 - RNA, 21 nt, Human
agaccuacuguucuaaagcuc

SEQ ID NO: 1306341 - RNA, 22 nt, Human
agaccuacuguucuaaagcucu

SEQ ID NO: 1306342 - RNA, 14 nt, Human
agaccucagaagua

SEQ ID NO: 1306343 - RNA, 15 nt, Human
agaccucagaaguaa

SEQ ID NO: 1306344 - RNA, 18 nt, Human
agaccucagugccuuccu

SEQ ID NO: 1306345 - RNA, 20 nt, Human
agaccucagugccuuccugu

SEQ ID NO: 1306346 - RNA, 19 nt, Human
agaccucuacugccuugga

SEQ ID NO: 1306347 - RNA, 18 nt, Human
agaccucugugcacuuau

SEQ ID NO: 1306348 - RNA, 13 nt, Human
agaccugaagaau

SEQ ID NO: 1306349 - RNA, 21 nt, Human
agacucaguggggaggggcug

SEQ ID NO: 1306350 - RNA, 21 nt, Human
ucuugaguuugucgcucaugu

SEQ ID NO: 1306351 - RNA, 18 nt, Human
ucuugaguuuuucaggua

SEQ ID NO: 1306352 - RNA, 22 nt, Human
ucuugaguuugucgcucaugug

SEQ ID NO: 1306353 - RNA, 16 nt, Human
agaccugccccuccuc

SEQ ID NO: 1306354 - RNA, 15 nt, Human
agaccugaauucuuu

SEQ ID NO: 1306355 - RNA, 22 nt, Human
agaccugccccuccucucugcc

SEQ ID NO: 1306356 - RNA, 23 nt, Human
agaccugccccuccucucugccc

SEQ ID NO: 1306357 - RNA, 14 nt, Human
agacuauuuuuaga

SEQ ID NO: 1306358 - RNA, 21 nt, Human
agacuauuuuuagauuuucuu

SEQ ID NO: 1306359 - RNA, 15 nt, Human
agacucaaauguucu

SEQ ID NO: 1306360 - RNA, 16 nt, Human
agacucaaauguucua

SEQ ID NO: 1306361 - RNA, 17 nt, Human
agacucaaauguucuaa

SEQ ID NO: 1306362 - RNA, 20 nt, Human
agacucaaauguucuaaguu

SEQ ID NO: 1306363 - RNA, 23 nt, Human
agacucaaauguucuaaguuucu

SEQ ID NO: 1306364 - RNA, 22 nt, Human
agacuggguaggaaagaggaag

SEQ ID NO: 1306365 - RNA, 18 nt, Human
agacuggguaggaaagag

SEQ ID NO: 1306366 - RNA, 17 nt, Human
agacuuagggcaccagg

SEQ ID NO: 1306367 - RNA, 19 nt, Human
agacuucccacggcuccuc

SEQ ID NO: 1306368 - RNA, 14 nt, Human
agacuucccagcua

SEQ ID NO: 1306369 - RNA, 14 nt, Human
agacuuccuagacu

SEQ ID NO: 1306370 - RNA, 14 nt, Human
agacugucucaaga

SEQ ID NO: 1306371 - RNA, 18 nt, Human
agacuuaagcccagugca

SEQ ID NO: 1306372 - RNA, 20 nt, Human
agacuuacagcaaauccuuu

SEQ ID NO: 1306373 - RNA, 18 nt, Human
agacuuacagcaaauccu

SEQ ID NO: 1306374 - RNA, 23 nt, Human
agacuuacagggauaaggccugu

SEQ ID NO: 1306375 - RNA, 15 nt, Human
agacuuacagcaaau

SEQ ID NO: 1306376 - RNA, 14 nt, Human
agacuuacucuaag

SEQ ID NO: 1306377 - RNA, 15 nt, Human
agacuuacucuaaga

SEQ ID NO: 1306378 - RNA, 16 nt, Human
agacuuacucuaagau

SEQ ID NO: 1306379 - RNA, 18 nt, Human
agacuuacucuaagaucu

SEQ ID NO: 1306380 - RNA, 16 nt, Human
agacuuagggcaccag

SEQ ID NO: 1306381 - RNA, 19 nt, Human
agacuuuuuuuaaauagua

SEQ ID NO: 1306382 - RNA, 16 nt, Human
agacuuuauguaguuu

SEQ ID NO: 1306383 - RNA, 22 nt, Human
agacuuuccauuacaaguauuu

SEQ ID NO: 1306384 - RNA, 17 nt, Human
agacuuuauguaguuuu

SEQ ID NO: 1306385 - RNA, 15 nt, Human
agacuuuccauuaca

SEQ ID NO: 1306386 - RNA, 18 nt, Human
agacuuguaugaaagaug

SEQ ID NO: 1306387 - RNA, 11 nt, Human
agacuuguugg

SEQ ID NO: 1306388 - RNA, 16 nt, Human
agacuuguuggcguag

SEQ ID NO: 1306389 - RNA, 21 nt, Human
agacuuguuggcguaggcuac

SEQ ID NO: 1306390 - RNA, 12 nt, Human
agacuuuaacau

SEQ ID NO: 1306391 - RNA, 21 nt, Human
agacuuuaacauaagcuauuu

SEQ ID NO: 1306392 - RNA, 17 nt, Human
agacuuuaacauaagcu

SEQ ID NO: 1306393 - RNA, 16 nt, Human
agacuucucuuugccu

SEQ ID NO: 1306394 - RNA, 17 nt, Human
agacuucucuuugccuc

SEQ ID NO: 1306395 - RNA, 18 nt, Human
agacuucucuuugccuca

SEQ ID NO: 1306396 - RNA, 20 nt, Human
agacuucucuuugccucaaa

SEQ ID NO: 1306397 - RNA, 19 nt, Human
agacuucucuuugccucaa

SEQ ID NO: 1306398 - RNA, 21 nt, Human
agacuugguugguaggguggg

SEQ ID NO: 1306399 - RNA, 22 nt, Human
agacuugguugguaggguggga

SEQ ID NO: 1306400 - RNA, 24 nt, Human
agagacagaaagcagaacagugau

SEQ ID NO: 1306401 - RNA, 20 nt, Human
agagacaaacaccucccagg

SEQ ID NO: 1306402 - RNA, 14 nt, Human
agagacagcccagg

SEQ ID NO: 1306403 - RNA, 15 nt, Human
agagacagcccagga

SEQ ID NO: 1306404 - RNA, 14 nt, Human
agagaaaaaagcca

SEQ ID NO: 1306405 - RNA, 22 nt, Human
agagaauuucuaccauuucaga

SEQ ID NO: 1306406 - RNA, 23 nt, Human
agagaauuucuaccauuucagag

SEQ ID NO: 1306407 - RNA, 19 nt, Human
agagacaaacaccucccag

SEQ ID NO: 1306408 - RNA, 21 nt, Human
agagacaaacaccucccagga

SEQ ID NO: 1306409 - RNA, 12 nt, Human
agagacaaagcu

SEQ ID NO: 1306410 - RNA, 13 nt, Human
ucuuuaauucugu

SEQ ID NO: 1306411 - RNA, 19 nt, Human
ucuuguaauccgaaucucu

SEQ ID NO: 1306412 - RNA, 12 nt, Human
ucuuuauaagaa

SEQ ID NO: 1306413 - RNA, 13 nt, Human
ucuuuauaagaaa

SEQ ID NO: 1306414 - RNA, 14 nt, Human
ucuuuaauuuuaca

SEQ ID NO: 1306415 - RNA, 20 nt, Human
ucuugguuuucccuuugccu

SEQ ID NO: 1306416 - RNA, 23 nt, Human
ucuugguugaaaauaaaaagauc

SEQ ID NO: 1306417 - RNA, 13 nt, Human
ucuugguugagga

SEQ ID NO: 1306418 - RNA, 15 nt, Human
ucuugguugaggaaa

SEQ ID NO: 1306419 - RNA, 19 nt, Human
ucuugguugaaaauaaaaa

SEQ ID NO: 1306420 - RNA, 16 nt, Human
ucuugaucaguuaaga

SEQ ID NO: 1306421 - RNA, 17 nt, Human
ucuugaucaguuaagaa

SEQ ID NO: 1306422 - RNA, 17 nt, Human
ucuugauaccccccucu

SEQ ID NO: 1306423 - RNA, 20 nt, Human
ucuugauaccccccucuguc

SEQ ID NO: 1306424 - RNA, 21 nt, Human
ucuugauaccccccucugucu

SEQ ID NO: 1306425 - RNA, 22 nt, Human
ucuugauaccccccucugucuu

SEQ ID NO: 1306426 - RNA, 15 nt, Human
ucuuucuuccucugc

SEQ ID NO: 1306427 - RNA, 16 nt, Human
ucuuucuuccucugcu

SEQ ID NO: 1306428 - RNA, 17 nt, Human
ucuuucuuccucugcug

SEQ ID NO: 1306429 - RNA, 17 nt, Human
agacuccuucaacaauu

SEQ ID NO: 1306430 - RNA, 21 nt, Human
agacuccuucaacaauucuaa

SEQ ID NO: 1306431 - RNA, 14 nt, Human
ucuuuauaagaaag

SEQ ID NO: 1306432 - RNA, 15 nt, Human
ucuuuauaagaaagc

SEQ ID NO: 1306433 - RNA, 16 nt, Human
ucuuuauaagaaagcc

SEQ ID NO: 1306434 - RNA, 17 nt, Human
ucuuuauaagaaagccu

SEQ ID NO: 1306435 - RNA, 19 nt, Human
ucuuuauaagaaagccuga

SEQ ID NO: 1306436 - RNA, 14 nt, Human
ucuuuauacagcug

SEQ ID NO: 1306437 - RNA, 15 nt, Human
ucuuuauacagcugu

SEQ ID NO: 1306438 - RNA, 16 nt, Human
ucuuuauacagcugua

SEQ ID NO: 1306439 - RNA, 13 nt, Human
ucuuucuuccaaa

SEQ ID NO: 1306440 - RNA, 14 nt, Human
ucuuucuuccucug

SEQ ID NO: 1306441 - RNA, 13 nt, Human
ucugauacagaaa

SEQ ID NO: 1306442 - RNA, 19 nt, Human
ucugauaagagaaucaaca

SEQ ID NO: 1306443 - RNA, 15 nt, Human
ucugauaaugaaaau

SEQ ID NO: 1306444 - RNA, 14 nt, Human
ucugaguuuuacca

SEQ ID NO: 1306445 - RNA, 16 nt, Human
ucugaguuuuaccaaa

SEQ ID NO: 1306446 - RNA, 14 nt, Human
ucugaguuuugugu

SEQ ID NO: 1306447 - RNA, 20 nt, Human
ucugaguuuuguguuuguug

SEQ ID NO: 1306448 - RNA, 23 nt, Human
ucugaugcaagcaagaaacacug

SEQ ID NO: 1306449 - RNA, 13 nt, Human
ucugaugcagcuu

SEQ ID NO: 1306450 - RNA, 17 nt, Human
ucugaugcagcuuauac

SEQ ID NO: 1306451 - RNA, 16 nt, Human
ucugaugcagcuuaua

SEQ ID NO: 1306452 - RNA, 15 nt, Human
ucugauguacucuaa

SEQ ID NO: 1306453 - RNA, 16 nt, Human
ucugauguacucuaaa

SEQ ID NO: 1306454 - RNA, 17 nt, Human
ucugauguacucuaaau

SEQ ID NO: 1306455 - RNA, 19 nt, Human
ucugauuaaaaugcuuccu

SEQ ID NO: 1306456 - RNA, 14 nt, Human
ucugaccuuaaaug

SEQ ID NO: 1306457 - RNA, 14 nt, Human
ucugagagaggcca

SEQ ID NO: 1306458 - RNA, 20 nt, Human
ucugagagaggccauucuuu

SEQ ID NO: 1306459 - RNA, 17 nt, Human
ucugaguuccugcaugc

SEQ ID NO: 1306460 - RNA, 17 nt, Human
agaaauuuauaaacuuu

SEQ ID NO: 1306461 - RNA, 16 nt, Human
agaaauuuauaaacuu

SEQ ID NO: 1306462 - RNA, 22 nt, Human
agaaauuaugugccagauuuau

SEQ ID NO: 1306463 - RNA, 21 nt, Human
agaaauuaugugccagauuua

SEQ ID NO: 1306464 - RNA, 13 nt, Human
agaaauuaugugc

SEQ ID NO: 1306465 - RNA, 19 nt, Human
ucugcaggucccuaauaaa

SEQ ID NO: 1306466 - RNA, 18 nt, Human
ucugcaggucccuaauaa

SEQ ID NO: 1306467 - RNA, 17 nt, Human
ucugcaggucccuaaua

SEQ ID NO: 1306468 - RNA, 16 nt, Human
ucugcaggucccuaau

SEQ ID NO: 1306469 - RNA, 15 nt, Human
ucugcaggucccuaa

SEQ ID NO: 1306470 - RNA, 11 nt, Human
ucugcagccuc

SEQ ID NO: 1306471 - RNA, 13 nt, Human
ucugcagccucag

SEQ ID NO: 1306472 - RNA, 14 nt, Human
ucugcagccucaga

SEQ ID NO: 1306473 - RNA, 17 nt, Human
agaaaugaaaaaauaua

SEQ ID NO: 1306474 - RNA, 15 nt, Human
agaaaucuaaaaaac

SEQ ID NO: 1306475 - RNA, 22 nt, Human
agaaaucauuuugcaaucccuu

SEQ ID NO: 1306476 - RNA, 12 nt, Human
agaaaucuaaaa

SEQ ID NO: 1306477 - RNA, 14 nt, Human
agaaaucauagcug

SEQ ID NO: 1306478 - RNA, 14 nt, Human
agaaagaaaaucag

SEQ ID NO: 1306479 - RNA, 15 nt, Human
agaaacuuucuuucu

SEQ ID NO: 1306480 - RNA, 15 nt, Human
agaaacuuuuuuauu

SEQ ID NO: 1306481 - RNA, 19 nt, Human
agaaacuuuuuuauuuaaa

SEQ ID NO: 1306482 - RNA, 19 nt, Human
agaaagccugggugacauu

SEQ ID NO: 1306483 - RNA, 20 nt, Human
agaaagccugggugacauuu

SEQ ID NO: 1306484 - RNA, 21 nt, Human
agaaagccugggugacauuug

SEQ ID NO: 1306485 - RNA, 19 nt, Human
agaaacuuccaaauccccu

SEQ ID NO: 1306486 - RNA, 13 nt, Human
agaaagccuucuu

SEQ ID NO: 1306487 - RNA, 15 nt, Human
agaaagccuucuuuu

SEQ ID NO: 1306488 - RNA, 11 nt, Human
agaaagcucaa

SEQ ID NO: 1306489 - RNA, 13 nt, Human
agaaagcugacuu

SEQ ID NO: 1306490 - RNA, 15 nt, Human
agaaagcugacuugg

SEQ ID NO: 1306491 - RNA, 16 nt, Human
agaaagcugacuuggc

SEQ ID NO: 1306492 - RNA, 17 nt, Human
agaaagcugacuuggcu

SEQ ID NO: 1306493 - RNA, 20 nt, Human
agaaagcugacuuggcuggu

SEQ ID NO: 1306494 - RNA, 21 nt, Human
agaaagcugacuuggcuggug

SEQ ID NO: 1306495 - RNA, 22 nt, Human
agaaagcugacuuggcuggugu

SEQ ID NO: 1306496 - RNA, 23 nt, Human
agaaagcugacuuggcuggugug

SEQ ID NO: 1306497 - RNA, 13 nt, Human
agaaagcugccug

SEQ ID NO: 1306498 - RNA, 18 nt, Human
agaaaggaaaaacaaacu

SEQ ID NO: 1306499 - RNA, 15 nt, Human
agaaaggaagcauug

SEQ ID NO: 1306500 - RNA, 17 nt, Human
agaaaggaagcauugua

SEQ ID NO: 1306501 - RNA, 18 nt, Human
agaaaggaagcauuguaa

SEQ ID NO: 1306502 - RNA, 23 nt, Human
agaaaugaaaaaauauauaucaa

SEQ ID NO: 1306503 - RNA, 18 nt, Human
agaaaugaaaaaauauau

SEQ ID NO: 1306504 - RNA, 14 nt, Human
agaaaugaaagcag

SEQ ID NO: 1306505 - RNA, 12 nt, Human
ucugaagaagau

SEQ ID NO: 1306506 - RNA, 17 nt, Human
agaaaucauuuugcaau

SEQ ID NO: 1306507 - RNA, 16 nt, Human
ucugaagcccucccag

SEQ ID NO: 1306508 - RNA, 17 nt, Human
ucugaagcccucccagg

SEQ ID NO: 1306509 - RNA, 15 nt, Human
ucugaauuuuuaaac

SEQ ID NO: 1306510 - RNA, 18 nt, Human
ucugaagucacugcacag

SEQ ID NO: 1306511 - RNA, 15 nt, Human
ucugaagucacugca

SEQ ID NO: 1306512 - RNA, 16 nt, Human
ucugaagucacugcac

SEQ ID NO: 1306513 - RNA, 16 nt, Human
ucugacaacagacuuc

SEQ ID NO: 1306514 - RNA, 15 nt, Human
ucugacaacagacuu

SEQ ID NO: 1306515 - RNA, 16 nt, Human
ucugaauuuuuaaaca

SEQ ID NO: 1306516 - RNA, 17 nt, Human
ucugaauuuuuaaacaa

SEQ ID NO: 1306517 - RNA, 19 nt, Human
ucugaauuuuuaaacaagu

SEQ ID NO: 1306518 - RNA, 17 nt, Human
ucucucacuuguuuuau

SEQ ID NO: 1306519 - RNA, 21 nt, Human
ucucucacuuguuuuauuuaa

SEQ ID NO: 1306520 - RNA, 18 nt, Human
acuuucucaguuuucaua

SEQ ID NO: 1306521 - RNA, 15 nt, Human
ucucucauacccucc

SEQ ID NO: 1306522 - RNA, 12 nt, Human
ucucucagguga

SEQ ID NO: 1306523 - RNA, 13 nt, Human
ucucucaggugaa

SEQ ID NO: 1306524 - RNA, 23 nt, Human
ucucucacucccucccuuucuau

SEQ ID NO: 1306525 - RNA, 16 nt, Human
ucucucagggccaggc

SEQ ID NO: 1306526 - RNA, 12 nt, Human
ucucucaugaac

SEQ ID NO: 1306527 - RNA, 15 nt, Human
ucucucaugaaccuc

SEQ ID NO: 1306528 - RNA, 17 nt, Human
ucucucaugaaccucaa

SEQ ID NO: 1306529 - RNA, 22 nt, Human
ucucucaugaaccucaagcugc

SEQ ID NO: 1306530 - RNA, 16 nt, Human
ucucucauugucugug

SEQ ID NO: 1306531 - RNA, 16 nt, Human
ucucuccacuuucagc

SEQ ID NO: 1306532 - RNA, 17 nt, Human
ucucuccacuuucagcu

SEQ ID NO: 1306533 - RNA, 20 nt, Human
ucucuccacuuucagcuguc

SEQ ID NO: 1306534 - RNA, 15 nt, Human
ucucuggaauuugaa

SEQ ID NO: 1306535 - RNA, 19 nt, Human
ucucuggaauuugaaacac

SEQ ID NO: 1306536 - RNA, 19 nt, Human
ucucuggaagccccugggc

SEQ ID NO: 1306537 - RNA, 20 nt, Human
ucucuggaagccccugggcc

SEQ ID NO: 1306538 - RNA, 12 nt, Human
ucucuggccuuc

SEQ ID NO: 1306539 - RNA, 18 nt, Human
ucucuccacuuucagcug

SEQ ID NO: 1306540 - RNA, 19 nt, Human
ucucuccacuuucagcugu

SEQ ID NO: 1306541 - RNA, 15 nt, Human
ucucuccagcugacu

SEQ ID NO: 1306542 - RNA, 21 nt, Human
agaaaacuuguauuaugugug

SEQ ID NO: 1306543 - RNA, 14 nt, Human
agaaaaagaagcaa

SEQ ID NO: 1306544 - RNA, 23 nt, Human
agaaacacguaucccaccugaca

SEQ ID NO: 1306545 - RNA, 13 nt, Human
agaaacacucaag

SEQ ID NO: 1306546 - RNA, 17 nt, Human
agaaacaguugguaacu

SEQ ID NO: 1306547 - RNA, 18 nt, Human
agaaacaguugguaacuu

SEQ ID NO: 1306548 - RNA, 19 nt, Human
agaaacaguugguaacuuu

SEQ ID NO: 1306549 - RNA, 18 nt, Human
agaaaccuuuuuaaaaau

SEQ ID NO: 1306550 - RNA, 15 nt, Human
agaaacgucuucuaa

SEQ ID NO: 1306551 - RNA, 16 nt, Human
agaaacgucuucuaaa

SEQ ID NO: 1306552 - RNA, 18 nt, Human
agaaacgucuucuaaacu

SEQ ID NO: 1306553 - RNA, 21 nt, Human
agaaacgucuucuaaacuucc

SEQ ID NO: 1306554 - RNA, 14 nt, Human
agaaacuuccaaau

SEQ ID NO: 1306555 - RNA, 21 nt, Human
ucucuuuaaaaggaaagaaaa

SEQ ID NO: 1306556 - RNA, 19 nt, Human
ucucuuuaaaaggaaagaa

SEQ ID NO: 1306557 - RNA, 18 nt, Human
ucucuuuaaaaggaaaga

SEQ ID NO: 1306558 - RNA, 21 nt, Human
ucucuugccucaaccucccaa

SEQ ID NO: 1306559 - RNA, 13 nt, Human
ucucuugccucaa

SEQ ID NO: 1306560 - RNA, 16 nt, Human
ucucuugggaacugaa

SEQ ID NO: 1306561 - RNA, 23 nt, Human
ucucuugggaacugaacucacuu

SEQ ID NO: 1306562 - RNA, 14 nt, Human
ucucuugaguuugu

SEQ ID NO: 1306563 - RNA, 15 nt, Human
ucucuugaguuuguc

SEQ ID NO: 1306564 - RNA, 12 nt, Human
ucucuugauuuu

SEQ ID NO: 1306565 - RNA, 12 nt, Human
ucucuugccuca

SEQ ID NO: 1306566 - RNA, 13 nt, Human
ucucuggccuucg

SEQ ID NO: 1306567 - RNA, 23 nt, Human
ucucuggccuucggccuccaucc

SEQ ID NO: 1306568 - RNA, 22 nt, Human
ucucuggccuucggccuccauc

SEQ ID NO: 1306569 - RNA, 21 nt, Human
ucucuggccuucggccuccau

SEQ ID NO: 1306570 - RNA, 16 nt, Human
ucucagcucacugcaa

SEQ ID NO: 1306571 - RNA, 15 nt, Human
ucucagcucacugca

SEQ ID NO: 1306572 - RNA, 18 nt, Human
ucucagcucacugcaacc

SEQ ID NO: 1306573 - RNA, 16 nt, Human
ucucagcucaucuuca

SEQ ID NO: 1306574 - RNA, 15 nt, Human
ucucagcuaagcuca

SEQ ID NO: 1306575 - RNA, 20 nt, Human
ucucagcucaucuucacugc

SEQ ID NO: 1306576 - RNA, 16 nt, Human
ucucagcuccaggugg

SEQ ID NO: 1306577 - RNA, 21 nt, Human
ucucagcuccagguggcucug

SEQ ID NO: 1306578 - RNA, 13 nt, Human
ucucaggcugccu

SEQ ID NO: 1306579 - RNA, 14 nt, Human
ucucaggcugccug

SEQ ID NO: 1306580 - RNA, 15 nt, Human
ucucaggcugccuga

SEQ ID NO: 1306581 - RNA, 16 nt, Human
ucucaggcugccugag

SEQ ID NO: 1306582 - RNA, 17 nt, Human
ucucaggcugccugagu

SEQ ID NO: 1306583 - RNA, 14 nt, Human
ucucagggccaggc

SEQ ID NO: 1306584 - RNA, 17 nt, Human
ucucagggccaggccuc

SEQ ID NO: 1306585 - RNA, 15 nt, Human
ucucauuaaaagaau

SEQ ID NO: 1306586 - RNA, 16 nt, Human
ucucauuaaaagaaua

SEQ ID NO: 1306587 - RNA, 20 nt, Human
ucucauuaaaagaauaucug

SEQ ID NO: 1306588 - RNA, 14 nt, Human
ucucauugcucuga

SEQ ID NO: 1306589 - RNA, 15 nt, Human
ucucauugcuuacaa

SEQ ID NO: 1306590 - RNA, 14 nt, Human
ucucauuggaaauu

SEQ ID NO: 1306591 - RNA, 17 nt, Human
ucucauuggaaauuuag

SEQ ID NO: 1306592 - RNA, 19 nt, Human
ucucauuggaaauuuagca

SEQ ID NO: 1306593 - RNA, 20 nt, Human
ucucauuggaaauuuagcau

SEQ ID NO: 1306594 - RNA, 21 nt, Human
ucucauuggaaauuuagcauu

SEQ ID NO: 1306595 - RNA, 23 nt, Human
ucucauuggaaauuuagcauugu

SEQ ID NO: 1306596 - RNA, 19 nt, Human
ucucauuggacccuuccau

SEQ ID NO: 1306597 - RNA, 14 nt, Human
ucuccaaaccacuu

SEQ ID NO: 1306598 - RNA, 22 nt, Human
ucuccaaacugaagcagccucu

SEQ ID NO: 1306599 - RNA, 20 nt, Human
ucucauuggacccuuccaug

SEQ ID NO: 1306600 - RNA, 20 nt, Human
ucuccaacaucacagcccag

SEQ ID NO: 1306601 - RNA, 23 nt, Human
ucuccaaacugaagcagccucuc

SEQ ID NO: 1306602 - RNA, 24 nt, Human
ucucauuggaaauuuagcauugua

SEQ ID NO: 1306603 - RNA, 17 nt, Human
ucuccaacaucacagcc

SEQ ID NO: 1306604 - RNA, 19 nt, Human
ucuccaacaucacagccca

SEQ ID NO: 1306605 - RNA, 21 nt, Human
ucuccaacaucacagcccagc

SEQ ID NO: 1306606 - RNA, 13 nt, Human
ucuccaagcagcu

SEQ ID NO: 1306607 - RNA, 19 nt, Human
ucuccaagcagcuuagagu

SEQ ID NO: 1306608 - RNA, 17 nt, Human
ucuccaggggcugcuuc

SEQ ID NO: 1306609 - RNA, 18 nt, Human
ucuccaggggcugcuucc

SEQ ID NO: 1306610 - RNA, 20 nt, Human
ucuccaggggcugcuuccuc

SEQ ID NO: 1306611 - RNA, 22 nt, Human
ucuccaggggcugcuuccuccu

SEQ ID NO: 1306612 - RNA, 23 nt, Human
ucuccaggggcugcuuccuccug

SEQ ID NO: 1306613 - RNA, 19 nt, Human
ucuccaguauccacuuugc

SEQ ID NO: 1306614 - RNA, 15 nt, Human
ucuccagugcaccug

SEQ ID NO: 1306615 - RNA, 18 nt, Human
ucuccaguggauucccag

SEQ ID NO: 1306616 - RNA, 13 nt, Human
ucuccauccacau

SEQ ID NO: 1306617 - RNA, 19 nt, Human
ucuccauccacaugggagc

SEQ ID NO: 1306618 - RNA, 16 nt, Human
acuuguguuuugcaag

SEQ ID NO: 1306619 - RNA, 20 nt, Human
ucuccuccaugggagaaaau

SEQ ID NO: 1306620 - RNA, 12 nt, Human
ucuccucccagg

SEQ ID NO: 1306621 - RNA, 17 nt, Human
acuuucuauccucugua

SEQ ID NO: 1306622 - RNA, 13 nt, Human
acuuucucaguuu

SEQ ID NO: 1306623 - RNA, 14 nt, Human
acuuucucaguuuu

SEQ ID NO: 1306624 - RNA, 17 nt, Human
acuuucucaguuuucau

SEQ ID NO: 1306625 - RNA, 12 nt, Human
acuuuaaagcgu

SEQ ID NO: 1306626 - RNA, 13 nt, Human
acuuuaaauugug

SEQ ID NO: 1306627 - RNA, 14 nt, Human
acuuuaacauaagc

SEQ ID NO: 1306628 - RNA, 16 nt, Human
acuuuaacauaagcua

SEQ ID NO: 1306629 - RNA, 18 nt, Human
acuuuaacauaagcuauu

SEQ ID NO: 1306630 - RNA, 19 nt, Human
acuuuaacauaagcuauuu

SEQ ID NO: 1306631 - RNA, 23 nt, Human
acuuuaacauaagcuauuuuucu

SEQ ID NO: 1306632 - RNA, 16 nt, Human
acuuuaacuucuguuu

SEQ ID NO: 1306633 - RNA, 20 nt, Human
acuuuaacuucuguuuuacc

SEQ ID NO: 1306634 - RNA, 19 nt, Human
acuuuaauuaccaaccugu

SEQ ID NO: 1306635 - RNA, 19 nt, Human
ucuccuaagcuggagugca

SEQ ID NO: 1306636 - RNA, 22 nt, Human
ucuccguuagcuccuguggccc

SEQ ID NO: 1306637 - RNA, 23 nt, Human
ucuccguuagcuccuguggcccc

SEQ ID NO: 1306638 - RNA, 21 nt, Human
ucuccguuagcuccuguggcc

SEQ ID NO: 1306639 - RNA, 23 nt, Human
ucuccuaagcaccuguaaugugc

SEQ ID NO: 1306640 - RNA, 14 nt, Human
ucuccuagccccug

SEQ ID NO: 1306641 - RNA, 15 nt, Human
ucuccuaggcauucu

SEQ ID NO: 1306642 - RNA, 19 nt, Human
ucuccuaggcauucuggac

SEQ ID NO: 1306643 - RNA, 23 nt, Human
ucuccuaggcauucuggaccucu

SEQ ID NO: 1306644 - RNA, 21 nt, Human
ucuccuaggcauucuggaccu

SEQ ID NO: 1306645 - RNA, 13 nt, Human
ucucccaguuguc

SEQ ID NO: 1306646 - RNA, 23 nt, Human
ucucccauuuuggaauuugccug

SEQ ID NO: 1306647 - RNA, 17 nt, Human
ucuccauggcccugcca

SEQ ID NO: 1306648 - RNA, 16 nt, Human
ucuccauggcccugcc

SEQ ID NO: 1306649 - RNA, 15 nt, Human
ucuccauggcccugc

SEQ ID NO: 1306650 - RNA, 18 nt, Human
ucuccauggcccugcaaa

SEQ ID NO: 1306651 - RNA, 14 nt, Human
ucuccauggcccug

SEQ ID NO: 1306652 - RNA, 24 nt, Human
ucuccauggcccugccaugcucuc

SEQ ID NO: 1306653 - RNA, 20 nt, Human
ucuccauggcccugccaugc

SEQ ID NO: 1306654 - RNA, 15 nt, Human
ucuccauucugcucc

SEQ ID NO: 1306655 - RNA, 16 nt, Human
ucuccauucugcuccu

SEQ ID NO: 1306656 - RNA, 12 nt, Human
ucucccacccuc

SEQ ID NO: 1306657 - RNA, 13 nt, Human
ucucccacccucu

SEQ ID NO: 1306658 - RNA, 14 nt, Human
ucucccacccucuu

SEQ ID NO: 1306659 - RNA, 15 nt, Human
ucucccacccucuuc

SEQ ID NO: 1306660 - RNA, 16 nt, Human
ucucccacccucuucc

SEQ ID NO: 1306661 - RNA, 17 nt, Human
ucucccacccucuuccu

SEQ ID NO: 1306662 - RNA, 20 nt, Human
ucucccacccucuuccuacu

SEQ ID NO: 1306663 - RNA, 14 nt, Human
ucucccaccuagca

SEQ ID NO: 1306664 - RNA, 19 nt, Human
ucucccacccucuuccuac

SEQ ID NO: 1306665 - RNA, 19 nt, Human
ucucccacuagacaagucc

SEQ ID NO: 1306666 - RNA, 14 nt, Human
ucucccacucuccu

SEQ ID NO: 1306667 - RNA, 15 nt, Human
ucucccacucuccua

SEQ ID NO: 1306668 - RNA, 16 nt, Human
ucucccacucuccuag

SEQ ID NO: 1306669 - RNA, 16 nt, Human
ucucccagauaaugug

SEQ ID NO: 1306670 - RNA, 18 nt, Human
ucucccagauaaugugaa

SEQ ID NO: 1306671 - RNA, 21 nt, Human
ucucccagauaaugugaaaau

SEQ ID NO: 1306672 - RNA, 23 nt, Human
ucucccagauaaugugaaaaugg

SEQ ID NO: 1306673 - RNA, 14 nt, Human
acuugcucuugaug

SEQ ID NO: 1306674 - RNA, 17 nt, Human
acuuggaguggagagga

SEQ ID NO: 1306675 - RNA, 18 nt, Human
acuuggauacuuggauuu

SEQ ID NO: 1306676 - RNA, 16 nt, Human
acuuggauucuuucca

SEQ ID NO: 1306677 - RNA, 17 nt, Human
acuuggauucuuuccau

SEQ ID NO: 1306678 - RNA, 18 nt, Human
acuuggauucuuuccauu

SEQ ID NO: 1306679 - RNA, 22 nt, Human
acuuggauucuuuccauuugca

SEQ ID NO: 1306680 - RNA, 20 nt, Human
acuuggauuuaguuucagua

SEQ ID NO: 1306681 - RNA, 13 nt, Human
acuuggcagccuu

SEQ ID NO: 1306682 - RNA, 14 nt, Human
acuuggcagccuug

SEQ ID NO: 1306683 - RNA, 15 nt, Human
acuuggcagccuugu

SEQ ID NO: 1306684 - RNA, 17 nt, Human
acuuggcagccuuguga

SEQ ID NO: 1306685 - RNA, 15 nt, Human
acuuggccucucucu

SEQ ID NO: 1306686 - RNA, 16 nt, Human
acuugaggacacaugu

SEQ ID NO: 1306687 - RNA, 15 nt, Human
acuugaggacacaug

SEQ ID NO: 1306688 - RNA, 17 nt, Human
acuugccucuuccuuga

SEQ ID NO: 1306689 - RNA, 13 nt, Human
acuugccugccuu

SEQ ID NO: 1306690 - RNA, 14 nt, Human
acuugccugccuuu

SEQ ID NO: 1306691 - RNA, 18 nt, Human
acuugccugccuuuccau

SEQ ID NO: 1306692 - RNA, 21 nt, Human
acuugccugccuuuccaucca

SEQ ID NO: 1306693 - RNA, 17 nt, Human
acuugcgagaaauucgu

SEQ ID NO: 1306694 - RNA, 22 nt, Human
acuugcgagaaauucguguguu

SEQ ID NO: 1306695 - RNA, 20 nt, Human
acuugcgguuccggcaugga

SEQ ID NO: 1306696 - RNA, 22 nt, Human
acuugcucagguacuuguaaau

SEQ ID NO: 1306697 - RNA, 20 nt, Human
acuugcucagguacuuguaa

SEQ ID NO: 1306698 - RNA, 23 nt, Human
acuugucccgggacaccuaggcu

SEQ ID NO: 1306699 - RNA, 24 nt, Human
acuugucauuguuauauaaucauu

SEQ ID NO: 1306700 - RNA, 19 nt, Human
acuuggcucacacucgaca

SEQ ID NO: 1306701 - RNA, 18 nt, Human
acuuggcucgaaucucug

SEQ ID NO: 1306702 - RNA, 19 nt, Human
acuuggcucgaaucucugu

SEQ ID NO: 1306703 - RNA, 20 nt, Human
acuuggcucgaaucucugug

SEQ ID NO: 1306704 - RNA, 21 nt, Human
acuuggcucgaaucucugugc

SEQ ID NO: 1306705 - RNA, 20 nt, Human
acuugucacagaugcagauu

SEQ ID NO: 1306706 - RNA, 19 nt, Human
acuugucaggagugugugu

SEQ ID NO: 1306707 - RNA, 13 nt, Human
acuugucauguga

SEQ ID NO: 1306708 - RNA, 21 nt, Human
acuugucaggaguguguguga

SEQ ID NO: 1306709 - RNA, 23 nt, Human
acuugucauuguuauauaaucau

SEQ ID NO: 1306710 - RNA, 14 nt, Human
acuugaggacacau

SEQ ID NO: 1306711 - RNA, 13 nt, Human
acuugaggacaca

SEQ ID NO: 1306712 - RNA, 12 nt, Human
acuugaggacac

SEQ ID NO: 1306713 - RNA, 11 nt, Human
acuugaggaca

SEQ ID NO: 1306714 - RNA, 14 nt, Human
acuugagaccuaau

SEQ ID NO: 1306715 - RNA, 12 nt, Human
acuugagcaugu

SEQ ID NO: 1306716 - RNA, 13 nt, Human
acuugaaugaaaa

SEQ ID NO: 1306717 - RNA, 20 nt, Human
acuugaaugaaaauguccau

SEQ ID NO: 1306718 - RNA, 24 nt, Human
acuugaaugcuaguuauacuuauu

SEQ ID NO: 1306719 - RNA, 21 nt, Human
acuugagaccuaaucucugua

SEQ ID NO: 1306720 - RNA, 21 nt, Human
acuugaacccgggaggcagag

SEQ ID NO: 1306721 - RNA, 15 nt, Human
acuugaagggccaga

SEQ ID NO: 1306722 - RNA, 17 nt, Human
acuugaagggccagagc

SEQ ID NO: 1306723 - RNA, 18 nt, Human
acuugaagggccagagcc

SEQ ID NO: 1306724 - RNA, 19 nt, Human
acuugaagggccagagcca

SEQ ID NO: 1306725 - RNA, 20 nt, Human
acuugaagggccagagccag

SEQ ID NO: 1306726 - RNA, 21 nt, Human
acuugaagggccagagccagg

SEQ ID NO: 1306727 - RNA, 22 nt, Human
acuugaagggccagagccaggg

SEQ ID NO: 1306728 - RNA, 20 nt, Human
acuugaacccgggaggcaga

SEQ ID NO: 1306729 - RNA, 19 nt, Human
acuugaacccgggaggcag

SEQ ID NO: 1306730 - RNA, 21 nt, Human
acuugaacccauauuuguaca

SEQ ID NO: 1306731 - RNA, 20 nt, Human
acuucucauuuuuuaaaaaa

SEQ ID NO: 1306732 - RNA, 21 nt, Human
ucucacagcuccaagaauuuc

SEQ ID NO: 1306733 - RNA, 14 nt, Human
ucucaccucuaggu

SEQ ID NO: 1306734 - RNA, 21 nt, Human
ucucaccucuagguccccaua

SEQ ID NO: 1306735 - RNA, 19 nt, Human
ucucacacuggucugcugu

SEQ ID NO: 1306736 - RNA, 14 nt, Human
ucucacuaaaucuu

SEQ ID NO: 1306737 - RNA, 13 nt, Human
ucucaccuggacu

SEQ ID NO: 1306738 - RNA, 24 nt, Human
ucucaccuggacuuaagcaucugg

SEQ ID NO: 1306739 - RNA, 12 nt, Human
ucucaccuggcc

SEQ ID NO: 1306740 - RNA, 14 nt, Human
ucucaccuggcccu

SEQ ID NO: 1306741 - RNA, 16 nt, Human
ucucaccuggcccugc

SEQ ID NO: 1306742 - RNA, 19 nt, Human
ucucaccuggcccugcuuc

SEQ ID NO: 1306743 - RNA, 21 nt, Human
ucucaccuggcccugcuuccu

SEQ ID NO: 1306744 - RNA, 20 nt, Human
ucucacggccacacagcugc

SEQ ID NO: 1306745 - RNA, 21 nt, Human
ucucacggccacacagcugcc

SEQ ID NO: 1306746 - RNA, 22 nt, Human
ucucacggccacacagcugccg

SEQ ID NO: 1306747 - RNA, 14 nt, Human
acuucaggcucuuc

SEQ ID NO: 1306748 - RNA, 16 nt, Human
acuucaggcucuucuc

SEQ ID NO: 1306749 - RNA, 16 nt, Human
ucuauuucauaccaug

SEQ ID NO: 1306750 - RNA, 17 nt, Human
ucuauuucacuggagca

SEQ ID NO: 1306751 - RNA, 14 nt, Human
ucuauuucacugga

SEQ ID NO: 1306752 - RNA, 16 nt, Human
ucuauuucauguuuuu

SEQ ID NO: 1306753 - RNA, 14 nt, Human
ucuauuucauguuu

SEQ ID NO: 1306754 - RNA, 14 nt, Human
ucuauuucuccucc

SEQ ID NO: 1306755 - RNA, 15 nt, Human
ucuauuucuccucca

SEQ ID NO: 1306756 - RNA, 16 nt, Human
ucuauuucuccuccau

SEQ ID NO: 1306757 - RNA, 20 nt, Human
ucuauuucuccuccauggga

SEQ ID NO: 1306758 - RNA, 16 nt, Human
ucuauuucugccuccc

SEQ ID NO: 1306759 - RNA, 16 nt, Human
ucucacuauaccagua

SEQ ID NO: 1306760 - RNA, 18 nt, Human
acuuccuguccagcucca

SEQ ID NO: 1306761 - RNA, 22 nt, Human
acuuccuguccagcuccaaccu

SEQ ID NO: 1306762 - RNA, 15 nt, Human
acuuccugugacuuc

SEQ ID NO: 1306763 - RNA, 23 nt, Human
acuuccuguccagcuccaaccug

SEQ ID NO: 1306764 - RNA, 14 nt, Human
acuucgacacuguu

SEQ ID NO: 1306765 - RNA, 16 nt, Human
acuucgacacuguucu

SEQ ID NO: 1306766 - RNA, 23 nt, Human
acuucgacacuguucuuagcuca

SEQ ID NO: 1306767 - RNA, 21 nt, Human
acuucgacacuguucuuagcu

SEQ ID NO: 1306768 - RNA, 17 nt, Human
acuucucacuaauuugu

SEQ ID NO: 1306769 - RNA, 17 nt, Human
acuucucaggacacagg

SEQ ID NO: 1306770 - RNA, 18 nt, Human
acuucucaggacacaggc

SEQ ID NO: 1306771 - RNA, 20 nt, Human
acuucucaggacacaggccu

SEQ ID NO: 1306772 - RNA, 22 nt, Human
acuucucaggacacaggccugu

SEQ ID NO: 1306773 - RNA, 21 nt, Human
acuucucaggacacaggccug

SEQ ID NO: 1306774 - RNA, 19 nt, Human
acuucucauuuuuuaaaaa

SEQ ID NO: 1306775 - RNA, 17 nt, Human
acuucuaagacuuuacu

SEQ ID NO: 1306776 - RNA, 17 nt, Human
acuucuaauugccaugu

SEQ ID NO: 1306777 - RNA, 14 nt, Human
acuucuaauugcca

SEQ ID NO: 1306778 - RNA, 21 nt, Human
acuucuauuuuaaagacaaug

SEQ ID NO: 1306779 - RNA, 18 nt, Human
acuucguuuaaugaaugc

SEQ ID NO: 1306780 - RNA, 20 nt, Human
acuucguuuaaugaaugcuu

SEQ ID NO: 1306781 - RNA, 17 nt, Human
acuucguuuaaugaaug

SEQ ID NO: 1306782 - RNA, 17 nt, Human
acuucggggcugggaag

SEQ ID NO: 1306783 - RNA, 13 nt, Human
acuggccccaccc

SEQ ID NO: 1306784 - RNA, 12 nt, Human
acuggccccacc

SEQ ID NO: 1306785 - RNA, 21 nt, Human
acuggccauggccugcaaacu

SEQ ID NO: 1306786 - RNA, 16 nt, Human
acuggccauggccugc

SEQ ID NO: 1306787 - RNA, 22 nt, Human
acuggccagggccacgcuccag

SEQ ID NO: 1306788 - RNA, 15 nt, Human
acuggccauggccug

SEQ ID NO: 1306789 - RNA, 11 nt, Human
acuggccaggg

SEQ ID NO: 1306790 - RNA, 16 nt, Human
acuggccucugcugau

SEQ ID NO: 1306791 - RNA, 14 nt, Human
acuggccucugcug

SEQ ID NO: 1306792 - RNA, 17 nt, Human
acuggccucaaagcaag

SEQ ID NO: 1306793 - RNA, 15 nt, Human
acuggccucaaagca

SEQ ID NO: 1306794 - RNA, 22 nt, Human
acuggccucaaagcaagcauuc

SEQ ID NO: 1306795 - RNA, 15 nt, Human
uccuuccaccaaguu

SEQ ID NO: 1306796 - RNA, 16 nt, Human
uccuuccagcuaguga

SEQ ID NO: 1306797 - RNA, 22 nt, Human
uccuuccagcuagugacccaca

SEQ ID NO: 1306798 - RNA, 24 nt, Human
uccuuccagugucauuucucaucc

SEQ ID NO: 1306799 - RNA, 10 nt, Human
uccuucccaa

SEQ ID NO: 1306800 - RNA, 12 nt, Human
uccuucccagag

SEQ ID NO: 1306801 - RNA, 22 nt, Human
uccuucccagaggggccugcca

SEQ ID NO: 1306802 - RNA, 23 nt, Human
uccuucccagaggggccugccac

SEQ ID NO: 1306803 - RNA, 21 nt, Human
uccuuguuguuucuugccuga

SEQ ID NO: 1306804 - RNA, 11 nt, Human
uccuuuaacaa

SEQ ID NO: 1306805 - RNA, 13 nt, Human
uccuuuaauugua

SEQ ID NO: 1306806 - RNA, 15 nt, Human
uccuuuaauuguaaa

SEQ ID NO: 1306807 - RNA, 15 nt, Human
uccuucuauucuagc

SEQ ID NO: 1306808 - RNA, 18 nt, Human
uccuucugagcuccuguc

SEQ ID NO: 1306809 - RNA, 24 nt, Human
uccuucugagcccgguaagagcaa

SEQ ID NO: 1306810 - RNA, 16 nt, Human
uccuucugagcuccug

SEQ ID NO: 1306811 - RNA, 13 nt, Human
uccuugucacugg

SEQ ID NO: 1306812 - RNA, 17 nt, Human
uccuugugaugugcacg

SEQ ID NO: 1306813 - RNA, 20 nt, Human
uccuugugaugugcacguaa

SEQ ID NO: 1306814 - RNA, 19 nt, Human
uccuugugaugugcacgua

SEQ ID NO: 1306815 - RNA, 16 nt, Human
uccuugugccagagaa

SEQ ID NO: 1306816 - RNA, 15 nt, Human
uccuugugccagaga

SEQ ID NO: 1306817 - RNA, 16 nt, Human
uccuugugggccuggg

SEQ ID NO: 1306818 - RNA, 18 nt, Human
uccuugugggccugggcu

SEQ ID NO: 1306819 - RNA, 19 nt, Human
uccuugugggccugggcuc

SEQ ID NO: 1306820 - RNA, 23 nt, Human
uccuugugggccugggcuccugg

SEQ ID NO: 1306821 - RNA, 13 nt, Human
ucgaagugcugag

SEQ ID NO: 1306822 - RNA, 12 nt, Human
ucgaagugcuga

SEQ ID NO: 1306823 - RNA, 13 nt, Human
uccuuucuuuucc

SEQ ID NO: 1306824 - RNA, 13 nt, Human
uccuuucuggcuu

SEQ ID NO: 1306825 - RNA, 20 nt, Human
uccuuucuuccggccccucc

SEQ ID NO: 1306826 - RNA, 12 nt, Human
uccuuucuuccg

SEQ ID NO: 1306827 - RNA, 12 nt, Human
uccuuucuuuuc

SEQ ID NO: 1306828 - RNA, 20 nt, Human
uccuuucuagagcacugcca

SEQ ID NO: 1306829 - RNA, 19 nt, Human
uccuuucuagagcacugcc

SEQ ID NO: 1306830 - RNA, 17 nt, Human
ucgagaucccaacacug

SEQ ID NO: 1306831 - RNA, 21 nt, Human
ucgagaaagaggcaccaggaa

SEQ ID NO: 1306832 - RNA, 15 nt, Human
ucgacuguuguuauc

SEQ ID NO: 1306833 - RNA, 19 nt, Human
ucgagaaagaggcaccagg

SEQ ID NO: 1306834 - RNA, 20 nt, Human
ucgagaaagaggcaccagga

SEQ ID NO: 1306835 - RNA, 17 nt, Human
ucgacuguuguuaucug

SEQ ID NO: 1306836 - RNA, 14 nt, Human
ucgacuguuguuau

SEQ ID NO: 1306837 - RNA, 20 nt, Human
ucgaaucuacuaauuccaca

SEQ ID NO: 1306838 - RNA, 14 nt, Human
ucgaaucucugugc

SEQ ID NO: 1306839 - RNA, 16 nt, Human
ucgaaucucugugccu

SEQ ID NO: 1306840 - RNA, 17 nt, Human
ucgaaucucugugccuu

SEQ ID NO: 1306841 - RNA, 22 nt, Human
ucgaaucucugugccuucgucu

SEQ ID NO: 1306842 - RNA, 12 nt, Human
ucgaaugaaauu

SEQ ID NO: 1306843 - RNA, 17 nt, Human
ucgaaugaaauuaacug

SEQ ID NO: 1306844 - RNA, 15 nt, Human
ucgaaugacacuguu

SEQ ID NO: 1306845 - RNA, 14 nt, Human
ucgaaugacacugu

SEQ ID NO: 1306846 - RNA, 15 nt, Human
ucgagcgcccugcag

SEQ ID NO: 1306847 - RNA, 16 nt, Human
ucgagcgcccugcaga

SEQ ID NO: 1306848 - RNA, 17 nt, Human
ucgagcgcccugcagac

SEQ ID NO: 1306849 - RNA, 18 nt, Human
ucgagcgcccugcagacc

SEQ ID NO: 1306850 - RNA, 19 nt, Human
ucgagcgcccugcagaccc

SEQ ID NO: 1306851 - RNA, 23 nt, Human
ucgagaggggccgaugcccagag

SEQ ID NO: 1306852 - RNA, 14 nt, Human
ucgagcgcccugca

SEQ ID NO: 1306853 - RNA, 18 nt, Human
ucgagaucccaacacugc

SEQ ID NO: 1306854 - RNA, 21 nt, Human
ucgagaucccaacacugccag

SEQ ID NO: 1306855 - RNA, 18 nt, Human
ucgcuauugucaccaggg

SEQ ID NO: 1306856 - RNA, 22 nt, Human
ucgcuagcaguggcaggcagag

SEQ ID NO: 1306857 - RNA, 21 nt, Human
ucgcuagcaguggcaggcaga

SEQ ID NO: 1306858 - RNA, 23 nt, Human
ucgcuagcauuucccaacacaaa

SEQ ID NO: 1306859 - RNA, 17 nt, Human
ucgcggcccucaguagu

SEQ ID NO: 1306860 - RNA, 22 nt, Human
ucgcggcccucaguagucccug

SEQ ID NO: 1306861 - RNA, 14 nt, Human
ucgcuccccacucu

SEQ ID NO: 1306862 - RNA, 15 nt, Human
ucgcuccccacucug

SEQ ID NO: 1306863 - RNA, 18 nt, Human
ucgcuccccacucugcuc

SEQ ID NO: 1306864 - RNA, 13 nt, Human
acuggcuucagca

SEQ ID NO: 1306865 - RNA, 15 nt, Human
acuggcuucagcaag

SEQ ID NO: 1306866 - RNA, 14 nt, Human
acuggcuuuuauua

SEQ ID NO: 1306867 - RNA, 18 nt, Human
acuggcuuuuauuaaugc

SEQ ID NO: 1306868 - RNA, 19 nt, Human
acuggcuuuuauuaaugca

SEQ ID NO: 1306869 - RNA, 13 nt, Human
acugccuucucaa

SEQ ID NO: 1306870 - RNA, 19 nt, Human
acugccuucucaacuccaa

SEQ ID NO: 1306871 - RNA, 20 nt, Human
acugccuucucaacuccaaa

SEQ ID NO: 1306872 - RNA, 23 nt, Human
acugccuucgcuucuugccucug

SEQ ID NO: 1306873 - RNA, 13 nt, Human
acugcuaaauaaa

SEQ ID NO: 1306874 - RNA, 14 nt, Human
acugcuaaauaaaa

SEQ ID NO: 1306875 - RNA, 15 nt, Human
acugcuaaauaaaau

SEQ ID NO: 1306876 - RNA, 16 nt, Human
acugcuaaauaaaauu

SEQ ID NO: 1306877 - RNA, 17 nt, Human
acugcuaaauaaaauuu

SEQ ID NO: 1306878 - RNA, 19 nt, Human
acugcuaaauaaaauuugu

SEQ ID NO: 1306879 - RNA, 20 nt, Human
acugcuaaauaaaauuuguu

SEQ ID NO: 1306880 - RNA, 14 nt, Human
acugcuacagcaau

SEQ ID NO: 1306881 - RNA, 16 nt, Human
acugcuacagcaauuu

SEQ ID NO: 1306882 - RNA, 15 nt, Human
acugcuggcugccuu

SEQ ID NO: 1306883 - RNA, 18 nt, Human
acugcucuaacagcccuc

SEQ ID NO: 1306884 - RNA, 13 nt, Human
acugcuccuccuc

SEQ ID NO: 1306885 - RNA, 14 nt, Human
acugcuguggccag

SEQ ID NO: 1306886 - RNA, 15 nt, Human
acugcuguggccagg

SEQ ID NO: 1306887 - RNA, 16 nt, Human
acugcuguggccagga

SEQ ID NO: 1306888 - RNA, 17 nt, Human
acugcuguggccaggag

SEQ ID NO: 1306889 - RNA, 13 nt, Human
acugcuuaauuca

SEQ ID NO: 1306890 - RNA, 16 nt, Human
acugcuuaauucaaau

SEQ ID NO: 1306891 - RNA, 18 nt, Human
acugcuguggccaggagg

SEQ ID NO: 1306892 - RNA, 19 nt, Human
acugcuguggccaggaggu

SEQ ID NO: 1306893 - RNA, 20 nt, Human
acugcuguggccaggaggug

SEQ ID NO: 1306894 - RNA, 15 nt, Human
acugcuguuauauuu

SEQ ID NO: 1306895 - RNA, 18 nt, Human
acugcuguuauauuucau

SEQ ID NO: 1306896 - RNA, 20 nt, Human
acugcuguuauauuucauca

SEQ ID NO: 1306897 - RNA, 22 nt, Human
acuggagugugcgugguggucc

SEQ ID NO: 1306898 - RNA, 22 nt, Human
acugcuucaaucucaauugcuu

SEQ ID NO: 1306899 - RNA, 12 nt, Human
acugcuuucugu

SEQ ID NO: 1306900 - RNA, 14 nt, Human
acugcuuucuguuc

SEQ ID NO: 1306901 - RNA, 16 nt, Human
acugcuuucuguucca

SEQ ID NO: 1306902 - RNA, 17 nt, Human
acugcuuucuguuccaa

SEQ ID NO: 1306903 - RNA, 18 nt, Human
acugcuuucuguuccaaa

SEQ ID NO: 1306904 - RNA, 19 nt, Human
acugcuuucuguuccaaau

SEQ ID NO: 1306905 - RNA, 14 nt, Human
acuggcacagaggu

SEQ ID NO: 1306906 - RNA, 12 nt, Human
acuggcacagag

SEQ ID NO: 1306907 - RNA, 14 nt, Human
acuggccaagcuga

SEQ ID NO: 1306908 - RNA, 16 nt, Human
acuggccaagcugagg

SEQ ID NO: 1306909 - RNA, 17 nt, Human
acuggccaagcugaggu

SEQ ID NO: 1306910 - RNA, 18 nt, Human
acuggccaagcugaggug

SEQ ID NO: 1306911 - RNA, 19 nt, Human
acuggccaagcugaggugc

SEQ ID NO: 1306912 - RNA, 21 nt, Human
acuggccaagcugaggugccc

SEQ ID NO: 1306913 - RNA, 21 nt, Human
acugccuauuuuaauaaacac

SEQ ID NO: 1306914 - RNA, 16 nt, Human
acugccuauuuuaaua

SEQ ID NO: 1306915 - RNA, 17 nt, Human
acugccucgaaacacag

SEQ ID NO: 1306916 - RNA, 19 nt, Human
acugccucgaaacacagaa

SEQ ID NO: 1306917 - RNA, 15 nt, Human
acugcauuauauuua

SEQ ID NO: 1306918 - RNA, 17 nt, Human
acugcauuauuugagaa

SEQ ID NO: 1306919 - RNA, 23 nt, Human
acugcauucuucugagcacuguu

SEQ ID NO: 1306920 - RNA, 14 nt, Human
acugcauuauuuga

SEQ ID NO: 1306921 - RNA, 14 nt, Human
acugcauuauauuu

SEQ ID NO: 1306922 - RNA, 14 nt, Human
acugccucuuccuc

SEQ ID NO: 1306923 - RNA, 15 nt, Human
acugccucuuccucc

SEQ ID NO: 1306924 - RNA, 9 nt, Human
acugccugc

SEQ ID NO: 1306925 - RNA, 11 nt, Human
acugccugcuc

SEQ ID NO: 1306926 - RNA, 13 nt, Human
acugccugcuccc

SEQ ID NO: 1306927 - RNA, 15 nt, Human
acugccugcucccau

SEQ ID NO: 1306928 - RNA, 19 nt, Human
acugccugcucccauccug

SEQ ID NO: 1306929 - RNA, 14 nt, Human
acugccugcuuggg

SEQ ID NO: 1306930 - RNA, 15 nt, Human
acugccuucgcuucu

SEQ ID NO: 1306931 - RNA, 16 nt, Human
acugccuucgcuucuu

SEQ ID NO: 1306932 - RNA, 17 nt, Human
acugccuucgcuucuug

SEQ ID NO: 1306933 - RNA, 21 nt, Human
acugccuucgcuucuugccuc

SEQ ID NO: 1306934 - RNA, 22 nt, Human
acugccuucgcuucuugccucu

SEQ ID NO: 1306935 - RNA, 15 nt, Human
acugcauccagccug

SEQ ID NO: 1306936 - RNA, 14 nt, Human
acugcauccagccu

SEQ ID NO: 1306937 - RNA, 20 nt, Human
acugcauacuuuuuaaaugu

SEQ ID NO: 1306938 - RNA, 23 nt, Human
acugcauacuuuuuaaauguaaa

SEQ ID NO: 1306939 - RNA, 17 nt, Human
acugcauccuccgccuc

SEQ ID NO: 1306940 - RNA, 20 nt, Human
acugcauccuccgccucccg

SEQ ID NO: 1306941 - RNA, 23 nt, Human
acugcauccuccgccucccgggu

SEQ ID NO: 1306942 - RNA, 12 nt, Human
acugcaugcacu

SEQ ID NO: 1306943 - RNA, 14 nt, Human
acugcaugcacuuc

SEQ ID NO: 1306944 - RNA, 18 nt, Human
acugcaugcacuucuuac

SEQ ID NO: 1306945 - RNA, 14 nt, Human
acugcaugcccaga

SEQ ID NO: 1306946 - RNA, 17 nt, Human
acugcaugcccagagac

SEQ ID NO: 1306947 - RNA, 22 nt, Human
acugcaugcccagagacccagc

SEQ ID NO: 1306948 - RNA, 16 nt, Human
uccuacuggucucucu

SEQ ID NO: 1306949 - RNA, 17 nt, Human
uccuacuggucucucua

SEQ ID NO: 1306950 - RNA, 19 nt, Human
uccuacuggucucucuaug

SEQ ID NO: 1306951 - RNA, 18 nt, Human
uccuagagaagacaggcu

SEQ ID NO: 1306952 - RNA, 13 nt, Human
acugcauacuuuu

SEQ ID NO: 1306953 - RNA, 16 nt, Human
acugcauacuuuuuaa

SEQ ID NO: 1306954 - RNA, 17 nt, Human
acugcauacuuuuuaaa

SEQ ID NO: 1306955 - RNA, 18 nt, Human
acugcauacuuuuuaaau

SEQ ID NO: 1306956 - RNA, 20 nt, Human
uccuagagaagacaggcugg

SEQ ID NO: 1306957 - RNA, 19 nt, Human
uccuagagaagacaggcug

SEQ ID NO: 1306958 - RNA, 20 nt, Human
ucuaaagccauuguaguccu

SEQ ID NO: 1306959 - RNA, 12 nt, Human
ucuaaagcaaau

SEQ ID NO: 1306960 - RNA, 12 nt, Human
ucuaaagcucug

SEQ ID NO: 1306961 - RNA, 14 nt, Human
ucuaaagcucugac

SEQ ID NO: 1306962 - RNA, 17 nt, Human
ucuaaggaccugaaauu

SEQ ID NO: 1306963 - RNA, 21 nt, Human
ucuaaggaccugaaauuccaa

SEQ ID NO: 1306964 - RNA, 23 nt, Human
ucuaaggaccugaaauuccaaag

SEQ ID NO: 1306965 - RNA, 18 nt, Human
ucuaaggccuaggauucu

SEQ ID NO: 1306966 - RNA, 19 nt, Human
ucuaaggccuaggauucua

SEQ ID NO: 1306967 - RNA, 20 nt, Human
ucuaaggccuaggauucuaa

SEQ ID NO: 1306968 - RNA, 21 nt, Human
ucuaaggccuaggauucuaaa

SEQ ID NO: 1306969 - RNA, 22 nt, Human
ucuaaggccuaggauucuaaaa

SEQ ID NO: 1306970 - RNA, 13 nt, Human
ucuaaggcucuga

SEQ ID NO: 1306971 - RNA, 14 nt, Human
ucuaaggcucugag

SEQ ID NO: 1306972 - RNA, 15 nt, Human
ucuaaggcucugaga

SEQ ID NO: 1306973 - RNA, 16 nt, Human
ucuaaggcucugagag

SEQ ID NO: 1306974 - RNA, 17 nt, Human
ucuaaggcucugagagu

SEQ ID NO: 1306975 - RNA, 20 nt, Human
ucuaaggcucugagagucua

SEQ ID NO: 1306976 - RNA, 23 nt, Human
ucuaaggcucugagagucuagau

SEQ ID NO: 1306977 - RNA, 22 nt, Human
ucuaaggcucugagagucuaga

SEQ ID NO: 1306978 - RNA, 20 nt, Human
ucuaagguccgguguucuaa

SEQ ID NO: 1306979 - RNA, 22 nt, Human
ucuaagguccgguguucuaaga

SEQ ID NO: 1306980 - RNA, 23 nt, Human
ucuaagguccgguguucuaagau

SEQ ID NO: 1306981 - RNA, 14 nt, Human
ucuaaguaaauaca

SEQ ID NO: 1306982 - RNA, 15 nt, Human
ucuaaguaaauacaa

SEQ ID NO: 1306983 - RNA, 16 nt, Human
ucuaaguaaauacaau

SEQ ID NO: 1306984 - RNA, 18 nt, Human
ucuacagucucgucucuu

SEQ ID NO: 1306985 - RNA, 21 nt, Human
acuguucuaaagcucugacau

SEQ ID NO: 1306986 - RNA, 13 nt, Human
acuguucuaaagc

SEQ ID NO: 1306987 - RNA, 14 nt, Human
acuguucuaaagcu

SEQ ID NO: 1306988 - RNA, 16 nt, Human
acuguucuaaagcucu

SEQ ID NO: 1306989 - RNA, 17 nt, Human
acuguucuaaagcucug

SEQ ID NO: 1306990 - RNA, 18 nt, Human
acuguucuaaagcucuga

SEQ ID NO: 1306991 - RNA, 17 nt, Human
ucuaccaaccuguucaa

SEQ ID NO: 1306992 - RNA, 14 nt, Human
ucuaccauuucaga

SEQ ID NO: 1306993 - RNA, 15 nt, Human
ucuaccauuucagag

SEQ ID NO: 1306994 - RNA, 18 nt, Human
ucuaccauuucagagagg

SEQ ID NO: 1306995 - RNA, 17 nt, Human
ucuaccauuuucugguu

SEQ ID NO: 1306996 - RNA, 20 nt, Human
ucuaccauuuucugguucuu

SEQ ID NO: 1306997 - RNA, 19 nt, Human
acuguuguagaagacaaaa

SEQ ID NO: 1306998 - RNA, 20 nt, Human
acuuaagcaucuggcucuaa

SEQ ID NO: 1306999 - RNA, 21 nt, Human
acuuaagcaucuggcucuaau

SEQ ID NO: 1307000 - RNA, 21 nt, Human
acuuaagcccagugcacugaa

SEQ ID NO: 1307001 - RNA, 16 nt, Human
acuuaaggcauuuguu

SEQ ID NO: 1307002 - RNA, 17 nt, Human
acuuaauacuaccuuga

SEQ ID NO: 1307003 - RNA, 18 nt, Human
acuuaauacuaccuugaa

SEQ ID NO: 1307004 - RNA, 19 nt, Human
acuuaauacuaccuugaaa

SEQ ID NO: 1307005 - RNA, 21 nt, Human
acuuaauacuaccuugaaaau

SEQ ID NO: 1307006 - RNA, 13 nt, Human
acuguucuguguc

SEQ ID NO: 1307007 - RNA, 15 nt, Human
acuguucugugucuu

SEQ ID NO: 1307008 - RNA, 16 nt, Human
acuguucugugucuuu

SEQ ID NO: 1307009 - RNA, 17 nt, Human
acuguucugugucuuuc

SEQ ID NO: 1307010 - RNA, 19 nt, Human
acuguucuuagcucaauga

SEQ ID NO: 1307011 - RNA, 13 nt, Human
acuguucuuagcu

SEQ ID NO: 1307012 - RNA, 12 nt, Human
acuguuggaaug

SEQ ID NO: 1307013 - RNA, 21 nt, Human
acuguuggaauggauuuuucu

SEQ ID NO: 1307014 - RNA, 18 nt, Human
acuuauaguacaugauaa

SEQ ID NO: 1307015 - RNA, 17 nt, Human
acuuauaguacaugaua

SEQ ID NO: 1307016 - RNA, 15 nt, Human
acuuauaguacauga

SEQ ID NO: 1307017 - RNA, 14 nt, Human
acuuauaguacaug

SEQ ID NO: 1307018 - RNA, 14 nt, Human
acuucagcucuguu

SEQ ID NO: 1307019 - RNA, 18 nt, Human
acuuauauggaaauucug

SEQ ID NO: 1307020 - RNA, 17 nt, Human
acuuauaauuuuccuaa

SEQ ID NO: 1307021 - RNA, 13 nt, Human
acuuauagccucu

SEQ ID NO: 1307022 - RNA, 14 nt, Human
acuuauagccucug

SEQ ID NO: 1307023 - RNA, 15 nt, Human
acuuauagccucugu

SEQ ID NO: 1307024 - RNA, 21 nt, Human
acuuauagccucugucuggca

SEQ ID NO: 1307025 - RNA, 16 nt, Human
acuuagaaauugcauu

SEQ ID NO: 1307026 - RNA, 16 nt, Human
acuuacuugcuuauuu

SEQ ID NO: 1307027 - RNA, 13 nt, Human
acuuacuuuuucu

SEQ ID NO: 1307028 - RNA, 21 nt, Human
acuuacuuuuucuggucucua

SEQ ID NO: 1307029 - RNA, 20 nt, Human
acuuagaaaaccagcucagc

SEQ ID NO: 1307030 - RNA, 21 nt, Human
acuuagaaaaccagcucagca

SEQ ID NO: 1307031 - RNA, 20 nt, Human
acuuaguauugcaaagucag

SEQ ID NO: 1307032 - RNA, 19 nt, Human
acuuaguauugcaaaguca

SEQ ID NO: 1307033 - RNA, 19 nt, Human
acuuaauacucaaaugagu

SEQ ID NO: 1307034 - RNA, 16 nt, Human
acuuaaucaaaacuca

SEQ ID NO: 1307035 - RNA, 19 nt, Human
acuuacaugauucauuuua

SEQ ID NO: 1307036 - RNA, 17 nt, Human
acuuacaugauucauuu

SEQ ID NO: 1307037 - RNA, 18 nt, Human
acuuacaugauucauuuu

SEQ ID NO: 1307038 - RNA, 21 nt, Human
acuuaccaggcaccaaaagaa

SEQ ID NO: 1307039 - RNA, 22 nt, Human
acuuaccaggcaccaaaagaag

SEQ ID NO: 1307040 - RNA, 14 nt, Human
acuuacauuuacaa

SEQ ID NO: 1307041 - RNA, 15 nt, Human
acuuacauuuacaaa

SEQ ID NO: 1307042 - RNA, 19 nt, Human
acuuacauuuacaaacuga

SEQ ID NO: 1307043 - RNA, 18 nt, Human
acuuaccaggcaccaaaa

SEQ ID NO: 1307044 - RNA, 15 nt, Human
acuuacuugcuuauu

SEQ ID NO: 1307045 - RNA, 21 nt, Human
acugugugcucaggagcccug

SEQ ID NO: 1307046 - RNA, 20 nt, Human
acugugugcucaggagcccu

SEQ ID NO: 1307047 - RNA, 19 nt, Human
acugugugcucaggagccc

SEQ ID NO: 1307048 - RNA, 15 nt, Human
acugugugcucagga

SEQ ID NO: 1307049 - RNA, 12 nt, Human
acugugugcuca

SEQ ID NO: 1307050 - RNA, 21 nt, Human
acuguguccaggugguacuuu

SEQ ID NO: 1307051 - RNA, 21 nt, Human
acuguguauuccaagacaugu

SEQ ID NO: 1307052 - RNA, 17 nt, Human
acuguguacauaacuga

SEQ ID NO: 1307053 - RNA, 15 nt, Human
acuguguauuccaag

SEQ ID NO: 1307054 - RNA, 16 nt, Human
acuguguauuccaaga

SEQ ID NO: 1307055 - RNA, 12 nt, Human
acuguguaacug

SEQ ID NO: 1307056 - RNA, 13 nt, Human
acuguguaacugc

SEQ ID NO: 1307057 - RNA, 14 nt, Human
acuguguaacugcc

SEQ ID NO: 1307058 - RNA, 15 nt, Human
acuguguaacugccc

SEQ ID NO: 1307059 - RNA, 17 nt, Human
acuguguaacugcccaa

SEQ ID NO: 1307060 - RNA, 19 nt, Human
acuguguaagggccagaaa

SEQ ID NO: 1307061 - RNA, 21 nt, Human
acuguguaagggccagaaaua

SEQ ID NO: 1307062 - RNA, 13 nt, Human
acuguguaauuag

SEQ ID NO: 1307063 - RNA, 12 nt, Human
acuguguacaua

SEQ ID NO: 1307064 - RNA, 16 nt, Human
acuguguacauaacug

SEQ ID NO: 1307065 - RNA, 18 nt, Human
acuguguacauaacugaa

SEQ ID NO: 1307066 - RNA, 18 nt, Human
acuguggguagacacaca

SEQ ID NO: 1307067 - RNA, 17 nt, Human
acugggagaaaugaaaa

SEQ ID NO: 1307068 - RNA, 20 nt, Human
acugggaaggcuugggauuu

SEQ ID NO: 1307069 - RNA, 17 nt, Human
acugggaaggcuacuuc

SEQ ID NO: 1307070 - RNA, 15 nt, Human
acugggaccaggcac

SEQ ID NO: 1307071 - RNA, 15 nt, Human
acugucacuguuccu

SEQ ID NO: 1307072 - RNA, 16 nt, Human
acugggagaaaugaaa

SEQ ID NO: 1307073 - RNA, 18 nt, Human
acugggacaggggagaac

SEQ ID NO: 1307074 - RNA, 20 nt, Human
acuggcuuuuauuaaugcac

SEQ ID NO: 1307075 - RNA, 21 nt, Human
acuggcuuuuauuaaugcacu

SEQ ID NO: 1307076 - RNA, 23 nt, Human
acuggcuuuuauuaaugcacuuu

SEQ ID NO: 1307077 - RNA, 16 nt, Human
acugggaaccccuuuc

SEQ ID NO: 1307078 - RNA, 17 nt, Human
acugggaaccccuuucc

SEQ ID NO: 1307079 - RNA, 19 nt, Human
acugggaaccccuuuccca

SEQ ID NO: 1307080 - RNA, 20 nt, Human
acugggaaccccuuucccac

SEQ ID NO: 1307081 - RNA, 11 nt, Human
acugggaaggc

SEQ ID NO: 1307082 - RNA, 12 nt, Human
acugggaaggcu

SEQ ID NO: 1307083 - RNA, 19 nt, Human
acugucagcagggacugua

SEQ ID NO: 1307084 - RNA, 22 nt, Human
acugucagcagggacuguaaac

SEQ ID NO: 1307085 - RNA, 22 nt, Human
acugugcuguuguuaugaugug

SEQ ID NO: 1307086 - RNA, 23 nt, Human
acugugcuguuguuaugaugugc

SEQ ID NO: 1307087 - RNA, 18 nt, Human
acugugcuguuguuauga

SEQ ID NO: 1307088 - RNA, 14 nt, Human
acugugcuguuguu

SEQ ID NO: 1307089 - RNA, 13 nt, Human
acugugcuguugu

SEQ ID NO: 1307090 - RNA, 16 nt, Human
acugucccuugccuca

SEQ ID NO: 1307091 - RNA, 13 nt, Human
ucguaaaauuaag

SEQ ID NO: 1307092 - RNA, 16 nt, Human
ucgguagguucagcca

SEQ ID NO: 1307093 - RNA, 20 nt, Human
ucgguauccccccaucuugc

SEQ ID NO: 1307094 - RNA, 14 nt, Human
ucggucugugcccc

SEQ ID NO: 1307095 - RNA, 12 nt, Human
ucggugaagaaa

SEQ ID NO: 1307096 - RNA, 16 nt, Human
ucguaaaauuaagaaa

SEQ ID NO: 1307097 - RNA, 13 nt, Human
ucgguuucuccaa

SEQ ID NO: 1307098 - RNA, 15 nt, Human
ucguaaagauuuggg

SEQ ID NO: 1307099 - RNA, 22 nt, Human
ucguuuucaaaauuguuacaaa

SEQ ID NO: 1307100 - RNA, 17 nt, Human
ucguuugaaucacagua

SEQ ID NO: 1307101 - RNA, 13 nt, Human
ucguaaagauuug

SEQ ID NO: 1307102 - RNA, 14 nt, Human
ucguuuguguucug

SEQ ID NO: 1307103 - RNA, 15 nt, Human
ucguuuguguucugu

SEQ ID NO: 1307104 - RNA, 13 nt, Human
ucguuuguuuguu

SEQ ID NO: 1307105 - RNA, 20 nt, Human
ucguuuguuuguuuguuuaa

SEQ ID NO: 1307106 - RNA, 13 nt, Human
ucguuuucuuaaa

SEQ ID NO: 1307107 - RNA, 21 nt, Human
ucguuuucuuaaagugccagu

SEQ ID NO: 1307108 - RNA, 14 nt, Human
ucguuuuuuacaaa

SEQ ID NO: 1307109 - RNA, 20 nt, Human
ucguuuuuuuuuuguuuguu

SEQ ID NO: 1307110 - RNA, 17 nt, Human
ucguuuuuuucauucca

SEQ ID NO: 1307111 - RNA, 11 nt, Human
ucuaaaacucc

SEQ ID NO: 1307112 - RNA, 18 nt, Human
ucuaaaagaaaaaggcau

SEQ ID NO: 1307113 - RNA, 15 nt, Human
ucuaaaaucuuauag

SEQ ID NO: 1307114 - RNA, 18 nt, Human
ucuaaaaucuuauaguuc

SEQ ID NO: 1307115 - RNA, 19 nt, Human
ucuaaaaucuuauaguucu

SEQ ID NO: 1307116 - RNA, 22 nt, Human
ucuaaaaucuuauaguucuagg

SEQ ID NO: 1307117 - RNA, 23 nt, Human
ucuaaaaucuuauaguucuaggc

SEQ ID NO: 1307118 - RNA, 19 nt, Human
ucuaaagauggaguuucua

SEQ ID NO: 1307119 - RNA, 20 nt, Human
ucuaaagauggaguuucuaa

SEQ ID NO: 1307120 - RNA, 21 nt, Human
ucuaaagauggaguuucuaag

SEQ ID NO: 1307121 - RNA, 22 nt, Human
ucuaaagauggaguuucuaagg

SEQ ID NO: 1307122 - RNA, 23 nt, Human
ucuaaagauggaguuucuaaggu

SEQ ID NO: 1307123 - RNA, 13 nt, Human
ucuaaagauucua

SEQ ID NO: 1307124 - RNA, 15 nt, Human
ucuaaagauucuaua

SEQ ID NO: 1307125 - RNA, 16 nt, Human
ucuaaagauucuauag

SEQ ID NO: 1307126 - RNA, 20 nt, Human
ucuaaagauucuauaguucu

SEQ ID NO: 1307127 - RNA, 22 nt, Human
ucuaaagauucuauaguucuag

SEQ ID NO: 1307128 - RNA, 23 nt, Human
ucuaaagauucuauaguucuaga

SEQ ID NO: 1307129 - RNA, 11 nt, Human
ucuaaagcaaa

SEQ ID NO: 1307130 - RNA, 16 nt, Human
ucggcugaccaugcuc

SEQ ID NO: 1307131 - RNA, 21 nt, Human
ucgggaaaagguagaggaguc

SEQ ID NO: 1307132 - RNA, 18 nt, Human
ucggcucacugcauccuc

SEQ ID NO: 1307133 - RNA, 19 nt, Human
ucggccugcccccacccca

SEQ ID NO: 1307134 - RNA, 19 nt, Human
ucggcuccccauguguccu

SEQ ID NO: 1307135 - RNA, 15 nt, Human
ucggcugaccaugcu

SEQ ID NO: 1307136 - RNA, 21 nt, Human
ucgggcagcacaaguguaaug

SEQ ID NO: 1307137 - RNA, 22 nt, Human
ucgggcagcacaaguguaauga

SEQ ID NO: 1307138 - RNA, 13 nt, Human
ucgggcccuuccc

SEQ ID NO: 1307139 - RNA, 14 nt, Human
ucggggugcacagg

SEQ ID NO: 1307140 - RNA, 15 nt, Human
ucggggugcacagga

SEQ ID NO: 1307141 - RNA, 16 nt, Human
ucggggugcacaggag

SEQ ID NO: 1307142 - RNA, 17 nt, Human
ucggggugcacaggagg

SEQ ID NO: 1307143 - RNA, 19 nt, Human
ucggggugcacaggagggg

SEQ ID NO: 1307144 - RNA, 22 nt, Human
ucggggugcacaggaggggguc

SEQ ID NO: 1307145 - RNA, 19 nt, Human
uccuaaauauauuuuaaga

SEQ ID NO: 1307146 - RNA, 14 nt, Human
uccuaaauauuaug

SEQ ID NO: 1307147 - RNA, 21 nt, Human
uccuaaauauuaugagaugcu

SEQ ID NO: 1307148 - RNA, 18 nt, Human
uccuaaauuuuccugucc

SEQ ID NO: 1307149 - RNA, 19 nt, Human
uccuaaauuuuccuguccu

SEQ ID NO: 1307150 - RNA, 14 nt, Human
uccuacuuccccuu

SEQ ID NO: 1307151 - RNA, 20 nt, Human
uccuaaauuuuccuguccuc

SEQ ID NO: 1307152 - RNA, 16 nt, Human
uccuaagagugcuggg

SEQ ID NO: 1307153 - RNA, 14 nt, Human
ucccuuuuccauga

SEQ ID NO: 1307154 - RNA, 13 nt, Human
ucccuuuucuguu

SEQ ID NO: 1307155 - RNA, 14 nt, Human
ucccuuuucuguuc

SEQ ID NO: 1307156 - RNA, 16 nt, Human
ucccuuuucuguucua

SEQ ID NO: 1307157 - RNA, 20 nt, Human
ucccuuuucuguucuaguuu

SEQ ID NO: 1307158 - RNA, 21 nt, Human
uccgggaccuggugcugccuc

SEQ ID NO: 1307159 - RNA, 20 nt, Human
ucccuggguagcgggggagg

SEQ ID NO: 1307160 - RNA, 12 nt, Human
ucccuggucccu

SEQ ID NO: 1307161 - RNA, 11 nt, Human
ucccuggugcu

SEQ ID NO: 1307162 - RNA, 15 nt, Human
ucccuggugcuuaug

SEQ ID NO: 1307163 - RNA, 14 nt, Human
ucccugugccccca

SEQ ID NO: 1307164 - RNA, 14 nt, Human
ucccugugccuccu

SEQ ID NO: 1307165 - RNA, 21 nt, Human
ucccuuaauauccuaaacauc

SEQ ID NO: 1307166 - RNA, 17 nt, Human
ucccuuaauauccuaaa

SEQ ID NO: 1307167 - RNA, 19 nt, Human
ucccugugccuccucccuc

SEQ ID NO: 1307168 - RNA, 16 nt, Human
ucccugugccuccucc

SEQ ID NO: 1307169 - RNA, 19 nt, Human
ucccuguuuuccccccaag

SEQ ID NO: 1307170 - RNA, 19 nt, Human
ucccuguuuucccacgagg

SEQ ID NO: 1307171 - RNA, 15 nt, Human
ucccuuaaacaaaaa

SEQ ID NO: 1307172 - RNA, 22 nt, Human
ucccuuaaacaaaaauuaaaau

SEQ ID NO: 1307173 - RNA, 16 nt, Human
ucccuuaacaguugua

SEQ ID NO: 1307174 - RNA, 17 nt, Human
ucccuuaacaguuguau

SEQ ID NO: 1307175 - RNA, 20 nt, Human
ucccuuaacaguuguauuua

SEQ ID NO: 1307176 - RNA, 22 nt, Human
ucccuuaacaguuguauuuaac

SEQ ID NO: 1307177 - RNA, 14 nt, Human
ucccuuaauauccu

SEQ ID NO: 1307178 - RNA, 14 nt, Human
acuccugaaaaaaa

SEQ ID NO: 1307179 - RNA, 16 nt, Human
acuccugaaaaaaaac

SEQ ID NO: 1307180 - RNA, 19 nt, Human
acuccugaaaaaaaaccug

SEQ ID NO: 1307181 - RNA, 15 nt, Human
acuccugaccucaag

SEQ ID NO: 1307182 - RNA, 13 nt, Human
acuccucugucca

SEQ ID NO: 1307183 - RNA, 13 nt, Human
acuccucugcuga

SEQ ID NO: 1307184 - RNA, 16 nt, Human
acuccucugcugaccu

SEQ ID NO: 1307185 - RNA, 14 nt, Human
acuccucuguccag

SEQ ID NO: 1307186 - RNA, 21 nt, Human
acuccucugcugaccugcuga

SEQ ID NO: 1307187 - RNA, 13 nt, Human
acuccugaaaaaa

SEQ ID NO: 1307188 - RNA, 16 nt, Human
acuccuccuuuuucca

SEQ ID NO: 1307189 - RNA, 14 nt, Human
acuccucugacuca

SEQ ID NO: 1307190 - RNA, 20 nt, Human
acuccucugacucagggcuc

SEQ ID NO: 1307191 - RNA, 13 nt, Human
acuccagaccccu

SEQ ID NO: 1307192 - RNA, 13 nt, Human
acucauuagacug

SEQ ID NO: 1307193 - RNA, 14 nt, Human
acucauuagacugg

SEQ ID NO: 1307194 - RNA, 15 nt, Human
acucauuagacugga

SEQ ID NO: 1307195 - RNA, 21 nt, Human
acucauuagacuggaacuuga

SEQ ID NO: 1307196 - RNA, 13 nt, Human
acucauucauuag

SEQ ID NO: 1307197 - RNA, 16 nt, Human
acucauucauuaguca

SEQ ID NO: 1307198 - RNA, 15 nt, Human
acucauucugaagga

SEQ ID NO: 1307199 - RNA, 19 nt, Human
acucauucugaaggagccc

SEQ ID NO: 1307200 - RNA, 18 nt, Human
acucaugugacucuuucc

SEQ ID NO: 1307201 - RNA, 19 nt, Human
acucaugugacucuuucca

SEQ ID NO: 1307202 - RNA, 15 nt, Human
acucacuuucuagau

SEQ ID NO: 1307203 - RNA, 14 nt, Human
acucacuuuuccca

SEQ ID NO: 1307204 - RNA, 15 nt, Human
acucacuuuucccac

SEQ ID NO: 1307205 - RNA, 16 nt, Human
acucacuuuucccacu

SEQ ID NO: 1307206 - RNA, 18 nt, Human
acucacuuuucccacucc

SEQ ID NO: 1307207 - RNA, 17 nt, Human
acucacuuuucccacuc

SEQ ID NO: 1307208 - RNA, 13 nt, Human
acucagaaauuca

SEQ ID NO: 1307209 - RNA, 21 nt, Human
acuacuagggaaaugccuuug

SEQ ID NO: 1307210 - RNA, 22 nt, Human
acuaccuguaaugacaggccug

SEQ ID NO: 1307211 - RNA, 13 nt, Human
acuacucagcaug

SEQ ID NO: 1307212 - RNA, 12 nt, Human
acuacucagcau

SEQ ID NO: 1307213 - RNA, 17 nt, Human
acuacucagcauggaaa

SEQ ID NO: 1307214 - RNA, 13 nt, Human
acucaccacugcc

SEQ ID NO: 1307215 - RNA, 20 nt, Human
uccccuaagcagaccacuga

SEQ ID NO: 1307216 - RNA, 16 nt, Human
uccccuagagucccag

SEQ ID NO: 1307217 - RNA, 15 nt, Human
uccccuagaguccca

SEQ ID NO: 1307218 - RNA, 23 nt, Human
uccccuauguggaaguggggcgg

SEQ ID NO: 1307219 - RNA, 14 nt, Human
uccccuccaucccu

SEQ ID NO: 1307220 - RNA, 15 nt, Human
uccccuccaucccug

SEQ ID NO: 1307221 - RNA, 16 nt, Human
uccccuccaucccugg

SEQ ID NO: 1307222 - RNA, 20 nt, Human
uccccuccaucccuggcccc

SEQ ID NO: 1307223 - RNA, 18 nt, Human
uccccuccaucccuggcc

SEQ ID NO: 1307224 - RNA, 14 nt, Human
uccccuccccaacu

SEQ ID NO: 1307225 - RNA, 20 nt, Human
ucccgaguagcugagauuau

SEQ ID NO: 1307226 - RNA, 24 nt, Human
uccccuuugcuucauucaagucag

SEQ ID NO: 1307227 - RNA, 22 nt, Human
ucccgagcaccuccacauccuc

SEQ ID NO: 1307228 - RNA, 15 nt, Human
ucccgagcuccucuu

SEQ ID NO: 1307229 - RNA, 15 nt, Human
uccccucuccuuccu

SEQ ID NO: 1307230 - RNA, 16 nt, Human
uccccucuccuuccug

SEQ ID NO: 1307231 - RNA, 12 nt, Human
uccccuugccug

SEQ ID NO: 1307232 - RNA, 16 nt, Human
uccccuugccugugcc

SEQ ID NO: 1307233 - RNA, 23 nt, Human
uccccuugccugugccaggugag

SEQ ID NO: 1307234 - RNA, 16 nt, Human
uccccuugggcccaca

SEQ ID NO: 1307235 - RNA, 18 nt, Human
uccccuugggcccacacc

SEQ ID NO: 1307236 - RNA, 19 nt, Human
uccccuugggcccacaccu

SEQ ID NO: 1307237 - RNA, 22 nt, Human
uccccuugggcccacaccuccu

SEQ ID NO: 1307238 - RNA, 14 nt, Human
ucccugacugggag

SEQ ID NO: 1307239 - RNA, 23 nt, Human
ucccugagaugggcuucccaagg

SEQ ID NO: 1307240 - RNA, 20 nt, Human
ucccugaggacugauuucag

SEQ ID NO: 1307241 - RNA, 21 nt, Human
ucccugaggacugauuucaga

SEQ ID NO: 1307242 - RNA, 15 nt, Human
ucccugacugggagu

SEQ ID NO: 1307243 - RNA, 13 nt, Human
ucccugagauggg

SEQ ID NO: 1307244 - RNA, 23 nt, Human
ucccugagcuagaacccucuguu

SEQ ID NO: 1307245 - RNA, 15 nt, Human
ucccugaggacugau

SEQ ID NO: 1307246 - RNA, 18 nt, Human
acucacuaauucauuaau

SEQ ID NO: 1307247 - RNA, 20 nt, Human
acucacuaauucauuaaucu

SEQ ID NO: 1307248 - RNA, 14 nt, Human
acucacuaggcccc

SEQ ID NO: 1307249 - RNA, 15 nt, Human
acucacuaggccccc

SEQ ID NO: 1307250 - RNA, 17 nt, Human
acucacuaggcccccac

SEQ ID NO: 1307251 - RNA, 21 nt, Human
acucacuaggcccccacuugc

SEQ ID NO: 1307252 - RNA, 22 nt, Human
acucacuaggcccccacuugcc

SEQ ID NO: 1307253 - RNA, 16 nt, Human
acucacuccuuuuaaa

SEQ ID NO: 1307254 - RNA, 18 nt, Human
acucacuccuuuuaaaga

SEQ ID NO: 1307255 - RNA, 19 nt, Human
acucacuccuuuuaaagaa

SEQ ID NO: 1307256 - RNA, 15 nt, Human
ucccuccccuugccu

SEQ ID NO: 1307257 - RNA, 21 nt, Human
ucccgggacaccuaggcuagg

SEQ ID NO: 1307258 - RNA, 22 nt, Human
ucccggcugcccuuucugggca

SEQ ID NO: 1307259 - RNA, 13 nt, Human
ucccggcugcccu

SEQ ID NO: 1307260 - RNA, 14 nt, Human
ucccggcugcccuu

SEQ ID NO: 1307261 - RNA, 15 nt, Human
ucccggcugcccuuu

SEQ ID NO: 1307262 - RNA, 18 nt, Human
ucccggcugcccuuucug

SEQ ID NO: 1307263 - RNA, 23 nt, Human
ucccucccagagcaccugcuguc

SEQ ID NO: 1307264 - RNA, 22 nt, Human
ucccucccagaggagccaccag

SEQ ID NO: 1307265 - RNA, 14 nt, Human
ucccuccccuucuc

SEQ ID NO: 1307266 - RNA, 15 nt, Human
ucccuccccuucucu

SEQ ID NO: 1307267 - RNA, 13 nt, Human
ucccuccccuugc

SEQ ID NO: 1307268 - RNA, 14 nt, Human
ucccuccccuugcc

SEQ ID NO: 1307269 - RNA, 17 nt, Human
acgugggcauucaaaug

SEQ ID NO: 1307270 - RNA, 20 nt, Human
acgugggcauucaaauguau

SEQ ID NO: 1307271 - RNA, 22 nt, Human
acguauaaaagccuguuuaaga

SEQ ID NO: 1307272 - RNA, 20 nt, Human
acguacugcagccuccagag

SEQ ID NO: 1307273 - RNA, 14 nt, Human
acguacucugguua

SEQ ID NO: 1307274 - RNA, 18 nt, Human
acguaugucugguucuca

SEQ ID NO: 1307275 - RNA, 17 nt, Human
acguaugucugguucuc

SEQ ID NO: 1307276 - RNA, 13 nt, Human
acguauuuaauag

SEQ ID NO: 1307277 - RNA, 16 nt, Human
acguauuuaauagcaa

SEQ ID NO: 1307278 - RNA, 15 nt, Human
acguauuuaauagca

SEQ ID NO: 1307279 - RNA, 15 nt, Human
acggggacucagccc

SEQ ID NO: 1307280 - RNA, 17 nt, Human
acgggccuguccacagg

SEQ ID NO: 1307281 - RNA, 21 nt, Human
acgguggggguagggggcugg

SEQ ID NO: 1307282 - RNA, 18 nt, Human
acgggacugcggaggaag

SEQ ID NO: 1307283 - RNA, 22 nt, Human
acgggaugguucuggcuguuug

SEQ ID NO: 1307284 - RNA, 18 nt, Human
ucccacccccacccccag

SEQ ID NO: 1307285 - RNA, 20 nt, Human
ucccacccccacccccagcu

SEQ ID NO: 1307286 - RNA, 16 nt, Human
ucccacagccacgugu

SEQ ID NO: 1307287 - RNA, 17 nt, Human
ucccacaggacauuucu

SEQ ID NO: 1307288 - RNA, 14 nt, Human
ucccacaagccucu

SEQ ID NO: 1307289 - RNA, 14 nt, Human
ucccacaagccuga

SEQ ID NO: 1307290 - RNA, 15 nt, Human
ucccacaagccugag

SEQ ID NO: 1307291 - RNA, 16 nt, Human
ucccacaagccugagg

SEQ ID NO: 1307292 - RNA, 21 nt, Human
ucccaagugagucucucuggg

SEQ ID NO: 1307293 - RNA, 17 nt, Human
ucccaagugagucucuc

SEQ ID NO: 1307294 - RNA, 15 nt, Human
ucccaaguguacuau

SEQ ID NO: 1307295 - RNA, 16 nt, Human
ucccaaguugugcuug

SEQ ID NO: 1307296 - RNA, 21 nt, Human
ucccacaagccugagggaaag

SEQ ID NO: 1307297 - RNA, 20 nt, Human
ucccaaguagcugagacuac

SEQ ID NO: 1307298 - RNA, 20 nt, Human
ucccaaguagcugggauuac

SEQ ID NO: 1307299 - RNA, 21 nt, Human
ucccaaguagcugggauuaca

SEQ ID NO: 1307300 - RNA, 23 nt, Human
ucccaaguagcugggauuacagg

SEQ ID NO: 1307301 - RNA, 18 nt, Human
ucccaaagugcugagauu

SEQ ID NO: 1307302 - RNA, 19 nt, Human
ucccaaagugcugagauua

SEQ ID NO: 1307303 - RNA, 20 nt, Human
ucccaaagugcugagauuac

SEQ ID NO: 1307304 - RNA, 23 nt, Human
ucccaaagugcugagauuacagg

SEQ ID NO: 1307305 - RNA, 17 nt, Human
ucccaaguagaaucuca

SEQ ID NO: 1307306 - RNA, 19 nt, Human
ucccaaguagaaucucagu

SEQ ID NO: 1307307 - RNA, 13 nt, Human
ucccaaagugcug

SEQ ID NO: 1307308 - RNA, 21 nt, Human
ucccaaaguccugggauuaca

SEQ ID NO: 1307309 - RNA, 14 nt, Human
ucccaaagcaagca

SEQ ID NO: 1307310 - RNA, 20 nt, Human
ucccaaagcaagcaagaggc

SEQ ID NO: 1307311 - RNA, 20 nt, Human
ucccaaaagcccauucauuc

SEQ ID NO: 1307312 - RNA, 14 nt, Human
ucccaaaaaacuac

SEQ ID NO: 1307313 - RNA, 12 nt, Human
uccauuugcaag

SEQ ID NO: 1307314 - RNA, 14 nt, Human
uccauuucuaauua

SEQ ID NO: 1307315 - RNA, 13 nt, Human
uccauuucuaauu

SEQ ID NO: 1307316 - RNA, 18 nt, Human
uccauuuccccuccuucc

SEQ ID NO: 1307317 - RNA, 12 nt, Human
uccauuucuaau

SEQ ID NO: 1307318 - RNA, 21 nt, Human
ucccaaagaaguucugguaug

SEQ ID NO: 1307319 - RNA, 24 nt, Human
ucccaaacgcccuuuccuccucag

SEQ ID NO: 1307320 - RNA, 20 nt, Human
ucccaaaauguugaaauaug

SEQ ID NO: 1307321 - RNA, 20 nt, Human
ucccaaaccacgccucuuga

SEQ ID NO: 1307322 - RNA, 22 nt, Human
ucccaaacgcccuuuccuccuc

SEQ ID NO: 1307323 - RNA, 23 nt, Human
uccauuuaauggggugcaccugu

SEQ ID NO: 1307324 - RNA, 14 nt, Human
uccauucuggaagu

SEQ ID NO: 1307325 - RNA, 13 nt, Human
uccauucuggaag

SEQ ID NO: 1307326 - RNA, 20 nt, Human
uccauucugcuccuucccca

SEQ ID NO: 1307327 - RNA, 12 nt, Human
uccauucuggaa

SEQ ID NO: 1307328 - RNA, 14 nt, Human
uccauucuccugag

SEQ ID NO: 1307329 - RNA, 18 nt, Human
uccauucucacagguccc

SEQ ID NO: 1307330 - RNA, 20 nt, Human
uccaucucuuguuuaaauuc

SEQ ID NO: 1307331 - RNA, 13 nt, Human
uccaugaagaugu

SEQ ID NO: 1307332 - RNA, 22 nt, Human
uccaugaagauguagaggagaa

SEQ ID NO: 1307333 - RNA, 17 nt, Human
uccaugaaagaacuuaa

SEQ ID NO: 1307334 - RNA, 21 nt, Human
uccaugaagauguagaggaga

SEQ ID NO: 1307335 - RNA, 20 nt, Human
uccauccuugagucaaaaaa

SEQ ID NO: 1307336 - RNA, 16 nt, Human
uccaucuaaacugccc

SEQ ID NO: 1307337 - RNA, 18 nt, Human
uccaucuaaacugccccc

SEQ ID NO: 1307338 - RNA, 21 nt, Human
uccauccugaggcuccacuug

SEQ ID NO: 1307339 - RNA, 20 nt, Human
uccauccugaggcuccacuu

SEQ ID NO: 1307340 - RNA, 15 nt, Human
acuacaguuagggcu

SEQ ID NO: 1307341 - RNA, 17 nt, Human
acuacagcuucagugau

SEQ ID NO: 1307342 - RNA, 16 nt, Human
acuacagucuaaagcu

SEQ ID NO: 1307343 - RNA, 17 nt, Human
acuacagucuaaagcug

SEQ ID NO: 1307344 - RNA, 20 nt, Human
ucccagcaugcugagauuac

SEQ ID NO: 1307345 - RNA, 20 nt, Human
acuacaggcacacaccacca

SEQ ID NO: 1307346 - RNA, 17 nt, Human
acuacaggcgugagcca

SEQ ID NO: 1307347 - RNA, 22 nt, Human
acuacacacuguguacugcagu

SEQ ID NO: 1307348 - RNA, 17 nt, Human
acuacagcuggggugca

SEQ ID NO: 1307349 - RNA, 18 nt, Human
acuacagcuggggugcag

SEQ ID NO: 1307350 - RNA, 19 nt, Human
acuacagcuggggugcagg

SEQ ID NO: 1307351 - RNA, 21 nt, Human
acuacagcuggggugcaggga

SEQ ID NO: 1307352 - RNA, 23 nt, Human
acuacagcuggggugcagggaug

SEQ ID NO: 1307353 - RNA, 16 nt, Human
acuacaaccaauggaa

SEQ ID NO: 1307354 - RNA, 13 nt, Human
acuacacacagua

SEQ ID NO: 1307355 - RNA, 15 nt, Human
acuaaccaagcugag

SEQ ID NO: 1307356 - RNA, 18 nt, Human
acuaaccaagcugaguuu

SEQ ID NO: 1307357 - RNA, 21 nt, Human
acuaaccaagcugaguuuccu

SEQ ID NO: 1307358 - RNA, 22 nt, Human
acuaaccaagcugaguuuccua

SEQ ID NO: 1307359 - RNA, 17 nt, Human
acuacaaagguuuaaau

SEQ ID NO: 1307360 - RNA, 18 nt, Human
acuacaaagguuuaaaug

SEQ ID NO: 1307361 - RNA, 19 nt, Human
acuacaaagguuuaaauga

SEQ ID NO: 1307362 - RNA, 20 nt, Human
acuacaaagguuuaaaugaa

SEQ ID NO: 1307363 - RNA, 21 nt, Human
acuacaaagguuuaaaugaac

SEQ ID NO: 1307364 - RNA, 22 nt, Human
acuacaaagguuuaaaugaaca

SEQ ID NO: 1307365 - RNA, 23 nt, Human
acuacaaagguuuaaaugaacaa

SEQ ID NO: 1307366 - RNA, 11 nt, Human
acuacaaauca

SEQ ID NO: 1307367 - RNA, 13 nt, Human
acuacaaaucaag

SEQ ID NO: 1307368 - RNA, 19 nt, Human
acuacaaaucaaguauuug

SEQ ID NO: 1307369 - RNA, 16 nt, Human
acguugagccccugga

SEQ ID NO: 1307370 - RNA, 18 nt, Human
acguuggagaagcccgug

SEQ ID NO: 1307371 - RNA, 18 nt, Human
acuaacaggccaaagagu

SEQ ID NO: 1307372 - RNA, 15 nt, Human
acuaacauauaaugu

SEQ ID NO: 1307373 - RNA, 17 nt, Human
acuaacauauaauguug

SEQ ID NO: 1307374 - RNA, 17 nt, Human
acuaacauguccugccu

SEQ ID NO: 1307375 - RNA, 14 nt, Human
ucccaucccugcgu

SEQ ID NO: 1307376 - RNA, 12 nt, Human
ucccaucccugc

SEQ ID NO: 1307377 - RNA, 14 nt, Human
ucccauccugugug

SEQ ID NO: 1307378 - RNA, 15 nt, Human
ucccauccugugugu

SEQ ID NO: 1307379 - RNA, 16 nt, Human
ucccauccuguguguu

SEQ ID NO: 1307380 - RNA, 15 nt, Human
uccccaccagaugcu

SEQ ID NO: 1307381 - RNA, 16 nt, Human
uccccaccagaugcug

SEQ ID NO: 1307382 - RNA, 20 nt, Human
uccccaccagaugcugaaaa

SEQ ID NO: 1307383 - RNA, 17 nt, Human
uccccaccagaugcuga

SEQ ID NO: 1307384 - RNA, 13 nt, Human
uccccacccacca

SEQ ID NO: 1307385 - RNA, 21 nt, Human
uccccacccaccaacccucag

SEQ ID NO: 1307386 - RNA, 22 nt, Human
uccccacccaccaacccucagg

SEQ ID NO: 1307387 - RNA, 23 nt, Human
uccccacccaccaacccucaggg

SEQ ID NO: 1307388 - RNA, 13 nt, Human
ucccauccagggc

SEQ ID NO: 1307389 - RNA, 14 nt, Human
ucccauccagggcc

SEQ ID NO: 1307390 - RNA, 14 nt, Human
ucccauccccagcg

SEQ ID NO: 1307391 - RNA, 15 nt, Human
ucccauccccagcga

SEQ ID NO: 1307392 - RNA, 12 nt, Human
ucccagcugccu

SEQ ID NO: 1307393 - RNA, 14 nt, Human
ucccagcugccuag

SEQ ID NO: 1307394 - RNA, 17 nt, Human
ucccagguuggcucugc

SEQ ID NO: 1307395 - RNA, 19 nt, Human
ucccagguuggcucugcca

SEQ ID NO: 1307396 - RNA, 20 nt, Human
ucccagguuggcucugccag

SEQ ID NO: 1307397 - RNA, 21 nt, Human
ucccagguuggcucugccagu

SEQ ID NO: 1307398 - RNA, 23 nt, Human
ucccagguuggcucugccagucc

SEQ ID NO: 1307399 - RNA, 23 nt, Human
ucccaguccaccugaggaacugu

SEQ ID NO: 1307400 - RNA, 19 nt, Human
uccccaucuucuaaaccca

SEQ ID NO: 1307401 - RNA, 17 nt, Human
uccccaugucucgacuc

SEQ ID NO: 1307402 - RNA, 17 nt, Human
uccccauggcccugagc

SEQ ID NO: 1307403 - RNA, 14 nt, Human
uccccauucuuccu

SEQ ID NO: 1307404 - RNA, 17 nt, Human
uccccauucuuccuagu

SEQ ID NO: 1307405 - RNA, 22 nt, Human
uccccauucuuccuaguuuucu

SEQ ID NO: 1307406 - RNA, 19 nt, Human
uccccauuuagguuucuga

SEQ ID NO: 1307407 - RNA, 22 nt, Human
acuacccagguuaagaaaauaa

SEQ ID NO: 1307408 - RNA, 19 nt, Human
acuacccagguuaagaaaa

SEQ ID NO: 1307409 - RNA, 16 nt, Human
acuaccgaaugugucu

SEQ ID NO: 1307410 - RNA, 17 nt, Human
acuaccgaaugugucuu

SEQ ID NO: 1307411 - RNA, 18 nt, Human
acuaccgaaugugucuuu

SEQ ID NO: 1307412 - RNA, 23 nt, Human
acuaccgaaugugucuuuagaua

SEQ ID NO: 1307413 - RNA, 19 nt, Human
acuaccgaaugugucuuua

SEQ ID NO: 1307414 - RNA, 20 nt, Human
accuuuuggucuggagggaa

SEQ ID NO: 1307415 - RNA, 16 nt, Human
uccaccuucccaugcc

SEQ ID NO: 1307416 - RNA, 18 nt, Human
uccaccuucccaugcccu

SEQ ID NO: 1307417 - RNA, 19 nt, Human
uccaccuucccaugcccug

SEQ ID NO: 1307418 - RNA, 14 nt, Human
uccaccuuucccaa

SEQ ID NO: 1307419 - RNA, 14 nt, Human
uccacgacugucuc

SEQ ID NO: 1307420 - RNA, 15 nt, Human
uccacgacugucucc

SEQ ID NO: 1307421 - RNA, 16 nt, Human
uccacgacugucucca

SEQ ID NO: 1307422 - RNA, 14 nt, Human
uccacucaugugac

SEQ ID NO: 1307423 - RNA, 21 nt, Human
uccacucaugugacucuuucc

SEQ ID NO: 1307424 - RNA, 17 nt, Human
uccacgacugucuccau

SEQ ID NO: 1307425 - RNA, 18 nt, Human
uccacgacugucuccaug

SEQ ID NO: 1307426 - RNA, 20 nt, Human
uccacucaggccuccaucuu

SEQ ID NO: 1307427 - RNA, 19 nt, Human
uccacgacugucuccaugg

SEQ ID NO: 1307428 - RNA, 18 nt, Human
accuuagaccaccaagcc

SEQ ID NO: 1307429 - RNA, 19 nt, Human
accuuagaccaccaagccu

SEQ ID NO: 1307430 - RNA, 20 nt, Human
accuuagaccaccaagccuu

SEQ ID NO: 1307431 - RNA, 21 nt, Human
accuuagaccaccaagccuug

SEQ ID NO: 1307432 - RNA, 22 nt, Human
accuuagauguucuaagucuuu

SEQ ID NO: 1307433 - RNA, 22 nt, Human
accuuagaccaccaagccuuga

SEQ ID NO: 1307434 - RNA, 19 nt, Human
accuucaaacuagggccaa

SEQ ID NO: 1307435 - RNA, 11 nt, Human
uccagaccuga

SEQ ID NO: 1307436 - RNA, 15 nt, Human
uccagaccugaagaa

SEQ ID NO: 1307437 - RNA, 16 nt, Human
uccagaccugaagaau

SEQ ID NO: 1307438 - RNA, 13 nt, Human
uccagaccugauc

SEQ ID NO: 1307439 - RNA, 18 nt, Human
uccagaccugauccugga

SEQ ID NO: 1307440 - RNA, 19 nt, Human
uccagaccugauccuggag

SEQ ID NO: 1307441 - RNA, 22 nt, Human
uccagaccugauccuggaggcc

SEQ ID NO: 1307442 - RNA, 15 nt, Human
uccagaccugaggcg

SEQ ID NO: 1307443 - RNA, 22 nt, Human
uccagacugcuuccaauuuucu

SEQ ID NO: 1307444 - RNA, 23 nt, Human
uccagacugcuuccaauuuucug

SEQ ID NO: 1307445 - RNA, 14 nt, Human
uccagagacaacag

SEQ ID NO: 1307446 - RNA, 15 nt, Human
uccagagacaacagg

SEQ ID NO: 1307447 - RNA, 13 nt, Human
uccacugccuucg

SEQ ID NO: 1307448 - RNA, 15 nt, Human
uccacugccuucgau

SEQ ID NO: 1307449 - RNA, 22 nt, Human
uccacugccuucgauacaccgg

SEQ ID NO: 1307450 - RNA, 14 nt, Human
acgagaaaacaaua

SEQ ID NO: 1307451 - RNA, 15 nt, Human
uccaggcuguguuug

SEQ ID NO: 1307452 - RNA, 23 nt, Human
uccaggcuucugcuggggccugg

SEQ ID NO: 1307453 - RNA, 17 nt, Human
uccaggcuucugcuggg

SEQ ID NO: 1307454 - RNA, 19 nt, Human
acgagcuguuuacuaggga

SEQ ID NO: 1307455 - RNA, 20 nt, Human
acgaggaaucugugggucug

SEQ ID NO: 1307456 - RNA, 22 nt, Human
acgaggaaucugugggucuggg

SEQ ID NO: 1307457 - RNA, 21 nt, Human
acgagaaccugaaggggaagg

SEQ ID NO: 1307458 - RNA, 16 nt, Human
acgagacguuuccuac

SEQ ID NO: 1307459 - RNA, 14 nt, Human
acgagacuuuccau

SEQ ID NO: 1307460 - RNA, 17 nt, Human
acgagagcagaggucuc

SEQ ID NO: 1307461 - RNA, 15 nt, Human
uccagccccucuggu

SEQ ID NO: 1307462 - RNA, 16 nt, Human
uccagccccucugguc

SEQ ID NO: 1307463 - RNA, 15 nt, Human
uccagagaguggcuc

SEQ ID NO: 1307464 - RNA, 16 nt, Human
uccagagacaacaggu

SEQ ID NO: 1307465 - RNA, 16 nt, Human
uccagagaguggcucc

SEQ ID NO: 1307466 - RNA, 17 nt, Human
uccagagaguggcuccu

SEQ ID NO: 1307467 - RNA, 18 nt, Human
uccagccccucuggucgc

SEQ ID NO: 1307468 - RNA, 23 nt, Human
uccagccccucuggucgcuccug

SEQ ID NO: 1307469 - RNA, 18 nt, Human
uccagccccucuuggaga

SEQ ID NO: 1307470 - RNA, 20 nt, Human
uccagccccucuuggagaag

SEQ ID NO: 1307471 - RNA, 21 nt, Human
uccagccccucuuggagaagu

SEQ ID NO: 1307472 - RNA, 13 nt, Human
uccaggcaccagg

SEQ ID NO: 1307473 - RNA, 21 nt, Human
uccaggcaccaggacuagggc

SEQ ID NO: 1307474 - RNA, 14 nt, Human
uccaggcacugaga

SEQ ID NO: 1307475 - RNA, 16 nt, Human
uccaggcacugagaua

SEQ ID NO: 1307476 - RNA, 13 nt, Human
uccaggcagaucc

SEQ ID NO: 1307477 - RNA, 11 nt, Human
uccaggcccaa

SEQ ID NO: 1307478 - RNA, 15 nt, Human
uccaggcccaaggcu

SEQ ID NO: 1307479 - RNA, 17 nt, Human
uccaggcccaaggcucc

SEQ ID NO: 1307480 - RNA, 18 nt, Human
uccaggcccaaggcuccc

SEQ ID NO: 1307481 - RNA, 19 nt, Human
uccaggcccaaggcucccg

SEQ ID NO: 1307482 - RNA, 20 nt, Human
uccaggcccaaggcucccgg

SEQ ID NO: 1307483 - RNA, 21 nt, Human
uccaggcaggucugaagcuca

SEQ ID NO: 1307484 - RNA, 14 nt, Human
uccaggcagaucca

SEQ ID NO: 1307485 - RNA, 15 nt, Human
uccaggcagauccag

SEQ ID NO: 1307486 - RNA, 16 nt, Human
uccaggcagauccagg

SEQ ID NO: 1307487 - RNA, 17 nt, Human
uccaggcagauccagga

SEQ ID NO: 1307488 - RNA, 18 nt, Human
uccaggcagauccaggac

SEQ ID NO: 1307489 - RNA, 19 nt, Human
uccaggcagauccaggacu

SEQ ID NO: 1307490 - RNA, 20 nt, Human
uccaggcagauccaggacua

SEQ ID NO: 1307491 - RNA, 21 nt, Human
uccaggcagauccaggacuau

SEQ ID NO: 1307492 - RNA, 15 nt, Human
uccaacccuagcaaa

SEQ ID NO: 1307493 - RNA, 21 nt, Human
uccaaccggcuuuguggcacu

SEQ ID NO: 1307494 - RNA, 14 nt, Human
uccaacccuagcaa

SEQ ID NO: 1307495 - RNA, 13 nt, Human
uccaacccuagca

SEQ ID NO: 1307496 - RNA, 22 nt, Human
uccaacccgucuggcccaccag

SEQ ID NO: 1307497 - RNA, 23 nt, Human
uccaacccgucuggcccaccagg

SEQ ID NO: 1307498 - RNA, 15 nt, Human
uccaacuuggcugca

SEQ ID NO: 1307499 - RNA, 16 nt, Human
uccaagguggggugga

SEQ ID NO: 1307500 - RNA, 13 nt, Human
uccaagguuuaaa

SEQ ID NO: 1307501 - RNA, 14 nt, Human
uccaagguuuaaag

SEQ ID NO: 1307502 - RNA, 15 nt, Human
uccaagguuuaaaga

SEQ ID NO: 1307503 - RNA, 16 nt, Human
uccaagguuuaaagag

SEQ ID NO: 1307504 - RNA, 19 nt, Human
uccaagguuuaaagagucu

SEQ ID NO: 1307505 - RNA, 20 nt, Human
uccaagguuuaaagagucua

SEQ ID NO: 1307506 - RNA, 18 nt, Human
uccaaucccaccaacccu

SEQ ID NO: 1307507 - RNA, 22 nt, Human
uccaagguuuaaagagucuaga

SEQ ID NO: 1307508 - RNA, 14 nt, Human
uccaagucuccacc

SEQ ID NO: 1307509 - RNA, 16 nt, Human
uccaauccuauguuuu

SEQ ID NO: 1307510 - RNA, 23 nt, Human
uccaacuggcccuauuuagauga

SEQ ID NO: 1307511 - RNA, 23 nt, Human
uccaacuuggcugcaggaaucuu

SEQ ID NO: 1307512 - RNA, 21 nt, Human
uccaaccugcaaagaucuguc

SEQ ID NO: 1307513 - RNA, 18 nt, Human
uccaacucgaaucugugu

SEQ ID NO: 1307514 - RNA, 19 nt, Human
uccaacucgaaucugugug

SEQ ID NO: 1307515 - RNA, 24 nt, Human
uccaacucuucccccucucccagu

SEQ ID NO: 1307516 - RNA, 21 nt, Human
accuggucacaggacucugcc

SEQ ID NO: 1307517 - RNA, 11 nt, Human
accuggccuuc

SEQ ID NO: 1307518 - RNA, 15 nt, Human
accuggcucucaccu

SEQ ID NO: 1307519 - RNA, 16 nt, Human
accuggcucucaccuc

SEQ ID NO: 1307520 - RNA, 20 nt, Human
accuggcucucaccucuagg

SEQ ID NO: 1307521 - RNA, 17 nt, Human
accuggcucucaccucu

SEQ ID NO: 1307522 - RNA, 16 nt, Human
accuggguugcagaca

SEQ ID NO: 1307523 - RNA, 18 nt, Human
accuggguugcagacagg

SEQ ID NO: 1307524 - RNA, 20 nt, Human
accuggguugcagacaggaa

SEQ ID NO: 1307525 - RNA, 16 nt, Human
accugguacccuccug

SEQ ID NO: 1307526 - RNA, 18 nt, Human
accugguacccuccuggc

SEQ ID NO: 1307527 - RNA, 19 nt, Human
accugguacccuccuggcu

SEQ ID NO: 1307528 - RNA, 17 nt, Human
accugguacucccucuc

SEQ ID NO: 1307529 - RNA, 21 nt, Human
accugguacucccucucagga

SEQ ID NO: 1307530 - RNA, 12 nt, Human
uccaaugagcuu

SEQ ID NO: 1307531 - RNA, 13 nt, Human
uccaaugagcuuu

SEQ ID NO: 1307532 - RNA, 14 nt, Human
uccaaugagcuuuc

SEQ ID NO: 1307533 - RNA, 20 nt, Human
uccaaugagcuuucugaaca

SEQ ID NO: 1307534 - RNA, 15 nt, Human
uccaaugagcuuucu

SEQ ID NO: 1307535 - RNA, 16 nt, Human
uccaaugagcuuucug

SEQ ID NO: 1307536 - RNA, 17 nt, Human
uccaaugagcuuucuga

SEQ ID NO: 1307537 - RNA, 18 nt, Human
uccaaugagcuuucugaa

SEQ ID NO: 1307538 - RNA, 19 nt, Human
uccaaugagcuuucugaac

SEQ ID NO: 1307539 - RNA, 14 nt, Human
accuggauggggca

SEQ ID NO: 1307540 - RNA, 19 nt, Human
accuggauggggcaggcca

SEQ ID NO: 1307541 - RNA, 14 nt, Human
accuggcagcucug

SEQ ID NO: 1307542 - RNA, 17 nt, Human
accuggcagcucuggac

SEQ ID NO: 1307543 - RNA, 21 nt, Human
accuggcaucgcaccauucug

SEQ ID NO: 1307544 - RNA, 21 nt, Human
accuagggugauauuaaccag

SEQ ID NO: 1307545 - RNA, 16 nt, Human
accuaccaccacgccc

SEQ ID NO: 1307546 - RNA, 20 nt, Human
accuaccaccacgcccggcu

SEQ ID NO: 1307547 - RNA, 14 nt, Human
accuaguuuuccau

SEQ ID NO: 1307548 - RNA, 15 nt, Human
accucaaaauuuaac

SEQ ID NO: 1307549 - RNA, 22 nt, Human
accuaauccaggcagauccagg

SEQ ID NO: 1307550 - RNA, 17 nt, Human
accuaaucucuguaaag

SEQ ID NO: 1307551 - RNA, 21 nt, Human
accuaaucucuguaaagcuaa

SEQ ID NO: 1307552 - RNA, 20 nt, Human
accuacagagaugcuaagag

SEQ ID NO: 1307553 - RNA, 17 nt, Human
accuacagggggucugg

SEQ ID NO: 1307554 - RNA, 19 nt, Human
accuacagggggucuggcu

SEQ ID NO: 1307555 - RNA, 21 nt, Human
accuacagggggucuggcugg

SEQ ID NO: 1307556 - RNA, 23 nt, Human
accuacagggggucuggcuggug

SEQ ID NO: 1307557 - RNA, 22 nt, Human
accuacagggggucuggcuggu

SEQ ID NO: 1307558 - RNA, 11 nt, Human
accuacaguuu

SEQ ID NO: 1307559 - RNA, 16 nt, Human
accuacaguuuuaacu

SEQ ID NO: 1307560 - RNA, 17 nt, Human
accuacaguuuuaacug

SEQ ID NO: 1307561 - RNA, 19 nt, Human
accuacaguuuuaacugug

SEQ ID NO: 1307562 - RNA, 18 nt, Human
accuacaguuuuaacugu

SEQ ID NO: 1307563 - RNA, 17 nt, Human
ucaggaaccgaggcagg

SEQ ID NO: 1307564 - RNA, 22 nt, Human
ucaggaaaggaaucauuucuau

SEQ ID NO: 1307565 - RNA, 17 nt, Human
accgcgucuacccuggg

SEQ ID NO: 1307566 - RNA, 18 nt, Human
accgcgucuacccuggga

SEQ ID NO: 1307567 - RNA, 19 nt, Human
accgcgucuacccugggau

SEQ ID NO: 1307568 - RNA, 20 nt, Human
accgcgacuaauuucaaaau

SEQ ID NO: 1307569 - RNA, 16 nt, Human
accgcgacuaauuuca

SEQ ID NO: 1307570 - RNA, 17 nt, Human
accgcgacuaauuucaa

SEQ ID NO: 1307571 - RNA, 13 nt, Human
accgcuaaaagaa

SEQ ID NO: 1307572 - RNA, 15 nt, Human
accgcuaaaagaaac

SEQ ID NO: 1307573 - RNA, 16 nt, Human
accgcuaaaagaaacu

SEQ ID NO: 1307574 - RNA, 14 nt, Human
accgcuacaccacu

SEQ ID NO: 1307575 - RNA, 17 nt, Human
accgcuacaccacucug

SEQ ID NO: 1307576 - RNA, 19 nt, Human
accgcuacaccacucuggc

SEQ ID NO: 1307577 - RNA, 21 nt, Human
accgcuacaccacucuggcag

SEQ ID NO: 1307578 - RNA, 20 nt, Human
accgcuacaccacucuggca

SEQ ID NO: 1307579 - RNA, 13 nt, Human
accuaaaacuuaa

SEQ ID NO: 1307580 - RNA, 23 nt, Human
accuaaacauagaaauugccuga

SEQ ID NO: 1307581 - RNA, 12 nt, Human
accuaaagaaaa

SEQ ID NO: 1307582 - RNA, 13 nt, Human
accuaaagaaaaa

SEQ ID NO: 1307583 - RNA, 17 nt, Human
accuaaagaaaaacaaa

SEQ ID NO: 1307584 - RNA, 15 nt, Human
accuaaauggccuca

SEQ ID NO: 1307585 - RNA, 20 nt, Human
accuaacaacauuguagccu

SEQ ID NO: 1307586 - RNA, 18 nt, Human
ucaucucagcucacugca

SEQ ID NO: 1307587 - RNA, 13 nt, Human
ucaucucagcuca

SEQ ID NO: 1307588 - RNA, 16 nt, Human
ucaugaauuaguuuua

SEQ ID NO: 1307589 - RNA, 12 nt, Human
ucaugaauguaa

SEQ ID NO: 1307590 - RNA, 18 nt, Human
ucaucuagguaaauuaca

SEQ ID NO: 1307591 - RNA, 13 nt, Human
ucauccuugucuu

SEQ ID NO: 1307592 - RNA, 14 nt, Human
ucauccuugucuua

SEQ ID NO: 1307593 - RNA, 22 nt, Human
ucauccucuccacagcugccuc

SEQ ID NO: 1307594 - RNA, 12 nt, Human
ucauccucuggc

SEQ ID NO: 1307595 - RNA, 11 nt, Human
ucauccucugg

SEQ ID NO: 1307596 - RNA, 23 nt, Human
ucauccucaaagaaaguguauug

SEQ ID NO: 1307597 - RNA, 23 nt, Human
ucauccucacagugaacacucag

SEQ ID NO: 1307598 - RNA, 12 nt, Human
ucauccugcagg

SEQ ID NO: 1307599 - RNA, 13 nt, Human
ucauccugcaggc

SEQ ID NO: 1307600 - RNA, 17 nt, Human
ucauccucaaagaaagu

SEQ ID NO: 1307601 - RNA, 18 nt, Human
ucauccucaaagaaagug

SEQ ID NO: 1307602 - RNA, 21 nt, Human
ucauccucaaagaaaguguau

SEQ ID NO: 1307603 - RNA, 22 nt, Human
ucauccucaaagaaaguguauu

SEQ ID NO: 1307604 - RNA, 19 nt, Human
accucccucaaccucaucc

SEQ ID NO: 1307605 - RNA, 16 nt, Human
accucaacugccuacu

SEQ ID NO: 1307606 - RNA, 22 nt, Human
accucaacugccuacuccaaaa

SEQ ID NO: 1307607 - RNA, 14 nt, Human
accucaagcugcau

SEQ ID NO: 1307608 - RNA, 17 nt, Human
ucauccuaaagaacaaa

SEQ ID NO: 1307609 - RNA, 14 nt, Human
ucauccucaaagaa

SEQ ID NO: 1307610 - RNA, 21 nt, Human
ucaucccgagcaccuccacau

SEQ ID NO: 1307611 - RNA, 23 nt, Human
ucaucccgagcaccuccacaucc

SEQ ID NO: 1307612 - RNA, 22 nt, Human
accucuccagccucagcucuca

SEQ ID NO: 1307613 - RNA, 20 nt, Human
accucuccagccucagcucu

SEQ ID NO: 1307614 - RNA, 18 nt, Human
accucuccagccucagcu

SEQ ID NO: 1307615 - RNA, 16 nt, Human
accucuccagccucag

SEQ ID NO: 1307616 - RNA, 23 nt, Human
accucucaauauucaauaaagcu

SEQ ID NO: 1307617 - RNA, 21 nt, Human
accucucaauauucaauaaag

SEQ ID NO: 1307618 - RNA, 20 nt, Human
accucucaauauucaauaaa

SEQ ID NO: 1307619 - RNA, 19 nt, Human
accucucaauauucaauaa

SEQ ID NO: 1307620 - RNA, 14 nt, Human
accucuaaauucuu

SEQ ID NO: 1307621 - RNA, 17 nt, Human
accucuccccuggaacu

SEQ ID NO: 1307622 - RNA, 11 nt, Human
accugaaaaca

SEQ ID NO: 1307623 - RNA, 18 nt, Human
accugaaaacacugugca

SEQ ID NO: 1307624 - RNA, 19 nt, Human
accugaaaacacugugcac

SEQ ID NO: 1307625 - RNA, 20 nt, Human
accugaaaacacugugcaca

SEQ ID NO: 1307626 - RNA, 17 nt, Human
accugaggaacugucuc

SEQ ID NO: 1307627 - RNA, 15 nt, Human
accugagaccugaag

SEQ ID NO: 1307628 - RNA, 15 nt, Human
accugagauuuauua

SEQ ID NO: 1307629 - RNA, 17 nt, Human
accugagauuuauuaaa

SEQ ID NO: 1307630 - RNA, 18 nt, Human
accugagauuuauuaaag

SEQ ID NO: 1307631 - RNA, 19 nt, Human
accugagauuuauuaaaga

SEQ ID NO: 1307632 - RNA, 20 nt, Human
accugagauuuauuaaagaa

SEQ ID NO: 1307633 - RNA, 17 nt, Human
accugagccugccgagc

SEQ ID NO: 1307634 - RNA, 21 nt, Human
accugagccugccgagcaacc

SEQ ID NO: 1307635 - RNA, 12 nt, Human
accugagcuaaa

SEQ ID NO: 1307636 - RNA, 22 nt, Human
accugagcuaaauaaagauauu

SEQ ID NO: 1307637 - RNA, 21 nt, Human
accugaaaacacugugcacau

SEQ ID NO: 1307638 - RNA, 14 nt, Human
accugaaauuccaa

SEQ ID NO: 1307639 - RNA, 15 nt, Human
accugaaauuccaaa

SEQ ID NO: 1307640 - RNA, 16 nt, Human
accugaaauuccaaag

SEQ ID NO: 1307641 - RNA, 16 nt, Human
accugaccccugcuca

SEQ ID NO: 1307642 - RNA, 17 nt, Human
accugaccccugcucag

SEQ ID NO: 1307643 - RNA, 23 nt, Human
accugaccccugcucaguaaagc

SEQ ID NO: 1307644 - RNA, 14 nt, Human
accugagggucugu

SEQ ID NO: 1307645 - RNA, 15 nt, Human
accugagggucugua

SEQ ID NO: 1307646 - RNA, 17 nt, Human
accugagggucuguagg

SEQ ID NO: 1307647 - RNA, 18 nt, Human
accugagggucuguaggu

SEQ ID NO: 1307648 - RNA, 19 nt, Human
accugagggucuguagguu

SEQ ID NO: 1307649 - RNA, 22 nt, Human
accugagucacccuaccugugc

SEQ ID NO: 1307650 - RNA, 23 nt, Human
accugagucacccuaccugugcc

SEQ ID NO: 1307651 - RNA, 21 nt, Human
accugagucguacagaaagcu

SEQ ID NO: 1307652 - RNA, 11 nt, Human
accugauuuuu

SEQ ID NO: 1307653 - RNA, 17 nt, Human
accugcacuaacagagu

SEQ ID NO: 1307654 - RNA, 18 nt, Human
accugcacuaacagagug

SEQ ID NO: 1307655 - RNA, 23 nt, Human
accugcacuggggagcccgucuc

SEQ ID NO: 1307656 - RNA, 17 nt, Human
accucgugauccacccg

SEQ ID NO: 1307657 - RNA, 19 nt, Human
accuccuucccucucugga

SEQ ID NO: 1307658 - RNA, 21 nt, Human
accuccuucccucucuggaga

SEQ ID NO: 1307659 - RNA, 22 nt, Human
accuccuucccucucuggagaa

SEQ ID NO: 1307660 - RNA, 13 nt, Human
accuccuucccuc

SEQ ID NO: 1307661 - RNA, 14 nt, Human
accuccuucccucu

SEQ ID NO: 1307662 - RNA, 15 nt, Human
accuccuucccucuc

SEQ ID NO: 1307663 - RNA, 16 nt, Human
accuccuucccucucu

SEQ ID NO: 1307664 - RNA, 17 nt, Human
accuccuucccucucug

SEQ ID NO: 1307665 - RNA, 18 nt, Human
accuccuucccucucugg

SEQ ID NO: 1307666 - RNA, 21 nt, Human
ucaugaauuaguuuuauaugc

SEQ ID NO: 1307667 - RNA, 13 nt, Human
ucaugaauguaaa

SEQ ID NO: 1307668 - RNA, 14 nt, Human
ucaugaauguaaau

SEQ ID NO: 1307669 - RNA, 19 nt, Human
ucaugaauguaaauuugua

SEQ ID NO: 1307670 - RNA, 20 nt, Human
ucaugaauguaaauuuguac

SEQ ID NO: 1307671 - RNA, 21 nt, Human
ucaugaauguaaauuuguacu

SEQ ID NO: 1307672 - RNA, 16 nt, Human
ucaugauccaacuaau

SEQ ID NO: 1307673 - RNA, 23 nt, Human
ucaugauuagaaauuaccugugg

SEQ ID NO: 1307674 - RNA, 18 nt, Human
ucauuaaucugccucccu

SEQ ID NO: 1307675 - RNA, 17 nt, Human
ucauuaaucugccuccc

SEQ ID NO: 1307676 - RNA, 13 nt, Human
ucauuaauucuau

SEQ ID NO: 1307677 - RNA, 14 nt, Human
ucauuaauucuaua

SEQ ID NO: 1307678 - RNA, 12 nt, Human
ucauuacuauaa

SEQ ID NO: 1307679 - RNA, 14 nt, Human
ucauucucugucuc

SEQ ID NO: 1307680 - RNA, 15 nt, Human
ucauucucugucuca

SEQ ID NO: 1307681 - RNA, 16 nt, Human
ucauucucugucucau

SEQ ID NO: 1307682 - RNA, 18 nt, Human
ucauucucugucucaucc

SEQ ID NO: 1307683 - RNA, 19 nt, Human
ucauucucugucucaucca

SEQ ID NO: 1307684 - RNA, 18 nt, Human
ucauucugaaggagcccc

SEQ ID NO: 1307685 - RNA, 16 nt, Human
ucauucugcaaguaua

SEQ ID NO: 1307686 - RNA, 14 nt, Human
ucauucuuauuuca

SEQ ID NO: 1307687 - RNA, 18 nt, Human
ucauucuuauuucaugaa

SEQ ID NO: 1307688 - RNA, 21 nt, Human
uauuuuuaucaguuacacaug

SEQ ID NO: 1307689 - RNA, 12 nt, Human
uauuuuuaucuu

SEQ ID NO: 1307690 - RNA, 16 nt, Human
uauuuuucuaacuaca

SEQ ID NO: 1307691 - RNA, 12 nt, Human
uauuuuucuuga

SEQ ID NO: 1307692 - RNA, 18 nt, Human
ucaaaagaaagaaaauca

SEQ ID NO: 1307693 - RNA, 16 nt, Human
uauuuguaaaaugaca

SEQ ID NO: 1307694 - RNA, 13 nt, Human
uauuuguaaaucu

SEQ ID NO: 1307695 - RNA, 17 nt, Human
uauuuguaaaucugcca

SEQ ID NO: 1307696 - RNA, 21 nt, Human
uauuuuuaauuaauugggcca

SEQ ID NO: 1307697 - RNA, 18 nt, Human
uauuuuuacauucugaau

SEQ ID NO: 1307698 - RNA, 14 nt, Human
uauuuuuaauuaau

SEQ ID NO: 1307699 - RNA, 19 nt, Human
ucaaaauuguuacaaauug

SEQ ID NO: 1307700 - RNA, 16 nt, Human
ucaaaauuguuacaaa

SEQ ID NO: 1307701 - RNA, 21 nt, Human
ucaaaaugcucuuauuucauc

SEQ ID NO: 1307702 - RNA, 20 nt, Human
ucaaaauguuaucuucucaa

SEQ ID NO: 1307703 - RNA, 21 nt, Human
ucaaaauguuaucuucucaag

SEQ ID NO: 1307704 - RNA, 12 nt, Human
ucaaaaugcuuu

SEQ ID NO: 1307705 - RNA, 17 nt, Human
ucaaaaugcuuuuuauu

SEQ ID NO: 1307706 - RNA, 19 nt, Human
ucaaaaugcuuuuuauuuc

SEQ ID NO: 1307707 - RNA, 22 nt, Human
ucaaaaugcucuuauuucauca

SEQ ID NO: 1307708 - RNA, 20 nt, Human
ucaaaaugcucuuauuucau

SEQ ID NO: 1307709 - RNA, 19 nt, Human
ucaaaaugcucuuauuuca

SEQ ID NO: 1307710 - RNA, 16 nt, Human
ucaaaaugcucuuauu

SEQ ID NO: 1307711 - RNA, 14 nt, Human
ucaaaaugcucuua

SEQ ID NO: 1307712 - RNA, 21 nt, Human
ucaaaaugauuuccucuguaa

SEQ ID NO: 1307713 - RNA, 22 nt, Human
ucaaaaugauuuccucuguaau

SEQ ID NO: 1307714 - RNA, 14 nt, Human
ucaaaaucucucca

SEQ ID NO: 1307715 - RNA, 16 nt, Human
ucaaaaucucuccacu

SEQ ID NO: 1307716 - RNA, 21 nt, Human
ucaaaaucucuccacuuucag

SEQ ID NO: 1307717 - RNA, 22 nt, Human
ucaaaaucucuccacuuucagc

SEQ ID NO: 1307718 - RNA, 23 nt, Human
ucaaaaucucuccacuuucagcu

SEQ ID NO: 1307719 - RNA, 16 nt, Human
ucaaaauauuuguaca

SEQ ID NO: 1307720 - RNA, 17 nt, Human
ucaaaauauuuguacau

SEQ ID NO: 1307721 - RNA, 19 nt, Human
ucaaaauauuuguacauag

SEQ ID NO: 1307722 - RNA, 18 nt, Human
ucaaaauauuuguacaua

SEQ ID NO: 1307723 - RNA, 21 nt, Human
ucaaaauaugccccauucaac

SEQ ID NO: 1307724 - RNA, 22 nt, Human
ucaaaauagggacuaucuaucu

SEQ ID NO: 1307725 - RNA, 17 nt, Human
ucaaaauagugccacua

SEQ ID NO: 1307726 - RNA, 22 nt, Human
ucaaaagcuauuuaaagcaucu

SEQ ID NO: 1307727 - RNA, 13 nt, Human
ucaaaaguuuguu

SEQ ID NO: 1307728 - RNA, 14 nt, Human
ucaaaaguuuguuu

SEQ ID NO: 1307729 - RNA, 17 nt, Human
ucaaaagcuauuuaaag

SEQ ID NO: 1307730 - RNA, 14 nt, Human
ucaaaguuuaauaa

SEQ ID NO: 1307731 - RNA, 13 nt, Human
ucaaaguuuaaua

SEQ ID NO: 1307732 - RNA, 12 nt, Human
ucaaagccagcg

SEQ ID NO: 1307733 - RNA, 22 nt, Human
ucaaagccagcguccuccucug

SEQ ID NO: 1307734 - RNA, 23 nt, Human
ucaaagccagcguccuccucugu

SEQ ID NO: 1307735 - RNA, 21 nt, Human
ucaaagcaugggauuauuaga

SEQ ID NO: 1307736 - RNA, 11 nt, Human
ucaaagcugcc

SEQ ID NO: 1307737 - RNA, 18 nt, Human
ucaaagcugccugucccu

SEQ ID NO: 1307738 - RNA, 19 nt, Human
ucaaagcuguguguuugga

SEQ ID NO: 1307739 - RNA, 15 nt, Human
ucaaagcuuuuucca

SEQ ID NO: 1307740 - RNA, 16 nt, Human
ucaaagcuuuuuccag

SEQ ID NO: 1307741 - RNA, 20 nt, Human
ucaaaggagcgagcaugucg

SEQ ID NO: 1307742 - RNA, 14 nt, Human
ucaaagcugaaaug

SEQ ID NO: 1307743 - RNA, 19 nt, Human
ucaaagcaucuugcauuau

SEQ ID NO: 1307744 - RNA, 20 nt, Human
ucaaagcaugggauuauuag

SEQ ID NO: 1307745 - RNA, 22 nt, Human
ucaaaauguuaucuucucaagu

SEQ ID NO: 1307746 - RNA, 24 nt, Human
ucaaaauuagugcuuuuuguguca

SEQ ID NO: 1307747 - RNA, 21 nt, Human
ucaaaauuuaacaguuaccug

SEQ ID NO: 1307748 - RNA, 14 nt, Human
ucaaacaaugacaa

SEQ ID NO: 1307749 - RNA, 19 nt, Human
ucaaacaaugacaaagcag

SEQ ID NO: 1307750 - RNA, 21 nt, Human
ucaaacaaugacaaagcagau

SEQ ID NO: 1307751 - RNA, 20 nt, Human
ucaaacaaugacaaagcaga

SEQ ID NO: 1307752 - RNA, 21 nt, Human
ucaaacaccaacauaaaaaug

SEQ ID NO: 1307753 - RNA, 16 nt, Human
acaugaaguccaagca

SEQ ID NO: 1307754 - RNA, 21 nt, Human
acaugaagguaaauaaaaaga

SEQ ID NO: 1307755 - RNA, 22 nt, Human
acaugaagguaaauaaaaagaa

SEQ ID NO: 1307756 - RNA, 23 nt, Human
acaugaagguaaauaaaaagaaa

SEQ ID NO: 1307757 - RNA, 12 nt, Human
acaugaaguauu

SEQ ID NO: 1307758 - RNA, 22 nt, Human
acaugaagauucuuucccaauu

SEQ ID NO: 1307759 - RNA, 19 nt, Human
acaugaagcuguuguguga

SEQ ID NO: 1307760 - RNA, 13 nt, Human
acaugaagcuguu

SEQ ID NO: 1307761 - RNA, 13 nt, Human
acaugaagguaaa

SEQ ID NO: 1307762 - RNA, 15 nt, Human
acaugaagguaaaua

SEQ ID NO: 1307763 - RNA, 16 nt, Human
acaugaagguaaauaa

SEQ ID NO: 1307764 - RNA, 20 nt, Human
ucaaauacgugggcauucaa

SEQ ID NO: 1307765 - RNA, 14 nt, Human
acaugaagaccuuu

SEQ ID NO: 1307766 - RNA, 13 nt, Human
acaugaagaccuu

SEQ ID NO: 1307767 - RNA, 16 nt, Human
acaugaagaagcuaaa

SEQ ID NO: 1307768 - RNA, 21 nt, Human
acaugaagaccuuuuucugca

SEQ ID NO: 1307769 - RNA, 20 nt, Human
acaugaagaccuuuuucugc

SEQ ID NO: 1307770 - RNA, 15 nt, Human
acaugaagauucuuu

SEQ ID NO: 1307771 - RNA, 17 nt, Human
acaugaagauucuuucc

SEQ ID NO: 1307772 - RNA, 18 nt, Human
acaugaagauucuuuccc

SEQ ID NO: 1307773 - RNA, 21 nt, Human
ucaaauacauuuaaaacauua

SEQ ID NO: 1307774 - RNA, 22 nt, Human
ucaaauacauuuaaaacauuaa

SEQ ID NO: 1307775 - RNA, 19 nt, Human
acaugauccugcaauucca

SEQ ID NO: 1307776 - RNA, 13 nt, Human
acaugaaguauuu

SEQ ID NO: 1307777 - RNA, 14 nt, Human
acaugaaguauuuu

SEQ ID NO: 1307778 - RNA, 22 nt, Human
ucaagaacacagcccugcuucu

SEQ ID NO: 1307779 - RNA, 22 nt, Human
ucaagaagugaagaaugcacaa

SEQ ID NO: 1307780 - RNA, 22 nt, Human
ucaagaaaacaggcacugcccu

SEQ ID NO: 1307781 - RNA, 21 nt, Human
ucaagaaagcuucaaacugca

SEQ ID NO: 1307782 - RNA, 20 nt, Human
ucaagaaauaaaaggaagcc

SEQ ID NO: 1307783 - RNA, 21 nt, Human
ucaagaaauaaaaggaagcca

SEQ ID NO: 1307784 - RNA, 22 nt, Human
ucaagaaauaaaaggaagccaa

SEQ ID NO: 1307785 - RNA, 17 nt, Human
ucaagaaauaaguuuuu

SEQ ID NO: 1307786 - RNA, 14 nt, Human
ucaagaaauaaguu

SEQ ID NO: 1307787 - RNA, 21 nt, Human
ucaagaauaaucacgcuuucc

SEQ ID NO: 1307788 - RNA, 19 nt, Human
ucaagaauagcauuguaaa

SEQ ID NO: 1307789 - RNA, 22 nt, Human
ucaagacccuuuuggguuucug

SEQ ID NO: 1307790 - RNA, 15 nt, Human
ucaagagacugaguc

SEQ ID NO: 1307791 - RNA, 22 nt, Human
ucaagagcccugucaguagagu

SEQ ID NO: 1307792 - RNA, 22 nt, Human
ucaacaggccucagggcuccuu

SEQ ID NO: 1307793 - RNA, 13 nt, Human
ucaacaguaaacc

SEQ ID NO: 1307794 - RNA, 14 nt, Human
ucaacaguaaacca

SEQ ID NO: 1307795 - RNA, 18 nt, Human
ucaacaguaaaccacuga

SEQ ID NO: 1307796 - RNA, 20 nt, Human
ucaacaguaaaccacugaaa

SEQ ID NO: 1307797 - RNA, 22 nt, Human
ucaacaguaaaccacugaaaaa

SEQ ID NO: 1307798 - RNA, 15 nt, Human
ucaacagugaagaca

SEQ ID NO: 1307799 - RNA, 17 nt, Human
ucaacagugaagacaga

SEQ ID NO: 1307800 - RNA, 22 nt, Human
ucaacagugaagacagaaguuu

SEQ ID NO: 1307801 - RNA, 18 nt, Human
ucaacagugaagacagaa

SEQ ID NO: 1307802 - RNA, 14 nt, Human
ucaacaguuuuccu

SEQ ID NO: 1307803 - RNA, 15 nt, Human
ucaacaguuuuccua

SEQ ID NO: 1307804 - RNA, 17 nt, Human
ucaacaguuuuccuaug

SEQ ID NO: 1307805 - RNA, 20 nt, Human
ucaacaguuuuccuaugcuu

SEQ ID NO: 1307806 - RNA, 22 nt, Human
ucaacaguuuuccuaugcuuug

SEQ ID NO: 1307807 - RNA, 23 nt, Human
ucaacaguuuuccuaugcuuuga

SEQ ID NO: 1307808 - RNA, 23 nt, Human
ucaagaaaacaggcacugcccug

SEQ ID NO: 1307809 - RNA, 15 nt, Human
ucaagaaaacaggca

SEQ ID NO: 1307810 - RNA, 19 nt, Human
ucaagaaaacaggcacugc

SEQ ID NO: 1307811 - RNA, 12 nt, Human
ucaagaaacuga

SEQ ID NO: 1307812 - RNA, 13 nt, Human
ucaagaaacugag

SEQ ID NO: 1307813 - RNA, 17 nt, Human
ucaagaaacugaggaau

SEQ ID NO: 1307814 - RNA, 18 nt, Human
ucaagaaacugaggaauu

SEQ ID NO: 1307815 - RNA, 20 nt, Human
ucaagaaacugaggaauuuu

SEQ ID NO: 1307816 - RNA, 22 nt, Human
ucaagaaacugaggaauuuucu

SEQ ID NO: 1307817 - RNA, 23 nt, Human
ucaagaaacugaggaauuuucuu

SEQ ID NO: 1307818 - RNA, 16 nt, Human
ucaagggucaggccuu

SEQ ID NO: 1307819 - RNA, 15 nt, Human
ucaaggucguuuuuu

SEQ ID NO: 1307820 - RNA, 12 nt, Human
ucaaguauuugg

SEQ ID NO: 1307821 - RNA, 23 nt, Human
ucaagggcagcuuugcucauauu

SEQ ID NO: 1307822 - RNA, 21 nt, Human
ucaagggcagcuuugcucaua

SEQ ID NO: 1307823 - RNA, 20 nt, Human
ucaagggcagcuuugcucau

SEQ ID NO: 1307824 - RNA, 19 nt, Human
ucaagggcagcuuugcuca

SEQ ID NO: 1307825 - RNA, 13 nt, Human
ucaagggucaggc

SEQ ID NO: 1307826 - RNA, 15 nt, Human
ucaagggucaggccu

SEQ ID NO: 1307827 - RNA, 15 nt, Human
ucaagauucagcuag

SEQ ID NO: 1307828 - RNA, 14 nt, Human
ucaagauucagcua

SEQ ID NO: 1307829 - RNA, 13 nt, Human
ucaagauucagcu

SEQ ID NO: 1307830 - RNA, 13 nt, Human
acauuccauccuu

SEQ ID NO: 1307831 - RNA, 16 nt, Human
acauuccaagacucua

SEQ ID NO: 1307832 - RNA, 19 nt, Human
acauucaggaauucuugga

SEQ ID NO: 1307833 - RNA, 17 nt, Human
acauuccaaagaacagc

SEQ ID NO: 1307834 - RNA, 15 nt, Human
acauuccaacucgua

SEQ ID NO: 1307835 - RNA, 22 nt, Human
acauuccaacucguauagcaug

SEQ ID NO: 1307836 - RNA, 23 nt, Human
ucaaauuuguaggguuucuaggu

SEQ ID NO: 1307837 - RNA, 20 nt, Human
ucaaauuuguaggguuucua

SEQ ID NO: 1307838 - RNA, 14 nt, Human
ucaacaauucuaaa

SEQ ID NO: 1307839 - RNA, 15 nt, Human
ucaacaauucuaaaa

SEQ ID NO: 1307840 - RNA, 17 nt, Human
ucaacaauucuaaaaug

SEQ ID NO: 1307841 - RNA, 14 nt, Human
ucaacaccaugauu

SEQ ID NO: 1307842 - RNA, 22 nt, Human
ucaacaccaugauuccuuuaac

SEQ ID NO: 1307843 - RNA, 16 nt, Human
ucaacaggccucaggg

SEQ ID NO: 1307844 - RNA, 17 nt, Human
ucaacaggccucagggc

SEQ ID NO: 1307845 - RNA, 21 nt, Human
ucaacaggccucagggcuccu

SEQ ID NO: 1307846 - RNA, 23 nt, Human
ucaacaggccucagggcuccuug

SEQ ID NO: 1307847 - RNA, 14 nt, Human
ucaacacccaguuu

SEQ ID NO: 1307848 - RNA, 22 nt, Human
ucaacacccaguuuccuuggga

SEQ ID NO: 1307849 - RNA, 16 nt, Human
ucaacagagacugaau

SEQ ID NO: 1307850 - RNA, 19 nt, Human
ucaacagcagggugggcuu

SEQ ID NO: 1307851 - RNA, 22 nt, Human
ucaacagcguuccuagagaaga

SEQ ID NO: 1307852 - RNA, 22 nt, Human
acauuaaauuuuuuuuacauuu

SEQ ID NO: 1307853 - RNA, 18 nt, Human
acaugucuguucuacaua

SEQ ID NO: 1307854 - RNA, 21 nt, Human
acauguccagugggaggugag

SEQ ID NO: 1307855 - RNA, 23 nt, Human
acauguccugccuauuaucuguc

SEQ ID NO: 1307856 - RNA, 19 nt, Human
acauguccuucugagcccg

SEQ ID NO: 1307857 - RNA, 17 nt, Human
acaugucuguucuacau

SEQ ID NO: 1307858 - RNA, 16 nt, Human
acaugcuccagauuag

SEQ ID NO: 1307859 - RNA, 18 nt, Human
acauuagcaguuugcuuu

SEQ ID NO: 1307860 - RNA, 22 nt, Human
acauuagcaguuugcuuuguau

SEQ ID NO: 1307861 - RNA, 19 nt, Human
acauuaggaaaaguugcua

SEQ ID NO: 1307862 - RNA, 13 nt, Human
acauuaacucauu

SEQ ID NO: 1307863 - RNA, 14 nt, Human
acauuaacucauua

SEQ ID NO: 1307864 - RNA, 15 nt, Human
acauuaacucauuag

SEQ ID NO: 1307865 - RNA, 22 nt, Human
acauuaacucauuagacuggaa

SEQ ID NO: 1307866 - RNA, 14 nt, Human
acauuagucucagu

SEQ ID NO: 1307867 - RNA, 13 nt, Human
acauucaccugcc

SEQ ID NO: 1307868 - RNA, 14 nt, Human
acauucaccugccc

SEQ ID NO: 1307869 - RNA, 20 nt, Human
acauucaccugccccaacuc

SEQ ID NO: 1307870 - RNA, 22 nt, Human
acauucauagucuuuggagaaa

SEQ ID NO: 1307871 - RNA, 22 nt, Human
uaugaacuugaggacacauguc

SEQ ID NO: 1307872 - RNA, 23 nt, Human
uaugaacuugaggacacaugucc

SEQ ID NO: 1307873 - RNA, 14 nt, Human
uaugaagaacugag

SEQ ID NO: 1307874 - RNA, 21 nt, Human
uaugaacuugaggacacaugu

SEQ ID NO: 1307875 - RNA, 20 nt, Human
uaugaacuugaggacacaug

SEQ ID NO: 1307876 - RNA, 21 nt, Human
uaugaaauauuauguuaaaac

SEQ ID NO: 1307877 - RNA, 13 nt, Human
uauuuccacuucu

SEQ ID NO: 1307878 - RNA, 18 nt, Human
uauuuccauucaacaaga

SEQ ID NO: 1307879 - RNA, 14 nt, Human
uaugaagacauaaa

SEQ ID NO: 1307880 - RNA, 16 nt, Human
uaugaagaacugagga

SEQ ID NO: 1307881 - RNA, 17 nt, Human
uaugaagaacugaggag

SEQ ID NO: 1307882 - RNA, 20 nt, Human
uaugaaauauguauaacuuu

SEQ ID NO: 1307883 - RNA, 21 nt, Human
uaugaagaaggugaauagcca

SEQ ID NO: 1307884 - RNA, 16 nt, Human
uauuuccuaugaugua

SEQ ID NO: 1307885 - RNA, 15 nt, Human
uauuuccuaugaugu

SEQ ID NO: 1307886 - RNA, 17 nt, Human
uauuuccuaugauguau

SEQ ID NO: 1307887 - RNA, 13 nt, Human
uauuuccucccuc

SEQ ID NO: 1307888 - RNA, 22 nt, Human
uauuucccuacauuaaacauga

SEQ ID NO: 1307889 - RNA, 17 nt, Human
uauuucccuacauuaaa

SEQ ID NO: 1307890 - RNA, 16 nt, Human
uauuucccuacauuaa

SEQ ID NO: 1307891 - RNA, 15 nt, Human
uauuucccuacauua

SEQ ID NO: 1307892 - RNA, 21 nt, Human
uauuucccaugauuucaugua

SEQ ID NO: 1307893 - RNA, 21 nt, Human
uauuuccccaacauguaauaa

SEQ ID NO: 1307894 - RNA, 18 nt, Human
uauuucccaugauuucau

SEQ ID NO: 1307895 - RNA, 16 nt, Human
uauuucccaugauuuc

SEQ ID NO: 1307896 - RNA, 15 nt, Human
uauuucccaugauuu

SEQ ID NO: 1307897 - RNA, 21 nt, Human
acaguucuuugggccagacau

SEQ ID NO: 1307898 - RNA, 19 nt, Human
acaguugcacagcaucuca

SEQ ID NO: 1307899 - RNA, 15 nt, Human
acaguugcacagcau

SEQ ID NO: 1307900 - RNA, 14 nt, Human
acaguugcacagca

SEQ ID NO: 1307901 - RNA, 13 nt, Human
acaguugcacagc

SEQ ID NO: 1307902 - RNA, 22 nt, Human
acaguucuuugggccagacaug

SEQ ID NO: 1307903 - RNA, 22 nt, Human
acaguugaagggaggggcugug

SEQ ID NO: 1307904 - RNA, 20 nt, Human
acaguugcacagcaucucag

SEQ ID NO: 1307905 - RNA, 13 nt, Human
acaguugcaugua

SEQ ID NO: 1307906 - RNA, 23 nt, Human
acaguugcacagcaucucagcuc

SEQ ID NO: 1307907 - RNA, 23 nt, Human
acaguugcauguaguaacacuaa

SEQ ID NO: 1307908 - RNA, 14 nt, Human
acaguugguaacuu

SEQ ID NO: 1307909 - RNA, 15 nt, Human
acaguugguaacuuu

SEQ ID NO: 1307910 - RNA, 16 nt, Human
acaguugguaacuuuu

SEQ ID NO: 1307911 - RNA, 24 nt, Human
acaguugguaacuuuugugaauua

SEQ ID NO: 1307912 - RNA, 12 nt, Human
acaguuguauuu

SEQ ID NO: 1307913 - RNA, 13 nt, Human
acaguuguauuua

SEQ ID NO: 1307914 - RNA, 18 nt, Human
acaguuguauuuaacaga

SEQ ID NO: 1307915 - RNA, 22 nt, Human
acaguuguauuuaacagaaauu

SEQ ID NO: 1307916 - RNA, 20 nt, Human
acaguuuaauaccacagcuu

SEQ ID NO: 1307917 - RNA, 19 nt, Human
acaguuuaaugaagaucua

SEQ ID NO: 1307918 - RNA, 22 nt, Human
acaguuuaccaguugccuuuua

SEQ ID NO: 1307919 - RNA, 15 nt, Human
acaguuuauuuguug

SEQ ID NO: 1307920 - RNA, 19 nt, Human
acaguuuaccaguugccuu

SEQ ID NO: 1307921 - RNA, 13 nt, Human
acaguuugaaaua

SEQ ID NO: 1307922 - RNA, 14 nt, Human
acaguuugaaauaa

SEQ ID NO: 1307923 - RNA, 15 nt, Human
acaguuugaaauaag

SEQ ID NO: 1307924 - RNA, 18 nt, Human
acaguuugaaauaagcua

SEQ ID NO: 1307925 - RNA, 20 nt, Human
acaguuugaaauaagcuauu

SEQ ID NO: 1307926 - RNA, 22 nt, Human
acaguuugaaauaagcuauuug

SEQ ID NO: 1307927 - RNA, 14 nt, Human
acauaaaaaggaca

SEQ ID NO: 1307928 - RNA, 14 nt, Human
acauacauuuugua

SEQ ID NO: 1307929 - RNA, 14 nt, Human
acauacccccuccc

SEQ ID NO: 1307930 - RNA, 18 nt, Human
acauaccccuuacaaaug

SEQ ID NO: 1307931 - RNA, 20 nt, Human
acauacccccucccccaccg

SEQ ID NO: 1307932 - RNA, 16 nt, Human
acauacccugaccugg

SEQ ID NO: 1307933 - RNA, 22 nt, Human
acauacccugaccuggcccccu

SEQ ID NO: 1307934 - RNA, 20 nt, Human
acauacccuggccgcccccu

SEQ ID NO: 1307935 - RNA, 14 nt, Human
acauaccuaagaag

SEQ ID NO: 1307936 - RNA, 21 nt, Human
acauacccuggccgcccccug

SEQ ID NO: 1307937 - RNA, 14 nt, Human
acauacuaugaaau

SEQ ID NO: 1307938 - RNA, 12 nt, Human
acauacucauuu

SEQ ID NO: 1307939 - RNA, 13 nt, Human
acauacucauuuu

SEQ ID NO: 1307940 - RNA, 14 nt, Human
acauacucauuuuu

SEQ ID NO: 1307941 - RNA, 16 nt, Human
acauacucauuuuuca

SEQ ID NO: 1307942 - RNA, 17 nt, Human
acauacucauuuuucau

SEQ ID NO: 1307943 - RNA, 18 nt, Human
acauacuggccuggacug

SEQ ID NO: 1307944 - RNA, 19 nt, Human
acauacuggccuggacugu

SEQ ID NO: 1307945 - RNA, 15 nt, Human
acauacuugaagggc

SEQ ID NO: 1307946 - RNA, 16 nt, Human
acauacuugaagggcc

SEQ ID NO: 1307947 - RNA, 17 nt, Human
acauacuugaagggcca

SEQ ID NO: 1307948 - RNA, 18 nt, Human
acauacuugaagggccag

SEQ ID NO: 1307949 - RNA, 19 nt, Human
acauacuugaagggccaga

SEQ ID NO: 1307950 - RNA, 20 nt, Human
acauacuugaagggccagag

SEQ ID NO: 1307951 - RNA, 21 nt, Human
acauacuugaagggccagagc

SEQ ID NO: 1307952 - RNA, 22 nt, Human
acauacuugaagggccagagcc

SEQ ID NO: 1307953 - RNA, 23 nt, Human
acauacuugaagggccagagcca

SEQ ID NO: 1307954 - RNA, 16 nt, Human
acauagaaauugccug

SEQ ID NO: 1307955 - RNA, 21 nt, Human
acauagaaauugccugacgaa

SEQ ID NO: 1307956 - RNA, 13 nt, Human
acaguuuuaacug

SEQ ID NO: 1307957 - RNA, 21 nt, Human
acaguuuuaacuguggauauu

SEQ ID NO: 1307958 - RNA, 17 nt, Human
acaguuuuaacugugga

SEQ ID NO: 1307959 - RNA, 19 nt, Human
acaguuuuaacuguggaua

SEQ ID NO: 1307960 - RNA, 20 nt, Human
acaguuuuccuaugcuuuga

SEQ ID NO: 1307961 - RNA, 12 nt, Human
acaucagcaaac

SEQ ID NO: 1307962 - RNA, 16 nt, Human
acaucuacaaaacauu

SEQ ID NO: 1307963 - RNA, 17 nt, Human
acaucuacaaaacauua

SEQ ID NO: 1307964 - RNA, 22 nt, Human
acaucagagugacauccaggag

SEQ ID NO: 1307965 - RNA, 18 nt, Human
acaucuauuuuggauugu

SEQ ID NO: 1307966 - RNA, 19 nt, Human
acaucuauuuuggauugua

SEQ ID NO: 1307967 - RNA, 23 nt, Human
acaucuauuuuggauuguauauu

SEQ ID NO: 1307968 - RNA, 17 nt, Human
acaucucaacaggccuc

SEQ ID NO: 1307969 - RNA, 20 nt, Human
acaucucaacaggccucagg

SEQ ID NO: 1307970 - RNA, 21 nt, Human
acaucucaacaggccucaggg

SEQ ID NO: 1307971 - RNA, 22 nt, Human
acaucucaacaggccucagggc

SEQ ID NO: 1307972 - RNA, 12 nt, Human
acaucucauuuu

SEQ ID NO: 1307973 - RNA, 23 nt, Human
acaucucccuuuuccaugacugu

SEQ ID NO: 1307974 - RNA, 13 nt, Human
acaucacagauga

SEQ ID NO: 1307975 - RNA, 16 nt, Human
acaucacagcccagcc

SEQ ID NO: 1307976 - RNA, 16 nt, Human
acaucaccacaguuua

SEQ ID NO: 1307977 - RNA, 14 nt, Human
acaucacagcccag

SEQ ID NO: 1307978 - RNA, 15 nt, Human
acaucacuuguacaa

SEQ ID NO: 1307979 - RNA, 16 nt, Human
acaucacuuguacaaa

SEQ ID NO: 1307980 - RNA, 19 nt, Human
acaucacuuguacaaaaua

SEQ ID NO: 1307981 - RNA, 18 nt, Human
acaucaacccgagucauu

SEQ ID NO: 1307982 - RNA, 14 nt, Human
acaucaaucuuuaa

SEQ ID NO: 1307983 - RNA, 14 nt, Human
acaucacaagacua

SEQ ID NO: 1307984 - RNA, 13 nt, Human
acaucaacagaua

SEQ ID NO: 1307985 - RNA, 12 nt, Human
acaucaaagagg

SEQ ID NO: 1307986 - RNA, 14 nt, Human
acauauuuuaaaau

SEQ ID NO: 1307987 - RNA, 21 nt, Human
acaucugagguuuuauuucau

SEQ ID NO: 1307988 - RNA, 23 nt, Human
acaucugagguuuuauuucauuu

SEQ ID NO: 1307989 - RNA, 19 nt, Human
acaucuguaaaucuacaca

SEQ ID NO: 1307990 - RNA, 15 nt, Human
acaucugugucuugu

SEQ ID NO: 1307991 - RNA, 16 nt, Human
acaucugugucuuguu

SEQ ID NO: 1307992 - RNA, 22 nt, Human
uauuuggugauuacauuuuaaa

SEQ ID NO: 1307993 - RNA, 17 nt, Human
uauuuggugauuacauu

SEQ ID NO: 1307994 - RNA, 14 nt, Human
uauuuguaaaauga

SEQ ID NO: 1307995 - RNA, 15 nt, Human
uauuuguaaaaugac

SEQ ID NO: 1307996 - RNA, 23 nt, Human
uauuuguaaaaugacaaucaugu

SEQ ID NO: 1307997 - RNA, 19 nt, Human
acauaguauucaugacuau

SEQ ID NO: 1307998 - RNA, 14 nt, Human
acauaguauucaug

SEQ ID NO: 1307999 - RNA, 16 nt, Human
acauagugaugguucc

SEQ ID NO: 1308000 - RNA, 21 nt, Human
acauagugaugguuccccugu

SEQ ID NO: 1308001 - RNA, 20 nt, Human
acauagugggacccugucuc

SEQ ID NO: 1308002 - RNA, 20 nt, Human
acauagugcuaacaugaaga

SEQ ID NO: 1308003 - RNA, 15 nt, Human
acauaguuauuuauu

SEQ ID NO: 1308004 - RNA, 19 nt, Human
acauauauaacaaugcugu

SEQ ID NO: 1308005 - RNA, 23 nt, Human
acauauaauguuguuauuuaaag

SEQ ID NO: 1308006 - RNA, 18 nt, Human
acauagaauuaacacaug

SEQ ID NO: 1308007 - RNA, 14 nt, Human
acauagaauuaaca

SEQ ID NO: 1308008 - RNA, 16 nt, Human
acauagacagaagaaa

SEQ ID NO: 1308009 - RNA, 18 nt, Human
acauagacagaagaaaca

SEQ ID NO: 1308010 - RNA, 17 nt, Human
acauagacagaagaaac

SEQ ID NO: 1308011 - RNA, 19 nt, Human
acauagagccggguguccc

SEQ ID NO: 1308012 - RNA, 22 nt, Human
acauagagccggguguccccaa

SEQ ID NO: 1308013 - RNA, 16 nt, Human
acauagauaaaacauc

SEQ ID NO: 1308014 - RNA, 21 nt, Human
acauagagccgggugucccca

SEQ ID NO: 1308015 - RNA, 16 nt, Human
acauagcccacuuaca

SEQ ID NO: 1308016 - RNA, 19 nt, Human
acauagcccacuuacauuu

SEQ ID NO: 1308017 - RNA, 21 nt, Human
acauagcccacuuacauuuac

SEQ ID NO: 1308018 - RNA, 20 nt, Human
acauauggaauuuugcaaag

SEQ ID NO: 1308019 - RNA, 21 nt, Human
acauaugugcuggaauucuaa

SEQ ID NO: 1308020 - RNA, 15 nt, Human
acauaucuuagaugg

SEQ ID NO: 1308021 - RNA, 16 nt, Human
acauaugaucugucug

SEQ ID NO: 1308022 - RNA, 17 nt, Human
acauaugaucugucugu

SEQ ID NO: 1308023 - RNA, 18 nt, Human
acauaugaucugucugug

SEQ ID NO: 1308024 - RNA, 19 nt, Human
acauaugaucugucugugg

SEQ ID NO: 1308025 - RNA, 13 nt, Human
acauauggaauuu

SEQ ID NO: 1308026 - RNA, 17 nt, Human
acauauggaauuuugca

SEQ ID NO: 1308027 - RNA, 20 nt, Human
accacuuuuugcagcuuucu

SEQ ID NO: 1308028 - RNA, 18 nt, Human
accacuuuuugcagcuuu

SEQ ID NO: 1308029 - RNA, 17 nt, Human
accagaaaagcccaagu

SEQ ID NO: 1308030 - RNA, 24 nt, Human
accagaaagcaguugagacaagaa

SEQ ID NO: 1308031 - RNA, 17 nt, Human
accacuuuuugcagcuu

SEQ ID NO: 1308032 - RNA, 16 nt, Human
accacuuuuugcagcu

SEQ ID NO: 1308033 - RNA, 15 nt, Human
accacuuuuugcagc

SEQ ID NO: 1308034 - RNA, 14 nt, Human
accacuuuuugcag

SEQ ID NO: 1308035 - RNA, 13 nt, Human
accacuuuuugca

SEQ ID NO: 1308036 - RNA, 12 nt, Human
accacuuuuuag

SEQ ID NO: 1308037 - RNA, 23 nt, Human
accagaaagcaguugagacaaga

SEQ ID NO: 1308038 - RNA, 21 nt, Human
accagaaccaauuauuuucau

SEQ ID NO: 1308039 - RNA, 19 nt, Human
accagaaccaauuauuuuc

SEQ ID NO: 1308040 - RNA, 17 nt, Human
accagaagcucccccag

SEQ ID NO: 1308041 - RNA, 19 nt, Human
accagaagcucccccagca

SEQ ID NO: 1308042 - RNA, 20 nt, Human
accagaagcucccccagcaa

SEQ ID NO: 1308043 - RNA, 14 nt, Human
accagacacccagg

SEQ ID NO: 1308044 - RNA, 15 nt, Human
accagacacccagga

SEQ ID NO: 1308045 - RNA, 16 nt, Human
accagacacccaggac

SEQ ID NO: 1308046 - RNA, 17 nt, Human
accagacacccaggacu

SEQ ID NO: 1308047 - RNA, 21 nt, Human
accagacuacuugggagcacc

SEQ ID NO: 1308048 - RNA, 23 nt, Human
accagacuacuugggagcaccgc

SEQ ID NO: 1308049 - RNA, 22 nt, Human
accagacuagauggaccugccu

SEQ ID NO: 1308050 - RNA, 16 nt, Human
accagacucuugccug

SEQ ID NO: 1308051 - RNA, 18 nt, Human
accacuuguguuuugcaa

SEQ ID NO: 1308052 - RNA, 16 nt, Human
accacuggucuguagg

SEQ ID NO: 1308053 - RNA, 15 nt, Human
accacuucagggcuu

SEQ ID NO: 1308054 - RNA, 13 nt, Human
accacugcagaag

SEQ ID NO: 1308055 - RNA, 15 nt, Human
accacugcucugaug

SEQ ID NO: 1308056 - RNA, 17 nt, Human
accacugcucugaugaa

SEQ ID NO: 1308057 - RNA, 23 nt, Human
accacugcucugaugaagaggag

SEQ ID NO: 1308058 - RNA, 21 nt, Human
accacugcugauauuuucucu

SEQ ID NO: 1308059 - RNA, 15 nt, Human
accagacucuugccu

SEQ ID NO: 1308060 - RNA, 14 nt, Human
accagccgugagca

SEQ ID NO: 1308061 - RNA, 19 nt, Human
accagccgugagcauguuu

SEQ ID NO: 1308062 - RNA, 14 nt, Human
accagccuccaugc

SEQ ID NO: 1308063 - RNA, 19 nt, Human
accagccuccaugcugccu

SEQ ID NO: 1308064 - RNA, 20 nt, Human
accagccuccaugcugccuc

SEQ ID NO: 1308065 - RNA, 21 nt, Human
accagccuccaugcugccucc

SEQ ID NO: 1308066 - RNA, 14 nt, Human
accagggacugagg

SEQ ID NO: 1308067 - RNA, 18 nt, Human
accaggcuugccugcagg

SEQ ID NO: 1308068 - RNA, 22 nt, Human
accagccgugagcauguuugga

SEQ ID NO: 1308069 - RNA, 17 nt, Human
accaggcugccucccuu

SEQ ID NO: 1308070 - RNA, 19 nt, Human
accaggcuugccugcaggc

SEQ ID NO: 1308071 - RNA, 22 nt, Human
ucaccucuagguccccauacuc

SEQ ID NO: 1308072 - RNA, 23 nt, Human
ucaccucuagguccccauacucc

SEQ ID NO: 1308073 - RNA, 19 nt, Human
ucaccugagucacccuacc

SEQ ID NO: 1308074 - RNA, 16 nt, Human
ucaccugccccaacuc

SEQ ID NO: 1308075 - RNA, 13 nt, Human
ucaccugcacuaa

SEQ ID NO: 1308076 - RNA, 22 nt, Human
ucacuaggcccccacuugccuc

SEQ ID NO: 1308077 - RNA, 20 nt, Human
ucacuccccaacccccaacu

SEQ ID NO: 1308078 - RNA, 14 nt, Human
ucacuacucagcau

SEQ ID NO: 1308079 - RNA, 15 nt, Human
ucacuacucagcaug

SEQ ID NO: 1308080 - RNA, 18 nt, Human
ucacuagcccuccuuuuu

SEQ ID NO: 1308081 - RNA, 21 nt, Human
ucacuagcccuccuuuuucca

SEQ ID NO: 1308082 - RNA, 19 nt, Human
ucacuaggcccccacuugc

SEQ ID NO: 1308083 - RNA, 21 nt, Human
ucacuaggcccccacuugccu

SEQ ID NO: 1308084 - RNA, 20 nt, Human
ucaccugugcuucgggcccu

SEQ ID NO: 1308085 - RNA, 21 nt, Human
ucaccugugcuucgggcccuu

SEQ ID NO: 1308086 - RNA, 16 nt, Human
ucaccuuagaccacca

SEQ ID NO: 1308087 - RNA, 19 nt, Human
ucaccuuagaccaccaagc

SEQ ID NO: 1308088 - RNA, 20 nt, Human
ucaccuuagaccaccaagcc

SEQ ID NO: 1308089 - RNA, 21 nt, Human
ucaccuuagaccaccaagccu

SEQ ID NO: 1308090 - RNA, 22 nt, Human
ucaccuuagaccaccaagccuu

SEQ ID NO: 1308091 - RNA, 18 nt, Human
ucaccuucaccuucaucc

SEQ ID NO: 1308092 - RNA, 23 nt, Human
ucaauucuucccuaucuuugcca

SEQ ID NO: 1308093 - RNA, 16 nt, Human
ucaauuuuaucccuca

SEQ ID NO: 1308094 - RNA, 21 nt, Human
ucaauuuuaucccucaccugu

SEQ ID NO: 1308095 - RNA, 22 nt, Human
ucaauuuuaucccucaccugua

SEQ ID NO: 1308096 - RNA, 19 nt, Human
ucaauucuucccuaucuuu

SEQ ID NO: 1308097 - RNA, 17 nt, Human
ucaauucuucccuaucu

SEQ ID NO: 1308098 - RNA, 15 nt, Human
ucaauucuugccaaa

SEQ ID NO: 1308099 - RNA, 16 nt, Human
ucaauuuucacugugu

SEQ ID NO: 1308100 - RNA, 15 nt, Human
ucaauuuucacugug

SEQ ID NO: 1308101 - RNA, 17 nt, Human
ucacaaaguggaacgaa

SEQ ID NO: 1308102 - RNA, 14 nt, Human
accacacuccagcu

SEQ ID NO: 1308103 - RNA, 18 nt, Human
accacacccggcuaauuu

SEQ ID NO: 1308104 - RNA, 13 nt, Human
accacacccugua

SEQ ID NO: 1308105 - RNA, 17 nt, Human
accacacccuguacugu

SEQ ID NO: 1308106 - RNA, 23 nt, Human
accaauuauaagggcaaauugga

SEQ ID NO: 1308107 - RNA, 14 nt, Human
accaauuauuuuca

SEQ ID NO: 1308108 - RNA, 13 nt, Human
accaaucauuuua

SEQ ID NO: 1308109 - RNA, 20 nt, Human
accaaucauuuuaauuauua

SEQ ID NO: 1308110 - RNA, 16 nt, Human
accaauuauuuucauc

SEQ ID NO: 1308111 - RNA, 22 nt, Human
accaauugcugcuacuuauaua

SEQ ID NO: 1308112 - RNA, 14 nt, Human
accacaaacuguaa

SEQ ID NO: 1308113 - RNA, 18 nt, Human
accacaaacuguaauaca

SEQ ID NO: 1308114 - RNA, 13 nt, Human
accaaucaugaau

SEQ ID NO: 1308115 - RNA, 15 nt, Human
accaaucaugaauua

SEQ ID NO: 1308116 - RNA, 20 nt, Human
ucaagugaucugcccaccuc

SEQ ID NO: 1308117 - RNA, 17 nt, Human
ucaagugauucucaugc

SEQ ID NO: 1308118 - RNA, 14 nt, Human
ucaagucagcucuu

SEQ ID NO: 1308119 - RNA, 20 nt, Human
ucaagugauucucaugccuc

SEQ ID NO: 1308120 - RNA, 19 nt, Human
ucacccagguuggagugca

SEQ ID NO: 1308121 - RNA, 19 nt, Human
ucacccaggcuggacugca

SEQ ID NO: 1308122 - RNA, 19 nt, Human
ucacccaggcuggagugca

SEQ ID NO: 1308123 - RNA, 18 nt, Human
ucaccaguguguggcuuu

SEQ ID NO: 1308124 - RNA, 23 nt, Human
ucaccaguguguggcuuucagag

SEQ ID NO: 1308125 - RNA, 15 nt, Human
ucacaugaauuauua

SEQ ID NO: 1308126 - RNA, 16 nt, Human
ucacaugaauuauuac

SEQ ID NO: 1308127 - RNA, 17 nt, Human
ucacaugaauuauuaca

SEQ ID NO: 1308128 - RNA, 18 nt, Human
ucacaugaauuauuacag

SEQ ID NO: 1308129 - RNA, 22 nt, Human
ucacaugaauuauuacaguguu

SEQ ID NO: 1308130 - RNA, 21 nt, Human
ucacaugaauuauuacagugu

SEQ ID NO: 1308131 - RNA, 17 nt, Human
ucaccaggcagccucug

SEQ ID NO: 1308132 - RNA, 19 nt, Human
ucaccaggcagccucuggg

SEQ ID NO: 1308133 - RNA, 22 nt, Human
ucaccaggcagccucugggggg

SEQ ID NO: 1308134 - RNA, 20 nt, Human
ucaccaggcagccucugggg

SEQ ID NO: 1308135 - RNA, 16 nt, Human
ucacaacaaccugguc

SEQ ID NO: 1308136 - RNA, 22 nt, Human
ucacacgucuggcuucacagau

SEQ ID NO: 1308137 - RNA, 21 nt, Human
ucacacucaguugugacuaac

SEQ ID NO: 1308138 - RNA, 12 nt, Human
ucacacucgaca

SEQ ID NO: 1308139 - RNA, 16 nt, Human
ucacacucgacaugaa

SEQ ID NO: 1308140 - RNA, 17 nt, Human
accaugguuaagagucc

SEQ ID NO: 1308141 - RNA, 19 nt, Human
accaugguuaagaguccaa

SEQ ID NO: 1308142 - RNA, 21 nt, Human
accauguaaagaacauaaaua

SEQ ID NO: 1308143 - RNA, 21 nt, Human
accaugguuaagaguccaaga

SEQ ID NO: 1308144 - RNA, 12 nt, Human
accauguaaugg

SEQ ID NO: 1308145 - RNA, 11 nt, Human
accauguacau

SEQ ID NO: 1308146 - RNA, 17 nt, Human
accauguacaugaagaa

SEQ ID NO: 1308147 - RNA, 17 nt, Human
accauguagaaaauuug

SEQ ID NO: 1308148 - RNA, 15 nt, Human
ucacuccuaccuggu

SEQ ID NO: 1308149 - RNA, 12 nt, Human
accauuccccau

SEQ ID NO: 1308150 - RNA, 21 nt, Human
accauuccaagucuccacccc

SEQ ID NO: 1308151 - RNA, 13 nt, Human
accauugaaggcu

SEQ ID NO: 1308152 - RNA, 16 nt, Human
accauugaaggcuuaa

SEQ ID NO: 1308153 - RNA, 18 nt, Human
accauugaauucuugguu

SEQ ID NO: 1308154 - RNA, 18 nt, Human
accauugauuuaauguaa

SEQ ID NO: 1308155 - RNA, 13 nt, Human
accauuaaaccau

SEQ ID NO: 1308156 - RNA, 19 nt, Human
accauuaaaccaucucccu

SEQ ID NO: 1308157 - RNA, 13 nt, Human
accauuaaccaga

SEQ ID NO: 1308158 - RNA, 14 nt, Human
accauuaaaccauc

SEQ ID NO: 1308159 - RNA, 19 nt, Human
accauuauaaccuuaauuu

SEQ ID NO: 1308160 - RNA, 17 nt, Human
accauuauaaugaauuu

SEQ ID NO: 1308161 - RNA, 21 nt, Human
accauuauaaccuuaauuuau

SEQ ID NO: 1308162 - RNA, 16 nt, Human
accauuauaaugaauu

SEQ ID NO: 1308163 - RNA, 21 nt, Human
acccagauaaagguucaugca

SEQ ID NO: 1308164 - RNA, 15 nt, Human
acccagacucagaca

SEQ ID NO: 1308165 - RNA, 18 nt, Human
acccagacauaaaggaaa

SEQ ID NO: 1308166 - RNA, 20 nt, Human
acccagacauaaaggaaaag

SEQ ID NO: 1308167 - RNA, 19 nt, Human
acccagacauaaaggaaaa

SEQ ID NO: 1308168 - RNA, 22 nt, Human
acccagaccuguuagcagacag

SEQ ID NO: 1308169 - RNA, 23 nt, Human
accauuucuugagguaaaagcau

SEQ ID NO: 1308170 - RNA, 14 nt, Human
accauugucucaga

SEQ ID NO: 1308171 - RNA, 15 nt, Human
accauugucucagag

SEQ ID NO: 1308172 - RNA, 18 nt, Human
accauugucucagagcag

SEQ ID NO: 1308173 - RNA, 19 nt, Human
accauugucucagagcagg

SEQ ID NO: 1308174 - RNA, 23 nt, Human
accauuuggauccuguguggaga

SEQ ID NO: 1308175 - RNA, 22 nt, Human
accauuuggcaucccugggccu

SEQ ID NO: 1308176 - RNA, 19 nt, Human
accauuuggcaucccuggg

SEQ ID NO: 1308177 - RNA, 20 nt, Human
accauuuggcaucccugggc

SEQ ID NO: 1308178 - RNA, 15 nt, Human
accauuuuaaaguua

SEQ ID NO: 1308179 - RNA, 13 nt, Human
accauuuucuggu

SEQ ID NO: 1308180 - RNA, 19 nt, Human
ucagaaguuucucagcucc

SEQ ID NO: 1308181 - RNA, 17 nt, Human
ucagaaguuaguuugua

SEQ ID NO: 1308182 - RNA, 18 nt, Human
ucagaagucaucuugcua

SEQ ID NO: 1308183 - RNA, 22 nt, Human
ucagaagucaucuugcuaccag

SEQ ID NO: 1308184 - RNA, 15 nt, Human
ucagaagucuuucag

SEQ ID NO: 1308185 - RNA, 18 nt, Human
ucagaagucuuucagcaa

SEQ ID NO: 1308186 - RNA, 23 nt, Human
ucagaagccugggggccuggcug

SEQ ID NO: 1308187 - RNA, 22 nt, Human
ucagaagccugggggccuggcu

SEQ ID NO: 1308188 - RNA, 15 nt, Human
ucagaagucaucuug

SEQ ID NO: 1308189 - RNA, 22 nt, Human
acccagaggaaggggccagagg

SEQ ID NO: 1308190 - RNA, 17 nt, Human
acccagccccagccagg

SEQ ID NO: 1308191 - RNA, 15 nt, Human
acccagcccucaucc

SEQ ID NO: 1308192 - RNA, 16 nt, Human
acccagcccucauccc

SEQ ID NO: 1308193 - RNA, 12 nt, Human
ucagaagccugg

SEQ ID NO: 1308194 - RNA, 13 nt, Human
ucagaagccuggg

SEQ ID NO: 1308195 - RNA, 14 nt, Human
ucagaagccugggg

SEQ ID NO: 1308196 - RNA, 15 nt, Human
ucagaagccuggggg

SEQ ID NO: 1308197 - RNA, 16 nt, Human
ucagaagccugggggc

SEQ ID NO: 1308198 - RNA, 19 nt, Human
ucagaagccugggggccug

SEQ ID NO: 1308199 - RNA, 20 nt, Human
ucagaagccugggggccugg

SEQ ID NO: 1308200 - RNA, 21 nt, Human
ucagaagccugggggccuggc

SEQ ID NO: 1308201 - RNA, 14 nt, Human
ucagaaugucauuu

SEQ ID NO: 1308202 - RNA, 16 nt, Human
ucagaauuaaacuuuu

SEQ ID NO: 1308203 - RNA, 18 nt, Human
ucagaauuaaacuuuuaa

SEQ ID NO: 1308204 - RNA, 20 nt, Human
ucagaauuaaacuuuuaauu

SEQ ID NO: 1308205 - RNA, 23 nt, Human
ucagaauuaaacuuuuaauucau

SEQ ID NO: 1308206 - RNA, 23 nt, Human
accccagcuggggccaggcuggg

SEQ ID NO: 1308207 - RNA, 12 nt, Human
accccacuccca

SEQ ID NO: 1308208 - RNA, 13 nt, Human
accccacucccac

SEQ ID NO: 1308209 - RNA, 14 nt, Human
accccacucccaca

SEQ ID NO: 1308210 - RNA, 14 nt, Human
accccagacacugg

SEQ ID NO: 1308211 - RNA, 18 nt, Human
accccagggcacaggagc

SEQ ID NO: 1308212 - RNA, 20 nt, Human
accccaggcugaagcagguu

SEQ ID NO: 1308213 - RNA, 10 nt, Human
accccagggc

SEQ ID NO: 1308214 - RNA, 11 nt, Human
accccagggca

SEQ ID NO: 1308215 - RNA, 12 nt, Human
accccagggcac

SEQ ID NO: 1308216 - RNA, 15 nt, Human
accccagggcacagg

SEQ ID NO: 1308217 - RNA, 16 nt, Human
accccagggcacagga

SEQ ID NO: 1308218 - RNA, 15 nt, Human
acccagcggacacac

SEQ ID NO: 1308219 - RNA, 14 nt, Human
acccaggaucccca

SEQ ID NO: 1308220 - RNA, 19 nt, Human
acccaggccaggcaugugg

SEQ ID NO: 1308221 - RNA, 18 nt, Human
acccaggcuggagugcag

SEQ ID NO: 1308222 - RNA, 19 nt, Human
acccaggcuggagugcagu

SEQ ID NO: 1308223 - RNA, 20 nt, Human
acccaggcuggagugcagug

SEQ ID NO: 1308224 - RNA, 21 nt, Human
accccaccuuuauuccuucau

SEQ ID NO: 1308225 - RNA, 16 nt, Human
accccacgccuuaucc

SEQ ID NO: 1308226 - RNA, 22 nt, Human
ucagccaagguuuuauaaggcu

SEQ ID NO: 1308227 - RNA, 23 nt, Human
ucagccaagguuuuauaaggcug

SEQ ID NO: 1308228 - RNA, 20 nt, Human
ucagccagugaccaaccuuu

SEQ ID NO: 1308229 - RNA, 14 nt, Human
ucagccauguauuu

SEQ ID NO: 1308230 - RNA, 21 nt, Human
ucagagaggccuuuuggaaug

SEQ ID NO: 1308231 - RNA, 22 nt, Human
ucagagaggccuuuuggaaugu

SEQ ID NO: 1308232 - RNA, 21 nt, Human
ucagagccuccuuucuggcuu

SEQ ID NO: 1308233 - RNA, 16 nt, Human
ucagagcgcacaggga

SEQ ID NO: 1308234 - RNA, 14 nt, Human
ucagagcgcacagg

SEQ ID NO: 1308235 - RNA, 11 nt, Human
ucagcauuuga

SEQ ID NO: 1308236 - RNA, 12 nt, Human
ucagcauuugac

SEQ ID NO: 1308237 - RNA, 19 nt, Human
ucagccuacaggccucaca

SEQ ID NO: 1308238 - RNA, 13 nt, Human
ucaggaaagagaa

SEQ ID NO: 1308239 - RNA, 14 nt, Human
ucaggaaaaggccu

SEQ ID NO: 1308240 - RNA, 15 nt, Human
ucaggaaaaggccug

SEQ ID NO: 1308241 - RNA, 16 nt, Human
ucaggaaaaggccugg

SEQ ID NO: 1308242 - RNA, 17 nt, Human
ucaggaaaaggccuggg

SEQ ID NO: 1308243 - RNA, 19 nt, Human
ucaggaaaaggccuggggu

SEQ ID NO: 1308244 - RNA, 18 nt, Human
ucaggaaaaggccugggg

SEQ ID NO: 1308245 - RNA, 12 nt, Human
ucaggaaaauug

SEQ ID NO: 1308246 - RNA, 19 nt, Human
ucaggaaagagaacuucca

SEQ ID NO: 1308247 - RNA, 18 nt, Human
ucaggaaaauugaaugca

SEQ ID NO: 1308248 - RNA, 22 nt, Human
ucaggaaacgagacuuuccauu

SEQ ID NO: 1308249 - RNA, 21 nt, Human
ucaggaaacgagacuuuccau

SEQ ID NO: 1308250 - RNA, 15 nt, Human
ucaggaaaggaauca

SEQ ID NO: 1308251 - RNA, 12 nt, Human
ucagcucaugga

SEQ ID NO: 1308252 - RNA, 15 nt, Human
ucagcucauccaugc

SEQ ID NO: 1308253 - RNA, 19 nt, Human
ucagcuucguuuauuuuca

SEQ ID NO: 1308254 - RNA, 21 nt, Human
ucagcuucguuuauuuucaag

SEQ ID NO: 1308255 - RNA, 13 nt, Human
ucagcucacugca

SEQ ID NO: 1308256 - RNA, 16 nt, Human
ucagcucacugcaacc

SEQ ID NO: 1308257 - RNA, 11 nt, Human
accccccucug

SEQ ID NO: 1308258 - RNA, 22 nt, Human
accccccuguacacaacucacu

SEQ ID NO: 1308259 - RNA, 14 nt, Human
accccccuguacac

SEQ ID NO: 1308260 - RNA, 18 nt, Human
accccccuuucacaggca

SEQ ID NO: 1308261 - RNA, 21 nt, Human
accccccuuucacaggcagcc

SEQ ID NO: 1308262 - RNA, 20 nt, Human
accccccuuucacaggcagc

SEQ ID NO: 1308263 - RNA, 15 nt, Human
accccuguaggccuc

SEQ ID NO: 1308264 - RNA, 16 nt, Human
accccuguaggccuca

SEQ ID NO: 1308265 - RNA, 17 nt, Human
accccuguaggccucag

SEQ ID NO: 1308266 - RNA, 14 nt, Human
ucagccuugccaga

SEQ ID NO: 1308267 - RNA, 15 nt, Human
ucagccuugccagag

SEQ ID NO: 1308268 - RNA, 16 nt, Human
ucagccuugccagaga

SEQ ID NO: 1308269 - RNA, 17 nt, Human
ucagccuugccagagau

SEQ ID NO: 1308270 - RNA, 19 nt, Human
ucagcgacuccguuggcca

SEQ ID NO: 1308271 - RNA, 20 nt, Human
ucagcgacuccguuggccac

SEQ ID NO: 1308272 - RNA, 23 nt, Human
ucagcgacuccguuggccacucc

SEQ ID NO: 1308273 - RNA, 20 nt, Human
ucagcgcugucaggauugcg

SEQ ID NO: 1308274 - RNA, 21 nt, Human
ucagcgcugucaggauugcga

SEQ ID NO: 1308275 - RNA, 21 nt, Human
aaugccccugaauuuaaauag

SEQ ID NO: 1308276 - RNA, 21 nt, Human
aauggaaugugauguucaugg

SEQ ID NO: 1308277 - RNA, 12 nt, Human
aaugcuuucgau

SEQ ID NO: 1308278 - RNA, 14 nt, Human
aaugcuuugaaauu

SEQ ID NO: 1308279 - RNA, 22 nt, Human
aaugcuuugaaauugaaccuuu

SEQ ID NO: 1308280 - RNA, 12 nt, Human
aaugcuuugaua

SEQ ID NO: 1308281 - RNA, 18 nt, Human
aaugcuuugauauuucaa

SEQ ID NO: 1308282 - RNA, 19 nt, Human
aaugcuuuuuauuucugca

SEQ ID NO: 1308283 - RNA, 20 nt, Human
aaugcuuuuuauuucugcau

SEQ ID NO: 1308284 - RNA, 15 nt, Human
aaugccaaauuaaaa

SEQ ID NO: 1308285 - RNA, 22 nt, Human
aaugccaaauuaaaaaagauaa

SEQ ID NO: 1308286 - RNA, 16 nt, Human
aaugccaaauuaaaaa

SEQ ID NO: 1308287 - RNA, 17 nt, Human
aaugccaaauuaaaaaa

SEQ ID NO: 1308288 - RNA, 21 nt, Human
aaugccaaauuaaaaaagaua

SEQ ID NO: 1308289 - RNA, 14 nt, Human
aaugccaagcacuu

SEQ ID NO: 1308290 - RNA, 19 nt, Human
aaugccaagcacuucuuuu

SEQ ID NO: 1308291 - RNA, 16 nt, Human
aaugcauaaaauguua

SEQ ID NO: 1308292 - RNA, 16 nt, Human
aaugcaguugucucug

SEQ ID NO: 1308293 - RNA, 19 nt, Human
aaugcaguugucucuguuu

SEQ ID NO: 1308294 - RNA, 14 nt, Human
aaugcauaaaugca

SEQ ID NO: 1308295 - RNA, 14 nt, Human
aaugcauacaaguu

SEQ ID NO: 1308296 - RNA, 23 nt, Human
aaugcauuauaggaucauuuguu

SEQ ID NO: 1308297 - RNA, 19 nt, Human
aaugcauucuucucuguug

SEQ ID NO: 1308298 - RNA, 14 nt, Human
aaugcauucuucuc

SEQ ID NO: 1308299 - RNA, 14 nt, Human
uacaaggacagccc

SEQ ID NO: 1308300 - RNA, 15 nt, Human
uacaaguaacaaaaa

SEQ ID NO: 1308301 - RNA, 19 nt, Human
uacaaguaacaaaaauaaa

SEQ ID NO: 1308302 - RNA, 20 nt, Human
uacaaaauaaacaaauaaca

SEQ ID NO: 1308303 - RNA, 10 nt, Human
uacaaaauca

SEQ ID NO: 1308304 - RNA, 13 nt, Human
aaugcauaaaaug

SEQ ID NO: 1308305 - RNA, 15 nt, Human
aaugcaguugucucu

SEQ ID NO: 1308306 - RNA, 17 nt, Human
uacaaguauuuuuaauu

SEQ ID NO: 1308307 - RNA, 18 nt, Human
uacaaguauuuuuaauua

SEQ ID NO: 1308308 - RNA, 19 nt, Human
uacaaguauuuuuaauuaa

SEQ ID NO: 1308309 - RNA, 14 nt, Human
uacaaaaauauaaa

SEQ ID NO: 1308310 - RNA, 17 nt, Human
uacaaaaauauaaaaua

SEQ ID NO: 1308311 - RNA, 18 nt, Human
uacaaaaauauaaaauau

SEQ ID NO: 1308312 - RNA, 21 nt, Human
uacaaaagaagggcugguauu

SEQ ID NO: 1308313 - RNA, 19 nt, Human
uacaaaauaaacaaauaac

SEQ ID NO: 1308314 - RNA, 20 nt, Human
uacaaaaauauaaaauauga

SEQ ID NO: 1308315 - RNA, 13 nt, Human
uacaaaaauuccu

SEQ ID NO: 1308316 - RNA, 14 nt, Human
uacaaaacaaacuc

SEQ ID NO: 1308317 - RNA, 17 nt, Human
uacaaaacaaacucauu

SEQ ID NO: 1308318 - RNA, 22 nt, Human
uacaaaacaaacucauucauua

SEQ ID NO: 1308319 - RNA, 12 nt, Human
uacaaaacauua

SEQ ID NO: 1308320 - RNA, 14 nt, Human
uacaaaacauuaaa

SEQ ID NO: 1308321 - RNA, 16 nt, Human
uacaaaacauuaaacu

SEQ ID NO: 1308322 - RNA, 14 nt, Human
uaauuuaugcagaa

SEQ ID NO: 1308323 - RNA, 14 nt, Human
uaauuuauuauuaa

SEQ ID NO: 1308324 - RNA, 12 nt, Human
uaauuucaaaau

SEQ ID NO: 1308325 - RNA, 15 nt, Human
uaauuucaaaaugcu

SEQ ID NO: 1308326 - RNA, 16 nt, Human
uaauuucaaaaugcuu

SEQ ID NO: 1308327 - RNA, 20 nt, Human
uaauuucaaaaugcuuuuua

SEQ ID NO: 1308328 - RNA, 21 nt, Human
uaauuucaggaggaauacuga

SEQ ID NO: 1308329 - RNA, 23 nt, Human
uaauuucaggaggaauacugaac

SEQ ID NO: 1308330 - RNA, 22 nt, Human
uaauuucaggaggaauacugaa

SEQ ID NO: 1308331 - RNA, 13 nt, Human
uaauuccacagcu

SEQ ID NO: 1308332 - RNA, 15 nt, Human
uaauuccacaccuuu

SEQ ID NO: 1308333 - RNA, 14 nt, Human
uaauuccacagcug

SEQ ID NO: 1308334 - RNA, 17 nt, Human
uaauuccacagcugcuc

SEQ ID NO: 1308335 - RNA, 17 nt, Human
uaauuccacaccuuuua

SEQ ID NO: 1308336 - RNA, 12 nt, Human
aaugagcuuucu

SEQ ID NO: 1308337 - RNA, 13 nt, Human
aaugagcuuucug

SEQ ID NO: 1308338 - RNA, 14 nt, Human
aaugagcuuucuga

SEQ ID NO: 1308339 - RNA, 15 nt, Human
aaugagcuuucugaa

SEQ ID NO: 1308340 - RNA, 16 nt, Human
aaugagcuuucugaac

SEQ ID NO: 1308341 - RNA, 20 nt, Human
aaugagcuuucugaacagcu

SEQ ID NO: 1308342 - RNA, 21 nt, Human
aaugagcuuucugaacagcug

SEQ ID NO: 1308343 - RNA, 22 nt, Human
aaugagcuuucugaacagcugg

SEQ ID NO: 1308344 - RNA, 23 nt, Human
aaugagcuuucugaacagcuggu

SEQ ID NO: 1308345 - RNA, 14 nt, Human
aaugaggagacaca

SEQ ID NO: 1308346 - RNA, 14 nt, Human
uaauuauuuaugua

SEQ ID NO: 1308347 - RNA, 16 nt, Human
uaauuauuuauguaug

SEQ ID NO: 1308348 - RNA, 18 nt, Human
uaauuauuuauguauggu

SEQ ID NO: 1308349 - RNA, 18 nt, Human
uaauucaaggaauuucuu

SEQ ID NO: 1308350 - RNA, 20 nt, Human
uaauucaaggaauuucuuaa

SEQ ID NO: 1308351 - RNA, 22 nt, Human
uaauucaaggaauuucuuaacu

SEQ ID NO: 1308352 - RNA, 19 nt, Human
uaauucaauucaaagcugu

SEQ ID NO: 1308353 - RNA, 16 nt, Human
uaauucaauucaaagc

SEQ ID NO: 1308354 - RNA, 20 nt, Human
uacaguaggagcccagcucu

SEQ ID NO: 1308355 - RNA, 22 nt, Human
uacaguaggagcccagcucuga

SEQ ID NO: 1308356 - RNA, 17 nt, Human
uacaguagauuuuccaa

SEQ ID NO: 1308357 - RNA, 21 nt, Human
uacaguagauuuuccaaaugu

SEQ ID NO: 1308358 - RNA, 13 nt, Human
uacaguaggagcc

SEQ ID NO: 1308359 - RNA, 14 nt, Human
uacaguaggagccc

SEQ ID NO: 1308360 - RNA, 15 nt, Human
uacaguaggagccca

SEQ ID NO: 1308361 - RNA, 18 nt, Human
uacaguaggagcccagcu

SEQ ID NO: 1308362 - RNA, 22 nt, Human
uacaggcgugagccaccgugcc

SEQ ID NO: 1308363 - RNA, 15 nt, Human
uacaggccucacaca

SEQ ID NO: 1308364 - RNA, 14 nt, Human
uacaggcuccugcc

SEQ ID NO: 1308365 - RNA, 15 nt, Human
uacaggcuccugcca

SEQ ID NO: 1308366 - RNA, 17 nt, Human
uacaggcuccugccacc

SEQ ID NO: 1308367 - RNA, 19 nt, Human
uacacuaagagagaaugag

SEQ ID NO: 1308368 - RNA, 14 nt, Human
uacacuccagugag

SEQ ID NO: 1308369 - RNA, 13 nt, Human
uacacuaucuuaa

SEQ ID NO: 1308370 - RNA, 16 nt, Human
uacagagcuucccuga

SEQ ID NO: 1308371 - RNA, 15 nt, Human
uacagagcuucccug

SEQ ID NO: 1308372 - RNA, 19 nt, Human
aauggacuuuuguacauag

SEQ ID NO: 1308373 - RNA, 21 nt, Human
aauggaccggagagugggggu

SEQ ID NO: 1308374 - RNA, 20 nt, Human
aauggagauucaguuuucau

SEQ ID NO: 1308375 - RNA, 21 nt, Human
aauggaggaacuuuccaaaca

SEQ ID NO: 1308376 - RNA, 12 nt, Human
uacaccacucug

SEQ ID NO: 1308377 - RNA, 14 nt, Human
uacaccacucuggc

SEQ ID NO: 1308378 - RNA, 16 nt, Human
uacaccacucuggcag

SEQ ID NO: 1308379 - RNA, 17 nt, Human
uacaccacucuggcagc

SEQ ID NO: 1308380 - RNA, 19 nt, Human
uacaccacucuggcagcca

SEQ ID NO: 1308381 - RNA, 21 nt, Human
uacaccacucuggcagccaca

SEQ ID NO: 1308382 - RNA, 20 nt, Human
uacaccacucuggcagccac

SEQ ID NO: 1308383 - RNA, 17 nt, Human
uacauagaugcuuaguc

SEQ ID NO: 1308384 - RNA, 16 nt, Human
uacauagugcuaacau

SEQ ID NO: 1308385 - RNA, 21 nt, Human
uacauagggauaugcguauua

SEQ ID NO: 1308386 - RNA, 22 nt, Human
uacauauaagugauugcugguu

SEQ ID NO: 1308387 - RNA, 22 nt, Human
uacauagugcugcugugugcuu

SEQ ID NO: 1308388 - RNA, 21 nt, Human
uacauaugugcuggaauucua

SEQ ID NO: 1308389 - RNA, 19 nt, Human
uacauauaagugauugcug

SEQ ID NO: 1308390 - RNA, 23 nt, Human
uacauagugcuaacaugaagacc

SEQ ID NO: 1308391 - RNA, 17 nt, Human
uacauagugcugcugug

SEQ ID NO: 1308392 - RNA, 22 nt, Human
uacauagugcuaacaugaagac

SEQ ID NO: 1308393 - RNA, 21 nt, Human
uacauagugcuaacaugaaga

SEQ ID NO: 1308394 - RNA, 19 nt, Human
uacauagugcugcugugug

SEQ ID NO: 1308395 - RNA, 21 nt, Human
uacauagugcugcugugugcu

SEQ ID NO: 1308396 - RNA, 15 nt, Human
aauguacuaauauuu

SEQ ID NO: 1308397 - RNA, 13 nt, Human
aauguaugucugg

SEQ ID NO: 1308398 - RNA, 11 nt, Human
aaugugauaug

SEQ ID NO: 1308399 - RNA, 16 nt, Human
aaugugauauuauaca

SEQ ID NO: 1308400 - RNA, 12 nt, Human
aaugugaugaau

SEQ ID NO: 1308401 - RNA, 20 nt, Human
aaugugaugaauacuguauu

SEQ ID NO: 1308402 - RNA, 14 nt, Human
aauguggcuccugg

SEQ ID NO: 1308403 - RNA, 16 nt, Human
aaugugaugaauacug

SEQ ID NO: 1308404 - RNA, 13 nt, Human
aaugugauguucu

SEQ ID NO: 1308405 - RNA, 12 nt, Human
aauguggcuuga

SEQ ID NO: 1308406 - RNA, 16 nt, Human
aauguggcuugagaaa

SEQ ID NO: 1308407 - RNA, 21 nt, Human
aauguggcuugagaaauaugg

SEQ ID NO: 1308408 - RNA, 13 nt, Human
aauguauuuuaug

SEQ ID NO: 1308409 - RNA, 15 nt, Human
aauguauuuuauguu

SEQ ID NO: 1308410 - RNA, 18 nt, Human
aauguauuuuauguuaua

SEQ ID NO: 1308411 - RNA, 20 nt, Human
aauguauuuuauguuauaua

SEQ ID NO: 1308412 - RNA, 19 nt, Human
aauguauuuuauguuauau

SEQ ID NO: 1308413 - RNA, 20 nt, Human
uaauagggcaauuaauuccu

SEQ ID NO: 1308414 - RNA, 19 nt, Human
uaauagguuuggacaaaau

SEQ ID NO: 1308415 - RNA, 14 nt, Human
uaauaguauaaacc

SEQ ID NO: 1308416 - RNA, 14 nt, Human
uaauagguuuggac

SEQ ID NO: 1308417 - RNA, 18 nt, Human
uaauagggaaaauucuaa

SEQ ID NO: 1308418 - RNA, 19 nt, Human
uaauacugcugagauacau

SEQ ID NO: 1308419 - RNA, 11 nt, Human
uaauagcugua

SEQ ID NO: 1308420 - RNA, 18 nt, Human
uaaucaauguuucuucua

SEQ ID NO: 1308421 - RNA, 15 nt, Human
uaaucacgcuuuccu

SEQ ID NO: 1308422 - RNA, 23 nt, Human
aaucuuccaauuuaguuguugua

SEQ ID NO: 1308423 - RNA, 15 nt, Human
aaucuuccaauuuag

SEQ ID NO: 1308424 - RNA, 14 nt, Human
aaucuuccuguuua

SEQ ID NO: 1308425 - RNA, 17 nt, Human
aaucuuauaauuguucu

SEQ ID NO: 1308426 - RNA, 14 nt, Human
uaauacuaccuuga

SEQ ID NO: 1308427 - RNA, 15 nt, Human
uaauacuaccuugaa

SEQ ID NO: 1308428 - RNA, 16 nt, Human
uaauacucaaaugagu

SEQ ID NO: 1308429 - RNA, 18 nt, Human
uaauacucaaaugaguaa

SEQ ID NO: 1308430 - RNA, 20 nt, Human
uaauacucaaaugaguaaca

SEQ ID NO: 1308431 - RNA, 21 nt, Human
uaauacucaaaugaguaacau

SEQ ID NO: 1308432 - RNA, 14 nt, Human
uaauacugcugaga

SEQ ID NO: 1308433 - RNA, 23 nt, Human
uaauacugcugagauacauacag

SEQ ID NO: 1308434 - RNA, 20 nt, Human
uaaugacaucaccacaguuu

SEQ ID NO: 1308435 - RNA, 17 nt, Human
uaaugaaacaaagaguu

SEQ ID NO: 1308436 - RNA, 15 nt, Human
uaaugaauuuaguga

SEQ ID NO: 1308437 - RNA, 15 nt, Human
uaaugacaggccugu

SEQ ID NO: 1308438 - RNA, 20 nt, Human
uaaugacaggccuguccaac

SEQ ID NO: 1308439 - RNA, 23 nt, Human
uaaugaaacaaagaguucaagaa

SEQ ID NO: 1308440 - RNA, 22 nt, Human
uaaucaucaagagaauuugggg

SEQ ID NO: 1308441 - RNA, 18 nt, Human
uaaucaucaaguaauaca

SEQ ID NO: 1308442 - RNA, 21 nt, Human
uaaucauauaaauagaaugua

SEQ ID NO: 1308443 - RNA, 20 nt, Human
uaaucauauaaauagaaugu

SEQ ID NO: 1308444 - RNA, 15 nt, Human
uaaucauauaauaaa

SEQ ID NO: 1308445 - RNA, 20 nt, Human
uaaucauauaauaaauguac

SEQ ID NO: 1308446 - RNA, 22 nt, Human
uaaucauauaauaaauguacau

SEQ ID NO: 1308447 - RNA, 19 nt, Human
uaaucauauaaauagaaug

SEQ ID NO: 1308448 - RNA, 17 nt, Human
uaaucauauaaauagaa

SEQ ID NO: 1308449 - RNA, 13 nt, Human
uaaucauauaaau

SEQ ID NO: 1308450 - RNA, 12 nt, Human
uaaucauauaaa

SEQ ID NO: 1308451 - RNA, 17 nt, Human
uaaucacgcuuuccuga

SEQ ID NO: 1308452 - RNA, 23 nt, Human
uaaucaguucauuagaaauauuu

SEQ ID NO: 1308453 - RNA, 15 nt, Human
aaugaaaaccacauu

SEQ ID NO: 1308454 - RNA, 16 nt, Human
aaugaaaacagaaugu

SEQ ID NO: 1308455 - RNA, 18 nt, Human
aaugaaaacagaaugucu

SEQ ID NO: 1308456 - RNA, 18 nt, Human
aaugaaaacucuuugcug

SEQ ID NO: 1308457 - RNA, 14 nt, Human
aaugaaaauaagaa

SEQ ID NO: 1308458 - RNA, 15 nt, Human
aaugaaaauguccau

SEQ ID NO: 1308459 - RNA, 15 nt, Human
aaugaaaaugucuug

SEQ ID NO: 1308460 - RNA, 14 nt, Human
aaugacacucauau

SEQ ID NO: 1308461 - RNA, 17 nt, Human
aaugacacucauauaau

SEQ ID NO: 1308462 - RNA, 11 nt, Human
aaugacacugu

SEQ ID NO: 1308463 - RNA, 19 nt, Human
aaugacacucauauaauua

SEQ ID NO: 1308464 - RNA, 15 nt, Human
aaugacaggccuguc

SEQ ID NO: 1308465 - RNA, 22 nt, Human
aaugacaguccgucaaaacaga

SEQ ID NO: 1308466 - RNA, 18 nt, Human
aaugacaucaccacaguu

SEQ ID NO: 1308467 - RNA, 13 nt, Human
aaugacaugaauu

SEQ ID NO: 1308468 - RNA, 19 nt, Human
aaugacaugaauuuuagcu

SEQ ID NO: 1308469 - RNA, 18 nt, Human
aaugacauuuauaucaca

SEQ ID NO: 1308470 - RNA, 15 nt, Human
aaugagacauccagc

SEQ ID NO: 1308471 - RNA, 14 nt, Human
aaugagacauccag

SEQ ID NO: 1308472 - RNA, 13 nt, Human
aaugagacaucca

SEQ ID NO: 1308473 - RNA, 21 nt, Human
aaugagagacacacugaagaa

SEQ ID NO: 1308474 - RNA, 13 nt, Human
aaugagaaucuac

SEQ ID NO: 1308475 - RNA, 21 nt, Human
aaucuuuaaaagaugcuuuua

SEQ ID NO: 1308476 - RNA, 17 nt, Human
aaucuuuaaaagaugcu

SEQ ID NO: 1308477 - RNA, 21 nt, Human
aaucuuugaaagguuagagaa

SEQ ID NO: 1308478 - RNA, 12 nt, Human
aaucuuuuacaa

SEQ ID NO: 1308479 - RNA, 21 nt, Human
aaucuuuuacaacugccucga

SEQ ID NO: 1308480 - RNA, 23 nt, Human
aaucuuuuacaacugccucgaaa

SEQ ID NO: 1308481 - RNA, 16 nt, Human
uaaugauaacuggaaa

SEQ ID NO: 1308482 - RNA, 19 nt, Human
uaaugguguagaacacuaa

SEQ ID NO: 1308483 - RNA, 16 nt, Human
uaauggugccuucauu

SEQ ID NO: 1308484 - RNA, 18 nt, Human
uaauggugccuucauuug

SEQ ID NO: 1308485 - RNA, 13 nt, Human
uaaugguguagaa

SEQ ID NO: 1308486 - RNA, 18 nt, Human
aaucuugucauguguaua

SEQ ID NO: 1308487 - RNA, 19 nt, Human
aaucuugucauguguauaa

SEQ ID NO: 1308488 - RNA, 20 nt, Human
aauccucaguuuuugugaaa

SEQ ID NO: 1308489 - RNA, 22 nt, Human
aauccuaugcaugguuucagca

SEQ ID NO: 1308490 - RNA, 21 nt, Human
aauccuaugcaugguuucagc

SEQ ID NO: 1308491 - RNA, 17 nt, Human
aauccuaccucaaaauu

SEQ ID NO: 1308492 - RNA, 15 nt, Human
aauccuaccucaaaa

SEQ ID NO: 1308493 - RNA, 15 nt, Human
aauccuaugcauggu

SEQ ID NO: 1308494 - RNA, 18 nt, Human
aauccuaugcaugguuuc

SEQ ID NO: 1308495 - RNA, 14 nt, Human
aaucauuguaugug

SEQ ID NO: 1308496 - RNA, 12 nt, Human
aaucauuucuau

SEQ ID NO: 1308497 - RNA, 19 nt, Human
aaucauuucuauuucuccu

SEQ ID NO: 1308498 - RNA, 20 nt, Human
aaucauuucuauuucuccuc

SEQ ID NO: 1308499 - RNA, 13 nt, Human
aauccuugaagau

SEQ ID NO: 1308500 - RNA, 19 nt, Human
aauccuuagaucuggcaug

SEQ ID NO: 1308501 - RNA, 20 nt, Human
aauccuuagaucuggcaugu

SEQ ID NO: 1308502 - RNA, 20 nt, Human
aauccuugaagguauaucua

SEQ ID NO: 1308503 - RNA, 13 nt, Human
aauccuugcuuau

SEQ ID NO: 1308504 - RNA, 15 nt, Human
aauccuugaagguau

SEQ ID NO: 1308505 - RNA, 22 nt, Human
aauccuucuauucuagccugca

SEQ ID NO: 1308506 - RNA, 19 nt, Human
aauccuucuauucuagccu

SEQ ID NO: 1308507 - RNA, 17 nt, Human
aauccuugcuuaugaca

SEQ ID NO: 1308508 - RNA, 18 nt, Human
aauccuugcuuaugacau

SEQ ID NO: 1308509 - RNA, 17 nt, Human
aauccuugaugauugac

SEQ ID NO: 1308510 - RNA, 15 nt, Human
aaucuacuaauucca

SEQ ID NO: 1308511 - RNA, 16 nt, Human
aaucuacuaauuccac

SEQ ID NO: 1308512 - RNA, 14 nt, Human
aaucuuauaauugu

SEQ ID NO: 1308513 - RNA, 15 nt, Human
aaucuuauaauuguu

SEQ ID NO: 1308514 - RNA, 16 nt, Human
aaucuuauaauuuaaa

SEQ ID NO: 1308515 - RNA, 14 nt, Human
aaucuuauaauuua

SEQ ID NO: 1308516 - RNA, 22 nt, Human
aaucugucacguagaacuugga

SEQ ID NO: 1308517 - RNA, 17 nt, Human
aaucuacuaauuccaca

SEQ ID NO: 1308518 - RNA, 17 nt, Human
aaucuacucaaagcaug

SEQ ID NO: 1308519 - RNA, 16 nt, Human
aaucuacucaaagcau

SEQ ID NO: 1308520 - RNA, 22 nt, Human
aaucuagauaucgacuuguuuu

SEQ ID NO: 1308521 - RNA, 15 nt, Human
aaucaucaagucuuu

SEQ ID NO: 1308522 - RNA, 15 nt, Human
aaucaucaagagaau

SEQ ID NO: 1308523 - RNA, 21 nt, Human
aaucaucaagagaauuugggg

SEQ ID NO: 1308524 - RNA, 23 nt, Human
aaucaucaagagaauuuggggcu

SEQ ID NO: 1308525 - RNA, 12 nt, Human
aaucaucaagua

SEQ ID NO: 1308526 - RNA, 22 nt, Human
aaucaucagaaaggaaaaacaa

SEQ ID NO: 1308527 - RNA, 20 nt, Human
aaucauccauccuugccaau

SEQ ID NO: 1308528 - RNA, 15 nt, Human
uaauaaaaauaauuu

SEQ ID NO: 1308529 - RNA, 11 nt, Human
uaauaaaagaa

SEQ ID NO: 1308530 - RNA, 12 nt, Human
uaauaaaagaaa

SEQ ID NO: 1308531 - RNA, 14 nt, Human
uaauaaaagaaaau

SEQ ID NO: 1308532 - RNA, 13 nt, Human
uaauaaaagaaaa

SEQ ID NO: 1308533 - RNA, 17 nt, Human
aaucauggugcucagag

SEQ ID NO: 1308534 - RNA, 12 nt, Human
aaucaugugugu

SEQ ID NO: 1308535 - RNA, 13 nt, Human
aaucauguguguu

SEQ ID NO: 1308536 - RNA, 15 nt, Human
aaucauguguguuaa

SEQ ID NO: 1308537 - RNA, 19 nt, Human
aaucaugaauuaguuuuau

SEQ ID NO: 1308538 - RNA, 17 nt, Human
aaucaugaauuaguuuu

SEQ ID NO: 1308539 - RNA, 23 nt, Human
aaucaugaauuaguuuuauaugc

SEQ ID NO: 1308540 - RNA, 17 nt, Human
aaucagacuaugaaguu

SEQ ID NO: 1308541 - RNA, 14 nt, Human
aaucagacuaugaa

SEQ ID NO: 1308542 - RNA, 13 nt, Human
aaucagaauuaga

SEQ ID NO: 1308543 - RNA, 12 nt, Human
aaucagacugac

SEQ ID NO: 1308544 - RNA, 16 nt, Human
aaucagagaaggaaca

SEQ ID NO: 1308545 - RNA, 20 nt, Human
aaucagagaccuuccagaaa

SEQ ID NO: 1308546 - RNA, 14 nt, Human
aaucagauagauau

SEQ ID NO: 1308547 - RNA, 16 nt, Human
aaucagauagauauuc

SEQ ID NO: 1308548 - RNA, 21 nt, Human
aaucagauagauauuccuauu

SEQ ID NO: 1308549 - RNA, 12 nt, Human
aaucagcauucu

SEQ ID NO: 1308550 - RNA, 18 nt, Human
uaaguuuuuuuuuaaaaa

SEQ ID NO: 1308551 - RNA, 14 nt, Human
uaaguuucugggac

SEQ ID NO: 1308552 - RNA, 17 nt, Human
uaaguuucucugcagaa

SEQ ID NO: 1308553 - RNA, 16 nt, Human
uaaguuugauuucauu

SEQ ID NO: 1308554 - RNA, 12 nt, Human
uaaguuauugca

SEQ ID NO: 1308555 - RNA, 14 nt, Human
uaaguuauugcagu

SEQ ID NO: 1308556 - RNA, 15 nt, Human
uaaguuauugcaguu

SEQ ID NO: 1308557 - RNA, 16 nt, Human
uaaguuauugcaguuu

SEQ ID NO: 1308558 - RNA, 20 nt, Human
uaaguuauugcaguuuauca

SEQ ID NO: 1308559 - RNA, 20 nt, Human
uaaguuauuuuuacauucug

SEQ ID NO: 1308560 - RNA, 19 nt, Human
uaaguucaaauucuucuga

SEQ ID NO: 1308561 - RNA, 20 nt, Human
uaaguucaaauucuucugaa

SEQ ID NO: 1308562 - RNA, 18 nt, Human
aauaggcguaacuaauuu

SEQ ID NO: 1308563 - RNA, 16 nt, Human
aauaggaauugguuuc

SEQ ID NO: 1308564 - RNA, 14 nt, Human
aauaggcaggaagc

SEQ ID NO: 1308565 - RNA, 18 nt, Human
aauaggcggggcuugccu

SEQ ID NO: 1308566 - RNA, 19 nt, Human
aauaggcggggcuugccuu

SEQ ID NO: 1308567 - RNA, 18 nt, Human
aauagggacuaucuaucu

SEQ ID NO: 1308568 - RNA, 21 nt, Human
aauagggcugagcucucugug

SEQ ID NO: 1308569 - RNA, 19 nt, Human
aauaggguauauuuuccua

SEQ ID NO: 1308570 - RNA, 20 nt, Human
aauaggguauauuuuccuau

SEQ ID NO: 1308571 - RNA, 24 nt, Human
aauagcuuuuuucucugauacaga

SEQ ID NO: 1308572 - RNA, 22 nt, Human
aauagccauauuuguaaaauga

SEQ ID NO: 1308573 - RNA, 18 nt, Human
aauagcuguaaacuucca

SEQ ID NO: 1308574 - RNA, 16 nt, Human
aauagcuuaugaaaag

SEQ ID NO: 1308575 - RNA, 17 nt, Human
aauagcuuaugaaaaga

SEQ ID NO: 1308576 - RNA, 19 nt, Human
aauagcuuaugaaaagaau

SEQ ID NO: 1308577 - RNA, 18 nt, Human
aauagcuuaugaaaagaa

SEQ ID NO: 1308578 - RNA, 15 nt, Human
aauagcuuuaaugau

SEQ ID NO: 1308579 - RNA, 16 nt, Human
aauagcuuuaaugaua

SEQ ID NO: 1308580 - RNA, 16 nt, Human
uaaauuuuuuguugac

SEQ ID NO: 1308581 - RNA, 18 nt, Human
uaaauuuuuuguugacau

SEQ ID NO: 1308582 - RNA, 20 nt, Human
uaaauuuuuuguugacauua

SEQ ID NO: 1308583 - RNA, 14 nt, Human
uaaauuuuuuuccu

SEQ ID NO: 1308584 - RNA, 22 nt, Human
aauagacacuccccgaagucuu

SEQ ID NO: 1308585 - RNA, 23 nt, Human
aauagacacuccccgaagucuuu

SEQ ID NO: 1308586 - RNA, 16 nt, Human
aauagacagcaugaga

SEQ ID NO: 1308587 - RNA, 18 nt, Human
aauagacccacaagaggc

SEQ ID NO: 1308588 - RNA, 16 nt, Human
uaaauuuuuuuccuua

SEQ ID NO: 1308589 - RNA, 20 nt, Human
aauagauaagaguagaaacu

SEQ ID NO: 1308590 - RNA, 21 nt, Human
aauagauauccacuugagaca

SEQ ID NO: 1308591 - RNA, 18 nt, Human
aauagauaugaaagcuga

SEQ ID NO: 1308592 - RNA, 15 nt, Human
aauagccauauuugu

SEQ ID NO: 1308593 - RNA, 18 nt, Human
aauagccauauuuguaaa

SEQ ID NO: 1308594 - RNA, 21 nt, Human
aauagccauauuuguaaaaug

SEQ ID NO: 1308595 - RNA, 23 nt, Human
aauagccacuaaccuugccuggu

SEQ ID NO: 1308596 - RNA, 20 nt, Human
aauagccacuaaccuugccu

SEQ ID NO: 1308597 - RNA, 21 nt, Human
aauagccacuaaccuugccug

SEQ ID NO: 1308598 - RNA, 16 nt, Human
aauagaugcugacugu

SEQ ID NO: 1308599 - RNA, 11 nt, Human
aauagauguuu

SEQ ID NO: 1308600 - RNA, 22 nt, Human
aauagauguuugauagauuuuc

SEQ ID NO: 1308601 - RNA, 19 nt, Human
aauagauaugaaagcugau

SEQ ID NO: 1308602 - RNA, 19 nt, Human
aauagauguuugauagauu

SEQ ID NO: 1308603 - RNA, 11 nt, Human
aauagauucuc

SEQ ID NO: 1308604 - RNA, 12 nt, Human
aauagauucucu

SEQ ID NO: 1308605 - RNA, 20 nt, Human
aauagcaugucacuaaagca

SEQ ID NO: 1308606 - RNA, 20 nt, Human
aauagccacauuuggaauac

SEQ ID NO: 1308607 - RNA, 22 nt, Human
aauagccacauuuggaauacuu

SEQ ID NO: 1308608 - RNA, 23 nt, Human
aauagccacauuuggaauacuuu

SEQ ID NO: 1308609 - RNA, 12 nt, Human
aauaucacuugu

SEQ ID NO: 1308610 - RNA, 21 nt, Human
aauauauuauuacuuguaaau

SEQ ID NO: 1308611 - RNA, 18 nt, Human
aauaucaccaaaaaccua

SEQ ID NO: 1308612 - RNA, 19 nt, Human
aauaucaccaaaaaccuau

SEQ ID NO: 1308613 - RNA, 20 nt, Human
aauaucaccaaaaaccuauu

SEQ ID NO: 1308614 - RNA, 23 nt, Human
aauaucaccaaaaaccuauucca

SEQ ID NO: 1308615 - RNA, 14 nt, Human
aauauauguauaua

SEQ ID NO: 1308616 - RNA, 13 nt, Human
aauauauuauuac

SEQ ID NO: 1308617 - RNA, 15 nt, Human
aauauauuauuacuu

SEQ ID NO: 1308618 - RNA, 18 nt, Human
aauauauuauuacuugua

SEQ ID NO: 1308619 - RNA, 20 nt, Human
aauauauuauuacuuguaaa

SEQ ID NO: 1308620 - RNA, 16 nt, Human
aauaguauuucccauu

SEQ ID NO: 1308621 - RNA, 15 nt, Human
aauaguauuucccau

SEQ ID NO: 1308622 - RNA, 16 nt, Human
aauauauguauauaca

SEQ ID NO: 1308623 - RNA, 15 nt, Human
aauaucacuugucaa

SEQ ID NO: 1308624 - RNA, 20 nt, Human
aauaucacuugucaauaaaa

SEQ ID NO: 1308625 - RNA, 21 nt, Human
aauaucccagaaaaaguaacu

SEQ ID NO: 1308626 - RNA, 22 nt, Human
aauaucccagaaaaaguaacuc

SEQ ID NO: 1308627 - RNA, 16 nt, Human
aauaucccuacaugua

SEQ ID NO: 1308628 - RNA, 17 nt, Human
aauaucccuacauguau

SEQ ID NO: 1308629 - RNA, 18 nt, Human
aauaucccuacauguauu

SEQ ID NO: 1308630 - RNA, 19 nt, Human
aauaucccuacauguauug

SEQ ID NO: 1308631 - RNA, 23 nt, Human
aauaucccuccuguugggagagg

SEQ ID NO: 1308632 - RNA, 12 nt, Human
aauaucccuccu

SEQ ID NO: 1308633 - RNA, 19 nt, Human
aauaucccuccuguuggga

SEQ ID NO: 1308634 - RNA, 22 nt, Human
aauaucccuccuguugggagag

SEQ ID NO: 1308635 - RNA, 14 nt, Human
aauauccuaaacau

SEQ ID NO: 1308636 - RNA, 18 nt, Human
aauauccuaaacaucauu

SEQ ID NO: 1308637 - RNA, 16 nt, Human
uaaccucuaaauucuu

SEQ ID NO: 1308638 - RNA, 16 nt, Human
uaaccucgggccugcu

SEQ ID NO: 1308639 - RNA, 14 nt, Human
uaaccucugcacua

SEQ ID NO: 1308640 - RNA, 17 nt, Human
uaaccucuucagaggcc

SEQ ID NO: 1308641 - RNA, 18 nt, Human
uaaccugucucaccugga

SEQ ID NO: 1308642 - RNA, 12 nt, Human
uaacuaaaauaa

SEQ ID NO: 1308643 - RNA, 18 nt, Human
uaacuaaaauaauuuugu

SEQ ID NO: 1308644 - RNA, 19 nt, Human
uaacuaaaauaauuuugua

SEQ ID NO: 1308645 - RNA, 15 nt, Human
aauauccuaaacauc

SEQ ID NO: 1308646 - RNA, 16 nt, Human
aauauccuaaacauca

SEQ ID NO: 1308647 - RNA, 17 nt, Human
aauauccuaaacaucau

SEQ ID NO: 1308648 - RNA, 14 nt, Human
uaacaugauuuggg

SEQ ID NO: 1308649 - RNA, 14 nt, Human
uaacauaagcuauu

SEQ ID NO: 1308650 - RNA, 15 nt, Human
uaacauaagcuauuu

SEQ ID NO: 1308651 - RNA, 19 nt, Human
uaacauaagcuauuuuucu

SEQ ID NO: 1308652 - RNA, 22 nt, Human
uaacauaccuaagaaguacauu

SEQ ID NO: 1308653 - RNA, 16 nt, Human
aauaucuccgucaacu

SEQ ID NO: 1308654 - RNA, 21 nt, Human
aauaucuccgucaacucauau

SEQ ID NO: 1308655 - RNA, 13 nt, Human
uaagaccuggcag

SEQ ID NO: 1308656 - RNA, 11 nt, Human
uaagaccuggc

SEQ ID NO: 1308657 - RNA, 13 nt, Human
aauauccugcuug

SEQ ID NO: 1308658 - RNA, 12 nt, Human
aauaucugaagc

SEQ ID NO: 1308659 - RNA, 17 nt, Human
aauaucuguaaugguac

SEQ ID NO: 1308660 - RNA, 17 nt, Human
aauaucuucacuuguca

SEQ ID NO: 1308661 - RNA, 19 nt, Human
aauaucuuuuuuuuaauaa

SEQ ID NO: 1308662 - RNA, 20 nt, Human
uaacuaauacagcugagcua

SEQ ID NO: 1308663 - RNA, 16 nt, Human
uaacuaacuaaaacaa

SEQ ID NO: 1308664 - RNA, 18 nt, Human
uaacuaacugcauacacu

SEQ ID NO: 1308665 - RNA, 21 nt, Human
uaacuacaaagguuuaaauga

SEQ ID NO: 1308666 - RNA, 22 nt, Human
uaacuacaaagguuuaaaugaa

SEQ ID NO: 1308667 - RNA, 23 nt, Human
uaacuacaaagguuuaaaugaac

SEQ ID NO: 1308668 - RNA, 21 nt, Human
uaacuaaaauaauuuuguaau

SEQ ID NO: 1308669 - RNA, 20 nt, Human
uaacuaaaauaauuuuguaa

SEQ ID NO: 1308670 - RNA, 16 nt, Human
uaacuaacauguccug

SEQ ID NO: 1308671 - RNA, 13 nt, Human
uaacuacuuuaua

SEQ ID NO: 1308672 - RNA, 14 nt, Human
uaacuacuuuauaa

SEQ ID NO: 1308673 - RNA, 12 nt, Human
uaacuuuguuuu

SEQ ID NO: 1308674 - RNA, 14 nt, Human
uaacuuuguuuuau

SEQ ID NO: 1308675 - RNA, 18 nt, Human
uaacuuuguuuuauuuuc

SEQ ID NO: 1308676 - RNA, 13 nt, Human
uaagaaugaucug

SEQ ID NO: 1308677 - RNA, 21 nt, Human
uaacuuuguuuuauuuucaaa

SEQ ID NO: 1308678 - RNA, 17 nt, Human
uaagaaucuagcaagaa

SEQ ID NO: 1308679 - RNA, 21 nt, Human
uaagaaucuagcaagaauuga

SEQ ID NO: 1308680 - RNA, 14 nt, Human
uaagaaucuuuaga

SEQ ID NO: 1308681 - RNA, 17 nt, Human
uaagacauuuuuggaag

SEQ ID NO: 1308682 - RNA, 20 nt, Human
uaagacaugauuuccuugaa

SEQ ID NO: 1308683 - RNA, 21 nt, Human
uaagacaugauuuccuugaau

SEQ ID NO: 1308684 - RNA, 22 nt, Human
uaagacccuuauugcuguccug

SEQ ID NO: 1308685 - RNA, 14 nt, Human
uaagaccuacuguu

SEQ ID NO: 1308686 - RNA, 16 nt, Human
uaagaccuacuguucu

SEQ ID NO: 1308687 - RNA, 17 nt, Human
uaagaccuacuguucua

SEQ ID NO: 1308688 - RNA, 18 nt, Human
uaagaccuacuguucuaa

SEQ ID NO: 1308689 - RNA, 19 nt, Human
uaagaccuacuguucuaaa

SEQ ID NO: 1308690 - RNA, 20 nt, Human
uaagaccuacuguucuaaag

SEQ ID NO: 1308691 - RNA, 21 nt, Human
uaagaccuacuguucuaaagc

SEQ ID NO: 1308692 - RNA, 22 nt, Human
uaagaccuacuguucuaaagcu

SEQ ID NO: 1308693 - RNA, 12 nt, Human
aauauuuuccuc

SEQ ID NO: 1308694 - RNA, 19 nt, Human
aaucacuguuuagaacaca

SEQ ID NO: 1308695 - RNA, 21 nt, Human
aaucacuguuuagaacacaca

SEQ ID NO: 1308696 - RNA, 16 nt, Human
aaucacuuaggaaaug

SEQ ID NO: 1308697 - RNA, 11 nt, Human
aaucagaacuc

SEQ ID NO: 1308698 - RNA, 12 nt, Human
aaucagaacuca

SEQ ID NO: 1308699 - RNA, 23 nt, Human
aaucagaacucaaauggggccag

SEQ ID NO: 1308700 - RNA, 20 nt, Human
aaucagaagucaucuugcua

SEQ ID NO: 1308701 - RNA, 24 nt, Human
aaucagaagucaucuugcuaccag

SEQ ID NO: 1308702 - RNA, 17 nt, Human
aauauuguuuuacaaua

SEQ ID NO: 1308703 - RNA, 18 nt, Human
aauauuguuuuacaauag

SEQ ID NO: 1308704 - RNA, 15 nt, Human
aauauuucagauaau

SEQ ID NO: 1308705 - RNA, 12 nt, Human
aauauuucuuca

SEQ ID NO: 1308706 - RNA, 16 nt, Human
aauaugauguuaaaaa

SEQ ID NO: 1308707 - RNA, 22 nt, Human
aauauugcuccaugaugacuua

SEQ ID NO: 1308708 - RNA, 14 nt, Human
aauaauuuuaucuc

SEQ ID NO: 1308709 - RNA, 11 nt, Human
aauaauuuuau

SEQ ID NO: 1308710 - RNA, 16 nt, Human
aauaauuuuaaacaaa

SEQ ID NO: 1308711 - RNA, 16 nt, Human
aauaauuucuaauguu

SEQ ID NO: 1308712 - RNA, 12 nt, Human
aauaauuguugu

SEQ ID NO: 1308713 - RNA, 14 nt, Human
aauaauuguuguuc

SEQ ID NO: 1308714 - RNA, 16 nt, Human
aauaauuguuguucug

SEQ ID NO: 1308715 - RNA, 17 nt, Human
aauaauuguuguucugu

SEQ ID NO: 1308716 - RNA, 22 nt, Human
aauaauuguuguucuguuaacu

SEQ ID NO: 1308717 - RNA, 18 nt, Human
aauaauuguuguucuguu

SEQ ID NO: 1308718 - RNA, 12 nt, Human
aauaauuuagac

SEQ ID NO: 1308719 - RNA, 21 nt, Human
aauaauuuagacuucaagcau

SEQ ID NO: 1308720 - RNA, 13 nt, Human
aauaauuucuaau

SEQ ID NO: 1308721 - RNA, 15 nt, Human
aauaauuucuaaugu

SEQ ID NO: 1308722 - RNA, 16 nt, Human
aauaauuuuuauauuu

SEQ ID NO: 1308723 - RNA, 13 nt, Human
aauaauuuuguaa

SEQ ID NO: 1308724 - RNA, 14 nt, Human
aauaauuuuguaau

SEQ ID NO: 1308725 - RNA, 15 nt, Human
aauaauuuuguaaug

SEQ ID NO: 1308726 - RNA, 17 nt, Human
aauaauuuuuauauuug

SEQ ID NO: 1308727 - RNA, 19 nt, Human
aauaauuuuuauauuugaa

SEQ ID NO: 1308728 - RNA, 20 nt, Human
aauaacuggaaaacagaaca

SEQ ID NO: 1308729 - RNA, 13 nt, Human
aauaagaaacuuu

SEQ ID NO: 1308730 - RNA, 22 nt, Human
aauaagaaacaacucuuugaga

SEQ ID NO: 1308731 - RNA, 13 nt, Human
aauaagaauagaa

SEQ ID NO: 1308732 - RNA, 18 nt, Human
aauaagaauagaaauaaa

SEQ ID NO: 1308733 - RNA, 17 nt, Human
aauaauucugaguuuug

SEQ ID NO: 1308734 - RNA, 19 nt, Human
aauaauucugaguuuugug

SEQ ID NO: 1308735 - RNA, 22 nt, Human
aauaauucugaguuuuguguuu

SEQ ID NO: 1308736 - RNA, 21 nt, Human
aauaauucugaguuuuguguu

SEQ ID NO: 1308737 - RNA, 21 nt, Human
uaaauaaaguuuguugaaaca

SEQ ID NO: 1308738 - RNA, 12 nt, Human
uaaauaaaguuu

SEQ ID NO: 1308739 - RNA, 20 nt, Human
aauaauuuuuauauuugaaa

SEQ ID NO: 1308740 - RNA, 22 nt, Human
aauaauuuuucacuucaaaaca

SEQ ID NO: 1308741 - RNA, 12 nt, Human
aauacaaaugga

SEQ ID NO: 1308742 - RNA, 13 nt, Human
aauacaaauggau

SEQ ID NO: 1308743 - RNA, 18 nt, Human
aauacaaauggauuuugg

SEQ ID NO: 1308744 - RNA, 22 nt, Human
aauacaagacugccauauuaaa

SEQ ID NO: 1308745 - RNA, 17 nt, Human
uaaauaaggaaaagcuu

SEQ ID NO: 1308746 - RNA, 18 nt, Human
uaaauaagauucuaacgg

SEQ ID NO: 1308747 - RNA, 14 nt, Human
uaaauaauacauua

SEQ ID NO: 1308748 - RNA, 13 nt, Human
uaaauaaugcuuu

SEQ ID NO: 1308749 - RNA, 16 nt, Human
uaaauaaugcuuugaa

SEQ ID NO: 1308750 - RNA, 21 nt, Human
uaaauaagaaacaacucuuug

SEQ ID NO: 1308751 - RNA, 22 nt, Human
uaaauaagaaacaacucuuuga

SEQ ID NO: 1308752 - RNA, 11 nt, Human
uaaauaagaaa

SEQ ID NO: 1308753 - RNA, 13 nt, Human
uaaauaagaaacu

SEQ ID NO: 1308754 - RNA, 16 nt, Human
uaaauaagaaacuuuu

SEQ ID NO: 1308755 - RNA, 15 nt, Human
uaaauaagaaacuuu

SEQ ID NO: 1308756 - RNA, 13 nt, Human
uaaauaagauucu

SEQ ID NO: 1308757 - RNA, 14 nt, Human
uaaauaagauucua

SEQ ID NO: 1308758 - RNA, 15 nt, Human
uaaauaagauucuaa

SEQ ID NO: 1308759 - RNA, 13 nt, Human
uaaauacaggaaa

SEQ ID NO: 1308760 - RNA, 14 nt, Human
uaaauacaggaaac

SEQ ID NO: 1308761 - RNA, 15 nt, Human
uaaauacaggaaaca

SEQ ID NO: 1308762 - RNA, 16 nt, Human
uaaauacaggaaacag

SEQ ID NO: 1308763 - RNA, 17 nt, Human
uaaauacaggaaacagu

SEQ ID NO: 1308764 - RNA, 18 nt, Human
uaaauacaggaaacaguu

SEQ ID NO: 1308765 - RNA, 13 nt, Human
uaaauacagucuu

SEQ ID NO: 1308766 - RNA, 17 nt, Human
uaaauacagucuuccau

SEQ ID NO: 1308767 - RNA, 20 nt, Human
uaaauacagucuuccauuug

SEQ ID NO: 1308768 - RNA, 22 nt, Human
uaaauacagucuuccauuugca

SEQ ID NO: 1308769 - RNA, 23 nt, Human
uaaauacagucuuccauuugcaa

SEQ ID NO: 1308770 - RNA, 24 nt, Human
uaaauguuuuuuuuuaaagacuuu

SEQ ID NO: 1308771 - RNA, 13 nt, Human
uaaauguuauuau

SEQ ID NO: 1308772 - RNA, 15 nt, Human
uaaauguugacaugg

SEQ ID NO: 1308773 - RNA, 23 nt, Human
uaaauguuaugacuauguaaacu

SEQ ID NO: 1308774 - RNA, 22 nt, Human
uaaauguuaugacuauguaaac

SEQ ID NO: 1308775 - RNA, 14 nt, Human
uaaaucuuuuacaa

SEQ ID NO: 1308776 - RNA, 13 nt, Human
uaaaucuuuuaua

SEQ ID NO: 1308777 - RNA, 16 nt, Human
uaaaugcauaaaugca

SEQ ID NO: 1308778 - RNA, 14 nt, Human
uaaaugcauuauag

SEQ ID NO: 1308779 - RNA, 12 nt, Human
uaaaucugccac

SEQ ID NO: 1308780 - RNA, 15 nt, Human
uaaaucugacccagu

SEQ ID NO: 1308781 - RNA, 16 nt, Human
uaaaucugacccagug

SEQ ID NO: 1308782 - RNA, 17 nt, Human
uaaaucugacccagugc

SEQ ID NO: 1308783 - RNA, 20 nt, Human
uaaaucugcuggaguuucau

SEQ ID NO: 1308784 - RNA, 14 nt, Human
uaaaucugacccag

SEQ ID NO: 1308785 - RNA, 15 nt, Human
uaaauagacacgcac

SEQ ID NO: 1308786 - RNA, 17 nt, Human
uaaauagaccauuaauc

SEQ ID NO: 1308787 - RNA, 18 nt, Human
uaaauagaauguaaaugu

SEQ ID NO: 1308788 - RNA, 16 nt, Human
uaaauagaauguaaau

SEQ ID NO: 1308789 - RNA, 13 nt, Human
uaaauagaaugua

SEQ ID NO: 1308790 - RNA, 17 nt, Human
uaaauacugcaaaucag

SEQ ID NO: 1308791 - RNA, 20 nt, Human
uaaauacugagaaaaccugu

SEQ ID NO: 1308792 - RNA, 13 nt, Human
uaaauacugcaaa

SEQ ID NO: 1308793 - RNA, 16 nt, Human
uaaauacugcaaauca

SEQ ID NO: 1308794 - RNA, 22 nt, Human
uaaauacugcaaaucaggcuuu

SEQ ID NO: 1308795 - RNA, 20 nt, Human
uaaauagaauguaaaugucu

SEQ ID NO: 1308796 - RNA, 22 nt, Human
uaaaguaaaaacaaagaaauua

SEQ ID NO: 1308797 - RNA, 21 nt, Human
uaaaguaaaaacaaagaaauu

SEQ ID NO: 1308798 - RNA, 19 nt, Human
uaaaguaaaaacaaagaaa

SEQ ID NO: 1308799 - RNA, 22 nt, Human
uaaagguucaugcaaacuuuau

SEQ ID NO: 1308800 - RNA, 15 nt, Human
uaaaguacuuguagu

SEQ ID NO: 1308801 - RNA, 16 nt, Human
uaaaguacuuguaguu

SEQ ID NO: 1308802 - RNA, 17 nt, Human
uaaaguaguccugugaa

SEQ ID NO: 1308803 - RNA, 20 nt, Human
uaaaguaucaggauacuaua

SEQ ID NO: 1308804 - RNA, 17 nt, Human
guuuucuuuugccauga

SEQ ID NO: 1308805 - RNA, 18 nt, Human
guuuugaagcuacugugu

SEQ ID NO: 1308806 - RNA, 19 nt, Human
guuuugaagcuacugugug

SEQ ID NO: 1308807 - RNA, 15 nt, Human
guuuugaaggcaaaa

SEQ ID NO: 1308808 - RNA, 22 nt, Human
uaaaggggagaccucagaagua

SEQ ID NO: 1308809 - RNA, 19 nt, Human
uaaagguccacaggucuag

SEQ ID NO: 1308810 - RNA, 20 nt, Human
uaaagguccacaggucuaga

SEQ ID NO: 1308811 - RNA, 21 nt, Human
uaaagguccacaggucuagac

SEQ ID NO: 1308812 - RNA, 22 nt, Human
uaaagguccacaggucuagacu

SEQ ID NO: 1308813 - RNA, 21 nt, Human
uaaaggugacaucggaaaaau

SEQ ID NO: 1308814 - RNA, 22 nt, Human
uaaaggugacaucggaaaaaua

SEQ ID NO: 1308815 - RNA, 13 nt, Human
uaaagguuaaaaa

SEQ ID NO: 1308816 - RNA, 22 nt, Human
uaaagguuacaagccugcacaa

SEQ ID NO: 1308817 - RNA, 13 nt, Human
uaaagucagaugg

SEQ ID NO: 1308818 - RNA, 19 nt, Human
uaaaguauguauuauuuac

SEQ ID NO: 1308819 - RNA, 21 nt, Human
uaaaguauguauuauuuacau

SEQ ID NO: 1308820 - RNA, 13 nt, Human
uaaaguauucuuc

SEQ ID NO: 1308821 - RNA, 14 nt, Human
uaaaguauucuucu

SEQ ID NO: 1308822 - RNA, 18 nt, Human
uaaaguauucuucucuuc

SEQ ID NO: 1308823 - RNA, 13 nt, Human
aauaaaaccagcu

SEQ ID NO: 1308824 - RNA, 17 nt, Human
aauaaaaagaucacuuu

SEQ ID NO: 1308825 - RNA, 19 nt, Human
aauaaaaagaucacuuucu

SEQ ID NO: 1308826 - RNA, 23 nt, Human
aauaaaaagaucacuuucucagu

SEQ ID NO: 1308827 - RNA, 13 nt, Human
aauaaaaagcuuu

SEQ ID NO: 1308828 - RNA, 18 nt, Human
aauaaaaagcuuuugucu

SEQ ID NO: 1308829 - RNA, 16 nt, Human
aauaaaaagcuuuugu

SEQ ID NO: 1308830 - RNA, 21 nt, Human
aauaacaaugaaaguugauaa

SEQ ID NO: 1308831 - RNA, 18 nt, Human
aauaaauuguacagccgg

SEQ ID NO: 1308832 - RNA, 16 nt, Human
aauaaauugcuccuug

SEQ ID NO: 1308833 - RNA, 20 nt, Human
aauaaauugcuccuugacau

SEQ ID NO: 1308834 - RNA, 12 nt, Human
aauaaaugucuu

SEQ ID NO: 1308835 - RNA, 14 nt, Human
aauaaaugucuugc

SEQ ID NO: 1308836 - RNA, 22 nt, Human
aauaaauugauuuuuauaaaua

SEQ ID NO: 1308837 - RNA, 11 nt, Human
aauaaauguca

SEQ ID NO: 1308838 - RNA, 21 nt, Human
aauaaaugucaccagguacuu

SEQ ID NO: 1308839 - RNA, 13 nt, Human
aauaaaugucacu

SEQ ID NO: 1308840 - RNA, 14 nt, Human
aauaaaugucacuu

SEQ ID NO: 1308841 - RNA, 19 nt, Human
aauaaaugucacuuuuuga

SEQ ID NO: 1308842 - RNA, 15 nt, Human
aauaaaugucacuuu

SEQ ID NO: 1308843 - RNA, 15 nt, Human
aauaacgauaaaaga

SEQ ID NO: 1308844 - RNA, 18 nt, Human
aauaacuggaaaacagaa

SEQ ID NO: 1308845 - RNA, 21 nt, Human
aauaacuggaaaacagaacac

SEQ ID NO: 1308846 - RNA, 20 nt, Human
aauaaauuuauuuucuugga

SEQ ID NO: 1308847 - RNA, 13 nt, Human
aauaaauuugacu

SEQ ID NO: 1308848 - RNA, 20 nt, Human
aauaaauuugacuuuucugu

SEQ ID NO: 1308849 - RNA, 13 nt, Human
aauaacaaugugc

SEQ ID NO: 1308850 - RNA, 19 nt, Human
aauaacaaugugcucucgg

SEQ ID NO: 1308851 - RNA, 21 nt, Human
aauaaauuugacuuuucugua

SEQ ID NO: 1308852 - RNA, 12 nt, Human
aauaaagugacc

SEQ ID NO: 1308853 - RNA, 17 nt, Human
aauaaagucagauggaa

SEQ ID NO: 1308854 - RNA, 12 nt, Human
aauaaaguguau

SEQ ID NO: 1308855 - RNA, 15 nt, Human
aauaaaguguaacaa

SEQ ID NO: 1308856 - RNA, 18 nt, Human
aauaaaguguaacaauug

SEQ ID NO: 1308857 - RNA, 15 nt, Human
aauaaaucugaccca

SEQ ID NO: 1308858 - RNA, 16 nt, Human
aauaaaucugacccag

SEQ ID NO: 1308859 - RNA, 17 nt, Human
aauaaaucugacccagu

SEQ ID NO: 1308860 - RNA, 20 nt, Human
aauaaaucugacccagugcc

SEQ ID NO: 1308861 - RNA, 14 nt, Human
aauaaaucuuccua

SEQ ID NO: 1308862 - RNA, 20 nt, Human
aauaaaacccguugauuacu

SEQ ID NO: 1308863 - RNA, 13 nt, Human
aauaaaagaaaau

SEQ ID NO: 1308864 - RNA, 16 nt, Human
aauaaaagaaaauuac

SEQ ID NO: 1308865 - RNA, 13 nt, Human
acacccagcaaua

SEQ ID NO: 1308866 - RNA, 23 nt, Human
acacccagcaauagagacgggac

SEQ ID NO: 1308867 - RNA, 17 nt, Human
acaccccgacuuuuguu

SEQ ID NO: 1308868 - RNA, 16 nt, Human
acacccauuuuuccuu

SEQ ID NO: 1308869 - RNA, 11 nt, Human
acaccuccuuc

SEQ ID NO: 1308870 - RNA, 18 nt, Human
acaccuccuucccucucu

SEQ ID NO: 1308871 - RNA, 22 nt, Human
acaccuccuucccucucuggag

SEQ ID NO: 1308872 - RNA, 13 nt, Human
acaccucccagga

SEQ ID NO: 1308873 - RNA, 19 nt, Human
acaccucccaggagacagu

SEQ ID NO: 1308874 - RNA, 23 nt, Human
acaccugcccugcccugccaccu

SEQ ID NO: 1308875 - RNA, 22 nt, Human
acaccugcccugcccugccacc

SEQ ID NO: 1308876 - RNA, 20 nt, Human
acaccugcccugcccugcca

SEQ ID NO: 1308877 - RNA, 18 nt, Human
acaccugcccugcccugc

SEQ ID NO: 1308878 - RNA, 17 nt, Human
acaccugcccugcccug

SEQ ID NO: 1308879 - RNA, 15 nt, Human
acaccugcccugccc

SEQ ID NO: 1308880 - RNA, 12 nt, Human
acaccugcccug

SEQ ID NO: 1308881 - RNA, 14 nt, Human
acaccugcccugcc

SEQ ID NO: 1308882 - RNA, 13 nt, Human
acaccugcccugc

SEQ ID NO: 1308883 - RNA, 19 nt, Human
acaccuccuucccucucug

SEQ ID NO: 1308884 - RNA, 18 nt, Human
acacuaagagagaaugag

SEQ ID NO: 1308885 - RNA, 19 nt, Human
acacuaagagagaaugaga

SEQ ID NO: 1308886 - RNA, 15 nt, Human
acacuacacccagca

SEQ ID NO: 1308887 - RNA, 14 nt, Human
acacuacacccagc

SEQ ID NO: 1308888 - RNA, 13 nt, Human
acacuacacccag

SEQ ID NO: 1308889 - RNA, 20 nt, Human
acaccuuggacauccuccuc

SEQ ID NO: 1308890 - RNA, 17 nt, Human
acacuacacacugugua

SEQ ID NO: 1308891 - RNA, 17 nt, Human
acacuaagagagaauga

SEQ ID NO: 1308892 - RNA, 17 nt, Human
acacuacacccagcaau

SEQ ID NO: 1308893 - RNA, 16 nt, Human
acacuaccgaaugugu

SEQ ID NO: 1308894 - RNA, 23 nt, Human
acacuacacccagcaauagagac

SEQ ID NO: 1308895 - RNA, 18 nt, Human
acacuaccgaaugugucu

SEQ ID NO: 1308896 - RNA, 19 nt, Human
acacuaccgaaugugucuu

SEQ ID NO: 1308897 - RNA, 20 nt, Human
acacuaccgaaugugucuuu

SEQ ID NO: 1308898 - RNA, 21 nt, Human
acacuaccgaaugugucuuua

SEQ ID NO: 1308899 - RNA, 16 nt, Human
acacuagacaagccag

SEQ ID NO: 1308900 - RNA, 23 nt, Human
acacuaccgaaugugucuuuaga

SEQ ID NO: 1308901 - RNA, 17 nt, Human
acacuagcccaaugaaa

SEQ ID NO: 1308902 - RNA, 20 nt, Human
acacuagcccaaugaaauga

SEQ ID NO: 1308903 - RNA, 23 nt, Human
acacuagccuuggccucuuuccu

SEQ ID NO: 1308904 - RNA, 19 nt, Human
uauaacuauguugauaaaa

SEQ ID NO: 1308905 - RNA, 14 nt, Human
uauaagcuuuucuu

SEQ ID NO: 1308906 - RNA, 15 nt, Human
uauaaccuuaauuua

SEQ ID NO: 1308907 - RNA, 20 nt, Human
uauaaccuuaauuuauuauu

SEQ ID NO: 1308908 - RNA, 14 nt, Human
uauaacguguucaa

SEQ ID NO: 1308909 - RNA, 19 nt, Human
uauaacguguucaauauuu

SEQ ID NO: 1308910 - RNA, 14 nt, Human
uauaacuaacaugu

SEQ ID NO: 1308911 - RNA, 20 nt, Human
uauaacguguucaauauuuu

SEQ ID NO: 1308912 - RNA, 23 nt, Human
acacaugcuucccuuuccugagu

SEQ ID NO: 1308913 - RNA, 21 nt, Human
acacaugcuucccuuuccuga

SEQ ID NO: 1308914 - RNA, 19 nt, Human
acacaugcuucccuuuccu

SEQ ID NO: 1308915 - RNA, 15 nt, Human
acacauuaagcaaau

SEQ ID NO: 1308916 - RNA, 16 nt, Human
acacauuaggaaaagu

SEQ ID NO: 1308917 - RNA, 15 nt, Human
acacauguauuuggu

SEQ ID NO: 1308918 - RNA, 21 nt, Human
acacauugcugugaacaggaa

SEQ ID NO: 1308919 - RNA, 22 nt, Human
acacauugaguuggaaucacug

SEQ ID NO: 1308920 - RNA, 15 nt, Human
acacauuucaaauga

SEQ ID NO: 1308921 - RNA, 14 nt, Human
acacauuugcuuuu

SEQ ID NO: 1308922 - RNA, 17 nt, Human
acacauuugcuuuuugu

SEQ ID NO: 1308923 - RNA, 15 nt, Human
acacccacacucaga

SEQ ID NO: 1308924 - RNA, 21 nt, Human
uauaaaaauaaaaaacacugg

SEQ ID NO: 1308925 - RNA, 21 nt, Human
uaguuuuuucaucuucaguug

SEQ ID NO: 1308926 - RNA, 13 nt, Human
uaguuuuuucauc

SEQ ID NO: 1308927 - RNA, 14 nt, Human
uaguuuuuucaucu

SEQ ID NO: 1308928 - RNA, 15 nt, Human
uaguuuuuucaucuu

SEQ ID NO: 1308929 - RNA, 17 nt, Human
uaguuuuuucaucuuca

SEQ ID NO: 1308930 - RNA, 22 nt, Human
uauaaaaauaaaaaagauccca

SEQ ID NO: 1308931 - RNA, 19 nt, Human
uauaaaaauaaaaaagauc

SEQ ID NO: 1308932 - RNA, 15 nt, Human
uauaaaacuuuccuc

SEQ ID NO: 1308933 - RNA, 12 nt, Human
uauaaaauacag

SEQ ID NO: 1308934 - RNA, 12 nt, Human
uauaaaauagac

SEQ ID NO: 1308935 - RNA, 19 nt, Human
uauaaaauagacaaauaga

SEQ ID NO: 1308936 - RNA, 21 nt, Human
uauaaaauaugaagacauaaa

SEQ ID NO: 1308937 - RNA, 23 nt, Human
uauaaaauaugaagacauaaacc

SEQ ID NO: 1308938 - RNA, 17 nt, Human
uaguuauucacaaaaau

SEQ ID NO: 1308939 - RNA, 23 nt, Human
uaguuaucauguuaguaauaccu

SEQ ID NO: 1308940 - RNA, 16 nt, Human
uaguuaucauguuagu

SEQ ID NO: 1308941 - RNA, 15 nt, Human
uaguuaucauguuag

SEQ ID NO: 1308942 - RNA, 14 nt, Human
uaguuaucauguua

SEQ ID NO: 1308943 - RNA, 13 nt, Human
uaguuaucauguu

SEQ ID NO: 1308944 - RNA, 12 nt, Human
uaguuaucaugu

SEQ ID NO: 1308945 - RNA, 11 nt, Human
uaguuaucaug

SEQ ID NO: 1308946 - RNA, 17 nt, Human
uagucuuuugcuuuugc

SEQ ID NO: 1308947 - RNA, 18 nt, Human
uaguuuugucacaauuau

SEQ ID NO: 1308948 - RNA, 15 nt, Human
uaguuuuuauauguu

SEQ ID NO: 1308949 - RNA, 14 nt, Human
uaguuuuucauuaa

SEQ ID NO: 1308950 - RNA, 21 nt, Human
uaguuuuucauuaaauaaauu

SEQ ID NO: 1308951 - RNA, 16 nt, Human
uaguucagaauuuagu

SEQ ID NO: 1308952 - RNA, 23 nt, Human
uaguucagaauuuaguguaucca

SEQ ID NO: 1308953 - RNA, 22 nt, Human
uaguuuugauuuaauguuuuca

SEQ ID NO: 1308954 - RNA, 22 nt, Human
uaguucagcauccgcaggugcu

SEQ ID NO: 1308955 - RNA, 22 nt, Human
uagguuuggacaaaauggaaua

SEQ ID NO: 1308956 - RNA, 21 nt, Human
uagguuuaugacaguaauugu

SEQ ID NO: 1308957 - RNA, 11 nt, Human
uagguuucaaa

SEQ ID NO: 1308958 - RNA, 14 nt, Human
uagguuucaaagau

SEQ ID NO: 1308959 - RNA, 15 nt, Human
uaguaauaccucuaa

SEQ ID NO: 1308960 - RNA, 13 nt, Human
uaguaauaccucu

SEQ ID NO: 1308961 - RNA, 12 nt, Human
uaguaauaccuc

SEQ ID NO: 1308962 - RNA, 17 nt, Human
acacagugaccauacua

SEQ ID NO: 1308963 - RNA, 20 nt, Human
uagguuuaugacaguaauug

SEQ ID NO: 1308964 - RNA, 19 nt, Human
uagguuuaugacaguaauu

SEQ ID NO: 1308965 - RNA, 17 nt, Human
uagguuuaugacaguaa

SEQ ID NO: 1308966 - RNA, 14 nt, Human
acacacugaagaag

SEQ ID NO: 1308967 - RNA, 11 nt, Human
acacagcugcc

SEQ ID NO: 1308968 - RNA, 12 nt, Human
acacagcugccg

SEQ ID NO: 1308969 - RNA, 12 nt, Human
acacaguauuuu

SEQ ID NO: 1308970 - RNA, 15 nt, Human
uagucuuuggagaaa

SEQ ID NO: 1308971 - RNA, 12 nt, Human
uagucuuuugcu

SEQ ID NO: 1308972 - RNA, 13 nt, Human
uagucuuuugcuu

SEQ ID NO: 1308973 - RNA, 14 nt, Human
uagucuuuugcuuu

SEQ ID NO: 1308974 - RNA, 19 nt, Human
uagucucacugcuugaacu

SEQ ID NO: 1308975 - RNA, 15 nt, Human
uagucucagugaaga

SEQ ID NO: 1308976 - RNA, 17 nt, Human
uagucucagugaagacu

SEQ ID NO: 1308977 - RNA, 18 nt, Human
uagucucagugaagacua

SEQ ID NO: 1308978 - RNA, 12 nt, Human
uaguguuggaga

SEQ ID NO: 1308979 - RNA, 15 nt, Human
uagucuuuugcuuuu

SEQ ID NO: 1308980 - RNA, 16 nt, Human
uagucuuuugcuuuug

SEQ ID NO: 1308981 - RNA, 21 nt, Human
uagucuuuugcuuuuggcaaa

SEQ ID NO: 1308982 - RNA, 16 nt, Human
uaguguuggagaagaa

SEQ ID NO: 1308983 - RNA, 17 nt, Human
uaguguuggagaagaac

SEQ ID NO: 1308984 - RNA, 14 nt, Human
uaguagagacaggg

SEQ ID NO: 1308985 - RNA, 11 nt, Human
uaguccuguga

SEQ ID NO: 1308986 - RNA, 22 nt, Human
uaguccugugaaugccacugcc

SEQ ID NO: 1308987 - RNA, 12 nt, Human
uaguccugugaa

SEQ ID NO: 1308988 - RNA, 14 nt, Human
uaguaauagccugg

SEQ ID NO: 1308989 - RNA, 13 nt, Human
acacacugaagaa

SEQ ID NO: 1308990 - RNA, 11 nt, Human
acacaccugua

SEQ ID NO: 1308991 - RNA, 20 nt, Human
acacaccuguagcacuuacu

SEQ ID NO: 1308992 - RNA, 23 nt, Human
acacacauugcugugaacaggaa

SEQ ID NO: 1308993 - RNA, 14 nt, Human
acacaccaggcgcu

SEQ ID NO: 1308994 - RNA, 17 nt, Human
acacaccaggcgcuaau

SEQ ID NO: 1308995 - RNA, 12 nt, Human
acacacaguacg

SEQ ID NO: 1308996 - RNA, 17 nt, Human
acacaacuauauuguuu

SEQ ID NO: 1308997 - RNA, 12 nt, Human
acaauguaauua

SEQ ID NO: 1308998 - RNA, 13 nt, Human
acaauguaauuau

SEQ ID NO: 1308999 - RNA, 15 nt, Human
acaauguaauuauuu

SEQ ID NO: 1309000 - RNA, 18 nt, Human
acaauguaauuauuuaug

SEQ ID NO: 1309001 - RNA, 17 nt, Human
acaauguagauaagugu

SEQ ID NO: 1309002 - RNA, 20 nt, Human
acaauguagauaaguguucu

SEQ ID NO: 1309003 - RNA, 21 nt, Human
acaauguagauaaguguucug

SEQ ID NO: 1309004 - RNA, 13 nt, Human
acacaacucacuc

SEQ ID NO: 1309005 - RNA, 22 nt, Human
acacaagaagaagggcacccua

SEQ ID NO: 1309006 - RNA, 16 nt, Human
acacaagauugguguu

SEQ ID NO: 1309007 - RNA, 17 nt, Human
acacaagauugguguuu

SEQ ID NO: 1309008 - RNA, 18 nt, Human
acacaagauugguguuuu

SEQ ID NO: 1309009 - RNA, 19 nt, Human
acacaagauugguguuuuu

SEQ ID NO: 1309010 - RNA, 20 nt, Human
acacaagauugguguuuuuu

SEQ ID NO: 1309011 - RNA, 21 nt, Human
acacaagauugguguuuuuuu

SEQ ID NO: 1309012 - RNA, 14 nt, Human
acaaugcuguauuu

SEQ ID NO: 1309013 - RNA, 17 nt, Human
acaaugcuguauuuuaa

SEQ ID NO: 1309014 - RNA, 18 nt, Human
acaaugcuguauuuuaaa

SEQ ID NO: 1309015 - RNA, 14 nt, Human
uagcuuauguuaac

SEQ ID NO: 1309016 - RNA, 22 nt, Human
uagcuuaucuacuuccaaacua

SEQ ID NO: 1309017 - RNA, 12 nt, Human
uagcuuaugaaa

SEQ ID NO: 1309018 - RNA, 15 nt, Human
uagcuuaucuacuuc

SEQ ID NO: 1309019 - RNA, 19 nt, Human
uagcuuaucuacuuccaaa

SEQ ID NO: 1309020 - RNA, 16 nt, Human
uagcuuaugaaaagaa

SEQ ID NO: 1309021 - RNA, 21 nt, Human
uagcucaaugagcauguuuag

SEQ ID NO: 1309022 - RNA, 12 nt, Human
acacugaagaag

SEQ ID NO: 1309023 - RNA, 14 nt, Human
acacugaagaagca

SEQ ID NO: 1309024 - RNA, 12 nt, Human
acacucugcugu

SEQ ID NO: 1309025 - RNA, 17 nt, Human
acacucugcuguuugac

SEQ ID NO: 1309026 - RNA, 13 nt, Human
acacucuguaauu

SEQ ID NO: 1309027 - RNA, 16 nt, Human
acacucugcuguuuga

SEQ ID NO: 1309028 - RNA, 12 nt, Human
acacucuuugua

SEQ ID NO: 1309029 - RNA, 16 nt, Human
acacucuuuguaagag

SEQ ID NO: 1309030 - RNA, 23 nt, Human
acacugaaaaaucuaagugauau

SEQ ID NO: 1309031 - RNA, 21 nt, Human
acacucuuuugcuuuauucca

SEQ ID NO: 1309032 - RNA, 12 nt, Human
acacuguucuua

SEQ ID NO: 1309033 - RNA, 15 nt, Human
acacuguucuuagcu

SEQ ID NO: 1309034 - RNA, 18 nt, Human
acacuguucuuagcucaa

SEQ ID NO: 1309035 - RNA, 21 nt, Human
acacuguucuuagcucaauga

SEQ ID NO: 1309036 - RNA, 22 nt, Human
acacuguucuuagcucaaugag

SEQ ID NO: 1309037 - RNA, 20 nt, Human
acacucucaaagcaaauaau

SEQ ID NO: 1309038 - RNA, 17 nt, Human
acacucguaugauacuu

SEQ ID NO: 1309039 - RNA, 14 nt, Human
acacuccagugaga

SEQ ID NO: 1309040 - RNA, 22 nt, Human
acacucaguggcccauggcauu

SEQ ID NO: 1309041 - RNA, 22 nt, Human
uauaagggcaaauuggagaaaa

SEQ ID NO: 1309042 - RNA, 16 nt, Human
uauaaggugcucucuu

SEQ ID NO: 1309043 - RNA, 22 nt, Human
uauaaggugcucucuuucuguc

SEQ ID NO: 1309044 - RNA, 21 nt, Human
uauaaggugcucucuuucugu

SEQ ID NO: 1309045 - RNA, 24 nt, Human
uauaagggaaguaguuaucauguu

SEQ ID NO: 1309046 - RNA, 21 nt, Human
uauaagggaaguaguuaucau

SEQ ID NO: 1309047 - RNA, 16 nt, Human
uauaaguagcaggcca

SEQ ID NO: 1309048 - RNA, 13 nt, Human
acacucagaagcc

SEQ ID NO: 1309049 - RNA, 14 nt, Human
acacucagaagccu

SEQ ID NO: 1309050 - RNA, 15 nt, Human
acacucagaagccug

SEQ ID NO: 1309051 - RNA, 16 nt, Human
acacucagaagccugg

SEQ ID NO: 1309052 - RNA, 17 nt, Human
acacucagaagccuggg

SEQ ID NO: 1309053 - RNA, 19 nt, Human
acacucagaagccuggggg

SEQ ID NO: 1309054 - RNA, 14 nt, Human
acacucagaccuga

SEQ ID NO: 1309055 - RNA, 19 nt, Human
acacucagaccugaauucu

SEQ ID NO: 1309056 - RNA, 20 nt, Human
acacucagaagccugggggc

SEQ ID NO: 1309057 - RNA, 19 nt, Human
acacucagauccuccucau

SEQ ID NO: 1309058 - RNA, 13 nt, Human
acacucagcacaa

SEQ ID NO: 1309059 - RNA, 16 nt, Human
acacucagcacaaggc

SEQ ID NO: 1309060 - RNA, 23 nt, Human
acacucaguggcccauggcauuu

SEQ ID NO: 1309061 - RNA, 12 nt, Human
uauauuuacaaa

SEQ ID NO: 1309062 - RNA, 17 nt, Human
uauauuuaaaaauaagu

SEQ ID NO: 1309063 - RNA, 18 nt, Human
uauauuuaaaagugucaa

SEQ ID NO: 1309064 - RNA, 15 nt, Human
uauauuuaaaaauaa

SEQ ID NO: 1309065 - RNA, 15 nt, Human
uauauuuaacaagau

SEQ ID NO: 1309066 - RNA, 19 nt, Human
uauauuuaacucucuuuau

SEQ ID NO: 1309067 - RNA, 13 nt, Human
uauauuaucuuuu

SEQ ID NO: 1309068 - RNA, 12 nt, Human
uauauuauuacu

SEQ ID NO: 1309069 - RNA, 16 nt, Human
uauauuauuacuugua

SEQ ID NO: 1309070 - RNA, 19 nt, Human
uauauuauuacuuguaaau

SEQ ID NO: 1309071 - RNA, 20 nt, Human
uauauuauuacuuguaaaua

SEQ ID NO: 1309072 - RNA, 12 nt, Human
uauauuauuaua

SEQ ID NO: 1309073 - RNA, 22 nt, Human
uauauucaggacuugaaagaaa

SEQ ID NO: 1309074 - RNA, 19 nt, Human
acagaaagcagaacaguga

SEQ ID NO: 1309075 - RNA, 23 nt, Human
acacuguucuuagcucaaugagc

SEQ ID NO: 1309076 - RNA, 15 nt, Human
acacuuaaaaauggu

SEQ ID NO: 1309077 - RNA, 13 nt, Human
acacuuaaaaaug

SEQ ID NO: 1309078 - RNA, 17 nt, Human
acacuuguccacauagg

SEQ ID NO: 1309079 - RNA, 20 nt, Human
acacuuguugauuaauggaa

SEQ ID NO: 1309080 - RNA, 23 nt, Human
acacuuguugauuaauggaaaug

SEQ ID NO: 1309081 - RNA, 22 nt, Human
acacuuuaauuaccaaccuguu

SEQ ID NO: 1309082 - RNA, 17 nt, Human
acacuuugcacugauau

SEQ ID NO: 1309083 - RNA, 19 nt, Human
acacuuugcacugauauau

SEQ ID NO: 1309084 - RNA, 22 nt, Human
acacuuugcacugauauaucau

SEQ ID NO: 1309085 - RNA, 19 nt, Human
acacuuugccauauuuuca

SEQ ID NO: 1309086 - RNA, 16 nt, Human
acacuuugguaccaga

SEQ ID NO: 1309087 - RNA, 12 nt, Human
acagaaacaaaa

SEQ ID NO: 1309088 - RNA, 17 nt, Human
acagaaacaaaaacacu

SEQ ID NO: 1309089 - RNA, 15 nt, Human
acagaaaccuuuuua

SEQ ID NO: 1309090 - RNA, 20 nt, Human
acagaaaccuuuuuaaaaau

SEQ ID NO: 1309091 - RNA, 23 nt, Human
acagaaacuaaacucuuaccaua

SEQ ID NO: 1309092 - RNA, 20 nt, Human
acagcccuucuuuccacaga

SEQ ID NO: 1309093 - RNA, 21 nt, Human
acagcccuucuuuccacagaa

SEQ ID NO: 1309094 - RNA, 14 nt, Human
acagcaaccccagg

SEQ ID NO: 1309095 - RNA, 17 nt, Human
acagcaacaauuuauga

SEQ ID NO: 1309096 - RNA, 20 nt, Human
acagcaacaauuuaugaauu

SEQ ID NO: 1309097 - RNA, 20 nt, Human
uaugaaagauggcugugccu

SEQ ID NO: 1309098 - RNA, 22 nt, Human
uaugaaagauggcugugccucu

SEQ ID NO: 1309099 - RNA, 23 nt, Human
uaugaaagauggcugugccucug

SEQ ID NO: 1309100 - RNA, 24 nt, Human
uaucuuuaaacgaaacaaagacaa

SEQ ID NO: 1309101 - RNA, 15 nt, Human
acagcccuuuugucu

SEQ ID NO: 1309102 - RNA, 16 nt, Human
acagcccuuuugucuc

SEQ ID NO: 1309103 - RNA, 23 nt, Human
uaucuuggugaauuuuuuuuucc

SEQ ID NO: 1309104 - RNA, 22 nt, Human
acagauggcacuuugaaggggc

SEQ ID NO: 1309105 - RNA, 16 nt, Human
acagaugggcaaauua

SEQ ID NO: 1309106 - RNA, 13 nt, Human
acagaugccuccu

SEQ ID NO: 1309107 - RNA, 17 nt, Human
acagaugccuccuuccu

SEQ ID NO: 1309108 - RNA, 18 nt, Human
acagaugccuccuuccuc

SEQ ID NO: 1309109 - RNA, 22 nt, Human
acagaugccuccuuccucuuuu

SEQ ID NO: 1309110 - RNA, 21 nt, Human
acagauguccaucagaugaca

SEQ ID NO: 1309111 - RNA, 22 nt, Human
acagauguccaucagaugacaa

SEQ ID NO: 1309112 - RNA, 16 nt, Human
acagauguccaucaga

SEQ ID NO: 1309113 - RNA, 14 nt, Human
acagauguccauca

SEQ ID NO: 1309114 - RNA, 14 nt, Human
acagauggccagcc

SEQ ID NO: 1309115 - RNA, 22 nt, Human
acagcaaacaggugcuaauuug

SEQ ID NO: 1309116 - RNA, 15 nt, Human
acagcaaacaggugc

SEQ ID NO: 1309117 - RNA, 16 nt, Human
acagcaaaugcaaaaa

SEQ ID NO: 1309118 - RNA, 23 nt, Human
acagagcuggagaugaggccaga

SEQ ID NO: 1309119 - RNA, 20 nt, Human
acagagccaggagaagcuca

SEQ ID NO: 1309120 - RNA, 14 nt, Human
acagagcuucccug

SEQ ID NO: 1309121 - RNA, 15 nt, Human
acagagcuucccuga

SEQ ID NO: 1309122 - RNA, 16 nt, Human
acagagcuucccugac

SEQ ID NO: 1309123 - RNA, 16 nt, Human
acagagauucugaacu

SEQ ID NO: 1309124 - RNA, 16 nt, Human
acagagccaggagaag

SEQ ID NO: 1309125 - RNA, 17 nt, Human
acagagccaggagaagc

SEQ ID NO: 1309126 - RNA, 22 nt, Human
acagagccaggagaagcucagc

SEQ ID NO: 1309127 - RNA, 11 nt, Human
acagagccagg

SEQ ID NO: 1309128 - RNA, 13 nt, Human
acagagccaggag

SEQ ID NO: 1309129 - RNA, 14 nt, Human
acagagccaggaga

SEQ ID NO: 1309130 - RNA, 20 nt, Human
uaucucuacugaaugucauu

SEQ ID NO: 1309131 - RNA, 11 nt, Human
uaucucugugu

SEQ ID NO: 1309132 - RNA, 16 nt, Human
uaucucugugugcaca

SEQ ID NO: 1309133 - RNA, 17 nt, Human
uaucucugugugcacaa

SEQ ID NO: 1309134 - RNA, 18 nt, Human
uaucucugugugcacaaa

SEQ ID NO: 1309135 - RNA, 23 nt, Human
uaucucugugugcacaaauauuu

SEQ ID NO: 1309136 - RNA, 12 nt, Human
uaucucuguguu

SEQ ID NO: 1309137 - RNA, 14 nt, Human
acagagagucugga

SEQ ID NO: 1309138 - RNA, 19 nt, Human
acagagaugcuaagagaaa

SEQ ID NO: 1309139 - RNA, 15 nt, Human
uauauuuauuacugu

SEQ ID NO: 1309140 - RNA, 19 nt, Human
uauauuuauuacuguaaga

SEQ ID NO: 1309141 - RNA, 20 nt, Human
uauauuuauuacuguaagaa

SEQ ID NO: 1309142 - RNA, 16 nt, Human
uaucccggcugcccuu

SEQ ID NO: 1309143 - RNA, 15 nt, Human
uaucccuacauguau

SEQ ID NO: 1309144 - RNA, 15 nt, Human
uaucccucaccugua

SEQ ID NO: 1309145 - RNA, 14 nt, Human
uaucccuccuguug

SEQ ID NO: 1309146 - RNA, 20 nt, Human
uaucccuccuguugggagag

SEQ ID NO: 1309147 - RNA, 19 nt, Human
uaucccuccuguugggaga

SEQ ID NO: 1309148 - RNA, 12 nt, Human
uaucucaaacaa

SEQ ID NO: 1309149 - RNA, 23 nt, Human
uaucucaaacaauugaagucaau

SEQ ID NO: 1309150 - RNA, 12 nt, Human
uaucucacacuc

SEQ ID NO: 1309151 - RNA, 10 nt, Human
uaucucagaa

SEQ ID NO: 1309152 - RNA, 12 nt, Human
uaucucagaaag

SEQ ID NO: 1309153 - RNA, 13 nt, Human
uaucucagaaagu

SEQ ID NO: 1309154 - RNA, 19 nt, Human
uaucucagaaagugccuga

SEQ ID NO: 1309155 - RNA, 20 nt, Human
uaucucagaaagugccugac

SEQ ID NO: 1309156 - RNA, 14 nt, Human
uauccuacuucccc

SEQ ID NO: 1309157 - RNA, 17 nt, Human
uauccuacuuccccuuc

SEQ ID NO: 1309158 - RNA, 16 nt, Human
uauccuaucucuccaa

SEQ ID NO: 1309159 - RNA, 15 nt, Human
uauccuccaccgucu

SEQ ID NO: 1309160 - RNA, 19 nt, Human
uacugaaauaaacgucuua

SEQ ID NO: 1309161 - RNA, 22 nt, Human
uacugaaauaaacgucuuaaau

SEQ ID NO: 1309162 - RNA, 22 nt, Human
uacugacauguggggccagguc

SEQ ID NO: 1309163 - RNA, 17 nt, Human
uacugagagugaacaaa

SEQ ID NO: 1309164 - RNA, 16 nt, Human
uacugacuuugcuugc

SEQ ID NO: 1309165 - RNA, 17 nt, Human
uacugacuuugcuugcu

SEQ ID NO: 1309166 - RNA, 14 nt, Human
uacucuagaugaag

SEQ ID NO: 1309167 - RNA, 20 nt, Human
uacucuauaaccaaaugaaa

SEQ ID NO: 1309168 - RNA, 23 nt, Human
uacucuauaaccaaaugaaauau

SEQ ID NO: 1309169 - RNA, 15 nt, Human
uacucuccccacgag

SEQ ID NO: 1309170 - RNA, 20 nt, Human
uacucuccccacgagggcug

SEQ ID NO: 1309171 - RNA, 22 nt, Human
uacucuccccacgagggcuggc

SEQ ID NO: 1309172 - RNA, 14 nt, Human
uacucuuucuguau

SEQ ID NO: 1309173 - RNA, 15 nt, Human
uacucuuucuguaua

SEQ ID NO: 1309174 - RNA, 16 nt, Human
uacucuuucuguauau

SEQ ID NO: 1309175 - RNA, 14 nt, Human
uacugaaaacuuca

SEQ ID NO: 1309176 - RNA, 19 nt, Human
uacugaaagaguccauugu

SEQ ID NO: 1309177 - RNA, 23 nt, Human
uacugguccaaaagauugcugaa

SEQ ID NO: 1309178 - RNA, 22 nt, Human
uacuggggaaacuggccauggc

SEQ ID NO: 1309179 - RNA, 12 nt, Human
uacuggucucuc

SEQ ID NO: 1309180 - RNA, 13 nt, Human
uacuggucucucu

SEQ ID NO: 1309181 - RNA, 19 nt, Human
uacuggucucucuaugccu

SEQ ID NO: 1309182 - RNA, 18 nt, Human
uacuggucuuguggaauu

SEQ ID NO: 1309183 - RNA, 18 nt, Human
uacugacuuugcuugcuu

SEQ ID NO: 1309184 - RNA, 20 nt, Human
uacugacuuugcuugcuuug

SEQ ID NO: 1309185 - RNA, 17 nt, Human
uacugagaaaaccuguu

SEQ ID NO: 1309186 - RNA, 19 nt, Human
uacugagagugaacaaauu

SEQ ID NO: 1309187 - RNA, 22 nt, Human
uacugacuuugcuugcuuugaa

SEQ ID NO: 1309188 - RNA, 13 nt, Human
uacugggaaggcu

SEQ ID NO: 1309189 - RNA, 17 nt, Human
uacugggaaggcuacuu

SEQ ID NO: 1309190 - RNA, 16 nt, Human
uacuggggaaacuggc

SEQ ID NO: 1309191 - RNA, 19 nt, Human
uacuggggaaacuggccau

SEQ ID NO: 1309192 - RNA, 21 nt, Human
uacuggggaaacuggccaugg

SEQ ID NO: 1309193 - RNA, 24 nt, Human
uacuggggaaacuggccauggccu

SEQ ID NO: 1309194 - RNA, 13 nt, Human
uacugguccaaaa

SEQ ID NO: 1309195 - RNA, 18 nt, Human
uacugguccaaaagauug

SEQ ID NO: 1309196 - RNA, 23 nt, Human
uacuguacagacagaaaaaacug

SEQ ID NO: 1309197 - RNA, 14 nt, Human
uacuguacagcugg

SEQ ID NO: 1309198 - RNA, 19 nt, Human
uacuguacagacagaaaaa

SEQ ID NO: 1309199 - RNA, 13 nt, Human
uacuguaauuccu

SEQ ID NO: 1309200 - RNA, 15 nt, Human
uacuguaauuccuca

SEQ ID NO: 1309201 - RNA, 16 nt, Human
uacuguaauuccucaa

SEQ ID NO: 1309202 - RNA, 18 nt, Human
aauugaggacacugauau

SEQ ID NO: 1309203 - RNA, 15 nt, Human
aauugagaaggaaaa

SEQ ID NO: 1309204 - RNA, 23 nt, Human
aauugagaaaaauauauacuaaa

SEQ ID NO: 1309205 - RNA, 19 nt, Human
aauugagaaaaauauauac

SEQ ID NO: 1309206 - RNA, 19 nt, Human
uacuguacagcuggcucua

SEQ ID NO: 1309207 - RNA, 12 nt, Human
aauugcauuucc

SEQ ID NO: 1309208 - RNA, 20 nt, Human
aauugcauugacuuucccca

SEQ ID NO: 1309209 - RNA, 21 nt, Human
aauugcauugacuuuccccac

SEQ ID NO: 1309210 - RNA, 11 nt, Human
aauugcauuga

SEQ ID NO: 1309211 - RNA, 18 nt, Human
aauugcauugacuuuccc

SEQ ID NO: 1309212 - RNA, 23 nt, Human
aauugauuugcauugaacacaaa

SEQ ID NO: 1309213 - RNA, 13 nt, Human
aauugauuuugaa

SEQ ID NO: 1309214 - RNA, 14 nt, Human
aauugauuuugaac

SEQ ID NO: 1309215 - RNA, 14 nt, Human
aauugcaaaucuug

SEQ ID NO: 1309216 - RNA, 18 nt, Human
aauugcaaaucuugaaau

SEQ ID NO: 1309217 - RNA, 20 nt, Human
aauugauuuuuauaaauacu

SEQ ID NO: 1309218 - RNA, 20 nt, Human
aauugcacaccuuggaauuc

SEQ ID NO: 1309219 - RNA, 22 nt, Human
aauugcacgcggagugaguuuu

SEQ ID NO: 1309220 - RNA, 13 nt, Human
aauugauuugcau

SEQ ID NO: 1309221 - RNA, 14 nt, Human
aauugauuugcauu

SEQ ID NO: 1309222 - RNA, 16 nt, Human
aauugauuugcauuga

SEQ ID NO: 1309223 - RNA, 20 nt, Human
aauugauuugcauugaacac

SEQ ID NO: 1309224 - RNA, 22 nt, Human
aauugauuugcauugaacacaa

SEQ ID NO: 1309225 - RNA, 18 nt, Human
uacuagggaaaugccuuu

SEQ ID NO: 1309226 - RNA, 19 nt, Human
uacuagggagccauuugag

SEQ ID NO: 1309227 - RNA, 20 nt, Human
uacuagggagccauuugaga

SEQ ID NO: 1309228 - RNA, 21 nt, Human
uacuagggaucccucaucugu

SEQ ID NO: 1309229 - RNA, 19 nt, Human
uacuauuuaaagccuccuc

SEQ ID NO: 1309230 - RNA, 21 nt, Human
uacuauuuaaagccuccucau

SEQ ID NO: 1309231 - RNA, 22 nt, Human
uacuauuuaaagccuccucauc

SEQ ID NO: 1309232 - RNA, 12 nt, Human
uacuauuuaacu

SEQ ID NO: 1309233 - RNA, 13 nt, Human
uacuauuuaacug

SEQ ID NO: 1309234 - RNA, 14 nt, Human
uacuauuuaacuga

SEQ ID NO: 1309235 - RNA, 17 nt, Human
uacucaaaugaguaaca

SEQ ID NO: 1309236 - RNA, 19 nt, Human
uacuauuuaacugacuauu

SEQ ID NO: 1309237 - RNA, 16 nt, Human
uacuauuuaacugacu

SEQ ID NO: 1309238 - RNA, 13 nt, Human
uacuauuucacaa

SEQ ID NO: 1309239 - RNA, 12 nt, Human
uacuauuucaca

SEQ ID NO: 1309240 - RNA, 19 nt, Human
uacuagagucugaacagcu

SEQ ID NO: 1309241 - RNA, 18 nt, Human
uacuaaaaauacaaaaaa

SEQ ID NO: 1309242 - RNA, 15 nt, Human
uacggauuuucaguu

SEQ ID NO: 1309243 - RNA, 17 nt, Human
uacggauuuucaguuac

SEQ ID NO: 1309244 - RNA, 14 nt, Human
uacuaaaaauacaa

SEQ ID NO: 1309245 - RNA, 17 nt, Human
uacggacagagaccaag

SEQ ID NO: 1309246 - RNA, 14 nt, Human
uacgcuguccagaa

SEQ ID NO: 1309247 - RNA, 14 nt, Human
uacgcuuugauuca

SEQ ID NO: 1309248 - RNA, 15 nt, Human
uacgcuuugauucau

SEQ ID NO: 1309249 - RNA, 13 nt, Human
aauugacccacaa

SEQ ID NO: 1309250 - RNA, 21 nt, Human
aauugaauacuuugaaugugu

SEQ ID NO: 1309251 - RNA, 14 nt, Human
aauugaauauuauu

SEQ ID NO: 1309252 - RNA, 15 nt, Human
aauugaaucacugcu

SEQ ID NO: 1309253 - RNA, 22 nt, Human
aauugaaucacugcucacacug

SEQ ID NO: 1309254 - RNA, 15 nt, Human
aauugaauauuauuc

SEQ ID NO: 1309255 - RNA, 18 nt, Human
aauugaaugcaaaccaua

SEQ ID NO: 1309256 - RNA, 14 nt, Human
aaugugggauuaug

SEQ ID NO: 1309257 - RNA, 14 nt, Human
aaugugauguucua

SEQ ID NO: 1309258 - RNA, 16 nt, Human
aaugugguagccucac

SEQ ID NO: 1309259 - RNA, 13 nt, Human
aauguguaagaac

SEQ ID NO: 1309260 - RNA, 21 nt, Human
aauguguaagaacaacuaccu

SEQ ID NO: 1309261 - RNA, 16 nt, Human
aauguguaguucaugu

SEQ ID NO: 1309262 - RNA, 21 nt, Human
aauguguaguucauguaaaua

SEQ ID NO: 1309263 - RNA, 22 nt, Human
aauguguaguucauguaaauaa

SEQ ID NO: 1309264 - RNA, 15 nt, Human
aauguguauaaacaa

SEQ ID NO: 1309265 - RNA, 22 nt, Human
aauguguauuacaaauauuuug

SEQ ID NO: 1309266 - RNA, 14 nt, Human
aauguguauaaaca

SEQ ID NO: 1309267 - RNA, 11 nt, Human
aaugugucuuu

SEQ ID NO: 1309268 - RNA, 12 nt, Human
aaugugucuuua

SEQ ID NO: 1309269 - RNA, 13 nt, Human
aaugugucuuuag

SEQ ID NO: 1309270 - RNA, 14 nt, Human
aaugugucuuuaga

SEQ ID NO: 1309271 - RNA, 15 nt, Human
aaugugucuuuagau

SEQ ID NO: 1309272 - RNA, 23 nt, Human
aaugugucuuuagauagcccugu

SEQ ID NO: 1309273 - RNA, 17 nt, Human
aaugugucuuuagauag

SEQ ID NO: 1309274 - RNA, 13 nt, Human
aauguguguauau

SEQ ID NO: 1309275 - RNA, 15 nt, Human
aauguguguauaugg

SEQ ID NO: 1309276 - RNA, 17 nt, Human
aauguguguauauggac

SEQ ID NO: 1309277 - RNA, 16 nt, Human
aauguguguauaugga

SEQ ID NO: 1309278 - RNA, 16 nt, Human
aaugugugucaauuua

SEQ ID NO: 1309279 - RNA, 16 nt, Human
aauugaauacuuugaa

SEQ ID NO: 1309280 - RNA, 18 nt, Human
aauugaauacuuugaaug

SEQ ID NO: 1309281 - RNA, 19 nt, Human
aauugaauacuuugaaugu

SEQ ID NO: 1309282 - RNA, 22 nt, Human
aauuuauaaacuuuuuucuuac

SEQ ID NO: 1309283 - RNA, 23 nt, Human
aauuuauaacguguucaauauuu

SEQ ID NO: 1309284 - RNA, 15 nt, Human
aauuuauaaugauua

SEQ ID NO: 1309285 - RNA, 16 nt, Human
aauuuaguuguuguag

SEQ ID NO: 1309286 - RNA, 12 nt, Human
aauuuaguuuca

SEQ ID NO: 1309287 - RNA, 14 nt, Human
aauuuaguuucaua

SEQ ID NO: 1309288 - RNA, 22 nt, Human
aauuuaguuucauauaaaguau

SEQ ID NO: 1309289 - RNA, 21 nt, Human
aauuuaguuucauauaaagua

SEQ ID NO: 1309290 - RNA, 16 nt, Human
aauuuauaaaaaggug

SEQ ID NO: 1309291 - RNA, 22 nt, Human
aauuuauaaaaagguguuuuga

SEQ ID NO: 1309292 - RNA, 21 nt, Human
aauuuauaccucaauuuucac

SEQ ID NO: 1309293 - RNA, 20 nt, Human
aauuuauaccucaauuuuca

SEQ ID NO: 1309294 - RNA, 18 nt, Human
aauuuauaccucaauuuu

SEQ ID NO: 1309295 - RNA, 16 nt, Human
aauuuauauuguaaau

SEQ ID NO: 1309296 - RNA, 23 nt, Human
aauuucuaggacugaauuaugaa

SEQ ID NO: 1309297 - RNA, 15 nt, Human
aauuucuuaacuucu

SEQ ID NO: 1309298 - RNA, 16 nt, Human
aauuucuuaacuucuu

SEQ ID NO: 1309299 - RNA, 20 nt, Human
aauuucuuaacuucuugcuu

SEQ ID NO: 1309300 - RNA, 18 nt, Human
aauuucuaggacugaauu

SEQ ID NO: 1309301 - RNA, 22 nt, Human
aauuucuaggacugaauuauga

SEQ ID NO: 1309302 - RNA, 17 nt, Human
aauuucuaggacugaau

SEQ ID NO: 1309303 - RNA, 11 nt, Human
aauuuaaaugu

SEQ ID NO: 1309304 - RNA, 13 nt, Human
aauuuaaauguua

SEQ ID NO: 1309305 - RNA, 15 nt, Human
aauuggagcucgugg

SEQ ID NO: 1309306 - RNA, 15 nt, Human
aauuggaaagcaggu

SEQ ID NO: 1309307 - RNA, 20 nt, Human
aauuggaagcugcccugccc

SEQ ID NO: 1309308 - RNA, 23 nt, Human
aauugcauugacuuuccccacca

SEQ ID NO: 1309309 - RNA, 13 nt, Human
aauugcuuauuua

SEQ ID NO: 1309310 - RNA, 22 nt, Human
aauugcuuauuuauuguauucu

SEQ ID NO: 1309311 - RNA, 19 nt, Human
aauugcuuauuuauuguau

SEQ ID NO: 1309312 - RNA, 16 nt, Human
aauugcuuguuugcuu

SEQ ID NO: 1309313 - RNA, 19 nt, Human
aauugcuuguuugcuucaa

SEQ ID NO: 1309314 - RNA, 22 nt, Human
aauugcuuuaccuuuuuucuua

SEQ ID NO: 1309315 - RNA, 13 nt, Human
aauuuaguauuuu

SEQ ID NO: 1309316 - RNA, 17 nt, Human
aauuuaguguauccaua

SEQ ID NO: 1309317 - RNA, 16 nt, Human
aauuuaguguauccau

SEQ ID NO: 1309318 - RNA, 18 nt, Human
aauuuacagagacagaaa

SEQ ID NO: 1309319 - RNA, 17 nt, Human
aauuuacagagacagaa

SEQ ID NO: 1309320 - RNA, 15 nt, Human
uacuugaaaauuaac

SEQ ID NO: 1309321 - RNA, 22 nt, Human
uacuucuuuuuucaaaagaaag

SEQ ID NO: 1309322 - RNA, 20 nt, Human
uacuucuuuuuucaaaagaa

SEQ ID NO: 1309323 - RNA, 19 nt, Human
uacuucuuguguguaugca

SEQ ID NO: 1309324 - RNA, 22 nt, Human
uacuucuguaauuguguggauu

SEQ ID NO: 1309325 - RNA, 15 nt, Human
uacuuucccuacccu

SEQ ID NO: 1309326 - RNA, 18 nt, Human
uacuuucccuacccucua

SEQ ID NO: 1309327 - RNA, 21 nt, Human
uacuuucccuacccucuagag

SEQ ID NO: 1309328 - RNA, 19 nt, Human
uacuuucccuacccucuag

SEQ ID NO: 1309329 - RNA, 23 nt, Human
uacuuugauauuuucaacgcagc

SEQ ID NO: 1309330 - RNA, 20 nt, Human
uacuuugacaguguuuuuag

SEQ ID NO: 1309331 - RNA, 15 nt, Human
uacuuugugcauucu

SEQ ID NO: 1309332 - RNA, 14 nt, Human
uacuuugaagucau

SEQ ID NO: 1309333 - RNA, 18 nt, Human
uacuuugaagucauacca

SEQ ID NO: 1309334 - RNA, 13 nt, Human
uacuuugaaugug

SEQ ID NO: 1309335 - RNA, 14 nt, Human
uacuuugaaugugu

SEQ ID NO: 1309336 - RNA, 18 nt, Human
uacuuugaauguguuuca

SEQ ID NO: 1309337 - RNA, 20 nt, Human
uacuuugaauguguuucaca

SEQ ID NO: 1309338 - RNA, 22 nt, Human
uacuuugaauguguuucacagu

SEQ ID NO: 1309339 - RNA, 15 nt, Human
uacuuugacaguguu

SEQ ID NO: 1309340 - RNA, 14 nt, Human
uacuuugacuuuuu

SEQ ID NO: 1309341 - RNA, 19 nt, Human
uacuucuuaggguuaugau

SEQ ID NO: 1309342 - RNA, 22 nt, Human
uacuucguguccgacucuucug

SEQ ID NO: 1309343 - RNA, 20 nt, Human
uacuucucauuuuuuaaaaa

SEQ ID NO: 1309344 - RNA, 16 nt, Human
uacuucucuaauucuu

SEQ ID NO: 1309345 - RNA, 13 nt, Human
uacuucugaggua

SEQ ID NO: 1309346 - RNA, 16 nt, Human
uacuucuguaauugug

SEQ ID NO: 1309347 - RNA, 17 nt, Human
uacuucuguaauugugu

SEQ ID NO: 1309348 - RNA, 20 nt, Human
uacuucuguaauugugugga

SEQ ID NO: 1309349 - RNA, 14 nt, Human
uacuucuugaaggu

SEQ ID NO: 1309350 - RNA, 15 nt, Human
aauuugaaacacuuu

SEQ ID NO: 1309351 - RNA, 17 nt, Human
aauuugauuauuaacau

SEQ ID NO: 1309352 - RNA, 12 nt, Human
aauuugauugau

SEQ ID NO: 1309353 - RNA, 13 nt, Human
aauuugauugauu

SEQ ID NO: 1309354 - RNA, 14 nt, Human
aauuugauugauuu

SEQ ID NO: 1309355 - RNA, 15 nt, Human
aauuugauugauuug

SEQ ID NO: 1309356 - RNA, 16 nt, Human
aauuugauugauuuga

SEQ ID NO: 1309357 - RNA, 17 nt, Human
uacuuaguauugcaaag

SEQ ID NO: 1309358 - RNA, 17 nt, Human
uacuuauauaauugcca

SEQ ID NO: 1309359 - RNA, 20 nt, Human
uacuuaguauugcaaaguca

SEQ ID NO: 1309360 - RNA, 15 nt, Human
uacuuaguauugcaa

SEQ ID NO: 1309361 - RNA, 16 nt, Human
uacuuauauggaaauu

SEQ ID NO: 1309362 - RNA, 17 nt, Human
aauuugauugauuugaa

SEQ ID NO: 1309363 - RNA, 20 nt, Human
aauuugauugauuugaagaa

SEQ ID NO: 1309364 - RNA, 23 nt, Human
uacuuccugugacuucagcucug

SEQ ID NO: 1309365 - RNA, 14 nt, Human
uacuuccuccuccc

SEQ ID NO: 1309366 - RNA, 16 nt, Human
uacuuccuccucccca

SEQ ID NO: 1309367 - RNA, 20 nt, Human
uacuucggggcugggaaguc

SEQ ID NO: 1309368 - RNA, 18 nt, Human
uacuucgacacuguucuu

SEQ ID NO: 1309369 - RNA, 14 nt, Human
uacuuccccuuccu

SEQ ID NO: 1309370 - RNA, 15 nt, Human
uacuuccccuuccua

SEQ ID NO: 1309371 - RNA, 18 nt, Human
uacuuccccuuccuaauu

SEQ ID NO: 1309372 - RNA, 20 nt, Human
uacuuccccuuccuaauucc

SEQ ID NO: 1309373 - RNA, 18 nt, Human
uacuuauuuguauauggu

SEQ ID NO: 1309374 - RNA, 17 nt, Human
uacuuauuuuugacagu

SEQ ID NO: 1309375 - RNA, 20 nt, Human
uacuuauuuuugacaguguu

SEQ ID NO: 1309376 - RNA, 19 nt, Human
uacuuauuuuugacagugu

SEQ ID NO: 1309377 - RNA, 14 nt, Human
uacuuccaaacuaa

SEQ ID NO: 1309378 - RNA, 17 nt, Human
uacuuccccauggcccu

SEQ ID NO: 1309379 - RNA, 13 nt, Human
uacuuuuuguuau

SEQ ID NO: 1309380 - RNA, 15 nt, Human
aauuugcauuaaauu

SEQ ID NO: 1309381 - RNA, 17 nt, Human
aauuugcauuaaauuac

SEQ ID NO: 1309382 - RNA, 17 nt, Human
aauuugcauuaaauuca

SEQ ID NO: 1309383 - RNA, 18 nt, Human
aauuugcauuaaauucac

SEQ ID NO: 1309384 - RNA, 21 nt, Human
aauuugcauuaaauucacaaa

SEQ ID NO: 1309385 - RNA, 14 nt, Human
uacuuuuaaacugu

SEQ ID NO: 1309386 - RNA, 15 nt, Human
uacuuuuaaacugug

SEQ ID NO: 1309387 - RNA, 21 nt, Human
uacuuuuaaacuguguacaua

SEQ ID NO: 1309388 - RNA, 21 nt, Human
uacuuuuaaacagugagccug

SEQ ID NO: 1309389 - RNA, 13 nt, Human
aauuugguuuuca

SEQ ID NO: 1309390 - RNA, 18 nt, Human
aauuugggggacuuacau

SEQ ID NO: 1309391 - RNA, 21 nt, Human
aauuugggggacuuacaugau

SEQ ID NO: 1309392 - RNA, 23 nt, Human
aauuugcauuaaauucacaaacu

SEQ ID NO: 1309393 - RNA, 20 nt, Human
aauuugcauuaaauuacaga

SEQ ID NO: 1309394 - RNA, 13 nt, Human
aauuugccugcug

SEQ ID NO: 1309395 - RNA, 15 nt, Human
aauuugccugcuggg

SEQ ID NO: 1309396 - RNA, 16 nt, Human
aauuugccuguaacaa

SEQ ID NO: 1309397 - RNA, 22 nt, Human
aauuugccuguaacaagccaga

SEQ ID NO: 1309398 - RNA, 15 nt, Human
aauuugguuuucaca

SEQ ID NO: 1309399 - RNA, 21 nt, Human
aauuugguuuucacauuggaa

SEQ ID NO: 1309400 - RNA, 18 nt, Human
aauuuguuauuuugcaac

SEQ ID NO: 1309401 - RNA, 14 nt, Human
aauuuguucuugua

SEQ ID NO: 1309402 - RNA, 22 nt, Human
aauuuuuaaucuuuaauuuuac

SEQ ID NO: 1309403 - RNA, 13 nt, Human
aauuuuuaaacaa

SEQ ID NO: 1309404 - RNA, 15 nt, Human
aauuuuuaaacaagu

SEQ ID NO: 1309405 - RNA, 19 nt, Human
aauuuuuaaacaaguauuu

SEQ ID NO: 1309406 - RNA, 15 nt, Human
aauuuguucuuguau

SEQ ID NO: 1309407 - RNA, 16 nt, Human
aauuuguucuuguauu

SEQ ID NO: 1309408 - RNA, 21 nt, Human
aauuuguucuuguauuuauug

SEQ ID NO: 1309409 - RNA, 12 nt, Human
aauuuguugcau

SEQ ID NO: 1309410 - RNA, 14 nt, Human
aauuuuuacagaau

SEQ ID NO: 1309411 - RNA, 16 nt, Human
aauuuuuacagaauug

SEQ ID NO: 1309412 - RNA, 13 nt, Human
aauuuuugauacu

SEQ ID NO: 1309413 - RNA, 13 nt, Human
aauuuuucuucuu

SEQ ID NO: 1309414 - RNA, 14 nt, Human
aauuuuucuucuug

SEQ ID NO: 1309415 - RNA, 16 nt, Human
aauuuuucuucuugag

SEQ ID NO: 1309416 - RNA, 13 nt, Human
aauuuuuguagua

SEQ ID NO: 1309417 - RNA, 14 nt, Human
aauuuuuguaauuu

SEQ ID NO: 1309418 - RNA, 22 nt, Human
aauuuuuuguugacauuagucu

SEQ ID NO: 1309419 - RNA, 17 nt, Human
aauuuuuuguugacauu

SEQ ID NO: 1309420 - RNA, 19 nt, Human
aauuuuuuuaauuuacaaa

SEQ ID NO: 1309421 - RNA, 16 nt, Human
aauuuuuuuuacauuu

SEQ ID NO: 1309422 - RNA, 12 nt, Human
aauuuuuuuuac

SEQ ID NO: 1309423 - RNA, 15 nt, Human
aauuuuuuuuaacau

SEQ ID NO: 1309424 - RNA, 17 nt, Human
aauuuuuuuuaacauuc

SEQ ID NO: 1309425 - RNA, 18 nt, Human
aauuuuuuuuaacauucc

SEQ ID NO: 1309426 - RNA, 19 nt, Human
aauuuuuuuuaacauuccu

SEQ ID NO: 1309427 - RNA, 20 nt, Human
aauuuuuuuuauuaguauug

SEQ ID NO: 1309428 - RNA, 22 nt, Human
aauuuuuuuuauuaguauuguu

SEQ ID NO: 1309429 - RNA, 23 nt, Human
aauuuuuuuuauuaguauuguug

SEQ ID NO: 1309430 - RNA, 18 nt, Human
aauuuuuuuguauuuuag

SEQ ID NO: 1309431 - RNA, 14 nt, Human
aauuuuuuuuaaca

SEQ ID NO: 1309432 - RNA, 22 nt, Human
uagauaggucagugcaaauacu

SEQ ID NO: 1309433 - RNA, 17 nt, Human
uagauaguuagaaccug

SEQ ID NO: 1309434 - RNA, 21 nt, Human
acaaauagucggauuagaaau

SEQ ID NO: 1309435 - RNA, 12 nt, Human
acaaauauuuau

SEQ ID NO: 1309436 - RNA, 18 nt, Human
acaaauauuuauuuucuu

SEQ ID NO: 1309437 - RNA, 22 nt, Human
acaaauauuuauuuucuuucug

SEQ ID NO: 1309438 - RNA, 23 nt, Human
acaaauauuuauuuucuuucugu

SEQ ID NO: 1309439 - RNA, 16 nt, Human
uagaucuggcauguua

SEQ ID NO: 1309440 - RNA, 13 nt, Human
uagaucucugaag

SEQ ID NO: 1309441 - RNA, 15 nt, Human
uagaucuggcauguu

SEQ ID NO: 1309442 - RNA, 15 nt, Human
uagaugaacucaacu

SEQ ID NO: 1309443 - RNA, 16 nt, Human
uagaugaaguuuuaca

SEQ ID NO: 1309444 - RNA, 21 nt, Human
uagaugcaguucugaagaaga

SEQ ID NO: 1309445 - RNA, 15 nt, Human
uagaugcauuugggu

SEQ ID NO: 1309446 - RNA, 19 nt, Human
uagaugcauuuggguccag

SEQ ID NO: 1309447 - RNA, 20 nt, Human
uagaugcauuuggguccagg

SEQ ID NO: 1309448 - RNA, 21 nt, Human
uagaugcauuuggguccagga

SEQ ID NO: 1309449 - RNA, 23 nt, Human
uagaugcauuuggguccaggagg

SEQ ID NO: 1309450 - RNA, 22 nt, Human
uagaugcucuaugugcuuguaa

SEQ ID NO: 1309451 - RNA, 22 nt, Human
uagaugcauuuggguccaggag

SEQ ID NO: 1309452 - RNA, 17 nt, Human
uagcaaagauaucucau

SEQ ID NO: 1309453 - RNA, 19 nt, Human
uagcaaagauaucucaucu

SEQ ID NO: 1309454 - RNA, 16 nt, Human
acaaaggagccuguga

SEQ ID NO: 1309455 - RNA, 19 nt, Human
acaaaguuuaccagaaagc

SEQ ID NO: 1309456 - RNA, 19 nt, Human
acaaaguuucaauuuguuu

SEQ ID NO: 1309457 - RNA, 13 nt, Human
acaaaggagccug

SEQ ID NO: 1309458 - RNA, 23 nt, Human
acaaaggagccugugaacccagg

SEQ ID NO: 1309459 - RNA, 14 nt, Human
acaaaggagccugu

SEQ ID NO: 1309460 - RNA, 15 nt, Human
acaaaggagccugug

SEQ ID NO: 1309461 - RNA, 18 nt, Human
acaaagcccuuccauguc

SEQ ID NO: 1309462 - RNA, 15 nt, Human
acaaagcccuuuuau

SEQ ID NO: 1309463 - RNA, 16 nt, Human
acaaagcccuuuuaua

SEQ ID NO: 1309464 - RNA, 18 nt, Human
acaaagccacuuucaauc

SEQ ID NO: 1309465 - RNA, 14 nt, Human
acaaaacugcauuu

SEQ ID NO: 1309466 - RNA, 20 nt, Human
acaaaagaagcccggcuccu

SEQ ID NO: 1309467 - RNA, 23 nt, Human
acaaaagaagcccggcuccuggu

SEQ ID NO: 1309468 - RNA, 16 nt, Human
acaaaacugcauuuca

SEQ ID NO: 1309469 - RNA, 19 nt, Human
aauuuuuuuuuccuagccc

SEQ ID NO: 1309470 - RNA, 17 nt, Human
acaaaacuacaugagaa

SEQ ID NO: 1309471 - RNA, 23 nt, Human
acaaaacuacaugagaacaaaca

SEQ ID NO: 1309472 - RNA, 16 nt, Human
acaaaacuagagacuc

SEQ ID NO: 1309473 - RNA, 16 nt, Human
uagcuacuaauuuuaa

SEQ ID NO: 1309474 - RNA, 16 nt, Human
uagccuucucuguuca

SEQ ID NO: 1309475 - RNA, 20 nt, Human
uagccuucucuguucauuuc

SEQ ID NO: 1309476 - RNA, 22 nt, Human
uagccuucucuguucauuuccu

SEQ ID NO: 1309477 - RNA, 12 nt, Human
uagccuugcuug

SEQ ID NO: 1309478 - RNA, 13 nt, Human
uagccuugcuugu

SEQ ID NO: 1309479 - RNA, 15 nt, Human
uagccuugcuuguua

SEQ ID NO: 1309480 - RNA, 14 nt, Human
uagccuugcuuguu

SEQ ID NO: 1309481 - RNA, 24 nt, Human
acaaugaacaucccuuuuucaaug

SEQ ID NO: 1309482 - RNA, 21 nt, Human
acaaugaaaacucuuugcugc

SEQ ID NO: 1309483 - RNA, 18 nt, Human
acaaugaaaacucuuugc

SEQ ID NO: 1309484 - RNA, 23 nt, Human
acaaugaauaaaaacucaaggag

SEQ ID NO: 1309485 - RNA, 15 nt, Human
acaaugacaaagcag

SEQ ID NO: 1309486 - RNA, 16 nt, Human
acaaugacaaagcaga

SEQ ID NO: 1309487 - RNA, 13 nt, Human
uagccuucucugu

SEQ ID NO: 1309488 - RNA, 14 nt, Human
uagccuucucuguu

SEQ ID NO: 1309489 - RNA, 15 nt, Human
uagccuucucuguuc

SEQ ID NO: 1309490 - RNA, 15 nt, Human
uagccuuuuuguaua

SEQ ID NO: 1309491 - RNA, 17 nt, Human
uagccuuuuuguauaaa

SEQ ID NO: 1309492 - RNA, 22 nt, Human
uagccuuuuuguauaaaauaga

SEQ ID NO: 1309493 - RNA, 19 nt, Human
uagccuuuuuuccccagac

SEQ ID NO: 1309494 - RNA, 20 nt, Human
uagccuuuuuuccccagacu

SEQ ID NO: 1309495 - RNA, 22 nt, Human
uagccuuuuuuccccagacuug

SEQ ID NO: 1309496 - RNA, 23 nt, Human
uagccuuuuuuccccagacuugu

SEQ ID NO: 1309497 - RNA, 12 nt, Human
uagcucaaugag

SEQ ID NO: 1309498 - RNA, 13 nt, Human
uagcucaaugagc

SEQ ID NO: 1309499 - RNA, 15 nt, Human
uagcucaaugagcau

SEQ ID NO: 1309500 - RNA, 16 nt, Human
uagcucaaugagcaug

SEQ ID NO: 1309501 - RNA, 17 nt, Human
uagcucaaugagcaugu

SEQ ID NO: 1309502 - RNA, 18 nt, Human
uagcucaaugagcauguu

SEQ ID NO: 1309503 - RNA, 15 nt, Human
uagcucaauuagugu

SEQ ID NO: 1309504 - RNA, 17 nt, Human
acaagcuccauuuaaac

SEQ ID NO: 1309505 - RNA, 23 nt, Human
acaagccugagggaaaggccagc

SEQ ID NO: 1309506 - RNA, 17 nt, Human
acaaguuauuuaaaucu

SEQ ID NO: 1309507 - RNA, 22 nt, Human
acaaguuauuuaaaucuguuuu

SEQ ID NO: 1309508 - RNA, 18 nt, Human
acaagcuccauuuaaaca

SEQ ID NO: 1309509 - RNA, 16 nt, Human
acaaguuggagucacu

SEQ ID NO: 1309510 - RNA, 17 nt, Human
acaaguuggagucacuc

SEQ ID NO: 1309511 - RNA, 18 nt, Human
acaaguuggagucacucu

SEQ ID NO: 1309512 - RNA, 18 nt, Human
acaaucucggcucacugc

SEQ ID NO: 1309513 - RNA, 20 nt, Human
acaaucucggcucacugcau

SEQ ID NO: 1309514 - RNA, 22 nt, Human
acaauaaaaguguccauugaaa

SEQ ID NO: 1309515 - RNA, 14 nt, Human
acaauaaaaauguu

SEQ ID NO: 1309516 - RNA, 16 nt, Human
acaauaaaaauguuua

SEQ ID NO: 1309517 - RNA, 12 nt, Human
acaauaaaacau

SEQ ID NO: 1309518 - RNA, 16 nt, Human
acaauaaaacauuaau

SEQ ID NO: 1309519 - RNA, 21 nt, Human
acaaauucugucucuggauua

SEQ ID NO: 1309520 - RNA, 18 nt, Human
acaaaugccaaauuaaaa

SEQ ID NO: 1309521 - RNA, 22 nt, Human
acaaaugccaaauuaaaaaaga

SEQ ID NO: 1309522 - RNA, 22 nt, Human
uagcaacuacagucuaaagcug

SEQ ID NO: 1309523 - RNA, 21 nt, Human
uagcaacuacagucuaaagcu

SEQ ID NO: 1309524 - RNA, 14 nt, Human
acaacagcugccug

SEQ ID NO: 1309525 - RNA, 16 nt, Human
acaacagguaaaacag

SEQ ID NO: 1309526 - RNA, 23 nt, Human
acaacaguuacauaauucacucu

SEQ ID NO: 1309527 - RNA, 21 nt, Human
acaacaugaggccacuggaga

SEQ ID NO: 1309528 - RNA, 13 nt, Human
acaagacacagug

SEQ ID NO: 1309529 - RNA, 17 nt, Human
acaaauuuacagagaca

SEQ ID NO: 1309530 - RNA, 14 nt, Human
acaaauggccuuua

SEQ ID NO: 1309531 - RNA, 14 nt, Human
acaagacacaguga

SEQ ID NO: 1309532 - RNA, 18 nt, Human
acaagagcuuaacagugu

SEQ ID NO: 1309533 - RNA, 19 nt, Human
acaagagcuuaacagugug

SEQ ID NO: 1309534 - RNA, 18 nt, Human
acaagauggaauuuauca

SEQ ID NO: 1309535 - RNA, 11 nt, Human
acaagccucug

SEQ ID NO: 1309536 - RNA, 13 nt, Human
acaagccucugcc

SEQ ID NO: 1309537 - RNA, 18 nt, Human
acaagccucugcccaggc

SEQ ID NO: 1309538 - RNA, 20 nt, Human
acaagccucugcccaggcac

SEQ ID NO: 1309539 - RNA, 23 nt, Human
acaagccucugcccaggcacugc

SEQ ID NO: 1309540 - RNA, 12 nt, Human
acaagccugagg

SEQ ID NO: 1309541 - RNA, 22 nt, Human
acaagccugagggaaaggccag

SEQ ID NO: 1309542 - RNA, 18 nt, Human
acaagauuauaauauuuu

SEQ ID NO: 1309543 - RNA, 17 nt, Human
acaagauugguguuuuu

SEQ ID NO: 1309544 - RNA, 18 nt, Human
acaagauugguguuuuuu

SEQ ID NO: 1309545 - RNA, 19 nt, Human
acaagauugguguuuuuuu

SEQ ID NO: 1309546 - RNA, 22 nt, Human
acaagauugguguuuuuuucua

SEQ ID NO: 1309547 - RNA, 24 nt, Human
acaagauugguguuuuuuucuaug

SEQ ID NO: 1309548 - RNA, 23 nt, Human
acaagauugguguuuuuuucuau

SEQ ID NO: 1309549 - RNA, 15 nt, Human
guugcccccauuucu

SEQ ID NO: 1309550 - RNA, 15 nt, Human
aaggaugugauugug

SEQ ID NO: 1309551 - RNA, 17 nt, Human
aaggaugugauugugga

SEQ ID NO: 1309552 - RNA, 22 nt, Human
aaggaugugauuguggaaugga

SEQ ID NO: 1309553 - RNA, 21 nt, Human
aaggccaauuccuauacgcag

SEQ ID NO: 1309554 - RNA, 23 nt, Human
aaggcuacuucggggcugggaag

SEQ ID NO: 1309555 - RNA, 20 nt, Human
aaggcuacuucggggcuggg

SEQ ID NO: 1309556 - RNA, 21 nt, Human
guugaugccugugaacugaac

SEQ ID NO: 1309557 - RNA, 19 nt, Human
aaggaugccccgucccccu

SEQ ID NO: 1309558 - RNA, 19 nt, Human
aaggaugaagggcccgaga

SEQ ID NO: 1309559 - RNA, 16 nt, Human
guugcugcuucaauuu

SEQ ID NO: 1309560 - RNA, 18 nt, Human
guugcugcuucucccagg

SEQ ID NO: 1309561 - RNA, 22 nt, Human
guugcugcuucucccaggcaag

SEQ ID NO: 1309562 - RNA, 23 nt, Human
guugcugcuucucccaggcaagg

SEQ ID NO: 1309563 - RNA, 16 nt, Human
guuggucuguacugau

SEQ ID NO: 1309564 - RNA, 15 nt, Human
guuggucuguacuga

SEQ ID NO: 1309565 - RNA, 12 nt, Human
guuguauucauu

SEQ ID NO: 1309566 - RNA, 16 nt, Human
guuguauuuaacagaa

SEQ ID NO: 1309567 - RNA, 18 nt, Human
guuguaccgcaaugugac

SEQ ID NO: 1309568 - RNA, 13 nt, Human
guugguggugcug

SEQ ID NO: 1309569 - RNA, 17 nt, Human
guuguaauauuucuuca

SEQ ID NO: 1309570 - RNA, 20 nt, Human
guuguagagaaaacaugcag

SEQ ID NO: 1309571 - RNA, 18 nt, Human
guuguacuuuggaauucu

SEQ ID NO: 1309572 - RNA, 17 nt, Human
guuggugcacagcacaa

SEQ ID NO: 1309573 - RNA, 21 nt, Human
guuuauguuccauuaaacgau

SEQ ID NO: 1309574 - RNA, 22 nt, Human
guuuauguuccauuaaacgauu

SEQ ID NO: 1309575 - RNA, 14 nt, Human
guuuauuaaucuua

SEQ ID NO: 1309576 - RNA, 18 nt, Human
guuuauuaaucuuagugu

SEQ ID NO: 1309577 - RNA, 20 nt, Human
guuuauuaaucuuaguguau

SEQ ID NO: 1309578 - RNA, 21 nt, Human
guuuauuaaucuuaguguaug

SEQ ID NO: 1309579 - RNA, 18 nt, Human
guuuauuaagcaucagaa

SEQ ID NO: 1309580 - RNA, 22 nt, Human
guuuauuaaucuuaguguauga

SEQ ID NO: 1309581 - RNA, 13 nt, Human
guuuaauguuuug

SEQ ID NO: 1309582 - RNA, 18 nt, Human
guuuaauuuuuauuucuu

SEQ ID NO: 1309583 - RNA, 20 nt, Human
guuuaauuuuuauuucuucc

SEQ ID NO: 1309584 - RNA, 19 nt, Human
guuuacaaaaucagguaac

SEQ ID NO: 1309585 - RNA, 20 nt, Human
guuuacaaaaauuucuguaa

SEQ ID NO: 1309586 - RNA, 16 nt, Human
guuuacacucuuugua

SEQ ID NO: 1309587 - RNA, 15 nt, Human
guuuauguaauuuca

SEQ ID NO: 1309588 - RNA, 20 nt, Human
guuuaagacauuuuuggaag

SEQ ID NO: 1309589 - RNA, 17 nt, Human
guuuaagccaaaacaau

SEQ ID NO: 1309590 - RNA, 20 nt, Human
guuuaagccaaaacaauguu

SEQ ID NO: 1309591 - RNA, 11 nt, Human
guuuaaaacuu

SEQ ID NO: 1309592 - RNA, 19 nt, Human
guuuaaaagacacacuugu

SEQ ID NO: 1309593 - RNA, 23 nt, Human
guuuaaaagacacacuuguccac

SEQ ID NO: 1309594 - RNA, 13 nt, Human
guuuaaagaaagu

SEQ ID NO: 1309595 - RNA, 20 nt, Human
guuuucuuaaccagaucauu

SEQ ID NO: 1309596 - RNA, 12 nt, Human
guuuuauaagca

SEQ ID NO: 1309597 - RNA, 20 nt, Human
guuuuauaagcaucauuauu

SEQ ID NO: 1309598 - RNA, 22 nt, Human
guuuuauaagcaucauuauuua

SEQ ID NO: 1309599 - RNA, 13 nt, Human
guuuuagguucua

SEQ ID NO: 1309600 - RNA, 15 nt, Human
guuuuagguucuaaa

SEQ ID NO: 1309601 - RNA, 16 nt, Human
guuuuagguucuaaag

SEQ ID NO: 1309602 - RNA, 17 nt, Human
guuuuagguucuaaagu

SEQ ID NO: 1309603 - RNA, 21 nt, Human
guuuuagguucuaaaguucua

SEQ ID NO: 1309604 - RNA, 23 nt, Human
guuuuauaagcaucauuauuuau

SEQ ID NO: 1309605 - RNA, 20 nt, Human
guuuuacaauaguucugugg

SEQ ID NO: 1309606 - RNA, 16 nt, Human
guuuuacaauaguucu

SEQ ID NO: 1309607 - RNA, 13 nt, Human
guuuuacaauagu

SEQ ID NO: 1309608 - RNA, 11 nt, Human
guuuuacaaua

SEQ ID NO: 1309609 - RNA, 23 nt, Human
guuuuacaauaaaaucuugaaaa

SEQ ID NO: 1309610 - RNA, 16 nt, Human
guuuuacaaguuggag

SEQ ID NO: 1309611 - RNA, 20 nt, Human
guuugggccccagaggcugg

SEQ ID NO: 1309612 - RNA, 20 nt, Human
guuuuacaaguuggagucac

SEQ ID NO: 1309613 - RNA, 16 nt, Human
guuuuacagauuuauu

SEQ ID NO: 1309614 - RNA, 22 nt, Human
guuuuacagauuuauuccuuug

SEQ ID NO: 1309615 - RNA, 12 nt, Human
guuuuacauugu

SEQ ID NO: 1309616 - RNA, 21 nt, Human
guuuuacauuguugagcuauu

SEQ ID NO: 1309617 - RNA, 20 nt, Human
guuuuagauuuucugguucu

SEQ ID NO: 1309618 - RNA, 21 nt, Human
guuuuagauuuucugguucua

SEQ ID NO: 1309619 - RNA, 12 nt, Human
guuuuagguucu

SEQ ID NO: 1309620 - RNA, 16 nt, Human
aaguaauacaaacuaa

SEQ ID NO: 1309621 - RNA, 20 nt, Human
aaguaauaaaauucaacaaa

SEQ ID NO: 1309622 - RNA, 14 nt, Human
guuucuaagauucu

SEQ ID NO: 1309623 - RNA, 15 nt, Human
guuucuaagauucua

SEQ ID NO: 1309624 - RNA, 16 nt, Human
guuucuaagauucuaa

SEQ ID NO: 1309625 - RNA, 17 nt, Human
guuucugucguuaaaaa

SEQ ID NO: 1309626 - RNA, 15 nt, Human
guuugauuucauuaa

SEQ ID NO: 1309627 - RNA, 22 nt, Human
guuucugucguuaaaaacagau

SEQ ID NO: 1309628 - RNA, 12 nt, Human
guuucuguucca

SEQ ID NO: 1309629 - RNA, 13 nt, Human
guuucuguuccaa

SEQ ID NO: 1309630 - RNA, 15 nt, Human
guuucuguuccaaau

SEQ ID NO: 1309631 - RNA, 14 nt, Human
guuucuguuccaaa

SEQ ID NO: 1309632 - RNA, 13 nt, Human
guuuggcuuucag

SEQ ID NO: 1309633 - RNA, 18 nt, Human
guuuggcuuucagggagg

SEQ ID NO: 1309634 - RNA, 18 nt, Human
guuugcaaaaaauguuuu

SEQ ID NO: 1309635 - RNA, 17 nt, Human
guuugcaccuuucuagu

SEQ ID NO: 1309636 - RNA, 22 nt, Human
guuugccuccguccccugccca

SEQ ID NO: 1309637 - RNA, 21 nt, Human
guuucaaacauauauaacaau

SEQ ID NO: 1309638 - RNA, 17 nt, Human
aaggcuucucucugugg

SEQ ID NO: 1309639 - RNA, 18 nt, Human
aaggcuucucucuguggg

SEQ ID NO: 1309640 - RNA, 14 nt, Human
aaggcuugggauuu

SEQ ID NO: 1309641 - RNA, 19 nt, Human
aaggcuugggauuugcugu

SEQ ID NO: 1309642 - RNA, 17 nt, Human
aaggcuuguugugcuuu

SEQ ID NO: 1309643 - RNA, 19 nt, Human
aaggcuuguugugcuuuua

SEQ ID NO: 1309644 - RNA, 20 nt, Human
aaggcuuguugugcuuuuag

SEQ ID NO: 1309645 - RNA, 14 nt, Human
aaggcuuucucuac

SEQ ID NO: 1309646 - RNA, 21 nt, Human
aaggcuuugcccugcugcccu

SEQ ID NO: 1309647 - RNA, 22 nt, Human
aaggcuuugcccugcugcccuc

SEQ ID NO: 1309648 - RNA, 17 nt, Human
aaggggaauugaggaca

SEQ ID NO: 1309649 - RNA, 16 nt, Human
aagggguuggauugca

SEQ ID NO: 1309650 - RNA, 18 nt, Human
aagggcuuuguuuugcac

SEQ ID NO: 1309651 - RNA, 20 nt, Human
aaguaaaaacaaagaaauua

SEQ ID NO: 1309652 - RNA, 13 nt, Human
aaguaaaaacaaa

SEQ ID NO: 1309653 - RNA, 22 nt, Human
aaguaaaaacaaagaaauuaug

SEQ ID NO: 1309654 - RNA, 11 nt, Human
aagguuuuuuu

SEQ ID NO: 1309655 - RNA, 17 nt, Human
aagguuuuuuuucaguu

SEQ ID NO: 1309656 - RNA, 14 nt, Human
aaguaauaaaauuc

SEQ ID NO: 1309657 - RNA, 13 nt, Human
aagguacuucaaa

SEQ ID NO: 1309658 - RNA, 18 nt, Human
aagguaaaaugccaugau

SEQ ID NO: 1309659 - RNA, 16 nt, Human
aagguaaauaaaaaga

SEQ ID NO: 1309660 - RNA, 19 nt, Human
aagguaaauaaaaagaaag

SEQ ID NO: 1309661 - RNA, 18 nt, Human
aagguacaagaagcauuu

SEQ ID NO: 1309662 - RNA, 19 nt, Human
aagguacaagaagcauuuu

SEQ ID NO: 1309663 - RNA, 22 nt, Human
aagguacuguaugaucaaaugu

SEQ ID NO: 1309664 - RNA, 21 nt, Human
aagguacuguaugaucaaaug

SEQ ID NO: 1309665 - RNA, 20 nt, Human
aagguacuguaugaucaaau

SEQ ID NO: 1309666 - RNA, 19 nt, Human
aagguacuguaugaucaaa

SEQ ID NO: 1309667 - RNA, 17 nt, Human
aagguacuguaugauca

SEQ ID NO: 1309668 - RNA, 15 nt, Human
aagguacuguaugau

SEQ ID NO: 1309669 - RNA, 14 nt, Human
aagguacuguauga

SEQ ID NO: 1309670 - RNA, 20 nt, Human
aagguuuuccucuucuauuu

SEQ ID NO: 1309671 - RNA, 12 nt, Human
aaggguaaacaa

SEQ ID NO: 1309672 - RNA, 13 nt, Human
aaggguaaacaau

SEQ ID NO: 1309673 - RNA, 16 nt, Human
aaggguaaacaauaua

SEQ ID NO: 1309674 - RNA, 15 nt, Human
aaggguaaacaauau

SEQ ID NO: 1309675 - RNA, 14 nt, Human
aagguaaaaugcca

SEQ ID NO: 1309676 - RNA, 22 nt, Human
aagguaaaaugccaugaugccu

SEQ ID NO: 1309677 - RNA, 19 nt, Human
aagccuccuuagaaaaaaa

SEQ ID NO: 1309678 - RNA, 22 nt, Human
guucauauguaccauguacaug

SEQ ID NO: 1309679 - RNA, 15 nt, Human
aagccucugcccagg

SEQ ID NO: 1309680 - RNA, 13 nt, Human
guucauagcccag

SEQ ID NO: 1309681 - RNA, 14 nt, Human
guucauagcccagu

SEQ ID NO: 1309682 - RNA, 19 nt, Human
guucauauguaccauguac

SEQ ID NO: 1309683 - RNA, 20 nt, Human
aagccugggggccuggcugg

SEQ ID NO: 1309684 - RNA, 21 nt, Human
aagccugggggccuggcuggc

SEQ ID NO: 1309685 - RNA, 23 nt, Human
aagccugggggccuggcuggcug

SEQ ID NO: 1309686 - RNA, 22 nt, Human
aagccuggguuugguguauggu

SEQ ID NO: 1309687 - RNA, 15 nt, Human
aagccugggggccug

SEQ ID NO: 1309688 - RNA, 16 nt, Human
aagccugggggccugg

SEQ ID NO: 1309689 - RNA, 17 nt, Human
aagccugggggccuggc

SEQ ID NO: 1309690 - RNA, 18 nt, Human
aagccugggggccuggcu

SEQ ID NO: 1309691 - RNA, 19 nt, Human
aagccugggggccuggcug

SEQ ID NO: 1309692 - RNA, 21 nt, Human
aagccuggccuacaugguuga

SEQ ID NO: 1309693 - RNA, 16 nt, Human
guuauuuguaauagau

SEQ ID NO: 1309694 - RNA, 21 nt, Human
guuauuucccuacauuaaaca

SEQ ID NO: 1309695 - RNA, 22 nt, Human
guuauuugaaaacauguuuauu

SEQ ID NO: 1309696 - RNA, 17 nt, Human
guuauuuguaauagaug

SEQ ID NO: 1309697 - RNA, 23 nt, Human
guuauuucccuacauuaaacaug

SEQ ID NO: 1309698 - RNA, 11 nt, Human
guuauuuaaau

SEQ ID NO: 1309699 - RNA, 13 nt, Human
guuagauuaagaa

SEQ ID NO: 1309700 - RNA, 16 nt, Human
guuagauuaagaaaua

SEQ ID NO: 1309701 - RNA, 13 nt, Human
guuagcagacagg

SEQ ID NO: 1309702 - RNA, 18 nt, Human
guuagcagacaggccccg

SEQ ID NO: 1309703 - RNA, 17 nt, Human
guuagccaauauuuuuc

SEQ ID NO: 1309704 - RNA, 21 nt, Human
guuagcuaauaaaaagcuuuu

SEQ ID NO: 1309705 - RNA, 18 nt, Human
guuagccuuuuuucccca

SEQ ID NO: 1309706 - RNA, 12 nt, Human
guuagcuccugu

SEQ ID NO: 1309707 - RNA, 14 nt, Human
guuaguaauaccuc

SEQ ID NO: 1309708 - RNA, 14 nt, Human
guuagcuccugugg

SEQ ID NO: 1309709 - RNA, 15 nt, Human
guuagcuccuguggc

SEQ ID NO: 1309710 - RNA, 16 nt, Human
guuagcuccuguggcc

SEQ ID NO: 1309711 - RNA, 23 nt, Human
guuagccuuuuuuccccagacuu

SEQ ID NO: 1309712 - RNA, 14 nt, Human
guuaguaucuuuug

SEQ ID NO: 1309713 - RNA, 17 nt, Human
guuaguaucuuuugaua

SEQ ID NO: 1309714 - RNA, 12 nt, Human
guuagucauuug

SEQ ID NO: 1309715 - RNA, 22 nt, Human
guuagucauuugcugagcaugu

SEQ ID NO: 1309716 - RNA, 18 nt, Human
guuaguaucuuuugauau

SEQ ID NO: 1309717 - RNA, 17 nt, Human
guuaguuaccuuauagu

SEQ ID NO: 1309718 - RNA, 22 nt, Human
guuaguuaccuuauaguuacug

SEQ ID NO: 1309719 - RNA, 23 nt, Human
guuaguuaccuuauaguuacugu

SEQ ID NO: 1309720 - RNA, 18 nt, Human
guguuuuaaaaugagaaa

SEQ ID NO: 1309721 - RNA, 18 nt, Human
guguuuccacagccugca

SEQ ID NO: 1309722 - RNA, 14 nt, Human
guguuuccaucuca

SEQ ID NO: 1309723 - RNA, 14 nt, Human
guguuuggcuuuca

SEQ ID NO: 1309724 - RNA, 12 nt, Human
guuaagccuuug

SEQ ID NO: 1309725 - RNA, 13 nt, Human
guuaagccuuugg

SEQ ID NO: 1309726 - RNA, 16 nt, Human
guuaagccuuuggaaa

SEQ ID NO: 1309727 - RNA, 16 nt, Human
guguuuuaauuguaaa

SEQ ID NO: 1309728 - RNA, 15 nt, Human
guuaagcucugcuau

SEQ ID NO: 1309729 - RNA, 14 nt, Human
guguuuuaauugua

SEQ ID NO: 1309730 - RNA, 13 nt, Human
guguuuuaauuua

SEQ ID NO: 1309731 - RNA, 14 nt, Human
guguuuuaauuuaa

SEQ ID NO: 1309732 - RNA, 16 nt, Human
guuaaucuugcuuucu

SEQ ID NO: 1309733 - RNA, 23 nt, Human
guuaaguugagauaguuuucauc

SEQ ID NO: 1309734 - RNA, 13 nt, Human
guuaaucuugcuu

SEQ ID NO: 1309735 - RNA, 21 nt, Human
guuaaucuugcuuucuuuguu

SEQ ID NO: 1309736 - RNA, 22 nt, Human
guuaaguugauggugaugaaau

SEQ ID NO: 1309737 - RNA, 12 nt, Human
guuaagcucugc

SEQ ID NO: 1309738 - RNA, 14 nt, Human
guugacaugggaca

SEQ ID NO: 1309739 - RNA, 18 nt, Human
guugacaugggacauuug

SEQ ID NO: 1309740 - RNA, 13 nt, Human
guugacauucuga

SEQ ID NO: 1309741 - RNA, 14 nt, Human
guugacauucugaa

SEQ ID NO: 1309742 - RNA, 15 nt, Human
guugacauucugaau

SEQ ID NO: 1309743 - RNA, 17 nt, Human
guugacauucugaaugc

SEQ ID NO: 1309744 - RNA, 18 nt, Human
guugacauucugaaugcu

SEQ ID NO: 1309745 - RNA, 19 nt, Human
guugacauucugaaugcuu

SEQ ID NO: 1309746 - RNA, 14 nt, Human
guugaggccacugu

SEQ ID NO: 1309747 - RNA, 21 nt, Human
guugaggccacuguguuccuu

SEQ ID NO: 1309748 - RNA, 19 nt, Human
guugaggccacuguguucc

SEQ ID NO: 1309749 - RNA, 16 nt, Human
guucuuacugcuuaau

SEQ ID NO: 1309750 - RNA, 14 nt, Human
guucuuacugcuug

SEQ ID NO: 1309751 - RNA, 16 nt, Human
guucuuagcucaauga

SEQ ID NO: 1309752 - RNA, 19 nt, Human
guucuuagcucaaugagca

SEQ ID NO: 1309753 - RNA, 17 nt, Human
guucuuagcucaaugag

SEQ ID NO: 1309754 - RNA, 18 nt, Human
guucuuguaauuuuacac

SEQ ID NO: 1309755 - RNA, 12 nt, Human
guucuuguauuu

SEQ ID NO: 1309756 - RNA, 13 nt, Human
guucuuguaauuu

SEQ ID NO: 1309757 - RNA, 13 nt, Human
guucuuguuggug

SEQ ID NO: 1309758 - RNA, 14 nt, Human
guucuuguuggugc

SEQ ID NO: 1309759 - RNA, 15 nt, Human
guucuuguuggugca

SEQ ID NO: 1309760 - RNA, 23 nt, Human
guucuuuaaaauguaaagccaug

SEQ ID NO: 1309761 - RNA, 23 nt, Human
guucugguaugaacuugaggaca

SEQ ID NO: 1309762 - RNA, 17 nt, Human
guucugguccuuuuugg

SEQ ID NO: 1309763 - RNA, 22 nt, Human
guucuuaccuguaugucuccag

SEQ ID NO: 1309764 - RNA, 17 nt, Human
guucuccugcugcuccc

SEQ ID NO: 1309765 - RNA, 18 nt, Human
guucuccugcugcucccu

SEQ ID NO: 1309766 - RNA, 21 nt, Human
guucuccugcugcucccucag

SEQ ID NO: 1309767 - RNA, 22 nt, Human
guucuccugcugcucccucaga

SEQ ID NO: 1309768 - RNA, 13 nt, Human
guucuccuuuucc

SEQ ID NO: 1309769 - RNA, 18 nt, Human
guucuccuuuuccucucu

SEQ ID NO: 1309770 - RNA, 22 nt, Human
guucuccuuuuccucucucccg

SEQ ID NO: 1309771 - RNA, 20 nt, Human
guucuaccucaggcagcuca

SEQ ID NO: 1309772 - RNA, 21 nt, Human
guucuaccucaggcagcucaa

SEQ ID NO: 1309773 - RNA, 12 nt, Human
guucuagaaaaa

SEQ ID NO: 1309774 - RNA, 13 nt, Human
guucuagaaaaac

SEQ ID NO: 1309775 - RNA, 14 nt, Human
guucuagaaaaaca

SEQ ID NO: 1309776 - RNA, 18 nt, Human
guucuagaaaaacaggca

SEQ ID NO: 1309777 - RNA, 21 nt, Human
guucuagaaaaacaggcacuu

SEQ ID NO: 1309778 - RNA, 20 nt, Human
guucuagacauggagguucu

SEQ ID NO: 1309779 - RNA, 21 nt, Human
guucuagacauggagguucua

SEQ ID NO: 1309780 - RNA, 22 nt, Human
guucuagacauggagguucuaa

SEQ ID NO: 1309781 - RNA, 23 nt, Human
guucuagacauggagguucuaag

SEQ ID NO: 1309782 - RNA, 22 nt, Human
guucuccguuagcuccuguggc

SEQ ID NO: 1309783 - RNA, 23 nt, Human
guucuccguuagcuccuguggcc

SEQ ID NO: 1309784 - RNA, 17 nt, Human
aagcuaucguaaaauua

SEQ ID NO: 1309785 - RNA, 18 nt, Human
aagcuccucuccccagcc

SEQ ID NO: 1309786 - RNA, 22 nt, Human
aagcucgauguggucacagcug

SEQ ID NO: 1309787 - RNA, 23 nt, Human
aagcucgauguggucacagcugu

SEQ ID NO: 1309788 - RNA, 19 nt, Human
aagcuccucuccccagccc

SEQ ID NO: 1309789 - RNA, 20 nt, Human
aagcuccucuccccagccca

SEQ ID NO: 1309790 - RNA, 21 nt, Human
aagcuccucuccccagcccag

SEQ ID NO: 1309791 - RNA, 22 nt, Human
aagcuccucuccccagcccaga

SEQ ID NO: 1309792 - RNA, 23 nt, Human
aagcuccucuccccagcccagag

SEQ ID NO: 1309793 - RNA, 14 nt, Human
aagcugacuuggcu

SEQ ID NO: 1309794 - RNA, 15 nt, Human
aagcugacuuggcug

SEQ ID NO: 1309795 - RNA, 16 nt, Human
aagcugacuuggcugg

SEQ ID NO: 1309796 - RNA, 17 nt, Human
aagcugacuuggcuggu

SEQ ID NO: 1309797 - RNA, 18 nt, Human
aagcugacuuggcuggug

SEQ ID NO: 1309798 - RNA, 20 nt, Human
aagcugacuuggcuggugug

SEQ ID NO: 1309799 - RNA, 19 nt, Human
aagcugacuuggcuggugu

SEQ ID NO: 1309800 - RNA, 13 nt, Human
aagcugaggugcc

SEQ ID NO: 1309801 - RNA, 17 nt, Human
aagcugaggugcccagg

SEQ ID NO: 1309802 - RNA, 18 nt, Human
aagcugaggugcccagga

SEQ ID NO: 1309803 - RNA, 19 nt, Human
aagcugaggugcccaggag

SEQ ID NO: 1309804 - RNA, 13 nt, Human
aagcugaguauua

SEQ ID NO: 1309805 - RNA, 20 nt, Human
aagcugaggugcccaggaga

SEQ ID NO: 1309806 - RNA, 18 nt, Human
aagcuucaaacugcauga

SEQ ID NO: 1309807 - RNA, 19 nt, Human
aagcuucagugcugccgau

SEQ ID NO: 1309808 - RNA, 15 nt, Human
aagcuuccaugauuc

SEQ ID NO: 1309809 - RNA, 20 nt, Human
aagcuuccaugauucuauuu

SEQ ID NO: 1309810 - RNA, 15 nt, Human
guuccccaagacauu

SEQ ID NO: 1309811 - RNA, 15 nt, Human
guuccccuuccacug

SEQ ID NO: 1309812 - RNA, 22 nt, Human
guuccccuuccacugagggcag

SEQ ID NO: 1309813 - RNA, 17 nt, Human
guuccccuuugcuucau

SEQ ID NO: 1309814 - RNA, 16 nt, Human
guucccauuucagcug

SEQ ID NO: 1309815 - RNA, 20 nt, Human
guucccuacuuccugugacu

SEQ ID NO: 1309816 - RNA, 19 nt, Human
guucccguuucuccaccua

SEQ ID NO: 1309817 - RNA, 14 nt, Human
guucccguuucucc

SEQ ID NO: 1309818 - RNA, 16 nt, Human
guucccguuucuccac

SEQ ID NO: 1309819 - RNA, 18 nt, Human
guucccguuucuccaccu

SEQ ID NO: 1309820 - RNA, 13 nt, Human
guucccucccaga

SEQ ID NO: 1309821 - RNA, 17 nt, Human
guuccauuaaacgauuu

SEQ ID NO: 1309822 - RNA, 21 nt, Human
guucccaagagcaucaugccu

SEQ ID NO: 1309823 - RNA, 19 nt, Human
guucccaagcucagaggcg

SEQ ID NO: 1309824 - RNA, 23 nt, Human
guucccaagagcaucaugccucu

SEQ ID NO: 1309825 - RNA, 17 nt, Human
guucccacauuaaagaa

SEQ ID NO: 1309826 - RNA, 21 nt, Human
guucccacauuaaagaagacc

SEQ ID NO: 1309827 - RNA, 18 nt, Human
guucccacauuaaagaag

SEQ ID NO: 1309828 - RNA, 20 nt, Human
guucccaguuggagcuccag

SEQ ID NO: 1309829 - RNA, 16 nt, Human
aagcuuccaugauucu

SEQ ID NO: 1309830 - RNA, 14 nt, Human
aagcuuuaucuauu

SEQ ID NO: 1309831 - RNA, 21 nt, Human
aagcuuucagaauaugucagu

SEQ ID NO: 1309832 - RNA, 22 nt, Human
aagcuuucauguaaacugugca

SEQ ID NO: 1309833 - RNA, 23 nt, Human
aagcuuucauguaaacugugcac

SEQ ID NO: 1309834 - RNA, 12 nt, Human
aagcuuuccugc

SEQ ID NO: 1309835 - RNA, 16 nt, Human
aagcuuucagaauaug

SEQ ID NO: 1309836 - RNA, 16 nt, Human
aagcuuuccugcccca

SEQ ID NO: 1309837 - RNA, 14 nt, Human
guguuggucuguac

SEQ ID NO: 1309838 - RNA, 20 nt, Human
guguuggacaagcuucugag

SEQ ID NO: 1309839 - RNA, 13 nt, Human
guguuucacaguu

SEQ ID NO: 1309840 - RNA, 21 nt, Human
guguuucacaguuugaaauaa

SEQ ID NO: 1309841 - RNA, 12 nt, Human
guguugucucua

SEQ ID NO: 1309842 - RNA, 15 nt, Human
guguugucucuugag

SEQ ID NO: 1309843 - RNA, 18 nt, Human
guguguaugcgugugugu

SEQ ID NO: 1309844 - RNA, 14 nt, Human
guguguauauggac

SEQ ID NO: 1309845 - RNA, 12 nt, Human
gugugaggccag

SEQ ID NO: 1309846 - RNA, 19 nt, Human
guguguccacgacugucuc

SEQ ID NO: 1309847 - RNA, 20 nt, Human
guguguccacgacugucucc

SEQ ID NO: 1309848 - RNA, 16 nt, Human
gugugucccccucugu

SEQ ID NO: 1309849 - RNA, 17 nt, Human
gugugucccccucuguc

SEQ ID NO: 1309850 - RNA, 18 nt, Human
gugugucccccucugucc

SEQ ID NO: 1309851 - RNA, 15 nt, Human
gugugucugcucagu

SEQ ID NO: 1309852 - RNA, 16 nt, Human
gugugucugcucagua

SEQ ID NO: 1309853 - RNA, 15 nt, Human
gugugucuguucacu

SEQ ID NO: 1309854 - RNA, 22 nt, Human
gugugucuguucacuuuuccuc

SEQ ID NO: 1309855 - RNA, 14 nt, Human
gugugucuuaauua

SEQ ID NO: 1309856 - RNA, 21 nt, Human
gugugucuuaauuauuauuug

SEQ ID NO: 1309857 - RNA, 15 nt, Human
guguugauacuguug

SEQ ID NO: 1309858 - RNA, 16 nt, Human
guguugauacuguugc

SEQ ID NO: 1309859 - RNA, 17 nt, Human
guguugauacuguugca

SEQ ID NO: 1309860 - RNA, 18 nt, Human
guguugauacuguugcac

SEQ ID NO: 1309861 - RNA, 20 nt, Human
guguugauacuguugcacgu

SEQ ID NO: 1309862 - RNA, 21 nt, Human
guguugauacuguugcacgug

SEQ ID NO: 1309863 - RNA, 23 nt, Human
guguugauacuguugcacgugug

SEQ ID NO: 1309864 - RNA, 17 nt, Human
guguugccaaauauguc

SEQ ID NO: 1309865 - RNA, 19 nt, Human
guguugccaaauauguccu

SEQ ID NO: 1309866 - RNA, 20 nt, Human
guguugccaaauauguccug

SEQ ID NO: 1309867 - RNA, 14 nt, Human
guguugccaagcuc

SEQ ID NO: 1309868 - RNA, 18 nt, Human
guguugccaagcuccaag

SEQ ID NO: 1309869 - RNA, 17 nt, Human
gugucuuuagauagccc

SEQ ID NO: 1309870 - RNA, 18 nt, Human
gugucuuucacagcuccu

SEQ ID NO: 1309871 - RNA, 19 nt, Human
gugucuuuagauagcccug

SEQ ID NO: 1309872 - RNA, 13 nt, Human
aagcaauaugcau

SEQ ID NO: 1309873 - RNA, 19 nt, Human
aagcaauaugcauuuaaau

SEQ ID NO: 1309874 - RNA, 17 nt, Human
gugugaaaaugugugug

SEQ ID NO: 1309875 - RNA, 16 nt, Human
gugucuuuuuuuguau

SEQ ID NO: 1309876 - RNA, 20 nt, Human
gugugaaacuuucauuccuu

SEQ ID NO: 1309877 - RNA, 21 nt, Human
gugugagaagugaaugcuggg

SEQ ID NO: 1309878 - RNA, 22 nt, Human
gugugagaagugaaugcuggga

SEQ ID NO: 1309879 - RNA, 12 nt, Human
gugugagacugg

SEQ ID NO: 1309880 - RNA, 14 nt, Human
aagagguuuuaaag

SEQ ID NO: 1309881 - RNA, 18 nt, Human
aagagguuuuaaagcuuc

SEQ ID NO: 1309882 - RNA, 13 nt, Human
aagaguagaaacu

SEQ ID NO: 1309883 - RNA, 20 nt, Human
aagaguagaaacugcaggga

SEQ ID NO: 1309884 - RNA, 13 nt, Human
aagaguaaucaau

SEQ ID NO: 1309885 - RNA, 14 nt, Human
gugguuucauguua

SEQ ID NO: 1309886 - RNA, 23 nt, Human
gugguuuuagauuuucugguucu

SEQ ID NO: 1309887 - RNA, 17 nt, Human
aagagguguuuuuucua

SEQ ID NO: 1309888 - RNA, 17 nt, Human
aagagguguuauuugga

SEQ ID NO: 1309889 - RNA, 19 nt, Human
aagaucuguccucagccuu

SEQ ID NO: 1309890 - RNA, 20 nt, Human
aagaucuguccucagccuug

SEQ ID NO: 1309891 - RNA, 19 nt, Human
aagauauuuuaaaaucugu

SEQ ID NO: 1309892 - RNA, 16 nt, Human
aagauaugggacauuu

SEQ ID NO: 1309893 - RNA, 19 nt, Human
aagauaugggacauuuuug

SEQ ID NO: 1309894 - RNA, 23 nt, Human
aagaucuuagauucucugugucu

SEQ ID NO: 1309895 - RNA, 11 nt, Human
aagaucuuuua

SEQ ID NO: 1309896 - RNA, 15 nt, Human
aagaucuuuuauuuu

SEQ ID NO: 1309897 - RNA, 17 nt, Human
aagaucuuuuauuuugc

SEQ ID NO: 1309898 - RNA, 20 nt, Human
aagaucuguuuugaaggcaa

SEQ ID NO: 1309899 - RNA, 21 nt, Human
aagaucuguuuugaaggcaaa

SEQ ID NO: 1309900 - RNA, 22 nt, Human
aagaucuguuuugaaggcaaaa

SEQ ID NO: 1309901 - RNA, 13 nt, Human
aagaucuuagauu

SEQ ID NO: 1309902 - RNA, 14 nt, Human
aagaucuuagauuc

SEQ ID NO: 1309903 - RNA, 15 nt, Human
aagaucuuagauucu

SEQ ID NO: 1309904 - RNA, 16 nt, Human
aagaucuuagauucuc

SEQ ID NO: 1309905 - RNA, 17 nt, Human
aagaucuuagauucucu

SEQ ID NO: 1309906 - RNA, 22 nt, Human
aagcaaagacuuuccucuuagu

SEQ ID NO: 1309907 - RNA, 12 nt, Human
aagcaaagcaca

SEQ ID NO: 1309908 - RNA, 15 nt, Human
aagcaaagcacagag

SEQ ID NO: 1309909 - RNA, 17 nt, Human
aagcaaagcacagagag

SEQ ID NO: 1309910 - RNA, 14 nt, Human
aagaugugauauuc

SEQ ID NO: 1309911 - RNA, 16 nt, Human
aagaugugauauucua

SEQ ID NO: 1309912 - RNA, 17 nt, Human
aagaugugauauucuaa

SEQ ID NO: 1309913 - RNA, 18 nt, Human
aagaugugauauucuaag

SEQ ID NO: 1309914 - RNA, 19 nt, Human
aagaugugauauucuaaga

SEQ ID NO: 1309915 - RNA, 20 nt, Human
aagaugugauauucuaagac

SEQ ID NO: 1309916 - RNA, 18 nt, Human
aagaucuuuuauuuugcc

SEQ ID NO: 1309917 - RNA, 23 nt, Human
aagaugcacuuugcuuuaauaua

SEQ ID NO: 1309918 - RNA, 15 nt, Human
aagaugccacauuca

SEQ ID NO: 1309919 - RNA, 16 nt, Human
aagaugccacauucaa

SEQ ID NO: 1309920 - RNA, 22 nt, Human
aagaugccacauucaaaauagg

SEQ ID NO: 1309921 - RNA, 16 nt, Human
aagcaaagcacagaga

SEQ ID NO: 1309922 - RNA, 18 nt, Human
aagcaaccucaguaauuu

SEQ ID NO: 1309923 - RNA, 19 nt, Human
aagcaaccucaguaauuua

SEQ ID NO: 1309924 - RNA, 20 nt, Human
aagcaaccucaguaauuuag

SEQ ID NO: 1309925 - RNA, 21 nt, Human
aagcaaccucaguaauuuaga

SEQ ID NO: 1309926 - RNA, 22 nt, Human
aagcaaccucaguaauuuagaa

SEQ ID NO: 1309927 - RNA, 19 nt, Human
aagcaacuaggccuucagu

SEQ ID NO: 1309928 - RNA, 23 nt, Human
aagcaagaaucagagaaggaaca

SEQ ID NO: 1309929 - RNA, 17 nt, Human
aagcaagaaucagagaa

SEQ ID NO: 1309930 - RNA, 22 nt, Human
aagcaagaggccguggcugcug

SEQ ID NO: 1309931 - RNA, 19 nt, Human
aagcaaguucgucuguugu

SEQ ID NO: 1309932 - RNA, 17 nt, Human
gugggaggugagaccac

SEQ ID NO: 1309933 - RNA, 15 nt, Human
gugggaggguaccag

SEQ ID NO: 1309934 - RNA, 16 nt, Human
gugggaggguaccagc

SEQ ID NO: 1309935 - RNA, 20 nt, Human
gugggaggguaccagcagaa

SEQ ID NO: 1309936 - RNA, 19 nt, Human
gugggacggugcccaagcc

SEQ ID NO: 1309937 - RNA, 20 nt, Human
gugggacggugcccaagcca

SEQ ID NO: 1309938 - RNA, 21 nt, Human
gugggagaccggccugccagg

SEQ ID NO: 1309939 - RNA, 20 nt, Human
gugggacgggaugguucugg

SEQ ID NO: 1309940 - RNA, 19 nt, Human
guggcgugaucucagcuca

SEQ ID NO: 1309941 - RNA, 22 nt, Human
gugggacagcuuguaggggagg

SEQ ID NO: 1309942 - RNA, 17 nt, Human
gugggaccuagggaggc

SEQ ID NO: 1309943 - RNA, 21 nt, Human
gugggacagucaccucaugga

SEQ ID NO: 1309944 - RNA, 16 nt, Human
guggcguuuguaauga

SEQ ID NO: 1309945 - RNA, 19 nt, Human
guggcgcgaucucagcuca

SEQ ID NO: 1309946 - RNA, 22 nt, Human
guggcgccgucuccaggggcug

SEQ ID NO: 1309947 - RNA, 17 nt, Human
guggcgccgucuccagg

SEQ ID NO: 1309948 - RNA, 21 nt, Human
guggcgccgucuccaggggcu

SEQ ID NO: 1309949 - RNA, 14 nt, Human
guggguagacacac

SEQ ID NO: 1309950 - RNA, 13 nt, Human
gugggucugggag

SEQ ID NO: 1309951 - RNA, 13 nt, Human
gugggugccuagg

SEQ ID NO: 1309952 - RNA, 14 nt, Human
gugguggcucggga

SEQ ID NO: 1309953 - RNA, 15 nt, Human
gugguggucccuggg

SEQ ID NO: 1309954 - RNA, 16 nt, Human
gugguggucccugggu

SEQ ID NO: 1309955 - RNA, 20 nt, Human
guggguacccccaggaccag

SEQ ID NO: 1309956 - RNA, 13 nt, Human
gugggguggcugc

SEQ ID NO: 1309957 - RNA, 15 nt, Human
gugggguggcugcag

SEQ ID NO: 1309958 - RNA, 18 nt, Human
gugggguggcugcagccu

SEQ ID NO: 1309959 - RNA, 19 nt, Human
gugggguggcugcagccuc

SEQ ID NO: 1309960 - RNA, 16 nt, Human
gugggguggugucaga

SEQ ID NO: 1309961 - RNA, 13 nt, Human
guggggugugcug

SEQ ID NO: 1309962 - RNA, 16 nt, Human
guggggugugcuggga

SEQ ID NO: 1309963 - RNA, 19 nt, Human
guggggugugcugggagcu

SEQ ID NO: 1309964 - RNA, 17 nt, Human
gugggagugugugccug

SEQ ID NO: 1309965 - RNA, 14 nt, Human
gugggagugugugc

SEQ ID NO: 1309966 - RNA, 23 nt, Human
guggggggggggcgcggcuggga

SEQ ID NO: 1309967 - RNA, 14 nt, Human
aagaggaagcaaau

SEQ ID NO: 1309968 - RNA, 13 nt, Human
aagaggaagcaaa

SEQ ID NO: 1309969 - RNA, 18 nt, Human
guggcccgacagccuggc

SEQ ID NO: 1309970 - RNA, 19 nt, Human
guggcccgacagccuggca

SEQ ID NO: 1309971 - RNA, 14 nt, Human
guggcccucucccc

SEQ ID NO: 1309972 - RNA, 15 nt, Human
guggcccucuccccu

SEQ ID NO: 1309973 - RNA, 17 nt, Human
guggcccucuccccugc

SEQ ID NO: 1309974 - RNA, 18 nt, Human
guggcccucuccccugcc

SEQ ID NO: 1309975 - RNA, 19 nt, Human
guggcccucuccccugccc

SEQ ID NO: 1309976 - RNA, 16 nt, Human
aagagcuuaacagugu

SEQ ID NO: 1309977 - RNA, 23 nt, Human
aagagcgagagaucaaagaugaa

SEQ ID NO: 1309978 - RNA, 14 nt, Human
aagagcuacauaau

SEQ ID NO: 1309979 - RNA, 14 nt, Human
aagagcuuaagaac

SEQ ID NO: 1309980 - RNA, 16 nt, Human
aagagcuacauaauuu

SEQ ID NO: 1309981 - RNA, 16 nt, Human
aagagccuuccaccca

SEQ ID NO: 1309982 - RNA, 18 nt, Human
aagagccuuccacccagg

SEQ ID NO: 1309983 - RNA, 18 nt, Human
aagagcgagagaucaaag

SEQ ID NO: 1309984 - RNA, 21 nt, Human
aagagcgagagaucaaagaug

SEQ ID NO: 1309985 - RNA, 18 nt, Human
aagagcuacguauuuaau

SEQ ID NO: 1309986 - RNA, 14 nt, Human
aagacuuacucuaa

SEQ ID NO: 1309987 - RNA, 15 nt, Human
aagacuuacucuaag

SEQ ID NO: 1309988 - RNA, 16 nt, Human
aagacuuacucuaaga

SEQ ID NO: 1309989 - RNA, 17 nt, Human
aagacuuacucuaagau

SEQ ID NO: 1309990 - RNA, 20 nt, Human
aagacuuacucuaagaucuu

SEQ ID NO: 1309991 - RNA, 13 nt, Human
aagagauuuuuca

SEQ ID NO: 1309992 - RNA, 14 nt, Human
aagagauuuuucau

SEQ ID NO: 1309993 - RNA, 15 nt, Human
aagagauuuuucaug

SEQ ID NO: 1309994 - RNA, 17 nt, Human
aagagauuuuucaugau

SEQ ID NO: 1309995 - RNA, 15 nt, Human
aagagcaaaagaaug

SEQ ID NO: 1309996 - RNA, 20 nt, Human
aagagcaaaagaauggcaga

SEQ ID NO: 1309997 - RNA, 17 nt, Human
aagagcagcaccuccuc

SEQ ID NO: 1309998 - RNA, 20 nt, Human
aagacccuuuuggguuucug

SEQ ID NO: 1309999 - RNA, 17 nt, Human
aagacccuuuuggguuu

SEQ ID NO: 1310000 - RNA, 17 nt, Human
aagaccuacuguucuaa

SEQ ID NO: 1310001 - RNA, 18 nt, Human
aagaccuacuguucuaaa

SEQ ID NO: 1310002 - RNA, 20 nt, Human
aagaccuacuguucuaaagc

SEQ ID NO: 1310003 - RNA, 22 nt, Human
aagaccuacuguucuaaagcuc

SEQ ID NO: 1310004 - RNA, 15 nt, Human
aagaccugagaaugu

SEQ ID NO: 1310005 - RNA, 21 nt, Human
aagaccuacuguucuaaagcu

SEQ ID NO: 1310006 - RNA, 17 nt, Human
aagaccuggcagcucug

SEQ ID NO: 1310007 - RNA, 22 nt, Human
aagacuaucuuacuauuucaca

SEQ ID NO: 1310008 - RNA, 17 nt, Human
aagacuaugaaaaugcu

SEQ ID NO: 1310009 - RNA, 15 nt, Human
aagacuaugaaaaug

SEQ ID NO: 1310010 - RNA, 12 nt, Human
aagacucuagag

SEQ ID NO: 1310011 - RNA, 13 nt, Human
aagacucuagagu

SEQ ID NO: 1310012 - RNA, 15 nt, Human
aagacucuagagucc

SEQ ID NO: 1310013 - RNA, 19 nt, Human
aagacucuagaguccaagg

SEQ ID NO: 1310014 - RNA, 21 nt, Human
aagacucuagaguccaagguu

SEQ ID NO: 1310015 - RNA, 18 nt, Human
gugcuaguaauuggaaag

SEQ ID NO: 1310016 - RNA, 19 nt, Human
gugcuaggaagaggagugg

SEQ ID NO: 1310017 - RNA, 17 nt, Human
aagaauagcuuuaauga

SEQ ID NO: 1310018 - RNA, 12 nt, Human
aagaauacuucu

SEQ ID NO: 1310019 - RNA, 16 nt, Human
aagaauacuucucauu

SEQ ID NO: 1310020 - RNA, 17 nt, Human
aagaauacuucucauuu

SEQ ID NO: 1310021 - RNA, 22 nt, Human
aagaauacuucucauuuuuuaa

SEQ ID NO: 1310022 - RNA, 11 nt, Human
aagaauagaac

SEQ ID NO: 1310023 - RNA, 17 nt, Human
aagaauagcauuguaaa

SEQ ID NO: 1310024 - RNA, 18 nt, Human
aagaauagcauuguaaaa

SEQ ID NO: 1310025 - RNA, 23 nt, Human
aagaauagcauuguaaaagcauu

SEQ ID NO: 1310026 - RNA, 19 nt, Human
aagaaguggggcagcagca

SEQ ID NO: 1310027 - RNA, 18 nt, Human
aagaaguggggcagcagc

SEQ ID NO: 1310028 - RNA, 16 nt, Human
aagaaggcaaaaaugu

SEQ ID NO: 1310029 - RNA, 22 nt, Human
aagaagugaaaaucuacacucc

SEQ ID NO: 1310030 - RNA, 16 nt, Human
aagaagugaaaaucua

SEQ ID NO: 1310031 - RNA, 14 nt, Human
aagaaggcaaaaau

SEQ ID NO: 1310032 - RNA, 15 nt, Human
aagaaggcaaaaaua

SEQ ID NO: 1310033 - RNA, 19 nt, Human
aagaaggcaaaaauaguuu

SEQ ID NO: 1310034 - RNA, 13 nt, Human
aagaaauauaccu

SEQ ID NO: 1310035 - RNA, 15 nt, Human
aagaaauagaacaag

SEQ ID NO: 1310036 - RNA, 20 nt, Human
aagaaauagaacaaggcuga

SEQ ID NO: 1310037 - RNA, 12 nt, Human
aagaaauagaau

SEQ ID NO: 1310038 - RNA, 16 nt, Human
aagaaagacgcacuuu

SEQ ID NO: 1310039 - RNA, 20 nt, Human
aagaaagacgcacuuuggcu

SEQ ID NO: 1310040 - RNA, 14 nt, Human
aagaaauagaacaa

SEQ ID NO: 1310041 - RNA, 16 nt, Human
aagaaagaacggaaga

SEQ ID NO: 1310042 - RNA, 14 nt, Human
aagaaacuuuuuua

SEQ ID NO: 1310043 - RNA, 13 nt, Human
aagaaagaaaauc

SEQ ID NO: 1310044 - RNA, 23 nt, Human
aagaaacuuucuuucucacuaaa

SEQ ID NO: 1310045 - RNA, 17 nt, Human
aagaaacuuguccuucc

SEQ ID NO: 1310046 - RNA, 11 nt, Human
aagaaacuuuc

SEQ ID NO: 1310047 - RNA, 21 nt, Human
aagaaacuggggcuccuccag

SEQ ID NO: 1310048 - RNA, 21 nt, Human
aagaaacugaggaauuuucuu

SEQ ID NO: 1310049 - RNA, 16 nt, Human
aagaaacugaggaauu

SEQ ID NO: 1310050 - RNA, 19 nt, Human
aagaaacugaggaauuuuc

SEQ ID NO: 1310051 - RNA, 20 nt, Human
aagaaacugaggaauuuucu

SEQ ID NO: 1310052 - RNA, 16 nt, Human
aagaaaccuacugccc

SEQ ID NO: 1310053 - RNA, 21 nt, Human
aagaaaccuacugcccaggca

SEQ ID NO: 1310054 - RNA, 21 nt, Human
aagaaaaaaauugaaauguaa

SEQ ID NO: 1310055 - RNA, 20 nt, Human
aagaaaaaaauugaaaugua

SEQ ID NO: 1310056 - RNA, 15 nt, Human
aagaaaaagaagcaa

SEQ ID NO: 1310057 - RNA, 16 nt, Human
aacuuguauuaugugu

SEQ ID NO: 1310058 - RNA, 23 nt, Human
aacuuggggaguuaagaccuggc

SEQ ID NO: 1310059 - RNA, 19 nt, Human
aacuuguccuagcacagau

SEQ ID NO: 1310060 - RNA, 12 nt, Human
aacuugggaacu

SEQ ID NO: 1310061 - RNA, 11 nt, Human
aacuuggcuca

SEQ ID NO: 1310062 - RNA, 18 nt, Human
aacuuggcugcaggaauc

SEQ ID NO: 1310063 - RNA, 19 nt, Human
aacuuggcugcaggaaucu

SEQ ID NO: 1310064 - RNA, 21 nt, Human
aacuuggggaguuaagaccug

SEQ ID NO: 1310065 - RNA, 22 nt, Human
aacuuggggaguuaagaccugg

SEQ ID NO: 1310066 - RNA, 22 nt, Human
gugccuucaagaaaacaggcac

SEQ ID NO: 1310067 - RNA, 21 nt, Human
aacuuggcucgaaucucugug

SEQ ID NO: 1310068 - RNA, 22 nt, Human
aacuuggcucgaaucucugugc

SEQ ID NO: 1310069 - RNA, 23 nt, Human
aacuuggcucgaaucucugugcc

SEQ ID NO: 1310070 - RNA, 19 nt, Human
aacuuuaauguuuuuugcc

SEQ ID NO: 1310071 - RNA, 19 nt, Human
aacuuuaaagcguuugcac

SEQ ID NO: 1310072 - RNA, 13 nt, Human
aacuuuaacuucu

SEQ ID NO: 1310073 - RNA, 20 nt, Human
aacuuuaacuucuguuuuac

SEQ ID NO: 1310074 - RNA, 14 nt, Human
aacuuuaauguuuu

SEQ ID NO: 1310075 - RNA, 15 nt, Human
aagaaaaaaauguau

SEQ ID NO: 1310076 - RNA, 16 nt, Human
aagaaaaaaauguauu

SEQ ID NO: 1310077 - RNA, 17 nt, Human
aagaaaaaaauguauuu

SEQ ID NO: 1310078 - RNA, 21 nt, Human
aagaaaaaaauguauuuuaug

SEQ ID NO: 1310079 - RNA, 23 nt, Human
aagaaaaaaauguauuuuauguu

SEQ ID NO: 1310080 - RNA, 22 nt, Human
aagaaaaaaauguauuuuaugu

SEQ ID NO: 1310081 - RNA, 17 nt, Human
aagaaaaaaauugaaau

SEQ ID NO: 1310082 - RNA, 18 nt, Human
aagaaaaaaauugaaaug

SEQ ID NO: 1310083 - RNA, 19 nt, Human
aagaaaaaaauugaaaugu

SEQ ID NO: 1310084 - RNA, 13 nt, Human
gugccucugccug

SEQ ID NO: 1310085 - RNA, 13 nt, Human
gugccucagagac

SEQ ID NO: 1310086 - RNA, 15 nt, Human
gugccucagagacca

SEQ ID NO: 1310087 - RNA, 19 nt, Human
gugccucagagaccagggc

SEQ ID NO: 1310088 - RNA, 20 nt, Human
gugccucagagaccagggcu

SEQ ID NO: 1310089 - RNA, 15 nt, Human
gugccucugccuguc

SEQ ID NO: 1310090 - RNA, 20 nt, Human
gugccuaguauugacaaaau

SEQ ID NO: 1310091 - RNA, 18 nt, Human
gugccuaguauugacaaa

SEQ ID NO: 1310092 - RNA, 16 nt, Human
gugccuaguauugaca

SEQ ID NO: 1310093 - RNA, 18 nt, Human
gugccuauugcuagagcu

SEQ ID NO: 1310094 - RNA, 19 nt, Human
gugccuauugcuagagcuc

SEQ ID NO: 1310095 - RNA, 20 nt, Human
gugccuauugcuagagcucc

SEQ ID NO: 1310096 - RNA, 21 nt, Human
gugccuauugcuagagcuccu

SEQ ID NO: 1310097 - RNA, 14 nt, Human
gugccuaguauuga

SEQ ID NO: 1310098 - RNA, 20 nt, Human
gugccuaggccugggcagug

SEQ ID NO: 1310099 - RNA, 15 nt, Human
gugccuaggccuggg

SEQ ID NO: 1310100 - RNA, 18 nt, Human
gugccuaggccugggcag

SEQ ID NO: 1310101 - RNA, 14 nt, Human
gugccuaggccugg

SEQ ID NO: 1310102 - RNA, 16 nt, Human
gugcucaggagcccug

SEQ ID NO: 1310103 - RNA, 15 nt, Human
gugcuggccagcgag

SEQ ID NO: 1310104 - RNA, 18 nt, Human
gugcucagcccugaggac

SEQ ID NO: 1310105 - RNA, 15 nt, Human
gugcucaggagcccu

SEQ ID NO: 1310106 - RNA, 16 nt, Human
gugcuauuugucaucu

SEQ ID NO: 1310107 - RNA, 13 nt, Human
gugcucaaggcca

SEQ ID NO: 1310108 - RNA, 12 nt, Human
gugcucagcccu

SEQ ID NO: 1310109 - RNA, 16 nt, Human
gugcucagcccugagg

SEQ ID NO: 1310110 - RNA, 14 nt, Human
gugcuaggaagagg

SEQ ID NO: 1310111 - RNA, 14 nt, Human
gugcuauggugcuc

SEQ ID NO: 1310112 - RNA, 16 nt, Human
gugcuauggugcucug

SEQ ID NO: 1310113 - RNA, 17 nt, Human
gugcugggagaggcagc

SEQ ID NO: 1310114 - RNA, 18 nt, Human
gugcugggagaggcagcc

SEQ ID NO: 1310115 - RNA, 16 nt, Human
gugcugggagcuccac

SEQ ID NO: 1310116 - RNA, 22 nt, Human
gugcugggagcuccacucugcu

SEQ ID NO: 1310117 - RNA, 23 nt, Human
gugcugggagcuccacucugcuu

SEQ ID NO: 1310118 - RNA, 20 nt, Human
gugcugggauuacaggcgug

SEQ ID NO: 1310119 - RNA, 21 nt, Human
guggauggaaggggcugacag

SEQ ID NO: 1310120 - RNA, 13 nt, Human
guggauggcccca

SEQ ID NO: 1310121 - RNA, 12 nt, Human
guggauguuacu

SEQ ID NO: 1310122 - RNA, 15 nt, Human
guggauggccccagc

SEQ ID NO: 1310123 - RNA, 16 nt, Human
guggauggccccagca

SEQ ID NO: 1310124 - RNA, 19 nt, Human
guggauggccccagcacag

SEQ ID NO: 1310125 - RNA, 22 nt, Human
guggauggccccagcacagcuu

SEQ ID NO: 1310126 - RNA, 16 nt, Human
guggaccauggagugg

SEQ ID NO: 1310127 - RNA, 21 nt, Human
guggaccauggaguggcagcc

SEQ ID NO: 1310128 - RNA, 12 nt, Human
guggacaggacu

SEQ ID NO: 1310129 - RNA, 20 nt, Human
gugcugggauuacaggugua

SEQ ID NO: 1310130 - RNA, 16 nt, Human
aagaaugauuaugaau

SEQ ID NO: 1310131 - RNA, 21 nt, Human
aagaauccacauuucuaaaau

SEQ ID NO: 1310132 - RNA, 12 nt, Human
aagaaucucauc

SEQ ID NO: 1310133 - RNA, 20 nt, Human
aagaaucucaucucagugaa

SEQ ID NO: 1310134 - RNA, 20 nt, Human
aagaaucuugguuugccuuc

SEQ ID NO: 1310135 - RNA, 21 nt, Human
aagaaucuugguuugccuucc

SEQ ID NO: 1310136 - RNA, 15 nt, Human
aagaaucuuuagaga

SEQ ID NO: 1310137 - RNA, 17 nt, Human
aagaauccacauuucua

SEQ ID NO: 1310138 - RNA, 18 nt, Human
aagaauccacauuucuaa

SEQ ID NO: 1310139 - RNA, 19 nt, Human
aagaauccacauuucuaaa

SEQ ID NO: 1310140 - RNA, 13 nt, Human
guggauucuuuaa

SEQ ID NO: 1310141 - RNA, 14 nt, Human
guggcacuggggca

SEQ ID NO: 1310142 - RNA, 15 nt, Human
guggcagcccagcca

SEQ ID NO: 1310143 - RNA, 16 nt, Human
guggcagcccagccag

SEQ ID NO: 1310144 - RNA, 17 nt, Human
guggcagcccagccagc

SEQ ID NO: 1310145 - RNA, 18 nt, Human
guggcagcccagccagcg

SEQ ID NO: 1310146 - RNA, 19 nt, Human
guggauugcacguggccuc

SEQ ID NO: 1310147 - RNA, 22 nt, Human
guggcacucagucucucuucuc

SEQ ID NO: 1310148 - RNA, 20 nt, Human
aagacaaaaagcuacuuauu

SEQ ID NO: 1310149 - RNA, 23 nt, Human
aagacaaaaagcuacuuauugua

SEQ ID NO: 1310150 - RNA, 12 nt, Human
aagaauuguugg

SEQ ID NO: 1310151 - RNA, 21 nt, Human
aagaauuguuggggguuuuuu

SEQ ID NO: 1310152 - RNA, 22 nt, Human
aagaauuguuggggguuuuuuu

SEQ ID NO: 1310153 - RNA, 16 nt, Human
aagaauugaguaaugg

SEQ ID NO: 1310154 - RNA, 20 nt, Human
aagaauugugguuuauauau

SEQ ID NO: 1310155 - RNA, 22 nt, Human
aagaauugugguuuauauauuu

SEQ ID NO: 1310156 - RNA, 23 nt, Human
aagaauugugguuuauauauuua

SEQ ID NO: 1310157 - RNA, 15 nt, Human
aagaauugaguaaug

SEQ ID NO: 1310158 - RNA, 17 nt, Human
aagaauugaguaauggu

SEQ ID NO: 1310159 - RNA, 21 nt, Human
aagacaaaacauacauuuugu

SEQ ID NO: 1310160 - RNA, 15 nt, Human
aagacaaacuuugca

SEQ ID NO: 1310161 - RNA, 18 nt, Human
aagacaaacuuugcaucu

SEQ ID NO: 1310162 - RNA, 17 nt, Human
aagacaaagguuuuccu

SEQ ID NO: 1310163 - RNA, 13 nt, Human
aagacccuccccg

SEQ ID NO: 1310164 - RNA, 18 nt, Human
aagacccuaaacauccau

SEQ ID NO: 1310165 - RNA, 14 nt, Human
aagacccuggcuuu

SEQ ID NO: 1310166 - RNA, 18 nt, Human
aagaaugauuaugaauua

SEQ ID NO: 1310167 - RNA, 19 nt, Human
aagaaugaucugauugacc

SEQ ID NO: 1310168 - RNA, 17 nt, Human
aagaaugcacaagaaug

SEQ ID NO: 1310169 - RNA, 18 nt, Human
aagaaugcacaagaaugg

SEQ ID NO: 1310170 - RNA, 19 nt, Human
aagaaugcacaagaaugga

SEQ ID NO: 1310171 - RNA, 20 nt, Human
aagaaugcacaagaauggau

SEQ ID NO: 1310172 - RNA, 21 nt, Human
aagaaugcacaagaauggauc

SEQ ID NO: 1310173 - RNA, 22 nt, Human
aagaaugcacaagaauggauca

SEQ ID NO: 1310174 - RNA, 13 nt, Human
aagaaugcuuaau

SEQ ID NO: 1310175 - RNA, 17 nt, Human
aagaaugcuuaaucaga

SEQ ID NO: 1310176 - RNA, 20 nt, Human
aagaauggcagaaaaguuua

SEQ ID NO: 1310177 - RNA, 17 nt, Human
aagaauggcagaaaagu

SEQ ID NO: 1310178 - RNA, 13 nt, Human
guaggcuacagag

SEQ ID NO: 1310179 - RNA, 13 nt, Human
guaggcaggauug

SEQ ID NO: 1310180 - RNA, 18 nt, Human
guaggcaggauuggggaa

SEQ ID NO: 1310181 - RNA, 14 nt, Human
guaggcauuuccua

SEQ ID NO: 1310182 - RNA, 12 nt, Human
guaggccaaggu

SEQ ID NO: 1310183 - RNA, 18 nt, Human
guaggccaagguguccua

SEQ ID NO: 1310184 - RNA, 20 nt, Human
guaggccaagguguccuaca

SEQ ID NO: 1310185 - RNA, 23 nt, Human
guaggccaagguguccuacagaa

SEQ ID NO: 1310186 - RNA, 14 nt, Human
guaggauuuuuguu

SEQ ID NO: 1310187 - RNA, 19 nt, Human
guaggagacuguuuggaaa

SEQ ID NO: 1310188 - RNA, 20 nt, Human
guaggagacuguuuggaaau

SEQ ID NO: 1310189 - RNA, 18 nt, Human
guaggagcccagcucuga

SEQ ID NO: 1310190 - RNA, 21 nt, Human
guaggagggacugucgcugcu

SEQ ID NO: 1310191 - RNA, 16 nt, Human
guaggagggugggaag

SEQ ID NO: 1310192 - RNA, 17 nt, Human
guaggagggugggaagg

SEQ ID NO: 1310193 - RNA, 16 nt, Human
guaggaaagaggaagc

SEQ ID NO: 1310194 - RNA, 12 nt, Human
guagcuuugcuc

SEQ ID NO: 1310195 - RNA, 13 nt, Human
guaggaaaugugg

SEQ ID NO: 1310196 - RNA, 22 nt, Human
guaggaagguacuguaugauca

SEQ ID NO: 1310197 - RNA, 15 nt, Human
guaggaaguaggaag

SEQ ID NO: 1310198 - RNA, 19 nt, Human
guaggaagguacuguauga

SEQ ID NO: 1310199 - RNA, 17 nt, Human
guaggaagguacuguau

SEQ ID NO: 1310200 - RNA, 19 nt, Human
guaggaccaagcaucuugg

SEQ ID NO: 1310201 - RNA, 13 nt, Human
aaaggacuguaau

SEQ ID NO: 1310202 - RNA, 21 nt, Human
aaaggacuccugaaaaaaaac

SEQ ID NO: 1310203 - RNA, 15 nt, Human
aaaggagaaugaauc

SEQ ID NO: 1310204 - RNA, 23 nt, Human
aaaggagccugugaacccaggac

SEQ ID NO: 1310205 - RNA, 16 nt, Human
aaaggagucaaaacua

SEQ ID NO: 1310206 - RNA, 11 nt, Human
aaaggaguuua

SEQ ID NO: 1310207 - RNA, 21 nt, Human
aaaggaguuuauguuccauua

SEQ ID NO: 1310208 - RNA, 19 nt, Human
guagcucuuugucagggag

SEQ ID NO: 1310209 - RNA, 20 nt, Human
guagcucuuugucagggagu

SEQ ID NO: 1310210 - RNA, 21 nt, Human
guagcucuuugucagggagug

SEQ ID NO: 1310211 - RNA, 11 nt, Human
guagcugagcu

SEQ ID NO: 1310212 - RNA, 12 nt, Human
guagcugagcuc

SEQ ID NO: 1310213 - RNA, 13 nt, Human
guagcugagcuca

SEQ ID NO: 1310214 - RNA, 21 nt, Human
guagcugagcucacaaggcag

SEQ ID NO: 1310215 - RNA, 22 nt, Human
guagcugagcucacaaggcagc

SEQ ID NO: 1310216 - RNA, 15 nt, Human
aaaggaguuuauguu

SEQ ID NO: 1310217 - RNA, 18 nt, Human
guagcugggauuacaggc

SEQ ID NO: 1310218 - RNA, 12 nt, Human
guagcuggggcu

SEQ ID NO: 1310219 - RNA, 23 nt, Human
guagcuggggcuuugauguuccu

SEQ ID NO: 1310220 - RNA, 13 nt, Human
guagcugugaccu

SEQ ID NO: 1310221 - RNA, 14 nt, Human
guagcugugaccug

SEQ ID NO: 1310222 - RNA, 15 nt, Human
guagcugugaccugc

SEQ ID NO: 1310223 - RNA, 16 nt, Human
guagcugugaccugcu

SEQ ID NO: 1310224 - RNA, 17 nt, Human
guagcugugaccugcug

SEQ ID NO: 1310225 - RNA, 18 nt, Human
guagcugugaccugcuga

SEQ ID NO: 1310226 - RNA, 19 nt, Human
guagcugugaccugcugag

SEQ ID NO: 1310227 - RNA, 20 nt, Human
guagcugugaccugcugagc

SEQ ID NO: 1310228 - RNA, 21 nt, Human
guagcugugaccugcugagcu

SEQ ID NO: 1310229 - RNA, 17 nt, Human
guagcugggacuacagg

SEQ ID NO: 1310230 - RNA, 14 nt, Human
aaauccuugaagau

SEQ ID NO: 1310231 - RNA, 15 nt, Human
aaauccuuugugaaa

SEQ ID NO: 1310232 - RNA, 16 nt, Human
aaauccuuuacuguua

SEQ ID NO: 1310233 - RNA, 19 nt, Human
aaauccuuagaucuggcau

SEQ ID NO: 1310234 - RNA, 13 nt, Human
aaaucgaaugaaa

SEQ ID NO: 1310235 - RNA, 20 nt, Human
aaaucgaaugaaauuaacug

SEQ ID NO: 1310236 - RNA, 22 nt, Human
guaggccaagguguccuacaga

SEQ ID NO: 1310237 - RNA, 21 nt, Human
aaauccuuagaucuggcaugu

SEQ ID NO: 1310238 - RNA, 11 nt, Human
aaaugaaaauu

SEQ ID NO: 1310239 - RNA, 15 nt, Human
aaaugaaaaugucuu

SEQ ID NO: 1310240 - RNA, 16 nt, Human
aaaugaaaaugucuug

SEQ ID NO: 1310241 - RNA, 17 nt, Human
aaaugaaaaugucuugu

SEQ ID NO: 1310242 - RNA, 13 nt, Human
aaaucuaccacug

SEQ ID NO: 1310243 - RNA, 19 nt, Human
aaaucuacacuccagugag

SEQ ID NO: 1310244 - RNA, 17 nt, Human
aaaucuaccacuguaug

SEQ ID NO: 1310245 - RNA, 11 nt, Human
aaaugagaaau

SEQ ID NO: 1310246 - RNA, 20 nt, Human
aaaugacacucauauaauua

SEQ ID NO: 1310247 - RNA, 23 nt, Human
aaaugacacucauauaauuauau

SEQ ID NO: 1310248 - RNA, 23 nt, Human
aaaugaauggaggaacuuuccaa

SEQ ID NO: 1310249 - RNA, 16 nt, Human
aaaugacaaucaugug

SEQ ID NO: 1310250 - RNA, 17 nt, Human
aaaugacaaucaugugu

SEQ ID NO: 1310251 - RNA, 19 nt, Human
aaaugacaaucaugugugu

SEQ ID NO: 1310252 - RNA, 21 nt, Human
aaaugacaaucauguguguua

SEQ ID NO: 1310253 - RNA, 22 nt, Human
aaaugaaagcagggacuugaac

SEQ ID NO: 1310254 - RNA, 21 nt, Human
aaaugaaagcagggacuugaa

SEQ ID NO: 1310255 - RNA, 13 nt, Human
aaaugaaagcuac

SEQ ID NO: 1310256 - RNA, 14 nt, Human
aaaugaaagcuacu

SEQ ID NO: 1310257 - RNA, 21 nt, Human
aaaugaaauauauuuaaaaua

SEQ ID NO: 1310258 - RNA, 21 nt, Human
aaaugaacaagagaagcauuc

SEQ ID NO: 1310259 - RNA, 13 nt, Human
aaaugaacaagag

SEQ ID NO: 1310260 - RNA, 11 nt, Human
aaaugaagaaa

SEQ ID NO: 1310261 - RNA, 16 nt, Human
aaaugagaaaucuaaa

SEQ ID NO: 1310262 - RNA, 14 nt, Human
aaaugagaaaucua

SEQ ID NO: 1310263 - RNA, 13 nt, Human
aaaugagaaaucu

SEQ ID NO: 1310264 - RNA, 13 nt, Human
aaaugagccauga

SEQ ID NO: 1310265 - RNA, 19 nt, Human
aaaugaggccauggacucu

SEQ ID NO: 1310266 - RNA, 20 nt, Human
aaaugaggccauggacucug

SEQ ID NO: 1310267 - RNA, 12 nt, Human
aaaugaguaaca

SEQ ID NO: 1310268 - RNA, 13 nt, Human
aaaugaguaacau

SEQ ID NO: 1310269 - RNA, 14 nt, Human
aaaugaguaacauu

SEQ ID NO: 1310270 - RNA, 18 nt, Human
aaaugaguaacauuugcu

SEQ ID NO: 1310271 - RNA, 15 nt, Human
aaaugaguaacauuu

SEQ ID NO: 1310272 - RNA, 13 nt, Human
aaaugcauguugc

SEQ ID NO: 1310273 - RNA, 20 nt, Human
aaaugcauuauaggaucauu

SEQ ID NO: 1310274 - RNA, 15 nt, Human
aaaugcauaaaugca

SEQ ID NO: 1310275 - RNA, 19 nt, Human
aaaugcaaaaacucuuuga

SEQ ID NO: 1310276 - RNA, 14 nt, Human
aaaugcaaauaaca

SEQ ID NO: 1310277 - RNA, 13 nt, Human
aaaugaucuaaac

SEQ ID NO: 1310278 - RNA, 15 nt, Human
aaaugauucuuagug

SEQ ID NO: 1310279 - RNA, 17 nt, Human
aaaugauuacuaaggaa

SEQ ID NO: 1310280 - RNA, 14 nt, Human
aaaugauuguagua

SEQ ID NO: 1310281 - RNA, 21 nt, Human
aaaugauuuccucuguaaucu

SEQ ID NO: 1310282 - RNA, 19 nt, Human
aaauggcuuccuggcaaua

SEQ ID NO: 1310283 - RNA, 18 nt, Human
aaaugccaaauuaaaaaa

SEQ ID NO: 1310284 - RNA, 22 nt, Human
aaaugccaugaugccucugucu

SEQ ID NO: 1310285 - RNA, 14 nt, Human
aaaugcauuucuaa

SEQ ID NO: 1310286 - RNA, 16 nt, Human
aaaugccaaauuaaaa

SEQ ID NO: 1310287 - RNA, 17 nt, Human
aaaugccaaauuaaaaa

SEQ ID NO: 1310288 - RNA, 22 nt, Human
aaaugccaaauuaaaaaagaua

SEQ ID NO: 1310289 - RNA, 21 nt, Human
guauggguuagggaaaacauu

SEQ ID NO: 1310290 - RNA, 19 nt, Human
guauggguaggguaaauca

SEQ ID NO: 1310291 - RNA, 16 nt, Human
guaugggacuggccuc

SEQ ID NO: 1310292 - RNA, 15 nt, Human
guauggugcaaugug

SEQ ID NO: 1310293 - RNA, 14 nt, Human
guaugucugguucu

SEQ ID NO: 1310294 - RNA, 22 nt, Human
guaugucugguucucaauucca

SEQ ID NO: 1310295 - RNA, 17 nt, Human
guaugucugguucucaa

SEQ ID NO: 1310296 - RNA, 19 nt, Human
guauguguaucucacacuc

SEQ ID NO: 1310297 - RNA, 11 nt, Human
guauucucuga

SEQ ID NO: 1310298 - RNA, 12 nt, Human
guauucucugag

SEQ ID NO: 1310299 - RNA, 13 nt, Human
guauucucugagc

SEQ ID NO: 1310300 - RNA, 19 nt, Human
guauucucugagcugugca

SEQ ID NO: 1310301 - RNA, 18 nt, Human
guauucugggguauggcg

SEQ ID NO: 1310302 - RNA, 20 nt, Human
guauugacaaaauguuauuu

SEQ ID NO: 1310303 - RNA, 22 nt, Human
guauucuucucuuccuuuuauc

SEQ ID NO: 1310304 - RNA, 16 nt, Human
guauucuucucuuccu

SEQ ID NO: 1310305 - RNA, 13 nt, Human
guauugcacauug

SEQ ID NO: 1310306 - RNA, 14 nt, Human
guauugcacauugu

SEQ ID NO: 1310307 - RNA, 16 nt, Human
guauugcacauuguaa

SEQ ID NO: 1310308 - RNA, 18 nt, Human
guauugcacauuguaaaa

SEQ ID NO: 1310309 - RNA, 21 nt, Human
guauugcacauuguaaaaagu

SEQ ID NO: 1310310 - RNA, 14 nt, Human
guaugauucccagc

SEQ ID NO: 1310311 - RNA, 19 nt, Human
guaugaucggcaggacacc

SEQ ID NO: 1310312 - RNA, 21 nt, Human
guaugauuacuggccuuuuuc

SEQ ID NO: 1310313 - RNA, 15 nt, Human
guaugcagggagcug

SEQ ID NO: 1310314 - RNA, 19 nt, Human
guaugcacaugaacuuaga

SEQ ID NO: 1310315 - RNA, 13 nt, Human
guauggaaauaaa

SEQ ID NO: 1310316 - RNA, 20 nt, Human
guauggcguaaguacagaga

SEQ ID NO: 1310317 - RNA, 21 nt, Human
guauggcguaaguacagagaa

SEQ ID NO: 1310318 - RNA, 22 nt, Human
guauggcguaaguacagagaag

SEQ ID NO: 1310319 - RNA, 23 nt, Human
guauggcguaaguacagagaagc

SEQ ID NO: 1310320 - RNA, 24 nt, Human
guauggcguaaguacagagaagcc

SEQ ID NO: 1310321 - RNA, 18 nt, Human
guauggacuaucugucug

SEQ ID NO: 1310322 - RNA, 14 nt, Human
guauggccuguguc

SEQ ID NO: 1310323 - RNA, 15 nt, Human
guauggccuguguca

SEQ ID NO: 1310324 - RNA, 18 nt, Human
guauggcguaaguacaga

SEQ ID NO: 1310325 - RNA, 19 nt, Human
guauggcguaaguacagag

SEQ ID NO: 1310326 - RNA, 17 nt, Human
guauccccccaucuugc

SEQ ID NO: 1310327 - RNA, 18 nt, Human
guauccccccaucuugcu

SEQ ID NO: 1310328 - RNA, 13 nt, Human
guauccccugcag

SEQ ID NO: 1310329 - RNA, 13 nt, Human
guaucaaauguaa

SEQ ID NO: 1310330 - RNA, 14 nt, Human
guaucaggacccag

SEQ ID NO: 1310331 - RNA, 18 nt, Human
guaucaggacccagagga

SEQ ID NO: 1310332 - RNA, 21 nt, Human
guaucaggacccagaggaagg

SEQ ID NO: 1310333 - RNA, 22 nt, Human
guaucaggacccagaggaaggg

SEQ ID NO: 1310334 - RNA, 14 nt, Human
guauccccccaucu

SEQ ID NO: 1310335 - RNA, 22 nt, Human
guauauugauccagaaagaaaa

SEQ ID NO: 1310336 - RNA, 12 nt, Human
guauauucagga

SEQ ID NO: 1310337 - RNA, 23 nt, Human
guauauucaggacuugaaagaaa

SEQ ID NO: 1310338 - RNA, 18 nt, Human
guauauuacaaugaucac

SEQ ID NO: 1310339 - RNA, 17 nt, Human
guauauuacaaugauca

SEQ ID NO: 1310340 - RNA, 14 nt, Human
guauaagauccuag

SEQ ID NO: 1310341 - RNA, 22 nt, Human
guauaagauccuagauccuaag

SEQ ID NO: 1310342 - RNA, 18 nt, Human
guauaagauccuagaucc

SEQ ID NO: 1310343 - RNA, 18 nt, Human
guauaaaugucuuuaaug

SEQ ID NO: 1310344 - RNA, 18 nt, Human
guauaacuuuaacuucug

SEQ ID NO: 1310345 - RNA, 21 nt, Human
guauaacuuuaacuucuguuu

SEQ ID NO: 1310346 - RNA, 23 nt, Human
guauaacuuuaacuucuguuuua

SEQ ID NO: 1310347 - RNA, 18 nt, Human
guauaaaagggacugaga

SEQ ID NO: 1310348 - RNA, 21 nt, Human
guauaaaagccuguuuaagag

SEQ ID NO: 1310349 - RNA, 18 nt, Human
guauaaaagccuguuuaa

SEQ ID NO: 1310350 - RNA, 15 nt, Human
guauaaacaagaaaa

SEQ ID NO: 1310351 - RNA, 16 nt, Human
guauaaacaagaaaaa

SEQ ID NO: 1310352 - RNA, 17 nt, Human
guauaaacaagaaaaau

SEQ ID NO: 1310353 - RNA, 22 nt, Human
guauaaacaagaaaaauaaaga

SEQ ID NO: 1310354 - RNA, 23 nt, Human
guauaaacaagaaaaauaaagaa

SEQ ID NO: 1310355 - RNA, 16 nt, Human
guauaaacugauggau

SEQ ID NO: 1310356 - RNA, 17 nt, Human
guauaaagaauuguggu

SEQ ID NO: 1310357 - RNA, 16 nt, Human
guauaaaugucuuuaa

SEQ ID NO: 1310358 - RNA, 17 nt, Human
guauaaaagccuguuua

SEQ ID NO: 1310359 - RNA, 15 nt, Human
guaguucauguaaau

SEQ ID NO: 1310360 - RNA, 22 nt, Human
guaguuccacuuauagccucug

SEQ ID NO: 1310361 - RNA, 23 nt, Human
guaguuccacuuauagccucugu

SEQ ID NO: 1310362 - RNA, 13 nt, Human
guaguucuaagac

SEQ ID NO: 1310363 - RNA, 14 nt, Human
guaguucucaaagu

SEQ ID NO: 1310364 - RNA, 16 nt, Human
guaguucugcuccaga

SEQ ID NO: 1310365 - RNA, 20 nt, Human
guaguucugcuccagacagg

SEQ ID NO: 1310366 - RNA, 15 nt, Human
guaguuaucauguua

SEQ ID NO: 1310367 - RNA, 16 nt, Human
guaguuaucauguuag

SEQ ID NO: 1310368 - RNA, 14 nt, Human
guaguuaucauguu

SEQ ID NO: 1310369 - RNA, 13 nt, Human
guaguuaucaugu

SEQ ID NO: 1310370 - RNA, 12 nt, Human
guaguuaucaug

SEQ ID NO: 1310371 - RNA, 20 nt, Human
aaauguaggcuuaguuugug

SEQ ID NO: 1310372 - RNA, 19 nt, Human
aaauguagaguuuuuaaac

SEQ ID NO: 1310373 - RNA, 15 nt, Human
aaaugggcacuuaaa

SEQ ID NO: 1310374 - RNA, 20 nt, Human
aaaugggcacuuaaagcuuu

SEQ ID NO: 1310375 - RNA, 13 nt, Human
aaauggggccaga

SEQ ID NO: 1310376 - RNA, 16 nt, Human
aaauggggccagaucc

SEQ ID NO: 1310377 - RNA, 17 nt, Human
aaauggggccagaucca

SEQ ID NO: 1310378 - RNA, 21 nt, Human
aaauggggccagauccagccu

SEQ ID NO: 1310379 - RNA, 22 nt, Human
aaauggggccagauccagccug

SEQ ID NO: 1310380 - RNA, 16 nt, Human
guauuuaauucauguu

SEQ ID NO: 1310381 - RNA, 20 nt, Human
guauuuaauagguuuggaca

SEQ ID NO: 1310382 - RNA, 20 nt, Human
guauugggguuauuuucugg

SEQ ID NO: 1310383 - RNA, 19 nt, Human
guauuuaacagaaauugua

SEQ ID NO: 1310384 - RNA, 21 nt, Human
guauuuaacagaaauuguaua

SEQ ID NO: 1310385 - RNA, 20 nt, Human
guauuuaacagaaauuguau

SEQ ID NO: 1310386 - RNA, 22 nt, Human
aaauguuauuucccuacauuaa

SEQ ID NO: 1310387 - RNA, 15 nt, Human
aaauuaccuguggau

SEQ ID NO: 1310388 - RNA, 18 nt, Human
aaauuaccuguggauauu

SEQ ID NO: 1310389 - RNA, 18 nt, Human
aaauuacuuaguauugca

SEQ ID NO: 1310390 - RNA, 13 nt, Human
aaauuacuguuua

SEQ ID NO: 1310391 - RNA, 23 nt, Human
aaauuacuguuuauuaaaguaca

SEQ ID NO: 1310392 - RNA, 22 nt, Human
aaauguuaugacuauguaaacu

SEQ ID NO: 1310393 - RNA, 18 nt, Human
aaauguuaucuucucaag

SEQ ID NO: 1310394 - RNA, 23 nt, Human
aaauguuaucuucucaaguucua

SEQ ID NO: 1310395 - RNA, 20 nt, Human
aaauguuaaguugaugguga

SEQ ID NO: 1310396 - RNA, 17 nt, Human
aaauguuaucuucucaa

SEQ ID NO: 1310397 - RNA, 14 nt, Human
aaauguuauuuccc

SEQ ID NO: 1310398 - RNA, 16 nt, Human
aaauguuauuaucugg

SEQ ID NO: 1310399 - RNA, 20 nt, Human
aaauguuauuuuuuaauuau

SEQ ID NO: 1310400 - RNA, 19 nt, Human
aaauucccuucaucuggaa

SEQ ID NO: 1310401 - RNA, 16 nt, Human
aaauucccuucaucug

SEQ ID NO: 1310402 - RNA, 17 nt, Human
aaauucccguuuuguca

SEQ ID NO: 1310403 - RNA, 20 nt, Human
aaauucaggcuacugcuuca

SEQ ID NO: 1310404 - RNA, 13 nt, Human
aaauucaguuuca

SEQ ID NO: 1310405 - RNA, 14 nt, Human
aaauucaguuucau

SEQ ID NO: 1310406 - RNA, 13 nt, Human
aaauucauuuuuu

SEQ ID NO: 1310407 - RNA, 19 nt, Human
aaauucauuuuuuaaauuc

SEQ ID NO: 1310408 - RNA, 12 nt, Human
aaauucagcaaa

SEQ ID NO: 1310409 - RNA, 13 nt, Human
aaauucagcauuu

SEQ ID NO: 1310410 - RNA, 15 nt, Human
aaauucagcauuuga

SEQ ID NO: 1310411 - RNA, 22 nt, Human
aaauucacccccuuuccuggac

SEQ ID NO: 1310412 - RNA, 18 nt, Human
aaauuauagcucuaaugu

SEQ ID NO: 1310413 - RNA, 15 nt, Human
aaauuauaucaauuu

SEQ ID NO: 1310414 - RNA, 23 nt, Human
aaauuaucaggcaaauuugcauu

SEQ ID NO: 1310415 - RNA, 22 nt, Human
aaauuaucaggcaaauuugcau

SEQ ID NO: 1310416 - RNA, 21 nt, Human
aaauuauagcucuaauguuug

SEQ ID NO: 1310417 - RNA, 15 nt, Human
aaauuauagcucuaa

SEQ ID NO: 1310418 - RNA, 18 nt, Human
aaauuagccaguaauccu

SEQ ID NO: 1310419 - RNA, 14 nt, Human
aaauuagaugaacu

SEQ ID NO: 1310420 - RNA, 14 nt, Human
aaauuacuuuguga

SEQ ID NO: 1310421 - RNA, 17 nt, Human
aaauuacuuugugaaua

SEQ ID NO: 1310422 - RNA, 20 nt, Human
aaauuagacugugauucaga

SEQ ID NO: 1310423 - RNA, 18 nt, Human
aaauuucagcagcugcag

SEQ ID NO: 1310424 - RNA, 17 nt, Human
aaauuucagcagcugca

SEQ ID NO: 1310425 - RNA, 18 nt, Human
aaauucccuucaucugga

SEQ ID NO: 1310426 - RNA, 20 nt, Human
aaauuuaguauuuuguuuca

SEQ ID NO: 1310427 - RNA, 13 nt, Human
aaauuuagcauug

SEQ ID NO: 1310428 - RNA, 16 nt, Human
aaauuuagcauuguag

SEQ ID NO: 1310429 - RNA, 17 nt, Human
aaauuuacaucauuucu

SEQ ID NO: 1310430 - RNA, 22 nt, Human
aaauuuccugggagcuuuugua

SEQ ID NO: 1310431 - RNA, 21 nt, Human
aaauuuagcauuguagugcuu

SEQ ID NO: 1310432 - RNA, 22 nt, Human
aaauuuagcauuguagugcuuu

SEQ ID NO: 1310433 - RNA, 10 nt, Human
aaauuuauaa

SEQ ID NO: 1310434 - RNA, 16 nt, Human
aaauuuauauuguaaa

SEQ ID NO: 1310435 - RNA, 12 nt, Human
aaauuucagauu

SEQ ID NO: 1310436 - RNA, 16 nt, Human
gucaaauugugugaaa

SEQ ID NO: 1310437 - RNA, 22 nt, Human
gucaaaugcauacaaguuucau

SEQ ID NO: 1310438 - RNA, 22 nt, Human
gucaaaugguaggcauuuccua

SEQ ID NO: 1310439 - RNA, 14 nt, Human
gucaacaguuuucc

SEQ ID NO: 1310440 - RNA, 21 nt, Human
gucaacaguuuuccuaugcuu

SEQ ID NO: 1310441 - RNA, 22 nt, Human
gucaacaguuuuccuaugcuuu

SEQ ID NO: 1310442 - RNA, 14 nt, Human
gucaaccugggcaa

SEQ ID NO: 1310443 - RNA, 19 nt, Human
gucaaccugggcaaagccu

SEQ ID NO: 1310444 - RNA, 21 nt, Human
gucaacgagacguuuccuacc

SEQ ID NO: 1310445 - RNA, 19 nt, Human
gucaacucauauuuucaug

SEQ ID NO: 1310446 - RNA, 17 nt, Human
gucaacucuuuguuauu

SEQ ID NO: 1310447 - RNA, 14 nt, Human
gucacaaccaagaa

SEQ ID NO: 1310448 - RNA, 20 nt, Human
gucacaaugagauugaauuu

SEQ ID NO: 1310449 - RNA, 13 nt, Human
gucacacacugau

SEQ ID NO: 1310450 - RNA, 23 nt, Human
gucaaaaauuaaaccggaccauc

SEQ ID NO: 1310451 - RNA, 13 nt, Human
gucaaaaauuaaa

SEQ ID NO: 1310452 - RNA, 14 nt, Human
gucaaaaagaacca

SEQ ID NO: 1310453 - RNA, 14 nt, Human
gucaaaaauuaaac

SEQ ID NO: 1310454 - RNA, 19 nt, Human
gucaaaaagaaccacuugu

SEQ ID NO: 1310455 - RNA, 20 nt, Human
gucuccuaagcuggagugca

SEQ ID NO: 1310456 - RNA, 16 nt, Human
gucuccuaagcaccug

SEQ ID NO: 1310457 - RNA, 17 nt, Human
gucuccuaagcaccugu

SEQ ID NO: 1310458 - RNA, 12 nt, Human
gucucccuccuc

SEQ ID NO: 1310459 - RNA, 16 nt, Human
gucucccuccucugcc

SEQ ID NO: 1310460 - RNA, 16 nt, Human
gucucccucccuuggg

SEQ ID NO: 1310461 - RNA, 19 nt, Human
aacauuuuugauaaagccu

SEQ ID NO: 1310462 - RNA, 16 nt, Human
gucucagugaagacua

SEQ ID NO: 1310463 - RNA, 15 nt, Human
gucucagugaagacu

SEQ ID NO: 1310464 - RNA, 18 nt, Human
gucucaguuugugugucu

SEQ ID NO: 1310465 - RNA, 19 nt, Human
gucucaguuugugugucuu

SEQ ID NO: 1310466 - RNA, 21 nt, Human
gucucaguuugugugucuuaa

SEQ ID NO: 1310467 - RNA, 14 nt, Human
gucucaguuucuug

SEQ ID NO: 1310468 - RNA, 15 nt, Human
gucucauccaucauc

SEQ ID NO: 1310469 - RNA, 16 nt, Human
gucucauccaucauca

SEQ ID NO: 1310470 - RNA, 13 nt, Human
gucucaucugggg

SEQ ID NO: 1310471 - RNA, 15 nt, Human
gucucaucuggggag

SEQ ID NO: 1310472 - RNA, 22 nt, Human
gucucaucuggggagcaggcag

SEQ ID NO: 1310473 - RNA, 22 nt, Human
gucucaugccaguaacaggcuc

SEQ ID NO: 1310474 - RNA, 23 nt, Human
gucucaugccaguaacaggcuca

SEQ ID NO: 1310475 - RNA, 18 nt, Human
gucucccccaacagcugg

SEQ ID NO: 1310476 - RNA, 23 nt, Human
gucucccccaacagcuggacccu

SEQ ID NO: 1310477 - RNA, 20 nt, Human
gucucccccaacagcuggac

SEQ ID NO: 1310478 - RNA, 10 nt, Human
aaccaaguuc

SEQ ID NO: 1310479 - RNA, 19 nt, Human
aaccaauccuaugcauggu

SEQ ID NO: 1310480 - RNA, 13 nt, Human
aaccaauccugga

SEQ ID NO: 1310481 - RNA, 20 nt, Human
aaccaauccuaugcaugguu

SEQ ID NO: 1310482 - RNA, 16 nt, Human
aaccaaagaagaaagu

SEQ ID NO: 1310483 - RNA, 13 nt, Human
aaccaauuauuuu

SEQ ID NO: 1310484 - RNA, 17 nt, Human
aaccacacccacacuca

SEQ ID NO: 1310485 - RNA, 14 nt, Human
aaccaauuauuuuc

SEQ ID NO: 1310486 - RNA, 20 nt, Human
aaccacauuggagauguuua

SEQ ID NO: 1310487 - RNA, 17 nt, Human
aaccacauggcacagag

SEQ ID NO: 1310488 - RNA, 20 nt, Human
aaccuagggugauauuaacc

SEQ ID NO: 1310489 - RNA, 16 nt, Human
aaccccccagauauca

SEQ ID NO: 1310490 - RNA, 22 nt, Human
aaccuaugauauuuucugugcc

SEQ ID NO: 1310491 - RNA, 14 nt, Human
aaccccccagauau

SEQ ID NO: 1310492 - RNA, 22 nt, Human
aaccuauuucuuaaacacuugc

SEQ ID NO: 1310493 - RNA, 15 nt, Human
aaccccagacacugg

SEQ ID NO: 1310494 - RNA, 16 nt, Human
aaccucaacugccuac

SEQ ID NO: 1310495 - RNA, 17 nt, Human
aaccucaacugccuacu

SEQ ID NO: 1310496 - RNA, 18 nt, Human
aaccucaacugccuacuc

SEQ ID NO: 1310497 - RNA, 20 nt, Human
aaccucaccaacuccuaguu

SEQ ID NO: 1310498 - RNA, 17 nt, Human
aaccucaccaacuccua

SEQ ID NO: 1310499 - RNA, 11 nt, Human
aaccucagccu

SEQ ID NO: 1310500 - RNA, 12 nt, Human
aaccucagccug

SEQ ID NO: 1310501 - RNA, 13 nt, Human
aaccucagccugg

SEQ ID NO: 1310502 - RNA, 14 nt, Human
aaccucagccuggc

SEQ ID NO: 1310503 - RNA, 16 nt, Human
aaccucagccuggcca

SEQ ID NO: 1310504 - RNA, 14 nt, Human
aaccacauggcaca

SEQ ID NO: 1310505 - RNA, 20 nt, Human
aaccauguaaagaacauaaa

SEQ ID NO: 1310506 - RNA, 17 nt, Human
aaccauguagaaaauuu

SEQ ID NO: 1310507 - RNA, 17 nt, Human
aaccaugucauuucaga

SEQ ID NO: 1310508 - RNA, 13 nt, Human
aacccaaauguuc

SEQ ID NO: 1310509 - RNA, 18 nt, Human
aacccaaauguucaucaa

SEQ ID NO: 1310510 - RNA, 23 nt, Human
aacccaaauguucaucaaugaau

SEQ ID NO: 1310511 - RNA, 20 nt, Human
aacccagguuggcgacugca

SEQ ID NO: 1310512 - RNA, 15 nt, Human
aacccaguugccauc

SEQ ID NO: 1310513 - RNA, 20 nt, Human
aacccauauuuguacaccaa

SEQ ID NO: 1310514 - RNA, 17 nt, Human
aacccauauuguaaaac

SEQ ID NO: 1310515 - RNA, 21 nt, Human
aacccauauuguaaaacaggu

SEQ ID NO: 1310516 - RNA, 20 nt, Human
aacccaucaacaaaaauugu

SEQ ID NO: 1310517 - RNA, 19 nt, Human
aaccccaacuacuguguua

SEQ ID NO: 1310518 - RNA, 14 nt, Human
aacuccagaaagug

SEQ ID NO: 1310519 - RNA, 16 nt, Human
aacuagccccuggggu

SEQ ID NO: 1310520 - RNA, 13 nt, Human
aacuagccccugg

SEQ ID NO: 1310521 - RNA, 15 nt, Human
aacuagcauuguaaa

SEQ ID NO: 1310522 - RNA, 21 nt, Human
aacuagccaaaccaggacccu

SEQ ID NO: 1310523 - RNA, 18 nt, Human
aacuagccaaaccaggac

SEQ ID NO: 1310524 - RNA, 21 nt, Human
aacuccagaaagugacaagcu

SEQ ID NO: 1310525 - RNA, 15 nt, Human
aacuaggaaguggcu

SEQ ID NO: 1310526 - RNA, 22 nt, Human
aacuaggagcuuugacucagga

SEQ ID NO: 1310527 - RNA, 23 nt, Human
aacuaggagcuuugacucaggag

SEQ ID NO: 1310528 - RNA, 14 nt, Human
aacuaggaucagaa

SEQ ID NO: 1310529 - RNA, 13 nt, Human
aacucccugcccc

SEQ ID NO: 1310530 - RNA, 19 nt, Human
aacucccugccccccagcc

SEQ ID NO: 1310531 - RNA, 21 nt, Human
aacucccauuaccauguaaug

SEQ ID NO: 1310532 - RNA, 15 nt, Human
aacucccauuaccau

SEQ ID NO: 1310533 - RNA, 18 nt, Human
aacucguuaauuuguagu

SEQ ID NO: 1310534 - RNA, 19 nt, Human
aacucgugucuggcacagc

SEQ ID NO: 1310535 - RNA, 15 nt, Human
aacucguuuuuuaca

SEQ ID NO: 1310536 - RNA, 14 nt, Human
aacucccuuucaac

SEQ ID NO: 1310537 - RNA, 13 nt, Human
aacucccuuucaa

SEQ ID NO: 1310538 - RNA, 22 nt, Human
aacucuauauuguucagcaugc

SEQ ID NO: 1310539 - RNA, 23 nt, Human
aacucuauauuguucagcaugca

SEQ ID NO: 1310540 - RNA, 15 nt, Human
aaccuggagauggug

SEQ ID NO: 1310541 - RNA, 17 nt, Human
aaccuggagauggugga

SEQ ID NO: 1310542 - RNA, 11 nt, Human
aaccugcucuc

SEQ ID NO: 1310543 - RNA, 19 nt, Human
aaccugccugacauuugga

SEQ ID NO: 1310544 - RNA, 15 nt, Human
aaccugcucuccucu

SEQ ID NO: 1310545 - RNA, 13 nt, Human
aaccugcucuccu

SEQ ID NO: 1310546 - RNA, 14 nt, Human
aaccugcucuccuc

SEQ ID NO: 1310547 - RNA, 16 nt, Human
aaccugcucuccucuu

SEQ ID NO: 1310548 - RNA, 17 nt, Human
aaccugcucuccucuuc

SEQ ID NO: 1310549 - RNA, 20 nt, Human
aaccugcucuccucuugcca

SEQ ID NO: 1310550 - RNA, 13 nt, Human
aaccugcuuuuca

SEQ ID NO: 1310551 - RNA, 18 nt, Human
aacuaaacucuuaccaua

SEQ ID NO: 1310552 - RNA, 23 nt, Human
aacuaaacucuuaccauauguuu

SEQ ID NO: 1310553 - RNA, 20 nt, Human
aacuaaagugcugcacucaa

SEQ ID NO: 1310554 - RNA, 21 nt, Human
aacuaaaugugcaauagaagg

SEQ ID NO: 1310555 - RNA, 14 nt, Human
aacuaauaauugca

SEQ ID NO: 1310556 - RNA, 12 nt, Human
aacuaaugccuu

SEQ ID NO: 1310557 - RNA, 15 nt, Human
aacuaaugccuuacu

SEQ ID NO: 1310558 - RNA, 23 nt, Human
aacuaauuuuuauuuuugcugag

SEQ ID NO: 1310559 - RNA, 15 nt, Human
aacuaauuuaguaau

SEQ ID NO: 1310560 - RNA, 16 nt, Human
aacuacaaagguuuaa

SEQ ID NO: 1310561 - RNA, 17 nt, Human
aacuacaaagguuuaaa

SEQ ID NO: 1310562 - RNA, 18 nt, Human
aacuacaaagguuuaaau

SEQ ID NO: 1310563 - RNA, 20 nt, Human
aacuacaaagguuuaaauga

SEQ ID NO: 1310564 - RNA, 21 nt, Human
aacuacaaagguuuaaaugaa

SEQ ID NO: 1310565 - RNA, 13 nt, Human
aacuacaaaucaa

SEQ ID NO: 1310566 - RNA, 20 nt, Human
aacuacaaccaauggaaugu

SEQ ID NO: 1310567 - RNA, 14 nt, Human
aacuacagucuaaa

SEQ ID NO: 1310568 - RNA, 13 nt, Human
aacuacaugagaa

SEQ ID NO: 1310569 - RNA, 22 nt, Human
aacuacaugagaacaaacagau

SEQ ID NO: 1310570 - RNA, 13 nt, Human
aacuacaguggcu

SEQ ID NO: 1310571 - RNA, 12 nt, Human
gucugcucccaa

SEQ ID NO: 1310572 - RNA, 18 nt, Human
aaccucuucagaggcccu

SEQ ID NO: 1310573 - RNA, 19 nt, Human
gucugcucccaaggggccu

SEQ ID NO: 1310574 - RNA, 21 nt, Human
gucugcucccaaggggccuga

SEQ ID NO: 1310575 - RNA, 15 nt, Human
gucugcucuuucucu

SEQ ID NO: 1310576 - RNA, 17 nt, Human
gucugcucuuucucugc

SEQ ID NO: 1310577 - RNA, 19 nt, Human
gucugcucuuucucugcca

SEQ ID NO: 1310578 - RNA, 20 nt, Human
gucugcucuuucucugccag

SEQ ID NO: 1310579 - RNA, 22 nt, Human
gucugcucuuucucugccagug

SEQ ID NO: 1310580 - RNA, 13 nt, Human
gucugcuguagaa

SEQ ID NO: 1310581 - RNA, 16 nt, Human
gucugcuguuccagug

SEQ ID NO: 1310582 - RNA, 14 nt, Human
gucugcuguagaaa

SEQ ID NO: 1310583 - RNA, 13 nt, Human
gucuggcuggugu

SEQ ID NO: 1310584 - RNA, 14 nt, Human
gucuggcugguguu

SEQ ID NO: 1310585 - RNA, 15 nt, Human
gucuggcugguguua

SEQ ID NO: 1310586 - RNA, 16 nt, Human
gucuggcugguguuaa

SEQ ID NO: 1310587 - RNA, 15 nt, Human
gucuggcuucacaga

SEQ ID NO: 1310588 - RNA, 21 nt, Human
gucuggcugguguuaacagaa

SEQ ID NO: 1310589 - RNA, 13 nt, Human
gucuuaauuauua

SEQ ID NO: 1310590 - RNA, 18 nt, Human
gucuuaauuauuauuugu

SEQ ID NO: 1310591 - RNA, 21 nt, Human
gucuuaauuauuauuuguguu

SEQ ID NO: 1310592 - RNA, 14 nt, Human
gucuuccucugucu

SEQ ID NO: 1310593 - RNA, 14 nt, Human
gucuuccugacacu

SEQ ID NO: 1310594 - RNA, 18 nt, Human
gucuuccugacacuuuaa

SEQ ID NO: 1310595 - RNA, 19 nt, Human
gucuuccugacacuuuaau

SEQ ID NO: 1310596 - RNA, 12 nt, Human
gucuuccugagu

SEQ ID NO: 1310597 - RNA, 19 nt, Human
gucuuauauauuguagaua

SEQ ID NO: 1310598 - RNA, 19 nt, Human
gucuuaauuauuauuugug

SEQ ID NO: 1310599 - RNA, 19 nt, Human
gucuuccugaguggugcca

SEQ ID NO: 1310600 - RNA, 16 nt, Human
gucuuuucccauuuau

SEQ ID NO: 1310601 - RNA, 21 nt, Human
guccaagcauuuagauguaua

SEQ ID NO: 1310602 - RNA, 15 nt, Human
guccaagcugggaga

SEQ ID NO: 1310603 - RNA, 20 nt, Human
guccaagguuuaaagagucu

SEQ ID NO: 1310604 - RNA, 21 nt, Human
guccaagguuuaaagagucua

SEQ ID NO: 1310605 - RNA, 12 nt, Human
guccaauccuau

SEQ ID NO: 1310606 - RNA, 17 nt, Human
guccaauccuauguuuu

SEQ ID NO: 1310607 - RNA, 15 nt, Human
guccaaugagcuuuc

SEQ ID NO: 1310608 - RNA, 16 nt, Human
guccaaugagcuuucu

SEQ ID NO: 1310609 - RNA, 17 nt, Human
guccaaugagcuuucug

SEQ ID NO: 1310610 - RNA, 18 nt, Human
guccaaugagcuuucuga

SEQ ID NO: 1310611 - RNA, 19 nt, Human
guccaaugagcuuucugaa

SEQ ID NO: 1310612 - RNA, 21 nt, Human
guccaaugagcuuucugaaca

SEQ ID NO: 1310613 - RNA, 15 nt, Human
guccacaacacacag

SEQ ID NO: 1310614 - RNA, 12 nt, Human
guccaauguggc

SEQ ID NO: 1310615 - RNA, 23 nt, Human
guccaaugagcuuucugaacagc

SEQ ID NO: 1310616 - RNA, 16 nt, Human
guccaauuaguuuccu

SEQ ID NO: 1310617 - RNA, 17 nt, Human
guccaauuaguuuccuu

SEQ ID NO: 1310618 - RNA, 20 nt, Human
guccacaaaauaaccaaucc

SEQ ID NO: 1310619 - RNA, 16 nt, Human
guccauuguccaaucc

SEQ ID NO: 1310620 - RNA, 21 nt, Human
guccauuguccaauccuaugu

SEQ ID NO: 1310621 - RNA, 16 nt, Human
guccauuuacacguau

SEQ ID NO: 1310622 - RNA, 11 nt, Human
aacacuuccau

SEQ ID NO: 1310623 - RNA, 12 nt, Human
aacacuuguaau

SEQ ID NO: 1310624 - RNA, 21 nt, Human
gucauuugcugagcauguacu

SEQ ID NO: 1310625 - RNA, 22 nt, Human
gucauuugcugagcauguacug

SEQ ID NO: 1310626 - RNA, 12 nt, Human
aacacucuuuug

SEQ ID NO: 1310627 - RNA, 22 nt, Human
aacacuguaguaaauaaugcuu

SEQ ID NO: 1310628 - RNA, 20 nt, Human
aacacugugcacaucugugu

SEQ ID NO: 1310629 - RNA, 22 nt, Human
aacacugugcacaucugugucu

SEQ ID NO: 1310630 - RNA, 12 nt, Human
aacacugccagc

SEQ ID NO: 1310631 - RNA, 22 nt, Human
aacacugccagcauuucccuuc

SEQ ID NO: 1310632 - RNA, 16 nt, Human
aacacucuuuugcuuu

SEQ ID NO: 1310633 - RNA, 19 nt, Human
aacacucuuuugcuuuauu

SEQ ID NO: 1310634 - RNA, 19 nt, Human
aacacuguaguaaauaaug

SEQ ID NO: 1310635 - RNA, 14 nt, Human
aacaaugcuguauu

SEQ ID NO: 1310636 - RNA, 17 nt, Human
aacaaucuuccuguuua

SEQ ID NO: 1310637 - RNA, 22 nt, Human
aacaaugaauaaaaacucaagg

SEQ ID NO: 1310638 - RNA, 24 nt, Human
aacaaugaauaaaaacucaaggag

SEQ ID NO: 1310639 - RNA, 17 nt, Human
aacaaugacaaagcaga

SEQ ID NO: 1310640 - RNA, 18 nt, Human
aacaaugacaaagcagau

SEQ ID NO: 1310641 - RNA, 15 nt, Human
aacaaugacauuuau

SEQ ID NO: 1310642 - RNA, 18 nt, Human
aacaaugaaaacucuuug

SEQ ID NO: 1310643 - RNA, 14 nt, Human
aacaaucuuccugu

SEQ ID NO: 1310644 - RNA, 18 nt, Human
aacaauuguguagccuuu

SEQ ID NO: 1310645 - RNA, 20 nt, Human
aacaauuguguagccuuuuu

SEQ ID NO: 1310646 - RNA, 23 nt, Human
aacaauuguguagccuuuuugua

SEQ ID NO: 1310647 - RNA, 13 nt, Human
aacaauuuaugaa

SEQ ID NO: 1310648 - RNA, 16 nt, Human
aacaauuuaugaauug

SEQ ID NO: 1310649 - RNA, 22 nt, Human
aacaauuguguagccuuuuugu

SEQ ID NO: 1310650 - RNA, 14 nt, Human
aacaauuuggcaau

SEQ ID NO: 1310651 - RNA, 18 nt, Human
aacaauuuggcaauuuug

SEQ ID NO: 1310652 - RNA, 19 nt, Human
aacaauuuggcaauuuugu

SEQ ID NO: 1310653 - RNA, 23 nt, Human
aacaauuuuaggaggaccagagc

SEQ ID NO: 1310654 - RNA, 15 nt, Human
aacaagucagucauu

SEQ ID NO: 1310655 - RNA, 12 nt, Human
aacaaguauuug

SEQ ID NO: 1310656 - RNA, 20 nt, Human
aacaaguauuuguuaauuua

SEQ ID NO: 1310657 - RNA, 23 nt, Human
aacaaguauuuguuaauuuagaa

SEQ ID NO: 1310658 - RNA, 18 nt, Human
aacaagucagucauucag

SEQ ID NO: 1310659 - RNA, 20 nt, Human
aacaauaccugaaugcucug

SEQ ID NO: 1310660 - RNA, 21 nt, Human
aacaauaccugaaugcucugu

SEQ ID NO: 1310661 - RNA, 12 nt, Human
aacaauaccuga

SEQ ID NO: 1310662 - RNA, 17 nt, Human
aacaauacaaauggauu

SEQ ID NO: 1310663 - RNA, 13 nt, Human
aacaauacaaaug

SEQ ID NO: 1310664 - RNA, 14 nt, Human
aacaauacaaaugg

SEQ ID NO: 1310665 - RNA, 15 nt, Human
aacaauacaaaugga

SEQ ID NO: 1310666 - RNA, 16 nt, Human
aacaauacaaauggau

SEQ ID NO: 1310667 - RNA, 15 nt, Human
aacaaggaugaauua

SEQ ID NO: 1310668 - RNA, 14 nt, Human
aacaaggaagucaa

SEQ ID NO: 1310669 - RNA, 16 nt, Human
aaauuuuucugcuuua

SEQ ID NO: 1310670 - RNA, 21 nt, Human
aacaagccuccuuuuaaagua

SEQ ID NO: 1310671 - RNA, 17 nt, Human
aaauuuuuguaguagcg

SEQ ID NO: 1310672 - RNA, 23 nt, Human
aaauuuuuaaucuuuaauuuuac

SEQ ID NO: 1310673 - RNA, 17 nt, Human
gucacagggcaguaccu

SEQ ID NO: 1310674 - RNA, 18 nt, Human
aaauuuuuaggaaacuca

SEQ ID NO: 1310675 - RNA, 20 nt, Human
aaauuuuguuuauaagaaau

SEQ ID NO: 1310676 - RNA, 17 nt, Human
aaauuuuucuucuugag

SEQ ID NO: 1310677 - RNA, 11 nt, Human
gucacagggca

SEQ ID NO: 1310678 - RNA, 12 nt, Human
gucacagggcag

SEQ ID NO: 1310679 - RNA, 13 nt, Human
gucacagggcagu

SEQ ID NO: 1310680 - RNA, 19 nt, Human
aacaguuguguuugaagca

SEQ ID NO: 1310681 - RNA, 22 nt, Human
aacaguugguaacuuuugugaa

SEQ ID NO: 1310682 - RNA, 13 nt, Human
aacaguuguauuu

SEQ ID NO: 1310683 - RNA, 13 nt, Human
aacaguguuuaaa

SEQ ID NO: 1310684 - RNA, 21 nt, Human
aacaguugguaacuuuuguga

SEQ ID NO: 1310685 - RNA, 23 nt, Human
aacaguuguauuuaacagaaauu

SEQ ID NO: 1310686 - RNA, 20 nt, Human
aacaguuguauuuaacagaa

SEQ ID NO: 1310687 - RNA, 13 nt, Human
aacaguuuaauga

SEQ ID NO: 1310688 - RNA, 15 nt, Human
aacaguuuaaugaag

SEQ ID NO: 1310689 - RNA, 18 nt, Human
aacaguuuaaugaagauc

SEQ ID NO: 1310690 - RNA, 21 nt, Human
aacaguuuaaugaagaucuaa

SEQ ID NO: 1310691 - RNA, 20 nt, Human
aacaguuuaaugaagaucua

SEQ ID NO: 1310692 - RNA, 18 nt, Human
aacaguaaaccacugaaa

SEQ ID NO: 1310693 - RNA, 19 nt, Human
aacaguaaaccacugaaaa

SEQ ID NO: 1310694 - RNA, 18 nt, Human
aacaguaucucaaacaau

SEQ ID NO: 1310695 - RNA, 14 nt, Human
aacaguggaucaca

SEQ ID NO: 1310696 - RNA, 16 nt, Human
aacagugugcaaggca

SEQ ID NO: 1310697 - RNA, 19 nt, Human
aacagugugcaaggcagcc

SEQ ID NO: 1310698 - RNA, 18 nt, Human
aacagugugcaaggcagc

SEQ ID NO: 1310699 - RNA, 22 nt, Human
aacaguagugauaguuguaccg

SEQ ID NO: 1310700 - RNA, 13 nt, Human
aacaguaaaccac

SEQ ID NO: 1310701 - RNA, 15 nt, Human
aacaguaaaccacug

SEQ ID NO: 1310702 - RNA, 16 nt, Human
aacaguaaaccacuga

SEQ ID NO: 1310703 - RNA, 17 nt, Human
aacaguaaaccacugaa

SEQ ID NO: 1310704 - RNA, 23 nt, Human
aacaguaaaccacugaaaaaaua

SEQ ID NO: 1310705 - RNA, 22 nt, Human
guccgcugggugguacccucug

SEQ ID NO: 1310706 - RNA, 15 nt, Human
guccggcagcuucug

SEQ ID NO: 1310707 - RNA, 18 nt, Human
guccggcagcuucugccc

SEQ ID NO: 1310708 - RNA, 23 nt, Human
aacagaaaaauauguaccaagaa

SEQ ID NO: 1310709 - RNA, 13 nt, Human
aacagaaacaaaa

SEQ ID NO: 1310710 - RNA, 15 nt, Human
gucccaacuuguaaa

SEQ ID NO: 1310711 - RNA, 15 nt, Human
guccgaucuuugacu

SEQ ID NO: 1310712 - RNA, 16 nt, Human
aacagaaacaaaaaca

SEQ ID NO: 1310713 - RNA, 22 nt, Human
aacagaaagccugggugacauu

SEQ ID NO: 1310714 - RNA, 15 nt, Human
aacagaaauuguaua

SEQ ID NO: 1310715 - RNA, 17 nt, Human
aacagaaauuguauauu

SEQ ID NO: 1310716 - RNA, 18 nt, Human
aacagaaauuguauauug

SEQ ID NO: 1310717 - RNA, 19 nt, Human
aacagaaauuguauauugu

SEQ ID NO: 1310718 - RNA, 21 nt, Human
aacagaaauuguauauuguaa

SEQ ID NO: 1310719 - RNA, 12 nt, Human
aacagaacacuu

SEQ ID NO: 1310720 - RNA, 13 nt, Human
aacagaacacuua

SEQ ID NO: 1310721 - RNA, 18 nt, Human
aacagaacauagacagaa

SEQ ID NO: 1310722 - RNA, 22 nt, Human
aacauuuguucuauagcuuuuc

SEQ ID NO: 1310723 - RNA, 14 nt, Human
aacauuugcuguuu

SEQ ID NO: 1310724 - RNA, 15 nt, Human
aacauuugcuguuuu

SEQ ID NO: 1310725 - RNA, 16 nt, Human
aacauuugcuguuuua

SEQ ID NO: 1310726 - RNA, 15 nt, Human
guccucugagacucc

SEQ ID NO: 1310727 - RNA, 19 nt, Human
guccucugagacuccagac

SEQ ID NO: 1310728 - RNA, 18 nt, Human
guccucugucagucacag

SEQ ID NO: 1310729 - RNA, 19 nt, Human
guccucugucagucacagc

SEQ ID NO: 1310730 - RNA, 20 nt, Human
guccucugucagucacagcc

SEQ ID NO: 1310731 - RNA, 23 nt, Human
guccucugucagucacagccacc

SEQ ID NO: 1310732 - RNA, 18 nt, Human
guccucuuccaccacaga

SEQ ID NO: 1310733 - RNA, 18 nt, Human
guccucuucccucucugc

SEQ ID NO: 1310734 - RNA, 19 nt, Human
guccucuucccucucugca

SEQ ID NO: 1310735 - RNA, 20 nt, Human
guccucuucccucucugcag

SEQ ID NO: 1310736 - RNA, 13 nt, Human
guccucuucuggg

SEQ ID NO: 1310737 - RNA, 16 nt, Human
guccugagaaagcuca

SEQ ID NO: 1310738 - RNA, 13 nt, Human
guccugagcacug

SEQ ID NO: 1310739 - RNA, 14 nt, Human
guccugagcacugc

SEQ ID NO: 1310740 - RNA, 16 nt, Human
guccugagcacugcca

SEQ ID NO: 1310741 - RNA, 17 nt, Human
guccugagcacugccag

SEQ ID NO: 1310742 - RNA, 18 nt, Human
guccugagcacugccagg

SEQ ID NO: 1310743 - RNA, 19 nt, Human
guccugagcacugccagga

SEQ ID NO: 1310744 - RNA, 20 nt, Human
guccugagcacugccaggag

SEQ ID NO: 1310745 - RNA, 21 nt, Human
guccugagcacugccaggagg

SEQ ID NO: 1310746 - RNA, 22 nt, Human
guccugagcacugccaggaggg

SEQ ID NO: 1310747 - RNA, 23 nt, Human
guccugagcacugccaggaggga

SEQ ID NO: 1310748 - RNA, 18 nt, Human
guccugagccccagggag

SEQ ID NO: 1310749 - RNA, 13 nt, Human
guccugagcucag

SEQ ID NO: 1310750 - RNA, 14 nt, Human
guccugagcucagc

SEQ ID NO: 1310751 - RNA, 15 nt, Human
guccugagcucagcg

SEQ ID NO: 1310752 - RNA, 16 nt, Human
guccugagcucagcgu

SEQ ID NO: 1310753 - RNA, 19 nt, Human
guccugagcucagcgugga

SEQ ID NO: 1310754 - RNA, 18 nt, Human
guccugagcucagcgugg

SEQ ID NO: 1310755 - RNA, 15 nt, Human
guccugaucagagcc

SEQ ID NO: 1310756 - RNA, 17 nt, Human
guccugccacccagccc

SEQ ID NO: 1310757 - RNA, 20 nt, Human
guccugccacccagccccag

SEQ ID NO: 1310758 - RNA, 11 nt, Human
guccugccugu

SEQ ID NO: 1310759 - RNA, 13 nt, Human
guccugccugugg

SEQ ID NO: 1310760 - RNA, 14 nt, Human
guccugccuguggc

SEQ ID NO: 1310761 - RNA, 15 nt, Human
guccugccuguggcg

SEQ ID NO: 1310762 - RNA, 16 nt, Human
guccuuagccuggacc

SEQ ID NO: 1310763 - RNA, 19 nt, Human
guccuuagccuggaccucu

SEQ ID NO: 1310764 - RNA, 20 nt, Human
guccuuagccuggaccucug

SEQ ID NO: 1310765 - RNA, 23 nt, Human
guccuuagccuggaccucugaca

SEQ ID NO: 1310766 - RNA, 18 nt, Human
guccuuaggccucugaga

SEQ ID NO: 1310767 - RNA, 17 nt, Human
guccuuaggccucugag

SEQ ID NO: 1310768 - RNA, 13 nt, Human
guccuucaaaggc

SEQ ID NO: 1310769 - RNA, 20 nt, Human
aacauuuguucuauagcuuu

SEQ ID NO: 1310770 - RNA, 18 nt, Human
aacauuugguaaggggaa

SEQ ID NO: 1310771 - RNA, 16 nt, Human
aacauuucucaauaau

SEQ ID NO: 1310772 - RNA, 19 nt, Human
aacauuuauuuugacauaa

SEQ ID NO: 1310773 - RNA, 22 nt, Human
aacauuucuauagccaaaaaua

SEQ ID NO: 1310774 - RNA, 16 nt, Human
aacauuguagccucaa

SEQ ID NO: 1310775 - RNA, 13 nt, Human
aacauuguguucc

SEQ ID NO: 1310776 - RNA, 23 nt, Human
aacauuguguucccauuucagcu

SEQ ID NO: 1310777 - RNA, 15 nt, Human
aacauuuauuuugac

SEQ ID NO: 1310778 - RNA, 17 nt, Human
aacauuuauuuugacau

SEQ ID NO: 1310779 - RNA, 19 nt, Human
aacauacauuuuguaccaa

SEQ ID NO: 1310780 - RNA, 16 nt, Human
aacauacauuuuguac

SEQ ID NO: 1310781 - RNA, 12 nt, Human
aacaguuuuccu

SEQ ID NO: 1310782 - RNA, 20 nt, Human
aacauaccccuuacaaauga

SEQ ID NO: 1310783 - RNA, 21 nt, Human
aacauaccccuuacaaaugaa

SEQ ID NO: 1310784 - RNA, 17 nt, Human
aacauaccuaagaagua

SEQ ID NO: 1310785 - RNA, 16 nt, Human
caagaccgaucggcgg

SEQ ID NO: 1310786 - RNA, 15 nt, Human
caagaaaugaaagca

SEQ ID NO: 1310787 - RNA, 21 nt, Human
caagaaauaaaaggaagccaa

SEQ ID NO: 1310788 - RNA, 18 nt, Human
caagaaauaaguuuuugu

SEQ ID NO: 1310789 - RNA, 13 nt, Human
caagaaaugaaag

SEQ ID NO: 1310790 - RNA, 13 nt, Human
caagaaauaaaag

SEQ ID NO: 1310791 - RNA, 19 nt, Human
caagaaauaaaaggaagcc

SEQ ID NO: 1310792 - RNA, 20 nt, Human
caagaaauaaaaggaagcca

SEQ ID NO: 1310793 - RNA, 20 nt, Human
caacuugcaaaaucaguuuu

SEQ ID NO: 1310794 - RNA, 19 nt, Human
caacuugcaaaaucaguuu

SEQ ID NO: 1310795 - RNA, 18 nt, Human
caacuugcaaaaucaguu

SEQ ID NO: 1310796 - RNA, 20 nt, Human
caagaaaggcugcuguacug

SEQ ID NO: 1310797 - RNA, 15 nt, Human
caacuugcaaaauca

SEQ ID NO: 1310798 - RNA, 12 nt, Human
caacuugcaaaa

SEQ ID NO: 1310799 - RNA, 19 nt, Human
caacuugagcauguuacug

SEQ ID NO: 1310800 - RNA, 18 nt, Human
caacuugagcauguuacu

SEQ ID NO: 1310801 - RNA, 20 nt, Human
caacuugagcauguuacuga

SEQ ID NO: 1310802 - RNA, 17 nt, Human
caagaccucagugccuu

SEQ ID NO: 1310803 - RNA, 21 nt, Human
caagacccuuuuggguuucug

SEQ ID NO: 1310804 - RNA, 12 nt, Human
caagacugcugu

SEQ ID NO: 1310805 - RNA, 19 nt, Human
caagacugcuguggccagg

SEQ ID NO: 1310806 - RNA, 20 nt, Human
caagacugcuguggccagga

SEQ ID NO: 1310807 - RNA, 21 nt, Human
caagacugcuguggccaggag

SEQ ID NO: 1310808 - RNA, 22 nt, Human
caagacugcuguggccaggagg

SEQ ID NO: 1310809 - RNA, 21 nt, Human
caagcagccugagcaacucuu

SEQ ID NO: 1310810 - RNA, 22 nt, Human
caagcagcgaccgcccccuccu

SEQ ID NO: 1310811 - RNA, 13 nt, Human
caagcagcuuaga

SEQ ID NO: 1310812 - RNA, 18 nt, Human
caagcagcuuagaguugg

SEQ ID NO: 1310813 - RNA, 20 nt, Human
caagcagcuuagaguuggcc

SEQ ID NO: 1310814 - RNA, 14 nt, Human
caagagaaacuucc

SEQ ID NO: 1310815 - RNA, 16 nt, Human
caagagaaacuuccua

SEQ ID NO: 1310816 - RNA, 23 nt, Human
caagacugcuguggccaggaggu

SEQ ID NO: 1310817 - RNA, 20 nt, Human
caagacuucucuuugccuca

SEQ ID NO: 1310818 - RNA, 21 nt, Human
caagacuucucuuugccucaa

SEQ ID NO: 1310819 - RNA, 13 nt, Human
caagagcccuguc

SEQ ID NO: 1310820 - RNA, 18 nt, Human
caagagggcacugguggc

SEQ ID NO: 1310821 - RNA, 19 nt, Human
caagagggcacugguggcc

SEQ ID NO: 1310822 - RNA, 20 nt, Human
caagagggcacugguggccc

SEQ ID NO: 1310823 - RNA, 16 nt, Human
caagcauuuagaugua

SEQ ID NO: 1310824 - RNA, 19 nt, Human
caagcauuuagauguauag

SEQ ID NO: 1310825 - RNA, 14 nt, Human
caagcauucugucu

SEQ ID NO: 1310826 - RNA, 21 nt, Human
caagccauggguagccugggu

SEQ ID NO: 1310827 - RNA, 20 nt, Human
caagccaucuugagugguca

SEQ ID NO: 1310828 - RNA, 17 nt, Human
caagcccagcacugcuu

SEQ ID NO: 1310829 - RNA, 19 nt, Human
caagcccagcccauggaga

SEQ ID NO: 1310830 - RNA, 17 nt, Human
caagcaggaaaugaaaa

SEQ ID NO: 1310831 - RNA, 23 nt, Human
caagcaggaaaugaaaaugucuu

SEQ ID NO: 1310832 - RNA, 15 nt, Human
caagcagucgugccu

SEQ ID NO: 1310833 - RNA, 16 nt, Human
caagcagucgugccug

SEQ ID NO: 1310834 - RNA, 18 nt, Human
caagcagucgugccugug

SEQ ID NO: 1310835 - RNA, 19 nt, Human
caagcagucgugccugugu

SEQ ID NO: 1310836 - RNA, 20 nt, Human
caagcagucgugccuguguc

SEQ ID NO: 1310837 - RNA, 21 nt, Human
caagcagucgugccugugucc

SEQ ID NO: 1310838 - RNA, 22 nt, Human
caagcaguugggacuacaggcg

SEQ ID NO: 1310839 - RNA, 17 nt, Human
caagcauauaaaauuuu

SEQ ID NO: 1310840 - RNA, 21 nt, Human
caagcaucuuggggggguggc

SEQ ID NO: 1310841 - RNA, 18 nt, Human
caagcauggcuauuuuau

SEQ ID NO: 1310842 - RNA, 21 nt, Human
caagcauggcuauuuuauauu

SEQ ID NO: 1310843 - RNA, 23 nt, Human
caagcauggucccacaucccugg

SEQ ID NO: 1310844 - RNA, 22 nt, Human
caagcauggucccacaucccug

SEQ ID NO: 1310845 - RNA, 16 nt, Human
caagcauucagaagaa

SEQ ID NO: 1310846 - RNA, 22 nt, Human
caagcauucagaagaaaaagaa

SEQ ID NO: 1310847 - RNA, 17 nt, Human
caagcauucagaagaaa

SEQ ID NO: 1310848 - RNA, 20 nt, Human
caaggacuaggguccugggg

SEQ ID NO: 1310849 - RNA, 21 nt, Human
caaggacuaggguccugggga

SEQ ID NO: 1310850 - RNA, 16 nt, Human
caaggacuaggguccu

SEQ ID NO: 1310851 - RNA, 18 nt, Human
caaggacuaggguccugg

SEQ ID NO: 1310852 - RNA, 19 nt, Human
caaggacuaggguccuggg

SEQ ID NO: 1310853 - RNA, 14 nt, Human
caagcuguuuucuu

SEQ ID NO: 1310854 - RNA, 16 nt, Human
caagcuguuuucuucu

SEQ ID NO: 1310855 - RNA, 20 nt, Human
caagcuuaauggcugauaau

SEQ ID NO: 1310856 - RNA, 24 nt, Human
caagcuucugagacgucaugagga

SEQ ID NO: 1310857 - RNA, 15 nt, Human
caagcuucugagacg

SEQ ID NO: 1310858 - RNA, 18 nt, Human
caagggcagcuuugcuca

SEQ ID NO: 1310859 - RNA, 22 nt, Human
caagggcagggggccccuuugc

SEQ ID NO: 1310860 - RNA, 23 nt, Human
caagggcagggggccccuuugcu

SEQ ID NO: 1310861 - RNA, 18 nt, Human
caagggcauaaauuauug

SEQ ID NO: 1310862 - RNA, 14 nt, Human
caagggcagcuuug

SEQ ID NO: 1310863 - RNA, 11 nt, Human
caagggcagcu

SEQ ID NO: 1310864 - RNA, 14 nt, Human
caagggaggcugcu

SEQ ID NO: 1310865 - RNA, 16 nt, Human
caagggaggcugcugc

SEQ ID NO: 1310866 - RNA, 17 nt, Human
caagggaggcugcugcu

SEQ ID NO: 1310867 - RNA, 14 nt, Human
caagggccugaugg

SEQ ID NO: 1310868 - RNA, 18 nt, Human
caaggggaaucagaacuc

SEQ ID NO: 1310869 - RNA, 21 nt, Human
caaggggauuuuuaugucugg

SEQ ID NO: 1310870 - RNA, 15 nt, Human
caagguguccuacag

SEQ ID NO: 1310871 - RNA, 16 nt, Human
caagguguccuacaga

SEQ ID NO: 1310872 - RNA, 17 nt, Human
caagguguccuacagaa

SEQ ID NO: 1310873 - RNA, 18 nt, Human
caagguguccuacagaaa

SEQ ID NO: 1310874 - RNA, 21 nt, Human
caagguguccuacagaaaaac

SEQ ID NO: 1310875 - RNA, 20 nt, Human
caagguuacuuaauucaacu

SEQ ID NO: 1310876 - RNA, 21 nt, Human
caagguuacuuaauucaacuu

SEQ ID NO: 1310877 - RNA, 20 nt, Human
caagguguccuacagaaaaa

SEQ ID NO: 1310878 - RNA, 14 nt, Human
caagguacucuggu

SEQ ID NO: 1310879 - RNA, 16 nt, Human
caagguacucugguga

SEQ ID NO: 1310880 - RNA, 15 nt, Human
caagguaccauccua

SEQ ID NO: 1310881 - RNA, 18 nt, Human
caagguuuaaagagucua

SEQ ID NO: 1310882 - RNA, 20 nt, Human
caagguuuaaagagucuaga

SEQ ID NO: 1310883 - RNA, 22 nt, Human
caagguuuaaagagucuagauu

SEQ ID NO: 1310884 - RNA, 21 nt, Human
caagguuuaaagagucuagau

SEQ ID NO: 1310885 - RNA, 18 nt, Human
caagguucaacuuauuaa

SEQ ID NO: 1310886 - RNA, 13 nt, Human
caagguucuaacc

SEQ ID NO: 1310887 - RNA, 15 nt, Human
caagguucuccaaca

SEQ ID NO: 1310888 - RNA, 17 nt, Human
caagguuuaaagagucu

SEQ ID NO: 1310889 - RNA, 21 nt, Human
caagugaccuauaccuguguu

SEQ ID NO: 1310890 - RNA, 20 nt, Human
caaccuccgcauccgggguu

SEQ ID NO: 1310891 - RNA, 20 nt, Human
caaccuccaccuccuggguu

SEQ ID NO: 1310892 - RNA, 17 nt, Human
caaccugcaaagaucug

SEQ ID NO: 1310893 - RNA, 21 nt, Human
caaccugccugacauuuggag

SEQ ID NO: 1310894 - RNA, 14 nt, Human
caaccuccaccucc

SEQ ID NO: 1310895 - RNA, 15 nt, Human
caaccugcucuccuc

SEQ ID NO: 1310896 - RNA, 12 nt, Human
caacucuugauu

SEQ ID NO: 1310897 - RNA, 16 nt, Human
caacucuugauuaucc

SEQ ID NO: 1310898 - RNA, 18 nt, Human
caacucuugauuauccau

SEQ ID NO: 1310899 - RNA, 16 nt, Human
caaccugcucuccucu

SEQ ID NO: 1310900 - RNA, 13 nt, Human
caacucuuugaga

SEQ ID NO: 1310901 - RNA, 14 nt, Human
caacucuuugagaa

SEQ ID NO: 1310902 - RNA, 15 nt, Human
caacucuuugagaaa

SEQ ID NO: 1310903 - RNA, 16 nt, Human
caacucuuugagaaac

SEQ ID NO: 1310904 - RNA, 13 nt, Human
caacucuuuguua

SEQ ID NO: 1310905 - RNA, 14 nt, Human
caacucuuuguuau

SEQ ID NO: 1310906 - RNA, 18 nt, Human
caacucuuuguuauuuga

SEQ ID NO: 1310907 - RNA, 18 nt, Human
caacugaaugaggucagc

SEQ ID NO: 1310908 - RNA, 12 nt, Human
caacuggcaggc

SEQ ID NO: 1310909 - RNA, 14 nt, Human
caacuggcaggcag

SEQ ID NO: 1310910 - RNA, 18 nt, Human
caacuggcccuauuuaga

SEQ ID NO: 1310911 - RNA, 23 nt, Human
caacuggcccuauuuagaugaua

SEQ ID NO: 1310912 - RNA, 19 nt, Human
caacuggcccuauuuagau

SEQ ID NO: 1310913 - RNA, 21 nt, Human
caacugucucgaugcaaugaa

SEQ ID NO: 1310914 - RNA, 23 nt, Human
caacugucucgaugcaaugaaca

SEQ ID NO: 1310915 - RNA, 21 nt, Human
caacugucuccuaccucugcu

SEQ ID NO: 1310916 - RNA, 15 nt, Human
caaccucauccucuc

SEQ ID NO: 1310917 - RNA, 15 nt, Human
caaccucaguaauuu

SEQ ID NO: 1310918 - RNA, 18 nt, Human
caaccucaguaauuuaga

SEQ ID NO: 1310919 - RNA, 18 nt, Human
caaccucauccuccuucu

SEQ ID NO: 1310920 - RNA, 18 nt, Human
caaccucaacugccuacu

SEQ ID NO: 1310921 - RNA, 15 nt, Human
caaccuaaaacucuu

SEQ ID NO: 1310922 - RNA, 16 nt, Human
caacaguuacauaauu

SEQ ID NO: 1310923 - RNA, 12 nt, Human
caacaguuuaau

SEQ ID NO: 1310924 - RNA, 15 nt, Human
caacaguuuaaugaa

SEQ ID NO: 1310925 - RNA, 20 nt, Human
caacaguuuaaugaagaucu

SEQ ID NO: 1310926 - RNA, 12 nt, Human
caacaguuuucc

SEQ ID NO: 1310927 - RNA, 13 nt, Human
caacaguuuuccu

SEQ ID NO: 1310928 - RNA, 20 nt, Human
caacaguuuuccuaugcuuu

SEQ ID NO: 1310929 - RNA, 22 nt, Human
caacaguuuuccuaugcuuuga

SEQ ID NO: 1310930 - RNA, 22 nt, Human
caacaguuuuuuaugcuaauca

SEQ ID NO: 1310931 - RNA, 23 nt, Human
caaauuuacagagacagaaagca

SEQ ID NO: 1310932 - RNA, 17 nt, Human
caaauuuacagagacag

SEQ ID NO: 1310933 - RNA, 17 nt, Human
caaauuguaagcaugca

SEQ ID NO: 1310934 - RNA, 13 nt, Human
caaauuggagaaa

SEQ ID NO: 1310935 - RNA, 21 nt, Human
caaauuggagcuucauggcag

SEQ ID NO: 1310936 - RNA, 14 nt, Human
caaauucuucugaa

SEQ ID NO: 1310937 - RNA, 15 nt, Human
caaauucuucugaac

SEQ ID NO: 1310938 - RNA, 22 nt, Human
caaauguuuaaucauauaaaua

SEQ ID NO: 1310939 - RNA, 23 nt, Human
caaauguuuauuaagcaucagaa

SEQ ID NO: 1310940 - RNA, 15 nt, Human
caaauuaaaaaagau

SEQ ID NO: 1310941 - RNA, 16 nt, Human
caaauuaaaaaagaua

SEQ ID NO: 1310942 - RNA, 17 nt, Human
caaauuaaaaaagauaa

SEQ ID NO: 1310943 - RNA, 19 nt, Human
caaauuaaaaaagauaaac

SEQ ID NO: 1310944 - RNA, 21 nt, Human
caaauuaaaaaagauaaacac

SEQ ID NO: 1310945 - RNA, 20 nt, Human
caaauuaaaaaagauaaaca

SEQ ID NO: 1310946 - RNA, 21 nt, Human
caaaguucuaauaauuucuaa

SEQ ID NO: 1310947 - RNA, 22 nt, Human
caaaguucuaauaauuucuaau

SEQ ID NO: 1310948 - RNA, 17 nt, Human
caaaguucucuguggca

SEQ ID NO: 1310949 - RNA, 22 nt, Human
caaaguucccuacuuccuguga

SEQ ID NO: 1310950 - RNA, 18 nt, Human
caaaggggaccuggaagg

SEQ ID NO: 1310951 - RNA, 20 nt, Human
caaaguucuaauaauuucua

SEQ ID NO: 1310952 - RNA, 20 nt, Human
caaauguuuaaucauauaaa

SEQ ID NO: 1310953 - RNA, 19 nt, Human
caaauguuuaaucauauaa

SEQ ID NO: 1310954 - RNA, 17 nt, Human
caaauguuuaaucauau

SEQ ID NO: 1310955 - RNA, 16 nt, Human
caaauguuuaaucaua

SEQ ID NO: 1310956 - RNA, 15 nt, Human
caaauauuuauuuuc

SEQ ID NO: 1310957 - RNA, 16 nt, Human
caaauauuuauuuucu

SEQ ID NO: 1310958 - RNA, 22 nt, Human
caaauauuuagauguaauuuug

SEQ ID NO: 1310959 - RNA, 23 nt, Human
caaauauuuagauguaauuuugu

SEQ ID NO: 1310960 - RNA, 12 nt, Human
caaauauuuauu

SEQ ID NO: 1310961 - RNA, 14 nt, Human
caaauauuuauuuu

SEQ ID NO: 1310962 - RNA, 23 nt, Human
caaaguucuaauaauuucuaaug

SEQ ID NO: 1310963 - RNA, 21 nt, Human
caaauauuuagauguaauuuu

SEQ ID NO: 1310964 - RNA, 13 nt, Human
caaaggacgcacu

SEQ ID NO: 1310965 - RNA, 18 nt, Human
caaaggacgcacugagca

SEQ ID NO: 1310966 - RNA, 16 nt, Human
caaaggacgcacugag

SEQ ID NO: 1310967 - RNA, 18 nt, Human
caaagcccuuccaugucg

SEQ ID NO: 1310968 - RNA, 22 nt, Human
caaagcccccagagcccaggcu

SEQ ID NO: 1310969 - RNA, 19 nt, Human
caaagcccccagagcccag

SEQ ID NO: 1310970 - RNA, 14 nt, Human
caaagcccccagag

SEQ ID NO: 1310971 - RNA, 15 nt, Human
caaagcccccagagc

SEQ ID NO: 1310972 - RNA, 16 nt, Human
caaagcccccagagcc

SEQ ID NO: 1310973 - RNA, 17 nt, Human
caaagcccccagagccc

SEQ ID NO: 1310974 - RNA, 18 nt, Human
caaagcccccagagccca

SEQ ID NO: 1310975 - RNA, 11 nt, Human
caaaggagccu

SEQ ID NO: 1310976 - RNA, 12 nt, Human
caaaggagccug

SEQ ID NO: 1310977 - RNA, 13 nt, Human
caaaggagccugu

SEQ ID NO: 1310978 - RNA, 14 nt, Human
caaaggagccugug

SEQ ID NO: 1310979 - RNA, 15 nt, Human
caaaggagccuguga

SEQ ID NO: 1310980 - RNA, 16 nt, Human
caaaggagccugugaa

SEQ ID NO: 1310981 - RNA, 23 nt, Human
caaaggagccugugaacccagga

SEQ ID NO: 1310982 - RNA, 18 nt, Human
caaaggagcgagcauguc

SEQ ID NO: 1310983 - RNA, 15 nt, Human
caaaggcuuugcccu

SEQ ID NO: 1310984 - RNA, 23 nt, Human
caaaggcuuugcccugcugcccu

SEQ ID NO: 1310985 - RNA, 21 nt, Human
caaaggcuuugcccugcugcc

SEQ ID NO: 1310986 - RNA, 17 nt, Human
caaagggagucugccag

SEQ ID NO: 1310987 - RNA, 18 nt, Human
caaagggagucugccagg

SEQ ID NO: 1310988 - RNA, 17 nt, Human
caaaggggaccuggaag

SEQ ID NO: 1310989 - RNA, 22 nt, Human
caaaggggaggcaucagugucc

SEQ ID NO: 1310990 - RNA, 17 nt, Human
auuuguacuauuuaacu

SEQ ID NO: 1310991 - RNA, 18 nt, Human
auuuguacuauuuaacug

SEQ ID NO: 1310992 - RNA, 19 nt, Human
auuuguacuauuuaacuga

SEQ ID NO: 1310993 - RNA, 12 nt, Human
auuuuaaaguua

SEQ ID NO: 1310994 - RNA, 13 nt, Human
auuuuaaaguuag

SEQ ID NO: 1310995 - RNA, 14 nt, Human
auuuuaaaguuagu

SEQ ID NO: 1310996 - RNA, 21 nt, Human
auuuuaaaguuaguaucuuuu

SEQ ID NO: 1310997 - RNA, 18 nt, Human
auuuuaaaguuaguaucu

SEQ ID NO: 1310998 - RNA, 18 nt, Human
auuuuaauaauguuucaa

SEQ ID NO: 1310999 - RNA, 19 nt, Human
auuuuaauaauguuucaaa

SEQ ID NO: 1311000 - RNA, 14 nt, Human
auuuuaaucaaauu

SEQ ID NO: 1311001 - RNA, 23 nt, Human
auuuuaaugaagaaaguggaaaa

SEQ ID NO: 1311002 - RNA, 22 nt, Human
caaacugaggaauuucaccugu

SEQ ID NO: 1311003 - RNA, 13 nt, Human
caaacugcaugcc

SEQ ID NO: 1311004 - RNA, 14 nt, Human
caaacugcaugccc

SEQ ID NO: 1311005 - RNA, 16 nt, Human
caaacugcaugcccag

SEQ ID NO: 1311006 - RNA, 18 nt, Human
caaacugcaugcccagag

SEQ ID NO: 1311007 - RNA, 19 nt, Human
caaacugcaugcccagaga

SEQ ID NO: 1311008 - RNA, 20 nt, Human
caaacugcaugcccagagac

SEQ ID NO: 1311009 - RNA, 15 nt, Human
caaagaaauuaugug

SEQ ID NO: 1311010 - RNA, 16 nt, Human
caaagaaaguguauug

SEQ ID NO: 1311011 - RNA, 13 nt, Human
caaagaaauuaug

SEQ ID NO: 1311012 - RNA, 12 nt, Human
caaagaaauuau

SEQ ID NO: 1311013 - RNA, 14 nt, Human
caaacugccuucuu

SEQ ID NO: 1311014 - RNA, 16 nt, Human
caaacugggaaccccu

SEQ ID NO: 1311015 - RNA, 20 nt, Human
caaacugggaaccccuuucc

SEQ ID NO: 1311016 - RNA, 22 nt, Human
caaacugggaaccccuuuccca

SEQ ID NO: 1311017 - RNA, 23 nt, Human
caaacugggaaccccuuucccac

SEQ ID NO: 1311018 - RNA, 14 nt, Human
caaagacccuggcu

SEQ ID NO: 1311019 - RNA, 16 nt, Human
caaagacccuggcuuu

SEQ ID NO: 1311020 - RNA, 18 nt, Human
caaagacccuggcuuuca

SEQ ID NO: 1311021 - RNA, 17 nt, Human
caaagacccuggcuuuc

SEQ ID NO: 1311022 - RNA, 22 nt, Human
caaagacuuaagcccagugcac

SEQ ID NO: 1311023 - RNA, 13 nt, Human
caaagcccagcuu

SEQ ID NO: 1311024 - RNA, 15 nt, Human
caaagaguucaagaa

SEQ ID NO: 1311025 - RNA, 16 nt, Human
caaagaguucaagaaa

SEQ ID NO: 1311026 - RNA, 14 nt, Human
caaagaguagaauu

SEQ ID NO: 1311027 - RNA, 17 nt, Human
caaagaguucaagaaau

SEQ ID NO: 1311028 - RNA, 22 nt, Human
cacaccuacuagucaccagaga

SEQ ID NO: 1311029 - RNA, 10 nt, Human
cacaccuccu

SEQ ID NO: 1311030 - RNA, 22 nt, Human
cacacagauuugagcucagccc

SEQ ID NO: 1311031 - RNA, 14 nt, Human
cacaccaggauaga

SEQ ID NO: 1311032 - RNA, 18 nt, Human
cacaccaggcgcuaauuc

SEQ ID NO: 1311033 - RNA, 19 nt, Human
cacacacaaaagggaaccc

SEQ ID NO: 1311034 - RNA, 20 nt, Human
cacaaucucggcucacugca

SEQ ID NO: 1311035 - RNA, 22 nt, Human
cacaaucucggcucacugcauc

SEQ ID NO: 1311036 - RNA, 23 nt, Human
cacaaucucggcucacugcaucc

SEQ ID NO: 1311037 - RNA, 24 nt, Human
cacaaucucggcucacugcauccu

SEQ ID NO: 1311038 - RNA, 16 nt, Human
cacacaagaagaaggg

SEQ ID NO: 1311039 - RNA, 19 nt, Human
cacacaaggauagaugcug

SEQ ID NO: 1311040 - RNA, 18 nt, Human
cacacaagaagaagggca

SEQ ID NO: 1311041 - RNA, 18 nt, Human
cacacaaugugucugaga

SEQ ID NO: 1311042 - RNA, 11 nt, Human
cacacaccugu

SEQ ID NO: 1311043 - RNA, 14 nt, Human
cacacacugaugcu

SEQ ID NO: 1311044 - RNA, 18 nt, Human
cacacagauuugagcuca

SEQ ID NO: 1311045 - RNA, 20 nt, Human
cacacagauuugagcucagc

SEQ ID NO: 1311046 - RNA, 12 nt, Human
caauuuuguaac

SEQ ID NO: 1311047 - RNA, 11 nt, Human
caauuuuguaa

SEQ ID NO: 1311048 - RNA, 12 nt, Human
caauucaaaaca

SEQ ID NO: 1311049 - RNA, 13 nt, Human
caauucaaaaguu

SEQ ID NO: 1311050 - RNA, 15 nt, Human
caauucaaaaguucc

SEQ ID NO: 1311051 - RNA, 12 nt, Human
cacaaacuguaa

SEQ ID NO: 1311052 - RNA, 13 nt, Human
caauuuuuauauu

SEQ ID NO: 1311053 - RNA, 15 nt, Human
cacaaaccaugcaaa

SEQ ID NO: 1311054 - RNA, 17 nt, Human
caaugcaccuaaagaaa

SEQ ID NO: 1311055 - RNA, 18 nt, Human
caaugcaccuaaagaaaa

SEQ ID NO: 1311056 - RNA, 23 nt, Human
caaugcaccuaaagaaaaacaaa

SEQ ID NO: 1311057 - RNA, 14 nt, Human
caauguaaauauuu

SEQ ID NO: 1311058 - RNA, 16 nt, Human
caauuagggccuagcc

SEQ ID NO: 1311059 - RNA, 17 nt, Human
caauguaaauauuuuaa

SEQ ID NO: 1311060 - RNA, 13 nt, Human
caauuaguuuccu

SEQ ID NO: 1311061 - RNA, 14 nt, Human
caauuaguuuccuu

SEQ ID NO: 1311062 - RNA, 17 nt, Human
caauuaguuuccuuuuu

SEQ ID NO: 1311063 - RNA, 18 nt, Human
caauuaguuuccuuuuua

SEQ ID NO: 1311064 - RNA, 21 nt, Human
caauuaguuuccuuuuuaaua

SEQ ID NO: 1311065 - RNA, 21 nt, Human
caauuauaagaggauaugaac

SEQ ID NO: 1311066 - RNA, 14 nt, Human
caauuauaguuucu

SEQ ID NO: 1311067 - RNA, 15 nt, Human
caauuauaguuucug

SEQ ID NO: 1311068 - RNA, 18 nt, Human
caauuauaguuucugagg

SEQ ID NO: 1311069 - RNA, 22 nt, Human
caauuauaguuucugaggcuuu

SEQ ID NO: 1311070 - RNA, 16 nt, Human
caauuaugaagauuua

SEQ ID NO: 1311071 - RNA, 16 nt, Human
caauuauggaaaaaaa

SEQ ID NO: 1311072 - RNA, 18 nt, Human
caauuauggaaaaaaaau

SEQ ID NO: 1311073 - RNA, 18 nt, Human
cacaagaaaugaaagcag

SEQ ID NO: 1311074 - RNA, 12 nt, Human
cacaacuuguuu

SEQ ID NO: 1311075 - RNA, 20 nt, Human
cacaacuuguuuuugguuuu

SEQ ID NO: 1311076 - RNA, 15 nt, Human
cacaagaaaugaaag

SEQ ID NO: 1311077 - RNA, 13 nt, Human
cacaagaaaugaa

SEQ ID NO: 1311078 - RNA, 16 nt, Human
cacaaauuaguuauau

SEQ ID NO: 1311079 - RNA, 13 nt, Human
cacaaauuaguua

SEQ ID NO: 1311080 - RNA, 14 nt, Human
cacaaauuaguuau

SEQ ID NO: 1311081 - RNA, 14 nt, Human
cacaaacuguaaau

SEQ ID NO: 1311082 - RNA, 13 nt, Human
cacaaacuguaaa

SEQ ID NO: 1311083 - RNA, 13 nt, Human
cacaaauaacaag

SEQ ID NO: 1311084 - RNA, 13 nt, Human
cacaaauauuuau

SEQ ID NO: 1311085 - RNA, 21 nt, Human
cacaaauauuuauuuucuuuc

SEQ ID NO: 1311086 - RNA, 23 nt, Human
cacaaauauuuauuuucuuucug

SEQ ID NO: 1311087 - RNA, 23 nt, Human
cacaagacccaaaaggcagaagc

SEQ ID NO: 1311088 - RNA, 23 nt, Human
cacaagaaaugaaagcagggacu

SEQ ID NO: 1311089 - RNA, 13 nt, Human
cacaagaauggau

SEQ ID NO: 1311090 - RNA, 14 nt, Human
cacaagaauggauc

SEQ ID NO: 1311091 - RNA, 23 nt, Human
cacaagaauggaucacaagaugg

SEQ ID NO: 1311092 - RNA, 19 nt, Human
cacaaucucggcucacugc

SEQ ID NO: 1311093 - RNA, 21 nt, Human
cacaagugcccuccaggcuuu

SEQ ID NO: 1311094 - RNA, 18 nt, Human
cacaaguggguaccccca

SEQ ID NO: 1311095 - RNA, 19 nt, Human
cacaaguggguacccccag

SEQ ID NO: 1311096 - RNA, 21 nt, Human
cacaaguggguacccccagga

SEQ ID NO: 1311097 - RNA, 22 nt, Human
cacaaguggguacccccaggac

SEQ ID NO: 1311098 - RNA, 17 nt, Human
caauauucaauaaagcu

SEQ ID NO: 1311099 - RNA, 16 nt, Human
caauauucaauaaagc

SEQ ID NO: 1311100 - RNA, 15 nt, Human
caauauucaauaaag

SEQ ID NO: 1311101 - RNA, 14 nt, Human
caauauucaauaaa

SEQ ID NO: 1311102 - RNA, 18 nt, Human
caaucucggcucacugca

SEQ ID NO: 1311103 - RNA, 18 nt, Human
caaucuucaauccuugaa

SEQ ID NO: 1311104 - RNA, 21 nt, Human
caaucuuccuguuuaaaaaac

SEQ ID NO: 1311105 - RNA, 15 nt, Human
caaucuucaauccuu

SEQ ID NO: 1311106 - RNA, 14 nt, Human
caaucuucaauccu

SEQ ID NO: 1311107 - RNA, 17 nt, Human
caaucuacucaaagcau

SEQ ID NO: 1311108 - RNA, 16 nt, Human
caaucuacucaaagca

SEQ ID NO: 1311109 - RNA, 14 nt, Human
caagugcugaacag

SEQ ID NO: 1311110 - RNA, 16 nt, Human
caagugcugaacagug

SEQ ID NO: 1311111 - RNA, 17 nt, Human
caagugcugaacagugg

SEQ ID NO: 1311112 - RNA, 20 nt, Human
caagugcugaacaguggagg

SEQ ID NO: 1311113 - RNA, 18 nt, Human
caagugcugaacagugga

SEQ ID NO: 1311114 - RNA, 14 nt, Human
caauauuaaaucug

SEQ ID NO: 1311115 - RNA, 15 nt, Human
caauauuaaaucugc

SEQ ID NO: 1311116 - RNA, 11 nt, Human
caaugaaauga

SEQ ID NO: 1311117 - RNA, 19 nt, Human
caaugaaaugaauuaaagu

SEQ ID NO: 1311118 - RNA, 13 nt, Human
caaucuugcaugu

SEQ ID NO: 1311119 - RNA, 17 nt, Human
caaucuugcauguaacg

SEQ ID NO: 1311120 - RNA, 18 nt, Human
caaucuugcauguaacgc

SEQ ID NO: 1311121 - RNA, 15 nt, Human
caaucuuuaaaccaa

SEQ ID NO: 1311122 - RNA, 22 nt, Human
caaucuuuaaaccaauugcugc

SEQ ID NO: 1311123 - RNA, 15 nt, Human
caaugaaaaaaugua

SEQ ID NO: 1311124 - RNA, 16 nt, Human
caaugaaaacucuuug

SEQ ID NO: 1311125 - RNA, 19 nt, Human
caaugaaaacucuuugcug

SEQ ID NO: 1311126 - RNA, 20 nt, Human
caaugaaaacucuuugcugc

SEQ ID NO: 1311127 - RNA, 13 nt, Human
caaugaaaugaau

SEQ ID NO: 1311128 - RNA, 24 nt, Human
caaugauggcaauuuuguaacgaa

SEQ ID NO: 1311129 - RNA, 14 nt, Human
caagugcugugcaa

SEQ ID NO: 1311130 - RNA, 19 nt, Human
caauguaaauauuuuaaag

SEQ ID NO: 1311131 - RNA, 19 nt, Human
cacacuaaccaagcugagu

SEQ ID NO: 1311132 - RNA, 17 nt, Human
cacaugaaguccaagca

SEQ ID NO: 1311133 - RNA, 20 nt, Human
cacaugaaguccaagcauuu

SEQ ID NO: 1311134 - RNA, 16 nt, Human
cacagugacuucugag

SEQ ID NO: 1311135 - RNA, 15 nt, Human
cacagugacuucuga

SEQ ID NO: 1311136 - RNA, 17 nt, Human
cacagugacuucugaga

SEQ ID NO: 1311137 - RNA, 22 nt, Human
cacaugaauuauuacaguguuu

SEQ ID NO: 1311138 - RNA, 20 nt, Human
cacaugacucgggggugggg

SEQ ID NO: 1311139 - RNA, 18 nt, Human
cacaugaaucugcacauc

SEQ ID NO: 1311140 - RNA, 20 nt, Human
cacaugaaucugcacaucug

SEQ ID NO: 1311141 - RNA, 20 nt, Human
cacaugcuucccuuuccuga

SEQ ID NO: 1311142 - RNA, 21 nt, Human
cacaugucagcaaguccuaag

SEQ ID NO: 1311143 - RNA, 20 nt, Human
cacaugucaguaccuucaaa

SEQ ID NO: 1311144 - RNA, 14 nt, Human
cacaugccccaucc

SEQ ID NO: 1311145 - RNA, 21 nt, Human
cacaugccccaucccaugcug

SEQ ID NO: 1311146 - RNA, 18 nt, Human
cacaugaauuauuacagu

SEQ ID NO: 1311147 - RNA, 16 nt, Human
cacaugauuccagcca

SEQ ID NO: 1311148 - RNA, 14 nt, Human
cacagcccagcccg

SEQ ID NO: 1311149 - RNA, 20 nt, Human
cacaggacaugcgguagcca

SEQ ID NO: 1311150 - RNA, 22 nt, Human
cacaggacaugcgguagccagc

SEQ ID NO: 1311151 - RNA, 23 nt, Human
cacaggacaugcgguagccagca

SEQ ID NO: 1311152 - RNA, 15 nt, Human
cacaggacucugccu

SEQ ID NO: 1311153 - RNA, 16 nt, Human
cacaggacucugccuc

SEQ ID NO: 1311154 - RNA, 15 nt, Human
cacaggacauuucuc

SEQ ID NO: 1311155 - RNA, 17 nt, Human
cacaggacauuucucua

SEQ ID NO: 1311156 - RNA, 12 nt, Human
cacaggcccccu

SEQ ID NO: 1311157 - RNA, 13 nt, Human
cacaggcccccuu

SEQ ID NO: 1311158 - RNA, 21 nt, Human
cacaggcccccuugagugggg

SEQ ID NO: 1311159 - RNA, 22 nt, Human
cacaggcccccuugaguggggu

SEQ ID NO: 1311160 - RNA, 16 nt, Human
cacaggcaaaauccuu

SEQ ID NO: 1311161 - RNA, 20 nt, Human
cacaggcaaaauccuugcuu

SEQ ID NO: 1311162 - RNA, 15 nt, Human
cacaggcauuuccug

SEQ ID NO: 1311163 - RNA, 16 nt, Human
cacaggcauuuccugg

SEQ ID NO: 1311164 - RNA, 17 nt, Human
cacaggcauuuccuggg

SEQ ID NO: 1311165 - RNA, 18 nt, Human
cacaggcauuuccugggu

SEQ ID NO: 1311166 - RNA, 19 nt, Human
cacaggcauuuccugggug

SEQ ID NO: 1311167 - RNA, 20 nt, Human
cacaggcauuuccugggugg

SEQ ID NO: 1311168 - RNA, 23 nt, Human
cacaggcauuuccuggguggcua

SEQ ID NO: 1311169 - RNA, 14 nt, Human
cacagcaaccccag

SEQ ID NO: 1311170 - RNA, 17 nt, Human
cacagcaaccccaggcu

SEQ ID NO: 1311171 - RNA, 18 nt, Human
cacagcaaccccaggcug

SEQ ID NO: 1311172 - RNA, 16 nt, Human
cacagcaauuccucag

SEQ ID NO: 1311173 - RNA, 18 nt, Human
cacagcaauuccucaggc

SEQ ID NO: 1311174 - RNA, 14 nt, Human
cacagcacaaauua

SEQ ID NO: 1311175 - RNA, 16 nt, Human
cacagcacaaauuagu

SEQ ID NO: 1311176 - RNA, 18 nt, Human
cacagcacaaauuaguua

SEQ ID NO: 1311177 - RNA, 23 nt, Human
cacagcacaaauuaguuauauau

SEQ ID NO: 1311178 - RNA, 12 nt, Human
cacagcacagcc

SEQ ID NO: 1311179 - RNA, 15 nt, Human
cacagcacagccaac

SEQ ID NO: 1311180 - RNA, 15 nt, Human
cacagccagcaccug

SEQ ID NO: 1311181 - RNA, 16 nt, Human
cacagccagcaccugg

SEQ ID NO: 1311182 - RNA, 17 nt, Human
cacagccagcaccuggc

SEQ ID NO: 1311183 - RNA, 20 nt, Human
cacagccagcaccuggcauc

SEQ ID NO: 1311184 - RNA, 18 nt, Human
cacagccaggggagcaga

SEQ ID NO: 1311185 - RNA, 19 nt, Human
cacagccaggggagcagag

SEQ ID NO: 1311186 - RNA, 21 nt, Human
caccauauuggccagucuggu

SEQ ID NO: 1311187 - RNA, 18 nt, Human
caccauaggucaccuuua

SEQ ID NO: 1311188 - RNA, 17 nt, Human
caccauagguagaaugu

SEQ ID NO: 1311189 - RNA, 15 nt, Human
caccaguugcugcuu

SEQ ID NO: 1311190 - RNA, 11 nt, Human
caccaguucuc

SEQ ID NO: 1311191 - RNA, 20 nt, Human
caccaguucucauggguggc

SEQ ID NO: 1311192 - RNA, 21 nt, Human
caccaguguguggcuuucaga

SEQ ID NO: 1311193 - RNA, 23 nt, Human
caccaguguguggcuuucagagc

SEQ ID NO: 1311194 - RNA, 23 nt, Human
caccagaugcugaaaauguccuu

SEQ ID NO: 1311195 - RNA, 14 nt, Human
caccagggccagcc

SEQ ID NO: 1311196 - RNA, 13 nt, Human
caccagaucugau

SEQ ID NO: 1311197 - RNA, 13 nt, Human
caccagaugcuga

SEQ ID NO: 1311198 - RNA, 17 nt, Human
caccagggccagccucu

SEQ ID NO: 1311199 - RNA, 16 nt, Human
caccagggccagccuc

SEQ ID NO: 1311200 - RNA, 15 nt, Human
caccagggguuucuc

SEQ ID NO: 1311201 - RNA, 22 nt, Human
caccaggguccuuuugacacug

SEQ ID NO: 1311202 - RNA, 19 nt, Human
caccaggguugaccccaga

SEQ ID NO: 1311203 - RNA, 22 nt, Human
caccaggguugaccccagagga

SEQ ID NO: 1311204 - RNA, 23 nt, Human
caccaggguugaccccagaggau

SEQ ID NO: 1311205 - RNA, 19 nt, Human
caccauguuggccaggcug

SEQ ID NO: 1311206 - RNA, 20 nt, Human
caccauguuggccaggcugc

SEQ ID NO: 1311207 - RNA, 20 nt, Human
caccauguuggccaggcugg

SEQ ID NO: 1311208 - RNA, 20 nt, Human
caccauguugcccaggcugg

SEQ ID NO: 1311209 - RNA, 15 nt, Human
caccaugauuccuuu

SEQ ID NO: 1311210 - RNA, 17 nt, Human
caccaugauuccuuuaa

SEQ ID NO: 1311211 - RNA, 19 nt, Human
caccaugauuccuuuaaca

SEQ ID NO: 1311212 - RNA, 17 nt, Human
caccaugcugcugggga

SEQ ID NO: 1311213 - RNA, 19 nt, Human
caccaugcugcuggggaag

SEQ ID NO: 1311214 - RNA, 22 nt, Human
caccaugcugcuggggaagaca

SEQ ID NO: 1311215 - RNA, 18 nt, Human
caccaacuacuaccugua

SEQ ID NO: 1311216 - RNA, 22 nt, Human
caccaacuccuaguucuagaaa

SEQ ID NO: 1311217 - RNA, 19 nt, Human
caccaacuccuaguucuag

SEQ ID NO: 1311218 - RNA, 13 nt, Human
caccaagcacagc

SEQ ID NO: 1311219 - RNA, 14 nt, Human
caccaagcacagca

SEQ ID NO: 1311220 - RNA, 15 nt, Human
caccaagcacagcag

SEQ ID NO: 1311221 - RNA, 16 nt, Human
caccaagcacagcagc

SEQ ID NO: 1311222 - RNA, 17 nt, Human
caccaagcacagcagcc

SEQ ID NO: 1311223 - RNA, 18 nt, Human
caccaagcacagcagccu

SEQ ID NO: 1311224 - RNA, 19 nt, Human
caccaagcacagcagccug

SEQ ID NO: 1311225 - RNA, 21 nt, Human
caccaagcaggaaaugaaaau

SEQ ID NO: 1311226 - RNA, 13 nt, Human
caccaagccaagg

SEQ ID NO: 1311227 - RNA, 14 nt, Human
caccaagccaaggg

SEQ ID NO: 1311228 - RNA, 16 nt, Human
caccaagugcgggucc

SEQ ID NO: 1311229 - RNA, 21 nt, Human
caccaagugcggguccggcag

SEQ ID NO: 1311230 - RNA, 22 nt, Human
caccaaguuggaacauccuugg

SEQ ID NO: 1311231 - RNA, 23 nt, Human
caccaaguuggaacauccuugga

SEQ ID NO: 1311232 - RNA, 22 nt, Human
caccaagugcggguccggcagc

SEQ ID NO: 1311233 - RNA, 17 nt, Human
caccaauguacccaccg

SEQ ID NO: 1311234 - RNA, 22 nt, Human
caccaauguacccaccgggcca

SEQ ID NO: 1311235 - RNA, 23 nt, Human
caccaauguacccaccgggccac

SEQ ID NO: 1311236 - RNA, 23 nt, Human
caccaauguuucaagaggagccc

SEQ ID NO: 1311237 - RNA, 19 nt, Human
caccagacacccaggacuu

SEQ ID NO: 1311238 - RNA, 20 nt, Human
caccagacacccaggacuua

SEQ ID NO: 1311239 - RNA, 14 nt, Human
caccacgcccggcu

SEQ ID NO: 1311240 - RNA, 15 nt, Human
caccacgcccggcua

SEQ ID NO: 1311241 - RNA, 22 nt, Human
caccacggaccaaagggagucu

SEQ ID NO: 1311242 - RNA, 15 nt, Human
caccagacacccagg

SEQ ID NO: 1311243 - RNA, 16 nt, Human
caccagacacccagga

SEQ ID NO: 1311244 - RNA, 17 nt, Human
caccagacacccaggac

SEQ ID NO: 1311245 - RNA, 18 nt, Human
caccagacacccaggacu

SEQ ID NO: 1311246 - RNA, 20 nt, Human
caccauguuggccaggcuug

SEQ ID NO: 1311247 - RNA, 14 nt, Human
caccauuauaauga

SEQ ID NO: 1311248 - RNA, 16 nt, Human
caccauuauaaugaau

SEQ ID NO: 1311249 - RNA, 17 nt, Human
caccauuauaaugaauu

SEQ ID NO: 1311250 - RNA, 22 nt, Human
caccauuauaaugaauuuagug

SEQ ID NO: 1311251 - RNA, 20 nt, Human
caccauuccaagucuccacc

SEQ ID NO: 1311252 - RNA, 18 nt, Human
caccauuauaaugaauuu

SEQ ID NO: 1311253 - RNA, 13 nt, Human
caccauucugacu

SEQ ID NO: 1311254 - RNA, 14 nt, Human
caccauucugacuc

SEQ ID NO: 1311255 - RNA, 13 nt, Human
caccauugaaggc

SEQ ID NO: 1311256 - RNA, 14 nt, Human
caccauugaaggcu

SEQ ID NO: 1311257 - RNA, 15 nt, Human
caccauugaaggcuu

SEQ ID NO: 1311258 - RNA, 16 nt, Human
caccauugaaggcuua

SEQ ID NO: 1311259 - RNA, 17 nt, Human
caccauuuggauccugu

SEQ ID NO: 1311260 - RNA, 17 nt, Human
caccauuuggcaaugcc

SEQ ID NO: 1311261 - RNA, 18 nt, Human
caccauuuggcaucccug

SEQ ID NO: 1311262 - RNA, 19 nt, Human
caccauuuggcaucccugg

SEQ ID NO: 1311263 - RNA, 20 nt, Human
caccauuuggcaucccuggg

SEQ ID NO: 1311264 - RNA, 21 nt, Human
caccauuuggcaucccugggc

SEQ ID NO: 1311265 - RNA, 22 nt, Human
caccauuuggcaucccugggcc

SEQ ID NO: 1311266 - RNA, 23 nt, Human
caccauuuggcaucccugggccu

SEQ ID NO: 1311267 - RNA, 24 nt, Human
caccauuuggcaucccugggccuu

SEQ ID NO: 1311268 - RNA, 22 nt, Human
cacccaaagagguauuuaucuu

SEQ ID NO: 1311269 - RNA, 14 nt, Human
cacccaacgcucca

SEQ ID NO: 1311270 - RNA, 13 nt, Human
uuuuuucuuacug

SEQ ID NO: 1311271 - RNA, 20 nt, Human
uuuugaaaagcagacauuuu

SEQ ID NO: 1311272 - RNA, 21 nt, Human
uuuugaaaccaugaagagauu

SEQ ID NO: 1311273 - RNA, 17 nt, Human
uuuugaaagucuguccu

SEQ ID NO: 1311274 - RNA, 12 nt, Human
uuuugaaagaau

SEQ ID NO: 1311275 - RNA, 18 nt, Human
uuuuucugcacuauaugc

SEQ ID NO: 1311276 - RNA, 22 nt, Human
uuuuucugcacuauaugcaaac

SEQ ID NO: 1311277 - RNA, 13 nt, Human
uuuuucugcacua

SEQ ID NO: 1311278 - RNA, 14 nt, Human
uuuuucuguaccag

SEQ ID NO: 1311279 - RNA, 16 nt, Human
uuuuucuguaccaguu

SEQ ID NO: 1311280 - RNA, 13 nt, Human
uuuuucuguauaa

SEQ ID NO: 1311281 - RNA, 20 nt, Human
uuuuuuauacaggaugauga

SEQ ID NO: 1311282 - RNA, 16 nt, Human
uuuuucuucacugcaa

SEQ ID NO: 1311283 - RNA, 14 nt, Human
uuuuuuacuuuugu

SEQ ID NO: 1311284 - RNA, 12 nt, Human
uuuuuuaggaaa

SEQ ID NO: 1311285 - RNA, 12 nt, Human
uuuuuucugaaa

SEQ ID NO: 1311286 - RNA, 16 nt, Human
uuuuuuaugcuaauca

SEQ ID NO: 1311287 - RNA, 13 nt, Human
uuuuuucguuugu

SEQ ID NO: 1311288 - RNA, 13 nt, Human
uuuuuuaguugaa

SEQ ID NO: 1311289 - RNA, 15 nt, Human
uuuuuuauauaugug

SEQ ID NO: 1311290 - RNA, 13 nt, Human
uuuuuuaugcuaa

SEQ ID NO: 1311291 - RNA, 17 nt, Human
uuuagaauaugccuugu

SEQ ID NO: 1311292 - RNA, 14 nt, Human
uuuagaagccugca

SEQ ID NO: 1311293 - RNA, 14 nt, Human
uuuagaaucccagc

SEQ ID NO: 1311294 - RNA, 19 nt, Human
uuuagaaucccagcccccu

SEQ ID NO: 1311295 - RNA, 15 nt, Human
uuuagacuucaagca

SEQ ID NO: 1311296 - RNA, 14 nt, Human
uuuagaagccaacu

SEQ ID NO: 1311297 - RNA, 22 nt, Human
uuuagaagccaacuaugauuau

SEQ ID NO: 1311298 - RNA, 21 nt, Human
uuuagacuuggauucuuucca

SEQ ID NO: 1311299 - RNA, 22 nt, Human
uuuagacuuggauucuuuccau

SEQ ID NO: 1311300 - RNA, 15 nt, Human
uuuagacuuuaacau

SEQ ID NO: 1311301 - RNA, 22 nt, Human
uuuagagauaagaguuggcugg

SEQ ID NO: 1311302 - RNA, 20 nt, Human
uuuagaaacacaacuauauu

SEQ ID NO: 1311303 - RNA, 12 nt, Human
uuuagaaaacuu

SEQ ID NO: 1311304 - RNA, 13 nt, Human
uuuagaaaacuuu

SEQ ID NO: 1311305 - RNA, 14 nt, Human
uuuagaaaacuuua

SEQ ID NO: 1311306 - RNA, 15 nt, Human
uuuagaaaacuuuaa

SEQ ID NO: 1311307 - RNA, 16 nt, Human
uuuagaaaacuuuaaa

SEQ ID NO: 1311308 - RNA, 22 nt, Human
uuuagaaacagugcaacacugg

SEQ ID NO: 1311309 - RNA, 12 nt, Human
uuuagaaacaca

SEQ ID NO: 1311310 - RNA, 14 nt, Human
uuuacuuuucuucu

SEQ ID NO: 1311311 - RNA, 15 nt, Human
uuuacuuuuaaacag

SEQ ID NO: 1311312 - RNA, 18 nt, Human
uuuacuuuuaaacaguga

SEQ ID NO: 1311313 - RNA, 15 nt, Human
uuuacuuuuaaacug

SEQ ID NO: 1311314 - RNA, 16 nt, Human
uuuacuuuuaaacugu

SEQ ID NO: 1311315 - RNA, 13 nt, Human
uuuacuuuuguuu

SEQ ID NO: 1311316 - RNA, 22 nt, Human
uuuacauggcuggagcuagaau

SEQ ID NO: 1311317 - RNA, 12 nt, Human
uuuacauguuuu

SEQ ID NO: 1311318 - RNA, 18 nt, Human
uuuacuuuagaagccugc

SEQ ID NO: 1311319 - RNA, 17 nt, Human
uuuacaauaguucugug

SEQ ID NO: 1311320 - RNA, 15 nt, Human
uuuacaauguaauua

SEQ ID NO: 1311321 - RNA, 16 nt, Human
uuuacaauguaauuau

SEQ ID NO: 1311322 - RNA, 17 nt, Human
uuuacaauguaauuauu

SEQ ID NO: 1311323 - RNA, 16 nt, Human
uuuacaaguaacaaaa

SEQ ID NO: 1311324 - RNA, 17 nt, Human
uuuacauggcuggagcu

SEQ ID NO: 1311325 - RNA, 19 nt, Human
uuuacaauuuuuuaucaug

SEQ ID NO: 1311326 - RNA, 18 nt, Human
uuuacacaauagaauuau

SEQ ID NO: 1311327 - RNA, 19 nt, Human
uuuacaauguaauuauuua

SEQ ID NO: 1311328 - RNA, 22 nt, Human
uuuaaucauauaaauagaaugu

SEQ ID NO: 1311329 - RNA, 19 nt, Human
uuguauuguauauuacaau

SEQ ID NO: 1311330 - RNA, 18 nt, Human
uuguauuguauauuacaa

SEQ ID NO: 1311331 - RNA, 13 nt, Human
uuguauuguugaa

SEQ ID NO: 1311332 - RNA, 15 nt, Human
uuguauuguuucaau

SEQ ID NO: 1311333 - RNA, 14 nt, Human
uuguauucucugag

SEQ ID NO: 1311334 - RNA, 15 nt, Human
uuguauucucugagc

SEQ ID NO: 1311335 - RNA, 16 nt, Human
uuguauucucugagcu

SEQ ID NO: 1311336 - RNA, 20 nt, Human
uuguauucucugagcugugc

SEQ ID NO: 1311337 - RNA, 22 nt, Human
uuguauucucugagcugugcag

SEQ ID NO: 1311338 - RNA, 23 nt, Human
uuuaaucauauaaauagaaugua

SEQ ID NO: 1311339 - RNA, 18 nt, Human
uuuaaucauauaaauaga

SEQ ID NO: 1311340 - RNA, 14 nt, Human
uuuaaucauauaaa

SEQ ID NO: 1311341 - RNA, 15 nt, Human
uuguauuuauuuagu

SEQ ID NO: 1311342 - RNA, 16 nt, Human
uuguauuguuucaauu

SEQ ID NO: 1311343 - RNA, 18 nt, Human
uuguauuguugaaaaagu

SEQ ID NO: 1311344 - RNA, 13 nt, Human
uuguauuuaacag

SEQ ID NO: 1311345 - RNA, 17 nt, Human
uuguauuuaacagaaau

SEQ ID NO: 1311346 - RNA, 18 nt, Human
uuguauuuaacagaaauu

SEQ ID NO: 1311347 - RNA, 22 nt, Human
uuguauuuaacagaaauuguau

SEQ ID NO: 1311348 - RNA, 16 nt, Human
uuuaucuuuuuaccuu

SEQ ID NO: 1311349 - RNA, 14 nt, Human
uuuaugaaaguauu

SEQ ID NO: 1311350 - RNA, 14 nt, Human
uuuaucuauaauuu

SEQ ID NO: 1311351 - RNA, 19 nt, Human
uuuaucuauaauuuaccua

SEQ ID NO: 1311352 - RNA, 20 nt, Human
uuuaucuauaauuuaccuaa

SEQ ID NO: 1311353 - RNA, 18 nt, Human
uuuaucuuuauaugaaga

SEQ ID NO: 1311354 - RNA, 12 nt, Human
uuuaucuuuuua

SEQ ID NO: 1311355 - RNA, 19 nt, Human
uuuaugaaaaagaagaauc

SEQ ID NO: 1311356 - RNA, 22 nt, Human
uuuauaaaaguguucauuguuu

SEQ ID NO: 1311357 - RNA, 21 nt, Human
uuuagagauaagaguuggcug

SEQ ID NO: 1311358 - RNA, 14 nt, Human
uuuaugcauauuau

SEQ ID NO: 1311359 - RNA, 16 nt, Human
uuuauucauaugcaua

SEQ ID NO: 1311360 - RNA, 15 nt, Human
uuuauucauaugcau

SEQ ID NO: 1311361 - RNA, 14 nt, Human
uuuauucauaugca

SEQ ID NO: 1311362 - RNA, 18 nt, Human
uuuauuccagaaugcugu

SEQ ID NO: 1311363 - RNA, 19 nt, Human
uuuauuccagaaugcugua

SEQ ID NO: 1311364 - RNA, 22 nt, Human
uuuauuccagaaugcuguacau

SEQ ID NO: 1311365 - RNA, 23 nt, Human
uuuauuccagaaugcuguacauc

SEQ ID NO: 1311366 - RNA, 16 nt, Human
uuuauuggcugagaua

SEQ ID NO: 1311367 - RNA, 15 nt, Human
uuuauugguuuugca

SEQ ID NO: 1311368 - RNA, 17 nt, Human
uuuauugguuuugcaga

SEQ ID NO: 1311369 - RNA, 23 nt, Human
uuuauugguuuugcagaagaagg

SEQ ID NO: 1311370 - RNA, 13 nt, Human
uuuauuguauucu

SEQ ID NO: 1311371 - RNA, 14 nt, Human
uuuauuguauucug

SEQ ID NO: 1311372 - RNA, 18 nt, Human
uuuauuguauucuggggu

SEQ ID NO: 1311373 - RNA, 22 nt, Human
uuucucccuggauuuuuaccag

SEQ ID NO: 1311374 - RNA, 18 nt, Human
uuucuccuuuaauuguaa

SEQ ID NO: 1311375 - RNA, 19 nt, Human
uuucuccuuuaauuguaaa

SEQ ID NO: 1311376 - RNA, 22 nt, Human
uuucuccuuuaauuguaaagua

SEQ ID NO: 1311377 - RNA, 17 nt, Human
uuucucuuuccaugaca

SEQ ID NO: 1311378 - RNA, 20 nt, Human
uuucucuuucccuggucccu

SEQ ID NO: 1311379 - RNA, 16 nt, Human
uuucuaggacugaauu

SEQ ID NO: 1311380 - RNA, 12 nt, Human
uuucucccugga

SEQ ID NO: 1311381 - RNA, 14 nt, Human
uuucucccuggauu

SEQ ID NO: 1311382 - RNA, 20 nt, Human
uuucucccuggauuuuuacc

SEQ ID NO: 1311383 - RNA, 21 nt, Human
uuucucccuggauuuuuacca

SEQ ID NO: 1311384 - RNA, 23 nt, Human
uuucucccuggauuuuuaccagu

SEQ ID NO: 1311385 - RNA, 14 nt, Human
uuucuccuccaugg

SEQ ID NO: 1311386 - RNA, 15 nt, Human
uuucuccucccagga

SEQ ID NO: 1311387 - RNA, 15 nt, Human
uuucuaaugugugaa

SEQ ID NO: 1311388 - RNA, 20 nt, Human
uuucuaagcauaaaagauga

SEQ ID NO: 1311389 - RNA, 14 nt, Human
uuucuaaugagaua

SEQ ID NO: 1311390 - RNA, 16 nt, Human
uuucuagauuaagaua

SEQ ID NO: 1311391 - RNA, 23 nt, Human
uuuccugacagaaggacucaggu

SEQ ID NO: 1311392 - RNA, 21 nt, Human
uuuccugaaacaacuuggaaa

SEQ ID NO: 1311393 - RNA, 22 nt, Human
uuuccucaaaacuucagacaua

SEQ ID NO: 1311394 - RNA, 15 nt, Human
uuuccuaugggaaca

SEQ ID NO: 1311395 - RNA, 17 nt, Human
uuuccuaugggaacaau

SEQ ID NO: 1311396 - RNA, 21 nt, Human
uuuccucuucuauuuuguaaa

SEQ ID NO: 1311397 - RNA, 22 nt, Human
uuuccucuucuauuuuguaaac

SEQ ID NO: 1311398 - RNA, 14 nt, Human
uuuccuaugaugua

SEQ ID NO: 1311399 - RNA, 15 nt, Human
uuuccuaugcuuuga

SEQ ID NO: 1311400 - RNA, 18 nt, Human
uuuccuaugauguauacu

SEQ ID NO: 1311401 - RNA, 17 nt, Human
uuuccuagcccucucac

SEQ ID NO: 1311402 - RNA, 23 nt, Human
uuuccuagcccucucacauuuau

SEQ ID NO: 1311403 - RNA, 20 nt, Human
uuuccaggacuguuucaaac

SEQ ID NO: 1311404 - RNA, 22 nt, Human
uuuccaggacuguuucaaacau

SEQ ID NO: 1311405 - RNA, 16 nt, Human
uuuccaggcuucugcu

SEQ ID NO: 1311406 - RNA, 18 nt, Human
uuuccaggcuucugcugg

SEQ ID NO: 1311407 - RNA, 19 nt, Human
uuuccaggcuucugcuggg

SEQ ID NO: 1311408 - RNA, 23 nt, Human
uuuccaggcuucugcuggggccu

SEQ ID NO: 1311409 - RNA, 14 nt, Human
uuucuaaaggaguu

SEQ ID NO: 1311410 - RNA, 16 nt, Human
uuucuaaaggaguuua

SEQ ID NO: 1311411 - RNA, 21 nt, Human
uuucuaaaggaguuuauguuc

SEQ ID NO: 1311412 - RNA, 18 nt, Human
uuucuaacuacaaagguu

SEQ ID NO: 1311413 - RNA, 20 nt, Human
uuucuaacuacaaagguuua

SEQ ID NO: 1311414 - RNA, 22 nt, Human
uuucuaacuacaaagguuuaaa

SEQ ID NO: 1311415 - RNA, 17 nt, Human
uuucuaagaaacauuua

SEQ ID NO: 1311416 - RNA, 14 nt, Human
uuucuaagaaacau

SEQ ID NO: 1311417 - RNA, 13 nt, Human
uuucuaagauucu

SEQ ID NO: 1311418 - RNA, 14 nt, Human
uuucuaagauucua

SEQ ID NO: 1311419 - RNA, 15 nt, Human
uuucuaagauucuaa

SEQ ID NO: 1311420 - RNA, 17 nt, Human
uuucuaagauucuaaag

SEQ ID NO: 1311421 - RNA, 18 nt, Human
uuucuaagauucuaaagg

SEQ ID NO: 1311422 - RNA, 19 nt, Human
uuucuaagcauaaaagaug

SEQ ID NO: 1311423 - RNA, 15 nt, Human
uuucagauaaucaca

SEQ ID NO: 1311424 - RNA, 13 nt, Human
uuucagagccucc

SEQ ID NO: 1311425 - RNA, 22 nt, Human
uuucagagugacuacacacagu

SEQ ID NO: 1311426 - RNA, 15 nt, Human
uuucaaucuucaauc

SEQ ID NO: 1311427 - RNA, 13 nt, Human
uuucaaucuucaa

SEQ ID NO: 1311428 - RNA, 13 nt, Human
uuuauuuguugag

SEQ ID NO: 1311429 - RNA, 14 nt, Human
uuuauuuguugaga

SEQ ID NO: 1311430 - RNA, 15 nt, Human
uuucagcagcugcag

SEQ ID NO: 1311431 - RNA, 21 nt, Human
uuucagauaaucacaauacau

SEQ ID NO: 1311432 - RNA, 23 nt, Human
uuucagaguucuuuuugaaguau

SEQ ID NO: 1311433 - RNA, 18 nt, Human
uuucagaguucuuuuuga

SEQ ID NO: 1311434 - RNA, 22 nt, Human
uuucagaguucuuuuugaagua

SEQ ID NO: 1311435 - RNA, 12 nt, Human
uuuauuuguuga

SEQ ID NO: 1311436 - RNA, 18 nt, Human
uuuauuuguugagagugu

SEQ ID NO: 1311437 - RNA, 13 nt, Human
uuuauuuccagug

SEQ ID NO: 1311438 - RNA, 17 nt, Human
uuuauuuccuaugaugu

SEQ ID NO: 1311439 - RNA, 20 nt, Human
uuuauuucauuuuucaauag

SEQ ID NO: 1311440 - RNA, 13 nt, Human
uuuauuuccuccc

SEQ ID NO: 1311441 - RNA, 16 nt, Human
uuuauuucugcauaug

SEQ ID NO: 1311442 - RNA, 22 nt, Human
uuucaggagagaguugaaccua

SEQ ID NO: 1311443 - RNA, 12 nt, Human
uuucaggaggaa

SEQ ID NO: 1311444 - RNA, 18 nt, Human
uuucaggaggaauacuga

SEQ ID NO: 1311445 - RNA, 19 nt, Human
uuucaggaggaauacugaa

SEQ ID NO: 1311446 - RNA, 21 nt, Human
uuucaggaggaauacugaaca

SEQ ID NO: 1311447 - RNA, 22 nt, Human
uuucaggaggaauacugaacau

SEQ ID NO: 1311448 - RNA, 13 nt, Human
uuucauuccuuca

SEQ ID NO: 1311449 - RNA, 21 nt, Human
uuucauuccuucagauuuggc

SEQ ID NO: 1311450 - RNA, 13 nt, Human
uuucaggaucuau

SEQ ID NO: 1311451 - RNA, 14 nt, Human
uuucaggaucuauu

SEQ ID NO: 1311452 - RNA, 16 nt, Human
uuucaggaucuauuuu

SEQ ID NO: 1311453 - RNA, 19 nt, Human
uuucaggcauuggauauuu

SEQ ID NO: 1311454 - RNA, 19 nt, Human
uuuccagaggcuauuauuu

SEQ ID NO: 1311455 - RNA, 17 nt, Human
uuuccagcauucccagg

SEQ ID NO: 1311456 - RNA, 18 nt, Human
uuuccagcauucccaggu

SEQ ID NO: 1311457 - RNA, 20 nt, Human
uuuccagcauucccagguag

SEQ ID NO: 1311458 - RNA, 19 nt, Human
uuuccaaaaucucccauuu

SEQ ID NO: 1311459 - RNA, 22 nt, Human
uuucuuacugucuuuuuucuaa

SEQ ID NO: 1311460 - RNA, 20 nt, Human
uuucuuacugauuuuuaagu

SEQ ID NO: 1311461 - RNA, 17 nt, Human
uuucugaggcuuuauga

SEQ ID NO: 1311462 - RNA, 21 nt, Human
uuucugaggugcacugggagg

SEQ ID NO: 1311463 - RNA, 16 nt, Human
uuucugaguuccugca

SEQ ID NO: 1311464 - RNA, 15 nt, Human
uuucugaguuuuacc

SEQ ID NO: 1311465 - RNA, 16 nt, Human
uuucugaguuuuacca

SEQ ID NO: 1311466 - RNA, 17 nt, Human
uuucuuaacuucuugcu

SEQ ID NO: 1311467 - RNA, 18 nt, Human
uuucuuaacuucuugcuu

SEQ ID NO: 1311468 - RNA, 21 nt, Human
uuucuuaacuucuugcuucuu

SEQ ID NO: 1311469 - RNA, 14 nt, Human
uuugagcucagccc

SEQ ID NO: 1311470 - RNA, 15 nt, Human
uuugagcuuaaucuu

SEQ ID NO: 1311471 - RNA, 14 nt, Human
uuugauacauuuuu

SEQ ID NO: 1311472 - RNA, 16 nt, Human
uuugauacuaagcauu

SEQ ID NO: 1311473 - RNA, 17 nt, Human
uuugauacuaagcauug

SEQ ID NO: 1311474 - RNA, 18 nt, Human
uuugauacuaagcauuga

SEQ ID NO: 1311475 - RNA, 23 nt, Human
uuugcauaacguauaaaagccug

SEQ ID NO: 1311476 - RNA, 19 nt, Human
uuugcauaacguauaaaag

SEQ ID NO: 1311477 - RNA, 11 nt, Human
uuugcagcuuu

SEQ ID NO: 1311478 - RNA, 21 nt, Human
uuugcagcugagagaaaauaa

SEQ ID NO: 1311479 - RNA, 16 nt, Human
uuugcagcgacuggca

SEQ ID NO: 1311480 - RNA, 21 nt, Human
uuugauacuaagcauugaaug

SEQ ID NO: 1311481 - RNA, 23 nt, Human
uuugauauagaaguauaaagaau

SEQ ID NO: 1311482 - RNA, 21 nt, Human
uuugauagauuuucugcuacu

SEQ ID NO: 1311483 - RNA, 18 nt, Human
uuuggaacccuaaauaau

SEQ ID NO: 1311484 - RNA, 14 nt, Human
uuuggaaccuuguu

SEQ ID NO: 1311485 - RNA, 12 nt, Human
uuuggaagaagg

SEQ ID NO: 1311486 - RNA, 13 nt, Human
uuuggaaccuugu

SEQ ID NO: 1311487 - RNA, 21 nt, Human
uuuggaaccagacucuugccu

SEQ ID NO: 1311488 - RNA, 15 nt, Human
uuugccagugggaac

SEQ ID NO: 1311489 - RNA, 16 nt, Human
uuugccagugggaacu

SEQ ID NO: 1311490 - RNA, 17 nt, Human
uuugcauacauucuuca

SEQ ID NO: 1311491 - RNA, 22 nt, Human
uuugccaugacaacuucuaauu

SEQ ID NO: 1311492 - RNA, 18 nt, Human
uuugcauacauucuucaa

SEQ ID NO: 1311493 - RNA, 23 nt, Human
uuugcauaguaccaaucauuuua

SEQ ID NO: 1311494 - RNA, 14 nt, Human
uuugucacuuuuuc

SEQ ID NO: 1311495 - RNA, 15 nt, Human
uuugucacuuuuucu

SEQ ID NO: 1311496 - RNA, 20 nt, Human
uuugucagaacuagaauuug

SEQ ID NO: 1311497 - RNA, 22 nt, Human
uuugucagaacuagaauuugau

SEQ ID NO: 1311498 - RNA, 21 nt, Human
uuugucagggaguguucccua

SEQ ID NO: 1311499 - RNA, 21 nt, Human
uuuguauaaaauaauuuuuau

SEQ ID NO: 1311500 - RNA, 13 nt, Human
uuuguauaauugg

SEQ ID NO: 1311501 - RNA, 21 nt, Human
uuuguauaauuggauuuccua

SEQ ID NO: 1311502 - RNA, 20 nt, Human
uuugguuaugaauacuuugc

SEQ ID NO: 1311503 - RNA, 19 nt, Human
uuuggaaguuuagcucuga

SEQ ID NO: 1311504 - RNA, 11 nt, Human
uuuggaaggag

SEQ ID NO: 1311505 - RNA, 13 nt, Human
uuuggaauacuuu

SEQ ID NO: 1311506 - RNA, 15 nt, Human
uuuggaauacuuuuu

SEQ ID NO: 1311507 - RNA, 17 nt, Human
uuuggaauacuuuuugu

SEQ ID NO: 1311508 - RNA, 12 nt, Human
uuugguguaugg

SEQ ID NO: 1311509 - RNA, 13 nt, Human
uuugguguauggu

SEQ ID NO: 1311510 - RNA, 17 nt, Human
uuuguuccccacuggag

SEQ ID NO: 1311511 - RNA, 19 nt, Human
uuuguuccccacuggagca

SEQ ID NO: 1311512 - RNA, 15 nt, Human
uuuguucauauuaag

SEQ ID NO: 1311513 - RNA, 15 nt, Human
uuuguucccaagagc

SEQ ID NO: 1311514 - RNA, 14 nt, Human
uuuguucauauuaa

SEQ ID NO: 1311515 - RNA, 12 nt, Human
uuuguuaauuua

SEQ ID NO: 1311516 - RNA, 21 nt, Human
uuuguuaauuuagaaaacuuu

SEQ ID NO: 1311517 - RNA, 16 nt, Human
uuuguuauuuugcaac

SEQ ID NO: 1311518 - RNA, 12 nt, Human
uuugucccaggu

SEQ ID NO: 1311519 - RNA, 13 nt, Human
uuuguguucuguu

SEQ ID NO: 1311520 - RNA, 17 nt, Human
uuuguguucuguuuugu

SEQ ID NO: 1311521 - RNA, 22 nt, Human
uuuguguuucagccauguauuu

SEQ ID NO: 1311522 - RNA, 22 nt, Human
uuugucaugcugggauuuccaa

SEQ ID NO: 1311523 - RNA, 22 nt, Human
uuuuaaaaugagaaaucuaaaa

SEQ ID NO: 1311524 - RNA, 14 nt, Human
uuuuaaaauguaca

SEQ ID NO: 1311525 - RNA, 13 nt, Human
uuuuaaaauguac

SEQ ID NO: 1311526 - RNA, 11 nt, Human
uuuuaaaauuu

SEQ ID NO: 1311527 - RNA, 15 nt, Human
uuuuaaaauuuguuc

SEQ ID NO: 1311528 - RNA, 20 nt, Human
uuuuaaaauuuguucuugua

SEQ ID NO: 1311529 - RNA, 15 nt, Human
uuuuaaaaugagaaa

SEQ ID NO: 1311530 - RNA, 15 nt, Human
uuuguuuauguaauu

SEQ ID NO: 1311531 - RNA, 21 nt, Human
uuuguuuaugguaaaaaauuu

SEQ ID NO: 1311532 - RNA, 14 nt, Human
uuuguuuaaaaagg

SEQ ID NO: 1311533 - RNA, 20 nt, Human
uuuguuuaaaaaguaauaaa

SEQ ID NO: 1311534 - RNA, 14 nt, Human
uuuguuuaaaaagu

SEQ ID NO: 1311535 - RNA, 21 nt, Human
uuuguuuaauuuuuauuucuu

SEQ ID NO: 1311536 - RNA, 22 nt, Human
uuuguuuaauuuuuauuucuuc

SEQ ID NO: 1311537 - RNA, 13 nt, Human
uuuuacauuaaau

SEQ ID NO: 1311538 - RNA, 15 nt, Human
uuuuacaugaaguau

SEQ ID NO: 1311539 - RNA, 18 nt, Human
uuuuacaugaaguauuuu

SEQ ID NO: 1311540 - RNA, 15 nt, Human
uuuuacauucugaau

SEQ ID NO: 1311541 - RNA, 15 nt, Human
uuuuacaucuaaacu

SEQ ID NO: 1311542 - RNA, 16 nt, Human
uuuuacaucuaaacua

SEQ ID NO: 1311543 - RNA, 11 nt, Human
uuuuacaugaa

SEQ ID NO: 1311544 - RNA, 12 nt, Human
uuuuacaugaag

SEQ ID NO: 1311545 - RNA, 14 nt, Human
uuuuacaugaagua

SEQ ID NO: 1311546 - RNA, 20 nt, Human
uuuuacccauuuguucauau

SEQ ID NO: 1311547 - RNA, 13 nt, Human
uuuuaccaaguuu

SEQ ID NO: 1311548 - RNA, 17 nt, Human
uuuuacuauuguuacau

SEQ ID NO: 1311549 - RNA, 12 nt, Human
uuuuacucugcc

SEQ ID NO: 1311550 - RNA, 22 nt, Human
uuuuacauaaauuuaguauuuu

SEQ ID NO: 1311551 - RNA, 16 nt, Human
uuuuacagcugccugc

SEQ ID NO: 1311552 - RNA, 17 nt, Human
uuuuaauuugguuuuca

SEQ ID NO: 1311553 - RNA, 21 nt, Human
uuuuaauuugguuuucacauu

SEQ ID NO: 1311554 - RNA, 14 nt, Human
uuuuacuguacaga

SEQ ID NO: 1311555 - RNA, 11 nt, Human
uuuuauauaua

SEQ ID NO: 1311556 - RNA, 13 nt, Human
uuuuacucugccu

SEQ ID NO: 1311557 - RNA, 14 nt, Human
uuuuacucugccua

SEQ ID NO: 1311558 - RNA, 22 nt, Human
uuuuacucugccuacagaacuu

SEQ ID NO: 1311559 - RNA, 16 nt, Human
uuuuacucugccuaca

SEQ ID NO: 1311560 - RNA, 16 nt, Human
uuuuacugcucugaga

SEQ ID NO: 1311561 - RNA, 15 nt, Human
uuuuauaugcuucug

SEQ ID NO: 1311562 - RNA, 20 nt, Human
uuuuauaugcuucuguuuua

SEQ ID NO: 1311563 - RNA, 20 nt, Human
uuuuauaucaauuuaaaaaa

SEQ ID NO: 1311564 - RNA, 13 nt, Human
uuuuauaucccau

SEQ ID NO: 1311565 - RNA, 12 nt, Human
uuuuauauauua

SEQ ID NO: 1311566 - RNA, 15 nt, Human
uuuuauauauuauau

SEQ ID NO: 1311567 - RNA, 10 nt, Human
uuuuauauuu

SEQ ID NO: 1311568 - RNA, 20 nt, Human
uuuuauauuaaccagauaua

SEQ ID NO: 1311569 - RNA, 21 nt, Human
uuuuauauuaaccagauauau

SEQ ID NO: 1311570 - RNA, 12 nt, Human
uuuuaucaguag

SEQ ID NO: 1311571 - RNA, 16 nt, Human
uuuuaucaugcauguc

SEQ ID NO: 1311572 - RNA, 20 nt, Human
uuuuaugauacuugaaaauu

SEQ ID NO: 1311573 - RNA, 16 nt, Human
uuuuaugauacuugaa

SEQ ID NO: 1311574 - RNA, 19 nt, Human
uuuuaucauuuucaaaaug

SEQ ID NO: 1311575 - RNA, 15 nt, Human
uuuuaucccaaaguu

SEQ ID NO: 1311576 - RNA, 13 nt, Human
uuuuccugaaaac

SEQ ID NO: 1311577 - RNA, 16 nt, Human
uuuuccuccugagugc

SEQ ID NO: 1311578 - RNA, 18 nt, Human
uuuucccaaaauguugaa

SEQ ID NO: 1311579 - RNA, 20 nt, Human
uuuucccaaagcaucccucu

SEQ ID NO: 1311580 - RNA, 12 nt, Human
uuuucccacgag

SEQ ID NO: 1311581 - RNA, 17 nt, Human
uuuucccacuccaagcc

SEQ ID NO: 1311582 - RNA, 11 nt, Human
uuuuccuauau

SEQ ID NO: 1311583 - RNA, 13 nt, Human
uuuuccucccuca

SEQ ID NO: 1311584 - RNA, 20 nt, Human
uuuuccaugcguguuucuga

SEQ ID NO: 1311585 - RNA, 22 nt, Human
uuuuccauggcaggaaggcuug

SEQ ID NO: 1311586 - RNA, 21 nt, Human
uuuuccauggcaggaaggcuu

SEQ ID NO: 1311587 - RNA, 19 nt, Human
uuuuccucucaauaaaauu

SEQ ID NO: 1311588 - RNA, 18 nt, Human
uuuuccucuucuauuuug

SEQ ID NO: 1311589 - RNA, 16 nt, Human
uuuuccucuccacaca

SEQ ID NO: 1311590 - RNA, 19 nt, Human
uuuuccuucccuuuucugu

SEQ ID NO: 1311591 - RNA, 21 nt, Human
uuuuccuuccaaugucuggag

SEQ ID NO: 1311592 - RNA, 17 nt, Human
uuuuccuuugaauccuc

SEQ ID NO: 1311593 - RNA, 13 nt, Human
uuuuccuuugugc

SEQ ID NO: 1311594 - RNA, 14 nt, Human
uuuucgaaaaucaa

SEQ ID NO: 1311595 - RNA, 15 nt, Human
uuuucgaaaaucaaa

SEQ ID NO: 1311596 - RNA, 16 nt, Human
uuuucgaaaaucaaau

SEQ ID NO: 1311597 - RNA, 19 nt, Human
uuuucggccccauguaucu

SEQ ID NO: 1311598 - RNA, 17 nt, Human
uuuuaucccucaccugu

SEQ ID NO: 1311599 - RNA, 17 nt, Human
uuuucaacgcagcccug

SEQ ID NO: 1311600 - RNA, 21 nt, Human
uuuucaacgcagcccugcuuu

SEQ ID NO: 1311601 - RNA, 22 nt, Human
uuuucaacgcagcccugcuuug

SEQ ID NO: 1311602 - RNA, 14 nt, Human
uuuucaagaaacug

SEQ ID NO: 1311603 - RNA, 15 nt, Human
uuuucaagaaacuga

SEQ ID NO: 1311604 - RNA, 16 nt, Human
uuuucaagaauaauca

SEQ ID NO: 1311605 - RNA, 14 nt, Human
uuuucaauagccac

SEQ ID NO: 1311606 - RNA, 16 nt, Human
uuuucaauagccacua

SEQ ID NO: 1311607 - RNA, 18 nt, Human
uuuucaaugaauuuuaua

SEQ ID NO: 1311608 - RNA, 19 nt, Human
uuuucacugcuggcugccu

SEQ ID NO: 1311609 - RNA, 20 nt, Human
uuuucacugcuggcugccuu

SEQ ID NO: 1311610 - RNA, 16 nt, Human
uuuucacuguagaaug

SEQ ID NO: 1311611 - RNA, 19 nt, Human
uucaaugccccugaauuua

SEQ ID NO: 1311612 - RNA, 20 nt, Human
uucaaucuucaauccuugaa

SEQ ID NO: 1311613 - RNA, 16 nt, Human
uucaaucuguaaacug

SEQ ID NO: 1311614 - RNA, 17 nt, Human
uucaaucuguaaacugu

SEQ ID NO: 1311615 - RNA, 18 nt, Human
uucaaucuguaaacugug

SEQ ID NO: 1311616 - RNA, 20 nt, Human
uucaaucuguaaacugugua

SEQ ID NO: 1311617 - RNA, 15 nt, Human
uucaauguuagccuc

SEQ ID NO: 1311618 - RNA, 15 nt, Human
uucaauucaaagcug

SEQ ID NO: 1311619 - RNA, 18 nt, Human
uucaacaauucuaaaaug

SEQ ID NO: 1311620 - RNA, 22 nt, Human
uucaacaaagaaacaaagaugu

SEQ ID NO: 1311621 - RNA, 14 nt, Human
uucaacaauucuaa

SEQ ID NO: 1311622 - RNA, 15 nt, Human
uucaacaauucuaaa

SEQ ID NO: 1311623 - RNA, 19 nt, Human
uucaacaauucuaaaauga

SEQ ID NO: 1311624 - RNA, 17 nt, Human
uucaaccauuccccaug

SEQ ID NO: 1311625 - RNA, 20 nt, Human
uucaaccauuccccauggga

SEQ ID NO: 1311626 - RNA, 13 nt, Human
uucaacgcagccc

SEQ ID NO: 1311627 - RNA, 14 nt, Human
uucaacgcagcccu

SEQ ID NO: 1311628 - RNA, 15 nt, Human
uucaacgcagcccug

SEQ ID NO: 1311629 - RNA, 16 nt, Human
uucaaucccaggaugu

SEQ ID NO: 1311630 - RNA, 11 nt, Human
uucaauauuuu

SEQ ID NO: 1311631 - RNA, 22 nt, Human
uucaauccuugaagguauaucu

SEQ ID NO: 1311632 - RNA, 16 nt, Human
uucaauauuuucuuuu

SEQ ID NO: 1311633 - RNA, 18 nt, Human
uucaaucucaauugcuuu

SEQ ID NO: 1311634 - RNA, 14 nt, Human
uucaaucuguaaac

SEQ ID NO: 1311635 - RNA, 15 nt, Human
uucaaucuguaaacu

SEQ ID NO: 1311636 - RNA, 12 nt, Human
uuauuuucacug

SEQ ID NO: 1311637 - RNA, 15 nt, Human
uuacgugcucugugg

SEQ ID NO: 1311638 - RNA, 17 nt, Human
uuacuaaaaaaaagaug

SEQ ID NO: 1311639 - RNA, 18 nt, Human
uuacuaaaaaaaagauga

SEQ ID NO: 1311640 - RNA, 15 nt, Human
uucaaagcaaauguc

SEQ ID NO: 1311641 - RNA, 13 nt, Human
uuauuuugaugua

SEQ ID NO: 1311642 - RNA, 15 nt, Human
uuauuuugacauaaa

SEQ ID NO: 1311643 - RNA, 12 nt, Human
uucaaagaugcu

SEQ ID NO: 1311644 - RNA, 12 nt, Human
uuauuuucuggu

SEQ ID NO: 1311645 - RNA, 17 nt, Human
uuauuuugacauaaagu

SEQ ID NO: 1311646 - RNA, 11 nt, Human
uuauuuugaug

SEQ ID NO: 1311647 - RNA, 16 nt, Human
uuauuuugauguaaag

SEQ ID NO: 1311648 - RNA, 17 nt, Human
uucaaauuuuaucugcc

SEQ ID NO: 1311649 - RNA, 12 nt, Human
uucaacaaacau

SEQ ID NO: 1311650 - RNA, 20 nt, Human
uucaacaaacauuugcugaa

SEQ ID NO: 1311651 - RNA, 21 nt, Human
uucaacaaagaaacaaagaug

SEQ ID NO: 1311652 - RNA, 13 nt, Human
uucaaagaugcug

SEQ ID NO: 1311653 - RNA, 18 nt, Human
uucaaagaugcugugagu

SEQ ID NO: 1311654 - RNA, 16 nt, Human
uucaaagcaugaaaug

SEQ ID NO: 1311655 - RNA, 13 nt, Human
uucaaagccagcg

SEQ ID NO: 1311656 - RNA, 21 nt, Human
uucaaagccagcguccuccuc

SEQ ID NO: 1311657 - RNA, 20 nt, Human
uucagacucccauuccugaa

SEQ ID NO: 1311658 - RNA, 21 nt, Human
uucagacucccauuccugaag

SEQ ID NO: 1311659 - RNA, 22 nt, Human
uucagaggcccucgcugccagc

SEQ ID NO: 1311660 - RNA, 23 nt, Human
uucagaggcccucgcugccagcu

SEQ ID NO: 1311661 - RNA, 12 nt, Human
uucagaggcuca

SEQ ID NO: 1311662 - RNA, 13 nt, Human
uucagaggcucag

SEQ ID NO: 1311663 - RNA, 22 nt, Human
uucagaggcucagauuguaaua

SEQ ID NO: 1311664 - RNA, 21 nt, Human
uucagaguucuuuuugaagua

SEQ ID NO: 1311665 - RNA, 16 nt, Human
uucacccccuuuccug

SEQ ID NO: 1311666 - RNA, 20 nt, Human
uucacucuucaaaugccuga

SEQ ID NO: 1311667 - RNA, 19 nt, Human
uucacccccuuuccuggac

SEQ ID NO: 1311668 - RNA, 13 nt, Human
uucagcugccagu

SEQ ID NO: 1311669 - RNA, 15 nt, Human
uucaggcucuucucc

SEQ ID NO: 1311670 - RNA, 23 nt, Human
uucaggaucuauuuuuggagguu

SEQ ID NO: 1311671 - RNA, 12 nt, Human
uucaggaucuau

SEQ ID NO: 1311672 - RNA, 14 nt, Human
uucaggaucuauuu

SEQ ID NO: 1311673 - RNA, 22 nt, Human
uucaggaucuauuuuuggaggu

SEQ ID NO: 1311674 - RNA, 18 nt, Human
uucaggacacucacuaca

SEQ ID NO: 1311675 - RNA, 20 nt, Human
uucaggagagaguugaaccu

SEQ ID NO: 1311676 - RNA, 21 nt, Human
uucaggagagaguugaaccua

SEQ ID NO: 1311677 - RNA, 15 nt, Human
uucaggaggaauacu

SEQ ID NO: 1311678 - RNA, 18 nt, Human
uucaggaggaauacugaa

SEQ ID NO: 1311679 - RNA, 20 nt, Human
uucaggaggaauacugaaca

SEQ ID NO: 1311680 - RNA, 10 nt, Human
uucagcuccu

SEQ ID NO: 1311681 - RNA, 12 nt, Human
uucagcuccuga

SEQ ID NO: 1311682 - RNA, 14 nt, Human
uucagcuccugacc

SEQ ID NO: 1311683 - RNA, 13 nt, Human
uucagcuccugac

SEQ ID NO: 1311684 - RNA, 15 nt, Human
uucagcucugaaaga

SEQ ID NO: 1311685 - RNA, 23 nt, Human
uucagcugagguuugcacuuccu

SEQ ID NO: 1311686 - RNA, 23 nt, Human
uucagcugccaguguccugagcc

SEQ ID NO: 1311687 - RNA, 21 nt, Human
uucccaaaagcccauucauuc

SEQ ID NO: 1311688 - RNA, 11 nt, Human
uucccaaaagc

SEQ ID NO: 1311689 - RNA, 22 nt, Human
uucccaaaauguugaaauauga

SEQ ID NO: 1311690 - RNA, 17 nt, Human
uuccauuugcauuuguu

SEQ ID NO: 1311691 - RNA, 19 nt, Human
uucccaaaauguugaaaua

SEQ ID NO: 1311692 - RNA, 14 nt, Human
uuccccaagacauu

SEQ ID NO: 1311693 - RNA, 15 nt, Human
uuccccaccagaugc

SEQ ID NO: 1311694 - RNA, 20 nt, Human
uuccaugucgccucugcauu

SEQ ID NO: 1311695 - RNA, 21 nt, Human
uuccaugucgccucugcauuc

SEQ ID NO: 1311696 - RNA, 20 nt, Human
uuccauugguccaagauucc

SEQ ID NO: 1311697 - RNA, 13 nt, Human
uuccauuugcaag

SEQ ID NO: 1311698 - RNA, 17 nt, Human
uuccauuugcaagggaa

SEQ ID NO: 1311699 - RNA, 15 nt, Human
uuccauuugcauuug

SEQ ID NO: 1311700 - RNA, 18 nt, Human
uuccauuugcauuuguuu

SEQ ID NO: 1311701 - RNA, 19 nt, Human
uuccaugacugcuugcccu

SEQ ID NO: 1311702 - RNA, 17 nt, Human
uuccaugauucuauuua

SEQ ID NO: 1311703 - RNA, 18 nt, Human
uuccaugauucuauuuau

SEQ ID NO: 1311704 - RNA, 17 nt, Human
uuccaugucgccucugc

SEQ ID NO: 1311705 - RNA, 18 nt, Human
uuccaugucgccucugca

SEQ ID NO: 1311706 - RNA, 19 nt, Human
uuccaugucgccucugcau

SEQ ID NO: 1311707 - RNA, 12 nt, Human
uuccaucugauu

SEQ ID NO: 1311708 - RNA, 13 nt, Human
uuccaucuuuaca

SEQ ID NO: 1311709 - RNA, 18 nt, Human
uuccaucuuuacaaaacu

SEQ ID NO: 1311710 - RNA, 16 nt, Human
uuccaugacaucaaga

SEQ ID NO: 1311711 - RNA, 21 nt, Human
uuccaugacugcuugcccuaa

SEQ ID NO: 1311712 - RNA, 16 nt, Human
uuccagccccucuggu

SEQ ID NO: 1311713 - RNA, 17 nt, Human
uuccagccccucugguc

SEQ ID NO: 1311714 - RNA, 20 nt, Human
uuccagccccucuggucgcu

SEQ ID NO: 1311715 - RNA, 12 nt, Human
uuccagccauca

SEQ ID NO: 1311716 - RNA, 15 nt, Human
uuccagcauucccag

SEQ ID NO: 1311717 - RNA, 20 nt, Human
uuccagcauucccagguagg

SEQ ID NO: 1311718 - RNA, 17 nt, Human
uuccagcauucccaggu

SEQ ID NO: 1311719 - RNA, 14 nt, Human
uuccagccccucug

SEQ ID NO: 1311720 - RNA, 19 nt, Human
uuccacuuauaggaauuga

SEQ ID NO: 1311721 - RNA, 18 nt, Human
uuccacuuauagccucug

SEQ ID NO: 1311722 - RNA, 20 nt, Human
uuccacuuauagccucuguc

SEQ ID NO: 1311723 - RNA, 21 nt, Human
uuccacuuagaaauugcauuu

SEQ ID NO: 1311724 - RNA, 22 nt, Human
uuccacugugcagguucccacu

SEQ ID NO: 1311725 - RNA, 17 nt, Human
uuccacuuauagccucu

SEQ ID NO: 1311726 - RNA, 16 nt, Human
uuccacugagggcagu

SEQ ID NO: 1311727 - RNA, 13 nt, Human
uucauuuucucua

SEQ ID NO: 1311728 - RNA, 15 nt, Human
uuccacugagggcag

SEQ ID NO: 1311729 - RNA, 16 nt, Human
uucaugaccaguaaag

SEQ ID NO: 1311730 - RNA, 16 nt, Human
uucaugacagccucca

SEQ ID NO: 1311731 - RNA, 12 nt, Human
uucaugauaaug

SEQ ID NO: 1311732 - RNA, 15 nt, Human
uucaugauaaugaac

SEQ ID NO: 1311733 - RNA, 18 nt, Human
uucaugauaaugaacaga

SEQ ID NO: 1311734 - RNA, 15 nt, Human
uucaugauuagaaau

SEQ ID NO: 1311735 - RNA, 23 nt, Human
uucaugauuagaaauuaccugug

SEQ ID NO: 1311736 - RNA, 17 nt, Human
uucaugauuucauuuca

SEQ ID NO: 1311737 - RNA, 23 nt, Human
uucaugauuucauuucaacuguu

SEQ ID NO: 1311738 - RNA, 19 nt, Human
uucauuuagucaugugacc

SEQ ID NO: 1311739 - RNA, 17 nt, Human
uucauuuaucuauaauu

SEQ ID NO: 1311740 - RNA, 18 nt, Human
uucauuuaucuauaauuu

SEQ ID NO: 1311741 - RNA, 15 nt, Human
uucauuucaacuguu

SEQ ID NO: 1311742 - RNA, 12 nt, Human
uucauuucacug

SEQ ID NO: 1311743 - RNA, 13 nt, Human
uucauuucaucua

SEQ ID NO: 1311744 - RNA, 13 nt, Human
uucauuuccucaa

SEQ ID NO: 1311745 - RNA, 16 nt, Human
uucauuuccucaaaaa

SEQ ID NO: 1311746 - RNA, 22 nt, Human
uucauuugguucauuaauucua

SEQ ID NO: 1311747 - RNA, 16 nt, Human
uucauuuccuccguca

SEQ ID NO: 1311748 - RNA, 18 nt, Human
uucauuuuaacaucugag

SEQ ID NO: 1311749 - RNA, 21 nt, Human
uucauuuuaacaucugagaaa

SEQ ID NO: 1311750 - RNA, 22 nt, Human
uucaucucccaccuagcagcac

SEQ ID NO: 1311751 - RNA, 19 nt, Human
uucaucuucaguugucucu

SEQ ID NO: 1311752 - RNA, 15 nt, Human
uucaugacagccucc

SEQ ID NO: 1311753 - RNA, 22 nt, Human
uucaguuuauuugaaccaauaa

SEQ ID NO: 1311754 - RNA, 16 nt, Human
uucaguuucauaaaag

SEQ ID NO: 1311755 - RNA, 13 nt, Human
uucaguuucauaa

SEQ ID NO: 1311756 - RNA, 21 nt, Human
uucaguuuucauuugguucau

SEQ ID NO: 1311757 - RNA, 16 nt, Human
uucaguuuugauauuu

SEQ ID NO: 1311758 - RNA, 12 nt, Human
uucauaaguauu

SEQ ID NO: 1311759 - RNA, 19 nt, Human
uucauaaguauuaugucuc

SEQ ID NO: 1311760 - RNA, 20 nt, Human
uucauaaguauuaugucucu

SEQ ID NO: 1311761 - RNA, 17 nt, Human
uucauaaguauuucaaa

SEQ ID NO: 1311762 - RNA, 15 nt, Human
uucauaaucacucua

SEQ ID NO: 1311763 - RNA, 15 nt, Human
uucaucuaggauuuu

SEQ ID NO: 1311764 - RNA, 20 nt, Human
uucaucuaccauuuucuggu

SEQ ID NO: 1311765 - RNA, 23 nt, Human
uucaucuauuuuuggcagucuga

SEQ ID NO: 1311766 - RNA, 16 nt, Human
uucaggcucuucuccu

SEQ ID NO: 1311767 - RNA, 20 nt, Human
uucagggaaggaggagccug

SEQ ID NO: 1311768 - RNA, 21 nt, Human
uucagggaaggaggagccugu

SEQ ID NO: 1311769 - RNA, 22 nt, Human
uucagggaaggaggagccuguc

SEQ ID NO: 1311770 - RNA, 23 nt, Human
uucagggaaggaggagccugucc

SEQ ID NO: 1311771 - RNA, 16 nt, Human
uucaguugcacuucua

SEQ ID NO: 1311772 - RNA, 15 nt, Human
uucaguugucucuga

SEQ ID NO: 1311773 - RNA, 17 nt, Human
uucaguuguucuuuuua

SEQ ID NO: 1311774 - RNA, 16 nt, Human
uucccuucaucuggaa

SEQ ID NO: 1311775 - RNA, 15 nt, Human
uucccuucaucugga

SEQ ID NO: 1311776 - RNA, 14 nt, Human
uucccuucaucugg

SEQ ID NO: 1311777 - RNA, 15 nt, Human
uucccugugccuccu

SEQ ID NO: 1311778 - RNA, 16 nt, Human
uucccuuguagcuccu

SEQ ID NO: 1311779 - RNA, 20 nt, Human
uucccuuguagcuccucccc

SEQ ID NO: 1311780 - RNA, 13 nt, Human
uucccuuuccuga

SEQ ID NO: 1311781 - RNA, 19 nt, Human
uuccuagagaagacaggcu

SEQ ID NO: 1311782 - RNA, 13 nt, Human
uuccccacuggag

SEQ ID NO: 1311783 - RNA, 14 nt, Human
uuccccacuggagc

SEQ ID NO: 1311784 - RNA, 18 nt, Human
uuccccagacgccuggcu

SEQ ID NO: 1311785 - RNA, 15 nt, Human
uuccccagacuuguu

SEQ ID NO: 1311786 - RNA, 11 nt, Human
uuccccagaga

SEQ ID NO: 1311787 - RNA, 12 nt, Human
uuccccagagaa

SEQ ID NO: 1311788 - RNA, 20 nt, Human
uuccccaccagaugcugaaa

SEQ ID NO: 1311789 - RNA, 23 nt, Human
uuccccacccaccaacccucagg

SEQ ID NO: 1311790 - RNA, 19 nt, Human
uuccccacccaccaacccu

SEQ ID NO: 1311791 - RNA, 23 nt, Human
uucccuggucccuuguauccccu

SEQ ID NO: 1311792 - RNA, 18 nt, Human
uucccugugccuccuccc

SEQ ID NO: 1311793 - RNA, 18 nt, Human
uucccuguuuucccccca

SEQ ID NO: 1311794 - RNA, 19 nt, Human
uucccuucaguacccucuc

SEQ ID NO: 1311795 - RNA, 22 nt, Human
uucccuucaguacccucucagc

SEQ ID NO: 1311796 - RNA, 23 nt, Human
uucccuucaguacccucucagcu

SEQ ID NO: 1311797 - RNA, 20 nt, Human
uuccuagguauaauucacau

SEQ ID NO: 1311798 - RNA, 14 nt, Human
uuccuagcccucuc

SEQ ID NO: 1311799 - RNA, 18 nt, Human
uuccuagcccucucacau

SEQ ID NO: 1311800 - RNA, 18 nt, Human
uuccuagcugugugaaua

SEQ ID NO: 1311801 - RNA, 19 nt, Human
uuccucagccagccucgcc

SEQ ID NO: 1311802 - RNA, 16 nt, Human
uuccucagccagccuc

SEQ ID NO: 1311803 - RNA, 23 nt, Human
uuccucaguucauccauucuauu

SEQ ID NO: 1311804 - RNA, 15 nt, Human
uuccuaguuuucucc

SEQ ID NO: 1311805 - RNA, 18 nt, Human
uuccuaguuuucuccucc

SEQ ID NO: 1311806 - RNA, 15 nt, Human
uuccucagccagccu

SEQ ID NO: 1311807 - RNA, 19 nt, Human
uuccucauccaccccaucc

SEQ ID NO: 1311808 - RNA, 18 nt, Human
uuccucauccaccccauc

SEQ ID NO: 1311809 - RNA, 14 nt, Human
uuccucaugaaugu

SEQ ID NO: 1311810 - RNA, 15 nt, Human
uuccucaugaaugua

SEQ ID NO: 1311811 - RNA, 16 nt, Human
uuccucaugaauguaa

SEQ ID NO: 1311812 - RNA, 17 nt, Human
uuccucaugaauguaaa

SEQ ID NO: 1311813 - RNA, 18 nt, Human
uuccucaugaauguaaau

SEQ ID NO: 1311814 - RNA, 21 nt, Human
uuccucaugaauguaaauuug

SEQ ID NO: 1311815 - RNA, 22 nt, Human
uuccucaugaauguaaauuugu

SEQ ID NO: 1311816 - RNA, 20 nt, Human
uuccuccucaggcacacagc

SEQ ID NO: 1311817 - RNA, 14 nt, Human
uuccuccuccccac

SEQ ID NO: 1311818 - RNA, 16 nt, Human
uuccuccuccccacuu

SEQ ID NO: 1311819 - RNA, 13 nt, Human
uuccuccucaggc

SEQ ID NO: 1311820 - RNA, 21 nt, Human
uuccuucccugcugugaaaga

SEQ ID NO: 1311821 - RNA, 19 nt, Human
uuccuucccugcugugaaa

SEQ ID NO: 1311822 - RNA, 15 nt, Human
uuccuucccugcugu

SEQ ID NO: 1311823 - RNA, 14 nt, Human
uuccuucccaugga

SEQ ID NO: 1311824 - RNA, 16 nt, Human
uuccuucccugugccu

SEQ ID NO: 1311825 - RNA, 19 nt, Human
uuccuucccuuuucuguuc

SEQ ID NO: 1311826 - RNA, 18 nt, Human
uuccugccgcaacaguuu

SEQ ID NO: 1311827 - RNA, 17 nt, Human
uuccuucauuuccuccg

SEQ ID NO: 1311828 - RNA, 21 nt, Human
uuccuuccaaugucuggagac

SEQ ID NO: 1311829 - RNA, 13 nt, Human
uuccuuccucuga

SEQ ID NO: 1311830 - RNA, 17 nt, Human
uuccuuccucugagccu

SEQ ID NO: 1311831 - RNA, 12 nt, Human
uuccuuccgcuu

SEQ ID NO: 1311832 - RNA, 11 nt, Human
uuccugcccug

SEQ ID NO: 1311833 - RNA, 18 nt, Human
uuccugccccaggccuga

SEQ ID NO: 1311834 - RNA, 13 nt, Human
uuccuccugcuca

SEQ ID NO: 1311835 - RNA, 15 nt, Human
uuccuccugcucaua

SEQ ID NO: 1311836 - RNA, 11 nt, Human
uuccuccugga

SEQ ID NO: 1311837 - RNA, 13 nt, Human
uuccuccuggaaa

SEQ ID NO: 1311838 - RNA, 13 nt, Human
uuccugcccuggg

SEQ ID NO: 1311839 - RNA, 16 nt, Human
uuccugcccugggagg

SEQ ID NO: 1311840 - RNA, 22 nt, Human
uuccugcccugggaggcaguga

SEQ ID NO: 1311841 - RNA, 14 nt, Human
uuccuccuggaaau

SEQ ID NO: 1311842 - RNA, 18 nt, Human
uucuaaacuggagacugu

SEQ ID NO: 1311843 - RNA, 16 nt, Human
uucuaaaggaguuuau

SEQ ID NO: 1311844 - RNA, 15 nt, Human
uucuaaaaugugaug

SEQ ID NO: 1311845 - RNA, 19 nt, Human
uucuaaaaugugauguucu

SEQ ID NO: 1311846 - RNA, 20 nt, Human
uucuaaaaugugauguucua

SEQ ID NO: 1311847 - RNA, 23 nt, Human
uucuaaaaugugauguucuaagg

SEQ ID NO: 1311848 - RNA, 18 nt, Human
uucuaaacccaauccaaa

SEQ ID NO: 1311849 - RNA, 19 nt, Human
uucuaaacccaauccaaau

SEQ ID NO: 1311850 - RNA, 23 nt, Human
uucuaaacccaauccaaauggcg

SEQ ID NO: 1311851 - RNA, 15 nt, Human
uucuaaacuggagac

SEQ ID NO: 1311852 - RNA, 23 nt, Human
uucuaaaggaguuuauguuccau

SEQ ID NO: 1311853 - RNA, 19 nt, Human
uucuaaaggaguuuauguu

SEQ ID NO: 1311854 - RNA, 21 nt, Human
uucuaaguuucuaagauucua

SEQ ID NO: 1311855 - RNA, 15 nt, Human
uucuaauaauuucua

SEQ ID NO: 1311856 - RNA, 16 nt, Human
uucuaauaauuucuaa

SEQ ID NO: 1311857 - RNA, 18 nt, Human
uucuaauaauuucuaaug

SEQ ID NO: 1311858 - RNA, 22 nt, Human
uucggccuccauccugaggcuc

SEQ ID NO: 1311859 - RNA, 15 nt, Human
uucuaaaagguguga

SEQ ID NO: 1311860 - RNA, 17 nt, Human
uuccuuucuuuuccccc

SEQ ID NO: 1311861 - RNA, 20 nt, Human
uucuaaaaucuuauaguucu

SEQ ID NO: 1311862 - RNA, 21 nt, Human
uucuaaaaucuuauaguucua

SEQ ID NO: 1311863 - RNA, 22 nt, Human
uucuaaaaucuuauaguucuag

SEQ ID NO: 1311864 - RNA, 15 nt, Human
uucuaaaaugauugu

SEQ ID NO: 1311865 - RNA, 14 nt, Human
uucuaaaaugccuu

SEQ ID NO: 1311866 - RNA, 19 nt, Human
uucggccuccauccugagg

SEQ ID NO: 1311867 - RNA, 18 nt, Human
uucggccuccauccugag

SEQ ID NO: 1311868 - RNA, 18 nt, Human
uuccuuucuuuucccccu

SEQ ID NO: 1311869 - RNA, 22 nt, Human
uuccuuugaauccucucucugu

SEQ ID NO: 1311870 - RNA, 14 nt, Human
uucucugauacaga

SEQ ID NO: 1311871 - RNA, 17 nt, Human
uucucugacuucugccu

SEQ ID NO: 1311872 - RNA, 15 nt, Human
uucucugauacagaa

SEQ ID NO: 1311873 - RNA, 16 nt, Human
uucucugauacagaaa

SEQ ID NO: 1311874 - RNA, 17 nt, Human
uucucucuuuauacagc

SEQ ID NO: 1311875 - RNA, 18 nt, Human
uucucucuuuauacagcu

SEQ ID NO: 1311876 - RNA, 20 nt, Human
uucucucuuuauacagcugu

SEQ ID NO: 1311877 - RNA, 21 nt, Human
uucucucuuuauacagcugua

SEQ ID NO: 1311878 - RNA, 11 nt, Human
uucucugacuu

SEQ ID NO: 1311879 - RNA, 12 nt, Human
uucucugacuuc

SEQ ID NO: 1311880 - RNA, 16 nt, Human
uucucugacuucugcc

SEQ ID NO: 1311881 - RNA, 17 nt, Human
uucucugauacagaaaa

SEQ ID NO: 1311882 - RNA, 10 nt, Human
uucucugcca

SEQ ID NO: 1311883 - RNA, 12 nt, Human
uucucugccagu

SEQ ID NO: 1311884 - RNA, 13 nt, Human
uucucugccagug

SEQ ID NO: 1311885 - RNA, 20 nt, Human
uucucuggcuguaaggcucu

SEQ ID NO: 1311886 - RNA, 19 nt, Human
uucucugguaauauugacu

SEQ ID NO: 1311887 - RNA, 13 nt, Human
uucucugucucau

SEQ ID NO: 1311888 - RNA, 12 nt, Human
uucucugucuca

SEQ ID NO: 1311889 - RNA, 18 nt, Human
uucugacucgguuucucc

SEQ ID NO: 1311890 - RNA, 19 nt, Human
uucugacucgguuucucca

SEQ ID NO: 1311891 - RNA, 15 nt, Human
uucugacucugagcu

SEQ ID NO: 1311892 - RNA, 16 nt, Human
uucugacucugagcua

SEQ ID NO: 1311893 - RNA, 23 nt, Human
uucucuccucuccccaugauguu

SEQ ID NO: 1311894 - RNA, 19 nt, Human
uucucuccagcugacuaaa

SEQ ID NO: 1311895 - RNA, 17 nt, Human
uucucucggcuccccau

SEQ ID NO: 1311896 - RNA, 16 nt, Human
uucuccccugcacugu

SEQ ID NO: 1311897 - RNA, 15 nt, Human
uucuccccugcacug

SEQ ID NO: 1311898 - RNA, 12 nt, Human
uucucuccagcu

SEQ ID NO: 1311899 - RNA, 12 nt, Human
uucuccccagcu

SEQ ID NO: 1311900 - RNA, 15 nt, Human
uucuccccagcuccc

SEQ ID NO: 1311901 - RNA, 18 nt, Human
uucuccccagcucccagg

SEQ ID NO: 1311902 - RNA, 21 nt, Human
uucucccccauguucuguccc

SEQ ID NO: 1311903 - RNA, 18 nt, Human
uucuccauggcccugcca

SEQ ID NO: 1311904 - RNA, 23 nt, Human
uucucccaauucauccucacuca

SEQ ID NO: 1311905 - RNA, 11 nt, Human
uucucccacuc

SEQ ID NO: 1311906 - RNA, 12 nt, Human
uucucccacucu

SEQ ID NO: 1311907 - RNA, 16 nt, Human
uucucccacucuccua

SEQ ID NO: 1311908 - RNA, 18 nt, Human
uucucccacucuccuagg

SEQ ID NO: 1311909 - RNA, 19 nt, Human
uucucccaggcaaggcugu

SEQ ID NO: 1311910 - RNA, 20 nt, Human
uucuccauccacaugggagc

SEQ ID NO: 1311911 - RNA, 15 nt, Human
uucuccauccuacca

SEQ ID NO: 1311912 - RNA, 22 nt, Human
uucuccacagcaaccccaggcu

SEQ ID NO: 1311913 - RNA, 15 nt, Human
uucuccacagcaacc

SEQ ID NO: 1311914 - RNA, 15 nt, Human
uucuauggguguuau

SEQ ID NO: 1311915 - RNA, 18 nt, Human
uucuauggguguuaucac

SEQ ID NO: 1311916 - RNA, 13 nt, Human
uucuauuaaaaga

SEQ ID NO: 1311917 - RNA, 14 nt, Human
uucuauuaaaagac

SEQ ID NO: 1311918 - RNA, 15 nt, Human
uucuauuaaaagacu

SEQ ID NO: 1311919 - RNA, 16 nt, Human
uucuauuaaaagacuc

SEQ ID NO: 1311920 - RNA, 17 nt, Human
uucuauuaaaagacuca

SEQ ID NO: 1311921 - RNA, 18 nt, Human
uucuauuaaaagacucau

SEQ ID NO: 1311922 - RNA, 19 nt, Human
uucuauuaaaagacucauc

SEQ ID NO: 1311923 - RNA, 21 nt, Human
uucuauuaaaagacucauccg

SEQ ID NO: 1311924 - RNA, 22 nt, Human
uucuauuaaaagacucauccgu

SEQ ID NO: 1311925 - RNA, 14 nt, Human
uucuauuaaaagug

SEQ ID NO: 1311926 - RNA, 18 nt, Human
uucuauuaaaagugggaa

SEQ ID NO: 1311927 - RNA, 23 nt, Human
uucuauuaaaagugggaauuagg

SEQ ID NO: 1311928 - RNA, 12 nt, Human
uucuauuaaagu

SEQ ID NO: 1311929 - RNA, 21 nt, Human
uucuauuaaagugcuaagguu

SEQ ID NO: 1311930 - RNA, 15 nt, Human
uucuauuaaagugcu

SEQ ID NO: 1311931 - RNA, 20 nt, Human
uucuauuacauuuucaguga

SEQ ID NO: 1311932 - RNA, 13 nt, Human
uucuauugccucu

SEQ ID NO: 1311933 - RNA, 14 nt, Human
uucuauugccucug

SEQ ID NO: 1311934 - RNA, 15 nt, Human
uucuauugccucuga

SEQ ID NO: 1311935 - RNA, 17 nt, Human
uucuauugccucugaga

SEQ ID NO: 1311936 - RNA, 13 nt, Human
uucuaaugaugau

SEQ ID NO: 1311937 - RNA, 14 nt, Human
uucuaauaguuuua

SEQ ID NO: 1311938 - RNA, 19 nt, Human
uucuaauaauuucuaaugu

SEQ ID NO: 1311939 - RNA, 15 nt, Human
uucuauuguuguaca

SEQ ID NO: 1311940 - RNA, 18 nt, Human
uucuauuuauauguacau

SEQ ID NO: 1311941 - RNA, 19 nt, Human
uucuauuuauauguacaug

SEQ ID NO: 1311942 - RNA, 17 nt, Human
uucuauuucacuggagc

SEQ ID NO: 1311943 - RNA, 17 nt, Human
uucuauuucuccuccau

SEQ ID NO: 1311944 - RNA, 19 nt, Human
uucuauuucuccuccaugg

SEQ ID NO: 1311945 - RNA, 15 nt, Human
uucuauuucacugga

SEQ ID NO: 1311946 - RNA, 14 nt, Human
uucuauuuggggcu

SEQ ID NO: 1311947 - RNA, 16 nt, Human
uucuauuuggggcuug

SEQ ID NO: 1311948 - RNA, 18 nt, Human
uucuauuuggggcuugau

SEQ ID NO: 1311949 - RNA, 15 nt, Human
uucuauuuuauuaug

SEQ ID NO: 1311950 - RNA, 18 nt, Human
uucuauuuuauuaugaag

SEQ ID NO: 1311951 - RNA, 20 nt, Human
uucuauuuuauuaugaagaa

SEQ ID NO: 1311952 - RNA, 19 nt, Human
uucuauuuuauuaugaaga

SEQ ID NO: 1311953 - RNA, 13 nt, Human
uucuauuuuguaa

SEQ ID NO: 1311954 - RNA, 16 nt, Human
uucuauuuuguaaacu

SEQ ID NO: 1311955 - RNA, 23 nt, Human
uucuauuuuuuguuuuguuuccu

SEQ ID NO: 1311956 - RNA, 16 nt, Human
uucuauuuuuaucuga

SEQ ID NO: 1311957 - RNA, 15 nt, Human
uucuauuuuuuguuu

SEQ ID NO: 1311958 - RNA, 11 nt, Human
uucucaugccu

SEQ ID NO: 1311959 - RNA, 12 nt, Human
uucucaugccuc

SEQ ID NO: 1311960 - RNA, 14 nt, Human
uucucaugauccaa

SEQ ID NO: 1311961 - RNA, 14 nt, Human
uucucaugccucag

SEQ ID NO: 1311962 - RNA, 21 nt, Human
uucucaugccucagccuccug

SEQ ID NO: 1311963 - RNA, 20 nt, Human
uucuccaaacugaagcagcc

SEQ ID NO: 1311964 - RNA, 22 nt, Human
uucuccaacaucacagcccagc

SEQ ID NO: 1311965 - RNA, 16 nt, Human
uucuccaagagcuaca

SEQ ID NO: 1311966 - RNA, 18 nt, Human
uucucaaaggagcgagca

SEQ ID NO: 1311967 - RNA, 14 nt, Human
uucuuuauaagaaa

SEQ ID NO: 1311968 - RNA, 22 nt, Human
uucuuuauaagaaagccugagu

SEQ ID NO: 1311969 - RNA, 13 nt, Human
uucuuguaauuuu

SEQ ID NO: 1311970 - RNA, 18 nt, Human
uucuuucaauacagauau

SEQ ID NO: 1311971 - RNA, 15 nt, Human
uucuuucaauacaga

SEQ ID NO: 1311972 - RNA, 23 nt, Human
uugaagaauguuaagacuugaca

SEQ ID NO: 1311973 - RNA, 21 nt, Human
uugaagaauguuaagacuuga

SEQ ID NO: 1311974 - RNA, 16 nt, Human
uugaagaacugcaggc

SEQ ID NO: 1311975 - RNA, 20 nt, Human
uugaagaacugcaggcccug

SEQ ID NO: 1311976 - RNA, 19 nt, Human
uugaagaacugcaggcccu

SEQ ID NO: 1311977 - RNA, 15 nt, Human
uugaagaauguuaag

SEQ ID NO: 1311978 - RNA, 19 nt, Human
uugaagaauguuaagacuu

SEQ ID NO: 1311979 - RNA, 14 nt, Human
uugaaagaauagaa

SEQ ID NO: 1311980 - RNA, 15 nt, Human
uugaacucugguggc

SEQ ID NO: 1311981 - RNA, 20 nt, Human
uugaacucuucacucuucaa

SEQ ID NO: 1311982 - RNA, 14 nt, Human
uucugagcauuuaa

SEQ ID NO: 1311983 - RNA, 20 nt, Human
uucugagcagcgagccugcu

SEQ ID NO: 1311984 - RNA, 22 nt, Human
uucugagcagcgagccugcuag

SEQ ID NO: 1311985 - RNA, 19 nt, Human
uucugagcccgguaagagc

SEQ ID NO: 1311986 - RNA, 16 nt, Human
uucugagcuauuucau

SEQ ID NO: 1311987 - RNA, 23 nt, Human
uucugagcuauuucaucuauuuu

SEQ ID NO: 1311988 - RNA, 22 nt, Human
uucugagcccgguaagagcaaa

SEQ ID NO: 1311989 - RNA, 13 nt, Human
uucugagcuccug

SEQ ID NO: 1311990 - RNA, 19 nt, Human
uucugagcuccuguccccu

SEQ ID NO: 1311991 - RNA, 12 nt, Human
uucuguggcuca

SEQ ID NO: 1311992 - RNA, 16 nt, Human
uucuguggcucacaga

SEQ ID NO: 1311993 - RNA, 15 nt, Human
uucugagcuccuguc

SEQ ID NO: 1311994 - RNA, 13 nt, Human
uucuguuaacuga

SEQ ID NO: 1311995 - RNA, 14 nt, Human
uucuguuaacugaa

SEQ ID NO: 1311996 - RNA, 15 nt, Human
uucuguuaacugaau

SEQ ID NO: 1311997 - RNA, 16 nt, Human
uucuguuaacugaaua

SEQ ID NO: 1311998 - RNA, 21 nt, Human
uucuguuaacugaauaccacu

SEQ ID NO: 1311999 - RNA, 17 nt, Human
uucuguuaacugaauac

SEQ ID NO: 1312000 - RNA, 13 nt, Human
uucuguuccaaau

SEQ ID NO: 1312001 - RNA, 17 nt, Human
uucuguuccaaauucag

SEQ ID NO: 1312002 - RNA, 19 nt, Human
uucuguuccaaauucaguu

SEQ ID NO: 1312003 - RNA, 13 nt, Human
uucuguucuaguu

SEQ ID NO: 1312004 - RNA, 14 nt, Human
uucuguucuaguuu

SEQ ID NO: 1312005 - RNA, 21 nt, Human
uucuguucuaguuuuuuacuu

SEQ ID NO: 1312006 - RNA, 14 nt, Human
uucuucaacucccu

SEQ ID NO: 1312007 - RNA, 17 nt, Human
uucuucaagaucccauu

SEQ ID NO: 1312008 - RNA, 12 nt, Human
uucuucaagauc

SEQ ID NO: 1312009 - RNA, 14 nt, Human
uucuuauuucauga

SEQ ID NO: 1312010 - RNA, 16 nt, Human
uucuuauuucaugaaa

SEQ ID NO: 1312011 - RNA, 19 nt, Human
uucuuauuuuuuucuauuu

SEQ ID NO: 1312012 - RNA, 18 nt, Human
uucuucaagaucccauuu

SEQ ID NO: 1312013 - RNA, 16 nt, Human
uucuucaccaaaucuu

SEQ ID NO: 1312014 - RNA, 13 nt, Human
uucuucacugcaa

SEQ ID NO: 1312015 - RNA, 14 nt, Human
uucuucacugcaac

SEQ ID NO: 1312016 - RNA, 22 nt, Human
uucuugguugaggaaacaaaca

SEQ ID NO: 1312017 - RNA, 12 nt, Human
uucuuguaauuu

SEQ ID NO: 1312018 - RNA, 22 nt, Human
uugaccugccucccuucaugca

SEQ ID NO: 1312019 - RNA, 22 nt, Human
uugaccuggauggggcaggcca

SEQ ID NO: 1312020 - RNA, 23 nt, Human
uugaccugccucccuucaugcau

SEQ ID NO: 1312021 - RNA, 21 nt, Human
uugaccuuuuauguaguaauu

SEQ ID NO: 1312022 - RNA, 21 nt, Human
uugaccugccucccuucaugc

SEQ ID NO: 1312023 - RNA, 19 nt, Human
uugaccugaggcugugguc

SEQ ID NO: 1312024 - RNA, 22 nt, Human
uugaccguguuggucuguacug

SEQ ID NO: 1312025 - RNA, 13 nt, Human
uugaccugaggcu

SEQ ID NO: 1312026 - RNA, 20 nt, Human
uugaauggcuauguuuuuaa

SEQ ID NO: 1312027 - RNA, 16 nt, Human
uugaauggcuauguuu

SEQ ID NO: 1312028 - RNA, 16 nt, Human
uugaaugcaaaccaua

SEQ ID NO: 1312029 - RNA, 11 nt, Human
uugaggacaca

SEQ ID NO: 1312030 - RNA, 15 nt, Human
uugaggaaagcaaga

SEQ ID NO: 1312031 - RNA, 23 nt, Human
uugaggaaagcaagaaucagaga

SEQ ID NO: 1312032 - RNA, 13 nt, Human
uugaggaaaacaa

SEQ ID NO: 1312033 - RNA, 23 nt, Human
uugaggaaaacaagcauucacaa

SEQ ID NO: 1312034 - RNA, 15 nt, Human
uugagcuuaaucuuu

SEQ ID NO: 1312035 - RNA, 16 nt, Human
uugagcuuaaucuuug

SEQ ID NO: 1312036 - RNA, 22 nt, Human
uugacuagaaaauuuaaaacau

SEQ ID NO: 1312037 - RNA, 23 nt, Human
uugacuagaugauggaugccaau

SEQ ID NO: 1312038 - RNA, 16 nt, Human
uugaggacacaugucc

SEQ ID NO: 1312039 - RNA, 15 nt, Human
uugaggacacauguc

SEQ ID NO: 1312040 - RNA, 14 nt, Human
uugaggacacaugu

SEQ ID NO: 1312041 - RNA, 13 nt, Human
uugaggacacaug

SEQ ID NO: 1312042 - RNA, 14 nt, Human
uugaggacacugau

SEQ ID NO: 1312043 - RNA, 15 nt, Human
uugaggacacugaua

SEQ ID NO: 1312044 - RNA, 14 nt, Human
uugaggggaccagg

SEQ ID NO: 1312045 - RNA, 17 nt, Human
uugaggggaccaggagu

SEQ ID NO: 1312046 - RNA, 15 nt, Human
uugaggggaccagga

SEQ ID NO: 1312047 - RNA, 21 nt, Human
uugauuggugauuagguggug

SEQ ID NO: 1312048 - RNA, 12 nt, Human
uugaugaagaag

SEQ ID NO: 1312049 - RNA, 13 nt, Human
uugaugaagaagu

SEQ ID NO: 1312050 - RNA, 15 nt, Human
uugaucuggaaccca

SEQ ID NO: 1312051 - RNA, 16 nt, Human
uugaucuggaacccag

SEQ ID NO: 1312052 - RNA, 17 nt, Human
uugaucuggaacccaga

SEQ ID NO: 1312053 - RNA, 19 nt, Human
uugaucuggaacccagacu

SEQ ID NO: 1312054 - RNA, 16 nt, Human
uugcaaaaucaguuuu

SEQ ID NO: 1312055 - RNA, 21 nt, Human
uugcaaaaucaguuuuccucu

SEQ ID NO: 1312056 - RNA, 15 nt, Human
uugcaaaaucaguuu

SEQ ID NO: 1312057 - RNA, 22 nt, Human
uugcaaauguaguauggccugu

SEQ ID NO: 1312058 - RNA, 14 nt, Human
uugauuuucuggau

SEQ ID NO: 1312059 - RNA, 20 nt, Human
uugauuuuugccucuuccag

SEQ ID NO: 1312060 - RNA, 19 nt, Human
uugcaaaaaauguuuuugg

SEQ ID NO: 1312061 - RNA, 15 nt, Human
uugcaaaaacuacaa

SEQ ID NO: 1312062 - RNA, 20 nt, Human
uugcaaaaacuacaaccaau

SEQ ID NO: 1312063 - RNA, 19 nt, Human
uugcaaaaacuacaaccaa

SEQ ID NO: 1312064 - RNA, 14 nt, Human
uugcauagaauaaa

SEQ ID NO: 1312065 - RNA, 22 nt, Human
uugcauacauucuucaagaucc

SEQ ID NO: 1312066 - RNA, 23 nt, Human
uugcagucccaagcggugucucu

SEQ ID NO: 1312067 - RNA, 14 nt, Human
uugcagucacucua

SEQ ID NO: 1312068 - RNA, 16 nt, Human
uugcagucacucuagu

SEQ ID NO: 1312069 - RNA, 22 nt, Human
uugcagucacucuagucaauga

SEQ ID NO: 1312070 - RNA, 13 nt, Human
uugcagucccaag

SEQ ID NO: 1312071 - RNA, 21 nt, Human
uugcagucccaagcggugucu

SEQ ID NO: 1312072 - RNA, 13 nt, Human
uugccacccucau

SEQ ID NO: 1312073 - RNA, 22 nt, Human
uugcauaguaccaaucauuuua

SEQ ID NO: 1312074 - RNA, 23 nt, Human
uugcauaguaccaaucauuuuaa

SEQ ID NO: 1312075 - RNA, 16 nt, Human
uugccacccucaugcu

SEQ ID NO: 1312076 - RNA, 18 nt, Human
uugccaccucuaacagca

SEQ ID NO: 1312077 - RNA, 20 nt, Human
uugccaccucuaacagcacc

SEQ ID NO: 1312078 - RNA, 14 nt, Human
uugccacugccucu

SEQ ID NO: 1312079 - RNA, 15 nt, Human
uugccacugccucuu

SEQ ID NO: 1312080 - RNA, 18 nt, Human
uugcagacaggaaucuua

SEQ ID NO: 1312081 - RNA, 18 nt, Human
uugcagcuguuuuguuga

SEQ ID NO: 1312082 - RNA, 21 nt, Human
uugcagcuguuuuguugacau

SEQ ID NO: 1312083 - RNA, 20 nt, Human
uugcagcuguuuuguugaca

SEQ ID NO: 1312084 - RNA, 23 nt, Human
uugcaguaucggcacuguacaaa

SEQ ID NO: 1312085 - RNA, 15 nt, Human
uugcaguaacuguuu

SEQ ID NO: 1312086 - RNA, 23 nt, Human
uugcagguggccaaguuccucua

SEQ ID NO: 1312087 - RNA, 13 nt, Human
uugcaguaacugu

SEQ ID NO: 1312088 - RNA, 23 nt, Human
uugcaggguccucuucugggccu

SEQ ID NO: 1312089 - RNA, 17 nt, Human
uugcaggguccucuucu

SEQ ID NO: 1312090 - RNA, 14 nt, Human
uugcagguggccaa

SEQ ID NO: 1312091 - RNA, 20 nt, Human
uugcagaagggggucucuuc

SEQ ID NO: 1312092 - RNA, 11 nt, Human
uugcagacagg

SEQ ID NO: 1312093 - RNA, 15 nt, Human
uugcagacaggaauc

SEQ ID NO: 1312094 - RNA, 16 nt, Human
uugcagacaggaaucu

SEQ ID NO: 1312095 - RNA, 13 nt, Human
uugcaaccaggaa

SEQ ID NO: 1312096 - RNA, 18 nt, Human
uugcaaccaggaacagca

SEQ ID NO: 1312097 - RNA, 14 nt, Human
uugcaaccgucugu

SEQ ID NO: 1312098 - RNA, 14 nt, Human
uugcaaccucgcug

SEQ ID NO: 1312099 - RNA, 20 nt, Human
uuggaaguuuagcucugaga

SEQ ID NO: 1312100 - RNA, 15 nt, Human
uuggaaggagcagaa

SEQ ID NO: 1312101 - RNA, 13 nt, Human
uuggaaggagcag

SEQ ID NO: 1312102 - RNA, 20 nt, Human
uuggaagugaaaacuuugua

SEQ ID NO: 1312103 - RNA, 17 nt, Human
uuggaaguuuagcucug

SEQ ID NO: 1312104 - RNA, 18 nt, Human
uuggaaguuuagcucuga

SEQ ID NO: 1312105 - RNA, 19 nt, Human
uuggaaguuuagcucugag

SEQ ID NO: 1312106 - RNA, 21 nt, Human
uuggaaguuuagcucugagaa

SEQ ID NO: 1312107 - RNA, 15 nt, Human
uuggaaguuuuaauc

SEQ ID NO: 1312108 - RNA, 22 nt, Human
uuggaacuugccugccuuucca

SEQ ID NO: 1312109 - RNA, 14 nt, Human
uuggaacuugccug

SEQ ID NO: 1312110 - RNA, 18 nt, Human
uuggaagaaggggcaggu

SEQ ID NO: 1312111 - RNA, 19 nt, Human
uuggaaccuuguuuuggac

SEQ ID NO: 1312112 - RNA, 16 nt, Human
uuggaacucugcuuga

SEQ ID NO: 1312113 - RNA, 17 nt, Human
uuggaacugaagggggc

SEQ ID NO: 1312114 - RNA, 13 nt, Human
uuggaacuggagg

SEQ ID NO: 1312115 - RNA, 14 nt, Human
uuggaacuggaggc

SEQ ID NO: 1312116 - RNA, 16 nt, Human
uuggaacuggaggcag

SEQ ID NO: 1312117 - RNA, 14 nt, Human
uuggauuguauauu

SEQ ID NO: 1312118 - RNA, 18 nt, Human
uuggauuguauauugugu

SEQ ID NO: 1312119 - RNA, 21 nt, Human
uuggauuggacaaaaugacuu

SEQ ID NO: 1312120 - RNA, 17 nt, Human
uuggauuggacaaaaug

SEQ ID NO: 1312121 - RNA, 20 nt, Human
uuggauucuuuccauuugca

SEQ ID NO: 1312122 - RNA, 15 nt, Human
uuggaaauuuagcau

SEQ ID NO: 1312123 - RNA, 16 nt, Human
uuggaaauuuagcauu

SEQ ID NO: 1312124 - RNA, 17 nt, Human
uuggaaauuuagcauug

SEQ ID NO: 1312125 - RNA, 18 nt, Human
uuggaaauuuagcauugu

SEQ ID NO: 1312126 - RNA, 22 nt, Human
uuggaacauuggaauguucuca

SEQ ID NO: 1312127 - RNA, 13 nt, Human
uuggaaccagacu

SEQ ID NO: 1312128 - RNA, 14 nt, Human
uuggaaccagacuc

SEQ ID NO: 1312129 - RNA, 15 nt, Human
uuggaaccagacucu

SEQ ID NO: 1312130 - RNA, 14 nt, Human
uuggaaccuuguuu

SEQ ID NO: 1312131 - RNA, 14 nt, Human
uugcuuaccucuca

SEQ ID NO: 1312132 - RNA, 13 nt, Human
uuggaaagcaggu

SEQ ID NO: 1312133 - RNA, 17 nt, Human
uuggaaaguacacucug

SEQ ID NO: 1312134 - RNA, 22 nt, Human
uuggaaaguacacucugcuguu

SEQ ID NO: 1312135 - RNA, 13 nt, Human
uuggaaauaaagu

SEQ ID NO: 1312136 - RNA, 21 nt, Human
uuggaaauaaagucagaugga

SEQ ID NO: 1312137 - RNA, 21 nt, Human
uuggaaaguacacucugcugu

SEQ ID NO: 1312138 - RNA, 14 nt, Human
uuggaaauacugua

SEQ ID NO: 1312139 - RNA, 16 nt, Human
uugcuguaauguuaau

SEQ ID NO: 1312140 - RNA, 13 nt, Human
uugcuguuuugau

SEQ ID NO: 1312141 - RNA, 18 nt, Human
uugccacugccucuuccu

SEQ ID NO: 1312142 - RNA, 15 nt, Human
uugccaguuguccuc

SEQ ID NO: 1312143 - RNA, 17 nt, Human
uugccaguuguccuccu

SEQ ID NO: 1312144 - RNA, 19 nt, Human
uugccaguuguccuccuuc

SEQ ID NO: 1312145 - RNA, 20 nt, Human
uugccaguuguccuccuucc

SEQ ID NO: 1312146 - RNA, 18 nt, Human
uugccucugagagcauca

SEQ ID NO: 1312147 - RNA, 12 nt, Human
uugccucugugc

SEQ ID NO: 1312148 - RNA, 13 nt, Human
uugccucugugcu

SEQ ID NO: 1312149 - RNA, 22 nt, Human
uugcuaaaggaaaaaaccaucc

SEQ ID NO: 1312150 - RNA, 11 nt, Human
uugcugccuca

SEQ ID NO: 1312151 - RNA, 19 nt, Human
uugcugccccaucagugcu

SEQ ID NO: 1312152 - RNA, 20 nt, Human
uugcugccccaucagugcuc

SEQ ID NO: 1312153 - RNA, 12 nt, Human
uugcugccucau

SEQ ID NO: 1312154 - RNA, 15 nt, Human
uugcugccucaugcu

SEQ ID NO: 1312155 - RNA, 13 nt, Human
uugcugcaaaccu

SEQ ID NO: 1312156 - RNA, 15 nt, Human
uugcugcaaaccuga

SEQ ID NO: 1312157 - RNA, 20 nt, Human
uugcugcaagcacagcccuu

SEQ ID NO: 1312158 - RNA, 18 nt, Human
uugcugcaguaugaaaau

SEQ ID NO: 1312159 - RNA, 16 nt, Human
uugcugcauggcaggg

SEQ ID NO: 1312160 - RNA, 15 nt, Human
uugcugcauggcagg

SEQ ID NO: 1312161 - RNA, 14 nt, Human
uugccucugugcug

SEQ ID NO: 1312162 - RNA, 19 nt, Human
uugccucugugcugugugu

SEQ ID NO: 1312163 - RNA, 17 nt, Human
uugccucuuccagucuu

SEQ ID NO: 1312164 - RNA, 19 nt, Human
uugccucuuccagucuucc

SEQ ID NO: 1312165 - RNA, 19 nt, Human
uugccucugagagcaucag

SEQ ID NO: 1312166 - RNA, 19 nt, Human
uugccugaacuccugccau

SEQ ID NO: 1312167 - RNA, 12 nt, Human
uugccugcaggc

SEQ ID NO: 1312168 - RNA, 12 nt, Human
uugccugccuuu

SEQ ID NO: 1312169 - RNA, 14 nt, Human
uugccugccuuucc

SEQ ID NO: 1312170 - RNA, 15 nt, Human
uugccugccuuucca

SEQ ID NO: 1312171 - RNA, 23 nt, Human
uugccugccuuuccauccauggc

SEQ ID NO: 1312172 - RNA, 16 nt, Human
uugccugccuuuccau

SEQ ID NO: 1312173 - RNA, 12 nt, Human
uugccugguaca

SEQ ID NO: 1312174 - RNA, 13 nt, Human
uugccugguacag

SEQ ID NO: 1312175 - RNA, 14 nt, Human
uugccugguacagu

SEQ ID NO: 1312176 - RNA, 15 nt, Human
uugccugguacagua

SEQ ID NO: 1312177 - RNA, 14 nt, Human
uugcggcuccucag

SEQ ID NO: 1312178 - RNA, 14 nt, Human
uugcgguucaggaa

SEQ ID NO: 1312179 - RNA, 14 nt, Human
uugguaaaccuuuu

SEQ ID NO: 1312180 - RNA, 16 nt, Human
uugguaaagacuggcu

SEQ ID NO: 1312181 - RNA, 19 nt, Human
uugguaaagacuggcuuuu

SEQ ID NO: 1312182 - RNA, 12 nt, Human
uugguaaaccuu

SEQ ID NO: 1312183 - RNA, 15 nt, Human
uuggguuuuuuuccu

SEQ ID NO: 1312184 - RNA, 16 nt, Human
uugggaaacuuggcuc

SEQ ID NO: 1312185 - RNA, 14 nt, Human
uuggcuuaccuggc

SEQ ID NO: 1312186 - RNA, 18 nt, Human
uugggaacugaacucacu

SEQ ID NO: 1312187 - RNA, 12 nt, Human
uugggaggcuga

SEQ ID NO: 1312188 - RNA, 12 nt, Human
uuggcuggaccc

SEQ ID NO: 1312189 - RNA, 17 nt, Human
uuggcuggacccagcca

SEQ ID NO: 1312190 - RNA, 15 nt, Human
uuggcuggacccagc

SEQ ID NO: 1312191 - RNA, 19 nt, Human
uuggccauauuuaccucag

SEQ ID NO: 1312192 - RNA, 15 nt, Human
uuggccacagccagg

SEQ ID NO: 1312193 - RNA, 18 nt, Human
uuggccauauuuaccuca

SEQ ID NO: 1312194 - RNA, 20 nt, Human
uuggcuggugugguacagag

SEQ ID NO: 1312195 - RNA, 21 nt, Human
uuggcuggugugguacagaga

SEQ ID NO: 1312196 - RNA, 23 nt, Human
uuggcuggugugguacagagaag

SEQ ID NO: 1312197 - RNA, 22 nt, Human
uuggcuggugugguacagagaa

SEQ ID NO: 1312198 - RNA, 14 nt, Human
uuggccaggcuggu

SEQ ID NO: 1312199 - RNA, 22 nt, Human
uuggccaaugcaccuaaagaaa

SEQ ID NO: 1312200 - RNA, 23 nt, Human
uuggccaaugcaccuaaagaaaa

SEQ ID NO: 1312201 - RNA, 14 nt, Human
uuggccacuccgag

SEQ ID NO: 1312202 - RNA, 21 nt, Human
uuggccacuccgagagguggg

SEQ ID NO: 1312203 - RNA, 22 nt, Human
uuggccacuccgagaggugggc

SEQ ID NO: 1312204 - RNA, 17 nt, Human
uuggccaaggaaaggca

SEQ ID NO: 1312205 - RNA, 15 nt, Human
uuggcaucccugggc

SEQ ID NO: 1312206 - RNA, 16 nt, Human
uuggcauggaaauuua

SEQ ID NO: 1312207 - RNA, 20 nt, Human
uuggcauggaaauuuaaagc

SEQ ID NO: 1312208 - RNA, 21 nt, Human
uuggcauggaaauuuaaagca

SEQ ID NO: 1312209 - RNA, 22 nt, Human
uuggcauggaaauuuaaagcag

SEQ ID NO: 1312210 - RNA, 13 nt, Human
uuggcaucccugg

SEQ ID NO: 1312211 - RNA, 17 nt, Human
uuggcaucccugggccu

SEQ ID NO: 1312212 - RNA, 16 nt, Human
uuguaaaggaauuuaa

SEQ ID NO: 1312213 - RNA, 17 nt, Human
uuguaaaguauguauua

SEQ ID NO: 1312214 - RNA, 14 nt, Human
uuguaaauauugug

SEQ ID NO: 1312215 - RNA, 21 nt, Human
uuguauucagaguugaugguu

SEQ ID NO: 1312216 - RNA, 14 nt, Human
uuguauucagaguu

SEQ ID NO: 1312217 - RNA, 22 nt, Human
uuguauucaaaaauuaucuaua

SEQ ID NO: 1312218 - RNA, 15 nt, Human
uuguagauugauugu

SEQ ID NO: 1312219 - RNA, 19 nt, Human
uuguagauugauuguauug

SEQ ID NO: 1312220 - RNA, 15 nt, Human
uuguauccccugcag

SEQ ID NO: 1312221 - RNA, 14 nt, Human
uuguauccccugca

SEQ ID NO: 1312222 - RNA, 21 nt, Human
uuguagagaaaacaugcagaa

SEQ ID NO: 1312223 - RNA, 17 nt, Human
uguagauaauacaguuc

SEQ ID NO: 1312224 - RNA, 13 nt, Human
uguagaguugcug

SEQ ID NO: 1312225 - RNA, 14 nt, Human
uguagaguugcuga

SEQ ID NO: 1312226 - RNA, 15 nt, Human
uguagaguugcugag

SEQ ID NO: 1312227 - RNA, 20 nt, Human
uguagaguugcugagagggc

SEQ ID NO: 1312228 - RNA, 13 nt, Human
uguagauaagugu

SEQ ID NO: 1312229 - RNA, 14 nt, Human
uguagauaaguguu

SEQ ID NO: 1312230 - RNA, 17 nt, Human
uguacugauucaauuug

SEQ ID NO: 1312231 - RNA, 16 nt, Human
uguacugauucaauuu

SEQ ID NO: 1312232 - RNA, 15 nt, Human
uguacugauucaauu

SEQ ID NO: 1312233 - RNA, 22 nt, Human
uguacugagccuuguaauucua

SEQ ID NO: 1312234 - RNA, 19 nt, Human
uguacugagccuuguaauu

SEQ ID NO: 1312235 - RNA, 20 nt, Human
uguacugagccuuguaauuc

SEQ ID NO: 1312236 - RNA, 18 nt, Human
uguacugaaguaaaacaa

SEQ ID NO: 1312237 - RNA, 17 nt, Human
uguacugagccuuguaa

SEQ ID NO: 1312238 - RNA, 14 nt, Human
uguacugaaguaaa

SEQ ID NO: 1312239 - RNA, 20 nt, Human
uguacugaaaaaugguaauu

SEQ ID NO: 1312240 - RNA, 12 nt, Human
uguacugaaaaa

SEQ ID NO: 1312241 - RNA, 15 nt, Human
uguacuauuuaacug

SEQ ID NO: 1312242 - RNA, 18 nt, Human
uguacuauuuaacugacu

SEQ ID NO: 1312243 - RNA, 12 nt, Human
uguacuccuccc

SEQ ID NO: 1312244 - RNA, 13 nt, Human
uguacuccuccca

SEQ ID NO: 1312245 - RNA, 19 nt, Human
uguacuaaccuacagagau

SEQ ID NO: 1312246 - RNA, 16 nt, Human
uguacuaacuagcauu

SEQ ID NO: 1312247 - RNA, 21 nt, Human
uguacuauagcggcauauaga

SEQ ID NO: 1312248 - RNA, 14 nt, Human
uguacuauuuaacu

SEQ ID NO: 1312249 - RNA, 15 nt, Human
uguacuaaagccaaa

SEQ ID NO: 1312250 - RNA, 16 nt, Human
uguacuaaagccaaac

SEQ ID NO: 1312251 - RNA, 18 nt, Human
uguacuaaagccaaacau

SEQ ID NO: 1312252 - RNA, 20 nt, Human
uguacuaaagccaaacauau

SEQ ID NO: 1312253 - RNA, 17 nt, Human
uguacccucugaaauac

SEQ ID NO: 1312254 - RNA, 18 nt, Human
uguaccugcccccaaucc

SEQ ID NO: 1312255 - RNA, 15 nt, Human
uguaccgcaauguga

SEQ ID NO: 1312256 - RNA, 14 nt, Human
uguaccauuugccu

SEQ ID NO: 1312257 - RNA, 18 nt, Human
uguaccauuuuaaaguua

SEQ ID NO: 1312258 - RNA, 12 nt, Human
uguacccaccgg

SEQ ID NO: 1312259 - RNA, 16 nt, Human
uguacccaccgggcca

SEQ ID NO: 1312260 - RNA, 20 nt, Human
uguacccaccgggccacucc

SEQ ID NO: 1312261 - RNA, 21 nt, Human
uguacccaccgggccacuccu

SEQ ID NO: 1312262 - RNA, 14 nt, Human
uguacccaguuucu

SEQ ID NO: 1312263 - RNA, 12 nt, Human
uguacccaguuu

SEQ ID NO: 1312264 - RNA, 15 nt, Human
uguaaugaauaccuu

SEQ ID NO: 1312265 - RNA, 14 nt, Human
uguaaugaauaccu

SEQ ID NO: 1312266 - RNA, 11 nt, Human
uguaaugaaua

SEQ ID NO: 1312267 - RNA, 12 nt, Human
uguaaugacagg

SEQ ID NO: 1312268 - RNA, 17 nt, Human
uguaauggcaguuauau

SEQ ID NO: 1312269 - RNA, 23 nt, Human
uguaauggcaguuauauuuugca

SEQ ID NO: 1312270 - RNA, 21 nt, Human
uguaaugguacugacuuugcu

SEQ ID NO: 1312271 - RNA, 19 nt, Human
uguaaugguacugacuuug

SEQ ID NO: 1312272 - RNA, 23 nt, Human
uguaauguaucaaauacauuuaa

SEQ ID NO: 1312273 - RNA, 14 nt, Human
uguacaguagauuu

SEQ ID NO: 1312274 - RNA, 17 nt, Human
uguacaguagauuuucc

SEQ ID NO: 1312275 - RNA, 18 nt, Human
uguacaguagauuuucca

SEQ ID NO: 1312276 - RNA, 20 nt, Human
uguacaguagauuuuccaaa

SEQ ID NO: 1312277 - RNA, 18 nt, Human
uguacaguauguucaaag

SEQ ID NO: 1312278 - RNA, 22 nt, Human
uguaaaugucucacugagcacu

SEQ ID NO: 1312279 - RNA, 17 nt, Human
uguaaaugucucacuga

SEQ ID NO: 1312280 - RNA, 16 nt, Human
uguaaaugucucacug

SEQ ID NO: 1312281 - RNA, 14 nt, Human
uguaaaucugccac

SEQ ID NO: 1312282 - RNA, 15 nt, Human
uguaaaucugccaca

SEQ ID NO: 1312283 - RNA, 16 nt, Human
uguaaaucugccacaa

SEQ ID NO: 1312284 - RNA, 16 nt, Human
ugguaggcauuuccua

SEQ ID NO: 1312285 - RNA, 13 nt, Human
ugguaggguggga

SEQ ID NO: 1312286 - RNA, 19 nt, Human
ugguagggugggagugguu

SEQ ID NO: 1312287 - RNA, 21 nt, Human
uguaaacaaacuguguaacug

SEQ ID NO: 1312288 - RNA, 11 nt, Human
uguaaacacag

SEQ ID NO: 1312289 - RNA, 13 nt, Human
uguaaaucugcca

SEQ ID NO: 1312290 - RNA, 12 nt, Human
uguaaauuggca

SEQ ID NO: 1312291 - RNA, 19 nt, Human
uguaaccucuucagaggcc

SEQ ID NO: 1312292 - RNA, 11 nt, Human
uguaaauuggc

SEQ ID NO: 1312293 - RNA, 20 nt, Human
uguaaaugucucacugagca

SEQ ID NO: 1312294 - RNA, 14 nt, Human
uguaaauuaucagg

SEQ ID NO: 1312295 - RNA, 12 nt, Human
uguaaauuaugu

SEQ ID NO: 1312296 - RNA, 13 nt, Human
uguaaauuaugua

SEQ ID NO: 1312297 - RNA, 23 nt, Human
uguaacgcaaguucccaguugga

SEQ ID NO: 1312298 - RNA, 19 nt, Human
uguaacgcaaguucccagu

SEQ ID NO: 1312299 - RNA, 14 nt, Human
uguaacuaaaauaa

SEQ ID NO: 1312300 - RNA, 15 nt, Human
uguaacuaaaauaau

SEQ ID NO: 1312301 - RNA, 23 nt, Human
uguaacuaaaauaauuuuguaau

SEQ ID NO: 1312302 - RNA, 16 nt, Human
uguaacuacuuuauaa

SEQ ID NO: 1312303 - RNA, 17 nt, Human
uguaacuacuuuauaac

SEQ ID NO: 1312304 - RNA, 18 nt, Human
uguaacuacuuuauaacu

SEQ ID NO: 1312305 - RNA, 19 nt, Human
uguaacuauaguccagcuu

SEQ ID NO: 1312306 - RNA, 21 nt, Human
uguaacuauaguccagcuuug

SEQ ID NO: 1312307 - RNA, 15 nt, Human
uguaaucacagcuac

SEQ ID NO: 1312308 - RNA, 17 nt, Human
uguaaucauauaauaaa

SEQ ID NO: 1312309 - RNA, 13 nt, Human
uguaacugccagg

SEQ ID NO: 1312310 - RNA, 15 nt, Human
uguaacugccaggcu

SEQ ID NO: 1312311 - RNA, 18 nt, Human
uguaacugccaggcucuc

SEQ ID NO: 1312312 - RNA, 11 nt, Human
uguaacugccc

SEQ ID NO: 1312313 - RNA, 13 nt, Human
uguaacugcccaa

SEQ ID NO: 1312314 - RNA, 16 nt, Human
uguaacugccuagaaa

SEQ ID NO: 1312315 - RNA, 18 nt, Human
uguaacugcccaaagcag

SEQ ID NO: 1312316 - RNA, 18 nt, Human
uguauuguauauuacaau

SEQ ID NO: 1312317 - RNA, 16 nt, Human
uguauuguauauuaca

SEQ ID NO: 1312318 - RNA, 13 nt, Human
uguaugcauguug

SEQ ID NO: 1312319 - RNA, 14 nt, Human
uguauugcacauug

SEQ ID NO: 1312320 - RNA, 15 nt, Human
uguauugcacauugu

SEQ ID NO: 1312321 - RNA, 19 nt, Human
uguauugcacauuguaaaa

SEQ ID NO: 1312322 - RNA, 14 nt, Human
uguauuuaacagaa

SEQ ID NO: 1312323 - RNA, 15 nt, Human
uguauuuaacagaaa

SEQ ID NO: 1312324 - RNA, 16 nt, Human
uguauuuaacagaaau

SEQ ID NO: 1312325 - RNA, 21 nt, Human
uguauuuaacagaaauuguau

SEQ ID NO: 1312326 - RNA, 20 nt, Human
uguauuuacgcuuugauuca

SEQ ID NO: 1312327 - RNA, 21 nt, Human
uguauuuacgcuuugauucau

SEQ ID NO: 1312328 - RNA, 23 nt, Human
uguauuuacgcuuugauucauag

SEQ ID NO: 1312329 - RNA, 14 nt, Human
uguauuuauaaaua

SEQ ID NO: 1312330 - RNA, 21 nt, Human
uguauuuauaaauauauuuaa

SEQ ID NO: 1312331 - RNA, 17 nt, Human
uguauuugaaauaagaa

SEQ ID NO: 1312332 - RNA, 16 nt, Human
uguaugcacaguaaaa

SEQ ID NO: 1312333 - RNA, 17 nt, Human
uguaugcacaugaacuu

SEQ ID NO: 1312334 - RNA, 18 nt, Human
uguaugcacaugaacuua

SEQ ID NO: 1312335 - RNA, 18 nt, Human
uguaucuaugcauuuucu

SEQ ID NO: 1312336 - RNA, 14 nt, Human
uguaugcacuuugu

SEQ ID NO: 1312337 - RNA, 21 nt, Human
uguaugcacaugaacuuagau

SEQ ID NO: 1312338 - RNA, 15 nt, Human
uguaugcauguuguc

SEQ ID NO: 1312339 - RNA, 19 nt, Human
uguaucuaugcauuuucug

SEQ ID NO: 1312340 - RNA, 14 nt, Human
uguauacuauagua

SEQ ID NO: 1312341 - RNA, 17 nt, Human
uguauacuauaguacca

SEQ ID NO: 1312342 - RNA, 15 nt, Human
uguauacuauaguac

SEQ ID NO: 1312343 - RNA, 15 nt, Human
uguauacugccacua

SEQ ID NO: 1312344 - RNA, 19 nt, Human
uguauacuauaguaccagu

SEQ ID NO: 1312345 - RNA, 14 nt, Human
uguauccccugcag

SEQ ID NO: 1312346 - RNA, 16 nt, Human
uguauccccugcaggc

SEQ ID NO: 1312347 - RNA, 20 nt, Human
uguagcaacuacagucuaaa

SEQ ID NO: 1312348 - RNA, 15 nt, Human
uguagcacuuacugg

SEQ ID NO: 1312349 - RNA, 19 nt, Human
uguagcacuuacugguagg

SEQ ID NO: 1312350 - RNA, 14 nt, Human
uguauaauuggauu

SEQ ID NO: 1312351 - RNA, 18 nt, Human
uguauaauuggauuuccu

SEQ ID NO: 1312352 - RNA, 19 nt, Human
uguauaauuggauuuccua

SEQ ID NO: 1312353 - RNA, 21 nt, Human
uguauaauuggauuuccuaau

SEQ ID NO: 1312354 - RNA, 16 nt, Human
ugucagucacagccac

SEQ ID NO: 1312355 - RNA, 17 nt, Human
ugucagucacagccacc

SEQ ID NO: 1312356 - RNA, 18 nt, Human
ugucagucacagccaccc

SEQ ID NO: 1312357 - RNA, 22 nt, Human
ugucagucacagccaccccuga

SEQ ID NO: 1312358 - RNA, 12 nt, Human
ugucauacagag

SEQ ID NO: 1312359 - RNA, 13 nt, Human
ugucauacagaga

SEQ ID NO: 1312360 - RNA, 14 nt, Human
ugucauacagagaa

SEQ ID NO: 1312361 - RNA, 15 nt, Human
ugucauacagagaag

SEQ ID NO: 1312362 - RNA, 18 nt, Human
ugucauacagagaaguca

SEQ ID NO: 1312363 - RNA, 16 nt, Human
ugucauacagagaagu

SEQ ID NO: 1312364 - RNA, 12 nt, Human
uguauuugcuaa

SEQ ID NO: 1312365 - RNA, 13 nt, Human
uguauuugcuaau

SEQ ID NO: 1312366 - RNA, 14 nt, Human
uguauuugcuuuuu

SEQ ID NO: 1312367 - RNA, 12 nt, Human
uguauuuggaaa

SEQ ID NO: 1312368 - RNA, 13 nt, Human
uguauuuggaaau

SEQ ID NO: 1312369 - RNA, 21 nt, Human
uguauuuggaaauaaagucag

SEQ ID NO: 1312370 - RNA, 17 nt, Human
uguauuugcuaauuuuu

SEQ ID NO: 1312371 - RNA, 15 nt, Human
ugucacuaaagcagg

SEQ ID NO: 1312372 - RNA, 14 nt, Human
ugucacuaaagcag

SEQ ID NO: 1312373 - RNA, 14 nt, Human
ugucacucaaggcg

SEQ ID NO: 1312374 - RNA, 17 nt, Human
ugucacucaaggcggug

SEQ ID NO: 1312375 - RNA, 20 nt, Human
ugucacucaaggcggugcuu

SEQ ID NO: 1312376 - RNA, 22 nt, Human
ugucacucaaggcggugcuuga

SEQ ID NO: 1312377 - RNA, 17 nt, Human
ugucacugacacacacg

SEQ ID NO: 1312378 - RNA, 14 nt, Human
ugucagucacagcc

SEQ ID NO: 1312379 - RNA, 15 nt, Human
ugucagucacagcca

SEQ ID NO: 1312380 - RNA, 14 nt, Human
uguccauuguccaa

SEQ ID NO: 1312381 - RNA, 17 nt, Human
uguccauuguccaaucc

SEQ ID NO: 1312382 - RNA, 14 nt, Human
ugucccagaagaug

SEQ ID NO: 1312383 - RNA, 16 nt, Human
ugucccagaagaugac

SEQ ID NO: 1312384 - RNA, 21 nt, Human
ugucccagaagaugacugagg

SEQ ID NO: 1312385 - RNA, 14 nt, Human
ugucccagguccuc

SEQ ID NO: 1312386 - RNA, 16 nt, Human
ugucccagguccucac

SEQ ID NO: 1312387 - RNA, 17 nt, Human
ugucccagguccucacu

SEQ ID NO: 1312388 - RNA, 16 nt, Human
ugucccaggcacugua

SEQ ID NO: 1312389 - RNA, 21 nt, Human
ugucccaucggagugcggacc

SEQ ID NO: 1312390 - RNA, 16 nt, Human
ugucccaugaucccug

SEQ ID NO: 1312391 - RNA, 17 nt, Human
ugucccaugaucccugu

SEQ ID NO: 1312392 - RNA, 18 nt, Human
ugucccaugaucccugug

SEQ ID NO: 1312393 - RNA, 15 nt, Human
ugucauagaaauuac

SEQ ID NO: 1312394 - RNA, 16 nt, Human
ugucauagaaauuaca

SEQ ID NO: 1312395 - RNA, 14 nt, Human
ugucaucaauuaaa

SEQ ID NO: 1312396 - RNA, 15 nt, Human
ugucaucaauuaaag

SEQ ID NO: 1312397 - RNA, 13 nt, Human
ugucaucacucua

SEQ ID NO: 1312398 - RNA, 22 nt, Human
ugucaucacucuagguuuuaca

SEQ ID NO: 1312399 - RNA, 23 nt, Human
ugucauuaaauggggcucacaaa

SEQ ID NO: 1312400 - RNA, 23 nt, Human
ugucauucgcuacuaugauuuaa

SEQ ID NO: 1312401 - RNA, 16 nt, Human
ugucauugaaaaacua

SEQ ID NO: 1312402 - RNA, 12 nt, Human
ugucauuguuau

SEQ ID NO: 1312403 - RNA, 14 nt, Human
ugucauuguuauau

SEQ ID NO: 1312404 - RNA, 20 nt, Human
ugucauuguuauauaaucau

SEQ ID NO: 1312405 - RNA, 22 nt, Human
uguccaugcgcucagggccaug

SEQ ID NO: 1312406 - RNA, 13 nt, Human
ugugauauaagug

SEQ ID NO: 1312407 - RNA, 15 nt, Human
ugugcaaggcagccg

SEQ ID NO: 1312408 - RNA, 17 nt, Human
ugugcaaggcagccgug

SEQ ID NO: 1312409 - RNA, 19 nt, Human
ugugcaaggcagccguggg

SEQ ID NO: 1312410 - RNA, 18 nt, Human
ugugcaagguauuacacu

SEQ ID NO: 1312411 - RNA, 21 nt, Human
ugugcaaggcagccgugggcc

SEQ ID NO: 1312412 - RNA, 13 nt, Human
ugugcaauagaag

SEQ ID NO: 1312413 - RNA, 16 nt, Human
ugugcaauagaaggug

SEQ ID NO: 1312414 - RNA, 17 nt, Human
ugugcaauguaaauauu

SEQ ID NO: 1312415 - RNA, 18 nt, Human
ugugcaauguaaauauuu

SEQ ID NO: 1312416 - RNA, 11 nt, Human
ugugcaaugug

SEQ ID NO: 1312417 - RNA, 14 nt, Human
ugugcaauguguau

SEQ ID NO: 1312418 - RNA, 22 nt, Human
ugugaguuuaccuuguauacug

SEQ ID NO: 1312419 - RNA, 16 nt, Human
ugugagucaauacaua

SEQ ID NO: 1312420 - RNA, 23 nt, Human
ugugaguuuaccuuguauacugu

SEQ ID NO: 1312421 - RNA, 21 nt, Human
ugugagucaauacauagugcu

SEQ ID NO: 1312422 - RNA, 13 nt, Human
ugugauaaggaaa

SEQ ID NO: 1312423 - RNA, 15 nt, Human
ugugagggugcugac

SEQ ID NO: 1312424 - RNA, 15 nt, Human
ugugacccccagcuc

SEQ ID NO: 1312425 - RNA, 16 nt, Human
ugugacccccagcucc

SEQ ID NO: 1312426 - RNA, 20 nt, Human
ugugacccccagcuccggcc

SEQ ID NO: 1312427 - RNA, 17 nt, Human
ugugacccccagcuccg

SEQ ID NO: 1312428 - RNA, 16 nt, Human
ugugaaucauuuuacc

SEQ ID NO: 1312429 - RNA, 16 nt, Human
ugugaaucaaggguca

SEQ ID NO: 1312430 - RNA, 17 nt, Human
ugugaaucaagggucag

SEQ ID NO: 1312431 - RNA, 21 nt, Human
ugugaaucaagggucaggccu

SEQ ID NO: 1312432 - RNA, 22 nt, Human
ugugaaucaagggucaggccuu

SEQ ID NO: 1312433 - RNA, 21 nt, Human
ugugaauaccugcucacguca

SEQ ID NO: 1312434 - RNA, 22 nt, Human
ugugaauagaacucugaaauga

SEQ ID NO: 1312435 - RNA, 14 nt, Human
ugugaaugaacacu

SEQ ID NO: 1312436 - RNA, 23 nt, Human
ugugaaugaacacucuuuugcuu

SEQ ID NO: 1312437 - RNA, 17 nt, Human
ugugaaugaacacucuu

SEQ ID NO: 1312438 - RNA, 17 nt, Human
ugugaaugccacugccu

SEQ ID NO: 1312439 - RNA, 15 nt, Human
ugugaccacaacaug

SEQ ID NO: 1312440 - RNA, 22 nt, Human
ugugaccacugcagaagacagu

SEQ ID NO: 1312441 - RNA, 12 nt, Human
ugugacaaaaaa

SEQ ID NO: 1312442 - RNA, 15 nt, Human
ugugacaaaaaauua

SEQ ID NO: 1312443 - RNA, 16 nt, Human
ugugacaaaaaauuaa

SEQ ID NO: 1312444 - RNA, 21 nt, Human
ugugacaaaaaauuaaagcau

SEQ ID NO: 1312445 - RNA, 12 nt, Human
ugugacagggcg

SEQ ID NO: 1312446 - RNA, 16 nt, Human
ugugacauacccccuc

SEQ ID NO: 1312447 - RNA, 21 nt, Human
ugugacauacccccuccccca

SEQ ID NO: 1312448 - RNA, 13 nt, Human
ugugaaacauguu

SEQ ID NO: 1312449 - RNA, 21 nt, Human
ugucuggugguggcaccaucu

SEQ ID NO: 1312450 - RNA, 20 nt, Human
ugucugggugcuacugggga

SEQ ID NO: 1312451 - RNA, 13 nt, Human
ugucugguucuca

SEQ ID NO: 1312452 - RNA, 14 nt, Human
ugucugguucucaa

SEQ ID NO: 1312453 - RNA, 14 nt, Human
ugucuuuuuuugua

SEQ ID NO: 1312454 - RNA, 16 nt, Human
ugucuuuuuuuguaua

SEQ ID NO: 1312455 - RNA, 23 nt, Human
ugucuuuuuuuguauaguuaaca

SEQ ID NO: 1312456 - RNA, 22 nt, Human
ugucuuuuuuuguauaguuaac

SEQ ID NO: 1312457 - RNA, 14 nt, Human
ugugaaacuuucau

SEQ ID NO: 1312458 - RNA, 15 nt, Human
ugugaaacuuucauu

SEQ ID NO: 1312459 - RNA, 14 nt, Human
ugucuuuuuucuaa

SEQ ID NO: 1312460 - RNA, 22 nt, Human
ugucugguucucaauuccaaca

SEQ ID NO: 1312461 - RNA, 21 nt, Human
ugucuggggagcgggucugcu

SEQ ID NO: 1312462 - RNA, 14 nt, Human
ugucuggggcagaa

SEQ ID NO: 1312463 - RNA, 15 nt, Human
ugucugggugcuacu

SEQ ID NO: 1312464 - RNA, 16 nt, Human
ugucugggugcuacug

SEQ ID NO: 1312465 - RNA, 21 nt, Human
ugucugggugcuacuggggaa

SEQ ID NO: 1312466 - RNA, 13 nt, Human
ugucugguggccc

SEQ ID NO: 1312467 - RNA, 14 nt, Human
ugucugguggcccc

SEQ ID NO: 1312468 - RNA, 16 nt, Human
ugucugguggccccgu

SEQ ID NO: 1312469 - RNA, 13 nt, Human
uguccccaacagc

SEQ ID NO: 1312470 - RNA, 14 nt, Human
uguccccaacagcg

SEQ ID NO: 1312471 - RNA, 20 nt, Human
uguccccaacagcgcccaaa

SEQ ID NO: 1312472 - RNA, 20 nt, Human
ugucucaagagggcacuggu

SEQ ID NO: 1312473 - RNA, 21 nt, Human
ugucucaagagggcacuggug

SEQ ID NO: 1312474 - RNA, 23 nt, Human
ugucucaagagggcacugguggc

SEQ ID NO: 1312475 - RNA, 19 nt, Human
ugucucaagcucuuccuua

SEQ ID NO: 1312476 - RNA, 17 nt, Human
ugucucaggucccugca

SEQ ID NO: 1312477 - RNA, 22 nt, Human
ugucucaguccaugaagaugua

SEQ ID NO: 1312478 - RNA, 21 nt, Human
ugucucaguccaugaagaugu

SEQ ID NO: 1312479 - RNA, 15 nt, Human
ugucugccaaccuaa

SEQ ID NO: 1312480 - RNA, 19 nt, Human
ugucugccaaccuaaaacu

SEQ ID NO: 1312481 - RNA, 15 nt, Human
ugugcggcugugugu

SEQ ID NO: 1312482 - RNA, 17 nt, Human
ugugcggcugugugugc

SEQ ID NO: 1312483 - RNA, 15 nt, Human
ugugccugacccuac

SEQ ID NO: 1312484 - RNA, 15 nt, Human
ugugccucugccugu

SEQ ID NO: 1312485 - RNA, 22 nt, Human
ugugcuuauguaugagguacaa

SEQ ID NO: 1312486 - RNA, 23 nt, Human
ugugcuguuguuaugaugugcuu

SEQ ID NO: 1312487 - RNA, 14 nt, Human
ugugcuguuucaaa

SEQ ID NO: 1312488 - RNA, 15 nt, Human
ugugcuguuucaaag

SEQ ID NO: 1312489 - RNA, 18 nt, Human
ugugcuguuucaaaguuc

SEQ ID NO: 1312490 - RNA, 20 nt, Human
ugugcuguuguuaugaugug

SEQ ID NO: 1312491 - RNA, 19 nt, Human
ugugcuguuguuaugaugu

SEQ ID NO: 1312492 - RNA, 19 nt, Human
ugugcuuaacagggaacgu

SEQ ID NO: 1312493 - RNA, 15 nt, Human
ugugcuuaacaggga

SEQ ID NO: 1312494 - RNA, 19 nt, Human
ugugcuuaugguaccagau

SEQ ID NO: 1312495 - RNA, 19 nt, Human
ugugcuucgggcccuuccc

SEQ ID NO: 1312496 - RNA, 16 nt, Human
ugugcuuuuaaaugca

SEQ ID NO: 1312497 - RNA, 16 nt, Human
ugugcuguuguuauga

SEQ ID NO: 1312498 - RNA, 14 nt, Human
ugugcuguuguuau

SEQ ID NO: 1312499 - RNA, 14 nt, Human
ugugccuucgucuu

SEQ ID NO: 1312500 - RNA, 22 nt, Human
ugugcuacaauucauuguguua

SEQ ID NO: 1312501 - RNA, 16 nt, Human
ugugcguggugguccc

SEQ ID NO: 1312502 - RNA, 19 nt, Human
ugugcgugguggucccugg

SEQ ID NO: 1312503 - RNA, 21 nt, Human
ugugcgugguggucccugggu

SEQ ID NO: 1312504 - RNA, 22 nt, Human
ugugcgugguggucccugggua

SEQ ID NO: 1312505 - RNA, 14 nt, Human
ugugccucugccug

SEQ ID NO: 1312506 - RNA, 12 nt, Human
ugugcaguguug

SEQ ID NO: 1312507 - RNA, 13 nt, Human
ugugcaucaggcu

SEQ ID NO: 1312508 - RNA, 15 nt, Human
ugugcaauguguaua

SEQ ID NO: 1312509 - RNA, 16 nt, Human
ugugcaauguguauaa

SEQ ID NO: 1312510 - RNA, 22 nt, Human
ugugcaauguguauaaacaaga

SEQ ID NO: 1312511 - RNA, 13 nt, Human
ugugcaccagggu

SEQ ID NO: 1312512 - RNA, 14 nt, Human
ugugcaccaggguu

SEQ ID NO: 1312513 - RNA, 20 nt, Human
ugugcaauguguauaaacaa

SEQ ID NO: 1312514 - RNA, 17 nt, Human
ugugcaccuaaaacuua

SEQ ID NO: 1312515 - RNA, 22 nt, Human
ugugcacguaaaguacuuguag

SEQ ID NO: 1312516 - RNA, 20 nt, Human
ugugcacguaaaguacuugu

SEQ ID NO: 1312517 - RNA, 16 nt, Human
ugugcagcauuucacu

SEQ ID NO: 1312518 - RNA, 17 nt, Human
ugugcagcauuucacuu

SEQ ID NO: 1312519 - RNA, 19 nt, Human
ugugcagccgcugagcgag

SEQ ID NO: 1312520 - RNA, 18 nt, Human
ugugcaggagcggcagau

SEQ ID NO: 1312521 - RNA, 16 nt, Human
ugugcagguggggaga

SEQ ID NO: 1312522 - RNA, 23 nt, Human
ugugcagguggggagacugggcu

SEQ ID NO: 1312523 - RNA, 14 nt, Human
ugugcagguuccca

SEQ ID NO: 1312524 - RNA, 17 nt, Human
ugugcaggagcggcaga

SEQ ID NO: 1312525 - RNA, 19 nt, Human
ugugcaguacuuugugcau

SEQ ID NO: 1312526 - RNA, 21 nt, Human
uguggcuccuggggguucuuu

SEQ ID NO: 1312527 - RNA, 12 nt, Human
uguggacucugg

SEQ ID NO: 1312528 - RNA, 22 nt, Human
uguggacucuggugccuccaga

SEQ ID NO: 1312529 - RNA, 23 nt, Human
uguggacucuggugccuccagag

SEQ ID NO: 1312530 - RNA, 17 nt, Human
ugugcuuuuuuugugug

SEQ ID NO: 1312531 - RNA, 16 nt, Human
ugugcuuuuuuugugu

SEQ ID NO: 1312532 - RNA, 17 nt, Human
uguggaaaaugaaaauu

SEQ ID NO: 1312533 - RNA, 16 nt, Human
uguggaaaagauggca

SEQ ID NO: 1312534 - RNA, 17 nt, Human
ugugggacuagccuggc

SEQ ID NO: 1312535 - RNA, 14 nt, Human
uguggcuccuuccc

SEQ ID NO: 1312536 - RNA, 15 nt, Human
uguggcuccuuccca

SEQ ID NO: 1312537 - RNA, 17 nt, Human
uguggcuuucagagccu

SEQ ID NO: 1312538 - RNA, 19 nt, Human
ugugggggguaaucccugc

SEQ ID NO: 1312539 - RNA, 22 nt, Human
ugugggggguaaucccugcuuu

SEQ ID NO: 1312540 - RNA, 19 nt, Human
uguggguaguggggaagag

SEQ ID NO: 1312541 - RNA, 16 nt, Human
uguggggauuuucacu

SEQ ID NO: 1312542 - RNA, 15 nt, Human
uguggggccagguca

SEQ ID NO: 1312543 - RNA, 16 nt, Human
uguggggccugggagg

SEQ ID NO: 1312544 - RNA, 14 nt, Human
uguggggccuggga

SEQ ID NO: 1312545 - RNA, 15 nt, Human
ugugggggacuguaa

SEQ ID NO: 1312546 - RNA, 16 nt, Human
ugugggggacuguaag

SEQ ID NO: 1312547 - RNA, 18 nt, Human
uguuuaaaaaaccacaug

SEQ ID NO: 1312548 - RNA, 12 nt, Human
uguuuaaaacau

SEQ ID NO: 1312549 - RNA, 15 nt, Human
uguuuaaaacaucau

SEQ ID NO: 1312550 - RNA, 16 nt, Human
uguuuaaaacaucauu

SEQ ID NO: 1312551 - RNA, 13 nt, Human
uguuggccaggcu

SEQ ID NO: 1312552 - RNA, 18 nt, Human
uguuggccaggcugcucu

SEQ ID NO: 1312553 - RNA, 16 nt, Human
uguuguucuuacaaac

SEQ ID NO: 1312554 - RNA, 19 nt, Human
uguuguugaaagguuuuuu

SEQ ID NO: 1312555 - RNA, 15 nt, Human
uguuguuucuuaaau

SEQ ID NO: 1312556 - RNA, 16 nt, Human
uguuguuucuuaaaua

SEQ ID NO: 1312557 - RNA, 21 nt, Human
uguuguuucuuaaauaagaaa

SEQ ID NO: 1312558 - RNA, 17 nt, Human
uguuguuucuuaaauaa

SEQ ID NO: 1312559 - RNA, 19 nt, Human
uguuuacacucuuuguaag

SEQ ID NO: 1312560 - RNA, 17 nt, Human
uguuuacagauccccaa

SEQ ID NO: 1312561 - RNA, 24 nt, Human
uguuuaaucauauaaauagaaugu

SEQ ID NO: 1312562 - RNA, 23 nt, Human
uguuuaaucauauaaauagaaug

SEQ ID NO: 1312563 - RNA, 20 nt, Human
uguuuaaucauauaaauaga

SEQ ID NO: 1312564 - RNA, 18 nt, Human
uguuuaauuuuuauuucu

SEQ ID NO: 1312565 - RNA, 19 nt, Human
uguuuaauuuuuauuucuu

SEQ ID NO: 1312566 - RNA, 21 nt, Human
uguuuaauuuuuauuucuucc

SEQ ID NO: 1312567 - RNA, 21 nt, Human
uguuuacaaaaauuucuguaa

SEQ ID NO: 1312568 - RNA, 19 nt, Human
uguuuacaaaaucagguaa

SEQ ID NO: 1312569 - RNA, 16 nt, Human
uguuuacacucuuugu

SEQ ID NO: 1312570 - RNA, 18 nt, Human
uguuuacacucuuuguaa

SEQ ID NO: 1312571 - RNA, 16 nt, Human
uguuuaaucauauaaa

SEQ ID NO: 1312572 - RNA, 15 nt, Human
uguuuaaucauauaa

SEQ ID NO: 1312573 - RNA, 14 nt, Human
uguuuaaucauaua

SEQ ID NO: 1312574 - RNA, 12 nt, Human
uguuuaaaacuu

SEQ ID NO: 1312575 - RNA, 18 nt, Human
uguuuaaaacuucaguuu

SEQ ID NO: 1312576 - RNA, 19 nt, Human
uguugaagagguuuuaaag

SEQ ID NO: 1312577 - RNA, 15 nt, Human
uguugaagccuuugu

SEQ ID NO: 1312578 - RNA, 13 nt, Human
uguugagacagag

SEQ ID NO: 1312579 - RNA, 17 nt, Human
uguugaagccacugccu

SEQ ID NO: 1312580 - RNA, 15 nt, Human
uguugagagugugac

SEQ ID NO: 1312581 - RNA, 16 nt, Human
uguugagcaucacaga

SEQ ID NO: 1312582 - RNA, 17 nt, Human
uguugagcaucacagaa

SEQ ID NO: 1312583 - RNA, 20 nt, Human
uguugagcaucacagaaugu

SEQ ID NO: 1312584 - RNA, 13 nt, Human
uguugcugccuca

SEQ ID NO: 1312585 - RNA, 14 nt, Human
uguugauacuguug

SEQ ID NO: 1312586 - RNA, 15 nt, Human
uguugauacuguugc

SEQ ID NO: 1312587 - RNA, 16 nt, Human
uguugauacuguugca

SEQ ID NO: 1312588 - RNA, 17 nt, Human
uguugauacuguugcac

SEQ ID NO: 1312589 - RNA, 19 nt, Human
uguugauacuguugcacgu

SEQ ID NO: 1312590 - RNA, 16 nt, Human
uguugagccuuuuccc

SEQ ID NO: 1312591 - RNA, 18 nt, Human
uguugagccuuuucccuc

SEQ ID NO: 1312592 - RNA, 21 nt, Human
uguuggagaagaacugaaauc

SEQ ID NO: 1312593 - RNA, 13 nt, Human
uguuggaaaaaau

SEQ ID NO: 1312594 - RNA, 14 nt, Human
uguugcugccucau

SEQ ID NO: 1312595 - RNA, 16 nt, Human
uguucauuccuccagg

SEQ ID NO: 1312596 - RNA, 15 nt, Human
uguucauuccuccag

SEQ ID NO: 1312597 - RNA, 14 nt, Human
uguucauuccucca

SEQ ID NO: 1312598 - RNA, 14 nt, Human
uguucauggcagau

SEQ ID NO: 1312599 - RNA, 13 nt, Human
uguucauggcaga

SEQ ID NO: 1312600 - RNA, 11 nt, Human
uguucauuucc

SEQ ID NO: 1312601 - RNA, 13 nt, Human
uguucauuuccuc

SEQ ID NO: 1312602 - RNA, 14 nt, Human
uguucauuuccuca

SEQ ID NO: 1312603 - RNA, 13 nt, Human
uguucauaaauaa

SEQ ID NO: 1312604 - RNA, 22 nt, Human
uguucaccauuauaaugaauuu

SEQ ID NO: 1312605 - RNA, 15 nt, Human
uguucaccauuauaa

SEQ ID NO: 1312606 - RNA, 12 nt, Human
uguucuauagcu

SEQ ID NO: 1312607 - RNA, 14 nt, Human
uguucuaguuuuuu

SEQ ID NO: 1312608 - RNA, 21 nt, Human
uguucuaguuuuuuacuuuug

SEQ ID NO: 1312609 - RNA, 17 nt, Human
uguucucacacuggucu

SEQ ID NO: 1312610 - RNA, 22 nt, Human
uguucucacacuggucugcugu

SEQ ID NO: 1312611 - RNA, 23 nt, Human
uguucucacacuggucugcuguc

SEQ ID NO: 1312612 - RNA, 12 nt, Human
uguucucagauu

SEQ ID NO: 1312613 - RNA, 22 nt, Human
uguucucagaaucccuuaacag

SEQ ID NO: 1312614 - RNA, 18 nt, Human
uguucaguugcacuucua

SEQ ID NO: 1312615 - RNA, 22 nt, Human
uguucuccugcugcucccucag

SEQ ID NO: 1312616 - RNA, 24 nt, Human
uguugaaagguaauuugagagaaa

SEQ ID NO: 1312617 - RNA, 23 nt, Human
uguugaaagguuuuuuuucaguu

SEQ ID NO: 1312618 - RNA, 14 nt, Human
uguugaaaauguuc

SEQ ID NO: 1312619 - RNA, 17 nt, Human
uguugaaaauguucaga

SEQ ID NO: 1312620 - RNA, 17 nt, Human
uguucugcacacagcac

SEQ ID NO: 1312621 - RNA, 15 nt, Human
uguucugauaaugaa

SEQ ID NO: 1312622 - RNA, 11 nt, Human
uguucuccugc

SEQ ID NO: 1312623 - RNA, 13 nt, Human
uguucuccugcug

SEQ ID NO: 1312624 - RNA, 23 nt, Human
uguucucuugggaacugaacuca

SEQ ID NO: 1312625 - RNA, 21 nt, Human
uguucuccugcugcucccuca

SEQ ID NO: 1312626 - RNA, 22 nt, Human
uguguuuaggaacuacugagga

SEQ ID NO: 1312627 - RNA, 22 nt, Human
uguguguccacgacugucucca

SEQ ID NO: 1312628 - RNA, 21 nt, Human
uguguuuacauuuuauggugc

SEQ ID NO: 1312629 - RNA, 20 nt, Human
uguguuuacuuuauguuacu

SEQ ID NO: 1312630 - RNA, 12 nt, Human
uguguguaugca

SEQ ID NO: 1312631 - RNA, 13 nt, Human
uguguguauuugc

SEQ ID NO: 1312632 - RNA, 14 nt, Human
uguguguauuugcu

SEQ ID NO: 1312633 - RNA, 20 nt, Human
uguguguauuugcuaauuuu

SEQ ID NO: 1312634 - RNA, 16 nt, Human
uguguguccaaaacug

SEQ ID NO: 1312635 - RNA, 19 nt, Human
uguguguccaaaacugccu

SEQ ID NO: 1312636 - RNA, 15 nt, Human
ugugugcaucaggcu

SEQ ID NO: 1312637 - RNA, 22 nt, Human
ugugugcaucaggcuuucuuuu

SEQ ID NO: 1312638 - RNA, 17 nt, Human
ugugugcaucaggcuuu

SEQ ID NO: 1312639 - RNA, 14 nt, Human
ugugugcccucugg

SEQ ID NO: 1312640 - RNA, 20 nt, Human
ugugugcccucugggcucug

SEQ ID NO: 1312641 - RNA, 12 nt, Human
ugugugaaugaa

SEQ ID NO: 1312642 - RNA, 16 nt, Human
ugugugaaugaacacu

SEQ ID NO: 1312643 - RNA, 17 nt, Human
ugugugaaugaacacuc

SEQ ID NO: 1312644 - RNA, 18 nt, Human
ugugugaaugaacacucu

SEQ ID NO: 1312645 - RNA, 22 nt, Human
ugugugaaugaacacucuuuug

SEQ ID NO: 1312646 - RNA, 15 nt, Human
uguguauuuacgcuu

SEQ ID NO: 1312647 - RNA, 11 nt, Human
uguguauuugc

SEQ ID NO: 1312648 - RNA, 13 nt, Human
uguguauuugcua

SEQ ID NO: 1312649 - RNA, 15 nt, Human
uguguauuugcuaau

SEQ ID NO: 1312650 - RNA, 23 nt, Human
ugugucacaaugagauugaauuu

SEQ ID NO: 1312651 - RNA, 16 nt, Human
uguguaugugugugug

SEQ ID NO: 1312652 - RNA, 14 nt, Human
uguguauuccaaga

SEQ ID NO: 1312653 - RNA, 14 nt, Human
uguguauauggaca

SEQ ID NO: 1312654 - RNA, 13 nt, Human
uguguauauggac

SEQ ID NO: 1312655 - RNA, 14 nt, Human
uguguaguucaugu

SEQ ID NO: 1312656 - RNA, 17 nt, Human
uguguaguucauguaaa

SEQ ID NO: 1312657 - RNA, 21 nt, Human
uguguauaaaaauaaaaaaga

SEQ ID NO: 1312658 - RNA, 13 nt, Human
uguguauaaacaa

SEQ ID NO: 1312659 - RNA, 14 nt, Human
uguguauaaacaag

SEQ ID NO: 1312660 - RNA, 21 nt, Human
uguguauaaacaagaaaaaua

SEQ ID NO: 1312661 - RNA, 22 nt, Human
uguguauaaacaagaaaaauaa

SEQ ID NO: 1312662 - RNA, 21 nt, Human
uguguauauauauauauaugu

SEQ ID NO: 1312663 - RNA, 17 nt, Human
uguuagauuaagaaaua

SEQ ID NO: 1312664 - RNA, 20 nt, Human
uguuagauuaagaaauagac

SEQ ID NO: 1312665 - RNA, 12 nt, Human
uguuauaaucuu

SEQ ID NO: 1312666 - RNA, 19 nt, Human
uguucaacuaggaucagaa

SEQ ID NO: 1312667 - RNA, 20 nt, Human
uguuaguuaccuuauaguua

SEQ ID NO: 1312668 - RNA, 23 nt, Human
uguuaguuaccuuauaguuacug

SEQ ID NO: 1312669 - RNA, 23 nt, Human
uguuaguuucugaguuuuaccaa

SEQ ID NO: 1312670 - RNA, 16 nt, Human
uguucacaauauauuu

SEQ ID NO: 1312671 - RNA, 21 nt, Human
uguucaagcgauucuccugcc

SEQ ID NO: 1312672 - RNA, 15 nt, Human
uguucaauauuuucu

SEQ ID NO: 1312673 - RNA, 16 nt, Human
uguucacaccagagaa

SEQ ID NO: 1312674 - RNA, 14 nt, Human
uguguuugcuuucu

SEQ ID NO: 1312675 - RNA, 15 nt, Human
uguguuugcuuucug

SEQ ID NO: 1312676 - RNA, 17 nt, Human
uguguuuggaagacuau

SEQ ID NO: 1312677 - RNA, 15 nt, Human
uguguuuggcuuuca

SEQ ID NO: 1312678 - RNA, 16 nt, Human
uguguuuggcuuucag

SEQ ID NO: 1312679 - RNA, 17 nt, Human
uguguuuggcuuucagg

SEQ ID NO: 1312680 - RNA, 15 nt, Human
uguguuuguguauuu

SEQ ID NO: 1312681 - RNA, 15 nt, Human
uguuacauuauuauc

SEQ ID NO: 1312682 - RNA, 19 nt, Human
uguuaccaaaaauaaauau

SEQ ID NO: 1312683 - RNA, 23 nt, Human
uguuaccaaaaauaaauauaucu

SEQ ID NO: 1312684 - RNA, 14 nt, Human
uguuacuucucuaa

SEQ ID NO: 1312685 - RNA, 15 nt, Human
uguuacuucucuaau

SEQ ID NO: 1312686 - RNA, 14 nt, Human
uuacauuuguauaa

SEQ ID NO: 1312687 - RNA, 15 nt, Human
uuacauuuguauaaa

SEQ ID NO: 1312688 - RNA, 19 nt, Human
uuacauuauuaucaacaau

SEQ ID NO: 1312689 - RNA, 14 nt, Human
uuacauguuugcac

SEQ ID NO: 1312690 - RNA, 22 nt, Human
uuacauggcuggagcuagaauu

SEQ ID NO: 1312691 - RNA, 15 nt, Human
uuacagcaaauccuu

SEQ ID NO: 1312692 - RNA, 18 nt, Human
uuacagauauuugucaug

SEQ ID NO: 1312693 - RNA, 23 nt, Human
uuacauggcuggagcuagaauuu

SEQ ID NO: 1312694 - RNA, 19 nt, Human
uuacagauuuauuccuuug

SEQ ID NO: 1312695 - RNA, 20 nt, Human
uuacagauuuauuccuuugu

SEQ ID NO: 1312696 - RNA, 21 nt, Human
uuacagauuuauuccuuuguu

SEQ ID NO: 1312697 - RNA, 12 nt, Human
uuacauguuugc

SEQ ID NO: 1312698 - RNA, 13 nt, Human
uuacauguuugca

SEQ ID NO: 1312699 - RNA, 16 nt, Human
uuacauguuuuaaaga

SEQ ID NO: 1312700 - RNA, 17 nt, Human
uuacaauaguucugugg

SEQ ID NO: 1312701 - RNA, 15 nt, Human
uuacaauaguucugu

SEQ ID NO: 1312702 - RNA, 23 nt, Human
uuacaauaaaaucuugaaaaugc

SEQ ID NO: 1312703 - RNA, 21 nt, Human
uuaauuauuauuuguguuuua

SEQ ID NO: 1312704 - RNA, 14 nt, Human
uuaauuauuguaca

SEQ ID NO: 1312705 - RNA, 17 nt, Human
uuaauucaacuuaacua

SEQ ID NO: 1312706 - RNA, 21 nt, Human
uuaauucagaaccccaacuac

SEQ ID NO: 1312707 - RNA, 16 nt, Human
uuacaauguaauuauu

SEQ ID NO: 1312708 - RNA, 17 nt, Human
uuacaauguaauuauuu

SEQ ID NO: 1312709 - RNA, 21 nt, Human
uuacaauguaauuauuuaugu

SEQ ID NO: 1312710 - RNA, 19 nt, Human
uuacaauguaauuauuuau

SEQ ID NO: 1312711 - RNA, 13 nt, Human
uuacaauguaauu

SEQ ID NO: 1312712 - RNA, 14 nt, Human
uuacaauguaauua

SEQ ID NO: 1312713 - RNA, 15 nt, Human
uuacaauguaauuau

SEQ ID NO: 1312714 - RNA, 16 nt, Human
uuacggaacucaaaua

SEQ ID NO: 1312715 - RNA, 15 nt, Human
uuacgcuuugauuca

SEQ ID NO: 1312716 - RNA, 16 nt, Human
uuacgcuuugauucau

SEQ ID NO: 1312717 - RNA, 13 nt, Human
uuacgcuuugauu

SEQ ID NO: 1312718 - RNA, 19 nt, Human
uuacguaugucugguucuc

SEQ ID NO: 1312719 - RNA, 22 nt, Human
uuacguaugucugguucucaau

SEQ ID NO: 1312720 - RNA, 20 nt, Human
uuaccuuuuuauuugcaugu

SEQ ID NO: 1312721 - RNA, 21 nt, Human
uuaccacuuguguuuugcaag

SEQ ID NO: 1312722 - RNA, 15 nt, Human
uuaccuuuuuauuug

SEQ ID NO: 1312723 - RNA, 18 nt, Human
uuaccuuuuuauuugcau

SEQ ID NO: 1312724 - RNA, 21 nt, Human
uuaccagauuuuuacacaugu

SEQ ID NO: 1312725 - RNA, 24 nt, Human
uuaccagauuuuuacacauguauc

SEQ ID NO: 1312726 - RNA, 20 nt, Human
uuacauuuguauaaaauaau

SEQ ID NO: 1312727 - RNA, 21 nt, Human
uuaauagguuuggacaaaaug

SEQ ID NO: 1312728 - RNA, 22 nt, Human
uuaauauaaaguaguccuguga

SEQ ID NO: 1312729 - RNA, 23 nt, Human
uuaauauaaaguaguccugugaa

SEQ ID NO: 1312730 - RNA, 19 nt, Human
uuaauaucccuacauguau

SEQ ID NO: 1312731 - RNA, 20 nt, Human
uuaauaucccuacauguauu

SEQ ID NO: 1312732 - RNA, 14 nt, Human
uuaauauccuaaac

SEQ ID NO: 1312733 - RNA, 17 nt, Human
uuaauauccuaaacauc

SEQ ID NO: 1312734 - RNA, 19 nt, Human
uuaauauccuaaacaucau

SEQ ID NO: 1312735 - RNA, 20 nt, Human
uuaauaugcuuaaaauaagc

SEQ ID NO: 1312736 - RNA, 18 nt, Human
uuaauggcugauaauuuu

SEQ ID NO: 1312737 - RNA, 14 nt, Human
uuaauggaaauguu

SEQ ID NO: 1312738 - RNA, 16 nt, Human
uuaauggcugauaauu

SEQ ID NO: 1312739 - RNA, 22 nt, Human
uuaauuaugccuuuuuugauca

SEQ ID NO: 1312740 - RNA, 14 nt, Human
uuaauuauuauucu

SEQ ID NO: 1312741 - RNA, 17 nt, Human
uuaauuauuauucuuca

SEQ ID NO: 1312742 - RNA, 14 nt, Human
uuaauuauuauuua

SEQ ID NO: 1312743 - RNA, 14 nt, Human
uuaauuauuauuug

SEQ ID NO: 1312744 - RNA, 18 nt, Human
uuaagggaagaauuccag

SEQ ID NO: 1312745 - RNA, 18 nt, Human
uuaauaauguuucaaaca

SEQ ID NO: 1312746 - RNA, 16 nt, Human
uuaauagguuuggaca

SEQ ID NO: 1312747 - RNA, 19 nt, Human
uuaauaauuuagacuucaa

SEQ ID NO: 1312748 - RNA, 13 nt, Human
uuaaggcauuugu

SEQ ID NO: 1312749 - RNA, 23 nt, Human
uuaacauuccucaugaauguaaa

SEQ ID NO: 1312750 - RNA, 19 nt, Human
uuaacauuccaagacucua

SEQ ID NO: 1312751 - RNA, 15 nt, Human
uuaaagcuuccauug

SEQ ID NO: 1312752 - RNA, 20 nt, Human
uuaaagcuuccauuguuguc

SEQ ID NO: 1312753 - RNA, 19 nt, Human
uuaaauagcuuuuuucucu

SEQ ID NO: 1312754 - RNA, 14 nt, Human
uuaaagcuguuauu

SEQ ID NO: 1312755 - RNA, 18 nt, Human
uuaaauaguaaaaauaaa

SEQ ID NO: 1312756 - RNA, 13 nt, Human
uuaacauuccaag

SEQ ID NO: 1312757 - RNA, 14 nt, Human
uuaacauuccaaga

SEQ ID NO: 1312758 - RNA, 17 nt, Human
uuaacauuccaagacuc

SEQ ID NO: 1312759 - RNA, 11 nt, Human
uuaacauuccu

SEQ ID NO: 1312760 - RNA, 18 nt, Human
uuaaauguaaagacaaaa

SEQ ID NO: 1312761 - RNA, 13 nt, Human
uuaaauguaaaga

SEQ ID NO: 1312762 - RNA, 17 nt, Human
uuaaauguaaagauauu

SEQ ID NO: 1312763 - RNA, 19 nt, Human
uuaaaagaaugauuaugaa

SEQ ID NO: 1312764 - RNA, 15 nt, Human
uuaaaacauuaaaau

SEQ ID NO: 1312765 - RNA, 21 nt, Human
uuaaaacagacacuggcaugg

SEQ ID NO: 1312766 - RNA, 14 nt, Human
uuaaaacagacacu

SEQ ID NO: 1312767 - RNA, 13 nt, Human
uuaaaagacucau

SEQ ID NO: 1312768 - RNA, 14 nt, Human
uuaaaagacucauc

SEQ ID NO: 1312769 - RNA, 18 nt, Human
uuaaaagacucauccguc

SEQ ID NO: 1312770 - RNA, 12 nt, Human
uuaaaagacuca

SEQ ID NO: 1312771 - RNA, 12 nt, Human
uuaaagagucua

SEQ ID NO: 1312772 - RNA, 14 nt, Human
uuaaagagucuaga

SEQ ID NO: 1312773 - RNA, 15 nt, Human
uuaaagagucuagau

SEQ ID NO: 1312774 - RNA, 16 nt, Human
uuaaagagucuagauu

SEQ ID NO: 1312775 - RNA, 17 nt, Human
uuaaagagucuagauuc

SEQ ID NO: 1312776 - RNA, 18 nt, Human
uuaaagagucuagauuca

SEQ ID NO: 1312777 - RNA, 23 nt, Human
uuaaagagucuagauucaaaggu

SEQ ID NO: 1312778 - RNA, 19 nt, Human
uuaaagagucuagauucaa

SEQ ID NO: 1312779 - RNA, 23 nt, Human
uguuuuaaaaugagaaaucuaaa

SEQ ID NO: 1312780 - RNA, 22 nt, Human
uguuuuaaacauuaauagcagc

SEQ ID NO: 1312781 - RNA, 14 nt, Human
uguuuugcuaaagg

SEQ ID NO: 1312782 - RNA, 19 nt, Human
uguuuuggacaguuuacca

SEQ ID NO: 1312783 - RNA, 18 nt, Human
uguuuuggcugaaauucu

SEQ ID NO: 1312784 - RNA, 23 nt, Human
uguuuuggcugaaauucuccugg

SEQ ID NO: 1312785 - RNA, 16 nt, Human
uguuuuuaucuuuuua

SEQ ID NO: 1312786 - RNA, 13 nt, Human
uguuuuucacauu

SEQ ID NO: 1312787 - RNA, 11 nt, Human
uguuuuucauu

SEQ ID NO: 1312788 - RNA, 16 nt, Human
uguuuuuccuuccaau

SEQ ID NO: 1312789 - RNA, 13 nt, Human
uguuuuucuaaag

SEQ ID NO: 1312790 - RNA, 13 nt, Human
uguuuuucuauua

SEQ ID NO: 1312791 - RNA, 14 nt, Human
uguuuuucuauuaa

SEQ ID NO: 1312792 - RNA, 15 nt, Human
uguuuuucuauuaaa

SEQ ID NO: 1312793 - RNA, 16 nt, Human
uguuuuucuauuaaaa

SEQ ID NO: 1312794 - RNA, 17 nt, Human
uguuuuucuauuaaaag

SEQ ID NO: 1312795 - RNA, 18 nt, Human
uguuuuucuauuaaaaga

SEQ ID NO: 1312796 - RNA, 19 nt, Human
uguuuuucuauuaaaagac

SEQ ID NO: 1312797 - RNA, 20 nt, Human
uguuuuucuauuaaaagacu

SEQ ID NO: 1312798 - RNA, 21 nt, Human
uguuuuucuauuaaaagacuc

SEQ ID NO: 1312799 - RNA, 22 nt, Human
uguuuuucuauuaaaagacuca

SEQ ID NO: 1312800 - RNA, 12 nt, Human
uguuuuuucuaa

SEQ ID NO: 1312801 - RNA, 22 nt, Human
uguuucuauuuuuugaaaagca

SEQ ID NO: 1312802 - RNA, 13 nt, Human
uguuucuccccca

SEQ ID NO: 1312803 - RNA, 21 nt, Human
uguuucucccccauguucugu

SEQ ID NO: 1312804 - RNA, 16 nt, Human
uguuucuauuuuuuga

SEQ ID NO: 1312805 - RNA, 15 nt, Human
uguuuacagauaauu

SEQ ID NO: 1312806 - RNA, 16 nt, Human
uguuuacagauaauua

SEQ ID NO: 1312807 - RNA, 22 nt, Human
uguuuacagauaauuaccuacu

SEQ ID NO: 1312808 - RNA, 13 nt, Human
uguuuguuuaauu

SEQ ID NO: 1312809 - RNA, 14 nt, Human
uguuuguuuaauuu

SEQ ID NO: 1312810 - RNA, 18 nt, Human
uguuuuaaaaugagaaau

SEQ ID NO: 1312811 - RNA, 17 nt, Human
uguuuuaaaaaccuguu

SEQ ID NO: 1312812 - RNA, 17 nt, Human
uguuuguuuccuuuguu

SEQ ID NO: 1312813 - RNA, 23 nt, Human
uggguaggaaagaggaagcaaau

SEQ ID NO: 1312814 - RNA, 16 nt, Human
uggguagccugggugu

SEQ ID NO: 1312815 - RNA, 18 nt, Human
uggguaggguaaaucagu

SEQ ID NO: 1312816 - RNA, 17 nt, Human
uggguaguggggaagag

SEQ ID NO: 1312817 - RNA, 13 nt, Human
ugggucaggcagg

SEQ ID NO: 1312818 - RNA, 12 nt, Human
uggguccaggag

SEQ ID NO: 1312819 - RNA, 14 nt, Human
uggguccaggagga

SEQ ID NO: 1312820 - RNA, 22 nt, Human
ugggguggggggggugcugggc

SEQ ID NO: 1312821 - RNA, 21 nt, Human
ugggguggggggggugcuggg

SEQ ID NO: 1312822 - RNA, 17 nt, Human
uggguagacacacauga

SEQ ID NO: 1312823 - RNA, 16 nt, Human
uggguagacacacaug

SEQ ID NO: 1312824 - RNA, 19 nt, Human
ugggguggggggggugcug

SEQ ID NO: 1312825 - RNA, 16 nt, Human
uggggcaggggccggg

SEQ ID NO: 1312826 - RNA, 20 nt, Human
uggggcaggcugggccaugu

SEQ ID NO: 1312827 - RNA, 18 nt, Human
uggggcaggggccggggg

SEQ ID NO: 1312828 - RNA, 22 nt, Human
uggggcaggaguagcugagcuc

SEQ ID NO: 1312829 - RNA, 21 nt, Human
uggggcaggaguagcugagcu

SEQ ID NO: 1312830 - RNA, 21 nt, Human
uggggcaggccaccuggcucu

SEQ ID NO: 1312831 - RNA, 14 nt, Human
uggggcaggcuggg

SEQ ID NO: 1312832 - RNA, 15 nt, Human
uggggcaggcugggc

SEQ ID NO: 1312833 - RNA, 16 nt, Human
uggggcaggcugggcc

SEQ ID NO: 1312834 - RNA, 17 nt, Human
uggggcaggcugggcca

SEQ ID NO: 1312835 - RNA, 18 nt, Human
uggggcaggcugggccau

SEQ ID NO: 1312836 - RNA, 21 nt, Human
uggguucugccugccagcugc

SEQ ID NO: 1312837 - RNA, 22 nt, Human
uggguucugccugccagcugca

SEQ ID NO: 1312838 - RNA, 17 nt, Human
uggguuggaaaacagua

SEQ ID NO: 1312839 - RNA, 16 nt, Human
uggguugcagacagga

SEQ ID NO: 1312840 - RNA, 21 nt, Human
uggguugcagacaggaaucuu

SEQ ID NO: 1312841 - RNA, 15 nt, Human
uggguugggaucagg

SEQ ID NO: 1312842 - RNA, 15 nt, Human
uggguugucaccaag

SEQ ID NO: 1312843 - RNA, 21 nt, Human
uggguuccagcaauucuccug

SEQ ID NO: 1312844 - RNA, 13 nt, Human
uggguuccacaga

SEQ ID NO: 1312845 - RNA, 14 nt, Human
uggguuccacagac

SEQ ID NO: 1312846 - RNA, 15 nt, Human
uggguuccacagacg

SEQ ID NO: 1312847 - RNA, 21 nt, Human
uggguuccuuccucugagccu

SEQ ID NO: 1312848 - RNA, 22 nt, Human
uggguuccuuccucugagccuu

SEQ ID NO: 1312849 - RNA, 13 nt, Human
uggguccaggagg

SEQ ID NO: 1312850 - RNA, 14 nt, Human
uggguccaugggca

SEQ ID NO: 1312851 - RNA, 17 nt, Human
uggguccaugggcagag

SEQ ID NO: 1312852 - RNA, 13 nt, Human
ugggcauucaaau

SEQ ID NO: 1312853 - RNA, 19 nt, Human
ugggcaugguguucuccug

SEQ ID NO: 1312854 - RNA, 20 nt, Human
ugggcaugguguucuccugc

SEQ ID NO: 1312855 - RNA, 13 nt, Human
ugggcaucuuuug

SEQ ID NO: 1312856 - RNA, 15 nt, Human
ugggcaucuuuugua

SEQ ID NO: 1312857 - RNA, 18 nt, Human
ugggcaucuuuuguauua

SEQ ID NO: 1312858 - RNA, 19 nt, Human
ugggcaucuuuuguauuaa

SEQ ID NO: 1312859 - RNA, 23 nt, Human
ugggcaugagggguuccuccccu

SEQ ID NO: 1312860 - RNA, 22 nt, Human
ugggcaugagggguuccucccc

SEQ ID NO: 1312861 - RNA, 18 nt, Human
ugggccuucagggaguga

SEQ ID NO: 1312862 - RNA, 12 nt, Human
ugggccuuggcc

SEQ ID NO: 1312863 - RNA, 13 nt, Human
ugggccuuggccu

SEQ ID NO: 1312864 - RNA, 15 nt, Human
ugggccuuggccugg

SEQ ID NO: 1312865 - RNA, 16 nt, Human
ugggagcuuuuguaga

SEQ ID NO: 1312866 - RNA, 19 nt, Human
ugggagcugguuagaaaug

SEQ ID NO: 1312867 - RNA, 16 nt, Human
ugggagcuugggaaug

SEQ ID NO: 1312868 - RNA, 18 nt, Human
ugggagcugguuagaaau

SEQ ID NO: 1312869 - RNA, 20 nt, Human
ugggagcugguuagaaaugc

SEQ ID NO: 1312870 - RNA, 13 nt, Human
ugggaggaaggac

SEQ ID NO: 1312871 - RNA, 15 nt, Human
ugggcaguuuuuuga

SEQ ID NO: 1312872 - RNA, 16 nt, Human
ugggcaguuuuuugaa

SEQ ID NO: 1312873 - RNA, 17 nt, Human
ugggcgugagaccugcc

SEQ ID NO: 1312874 - RNA, 18 nt, Human
ugggcgugagaccugccc

SEQ ID NO: 1312875 - RNA, 19 nt, Human
ugggcgugagaccugcccc

SEQ ID NO: 1312876 - RNA, 16 nt, Human
ugggccuuggccugga

SEQ ID NO: 1312877 - RNA, 17 nt, Human
ugggccuuggccuggag

SEQ ID NO: 1312878 - RNA, 18 nt, Human
ugggccuuggccuggagc

SEQ ID NO: 1312879 - RNA, 19 nt, Human
ugggccuuggccuggagca

SEQ ID NO: 1312880 - RNA, 14 nt, Human
ugggccuugggcuc

SEQ ID NO: 1312881 - RNA, 15 nt, Human
ugggccuugggcucc

SEQ ID NO: 1312882 - RNA, 16 nt, Human
ugggccuugggcuccg

SEQ ID NO: 1312883 - RNA, 14 nt, Human
ugggcgcugguccu

SEQ ID NO: 1312884 - RNA, 22 nt, Human
ugggcgcugguccuuucuuccg

SEQ ID NO: 1312885 - RNA, 13 nt, Human
ugggcuugggccu

SEQ ID NO: 1312886 - RNA, 14 nt, Human
ugggcuugggccua

SEQ ID NO: 1312887 - RNA, 15 nt, Human
ugggcuugggccuag

SEQ ID NO: 1312888 - RNA, 18 nt, Human
ugggcuugggccuaggcu

SEQ ID NO: 1312889 - RNA, 19 nt, Human
ugggcuugggccuaggcug

SEQ ID NO: 1312890 - RNA, 22 nt, Human
ugggcuugggccuaggcugcau

SEQ ID NO: 1312891 - RNA, 12 nt, Human
uggggcaggagu

SEQ ID NO: 1312892 - RNA, 13 nt, Human
uggggcaggagua

SEQ ID NO: 1312893 - RNA, 14 nt, Human
uggggcaggaguag

SEQ ID NO: 1312894 - RNA, 15 nt, Human
uggggcaggaguagc

SEQ ID NO: 1312895 - RNA, 18 nt, Human
uggggcaggaguagcuga

SEQ ID NO: 1312896 - RNA, 19 nt, Human
uggggcaggaguagcugag

SEQ ID NO: 1312897 - RNA, 20 nt, Human
uggggcaggaguagcugagc

SEQ ID NO: 1312898 - RNA, 19 nt, Human
ugggacauuugcucaugga

SEQ ID NO: 1312899 - RNA, 20 nt, Human
ugggacauuugcucauggaa

SEQ ID NO: 1312900 - RNA, 16 nt, Human
ugggacagggcauggc

SEQ ID NO: 1312901 - RNA, 17 nt, Human
ugggacauuccaaagaa

SEQ ID NO: 1312902 - RNA, 17 nt, Human
ugggaccacaacuauuu

SEQ ID NO: 1312903 - RNA, 13 nt, Human
ugggaccaggcac

SEQ ID NO: 1312904 - RNA, 14 nt, Human
ugggaccaggcacc

SEQ ID NO: 1312905 - RNA, 20 nt, Human
ugggagcaaacugcaugccc

SEQ ID NO: 1312906 - RNA, 22 nt, Human
ugggagcaaacugcaugcccag

SEQ ID NO: 1312907 - RNA, 15 nt, Human
ugggagcccccagcc

SEQ ID NO: 1312908 - RNA, 16 nt, Human
ugggagcccccagccu

SEQ ID NO: 1312909 - RNA, 17 nt, Human
ugggagcccccagccug

SEQ ID NO: 1312910 - RNA, 18 nt, Human
ugggagcccccagccugu

SEQ ID NO: 1312911 - RNA, 20 nt, Human
ugggagcccccagccuguca

SEQ ID NO: 1312912 - RNA, 19 nt, Human
ugggagcccccagccuguc

SEQ ID NO: 1312913 - RNA, 14 nt, Human
ugggagccgggucu

SEQ ID NO: 1312914 - RNA, 18 nt, Human
ugggagccgggucugccu

SEQ ID NO: 1312915 - RNA, 23 nt, Human
ugggagccgggucugccucuucu

SEQ ID NO: 1312916 - RNA, 16 nt, Human
ugggagcuccacucug

SEQ ID NO: 1312917 - RNA, 19 nt, Human
ugggagcuccacucugcuu

SEQ ID NO: 1312918 - RNA, 22 nt, Human
ugggagcuccacucugcuucuc

SEQ ID NO: 1312919 - RNA, 16 nt, Human
ugggagcugaggccac

SEQ ID NO: 1312920 - RNA, 20 nt, Human
uggcuuugugauucaaucug

SEQ ID NO: 1312921 - RNA, 17 nt, Human
uggcuuuuauuaaugca

SEQ ID NO: 1312922 - RNA, 20 nt, Human
uggcuuuuauuaaugcacuu

SEQ ID NO: 1312923 - RNA, 21 nt, Human
uggcuuuuauuaaugcacuuu

SEQ ID NO: 1312924 - RNA, 19 nt, Human
uggcuguaaggcucuagau

SEQ ID NO: 1312925 - RNA, 20 nt, Human
uggcuguaaggcucuagauc

SEQ ID NO: 1312926 - RNA, 21 nt, Human
uggcuguaaggcucuagauca

SEQ ID NO: 1312927 - RNA, 20 nt, Human
uggcugguguuaacagaagg

SEQ ID NO: 1312928 - RNA, 21 nt, Human
uggcugguguuaacagaaggg

SEQ ID NO: 1312929 - RNA, 15 nt, Human
uggcuguaaggcucu

SEQ ID NO: 1312930 - RNA, 16 nt, Human
uggcuguaaggcucua

SEQ ID NO: 1312931 - RNA, 23 nt, Human
ugggaauggaggggcagagccag

SEQ ID NO: 1312932 - RNA, 18 nt, Human
ugggacagucaccucaug

SEQ ID NO: 1312933 - RNA, 20 nt, Human
ugggacagucaccucaugga

SEQ ID NO: 1312934 - RNA, 21 nt, Human
ugggacagucaccucauggaa

SEQ ID NO: 1312935 - RNA, 19 nt, Human
ugggaauggaggggcagag

SEQ ID NO: 1312936 - RNA, 17 nt, Human
ugggaauggaggggcag

SEQ ID NO: 1312937 - RNA, 14 nt, Human
uggcuuuucacugc

SEQ ID NO: 1312938 - RNA, 22 nt, Human
uggcuuuuauuaaugcacuuuc

SEQ ID NO: 1312939 - RNA, 15 nt, Human
uggcuuuucacugcu

SEQ ID NO: 1312940 - RNA, 18 nt, Human
uggcgcgaucucagcuca

SEQ ID NO: 1312941 - RNA, 18 nt, Human
uggcgccgucuccagggg

SEQ ID NO: 1312942 - RNA, 21 nt, Human
uggcgcgaucucggcucacug

SEQ ID NO: 1312943 - RNA, 15 nt, Human
uggcgccgucuccag

SEQ ID NO: 1312944 - RNA, 17 nt, Human
uggcgccgucuccaggg

SEQ ID NO: 1312945 - RNA, 16 nt, Human
uggccuuuuucauuua

SEQ ID NO: 1312946 - RNA, 19 nt, Human
uggccuuuuucauuuaucu

SEQ ID NO: 1312947 - RNA, 20 nt, Human
uggccuuuuucauuuaucua

SEQ ID NO: 1312948 - RNA, 22 nt, Human
uggccuuuuucauuuaucuaua

SEQ ID NO: 1312949 - RNA, 15 nt, Human
uggcgcaggaacuca

SEQ ID NO: 1312950 - RNA, 19 nt, Human
uggcguaggcuacagagaa

SEQ ID NO: 1312951 - RNA, 20 nt, Human
uggcguaggcuacagagaag

SEQ ID NO: 1312952 - RNA, 21 nt, Human
uggcguaggcuacagagaagc

SEQ ID NO: 1312953 - RNA, 23 nt, Human
uggcguaggcuacagagaagccu

SEQ ID NO: 1312954 - RNA, 22 nt, Human
uggcguaggcuacagagaagcc

SEQ ID NO: 1312955 - RNA, 18 nt, Human
uggccuucggccuccauc

SEQ ID NO: 1312956 - RNA, 17 nt, Human
uggccuucggccuccau

SEQ ID NO: 1312957 - RNA, 20 nt, Human
uggccuucggccuccauccu

SEQ ID NO: 1312958 - RNA, 23 nt, Human
uggccuuguaagacccuuauugc

SEQ ID NO: 1312959 - RNA, 18 nt, Human
uggccuuguaagacccuu

SEQ ID NO: 1312960 - RNA, 14 nt, Human
uggccuuguucugu

SEQ ID NO: 1312961 - RNA, 19 nt, Human
uggccuuguucugucacca

SEQ ID NO: 1312962 - RNA, 22 nt, Human
uggccuuuauuaaaaacugagu

SEQ ID NO: 1312963 - RNA, 12 nt, Human
uggccuuuauua

SEQ ID NO: 1312964 - RNA, 14 nt, Human
uggccuuugcgcuc

SEQ ID NO: 1312965 - RNA, 16 nt, Human
uggccuuugcgcuccu

SEQ ID NO: 1312966 - RNA, 19 nt, Human
uggccuuugcgcuccuggc

SEQ ID NO: 1312967 - RNA, 24 nt, Human
uggccuuugcgcuccuggcccagc

SEQ ID NO: 1312968 - RNA, 14 nt, Human
uggcuaaagcucga

SEQ ID NO: 1312969 - RNA, 17 nt, Human
uggcuccuucccaucgc

SEQ ID NO: 1312970 - RNA, 19 nt, Human
uggcuccuucccaucgcug

SEQ ID NO: 1312971 - RNA, 17 nt, Human
uggcuccuugugccaga

SEQ ID NO: 1312972 - RNA, 20 nt, Human
uggcuccuugugccagagaa

SEQ ID NO: 1312973 - RNA, 18 nt, Human
uggcucgaaucucugugc

SEQ ID NO: 1312974 - RNA, 19 nt, Human
uggcucgaaucucugugcc

SEQ ID NO: 1312975 - RNA, 20 nt, Human
uggcucgaaucucugugccu

SEQ ID NO: 1312976 - RNA, 19 nt, Human
uggcucguuggcuagauua

SEQ ID NO: 1312977 - RNA, 18 nt, Human
uggcuccuugugccagag

SEQ ID NO: 1312978 - RNA, 21 nt, Human
uggcucgaaucucugugccuu

SEQ ID NO: 1312979 - RNA, 19 nt, Human
uggcucuaauucacagugc

SEQ ID NO: 1312980 - RNA, 14 nt, Human
uggcucuacuuccc

SEQ ID NO: 1312981 - RNA, 15 nt, Human
uggcucucaccucua

SEQ ID NO: 1312982 - RNA, 14 nt, Human
uggcuggggcaugg

SEQ ID NO: 1312983 - RNA, 20 nt, Human
uggcuggggcauggaaggca

SEQ ID NO: 1312984 - RNA, 16 nt, Human
uggaauacucuuauau

SEQ ID NO: 1312985 - RNA, 12 nt, Human
uggaauacuuuu

SEQ ID NO: 1312986 - RNA, 13 nt, Human
uggaauacuuuuu

SEQ ID NO: 1312987 - RNA, 18 nt, Human
uggaauacuuuuuguuau

SEQ ID NO: 1312988 - RNA, 20 nt, Human
uggaaguuuagcucugagaa

SEQ ID NO: 1312989 - RNA, 18 nt, Human
uggaaguuuagcucugag

SEQ ID NO: 1312990 - RNA, 19 nt, Human
uggaaguuuagcucugaga

SEQ ID NO: 1312991 - RNA, 14 nt, Human
uggaauacaugaaa

SEQ ID NO: 1312992 - RNA, 15 nt, Human
uggaauacaugaaau

SEQ ID NO: 1312993 - RNA, 21 nt, Human
uggaagugugugaucuguggg

SEQ ID NO: 1312994 - RNA, 18 nt, Human
uggaaguuauuaacuuua

SEQ ID NO: 1312995 - RNA, 23 nt, Human
uggaauguggccccugaacaaga

SEQ ID NO: 1312996 - RNA, 14 nt, Human
uggaauguaaucaa

SEQ ID NO: 1312997 - RNA, 21 nt, Human
uggaauguggccccugaacaa

SEQ ID NO: 1312998 - RNA, 15 nt, Human
uggaauauuguccau

SEQ ID NO: 1312999 - RNA, 20 nt, Human
uggaauauuguccauugucc

SEQ ID NO: 1313000 - RNA, 22 nt, Human
uggaaucacuguuuagaacaca

SEQ ID NO: 1313001 - RNA, 16 nt, Human
uggaaucagcucagga

SEQ ID NO: 1313002 - RNA, 21 nt, Human
uggaaucaggaauauuuucca

SEQ ID NO: 1313003 - RNA, 22 nt, Human
uggaaucaggaauauuuuccaa

SEQ ID NO: 1313004 - RNA, 23 nt, Human
uggaaucaggaauauuuuccaaa

SEQ ID NO: 1313005 - RNA, 13 nt, Human
uggaauccuuuca

SEQ ID NO: 1313006 - RNA, 19 nt, Human
uggaacccuaaauaauaaa

SEQ ID NO: 1313007 - RNA, 22 nt, Human
uggaacccagacucagacauug

SEQ ID NO: 1313008 - RNA, 16 nt, Human
uggaacccagacucag

SEQ ID NO: 1313009 - RNA, 17 nt, Human
uggaacccagacucaga

SEQ ID NO: 1313010 - RNA, 12 nt, Human
uggaacccagac

SEQ ID NO: 1313011 - RNA, 14 nt, Human
uggaacccagacuc

SEQ ID NO: 1313012 - RNA, 15 nt, Human
uggaacccagacuca

SEQ ID NO: 1313013 - RNA, 11 nt, Human
uggaaaauaaa

SEQ ID NO: 1313014 - RNA, 15 nt, Human
uggaaaauaaaucaa

SEQ ID NO: 1313015 - RNA, 17 nt, Human
ugcuuuuuuuuccuucu

SEQ ID NO: 1313016 - RNA, 17 nt, Human
ugcuuuuuuugugugua

SEQ ID NO: 1313017 - RNA, 23 nt, Human
ugcuuuuuuuguguguauuugcu

SEQ ID NO: 1313018 - RNA, 14 nt, Human
ugcuuuuuuuuccu

SEQ ID NO: 1313019 - RNA, 16 nt, Human
uggaaaaacagcaugu

SEQ ID NO: 1313020 - RNA, 13 nt, Human
uggaacugcugcc

SEQ ID NO: 1313021 - RNA, 15 nt, Human
uggaacugcugccac

SEQ ID NO: 1313022 - RNA, 17 nt, Human
uggaacugcugccacug

SEQ ID NO: 1313023 - RNA, 19 nt, Human
uggaacugcugccacugag

SEQ ID NO: 1313024 - RNA, 20 nt, Human
uggaacugcugccacugagg

SEQ ID NO: 1313025 - RNA, 20 nt, Human
uggaacuggaauccuuucag

SEQ ID NO: 1313026 - RNA, 13 nt, Human
uggaacuggaggc

SEQ ID NO: 1313027 - RNA, 16 nt, Human
uggaacuggaggcagg

SEQ ID NO: 1313028 - RNA, 23 nt, Human
uggaacugucucucaugaaccuc

SEQ ID NO: 1313029 - RNA, 17 nt, Human
uggaacuggaggcaggg

SEQ ID NO: 1313030 - RNA, 14 nt, Human
uggaacucucgagc

SEQ ID NO: 1313031 - RNA, 15 nt, Human
uggaaccucagccug

SEQ ID NO: 1313032 - RNA, 16 nt, Human
uggaaccucagccugg

SEQ ID NO: 1313033 - RNA, 17 nt, Human
uggaaccucagccuggc

SEQ ID NO: 1313034 - RNA, 13 nt, Human
uggaacucugcuu

SEQ ID NO: 1313035 - RNA, 13 nt, Human
uggaacugaaggg

SEQ ID NO: 1313036 - RNA, 15 nt, Human
uggaacugaaggggg

SEQ ID NO: 1313037 - RNA, 16 nt, Human
uggaacugaagggggc

SEQ ID NO: 1313038 - RNA, 20 nt, Human
uggaacugaagggggcggcc

SEQ ID NO: 1313039 - RNA, 21 nt, Human
uggaacugaagggggcggccu

SEQ ID NO: 1313040 - RNA, 22 nt, Human
uggaacugaagggggcggccua

SEQ ID NO: 1313041 - RNA, 15 nt, Human
ugcuuuauuccagaa

SEQ ID NO: 1313042 - RNA, 17 nt, Human
ugcuuuauuccagaaug

SEQ ID NO: 1313043 - RNA, 14 nt, Human
ugcuuuauuccaga

SEQ ID NO: 1313044 - RNA, 19 nt, Human
ugcuuuccauucgugaaaa

SEQ ID NO: 1313045 - RNA, 18 nt, Human
ugcuuuccauucgugaaa

SEQ ID NO: 1313046 - RNA, 17 nt, Human
ugcuuuuuuguuuuggc

SEQ ID NO: 1313047 - RNA, 18 nt, Human
ugcuuguuaacugagugc

SEQ ID NO: 1313048 - RNA, 14 nt, Human
ugcuucuuucuaga

SEQ ID NO: 1313049 - RNA, 15 nt, Human
ugcuucuuucuagaa

SEQ ID NO: 1313050 - RNA, 14 nt, Human
ugcuucuguuuuau

SEQ ID NO: 1313051 - RNA, 21 nt, Human
ugcuucucugacuucugccug

SEQ ID NO: 1313052 - RNA, 22 nt, Human
ugcuucucugacuucugccugg

SEQ ID NO: 1313053 - RNA, 23 nt, Human
ugcuucucugacuucugccugga

SEQ ID NO: 1313054 - RNA, 20 nt, Human
ugcuucuaguucugccagga

SEQ ID NO: 1313055 - RNA, 14 nt, Human
ugcuucucugacuu

SEQ ID NO: 1313056 - RNA, 17 nt, Human
ugcuucucugacuucug

SEQ ID NO: 1313057 - RNA, 19 nt, Human
ugcuucucugacuucugcc

SEQ ID NO: 1313058 - RNA, 20 nt, Human
ugcuucucugacuucugccu

SEQ ID NO: 1313059 - RNA, 18 nt, Human
ugcuucuaguucugccag

SEQ ID NO: 1313060 - RNA, 19 nt, Human
ugcuucuaguucugccagg

SEQ ID NO: 1313061 - RNA, 17 nt, Human
ugcuucuaaguaaauac

SEQ ID NO: 1313062 - RNA, 18 nt, Human
ugcuucuaaguaaauaca

SEQ ID NO: 1313063 - RNA, 19 nt, Human
ugcuucuaaguaaauacaa

SEQ ID NO: 1313064 - RNA, 20 nt, Human
ugcuucuaaguaaauacaau

SEQ ID NO: 1313065 - RNA, 22 nt, Human
ugcuucuaaguaaauacaauuu

SEQ ID NO: 1313066 - RNA, 13 nt, Human
ugcugccucaugc

SEQ ID NO: 1313067 - RNA, 14 nt, Human
ugcugccuccagaa

SEQ ID NO: 1313068 - RNA, 18 nt, Human
ugcuucgggcccuuccca

SEQ ID NO: 1313069 - RNA, 16 nt, Human
ugcuucuaaguaaaua

SEQ ID NO: 1313070 - RNA, 13 nt, Human
uggagauguuuag

SEQ ID NO: 1313071 - RNA, 15 nt, Human
uggagauugaccugg

SEQ ID NO: 1313072 - RNA, 16 nt, Human
uggagauugaccugga

SEQ ID NO: 1313073 - RNA, 24 nt, Human
uggagaugaggccagaccauggac

SEQ ID NO: 1313074 - RNA, 14 nt, Human
uggagaugguggau

SEQ ID NO: 1313075 - RNA, 22 nt, Human
uggagaugaggccagaccaugg

SEQ ID NO: 1313076 - RNA, 19 nt, Human
uggagaugaggccagacca

SEQ ID NO: 1313077 - RNA, 20 nt, Human
uggagaggcccggccucuca

SEQ ID NO: 1313078 - RNA, 15 nt, Human
uggagagggaaugug

SEQ ID NO: 1313079 - RNA, 16 nt, Human
uggagagggaauguga

SEQ ID NO: 1313080 - RNA, 17 nt, Human
uggagagggaaugugaa

SEQ ID NO: 1313081 - RNA, 19 nt, Human
uggagagggaaugugaaau

SEQ ID NO: 1313082 - RNA, 18 nt, Human
uggagagggaaugugaaa

SEQ ID NO: 1313083 - RNA, 18 nt, Human
uggacaggauguguuugc

SEQ ID NO: 1313084 - RNA, 20 nt, Human
uggagacugucuggcccccc

SEQ ID NO: 1313085 - RNA, 21 nt, Human
uggagacugucuggccccccu

SEQ ID NO: 1313086 - RNA, 18 nt, Human
uggagacugugugugccc

SEQ ID NO: 1313087 - RNA, 20 nt, Human
uggagacugugugugcccuc

SEQ ID NO: 1313088 - RNA, 21 nt, Human
uggagacugugugugcccucu

SEQ ID NO: 1313089 - RNA, 16 nt, Human
uggagacuuagggcac

SEQ ID NO: 1313090 - RNA, 21 nt, Human
uggagacuuagggcaccaggg

SEQ ID NO: 1313091 - RNA, 23 nt, Human
uggagacugugugugcccucugg

SEQ ID NO: 1313092 - RNA, 19 nt, Human
uggagagagcagacuggcg

SEQ ID NO: 1313093 - RNA, 13 nt, Human
uggacagcugugc

SEQ ID NO: 1313094 - RNA, 14 nt, Human
uggacagcugugcc

SEQ ID NO: 1313095 - RNA, 15 nt, Human
uggacagcugugccu

SEQ ID NO: 1313096 - RNA, 16 nt, Human
uggacagcugugccuc

SEQ ID NO: 1313097 - RNA, 18 nt, Human
uggacagcugugccucgc

SEQ ID NO: 1313098 - RNA, 19 nt, Human
uggacagcugugccucgcu

SEQ ID NO: 1313099 - RNA, 12 nt, Human
uggacagcuugu

SEQ ID NO: 1313100 - RNA, 13 nt, Human
uggacagcuugug

SEQ ID NO: 1313101 - RNA, 23 nt, Human
uggacaggacuaacacucagaag

SEQ ID NO: 1313102 - RNA, 13 nt, Human
uggacaggaugug

SEQ ID NO: 1313103 - RNA, 17 nt, Human
uggaggcaggggcuucc

SEQ ID NO: 1313104 - RNA, 18 nt, Human
uggaggcaggggcuuccu

SEQ ID NO: 1313105 - RNA, 20 nt, Human
uggaggcaggggcuuccugg

SEQ ID NO: 1313106 - RNA, 21 nt, Human
uggaggccacuguuuggaaau

SEQ ID NO: 1313107 - RNA, 19 nt, Human
uggaggcaggggcuuccug

SEQ ID NO: 1313108 - RNA, 14 nt, Human
uggaggcaggggcu

SEQ ID NO: 1313109 - RNA, 22 nt, Human
uggaggccauugugugagccua

SEQ ID NO: 1313110 - RNA, 12 nt, Human
uggaggcccagg

SEQ ID NO: 1313111 - RNA, 14 nt, Human
uggaggcccaggcu

SEQ ID NO: 1313112 - RNA, 18 nt, Human
uggaggcccaggcuggga

SEQ ID NO: 1313113 - RNA, 12 nt, Human
uggaggcccagu

SEQ ID NO: 1313114 - RNA, 18 nt, Human
uggaggccccaacccugu

SEQ ID NO: 1313115 - RNA, 15 nt, Human
uggaggcccaguuca

SEQ ID NO: 1313116 - RNA, 12 nt, Human
uggaggcugcuc

SEQ ID NO: 1313117 - RNA, 13 nt, Human
uggauaccauuau

SEQ ID NO: 1313118 - RNA, 15 nt, Human
uggauaccauuauau

SEQ ID NO: 1313119 - RNA, 22 nt, Human
uggauacuuggauuuaguuuca

SEQ ID NO: 1313120 - RNA, 14 nt, Human
uggauacuuggauu

SEQ ID NO: 1313121 - RNA, 15 nt, Human
uggauacuuggauuu

SEQ ID NO: 1313122 - RNA, 16 nt, Human
uggauauaguuuuacu

SEQ ID NO: 1313123 - RNA, 21 nt, Human
uggaucuugauguaaggaugg

SEQ ID NO: 1313124 - RNA, 14 nt, Human
uggaugacauuaaa

SEQ ID NO: 1313125 - RNA, 13 nt, Human
uggaugagcuccc

SEQ ID NO: 1313126 - RNA, 19 nt, Human
uggaugauauaaugcgggu

SEQ ID NO: 1313127 - RNA, 23 nt, Human
uggaugagcucccacaagccuga

SEQ ID NO: 1313128 - RNA, 16 nt, Human
uggaugauacuaauaa

SEQ ID NO: 1313129 - RNA, 22 nt, Human
uggaugauccccacgccacagc

SEQ ID NO: 1313130 - RNA, 22 nt, Human
uggccacuccagaccccuggcu

SEQ ID NO: 1313131 - RNA, 14 nt, Human
uggccacuccgaga

SEQ ID NO: 1313132 - RNA, 18 nt, Human
uggccacuccgagaggug

SEQ ID NO: 1313133 - RNA, 13 nt, Human
uggcaguuauauu

SEQ ID NO: 1313134 - RNA, 20 nt, Human
uggcaguuuauauuuaacuc

SEQ ID NO: 1313135 - RNA, 20 nt, Human
uggccacuccgagagguggg

SEQ ID NO: 1313136 - RNA, 23 nt, Human
uggccacuccgagaggugggcca

SEQ ID NO: 1313137 - RNA, 16 nt, Human
uggcaguuuauauuua

SEQ ID NO: 1313138 - RNA, 12 nt, Human
uggccagacaca

SEQ ID NO: 1313139 - RNA, 13 nt, Human
uggccagacacag

SEQ ID NO: 1313140 - RNA, 18 nt, Human
uggccagacacaggcccu

SEQ ID NO: 1313141 - RNA, 23 nt, Human
uggcaggcagaggcccaggcugc

SEQ ID NO: 1313142 - RNA, 22 nt, Human
uggcaggcagaggcccaggcug

SEQ ID NO: 1313143 - RNA, 20 nt, Human
uggcaggcaggcucccaggg

SEQ ID NO: 1313144 - RNA, 15 nt, Human
uggcaggccagcugu

SEQ ID NO: 1313145 - RNA, 12 nt, Human
uggcaggcuggc

SEQ ID NO: 1313146 - RNA, 13 nt, Human
uggcaggcuggcc

SEQ ID NO: 1313147 - RNA, 14 nt, Human
uggcaggcuggcca

SEQ ID NO: 1313148 - RNA, 18 nt, Human
uggcaggcuggccagucc

SEQ ID NO: 1313149 - RNA, 15 nt, Human
uggcaggcuggccag

SEQ ID NO: 1313150 - RNA, 20 nt, Human
uggaugauacuaauaaacua

SEQ ID NO: 1313151 - RNA, 20 nt, Human
uggaugccaauauuaaaucu

SEQ ID NO: 1313152 - RNA, 21 nt, Human
uggaugccaauauuaaaucug

SEQ ID NO: 1313153 - RNA, 12 nt, Human
uggcaggcagag

SEQ ID NO: 1313154 - RNA, 17 nt, Human
uggcaggcagaggccca

SEQ ID NO: 1313155 - RNA, 18 nt, Human
uggcaggcagaggcccag

SEQ ID NO: 1313156 - RNA, 21 nt, Human
uggcaggcagaggcccaggcu

SEQ ID NO: 1313157 - RNA, 11 nt, Human
uggcacuuuga

SEQ ID NO: 1313158 - RNA, 16 nt, Human
uggcacuuugaagggg

SEQ ID NO: 1313159 - RNA, 12 nt, Human
uggcagaaaagu

SEQ ID NO: 1313160 - RNA, 16 nt, Human
ugcacguaaaguacuu

SEQ ID NO: 1313161 - RNA, 18 nt, Human
ugcacguaaaguacuugu

SEQ ID NO: 1313162 - RNA, 19 nt, Human
ugcacguaaaguacuugua

SEQ ID NO: 1313163 - RNA, 21 nt, Human
ugcacguaaaguacuuguagu

SEQ ID NO: 1313164 - RNA, 22 nt, Human
ugcacuugcgguuccggcaugg

SEQ ID NO: 1313165 - RNA, 16 nt, Human
ugcacuuggcugcaua

SEQ ID NO: 1313166 - RNA, 17 nt, Human
ugcagauaaacaguagu

SEQ ID NO: 1313167 - RNA, 16 nt, Human
ugcagauaaacaguag

SEQ ID NO: 1313168 - RNA, 13 nt, Human
ugcagcuuuaaaa

SEQ ID NO: 1313169 - RNA, 14 nt, Human
ugcagcauuucacu

SEQ ID NO: 1313170 - RNA, 15 nt, Human
ugcagcauuucacuu

SEQ ID NO: 1313171 - RNA, 23 nt, Human
ugcaggaaggagcugccuggacc

SEQ ID NO: 1313172 - RNA, 15 nt, Human
ugcaggaaggagcug

SEQ ID NO: 1313173 - RNA, 16 nt, Human
ugcaggaaggagcugc

SEQ ID NO: 1313174 - RNA, 17 nt, Human
ugcaggaaggagcugcc

SEQ ID NO: 1313175 - RNA, 18 nt, Human
ugcaggaaggagcugccu

SEQ ID NO: 1313176 - RNA, 19 nt, Human
ugcaggaaggagcugccug

SEQ ID NO: 1313177 - RNA, 20 nt, Human
ugcaggaaggagcugccugg

SEQ ID NO: 1313178 - RNA, 21 nt, Human
ugcaggaaggagcugccugga

SEQ ID NO: 1313179 - RNA, 22 nt, Human
ugcaggaaggagcugccuggac

SEQ ID NO: 1313180 - RNA, 12 nt, Human
ugcaggaaggag

SEQ ID NO: 1313181 - RNA, 14 nt, Human
ugcaggaaggagcu

SEQ ID NO: 1313182 - RNA, 22 nt, Human
ugcagcuuuaaaaaauuaaucu

SEQ ID NO: 1313183 - RNA, 22 nt, Human
ugcagcuuguagccagccgggg

SEQ ID NO: 1313184 - RNA, 15 nt, Human
ugcacaucaaaauau

SEQ ID NO: 1313185 - RNA, 12 nt, Human
ugcacaucccug

SEQ ID NO: 1313186 - RNA, 22 nt, Human
ugcacaucuguaaaucuacaca

SEQ ID NO: 1313187 - RNA, 15 nt, Human
ugcacaucugugucu

SEQ ID NO: 1313188 - RNA, 16 nt, Human
ugcacaucugugucuu

SEQ ID NO: 1313189 - RNA, 18 nt, Human
ugcacaucugugucuugu

SEQ ID NO: 1313190 - RNA, 19 nt, Human
ugcacaucugugucuuguu

SEQ ID NO: 1313191 - RNA, 15 nt, Human
ugcaccuaaaacuua

SEQ ID NO: 1313192 - RNA, 13 nt, Human
ugcaccuaaagaa

SEQ ID NO: 1313193 - RNA, 14 nt, Human
ugcaccuaaagaaa

SEQ ID NO: 1313194 - RNA, 15 nt, Human
ugcaccuaaagaaaa

SEQ ID NO: 1313195 - RNA, 16 nt, Human
ugcaccuaaagaaaaa

SEQ ID NO: 1313196 - RNA, 19 nt, Human
ugcaccuaaagaaaaacaa

SEQ ID NO: 1313197 - RNA, 21 nt, Human
ugcaccuaaagaaaaacaaac

SEQ ID NO: 1313198 - RNA, 14 nt, Human
ugcacagcaucuca

SEQ ID NO: 1313199 - RNA, 12 nt, Human
ugcacaggaggg

SEQ ID NO: 1313200 - RNA, 13 nt, Human
ugcacaggagggg

SEQ ID NO: 1313201 - RNA, 19 nt, Human
ugcacagugcaucucagcc

SEQ ID NO: 1313202 - RNA, 20 nt, Human
ugcacagugcaucucagccc

SEQ ID NO: 1313203 - RNA, 15 nt, Human
ugcacaggagggggu

SEQ ID NO: 1313204 - RNA, 23 nt, Human
ugcacaggagggggucguggaga

SEQ ID NO: 1313205 - RNA, 18 nt, Human
ugcacagugcaucucagc

SEQ ID NO: 1313206 - RNA, 24 nt, Human
ugcacagccccuaagucaacuuag

SEQ ID NO: 1313207 - RNA, 15 nt, Human
ugcacagcaucucag

SEQ ID NO: 1313208 - RNA, 22 nt, Human
ugcacagcacaaauuaguuaua

SEQ ID NO: 1313209 - RNA, 16 nt, Human
ugcacagcacaaauua

SEQ ID NO: 1313210 - RNA, 18 nt, Human
ugcacagcacaaauuagu

SEQ ID NO: 1313211 - RNA, 23 nt, Human
ugcacagcacaaauuaguuauau

SEQ ID NO: 1313212 - RNA, 13 nt, Human
ugcacacuuuggu

SEQ ID NO: 1313213 - RNA, 17 nt, Human
ugcacacuuugguacca

SEQ ID NO: 1313214 - RNA, 22 nt, Human
ugcacacuuugccauauuuuca

SEQ ID NO: 1313215 - RNA, 14 nt, Human
ugcacacuuugcca

SEQ ID NO: 1313216 - RNA, 22 nt, Human
ugcacacuuugguaccagauaa

SEQ ID NO: 1313217 - RNA, 20 nt, Human
ugccaggcuggagugcagug

SEQ ID NO: 1313218 - RNA, 17 nt, Human
ugccagggcaaugauga

SEQ ID NO: 1313219 - RNA, 22 nt, Human
ugccagggcaaugaugaaugag

SEQ ID NO: 1313220 - RNA, 11 nt, Human
ugccagggcag

SEQ ID NO: 1313221 - RNA, 12 nt, Human
ugccagggcagg

SEQ ID NO: 1313222 - RNA, 17 nt, Human
ugccaagagugaaggga

SEQ ID NO: 1313223 - RNA, 17 nt, Human
ugccacccagccccagc

SEQ ID NO: 1313224 - RNA, 20 nt, Human
ugccacccagccccagccag

SEQ ID NO: 1313225 - RNA, 21 nt, Human
ugccacccagccccagccagg

SEQ ID NO: 1313226 - RNA, 22 nt, Human
ugccacccagccccagccaggg

SEQ ID NO: 1313227 - RNA, 13 nt, Human
ugccacccaggau

SEQ ID NO: 1313228 - RNA, 22 nt, Human
ugccaguaacgcgucuuccuga

SEQ ID NO: 1313229 - RNA, 23 nt, Human
ugccaguaacgcgucuuccugag

SEQ ID NO: 1313230 - RNA, 17 nt, Human
ugccaguaacaggcuca

SEQ ID NO: 1313231 - RNA, 18 nt, Human
ugccaguaacgcgucuuc

SEQ ID NO: 1313232 - RNA, 21 nt, Human
ugccaguaacgcgucuuccug

SEQ ID NO: 1313233 - RNA, 21 nt, Human
ugccaguauuuuaaaauagcg

SEQ ID NO: 1313234 - RNA, 17 nt, Human
ugccaguauuuuaaaau

SEQ ID NO: 1313235 - RNA, 22 nt, Human
ugccaucugcgugacaauaaaa

SEQ ID NO: 1313236 - RNA, 21 nt, Human
ugccaugaugccucugucuuc

SEQ ID NO: 1313237 - RNA, 18 nt, Human
ugcccacagugucaggca

SEQ ID NO: 1313238 - RNA, 20 nt, Human
ugcccacagugucaggcacu

SEQ ID NO: 1313239 - RNA, 23 nt, Human
ugcccacagugucaggcacuggg

SEQ ID NO: 1313240 - RNA, 21 nt, Human
ugcccacagugucaggcacug

SEQ ID NO: 1313241 - RNA, 15 nt, Human
ugcauuauauuuauu

SEQ ID NO: 1313242 - RNA, 20 nt, Human
ugcauuaaauucacaaacuu

SEQ ID NO: 1313243 - RNA, 21 nt, Human
ugcauuaaauucacaaacuuu

SEQ ID NO: 1313244 - RNA, 20 nt, Human
ugcauuaaauuacagaaauu

SEQ ID NO: 1313245 - RNA, 20 nt, Human
ugcauuauauuuauuacugu

SEQ ID NO: 1313246 - RNA, 21 nt, Human
ugcauuauauuuauuacugua

SEQ ID NO: 1313247 - RNA, 17 nt, Human
ugcauuaaauuacagaa

SEQ ID NO: 1313248 - RNA, 13 nt, Human
ugcauuaaauuca

SEQ ID NO: 1313249 - RNA, 14 nt, Human
ugcauuaaauucac

SEQ ID NO: 1313250 - RNA, 15 nt, Human
ugcauuaaauucaca

SEQ ID NO: 1313251 - RNA, 16 nt, Human
ugcauuaaauucacaa

SEQ ID NO: 1313252 - RNA, 17 nt, Human
ugcauuaaauucacaaa

SEQ ID NO: 1313253 - RNA, 19 nt, Human
ugcauuaaauucacaaacu

SEQ ID NO: 1313254 - RNA, 16 nt, Human
ugccaaaaaaaaauac

SEQ ID NO: 1313255 - RNA, 16 nt, Human
ugccaaaaagugaaau

SEQ ID NO: 1313256 - RNA, 17 nt, Human
ugccaaaaagugaaaua

SEQ ID NO: 1313257 - RNA, 18 nt, Human
ugccaaaaagugaaauaa

SEQ ID NO: 1313258 - RNA, 19 nt, Human
ugccaaaaagugaaauaau

SEQ ID NO: 1313259 - RNA, 22 nt, Human
ugccaaaaagugaaauaaugug

SEQ ID NO: 1313260 - RNA, 21 nt, Human
ugccaaaaagugaaauaaugu

SEQ ID NO: 1313261 - RNA, 14 nt, Human
ugccaagacugcug

SEQ ID NO: 1313262 - RNA, 17 nt, Human
ugccaagacugcugugg

SEQ ID NO: 1313263 - RNA, 21 nt, Human
ugccaagacugcuguggccag

SEQ ID NO: 1313264 - RNA, 22 nt, Human
ugccaagacugcuguggccagg

SEQ ID NO: 1313265 - RNA, 23 nt, Human
ugccaagacugcuguggccagga

SEQ ID NO: 1313266 - RNA, 21 nt, Human
ugcauccagccuggggcugag

SEQ ID NO: 1313267 - RNA, 18 nt, Human
ugcaggauggugucucuu

SEQ ID NO: 1313268 - RNA, 14 nt, Human
ugcaggaugguguc

SEQ ID NO: 1313269 - RNA, 18 nt, Human
ugcauccuccgccucccg

SEQ ID NO: 1313270 - RNA, 21 nt, Human
ugcauccuccgccucccgggu

SEQ ID NO: 1313271 - RNA, 22 nt, Human
ugcauccucuggagccagccga

SEQ ID NO: 1313272 - RNA, 19 nt, Human
ugcauccucuggagccagc

SEQ ID NO: 1313273 - RNA, 16 nt, Human
ugcauguccuguaaag

SEQ ID NO: 1313274 - RNA, 19 nt, Human
ugcaggaaucuuuaaaaga

SEQ ID NO: 1313275 - RNA, 17 nt, Human
ugcaggaucucaccagg

SEQ ID NO: 1313276 - RNA, 19 nt, Human
ugcaggaucucaccaggca

SEQ ID NO: 1313277 - RNA, 20 nt, Human
ugcaggaucucaccaggcag

SEQ ID NO: 1313278 - RNA, 21 nt, Human
ugcaggaucucaccaggcagc

SEQ ID NO: 1313279 - RNA, 22 nt, Human
ugcaggaucucaccaggcagcc

SEQ ID NO: 1313280 - RNA, 18 nt, Human
ugcugauauuuaaauuca

SEQ ID NO: 1313281 - RNA, 15 nt, Human
ugcugauauuuucuc

SEQ ID NO: 1313282 - RNA, 21 nt, Human
ugcugauauuuucucuaggaa

SEQ ID NO: 1313283 - RNA, 18 nt, Human
ugcugauauuuucucuag

SEQ ID NO: 1313284 - RNA, 16 nt, Human
ugcugaucgccuuccc

SEQ ID NO: 1313285 - RNA, 21 nt, Human
ugcugaugaacucuuaaucaa

SEQ ID NO: 1313286 - RNA, 17 nt, Human
ugcugaucgccuucccc

SEQ ID NO: 1313287 - RNA, 18 nt, Human
ugcugaucgccuucccca

SEQ ID NO: 1313288 - RNA, 18 nt, Human
ugcugaauauacagcagg

SEQ ID NO: 1313289 - RNA, 18 nt, Human
ugcugaauguugggacug

SEQ ID NO: 1313290 - RNA, 20 nt, Human
ugcugaauguugggacugcu

SEQ ID NO: 1313291 - RNA, 16 nt, Human
ugcugauggagccuuc

SEQ ID NO: 1313292 - RNA, 15 nt, Human
ugcugauggagccuu

SEQ ID NO: 1313293 - RNA, 21 nt, Human
ugcuccuguucacaccagaga

SEQ ID NO: 1313294 - RNA, 15 nt, Human
ugcuccuuccccauc

SEQ ID NO: 1313295 - RNA, 12 nt, Human
ugcuccuugggc

SEQ ID NO: 1313296 - RNA, 14 nt, Human
ugcuccuugggccc

SEQ ID NO: 1313297 - RNA, 15 nt, Human
ugcuccuugggcccu

SEQ ID NO: 1313298 - RNA, 16 nt, Human
ugcuccuugggcccuu

SEQ ID NO: 1313299 - RNA, 18 nt, Human
ugcuccuugggcccuuug

SEQ ID NO: 1313300 - RNA, 19 nt, Human
ugcuccuugggcccuuuga

SEQ ID NO: 1313301 - RNA, 21 nt, Human
ugcuccuugggcccuuugagu

SEQ ID NO: 1313302 - RNA, 13 nt, Human
ugcuccuucccca

SEQ ID NO: 1313303 - RNA, 16 nt, Human
ugcucuuucucugcca

SEQ ID NO: 1313304 - RNA, 17 nt, Human
ugcucuuucucugccag

SEQ ID NO: 1313305 - RNA, 18 nt, Human
ugcucuuucucugccagu

SEQ ID NO: 1313306 - RNA, 21 nt, Human
ugcucuuucucugccagugac

SEQ ID NO: 1313307 - RNA, 22 nt, Human
ugcucuuucucugccagugaca

SEQ ID NO: 1313308 - RNA, 14 nt, Human
ugcucuuuguuuug

SEQ ID NO: 1313309 - RNA, 15 nt, Human
ugcucuuuguuuugu

SEQ ID NO: 1313310 - RNA, 18 nt, Human
ugcucuuuguuuuguguc

SEQ ID NO: 1313311 - RNA, 20 nt, Human
ugcucuuuguuuugugucuc

SEQ ID NO: 1313312 - RNA, 13 nt, Human
ugcucuuuucucc

SEQ ID NO: 1313313 - RNA, 15 nt, Human
ugcucuuuucuccuc

SEQ ID NO: 1313314 - RNA, 21 nt, Human
ugcucuuuucuccucacugua

SEQ ID NO: 1313315 - RNA, 23 nt, Human
ugcucuuuucuccucacuguauc

SEQ ID NO: 1313316 - RNA, 16 nt, Human
ugcugaaaaaugggca

SEQ ID NO: 1313317 - RNA, 22 nt, Human
ugcucuuuguuuugugucucuu

SEQ ID NO: 1313318 - RNA, 16 nt, Human
ugcugaaaauguccuu

SEQ ID NO: 1313319 - RNA, 21 nt, Human
ugcugaaaauguccuugugau

SEQ ID NO: 1313320 - RNA, 18 nt, Human
ugcugaaaauguccuugu

SEQ ID NO: 1313321 - RNA, 15 nt, Human
ugcucaggagcccug

SEQ ID NO: 1313322 - RNA, 15 nt, Human
ugcucaucauucucu

SEQ ID NO: 1313323 - RNA, 17 nt, Human
ugcucaucauucucugu

SEQ ID NO: 1313324 - RNA, 19 nt, Human
ugcucaucauucucugucu

SEQ ID NO: 1313325 - RNA, 20 nt, Human
ugcucaucauucucugucuc

SEQ ID NO: 1313326 - RNA, 21 nt, Human
ugcucaucauucucugucuca

SEQ ID NO: 1313327 - RNA, 23 nt, Human
ugcucaucauucucugucucauc

SEQ ID NO: 1313328 - RNA, 11 nt, Human
ugcucauggaa

SEQ ID NO: 1313329 - RNA, 17 nt, Human
ugcucauccacucuacu

SEQ ID NO: 1313330 - RNA, 13 nt, Human
ugcucaucugcug

SEQ ID NO: 1313331 - RNA, 14 nt, Human
ugcucaucugcugg

SEQ ID NO: 1313332 - RNA, 15 nt, Human
ugcucaucugcuggu

SEQ ID NO: 1313333 - RNA, 16 nt, Human
ugcucaucugcugguc

SEQ ID NO: 1313334 - RNA, 18 nt, Human
ugcucaucugcugguccg

SEQ ID NO: 1313335 - RNA, 13 nt, Human
ugcuccucuuccc

SEQ ID NO: 1313336 - RNA, 15 nt, Human
ugcuccucuucccca

SEQ ID NO: 1313337 - RNA, 19 nt, Human
ugcuccucuuccccagacg

SEQ ID NO: 1313338 - RNA, 16 nt, Human
ugcuccucuuccccag

SEQ ID NO: 1313339 - RNA, 18 nt, Human
ugcuccuggaucucccug

SEQ ID NO: 1313340 - RNA, 21 nt, Human
ugcuccuggaucucccugaga

SEQ ID NO: 1313341 - RNA, 14 nt, Human
ugcucaggagcccu

SEQ ID NO: 1313342 - RNA, 17 nt, Human
ugcucagcuucuccaac

SEQ ID NO: 1313343 - RNA, 20 nt, Human
ugcucagcuucuccaacaau

SEQ ID NO: 1313344 - RNA, 18 nt, Human
ugcucagcucugggccau

SEQ ID NO: 1313345 - RNA, 20 nt, Human
ugcucagcucugggccauuc

SEQ ID NO: 1313346 - RNA, 16 nt, Human
ugcucagcugucaagg

SEQ ID NO: 1313347 - RNA, 20 nt, Human
ugcucagcugucaaggcuca

SEQ ID NO: 1313348 - RNA, 20 nt, Human
ugcuaggguuaggagguccu

SEQ ID NO: 1313349 - RNA, 21 nt, Human
ugcuaggguuaggagguccuu

SEQ ID NO: 1313350 - RNA, 12 nt, Human
ugcuagguucua

SEQ ID NO: 1313351 - RNA, 13 nt, Human
ugcuagguucuac

SEQ ID NO: 1313352 - RNA, 21 nt, Human
ugcuagaacucccuuucaaca

SEQ ID NO: 1313353 - RNA, 20 nt, Human
ugcuagaacucccuuucaac

SEQ ID NO: 1313354 - RNA, 13 nt, Human
ugcuagagcuccu

SEQ ID NO: 1313355 - RNA, 14 nt, Human
ugcuagagcuccuc

SEQ ID NO: 1313356 - RNA, 19 nt, Human
ugcuagaacucccuuucaa

SEQ ID NO: 1313357 - RNA, 18 nt, Human
ugcgugggagugugugcc

SEQ ID NO: 1313358 - RNA, 14 nt, Human
ugcgugggugugug

SEQ ID NO: 1313359 - RNA, 23 nt, Human
ugcgugggugugugcguguuugg

SEQ ID NO: 1313360 - RNA, 18 nt, Human
ugcgugguggucccuggg

SEQ ID NO: 1313361 - RNA, 19 nt, Human
ugcgugguggucccugggu

SEQ ID NO: 1313362 - RNA, 21 nt, Human
ugcgugguggucccuggguag

SEQ ID NO: 1313363 - RNA, 20 nt, Human
ugcgguuauaaaaaaugguu

SEQ ID NO: 1313364 - RNA, 22 nt, Human
ugcgguuauaaaaaaugguuca

SEQ ID NO: 1313365 - RNA, 18 nt, Human
ugcgguuccggcauggac

SEQ ID NO: 1313366 - RNA, 23 nt, Human
ugcgguucaggaaaauugaaugc

SEQ ID NO: 1313367 - RNA, 19 nt, Human
ugcguccacgagcuguuua

SEQ ID NO: 1313368 - RNA, 20 nt, Human
ugcguggaaugcccuucacu

SEQ ID NO: 1313369 - RNA, 22 nt, Human
ugccuucucaacuccaaacuga

SEQ ID NO: 1313370 - RNA, 13 nt, Human
ugccuucucucuc

SEQ ID NO: 1313371 - RNA, 17 nt, Human
ugccuuccuccugggcc

SEQ ID NO: 1313372 - RNA, 19 nt, Human
ugccuuccuccugggcccu

SEQ ID NO: 1313373 - RNA, 20 nt, Human
ugccuuccuccugggcccuc

SEQ ID NO: 1313374 - RNA, 15 nt, Human
ugccuuccuguuuuu

SEQ ID NO: 1313375 - RNA, 19 nt, Human
ugccuuccuguuuuucaca

SEQ ID NO: 1313376 - RNA, 13 nt, Human
ugccuucgcuucu

SEQ ID NO: 1313377 - RNA, 14 nt, Human
ugccuucgcuucuu

SEQ ID NO: 1313378 - RNA, 16 nt, Human
ugccuucgcuucuugc

SEQ ID NO: 1313379 - RNA, 17 nt, Human
ugccuucgcuucuugcc

SEQ ID NO: 1313380 - RNA, 20 nt, Human
ugccuucgcuucuugccucu

SEQ ID NO: 1313381 - RNA, 21 nt, Human
ugcgcccuuaacugcauccag

SEQ ID NO: 1313382 - RNA, 23 nt, Human
ugcgcccccuccgcccugccacu

SEQ ID NO: 1313383 - RNA, 16 nt, Human
ugcgguuaauuuugaa

SEQ ID NO: 1313384 - RNA, 21 nt, Human
ugcgguuaauuuugaagugcu

SEQ ID NO: 1313385 - RNA, 19 nt, Human
ugcgguuauaaaaaauggu

SEQ ID NO: 1313386 - RNA, 13 nt, Human
ugcgcaggcuggc

SEQ ID NO: 1313387 - RNA, 16 nt, Human
ugcgcaggcuggcccu

SEQ ID NO: 1313388 - RNA, 17 nt, Human
ugcgcaggcuggcccug

SEQ ID NO: 1313389 - RNA, 19 nt, Human
ugcgcaggcuggcccugcc

SEQ ID NO: 1313390 - RNA, 18 nt, Human
ugcgcccagggcugggag

SEQ ID NO: 1313391 - RNA, 19 nt, Human
ugcgcccagggcugggagg

SEQ ID NO: 1313392 - RNA, 23 nt, Human
ugcgcccagggcugggaggaagg

SEQ ID NO: 1313393 - RNA, 21 nt, Human
ugcgcccccuccgcccugcca

SEQ ID NO: 1313394 - RNA, 15 nt, Human
ugccuggcggggugg

SEQ ID NO: 1313395 - RNA, 13 nt, Human
ugccuucagcucu

SEQ ID NO: 1313396 - RNA, 18 nt, Human
ugccuuauucagggaagg

SEQ ID NO: 1313397 - RNA, 12 nt, Human
ugccuucaagaa

SEQ ID NO: 1313398 - RNA, 21 nt, Human
ugccuuauuagagugucuuuc

SEQ ID NO: 1313399 - RNA, 23 nt, Human
ugccuuauuagagugucuuucca

SEQ ID NO: 1313400 - RNA, 17 nt, Human
ugccuucagcucuacag

SEQ ID NO: 1313401 - RNA, 18 nt, Human
ugccuucagcucuacagc

SEQ ID NO: 1313402 - RNA, 17 nt, Human
ugccuuauucagggaag

SEQ ID NO: 1313403 - RNA, 12 nt, Human
ugccuucauuug

SEQ ID NO: 1313404 - RNA, 15 nt, Human
ugccuuccagaaaac

SEQ ID NO: 1313405 - RNA, 18 nt, Human
ugccuuccagaaaacaaa

SEQ ID NO: 1313406 - RNA, 14 nt, Human
ugccuuccuccugg

SEQ ID NO: 1313407 - RNA, 15 nt, Human
ugccuuccuccuggg

SEQ ID NO: 1313408 - RNA, 16 nt, Human
ugccuuccuccugggc

SEQ ID NO: 1313409 - RNA, 22 nt, Human
ugccuaaguccaguguuucuuu

SEQ ID NO: 1313410 - RNA, 19 nt, Human
ugccuaaggcugaacuugu

SEQ ID NO: 1313411 - RNA, 17 nt, Human
ugccuacagaacuucag

SEQ ID NO: 1313412 - RNA, 22 nt, Human
ugccuacagaacuucagaaaga

SEQ ID NO: 1313413 - RNA, 23 nt, Human
ugccuacagaacuucagaaagac

SEQ ID NO: 1313414 - RNA, 13 nt, Human
ugccuagaaacaa

SEQ ID NO: 1313415 - RNA, 18 nt, Human
ugccuagaaacaacacug

SEQ ID NO: 1313416 - RNA, 19 nt, Human
ugccuagaaacaacacugu

SEQ ID NO: 1313417 - RNA, 23 nt, Human
ugccuagaaacaacacuguagua

SEQ ID NO: 1313418 - RNA, 17 nt, Human
ugccuagauucagggaa

SEQ ID NO: 1313419 - RNA, 22 nt, Human
ugccuagaaacaacacuguagu

SEQ ID NO: 1313420 - RNA, 14 nt, Human
ugccuaggccuggg

SEQ ID NO: 1313421 - RNA, 20 nt, Human
ugccuaggccugggcagugg

SEQ ID NO: 1313422 - RNA, 16 nt, Human
ugccuaggccugggca

SEQ ID NO: 1313423 - RNA, 17 nt, Human
ugccuccccucuccuuc

SEQ ID NO: 1313424 - RNA, 15 nt, Human
ugccuaguauugaca

SEQ ID NO: 1313425 - RNA, 18 nt, Human
ugccuccccucuccuucc

SEQ ID NO: 1313426 - RNA, 13 nt, Human
ugccuccuuccuc

SEQ ID NO: 1313427 - RNA, 16 nt, Human
ugccucugucuucugg

SEQ ID NO: 1313428 - RNA, 11 nt, Human
ugccucugugc

SEQ ID NO: 1313429 - RNA, 12 nt, Human
ugccucugugcu

SEQ ID NO: 1313430 - RNA, 13 nt, Human
ugccucugugcug

SEQ ID NO: 1313431 - RNA, 17 nt, Human
ugccucugugcugugug

SEQ ID NO: 1313432 - RNA, 14 nt, Human
ugccucugugcugu

SEQ ID NO: 1313433 - RNA, 16 nt, Human
ugccucugugcugugu

SEQ ID NO: 1313434 - RNA, 15 nt, Human
ugccugaauauuugu

SEQ ID NO: 1313435 - RNA, 13 nt, Human
ugccugacacacu

SEQ ID NO: 1313436 - RNA, 18 nt, Human
ugccucugucuucuggac

SEQ ID NO: 1313437 - RNA, 19 nt, Human
ugccugagucgugaccugc

SEQ ID NO: 1313438 - RNA, 20 nt, Human
ugccugagucgugaccugcu

SEQ ID NO: 1313439 - RNA, 24 nt, Human
ugccugagucgugaccugcuaggc

SEQ ID NO: 1313440 - RNA, 23 nt, Human
ugccugagucgugaccugcuagg

SEQ ID NO: 1313441 - RNA, 22 nt, Human
ucuguuuuauaauuuugugaag

SEQ ID NO: 1313442 - RNA, 17 nt, Human
ucuguuaugcugugaca

SEQ ID NO: 1313443 - RNA, 19 nt, Human
ucuguucacuuuuccuccc

SEQ ID NO: 1313444 - RNA, 21 nt, Human
ucuguucacuuuuccucccuc

SEQ ID NO: 1313445 - RNA, 22 nt, Human
ucuguucacuuuuccucccuca

SEQ ID NO: 1313446 - RNA, 20 nt, Human
ucuguucaaagcugccuguc

SEQ ID NO: 1313447 - RNA, 14 nt, Human
ucuguguugccaag

SEQ ID NO: 1313448 - RNA, 16 nt, Human
ucuguguugccaagcu

SEQ ID NO: 1313449 - RNA, 11 nt, Human
ucugugucuuu

SEQ ID NO: 1313450 - RNA, 18 nt, Human
ucuguguuuugaaagaau

SEQ ID NO: 1313451 - RNA, 13 nt, Human
ucuguuaacugaa

SEQ ID NO: 1313452 - RNA, 16 nt, Human
ucuguuaacugaauac

SEQ ID NO: 1313453 - RNA, 17 nt, Human
ucuguuaacugaauacc

SEQ ID NO: 1313454 - RNA, 20 nt, Human
ucuguuaacugaauaccacu

SEQ ID NO: 1313455 - RNA, 21 nt, Human
ucuguuaacugaauaccacuc

SEQ ID NO: 1313456 - RNA, 19 nt, Human
ucuguuacacuuuuuggaa

SEQ ID NO: 1313457 - RNA, 20 nt, Human
ucuguccguucacaugugug

SEQ ID NO: 1313458 - RNA, 17 nt, Human
ucuguccgagugugcca

SEQ ID NO: 1313459 - RNA, 15 nt, Human
ucuguccgagugugc

SEQ ID NO: 1313460 - RNA, 19 nt, Human
ucugucccuugccccccug

SEQ ID NO: 1313461 - RNA, 16 nt, Human
ucugucccuugccccc

SEQ ID NO: 1313462 - RNA, 22 nt, Human
ucugucccuugccccccuggcc

SEQ ID NO: 1313463 - RNA, 12 nt, Human
ucuguaccaguu

SEQ ID NO: 1313464 - RNA, 13 nt, Human
ucuguaccaguua

SEQ ID NO: 1313465 - RNA, 22 nt, Human
ucuguaccaguuaauuuuucca

SEQ ID NO: 1313466 - RNA, 23 nt, Human
ucugucccuagguguuuuguuca

SEQ ID NO: 1313467 - RNA, 14 nt, Human
ucugugucuaagau

SEQ ID NO: 1313468 - RNA, 16 nt, Human
ucugugucuaagauuc

SEQ ID NO: 1313469 - RNA, 17 nt, Human
ucugugucuaagauucu

SEQ ID NO: 1313470 - RNA, 18 nt, Human
ucugugucuaagauucua

SEQ ID NO: 1313471 - RNA, 20 nt, Human
ucugugucuaagauucuaga

SEQ ID NO: 1313472 - RNA, 22 nt, Human
ucugugucuaagauucuagauc

SEQ ID NO: 1313473 - RNA, 23 nt, Human
ucugugucuaagauucuagauca

SEQ ID NO: 1313474 - RNA, 12 nt, Human
ucugugucuugu

SEQ ID NO: 1313475 - RNA, 21 nt, Human
ucugugucuuucacagcuccu

SEQ ID NO: 1313476 - RNA, 21 nt, Human
ucuguaaaacuaagaaacuua

SEQ ID NO: 1313477 - RNA, 14 nt, Human
ucuguaaaacuaag

SEQ ID NO: 1313478 - RNA, 18 nt, Human
ucuguaagcauaagcuua

SEQ ID NO: 1313479 - RNA, 15 nt, Human
ucugguugaacucug

SEQ ID NO: 1313480 - RNA, 15 nt, Human
ucugguuguuucugu

SEQ ID NO: 1313481 - RNA, 16 nt, Human
ucugguuguuucuguu

SEQ ID NO: 1313482 - RNA, 17 nt, Human
ucugguuguuucuguuc

SEQ ID NO: 1313483 - RNA, 18 nt, Human
ucugguuguuucuguucc

SEQ ID NO: 1313484 - RNA, 20 nt, Human
ucugguuguuucuguuccaa

SEQ ID NO: 1313485 - RNA, 22 nt, Human
ucugguuguuucuguuccaaau

SEQ ID NO: 1313486 - RNA, 18 nt, Human
ucuguaauuauaucuaaa

SEQ ID NO: 1313487 - RNA, 20 nt, Human
ucuguaauuauaucuaaaau

SEQ ID NO: 1313488 - RNA, 16 nt, Human
ucuguaauucagguuu

SEQ ID NO: 1313489 - RNA, 20 nt, Human
ucuggcuuggccacagccag

SEQ ID NO: 1313490 - RNA, 21 nt, Human
ucuggcuuggccacagccagg

SEQ ID NO: 1313491 - RNA, 14 nt, Human
ucugggaacuuguc

SEQ ID NO: 1313492 - RNA, 17 nt, Human
ucugguucucaauucca

SEQ ID NO: 1313493 - RNA, 18 nt, Human
ucugguucucaauuccaa

SEQ ID NO: 1313494 - RNA, 19 nt, Human
ucugguucucaauuccaac

SEQ ID NO: 1313495 - RNA, 20 nt, Human
ucugguucucaauuccaaca

SEQ ID NO: 1313496 - RNA, 14 nt, Human
ucuggaggggaggg

SEQ ID NO: 1313497 - RNA, 21 nt, Human
ucuggaggggagggggauccg

SEQ ID NO: 1313498 - RNA, 22 nt, Human
ucuggcucuaauucacagugcu

SEQ ID NO: 1313499 - RNA, 13 nt, Human
ucuggcucugucu

SEQ ID NO: 1313500 - RNA, 16 nt, Human
ucuggagaccaccagg

SEQ ID NO: 1313501 - RNA, 19 nt, Human
ucuggagaccaccagggca

SEQ ID NO: 1313502 - RNA, 20 nt, Human
ucuggagaccaccagggcau

SEQ ID NO: 1313503 - RNA, 14 nt, Human
ucuggagagaacag

SEQ ID NO: 1313504 - RNA, 23 nt, Human
ucuggagcccacuguacuugcuc

SEQ ID NO: 1313505 - RNA, 21 nt, Human
ucuuguccccaacaccccaca

SEQ ID NO: 1313506 - RNA, 12 nt, Human
ucuugucuuuau

SEQ ID NO: 1313507 - RNA, 15 nt, Human
ucuugugaaggcagg

SEQ ID NO: 1313508 - RNA, 18 nt, Human
ucuuuaaaaggaaagaaa

SEQ ID NO: 1313509 - RNA, 16 nt, Human
ucuuuaaaaggaaaga

SEQ ID NO: 1313510 - RNA, 21 nt, Human
ucuuguuuuuuuuuuccacuu

SEQ ID NO: 1313511 - RNA, 18 nt, Human
ucuuguuuuuuuuuucca

SEQ ID NO: 1313512 - RNA, 21 nt, Human
ucuugccugaacuccugccau

SEQ ID NO: 1313513 - RNA, 16 nt, Human
ucuugccuguuuccca

SEQ ID NO: 1313514 - RNA, 23 nt, Human
ucuugccuguuucccaggcccac

SEQ ID NO: 1313515 - RNA, 15 nt, Human
ucuuguauuuauugg

SEQ ID NO: 1313516 - RNA, 22 nt, Human
ucuuguauuuauugguuuugca

SEQ ID NO: 1313517 - RNA, 11 nt, Human
ucuugucaugu

SEQ ID NO: 1313518 - RNA, 13 nt, Human
ucuugucaugugu

SEQ ID NO: 1313519 - RNA, 15 nt, Human
ucuugucauguguau

SEQ ID NO: 1313520 - RNA, 17 nt, Human
ucuugucauguguauaa

SEQ ID NO: 1313521 - RNA, 13 nt, Human
ucuugucauuuuu

SEQ ID NO: 1313522 - RNA, 16 nt, Human
ucuucuccacuggaug

SEQ ID NO: 1313523 - RNA, 13 nt, Human
ucuugaauuuaau

SEQ ID NO: 1313524 - RNA, 21 nt, Human
ucuugaauuuaauaaucugua

SEQ ID NO: 1313525 - RNA, 23 nt, Human
ucuugaauuuaauaaucuguagg

SEQ ID NO: 1313526 - RNA, 16 nt, Human
ucuugacuacagucag

SEQ ID NO: 1313527 - RNA, 16 nt, Human
ucuugccucaaccucc

SEQ ID NO: 1313528 - RNA, 12 nt, Human
ucuugccucugu

SEQ ID NO: 1313529 - RNA, 13 nt, Human
ucuugccucugug

SEQ ID NO: 1313530 - RNA, 14 nt, Human
ucuugccucugugc

SEQ ID NO: 1313531 - RNA, 15 nt, Human
ucuugccucugugcu

SEQ ID NO: 1313532 - RNA, 16 nt, Human
ucuugccucugugcug

SEQ ID NO: 1313533 - RNA, 19 nt, Human
ucuugccucugugcugugu

SEQ ID NO: 1313534 - RNA, 13 nt, Human
ucuucuccacugg

SEQ ID NO: 1313535 - RNA, 14 nt, Human
ucuucucaaguucu

SEQ ID NO: 1313536 - RNA, 15 nt, Human
ucuucucaaguucua

SEQ ID NO: 1313537 - RNA, 17 nt, Human
ucuucucaaguucuaag

SEQ ID NO: 1313538 - RNA, 18 nt, Human
ucuucucaaguucuaaga

SEQ ID NO: 1313539 - RNA, 19 nt, Human
ucuucucaaguucuaagau

SEQ ID NO: 1313540 - RNA, 21 nt, Human
ucuucucaaguucuaagauuc

SEQ ID NO: 1313541 - RNA, 23 nt, Human
ucuucucaaguucuaagauucua

SEQ ID NO: 1313542 - RNA, 18 nt, Human
ucuucuacaacucauaca

SEQ ID NO: 1313543 - RNA, 12 nt, Human
ucuucuagaguu

SEQ ID NO: 1313544 - RNA, 17 nt, Human
ucuucuagaguucagag

SEQ ID NO: 1313545 - RNA, 17 nt, Human
ucuucuagguucuaaaa

SEQ ID NO: 1313546 - RNA, 14 nt, Human
ucuucuagaguuca

SEQ ID NO: 1313547 - RNA, 16 nt, Human
ucuucuauugccucug

SEQ ID NO: 1313548 - RNA, 14 nt, Human
ucuucuauugccuc

SEQ ID NO: 1313549 - RNA, 13 nt, Human
ucuucuauuuugu

SEQ ID NO: 1313550 - RNA, 15 nt, Human
ucuucuauugccucu

SEQ ID NO: 1313551 - RNA, 11 nt, Human
ucuucucaagu

SEQ ID NO: 1313552 - RNA, 21 nt, Human
ucuuccaauuuaguuguugua

SEQ ID NO: 1313553 - RNA, 13 nt, Human
ucuucuaaacuuc

SEQ ID NO: 1313554 - RNA, 22 nt, Human
ucuucuaaacuuccccaucuuc

SEQ ID NO: 1313555 - RNA, 12 nt, Human
ucuucuaaaugg

SEQ ID NO: 1313556 - RNA, 14 nt, Human
ucuucuaccaccca

SEQ ID NO: 1313557 - RNA, 22 nt, Human
ucuucuacucacuuuucccacu

SEQ ID NO: 1313558 - RNA, 14 nt, Human
ucuuaguguaugau

SEQ ID NO: 1313559 - RNA, 22 nt, Human
ucuuaaaaaguuauaaccaacu

SEQ ID NO: 1313560 - RNA, 13 nt, Human
ucuuaaaaccugc

SEQ ID NO: 1313561 - RNA, 23 nt, Human
ucuuaaaaccugcuuuucaaugu

SEQ ID NO: 1313562 - RNA, 12 nt, Human
ucuuaaaacucc

SEQ ID NO: 1313563 - RNA, 13 nt, Human
ucuuaaaacuccu

SEQ ID NO: 1313564 - RNA, 18 nt, Human
ucuuauggauguccccag

SEQ ID NO: 1313565 - RNA, 14 nt, Human
ucuuauggaauuga

SEQ ID NO: 1313566 - RNA, 15 nt, Human
ucuuauggaauugau

SEQ ID NO: 1313567 - RNA, 17 nt, Human
ucuuauggaauugauuu

SEQ ID NO: 1313568 - RNA, 18 nt, Human
ucuuauggaauugauuug

SEQ ID NO: 1313569 - RNA, 21 nt, Human
ucuuauggaauugauuugcau

SEQ ID NO: 1313570 - RNA, 22 nt, Human
ucuuauggaauugauuugcauu

SEQ ID NO: 1313571 - RNA, 12 nt, Human
ucuuauggaugu

SEQ ID NO: 1313572 - RNA, 19 nt, Human
ucuuauggauguccccagc

SEQ ID NO: 1313573 - RNA, 21 nt, Human
ucuuauaauuguucucagaau

SEQ ID NO: 1313574 - RNA, 13 nt, Human
ucuuauaguucua

SEQ ID NO: 1313575 - RNA, 17 nt, Human
ucuuauaguucuaggca

SEQ ID NO: 1313576 - RNA, 16 nt, Human
ucuuauaguucuaggc

SEQ ID NO: 1313577 - RNA, 15 nt, Human
ucuuaugcuguaccc

SEQ ID NO: 1313578 - RNA, 18 nt, Human
ucuuaugcuguacccagu

SEQ ID NO: 1313579 - RNA, 23 nt, Human
ucuuaugcuguacccaguuucua

SEQ ID NO: 1313580 - RNA, 17 nt, Human
ucuuucacauuuaaaua

SEQ ID NO: 1313581 - RNA, 18 nt, Human
ucuuucacagcuccuccc

SEQ ID NO: 1313582 - RNA, 19 nt, Human
ucuuucacagcuccuccca

SEQ ID NO: 1313583 - RNA, 20 nt, Human
ucuuucacagcuccucccac

SEQ ID NO: 1313584 - RNA, 19 nt, Human
ucuuuaaaagaugcuuuua

SEQ ID NO: 1313585 - RNA, 16 nt, Human
ucuuucaauacagaua

SEQ ID NO: 1313586 - RNA, 18 nt, Human
ucuuucaauacagauaua

SEQ ID NO: 1313587 - RNA, 19 nt, Human
ucuuucaauacagauauau

SEQ ID NO: 1313588 - RNA, 20 nt, Human
ucuuucaauacagauauauu

SEQ ID NO: 1313589 - RNA, 14 nt, Human
ucuuucacagcucc

SEQ ID NO: 1313590 - RNA, 15 nt, Human
ucuuucacagcuccu

SEQ ID NO: 1313591 - RNA, 19 nt, Human
ucuuuucuggaauguaauc

SEQ ID NO: 1313592 - RNA, 12 nt, Human
ucuuuucuuuac

SEQ ID NO: 1313593 - RNA, 19 nt, Human
ucuuuuguaagguuuuugu

SEQ ID NO: 1313594 - RNA, 22 nt, Human
ucuuuugguaaagacuggcuuu

SEQ ID NO: 1313595 - RNA, 20 nt, Human
ucuuuugguuaugaauacuu

SEQ ID NO: 1313596 - RNA, 13 nt, Human
ucuuuugccauga

SEQ ID NO: 1313597 - RNA, 23 nt, Human
ucuuuugccuuuugcaaccagga

SEQ ID NO: 1313598 - RNA, 13 nt, Human
ucuuuugcuuuug

SEQ ID NO: 1313599 - RNA, 19 nt, Human
ucuuuugcuuuugcccauu

SEQ ID NO: 1313600 - RNA, 18 nt, Human
ucuuuugcuuuuggcaaa

SEQ ID NO: 1313601 - RNA, 21 nt, Human
ucuuuuggaggacguacguaa

SEQ ID NO: 1313602 - RNA, 16 nt, Human
ucuuuuuucaaaagaa

SEQ ID NO: 1313603 - RNA, 13 nt, Human
ugaaaacucuuug

SEQ ID NO: 1313604 - RNA, 17 nt, Human
ugaaaacucuuugcugc

SEQ ID NO: 1313605 - RNA, 18 nt, Human
ugaaaacucuuugcugcu

SEQ ID NO: 1313606 - RNA, 19 nt, Human
ugaaaacuuuaugcuaagu

SEQ ID NO: 1313607 - RNA, 13 nt, Human
ugaaaacuuugua

SEQ ID NO: 1313608 - RNA, 16 nt, Human
ugaaaacuuuguagua

SEQ ID NO: 1313609 - RNA, 13 nt, Human
ugaaaagaauugu

SEQ ID NO: 1313610 - RNA, 14 nt, Human
ucuuuuugaaguau

SEQ ID NO: 1313611 - RNA, 17 nt, Human
ucuuuuugaaguauuua

SEQ ID NO: 1313612 - RNA, 15 nt, Human
ucuuuuugaaguauu

SEQ ID NO: 1313613 - RNA, 19 nt, Human
ucuuuuugggagagacuug

SEQ ID NO: 1313614 - RNA, 20 nt, Human
ucuuuuuguagcuggggcuu

SEQ ID NO: 1313615 - RNA, 19 nt, Human
ucuuuuuuaaaugaagaaa

SEQ ID NO: 1313616 - RNA, 22 nt, Human
ucuuuuugggagagacuuguuu

SEQ ID NO: 1313617 - RNA, 13 nt, Human
ugaaagauucaau

SEQ ID NO: 1313618 - RNA, 19 nt, Human
ugaaaggaagauaaacgug

SEQ ID NO: 1313619 - RNA, 12 nt, Human
ugaaaggaaauu

SEQ ID NO: 1313620 - RNA, 16 nt, Human
ugaaaggaaauuaagg

SEQ ID NO: 1313621 - RNA, 20 nt, Human
ugaaaggaaauuaaggcaac

SEQ ID NO: 1313622 - RNA, 23 nt, Human
ugaaagcagggacuugaacccau

SEQ ID NO: 1313623 - RNA, 19 nt, Human
ugaaagcagggacuugaac

SEQ ID NO: 1313624 - RNA, 18 nt, Human
ugaaagcagggacuugaa

SEQ ID NO: 1313625 - RNA, 21 nt, Human
ugaaagauggcugugccucug

SEQ ID NO: 1313626 - RNA, 22 nt, Human
ugaaagauggcugugccucugc

SEQ ID NO: 1313627 - RNA, 23 nt, Human
ugaaagauggcugugccucugcc

SEQ ID NO: 1313628 - RNA, 16 nt, Human
ugaaaagauaaauuau

SEQ ID NO: 1313629 - RNA, 12 nt, Human
ugaaaagagcug

SEQ ID NO: 1313630 - RNA, 15 nt, Human
ugaaaggacccugug

SEQ ID NO: 1313631 - RNA, 14 nt, Human
ugaaauccugcuuc

SEQ ID NO: 1313632 - RNA, 19 nt, Human
ugaaaugcagagucaauga

SEQ ID NO: 1313633 - RNA, 19 nt, Human
ugaaauggacuuuuguaca

SEQ ID NO: 1313634 - RNA, 19 nt, Human
ugaacacaaacuguaaaua

SEQ ID NO: 1313635 - RNA, 17 nt, Human
ugaacaccauugaaggc

SEQ ID NO: 1313636 - RNA, 20 nt, Human
ugaacaccauugaaggcuua

SEQ ID NO: 1313637 - RNA, 16 nt, Human
ugaacacgaagcuuag

SEQ ID NO: 1313638 - RNA, 13 nt, Human
ugaacagaacaua

SEQ ID NO: 1313639 - RNA, 17 nt, Human
ugaacauauuguugaaa

SEQ ID NO: 1313640 - RNA, 20 nt, Human
ugaacaucccuuuuucaaug

SEQ ID NO: 1313641 - RNA, 20 nt, Human
ugaacaucugaguccuggau

SEQ ID NO: 1313642 - RNA, 17 nt, Human
ugaacaucugaguccug

SEQ ID NO: 1313643 - RNA, 15 nt, Human
ugaacucuucacucu

SEQ ID NO: 1313644 - RNA, 14 nt, Human
ugaacugaacucug

SEQ ID NO: 1313645 - RNA, 13 nt, Human
ugaacugaacacc

SEQ ID NO: 1313646 - RNA, 14 nt, Human
ugaacugaacacca

SEQ ID NO: 1313647 - RNA, 12 nt, Human
ugaacugaacac

SEQ ID NO: 1313648 - RNA, 12 nt, Human
ugaacugauuca

SEQ ID NO: 1313649 - RNA, 17 nt, Human
ugaacugauucacaucu

SEQ ID NO: 1313650 - RNA, 20 nt, Human
ugaacugauucacaucucau

SEQ ID NO: 1313651 - RNA, 21 nt, Human
ugaacugauucacaucucauu

SEQ ID NO: 1313652 - RNA, 17 nt, Human
ugaacugaacucugaca

SEQ ID NO: 1313653 - RNA, 19 nt, Human
ugaacugaacucugacaac

SEQ ID NO: 1313654 - RNA, 22 nt, Human
ugaacugaacaccauugaaggc

SEQ ID NO: 1313655 - RNA, 19 nt, Human
ugaagagguuuuaaagcuu

SEQ ID NO: 1313656 - RNA, 15 nt, Human
ugaagauauuuuucc

SEQ ID NO: 1313657 - RNA, 17 nt, Human
ugaagauguagaggaga

SEQ ID NO: 1313658 - RNA, 22 nt, Human
ugaaggagaggcaacauccaaa

SEQ ID NO: 1313659 - RNA, 11 nt, Human
ugaaggagccc

SEQ ID NO: 1313660 - RNA, 22 nt, Human
ugaaggagccccauuccuggga

SEQ ID NO: 1313661 - RNA, 23 nt, Human
ugaaggagccccauuccugggaa

SEQ ID NO: 1313662 - RNA, 14 nt, Human
ugaagaucuaaaua

SEQ ID NO: 1313663 - RNA, 15 nt, Human
ugaagaucuaaauaa

SEQ ID NO: 1313664 - RNA, 22 nt, Human
ugaagaucuaaauaaaaugcua

SEQ ID NO: 1313665 - RNA, 20 nt, Human
ugaagaucuaaauaaaaugc

SEQ ID NO: 1313666 - RNA, 18 nt, Human
ugaagaugcuuuuugauc

SEQ ID NO: 1313667 - RNA, 21 nt, Human
ugaaguccaagcauuuagaug

SEQ ID NO: 1313668 - RNA, 22 nt, Human
ugaaguccaagcauuuagaugu

SEQ ID NO: 1313669 - RNA, 16 nt, Human
ugaaggcaaaauugca

SEQ ID NO: 1313670 - RNA, 17 nt, Human
ugaaggcaaaauugcaa

SEQ ID NO: 1313671 - RNA, 18 nt, Human
ugaaggcaaaauugcaaa

SEQ ID NO: 1313672 - RNA, 20 nt, Human
ugaaggccuucaacccgaga

SEQ ID NO: 1313673 - RNA, 14 nt, Human
ugaaggcaaaauug

SEQ ID NO: 1313674 - RNA, 22 nt, Human
ugaacuuguaaaggaauuuaaa

SEQ ID NO: 1313675 - RNA, 15 nt, Human
ugaagaccuuuuucu

SEQ ID NO: 1313676 - RNA, 23 nt, Human
ugaagacuuacagcaaauccuuu

SEQ ID NO: 1313677 - RNA, 17 nt, Human
ugaagaggaggggaaga

SEQ ID NO: 1313678 - RNA, 23 nt, Human
ugaagaggaggggaagaggccug

SEQ ID NO: 1313679 - RNA, 18 nt, Human
ugaagaccuuuuucugca

SEQ ID NO: 1313680 - RNA, 18 nt, Human
ugaagacuggaagcuaau

SEQ ID NO: 1313681 - RNA, 17 nt, Human
ugaacuugcauugugau

SEQ ID NO: 1313682 - RNA, 12 nt, Human
ugaagacauaaa

SEQ ID NO: 1313683 - RNA, 10 nt, Human
ucggaccagc

SEQ ID NO: 1313684 - RNA, 19 nt, Human
ucggacaagacccccagca

SEQ ID NO: 1313685 - RNA, 21 nt, Human
ucggacaagacccccagcacu

SEQ ID NO: 1313686 - RNA, 17 nt, Human
ucgcuucuugccucugu

SEQ ID NO: 1313687 - RNA, 15 nt, Human
ucggaaaucuuaaac

SEQ ID NO: 1313688 - RNA, 19 nt, Human
ucgcuucuugccucugugc

SEQ ID NO: 1313689 - RNA, 16 nt, Human
ucgcuucauguaacua

SEQ ID NO: 1313690 - RNA, 14 nt, Human
ucgcuucuugccuc

SEQ ID NO: 1313691 - RNA, 15 nt, Human
ucgcuucuugccucu

SEQ ID NO: 1313692 - RNA, 16 nt, Human
ucgcuucuugccucug

SEQ ID NO: 1313693 - RNA, 17 nt, Human
ucgcaauguaagacucg

SEQ ID NO: 1313694 - RNA, 15 nt, Human
ucgauuucuccagga

SEQ ID NO: 1313695 - RNA, 20 nt, Human
ucgcaacccgugccaagucc

SEQ ID NO: 1313696 - RNA, 16 nt, Human
ucgcaccauucugacu

SEQ ID NO: 1313697 - RNA, 17 nt, Human
ucgcaccauucugacuc

SEQ ID NO: 1313698 - RNA, 10 nt, Human
ucgcagccac

SEQ ID NO: 1313699 - RNA, 12 nt, Human
ucgcagccaccc

SEQ ID NO: 1313700 - RNA, 12 nt, Human
ucgcccaggcug

SEQ ID NO: 1313701 - RNA, 14 nt, Human
ucgcccaggcugga

SEQ ID NO: 1313702 - RNA, 21 nt, Human
ucgcccagcggcaucaggcuu

SEQ ID NO: 1313703 - RNA, 19 nt, Human
ucgcccaggcuggagugca

SEQ ID NO: 1313704 - RNA, 14 nt, Human
ucgagugagacaga

SEQ ID NO: 1313705 - RNA, 23 nt, Human
ucgagugagacagacuagaaguu

SEQ ID NO: 1313706 - RNA, 15 nt, Human
ucgaguucccagggu

SEQ ID NO: 1313707 - RNA, 14 nt, Human
ucgauacugcgacu

SEQ ID NO: 1313708 - RNA, 19 nt, Human
ucgauacugcgacuuucug

SEQ ID NO: 1313709 - RNA, 17 nt, Human
uccuuuuuccaacaaga

SEQ ID NO: 1313710 - RNA, 15 nt, Human
uccuuuuuccaacaa

SEQ ID NO: 1313711 - RNA, 12 nt, Human
uccuuuuuccuc

SEQ ID NO: 1313712 - RNA, 21 nt, Human
uccuuuuuccucuccacacag

SEQ ID NO: 1313713 - RNA, 16 nt, Human
uccuuuuuccucucca

SEQ ID NO: 1313714 - RNA, 23 nt, Human
uccuuuuuggucgaggaguaaca

SEQ ID NO: 1313715 - RNA, 12 nt, Human
uccuuuuuuucc

SEQ ID NO: 1313716 - RNA, 21 nt, Human
uccuuuuuuuccaucuuuaca

SEQ ID NO: 1313717 - RNA, 14 nt, Human
uccuuuuuuuguac

SEQ ID NO: 1313718 - RNA, 14 nt, Human
ucgaaaaucaaaug

SEQ ID NO: 1313719 - RNA, 13 nt, Human
ucgaaacacagaa

SEQ ID NO: 1313720 - RNA, 14 nt, Human
uccuuuuggaguca

SEQ ID NO: 1313721 - RNA, 23 nt, Human
uccuuuuggagucagacagaugu

SEQ ID NO: 1313722 - RNA, 12 nt, Human
uccuuuuuaaua

SEQ ID NO: 1313723 - RNA, 17 nt, Human
uccuuuuuaauaugcuu

SEQ ID NO: 1313724 - RNA, 17 nt, Human
uccuuggccaugcagaa

SEQ ID NO: 1313725 - RNA, 23 nt, Human
uccuuggccugcuaaggucuugg

SEQ ID NO: 1313726 - RNA, 13 nt, Human
uccuugggcccuu

SEQ ID NO: 1313727 - RNA, 14 nt, Human
uccuugggcccuuu

SEQ ID NO: 1313728 - RNA, 16 nt, Human
uccuugggcccuuuga

SEQ ID NO: 1313729 - RNA, 21 nt, Human
uccuggugguauuuucaauag

SEQ ID NO: 1313730 - RNA, 18 nt, Human
uccuggugguauuuucaa

SEQ ID NO: 1313731 - RNA, 19 nt, Human
uccuggugguauuuucaau

SEQ ID NO: 1313732 - RNA, 12 nt, Human
uccuggugcugg

SEQ ID NO: 1313733 - RNA, 14 nt, Human
uccuggugcuggag

SEQ ID NO: 1313734 - RNA, 13 nt, Human
uccugguggggca

SEQ ID NO: 1313735 - RNA, 16 nt, Human
uccugguggggcagcu

SEQ ID NO: 1313736 - RNA, 17 nt, Human
uccugguggggcagcuc

SEQ ID NO: 1313737 - RNA, 19 nt, Human
uccugguggggcagcuccu

SEQ ID NO: 1313738 - RNA, 21 nt, Human
uccugguggggcagcuccucu

SEQ ID NO: 1313739 - RNA, 16 nt, Human
uccuggugguauuuuc

SEQ ID NO: 1313740 - RNA, 21 nt, Human
uccuguaggaagguacuguau

SEQ ID NO: 1313741 - RNA, 19 nt, Human
uccuguauaccuccuccag

SEQ ID NO: 1313742 - RNA, 16 nt, Human
uccuguauucagacag

SEQ ID NO: 1313743 - RNA, 17 nt, Human
uccuguauucagacaga

SEQ ID NO: 1313744 - RNA, 20 nt, Human
uccuguauucagacagauga

SEQ ID NO: 1313745 - RNA, 22 nt, Human
uccuguaggaagguacuguaug

SEQ ID NO: 1313746 - RNA, 20 nt, Human
uccuguaggaagguacugua

SEQ ID NO: 1313747 - RNA, 19 nt, Human
uccuguaaagguuacaagc

SEQ ID NO: 1313748 - RNA, 15 nt, Human
uccugguucccguuu

SEQ ID NO: 1313749 - RNA, 21 nt, Human
uccugguucccguuucuccac

SEQ ID NO: 1313750 - RNA, 23 nt, Human
uccugguucccguuucuccaccu

SEQ ID NO: 1313751 - RNA, 13 nt, Human
uccuggcccagcc

SEQ ID NO: 1313752 - RNA, 14 nt, Human
uccuggcccagccu

SEQ ID NO: 1313753 - RNA, 15 nt, Human
uccuggcccagccuu

SEQ ID NO: 1313754 - RNA, 17 nt, Human
uccuggucaccuaggaa

SEQ ID NO: 1313755 - RNA, 20 nt, Human
uccuggucaccuaggaagcc

SEQ ID NO: 1313756 - RNA, 21 nt, Human
uccuggucaccuaggaagccu

SEQ ID NO: 1313757 - RNA, 20 nt, Human
uccuggugccaauuucaagu

SEQ ID NO: 1313758 - RNA, 21 nt, Human
uccuggugccaauuucaaguu

SEQ ID NO: 1313759 - RNA, 13 nt, Human
uccuggugccacc

SEQ ID NO: 1313760 - RNA, 15 nt, Human
uccuggugccaccuc

SEQ ID NO: 1313761 - RNA, 14 nt, Human
uccuggugccaccu

SEQ ID NO: 1313762 - RNA, 22 nt, Human
uccuugauuuaucacacaaagc

SEQ ID NO: 1313763 - RNA, 22 nt, Human
uccuugauuuuagccuucucug

SEQ ID NO: 1313764 - RNA, 23 nt, Human
uccuugauuuuagccuucucugu

SEQ ID NO: 1313765 - RNA, 21 nt, Human
uccuuacaaguuagaaaacau

SEQ ID NO: 1313766 - RNA, 22 nt, Human
uccuuacaaguuagaaaacaua

SEQ ID NO: 1313767 - RNA, 16 nt, Human
uccuucaaagcaaaug

SEQ ID NO: 1313768 - RNA, 21 nt, Human
uccuucaaaguuuaauaaauu

SEQ ID NO: 1313769 - RNA, 18 nt, Human
uccuucaacaauucuaaa

SEQ ID NO: 1313770 - RNA, 20 nt, Human
uccuucaacaauucuaaaau

SEQ ID NO: 1313771 - RNA, 16 nt, Human
uccuuaaggcucuuuu

SEQ ID NO: 1313772 - RNA, 22 nt, Human
uccugucaucaucauggccagc

SEQ ID NO: 1313773 - RNA, 21 nt, Human
uccuguauucagacagaugag

SEQ ID NO: 1313774 - RNA, 17 nt, Human
uccuguauuuguuccca

SEQ ID NO: 1313775 - RNA, 19 nt, Human
uccuguauuuguucccaag

SEQ ID NO: 1313776 - RNA, 20 nt, Human
uccuguauuuguucccaaga

SEQ ID NO: 1313777 - RNA, 22 nt, Human
uccuguauuuguucccaagagc

SEQ ID NO: 1313778 - RNA, 21 nt, Human
uccuguauuuguucccaagag

SEQ ID NO: 1313779 - RNA, 19 nt, Human
uccuuaaggcucuuuugua

SEQ ID NO: 1313780 - RNA, 17 nt, Human
uccuuaagucagaacag

SEQ ID NO: 1313781 - RNA, 16 nt, Human
ucuaaauucuuucauu

SEQ ID NO: 1313782 - RNA, 18 nt, Human
ucggacuuagcugggaga

SEQ ID NO: 1313783 - RNA, 21 nt, Human
ucuaaauguaguucugcucca

SEQ ID NO: 1313784 - RNA, 12 nt, Human
ucuaacaaguca

SEQ ID NO: 1313785 - RNA, 19 nt, Human
ucuaacccuauacuguagu

SEQ ID NO: 1313786 - RNA, 21 nt, Human
ucuacacuaagagagaaugag

SEQ ID NO: 1313787 - RNA, 13 nt, Human
ucuaaccucaucu

SEQ ID NO: 1313788 - RNA, 18 nt, Human
ucuaaccucaucuucuuc

SEQ ID NO: 1313789 - RNA, 20 nt, Human
ucuaaccucaucuucuucac

SEQ ID NO: 1313790 - RNA, 14 nt, Human
ucuaaccuuuacau

SEQ ID NO: 1313791 - RNA, 16 nt, Human
ucuaaccuuuacauga

SEQ ID NO: 1313792 - RNA, 22 nt, Human
ucuaaccuuuacaugaggacuc

SEQ ID NO: 1313793 - RNA, 13 nt, Human
ucuaacgccugag

SEQ ID NO: 1313794 - RNA, 14 nt, Human
ucuaacgccugagc

SEQ ID NO: 1313795 - RNA, 15 nt, Human
ucuaacgccugagcc

SEQ ID NO: 1313796 - RNA, 16 nt, Human
ucuaacgccugagccc

SEQ ID NO: 1313797 - RNA, 21 nt, Human
ucuaacgccugagcccaggga

SEQ ID NO: 1313798 - RNA, 23 nt, Human
ucuaacgccugagcccagggagg

SEQ ID NO: 1313799 - RNA, 17 nt, Human
ucuaacggucuguucug

SEQ ID NO: 1313800 - RNA, 22 nt, Human
ucuaacggucuguucuguuuca

SEQ ID NO: 1313801 - RNA, 17 nt, Human
ucuaacuacaaagguuu

SEQ ID NO: 1313802 - RNA, 15 nt, Human
ucuaacuacaaaggu

SEQ ID NO: 1313803 - RNA, 13 nt, Human
ucuaacucagcaa

SEQ ID NO: 1313804 - RNA, 17 nt, Human
ucuacacuccagugaga

SEQ ID NO: 1313805 - RNA, 19 nt, Human
ucuacacucuuguaauaaa

SEQ ID NO: 1313806 - RNA, 19 nt, Human
ucuacugggaaggcuacuu

SEQ ID NO: 1313807 - RNA, 22 nt, Human
ucuagaaucugcaauucaaaag

SEQ ID NO: 1313808 - RNA, 23 nt, Human
ucuagaaucugcaauucaaaagu

SEQ ID NO: 1313809 - RNA, 15 nt, Human
ucucaacuccaaacu

SEQ ID NO: 1313810 - RNA, 18 nt, Human
ucucagaaugucauuuug

SEQ ID NO: 1313811 - RNA, 11 nt, Human
ucucagaaagu

SEQ ID NO: 1313812 - RNA, 17 nt, Human
ucucagaaagugccuga

SEQ ID NO: 1313813 - RNA, 19 nt, Human
ucucagaaagugccugaca

SEQ ID NO: 1313814 - RNA, 21 nt, Human
ucucagaaagugccugacaca

SEQ ID NO: 1313815 - RNA, 12 nt, Human
ucucagaauccc

SEQ ID NO: 1313816 - RNA, 21 nt, Human
ucucagaaucccuuaacaguu

SEQ ID NO: 1313817 - RNA, 16 nt, Human
ucucaaacuccugacc

SEQ ID NO: 1313818 - RNA, 21 nt, Human
ucucaaacuccugaccucagg

SEQ ID NO: 1313819 - RNA, 23 nt, Human
ucucaaacuccugaccucaggca

SEQ ID NO: 1313820 - RNA, 21 nt, Human
ucucaacaccaugauuccuuu

SEQ ID NO: 1313821 - RNA, 14 nt, Human
ucucaacacccagu

SEQ ID NO: 1313822 - RNA, 19 nt, Human
ucucaacacccaguuuccu

SEQ ID NO: 1313823 - RNA, 23 nt, Human
ucucaacacccaguuuccuuggg

SEQ ID NO: 1313824 - RNA, 16 nt, Human
ucucaacaggccucag

SEQ ID NO: 1313825 - RNA, 17 nt, Human
ucucaacaggccucagg

SEQ ID NO: 1313826 - RNA, 18 nt, Human
ucucaacaggccucaggg

SEQ ID NO: 1313827 - RNA, 19 nt, Human
ucucaacaggccucagggc

SEQ ID NO: 1313828 - RNA, 23 nt, Human
ucucaacaggccucagggcuccu

SEQ ID NO: 1313829 - RNA, 20 nt, Human
ucucaacaggccucagggcu

SEQ ID NO: 1313830 - RNA, 23 nt, Human
ucuaggguacauggugcugggag

SEQ ID NO: 1313831 - RNA, 20 nt, Human
ucuaggguacauggugcugg

SEQ ID NO: 1313832 - RNA, 15 nt, Human
ucuagguuucaaaga

SEQ ID NO: 1313833 - RNA, 17 nt, Human
ucuagguuucaaagaug

SEQ ID NO: 1313834 - RNA, 19 nt, Human
ucuagguuucaaagaugcu

SEQ ID NO: 1313835 - RNA, 20 nt, Human
ucuagguuucaaagaugcug

SEQ ID NO: 1313836 - RNA, 17 nt, Human
ucuagguuuuacagauu

SEQ ID NO: 1313837 - RNA, 22 nt, Human
ucuaguacuugggagaccugua

SEQ ID NO: 1313838 - RNA, 24 nt, Human
ucuaguauuccagaccugaagaau

SEQ ID NO: 1313839 - RNA, 14 nt, Human
ucuagucaaugaca

SEQ ID NO: 1313840 - RNA, 20 nt, Human
ucuagucaaugacaugaauu

SEQ ID NO: 1313841 - RNA, 22 nt, Human
ucuagucaaugacaugaauuuu

SEQ ID NO: 1313842 - RNA, 14 nt, Human
ucucaguugcagcc

SEQ ID NO: 1313843 - RNA, 15 nt, Human
ucuccccccgccugc

SEQ ID NO: 1313844 - RNA, 18 nt, Human
ucuccccugcccccugca

SEQ ID NO: 1313845 - RNA, 21 nt, Human
ucuccccugcccccugcagga

SEQ ID NO: 1313846 - RNA, 19 nt, Human
ucuccccugcccccugcag

SEQ ID NO: 1313847 - RNA, 20 nt, Human
ucucccggagguuggguggg

SEQ ID NO: 1313848 - RNA, 18 nt, Human
ucucaguguugagccuuu

SEQ ID NO: 1313849 - RNA, 22 nt, Human
ucucaguguugagccuuuuccc

SEQ ID NO: 1313850 - RNA, 20 nt, Human
ucucagugaagacuaugaaa

SEQ ID NO: 1313851 - RNA, 21 nt, Human
ucucagugucaaugcagcccc

SEQ ID NO: 1313852 - RNA, 15 nt, Human
ucucaggucccugca

SEQ ID NO: 1313853 - RNA, 20 nt, Human
ucucaguaccccauggagcu

SEQ ID NO: 1313854 - RNA, 16 nt, Human
ucucagugaagacuau

SEQ ID NO: 1313855 - RNA, 12 nt, Human
ucuccugccuca

SEQ ID NO: 1313856 - RNA, 16 nt, Human
ucuccugccuuccucc

SEQ ID NO: 1313857 - RNA, 17 nt, Human
ucuccugccuuccuccu

SEQ ID NO: 1313858 - RNA, 18 nt, Human
ucuccugccuuccuccug

SEQ ID NO: 1313859 - RNA, 20 nt, Human
ucuccugccuuccuccuggg

SEQ ID NO: 1313860 - RNA, 23 nt, Human
ucuccuggcuucccauccccagc

SEQ ID NO: 1313861 - RNA, 16 nt, Human
ucuccugccuugaaaa

SEQ ID NO: 1313862 - RNA, 22 nt, Human
ucucccugagaugggcuuccca

SEQ ID NO: 1313863 - RNA, 13 nt, Human
ucucccugcaugg

SEQ ID NO: 1313864 - RNA, 14 nt, Human
ucucccugcauggc

SEQ ID NO: 1313865 - RNA, 15 nt, Human
ucucucgugaguaua

SEQ ID NO: 1313866 - RNA, 13 nt, Human
ucucucuaugccu

SEQ ID NO: 1313867 - RNA, 22 nt, Human
ucucucucacucccucccuuuc

SEQ ID NO: 1313868 - RNA, 11 nt, Human
ucucucugugg

SEQ ID NO: 1313869 - RNA, 18 nt, Human
ucucuauccucucuuccu

SEQ ID NO: 1313870 - RNA, 14 nt, Human
ucucuauguaucaa

SEQ ID NO: 1313871 - RNA, 15 nt, Human
ucucuauguaucaaa

SEQ ID NO: 1313872 - RNA, 16 nt, Human
ucucuauguaucaaau

SEQ ID NO: 1313873 - RNA, 13 nt, Human
ucucuaugccucu

SEQ ID NO: 1313874 - RNA, 13 nt, Human
ucucucaacacca

SEQ ID NO: 1313875 - RNA, 19 nt, Human
ucucucaacaccaugauuc

SEQ ID NO: 1313876 - RNA, 22 nt, Human
ucucucaacaccaugauuccuu

SEQ ID NO: 1313877 - RNA, 15 nt, Human
ucucucggcucccca

SEQ ID NO: 1313878 - RNA, 20 nt, Human
ucucucggcuccccaugugu

SEQ ID NO: 1313879 - RNA, 23 nt, Human
ucucucggcuccccauguguccu

SEQ ID NO: 1313880 - RNA, 19 nt, Human
ucucugauuuucaaagcuu

SEQ ID NO: 1313881 - RNA, 20 nt, Human
ucucugauuuucaaagcuuu

SEQ ID NO: 1313882 - RNA, 17 nt, Human
ucucugacuucugccug

SEQ ID NO: 1313883 - RNA, 18 nt, Human
ucucugacuucugccugg

SEQ ID NO: 1313884 - RNA, 19 nt, Human
ucucugacuucugccugga

SEQ ID NO: 1313885 - RNA, 14 nt, Human
ucucugagcaguga

SEQ ID NO: 1313886 - RNA, 15 nt, Human
ucucugagcugugca

SEQ ID NO: 1313887 - RNA, 16 nt, Human
ucucugagcugugcag

SEQ ID NO: 1313888 - RNA, 16 nt, Human
ucucucuuuauacagc

SEQ ID NO: 1313889 - RNA, 12 nt, Human
ucucucuucucu

SEQ ID NO: 1313890 - RNA, 17 nt, Human
ucucucuuuauacagcu

SEQ ID NO: 1313891 - RNA, 12 nt, Human
ucucugaacaca

SEQ ID NO: 1313892 - RNA, 20 nt, Human
ucucucuuugcauggauuuc

SEQ ID NO: 1313893 - RNA, 14 nt, Human
ucucugacuucugc

SEQ ID NO: 1313894 - RNA, 16 nt, Human
ucucugacuucugccu

SEQ ID NO: 1313895 - RNA, 19 nt, Human
ucucuauaccaauaaagug

SEQ ID NO: 1313896 - RNA, 17 nt, Human
ucucuauaccaauaaag

SEQ ID NO: 1313897 - RNA, 16 nt, Human
ucucuauaccaauaaa

SEQ ID NO: 1313898 - RNA, 14 nt, Human
ucucuauaccaaua

SEQ ID NO: 1313899 - RNA, 13 nt, Human
ucucuaggaaaua

SEQ ID NO: 1313900 - RNA, 19 nt, Human
ucucuaggaaauauuuauu

SEQ ID NO: 1313901 - RNA, 15 nt, Human
ucucuaauucuauua

SEQ ID NO: 1313902 - RNA, 13 nt, Human
ucucuacaaaccc

SEQ ID NO: 1313903 - RNA, 18 nt, Human
ucucuaauucuuccuuug

SEQ ID NO: 1313904 - RNA, 18 nt, Human
ucucuacagucucgucuc

SEQ ID NO: 1313905 - RNA, 21 nt, Human
ucucuacagucucgucucuuu

SEQ ID NO: 1313906 - RNA, 22 nt, Human
ucucuacagucucgucucuuuu

SEQ ID NO: 1313907 - RNA, 20 nt, Human
ucucuaccacugcugauauu

SEQ ID NO: 1313908 - RNA, 14 nt, Human
ucucuaccuucucc

SEQ ID NO: 1313909 - RNA, 16 nt, Human
ucucuaccuucucccc

SEQ ID NO: 1313910 - RNA, 18 nt, Human
ucucuaccuucuccccag

SEQ ID NO: 1313911 - RNA, 23 nt, Human
ucucuaccuucuccccagcuccc

SEQ ID NO: 1313912 - RNA, 22 nt, Human
ucucuacugaaugucauugaaa

SEQ ID NO: 1313913 - RNA, 19 nt, Human
ucucuaccuucuccccagc

SEQ ID NO: 1313914 - RNA, 20 nt, Human
ucucuucugaauaaagcaau

SEQ ID NO: 1313915 - RNA, 19 nt, Human
ucucuucugaauaaagcaa

SEQ ID NO: 1313916 - RNA, 23 nt, Human
ucucuucucuccagcugacuaaa

SEQ ID NO: 1313917 - RNA, 13 nt, Human
ucucuuugccuca

SEQ ID NO: 1313918 - RNA, 12 nt, Human
ucucuucucucc

SEQ ID NO: 1313919 - RNA, 14 nt, Human
ucucuucucuccag

SEQ ID NO: 1313920 - RNA, 15 nt, Human
ucucuucucuccagc

SEQ ID NO: 1313921 - RNA, 16 nt, Human
ucucuucucuccagcu

SEQ ID NO: 1313922 - RNA, 11 nt, Human
ucucuucucca

SEQ ID NO: 1313923 - RNA, 20 nt, Human
ucucuuccuuuuaucaguag

SEQ ID NO: 1313924 - RNA, 22 nt, Human
ucucuuccucuucccccaagau

SEQ ID NO: 1313925 - RNA, 13 nt, Human
ucucuucuccacu

SEQ ID NO: 1313926 - RNA, 14 nt, Human
ucucuucuccacug

SEQ ID NO: 1313927 - RNA, 15 nt, Human
ucucuucuccacugg

SEQ ID NO: 1313928 - RNA, 16 nt, Human
ucucuucuccacugga

SEQ ID NO: 1313929 - RNA, 11 nt, Human
ucucugcaggu

SEQ ID NO: 1313930 - RNA, 20 nt, Human
ucucuuauggauguccccag

SEQ ID NO: 1313931 - RNA, 15 nt, Human
ucucuuauugccuca

SEQ ID NO: 1313932 - RNA, 16 nt, Human
ucucuuauugccucac

SEQ ID NO: 1313933 - RNA, 19 nt, Human
ucucugcaaacugccuucu

SEQ ID NO: 1313934 - RNA, 17 nt, Human
ucucugcaaacugccuu

SEQ ID NO: 1313935 - RNA, 20 nt, Human
ucucugcagacuucccagcu

SEQ ID NO: 1313936 - RNA, 15 nt, Human
ucucugcagacuucc

SEQ ID NO: 1313937 - RNA, 17 nt, Human
ucucuucagucucuaua

SEQ ID NO: 1313938 - RNA, 13 nt, Human
ucucuucagucuc

SEQ ID NO: 1313939 - RNA, 22 nt, Human
ucucuuauugccucacuucagg

SEQ ID NO: 1313940 - RNA, 18 nt, Human
ucucuucacagucacauu

SEQ ID NO: 1313941 - RNA, 14 nt, Human
ucugaaauuuccug

SEQ ID NO: 1313942 - RNA, 13 nt, Human
ucugaaaugaaga

SEQ ID NO: 1313943 - RNA, 12 nt, Human
ucugaacucaaa

SEQ ID NO: 1313944 - RNA, 14 nt, Human
ucugaacucaaacu

SEQ ID NO: 1313945 - RNA, 16 nt, Human
ucugaacucaaacuga

SEQ ID NO: 1313946 - RNA, 17 nt, Human
ucugaacucaaacugag

SEQ ID NO: 1313947 - RNA, 21 nt, Human
ucugaacucaaacugaggaau

SEQ ID NO: 1313948 - RNA, 14 nt, Human
ucucuuugccucaa

SEQ ID NO: 1313949 - RNA, 18 nt, Human
ucucuuuuugcuuucgaa

SEQ ID NO: 1313950 - RNA, 14 nt, Human
ucugaggacaagag

SEQ ID NO: 1313951 - RNA, 17 nt, Human
ucugaggacaagagaaa

SEQ ID NO: 1313952 - RNA, 19 nt, Human
ucugagcugucaacgagac

SEQ ID NO: 1313953 - RNA, 10 nt, Human
ucugagcugu

SEQ ID NO: 1313954 - RNA, 22 nt, Human
ucugagcauuagauuucucauu

SEQ ID NO: 1313955 - RNA, 19 nt, Human
ucugagcagugaaugauuc

SEQ ID NO: 1313956 - RNA, 20 nt, Human
ucugagcuccuguccccugc

SEQ ID NO: 1313957 - RNA, 12 nt, Human
ucugagcuccug

SEQ ID NO: 1313958 - RNA, 21 nt, Human
ucugcaauuccccucugcugc

SEQ ID NO: 1313959 - RNA, 22 nt, Human
ucugcaauuccccucugcugcu

SEQ ID NO: 1313960 - RNA, 16 nt, Human
ucugauugugauguga

SEQ ID NO: 1313961 - RNA, 23 nt, Human
ucugcaauucaaaaguuccaaga

SEQ ID NO: 1313962 - RNA, 16 nt, Human
ucugcaauuccccucu

SEQ ID NO: 1313963 - RNA, 18 nt, Human
ucugcaauuccccucugc

SEQ ID NO: 1313964 - RNA, 20 nt, Human
ucugcaauuccccucugcug

SEQ ID NO: 1313965 - RNA, 18 nt, Human
ucugaggacaagagaaaa

SEQ ID NO: 1313966 - RNA, 19 nt, Human
ucugauucgaaugacacug

SEQ ID NO: 1313967 - RNA, 22 nt, Human
ucugauucgaaugacacuguuc

SEQ ID NO: 1313968 - RNA, 20 nt, Human
ucugauucgaaugacacugu

SEQ ID NO: 1313969 - RNA, 19 nt, Human
ucugacccagugcccccac

SEQ ID NO: 1313970 - RNA, 22 nt, Human
ucugacccagugcccccacuga

SEQ ID NO: 1313971 - RNA, 23 nt, Human
ucugacccagugcccccacugac

SEQ ID NO: 1313972 - RNA, 22 nt, Human
ucugagaucuguugauugauga

SEQ ID NO: 1313973 - RNA, 18 nt, Human
ucugagauggcucccagg

SEQ ID NO: 1313974 - RNA, 19 nt, Human
ucugagauggcucccaggg

SEQ ID NO: 1313975 - RNA, 22 nt, Human
ucugagauggcucccaggggcu

SEQ ID NO: 1313976 - RNA, 20 nt, Human
ucugagcauuagauuucuca

SEQ ID NO: 1313977 - RNA, 17 nt, Human
ucugagcagcgagccug

SEQ ID NO: 1313978 - RNA, 18 nt, Human
ucugagcagcgagccugc

SEQ ID NO: 1313979 - RNA, 19 nt, Human
ucugagcagcgagccugcu

SEQ ID NO: 1313980 - RNA, 21 nt, Human
ucugagcagcgagccugcuag

SEQ ID NO: 1313981 - RNA, 22 nt, Human
ucugagcacuguuuauacacug

SEQ ID NO: 1313982 - RNA, 19 nt, Human
ucugaacuugcauugugau

SEQ ID NO: 1313983 - RNA, 18 nt, Human
ucugaacuugcauuguga

SEQ ID NO: 1313984 - RNA, 22 nt, Human
ucugacauuaugugguuuuaga

SEQ ID NO: 1313985 - RNA, 23 nt, Human
ucugacauuaugugguuuuagau

SEQ ID NO: 1313986 - RNA, 13 nt, Human
ucugacccagugc

SEQ ID NO: 1313987 - RNA, 14 nt, Human
ucugacccagugcc

SEQ ID NO: 1313988 - RNA, 15 nt, Human
ucugacccagugccc

SEQ ID NO: 1313989 - RNA, 17 nt, Human
ucugacauucugauucg

SEQ ID NO: 1313990 - RNA, 11 nt, Human
ucugacccagu

SEQ ID NO: 1313991 - RNA, 21 nt, Human
ucagcacuuuagaauaugccu

SEQ ID NO: 1313992 - RNA, 14 nt, Human
ucagcacuuggccc

SEQ ID NO: 1313993 - RNA, 16 nt, Human
ucagcacuuggcccuu

SEQ ID NO: 1313994 - RNA, 17 nt, Human
ucagcagccucccugaa

SEQ ID NO: 1313995 - RNA, 12 nt, Human
ucaguugcagcc

SEQ ID NO: 1313996 - RNA, 17 nt, Human
ucaguugauuuucugga

SEQ ID NO: 1313997 - RNA, 18 nt, Human
ucaguugauuuucuggau

SEQ ID NO: 1313998 - RNA, 15 nt, Human
ucaguugugacuaac

SEQ ID NO: 1313999 - RNA, 15 nt, Human
ucaguuacucuucag

SEQ ID NO: 1314000 - RNA, 15 nt, Human
ucauaauuauuauuu

SEQ ID NO: 1314001 - RNA, 13 nt, Human
ucaguugucucug

SEQ ID NO: 1314002 - RNA, 19 nt, Human
ucauaauggggguaaaguu

SEQ ID NO: 1314003 - RNA, 23 nt, Human
ucauaauugcauugacuuucccc

SEQ ID NO: 1314004 - RNA, 19 nt, Human
ucauaauugcauugacuuu

SEQ ID NO: 1314005 - RNA, 15 nt, Human
ucauacagagaaguc

SEQ ID NO: 1314006 - RNA, 16 nt, Human
ucauacagagaaguca

SEQ ID NO: 1314007 - RNA, 17 nt, Human
ucauacagagaagucac

SEQ ID NO: 1314008 - RNA, 14 nt, Human
ucauacauuuucua

SEQ ID NO: 1314009 - RNA, 13 nt, Human
ucauacacagaaa

SEQ ID NO: 1314010 - RNA, 11 nt, Human
ucauacagaga

SEQ ID NO: 1314011 - RNA, 12 nt, Human
ucauacagagaa

SEQ ID NO: 1314012 - RNA, 13 nt, Human
ucauacagagaag

SEQ ID NO: 1314013 - RNA, 14 nt, Human
ucauacagagaagu

SEQ ID NO: 1314014 - RNA, 23 nt, Human
ucauacagagaagucacagggca

SEQ ID NO: 1314015 - RNA, 15 nt, Human
ucauguaauccucaa

SEQ ID NO: 1314016 - RNA, 18 nt, Human
ucauguaagcugaaaaua

SEQ ID NO: 1314017 - RNA, 19 nt, Human
ucauguaagcugaaaauau

SEQ ID NO: 1314018 - RNA, 22 nt, Human
ucauuauuuauguauugugcaa

SEQ ID NO: 1314019 - RNA, 19 nt, Human
ucauguaaauaauacauua

SEQ ID NO: 1314020 - RNA, 18 nt, Human
ucauguaaauaauacauu

SEQ ID NO: 1314021 - RNA, 20 nt, Human
ucauguaacuucccugaaaa

SEQ ID NO: 1314022 - RNA, 13 nt, Human
ucauguaaacugu

SEQ ID NO: 1314023 - RNA, 14 nt, Human
ucauguaaacugug

SEQ ID NO: 1314024 - RNA, 17 nt, Human
ucauguaaacugugcac

SEQ ID NO: 1314025 - RNA, 16 nt, Human
ucauguaaacugugca

SEQ ID NO: 1314026 - RNA, 13 nt, Human
ucauguaaauaau

SEQ ID NO: 1314027 - RNA, 16 nt, Human
ucaugccccuggcugg

SEQ ID NO: 1314028 - RNA, 15 nt, Human
ucaugcccugugcaa

SEQ ID NO: 1314029 - RNA, 13 nt, Human
ucaugccucugag

SEQ ID NO: 1314030 - RNA, 14 nt, Human
ucaugccucugagg

SEQ ID NO: 1314031 - RNA, 15 nt, Human
ucaugccucugaggc

SEQ ID NO: 1314032 - RNA, 16 nt, Human
ucaugccucugaggcc

SEQ ID NO: 1314033 - RNA, 21 nt, Human
ucaugccucugaggccagccu

SEQ ID NO: 1314034 - RNA, 22 nt, Human
ucaugccucugaggccagccug

SEQ ID NO: 1314035 - RNA, 22 nt, Human
ucaugcuaauuauauaauauuu

SEQ ID NO: 1314036 - RNA, 15 nt, Human
ucaugcuaucucugu

SEQ ID NO: 1314037 - RNA, 21 nt, Human
ucauacauuuucuaagaaaca

SEQ ID NO: 1314038 - RNA, 15 nt, Human
ucauaccaaugaaaa

SEQ ID NO: 1314039 - RNA, 14 nt, Human
ucauaggucugaaa

SEQ ID NO: 1314040 - RNA, 15 nt, Human
ucauaggucugaaau

SEQ ID NO: 1314041 - RNA, 22 nt, Human
ucauaggucugaaauuuuucuu

SEQ ID NO: 1314042 - RNA, 16 nt, Human
ucauaggucugaaauu

SEQ ID NO: 1314043 - RNA, 14 nt, Human
ucauaguaacuucu

SEQ ID NO: 1314044 - RNA, 15 nt, Human
ucauaguaacuucuu

SEQ ID NO: 1314045 - RNA, 16 nt, Human
ucauaguaacuucuua

SEQ ID NO: 1314046 - RNA, 18 nt, Human
ucauaguaacuucuuaug

SEQ ID NO: 1314047 - RNA, 21 nt, Human
ucauaguaacuucuuauggaa

SEQ ID NO: 1314048 - RNA, 21 nt, Human
ucaucuccugccuuccuccug

SEQ ID NO: 1314049 - RNA, 22 nt, Human
ucaucuccugccuuccuccugg

SEQ ID NO: 1314050 - RNA, 23 nt, Human
ucaucuccugccuuccuccuggg

SEQ ID NO: 1314051 - RNA, 14 nt, Human
ucaucucucugccc

SEQ ID NO: 1314052 - RNA, 16 nt, Human
ucaucucucugcccaa

SEQ ID NO: 1314053 - RNA, 14 nt, Human
ucaucucuucuuuu

SEQ ID NO: 1314054 - RNA, 23 nt, Human
ucaucugggaacuugucacagau

SEQ ID NO: 1314055 - RNA, 16 nt, Human
ucaucuggggagcagg

SEQ ID NO: 1314056 - RNA, 20 nt, Human
ucaucuggggagcaggcagc

SEQ ID NO: 1314057 - RNA, 23 nt, Human
ucaucuggggagcaggcagccag

SEQ ID NO: 1314058 - RNA, 21 nt, Human
ucaucuggggagcaggcagcc

SEQ ID NO: 1314059 - RNA, 23 nt, Human
ucaucugguugaacucugguggc

SEQ ID NO: 1314060 - RNA, 20 nt, Human
ucaucugguugaacucuggu

SEQ ID NO: 1314061 - RNA, 12 nt, Human
ucaucugucccu

SEQ ID NO: 1314062 - RNA, 17 nt, Human
ucaucugucccuccggg

SEQ ID NO: 1314063 - RNA, 18 nt, Human
ucaucugucccuccggga

SEQ ID NO: 1314064 - RNA, 12 nt, Human
ucaucugugcac

SEQ ID NO: 1314065 - RNA, 22 nt, Human
ucauucagauaugauucaaaug

SEQ ID NO: 1314066 - RNA, 20 nt, Human
ucauucacuucacugugcug

SEQ ID NO: 1314067 - RNA, 19 nt, Human
ucauucacuucacugugcu

SEQ ID NO: 1314068 - RNA, 17 nt, Human
ucauucacuucacugug

SEQ ID NO: 1314069 - RNA, 16 nt, Human
ucauucacuucacugu

SEQ ID NO: 1314070 - RNA, 16 nt, Human
ucauguacaagaugaa

SEQ ID NO: 1314071 - RNA, 18 nt, Human
ucauucauuagucauguu

SEQ ID NO: 1314072 - RNA, 14 nt, Human
ucauuucucaucca

SEQ ID NO: 1314073 - RNA, 23 nt, Human
ucauuucuuuuugggagagacuu

SEQ ID NO: 1314074 - RNA, 23 nt, Human
uccaaacugacucuuaagaagac

SEQ ID NO: 1314075 - RNA, 19 nt, Human
uccaaacucuucccucucu

SEQ ID NO: 1314076 - RNA, 19 nt, Human
uccaaacugaagcagccuc

SEQ ID NO: 1314077 - RNA, 22 nt, Human
uccaaagaguagaauugcauug

SEQ ID NO: 1314078 - RNA, 23 nt, Human
uccaaagaguagaauugcauuga

SEQ ID NO: 1314079 - RNA, 19 nt, Human
uccaaaagauugcugaaau

SEQ ID NO: 1314080 - RNA, 20 nt, Human
uccaaaagauugcugaaauu

SEQ ID NO: 1314081 - RNA, 22 nt, Human
uccaaaagauugcugaaauuuu

SEQ ID NO: 1314082 - RNA, 13 nt, Human
uccaaaagcuuuu

SEQ ID NO: 1314083 - RNA, 16 nt, Human
uccaaaagcuuuuuau

SEQ ID NO: 1314084 - RNA, 22 nt, Human
ucauuucuuuuugggagagacu

SEQ ID NO: 1314085 - RNA, 14 nt, Human
uccaagaauuucua

SEQ ID NO: 1314086 - RNA, 16 nt, Human
uccaagaauccacauu

SEQ ID NO: 1314087 - RNA, 19 nt, Human
uccaagaauccacauuucu

SEQ ID NO: 1314088 - RNA, 20 nt, Human
uccaagaauccacauuucua

SEQ ID NO: 1314089 - RNA, 21 nt, Human
uccaagaauccacauuucuaa

SEQ ID NO: 1314090 - RNA, 22 nt, Human
uccaagaauccacauuucuaaa

SEQ ID NO: 1314091 - RNA, 23 nt, Human
uccaagaauccacauuucuaaaa

SEQ ID NO: 1314092 - RNA, 14 nt, Human
uccaagaauccaca

SEQ ID NO: 1314093 - RNA, 22 nt, Human
uccaaaggaggauggcauauaa

SEQ ID NO: 1314094 - RNA, 16 nt, Human
uccaaagcuucccacg

SEQ ID NO: 1314095 - RNA, 14 nt, Human
uccaaagcagacag

SEQ ID NO: 1314096 - RNA, 15 nt, Human
uccaaagcagacagc

SEQ ID NO: 1314097 - RNA, 13 nt, Human
uccaagcaaaugu

SEQ ID NO: 1314098 - RNA, 13 nt, Human
uccaagauuccgg

SEQ ID NO: 1314099 - RNA, 15 nt, Human
uccaagauuccggau

SEQ ID NO: 1314100 - RNA, 12 nt, Human
uccaagauucua

SEQ ID NO: 1314101 - RNA, 13 nt, Human
uccaagauucuag

SEQ ID NO: 1314102 - RNA, 14 nt, Human
uccaagauucuaga

SEQ ID NO: 1314103 - RNA, 15 nt, Human
uccaagauucuagau

SEQ ID NO: 1314104 - RNA, 16 nt, Human
uccaagauucuagaug

SEQ ID NO: 1314105 - RNA, 17 nt, Human
uccaagauucuagauga

SEQ ID NO: 1314106 - RNA, 17 nt, Human
uccaagcauuuagaugu

SEQ ID NO: 1314107 - RNA, 17 nt, Human
uccaagagucuaaagau

SEQ ID NO: 1314108 - RNA, 18 nt, Human
uccaagagucuaaagaug

SEQ ID NO: 1314109 - RNA, 18 nt, Human
uccaagauauuuuaaaau

SEQ ID NO: 1314110 - RNA, 22 nt, Human
uccaagauauuuuaaaaucugu

SEQ ID NO: 1314111 - RNA, 17 nt, Human
uccaagacaugucuguu

SEQ ID NO: 1314112 - RNA, 20 nt, Human
uccaagacaugucuguucua

SEQ ID NO: 1314113 - RNA, 22 nt, Human
uccaagacaugucuguucuaca

SEQ ID NO: 1314114 - RNA, 16 nt, Human
uccagauccuggaaau

SEQ ID NO: 1314115 - RNA, 17 nt, Human
uccagauccuggaaauc

SEQ ID NO: 1314116 - RNA, 14 nt, Human
uccagauccuggaa

SEQ ID NO: 1314117 - RNA, 22 nt, Human
uccagcagauuuccagccuucu

SEQ ID NO: 1314118 - RNA, 15 nt, Human
uccagcauucccagg

SEQ ID NO: 1314119 - RNA, 17 nt, Human
uccacuucugacagccu

SEQ ID NO: 1314120 - RNA, 19 nt, Human
uccacuucugacagccuca

SEQ ID NO: 1314121 - RNA, 13 nt, Human
uccacuuggucug

SEQ ID NO: 1314122 - RNA, 12 nt, Human
uccacuuggucu

SEQ ID NO: 1314123 - RNA, 14 nt, Human
uccacuuggucugu

SEQ ID NO: 1314124 - RNA, 19 nt, Human
uccagaaauacaauuuuag

SEQ ID NO: 1314125 - RNA, 18 nt, Human
uccaccgcagaaggaagg

SEQ ID NO: 1314126 - RNA, 17 nt, Human
uccaccgcagaaggaag

SEQ ID NO: 1314127 - RNA, 16 nt, Human
uccaccgcagaaggaa

SEQ ID NO: 1314128 - RNA, 15 nt, Human
uccaccgcagaagga

SEQ ID NO: 1314129 - RNA, 14 nt, Human
uccaccucaacucc

SEQ ID NO: 1314130 - RNA, 23 nt, Human
uccaccgucuuucuuuuauacug

SEQ ID NO: 1314131 - RNA, 14 nt, Human
uccaccuacaugag

SEQ ID NO: 1314132 - RNA, 15 nt, Human
uccaagcaaauguga

SEQ ID NO: 1314133 - RNA, 18 nt, Human
uccaagauucuagaugau

SEQ ID NO: 1314134 - RNA, 20 nt, Human
uccaagauucuagaugauua

SEQ ID NO: 1314135 - RNA, 20 nt, Human
uccaagcauuuagauguaua

SEQ ID NO: 1314136 - RNA, 14 nt, Human
uccacaacacacag

SEQ ID NO: 1314137 - RNA, 14 nt, Human
uccacaaauuauua

SEQ ID NO: 1314138 - RNA, 20 nt, Human
uccacaaauuauuaaugaaa

SEQ ID NO: 1314139 - RNA, 22 nt, Human
uccaauuuucuggaauacauga

SEQ ID NO: 1314140 - RNA, 12 nt, Human
uccacaaaauaa

SEQ ID NO: 1314141 - RNA, 20 nt, Human
uccacaaaauaaccaauccu

SEQ ID NO: 1314142 - RNA, 21 nt, Human
uccacaaauuauuaaugaaaa

SEQ ID NO: 1314143 - RNA, 21 nt, Human
ucccaaguaacugggauuaca

SEQ ID NO: 1314144 - RNA, 20 nt, Human
ucccaaguaacugggauuac

SEQ ID NO: 1314145 - RNA, 22 nt, Human
ucccaaggcucugagcaaaugu

SEQ ID NO: 1314146 - RNA, 15 nt, Human
ucccaagggcugccg

SEQ ID NO: 1314147 - RNA, 16 nt, Human
ucccaaggggccugag

SEQ ID NO: 1314148 - RNA, 17 nt, Human
ucccaaggggccugagc

SEQ ID NO: 1314149 - RNA, 18 nt, Human
ucccaaggggccugagca

SEQ ID NO: 1314150 - RNA, 16 nt, Human
ucccaagguuacuuaa

SEQ ID NO: 1314151 - RNA, 20 nt, Human
ucccaagguuacuuaauuca

SEQ ID NO: 1314152 - RNA, 13 nt, Human
ucccaggacccug

SEQ ID NO: 1314153 - RNA, 19 nt, Human
ucccaaggggccugagcag

SEQ ID NO: 1314154 - RNA, 16 nt, Human
ucccaaguagaaucuc

SEQ ID NO: 1314155 - RNA, 17 nt, Human
ucccaccuagcagcacc

SEQ ID NO: 1314156 - RNA, 14 nt, Human
ucccaggacccuga

SEQ ID NO: 1314157 - RNA, 16 nt, Human
ucccaggacccugaag

SEQ ID NO: 1314158 - RNA, 19 nt, Human
ucccaggacccugaagggg

SEQ ID NO: 1314159 - RNA, 15 nt, Human
ucccaggagacaguu

SEQ ID NO: 1314160 - RNA, 16 nt, Human
ucccaggauguacaag

SEQ ID NO: 1314161 - RNA, 20 nt, Human
ucccaggcgccccuuccccc

SEQ ID NO: 1314162 - RNA, 18 nt, Human
ucccaggcgccccuuccc

SEQ ID NO: 1314163 - RNA, 21 nt, Human
ucccaggcgccccuucccccu

SEQ ID NO: 1314164 - RNA, 15 nt, Human
ucccaggcugagccu

SEQ ID NO: 1314165 - RNA, 16 nt, Human
ucccaggagacaguuc

SEQ ID NO: 1314166 - RNA, 22 nt, Human
ucccaggagacaguucaagaaa

SEQ ID NO: 1314167 - RNA, 19 nt, Human
ucccaggacccuggaccca

SEQ ID NO: 1314168 - RNA, 16 nt, Human
ucccaggcugagccuc

SEQ ID NO: 1314169 - RNA, 18 nt, Human
ucccaggcugagccucag

SEQ ID NO: 1314170 - RNA, 13 nt, Human
ucccaucugcuuc

SEQ ID NO: 1314171 - RNA, 14 nt, Human
ucccauggggaggg

SEQ ID NO: 1314172 - RNA, 23 nt, Human
ucccaugggcagaggaccaggcu

SEQ ID NO: 1314173 - RNA, 18 nt, Human
uccccagacgccuggcug

SEQ ID NO: 1314174 - RNA, 21 nt, Human
uccccagacgccuggcugcug

SEQ ID NO: 1314175 - RNA, 17 nt, Human
uccccagaauggaggca

SEQ ID NO: 1314176 - RNA, 21 nt, Human
uccccacuuguccgcugggug

SEQ ID NO: 1314177 - RNA, 19 nt, Human
uccccacuugcagcccugu

SEQ ID NO: 1314178 - RNA, 19 nt, Human
uccccacuuguccgcuggg

SEQ ID NO: 1314179 - RNA, 16 nt, Human
ucccauucaagauucc

SEQ ID NO: 1314180 - RNA, 14 nt, Human
ucccauucaagauu

SEQ ID NO: 1314181 - RNA, 19 nt, Human
ucccauucccccagugcgg

SEQ ID NO: 1314182 - RNA, 13 nt, Human
ucccauuccugaa

SEQ ID NO: 1314183 - RNA, 14 nt, Human
ucccauuccugaag

SEQ ID NO: 1314184 - RNA, 17 nt, Human
ucccauuccugaagaac

SEQ ID NO: 1314185 - RNA, 15 nt, Human
ucccauuccugaaga

SEQ ID NO: 1314186 - RNA, 13 nt, Human
ucccauuccccca

SEQ ID NO: 1314187 - RNA, 14 nt, Human
uccauggcccugcc

SEQ ID NO: 1314188 - RNA, 15 nt, Human
uccauggccagcagc

SEQ ID NO: 1314189 - RNA, 16 nt, Human
uccauggccagcagca

SEQ ID NO: 1314190 - RNA, 20 nt, Human
uccauggcccugcaaaagga

SEQ ID NO: 1314191 - RNA, 18 nt, Human
uccauggcaggaaggcuu

SEQ ID NO: 1314192 - RNA, 14 nt, Human
uccauggccagcag

SEQ ID NO: 1314193 - RNA, 23 nt, Human
uccaugucaagauucagcuagug

SEQ ID NO: 1314194 - RNA, 22 nt, Human
uccauguaacugccuagaaaca

SEQ ID NO: 1314195 - RNA, 17 nt, Human
uccauggccagcagcac

SEQ ID NO: 1314196 - RNA, 12 nt, Human
uccauguaacug

SEQ ID NO: 1314197 - RNA, 14 nt, Human
uccauguaacugcc

SEQ ID NO: 1314198 - RNA, 15 nt, Human
uccauguaacugccu

SEQ ID NO: 1314199 - RNA, 24 nt, Human
uccauguaacugccuagaaacaac

SEQ ID NO: 1314200 - RNA, 17 nt, Human
uccagcauucccaggua

SEQ ID NO: 1314201 - RNA, 16 nt, Human
uccagcauucccaggu

SEQ ID NO: 1314202 - RNA, 12 nt, Human
uccagcuccaac

SEQ ID NO: 1314203 - RNA, 16 nt, Human
uccagcuccaaccugc

SEQ ID NO: 1314204 - RNA, 18 nt, Human
uccagcuccaaccugcaa

SEQ ID NO: 1314205 - RNA, 19 nt, Human
uccagcuccaaccugcaaa

SEQ ID NO: 1314206 - RNA, 17 nt, Human
uccagcucccugugccc

SEQ ID NO: 1314207 - RNA, 19 nt, Human
uccagcucccugugccccc

SEQ ID NO: 1314208 - RNA, 20 nt, Human
uccagcucccugugccccca

SEQ ID NO: 1314209 - RNA, 23 nt, Human
uccagcucccugugcccccaggg

SEQ ID NO: 1314210 - RNA, 16 nt, Human
uccauccaggccauuc

SEQ ID NO: 1314211 - RNA, 18 nt, Human
uccauccaccuuucccaa

SEQ ID NO: 1314212 - RNA, 15 nt, Human
uccauccauggccag

SEQ ID NO: 1314213 - RNA, 13 nt, Human
uccauccaaggcc

SEQ ID NO: 1314214 - RNA, 21 nt, Human
uccauccaaggccagguucuc

SEQ ID NO: 1314215 - RNA, 15 nt, Human
uccauccacauggga

SEQ ID NO: 1314216 - RNA, 19 nt, Human
uccauccauggccagcagc

SEQ ID NO: 1314217 - RNA, 16 nt, Human
uccauccauggccagc

SEQ ID NO: 1314218 - RNA, 17 nt, Human
uccauccauggccagca

SEQ ID NO: 1314219 - RNA, 18 nt, Human
ucccaaggcucugagcaa

SEQ ID NO: 1314220 - RNA, 20 nt, Human
ucccaaauuugauugauuug

SEQ ID NO: 1314221 - RNA, 22 nt, Human
ucccaaauuugauugauuugaa

SEQ ID NO: 1314222 - RNA, 16 nt, Human
ucccaagcucagaggc

SEQ ID NO: 1314223 - RNA, 20 nt, Human
uccaugucaagauucagcua

SEQ ID NO: 1314224 - RNA, 16 nt, Human
uccaugucaagauuca

SEQ ID NO: 1314225 - RNA, 14 nt, Human
uccaugucaagauu

SEQ ID NO: 1314226 - RNA, 14 nt, Human
ucccaaaugagcca

SEQ ID NO: 1314227 - RNA, 17 nt, Human
ucccaaauuugauugau

SEQ ID NO: 1314228 - RNA, 19 nt, Human
ucccaaauuugauugauuu

SEQ ID NO: 1314229 - RNA, 14 nt, Human
ucccuaauaaagcu

SEQ ID NO: 1314230 - RNA, 13 nt, Human
ucccuaauaaagc

SEQ ID NO: 1314231 - RNA, 19 nt, Human
ucccuaccuugaaagaaga

SEQ ID NO: 1314232 - RNA, 15 nt, Human
ucccuacugaagccc

SEQ ID NO: 1314233 - RNA, 18 nt, Human
ucccuacugaagcccuug

SEQ ID NO: 1314234 - RNA, 21 nt, Human
ucccuacugaagcccuuguga

SEQ ID NO: 1314235 - RNA, 15 nt, Human
ucccuacuuccugug

SEQ ID NO: 1314236 - RNA, 16 nt, Human
ucccuacuuccuguga

SEQ ID NO: 1314237 - RNA, 17 nt, Human
ucccuacuuccugugac

SEQ ID NO: 1314238 - RNA, 14 nt, Human
ucccucccucuccg

SEQ ID NO: 1314239 - RNA, 12 nt, Human
ucccuaauaaag

SEQ ID NO: 1314240 - RNA, 11 nt, Human
ucccuaauaaa

SEQ ID NO: 1314241 - RNA, 14 nt, Human
uccccuucuccccu

SEQ ID NO: 1314242 - RNA, 11 nt, Human
ucccuaagcca

SEQ ID NO: 1314243 - RNA, 13 nt, Human
ucccuaagccagc

SEQ ID NO: 1314244 - RNA, 14 nt, Human
ucccuaagccagcu

SEQ ID NO: 1314245 - RNA, 15 nt, Human
uccccuguuuauuca

SEQ ID NO: 1314246 - RNA, 13 nt, Human
uccccuuccacug

SEQ ID NO: 1314247 - RNA, 17 nt, Human
uccccuuccacugaggg

SEQ ID NO: 1314248 - RNA, 18 nt, Human
uccccuuccacugagggc

SEQ ID NO: 1314249 - RNA, 21 nt, Human
uccccuuccuaauuccacagc

SEQ ID NO: 1314250 - RNA, 22 nt, Human
uccccuuccuaauuccacagcu

SEQ ID NO: 1314251 - RNA, 15 nt, Human
uccccuguucacucu

SEQ ID NO: 1314252 - RNA, 18 nt, Human
uccccuggaacugucucu

SEQ ID NO: 1314253 - RNA, 20 nt, Human
uccccuggaacugucucuca

SEQ ID NO: 1314254 - RNA, 19 nt, Human
uccccuggagggggaaugg

SEQ ID NO: 1314255 - RNA, 21 nt, Human
uccccugcccccugcaggaag

SEQ ID NO: 1314256 - RNA, 23 nt, Human
uccccugcccccugcaggaagga

SEQ ID NO: 1314257 - RNA, 18 nt, Human
uccccugccugcccuggu

SEQ ID NO: 1314258 - RNA, 17 nt, Human
uccccgacuggggcagg

SEQ ID NO: 1314259 - RNA, 14 nt, Human
uccccgcacccccc

SEQ ID NO: 1314260 - RNA, 21 nt, Human
uccccgcaccccccaagcugu

SEQ ID NO: 1314261 - RNA, 23 nt, Human
uccccgauaccaugcuguaagga

SEQ ID NO: 1314262 - RNA, 14 nt, Human
uccccugcacugua

SEQ ID NO: 1314263 - RNA, 15 nt, Human
uccccugcacuguaa

SEQ ID NO: 1314264 - RNA, 16 nt, Human
uccccugcacuguaaa

SEQ ID NO: 1314265 - RNA, 17 nt, Human
uccccugcacuguaaaa

SEQ ID NO: 1314266 - RNA, 18 nt, Human
uccccugcacuguaaaau

SEQ ID NO: 1314267 - RNA, 19 nt, Human
uccccugcacuguaaaaug

SEQ ID NO: 1314268 - RNA, 22 nt, Human
uccccugcacuguaaaaugugg

SEQ ID NO: 1314269 - RNA, 14 nt, Human
uccccugcaggcug

SEQ ID NO: 1314270 - RNA, 18 nt, Human
uccccugcaggcugagug

SEQ ID NO: 1314271 - RNA, 13 nt, Human
uccccugccacca

SEQ ID NO: 1314272 - RNA, 14 nt, Human
uccccugccaccag

SEQ ID NO: 1314273 - RNA, 16 nt, Human
uccccugccaccaggc

SEQ ID NO: 1314274 - RNA, 17 nt, Human
uccccugccaccaggcc

SEQ ID NO: 1314275 - RNA, 19 nt, Human
uccccugccaccaggccac

SEQ ID NO: 1314276 - RNA, 12 nt, Human
uccccugccagg

SEQ ID NO: 1314277 - RNA, 14 nt, Human
uccccugccagggc

SEQ ID NO: 1314278 - RNA, 15 nt, Human
uccccugccagggca

SEQ ID NO: 1314279 - RNA, 20 nt, Human
uccccugccagggcagggcc

SEQ ID NO: 1314280 - RNA, 20 nt, Human
uccccugcaggcugagugca

SEQ ID NO: 1314281 - RNA, 14 nt, Human
uccccugcccaugc

SEQ ID NO: 1314282 - RNA, 15 nt, Human
uccccugcccaugcu

SEQ ID NO: 1314283 - RNA, 21 nt, Human
uccccugcccaugcugggagc

SEQ ID NO: 1314284 - RNA, 12 nt, Human
uccccugccccc

SEQ ID NO: 1314285 - RNA, 16 nt, Human
uccccugcccccugca

SEQ ID NO: 1314286 - RNA, 17 nt, Human
uccccugcccccugcag

SEQ ID NO: 1314287 - RNA, 18 nt, Human
uccccugcccccugcagg

SEQ ID NO: 1314288 - RNA, 19 nt, Human
uccccugcccccugcagga

SEQ ID NO: 1314289 - RNA, 23 nt, Human
ucccccagucauucugggaacau

SEQ ID NO: 1314290 - RNA, 12 nt, Human
ucccccagugcg

SEQ ID NO: 1314291 - RNA, 15 nt, Human
uccccagacuuguug

SEQ ID NO: 1314292 - RNA, 17 nt, Human
uccccagacuuguuggc

SEQ ID NO: 1314293 - RNA, 10 nt, Human
uccccagaga

SEQ ID NO: 1314294 - RNA, 11 nt, Human
uccccagagaa

SEQ ID NO: 1314295 - RNA, 22 nt, Human
uccccagagaaaggggagccca

SEQ ID NO: 1314296 - RNA, 14 nt, Human
uccccagccuggga

SEQ ID NO: 1314297 - RNA, 23 nt, Human
uccccagcgauucccucucccag

SEQ ID NO: 1314298 - RNA, 13 nt, Human
uccccagcuccca

SEQ ID NO: 1314299 - RNA, 15 nt, Human
uccccagcucccagg

SEQ ID NO: 1314300 - RNA, 16 nt, Human
uccccagcucccagga

SEQ ID NO: 1314301 - RNA, 17 nt, Human
uccccagcucccaggac

SEQ ID NO: 1314302 - RNA, 17 nt, Human
ucccccaucucuucugg

SEQ ID NO: 1314303 - RNA, 16 nt, Human
ucccccauguucuguc

SEQ ID NO: 1314304 - RNA, 19 nt, Human
ucccccauguucugucccu

SEQ ID NO: 1314305 - RNA, 13 nt, Human
ucccccucuggcu

SEQ ID NO: 1314306 - RNA, 12 nt, Human
ucccccucuguc

SEQ ID NO: 1314307 - RNA, 18 nt, Human
ucccccuccucuccacca

SEQ ID NO: 1314308 - RNA, 13 nt, Human
ucccccugcccca

SEQ ID NO: 1314309 - RNA, 15 nt, Human
ucccccucuguccag

SEQ ID NO: 1314310 - RNA, 16 nt, Human
ucccccucccuccccu

SEQ ID NO: 1314311 - RNA, 17 nt, Human
ucacucuagguuuuaca

SEQ ID NO: 1314312 - RNA, 18 nt, Human
ucacucuagucaaugaca

SEQ ID NO: 1314313 - RNA, 20 nt, Human
ucacucuagucaaugacaug

SEQ ID NO: 1314314 - RNA, 21 nt, Human
ucacucuagucaaugacauga

SEQ ID NO: 1314315 - RNA, 19 nt, Human
ucacucuacuuagcauguc

SEQ ID NO: 1314316 - RNA, 20 nt, Human
ucacucuacuuagcaugucc

SEQ ID NO: 1314317 - RNA, 15 nt, Human
ucacucugaguguuu

SEQ ID NO: 1314318 - RNA, 20 nt, Human
ucacucugaguguuuuauga

SEQ ID NO: 1314319 - RNA, 13 nt, Human
ucacuccuuuuaa

SEQ ID NO: 1314320 - RNA, 14 nt, Human
ucacuccuuuuaaa

SEQ ID NO: 1314321 - RNA, 15 nt, Human
ucacuccuuuuaaag

SEQ ID NO: 1314322 - RNA, 16 nt, Human
ucacuccuuuuaaaga

SEQ ID NO: 1314323 - RNA, 17 nt, Human
ucacuccuuuuaaagaa

SEQ ID NO: 1314324 - RNA, 18 nt, Human
ucacuccuuuuaaagaaa

SEQ ID NO: 1314325 - RNA, 14 nt, Human
ucacucgauaauaa

SEQ ID NO: 1314326 - RNA, 18 nt, Human
ucacucgauaauaaagua

SEQ ID NO: 1314327 - RNA, 16 nt, Human
ucacucgucuccccca

SEQ ID NO: 1314328 - RNA, 21 nt, Human
ucacucuaauuaauuguaauc

SEQ ID NO: 1314329 - RNA, 18 nt, Human
ucacuccuaccugguaau

SEQ ID NO: 1314330 - RNA, 19 nt, Human
ucacggccacacagcugcc

SEQ ID NO: 1314331 - RNA, 20 nt, Human
ucacggccacacagcugccg

SEQ ID NO: 1314332 - RNA, 14 nt, Human
ucacggcugcgcac

SEQ ID NO: 1314333 - RNA, 18 nt, Human
ucacggcugcgcacugug

SEQ ID NO: 1314334 - RNA, 19 nt, Human
ucacggcugcgcacugugu

SEQ ID NO: 1314335 - RNA, 17 nt, Human
ucacgggacuauuucca

SEQ ID NO: 1314336 - RNA, 14 nt, Human
ucacgcuuuccuga

SEQ ID NO: 1314337 - RNA, 15 nt, Human
ucacgcuuuccugaa

SEQ ID NO: 1314338 - RNA, 16 nt, Human
ucacgcuuuccugaau

SEQ ID NO: 1314339 - RNA, 17 nt, Human
ucacgcuuuccugaauc

SEQ ID NO: 1314340 - RNA, 22 nt, Human
ucacgcuuuccugaauccaaac

SEQ ID NO: 1314341 - RNA, 16 nt, Human
ucacgcuuuuugaaaa

SEQ ID NO: 1314342 - RNA, 16 nt, Human
ucacaggacucugccu

SEQ ID NO: 1314343 - RNA, 14 nt, Human
ucacaggcagccag

SEQ ID NO: 1314344 - RNA, 15 nt, Human
ucacaggcagccagu

SEQ ID NO: 1314345 - RNA, 19 nt, Human
ucacaggccccaggaaagg

SEQ ID NO: 1314346 - RNA, 19 nt, Human
ucacaggcagccagugccc

SEQ ID NO: 1314347 - RNA, 22 nt, Human
ucacaggcagccagugcccuga

SEQ ID NO: 1314348 - RNA, 23 nt, Human
ucacaggcagccagugcccugag

SEQ ID NO: 1314349 - RNA, 12 nt, Human
ucacagggcagu

SEQ ID NO: 1314350 - RNA, 16 nt, Human
ucacagggcaguaccu

SEQ ID NO: 1314351 - RNA, 18 nt, Human
ucacagggcaguaccuga

SEQ ID NO: 1314352 - RNA, 22 nt, Human
ucacagggcaguaccugagggu

SEQ ID NO: 1314353 - RNA, 20 nt, Human
ucacagggcaguaccugagg

SEQ ID NO: 1314354 - RNA, 19 nt, Human
ucaccuacucacacaggca

SEQ ID NO: 1314355 - RNA, 16 nt, Human
ucaccuagcugaaugu

SEQ ID NO: 1314356 - RNA, 20 nt, Human
ucaccuagcugaauguuuuu

SEQ ID NO: 1314357 - RNA, 13 nt, Human
ucaccuuuauucu

SEQ ID NO: 1314358 - RNA, 23 nt, Human
ucaccuuggcaccagacacccag

SEQ ID NO: 1314359 - RNA, 18 nt, Human
ucaccuuggcaccagaca

SEQ ID NO: 1314360 - RNA, 19 nt, Human
ucaccuuggcaccagacac

SEQ ID NO: 1314361 - RNA, 22 nt, Human
ucaccuagcugaauguuuuucu

SEQ ID NO: 1314362 - RNA, 23 nt, Human
ucaccuagcugaauguuuuucua

SEQ ID NO: 1314363 - RNA, 14 nt, Human
ucaccuaggaagcc

SEQ ID NO: 1314364 - RNA, 15 nt, Human
ucaccuaggaagccu

SEQ ID NO: 1314365 - RNA, 17 nt, Human
ucaccuaggaagccuca

SEQ ID NO: 1314366 - RNA, 19 nt, Human
ucaccuaggaagccucaga

SEQ ID NO: 1314367 - RNA, 20 nt, Human
ucaccuaggaagccucagau

SEQ ID NO: 1314368 - RNA, 23 nt, Human
ucaccuaggaagccucagauucc

SEQ ID NO: 1314369 - RNA, 20 nt, Human
ucaccuauuuccauucaaca

SEQ ID NO: 1314370 - RNA, 16 nt, Human
ucaccucagauggcag

SEQ ID NO: 1314371 - RNA, 17 nt, Human
ucaccucagauggcagc

SEQ ID NO: 1314372 - RNA, 18 nt, Human
ucaccucagauggcagcu

SEQ ID NO: 1314373 - RNA, 19 nt, Human
ucaccucagauggcagcuu

SEQ ID NO: 1314374 - RNA, 20 nt, Human
ucaccucagauggcagcuuu

SEQ ID NO: 1314375 - RNA, 21 nt, Human
ucaccucagauggcagcuuuu

SEQ ID NO: 1314376 - RNA, 23 nt, Human
ucaccucagauggcagcuuuuaa

SEQ ID NO: 1314377 - RNA, 22 nt, Human
ucaccucagauggcagcuuuua

SEQ ID NO: 1314378 - RNA, 16 nt, Human
ucacgcaugcaguguu

SEQ ID NO: 1314379 - RNA, 18 nt, Human
ucacgccagacuucccac

SEQ ID NO: 1314380 - RNA, 14 nt, Human
ucacgcaugcagug

SEQ ID NO: 1314381 - RNA, 21 nt, Human
ucagcaaacaggaucaguuaa

SEQ ID NO: 1314382 - RNA, 15 nt, Human
ucagcaaacucuuuu

SEQ ID NO: 1314383 - RNA, 21 nt, Human
ucagaguugcugcaaaccuga

SEQ ID NO: 1314384 - RNA, 15 nt, Human
ucagcaaacaggauc

SEQ ID NO: 1314385 - RNA, 22 nt, Human
ucagaguugaugguuguacaua

SEQ ID NO: 1314386 - RNA, 21 nt, Human
ucagagugacauccaggagga

SEQ ID NO: 1314387 - RNA, 20 nt, Human
ucagagugacuacacacagu

SEQ ID NO: 1314388 - RNA, 16 nt, Human
ucagaguucuuuuuga

SEQ ID NO: 1314389 - RNA, 19 nt, Human
ucagaguucuuuuugaagu

SEQ ID NO: 1314390 - RNA, 21 nt, Human
ucagaggggaauaaacuguug

SEQ ID NO: 1314391 - RNA, 16 nt, Human
ucagaggcgcacugug

SEQ ID NO: 1314392 - RNA, 17 nt, Human
ucagaguccuuaaaaug

SEQ ID NO: 1314393 - RNA, 18 nt, Human
ucagaguccuuaaaaugu

SEQ ID NO: 1314394 - RNA, 19 nt, Human
ucagagugacauccaggag

SEQ ID NO: 1314395 - RNA, 18 nt, Human
ucagaggcccucgcugcc

SEQ ID NO: 1314396 - RNA, 21 nt, Human
ucagaggcccucgcugccagc

SEQ ID NO: 1314397 - RNA, 22 nt, Human
ucagaggcccucgcugccagcu

SEQ ID NO: 1314398 - RNA, 14 nt, Human
ucagcacuagccaa

SEQ ID NO: 1314399 - RNA, 13 nt, Human
ucagcacaaggcc

SEQ ID NO: 1314400 - RNA, 19 nt, Human
ucagcaaguuagaacuagc

SEQ ID NO: 1314401 - RNA, 15 nt, Human
ucagcacugccugcu

SEQ ID NO: 1314402 - RNA, 18 nt, Human
ucagcacugccugcuccc

SEQ ID NO: 1314403 - RNA, 22 nt, Human
ucagcacugccugcucccaucc

SEQ ID NO: 1314404 - RNA, 12 nt, Human
ucagcacugucc

SEQ ID NO: 1314405 - RNA, 13 nt, Human
ucagcacuguccc

SEQ ID NO: 1314406 - RNA, 14 nt, Human
ucagcacugucccu

SEQ ID NO: 1314407 - RNA, 21 nt, Human
ucagcacugucccuugccuca

SEQ ID NO: 1314408 - RNA, 19 nt, Human
ucagcacuuggcccuucua

SEQ ID NO: 1314409 - RNA, 18 nt, Human
ucagcaaagugguucccu

SEQ ID NO: 1314410 - RNA, 20 nt, Human
ucagcaaagugguucccucu

SEQ ID NO: 1314411 - RNA, 16 nt, Human
ucagcaacucgcuuua

SEQ ID NO: 1314412 - RNA, 19 nt, Human
ucagcaagacuucucuuug

SEQ ID NO: 1314413 - RNA, 18 nt, Human
ucagcaagauaaacauua

SEQ ID NO: 1314414 - RNA, 21 nt, Human
ucagcaaguuagaacuagcca

SEQ ID NO: 1314415 - RNA, 19 nt, Human
ucagcacaaggccaucugg

SEQ ID NO: 1314416 - RNA, 19 nt, Human
ucagacauagaauuaacac

SEQ ID NO: 1314417 - RNA, 22 nt, Human
ucagacauagaauuaacacaug

SEQ ID NO: 1314418 - RNA, 19 nt, Human
ucagacaucugagguuuua

SEQ ID NO: 1314419 - RNA, 22 nt, Human
ucagacaucugagguuuuauuu

SEQ ID NO: 1314420 - RNA, 14 nt, Human
ucagaccacaugcc

SEQ ID NO: 1314421 - RNA, 14 nt, Human
ucagaccacggcuc

SEQ ID NO: 1314422 - RNA, 17 nt, Human
ucagacuaagccagcac

SEQ ID NO: 1314423 - RNA, 19 nt, Human
ucagacucccauuccugaa

SEQ ID NO: 1314424 - RNA, 21 nt, Human
ucagacucccauuccugaaga

SEQ ID NO: 1314425 - RNA, 22 nt, Human
ucagacucccauuccugaagaa

SEQ ID NO: 1314426 - RNA, 19 nt, Human
ucagacucuaagaaagaac

SEQ ID NO: 1314427 - RNA, 15 nt, Human
ucagaccauaauguu

SEQ ID NO: 1314428 - RNA, 15 nt, Human
ucagacuaagccagc

SEQ ID NO: 1314429 - RNA, 17 nt, Human
ucagacucuaagaaaga

SEQ ID NO: 1314430 - RNA, 18 nt, Human
ucagacucuaagaaagaa

SEQ ID NO: 1314431 - RNA, 18 nt, Human
ucagacugacaguuuaca

SEQ ID NO: 1314432 - RNA, 17 nt, Human
ucacuugucaauaaaau

SEQ ID NO: 1314433 - RNA, 16 nt, Human
ucacuuguacaaaaua

SEQ ID NO: 1314434 - RNA, 17 nt, Human
ucacuuguacaaaauaa

SEQ ID NO: 1314435 - RNA, 19 nt, Human
ucacuugucaggagugugu

SEQ ID NO: 1314436 - RNA, 21 nt, Human
ucacuugucaggagugugugu

SEQ ID NO: 1314437 - RNA, 22 nt, Human
ucacuugucaggagugugugug

SEQ ID NO: 1314438 - RNA, 18 nt, Human
ucacuggcucuccuggcc

SEQ ID NO: 1314439 - RNA, 13 nt, Human
ucacuuguacaaa

SEQ ID NO: 1314440 - RNA, 14 nt, Human
ucacuuguacaaaa

SEQ ID NO: 1314441 - RNA, 15 nt, Human
ucacuuguacaaaau

SEQ ID NO: 1314442 - RNA, 20 nt, Human
ucacuggcgacacguagcag

SEQ ID NO: 1314443 - RNA, 22 nt, Human
ucacuggcgacacguagcagcu

SEQ ID NO: 1314444 - RNA, 13 nt, Human
ucacuggcucucc

SEQ ID NO: 1314445 - RNA, 12 nt, Human
ucacuggcucuc

SEQ ID NO: 1314446 - RNA, 17 nt, Human
ucacuggcucuccuggc

SEQ ID NO: 1314447 - RNA, 17 nt, Human
ucacucugaguguuuua

SEQ ID NO: 1314448 - RNA, 12 nt, Human
ucacuuuuauuu

SEQ ID NO: 1314449 - RNA, 22 nt, Human
ucacuuuuauuuagcaccaggg

SEQ ID NO: 1314450 - RNA, 13 nt, Human
ucacuuuucccac

SEQ ID NO: 1314451 - RNA, 14 nt, Human
ucacuuuucccacu

SEQ ID NO: 1314452 - RNA, 12 nt, Human
ucacuuuuccuc

SEQ ID NO: 1314453 - RNA, 17 nt, Human
ucacuugugcaguguug

SEQ ID NO: 1314454 - RNA, 14 nt, Human
ucacuuucuagauu

SEQ ID NO: 1314455 - RNA, 14 nt, Human
ucacuuucucaguu

SEQ ID NO: 1314456 - RNA, 19 nt, Human
ucacuuuuaaugaacaaau

SEQ ID NO: 1314457 - RNA, 21 nt, Human
ucacuuuuaaugaacaaaugg

SEQ ID NO: 1314458 - RNA, 13 nt, Human
ucacuuuuccucc

SEQ ID NO: 1314459 - RNA, 18 nt, Human
ucacuuuuccucccucag

SEQ ID NO: 1314460 - RNA, 18 nt, Human
ucacuuuugacaaaggca

SEQ ID NO: 1314461 - RNA, 15 nt, Human
ucacuuuucccacuc

SEQ ID NO: 1314462 - RNA, 13 nt, Human
ucacuuuuucuga

SEQ ID NO: 1314463 - RNA, 14 nt, Human
ucacuuuuucugau

SEQ ID NO: 1314464 - RNA, 16 nt, Human
ucacuuuuucugauaa

SEQ ID NO: 1314465 - RNA, 17 nt, Human
ucacuuuuucugauaaa

SEQ ID NO: 1314466 - RNA, 22 nt, Human
ucacuuuuugaggcaaaagaag

SEQ ID NO: 1314467 - RNA, 16 nt, Human
ucacuuuuugaggcaa

SEQ ID NO: 1314468 - RNA, 20 nt, Human
ucacuuuuugaggcaaaaga

SEQ ID NO: 1314469 - RNA, 20 nt, Human
ucagaaaauaucccuccugu

SEQ ID NO: 1314470 - RNA, 15 nt, Human
ucagaaaauguucug

SEQ ID NO: 1314471 - RNA, 18 nt, Human
ucagaaaauguucuguuu

SEQ ID NO: 1314472 - RNA, 19 nt, Human
ucagaaaauguucuguuug

SEQ ID NO: 1314473 - RNA, 23 nt, Human
ucagaaaauguucuguuugcugu

SEQ ID NO: 1314474 - RNA, 20 nt, Human
ucagaaaggaaaaacaaacu

SEQ ID NO: 1314475 - RNA, 17 nt, Human
ucagaaaggaaaaacaa

SEQ ID NO: 1314476 - RNA, 14 nt, Human
ucagaaagggaggg

SEQ ID NO: 1314477 - RNA, 17 nt, Human
ucagaaagggagggcuc

SEQ ID NO: 1314478 - RNA, 18 nt, Human
ucagaaagggagggcucu

SEQ ID NO: 1314479 - RNA, 19 nt, Human
ucagaaagggagggcucug

SEQ ID NO: 1314480 - RNA, 20 nt, Human
ucagaaagggagggcucuga

SEQ ID NO: 1314481 - RNA, 21 nt, Human
ucagaaagggagggcucugag

SEQ ID NO: 1314482 - RNA, 22 nt, Human
ucagaaagggagggcucugagg

SEQ ID NO: 1314483 - RNA, 23 nt, Human
ucagaaagggagggcucugaggc

SEQ ID NO: 1314484 - RNA, 15 nt, Human
ucagaaagugccuga

SEQ ID NO: 1314485 - RNA, 23 nt, Human
ucagaaagugccugacacacuaa

SEQ ID NO: 1314486 - RNA, 16 nt, Human
uauuuuauguugcaua

SEQ ID NO: 1314487 - RNA, 15 nt, Human
uauuuuauguugcau

SEQ ID NO: 1314488 - RNA, 17 nt, Human
uauuuuauauuguuaua

SEQ ID NO: 1314489 - RNA, 12 nt, Human
uauuuuauguua

SEQ ID NO: 1314490 - RNA, 14 nt, Human
uauuuuauguuaua

SEQ ID NO: 1314491 - RNA, 21 nt, Human
uauuuucaacgcagcccugcu

SEQ ID NO: 1314492 - RNA, 13 nt, Human
uauuuucaagaaa

SEQ ID NO: 1314493 - RNA, 16 nt, Human
uauuuucaagaaacug

SEQ ID NO: 1314494 - RNA, 19 nt, Human
uauuuucaauagccacuaa

SEQ ID NO: 1314495 - RNA, 21 nt, Human
uauuuuauguuauauauaaau

SEQ ID NO: 1314496 - RNA, 13 nt, Human
uauuuucaccauu

SEQ ID NO: 1314497 - RNA, 14 nt, Human
uauuuucaccauuu

SEQ ID NO: 1314498 - RNA, 14 nt, Human
uauuuucagaugug

SEQ ID NO: 1314499 - RNA, 18 nt, Human
uauuuucaauagccacua

SEQ ID NO: 1314500 - RNA, 19 nt, Human
uauuuucauccuugucuua

SEQ ID NO: 1314501 - RNA, 13 nt, Human
uauuuucuuggau

SEQ ID NO: 1314502 - RNA, 12 nt, Human
uauuuucuuucu

SEQ ID NO: 1314503 - RNA, 14 nt, Human
uauuuucauucaaa

SEQ ID NO: 1314504 - RNA, 12 nt, Human
uauuuugaauca

SEQ ID NO: 1314505 - RNA, 13 nt, Human
uauuuugaaucaa

SEQ ID NO: 1314506 - RNA, 15 nt, Human
uauuuugaaucaaua

SEQ ID NO: 1314507 - RNA, 16 nt, Human
uauuuugaaucaauaa

SEQ ID NO: 1314508 - RNA, 22 nt, Human
uauuuugaaucaauaauauauu

SEQ ID NO: 1314509 - RNA, 23 nt, Human
uauuuugaaucaauaauauauuu

SEQ ID NO: 1314510 - RNA, 18 nt, Human
uauuuugacauaaaguug

SEQ ID NO: 1314511 - RNA, 17 nt, Human
uauuuugacauaaaguu

SEQ ID NO: 1314512 - RNA, 12 nt, Human
uauuuuuuaauu

SEQ ID NO: 1314513 - RNA, 15 nt, Human
uauuuuuuaauuauu

SEQ ID NO: 1314514 - RNA, 22 nt, Human
uauuuuuuucugaauuauuuuc

SEQ ID NO: 1314515 - RNA, 17 nt, Human
uauuuuuuucuauuuuu

SEQ ID NO: 1314516 - RNA, 12 nt, Human
ucaaaaaaggca

SEQ ID NO: 1314517 - RNA, 16 nt, Human
uauuuuuuucugaaau

SEQ ID NO: 1314518 - RNA, 17 nt, Human
uauuuuuuucugaaauu

SEQ ID NO: 1314519 - RNA, 13 nt, Human
ucaaaaaauugca

SEQ ID NO: 1314520 - RNA, 13 nt, Human
ucaaaaacuauuu

SEQ ID NO: 1314521 - RNA, 17 nt, Human
ucaaaaacuuuggaguc

SEQ ID NO: 1314522 - RNA, 22 nt, Human
ucaaaaacuuuggaguccccuc

SEQ ID NO: 1314523 - RNA, 12 nt, Human
ucaaaaagaacc

SEQ ID NO: 1314524 - RNA, 12 nt, Human
ucaaaacauugu

SEQ ID NO: 1314525 - RNA, 22 nt, Human
ucaaaacauugugccaugucaa

SEQ ID NO: 1314526 - RNA, 22 nt, Human
ucaaaaccagguccaaugagcu

SEQ ID NO: 1314527 - RNA, 18 nt, Human
ucaaacuacauauuguaa

SEQ ID NO: 1314528 - RNA, 16 nt, Human
ucaaacuacuuugcug

SEQ ID NO: 1314529 - RNA, 21 nt, Human
ucaaacuacuuugcugcuaau

SEQ ID NO: 1314530 - RNA, 15 nt, Human
ucaaacgugaaaaug

SEQ ID NO: 1314531 - RNA, 16 nt, Human
ucaaacgugaaaaugc

SEQ ID NO: 1314532 - RNA, 15 nt, Human
ucaaaaccuuuugaa

SEQ ID NO: 1314533 - RNA, 16 nt, Human
ucaaaacuacaaauca

SEQ ID NO: 1314534 - RNA, 23 nt, Human
ucaaacggccucacuaggcuucu

SEQ ID NO: 1314535 - RNA, 13 nt, Human
uauuuauuacugu

SEQ ID NO: 1314536 - RNA, 22 nt, Human
uauuucuaugaaauauuauguu

SEQ ID NO: 1314537 - RNA, 14 nt, Human
uauuuauugguuuu

SEQ ID NO: 1314538 - RNA, 13 nt, Human
uauuuauuguauu

SEQ ID NO: 1314539 - RNA, 17 nt, Human
uauuuauuguauucugg

SEQ ID NO: 1314540 - RNA, 21 nt, Human
uauuucuaugaaauauuaugu

SEQ ID NO: 1314541 - RNA, 20 nt, Human
uaucugaauuuuuaaacaag

SEQ ID NO: 1314542 - RNA, 19 nt, Human
uaucugaauuuuuaaacaa

SEQ ID NO: 1314543 - RNA, 17 nt, Human
uauuucugcauauguug

SEQ ID NO: 1314544 - RNA, 14 nt, Human
uauuucugccuccc

SEQ ID NO: 1314545 - RNA, 22 nt, Human
uauuucuguaauuauaucuaaa

SEQ ID NO: 1314546 - RNA, 13 nt, Human
uauuucuuaaaca

SEQ ID NO: 1314547 - RNA, 16 nt, Human
uauuucuuaaacacuu

SEQ ID NO: 1314548 - RNA, 19 nt, Human
uauuucuuaaaucuaguaa

SEQ ID NO: 1314549 - RNA, 14 nt, Human
uauuugauguaaua

SEQ ID NO: 1314550 - RNA, 19 nt, Human
uauuugauguaauacuucu

SEQ ID NO: 1314551 - RNA, 14 nt, Human
uauuugcuaauuuu

SEQ ID NO: 1314552 - RNA, 11 nt, Human
uauuugcuuuu

SEQ ID NO: 1314553 - RNA, 16 nt, Human
uauuuggaaauaaagu

SEQ ID NO: 1314554 - RNA, 17 nt, Human
uauuuggaaauaaaguc

SEQ ID NO: 1314555 - RNA, 19 nt, Human
uauuuggaaauaaagucag

SEQ ID NO: 1314556 - RNA, 14 nt, Human
uauuugggaaguga

SEQ ID NO: 1314557 - RNA, 15 nt, Human
uauuugggaagugaa

SEQ ID NO: 1314558 - RNA, 23 nt, Human
uauuugggccugcuccagaccug

SEQ ID NO: 1314559 - RNA, 21 nt, Human
uauuuuagugaacuugaaaua

SEQ ID NO: 1314560 - RNA, 19 nt, Human
ucaacuccaaacugacucu

SEQ ID NO: 1314561 - RNA, 15 nt, Human
ucaacuaggaucaga

SEQ ID NO: 1314562 - RNA, 23 nt, Human
ucaagcagcgaccgcccccuccu

SEQ ID NO: 1314563 - RNA, 16 nt, Human
ucaagcagucgugccu

SEQ ID NO: 1314564 - RNA, 17 nt, Human
ucaagcagucgugccug

SEQ ID NO: 1314565 - RNA, 18 nt, Human
ucaagcagucgugccugu

SEQ ID NO: 1314566 - RNA, 11 nt, Human
ucaaccucauc

SEQ ID NO: 1314567 - RNA, 12 nt, Human
ucaaccucccaa

SEQ ID NO: 1314568 - RNA, 21 nt, Human
ucaacggaaagugcugucuua

SEQ ID NO: 1314569 - RNA, 15 nt, Human
ucaacguauuguuuc

SEQ ID NO: 1314570 - RNA, 20 nt, Human
ucaaacuacuuugcugcuaa

SEQ ID NO: 1314571 - RNA, 18 nt, Human
ucaaacuccugaccucag

SEQ ID NO: 1314572 - RNA, 20 nt, Human
ucaaacuccugaccucaggc

SEQ ID NO: 1314573 - RNA, 21 nt, Human
ucaaacuccugaccucaggca

SEQ ID NO: 1314574 - RNA, 15 nt, Human
ucaaacugaggaauu

SEQ ID NO: 1314575 - RNA, 12 nt, Human
ucaaagaaagug

SEQ ID NO: 1314576 - RNA, 14 nt, Human
ucaaagaaagugua

SEQ ID NO: 1314577 - RNA, 15 nt, Human
ucaaagaaaguguau

SEQ ID NO: 1314578 - RNA, 16 nt, Human
ucaaagaaaguguauu

SEQ ID NO: 1314579 - RNA, 15 nt, Human
ucaagcgauucuccu

SEQ ID NO: 1314580 - RNA, 19 nt, Human
ucaagcagucgugccugug

SEQ ID NO: 1314581 - RNA, 20 nt, Human
ucaagcagucgugccugugu

SEQ ID NO: 1314582 - RNA, 21 nt, Human
ucaagcagucgugccuguguc

SEQ ID NO: 1314583 - RNA, 22 nt, Human
ucaagcagucgugccugugucc

SEQ ID NO: 1314584 - RNA, 23 nt, Human
ucaagcagucgugccugugucca

SEQ ID NO: 1314585 - RNA, 16 nt, Human
ucaagccccggacuca

SEQ ID NO: 1314586 - RNA, 11 nt, Human
ucaagcucuga

SEQ ID NO: 1314587 - RNA, 12 nt, Human
ucaagcucugag

SEQ ID NO: 1314588 - RNA, 13 nt, Human
ucaagcucugagg

SEQ ID NO: 1314589 - RNA, 15 nt, Human
ucaagcucugaggga

SEQ ID NO: 1314590 - RNA, 21 nt, Human
ucaagcucugagggaaagggc

SEQ ID NO: 1314591 - RNA, 18 nt, Human
ucaagcucugagggaaag

SEQ ID NO: 1314592 - RNA, 20 nt, Human
ucaagcugaguauuaaaaug

SEQ ID NO: 1314593 - RNA, 23 nt, Human
ucaagcugaguauuaaaauguau

SEQ ID NO: 1314594 - RNA, 21 nt, Human
ucaagcugaguauuaaaaugu

SEQ ID NO: 1314595 - RNA, 23 nt, Human
ucacaggacagcccuucuuucca

SEQ ID NO: 1314596 - RNA, 19 nt, Human
ucacaggaaguagaggagg

SEQ ID NO: 1314597 - RNA, 14 nt, Human
ucacacaaagcaga

SEQ ID NO: 1314598 - RNA, 20 nt, Human
ucacacaggcauuuccuggg

SEQ ID NO: 1314599 - RNA, 21 nt, Human
ucacacaggcauuuccugggu

SEQ ID NO: 1314600 - RNA, 23 nt, Human
ucacacaggcauuuccugggugg

SEQ ID NO: 1314601 - RNA, 16 nt, Human
ucacaauaauuuucua

SEQ ID NO: 1314602 - RNA, 15 nt, Human
ucacaauaauuuucu

SEQ ID NO: 1314603 - RNA, 15 nt, Human
ucacaaugagauuga

SEQ ID NO: 1314604 - RNA, 13 nt, Human
ucacacaaagcag

SEQ ID NO: 1314605 - RNA, 13 nt, Human
ucaaugcagcccc

SEQ ID NO: 1314606 - RNA, 17 nt, Human
ucaaugcuauaacuaug

SEQ ID NO: 1314607 - RNA, 14 nt, Human
ucaauggggccagu

SEQ ID NO: 1314608 - RNA, 15 nt, Human
ucaauacagauauau

SEQ ID NO: 1314609 - RNA, 16 nt, Human
ucaauacagauauauu

SEQ ID NO: 1314610 - RNA, 19 nt, Human
ucaauacagauauauuuuc

SEQ ID NO: 1314611 - RNA, 14 nt, Human
ucaauacagauaua

SEQ ID NO: 1314612 - RNA, 12 nt, Human
ucaauagccacu

SEQ ID NO: 1314613 - RNA, 13 nt, Human
ucaauagccacua

SEQ ID NO: 1314614 - RNA, 23 nt, Human
ucaauagccacuaaccuugccug

SEQ ID NO: 1314615 - RNA, 22 nt, Human
ucaauagccacuaaccuugccu

SEQ ID NO: 1314616 - RNA, 16 nt, Human
guuuaguaaucauauu

SEQ ID NO: 1314617 - RNA, 20 nt, Human
guuuagcugacaaaauacuu

SEQ ID NO: 1314618 - RNA, 14 nt, Human
guuuaggcuauuug

SEQ ID NO: 1314619 - RNA, 17 nt, Human
guuuagcugacaaaaua

SEQ ID NO: 1314620 - RNA, 15 nt, Human
guuuagcugacaaaa

SEQ ID NO: 1314621 - RNA, 14 nt, Human
guuuagcugacaaa

SEQ ID NO: 1314622 - RNA, 16 nt, Human
guuuagcucugagaac

SEQ ID NO: 1314623 - RNA, 14 nt, Human
guuuagcucugaga

SEQ ID NO: 1314624 - RNA, 15 nt, Human
guuuagcucugagaa

SEQ ID NO: 1314625 - RNA, 15 nt, Human
guuuaggcuauuugu

SEQ ID NO: 1314626 - RNA, 22 nt, Human
guuuaggcuauuuguaaaucug

SEQ ID NO: 1314627 - RNA, 23 nt, Human
guuuaggcuauuuguaaaucugc

SEQ ID NO: 1314628 - RNA, 16 nt, Human
guuuagggaacaauuu

SEQ ID NO: 1314629 - RNA, 17 nt, Human
guuuagggaacaauuug

SEQ ID NO: 1314630 - RNA, 20 nt, Human
guuuagcuggaaaaguaugu

SEQ ID NO: 1314631 - RNA, 12 nt, Human
guuuagcucuga

SEQ ID NO: 1314632 - RNA, 13 nt, Human
guuuagcucugag

SEQ ID NO: 1314633 - RNA, 20 nt, Human
guuuagauuuaugguuguua

SEQ ID NO: 1314634 - RNA, 14 nt, Human
gguugcagacagga

SEQ ID NO: 1314635 - RNA, 16 nt, Human
gguuggcucugccagu

SEQ ID NO: 1314636 - RNA, 20 nt, Human
gguuggcucugccaguccug

SEQ ID NO: 1314637 - RNA, 16 nt, Human
guuuacuuguuucaga

SEQ ID NO: 1314638 - RNA, 17 nt, Human
guuuagaaagcuugccc

SEQ ID NO: 1314639 - RNA, 13 nt, Human
guuuagaaagcuu

SEQ ID NO: 1314640 - RNA, 16 nt, Human
guuuccuuauauuaug

SEQ ID NO: 1314641 - RNA, 22 nt, Human
guuuccugcccugggaggcagu

SEQ ID NO: 1314642 - RNA, 13 nt, Human
guuuccugcccug

SEQ ID NO: 1314643 - RNA, 17 nt, Human
guuuccugcccugggag

SEQ ID NO: 1314644 - RNA, 16 nt, Human
guuucccaagagcuac

SEQ ID NO: 1314645 - RNA, 14 nt, Human
guuucccaggccca

SEQ ID NO: 1314646 - RNA, 22 nt, Human
guuuccugaaacaacuuggaaa

SEQ ID NO: 1314647 - RNA, 18 nt, Human
guuucagcgacuccguug

SEQ ID NO: 1314648 - RNA, 12 nt, Human
guuucagcacua

SEQ ID NO: 1314649 - RNA, 23 nt, Human
guuucagcacuagccaaaccuca

SEQ ID NO: 1314650 - RNA, 22 nt, Human
guuucaggagagaguugaaccu

SEQ ID NO: 1314651 - RNA, 23 nt, Human
guuucaggagagaguugaaccua

SEQ ID NO: 1314652 - RNA, 19 nt, Human
guuucauuuagucauguga

SEQ ID NO: 1314653 - RNA, 20 nt, Human
guuucauuuagucaugugac

SEQ ID NO: 1314654 - RNA, 21 nt, Human
guuucauuuagucaugugacc

SEQ ID NO: 1314655 - RNA, 16 nt, Human
guuuccacagccugca

SEQ ID NO: 1314656 - RNA, 13 nt, Human
guuuccagcauuc

SEQ ID NO: 1314657 - RNA, 16 nt, Human
guuuccagcauuccca

SEQ ID NO: 1314658 - RNA, 19 nt, Human
guuuccagcauucccaggu

SEQ ID NO: 1314659 - RNA, 18 nt, Human
guuucuuuguaaugaaaa

SEQ ID NO: 1314660 - RNA, 17 nt, Human
guuucuuuguaaugaaa

SEQ ID NO: 1314661 - RNA, 14 nt, Human
guuucuuuguaaug

SEQ ID NO: 1314662 - RNA, 19 nt, Human
guuucuuucucugaggaca

SEQ ID NO: 1314663 - RNA, 20 nt, Human
guuucuuucucugaggacaa

SEQ ID NO: 1314664 - RNA, 12 nt, Human
guuucuuucuuu

SEQ ID NO: 1314665 - RNA, 23 nt, Human
guuucuuucuuucuuuauuuuga

SEQ ID NO: 1314666 - RNA, 18 nt, Human
guuucuaaacuggagacu

SEQ ID NO: 1314667 - RNA, 19 nt, Human
guuuccuugggaguuguca

SEQ ID NO: 1314668 - RNA, 15 nt, Human
guuucguggggaggu

SEQ ID NO: 1314669 - RNA, 23 nt, Human
guuucguggggaggucuaaucua

SEQ ID NO: 1314670 - RNA, 15 nt, Human
guuucuaaacuggag

SEQ ID NO: 1314671 - RNA, 17 nt, Human
guuucuaaacuggagac

SEQ ID NO: 1314672 - RNA, 16 nt, Human
guuugugacagggcgg

SEQ ID NO: 1314673 - RNA, 17 nt, Human
guuugugacagggcggg

SEQ ID NO: 1314674 - RNA, 19 nt, Human
guuuguggaaaaugaaaau

SEQ ID NO: 1314675 - RNA, 19 nt, Human
guuugugcuguaaagaguu

SEQ ID NO: 1314676 - RNA, 20 nt, Human
guuugaugaggcccuccaca

SEQ ID NO: 1314677 - RNA, 15 nt, Human
guuugagauucucaa

SEQ ID NO: 1314678 - RNA, 16 nt, Human
guuugauagauuuucu

SEQ ID NO: 1314679 - RNA, 15 nt, Human
guuugaugaggcccu

SEQ ID NO: 1314680 - RNA, 19 nt, Human
guuugaugaggcccuccac

SEQ ID NO: 1314681 - RNA, 11 nt, Human
uaaaaaacacu

SEQ ID NO: 1314682 - RNA, 22 nt, Human
uaaaaaaauaagaagaaugcuu

SEQ ID NO: 1314683 - RNA, 15 nt, Human
uaaaaaaauaagaag

SEQ ID NO: 1314684 - RNA, 20 nt, Human
uaaaaaaauaagaagaaugc

SEQ ID NO: 1314685 - RNA, 15 nt, Human
uaaaaaaaagaugaa

SEQ ID NO: 1314686 - RNA, 23 nt, Human
guuuuucagguauauaccuccau

SEQ ID NO: 1314687 - RNA, 16 nt, Human
guuuuucacauuuucc

SEQ ID NO: 1314688 - RNA, 12 nt, Human
guuuuucacauu

SEQ ID NO: 1314689 - RNA, 14 nt, Human
guuuuucacauuuu

SEQ ID NO: 1314690 - RNA, 19 nt, Human
uaaaaaaaaagaucuguuu

SEQ ID NO: 1314691 - RNA, 21 nt, Human
guuuuuauuuccuaugaugua

SEQ ID NO: 1314692 - RNA, 20 nt, Human
guuuuuauuuccuaugaugu

SEQ ID NO: 1314693 - RNA, 19 nt, Human
guuuuuauuuccuaugaug

SEQ ID NO: 1314694 - RNA, 16 nt, Human
guuuuuauuuccuaug

SEQ ID NO: 1314695 - RNA, 14 nt, Human
guuuuuauuuccua

SEQ ID NO: 1314696 - RNA, 21 nt, Human
guuuuuaucugaaaucaauua

SEQ ID NO: 1314697 - RNA, 17 nt, Human
guuuuuaugagaaacuu

SEQ ID NO: 1314698 - RNA, 15 nt, Human
guuuuuaugagaaac

SEQ ID NO: 1314699 - RNA, 17 nt, Human
uaaaaacaaagaaauua

SEQ ID NO: 1314700 - RNA, 19 nt, Human
uaaaaaaugguucagaauu

SEQ ID NO: 1314701 - RNA, 12 nt, Human
uaaaaaaugguu

SEQ ID NO: 1314702 - RNA, 14 nt, Human
uaaaaaauggucac

SEQ ID NO: 1314703 - RNA, 19 nt, Human
uaaaaaagcuuaaaacuuu

SEQ ID NO: 1314704 - RNA, 17 nt, Human
uaaaaaagaucccaaau

SEQ ID NO: 1314705 - RNA, 17 nt, Human
uaaaaaagcuuaaaacu

SEQ ID NO: 1314706 - RNA, 18 nt, Human
uaaaaaagcuuaaaacuu

SEQ ID NO: 1314707 - RNA, 22 nt, Human
uaaaaaaguuuagaaugugugu

SEQ ID NO: 1314708 - RNA, 15 nt, Human
uaaaaaccuguucaa

SEQ ID NO: 1314709 - RNA, 20 nt, Human
uaaaaacuagaggugagaaa

SEQ ID NO: 1314710 - RNA, 14 nt, Human
uaaaaacucaagga

SEQ ID NO: 1314711 - RNA, 21 nt, Human
uaaaaacugagugacucuaua

SEQ ID NO: 1314712 - RNA, 16 nt, Human
uaaaaacugagugacu

SEQ ID NO: 1314713 - RNA, 18 nt, Human
uaaaaagaaaaaugugua

SEQ ID NO: 1314714 - RNA, 19 nt, Human
uaaaaaugauuucaguagc

SEQ ID NO: 1314715 - RNA, 16 nt, Human
uaaaaaagaaacauuu

SEQ ID NO: 1314716 - RNA, 15 nt, Human
uaaaaaaccacaugg

SEQ ID NO: 1314717 - RNA, 17 nt, Human
uaaaaaacuaaaaacua

SEQ ID NO: 1314718 - RNA, 19 nt, Human
uaaaaaacuaaaaacuaga

SEQ ID NO: 1314719 - RNA, 12 nt, Human
uaaaaaagauaa

SEQ ID NO: 1314720 - RNA, 13 nt, Human
uaaaaaagauaaa

SEQ ID NO: 1314721 - RNA, 16 nt, Human
uaaaaaagauaaacac

SEQ ID NO: 1314722 - RNA, 17 nt, Human
uaaaaaagauaaacaca

SEQ ID NO: 1314723 - RNA, 20 nt, Human
uaaaaaagcuuaaaacuuug

SEQ ID NO: 1314724 - RNA, 12 nt, Human
uaaaaaacacug

SEQ ID NO: 1314725 - RNA, 11 nt, Human
uaaaaaacaac

SEQ ID NO: 1314726 - RNA, 18 nt, Human
guuuucaggcuagaugua

SEQ ID NO: 1314727 - RNA, 18 nt, Human
guuuucauccauaacuga

SEQ ID NO: 1314728 - RNA, 16 nt, Human
guuuguugugaggauu

SEQ ID NO: 1314729 - RNA, 23 nt, Human
guuugugccuuuuuauuuuuguu

SEQ ID NO: 1314730 - RNA, 22 nt, Human
guuuguugguugguuuucuucu

SEQ ID NO: 1314731 - RNA, 18 nt, Human
guuuguuuacaaaaucag

SEQ ID NO: 1314732 - RNA, 17 nt, Human
guuuucauuugguucau

SEQ ID NO: 1314733 - RNA, 16 nt, Human
guuuucauuugguuca

SEQ ID NO: 1314734 - RNA, 19 nt, Human
guuuucauccauaacugaa

SEQ ID NO: 1314735 - RNA, 20 nt, Human
guuuucauccauaacugaac

SEQ ID NO: 1314736 - RNA, 21 nt, Human
guuuucauccauaacugaaca

SEQ ID NO: 1314737 - RNA, 23 nt, Human
guuuucuaguguaucaaaaugcu

SEQ ID NO: 1314738 - RNA, 14 nt, Human
guuuucuaguguau

SEQ ID NO: 1314739 - RNA, 14 nt, Human
guuuucuaauugcu

SEQ ID NO: 1314740 - RNA, 13 nt, Human
guuuucuccuccc

SEQ ID NO: 1314741 - RNA, 16 nt, Human
guuuucuccucccagg

SEQ ID NO: 1314742 - RNA, 18 nt, Human
guuuucuccucccaggaa

SEQ ID NO: 1314743 - RNA, 21 nt, Human
guuuucuccucccaggaacug

SEQ ID NO: 1314744 - RNA, 18 nt, Human
guuuucuccaagagcuac

SEQ ID NO: 1314745 - RNA, 17 nt, Human
guuuucucucggcuccc

SEQ ID NO: 1314746 - RNA, 14 nt, Human
guuuucgaaaauca

SEQ ID NO: 1314747 - RNA, 16 nt, Human
guuuucgaaaaucaaa

SEQ ID NO: 1314748 - RNA, 11 nt, Human
guuuucuaauu

SEQ ID NO: 1314749 - RNA, 12 nt, Human
guuuucuaauug

SEQ ID NO: 1314750 - RNA, 19 nt, Human
guuuucucucggcucccca

SEQ ID NO: 1314751 - RNA, 14 nt, Human
guuuucucugaaca

SEQ ID NO: 1314752 - RNA, 17 nt, Human
guuuucugaaaauauaa

SEQ ID NO: 1314753 - RNA, 12 nt, Human
guuuuguauucu

SEQ ID NO: 1314754 - RNA, 15 nt, Human
guuuuguauucucug

SEQ ID NO: 1314755 - RNA, 14 nt, Human
guuuugugucucuu

SEQ ID NO: 1314756 - RNA, 16 nt, Human
guuuugugucucuuau

SEQ ID NO: 1314757 - RNA, 15 nt, Human
guuuuguuuuuacaa

SEQ ID NO: 1314758 - RNA, 14 nt, Human
guuuuuacugcucu

SEQ ID NO: 1314759 - RNA, 18 nt, Human
guuuuuacugcucugaga

SEQ ID NO: 1314760 - RNA, 16 nt, Human
guuuuuacugcucuga

SEQ ID NO: 1314761 - RNA, 13 nt, Human
guuuuuaaacugu

SEQ ID NO: 1314762 - RNA, 14 nt, Human
guuuuuaaacugua

SEQ ID NO: 1314763 - RNA, 15 nt, Human
guuuuuaaacuguac

SEQ ID NO: 1314764 - RNA, 16 nt, Human
guuuuuaaacuguaca

SEQ ID NO: 1314765 - RNA, 17 nt, Human
guuuuuaaacuguacag

SEQ ID NO: 1314766 - RNA, 18 nt, Human
guuuuuaaacuguacagu

SEQ ID NO: 1314767 - RNA, 20 nt, Human
guuuuuaaacuguacagugu

SEQ ID NO: 1314768 - RNA, 22 nt, Human
guuuuuaaacuguacagugucu

SEQ ID NO: 1314769 - RNA, 16 nt, Human
uaaaaugagaaaucua

SEQ ID NO: 1314770 - RNA, 15 nt, Human
uaaaaugagaaaucu

SEQ ID NO: 1314771 - RNA, 21 nt, Human
uaaaaugacaaucaugugugu

SEQ ID NO: 1314772 - RNA, 17 nt, Human
uaaaaugacaaucaugu

SEQ ID NO: 1314773 - RNA, 18 nt, Human
uaaaaugacaaucaugug

SEQ ID NO: 1314774 - RNA, 19 nt, Human
uaaaaugacaaucaugugu

SEQ ID NO: 1314775 - RNA, 23 nt, Human
uaaaaugauauuguuauauacau

SEQ ID NO: 1314776 - RNA, 13 nt, Human
uaaaaugagaaau

SEQ ID NO: 1314777 - RNA, 23 nt, Human
uaaaaucuugucauguguauaaa

SEQ ID NO: 1314778 - RNA, 14 nt, Human
uaaaaugacaauca

SEQ ID NO: 1314779 - RNA, 21 nt, Human
uaaaaucugcuuguauuccaa

SEQ ID NO: 1314780 - RNA, 13 nt, Human
uaaaaucugucac

SEQ ID NO: 1314781 - RNA, 20 nt, Human
uaaaaucuugucauguguau

SEQ ID NO: 1314782 - RNA, 21 nt, Human
uaaaaucuugucauguguaua

SEQ ID NO: 1314783 - RNA, 22 nt, Human
uaaaaucuugucauguguauaa

SEQ ID NO: 1314784 - RNA, 13 nt, Human
uaaaauauuuauu

SEQ ID NO: 1314785 - RNA, 14 nt, Human
uaaaauauuuugaa

SEQ ID NO: 1314786 - RNA, 16 nt, Human
uaaaauauuuugaauc

SEQ ID NO: 1314787 - RNA, 20 nt, Human
uaaaauauuuugaaucaaua

SEQ ID NO: 1314788 - RNA, 19 nt, Human
uaaaauccauacauuugug

SEQ ID NO: 1314789 - RNA, 15 nt, Human
uaaaauccucaaucc

SEQ ID NO: 1314790 - RNA, 21 nt, Human
uaaaagggacugagaaauuua

SEQ ID NO: 1314791 - RNA, 20 nt, Human
uaaaagggacugagaaauuu

SEQ ID NO: 1314792 - RNA, 19 nt, Human
uaaaagggacugagaaauu

SEQ ID NO: 1314793 - RNA, 17 nt, Human
uaaaagggacugagaaa

SEQ ID NO: 1314794 - RNA, 14 nt, Human
uaaaagcauuuugu

SEQ ID NO: 1314795 - RNA, 15 nt, Human
uaaaagcauuuugua

SEQ ID NO: 1314796 - RNA, 16 nt, Human
uaaaagcauuuuguaa

SEQ ID NO: 1314797 - RNA, 17 nt, Human
uaaaagcauuuuguaau

SEQ ID NO: 1314798 - RNA, 18 nt, Human
uaaaagcauuuuguaaua

SEQ ID NO: 1314799 - RNA, 12 nt, Human
uaaaagccugcu

SEQ ID NO: 1314800 - RNA, 14 nt, Human
uaaaagccugcuca

SEQ ID NO: 1314801 - RNA, 22 nt, Human
uaaaaauggaaacuauauugac

SEQ ID NO: 1314802 - RNA, 15 nt, Human
uaaaaaugaucuaaa

SEQ ID NO: 1314803 - RNA, 16 nt, Human
uaaaaaugauuucagu

SEQ ID NO: 1314804 - RNA, 23 nt, Human
uaaaaauggcaggggguggaauu

SEQ ID NO: 1314805 - RNA, 15 nt, Human
uaaaaaugguuuaaa

SEQ ID NO: 1314806 - RNA, 13 nt, Human
uaaaagaugaaag

SEQ ID NO: 1314807 - RNA, 17 nt, Human
uaaaagaugaaagagca

SEQ ID NO: 1314808 - RNA, 12 nt, Human
uaaaagaugcuu

SEQ ID NO: 1314809 - RNA, 14 nt, Human
uaaaagaugcuuuu

SEQ ID NO: 1314810 - RNA, 15 nt, Human
uaaaagaugcuuuua

SEQ ID NO: 1314811 - RNA, 21 nt, Human
uaaacacucuugaaaaaugca

SEQ ID NO: 1314812 - RNA, 22 nt, Human
uaaacaaguauuuguuaauuua

SEQ ID NO: 1314813 - RNA, 22 nt, Human
uaaacacaagauugguguuuuu

SEQ ID NO: 1314814 - RNA, 22 nt, Human
uaaacagauguccaucagauga

SEQ ID NO: 1314815 - RNA, 21 nt, Human
uaaacagauguccaucagaug

SEQ ID NO: 1314816 - RNA, 16 nt, Human
uaaacagauguccauc

SEQ ID NO: 1314817 - RNA, 14 nt, Human
uaaacacagacagg

SEQ ID NO: 1314818 - RNA, 20 nt, Human
uaaacacaagauugguguuu

SEQ ID NO: 1314819 - RNA, 16 nt, Human
uaaacacuugcaaccu

SEQ ID NO: 1314820 - RNA, 14 nt, Human
uaaacaagaaaaau

SEQ ID NO: 1314821 - RNA, 17 nt, Human
uaaacaagaaaaauaaa

SEQ ID NO: 1314822 - RNA, 18 nt, Human
uaaacaagaaaaauaaag

SEQ ID NO: 1314823 - RNA, 19 nt, Human
uaaacaagaaaaauaaaga

SEQ ID NO: 1314824 - RNA, 21 nt, Human
uaaacaagaaaaauaaagaaa

SEQ ID NO: 1314825 - RNA, 20 nt, Human
uaaacaagaaaaauaaagaa

SEQ ID NO: 1314826 - RNA, 13 nt, Human
uaaacaaguauuu

SEQ ID NO: 1314827 - RNA, 18 nt, Human
uaaacaaguauuuguuaa

SEQ ID NO: 1314828 - RNA, 23 nt, Human
uaaacaaguauuuguuaauuuag

SEQ ID NO: 1314829 - RNA, 13 nt, Human
uaaacaagaaaaa

SEQ ID NO: 1314830 - RNA, 16 nt, Human
uaaaaugauuguagua

SEQ ID NO: 1314831 - RNA, 14 nt, Human
uaaaaugcuagguu

SEQ ID NO: 1314832 - RNA, 16 nt, Human
uaaaaugcuagguucu

SEQ ID NO: 1314833 - RNA, 17 nt, Human
uaaaaugcuagguucua

SEQ ID NO: 1314834 - RNA, 20 nt, Human
uaaaaugcuagguucuaccu

SEQ ID NO: 1314835 - RNA, 23 nt, Human
uaaaaugcuuacauuugaacuug

SEQ ID NO: 1314836 - RNA, 18 nt, Human
uaaacuguacagugucuu

SEQ ID NO: 1314837 - RNA, 16 nt, Human
uaaacuggagacugug

SEQ ID NO: 1314838 - RNA, 12 nt, Human
uaaacuguacag

SEQ ID NO: 1314839 - RNA, 13 nt, Human
uaaacuguacagu

SEQ ID NO: 1314840 - RNA, 14 nt, Human
uaaacuguacagug

SEQ ID NO: 1314841 - RNA, 15 nt, Human
uaaacuguacagugu

SEQ ID NO: 1314842 - RNA, 17 nt, Human
uaaacuguacagugucu

SEQ ID NO: 1314843 - RNA, 16 nt, Human
uaaacuuuaucacuua

SEQ ID NO: 1314844 - RNA, 20 nt, Human
uaaacugcccccucugcccu

SEQ ID NO: 1314845 - RNA, 21 nt, Human
uaaacugcccccucugcccug

SEQ ID NO: 1314846 - RNA, 22 nt, Human
uaaacaguugcacagcaucuca

SEQ ID NO: 1314847 - RNA, 22 nt, Human
uaaacugcccccucugcccugc

SEQ ID NO: 1314848 - RNA, 23 nt, Human
uaaacugcccccucugcccugcg

SEQ ID NO: 1314849 - RNA, 12 nt, Human
uaaacuggagac

SEQ ID NO: 1314850 - RNA, 13 nt, Human
uaaacuggagacu

SEQ ID NO: 1314851 - RNA, 14 nt, Human
uaaacuggagacug

SEQ ID NO: 1314852 - RNA, 23 nt, Human
uaaacuggagacugugugugccc

SEQ ID NO: 1314853 - RNA, 19 nt, Human
uaaacaguugcacagcauc

SEQ ID NO: 1314854 - RNA, 18 nt, Human
uaaacaguugcacagcau

SEQ ID NO: 1314855 - RNA, 17 nt, Human
uaaacaguugcacagca

SEQ ID NO: 1314856 - RNA, 16 nt, Human
uaaacaguugcacagc

SEQ ID NO: 1314857 - RNA, 20 nt, Human
uaaacagugagccugaauuu

SEQ ID NO: 1314858 - RNA, 23 nt, Human
uaaacagugagccugaauuuugu

SEQ ID NO: 1314859 - RNA, 23 nt, Human
uaaacagauguccaucagaugac

SEQ ID NO: 1314860 - RNA, 22 nt, Human
uaaauauauuuuaagacgaaac

SEQ ID NO: 1314861 - RNA, 16 nt, Human
uaaauauauuuuaaga

SEQ ID NO: 1314862 - RNA, 23 nt, Human
uaaauauauuauuacuuguaaau

SEQ ID NO: 1314863 - RNA, 18 nt, Human
uaaauauaugcuaagucu

SEQ ID NO: 1314864 - RNA, 13 nt, Human
uaaauauauuauu

SEQ ID NO: 1314865 - RNA, 14 nt, Human
uaaauauauuauua

SEQ ID NO: 1314866 - RNA, 15 nt, Human
uaaauauauuauuac

SEQ ID NO: 1314867 - RNA, 17 nt, Human
uaaauauauuauuacuu

SEQ ID NO: 1314868 - RNA, 18 nt, Human
uaaauauauuauuacuug

SEQ ID NO: 1314869 - RNA, 20 nt, Human
uaaauauauuauuacuugua

SEQ ID NO: 1314870 - RNA, 21 nt, Human
uaaauauauuauuacuuguaa

SEQ ID NO: 1314871 - RNA, 22 nt, Human
uaaauauauuauuacuuguaaa

SEQ ID NO: 1314872 - RNA, 17 nt, Human
uaaauauauuuaagaua

SEQ ID NO: 1314873 - RNA, 22 nt, Human
uaaauauauuuaagauaauuau

SEQ ID NO: 1314874 - RNA, 17 nt, Human
uaaauaaaaugcuaggu

SEQ ID NO: 1314875 - RNA, 20 nt, Human
uaaauaaaaugcuagguucu

SEQ ID NO: 1314876 - RNA, 21 nt, Human
uaaauaaaaugcuagguucua

SEQ ID NO: 1314877 - RNA, 22 nt, Human
uaaauaaaaugcuagguucuac

SEQ ID NO: 1314878 - RNA, 23 nt, Human
uaaauaaaaugcuagguucuacc

SEQ ID NO: 1314879 - RNA, 13 nt, Human
uaaauaaaauuug

SEQ ID NO: 1314880 - RNA, 14 nt, Human
uaaauaaaauuugu

SEQ ID NO: 1314881 - RNA, 20 nt, Human
uaaauaaaauuuguugcaua

SEQ ID NO: 1314882 - RNA, 13 nt, Human
uaaauaaacccuu

SEQ ID NO: 1314883 - RNA, 14 nt, Human
uaaauauaucuacc

SEQ ID NO: 1314884 - RNA, 18 nt, Human
uaaauauaucuaccccag

SEQ ID NO: 1314885 - RNA, 20 nt, Human
uaaauauaucuaccccagac

SEQ ID NO: 1314886 - RNA, 15 nt, Human
uaaaucauuuuaugu

SEQ ID NO: 1314887 - RNA, 13 nt, Human
uaaaucauuuuau

SEQ ID NO: 1314888 - RNA, 12 nt, Human
uaaaucauuuua

SEQ ID NO: 1314889 - RNA, 17 nt, Human
uaaaucaguaagaggug

SEQ ID NO: 1314890 - RNA, 19 nt, Human
uaaaucacgcuuuuugaaa

SEQ ID NO: 1314891 - RNA, 21 nt, Human
uaaaucacgcuuuuugaaaaa

SEQ ID NO: 1314892 - RNA, 22 nt, Human
uaaaucacgcuuuuugaaaaag

SEQ ID NO: 1314893 - RNA, 18 nt, Human
uaaaucaguaagaggugu

SEQ ID NO: 1314894 - RNA, 20 nt, Human
uaaaucagacuaugaaguuu

SEQ ID NO: 1314895 - RNA, 19 nt, Human
uaaaucaaguuggcuucua

SEQ ID NO: 1314896 - RNA, 22 nt, Human
uaaauauuuuuucuuuucuauu

SEQ ID NO: 1314897 - RNA, 13 nt, Human
uaaaucaauaaag

SEQ ID NO: 1314898 - RNA, 17 nt, Human
uaaauauuuuaaagaau

SEQ ID NO: 1314899 - RNA, 16 nt, Human
uaaaucacgcuuuuug

SEQ ID NO: 1314900 - RNA, 18 nt, Human
uaaaucacgcuuuuugaa

SEQ ID NO: 1314901 - RNA, 17 nt, Human
uaaauauggacugcuca

SEQ ID NO: 1314902 - RNA, 19 nt, Human
uaaauauggacugcucagg

SEQ ID NO: 1314903 - RNA, 21 nt, Human
uaaauauggacugcucaggaa

SEQ ID NO: 1314904 - RNA, 23 nt, Human
uaaauauggacugcucaggaaac

SEQ ID NO: 1314905 - RNA, 18 nt, Human
uaaauauuuuaaagaauu

SEQ ID NO: 1314906 - RNA, 14 nt, Human
uaaauauuuuaaag

SEQ ID NO: 1314907 - RNA, 15 nt, Human
uaaauauuuuaaaga

SEQ ID NO: 1314908 - RNA, 20 nt, Human
uaaacuuuuuucuuacuguc

SEQ ID NO: 1314909 - RNA, 15 nt, Human
uaaacuuuuaauuca

SEQ ID NO: 1314910 - RNA, 17 nt, Human
uaaacuuuuaauucauu

SEQ ID NO: 1314911 - RNA, 15 nt, Human
uaaacuuuaucacuu

SEQ ID NO: 1314912 - RNA, 16 nt, Human
uaaacuuuuaauucau

SEQ ID NO: 1314913 - RNA, 12 nt, Human
uaaacuuuuugu

SEQ ID NO: 1314914 - RNA, 17 nt, Human
uaaacuuuuuguucugg

SEQ ID NO: 1314915 - RNA, 16 nt, Human
uaaacuuuuuuucugu

SEQ ID NO: 1314916 - RNA, 18 nt, Human
uaaacuuuuuuucuguac

SEQ ID NO: 1314917 - RNA, 20 nt, Human
uaaacuuuuuuucuguacca

SEQ ID NO: 1314918 - RNA, 13 nt, Human
uaaagcaguauuu

SEQ ID NO: 1314919 - RNA, 14 nt, Human
uaaagcaguauuuu

SEQ ID NO: 1314920 - RNA, 17 nt, Human
uaaagcaguauuuuucu

SEQ ID NO: 1314921 - RNA, 14 nt, Human
uaaaggacuguaau

SEQ ID NO: 1314922 - RNA, 12 nt, Human
uaaaggacugua

SEQ ID NO: 1314923 - RNA, 14 nt, Human
uaaagcucugacau

SEQ ID NO: 1314924 - RNA, 15 nt, Human
uaaaggaguuuaugu

SEQ ID NO: 1314925 - RNA, 16 nt, Human
uaaaggaguuuauguu

SEQ ID NO: 1314926 - RNA, 17 nt, Human
uaaaggaguuuauguuc

SEQ ID NO: 1314927 - RNA, 14 nt, Human
uaaagcugaaaacu

SEQ ID NO: 1314928 - RNA, 11 nt, Human
uaaagcauuua

SEQ ID NO: 1314929 - RNA, 20 nt, Human
uaaagcauuuaaccccccug

SEQ ID NO: 1314930 - RNA, 19 nt, Human
uaaagcauuuagaaaacuu

SEQ ID NO: 1314931 - RNA, 13 nt, Human
uaaagcauuuaga

SEQ ID NO: 1314932 - RNA, 15 nt, Human
uaaagcguuugcaca

SEQ ID NO: 1314933 - RNA, 21 nt, Human
uaaagcguuugcacagaucaa

SEQ ID NO: 1314934 - RNA, 15 nt, Human
uaaagcuaaaauaaa

SEQ ID NO: 1314935 - RNA, 22 nt, Human
uaaagcuaaaauaaagaaauag

SEQ ID NO: 1314936 - RNA, 23 nt, Human
uaaagcuaaaauaaagaaauaga

SEQ ID NO: 1314937 - RNA, 16 nt, Human
uaaaggaugugauugu

SEQ ID NO: 1314938 - RNA, 22 nt, Human
uaaaggaugugauuguggaaug

SEQ ID NO: 1314939 - RNA, 19 nt, Human
uaaaggaguuuauguucca

SEQ ID NO: 1314940 - RNA, 16 nt, Human
uaaaggcaaaggcaau

SEQ ID NO: 1314941 - RNA, 17 nt, Human
uaaauaaaaauaauccu

SEQ ID NO: 1314942 - RNA, 23 nt, Human
uaaaguuuuauauauuauaugga

SEQ ID NO: 1314943 - RNA, 19 nt, Human
uaaaguuuuauauauuaua

SEQ ID NO: 1314944 - RNA, 16 nt, Human
uaaauaaaaagaaagg

SEQ ID NO: 1314945 - RNA, 17 nt, Human
uaaauaaaaagaaaggc

SEQ ID NO: 1314946 - RNA, 14 nt, Human
uaaaguuuguugaa

SEQ ID NO: 1314947 - RNA, 14 nt, Human
uaaaguuuuauaua

SEQ ID NO: 1314948 - RNA, 17 nt, Human
uaaaguuuuauauauua

SEQ ID NO: 1314949 - RNA, 18 nt, Human
uaaaguuuuauauauuau

SEQ ID NO: 1314950 - RNA, 18 nt, Human
uaauuaaaagcaaaucau

SEQ ID NO: 1314951 - RNA, 19 nt, Human
uaauuaaaagcaaaucauu

SEQ ID NO: 1314952 - RNA, 14 nt, Human
uaauguuucaaaca

SEQ ID NO: 1314953 - RNA, 23 nt, Human
uaaugcgcaggcuggcccugccc

SEQ ID NO: 1314954 - RNA, 15 nt, Human
uaauguuuaaaacau

SEQ ID NO: 1314955 - RNA, 15 nt, Human
uaauguuucaaacau

SEQ ID NO: 1314956 - RNA, 19 nt, Human
uaaugcgcaggcuggcccu

SEQ ID NO: 1314957 - RNA, 22 nt, Human
uaaugcgcaggcuggcccugcc

SEQ ID NO: 1314958 - RNA, 18 nt, Human
uaaugcauucuucucugu

SEQ ID NO: 1314959 - RNA, 19 nt, Human
uaaugcauucuucucuguu

SEQ ID NO: 1314960 - RNA, 12 nt, Human
uaaugcccagac

SEQ ID NO: 1314961 - RNA, 18 nt, Human
uaaugccucuucauucuu

SEQ ID NO: 1314962 - RNA, 15 nt, Human
uaaugccuuacucuu

SEQ ID NO: 1314963 - RNA, 21 nt, Human
uaaugccuuacucuucuugaa

SEQ ID NO: 1314964 - RNA, 14 nt, Human
uaauucucauuaaa

SEQ ID NO: 1314965 - RNA, 17 nt, Human
uaauucugaguuuugug

SEQ ID NO: 1314966 - RNA, 21 nt, Human
uaauuaauugggccagcuuuu

SEQ ID NO: 1314967 - RNA, 14 nt, Human
uaauuaauuguaau

SEQ ID NO: 1314968 - RNA, 16 nt, Human
uaauuaccaaccuguu

SEQ ID NO: 1314969 - RNA, 17 nt, Human
uaauuaccaaccuguua

SEQ ID NO: 1314970 - RNA, 21 nt, Human
uaauuaccaaccuguuaccua

SEQ ID NO: 1314971 - RNA, 16 nt, Human
uaauuaccuacucugg

SEQ ID NO: 1314972 - RNA, 18 nt, Human
uaauucucauuaaaagaa

SEQ ID NO: 1314973 - RNA, 16 nt, Human
uaauugagaagaaaaa

SEQ ID NO: 1314974 - RNA, 20 nt, Human
uaauugagaagaaaaacuca

SEQ ID NO: 1314975 - RNA, 12 nt, Human
uaauucuuucaa

SEQ ID NO: 1314976 - RNA, 18 nt, Human
uaauucuuucaauacaga

SEQ ID NO: 1314977 - RNA, 20 nt, Human
uaauucuuucaauacagaua

SEQ ID NO: 1314978 - RNA, 21 nt, Human
uaauucuuucaauacagauau

SEQ ID NO: 1314979 - RNA, 15 nt, Human
uaauucuuccuuugu

SEQ ID NO: 1314980 - RNA, 22 nt, Human
uaauuggaaaggcagcucuaaa

SEQ ID NO: 1314981 - RNA, 22 nt, Human
uaauugcuuauuuauuguauuc

SEQ ID NO: 1314982 - RNA, 15 nt, Human
uaauuggauuuccua

SEQ ID NO: 1314983 - RNA, 16 nt, Human
uaauuggauuuccuaa

SEQ ID NO: 1314984 - RNA, 17 nt, Human
uaauuggauuuccuaau

SEQ ID NO: 1314985 - RNA, 23 nt, Human
uaauuggauuuccuaauacuguc

SEQ ID NO: 1314986 - RNA, 21 nt, Human
uaauugggccagcuuuucaaa

SEQ ID NO: 1314987 - RNA, 18 nt, Human
uaauugguccgaucuuug

SEQ ID NO: 1314988 - RNA, 18 nt, Human
uaauugggccagcuuuuc

SEQ ID NO: 1314989 - RNA, 17 nt, Human
uaauugcauugacuuuc

SEQ ID NO: 1314990 - RNA, 22 nt, Human
uaauugccaaaaagugaaauaa

SEQ ID NO: 1314991 - RNA, 23 nt, Human
uaauugccaaaaagugaaauaau

SEQ ID NO: 1314992 - RNA, 14 nt, Human
uaauugccaccucu

SEQ ID NO: 1314993 - RNA, 18 nt, Human
uaauugccaccucuaaca

SEQ ID NO: 1314994 - RNA, 23 nt, Human
uaauugccaccucuaacagcacc

SEQ ID NO: 1314995 - RNA, 11 nt, Human
uaauugccaug

SEQ ID NO: 1314996 - RNA, 12 nt, Human
uaauugccaugu

SEQ ID NO: 1314997 - RNA, 13 nt, Human
uaauugcuuauuu

SEQ ID NO: 1314998 - RNA, 20 nt, Human
uaauugcuuauuuauuguau

SEQ ID NO: 1314999 - RNA, 21 nt, Human
uaauugcuuauuuauuguauu

SEQ ID NO: 1315000 - RNA, 21 nt, Human
uaauuguguuuacauuuuaug

SEQ ID NO: 1315001 - RNA, 22 nt, Human
uaauuguguuuacauuuuaugg

SEQ ID NO: 1315002 - RNA, 20 nt, Human
uaauuguguuuacauuuuau

SEQ ID NO: 1315003 - RNA, 19 nt, Human
uaauuguguuuacauuuua

SEQ ID NO: 1315004 - RNA, 18 nt, Human
uaauuguguuuacauuuu

SEQ ID NO: 1315005 - RNA, 17 nt, Human
uaauuguguuuacauuu

SEQ ID NO: 1315006 - RNA, 16 nt, Human
uaauuguguuuacauu

SEQ ID NO: 1315007 - RNA, 14 nt, Human
uaauuguguuuaca

SEQ ID NO: 1315008 - RNA, 13 nt, Human
uaauuguguuuac

SEQ ID NO: 1315009 - RNA, 20 nt, Human
uaauuguguggauucuuuaa

SEQ ID NO: 1315010 - RNA, 14 nt, Human
uaauuguguggauu

SEQ ID NO: 1315011 - RNA, 17 nt, Human
uaauuguucucagaauc

SEQ ID NO: 1315012 - RNA, 16 nt, Human
uaauuguucucagaau

SEQ ID NO: 1315013 - RNA, 16 nt, Human
uaauuguugcuaaucu

SEQ ID NO: 1315014 - RNA, 14 nt, Human
uaauuguuguucug

SEQ ID NO: 1315015 - RNA, 15 nt, Human
uaauuguuguucugu

SEQ ID NO: 1315016 - RNA, 16 nt, Human
uaauuguuguucuguu

SEQ ID NO: 1315017 - RNA, 17 nt, Human
uaauuguuguucuguua

SEQ ID NO: 1315018 - RNA, 18 nt, Human
uaauuguuguucuguuaa

SEQ ID NO: 1315019 - RNA, 19 nt, Human
uaauuguuguucuguuaac

SEQ ID NO: 1315020 - RNA, 20 nt, Human
uaauuguuguucuguuaacu

SEQ ID NO: 1315021 - RNA, 22 nt, Human
uaauuguaaaguaaaagcuaua

SEQ ID NO: 1315022 - RNA, 18 nt, Human
uaauuguacuaaagccaa

SEQ ID NO: 1315023 - RNA, 22 nt, Human
uaauuguacuaaagccaaacau

SEQ ID NO: 1315024 - RNA, 23 nt, Human
uaauuguacuaaagccaaacaua

SEQ ID NO: 1315025 - RNA, 23 nt, Human
uaauugugauuagacagaacacc

SEQ ID NO: 1315026 - RNA, 22 nt, Human
uaauugugauuagacagaacac

SEQ ID NO: 1315027 - RNA, 20 nt, Human
uaauuuguaguguuggagaa

SEQ ID NO: 1315028 - RNA, 18 nt, Human
uaauuugguuuucacauu

SEQ ID NO: 1315029 - RNA, 23 nt, Human
uaauuuggaucucuucuuaaugu

SEQ ID NO: 1315030 - RNA, 15 nt, Human
uaauuugguuuucac

SEQ ID NO: 1315031 - RNA, 17 nt, Human
uaauuugguuuucacau

SEQ ID NO: 1315032 - RNA, 23 nt, Human
uaauuguuguucuguuaacugaa

SEQ ID NO: 1315033 - RNA, 21 nt, Human
uaauuguuguucuguuaacug

SEQ ID NO: 1315034 - RNA, 23 nt, Human
uaauuuguaguguuggagaagaa

SEQ ID NO: 1315035 - RNA, 17 nt, Human
uaauuuguuuuggauau

SEQ ID NO: 1315036 - RNA, 14 nt, Human
uaauuuuaaacaaa

SEQ ID NO: 1315037 - RNA, 13 nt, Human
uaauuuuaaauuc

SEQ ID NO: 1315038 - RNA, 18 nt, Human
uaauuuuacacgcuuuug

SEQ ID NO: 1315039 - RNA, 19 nt, Human
uaauuuuacacgcuuuugu

SEQ ID NO: 1315040 - RNA, 20 nt, Human
uaauuuuacacgcuuuugug

SEQ ID NO: 1315041 - RNA, 21 nt, Human
uaauuuuacacgcuuuuguga

SEQ ID NO: 1315042 - RNA, 14 nt, Human
uaauuuuaguuuuu

SEQ ID NO: 1315043 - RNA, 16 nt, Human
uaauuuuaguuuuuca

SEQ ID NO: 1315044 - RNA, 19 nt, Human
uaauuuuaguuuuucauua

SEQ ID NO: 1315045 - RNA, 21 nt, Human
uaauuuuaguuuuucauuaaa

SEQ ID NO: 1315046 - RNA, 23 nt, Human
uaauuuuaguuuuucauuaaaua

SEQ ID NO: 1315047 - RNA, 17 nt, Human
uaauuuuccuaauaaag

SEQ ID NO: 1315048 - RNA, 22 nt, Human
uaauaauuuagacuucaagcau

SEQ ID NO: 1315049 - RNA, 13 nt, Human
uaauaauuucuaa

SEQ ID NO: 1315050 - RNA, 14 nt, Human
uaauaauuucuaau

SEQ ID NO: 1315051 - RNA, 16 nt, Human
uaauaauuucuaaugu

SEQ ID NO: 1315052 - RNA, 15 nt, Human
uaauaauguuucaaa

SEQ ID NO: 1315053 - RNA, 13 nt, Human
uaauaagguuuua

SEQ ID NO: 1315054 - RNA, 14 nt, Human
uaauaagguuuuaa

SEQ ID NO: 1315055 - RNA, 16 nt, Human
uaauaagguuuuaauu

SEQ ID NO: 1315056 - RNA, 21 nt, Human
uaauaagguuuuaauuuagua

SEQ ID NO: 1315057 - RNA, 16 nt, Human
uaauaauaaagaauag

SEQ ID NO: 1315058 - RNA, 20 nt, Human
uaauaauuuuuaagaaauaa

SEQ ID NO: 1315059 - RNA, 16 nt, Human
uaauaauuuuuuaauu

SEQ ID NO: 1315060 - RNA, 14 nt, Human
uaauacaaacuaau

SEQ ID NO: 1315061 - RNA, 14 nt, Human
uaauacaaaggcuu

SEQ ID NO: 1315062 - RNA, 15 nt, Human
uaauacaaacuauau

SEQ ID NO: 1315063 - RNA, 15 nt, Human
uaauacacacaguua

SEQ ID NO: 1315064 - RNA, 13 nt, Human
uaauaguuccugc

SEQ ID NO: 1315065 - RNA, 21 nt, Human
uaauauaaaaagcuuccauga

SEQ ID NO: 1315066 - RNA, 12 nt, Human
uaauaguuccug

SEQ ID NO: 1315067 - RNA, 21 nt, Human
uaauauaaaguaguccuguga

SEQ ID NO: 1315068 - RNA, 15 nt, Human
uaauauaaaguuuua

SEQ ID NO: 1315069 - RNA, 20 nt, Human
uaauauaaaguuuuauauau

SEQ ID NO: 1315070 - RNA, 22 nt, Human
uaauauaaaguuuuauauauua

SEQ ID NO: 1315071 - RNA, 12 nt, Human
uaauauaaaugc

SEQ ID NO: 1315072 - RNA, 13 nt, Human
uaauauaaaugca

SEQ ID NO: 1315073 - RNA, 14 nt, Human
uaauauaaaugcaa

SEQ ID NO: 1315074 - RNA, 16 nt, Human
uaauauaaaugcaaau

SEQ ID NO: 1315075 - RNA, 22 nt, Human
uaauauaaaugcaaauaacaaa

SEQ ID NO: 1315076 - RNA, 15 nt, Human
uaauaagguugaaca

SEQ ID NO: 1315077 - RNA, 11 nt, Human
uaauaaagcug

SEQ ID NO: 1315078 - RNA, 17 nt, Human
uaauaaauguacauuaa

SEQ ID NO: 1315079 - RNA, 19 nt, Human
uaauaaauguacauuaauu

SEQ ID NO: 1315080 - RNA, 17 nt, Human
uaauaaacuuuaauaua

SEQ ID NO: 1315081 - RNA, 19 nt, Human
uaaggccauuauuguacuu

SEQ ID NO: 1315082 - RNA, 16 nt, Human
uaaggccuaggauucu

SEQ ID NO: 1315083 - RNA, 18 nt, Human
uaaggccuaggauucuaa

SEQ ID NO: 1315084 - RNA, 19 nt, Human
uaaggccuaggauucuaaa

SEQ ID NO: 1315085 - RNA, 20 nt, Human
uaaggccuaggauucuaaaa

SEQ ID NO: 1315086 - RNA, 21 nt, Human
uaaggccuaggauucuaaaau

SEQ ID NO: 1315087 - RNA, 16 nt, Human
uaaggccugugggggg

SEQ ID NO: 1315088 - RNA, 12 nt, Human
uaaggcucuaga

SEQ ID NO: 1315089 - RNA, 14 nt, Human
uaaggcucuagauc

SEQ ID NO: 1315090 - RNA, 20 nt, Human
uaauauguucuuuuaaauga

SEQ ID NO: 1315091 - RNA, 17 nt, Human
uaauauauuuucuguuu

SEQ ID NO: 1315092 - RNA, 21 nt, Human
uaauauauuuucuguuuucuu

SEQ ID NO: 1315093 - RNA, 14 nt, Human
uaauauauuuaaaa

SEQ ID NO: 1315094 - RNA, 17 nt, Human
uaauauauuuaaaaaua

SEQ ID NO: 1315095 - RNA, 13 nt, Human
uaauauauuuucu

SEQ ID NO: 1315096 - RNA, 16 nt, Human
uaauauacuauauuua

SEQ ID NO: 1315097 - RNA, 16 nt, Human
uaauauauauuaucuu

SEQ ID NO: 1315098 - RNA, 18 nt, Human
uaauauauauuaucuuuu

SEQ ID NO: 1315099 - RNA, 19 nt, Human
uaauauauauuaucuuuuc

SEQ ID NO: 1315100 - RNA, 22 nt, Human
uaauccuguaggaagguacugu

SEQ ID NO: 1315101 - RNA, 23 nt, Human
uaauccuguaggaagguacugua

SEQ ID NO: 1315102 - RNA, 18 nt, Human
uaauccuguaggaaggua

SEQ ID NO: 1315103 - RNA, 14 nt, Human
uaauccuguaggaa

SEQ ID NO: 1315104 - RNA, 13 nt, Human
uaaucgaccugcc

SEQ ID NO: 1315105 - RNA, 14 nt, Human
uaaucgaccugccu

SEQ ID NO: 1315106 - RNA, 16 nt, Human
uaaucgaccugccucg

SEQ ID NO: 1315107 - RNA, 16 nt, Human
uaaucguguccccuau

SEQ ID NO: 1315108 - RNA, 15 nt, Human
uaaucuucaauaguu

SEQ ID NO: 1315109 - RNA, 14 nt, Human
uaaucuucugccuu

SEQ ID NO: 1315110 - RNA, 15 nt, Human
uaaucuuauuuagga

SEQ ID NO: 1315111 - RNA, 21 nt, Human
uaaucuuauucauuuucucua

SEQ ID NO: 1315112 - RNA, 22 nt, Human
uaaucuuauucauuuucucuaa

SEQ ID NO: 1315113 - RNA, 22 nt, Human
uaaucuuauaauuguucucaga

SEQ ID NO: 1315114 - RNA, 16 nt, Human
uaaugauaugcuugua

SEQ ID NO: 1315115 - RNA, 15 nt, Human
uaaugauaugcuugu

SEQ ID NO: 1315116 - RNA, 19 nt, Human
uaaugccacuaaauugaca

SEQ ID NO: 1315117 - RNA, 17 nt, Human
uaaugaugucguuugaa

SEQ ID NO: 1315118 - RNA, 23 nt, Human
uaaugaugucguuugaaucacag

SEQ ID NO: 1315119 - RNA, 12 nt, Human
uaaugcacuuuc

SEQ ID NO: 1315120 - RNA, 13 nt, Human
uaaugcacuuucu

SEQ ID NO: 1315121 - RNA, 14 nt, Human
uaaugcacuuucua

SEQ ID NO: 1315122 - RNA, 18 nt, Human
uaaucucuguaaagcuaa

SEQ ID NO: 1315123 - RNA, 17 nt, Human
uaaucucuguaaagcua

SEQ ID NO: 1315124 - RNA, 13 nt, Human
uaaucugaauaaa

SEQ ID NO: 1315125 - RNA, 17 nt, Human
uaaucugaauaaagugu

SEQ ID NO: 1315126 - RNA, 20 nt, Human
uaaucugaauaaaguguaac

SEQ ID NO: 1315127 - RNA, 21 nt, Human
uaaucugaauaaaguguaaca

SEQ ID NO: 1315128 - RNA, 22 nt, Human
uaaucugaauaaaguguaacaa

SEQ ID NO: 1315129 - RNA, 23 nt, Human
uaaucugaauaaaguguaacaau

SEQ ID NO: 1315130 - RNA, 21 nt, Human
uaaucugugcuguuucaaagu

SEQ ID NO: 1315131 - RNA, 22 nt, Human
uaaucugugcuguuucaaaguu

SEQ ID NO: 1315132 - RNA, 23 nt, Human
uaaucugugcuguuucaaaguuc

SEQ ID NO: 1315133 - RNA, 13 nt, Human
uaaucuuagugua

SEQ ID NO: 1315134 - RNA, 15 nt, Human
uaaucuuaguguaug

SEQ ID NO: 1315135 - RNA, 18 nt, Human
uaaucuuaguguaugauu

SEQ ID NO: 1315136 - RNA, 15 nt, Human
uaaucuuauaauugu

SEQ ID NO: 1315137 - RNA, 18 nt, Human
uaaucuuauaauuguucu

SEQ ID NO: 1315138 - RNA, 15 nt, Human
uaaauugcuccuuga

SEQ ID NO: 1315139 - RNA, 13 nt, Human
uaaauuggaaagc

SEQ ID NO: 1315140 - RNA, 17 nt, Human
uaaauuggcauggaaau

SEQ ID NO: 1315141 - RNA, 20 nt, Human
uaaauuggcauggaaauuua

SEQ ID NO: 1315142 - RNA, 19 nt, Human
uaaaucauuuuaugucaag

SEQ ID NO: 1315143 - RNA, 16 nt, Human
uaaauugauguugcug

SEQ ID NO: 1315144 - RNA, 13 nt, Human
uaaauugauuuuu

SEQ ID NO: 1315145 - RNA, 21 nt, Human
uaaauugauuuuuauaaauac

SEQ ID NO: 1315146 - RNA, 22 nt, Human
uaaauugauuuuuauaaauacu

SEQ ID NO: 1315147 - RNA, 14 nt, Human
uaaauuuaguauuu

SEQ ID NO: 1315148 - RNA, 22 nt, Human
uaaauuuaguauuuuguuucag

SEQ ID NO: 1315149 - RNA, 21 nt, Human
uaaauuggcauggaaauuuaa

SEQ ID NO: 1315150 - RNA, 17 nt, Human
uaaauuguacagccggc

SEQ ID NO: 1315151 - RNA, 16 nt, Human
uaacaauuaggcagac

SEQ ID NO: 1315152 - RNA, 20 nt, Human
uaacaauuaggcagacucuu

SEQ ID NO: 1315153 - RNA, 13 nt, Human
uaacaauuccucu

SEQ ID NO: 1315154 - RNA, 14 nt, Human
uaacaauuccucua

SEQ ID NO: 1315155 - RNA, 14 nt, Human
uaacaauuguguag

SEQ ID NO: 1315156 - RNA, 18 nt, Human
uaacaauuguguagccuu

SEQ ID NO: 1315157 - RNA, 19 nt, Human
uaacaauuguguagccuuu

SEQ ID NO: 1315158 - RNA, 23 nt, Human
uaacaauuguguagccuuuuugu

SEQ ID NO: 1315159 - RNA, 20 nt, Human
uaacaauuguguagccuuuu

SEQ ID NO: 1315160 - RNA, 21 nt, Human
uaacacacuaccgaauguguc

SEQ ID NO: 1315161 - RNA, 22 nt, Human
uaacacacuaccgaaugugucu

SEQ ID NO: 1315162 - RNA, 23 nt, Human
uaacacacuaccgaaugugucuu

SEQ ID NO: 1315163 - RNA, 21 nt, Human
uaacacagcauuguauaugug

SEQ ID NO: 1315164 - RNA, 20 nt, Human
uaacacacuaccgaaugugu

SEQ ID NO: 1315165 - RNA, 13 nt, Human
uaacagaaauugu

SEQ ID NO: 1315166 - RNA, 14 nt, Human
uaacagaaauugua

SEQ ID NO: 1315167 - RNA, 15 nt, Human
uaacagaaauuguau

SEQ ID NO: 1315168 - RNA, 17 nt, Human
uaacagaaauuguauau

SEQ ID NO: 1315169 - RNA, 22 nt, Human
uaacagaaauuguauauuguaa

SEQ ID NO: 1315170 - RNA, 19 nt, Human
uaacagaagggagggcaga

SEQ ID NO: 1315171 - RNA, 15 nt, Human
uaacagcaccaaauc

SEQ ID NO: 1315172 - RNA, 11 nt, Human
uaacagcccuc

SEQ ID NO: 1315173 - RNA, 17 nt, Human
uaacagcccuccucugc

SEQ ID NO: 1315174 - RNA, 18 nt, Human
uaacagcccuccucugca

SEQ ID NO: 1315175 - RNA, 20 nt, Human
uaacagcccuccucugcacu

SEQ ID NO: 1315176 - RNA, 17 nt, Human
uaaccaggggccaugaa

SEQ ID NO: 1315177 - RNA, 17 nt, Human
uaacccuuugugugcuc

SEQ ID NO: 1315178 - RNA, 19 nt, Human
uaacccuuugugugcucuc

SEQ ID NO: 1315179 - RNA, 21 nt, Human
uaacccuuugugugcucucca

SEQ ID NO: 1315180 - RNA, 22 nt, Human
uaaccgagaucaguauuuaacu

SEQ ID NO: 1315181 - RNA, 12 nt, Human
uaaccaaguucc

SEQ ID NO: 1315182 - RNA, 11 nt, Human
uaaccaaguuc

SEQ ID NO: 1315183 - RNA, 19 nt, Human
uaaccaagcugaguuuccu

SEQ ID NO: 1315184 - RNA, 22 nt, Human
uaacauuaucuaguucauugaa

SEQ ID NO: 1315185 - RNA, 21 nt, Human
uaacauucaggaauucuugga

SEQ ID NO: 1315186 - RNA, 12 nt, Human
uaacauuccaag

SEQ ID NO: 1315187 - RNA, 13 nt, Human
uaacauuccaaga

SEQ ID NO: 1315188 - RNA, 18 nt, Human
uaacauuccaagacucua

SEQ ID NO: 1315189 - RNA, 10 nt, Human
uaacauuccu

SEQ ID NO: 1315190 - RNA, 22 nt, Human
uaacauuccaagacucuagagu

SEQ ID NO: 1315191 - RNA, 21 nt, Human
uaaccaagagauaacuguaaa

SEQ ID NO: 1315192 - RNA, 16 nt, Human
uaaccaagcugaguuu

SEQ ID NO: 1315193 - RNA, 20 nt, Human
uaaccaagcugaguuuccua

SEQ ID NO: 1315194 - RNA, 16 nt, Human
uaacagggaaggcagg

SEQ ID NO: 1315195 - RNA, 17 nt, Human
uaacagggaaggcaggc

SEQ ID NO: 1315196 - RNA, 19 nt, Human
uaacagggaaggcaggcag

SEQ ID NO: 1315197 - RNA, 23 nt, Human
uaacagggaacgugauuagugaa

SEQ ID NO: 1315198 - RNA, 14 nt, Human
uaacagggaaggca

SEQ ID NO: 1315199 - RNA, 22 nt, Human
uaacagggaacgugauuaguga

SEQ ID NO: 1315200 - RNA, 15 nt, Human
uaacagggaacguga

SEQ ID NO: 1315201 - RNA, 19 nt, Human
uaacaggcucaaacaauga

SEQ ID NO: 1315202 - RNA, 15 nt, Human
uaacaggccaaagag

SEQ ID NO: 1315203 - RNA, 21 nt, Human
uaacaggcucaaacaaugaca

SEQ ID NO: 1315204 - RNA, 12 nt, Human
uaacuguauuug

SEQ ID NO: 1315205 - RNA, 22 nt, Human
uaacuguauuugaaauaagaau

SEQ ID NO: 1315206 - RNA, 14 nt, Human
uaacuguauuugaa

SEQ ID NO: 1315207 - RNA, 17 nt, Human
uaacuggguaaugaaac

SEQ ID NO: 1315208 - RNA, 19 nt, Human
uaacuggguaaugaaacaa

SEQ ID NO: 1315209 - RNA, 20 nt, Human
uaacuggguaaugaaacaaa

SEQ ID NO: 1315210 - RNA, 15 nt, Human
uaacuguaaagaugu

SEQ ID NO: 1315211 - RNA, 23 nt, Human
uaacuguaaagauguuuauuuca

SEQ ID NO: 1315212 - RNA, 18 nt, Human
uaacuguaaaugugacau

SEQ ID NO: 1315213 - RNA, 17 nt, Human
uaacugagugccuuuug

SEQ ID NO: 1315214 - RNA, 14 nt, Human
uaacugcauacacu

SEQ ID NO: 1315215 - RNA, 11 nt, Human
uaacugccagg

SEQ ID NO: 1315216 - RNA, 17 nt, Human
uaacugcccaaagcagc

SEQ ID NO: 1315217 - RNA, 21 nt, Human
uaacugcccaaagcagcacuu

SEQ ID NO: 1315218 - RNA, 17 nt, Human
uaacugccguaauuuaa

SEQ ID NO: 1315219 - RNA, 14 nt, Human
uaacugccuagaaa

SEQ ID NO: 1315220 - RNA, 16 nt, Human
uaacugccuagaaaca

SEQ ID NO: 1315221 - RNA, 15 nt, Human
uaacugccuagaaac

SEQ ID NO: 1315222 - RNA, 17 nt, Human
uaacugggggaaaagau

SEQ ID NO: 1315223 - RNA, 16 nt, Human
uaacugagugccuuuu

SEQ ID NO: 1315224 - RNA, 15 nt, Human
uaacucaucugucac

SEQ ID NO: 1315225 - RNA, 12 nt, Human
uaacucauuaga

SEQ ID NO: 1315226 - RNA, 15 nt, Human
uaacucauugcucug

SEQ ID NO: 1315227 - RNA, 16 nt, Human
uaacucauuagacugg

SEQ ID NO: 1315228 - RNA, 14 nt, Human
uaacucaucuguca

SEQ ID NO: 1315229 - RNA, 23 nt, Human
uaaccgagaucaguauuuaacua

SEQ ID NO: 1315230 - RNA, 20 nt, Human
uaaccuaugauauuuucugu

SEQ ID NO: 1315231 - RNA, 14 nt, Human
uaaccucaucuucu

SEQ ID NO: 1315232 - RNA, 18 nt, Human
uaaccucaucuucuucac

SEQ ID NO: 1315233 - RNA, 16 nt, Human
uaagcauuccaacuau

SEQ ID NO: 1315234 - RNA, 18 nt, Human
uaagcauuccaacuaucu

SEQ ID NO: 1315235 - RNA, 20 nt, Human
uaagcauuccaacuaucuca

SEQ ID NO: 1315236 - RNA, 22 nt, Human
uaagcauugaauggcuauguuu

SEQ ID NO: 1315237 - RNA, 13 nt, Human
uaagccagacauc

SEQ ID NO: 1315238 - RNA, 17 nt, Human
uaagccacuuaaaaugu

SEQ ID NO: 1315239 - RNA, 19 nt, Human
uaagccacuuaaaauguuc

SEQ ID NO: 1315240 - RNA, 16 nt, Human
uaagccaaaacaaugu

SEQ ID NO: 1315241 - RNA, 15 nt, Human
uaagccaauuucaau

SEQ ID NO: 1315242 - RNA, 15 nt, Human
uaagcaugcacaaau

SEQ ID NO: 1315243 - RNA, 18 nt, Human
uaagcaucuggcucuaau

SEQ ID NO: 1315244 - RNA, 14 nt, Human
uaagcaucauuauu

SEQ ID NO: 1315245 - RNA, 19 nt, Human
uaagcaucauuauuuaugu

SEQ ID NO: 1315246 - RNA, 20 nt, Human
uaagcaucauuauuuaugua

SEQ ID NO: 1315247 - RNA, 21 nt, Human
uaagcaucauuauuuauguau

SEQ ID NO: 1315248 - RNA, 23 nt, Human
uaagcaucauuauuuauguauug

SEQ ID NO: 1315249 - RNA, 22 nt, Human
uaagcaucauuauuuauguauu

SEQ ID NO: 1315250 - RNA, 14 nt, Human
uaagcaucuaaguu

SEQ ID NO: 1315251 - RNA, 18 nt, Human
uaagaucuuuuauuuugc

SEQ ID NO: 1315252 - RNA, 14 nt, Human
uaagaucuuagauu

SEQ ID NO: 1315253 - RNA, 16 nt, Human
uaagaucuuagauucu

SEQ ID NO: 1315254 - RNA, 17 nt, Human
uaagaucuuagauucuc

SEQ ID NO: 1315255 - RNA, 20 nt, Human
uaagaucuuagauucucugu

SEQ ID NO: 1315256 - RNA, 17 nt, Human
uaagaucuauagccucu

SEQ ID NO: 1315257 - RNA, 15 nt, Human
uaaggcaaucauggu

SEQ ID NO: 1315258 - RNA, 22 nt, Human
uaagcgcuagaggaagcagcca

SEQ ID NO: 1315259 - RNA, 21 nt, Human
uaagccuuuggaaacagcucg

SEQ ID NO: 1315260 - RNA, 14 nt, Human
uaagccuuuggaaa

SEQ ID NO: 1315261 - RNA, 17 nt, Human
uaagccuuuggaaacag

SEQ ID NO: 1315262 - RNA, 21 nt, Human
uaagccagacaucaacagaua

SEQ ID NO: 1315263 - RNA, 20 nt, Human
uaagccagacaucaacagau

SEQ ID NO: 1315264 - RNA, 20 nt, Human
uaagccacuuaaaauguuca

SEQ ID NO: 1315265 - RNA, 17 nt, Human
uaagccagcaccggacc

SEQ ID NO: 1315266 - RNA, 23 nt, Human
uaagccagcaccggaccagccug

SEQ ID NO: 1315267 - RNA, 22 nt, Human
uaagccagcaccggaccagccu

SEQ ID NO: 1315268 - RNA, 15 nt, Human
uaagccagcugcccc

SEQ ID NO: 1315269 - RNA, 22 nt, Human
uaagccagcugcccccagagcc

SEQ ID NO: 1315270 - RNA, 17 nt, Human
uaagagagucuauuuac

SEQ ID NO: 1315271 - RNA, 21 nt, Human
uaagaagaaugcuuaaucaga

SEQ ID NO: 1315272 - RNA, 23 nt, Human
uaagaagcacgugguaaaacacu

SEQ ID NO: 1315273 - RNA, 22 nt, Human
uaagagcaaaagaauggcagaa

SEQ ID NO: 1315274 - RNA, 20 nt, Human
uaagagcaaaagaauggcag

SEQ ID NO: 1315275 - RNA, 12 nt, Human
uaagagcucagg

SEQ ID NO: 1315276 - RNA, 14 nt, Human
uaagagcucaggau

SEQ ID NO: 1315277 - RNA, 15 nt, Human
uaagagcucaggaug

SEQ ID NO: 1315278 - RNA, 22 nt, Human
uaagagcucaggaugagggaaa

SEQ ID NO: 1315279 - RNA, 16 nt, Human
uaagaggcugcccucc

SEQ ID NO: 1315280 - RNA, 13 nt, Human
uaagaaagccuga

SEQ ID NO: 1315281 - RNA, 14 nt, Human
uaagaaagccugag

SEQ ID NO: 1315282 - RNA, 15 nt, Human
uaagaaagccugagu

SEQ ID NO: 1315283 - RNA, 17 nt, Human
uaagaaagccugaguac

SEQ ID NO: 1315284 - RNA, 15 nt, Human
uaagaaaggaagcau

SEQ ID NO: 1315285 - RNA, 18 nt, Human
uaagaaaggaagcauugu

SEQ ID NO: 1315286 - RNA, 20 nt, Human
uaagaaaggaagcauuguaa

SEQ ID NO: 1315287 - RNA, 21 nt, Human
uaagaaaggaagcauuguaaa

SEQ ID NO: 1315288 - RNA, 23 nt, Human
uaagaaaggaagcauuguaaaau

SEQ ID NO: 1315289 - RNA, 22 nt, Human
uaagaaaggaagcauuguaaaa

SEQ ID NO: 1315290 - RNA, 15 nt, Human
uaagaaauacagacu

SEQ ID NO: 1315291 - RNA, 13 nt, Human
uaagaaauagaau

SEQ ID NO: 1315292 - RNA, 17 nt, Human
uaagaggcugcccuccu

SEQ ID NO: 1315293 - RNA, 20 nt, Human
uaagaggcugcccuccugug

SEQ ID NO: 1315294 - RNA, 18 nt, Human
uaagagguguuauuugga

SEQ ID NO: 1315295 - RNA, 21 nt, Human
uaagaguagaaacugcaggga

SEQ ID NO: 1315296 - RNA, 18 nt, Human
uaagaguccaagaaucca

SEQ ID NO: 1315297 - RNA, 14 nt, Human
uaagagugcugggc

SEQ ID NO: 1315298 - RNA, 12 nt, Human
uaagauaauuau

SEQ ID NO: 1315299 - RNA, 13 nt, Human
uaagauaauuaua

SEQ ID NO: 1315300 - RNA, 19 nt, Human
uaagauaugggacauuuuu

SEQ ID NO: 1315301 - RNA, 21 nt, Human
uaagauaugggacauuuuuga

SEQ ID NO: 1315302 - RNA, 14 nt, Human
uaagauauuuuuca

SEQ ID NO: 1315303 - RNA, 15 nt, Human
uaagauauuuuucau

SEQ ID NO: 1315304 - RNA, 17 nt, Human
uaagauauuuuucauga

SEQ ID NO: 1315305 - RNA, 18 nt, Human
uaagauauuuuucaugau

SEQ ID NO: 1315306 - RNA, 19 nt, Human
uaagauauuuuucaugauu

SEQ ID NO: 1315307 - RNA, 23 nt, Human
uaagauccuagauccuaaggguc

SEQ ID NO: 1315308 - RNA, 16 nt, Human
uagauguauguacuuc

SEQ ID NO: 1315309 - RNA, 15 nt, Human
uagauguaguauuuu

SEQ ID NO: 1315310 - RNA, 17 nt, Human
uagauguaguauuuuuu

SEQ ID NO: 1315311 - RNA, 16 nt, Human
uagauguauaacuagg

SEQ ID NO: 1315312 - RNA, 20 nt, Human
uagauguauguacuucaugc

SEQ ID NO: 1315313 - RNA, 20 nt, Human
uagaugucuuuucccauuua

SEQ ID NO: 1315314 - RNA, 13 nt, Human
uagaugucuuuuc

SEQ ID NO: 1315315 - RNA, 18 nt, Human
uagauguuccaguaaucu

SEQ ID NO: 1315316 - RNA, 21 nt, Human
uagauguucuaagucuuucca

SEQ ID NO: 1315317 - RNA, 23 nt, Human
uagauaacaagaccucagugccu

SEQ ID NO: 1315318 - RNA, 23 nt, Human
uagauaaaacaucuuugaaauua

SEQ ID NO: 1315319 - RNA, 18 nt, Human
uagauacaugcuuuuuaa

SEQ ID NO: 1315320 - RNA, 22 nt, Human
uagauacccuacgcuguccaga

SEQ ID NO: 1315321 - RNA, 16 nt, Human
uagauguaauuuugug

SEQ ID NO: 1315322 - RNA, 21 nt, Human
uagaugggagggaggcucagg

SEQ ID NO: 1315323 - RNA, 22 nt, Human
uagaugggggaaagcaaagcac

SEQ ID NO: 1315324 - RNA, 13 nt, Human
uagcagacaggcc

SEQ ID NO: 1315325 - RNA, 19 nt, Human
uagcagacaggccccguga

SEQ ID NO: 1315326 - RNA, 15 nt, Human
uagcagacaguguuu

SEQ ID NO: 1315327 - RNA, 19 nt, Human
uagcagcaccguucugugc

SEQ ID NO: 1315328 - RNA, 20 nt, Human
uagcagcaccguucugugca

SEQ ID NO: 1315329 - RNA, 16 nt, Human
uagauuuaauauaaag

SEQ ID NO: 1315330 - RNA, 20 nt, Human
uagauguuuauucuucuaga

SEQ ID NO: 1315331 - RNA, 21 nt, Human
uagauguuuauucuucuagag

SEQ ID NO: 1315332 - RNA, 17 nt, Human
uagauucuaaagauucu

SEQ ID NO: 1315333 - RNA, 18 nt, Human
uagauucuaaagauucua

SEQ ID NO: 1315334 - RNA, 22 nt, Human
uagauucucuggcuguaaggcu

SEQ ID NO: 1315335 - RNA, 23 nt, Human
uagauucucuggcuguaaggcuc

SEQ ID NO: 1315336 - RNA, 19 nt, Human
uagauucucugugucuaag

SEQ ID NO: 1315337 - RNA, 20 nt, Human
uagauucucugugucuaaga

SEQ ID NO: 1315338 - RNA, 21 nt, Human
uagauucucugugucuaagau

SEQ ID NO: 1315339 - RNA, 22 nt, Human
uagauucucugugucuaagauu

SEQ ID NO: 1315340 - RNA, 23 nt, Human
uagauucucugugucuaagauuc

SEQ ID NO: 1315341 - RNA, 23 nt, Human
uagauucucuuguauaagauccu

SEQ ID NO: 1315342 - RNA, 14 nt, Human
uagauugauuguau

SEQ ID NO: 1315343 - RNA, 16 nt, Human
uagauugauuguauug

SEQ ID NO: 1315344 - RNA, 23 nt, Human
uagauugauuguauuguugaaaa

SEQ ID NO: 1315345 - RNA, 23 nt, Human
uagauugcagaaaauucugugcc

SEQ ID NO: 1315346 - RNA, 12 nt, Human
uagauugcagaa

SEQ ID NO: 1315347 - RNA, 18 nt, Human
uagauuguccuuuugcaa

SEQ ID NO: 1315348 - RNA, 23 nt, Human
uagauuguccuuuugcaaagaaa

SEQ ID NO: 1315349 - RNA, 23 nt, Human
uagauuuaauauaaaguuuuaua

SEQ ID NO: 1315350 - RNA, 20 nt, Human
uagauuguccuuuugcaaag

SEQ ID NO: 1315351 - RNA, 13 nt, Human
uagauuuaauaua

SEQ ID NO: 1315352 - RNA, 23 nt, Human
uagcagaagguugcaccuccccc

SEQ ID NO: 1315353 - RNA, 11 nt, Human
uagcagacagg

SEQ ID NO: 1315354 - RNA, 19 nt, Human
uagacuggaacuugaacug

SEQ ID NO: 1315355 - RNA, 14 nt, Human
uagacuggacagcu

SEQ ID NO: 1315356 - RNA, 18 nt, Human
uagacuggacagcuugug

SEQ ID NO: 1315357 - RNA, 19 nt, Human
uagagaaaacaugcagaac

SEQ ID NO: 1315358 - RNA, 21 nt, Human
uagagaaaacuaaagaaauuu

SEQ ID NO: 1315359 - RNA, 13 nt, Human
uagagaagacagg

SEQ ID NO: 1315360 - RNA, 16 nt, Human
uagacuggacagcuug

SEQ ID NO: 1315361 - RNA, 20 nt, Human
uagacuuggauucuuuccau

SEQ ID NO: 1315362 - RNA, 16 nt, Human
uagacuuggauucuuu

SEQ ID NO: 1315363 - RNA, 14 nt, Human
uagacuuuaacaua

SEQ ID NO: 1315364 - RNA, 21 nt, Human
uagacuuuaacauaagcuauu

SEQ ID NO: 1315365 - RNA, 12 nt, Human
uagaaccaggca

SEQ ID NO: 1315366 - RNA, 23 nt, Human
uagaaccaggcaacuugggaacu

SEQ ID NO: 1315367 - RNA, 22 nt, Human
uagaacccucuguuccuucccu

SEQ ID NO: 1315368 - RNA, 21 nt, Human
uagaacccucuguuccuuccc

SEQ ID NO: 1315369 - RNA, 15 nt, Human
uagaaccuaauucaa

SEQ ID NO: 1315370 - RNA, 23 nt, Human
uagaaccuaauucaauucaaagc

SEQ ID NO: 1315371 - RNA, 12 nt, Human
uagaccuacagg

SEQ ID NO: 1315372 - RNA, 13 nt, Human
uagaccuacaggg

SEQ ID NO: 1315373 - RNA, 15 nt, Human
uagaccuacaggggg

SEQ ID NO: 1315374 - RNA, 16 nt, Human
uagaccuccagcuguu

SEQ ID NO: 1315375 - RNA, 21 nt, Human
uagacucuuuuccuucccuuu

SEQ ID NO: 1315376 - RNA, 17 nt, Human
uagaguuuagcuggaaa

SEQ ID NO: 1315377 - RNA, 18 nt, Human
uagaguuuagcuggaaaa

SEQ ID NO: 1315378 - RNA, 13 nt, Human
uagaguugcugag

SEQ ID NO: 1315379 - RNA, 14 nt, Human
uagaguugcugaga

SEQ ID NO: 1315380 - RNA, 14 nt, Human
uagaguuggccaua

SEQ ID NO: 1315381 - RNA, 16 nt, Human
uagaguugcugagagg

SEQ ID NO: 1315382 - RNA, 18 nt, Human
uagaguuuuuaaacauca

SEQ ID NO: 1315383 - RNA, 19 nt, Human
uagauaaaacaucuuugaa

SEQ ID NO: 1315384 - RNA, 20 nt, Human
uagauaaaacaucuuugaaa

SEQ ID NO: 1315385 - RNA, 21 nt, Human
uagauaaaacaucuuugaaau

SEQ ID NO: 1315386 - RNA, 17 nt, Human
uagaguagaagucucuu

SEQ ID NO: 1315387 - RNA, 13 nt, Human
uagaguccaaggu

SEQ ID NO: 1315388 - RNA, 16 nt, Human
uagaguccaagguuua

SEQ ID NO: 1315389 - RNA, 20 nt, Human
uagagucccagguuggcucu

SEQ ID NO: 1315390 - RNA, 14 nt, Human
uagagacuggaaca

SEQ ID NO: 1315391 - RNA, 18 nt, Human
uagagacuggaacacuag

SEQ ID NO: 1315392 - RNA, 16 nt, Human
uaggaauuguguuuau

SEQ ID NO: 1315393 - RNA, 22 nt, Human
uaggaaguugacuuauaguaca

SEQ ID NO: 1315394 - RNA, 14 nt, Human
uaggaauuguguuu

SEQ ID NO: 1315395 - RNA, 23 nt, Human
uaggaauugacccacaagaaaug

SEQ ID NO: 1315396 - RNA, 15 nt, Human
uaggaauagcauguc

SEQ ID NO: 1315397 - RNA, 17 nt, Human
uaggaaguugacuuaua

SEQ ID NO: 1315398 - RNA, 16 nt, Human
uaggaaguaaauuaua

SEQ ID NO: 1315399 - RNA, 24 nt, Human
uaggaagguacuguaugaucaaau

SEQ ID NO: 1315400 - RNA, 18 nt, Human
uaggaagguacuguauga

SEQ ID NO: 1315401 - RNA, 16 nt, Human
uaggaagguacuguau

SEQ ID NO: 1315402 - RNA, 15 nt, Human
uaggaagguacugua

SEQ ID NO: 1315403 - RNA, 14 nt, Human
uaggaagguacugu

SEQ ID NO: 1315404 - RNA, 17 nt, Human
uaggccagagcccacuc

SEQ ID NO: 1315405 - RNA, 13 nt, Human
uaggccagcaagc

SEQ ID NO: 1315406 - RNA, 22 nt, Human
uaggccagccgcgcaucagacu

SEQ ID NO: 1315407 - RNA, 23 nt, Human
uaggccagcaagcggggaugucc

SEQ ID NO: 1315408 - RNA, 19 nt, Human
uaggccucaggugaaacuc

SEQ ID NO: 1315409 - RNA, 16 nt, Human
uaggccaugggacagg

SEQ ID NO: 1315410 - RNA, 13 nt, Human
uaggccaugggac

SEQ ID NO: 1315411 - RNA, 18 nt, Human
uaggccaagguguccuac

SEQ ID NO: 1315412 - RNA, 21 nt, Human
uaggccaagguguccuacaga

SEQ ID NO: 1315413 - RNA, 23 nt, Human
uaggccaagguguccuacagaaa

SEQ ID NO: 1315414 - RNA, 22 nt, Human
uaggccaagguguccuacagaa

SEQ ID NO: 1315415 - RNA, 14 nt, Human
uaggccagagccca

SEQ ID NO: 1315416 - RNA, 16 nt, Human
uaggccagagcccacu

SEQ ID NO: 1315417 - RNA, 12 nt, Human
uaggaagaaaga

SEQ ID NO: 1315418 - RNA, 17 nt, Human
uaggaagaaagaagaca

SEQ ID NO: 1315419 - RNA, 19 nt, Human
uaggaagaaagaagacaaa

SEQ ID NO: 1315420 - RNA, 18 nt, Human
uaggaagagcaggacucc

SEQ ID NO: 1315421 - RNA, 21 nt, Human
uaggaagagccuuccacccag

SEQ ID NO: 1315422 - RNA, 14 nt, Human
uaggaagccucaga

SEQ ID NO: 1315423 - RNA, 15 nt, Human
uagcugggauuacag

SEQ ID NO: 1315424 - RNA, 22 nt, Human
uagcuggcucugugagggugcu

SEQ ID NO: 1315425 - RNA, 22 nt, Human
uaggaaauggcuuugugauuca

SEQ ID NO: 1315426 - RNA, 23 nt, Human
uaggaaauggcuuugugauucaa

SEQ ID NO: 1315427 - RNA, 21 nt, Human
uaggaaauguuuuuaauaaaa

SEQ ID NO: 1315428 - RNA, 22 nt, Human
uagcugggagaaagagagagcu

SEQ ID NO: 1315429 - RNA, 11 nt, Human
uagcucugggg

SEQ ID NO: 1315430 - RNA, 22 nt, Human
uagcucuggggugggcaguuuu

SEQ ID NO: 1315431 - RNA, 23 nt, Human
uagcucuggggugggcaguuuuu

SEQ ID NO: 1315432 - RNA, 12 nt, Human
uagcucugagaa

SEQ ID NO: 1315433 - RNA, 23 nt, Human
uagcucuuguugagccgugggca

SEQ ID NO: 1315434 - RNA, 13 nt, Human
uagcucuuuguca

SEQ ID NO: 1315435 - RNA, 18 nt, Human
uagcucuuugucagggag

SEQ ID NO: 1315436 - RNA, 21 nt, Human
uagcucuaauguuugcauaua

SEQ ID NO: 1315437 - RNA, 11 nt, Human
uagcucugaga

SEQ ID NO: 1315438 - RNA, 13 nt, Human
uagcucugagaac

SEQ ID NO: 1315439 - RNA, 20 nt, Human
uagcucuaauguuugcauau

SEQ ID NO: 1315440 - RNA, 19 nt, Human
uagcucuaauguuugcaua

SEQ ID NO: 1315441 - RNA, 18 nt, Human
uagcucuaauguuugcau

SEQ ID NO: 1315442 - RNA, 17 nt, Human
uagcucuaauguuugca

SEQ ID NO: 1315443 - RNA, 12 nt, Human
uagcuccucccc

SEQ ID NO: 1315444 - RNA, 14 nt, Human
uagcucuaaaaucu

SEQ ID NO: 1315445 - RNA, 22 nt, Human
uagcucuaaaaucugcuuguau

SEQ ID NO: 1315446 - RNA, 20 nt, Human
uagcuccuguggccccaccc

SEQ ID NO: 1315447 - RNA, 22 nt, Human
uagcuccuguggccccacccug

SEQ ID NO: 1315448 - RNA, 12 nt, Human
uagcuccugugg

SEQ ID NO: 1315449 - RNA, 13 nt, Human
uagcuccuguggc

SEQ ID NO: 1315450 - RNA, 14 nt, Human
uagcuccuguggcc

SEQ ID NO: 1315451 - RNA, 16 nt, Human
uagcuccuguggcccc

SEQ ID NO: 1315452 - RNA, 11 nt, Human
uagcuccuccc

SEQ ID NO: 1315453 - RNA, 15 nt, Human
uagcuccuccccugg

SEQ ID NO: 1315454 - RNA, 18 nt, Human
uagcauaaacacaucaca

SEQ ID NO: 1315455 - RNA, 23 nt, Human
uagcauaaacacaucacagauga

SEQ ID NO: 1315456 - RNA, 24 nt, Human
uagcaguggcaggcagaggcccag

SEQ ID NO: 1315457 - RNA, 16 nt, Human
uagcaguccccuuccc

SEQ ID NO: 1315458 - RNA, 15 nt, Human
uagcaguggcaggca

SEQ ID NO: 1315459 - RNA, 16 nt, Human
uagcaguggcaggcag

SEQ ID NO: 1315460 - RNA, 18 nt, Human
uagcaguggcaggcagag

SEQ ID NO: 1315461 - RNA, 18 nt, Human
uagcccaaugaaaugaau

SEQ ID NO: 1315462 - RNA, 21 nt, Human
uagcccacuuacauuuacaaa

SEQ ID NO: 1315463 - RNA, 13 nt, Human
uagccccagugac

SEQ ID NO: 1315464 - RNA, 13 nt, Human
uagccccauaauu

SEQ ID NO: 1315465 - RNA, 17 nt, Human
uagccccagugacagcu

SEQ ID NO: 1315466 - RNA, 18 nt, Human
uagcccucacccuggggc

SEQ ID NO: 1315467 - RNA, 18 nt, Human
uagcccuccuuuuuccaa

SEQ ID NO: 1315468 - RNA, 20 nt, Human
uagcccuccuuuuuccaaca

SEQ ID NO: 1315469 - RNA, 13 nt, Human
uagcccuguccug

SEQ ID NO: 1315470 - RNA, 14 nt, Human
uagcccuguccugg

SEQ ID NO: 1315471 - RNA, 15 nt, Human
uagcccuguccuggu

SEQ ID NO: 1315472 - RNA, 22 nt, Human
uagcccuguccuggugguauuu

SEQ ID NO: 1315473 - RNA, 17 nt, Human
uagcccuguccuggugg

SEQ ID NO: 1315474 - RNA, 19 nt, Human
uagccucaauuucugaaca

SEQ ID NO: 1315475 - RNA, 23 nt, Human
uagccucacuuuuaaugaacaaa

SEQ ID NO: 1315476 - RNA, 18 nt, Human
uagccucacuuuuaauga

SEQ ID NO: 1315477 - RNA, 12 nt, Human
uagccucagggg

SEQ ID NO: 1315478 - RNA, 22 nt, Human
uagccucaggggucugagcucc

SEQ ID NO: 1315479 - RNA, 16 nt, Human
uagccucugucuggca

SEQ ID NO: 1315480 - RNA, 18 nt, Human
uagucaaauugugugaaa

SEQ ID NO: 1315481 - RNA, 15 nt, Human
uaggcuagggugggg

SEQ ID NO: 1315482 - RNA, 15 nt, Human
uagucaaucaagucu

SEQ ID NO: 1315483 - RNA, 18 nt, Human
uagucaaucaagucuguu

SEQ ID NO: 1315484 - RNA, 19 nt, Human
uagucaaucaagucuguuu

SEQ ID NO: 1315485 - RNA, 21 nt, Human
uagucaaucaagucuguuuac

SEQ ID NO: 1315486 - RNA, 18 nt, Human
uagucaaugacaugaauu

SEQ ID NO: 1315487 - RNA, 19 nt, Human
uagucaaugacaugaauuu

SEQ ID NO: 1315488 - RNA, 13 nt, Human
uaggcuagggugg

SEQ ID NO: 1315489 - RNA, 18 nt, Human
uaggcuacagagaagccu

SEQ ID NO: 1315490 - RNA, 19 nt, Human
uaggcuacagagaagccuu

SEQ ID NO: 1315491 - RNA, 20 nt, Human
uaggcuacagagaagccuuc

SEQ ID NO: 1315492 - RNA, 21 nt, Human
uaggcuacagagaagccuuca

SEQ ID NO: 1315493 - RNA, 12 nt, Human
uaggcuacagag

SEQ ID NO: 1315494 - RNA, 13 nt, Human
uaggcuacagaga

SEQ ID NO: 1315495 - RNA, 14 nt, Human
uaggcuacagagaa

SEQ ID NO: 1315496 - RNA, 15 nt, Human
uaggcuacagagaag

SEQ ID NO: 1315497 - RNA, 16 nt, Human
uaggcuacagagaagc

SEQ ID NO: 1315498 - RNA, 17 nt, Human
uaggcuacagagaagcc

SEQ ID NO: 1315499 - RNA, 24 nt, Human
uaggccuugcggcuccucagggac

SEQ ID NO: 1315500 - RNA, 23 nt, Human
uaggccuugcggcuccucaggga

SEQ ID NO: 1315501 - RNA, 19 nt, Human
uaggcggggcuugccuucu

SEQ ID NO: 1315502 - RNA, 22 nt, Human
uaggcggggcuugccuucuggu

SEQ ID NO: 1315503 - RNA, 20 nt, Human
uagugauuuuuaugccaccu

SEQ ID NO: 1315504 - RNA, 21 nt, Human
uagugauuuuuaugccaccug

SEQ ID NO: 1315505 - RNA, 14 nt, Human
uagugaugguuccc

SEQ ID NO: 1315506 - RNA, 18 nt, Human
uagugaugguuccccugu

SEQ ID NO: 1315507 - RNA, 22 nt, Human
uagugauuuuuaugccaccuga

SEQ ID NO: 1315508 - RNA, 17 nt, Human
uagugcuacagggucca

SEQ ID NO: 1315509 - RNA, 15 nt, Human
uagugcuacaggguc

SEQ ID NO: 1315510 - RNA, 22 nt, Human
uagugcugcugugugcuuuuuu

SEQ ID NO: 1315511 - RNA, 12 nt, Human
uagugcuuugag

SEQ ID NO: 1315512 - RNA, 15 nt, Human
uagugcuuugagaga

SEQ ID NO: 1315513 - RNA, 15 nt, Human
uaguggaaaaggcac

SEQ ID NO: 1315514 - RNA, 18 nt, Human
uaguuguaaaccaaguga

SEQ ID NO: 1315515 - RNA, 19 nt, Human
uaguguaucaaaaugcucu

SEQ ID NO: 1315516 - RNA, 15 nt, Human
uaguguaugauuacu

SEQ ID NO: 1315517 - RNA, 19 nt, Human
uaguguaugauuacuggcc

SEQ ID NO: 1315518 - RNA, 17 nt, Human
uaguguaucaaaaugcu

SEQ ID NO: 1315519 - RNA, 14 nt, Human
uaguguaucaaaau

SEQ ID NO: 1315520 - RNA, 12 nt, Human
uaguguaucaaa

SEQ ID NO: 1315521 - RNA, 15 nt, Human
uaguggauggaaggg

SEQ ID NO: 1315522 - RNA, 18 nt, Human
uaguggauggaaggggcu

SEQ ID NO: 1315523 - RNA, 17 nt, Human
uaguggauuacugccau

SEQ ID NO: 1315524 - RNA, 23 nt, Human
uaguggauuacugccauucacuu

SEQ ID NO: 1315525 - RNA, 13 nt, Human
uaguuucugaggc

SEQ ID NO: 1315526 - RNA, 12 nt, Human
uaguuucugagu

SEQ ID NO: 1315527 - RNA, 20 nt, Human
uaguuucugaguuuuaccaa

SEQ ID NO: 1315528 - RNA, 21 nt, Human
uaguuguaccgcaaugugacu

SEQ ID NO: 1315529 - RNA, 17 nt, Human
uaguugucuuuccuggc

SEQ ID NO: 1315530 - RNA, 12 nt, Human
uaguugugucug

SEQ ID NO: 1315531 - RNA, 15 nt, Human
uaguuguguuucaac

SEQ ID NO: 1315532 - RNA, 21 nt, Human
uaguuucaguagauugcagaa

SEQ ID NO: 1315533 - RNA, 19 nt, Human
uaguuucauauaaaguauc

SEQ ID NO: 1315534 - RNA, 20 nt, Human
uaguuucauauaaaguauca

SEQ ID NO: 1315535 - RNA, 13 nt, Human
uaguuuccuuuuu

SEQ ID NO: 1315536 - RNA, 15 nt, Human
uaguuuuauaugcuu

SEQ ID NO: 1315537 - RNA, 20 nt, Human
uaguuuuacuuuuaaacugu

SEQ ID NO: 1315538 - RNA, 22 nt, Human
uaguuuuacuuuuaaacugugu

SEQ ID NO: 1315539 - RNA, 19 nt, Human
uauaaauauauauucuauu

SEQ ID NO: 1315540 - RNA, 15 nt, Human
uauaaauauauuauu

SEQ ID NO: 1315541 - RNA, 15 nt, Human
uauaaauauauuuaa

SEQ ID NO: 1315542 - RNA, 19 nt, Human
uauaaauauauuauuacuu

SEQ ID NO: 1315543 - RNA, 21 nt, Human
uaguuugauuauucaguguca

SEQ ID NO: 1315544 - RNA, 11 nt, Human
uaguuuggaua

SEQ ID NO: 1315545 - RNA, 19 nt, Human
uaguuuguguguugucucu

SEQ ID NO: 1315546 - RNA, 14 nt, Human
uaguuuuacuuuua

SEQ ID NO: 1315547 - RNA, 18 nt, Human
uauaacaaugcuguauuu

SEQ ID NO: 1315548 - RNA, 16 nt, Human
uauaaugaauuuagug

SEQ ID NO: 1315549 - RNA, 20 nt, Human
uauacuauaguaccaguagg

SEQ ID NO: 1315550 - RNA, 16 nt, Human
uauacuauauuuaugg

SEQ ID NO: 1315551 - RNA, 19 nt, Human
uauacuauuaaaaagguuu

SEQ ID NO: 1315552 - RNA, 17 nt, Human
uauacucacuuucuaga

SEQ ID NO: 1315553 - RNA, 20 nt, Human
uauaccugauuuuuuuuccu

SEQ ID NO: 1315554 - RNA, 20 nt, Human
uauacucuuauagacaacau

SEQ ID NO: 1315555 - RNA, 21 nt, Human
uauacuauuaaaaagguuuac

SEQ ID NO: 1315556 - RNA, 18 nt, Human
uauacucuagaugaaguu

SEQ ID NO: 1315557 - RNA, 16 nt, Human
uauacucuuucuguau

SEQ ID NO: 1315558 - RNA, 17 nt, Human
uauacucuuucuguaua

SEQ ID NO: 1315559 - RNA, 19 nt, Human
uauacucuuucuguauaua

SEQ ID NO: 1315560 - RNA, 22 nt, Human
uauacucuuucuguauauacuu

SEQ ID NO: 1315561 - RNA, 22 nt, Human
uauacccacccagaaugagaca

SEQ ID NO: 1315562 - RNA, 15 nt, Human
uauaauucucauuaa

SEQ ID NO: 1315563 - RNA, 16 nt, Human
uauaauucucauuaaa

SEQ ID NO: 1315564 - RNA, 15 nt, Human
uauacccacccagaa

SEQ ID NO: 1315565 - RNA, 17 nt, Human
uauacccccugcaaagc

SEQ ID NO: 1315566 - RNA, 22 nt, Human
uauaccucaauuuucacugugu

SEQ ID NO: 1315567 - RNA, 12 nt, Human
uauaccucacuu

SEQ ID NO: 1315568 - RNA, 12 nt, Human
uauaccugauuu

SEQ ID NO: 1315569 - RNA, 21 nt, Human
uauaccucaauuuucacugug

SEQ ID NO: 1315570 - RNA, 15 nt, Human
uauaauucaccuucu

SEQ ID NO: 1315571 - RNA, 13 nt, Human
uauaaugauuauu

SEQ ID NO: 1315572 - RNA, 14 nt, Human
uauauuuuaagacg

SEQ ID NO: 1315573 - RNA, 16 nt, Human
uauauuuuacaauuuu

SEQ ID NO: 1315574 - RNA, 13 nt, Human
uauauuuuaagac

SEQ ID NO: 1315575 - RNA, 23 nt, Human
uauauuucuauuuuauuaugaag

SEQ ID NO: 1315576 - RNA, 13 nt, Human
uauauuuuaagaa

SEQ ID NO: 1315577 - RNA, 13 nt, Human
uauauuugaaaua

SEQ ID NO: 1315578 - RNA, 14 nt, Human
uauauuugaaauau

SEQ ID NO: 1315579 - RNA, 20 nt, Human
uauauuugaaauauugacuu

SEQ ID NO: 1315580 - RNA, 19 nt, Human
uauauguaccguaggcuuu

SEQ ID NO: 1315581 - RNA, 12 nt, Human
uauauguacaug

SEQ ID NO: 1315582 - RNA, 12 nt, Human
uauauguacagu

SEQ ID NO: 1315583 - RNA, 18 nt, Human
uauauguacccucugaaa

SEQ ID NO: 1315584 - RNA, 19 nt, Human
uauauguacccucugaaau

SEQ ID NO: 1315585 - RNA, 22 nt, Human
uauauguacccucugaaauaca

SEQ ID NO: 1315586 - RNA, 20 nt, Human
uauauggggaugguaguuuu

SEQ ID NO: 1315587 - RNA, 21 nt, Human
uauauggggaugguaguuuuu

SEQ ID NO: 1315588 - RNA, 23 nt, Human
uauauuuauuacuguaagaaaau

SEQ ID NO: 1315589 - RNA, 16 nt, Human
uauauuuccacuucuu

SEQ ID NO: 1315590 - RNA, 21 nt, Human
uauaugcacuuauaauuuucc

SEQ ID NO: 1315591 - RNA, 19 nt, Human
uauaugaggacuugugucu

SEQ ID NO: 1315592 - RNA, 13 nt, Human
uauaugauggggg

SEQ ID NO: 1315593 - RNA, 20 nt, Human
uauauacucaagagugguau

SEQ ID NO: 1315594 - RNA, 16 nt, Human
uauauaccaaagcaca

SEQ ID NO: 1315595 - RNA, 21 nt, Human
uauauaccaaagcacauuuua

SEQ ID NO: 1315596 - RNA, 21 nt, Human
uauacucucaccauuuggauc

SEQ ID NO: 1315597 - RNA, 16 nt, Human
uauacuugaaugaaaa

SEQ ID NO: 1315598 - RNA, 14 nt, Human
uauacuugaaugaa

SEQ ID NO: 1315599 - RNA, 13 nt, Human
uauacuuguaauu

SEQ ID NO: 1315600 - RNA, 14 nt, Human
uauacuuguaauua

SEQ ID NO: 1315601 - RNA, 15 nt, Human
uauacuuguaauuau

SEQ ID NO: 1315602 - RNA, 16 nt, Human
uauacuuguaauuaug

SEQ ID NO: 1315603 - RNA, 18 nt, Human
uauacuuguaauuaugga

SEQ ID NO: 1315604 - RNA, 22 nt, Human
uauacuuguaauuauggaguca

SEQ ID NO: 1315605 - RNA, 19 nt, Human
uauauaaguguacauaugu

SEQ ID NO: 1315606 - RNA, 23 nt, Human
uauauaaguguacauaugugcug

SEQ ID NO: 1315607 - RNA, 16 nt, Human
uauauaaucaucaagu

SEQ ID NO: 1315608 - RNA, 14 nt, Human
uauauaauugccaa

SEQ ID NO: 1315609 - RNA, 13 nt, Human
uauauaauugcca

SEQ ID NO: 1315610 - RNA, 22 nt, Human
uaucaugugaaaucauucauuu

SEQ ID NO: 1315611 - RNA, 17 nt, Human
uaucaugugaaaucauu

SEQ ID NO: 1315612 - RNA, 21 nt, Human
uaucaugucaaacgugaaaau

SEQ ID NO: 1315613 - RNA, 14 nt, Human
uauccuucagccug

SEQ ID NO: 1315614 - RNA, 21 nt, Human
uauccuguuugaggaaagcaa

SEQ ID NO: 1315615 - RNA, 22 nt, Human
uauccuguuugaggaaagcaag

SEQ ID NO: 1315616 - RNA, 20 nt, Human
uauccuggagcauuguguau

SEQ ID NO: 1315617 - RNA, 16 nt, Human
uaucucuucagucucu

SEQ ID NO: 1315618 - RNA, 22 nt, Human
uaucuaaauauggacugcucag

SEQ ID NO: 1315619 - RNA, 14 nt, Human
uaucucuucagucu

SEQ ID NO: 1315620 - RNA, 13 nt, Human
uaucucuucaguc

SEQ ID NO: 1315621 - RNA, 12 nt, Human
uaucucuucagu

SEQ ID NO: 1315622 - RNA, 23 nt, Human
uaucuaaacuggauucacagcuc

SEQ ID NO: 1315623 - RNA, 18 nt, Human
uaucguuuucuuaaagug

SEQ ID NO: 1315624 - RNA, 17 nt, Human
uaucggcacuguacaaa

SEQ ID NO: 1315625 - RNA, 13 nt, Human
uaucggcacugua

SEQ ID NO: 1315626 - RNA, 18 nt, Human
uaucgcuucauguaacua

SEQ ID NO: 1315627 - RNA, 23 nt, Human
uaucgacuuguuuuugcacaugu

SEQ ID NO: 1315628 - RNA, 17 nt, Human
uaucgcugggaaaugag

SEQ ID NO: 1315629 - RNA, 19 nt, Human
uauauuuuuuguuaaauga

SEQ ID NO: 1315630 - RNA, 19 nt, Human
uaucaggcaaauuugcauu

SEQ ID NO: 1315631 - RNA, 20 nt, Human
uaucaggacccagaggaagg

SEQ ID NO: 1315632 - RNA, 21 nt, Human
uaucaggacccagaggaaggg

SEQ ID NO: 1315633 - RNA, 16 nt, Human
uaucaugucaaacgug

SEQ ID NO: 1315634 - RNA, 14 nt, Human
uaucauccacacau

SEQ ID NO: 1315635 - RNA, 15 nt, Human
uaucauccacacaug

SEQ ID NO: 1315636 - RNA, 17 nt, Human
uaucauccacacaugaa

SEQ ID NO: 1315637 - RNA, 16 nt, Human
uaucaucuaccuagau

SEQ ID NO: 1315638 - RNA, 17 nt, Human
uaucaucuaccuagauu

SEQ ID NO: 1315639 - RNA, 22 nt, Human
uaucaucuaccuagauuuaaua

SEQ ID NO: 1315640 - RNA, 15 nt, Human
uaucaguuacacaug

SEQ ID NO: 1315641 - RNA, 13 nt, Human
uaucagugcuucc

SEQ ID NO: 1315642 - RNA, 22 nt, Human
uaucagucuuguaccaaggcaa

SEQ ID NO: 1315643 - RNA, 11 nt, Human
uaucagugcuu

SEQ ID NO: 1315644 - RNA, 23 nt, Human
uaucaucaguguagaaccuaauu

SEQ ID NO: 1315645 - RNA, 14 nt, Human
uacagaagaaacug

SEQ ID NO: 1315646 - RNA, 15 nt, Human
uacagaacuucagaa

SEQ ID NO: 1315647 - RNA, 18 nt, Human
uacagaacuucagaaaga

SEQ ID NO: 1315648 - RNA, 19 nt, Human
uacagaacuucagaaagac

SEQ ID NO: 1315649 - RNA, 11 nt, Human
uacagaacuac

SEQ ID NO: 1315650 - RNA, 16 nt, Human
uacagaacucuuucaa

SEQ ID NO: 1315651 - RNA, 17 nt, Human
uacagaacucuuucaaa

SEQ ID NO: 1315652 - RNA, 19 nt, Human
uacagaacucuuucaaaac

SEQ ID NO: 1315653 - RNA, 14 nt, Human
uacagaaagcugcc

SEQ ID NO: 1315654 - RNA, 19 nt, Human
uacagaaauuuaauucaga

SEQ ID NO: 1315655 - RNA, 20 nt, Human
uacagaaauuuaauucagaa

SEQ ID NO: 1315656 - RNA, 13 nt, Human
uacagaauuuuau

SEQ ID NO: 1315657 - RNA, 23 nt, Human
uacagaauuacuguaacugauua

SEQ ID NO: 1315658 - RNA, 15 nt, Human
uacagaauuacugua

SEQ ID NO: 1315659 - RNA, 16 nt, Human
uacagcacccuguggu

SEQ ID NO: 1315660 - RNA, 18 nt, Human
uacagaaaaguugaauuu

SEQ ID NO: 1315661 - RNA, 15 nt, Human
uacagaaaaaccuug

SEQ ID NO: 1315662 - RNA, 20 nt, Human
uacagaaaaaccuuggguua

SEQ ID NO: 1315663 - RNA, 22 nt, Human
uacagaaaaguugaauuuuaca

SEQ ID NO: 1315664 - RNA, 16 nt, Human
uacagaaaaaccuugg

SEQ ID NO: 1315665 - RNA, 13 nt, Human
uacagaaagcugc

SEQ ID NO: 1315666 - RNA, 15 nt, Human
uacaggaaacaguug

SEQ ID NO: 1315667 - RNA, 21 nt, Human
uacaggaaacaguugcaugua

SEQ ID NO: 1315668 - RNA, 13 nt, Human
uacaggaacuuca

SEQ ID NO: 1315669 - RNA, 15 nt, Human
uacaggcauagaguu

SEQ ID NO: 1315670 - RNA, 12 nt, Human
uacagugucuuu

SEQ ID NO: 1315671 - RNA, 13 nt, Human
uacagugucuuuu

SEQ ID NO: 1315672 - RNA, 15 nt, Human
uacagccucagaaac

SEQ ID NO: 1315673 - RNA, 17 nt, Human
uacaauuuuuuaucaug

SEQ ID NO: 1315674 - RNA, 23 nt, Human
uacaauuuuuuaucaugcauguc

SEQ ID NO: 1315675 - RNA, 18 nt, Human
uacaauuuuuuuuauuag

SEQ ID NO: 1315676 - RNA, 19 nt, Human
uacaauuuuuuuuauuagu

SEQ ID NO: 1315677 - RNA, 21 nt, Human
uacaauuuuuuuuauuaguau

SEQ ID NO: 1315678 - RNA, 13 nt, Human
uacacaacucacu

SEQ ID NO: 1315679 - RNA, 14 nt, Human
uacacaacucacuc

SEQ ID NO: 1315680 - RNA, 15 nt, Human
uacacaacucacucc

SEQ ID NO: 1315681 - RNA, 22 nt, Human
uacacaacucacuccuuuuaaa

SEQ ID NO: 1315682 - RNA, 15 nt, Human
uacaagacacaguga

SEQ ID NO: 1315683 - RNA, 21 nt, Human
uacaagaagcauuuuguaagu

SEQ ID NO: 1315684 - RNA, 19 nt, Human
uacaagaagcauuuuguaa

SEQ ID NO: 1315685 - RNA, 16 nt, Human
uacaagacugccauau

SEQ ID NO: 1315686 - RNA, 19 nt, Human
uacaagacugccauauuaa

SEQ ID NO: 1315687 - RNA, 20 nt, Human
uacaagacugccauauuaaa

SEQ ID NO: 1315688 - RNA, 23 nt, Human
uacaagagaaaaagcagaggcca

SEQ ID NO: 1315689 - RNA, 19 nt, Human
uacaagagcuuaacagugu

SEQ ID NO: 1315690 - RNA, 22 nt, Human
uacaagacugccauauuaaauu

SEQ ID NO: 1315691 - RNA, 24 nt, Human
uacaagaugaaggagaggcaacau

SEQ ID NO: 1315692 - RNA, 17 nt, Human
uaauuuugaaaaacugc

SEQ ID NO: 1315693 - RNA, 13 nt, Human
uaauuuugaaaaa

SEQ ID NO: 1315694 - RNA, 12 nt, Human
uaauuuucuacc

SEQ ID NO: 1315695 - RNA, 18 nt, Human
uaauuuugaagugcuguu

SEQ ID NO: 1315696 - RNA, 22 nt, Human
uaauuuugaagugcuguuuauu

SEQ ID NO: 1315697 - RNA, 13 nt, Human
uaauuuuggauuu

SEQ ID NO: 1315698 - RNA, 13 nt, Human
uaauuuugugaag

SEQ ID NO: 1315699 - RNA, 12 nt, Human
uaauuuuguaau

SEQ ID NO: 1315700 - RNA, 19 nt, Human
uaauuuuguaauguaucaa

SEQ ID NO: 1315701 - RNA, 14 nt, Human
uaauuuuguaucuu

SEQ ID NO: 1315702 - RNA, 15 nt, Human
uacacaauaagcaaa

SEQ ID NO: 1315703 - RNA, 16 nt, Human
uacacaauagaauuau

SEQ ID NO: 1315704 - RNA, 18 nt, Human
uacacaauagaauuauaa

SEQ ID NO: 1315705 - RNA, 14 nt, Human
uacacaauaagcaa

SEQ ID NO: 1315706 - RNA, 18 nt, Human
uacacagaaauacaguua

SEQ ID NO: 1315707 - RNA, 17 nt, Human
uacacagcaccagaaug

SEQ ID NO: 1315708 - RNA, 15 nt, Human
uacacagcucuagac

SEQ ID NO: 1315709 - RNA, 20 nt, Human
uacacugucagcagggacug

SEQ ID NO: 1315710 - RNA, 15 nt, Human
uacccaaauuaagag

SEQ ID NO: 1315711 - RNA, 14 nt, Human
uacccaaacugcuu

SEQ ID NO: 1315712 - RNA, 15 nt, Human
uacccaaacugcuuu

SEQ ID NO: 1315713 - RNA, 12 nt, Human
uacccacccaga

SEQ ID NO: 1315714 - RNA, 20 nt, Human
uacccaccgggccacuccuu

SEQ ID NO: 1315715 - RNA, 22 nt, Human
uacccaccgggccacuccuucc

SEQ ID NO: 1315716 - RNA, 14 nt, Human
uaccaauaaaguga

SEQ ID NO: 1315717 - RNA, 17 nt, Human
uaccaauaaagugaccc

SEQ ID NO: 1315718 - RNA, 13 nt, Human
uaccaauaaagug

SEQ ID NO: 1315719 - RNA, 12 nt, Human
uaccaauaaagu

SEQ ID NO: 1315720 - RNA, 18 nt, Human
uaccaaggucuucuuaau

SEQ ID NO: 1315721 - RNA, 14 nt, Human
uaccaagucaaacu

SEQ ID NO: 1315722 - RNA, 16 nt, Human
uaccaaguuucaggua

SEQ ID NO: 1315723 - RNA, 21 nt, Human
uaccaaguuucagguauuaag

SEQ ID NO: 1315724 - RNA, 18 nt, Human
uaccacaaugcagugccu

SEQ ID NO: 1315725 - RNA, 15 nt, Human
uaccaaucauuuuaa

SEQ ID NO: 1315726 - RNA, 19 nt, Human
uaccaaucauuuuaauuau

SEQ ID NO: 1315727 - RNA, 20 nt, Human
uaccaaucauuuuaauuauu

SEQ ID NO: 1315728 - RNA, 22 nt, Human
uaccaaucauuuuaauuauuau

SEQ ID NO: 1315729 - RNA, 13 nt, Human
uaccaaugaaaaa

SEQ ID NO: 1315730 - RNA, 15 nt, Human
uaccaaugaaaaaau

SEQ ID NO: 1315731 - RNA, 17 nt, Human
uaccaaugaaaaaaugu

SEQ ID NO: 1315732 - RNA, 23 nt, Human
uaccacaggaaccacaagacugc

SEQ ID NO: 1315733 - RNA, 15 nt, Human
uaccaccacgcccgg

SEQ ID NO: 1315734 - RNA, 18 nt, Human
uaccaccagucugacugu

SEQ ID NO: 1315735 - RNA, 13 nt, Human
uaccaccagcugu

SEQ ID NO: 1315736 - RNA, 14 nt, Human
uaccaccagcugug

SEQ ID NO: 1315737 - RNA, 18 nt, Human
uaccaccagcugugucca

SEQ ID NO: 1315738 - RNA, 13 nt, Human
uaccauuuacaug

SEQ ID NO: 1315739 - RNA, 17 nt, Human
uaccauuuacauguuuu

SEQ ID NO: 1315740 - RNA, 18 nt, Human
uaccauuuuaaaguuagu

SEQ ID NO: 1315741 - RNA, 15 nt, Human
uaccauuuucugguu

SEQ ID NO: 1315742 - RNA, 16 nt, Human
uaccauuuucugguuc

SEQ ID NO: 1315743 - RNA, 12 nt, Human
uaccauuucaga

SEQ ID NO: 1315744 - RNA, 15 nt, Human
uaccauuucagagag

SEQ ID NO: 1315745 - RNA, 16 nt, Human
uaccauuucagagagg

SEQ ID NO: 1315746 - RNA, 15 nt, Human
uaccauuugccuccc

SEQ ID NO: 1315747 - RNA, 16 nt, Human
uacauuuguauaaaau

SEQ ID NO: 1315748 - RNA, 19 nt, Human
uacauuugggaguuuuuau

SEQ ID NO: 1315749 - RNA, 17 nt, Human
uacauuuguauaaaaua

SEQ ID NO: 1315750 - RNA, 11 nt, Human
uacauuugugu

SEQ ID NO: 1315751 - RNA, 22 nt, Human
uacaugagguacugagagugaa

SEQ ID NO: 1315752 - RNA, 21 nt, Human
uacaugagguacugagaguga

SEQ ID NO: 1315753 - RNA, 13 nt, Human
uacaugaggacuc

SEQ ID NO: 1315754 - RNA, 14 nt, Human
uacaugaggacucu

SEQ ID NO: 1315755 - RNA, 21 nt, Human
uacaugaggacucuauucuuu

SEQ ID NO: 1315756 - RNA, 22 nt, Human
uacaugaggacucuauucuuua

SEQ ID NO: 1315757 - RNA, 23 nt, Human
uacaugaggacucuauucuuuaa

SEQ ID NO: 1315758 - RNA, 15 nt, Human
uacaugauucauuuu

SEQ ID NO: 1315759 - RNA, 14 nt, Human
uacaugauucauuu

SEQ ID NO: 1315760 - RNA, 16 nt, Human
uacauuuuguaccaac

SEQ ID NO: 1315761 - RNA, 14 nt, Human
uacauuuuguacca

SEQ ID NO: 1315762 - RNA, 19 nt, Human
uacauuuucuaagaaacau

SEQ ID NO: 1315763 - RNA, 20 nt, Human
uacauuuucuaagaaacauu

SEQ ID NO: 1315764 - RNA, 17 nt, Human
uacauuuuguaccaacc

SEQ ID NO: 1315765 - RNA, 12 nt, Human
uacauuuuaugg

SEQ ID NO: 1315766 - RNA, 15 nt, Human
uacauuuucuaagaa

SEQ ID NO: 1315767 - RNA, 21 nt, Human
uacauuugggaguuuuuauga

SEQ ID NO: 1315768 - RNA, 12 nt, Human
uaccaaagcaca

SEQ ID NO: 1315769 - RNA, 17 nt, Human
uaccaaagaugaaugaa

SEQ ID NO: 1315770 - RNA, 12 nt, Human
uaccaaccuguu

SEQ ID NO: 1315771 - RNA, 18 nt, Human
uacaguuccuagguauaa

SEQ ID NO: 1315772 - RNA, 21 nt, Human
uacaguuagggcuccuauuca

SEQ ID NO: 1315773 - RNA, 19 nt, Human
uacaguuaucuaaguuaau

SEQ ID NO: 1315774 - RNA, 14 nt, Human
uacagugucuuuuu

SEQ ID NO: 1315775 - RNA, 21 nt, Human
uacagugucuuuuuuuguaua

SEQ ID NO: 1315776 - RNA, 12 nt, Human
uacaguguuacc

SEQ ID NO: 1315777 - RNA, 23 nt, Human
uacagugucuuuuuuuguauagu

SEQ ID NO: 1315778 - RNA, 15 nt, Human
uacaguguuuauccu

SEQ ID NO: 1315779 - RNA, 23 nt, Human
uacaguguuuauccuuucauaua

SEQ ID NO: 1315780 - RNA, 13 nt, Human
uacaguuaaguuu

SEQ ID NO: 1315781 - RNA, 18 nt, Human
uacaucuauuuuggauug

SEQ ID NO: 1315782 - RNA, 19 nt, Human
uacaucuauuuuggauugu

SEQ ID NO: 1315783 - RNA, 20 nt, Human
uacaucuauuuuggauugua

SEQ ID NO: 1315784 - RNA, 22 nt, Human
uacaucuauuuuggauuguaua

SEQ ID NO: 1315785 - RNA, 23 nt, Human
uacaucuauuuuggauuguauau

SEQ ID NO: 1315786 - RNA, 14 nt, Human
uacaucuucugccu

SEQ ID NO: 1315787 - RNA, 17 nt, Human
uacaucuucugccuuag

SEQ ID NO: 1315788 - RNA, 13 nt, Human
uacaugaaguauu

SEQ ID NO: 1315789 - RNA, 15 nt, Human
uacaugaaguauuuu

SEQ ID NO: 1315790 - RNA, 21 nt, Human
uacaugaaguauuuuuucagu

SEQ ID NO: 1315791 - RNA, 22 nt, Human
uacaugaaguauuuuuucagua

SEQ ID NO: 1315792 - RNA, 16 nt, Human
uacaugacauuuauuu

SEQ ID NO: 1315793 - RNA, 21 nt, Human
uacaugacauuuauuuuucau

SEQ ID NO: 1315794 - RNA, 17 nt, Human
uacaugagaacaaacag

SEQ ID NO: 1315795 - RNA, 18 nt, Human
uacaugagaacaaacaga

SEQ ID NO: 1315796 - RNA, 16 nt, Human
uacaugagaaggaacu

SEQ ID NO: 1315797 - RNA, 19 nt, Human
uaccuuugacaaagguaaa

SEQ ID NO: 1315798 - RNA, 13 nt, Human
uaccuugguuccc

SEQ ID NO: 1315799 - RNA, 22 nt, Human
uaccuugguucccccacugauc

SEQ ID NO: 1315800 - RNA, 14 nt, Human
uaccuuguauacug

SEQ ID NO: 1315801 - RNA, 16 nt, Human
uaccuuguauacugua

SEQ ID NO: 1315802 - RNA, 20 nt, Human
uaccuuguauacuguaggca

SEQ ID NO: 1315803 - RNA, 12 nt, Human
uaccuuucauac

SEQ ID NO: 1315804 - RNA, 19 nt, Human
uaccuuucuccuucccaaa

SEQ ID NO: 1315805 - RNA, 19 nt, Human
uacccaguaacucaucugu

SEQ ID NO: 1315806 - RNA, 22 nt, Human
uacccaguaacucaucugucac

SEQ ID NO: 1315807 - RNA, 22 nt, Human
uacccaguuucuaaacuggaga

SEQ ID NO: 1315808 - RNA, 23 nt, Human
uacccaguuucuaaacuggagac

SEQ ID NO: 1315809 - RNA, 24 nt, Human
uacccaguuucuaaacuggagacu

SEQ ID NO: 1315810 - RNA, 22 nt, Human
uacccauuuguucauauuaaga

SEQ ID NO: 1315811 - RNA, 13 nt, Human
uaccuucucccca

SEQ ID NO: 1315812 - RNA, 19 nt, Human
uaccuucuccccagcuccc

SEQ ID NO: 1315813 - RNA, 22 nt, Human
uaccuucuccccagcucccagg

SEQ ID NO: 1315814 - RNA, 15 nt, Human
uacccauuuguucau

SEQ ID NO: 1315815 - RNA, 14 nt, Human
uacccauuuguuca

SEQ ID NO: 1315816 - RNA, 19 nt, Human
uacccaugucuacacagau

SEQ ID NO: 1315817 - RNA, 23 nt, Human
uaccuucuccccagcucccagga

SEQ ID NO: 1315818 - RNA, 22 nt, Human
uaccuugaaaauaagaauagaa

SEQ ID NO: 1315819 - RNA, 17 nt, Human
uaccuugcaucucacag

SEQ ID NO: 1315820 - RNA, 14 nt, Human
uacgaauacuuuug

SEQ ID NO: 1315821 - RNA, 23 nt, Human
uacgacaguacacugucagcagg

SEQ ID NO: 1315822 - RNA, 14 nt, Human
uacuaauaaacuaa

SEQ ID NO: 1315823 - RNA, 16 nt, Human
uacuaauaaacuaaua

SEQ ID NO: 1315824 - RNA, 23 nt, Human
uacuaauagaauaaaggcaguuu

SEQ ID NO: 1315825 - RNA, 20 nt, Human
uacuaauaaacuaauaauug

SEQ ID NO: 1315826 - RNA, 22 nt, Human
uacuaauaaacuaauaauugca

SEQ ID NO: 1315827 - RNA, 20 nt, Human
uacuaauagaauaaaggcag

SEQ ID NO: 1315828 - RNA, 15 nt, Human
uacuccccuccuuga

SEQ ID NO: 1315829 - RNA, 11 nt, Human
uacuccugugg

SEQ ID NO: 1315830 - RNA, 12 nt, Human
uacuccuguggg

SEQ ID NO: 1315831 - RNA, 17 nt, Human
uacuccugugggagccu

SEQ ID NO: 1315832 - RNA, 18 nt, Human
uacuccugugggagccuc

SEQ ID NO: 1315833 - RNA, 20 nt, Human
uacuccugugggagccucgc

SEQ ID NO: 1315834 - RNA, 21 nt, Human
uacuccugugggagccucgca

SEQ ID NO: 1315835 - RNA, 15 nt, Human
uacugagccuuguaa

SEQ ID NO: 1315836 - RNA, 18 nt, Human
uacugagccuuguaauuc

SEQ ID NO: 1315837 - RNA, 19 nt, Human
uacugagccuuguaauucu

SEQ ID NO: 1315838 - RNA, 23 nt, Human
uacugagccuuguaauucuaaau

SEQ ID NO: 1315839 - RNA, 20 nt, Human
uacugauucaauuugaugug

SEQ ID NO: 1315840 - RNA, 17 nt, Human
uacugauucaauuugau

SEQ ID NO: 1315841 - RNA, 14 nt, Human
uacugauucaauuu

SEQ ID NO: 1315842 - RNA, 14 nt, Human
uacugauauauuuu

SEQ ID NO: 1315843 - RNA, 16 nt, Human
uacugauauauuuuac

SEQ ID NO: 1315844 - RNA, 13 nt, Human
uacuacaugcacu

SEQ ID NO: 1315845 - RNA, 14 nt, Human
uacuaccuguaaug

SEQ ID NO: 1315846 - RNA, 13 nt, Human
uacuaccuugaaa

SEQ ID NO: 1315847 - RNA, 14 nt, Human
uacuaccuugaaaa

SEQ ID NO: 1315848 - RNA, 16 nt, Human
uacuaccuugaaaaua

SEQ ID NO: 1315849 - RNA, 20 nt, Human
uacuaccuugaaaauaagaa

SEQ ID NO: 1315850 - RNA, 20 nt, Human
uacucacuuucuagauuaag

SEQ ID NO: 1315851 - RNA, 16 nt, Human
uacucacuuuucccac

SEQ ID NO: 1315852 - RNA, 18 nt, Human
uacucacuuuucccacuc

SEQ ID NO: 1315853 - RNA, 14 nt, Human
uacucagaauuaag

SEQ ID NO: 1315854 - RNA, 17 nt, Human
uacucacuuuucccacu

SEQ ID NO: 1315855 - RNA, 16 nt, Human
uacucagauaagguaa

SEQ ID NO: 1315856 - RNA, 23 nt, Human
uacucagauaagguaaaaugcca

SEQ ID NO: 1315857 - RNA, 15 nt, Human
uacucauaaguaaaa

SEQ ID NO: 1315858 - RNA, 11 nt, Human
uagaaagcuau

SEQ ID NO: 1315859 - RNA, 16 nt, Human
uagaaauaaagcaucu

SEQ ID NO: 1315860 - RNA, 19 nt, Human
uagaaauaaaggaugugau

SEQ ID NO: 1315861 - RNA, 20 nt, Human
uagaaauaaaggaugugauu

SEQ ID NO: 1315862 - RNA, 17 nt, Human
uacuuuagaagccugca

SEQ ID NO: 1315863 - RNA, 21 nt, Human
uacuuuagaagccugcauaau

SEQ ID NO: 1315864 - RNA, 19 nt, Human
uacuuuauaacuaacaugu

SEQ ID NO: 1315865 - RNA, 20 nt, Human
uacuuuauaacuaacauguc

SEQ ID NO: 1315866 - RNA, 23 nt, Human
uacuuuauaacuaacauguccug

SEQ ID NO: 1315867 - RNA, 17 nt, Human
uacuuuauguuacuaca

SEQ ID NO: 1315868 - RNA, 20 nt, Human
uacuuuauguuacuacaugc

SEQ ID NO: 1315869 - RNA, 15 nt, Human
uagaaacuuccaaau

SEQ ID NO: 1315870 - RNA, 15 nt, Human
uagaaagaccaggcc

SEQ ID NO: 1315871 - RNA, 17 nt, Human
uagaaagaccaggccaa

SEQ ID NO: 1315872 - RNA, 16 nt, Human
uagaaagagaaacagu

SEQ ID NO: 1315873 - RNA, 17 nt, Human
uagaaagagauacagag

SEQ ID NO: 1315874 - RNA, 18 nt, Human
uagaaagagauacagagg

SEQ ID NO: 1315875 - RNA, 16 nt, Human
uagaaagcagagauuu

SEQ ID NO: 1315876 - RNA, 17 nt, Human
uagaaagcagagauuuu

SEQ ID NO: 1315877 - RNA, 14 nt, Human
uagaaauauuuuaa

SEQ ID NO: 1315878 - RNA, 15 nt, Human
uagaaauauuuuaaa

SEQ ID NO: 1315879 - RNA, 16 nt, Human
uagaaauauuuuaaaa

SEQ ID NO: 1315880 - RNA, 19 nt, Human
uagaaauauuuuaaaauca

SEQ ID NO: 1315881 - RNA, 11 nt, Human
uagaaaucaua

SEQ ID NO: 1315882 - RNA, 20 nt, Human
uagaaauauuuuaaaaucag

SEQ ID NO: 1315883 - RNA, 13 nt, Human
uagaaaucauuuu

SEQ ID NO: 1315884 - RNA, 17 nt, Human
uagaaaucauuuugcaa

SEQ ID NO: 1315885 - RNA, 19 nt, Human
uagaaauguaacuuuugua

SEQ ID NO: 1315886 - RNA, 16 nt, Human
uagaaaucauuuugca

SEQ ID NO: 1315887 - RNA, 19 nt, Human
uagaaauuacacccaaaga

SEQ ID NO: 1315888 - RNA, 16 nt, Human
uagaaauuaccugugg

SEQ ID NO: 1315889 - RNA, 18 nt, Human
uagaaauuaccuguggau

SEQ ID NO: 1315890 - RNA, 13 nt, Human
uagaacaaggcug

SEQ ID NO: 1315891 - RNA, 12 nt, Human
uagaacacacac

SEQ ID NO: 1315892 - RNA, 17 nt, Human
uagaacacacacacuua

SEQ ID NO: 1315893 - RNA, 15 nt, Human
uagaacacaggcaaa

SEQ ID NO: 1315894 - RNA, 20 nt, Human
uagaacacuaauucauaauc

SEQ ID NO: 1315895 - RNA, 15 nt, Human
uagaacacuaauuca

SEQ ID NO: 1315896 - RNA, 16 nt, Human
uagaacacuaauucau

SEQ ID NO: 1315897 - RNA, 18 nt, Human
uagaacacuaauucauaa

SEQ ID NO: 1315898 - RNA, 19 nt, Human
uagaacacuaauucauaau

SEQ ID NO: 1315899 - RNA, 22 nt, Human
uagaacagggaaaauaggcagg

SEQ ID NO: 1315900 - RNA, 22 nt, Human
uagaacaugguuaccaugucuu

SEQ ID NO: 1315901 - RNA, 21 nt, Human
uacuugcucuugaugccuggc

SEQ ID NO: 1315902 - RNA, 23 nt, Human
uacuugccuuauuagagugucuu

SEQ ID NO: 1315903 - RNA, 16 nt, Human
uacuugcucagguacu

SEQ ID NO: 1315904 - RNA, 17 nt, Human
uacuugcucagguacuu

SEQ ID NO: 1315905 - RNA, 14 nt, Human
uacuugaaugaaaa

SEQ ID NO: 1315906 - RNA, 12 nt, Human
uacuugaaugaa

SEQ ID NO: 1315907 - RNA, 15 nt, Human
uacuuaauccaaugg

SEQ ID NO: 1315908 - RNA, 15 nt, Human
uacuuaauucaacuu

SEQ ID NO: 1315909 - RNA, 23 nt, Human
uacuuacaugcauuacugcaugc

SEQ ID NO: 1315910 - RNA, 19 nt, Human
uacuuacaugcauuacugc

SEQ ID NO: 1315911 - RNA, 21 nt, Human
uacuugaagggccagagccag

SEQ ID NO: 1315912 - RNA, 22 nt, Human
uacuugaagggccagagccagg

SEQ ID NO: 1315913 - RNA, 14 nt, Human
uacuuggauuuagu

SEQ ID NO: 1315914 - RNA, 21 nt, Human
uacuugggagaccuguaauca

SEQ ID NO: 1315915 - RNA, 23 nt, Human
uacuugggagaccuguaaucaua

SEQ ID NO: 1315916 - RNA, 13 nt, Human
uacuuguaaauau

SEQ ID NO: 1315917 - RNA, 16 nt, Human
uacuuguaaauauaaa

SEQ ID NO: 1315918 - RNA, 14 nt, Human
uacuuguaaauaua

SEQ ID NO: 1315919 - RNA, 15 nt, Human
uacuuguaaauauaa

SEQ ID NO: 1315920 - RNA, 19 nt, Human
uacuguaugaucaaauguu

SEQ ID NO: 1315921 - RNA, 18 nt, Human
uacuguaugaucaaaugu

SEQ ID NO: 1315922 - RNA, 17 nt, Human
uacuguaugaucaaaug

SEQ ID NO: 1315923 - RNA, 16 nt, Human
uacuguaugaucaaau

SEQ ID NO: 1315924 - RNA, 15 nt, Human
uacuguaugaucaaa

SEQ ID NO: 1315925 - RNA, 14 nt, Human
uacuguaugaucaa

SEQ ID NO: 1315926 - RNA, 13 nt, Human
uacuguaugauca

SEQ ID NO: 1315927 - RNA, 11 nt, Human
uacuguaugau

SEQ ID NO: 1315928 - RNA, 22 nt, Human
uacuguaugaucaaauguuuaa

SEQ ID NO: 1315929 - RNA, 21 nt, Human
uacuguaugaucaaauguuua

SEQ ID NO: 1315930 - RNA, 17 nt, Human
uacuguauuuuguauug

SEQ ID NO: 1315931 - RNA, 23 nt, Human
uacuguauuuuguauuguuucaa

SEQ ID NO: 1315932 - RNA, 18 nt, Human
uacuguaugguuuuguuu

SEQ ID NO: 1315933 - RNA, 17 nt, Human
uacugcauacuuuuuaa

SEQ ID NO: 1315934 - RNA, 18 nt, Human
uacugcauacuuuuuaaa

SEQ ID NO: 1315935 - RNA, 21 nt, Human
uacugcauacuuuuuaaaugu

SEQ ID NO: 1315936 - RNA, 22 nt, Human
uacugcauacuuuuuaaaugua

SEQ ID NO: 1315937 - RNA, 13 nt, Human
uacugcauacuuu

SEQ ID NO: 1315938 - RNA, 15 nt, Human
uacugcauacuuuuu

SEQ ID NO: 1315939 - RNA, 13 nt, Human
uacuguguaauua

SEQ ID NO: 1315940 - RNA, 14 nt, Human
uacuguguaauuag

SEQ ID NO: 1315941 - RNA, 14 nt, Human
uacuguguguguga

SEQ ID NO: 1315942 - RNA, 17 nt, Human
uacugugugugugaaug

SEQ ID NO: 1315943 - RNA, 18 nt, Human
uacugugugugugaauga

SEQ ID NO: 1315944 - RNA, 19 nt, Human
uacugugugugugaaugaa

SEQ ID NO: 1315945 - RNA, 21 nt, Human
uacugugugugugaaugaaca

SEQ ID NO: 1315946 - RNA, 12 nt, Human
uacuguucuaaa

SEQ ID NO: 1315947 - RNA, 13 nt, Human
uacuguucuaaag

SEQ ID NO: 1315948 - RNA, 14 nt, Human
uacuguucuaaagc

SEQ ID NO: 1315949 - RNA, 15 nt, Human
uacuguucuaaagcu

SEQ ID NO: 1315950 - RNA, 17 nt, Human
uacuguucuaaagcucu

SEQ ID NO: 1315951 - RNA, 18 nt, Human
uacuguucuaaagcucug

SEQ ID NO: 1315952 - RNA, 19 nt, Human
uacuguucuaaagcucuga

SEQ ID NO: 1315953 - RNA, 21 nt, Human
uacuguucuaaagcucugaca

SEQ ID NO: 1315954 - RNA, 14 nt, Human
uacuguucuguguc

SEQ ID NO: 1315955 - RNA, 17 nt, Human
uacuguucugugucuuu

SEQ ID NO: 1315956 - RNA, 16 nt, Human
uacuguucugugucuu

SEQ ID NO: 1315957 - RNA, 13 nt, Human
uacuguugcacgu

SEQ ID NO: 1315958 - RNA, 14 nt, Human
uacuguugcacgug

SEQ ID NO: 1315959 - RNA, 15 nt, Human
uacuguugcacgugu

SEQ ID NO: 1315960 - RNA, 16 nt, Human
uacuguugcacgugug

SEQ ID NO: 1315961 - RNA, 23 nt, Human
uacuguugcacguguguuuuucu

SEQ ID NO: 1315962 - RNA, 17 nt, Human
gguguagcuacagagaa

SEQ ID NO: 1315963 - RNA, 18 nt, Human
gguguagcuacagagaaa

SEQ ID NO: 1315964 - RNA, 22 nt, Human
gguguagcuacagagaaaccag

SEQ ID NO: 1315965 - RNA, 18 nt, Human
ggugucagacccuggagg

SEQ ID NO: 1315966 - RNA, 23 nt, Human
ggugucagacccuggaggcccca

SEQ ID NO: 1315967 - RNA, 13 nt, Human
gguguccccaaca

SEQ ID NO: 1315968 - RNA, 15 nt, Human
gguguccccaacagc

SEQ ID NO: 1315969 - RNA, 19 nt, Human
gguguccccaacagcgccc

SEQ ID NO: 1315970 - RNA, 20 nt, Human
gguguccccaacagcgccca

SEQ ID NO: 1315971 - RNA, 12 nt, Human
gguguccuacag

SEQ ID NO: 1315972 - RNA, 22 nt, Human
gguguagaacacuaauucauaa

SEQ ID NO: 1315973 - RNA, 15 nt, Human
gguguagcuacagag

SEQ ID NO: 1315974 - RNA, 16 nt, Human
gguguagcuacagaga

SEQ ID NO: 1315975 - RNA, 14 nt, Human
ggugggguccugga

SEQ ID NO: 1315976 - RNA, 23 nt, Human
ggugggguccuggagcagaccac

SEQ ID NO: 1315977 - RNA, 14 nt, Human
gguggcugcagccu

SEQ ID NO: 1315978 - RNA, 15 nt, Human
gguggcugcagccuc

SEQ ID NO: 1315979 - RNA, 16 nt, Human
gguggcugcagccuca

SEQ ID NO: 1315980 - RNA, 22 nt, Human
gguggcuacucugugccagagc

SEQ ID NO: 1315981 - RNA, 11 nt, Human
gguggggugga

SEQ ID NO: 1315982 - RNA, 10 nt, Human
ggugggucca

SEQ ID NO: 1315983 - RNA, 14 nt, Human
gguggguccauggg

SEQ ID NO: 1315984 - RNA, 17 nt, Human
gguggguccaugggcag

SEQ ID NO: 1315985 - RNA, 20 nt, Human
gguggguccaugggcagagc

SEQ ID NO: 1315986 - RNA, 19 nt, Human
ggugggugccuaggccugg

SEQ ID NO: 1315987 - RNA, 16 nt, Human
ggugguacccucugga

SEQ ID NO: 1315988 - RNA, 20 nt, Human
ggugguauuuucaauagcca

SEQ ID NO: 1315989 - RNA, 13 nt, Human
ggugguauuuuca

SEQ ID NO: 1315990 - RNA, 14 nt, Human
gguggucccugggu

SEQ ID NO: 1315991 - RNA, 16 nt, Human
gguggucuguuggcag

SEQ ID NO: 1315992 - RNA, 21 nt, Human
gguggucuguuggcaggcugg

SEQ ID NO: 1315993 - RNA, 22 nt, Human
gguggucuguuggcaggcuggc

SEQ ID NO: 1315994 - RNA, 15 nt, Human
ggugguggcucggga

SEQ ID NO: 1315995 - RNA, 14 nt, Human
ggugguggccuggu

SEQ ID NO: 1315996 - RNA, 23 nt, Human
gguggugucagacccuggaggcc

SEQ ID NO: 1315997 - RNA, 16 nt, Human
gguuagggaaaacauu

SEQ ID NO: 1315998 - RNA, 22 nt, Human
gguuaggaggguuucauugucu

SEQ ID NO: 1315999 - RNA, 13 nt, Human
gguuagaccuaca

SEQ ID NO: 1316000 - RNA, 14 nt, Human
gguuagaccuacag

SEQ ID NO: 1316001 - RNA, 15 nt, Human
gguuagaccuacagg

SEQ ID NO: 1316002 - RNA, 20 nt, Human
gguuagaccuacaggggguc

SEQ ID NO: 1316003 - RNA, 22 nt, Human
gguuagaccuacagggggucug

SEQ ID NO: 1316004 - RNA, 23 nt, Human
gguuagaccuacagggggucugg

SEQ ID NO: 1316005 - RNA, 14 nt, Human
gguuaucucugugu

SEQ ID NO: 1316006 - RNA, 21 nt, Human
gguuaguggauggaaggggcu

SEQ ID NO: 1316007 - RNA, 22 nt, Human
gguuaguggauggaaggggcug

SEQ ID NO: 1316008 - RNA, 23 nt, Human
gguuauagacagucguucccagu

SEQ ID NO: 1316009 - RNA, 21 nt, Human
gguguccugcaccggggccug

SEQ ID NO: 1316010 - RNA, 14 nt, Human
gguguccuacagaa

SEQ ID NO: 1316011 - RNA, 15 nt, Human
gguguccuacagaaa

SEQ ID NO: 1316012 - RNA, 16 nt, Human
gguguccuacagaaaa

SEQ ID NO: 1316013 - RNA, 18 nt, Human
gguguccuacagaaaaac

SEQ ID NO: 1316014 - RNA, 21 nt, Human
gguguccuacagaaaaaccuu

SEQ ID NO: 1316015 - RNA, 20 nt, Human
gguguuuuguucaccauuau

SEQ ID NO: 1316016 - RNA, 23 nt, Human
gguuauuuugauguaaagauguu

SEQ ID NO: 1316017 - RNA, 22 nt, Human
gguucacaaacuucauuucaga

SEQ ID NO: 1316018 - RNA, 21 nt, Human
gguugauaaaucauuuuaugu

SEQ ID NO: 1316019 - RNA, 17 nt, Human
gguucuuucuuccucug

SEQ ID NO: 1316020 - RNA, 18 nt, Human
gguucuuucauuugcuuu

SEQ ID NO: 1316021 - RNA, 11 nt, Human
gguugaggaaa

SEQ ID NO: 1316022 - RNA, 14 nt, Human
gguucuuguuggug

SEQ ID NO: 1316023 - RNA, 19 nt, Human
gguucuugaggggaccagg

SEQ ID NO: 1316024 - RNA, 20 nt, Human
gguucuugaggggaccagga

SEQ ID NO: 1316025 - RNA, 14 nt, Human
gguucuuucuuccu

SEQ ID NO: 1316026 - RNA, 16 nt, Human
gguucuuucuuccucu

SEQ ID NO: 1316027 - RNA, 22 nt, Human
gguucuugaggggaccaggagu

SEQ ID NO: 1316028 - RNA, 21 nt, Human
gguucuugaggggaccaggag

SEQ ID NO: 1316029 - RNA, 10 nt, Human
gguucuuguu

SEQ ID NO: 1316030 - RNA, 13 nt, Human
ggugagaaauuua

SEQ ID NO: 1316031 - RNA, 21 nt, Human
ggugagaaccuggguugcaga

SEQ ID NO: 1316032 - RNA, 14 nt, Human
ggugacugucuggg

SEQ ID NO: 1316033 - RNA, 21 nt, Human
ggugacugucuggggagcggg

SEQ ID NO: 1316034 - RNA, 17 nt, Human
ggugacaucggaaaaau

SEQ ID NO: 1316035 - RNA, 13 nt, Human
ggugaccccaggg

SEQ ID NO: 1316036 - RNA, 14 nt, Human
ggugaccccagggc

SEQ ID NO: 1316037 - RNA, 15 nt, Human
ggugaccccagggca

SEQ ID NO: 1316038 - RNA, 16 nt, Human
ggugaccccagggcac

SEQ ID NO: 1316039 - RNA, 17 nt, Human
ggugaccccagggcaca

SEQ ID NO: 1316040 - RNA, 23 nt, Human
ggucugccucuucugggagggca

SEQ ID NO: 1316041 - RNA, 23 nt, Human
ggucugcccucugcauccucugg

SEQ ID NO: 1316042 - RNA, 12 nt, Human
ggucugcuccca

SEQ ID NO: 1316043 - RNA, 14 nt, Human
ggucugcucccaag

SEQ ID NO: 1316044 - RNA, 20 nt, Human
ggucugcucccaaggggccu

SEQ ID NO: 1316045 - RNA, 23 nt, Human
ggucugcucccaaggggccugag

SEQ ID NO: 1316046 - RNA, 22 nt, Human
ggucugcucccaaggggccuga

SEQ ID NO: 1316047 - RNA, 16 nt, Human
ggucugcucuuucucu

SEQ ID NO: 1316048 - RNA, 18 nt, Human
ggucugcucuuucucugc

SEQ ID NO: 1316049 - RNA, 22 nt, Human
ggucugcucuuucucugccagu

SEQ ID NO: 1316050 - RNA, 19 nt, Human
ggucugcucuuucucugcc

SEQ ID NO: 1316051 - RNA, 20 nt, Human
ggucugcucuuucucugcca

SEQ ID NO: 1316052 - RNA, 18 nt, Human
ggugacaucagguuuuuc

SEQ ID NO: 1316053 - RNA, 18 nt, Human
ggugacaucggaaaaaua

SEQ ID NO: 1316054 - RNA, 22 nt, Human
ggucucuucugaauaaagcaau

SEQ ID NO: 1316055 - RNA, 21 nt, Human
ggucucuucugaauaaagcaa

SEQ ID NO: 1316056 - RNA, 20 nt, Human
ggucucuucugaauaaagca

SEQ ID NO: 1316057 - RNA, 19 nt, Human
ggucucucucucucuacaa

SEQ ID NO: 1316058 - RNA, 16 nt, Human
ggucucacccuggagg

SEQ ID NO: 1316059 - RNA, 20 nt, Human
ggucucacccuggaggcacc

SEQ ID NO: 1316060 - RNA, 21 nt, Human
ggucucacccuggaggcaccu

SEQ ID NO: 1316061 - RNA, 19 nt, Human
ggucucaccggcucucacc

SEQ ID NO: 1316062 - RNA, 21 nt, Human
ggucucaccggcucucaccug

SEQ ID NO: 1316063 - RNA, 11 nt, Human
ggucucagccc

SEQ ID NO: 1316064 - RNA, 22 nt, Human
ggucuccagaaagccccaccca

SEQ ID NO: 1316065 - RNA, 17 nt, Human
ggucucaaacuccugac

SEQ ID NO: 1316066 - RNA, 15 nt, Human
ggucucacccuggag

SEQ ID NO: 1316067 - RNA, 15 nt, Human
ggugagaccaccucu

SEQ ID NO: 1316068 - RNA, 15 nt, Human
ggugagaaauuuaaa

SEQ ID NO: 1316069 - RNA, 14 nt, Human
ggugagaccaccuc

SEQ ID NO: 1316070 - RNA, 16 nt, Human
ggugagaauagaaucu

SEQ ID NO: 1316071 - RNA, 13 nt, Human
ggugccuguccca

SEQ ID NO: 1316072 - RNA, 17 nt, Human
ggugccugucccacccc

SEQ ID NO: 1316073 - RNA, 17 nt, Human
ggugccuuuauuuccac

SEQ ID NO: 1316074 - RNA, 22 nt, Human
ggugcuacacccuuuuccagcu

SEQ ID NO: 1316075 - RNA, 23 nt, Human
ggugcuacacccuuuuccagcug

SEQ ID NO: 1316076 - RNA, 18 nt, Human
ggugcgagugcgugaaua

SEQ ID NO: 1316077 - RNA, 14 nt, Human
ggugcuacugggga

SEQ ID NO: 1316078 - RNA, 18 nt, Human
ggugcuacuggggaaacu

SEQ ID NO: 1316079 - RNA, 21 nt, Human
ggugcuacuggggaaacuggc

SEQ ID NO: 1316080 - RNA, 23 nt, Human
gguggccacuccagaccccuggc

SEQ ID NO: 1316081 - RNA, 11 nt, Human
gguggccaggc

SEQ ID NO: 1316082 - RNA, 12 nt, Human
gguggccaggcc

SEQ ID NO: 1316083 - RNA, 16 nt, Human
gguggccaggccggga

SEQ ID NO: 1316084 - RNA, 20 nt, Human
gguggccacuccagaccccu

SEQ ID NO: 1316085 - RNA, 21 nt, Human
gguggccacuccagaccccug

SEQ ID NO: 1316086 - RNA, 22 nt, Human
gguggccacuccagaccccugg

SEQ ID NO: 1316087 - RNA, 13 nt, Human
gguggccaggccg

SEQ ID NO: 1316088 - RNA, 15 nt, Human
gguggccaugcuccu

SEQ ID NO: 1316089 - RNA, 14 nt, Human
gguggcuacucugu

SEQ ID NO: 1316090 - RNA, 16 nt, Human
gguggcuacucugugc

SEQ ID NO: 1316091 - RNA, 18 nt, Human
gguggcuacucugugcca

SEQ ID NO: 1316092 - RNA, 19 nt, Human
gguggcuacucugugccag

SEQ ID NO: 1316093 - RNA, 23 nt, Human
gguggcuacucugugccagagcc

SEQ ID NO: 1316094 - RNA, 14 nt, Human
ggugcuaggaagag

SEQ ID NO: 1316095 - RNA, 15 nt, Human
ggugcugacggccag

SEQ ID NO: 1316096 - RNA, 16 nt, Human
ggugcugacggccagg

SEQ ID NO: 1316097 - RNA, 17 nt, Human
ggugcugacggccaggg

SEQ ID NO: 1316098 - RNA, 20 nt, Human
ggugcugacggccagggaga

SEQ ID NO: 1316099 - RNA, 12 nt, Human
ggugcucugucu

SEQ ID NO: 1316100 - RNA, 19 nt, Human
ggugcugacuggcuucagc

SEQ ID NO: 1316101 - RNA, 21 nt, Human
ggugcugacuucaucucccac

SEQ ID NO: 1316102 - RNA, 20 nt, Human
gggguggggggggugcuggg

SEQ ID NO: 1316103 - RNA, 13 nt, Human
ggggugggcuggu

SEQ ID NO: 1316104 - RNA, 13 nt, Human
gggguggccaggc

SEQ ID NO: 1316105 - RNA, 18 nt, Human
gggguggcugcagccuca

SEQ ID NO: 1316106 - RNA, 18 nt, Human
ggggugcugggccccugc

SEQ ID NO: 1316107 - RNA, 22 nt, Human
gggggagccccuucugcucagc

SEQ ID NO: 1316108 - RNA, 15 nt, Human
ggggcugaggagcag

SEQ ID NO: 1316109 - RNA, 15 nt, Human
gggggagagggcugc

SEQ ID NO: 1316110 - RNA, 21 nt, Human
gggggacuuacaugauucauu

SEQ ID NO: 1316111 - RNA, 17 nt, Human
ggguaaucccugcuuuu

SEQ ID NO: 1316112 - RNA, 19 nt, Human
ggguaacuaacuaaaacaa

SEQ ID NO: 1316113 - RNA, 21 nt, Human
ggguaaacccucacaucagag

SEQ ID NO: 1316114 - RNA, 21 nt, Human
ggguaaaauacuuuuacucug

SEQ ID NO: 1316115 - RNA, 15 nt, Human
ggguaaaauacuuuu

SEQ ID NO: 1316116 - RNA, 11 nt, Human
ggguaaacaau

SEQ ID NO: 1316117 - RNA, 19 nt, Human
gggguguggcuccuuccca

SEQ ID NO: 1316118 - RNA, 14 nt, Human
gggguggugucaga

SEQ ID NO: 1316119 - RNA, 15 nt, Human
gggguuaucucugug

SEQ ID NO: 1316120 - RNA, 16 nt, Human
gggguuauuuucuggu

SEQ ID NO: 1316121 - RNA, 16 nt, Human
gggucugagcuccagc

SEQ ID NO: 1316122 - RNA, 17 nt, Human
gggucugagcuccagcu

SEQ ID NO: 1316123 - RNA, 21 nt, Human
gggucugcucccaaggggccu

SEQ ID NO: 1316124 - RNA, 23 nt, Human
gggucugcucccaaggggccuga

SEQ ID NO: 1316125 - RNA, 19 nt, Human
gggucugcucuuucucugc

SEQ ID NO: 1316126 - RNA, 20 nt, Human
gggucugcucuuucucugcc

SEQ ID NO: 1316127 - RNA, 21 nt, Human
gggucugcucuuucucugcca

SEQ ID NO: 1316128 - RNA, 22 nt, Human
gggucugcucuuucucugccag

SEQ ID NO: 1316129 - RNA, 20 nt, Human
gggucuggaguugaucugga

SEQ ID NO: 1316130 - RNA, 22 nt, Human
gggucuggaguugaucuggaac

SEQ ID NO: 1316131 - RNA, 22 nt, Human
gggucuggcagccucccaucca

SEQ ID NO: 1316132 - RNA, 12 nt, Human
gggucuggcugg

SEQ ID NO: 1316133 - RNA, 13 nt, Human
gggucuggcuggu

SEQ ID NO: 1316134 - RNA, 14 nt, Human
gggucuggcuggug

SEQ ID NO: 1316135 - RNA, 15 nt, Human
gggucuggcuggugu

SEQ ID NO: 1316136 - RNA, 18 nt, Human
gggucuggcugguguuaa

SEQ ID NO: 1316137 - RNA, 21 nt, Human
gggucugggggcacaagacug

SEQ ID NO: 1316138 - RNA, 14 nt, Human
ggggcuaccaggaa

SEQ ID NO: 1316139 - RNA, 11 nt, Human
ggggcucagag

SEQ ID NO: 1316140 - RNA, 15 nt, Human
ggggcuaagacuucc

SEQ ID NO: 1316141 - RNA, 14 nt, Human
ggggcuaauuuaac

SEQ ID NO: 1316142 - RNA, 16 nt, Human
ggggcucccuccgccc

SEQ ID NO: 1316143 - RNA, 19 nt, Human
ggggcucccuccgccccca

SEQ ID NO: 1316144 - RNA, 17 nt, Human
ggggcucuaacgccuga

SEQ ID NO: 1316145 - RNA, 18 nt, Human
ggggcucuaacgccugag

SEQ ID NO: 1316146 - RNA, 20 nt, Human
ggggcucuaacgccugagcc

SEQ ID NO: 1316147 - RNA, 21 nt, Human
ggggcucuaacgccugagccc

SEQ ID NO: 1316148 - RNA, 22 nt, Human
ggggcucuaacgccugagccca

SEQ ID NO: 1316149 - RNA, 23 nt, Human
ggggcucuaacgccugagcccag

SEQ ID NO: 1316150 - RNA, 14 nt, Human
ggggcacaagacug

SEQ ID NO: 1316151 - RNA, 22 nt, Human
ggggcacaagacugacgccagg

SEQ ID NO: 1316152 - RNA, 18 nt, Human
ggggcagucugagagagg

SEQ ID NO: 1316153 - RNA, 15 nt, Human
ggggcagucugagag

SEQ ID NO: 1316154 - RNA, 19 nt, Human
ggggcagucugagagaggc

SEQ ID NO: 1316155 - RNA, 15 nt, Human
ggggcgcggcuggga

SEQ ID NO: 1316156 - RNA, 16 nt, Human
ggggcgcggcugggag

SEQ ID NO: 1316157 - RNA, 17 nt, Human
ggggaggguaggcagga

SEQ ID NO: 1316158 - RNA, 20 nt, Human
ggggauucuuccaucugauu

SEQ ID NO: 1316159 - RNA, 18 nt, Human
ggggaggggcugugggcg

SEQ ID NO: 1316160 - RNA, 15 nt, Human
ggggagggggauccg

SEQ ID NO: 1316161 - RNA, 13 nt, Human
ggggaggguaggc

SEQ ID NO: 1316162 - RNA, 15 nt, Human
ggggagggauucugg

SEQ ID NO: 1316163 - RNA, 20 nt, Human
ggggagggaagggagccaag

SEQ ID NO: 1316164 - RNA, 14 nt, Human
gggcuuuuuucuuu

SEQ ID NO: 1316165 - RNA, 14 nt, Human
ggggagggaaggga

SEQ ID NO: 1316166 - RNA, 17 nt, Human
ggggagggaagggagcc

SEQ ID NO: 1316167 - RNA, 18 nt, Human
ggggagggaagggagcca

SEQ ID NO: 1316168 - RNA, 14 nt, Human
ggggagggauucug

SEQ ID NO: 1316169 - RNA, 22 nt, Human
gggcuuugauguuccuuccagu

SEQ ID NO: 1316170 - RNA, 16 nt, Human
gggccugggcaggagg

SEQ ID NO: 1316171 - RNA, 17 nt, Human
gggccugggcaggaggg

SEQ ID NO: 1316172 - RNA, 11 nt, Human
gggccugggcc

SEQ ID NO: 1316173 - RNA, 12 nt, Human
gggccugggcuc

SEQ ID NO: 1316174 - RNA, 15 nt, Human
gggccugggcuccug

SEQ ID NO: 1316175 - RNA, 16 nt, Human
gggccugggcuccugg

SEQ ID NO: 1316176 - RNA, 18 nt, Human
gggccugggcuccuggac

SEQ ID NO: 1316177 - RNA, 17 nt, Human
gggccugggcuccugga

SEQ ID NO: 1316178 - RNA, 18 nt, Human
gggcuuguggggccuggg

SEQ ID NO: 1316179 - RNA, 16 nt, Human
gggcuuguggggccug

SEQ ID NO: 1316180 - RNA, 18 nt, Human
gggugcugggccccugcc

SEQ ID NO: 1316181 - RNA, 17 nt, Human
gggugcugggccccugc

SEQ ID NO: 1316182 - RNA, 16 nt, Human
ggguuaagaagacuuu

SEQ ID NO: 1316183 - RNA, 13 nt, Human
ggguuaucucugu

SEQ ID NO: 1316184 - RNA, 20 nt, Human
ggguucaccugggcugaggc

SEQ ID NO: 1316185 - RNA, 20 nt, Human
ggguuccuuccucugagccu

SEQ ID NO: 1316186 - RNA, 21 nt, Human
ggguuccuuccucugagccuu

SEQ ID NO: 1316187 - RNA, 19 nt, Human
ggguuccuuccucugagcc

SEQ ID NO: 1316188 - RNA, 13 nt, Human
ggguucauuugug

SEQ ID NO: 1316189 - RNA, 17 nt, Human
ggguucuuucuuccucu

SEQ ID NO: 1316190 - RNA, 19 nt, Human
ggguucuuucuuccucugc

SEQ ID NO: 1316191 - RNA, 22 nt, Human
gguaccagaugcagcucaagag

SEQ ID NO: 1316192 - RNA, 20 nt, Human
gggucuguagguugcacacu

SEQ ID NO: 1316193 - RNA, 20 nt, Human
gggugaacaaagcagccacg

SEQ ID NO: 1316194 - RNA, 21 nt, Human
gggucuguagguugcacacuu

SEQ ID NO: 1316195 - RNA, 20 nt, Human
gggugacccggcacccccug

SEQ ID NO: 1316196 - RNA, 14 nt, Human
gggugaggagcugg

SEQ ID NO: 1316197 - RNA, 15 nt, Human
gggugaggagcuggg

SEQ ID NO: 1316198 - RNA, 17 nt, Human
gggugagggucccaugu

SEQ ID NO: 1316199 - RNA, 23 nt, Human
gggugaguuggcuuaccuggccc

SEQ ID NO: 1316200 - RNA, 14 nt, Human
gggugaugagggca

SEQ ID NO: 1316201 - RNA, 17 nt, Human
gggugaugagggcagca

SEQ ID NO: 1316202 - RNA, 18 nt, Human
gggugaugagggcagcag

SEQ ID NO: 1316203 - RNA, 19 nt, Human
gggugaugagggcagcagc

SEQ ID NO: 1316204 - RNA, 21 nt, Human
gggugaugagggcagcagcca

SEQ ID NO: 1316205 - RNA, 23 nt, Human
gggugaugagggcagcagccagc

SEQ ID NO: 1316206 - RNA, 13 nt, Human
gggugcacaggag

SEQ ID NO: 1316207 - RNA, 14 nt, Human
gggugcacaggagg

SEQ ID NO: 1316208 - RNA, 16 nt, Human
gggugcacaggagggg

SEQ ID NO: 1316209 - RNA, 19 nt, Human
gggugcacaggaggggguc

SEQ ID NO: 1316210 - RNA, 23 nt, Human
gggugcaguaucaugcccugugc

SEQ ID NO: 1316211 - RNA, 24 nt, Human
gggugccuaggccugggcagugga

SEQ ID NO: 1316212 - RNA, 15 nt, Human
gggugcuacugggga

SEQ ID NO: 1316213 - RNA, 16 nt, Human
gggugcuacuggggaa

SEQ ID NO: 1316214 - RNA, 19 nt, Human
gggugcuacuggggaaacu

SEQ ID NO: 1316215 - RNA, 18 nt, Human
gguagcauuuguguugaa

SEQ ID NO: 1316216 - RNA, 13 nt, Human
gguagccagcaca

SEQ ID NO: 1316217 - RNA, 16 nt, Human
gguagccagcacacag

SEQ ID NO: 1316218 - RNA, 21 nt, Human
gguagccagcacacagggcag

SEQ ID NO: 1316219 - RNA, 15 nt, Human
gguagaagggaaagc

SEQ ID NO: 1316220 - RNA, 17 nt, Human
gguagaggaugaggaaa

SEQ ID NO: 1316221 - RNA, 21 nt, Human
gguaccagcagaaagguuagu

SEQ ID NO: 1316222 - RNA, 15 nt, Human
gguacuucuugaagg

SEQ ID NO: 1316223 - RNA, 16 nt, Human
gguacuucuugaaggu

SEQ ID NO: 1316224 - RNA, 19 nt, Human
gguacuucuugaaggugcu

SEQ ID NO: 1316225 - RNA, 16 nt, Human
gguacuugucauuucg

SEQ ID NO: 1316226 - RNA, 20 nt, Human
ggucacguuuggugcuucuc

SEQ ID NO: 1316227 - RNA, 20 nt, Human
ggucaccuaggaagccucag

SEQ ID NO: 1316228 - RNA, 12 nt, Human
ggucacagcugu

SEQ ID NO: 1316229 - RNA, 16 nt, Human
ggucacaggacucugc

SEQ ID NO: 1316230 - RNA, 18 nt, Human
ggucacaggacucugccu

SEQ ID NO: 1316231 - RNA, 22 nt, Human
ggucaacaguuuuccuaugcuu

SEQ ID NO: 1316232 - RNA, 22 nt, Human
ggucaacuugagcauguuacug

SEQ ID NO: 1316233 - RNA, 23 nt, Human
ggucaacuugagcauguuacuga

SEQ ID NO: 1316234 - RNA, 21 nt, Human
ggucacagcggagguguggag

SEQ ID NO: 1316235 - RNA, 12 nt, Human
gguauuuucaau

SEQ ID NO: 1316236 - RNA, 18 nt, Human
ggucaaaauagugccacu

SEQ ID NO: 1316237 - RNA, 16 nt, Human
ggucaacaguuuuccu

SEQ ID NO: 1316238 - RNA, 13 nt, Human
ggucaggcagggu

SEQ ID NO: 1316239 - RNA, 11 nt, Human
ggucaggccuu

SEQ ID NO: 1316240 - RNA, 12 nt, Human
ggucaggccuuu

SEQ ID NO: 1316241 - RNA, 20 nt, Human
ggucaggccuuugagcucag

SEQ ID NO: 1316242 - RNA, 13 nt, Human
ggucaggccuuug

SEQ ID NO: 1316243 - RNA, 21 nt, Human
gggccccugccucucugcagg

SEQ ID NO: 1316244 - RNA, 19 nt, Human
gggccccugccucucugca

SEQ ID NO: 1316245 - RNA, 18 nt, Human
gggccccugccucucugc

SEQ ID NO: 1316246 - RNA, 17 nt, Human
gggccccugccucucug

SEQ ID NO: 1316247 - RNA, 15 nt, Human
gggccccugccucuc

SEQ ID NO: 1316248 - RNA, 13 nt, Human
gggccccugccuc

SEQ ID NO: 1316249 - RNA, 13 nt, Human
gggccccucuccc

SEQ ID NO: 1316250 - RNA, 14 nt, Human
gggccccucucagc

SEQ ID NO: 1316251 - RNA, 15 nt, Human
gggccccucucagcc

SEQ ID NO: 1316252 - RNA, 16 nt, Human
gggccccucucagccc

SEQ ID NO: 1316253 - RNA, 17 nt, Human
gggccccucucagcccu

SEQ ID NO: 1316254 - RNA, 12 nt, Human
gggccccucucc

SEQ ID NO: 1316255 - RNA, 21 nt, Human
gggccccucuccccagggaag

SEQ ID NO: 1316256 - RNA, 14 nt, Human
gggccccagaggcu

SEQ ID NO: 1316257 - RNA, 14 nt, Human
gggcccccaucuca

SEQ ID NO: 1316258 - RNA, 17 nt, Human
gggccccucacccugcc

SEQ ID NO: 1316259 - RNA, 19 nt, Human
gggccccucacccugccuu

SEQ ID NO: 1316260 - RNA, 22 nt, Human
gggccccugccucucugcaggu

SEQ ID NO: 1316261 - RNA, 18 nt, Human
gggccccuuugcugaccc

SEQ ID NO: 1316262 - RNA, 22 nt, Human
gggcccgcgauguggaacugcu

SEQ ID NO: 1316263 - RNA, 17 nt, Human
gggcccugggccugccu

SEQ ID NO: 1316264 - RNA, 13 nt, Human
gggcccugggcug

SEQ ID NO: 1316265 - RNA, 15 nt, Human
gggcccugggcugga

SEQ ID NO: 1316266 - RNA, 14 nt, Human
gggcccugggcugg

SEQ ID NO: 1316267 - RNA, 18 nt, Human
gggcccugggccugccuc

SEQ ID NO: 1316268 - RNA, 13 nt, Human
gggccuggcuggc

SEQ ID NO: 1316269 - RNA, 14 nt, Human
gggccuggcuggcu

SEQ ID NO: 1316270 - RNA, 15 nt, Human
gggccuggcuggcug

SEQ ID NO: 1316271 - RNA, 16 nt, Human
gggccuggcuggcuga

SEQ ID NO: 1316272 - RNA, 17 nt, Human
gggccuggcuggcugag

SEQ ID NO: 1316273 - RNA, 18 nt, Human
gggccuggcuggcugagg

SEQ ID NO: 1316274 - RNA, 20 nt, Human
gggccuggcuggcugagggc

SEQ ID NO: 1316275 - RNA, 12 nt, Human
gggccugggcag

SEQ ID NO: 1316276 - RNA, 21 nt, Human
gggccuggcuggcugagggca

SEQ ID NO: 1316277 - RNA, 22 nt, Human
gggccuggcuggcugagggcag

SEQ ID NO: 1316278 - RNA, 23 nt, Human
gggccuggcuggcugagggcagu

SEQ ID NO: 1316279 - RNA, 12 nt, Human
gggccugggagg

SEQ ID NO: 1316280 - RNA, 13 nt, Human
gggccugggcagg

SEQ ID NO: 1316281 - RNA, 15 nt, Human
gggccugggcaggag

SEQ ID NO: 1316282 - RNA, 13 nt, Human
gggccaaggaccu

SEQ ID NO: 1316283 - RNA, 14 nt, Human
gggccaaggaccug

SEQ ID NO: 1316284 - RNA, 15 nt, Human
gggccaaggaccuga

SEQ ID NO: 1316285 - RNA, 16 nt, Human
gggccaaggaccugag

SEQ ID NO: 1316286 - RNA, 13 nt, Human
gggccaagcccag

SEQ ID NO: 1316287 - RNA, 19 nt, Human
gggccacauagaugcugau

SEQ ID NO: 1316288 - RNA, 19 nt, Human
gggccacaugggaggcuca

SEQ ID NO: 1316289 - RNA, 16 nt, Human
gggccacgcuccagcu

SEQ ID NO: 1316290 - RNA, 17 nt, Human
gggccacgcuccagcug

SEQ ID NO: 1316291 - RNA, 18 nt, Human
gggcccacaccuccuucc

SEQ ID NO: 1316292 - RNA, 13 nt, Human
gggcccacaccuc

SEQ ID NO: 1316293 - RNA, 12 nt, Human
gggccacuccuu

SEQ ID NO: 1316294 - RNA, 16 nt, Human
gggccacuccuuccug

SEQ ID NO: 1316295 - RNA, 17 nt, Human
gggccacuccuuccugc

SEQ ID NO: 1316296 - RNA, 19 nt, Human
gggccacuccuuccugccc

SEQ ID NO: 1316297 - RNA, 21 nt, Human
gggccacuccuuccugcccca

SEQ ID NO: 1316298 - RNA, 20 nt, Human
gggccacuccuuccugcccc

SEQ ID NO: 1316299 - RNA, 11 nt, Human
gggcccagagc

SEQ ID NO: 1316300 - RNA, 12 nt, Human
gggcccagagcc

SEQ ID NO: 1316301 - RNA, 13 nt, Human
gggcccagagccc

SEQ ID NO: 1316302 - RNA, 15 nt, Human
gggcccagagcccag

SEQ ID NO: 1316303 - RNA, 16 nt, Human
gggcccagagcccagc

SEQ ID NO: 1316304 - RNA, 17 nt, Human
gggcccagagcccagcu

SEQ ID NO: 1316305 - RNA, 19 nt, Human
gggcccagagcccagcucc

SEQ ID NO: 1316306 - RNA, 20 nt, Human
gggcccagagcccagcucca

SEQ ID NO: 1316307 - RNA, 15 nt, Human
gggcaucucugggcu

SEQ ID NO: 1316308 - RNA, 16 nt, Human
gggcaucucugggcug

SEQ ID NO: 1316309 - RNA, 22 nt, Human
gggcaucucugggcuggaugag

SEQ ID NO: 1316310 - RNA, 17 nt, Human
gggcaucucugggcugg

SEQ ID NO: 1316311 - RNA, 21 nt, Human
gggcaucuggccuggccagug

SEQ ID NO: 1316312 - RNA, 22 nt, Human
gggcaugagggguuccuccccu

SEQ ID NO: 1316313 - RNA, 15 nt, Human
gggcauggccaggug

SEQ ID NO: 1316314 - RNA, 17 nt, Human
gggcauggccagguggc

SEQ ID NO: 1316315 - RNA, 20 nt, Human
gggcauggccagguggccac

SEQ ID NO: 1316316 - RNA, 21 nt, Human
gggcaugguguucuccugcug

SEQ ID NO: 1316317 - RNA, 19 nt, Human
gggcaugguguucuccugc

SEQ ID NO: 1316318 - RNA, 20 nt, Human
gggcagucugagagaggcca

SEQ ID NO: 1316319 - RNA, 21 nt, Human
gggcagucugagagaggccau

SEQ ID NO: 1316320 - RNA, 17 nt, Human
gggcagucauuauccag

SEQ ID NO: 1316321 - RNA, 17 nt, Human
gggcaguaccugagggu

SEQ ID NO: 1316322 - RNA, 16 nt, Human
gggcaguucgcagcca

SEQ ID NO: 1316323 - RNA, 17 nt, Human
gggcaguucgcagccac

SEQ ID NO: 1316324 - RNA, 19 nt, Human
gggcaguucgcagccaccc

SEQ ID NO: 1316325 - RNA, 20 nt, Human
gggcaguucgcagccacccu

SEQ ID NO: 1316326 - RNA, 21 nt, Human
gggcaguucgcagccacccug

SEQ ID NO: 1316327 - RNA, 22 nt, Human
gggcaguucgcagccacccuga

SEQ ID NO: 1316328 - RNA, 14 nt, Human
gggcauaaauuauu

SEQ ID NO: 1316329 - RNA, 23 nt, Human
gggcaguucgcagccacccugag

SEQ ID NO: 1316330 - RNA, 14 nt, Human
gggcaucucugggc

SEQ ID NO: 1316331 - RNA, 21 nt, Human
gggcaauuaauuccuucagca

SEQ ID NO: 1316332 - RNA, 14 nt, Human
gggcaauugucuga

SEQ ID NO: 1316333 - RNA, 20 nt, Human
gggcaauuaauuccuucagc

SEQ ID NO: 1316334 - RNA, 13 nt, Human
gggcaagaggaau

SEQ ID NO: 1316335 - RNA, 21 nt, Human
gggcaagccuaagggauccug

SEQ ID NO: 1316336 - RNA, 20 nt, Human
gggaucccucccccccaugc

SEQ ID NO: 1316337 - RNA, 17 nt, Human
gggauccgacugcuuug

SEQ ID NO: 1316338 - RNA, 14 nt, Human
gggauccugccugc

SEQ ID NO: 1316339 - RNA, 18 nt, Human
gggaucagggguaggaau

SEQ ID NO: 1316340 - RNA, 15 nt, Human
gggauaggccagccg

SEQ ID NO: 1316341 - RNA, 13 nt, Human
gggacugagaaau

SEQ ID NO: 1316342 - RNA, 19 nt, Human
gggacucaucuuucccucc

SEQ ID NO: 1316343 - RNA, 12 nt, Human
gggacucagccc

SEQ ID NO: 1316344 - RNA, 22 nt, Human
gggacucagccuucagacagag

SEQ ID NO: 1316345 - RNA, 17 nt, Human
gggacuaaaugcccugc

SEQ ID NO: 1316346 - RNA, 19 nt, Human
gggacuacaggcgugagcc

SEQ ID NO: 1316347 - RNA, 20 nt, Human
gggacuacaggcgugagcca

SEQ ID NO: 1316348 - RNA, 18 nt, Human
gggacuagccuggcuugg

SEQ ID NO: 1316349 - RNA, 18 nt, Human
gggaggugagaccaccuc

SEQ ID NO: 1316350 - RNA, 15 nt, Human
gggacugaccagcag

SEQ ID NO: 1316351 - RNA, 23 nt, Human
gggaggugcuucuaguucugcca

SEQ ID NO: 1316352 - RNA, 15 nt, Human
gggacugagaaauuu

SEQ ID NO: 1316353 - RNA, 23 nt, Human
gggagugacucaagaagugaaga

SEQ ID NO: 1316354 - RNA, 13 nt, Human
gggagugugugcc

SEQ ID NO: 1316355 - RNA, 15 nt, Human
gggaguuaagaccug

SEQ ID NO: 1316356 - RNA, 16 nt, Human
gggaguuaagaccugg

SEQ ID NO: 1316357 - RNA, 16 nt, Human
gggaguuuaggguggg

SEQ ID NO: 1316358 - RNA, 17 nt, Human
gggaguuaagaccuggc

SEQ ID NO: 1316359 - RNA, 20 nt, Human
gggaguuaagaccuggcagc

SEQ ID NO: 1316360 - RNA, 23 nt, Human
gggaguuaagaccuggcagcucu

SEQ ID NO: 1316361 - RNA, 12 nt, Human
gggaguguuccc

SEQ ID NO: 1316362 - RNA, 14 nt, Human
gggcaccggggccu

SEQ ID NO: 1316363 - RNA, 14 nt, Human
gggcacccccagcc

SEQ ID NO: 1316364 - RNA, 16 nt, Human
gggcacccccagccug

SEQ ID NO: 1316365 - RNA, 17 nt, Human
gggcacccccagccugg

SEQ ID NO: 1316366 - RNA, 18 nt, Human
gggcacccccagccuggg

SEQ ID NO: 1316367 - RNA, 21 nt, Human
gggcacccccagccugggccu

SEQ ID NO: 1316368 - RNA, 18 nt, Human
gggcaccagggguuucuc

SEQ ID NO: 1316369 - RNA, 20 nt, Human
gggcaccagggguuucucgc

SEQ ID NO: 1316370 - RNA, 23 nt, Human
gggcacaagacugacgccagggu

SEQ ID NO: 1316371 - RNA, 16 nt, Human
gggcacaagacugacg

SEQ ID NO: 1316372 - RNA, 12 nt, Human
gggcacaggagc

SEQ ID NO: 1316373 - RNA, 13 nt, Human
gggcacaggagcu

SEQ ID NO: 1316374 - RNA, 14 nt, Human
gggcacaggagcua

SEQ ID NO: 1316375 - RNA, 15 nt, Human
gggcacaggagcuac

SEQ ID NO: 1316376 - RNA, 17 nt, Human
gggcacaggagcuaccu

SEQ ID NO: 1316377 - RNA, 21 nt, Human
gggcacaggagcuaccugugu

SEQ ID NO: 1316378 - RNA, 18 nt, Human
gggcacaggagcuaccug

SEQ ID NO: 1316379 - RNA, 19 nt, Human
gggcacccccagccugggc

SEQ ID NO: 1316380 - RNA, 13 nt, Human
gggcacugguggc

SEQ ID NO: 1316381 - RNA, 16 nt, Human
gggcacugguggcccg

SEQ ID NO: 1316382 - RNA, 14 nt, Human
gggcagggugaccc

SEQ ID NO: 1316383 - RNA, 17 nt, Human
gggcagucugagagagg

SEQ ID NO: 1316384 - RNA, 15 nt, Human
gggcaguaccugagg

SEQ ID NO: 1316385 - RNA, 20 nt, Human
gggcaguaccugagggucug

SEQ ID NO: 1316386 - RNA, 18 nt, Human
gggcagucugagagaggc

SEQ ID NO: 1316387 - RNA, 19 nt, Human
gggcagucugagagaggcc

SEQ ID NO: 1316388 - RNA, 15 nt, Human
gggaaggaucccaug

SEQ ID NO: 1316389 - RNA, 21 nt, Human
gggaaggauucugcuggccuc

SEQ ID NO: 1316390 - RNA, 22 nt, Human
gggaaggauucugcuggccucu

SEQ ID NO: 1316391 - RNA, 14 nt, Human
gggaaggcaggcag

SEQ ID NO: 1316392 - RNA, 22 nt, Human
gggaaggcagggagggccuggg

SEQ ID NO: 1316393 - RNA, 15 nt, Human
gggaaggcaggcagg

SEQ ID NO: 1316394 - RNA, 21 nt, Human
gggaaggcaggcagggcucuc

SEQ ID NO: 1316395 - RNA, 21 nt, Human
gggaaggcuacuucggggcug

SEQ ID NO: 1316396 - RNA, 22 nt, Human
gggaaggcuacuucggggcugg

SEQ ID NO: 1316397 - RNA, 14 nt, Human
gggaagggacacac

SEQ ID NO: 1316398 - RNA, 14 nt, Human
gggaagggagccaa

SEQ ID NO: 1316399 - RNA, 16 nt, Human
gggaagggagccaagg

SEQ ID NO: 1316400 - RNA, 22 nt, Human
gggaagggagccaagggaugga

SEQ ID NO: 1316401 - RNA, 21 nt, Human
gggaagggagccaagggaugg

SEQ ID NO: 1316402 - RNA, 13 nt, Human
gggaaugaagaua

SEQ ID NO: 1316403 - RNA, 20 nt, Human
gggaaguaguuaucauguua

SEQ ID NO: 1316404 - RNA, 23 nt, Human
gggaagugaagacuggaagcuaa

SEQ ID NO: 1316405 - RNA, 22 nt, Human
gggaaguaguuaucauguuagu

SEQ ID NO: 1316406 - RNA, 18 nt, Human
gggaaguaguuaucaugu

SEQ ID NO: 1316407 - RNA, 21 nt, Human
gggaaggugggguccuggagc

SEQ ID NO: 1316408 - RNA, 16 nt, Human
gggaagggccugccca

SEQ ID NO: 1316409 - RNA, 22 nt, Human
gggacguucgugguccugcgcu

SEQ ID NO: 1316410 - RNA, 22 nt, Human
gggacguggcucagccagcacu

SEQ ID NO: 1316411 - RNA, 20 nt, Human
gggacguggcucagccagca

SEQ ID NO: 1316412 - RNA, 19 nt, Human
gggaccuagggaggcaugg

SEQ ID NO: 1316413 - RNA, 20 nt, Human
gggaccggcggaccccagcc

SEQ ID NO: 1316414 - RNA, 21 nt, Human
gggaccgcuacaccacucugg

SEQ ID NO: 1316415 - RNA, 22 nt, Human
gggaccgcuacaccacucuggc

SEQ ID NO: 1316416 - RNA, 20 nt, Human
gggaccuagggaggcauggu

SEQ ID NO: 1316417 - RNA, 14 nt, Human
gggaccccugagcu

SEQ ID NO: 1316418 - RNA, 19 nt, Human
gggacaacugcucccaccu

SEQ ID NO: 1316419 - RNA, 18 nt, Human
gggacaaguggacucagg

SEQ ID NO: 1316420 - RNA, 19 nt, Human
gggacaaguggacucaggg

SEQ ID NO: 1316421 - RNA, 17 nt, Human
gggaauuucuucaacuc

SEQ ID NO: 1316422 - RNA, 14 nt, Human
gggaauggcagcag

SEQ ID NO: 1316423 - RNA, 23 nt, Human
gggacaaggacuaggguccuggg

SEQ ID NO: 1316424 - RNA, 16 nt, Human
gggacaaaggagccug

SEQ ID NO: 1316425 - RNA, 17 nt, Human
gggacaaaggagccugu

SEQ ID NO: 1316426 - RNA, 18 nt, Human
gggacaaaggagccugug

SEQ ID NO: 1316427 - RNA, 15 nt, Human
gggacaaaggagccu

SEQ ID NO: 1316428 - RNA, 22 nt, Human
ggcuugaguuuaaauuguaaua

SEQ ID NO: 1316429 - RNA, 22 nt, Human
ggcuuggggcucacacaccugu

SEQ ID NO: 1316430 - RNA, 14 nt, Human
ggcuuguggggccu

SEQ ID NO: 1316431 - RNA, 16 nt, Human
ggcuuguggggccugg

SEQ ID NO: 1316432 - RNA, 18 nt, Human
ggcuuguggggccuggga

SEQ ID NO: 1316433 - RNA, 19 nt, Human
ggcuuuucacugcuggcug

SEQ ID NO: 1316434 - RNA, 22 nt, Human
ggcuuuucacugcuggcugccu

SEQ ID NO: 1316435 - RNA, 14 nt, Human
ggcuuuucacugcu

SEQ ID NO: 1316436 - RNA, 15 nt, Human
ggcuuuucacugcug

SEQ ID NO: 1316437 - RNA, 17 nt, Human
ggcuuuucacugcuggc

SEQ ID NO: 1316438 - RNA, 20 nt, Human
ggcuuuaugauaauagauuc

SEQ ID NO: 1316439 - RNA, 22 nt, Human
ggcuuuaugauaauagauucuc

SEQ ID NO: 1316440 - RNA, 19 nt, Human
ggcuuucauuuucucucag

SEQ ID NO: 1316441 - RNA, 20 nt, Human
ggcuuucauuuucucucagg

SEQ ID NO: 1316442 - RNA, 13 nt, Human
ggcuuacacccac

SEQ ID NO: 1316443 - RNA, 20 nt, Human
ggcuuaccuggcccaucagg

SEQ ID NO: 1316444 - RNA, 14 nt, Human
ggcuuaccuggccc

SEQ ID NO: 1316445 - RNA, 12 nt, Human
ggcuucacagau

SEQ ID NO: 1316446 - RNA, 21 nt, Human
ggcuugagaaauauggacacu

SEQ ID NO: 1316447 - RNA, 20 nt, Human
ggcuugagcccccgcgccca

SEQ ID NO: 1316448 - RNA, 22 nt, Human
ggcuuaguuuguguguugucuc

SEQ ID NO: 1316449 - RNA, 16 nt, Human
ggcuuauaauucuuuc

SEQ ID NO: 1316450 - RNA, 17 nt, Human
ggcuuauaauucuuuca

SEQ ID NO: 1316451 - RNA, 18 nt, Human
ggcuuauaucuggccucu

SEQ ID NO: 1316452 - RNA, 17 nt, Human
ggcugggccauguccaa

SEQ ID NO: 1316453 - RNA, 20 nt, Human
ggcugggccauguccaaaga

SEQ ID NO: 1316454 - RNA, 21 nt, Human
ggcugggccauguccaaagag

SEQ ID NO: 1316455 - RNA, 23 nt, Human
ggcuuaaacccauauuguaaaac

SEQ ID NO: 1316456 - RNA, 15 nt, Human
ggcugcugcuacaau

SEQ ID NO: 1316457 - RNA, 11 nt, Human
ggcugcugcug

SEQ ID NO: 1316458 - RNA, 22 nt, Human
ggcugcugcugcucuuggcugg

SEQ ID NO: 1316459 - RNA, 23 nt, Human
ggcugcugcugcucuuggcugga

SEQ ID NO: 1316460 - RNA, 14 nt, Human
ggcugcugcugggc

SEQ ID NO: 1316461 - RNA, 16 nt, Human
ggcugcugcugggcuc

SEQ ID NO: 1316462 - RNA, 21 nt, Human
ggcugcugaucgccuucccca

SEQ ID NO: 1316463 - RNA, 19 nt, Human
ggcugcugaucgccuuccc

SEQ ID NO: 1316464 - RNA, 20 nt, Human
ggcugcugcugggcucagug

SEQ ID NO: 1316465 - RNA, 18 nt, Human
ggcugcugcugggcucag

SEQ ID NO: 1316466 - RNA, 17 nt, Human
ggcugcugugggaaaug

SEQ ID NO: 1316467 - RNA, 15 nt, Human
ggcugcagccucagg

SEQ ID NO: 1316468 - RNA, 16 nt, Human
ggcugcagccucagga

SEQ ID NO: 1316469 - RNA, 17 nt, Human
ggcugcagccucaggac

SEQ ID NO: 1316470 - RNA, 18 nt, Human
ggcugcagccucaggacu

SEQ ID NO: 1316471 - RNA, 22 nt, Human
ggcugcagccucaggacuggga

SEQ ID NO: 1316472 - RNA, 19 nt, Human
ggcugcagccucaggacug

SEQ ID NO: 1316473 - RNA, 20 nt, Human
ggcugcagccucaggacugg

SEQ ID NO: 1316474 - RNA, 21 nt, Human
ggcuggacccagccaggccca

SEQ ID NO: 1316475 - RNA, 11 nt, Human
ggcugggccau

SEQ ID NO: 1316476 - RNA, 12 nt, Human
ggcuggacccag

SEQ ID NO: 1316477 - RNA, 14 nt, Human
ggcuggacccagcc

SEQ ID NO: 1316478 - RNA, 15 nt, Human
ggcuggacccagcca

SEQ ID NO: 1316479 - RNA, 19 nt, Human
ggcuggacccagccaggcc

SEQ ID NO: 1316480 - RNA, 20 nt, Human
ggcuggacccagccaggccc

SEQ ID NO: 1316481 - RNA, 23 nt, Human
ggcuggacccagccaggcccagc

SEQ ID NO: 1316482 - RNA, 18 nt, Human
ggcuggaagauagcugug

SEQ ID NO: 1316483 - RNA, 15 nt, Human
ggcuggaagauccug

SEQ ID NO: 1316484 - RNA, 22 nt, Human
ggcuggaagauccugcgggugg

SEQ ID NO: 1316485 - RNA, 19 nt, Human
ggcuggaagauccugcggg

SEQ ID NO: 1316486 - RNA, 18 nt, Human
ggcugcuucccugaagcu

SEQ ID NO: 1316487 - RNA, 19 nt, Human
ggcugcuucccugaagcuc

SEQ ID NO: 1316488 - RNA, 13 nt, Human
ggcugcuuccucc

SEQ ID NO: 1316489 - RNA, 19 nt, Human
ggcugcuuccuccuggaaa

SEQ ID NO: 1316490 - RNA, 15 nt, Human
ggcugcuuccuccug

SEQ ID NO: 1316491 - RNA, 16 nt, Human
ggcugcuuccuccugg

SEQ ID NO: 1316492 - RNA, 17 nt, Human
ggcugcuuccuccugga

SEQ ID NO: 1316493 - RNA, 18 nt, Human
ggcugcuuccuccuggaa

SEQ ID NO: 1316494 - RNA, 14 nt, Human
ggcucuggagccca

SEQ ID NO: 1316495 - RNA, 13 nt, Human
ggcucuggagccc

SEQ ID NO: 1316496 - RNA, 20 nt, Human
ggccccugccaccuccugcc

SEQ ID NO: 1316497 - RNA, 13 nt, Human
ggccccugccucu

SEQ ID NO: 1316498 - RNA, 15 nt, Human
ggcugagauaugaac

SEQ ID NO: 1316499 - RNA, 15 nt, Human
ggcugagcucucugu

SEQ ID NO: 1316500 - RNA, 20 nt, Human
ggcugagcucucugugggcu

SEQ ID NO: 1316501 - RNA, 16 nt, Human
ggcugagggagccugg

SEQ ID NO: 1316502 - RNA, 13 nt, Human
ggcugagggcagu

SEQ ID NO: 1316503 - RNA, 21 nt, Human
ggcugagggcaguucgcagcc

SEQ ID NO: 1316504 - RNA, 22 nt, Human
ggcugagggcaguucgcagcca

SEQ ID NO: 1316505 - RNA, 18 nt, Human
ggcugaugucaauuucug

SEQ ID NO: 1316506 - RNA, 22 nt, Human
ggcugaugucaauuucuguguu

SEQ ID NO: 1316507 - RNA, 24 nt, Human
ggcugaugucaauuucuguguugc

SEQ ID NO: 1316508 - RNA, 15 nt, Human
ggcugauaauuuuaa

SEQ ID NO: 1316509 - RNA, 15 nt, Human
ggcugauggaguaaa

SEQ ID NO: 1316510 - RNA, 14 nt, Human
ggcugcagccucag

SEQ ID NO: 1316511 - RNA, 19 nt, Human
ggcugcagaggccagaggc

SEQ ID NO: 1316512 - RNA, 14 nt, Human
ggcugauuucuagg

SEQ ID NO: 1316513 - RNA, 13 nt, Human
ggcugcagaggcc

SEQ ID NO: 1316514 - RNA, 16 nt, Human
ggcugcagaggccaga

SEQ ID NO: 1316515 - RNA, 18 nt, Human
ggcugcagaggccagagg

SEQ ID NO: 1316516 - RNA, 20 nt, Human
ggccaggcaggagcccuucu

SEQ ID NO: 1316517 - RNA, 19 nt, Human
ggccaggcauguggcaggg

SEQ ID NO: 1316518 - RNA, 13 nt, Human
ggccaggaggugc

SEQ ID NO: 1316519 - RNA, 22 nt, Human
ggccaggcugggucgcccugga

SEQ ID NO: 1316520 - RNA, 18 nt, Human
ggccaggcugggucgccc

SEQ ID NO: 1316521 - RNA, 11 nt, Human
ggccaggcugg

SEQ ID NO: 1316522 - RNA, 16 nt, Human
ggccaccuggcucuca

SEQ ID NO: 1316523 - RNA, 17 nt, Human
ggccaccuggcucucac

SEQ ID NO: 1316524 - RNA, 22 nt, Human
ggccaccuggcucucaccucua

SEQ ID NO: 1316525 - RNA, 14 nt, Human
ggccacgcuccagc

SEQ ID NO: 1316526 - RNA, 14 nt, Human
ggccaggaggugcc

SEQ ID NO: 1316527 - RNA, 15 nt, Human
ggccaaguuccucua

SEQ ID NO: 1316528 - RNA, 13 nt, Human
ggccaaguuccuc

SEQ ID NO: 1316529 - RNA, 22 nt, Human
ggccaaugcaccuaaagaaaaa

SEQ ID NO: 1316530 - RNA, 12 nt, Human
ggccacacagcu

SEQ ID NO: 1316531 - RNA, 13 nt, Human
ggccacacagcug

SEQ ID NO: 1316532 - RNA, 14 nt, Human
ggccacacagcugc

SEQ ID NO: 1316533 - RNA, 16 nt, Human
ggccacacagcugccg

SEQ ID NO: 1316534 - RNA, 15 nt, Human
ggccacacagcugcc

SEQ ID NO: 1316535 - RNA, 16 nt, Human
ggcagugagggagggc

SEQ ID NO: 1316536 - RNA, 21 nt, Human
ggcagugagggagggcuguca

SEQ ID NO: 1316537 - RNA, 24 nt, Human
ggcauuagcuaaaaccuuccaugu

SEQ ID NO: 1316538 - RNA, 20 nt, Human
ggcauuagaauuauuuaaac

SEQ ID NO: 1316539 - RNA, 17 nt, Human
ggcauuagaauuauuua

SEQ ID NO: 1316540 - RNA, 19 nt, Human
ggcauuagaauuauuuaaa

SEQ ID NO: 1316541 - RNA, 19 nt, Human
ggcagucugaauuuuuaaa

SEQ ID NO: 1316542 - RNA, 20 nt, Human
ggcagucugagagaggccau

SEQ ID NO: 1316543 - RNA, 12 nt, Human
ggccaggcuggu

SEQ ID NO: 1316544 - RNA, 13 nt, Human
ggccauggccugc

SEQ ID NO: 1316545 - RNA, 22 nt, Human
ggccaugggacagggaggacgc

SEQ ID NO: 1316546 - RNA, 21 nt, Human
ggccaugggaggccuuucccu

SEQ ID NO: 1316547 - RNA, 22 nt, Human
ggccaugggaggccuuucccua

SEQ ID NO: 1316548 - RNA, 14 nt, Human
ggccauggccugca

SEQ ID NO: 1316549 - RNA, 15 nt, Human
ggccauggccugcaa

SEQ ID NO: 1316550 - RNA, 13 nt, Human
ggccaugggaggc

SEQ ID NO: 1316551 - RNA, 15 nt, Human
ggccaugggaggccu

SEQ ID NO: 1316552 - RNA, 16 nt, Human
ggcccccaccuggcuc

SEQ ID NO: 1316553 - RNA, 17 nt, Human
ggcccccaccuggcuca

SEQ ID NO: 1316554 - RNA, 15 nt, Human
ggcccccacuugccu

SEQ ID NO: 1316555 - RNA, 16 nt, Human
ggcccccacuugccuc

SEQ ID NO: 1316556 - RNA, 18 nt, Human
ggcccccacuugccucuu

SEQ ID NO: 1316557 - RNA, 14 nt, Human
ggcccccagcccag

SEQ ID NO: 1316558 - RNA, 17 nt, Human
ggcccccagcccagggc

SEQ ID NO: 1316559 - RNA, 18 nt, Human
ggcccccagcccagggcu

SEQ ID NO: 1316560 - RNA, 20 nt, Human
ggcccccagcccagggcucc

SEQ ID NO: 1316561 - RNA, 23 nt, Human
ggcccccagcccagggcuccugc

SEQ ID NO: 1316562 - RNA, 19 nt, Human
ggcccccaucauccucugg

SEQ ID NO: 1316563 - RNA, 14 nt, Human
ggcccccaucucau

SEQ ID NO: 1316564 - RNA, 21 nt, Human
ggcccccaucucaugccccug

SEQ ID NO: 1316565 - RNA, 15 nt, Human
ggcccccaucucaug

SEQ ID NO: 1316566 - RNA, 14 nt, Human
ggcccccccagcug

SEQ ID NO: 1316567 - RNA, 15 nt, Human
ggccccccugguccc

SEQ ID NO: 1316568 - RNA, 21 nt, Human
ggccccccugguccccuccuu

SEQ ID NO: 1316569 - RNA, 19 nt, Human
ggcccccgccuuggccugu

SEQ ID NO: 1316570 - RNA, 23 nt, Human
ggcccccgccuuggccuguguuc

SEQ ID NO: 1316571 - RNA, 13 nt, Human
ggcccccucccug

SEQ ID NO: 1316572 - RNA, 16 nt, Human
ggcccccucccuggau

SEQ ID NO: 1316573 - RNA, 17 nt, Human
ggcccccucccuggaug

SEQ ID NO: 1316574 - RNA, 18 nt, Human
ggccccguuucugguggu

SEQ ID NO: 1316575 - RNA, 19 nt, Human
ggccccucacccugccuua

SEQ ID NO: 1316576 - RNA, 16 nt, Human
ggccccucccccugag

SEQ ID NO: 1316577 - RNA, 14 nt, Human
ggccccuccccucc

SEQ ID NO: 1316578 - RNA, 17 nt, Human
ggccccuccccuccaaa

SEQ ID NO: 1316579 - RNA, 22 nt, Human
ggccccucacccugccuuaucu

SEQ ID NO: 1316580 - RNA, 12 nt, Human
ggccccucucag

SEQ ID NO: 1316581 - RNA, 13 nt, Human
ggccccucucagc

SEQ ID NO: 1316582 - RNA, 14 nt, Human
ggccccucucagcc

SEQ ID NO: 1316583 - RNA, 15 nt, Human
ggccccucucagccc

SEQ ID NO: 1316584 - RNA, 16 nt, Human
ggccccucucagcccu

SEQ ID NO: 1316585 - RNA, 20 nt, Human
ggccccucucagcccucaca

SEQ ID NO: 1316586 - RNA, 12 nt, Human
ggccccucuccc

SEQ ID NO: 1316587 - RNA, 23 nt, Human
ggccccucucccuugggcucuga

SEQ ID NO: 1316588 - RNA, 14 nt, Human
ggccccucugaccu

SEQ ID NO: 1316589 - RNA, 21 nt, Human
ggaucaguuaacuauugcauu

SEQ ID NO: 1316590 - RNA, 18 nt, Human
ggaucagcguggccuugu

SEQ ID NO: 1316591 - RNA, 12 nt, Human
ggaucagaauag

SEQ ID NO: 1316592 - RNA, 19 nt, Human
ggaucagagcgcacaggga

SEQ ID NO: 1316593 - RNA, 13 nt, Human
ggaucagcguggc

SEQ ID NO: 1316594 - RNA, 15 nt, Human
ggaucagcguggccu

SEQ ID NO: 1316595 - RNA, 16 nt, Human
ggaucagcguggccuu

SEQ ID NO: 1316596 - RNA, 17 nt, Human
ggaucagcguggccuug

SEQ ID NO: 1316597 - RNA, 19 nt, Human
ggaucagcguggccuuguu

SEQ ID NO: 1316598 - RNA, 17 nt, Human
ggaucccaugagcuccu

SEQ ID NO: 1316599 - RNA, 13 nt, Human
ggauccagggagg

SEQ ID NO: 1316600 - RNA, 20 nt, Human
ggauccacgacgcuuaaaua

SEQ ID NO: 1316601 - RNA, 18 nt, Human
ggaucagggguaggaaug

SEQ ID NO: 1316602 - RNA, 17 nt, Human
ggauccaaacugaucca

SEQ ID NO: 1316603 - RNA, 18 nt, Human
ggcaacuugggaacuaga

SEQ ID NO: 1316604 - RNA, 23 nt, Human
ggcaacuugggaacuagacuccc

SEQ ID NO: 1316605 - RNA, 20 nt, Human
ggaucccaugagcuccuuaa

SEQ ID NO: 1316606 - RNA, 16 nt, Human
ggcaacgcacaaaaca

SEQ ID NO: 1316607 - RNA, 16 nt, Human
ggcaaggcuguggacc

SEQ ID NO: 1316608 - RNA, 16 nt, Human
ggcacccccugcagcu

SEQ ID NO: 1316609 - RNA, 18 nt, Human
ggcacccccugcagcuug

SEQ ID NO: 1316610 - RNA, 19 nt, Human
ggcacccccugcagcuugu

SEQ ID NO: 1316611 - RNA, 18 nt, Human
ggcaccuaauccaggcag

SEQ ID NO: 1316612 - RNA, 19 nt, Human
ggcaccuaauccaggcaga

SEQ ID NO: 1316613 - RNA, 17 nt, Human
ggcaccugggcccuggg

SEQ ID NO: 1316614 - RNA, 19 nt, Human
ggcaccugggcccuggggc

SEQ ID NO: 1316615 - RNA, 12 nt, Human
ggcagagcuggu

SEQ ID NO: 1316616 - RNA, 13 nt, Human
ggcagagcuggug

SEQ ID NO: 1316617 - RNA, 14 nt, Human
ggcagagcuggugc

SEQ ID NO: 1316618 - RNA, 15 nt, Human
ggcagagcuggugcg

SEQ ID NO: 1316619 - RNA, 22 nt, Human
ggcaccuaauccaggcagaucc

SEQ ID NO: 1316620 - RNA, 21 nt, Human
ggcaccuacacucaccugcac

SEQ ID NO: 1316621 - RNA, 16 nt, Human
ggcaccucacaggccc

SEQ ID NO: 1316622 - RNA, 19 nt, Human
ggcaccucacaggccccag

SEQ ID NO: 1316623 - RNA, 13 nt, Human
ggcaccugggccc

SEQ ID NO: 1316624 - RNA, 16 nt, Human
ggcaccugggcccugg

SEQ ID NO: 1316625 - RNA, 22 nt, Human
ggcaccugggcccuggggccug

SEQ ID NO: 1316626 - RNA, 15 nt, Human
ggcagcaacaauaaa

SEQ ID NO: 1316627 - RNA, 16 nt, Human
ggcagauguaggaggg

SEQ ID NO: 1316628 - RNA, 17 nt, Human
ggcagauguaggaggga

SEQ ID NO: 1316629 - RNA, 20 nt, Human
ggcagauguaggagggacug

SEQ ID NO: 1316630 - RNA, 15 nt, Human
ggcagauggggagac

SEQ ID NO: 1316631 - RNA, 14 nt, Human
ggcagauguaggag

SEQ ID NO: 1316632 - RNA, 14 nt, Human
ggcagauccaggac

SEQ ID NO: 1316633 - RNA, 16 nt, Human
ggcagauccaggacua

SEQ ID NO: 1316634 - RNA, 15 nt, Human
ggcagcaauuuaaau

SEQ ID NO: 1316635 - RNA, 21 nt, Human
ggcagcaaggcccgagcagcu

SEQ ID NO: 1316636 - RNA, 22 nt, Human
ggcagcaaggcccgagcagcug

SEQ ID NO: 1316637 - RNA, 17 nt, Human
ggcagcaaggcccgagc

SEQ ID NO: 1316638 - RNA, 18 nt, Human
ggcagcaaggcccgagca

SEQ ID NO: 1316639 - RNA, 19 nt, Human
ggcagcaaggcccgagcag

SEQ ID NO: 1316640 - RNA, 20 nt, Human
ggcagcaaggcccgagcagc

SEQ ID NO: 1316641 - RNA, 22 nt, Human
ggcagcaacaauaaauagacac

SEQ ID NO: 1316642 - RNA, 17 nt, Human
ggcagcaacaauaaaua

SEQ ID NO: 1316643 - RNA, 12 nt, Human
ggcagcaaggcc

SEQ ID NO: 1316644 - RNA, 13 nt, Human
ggcagcaaggccc

SEQ ID NO: 1316645 - RNA, 16 nt, Human
ggcagcaaggcccgag

SEQ ID NO: 1316646 - RNA, 16 nt, Human
ggcagcaauuuaaaug

SEQ ID NO: 1316647 - RNA, 22 nt, Human
ggcagcacaaguguaaugaaua

SEQ ID NO: 1316648 - RNA, 23 nt, Human
ggcagcaaggcccgagcagcuga

SEQ ID NO: 1316649 - RNA, 18 nt, Human
ggcagagcuggugcggcu

SEQ ID NO: 1316650 - RNA, 20 nt, Human
ggcagaggaccaggcuguag

SEQ ID NO: 1316651 - RNA, 15 nt, Human
ggcagaggcaguacc

SEQ ID NO: 1316652 - RNA, 14 nt, Human
ggcagaggcccagg

SEQ ID NO: 1316653 - RNA, 16 nt, Human
ggcagaggcccaggcu

SEQ ID NO: 1316654 - RNA, 17 nt, Human
ggcagaggcccaggcug

SEQ ID NO: 1316655 - RNA, 19 nt, Human
ggcagaggcccaggcugcc

SEQ ID NO: 1316656 - RNA, 21 nt, Human
ggcagaggcccaggcugccgu

SEQ ID NO: 1316657 - RNA, 22 nt, Human
ggcagaggcccaggcugccguc

SEQ ID NO: 1316658 - RNA, 13 nt, Human
ggcagaggccugg

SEQ ID NO: 1316659 - RNA, 14 nt, Human
ggcagaggccuggg

SEQ ID NO: 1316660 - RNA, 17 nt, Human
ggcagaggccugggcug

SEQ ID NO: 1316661 - RNA, 22 nt, Human
ggcagaggccugggcugggaaa

SEQ ID NO: 1316662 - RNA, 18 nt, Human
ggcagaggccugggcugg

SEQ ID NO: 1316663 - RNA, 13 nt, Human
ggcagcagccagc

SEQ ID NO: 1316664 - RNA, 11 nt, Human
ggcagcagcca

SEQ ID NO: 1316665 - RNA, 14 nt, Human
ggcaggaaggcuga

SEQ ID NO: 1316666 - RNA, 21 nt, Human
ggcagguaugaucggcaggac

SEQ ID NO: 1316667 - RNA, 15 nt, Human
ggcagcuuugcucau

SEQ ID NO: 1316668 - RNA, 13 nt, Human
ggcagcuuuuaaa

SEQ ID NO: 1316669 - RNA, 14 nt, Human
ggcagcuuugcuca

SEQ ID NO: 1316670 - RNA, 12 nt, Human
ggcagcagccag

SEQ ID NO: 1316671 - RNA, 15 nt, Human
ggcagcuuuuaaaag

SEQ ID NO: 1316672 - RNA, 14 nt, Human
ggcagcuuuuaaaa

SEQ ID NO: 1316673 - RNA, 15 nt, Human
ggcaggaacaaacag

SEQ ID NO: 1316674 - RNA, 23 nt, Human
ggcaggaagcccaauugcuggag

SEQ ID NO: 1316675 - RNA, 23 nt, Human
ggcagguaugaucggcaggacac

SEQ ID NO: 1316676 - RNA, 18 nt, Human
ggaggaggcagagaagaa

SEQ ID NO: 1316677 - RNA, 17 nt, Human
ggaggaggcagagaaga

SEQ ID NO: 1316678 - RNA, 21 nt, Human
ggaggagccuguccugccugu

SEQ ID NO: 1316679 - RNA, 13 nt, Human
ggaggaggagggu

SEQ ID NO: 1316680 - RNA, 12 nt, Human
ggaggagcccag

SEQ ID NO: 1316681 - RNA, 13 nt, Human
ggaggagcccagg

SEQ ID NO: 1316682 - RNA, 20 nt, Human
ggaggagcccaggccaggac

SEQ ID NO: 1316683 - RNA, 12 nt, Human
ggaggagccugu

SEQ ID NO: 1316684 - RNA, 13 nt, Human
ggaggagccuguc

SEQ ID NO: 1316685 - RNA, 15 nt, Human
ggaggagccuguccu

SEQ ID NO: 1316686 - RNA, 16 nt, Human
ggaggagccuguccug

SEQ ID NO: 1316687 - RNA, 15 nt, Human
ggaggaggaaauccc

SEQ ID NO: 1316688 - RNA, 14 nt, Human
ggaggagggcaggc

SEQ ID NO: 1316689 - RNA, 15 nt, Human
ggaggagggcaggca

SEQ ID NO: 1316690 - RNA, 20 nt, Human
ggaggagggcaggcaucggg

SEQ ID NO: 1316691 - RNA, 19 nt, Human
ggaggagggucggugccuu

SEQ ID NO: 1316692 - RNA, 16 nt, Human
ggagccgggagccuga

SEQ ID NO: 1316693 - RNA, 21 nt, Human
ggagccgaggccuaccccgca

SEQ ID NO: 1316694 - RNA, 21 nt, Human
ggaggacgcucucuggccuuc

SEQ ID NO: 1316695 - RNA, 20 nt, Human
ggaggacgcucucuggccuu

SEQ ID NO: 1316696 - RNA, 22 nt, Human
ggaggagagacacuggugggga

SEQ ID NO: 1316697 - RNA, 13 nt, Human
ggaggagaaugag

SEQ ID NO: 1316698 - RNA, 13 nt, Human
ggaggaugugaau

SEQ ID NO: 1316699 - RNA, 17 nt, Human
ggagggaagggagccaa

SEQ ID NO: 1316700 - RNA, 18 nt, Human
ggagggaagggagccaag

SEQ ID NO: 1316701 - RNA, 23 nt, Human
ggagggaagggagccaagggaug

SEQ ID NO: 1316702 - RNA, 21 nt, Human
ggagggaagggagccaaggga

SEQ ID NO: 1316703 - RNA, 17 nt, Human
ggagggacaaaggagcc

SEQ ID NO: 1316704 - RNA, 18 nt, Human
ggagggacaaaggagccu

SEQ ID NO: 1316705 - RNA, 19 nt, Human
ggagggacaaaggagccug

SEQ ID NO: 1316706 - RNA, 20 nt, Human
ggagggacaaaggagccugu

SEQ ID NO: 1316707 - RNA, 21 nt, Human
ggagggacaaaggagccugug

SEQ ID NO: 1316708 - RNA, 22 nt, Human
ggagggacaaaggagccuguga

SEQ ID NO: 1316709 - RNA, 22 nt, Human
ggagggacaaguggacucaggg

SEQ ID NO: 1316710 - RNA, 13 nt, Human
ggagggcaggcau

SEQ ID NO: 1316711 - RNA, 14 nt, Human
ggagggcaggcauc

SEQ ID NO: 1316712 - RNA, 13 nt, Human
ggagggcagcagg

SEQ ID NO: 1316713 - RNA, 15 nt, Human
ggagggcagcagggc

SEQ ID NO: 1316714 - RNA, 16 nt, Human
ggagggcagcagggcu

SEQ ID NO: 1316715 - RNA, 17 nt, Human
ggagggcagcagggcua

SEQ ID NO: 1316716 - RNA, 15 nt, Human
ggagggaggcucagg

SEQ ID NO: 1316717 - RNA, 16 nt, Human
ggagggaggcucaggu

SEQ ID NO: 1316718 - RNA, 10 nt, Human
ggagggcaga

SEQ ID NO: 1316719 - RNA, 14 nt, Human
ggagggcagagcug

SEQ ID NO: 1316720 - RNA, 16 nt, Human
ggagggcagagcuggu

SEQ ID NO: 1316721 - RNA, 17 nt, Human
ggagggcagagcuggug

SEQ ID NO: 1316722 - RNA, 19 nt, Human
ggagggcagagcuggugcg

SEQ ID NO: 1316723 - RNA, 12 nt, Human
ggagggcucuga

SEQ ID NO: 1316724 - RNA, 13 nt, Human
ggagggcucugag

SEQ ID NO: 1316725 - RNA, 14 nt, Human
ggagggcucugagg

SEQ ID NO: 1316726 - RNA, 15 nt, Human
ggagggcucugaggc

SEQ ID NO: 1316727 - RNA, 16 nt, Human
ggagggcucugaggcg

SEQ ID NO: 1316728 - RNA, 19 nt, Human
ggaggggagcaugggaagu

SEQ ID NO: 1316729 - RNA, 21 nt, Human
ggagggcucugaggcgcccca

SEQ ID NO: 1316730 - RNA, 18 nt, Human
ggagggcucugaggcgcc

SEQ ID NO: 1316731 - RNA, 22 nt, Human
ggagggcugucaucugugcacu

SEQ ID NO: 1316732 - RNA, 16 nt, Human
ggaggggaagaggccu

SEQ ID NO: 1316733 - RNA, 16 nt, Human
ggaguccacuuuguuu

SEQ ID NO: 1316734 - RNA, 22 nt, Human
ggagucguggggugugcuggga

SEQ ID NO: 1316735 - RNA, 24 nt, Human
ggagucguggggugugcugggagc

SEQ ID NO: 1316736 - RNA, 13 nt, Human
ggagucugagguc

SEQ ID NO: 1316737 - RNA, 16 nt, Human
ggagucugagguccug

SEQ ID NO: 1316738 - RNA, 18 nt, Human
ggagucugagguccugag

SEQ ID NO: 1316739 - RNA, 19 nt, Human
ggagucugagguccugagc

SEQ ID NO: 1316740 - RNA, 20 nt, Human
ggagucugagguccugagca

SEQ ID NO: 1316741 - RNA, 21 nt, Human
ggagucugagguccugagcac

SEQ ID NO: 1316742 - RNA, 23 nt, Human
ggagucugagguccugagcacug

SEQ ID NO: 1316743 - RNA, 17 nt, Human
ggagucugccacccagg

SEQ ID NO: 1316744 - RNA, 20 nt, Human
ggagucugccacccaggauc

SEQ ID NO: 1316745 - RNA, 21 nt, Human
ggagucugccacccaggaucc

SEQ ID NO: 1316746 - RNA, 13 nt, Human
ggagucugccagg

SEQ ID NO: 1316747 - RNA, 14 nt, Human
ggagucugccaggg

SEQ ID NO: 1316748 - RNA, 15 nt, Human
ggagucugccagggc

SEQ ID NO: 1316749 - RNA, 16 nt, Human
ggagucugccagggcc

SEQ ID NO: 1316750 - RNA, 22 nt, Human
ggagucugccagggccccucuc

SEQ ID NO: 1316751 - RNA, 12 nt, Human
ggagucuugcuc

SEQ ID NO: 1316752 - RNA, 20 nt, Human
ggagucugccagggccccuc

SEQ ID NO: 1316753 - RNA, 16 nt, Human
ggaucagaacaggagc

SEQ ID NO: 1316754 - RNA, 15 nt, Human
ggagugaguggcccu

SEQ ID NO: 1316755 - RNA, 19 nt, Human
ggauagaugcuggcccagg

SEQ ID NO: 1316756 - RNA, 20 nt, Human
ggauagaugcuggcccaggg

SEQ ID NO: 1316757 - RNA, 21 nt, Human
ggauagaugcuggcccagggc

SEQ ID NO: 1316758 - RNA, 13 nt, Human
ggacccaggacag

SEQ ID NO: 1316759 - RNA, 10 nt, Human
ggacccagga

SEQ ID NO: 1316760 - RNA, 16 nt, Human
ggacccagccaggccc

SEQ ID NO: 1316761 - RNA, 13 nt, Human
ggacccagcuaau

SEQ ID NO: 1316762 - RNA, 12 nt, Human
ggacccagccag

SEQ ID NO: 1316763 - RNA, 15 nt, Human
ggacccagccaggcc

SEQ ID NO: 1316764 - RNA, 20 nt, Human
ggacccagccaggcccagcc

SEQ ID NO: 1316765 - RNA, 11 nt, Human
ggaccaggagu

SEQ ID NO: 1316766 - RNA, 20 nt, Human
ggaccaggagugggugggga

SEQ ID NO: 1316767 - RNA, 21 nt, Human
ggaccaggaguggguggggag

SEQ ID NO: 1316768 - RNA, 23 nt, Human
ggaccaggaguggguggggagug

SEQ ID NO: 1316769 - RNA, 21 nt, Human
ggacccagaggaaggggccag

SEQ ID NO: 1316770 - RNA, 13 nt, Human
ggacccagggcuc

SEQ ID NO: 1316771 - RNA, 22 nt, Human
ggacccaugaguuggggucugg

SEQ ID NO: 1316772 - RNA, 12 nt, Human
ggaccucugaca

SEQ ID NO: 1316773 - RNA, 13 nt, Human
ggaccucugacag

SEQ ID NO: 1316774 - RNA, 17 nt, Human
ggaccucugacagcagc

SEQ ID NO: 1316775 - RNA, 16 nt, Human
ggaccucugacagcag

SEQ ID NO: 1316776 - RNA, 22 nt, Human
ggaccagcuuuucccaaaagcc

SEQ ID NO: 1316777 - RNA, 17 nt, Human
ggaccagcuuuucccaa

SEQ ID NO: 1316778 - RNA, 15 nt, Human
ggaccagcuuuuccc

SEQ ID NO: 1316779 - RNA, 19 nt, Human
ggaccagcucaggacagau

SEQ ID NO: 1316780 - RNA, 22 nt, Human
ggaccagcucaggacagaugcc

SEQ ID NO: 1316781 - RNA, 17 nt, Human
ggaaggaucccaugagc

SEQ ID NO: 1316782 - RNA, 18 nt, Human
ggaccagcucaggacaga

SEQ ID NO: 1316783 - RNA, 17 nt, Human
ggaaggaggagccuguc

SEQ ID NO: 1316784 - RNA, 16 nt, Human
ggaaggaggagccugu

SEQ ID NO: 1316785 - RNA, 19 nt, Human
ggaaggaggacccaggaca

SEQ ID NO: 1316786 - RNA, 22 nt, Human
ggaaggagcugccuggacccgu

SEQ ID NO: 1316787 - RNA, 13 nt, Human
ggaaggaggagcc

SEQ ID NO: 1316788 - RNA, 16 nt, Human
ggaaggaggacccagg

SEQ ID NO: 1316789 - RNA, 19 nt, Human
ggaaggagcugccuggacc

SEQ ID NO: 1316790 - RNA, 20 nt, Human
ggaaggagcugccuggaccc

SEQ ID NO: 1316791 - RNA, 12 nt, Human
ggaaggagcugc

SEQ ID NO: 1316792 - RNA, 13 nt, Human
ggaaggagcugcc

SEQ ID NO: 1316793 - RNA, 14 nt, Human
ggaaggagcugccu

SEQ ID NO: 1316794 - RNA, 15 nt, Human
ggaaggagcugccug

SEQ ID NO: 1316795 - RNA, 17 nt, Human
ggaaggagcugccugga

SEQ ID NO: 1316796 - RNA, 18 nt, Human
ggaaggagcugccuggac

SEQ ID NO: 1316797 - RNA, 14 nt, Human
ggacuccucugucc

SEQ ID NO: 1316798 - RNA, 17 nt, Human
ggaccuucgggcugugc

SEQ ID NO: 1316799 - RNA, 15 nt, Human
ggacuccucugucca

SEQ ID NO: 1316800 - RNA, 11 nt, Human
ggacuccugaa

SEQ ID NO: 1316801 - RNA, 17 nt, Human
ggaccuggugcugccuc

SEQ ID NO: 1316802 - RNA, 17 nt, Human
ggaccugguacccuccu

SEQ ID NO: 1316803 - RNA, 19 nt, Human
ggaccugaaauuccaaagu

SEQ ID NO: 1316804 - RNA, 12 nt, Human
ggaccugagccu

SEQ ID NO: 1316805 - RNA, 13 nt, Human
ggaccugagccug

SEQ ID NO: 1316806 - RNA, 14 nt, Human
ggaccugagccugc

SEQ ID NO: 1316807 - RNA, 15 nt, Human
ggaccugagccugcc

SEQ ID NO: 1316808 - RNA, 16 nt, Human
ggaccugagccugccg

SEQ ID NO: 1316809 - RNA, 17 nt, Human
ggaccugagccugccga

SEQ ID NO: 1316810 - RNA, 19 nt, Human
ggaccugagccugccgagc

SEQ ID NO: 1316811 - RNA, 23 nt, Human
ggaccugagccugccgagcaacc

SEQ ID NO: 1316812 - RNA, 20 nt, Human
ggaccugagccugccgagca

SEQ ID NO: 1316813 - RNA, 13 nt, Human
ggaccugccugca

SEQ ID NO: 1316814 - RNA, 14 nt, Human
ggaccuggaaggga

SEQ ID NO: 1316815 - RNA, 14 nt, Human
ggaccuggcugcca

SEQ ID NO: 1316816 - RNA, 11 nt, Human
ggacucugccu

SEQ ID NO: 1316817 - RNA, 14 nt, Human
ggacucugcagccu

SEQ ID NO: 1316818 - RNA, 15 nt, Human
ggacucugcagccuc

SEQ ID NO: 1316819 - RNA, 17 nt, Human
ggacucugcagccucag

SEQ ID NO: 1316820 - RNA, 17 nt, Human
ggacucuggugccucca

SEQ ID NO: 1316821 - RNA, 18 nt, Human
ggacucuggugccuccag

SEQ ID NO: 1316822 - RNA, 12 nt, Human
ggacucuguccu

SEQ ID NO: 1316823 - RNA, 14 nt, Human
ggacucuguccuga

SEQ ID NO: 1316824 - RNA, 16 nt, Human
ggacucuguccugaag

SEQ ID NO: 1316825 - RNA, 21 nt, Human
ggacucuguccugaaggccug

SEQ ID NO: 1316826 - RNA, 23 nt, Human
ggacucuguccugaaggccugag

SEQ ID NO: 1316827 - RNA, 22 nt, Human
ggacucuguccugaaggccuga

SEQ ID NO: 1316828 - RNA, 17 nt, Human
ggacugagugggaagcc

SEQ ID NO: 1316829 - RNA, 18 nt, Human
ggacugagugggaagccc

SEQ ID NO: 1316830 - RNA, 15 nt, Human
ggacugaugucuccu

SEQ ID NO: 1316831 - RNA, 16 nt, Human
ggacugaugucuccua

SEQ ID NO: 1316832 - RNA, 16 nt, Human
ggacuccugaaaaaaa

SEQ ID NO: 1316833 - RNA, 13 nt, Human
ggacucuaaaguc

SEQ ID NO: 1316834 - RNA, 17 nt, Human
ggacucucagucucuga

SEQ ID NO: 1316835 - RNA, 18 nt, Human
ggacucucagucucugag

SEQ ID NO: 1316836 - RNA, 20 nt, Human
ggacucucagucucugagca

SEQ ID NO: 1316837 - RNA, 21 nt, Human
ggacucucagucucugagcag

SEQ ID NO: 1316838 - RNA, 13 nt, Human
ggacucugcagcc

SEQ ID NO: 1316839 - RNA, 13 nt, Human
ggagcccugggag

SEQ ID NO: 1316840 - RNA, 12 nt, Human
ggagcccuggga

SEQ ID NO: 1316841 - RNA, 16 nt, Human
ggagcccgucucagug

SEQ ID NO: 1316842 - RNA, 19 nt, Human
ggagcaaacugcaugccca

SEQ ID NO: 1316843 - RNA, 20 nt, Human
ggagcaaacugcaugcccag

SEQ ID NO: 1316844 - RNA, 21 nt, Human
ggagcaaacugcaugcccaga

SEQ ID NO: 1316845 - RNA, 22 nt, Human
ggagcaaacugcaugcccagag

SEQ ID NO: 1316846 - RNA, 23 nt, Human
ggagcaaacugcaugcccagaga

SEQ ID NO: 1316847 - RNA, 13 nt, Human
ggagcaaagccug

SEQ ID NO: 1316848 - RNA, 14 nt, Human
ggagcaaagccugu

SEQ ID NO: 1316849 - RNA, 15 nt, Human
ggagcaaagccuguu

SEQ ID NO: 1316850 - RNA, 22 nt, Human
ggagcaaagccuguucauggca

SEQ ID NO: 1316851 - RNA, 23 nt, Human
ggagcaaagccuguucauggcag

SEQ ID NO: 1316852 - RNA, 24 nt, Human
ggagcaaagccuguucauggcaga

SEQ ID NO: 1316853 - RNA, 18 nt, Human
ggagccccuucugcucag

SEQ ID NO: 1316854 - RNA, 19 nt, Human
ggagccccuucugcucagc

SEQ ID NO: 1316855 - RNA, 21 nt, Human
ggagccccuucugcucagcuc

SEQ ID NO: 1316856 - RNA, 13 nt, Human
ggagagggcgcag

SEQ ID NO: 1316857 - RNA, 14 nt, Human
ggagagggggcugg

SEQ ID NO: 1316858 - RNA, 18 nt, Human
ggagagggggcugguggg

SEQ ID NO: 1316859 - RNA, 21 nt, Human
ggagagggggcuggugggugc

SEQ ID NO: 1316860 - RNA, 15 nt, Human
ggagauugaccugga

SEQ ID NO: 1316861 - RNA, 22 nt, Human
ggagauucucauaacuugagac

SEQ ID NO: 1316862 - RNA, 23 nt, Human
ggagauucucauaacuugagacc

SEQ ID NO: 1316863 - RNA, 13 nt, Human
ggagauucugccu

SEQ ID NO: 1316864 - RNA, 16 nt, Human
ggacugcggaggaagg

SEQ ID NO: 1316865 - RNA, 15 nt, Human
ggacugcggaggaag

SEQ ID NO: 1316866 - RNA, 21 nt, Human
ggacugccagucccccugccc

SEQ ID NO: 1316867 - RNA, 18 nt, Human
ggacugcuaaauaaaauu

SEQ ID NO: 1316868 - RNA, 19 nt, Human
ggacugcuaaauaaaauuu

SEQ ID NO: 1316869 - RNA, 23 nt, Human
ggacugggagcccccagccuguc

SEQ ID NO: 1316870 - RNA, 22 nt, Human
ggacugggagcccccagccugu

SEQ ID NO: 1316871 - RNA, 21 nt, Human
ggacuguaaguugggcuugcu

SEQ ID NO: 1316872 - RNA, 18 nt, Human
ggacuguagggagggcgg

SEQ ID NO: 1316873 - RNA, 20 nt, Human
ggacuguagggagggcggca

SEQ ID NO: 1316874 - RNA, 18 nt, Human
ggacuguaaguugggcuu

SEQ ID NO: 1316875 - RNA, 15 nt, Human
ggacugucauagaaa

SEQ ID NO: 1316876 - RNA, 20 nt, Human
ggacugucgcugcuucgugg

SEQ ID NO: 1316877 - RNA, 14 nt, Human
ggacugucgcugcu

SEQ ID NO: 1316878 - RNA, 17 nt, Human
ggagaccggccugccag

SEQ ID NO: 1316879 - RNA, 22 nt, Human
ggagaccggccugccaggagga

SEQ ID NO: 1316880 - RNA, 19 nt, Human
ggagaccggccugccagga

SEQ ID NO: 1316881 - RNA, 20 nt, Human
ggagaccggccugccaggag

SEQ ID NO: 1316882 - RNA, 21 nt, Human
ggagaccggccugccaggagg

SEQ ID NO: 1316883 - RNA, 17 nt, Human
ggagaccucagaaguaa

SEQ ID NO: 1316884 - RNA, 12 nt, Human
ggagagcuagga

SEQ ID NO: 1316885 - RNA, 13 nt, Human
ggagagcuaggag

SEQ ID NO: 1316886 - RNA, 14 nt, Human
ggagagcuaggagc

SEQ ID NO: 1316887 - RNA, 15 nt, Human
ggagagcuaggagca

SEQ ID NO: 1316888 - RNA, 21 nt, Human
ggagagcuaggagcaaagccu

SEQ ID NO: 1316889 - RNA, 22 nt, Human
ggagagcuaggagcaaagccug

SEQ ID NO: 1316890 - RNA, 19 nt, Human
ggagagggaaugugaaauu

SEQ ID NO: 1316891 - RNA, 14 nt, Human
ggagagggaaugug

SEQ ID NO: 1316892 - RNA, 14 nt, Human
ggaagaucccccag

SEQ ID NO: 1316893 - RNA, 14 nt, Human
ggaagauagcugug

SEQ ID NO: 1316894 - RNA, 23 nt, Human
ggaagaggccuguuuggccucuc

SEQ ID NO: 1316895 - RNA, 17 nt, Human
ggaagagccuuccaccc

SEQ ID NO: 1316896 - RNA, 19 nt, Human
ggaagagccuuccacccag

SEQ ID NO: 1316897 - RNA, 20 nt, Human
ggaagagccuuccacccagg

SEQ ID NO: 1316898 - RNA, 13 nt, Human
ggaagaggccugu

SEQ ID NO: 1316899 - RNA, 15 nt, Human
ggaagagggacagau

SEQ ID NO: 1316900 - RNA, 17 nt, Human
ggaacucgugucuggca

SEQ ID NO: 1316901 - RNA, 17 nt, Human
ggaagagcagcaccucc

SEQ ID NO: 1316902 - RNA, 22 nt, Human
ggaagagcagcaccuccucagc

SEQ ID NO: 1316903 - RNA, 13 nt, Human
ggaagagcaggac

SEQ ID NO: 1316904 - RNA, 23 nt, Human
ggaagagcaggacuccaggccca

SEQ ID NO: 1316905 - RNA, 16 nt, Human
ggaagagcaggacucc

SEQ ID NO: 1316906 - RNA, 22 nt, Human
ggaagaucccccagaaaagaaa

SEQ ID NO: 1316907 - RNA, 18 nt, Human
ggaagaucccccagaaaa

SEQ ID NO: 1316908 - RNA, 12 nt, Human
ggaagauccugc

SEQ ID NO: 1316909 - RNA, 22 nt, Human
ggaagauccugcggguggggcu

SEQ ID NO: 1316910 - RNA, 18 nt, Human
ggaagauggggaccagca

SEQ ID NO: 1316911 - RNA, 22 nt, Human
ggaagauggggaccagcagccc

SEQ ID NO: 1316912 - RNA, 18 nt, Human
ggaagcagaaauccaagc

SEQ ID NO: 1316913 - RNA, 13 nt, Human
ggaagcagcuuuc

SEQ ID NO: 1316914 - RNA, 15 nt, Human
ggaagcagcagccuc

SEQ ID NO: 1316915 - RNA, 18 nt, Human
ggaagcagcagccucgcc

SEQ ID NO: 1316916 - RNA, 12 nt, Human
ggaagcagcagc

SEQ ID NO: 1316917 - RNA, 13 nt, Human
ggaagcagcagcc

SEQ ID NO: 1316918 - RNA, 14 nt, Human
ggaagcagcagccu

SEQ ID NO: 1316919 - RNA, 22 nt, Human
ggaagcauuguaaaauaauucu

SEQ ID NO: 1316920 - RNA, 22 nt, Human
ggaagccaaaauguaggcuuag

SEQ ID NO: 1316921 - RNA, 14 nt, Human
ggaagccaaagagu

SEQ ID NO: 1316922 - RNA, 19 nt, Human
ggaagcauuuguuucuacu

SEQ ID NO: 1316923 - RNA, 22 nt, Human
ggaaccucagccuggccagaca

SEQ ID NO: 1316924 - RNA, 17 nt, Human
ggaacggaucagauguc

SEQ ID NO: 1316925 - RNA, 14 nt, Human
ggaaccucagccug

SEQ ID NO: 1316926 - RNA, 15 nt, Human
ggaaccucagccugg

SEQ ID NO: 1316927 - RNA, 16 nt, Human
ggaaccucagccuggc

SEQ ID NO: 1316928 - RNA, 19 nt, Human
ggaaccucagccuggccag

SEQ ID NO: 1316929 - RNA, 20 nt, Human
ggaaccucagccuggccaga

SEQ ID NO: 1316930 - RNA, 21 nt, Human
ggaaccucagccuggccagac

SEQ ID NO: 1316931 - RNA, 23 nt, Human
ggaaccucagccuggccagacac

SEQ ID NO: 1316932 - RNA, 23 nt, Human
ggaacuagacucccaagcuggac

SEQ ID NO: 1316933 - RNA, 14 nt, Human
ggaacgugauuagu

SEQ ID NO: 1316934 - RNA, 13 nt, Human
ggaacucagaucc

SEQ ID NO: 1316935 - RNA, 15 nt, Human
ggaacucagauccag

SEQ ID NO: 1316936 - RNA, 16 nt, Human
ggaacucagauccagg

SEQ ID NO: 1316937 - RNA, 17 nt, Human
ggaacucagauccaggg

SEQ ID NO: 1316938 - RNA, 19 nt, Human
ggaacucagauccagggac

SEQ ID NO: 1316939 - RNA, 20 nt, Human
ggaacucagauccagggaca

SEQ ID NO: 1316940 - RNA, 17 nt, Human
ggaacucaucugguuga

SEQ ID NO: 1316941 - RNA, 13 nt, Human
ggaaccccuuucc

SEQ ID NO: 1316942 - RNA, 14 nt, Human
ggaaccccuuuccc

SEQ ID NO: 1316943 - RNA, 16 nt, Human
ggaaccccuuucccac

SEQ ID NO: 1316944 - RNA, 17 nt, Human
ggaaccccuuucccacc

SEQ ID NO: 1316945 - RNA, 19 nt, Human
ggaaccccuuucccacccc

SEQ ID NO: 1316946 - RNA, 23 nt, Human
ggaacccugcccacucccaggac

SEQ ID NO: 1316947 - RNA, 15 nt, Human
ggaaccgaggcaggg

SEQ ID NO: 1316948 - RNA, 16 nt, Human
ggaaccgaggcaggga

SEQ ID NO: 1316949 - RNA, 20 nt, Human
ggaaccgaggcagggaagga

SEQ ID NO: 1316950 - RNA, 24 nt, Human
ggaacccuuacaguaggagcccag

SEQ ID NO: 1316951 - RNA, 12 nt, Human
ggaaccucagcc

SEQ ID NO: 1316952 - RNA, 13 nt, Human
ggaaccucagccu

SEQ ID NO: 1316953 - RNA, 12 nt, Human
ggaaauauuuau

SEQ ID NO: 1316954 - RNA, 19 nt, Human
ggaaagugcugucuuaaac

SEQ ID NO: 1316955 - RNA, 23 nt, Human
ggaaaguggccaagaagcagugg

SEQ ID NO: 1316956 - RNA, 13 nt, Human
ggaaauauuuauu

SEQ ID NO: 1316957 - RNA, 15 nt, Human
ggaaauauuuauuuu

SEQ ID NO: 1316958 - RNA, 17 nt, Human
ggaaauauuuauuuuaa

SEQ ID NO: 1316959 - RNA, 18 nt, Human
ggaaauauuuauuuuaau

SEQ ID NO: 1316960 - RNA, 22 nt, Human
ggaaaucaaaagggccaaagaa

SEQ ID NO: 1316961 - RNA, 17 nt, Human
ggaaaagacacauuuuu

SEQ ID NO: 1316962 - RNA, 13 nt, Human
ggaaaagacacau

SEQ ID NO: 1316963 - RNA, 16 nt, Human
ggaaaauaauacugcu

SEQ ID NO: 1316964 - RNA, 19 nt, Human
ggaaaauaggcaggaagcc

SEQ ID NO: 1316965 - RNA, 20 nt, Human
ggaaaggggucggcugacca

SEQ ID NO: 1316966 - RNA, 16 nt, Human
ggaaaggugguguuuc

SEQ ID NO: 1316967 - RNA, 20 nt, Human
ggaaaggugugagacuggga

SEQ ID NO: 1316968 - RNA, 19 nt, Human
ggaaaguacacucugcugu

SEQ ID NO: 1316969 - RNA, 20 nt, Human
ggaaaaaauaacaaugaaag

SEQ ID NO: 1316970 - RNA, 15 nt, Human
gcuuugggcugcccu

SEQ ID NO: 1316971 - RNA, 16 nt, Human
gcuuugggcugcccug

SEQ ID NO: 1316972 - RNA, 18 nt, Human
gcuuugggcugcccuggu

SEQ ID NO: 1316973 - RNA, 14 nt, Human
gcuuuuaaaagauu

SEQ ID NO: 1316974 - RNA, 19 nt, Human
gcuuuuaacagagucugaa

SEQ ID NO: 1316975 - RNA, 22 nt, Human
ggaaaaccaagccguggcuucc

SEQ ID NO: 1316976 - RNA, 12 nt, Human
ggaaaaccagac

SEQ ID NO: 1316977 - RNA, 22 nt, Human
ggaaaaccagacuacuugggag

SEQ ID NO: 1316978 - RNA, 20 nt, Human
ggaaaacuccaccuucccac

SEQ ID NO: 1316979 - RNA, 19 nt, Human
ggaaaaacuuuggaaccag

SEQ ID NO: 1316980 - RNA, 23 nt, Human
ggaaaaagcaaguucgucuguug

SEQ ID NO: 1316981 - RNA, 17 nt, Human
ggaaaaacuuuggaacc

SEQ ID NO: 1316982 - RNA, 19 nt, Human
ggaaaaaguggguuuuuua

SEQ ID NO: 1316983 - RNA, 14 nt, Human
gcuuugggcugccc

SEQ ID NO: 1316984 - RNA, 22 nt, Human
gcuuuggaccuaaauggccuca

SEQ ID NO: 1316985 - RNA, 17 nt, Human
gcuuuggaccuaaucca

SEQ ID NO: 1316986 - RNA, 17 nt, Human
gcuuuggauuugacauu

SEQ ID NO: 1316987 - RNA, 17 nt, Human
gcuuuauuccagaaugc

SEQ ID NO: 1316988 - RNA, 19 nt, Human
gcuuuacuccguaacagau

SEQ ID NO: 1316989 - RNA, 20 nt, Human
gcuuuaugauaauagauucu

SEQ ID NO: 1316990 - RNA, 21 nt, Human
gcuuuaugauaauagauucuc

SEQ ID NO: 1316991 - RNA, 23 nt, Human
gcuugcccuaagcagaaagugcc

SEQ ID NO: 1316992 - RNA, 18 nt, Human
gcuuggagcagaggggcu

SEQ ID NO: 1316993 - RNA, 14 nt, Human
gcuuggagcugagc

SEQ ID NO: 1316994 - RNA, 15 nt, Human
gcuuggagcugagca

SEQ ID NO: 1316995 - RNA, 18 nt, Human
gcuuggccacagccaggg

SEQ ID NO: 1316996 - RNA, 17 nt, Human
gcuuggccacagccagg

SEQ ID NO: 1316997 - RNA, 12 nt, Human
gcuuuaauauaa

SEQ ID NO: 1316998 - RNA, 13 nt, Human
gcuuuaauauaaa

SEQ ID NO: 1316999 - RNA, 14 nt, Human
gcuuuaauauaaau

SEQ ID NO: 1317000 - RNA, 15 nt, Human
gcuuuaauauaaaug

SEQ ID NO: 1317001 - RNA, 16 nt, Human
gcuuuaauauaaaugc

SEQ ID NO: 1317002 - RNA, 21 nt, Human
gcuuuaauauaaaugcaaaua

SEQ ID NO: 1317003 - RNA, 17 nt, Human
gcuuuaauauaaaugca

SEQ ID NO: 1317004 - RNA, 19 nt, Human
gcuuuaauauaaaugcaaa

SEQ ID NO: 1317005 - RNA, 16 nt, Human
gcuugcccuaagcaga

SEQ ID NO: 1317006 - RNA, 19 nt, Human
gcuugcccuaagcagaaag

SEQ ID NO: 1317007 - RNA, 20 nt, Human
gcuugcccuaagcagaaagu

SEQ ID NO: 1317008 - RNA, 21 nt, Human
gcuugcccuaagcagaaagug

SEQ ID NO: 1317009 - RNA, 19 nt, Human
gcuugcccuggugccucac

SEQ ID NO: 1317010 - RNA, 17 nt, Human
gcuugcccuggugccuc

SEQ ID NO: 1317011 - RNA, 18 nt, Human
gcuugccaaggcagaggc

SEQ ID NO: 1317012 - RNA, 16 nt, Human
gcuucuguugcugccu

SEQ ID NO: 1317013 - RNA, 20 nt, Human
gcuugauagaaaugccaagc

SEQ ID NO: 1317014 - RNA, 22 nt, Human
gcuugcagagaugaggccgcca

SEQ ID NO: 1317015 - RNA, 14 nt, Human
gcuugauuuuugcc

SEQ ID NO: 1317016 - RNA, 19 nt, Human
gcuugaugggauucuggac

SEQ ID NO: 1317017 - RNA, 20 nt, Human
gcuugaugggauucuggaca

SEQ ID NO: 1317018 - RNA, 22 nt, Human
gcuugaugggauucuggacagg

SEQ ID NO: 1317019 - RNA, 14 nt, Human
gcuugauucugcag

SEQ ID NO: 1317020 - RNA, 15 nt, Human
gcuugccaaggcaga

SEQ ID NO: 1317021 - RNA, 20 nt, Human
gcuugccaaggcagaggccu

SEQ ID NO: 1317022 - RNA, 18 nt, Human
gcuucuaguucugccagg

SEQ ID NO: 1317023 - RNA, 13 nt, Human
gcuucuccucucc

SEQ ID NO: 1317024 - RNA, 21 nt, Human
gcuucuaguucugccaggaga

SEQ ID NO: 1317025 - RNA, 19 nt, Human
gcuucuaguucugccagga

SEQ ID NO: 1317026 - RNA, 20 nt, Human
gcuucuaguucugccaggag

SEQ ID NO: 1317027 - RNA, 14 nt, Human
gcuucucucugugg

SEQ ID NO: 1317028 - RNA, 16 nt, Human
gcuucucucuguggga

SEQ ID NO: 1317029 - RNA, 13 nt, Human
gcuucucugacuu

SEQ ID NO: 1317030 - RNA, 14 nt, Human
gcuucucugacuuc

SEQ ID NO: 1317031 - RNA, 17 nt, Human
gcuucucugacuucugc

SEQ ID NO: 1317032 - RNA, 18 nt, Human
gcuucucugacuucugcc

SEQ ID NO: 1317033 - RNA, 20 nt, Human
gcuucucugacuucugccug

SEQ ID NO: 1317034 - RNA, 21 nt, Human
gcuucucugacuucugccugg

SEQ ID NO: 1317035 - RNA, 22 nt, Human
gcuucucugacuucugccugga

SEQ ID NO: 1317036 - RNA, 15 nt, Human
gcuucuggccaggaa

SEQ ID NO: 1317037 - RNA, 18 nt, Human
gcuucuggccaggaagcu

SEQ ID NO: 1317038 - RNA, 16 nt, Human
gcuucuggccaggaag

SEQ ID NO: 1317039 - RNA, 17 nt, Human
gcuucuggccaggaagc

SEQ ID NO: 1317040 - RNA, 19 nt, Human
gcuggggccaggcuggguc

SEQ ID NO: 1317041 - RNA, 16 nt, Human
gcuggggccaggcugg

SEQ ID NO: 1317042 - RNA, 21 nt, Human
gcuggggcauggaaggcaaga

SEQ ID NO: 1317043 - RNA, 12 nt, Human
gcuggggccugg

SEQ ID NO: 1317044 - RNA, 13 nt, Human
gcuggggccuggg

SEQ ID NO: 1317045 - RNA, 15 nt, Human
gcuggggccugggac

SEQ ID NO: 1317046 - RNA, 16 nt, Human
gcuggggccugggaca

SEQ ID NO: 1317047 - RNA, 14 nt, Human
gcuggggucccagc

SEQ ID NO: 1317048 - RNA, 16 nt, Human
gcuggggucccagcag

SEQ ID NO: 1317049 - RNA, 17 nt, Human
gcuggggucccagcagc

SEQ ID NO: 1317050 - RNA, 19 nt, Human
gcuggggucccagcagcug

SEQ ID NO: 1317051 - RNA, 12 nt, Human
gcuggggugcag

SEQ ID NO: 1317052 - RNA, 13 nt, Human
gcuggggugcagg

SEQ ID NO: 1317053 - RNA, 15 nt, Human
gcuggggugcaggga

SEQ ID NO: 1317054 - RNA, 20 nt, Human
gcuggggugcagggaugugg

SEQ ID NO: 1317055 - RNA, 14 nt, Human
gcugggagaggcag

SEQ ID NO: 1317056 - RNA, 15 nt, Human
gcugggagaggcagc

SEQ ID NO: 1317057 - RNA, 13 nt, Human
gcugggagcucca

SEQ ID NO: 1317058 - RNA, 14 nt, Human
gcugggagcuccac

SEQ ID NO: 1317059 - RNA, 16 nt, Human
gcugggagcuccacuc

SEQ ID NO: 1317060 - RNA, 18 nt, Human
gcugggagcuccacucug

SEQ ID NO: 1317061 - RNA, 21 nt, Human
gcugggauuacaggcuccugc

SEQ ID NO: 1317062 - RNA, 17 nt, Human
gcugggauuacaggcgu

SEQ ID NO: 1317063 - RNA, 18 nt, Human
gcugggauuacaggcgug

SEQ ID NO: 1317064 - RNA, 19 nt, Human
gcugggauuacaggcuccu

SEQ ID NO: 1317065 - RNA, 20 nt, Human
gcugggauuacaggcuccug

SEQ ID NO: 1317066 - RNA, 17 nt, Human
gcugggaggagggcagg

SEQ ID NO: 1317067 - RNA, 22 nt, Human
gcugggaggaaggacuucccug

SEQ ID NO: 1317068 - RNA, 15 nt, Human
gcugggaggaaggac

SEQ ID NO: 1317069 - RNA, 19 nt, Human
gcugggaggagggcaggca

SEQ ID NO: 1317070 - RNA, 15 nt, Human
gcugggagcucugca

SEQ ID NO: 1317071 - RNA, 20 nt, Human
gcugggagcuccacucugcu

SEQ ID NO: 1317072 - RNA, 21 nt, Human
gcugggagcuccacucugcuu

SEQ ID NO: 1317073 - RNA, 16 nt, Human
gcugggagcucugcag

SEQ ID NO: 1317074 - RNA, 22 nt, Human
gcugggagcuccacucugcuuc

SEQ ID NO: 1317075 - RNA, 23 nt, Human
gcugggagaggcagcccaggaag

SEQ ID NO: 1317076 - RNA, 15 nt, Human
gcuggugcggcuggc

SEQ ID NO: 1317077 - RNA, 18 nt, Human
gcuggugcggcuggccau

SEQ ID NO: 1317078 - RNA, 20 nt, Human
gcuggugcggcuggccaugg

SEQ ID NO: 1317079 - RNA, 18 nt, Human
gcuggugggugccuaggc

SEQ ID NO: 1317080 - RNA, 15 nt, Human
gcuggugugguacag

SEQ ID NO: 1317081 - RNA, 17 nt, Human
gcuggugugguacagag

SEQ ID NO: 1317082 - RNA, 18 nt, Human
gcuggugugguacagaga

SEQ ID NO: 1317083 - RNA, 19 nt, Human
gcuggugugguacagagaa

SEQ ID NO: 1317084 - RNA, 20 nt, Human
gcuggugugguacagagaag

SEQ ID NO: 1317085 - RNA, 21 nt, Human
gcuggugugguacagagaagc

SEQ ID NO: 1317086 - RNA, 22 nt, Human
gcuggugugguacagagaagcc

SEQ ID NO: 1317087 - RNA, 23 nt, Human
gcuggugugguacagagaagcca

SEQ ID NO: 1317088 - RNA, 13 nt, Human
gcugguguuaaca

SEQ ID NO: 1317089 - RNA, 14 nt, Human
gcugguguuaacag

SEQ ID NO: 1317090 - RNA, 16 nt, Human
gcugguguuaacagaa

SEQ ID NO: 1317091 - RNA, 17 nt, Human
gcugguguuaacagaag

SEQ ID NO: 1317092 - RNA, 18 nt, Human
gcugguguuaacagaagg

SEQ ID NO: 1317093 - RNA, 21 nt, Human
gcugguguuaacagaagggag

SEQ ID NO: 1317094 - RNA, 22 nt, Human
gcuguauuuuaaaagaaugauu

SEQ ID NO: 1317095 - RNA, 14 nt, Human
gcugguuagaaaug

SEQ ID NO: 1317096 - RNA, 21 nt, Human
gcugucaagccauuuuuacau

SEQ ID NO: 1317097 - RNA, 14 nt, Human
gcugucaaggcuca

SEQ ID NO: 1317098 - RNA, 22 nt, Human
gcugguguuaacagaagggagg

SEQ ID NO: 1317099 - RNA, 13 nt, Human
gcugucacaggcg

SEQ ID NO: 1317100 - RNA, 17 nt, Human
gcugucacaaccaagaa

SEQ ID NO: 1317101 - RNA, 15 nt, Human
gcugucccucccccu

SEQ ID NO: 1317102 - RNA, 16 nt, Human
gcugucccucccccuu

SEQ ID NO: 1317103 - RNA, 18 nt, Human
gcugucugaggcuaggug

SEQ ID NO: 1317104 - RNA, 17 nt, Human
gcugucugggugcuacu

SEQ ID NO: 1317105 - RNA, 20 nt, Human
gcugucugggugcuacuggg

SEQ ID NO: 1317106 - RNA, 22 nt, Human
gcugucugggugcuacugggga

SEQ ID NO: 1317107 - RNA, 23 nt, Human
gcugucugggugcuacuggggaa

SEQ ID NO: 1317108 - RNA, 23 nt, Human
gcugucuguuguauucauugugg

SEQ ID NO: 1317109 - RNA, 21 nt, Human
gcugucuuaaacuaaaugugc

SEQ ID NO: 1317110 - RNA, 13 nt, Human
gcugugguuuucu

SEQ ID NO: 1317111 - RNA, 14 nt, Human
gcugugguuuucuu

SEQ ID NO: 1317112 - RNA, 15 nt, Human
gcugugguuuucuuu

SEQ ID NO: 1317113 - RNA, 23 nt, Human
gcugugguuuucuuuugccauga

SEQ ID NO: 1317114 - RNA, 22 nt, Human
gcugugguuuucuuuugccaug

SEQ ID NO: 1317115 - RNA, 16 nt, Human
gcuguguaagauuugu

SEQ ID NO: 1317116 - RNA, 23 nt, Human
gcuguguaagauuuguuuuuaaa

SEQ ID NO: 1317117 - RNA, 18 nt, Human
gcuguguaagauuuguuu

SEQ ID NO: 1317118 - RNA, 22 nt, Human
gcuguguccaaaaccgccagcu

SEQ ID NO: 1317119 - RNA, 16 nt, Human
gcuagcaaauaguaau

SEQ ID NO: 1317120 - RNA, 12 nt, Human
gcuagcaaauag

SEQ ID NO: 1317121 - RNA, 18 nt, Human
gcuagauguauguacuuc

SEQ ID NO: 1317122 - RNA, 18 nt, Human
gcuagaggaagcagccaa

SEQ ID NO: 1317123 - RNA, 17 nt, Human
gcuagagcuccucccuc

SEQ ID NO: 1317124 - RNA, 19 nt, Human
gcugcccuggugcugccac

SEQ ID NO: 1317125 - RNA, 20 nt, Human
gcugcccuggugcugccaca

SEQ ID NO: 1317126 - RNA, 22 nt, Human
gcugcccuggugcugccacacu

SEQ ID NO: 1317127 - RNA, 23 nt, Human
gcugcccuggugcugccacacuu

SEQ ID NO: 1317128 - RNA, 18 nt, Human
gcugcccuguaccccagc

SEQ ID NO: 1317129 - RNA, 17 nt, Human
gcugcccuuucugggca

SEQ ID NO: 1317130 - RNA, 15 nt, Human
gcugccuuuggacuu

SEQ ID NO: 1317131 - RNA, 20 nt, Human
gcugccuuuggacuuguccc

SEQ ID NO: 1317132 - RNA, 14 nt, Human
gcugcgcacugugu

SEQ ID NO: 1317133 - RNA, 13 nt, Human
gcugcuagaguga

SEQ ID NO: 1317134 - RNA, 20 nt, Human
gcugcuagagugacucacua

SEQ ID NO: 1317135 - RNA, 20 nt, Human
gcugcuguggccaucaaccu

SEQ ID NO: 1317136 - RNA, 19 nt, Human
gcugcuagagugacucacu

SEQ ID NO: 1317137 - RNA, 21 nt, Human
gcugcugugugcuuuuuuugu

SEQ ID NO: 1317138 - RNA, 22 nt, Human
gcugcugugugcuuuuuuugug

SEQ ID NO: 1317139 - RNA, 17 nt, Human
gcugcuuccuccuggaa

SEQ ID NO: 1317140 - RNA, 19 nt, Human
gcugcuucccugaagcucc

SEQ ID NO: 1317141 - RNA, 18 nt, Human
gcugcuucucccaggcaa

SEQ ID NO: 1317142 - RNA, 19 nt, Human
gcugcuucucccaggcaag

SEQ ID NO: 1317143 - RNA, 21 nt, Human
gcugcuucucccaggcaaggc

SEQ ID NO: 1317144 - RNA, 22 nt, Human
gcugcuucucccaggcaaggcu

SEQ ID NO: 1317145 - RNA, 13 nt, Human
gcugcuuccagug

SEQ ID NO: 1317146 - RNA, 13 nt, Human
gcugcuuccuccu

SEQ ID NO: 1317147 - RNA, 14 nt, Human
gcugcuuccuccug

SEQ ID NO: 1317148 - RNA, 15 nt, Human
gcugcuuccuccugg

SEQ ID NO: 1317149 - RNA, 16 nt, Human
gcugcuuccuccugga

SEQ ID NO: 1317150 - RNA, 23 nt, Human
gcugcuucucccaggcaaggcug

SEQ ID NO: 1317151 - RNA, 20 nt, Human
gcuggaugagaauuugagug

SEQ ID NO: 1317152 - RNA, 13 nt, Human
gcuggaugagcuc

SEQ ID NO: 1317153 - RNA, 14 nt, Human
gcuggaugagcucc

SEQ ID NO: 1317154 - RNA, 23 nt, Human
gcuggaugagcucccacaagccu

SEQ ID NO: 1317155 - RNA, 15 nt, Human
gcuggaugagcuccc

SEQ ID NO: 1317156 - RNA, 14 nt, Human
gcuggcaacacaga

SEQ ID NO: 1317157 - RNA, 19 nt, Human
gcuggcaacacagaggcag

SEQ ID NO: 1317158 - RNA, 21 nt, Human
gcuggcaacacagaggcagcc

SEQ ID NO: 1317159 - RNA, 13 nt, Human
gcuggcccagggc

SEQ ID NO: 1317160 - RNA, 15 nt, Human
gcuggcccagggccc

SEQ ID NO: 1317161 - RNA, 16 nt, Human
gcuggcccagggccca

SEQ ID NO: 1317162 - RNA, 17 nt, Human
gcuggcccagggcccag

SEQ ID NO: 1317163 - RNA, 21 nt, Human
gcuggcccagggcccagagcc

SEQ ID NO: 1317164 - RNA, 18 nt, Human
gcuggcccagggcccaga

SEQ ID NO: 1317165 - RNA, 19 nt, Human
gcuggcccagggcccagag

SEQ ID NO: 1317166 - RNA, 20 nt, Human
gcuggcccagggcccagagc

SEQ ID NO: 1317167 - RNA, 21 nt, Human
gcugggacguggcucagccag

SEQ ID NO: 1317168 - RNA, 22 nt, Human
gcugggacguggcucagccagc

SEQ ID NO: 1317169 - RNA, 14 nt, Human
gcugggacuacagg

SEQ ID NO: 1317170 - RNA, 12 nt, Human
gcugggacucag

SEQ ID NO: 1317171 - RNA, 14 nt, Human
gcugggacucagcc

SEQ ID NO: 1317172 - RNA, 15 nt, Human
gcugggacucagccu

SEQ ID NO: 1317173 - RNA, 16 nt, Human
gcugggacucagccuu

SEQ ID NO: 1317174 - RNA, 19 nt, Human
gcugggacucagccuucag

SEQ ID NO: 1317175 - RNA, 22 nt, Human
gcugggacucagccuucagaca

SEQ ID NO: 1317176 - RNA, 23 nt, Human
gcugggacucagccuucagacag

SEQ ID NO: 1317177 - RNA, 17 nt, Human
gcugggacguggcucag

SEQ ID NO: 1317178 - RNA, 19 nt, Human
gcugggacguggcucagcc

SEQ ID NO: 1317179 - RNA, 20 nt, Human
gcugggacguggcucagcca

SEQ ID NO: 1317180 - RNA, 23 nt, Human
gcugggacaccccgacuuuuguu

SEQ ID NO: 1317181 - RNA, 12 nt, Human
gcuggccucugc

SEQ ID NO: 1317182 - RNA, 13 nt, Human
gcuggccucugcg

SEQ ID NO: 1317183 - RNA, 14 nt, Human
gcuggccucugcga

SEQ ID NO: 1317184 - RNA, 15 nt, Human
gcuggccucugcgag

SEQ ID NO: 1317185 - RNA, 16 nt, Human
gcuggccucugcgagu

SEQ ID NO: 1317186 - RNA, 12 nt, Human
gcuggcccugcc

SEQ ID NO: 1317187 - RNA, 13 nt, Human
gcuggcccugccc

SEQ ID NO: 1317188 - RNA, 17 nt, Human
gcuggccgggagccuga

SEQ ID NO: 1317189 - RNA, 21 nt, Human
gcuggccucacccaccccugc

SEQ ID NO: 1317190 - RNA, 21 nt, Human
gcuggccucccaaaugagcca

SEQ ID NO: 1317191 - RNA, 22 nt, Human
gcuggccucccaaaugagccau

SEQ ID NO: 1317192 - RNA, 22 nt, Human
gcccuucuauacccacccagaa

SEQ ID NO: 1317193 - RNA, 21 nt, Human
gcccuucuauacccacccaga

SEQ ID NO: 1317194 - RNA, 19 nt, Human
gcccuucuuuccacagaag

SEQ ID NO: 1317195 - RNA, 20 nt, Human
gcccuucuauacccacccag

SEQ ID NO: 1317196 - RNA, 23 nt, Human
gcccuuccuggacagcugugccu

SEQ ID NO: 1317197 - RNA, 19 nt, Human
gcccuuccuggacagcugu

SEQ ID NO: 1317198 - RNA, 20 nt, Human
gcccuuccuggacagcugug

SEQ ID NO: 1317199 - RNA, 21 nt, Human
gcccuuccuggacagcugugc

SEQ ID NO: 1317200 - RNA, 22 nt, Human
gcccuuccuggacagcugugcc

SEQ ID NO: 1317201 - RNA, 22 nt, Human
gcccuuccucuccacugccuuc

SEQ ID NO: 1317202 - RNA, 12 nt, Human
gcccuuccugga

SEQ ID NO: 1317203 - RNA, 13 nt, Human
gcccuuccuggac

SEQ ID NO: 1317204 - RNA, 14 nt, Human
gcccuuccuggaca

SEQ ID NO: 1317205 - RNA, 15 nt, Human
gcccuuccuggacag

SEQ ID NO: 1317206 - RNA, 16 nt, Human
gcccuuccuggacagc

SEQ ID NO: 1317207 - RNA, 17 nt, Human
gcccuuccuggacagcu

SEQ ID NO: 1317208 - RNA, 18 nt, Human
gcccuuccuggacagcug

SEQ ID NO: 1317209 - RNA, 11 nt, Human
gcccucugggc

SEQ ID NO: 1317210 - RNA, 12 nt, Human
gcccucugggcu

SEQ ID NO: 1317211 - RNA, 13 nt, Human
gcccucugggcuc

SEQ ID NO: 1317212 - RNA, 14 nt, Human
gcccucugggcucu

SEQ ID NO: 1317213 - RNA, 15 nt, Human
gcccucugggcucug

SEQ ID NO: 1317214 - RNA, 16 nt, Human
gcccucugggcucuga

SEQ ID NO: 1317215 - RNA, 18 nt, Human
gcccucugggcucugagu

SEQ ID NO: 1317216 - RNA, 17 nt, Human
gcccucugggcucugag

SEQ ID NO: 1317217 - RNA, 21 nt, Human
gccgagaguccaucagccucc

SEQ ID NO: 1317218 - RNA, 18 nt, Human
gccgacgcuugcacgacc

SEQ ID NO: 1317219 - RNA, 12 nt, Human
gcccuucuuucu

SEQ ID NO: 1317220 - RNA, 13 nt, Human
gcccuucuuucua

SEQ ID NO: 1317221 - RNA, 16 nt, Human
gcccuucuuucuaccc

SEQ ID NO: 1317222 - RNA, 17 nt, Human
gcccuugaguccccauu

SEQ ID NO: 1317223 - RNA, 14 nt, Human
gccgaguccaagcu

SEQ ID NO: 1317224 - RNA, 15 nt, Human
gccgaguccaagcug

SEQ ID NO: 1317225 - RNA, 18 nt, Human
gccgaguccaagcuggga

SEQ ID NO: 1317226 - RNA, 17 nt, Human
gccgauauacucuagau

SEQ ID NO: 1317227 - RNA, 22 nt, Human
gccgauauacucuagaugaagu

SEQ ID NO: 1317228 - RNA, 14 nt, Human
gccgaugcccagag

SEQ ID NO: 1317229 - RNA, 13 nt, Human
gccgggagccuga

SEQ ID NO: 1317230 - RNA, 14 nt, Human
gccgggagccugac

SEQ ID NO: 1317231 - RNA, 19 nt, Human
gccgggagccugacccuca

SEQ ID NO: 1317232 - RNA, 23 nt, Human
gccggggaacuggccaagcugag

SEQ ID NO: 1317233 - RNA, 15 nt, Human
gccggggcagccccc

SEQ ID NO: 1317234 - RNA, 17 nt, Human
gccggggcgaguggcac

SEQ ID NO: 1317235 - RNA, 19 nt, Human
gccggggugggguggcugc

SEQ ID NO: 1317236 - RNA, 20 nt, Human
gccggggugggguggcugca

SEQ ID NO: 1317237 - RNA, 23 nt, Human
gccggggugggguggcugcagcc

SEQ ID NO: 1317238 - RNA, 14 nt, Human
gccgggucugccuc

SEQ ID NO: 1317239 - RNA, 21 nt, Human
gccgggucugccucuucuggg

SEQ ID NO: 1317240 - RNA, 22 nt, Human
gccggggugggguggcugcagc

SEQ ID NO: 1317241 - RNA, 17 nt, Human
gccuauuuuaauaaaca

SEQ ID NO: 1317242 - RNA, 20 nt, Human
gccuaagaggcugcccuccu

SEQ ID NO: 1317243 - RNA, 17 nt, Human
gccuauugcuagagcuc

SEQ ID NO: 1317244 - RNA, 18 nt, Human
gccuauugcuagagcucc

SEQ ID NO: 1317245 - RNA, 19 nt, Human
gccuauugcuagagcuccu

SEQ ID NO: 1317246 - RNA, 23 nt, Human
gccuauugcuagagcuccucccu

SEQ ID NO: 1317247 - RNA, 20 nt, Human
gccuauugcuagagcuccuc

SEQ ID NO: 1317248 - RNA, 15 nt, Human
gccucaaaggcccgc

SEQ ID NO: 1317249 - RNA, 17 nt, Human
gccucaaaggcccgcuc

SEQ ID NO: 1317250 - RNA, 20 nt, Human
gccucaaauaaaaagugcuu

SEQ ID NO: 1317251 - RNA, 22 nt, Human
gccucaaagcaagcauucagaa

SEQ ID NO: 1317252 - RNA, 22 nt, Human
gccuaaaagugggcuugauucu

SEQ ID NO: 1317253 - RNA, 18 nt, Human
gccuaagaauaaacauuu

SEQ ID NO: 1317254 - RNA, 12 nt, Human
gccuaagaggcu

SEQ ID NO: 1317255 - RNA, 13 nt, Human
gccuaagaggcug

SEQ ID NO: 1317256 - RNA, 21 nt, Human
gccuaagaggcugcccuccug

SEQ ID NO: 1317257 - RNA, 14 nt, Human
gccuaaggcugaac

SEQ ID NO: 1317258 - RNA, 14 nt, Human
gccucaaugccagu

SEQ ID NO: 1317259 - RNA, 22 nt, Human
gccucaauuucugaacaccaua

SEQ ID NO: 1317260 - RNA, 23 nt, Human
gccuaaaagugggcuugauucug

SEQ ID NO: 1317261 - RNA, 11 nt, Human
gccguggcuuc

SEQ ID NO: 1317262 - RNA, 12 nt, Human
gccguggcuucc

SEQ ID NO: 1317263 - RNA, 13 nt, Human
gccguggcuuccc

SEQ ID NO: 1317264 - RNA, 15 nt, Human
gccguggcuucccgc

SEQ ID NO: 1317265 - RNA, 21 nt, Human
gccguggauugcacguggccu

SEQ ID NO: 1317266 - RNA, 22 nt, Human
gccguggauugcacguggccuc

SEQ ID NO: 1317267 - RNA, 23 nt, Human
gccguggauugcacguggccucu

SEQ ID NO: 1317268 - RNA, 16 nt, Human
gccguggcugcugugg

SEQ ID NO: 1317269 - RNA, 20 nt, Human
gccguggcugcugugggaaa

SEQ ID NO: 1317270 - RNA, 23 nt, Human
gccggguguccccaacagcgccc

SEQ ID NO: 1317271 - RNA, 14 nt, Human
gccgucuccagggg

SEQ ID NO: 1317272 - RNA, 16 nt, Human
gccgucuccaggggcu

SEQ ID NO: 1317273 - RNA, 21 nt, Human
gccgucuccaggggcugcuuc

SEQ ID NO: 1317274 - RNA, 23 nt, Human
gccgucuccaggggcugcuuccu

SEQ ID NO: 1317275 - RNA, 16 nt, Human
gccgugaaugggugcc

SEQ ID NO: 1317276 - RNA, 14 nt, Human
gccgugacgucugg

SEQ ID NO: 1317277 - RNA, 18 nt, Human
gccgugacgucugggugg

SEQ ID NO: 1317278 - RNA, 22 nt, Human
gccgugacgucuggguggcccu

SEQ ID NO: 1317279 - RNA, 18 nt, Human
gccucucugcaggucccu

SEQ ID NO: 1317280 - RNA, 17 nt, Human
gccucucugcagguccc

SEQ ID NO: 1317281 - RNA, 16 nt, Human
gccucucugcaggucc

SEQ ID NO: 1317282 - RNA, 14 nt, Human
gccucucugcaggu

SEQ ID NO: 1317283 - RNA, 10 nt, Human
gccucucugc

SEQ ID NO: 1317284 - RNA, 20 nt, Human
gccucuccccagguccagcu

SEQ ID NO: 1317285 - RNA, 22 nt, Human
gccucuccccagguccagcucu

SEQ ID NO: 1317286 - RNA, 23 nt, Human
gccucuccccagguccagcucug

SEQ ID NO: 1317287 - RNA, 20 nt, Human
gccucucccaggcaggggcc

SEQ ID NO: 1317288 - RNA, 16 nt, Human
gccucuccccugccug

SEQ ID NO: 1317289 - RNA, 18 nt, Human
gccucuccccugccugcc

SEQ ID NO: 1317290 - RNA, 17 nt, Human
gccucuccccugccugc

SEQ ID NO: 1317291 - RNA, 14 nt, Human
gccucucccaggca

SEQ ID NO: 1317292 - RNA, 15 nt, Human
gccucucccaggcag

SEQ ID NO: 1317293 - RNA, 17 nt, Human
gccucucccaggcaggg

SEQ ID NO: 1317294 - RNA, 18 nt, Human
gccucuccccagguccag

SEQ ID NO: 1317295 - RNA, 15 nt, Human
gccucccucugcugu

SEQ ID NO: 1317296 - RNA, 13 nt, Human
gccucccugaagc

SEQ ID NO: 1317297 - RNA, 18 nt, Human
gccucccugaagccuuug

SEQ ID NO: 1317298 - RNA, 12 nt, Human
gccucccugagc

SEQ ID NO: 1317299 - RNA, 13 nt, Human
gccucccugagcu

SEQ ID NO: 1317300 - RNA, 13 nt, Human
gccucccccacuu

SEQ ID NO: 1317301 - RNA, 21 nt, Human
gccuccccuuaaaggggagac

SEQ ID NO: 1317302 - RNA, 16 nt, Human
gccucccuccugcccc

SEQ ID NO: 1317303 - RNA, 14 nt, Human
gccucccauguuca

SEQ ID NO: 1317304 - RNA, 15 nt, Human
gccucccauccaggg

SEQ ID NO: 1317305 - RNA, 22 nt, Human
gccucccauccagggcccccau

SEQ ID NO: 1317306 - RNA, 11 nt, Human
gccucccccac

SEQ ID NO: 1317307 - RNA, 20 nt, Human
gccucccccacuuucuuucu

SEQ ID NO: 1317308 - RNA, 12 nt, Human
gccucugcauuc

SEQ ID NO: 1317309 - RNA, 15 nt, Human
gccucugcauucagg

SEQ ID NO: 1317310 - RNA, 23 nt, Human
gccugaaagaggcugaggccugg

SEQ ID NO: 1317311 - RNA, 19 nt, Human
gccugaaccccagggcugu

SEQ ID NO: 1317312 - RNA, 17 nt, Human
gccugaacuccugccau

SEQ ID NO: 1317313 - RNA, 23 nt, Human
gccucucuuguaauuuggaucuc

SEQ ID NO: 1317314 - RNA, 23 nt, Human
gccugcugcugagaaccuggccu

SEQ ID NO: 1317315 - RNA, 13 nt, Human
gccuggaccucug

SEQ ID NO: 1317316 - RNA, 15 nt, Human
gccuggaccucugac

SEQ ID NO: 1317317 - RNA, 18 nt, Human
gccuggaccucugacagc

SEQ ID NO: 1317318 - RNA, 20 nt, Human
gccuggaccucugacagcag

SEQ ID NO: 1317319 - RNA, 16 nt, Human
gccugagcccagggag

SEQ ID NO: 1317320 - RNA, 17 nt, Human
gccugagcccagggagg

SEQ ID NO: 1317321 - RNA, 18 nt, Human
gccugagcccagggaggc

SEQ ID NO: 1317322 - RNA, 19 nt, Human
gccugagcccagggaggcc

SEQ ID NO: 1317323 - RNA, 20 nt, Human
gccugagcccagggaggccg

SEQ ID NO: 1317324 - RNA, 18 nt, Human
gccugagcaacucuugau

SEQ ID NO: 1317325 - RNA, 16 nt, Human
gccugagcaguccuug

SEQ ID NO: 1317326 - RNA, 18 nt, Human
gccugagcaguccuuggc

SEQ ID NO: 1317327 - RNA, 19 nt, Human
gccugagcaguccuuggcc

SEQ ID NO: 1317328 - RNA, 23 nt, Human
gccugagcaguccuuggccugcu

SEQ ID NO: 1317329 - RNA, 12 nt, Human
gccugagcccag

SEQ ID NO: 1317330 - RNA, 13 nt, Human
gccugagcccagg

SEQ ID NO: 1317331 - RNA, 14 nt, Human
gccugagcccaggg

SEQ ID NO: 1317332 - RNA, 15 nt, Human
gccugagcccaggga

SEQ ID NO: 1317333 - RNA, 16 nt, Human
gcuacagaagaaacug

SEQ ID NO: 1317334 - RNA, 22 nt, Human
gcuacaccacucuggcagccac

SEQ ID NO: 1317335 - RNA, 11 nt, Human
gcuacagagaa

SEQ ID NO: 1317336 - RNA, 12 nt, Human
gcuacagagaaa

SEQ ID NO: 1317337 - RNA, 13 nt, Human
gcuacagagaaac

SEQ ID NO: 1317338 - RNA, 15 nt, Human
gcuacagagaaacca

SEQ ID NO: 1317339 - RNA, 16 nt, Human
gcuacagagaaaccag

SEQ ID NO: 1317340 - RNA, 19 nt, Human
gcuacacccuuuuccagcu

SEQ ID NO: 1317341 - RNA, 23 nt, Human
gcuacaccuauuaucccagcugc

SEQ ID NO: 1317342 - RNA, 16 nt, Human
gcuacaccacucuggc

SEQ ID NO: 1317343 - RNA, 17 nt, Human
gcuacaccacucuggca

SEQ ID NO: 1317344 - RNA, 18 nt, Human
gcuacaccacucuggcag

SEQ ID NO: 1317345 - RNA, 19 nt, Human
gcuacaccacucuggcagc

SEQ ID NO: 1317346 - RNA, 20 nt, Human
gcuacaccacucuggcagcc

SEQ ID NO: 1317347 - RNA, 21 nt, Human
gcuacaccacucuggcagcca

SEQ ID NO: 1317348 - RNA, 17 nt, Human
gcuacacccuuuuccag

SEQ ID NO: 1317349 - RNA, 23 nt, Human
gcuaagaaccuggaacuugggga

SEQ ID NO: 1317350 - RNA, 16 nt, Human
gcuaagaaccuggaac

SEQ ID NO: 1317351 - RNA, 17 nt, Human
gcuaagaaccuggaacu

SEQ ID NO: 1317352 - RNA, 16 nt, Human
gcgugagaccugcccc

SEQ ID NO: 1317353 - RNA, 13 nt, Human
gcuaccaggaaag

SEQ ID NO: 1317354 - RNA, 13 nt, Human
gcuaccaguauuu

SEQ ID NO: 1317355 - RNA, 14 nt, Human
gcuaccaguauuua

SEQ ID NO: 1317356 - RNA, 15 nt, Human
gcuaccaguauuuag

SEQ ID NO: 1317357 - RNA, 12 nt, Human
gcuaccaccagc

SEQ ID NO: 1317358 - RNA, 13 nt, Human
gcuaccaccagcu

SEQ ID NO: 1317359 - RNA, 14 nt, Human
gcuaccaccagcug

SEQ ID NO: 1317360 - RNA, 15 nt, Human
gcuaccaccagcugu

SEQ ID NO: 1317361 - RNA, 16 nt, Human
gcuaccaccagcugug

SEQ ID NO: 1317362 - RNA, 20 nt, Human
gcuaccaccagcugugucca

SEQ ID NO: 1317363 - RNA, 21 nt, Human
gcuaccaccagcuguguccaa

SEQ ID NO: 1317364 - RNA, 17 nt, Human
gcuacagagaaaccagc

SEQ ID NO: 1317365 - RNA, 19 nt, Human
gcuacagagaaaccagcuu

SEQ ID NO: 1317366 - RNA, 20 nt, Human
gcuacagagaaaccagcuuc

SEQ ID NO: 1317367 - RNA, 21 nt, Human
gcuacagagaaaccagcuucc

SEQ ID NO: 1317368 - RNA, 22 nt, Human
gcuacagagaaaccagcuuccu

SEQ ID NO: 1317369 - RNA, 12 nt, Human
gcuacagagaag

SEQ ID NO: 1317370 - RNA, 13 nt, Human
gcuacagagaagc

SEQ ID NO: 1317371 - RNA, 19 nt, Human
gcuacauggggcucacuca

SEQ ID NO: 1317372 - RNA, 14 nt, Human
gcuaccaaaacagu

SEQ ID NO: 1317373 - RNA, 20 nt, Human
gcuaccaaagcaccuuagcu

SEQ ID NO: 1317374 - RNA, 18 nt, Human
gcuaccaguauuuagaag

SEQ ID NO: 1317375 - RNA, 19 nt, Human
gcuaccaguauuuagaagc

SEQ ID NO: 1317376 - RNA, 21 nt, Human
gcuaccaguauuuagaagcca

SEQ ID NO: 1317377 - RNA, 22 nt, Human
gcuaccaguauuuagaagccaa

SEQ ID NO: 1317378 - RNA, 12 nt, Human
gcuacccugagc

SEQ ID NO: 1317379 - RNA, 14 nt, Human
gcuacccugagcug

SEQ ID NO: 1317380 - RNA, 16 nt, Human
gcuacccugagcugag

SEQ ID NO: 1317381 - RNA, 20 nt, Human
gcuacccugagcugaggcag

SEQ ID NO: 1317382 - RNA, 19 nt, Human
gcuacccugagcugaggca

SEQ ID NO: 1317383 - RNA, 16 nt, Human
gcuacccuuuuucucc

SEQ ID NO: 1317384 - RNA, 13 nt, Human
gcuagagcuccuc

SEQ ID NO: 1317385 - RNA, 15 nt, Human
gcuagagcuccuccc

SEQ ID NO: 1317386 - RNA, 16 nt, Human
gcuagagcuccucccu

SEQ ID NO: 1317387 - RNA, 19 nt, Human
gcuagagcuccucccucuc

SEQ ID NO: 1317388 - RNA, 18 nt, Human
gcuacccuuuuucuccag

SEQ ID NO: 1317389 - RNA, 19 nt, Human
gcuacccuuuuucuccagc

SEQ ID NO: 1317390 - RNA, 20 nt, Human
gcuacccuuuuucuccagcu

SEQ ID NO: 1317391 - RNA, 21 nt, Human
gcuacccuuuuucuccagcug

SEQ ID NO: 1317392 - RNA, 22 nt, Human
gcuacccuuuuucuccagcugg

SEQ ID NO: 1317393 - RNA, 22 nt, Human
gcuagacacaugaagguaaaua

SEQ ID NO: 1317394 - RNA, 23 nt, Human
gcuagacacaugaagguaaauaa

SEQ ID NO: 1317395 - RNA, 18 nt, Human
gcgccuccaacccuagca

SEQ ID NO: 1317396 - RNA, 19 nt, Human
gcgccuccauccaaggcca

SEQ ID NO: 1317397 - RNA, 18 nt, Human
gcgcuccuggcccagccu

SEQ ID NO: 1317398 - RNA, 19 nt, Human
gcgcuccuggcccagccuu

SEQ ID NO: 1317399 - RNA, 20 nt, Human
gcgcuccuggcccagccuuu

SEQ ID NO: 1317400 - RNA, 23 nt, Human
gcgaccuuccucauccaccccau

SEQ ID NO: 1317401 - RNA, 13 nt, Human
gcgacuaauuuca

SEQ ID NO: 1317402 - RNA, 21 nt, Human
gcgacuaauuucaaaaugcuu

SEQ ID NO: 1317403 - RNA, 23 nt, Human
gcgacuaauuucaaaaugcuuuu

SEQ ID NO: 1317404 - RNA, 18 nt, Human
gcgacuccguuggccacu

SEQ ID NO: 1317405 - RNA, 19 nt, Human
gcgacuccguuggccacuc

SEQ ID NO: 1317406 - RNA, 20 nt, Human
gcgacuccguuggccacucc

SEQ ID NO: 1317407 - RNA, 12 nt, Human
gcgacuuucugc

SEQ ID NO: 1317408 - RNA, 14 nt, Human
gcgacuuucugccu

SEQ ID NO: 1317409 - RNA, 21 nt, Human
gcgccaggauggaacacggcc

SEQ ID NO: 1317410 - RNA, 22 nt, Human
gcgccaggauggaacacggcca

SEQ ID NO: 1317411 - RNA, 15 nt, Human
gcgccaggcugacca

SEQ ID NO: 1317412 - RNA, 20 nt, Human
gcgccaggcugaccacagca

SEQ ID NO: 1317413 - RNA, 22 nt, Human
gcgccaggcugaccacagcaca

SEQ ID NO: 1317414 - RNA, 14 nt, Human
gcgccaggauggcg

SEQ ID NO: 1317415 - RNA, 14 nt, Human
gcgcccagcuccug

SEQ ID NO: 1317416 - RNA, 15 nt, Human
gcgcccagcuccuga

SEQ ID NO: 1317417 - RNA, 13 nt, Human
gcgcccagggcug

SEQ ID NO: 1317418 - RNA, 19 nt, Human
gcgcccagggcugggagga

SEQ ID NO: 1317419 - RNA, 17 nt, Human
gcgcugguccuuucuuc

SEQ ID NO: 1317420 - RNA, 23 nt, Human
gcgcugucaggauugcgagagau

SEQ ID NO: 1317421 - RNA, 20 nt, Human
gcggaacaaggagucagaca

SEQ ID NO: 1317422 - RNA, 14 nt, Human
gcggggaggaggaa

SEQ ID NO: 1317423 - RNA, 23 nt, Human
gcggggaucagagcgcacaggga

SEQ ID NO: 1317424 - RNA, 14 nt, Human
gcguccuccucugu

SEQ ID NO: 1317425 - RNA, 15 nt, Human
gcguccuccucugug

SEQ ID NO: 1317426 - RNA, 16 nt, Human
gcguccuccucuguga

SEQ ID NO: 1317427 - RNA, 18 nt, Human
gcgacauuagcauaaaca

SEQ ID NO: 1317428 - RNA, 13 nt, Human
gcgaccgcccccu

SEQ ID NO: 1317429 - RNA, 14 nt, Human
gcgaccgcccccuc

SEQ ID NO: 1317430 - RNA, 15 nt, Human
gcgaccgcccccucc

SEQ ID NO: 1317431 - RNA, 10 nt, Human
gcgaccuccu

SEQ ID NO: 1317432 - RNA, 15 nt, Human
gcgaccuuccucauc

SEQ ID NO: 1317433 - RNA, 22 nt, Human
gcgaccuuccucauccacccca

SEQ ID NO: 1317434 - RNA, 17 nt, Human
gccuuuuaguuccugug

SEQ ID NO: 1317435 - RNA, 20 nt, Human
gccuuuuaguuccugugcac

SEQ ID NO: 1317436 - RNA, 22 nt, Human
gccuuuuaucccaaaguuguug

SEQ ID NO: 1317437 - RNA, 16 nt, Human
gccuuuuaguuccugu

SEQ ID NO: 1317438 - RNA, 23 nt, Human
gccuuuguuccccacuggagcag

SEQ ID NO: 1317439 - RNA, 21 nt, Human
gccuuuguuccccacuggagc

SEQ ID NO: 1317440 - RNA, 22 nt, Human
gccuuuguuccccacuggagca

SEQ ID NO: 1317441 - RNA, 13 nt, Human
gccuuuucccucu

SEQ ID NO: 1317442 - RNA, 20 nt, Human
gccuuuucccucuuuggcuc

SEQ ID NO: 1317443 - RNA, 18 nt, Human
gccuuuugcaaccaggaa

SEQ ID NO: 1317444 - RNA, 21 nt, Human
gccuuuauuaaaaacugagug

SEQ ID NO: 1317445 - RNA, 19 nt, Human
gccuuuauuuccacugugc

SEQ ID NO: 1317446 - RNA, 20 nt, Human
gccuuuauuuccacugugca

SEQ ID NO: 1317447 - RNA, 23 nt, Human
gccuuuauuuuuggcguggcuga

SEQ ID NO: 1317448 - RNA, 14 nt, Human
gccuuuauuuguua

SEQ ID NO: 1317449 - RNA, 17 nt, Human
gccuuucaggaucuauu

SEQ ID NO: 1317450 - RNA, 14 nt, Human
gccuuucaggaucu

SEQ ID NO: 1317451 - RNA, 18 nt, Human
gccuuuguuccccacugg

SEQ ID NO: 1317452 - RNA, 19 nt, Human
gccuuuguuccccacugga

SEQ ID NO: 1317453 - RNA, 20 nt, Human
gccuuuguuccccacuggag

SEQ ID NO: 1317454 - RNA, 18 nt, Human
gccuuggggcugaugcag

SEQ ID NO: 1317455 - RNA, 19 nt, Human
gccuucggccuccauccug

SEQ ID NO: 1317456 - RNA, 20 nt, Human
gccuucgcuucuugccucug

SEQ ID NO: 1317457 - RNA, 21 nt, Human
gccuucgcuucuugccucugu

SEQ ID NO: 1317458 - RNA, 22 nt, Human
gccuucgcuucuugccucugug

SEQ ID NO: 1317459 - RNA, 20 nt, Human
gccuuggcugacaugaagcu

SEQ ID NO: 1317460 - RNA, 17 nt, Human
gccuugggcuccgugug

SEQ ID NO: 1317461 - RNA, 18 nt, Human
gccuugggcuccgugugg

SEQ ID NO: 1317462 - RNA, 20 nt, Human
gccuugggcuccguguggga

SEQ ID NO: 1317463 - RNA, 22 nt, Human
gccuugggcuccgugugggaga

SEQ ID NO: 1317464 - RNA, 21 nt, Human
gccuugggcuccgugugggag

SEQ ID NO: 1317465 - RNA, 18 nt, Human
gccuucggccuccauccu

SEQ ID NO: 1317466 - RNA, 22 nt, Human
gccuuccccuuauccucccugu

SEQ ID NO: 1317467 - RNA, 20 nt, Human
gccuuccccuuauccucccu

SEQ ID NO: 1317468 - RNA, 17 nt, Human
gccuucgcuucuugccu

SEQ ID NO: 1317469 - RNA, 19 nt, Human
gccuucccaaguugugcuu

SEQ ID NO: 1317470 - RNA, 20 nt, Human
gccuucccaaguugugcuug

SEQ ID NO: 1317471 - RNA, 21 nt, Human
gccuucccaaguugugcuuga

SEQ ID NO: 1317472 - RNA, 22 nt, Human
gccuuccccacccaccaacccu

SEQ ID NO: 1317473 - RNA, 12 nt, Human
gccuuccccacc

SEQ ID NO: 1317474 - RNA, 13 nt, Human
gccuucagcucua

SEQ ID NO: 1317475 - RNA, 19 nt, Human
gccuucaagcucugaggga

SEQ ID NO: 1317476 - RNA, 17 nt, Human
gccuucacaaucuguca

SEQ ID NO: 1317477 - RNA, 22 nt, Human
gccuucacaaucugucaguucu

SEQ ID NO: 1317478 - RNA, 23 nt, Human
gccuucagacagagaggacugua

SEQ ID NO: 1317479 - RNA, 16 nt, Human
gccuucagcucuacag

SEQ ID NO: 1317480 - RNA, 13 nt, Human
gccuucaaaucaa

SEQ ID NO: 1317481 - RNA, 22 nt, Human
gccuuauuggaaagcagucccc

SEQ ID NO: 1317482 - RNA, 19 nt, Human
gccuuauuagagugucuuu

SEQ ID NO: 1317483 - RNA, 16 nt, Human
gccuuauucagggaag

SEQ ID NO: 1317484 - RNA, 18 nt, Human
gccuuauucagggaagga

SEQ ID NO: 1317485 - RNA, 20 nt, Human
gccuucaagaaaacaggcac

SEQ ID NO: 1317486 - RNA, 22 nt, Human
gccuucaagaaaacaggcacug

SEQ ID NO: 1317487 - RNA, 11 nt, Human
gccuucaagcu

SEQ ID NO: 1317488 - RNA, 14 nt, Human
gccuucaagcucug

SEQ ID NO: 1317489 - RNA, 15 nt, Human
gccuucaagcucuga

SEQ ID NO: 1317490 - RNA, 16 nt, Human
gccuucaagcucugag

SEQ ID NO: 1317491 - RNA, 22 nt, Human
gccuucaagcucugagggaaag

SEQ ID NO: 1317492 - RNA, 22 nt, Human
gccuuagucucaguuugugugu

SEQ ID NO: 1317493 - RNA, 18 nt, Human
gccuuagucucaguuugu

SEQ ID NO: 1317494 - RNA, 19 nt, Human
gccuuaggaagagccuucc

SEQ ID NO: 1317495 - RNA, 15 nt, Human
gccuuagucucaguu

SEQ ID NO: 1317496 - RNA, 16 nt, Human
gccuuagaaccuuucu

SEQ ID NO: 1317497 - RNA, 17 nt, Human
gccuuagaaccuuucuu

SEQ ID NO: 1317498 - RNA, 20 nt, Human
gccugucccacccccacccc

SEQ ID NO: 1317499 - RNA, 20 nt, Human
gccuguccacaggcuucuga

SEQ ID NO: 1317500 - RNA, 22 nt, Human
gccuguccuccaacaccaagca

SEQ ID NO: 1317501 - RNA, 15 nt, Human
gccuguccugccugu

SEQ ID NO: 1317502 - RNA, 12 nt, Human
gccuguccugcc

SEQ ID NO: 1317503 - RNA, 13 nt, Human
gccuguccugccu

SEQ ID NO: 1317504 - RNA, 14 nt, Human
gccuguccugccug

SEQ ID NO: 1317505 - RNA, 13 nt, Human
gccuggaggaccu

SEQ ID NO: 1317506 - RNA, 17 nt, Human
gccuggagauccuccug

SEQ ID NO: 1317507 - RNA, 18 nt, Human
gccuggagauccuccugc

SEQ ID NO: 1317508 - RNA, 19 nt, Human
gccuggagauccuccugca

SEQ ID NO: 1317509 - RNA, 20 nt, Human
gccuggagauccuccugcag

SEQ ID NO: 1317510 - RNA, 22 nt, Human
gccuggagauccuccugcagac

SEQ ID NO: 1317511 - RNA, 14 nt, Human
gccuggagaugacu

SEQ ID NO: 1317512 - RNA, 15 nt, Human
gccuggagcacaaag

SEQ ID NO: 1317513 - RNA, 21 nt, Human
gccuggaccucugacagcagc

SEQ ID NO: 1317514 - RNA, 22 nt, Human
gccuggaccucugacagcagca

SEQ ID NO: 1317515 - RNA, 23 nt, Human
gccuggaccucugacagcagcau

SEQ ID NO: 1317516 - RNA, 14 nt, Human
gccuggacuuuccu

SEQ ID NO: 1317517 - RNA, 15 nt, Human
gccuggacuuuccug

SEQ ID NO: 1317518 - RNA, 16 nt, Human
gccuggacuuuccugc

SEQ ID NO: 1317519 - RNA, 17 nt, Human
gccuggacuuuccugca

SEQ ID NO: 1317520 - RNA, 18 nt, Human
gccuggacuuuccugcaa

SEQ ID NO: 1317521 - RNA, 17 nt, Human
gccuggagacuuagggc

SEQ ID NO: 1317522 - RNA, 19 nt, Human
gccuggagacuuagggcac

SEQ ID NO: 1317523 - RNA, 23 nt, Human
gccuggagacuuagggcaccagg

SEQ ID NO: 1317524 - RNA, 16 nt, Human
gccuggagauccuccu

SEQ ID NO: 1317525 - RNA, 18 nt, Human
gccuguaaucacagcuac

SEQ ID NO: 1317526 - RNA, 21 nt, Human
gccuggagaugacuugaggcc

SEQ ID NO: 1317527 - RNA, 14 nt, Human
gccugguuagaggc

SEQ ID NO: 1317528 - RNA, 21 nt, Human
gccugguuaaauaaggcaggg

SEQ ID NO: 1317529 - RNA, 19 nt, Human
gccuguaacaagccagauu

SEQ ID NO: 1317530 - RNA, 13 nt, Human
gccuguaaacuuu

SEQ ID NO: 1317531 - RNA, 18 nt, Human
gccugucagauccaggag

SEQ ID NO: 1317532 - RNA, 19 nt, Human
gccugucagauccaggagc

SEQ ID NO: 1317533 - RNA, 20 nt, Human
gccugucagauccaggagcu

SEQ ID NO: 1317534 - RNA, 22 nt, Human
gccugucagauccaggagcucc

SEQ ID NO: 1317535 - RNA, 21 nt, Human
gccugucagauccaggagcuc

SEQ ID NO: 1317536 - RNA, 15 nt, Human
gccuguccacaggcu

SEQ ID NO: 1317537 - RNA, 18 nt, Human
gccuguccacaggcuucu

SEQ ID NO: 1317538 - RNA, 23 nt, Human
gccuguccacaggcuucugagca

SEQ ID NO: 1317539 - RNA, 22 nt, Human
gcccaucugggggccucuucug

SEQ ID NO: 1317540 - RNA, 14 nt, Human
gcccauccccuuga

SEQ ID NO: 1317541 - RNA, 22 nt, Human
gcccauccccuugaggucucag

SEQ ID NO: 1317542 - RNA, 14 nt, Human
gcccauccugacca

SEQ ID NO: 1317543 - RNA, 15 nt, Human
gcccauccugaccag

SEQ ID NO: 1317544 - RNA, 16 nt, Human
gcccauccugaccagc

SEQ ID NO: 1317545 - RNA, 18 nt, Human
gcccauccugaccagcug

SEQ ID NO: 1317546 - RNA, 19 nt, Human
gcccauccuguggucacug

SEQ ID NO: 1317547 - RNA, 19 nt, Human
gcccauggacaggcuggcu

SEQ ID NO: 1317548 - RNA, 20 nt, Human
gcccauggacaggcuggcuc

SEQ ID NO: 1317549 - RNA, 21 nt, Human
gcccauggacaggcuggcucc

SEQ ID NO: 1317550 - RNA, 23 nt, Human
gcccauggacaggcuggcuccag

SEQ ID NO: 1317551 - RNA, 13 nt, Human
gcccauggagauu

SEQ ID NO: 1317552 - RNA, 21 nt, Human
gcccauggagauugaccugga

SEQ ID NO: 1317553 - RNA, 22 nt, Human
gcccauggagauugaccuggau

SEQ ID NO: 1317554 - RNA, 23 nt, Human
gcccauggagauugaccuggaug

SEQ ID NO: 1317555 - RNA, 23 nt, Human
gccccagcccagccccacuccuc

SEQ ID NO: 1317556 - RNA, 14 nt, Human
gccccagcccagcc

SEQ ID NO: 1317557 - RNA, 19 nt, Human
gccccagcccagccccacu

SEQ ID NO: 1317558 - RNA, 22 nt, Human
gccccagcccagccccacuccu

SEQ ID NO: 1317559 - RNA, 16 nt, Human
gccccagccucccuga

SEQ ID NO: 1317560 - RNA, 18 nt, Human
gccccagccucccugaag

SEQ ID NO: 1317561 - RNA, 21 nt, Human
gccccagccucccugaagccu

SEQ ID NO: 1317562 - RNA, 15 nt, Human
gccccaggaaaggcc

SEQ ID NO: 1317563 - RNA, 22 nt, Human
gccccaggaaaggcccagccac

SEQ ID NO: 1317564 - RNA, 11 nt, Human
gccccaggacc

SEQ ID NO: 1317565 - RNA, 12 nt, Human
gccccaggacca

SEQ ID NO: 1317566 - RNA, 14 nt, Human
gccccaggaccagc

SEQ ID NO: 1317567 - RNA, 15 nt, Human
gccccaggaccagcu

SEQ ID NO: 1317568 - RNA, 16 nt, Human
gccccaggaccagcuc

SEQ ID NO: 1317569 - RNA, 17 nt, Human
gccccaggaccagcuca

SEQ ID NO: 1317570 - RNA, 18 nt, Human
gccccaggaccagcucag

SEQ ID NO: 1317571 - RNA, 19 nt, Human
gccccaggaccagcucagg

SEQ ID NO: 1317572 - RNA, 22 nt, Human
gccccaggaccagcucaggaca

SEQ ID NO: 1317573 - RNA, 23 nt, Human
gccccaggaccagcucaggacag

SEQ ID NO: 1317574 - RNA, 24 nt, Human
gccccaggaccagcucaggacaga

SEQ ID NO: 1317575 - RNA, 20 nt, Human
gccccaggaccuggcugcca

SEQ ID NO: 1317576 - RNA, 21 nt, Human
gccccaggaccuggcugccau

SEQ ID NO: 1317577 - RNA, 22 nt, Human
gccccaggaccuggcugccaua

SEQ ID NO: 1317578 - RNA, 14 nt, Human
gccccaugaccucc

SEQ ID NO: 1317579 - RNA, 15 nt, Human
gccccaugaccucca

SEQ ID NO: 1317580 - RNA, 16 nt, Human
gccccaugaccuccag

SEQ ID NO: 1317581 - RNA, 18 nt, Human
gccccaugaccuccagcu

SEQ ID NO: 1317582 - RNA, 17 nt, Human
gccccaugaccuccagc

SEQ ID NO: 1317583 - RNA, 20 nt, Human
gcccaggcucggccugcccc

SEQ ID NO: 1317584 - RNA, 12 nt, Human
gcccaggcugcc

SEQ ID NO: 1317585 - RNA, 13 nt, Human
gcccaggcugccg

SEQ ID NO: 1317586 - RNA, 16 nt, Human
gcccaggcugccgucc

SEQ ID NO: 1317587 - RNA, 18 nt, Human
gcccaggcugccgucccc

SEQ ID NO: 1317588 - RNA, 17 nt, Human
gcccaggccugccuguu

SEQ ID NO: 1317589 - RNA, 18 nt, Human
gcccaggcucggccugcc

SEQ ID NO: 1317590 - RNA, 19 nt, Human
gcccaggcucggccugccc

SEQ ID NO: 1317591 - RNA, 12 nt, Human
gcccagcuccaa

SEQ ID NO: 1317592 - RNA, 15 nt, Human
gcccagcuccaaggg

SEQ ID NO: 1317593 - RNA, 12 nt, Human
gcccagcuccug

SEQ ID NO: 1317594 - RNA, 14 nt, Human
gcccagcuccugac

SEQ ID NO: 1317595 - RNA, 23 nt, Human
gcccagcuccugacacugcugga

SEQ ID NO: 1317596 - RNA, 13 nt, Human
gcccagcucugaa

SEQ ID NO: 1317597 - RNA, 15 nt, Human
gcccagggcccagag

SEQ ID NO: 1317598 - RNA, 16 nt, Human
gcccagggcccagagc

SEQ ID NO: 1317599 - RNA, 17 nt, Human
gcccagggcccagagcc

SEQ ID NO: 1317600 - RNA, 18 nt, Human
gcccagggcccagagccc

SEQ ID NO: 1317601 - RNA, 19 nt, Human
gcccagggcccagagccca

SEQ ID NO: 1317602 - RNA, 20 nt, Human
gcccagggcccagagcccag

SEQ ID NO: 1317603 - RNA, 21 nt, Human
gcccagggcccagagcccagc

SEQ ID NO: 1317604 - RNA, 23 nt, Human
gcccagggcccagagcccagcuc

SEQ ID NO: 1317605 - RNA, 22 nt, Human
gcccaguaccuagcuggcucug

SEQ ID NO: 1317606 - RNA, 15 nt, Human
gcccaguagaccuug

SEQ ID NO: 1317607 - RNA, 17 nt, Human
gcccaguagaccuuguu

SEQ ID NO: 1317608 - RNA, 19 nt, Human
gcccaguucacccugauuu

SEQ ID NO: 1317609 - RNA, 15 nt, Human
gcccaguuaaucuug

SEQ ID NO: 1317610 - RNA, 21 nt, Human
gcccaguuggagacugucugg

SEQ ID NO: 1317611 - RNA, 18 nt, Human
gcccauccccaggcaccu

SEQ ID NO: 1317612 - RNA, 22 nt, Human
gcccagugcacuugcuggaaga

SEQ ID NO: 1317613 - RNA, 15 nt, Human
gcccagugcacugaa

SEQ ID NO: 1317614 - RNA, 19 nt, Human
gcccagugcacuugcugga

SEQ ID NO: 1317615 - RNA, 14 nt, Human
gcccaguuaaucuu

SEQ ID NO: 1317616 - RNA, 21 nt, Human
gcccggacgcccaggacccca

SEQ ID NO: 1317617 - RNA, 19 nt, Human
gcccggacgcccaggaccc

SEQ ID NO: 1317618 - RNA, 15 nt, Human
gcccucccugccccu

SEQ ID NO: 1317619 - RNA, 21 nt, Human
gcccucccugccccucccuuc

SEQ ID NO: 1317620 - RNA, 14 nt, Human
gcccucccccuccu

SEQ ID NO: 1317621 - RNA, 16 nt, Human
gcccuccucugcacuc

SEQ ID NO: 1317622 - RNA, 12 nt, Human
gcccuccugugc

SEQ ID NO: 1317623 - RNA, 17 nt, Human
gcccuccugugcucagc

SEQ ID NO: 1317624 - RNA, 18 nt, Human
gcccuccugugcucagcc

SEQ ID NO: 1317625 - RNA, 19 nt, Human
gcccuccugugcucagccc

SEQ ID NO: 1317626 - RNA, 20 nt, Human
gcccuccugugcucagcccu

SEQ ID NO: 1317627 - RNA, 21 nt, Human
gcccuccugugcucagcccug

SEQ ID NO: 1317628 - RNA, 22 nt, Human
gcccuccugugcucagcccuga

SEQ ID NO: 1317629 - RNA, 23 nt, Human
gcccuccugugcucagcccugag

SEQ ID NO: 1317630 - RNA, 17 nt, Human
gcccuccuuccuaaauu

SEQ ID NO: 1317631 - RNA, 14 nt, Human
gccccuuccgccac

SEQ ID NO: 1317632 - RNA, 15 nt, Human
gccccuuccgccacu

SEQ ID NO: 1317633 - RNA, 17 nt, Human
gccccuuccgccacugg

SEQ ID NO: 1317634 - RNA, 19 nt, Human
gccccuuccgccacugggg

SEQ ID NO: 1317635 - RNA, 21 nt, Human
gccccuuccgccacuggggcu

SEQ ID NO: 1317636 - RNA, 22 nt, Human
gcccgcucuacaucuucugccu

SEQ ID NO: 1317637 - RNA, 19 nt, Human
gccccugcacuccagccug

SEQ ID NO: 1317638 - RNA, 13 nt, Human
gccccugcacaaa

SEQ ID NO: 1317639 - RNA, 13 nt, Human
gccccuggcccca

SEQ ID NO: 1317640 - RNA, 14 nt, Human
gccccuggccccag

SEQ ID NO: 1317641 - RNA, 12 nt, Human
gccccuggcugg

SEQ ID NO: 1317642 - RNA, 14 nt, Human
gccccuggcuggga

SEQ ID NO: 1317643 - RNA, 16 nt, Human
gccccuggcugggacg

SEQ ID NO: 1317644 - RNA, 23 nt, Human
gccccuggcugggacguggcuca

SEQ ID NO: 1317645 - RNA, 18 nt, Human
gccccuacccuggacuug

SEQ ID NO: 1317646 - RNA, 21 nt, Human
gccccuagcgcuaucucccug

SEQ ID NO: 1317647 - RNA, 21 nt, Human
gccccucaucucucugcccaa

SEQ ID NO: 1317648 - RNA, 13 nt, Human
gccccgcguggaa

SEQ ID NO: 1317649 - RNA, 15 nt, Human
gccccgcccugcccc

SEQ ID NO: 1317650 - RNA, 13 nt, Human
gccccgcccucau

SEQ ID NO: 1317651 - RNA, 17 nt, Human
gccccgugggguuccuc

SEQ ID NO: 1317652 - RNA, 13 nt, Human
gccccgugaggca

SEQ ID NO: 1317653 - RNA, 17 nt, Human
gccccgucccccucugg

SEQ ID NO: 1317654 - RNA, 21 nt, Human
gccccgucccccucuggcucc

SEQ ID NO: 1317655 - RNA, 16 nt, Human
gcccacagcuguauga

SEQ ID NO: 1317656 - RNA, 13 nt, Human
gcccacaccuccu

SEQ ID NO: 1317657 - RNA, 21 nt, Human
gcccacaccuccuucccucuc

SEQ ID NO: 1317658 - RNA, 15 nt, Human
gcccaaaggacgcac

SEQ ID NO: 1317659 - RNA, 16 nt, Human
gcccaaaggacgcacu

SEQ ID NO: 1317660 - RNA, 21 nt, Human
gcccaaaggacgcacugagca

SEQ ID NO: 1317661 - RNA, 19 nt, Human
gcccaaaggacgcacugag

SEQ ID NO: 1317662 - RNA, 16 nt, Human
gcccacccccggcagc

SEQ ID NO: 1317663 - RNA, 20 nt, Human
gcccacccccggcagcagcc

SEQ ID NO: 1317664 - RNA, 22 nt, Human
gccaugggacagggaggacgcu

SEQ ID NO: 1317665 - RNA, 11 nt, Human
gccauuugaga

SEQ ID NO: 1317666 - RNA, 15 nt, Human
gccauuugcuuuuuc

SEQ ID NO: 1317667 - RNA, 14 nt, Human
gccauuuguacuga

SEQ ID NO: 1317668 - RNA, 19 nt, Human
gccaugggacagggaggac

SEQ ID NO: 1317669 - RNA, 14 nt, Human
gccaugggacaggg

SEQ ID NO: 1317670 - RNA, 17 nt, Human
gccauggccugcaaacu

SEQ ID NO: 1317671 - RNA, 18 nt, Human
gccauggccugcaaacug

SEQ ID NO: 1317672 - RNA, 21 nt, Human
gccauggccugcaaacuggga

SEQ ID NO: 1317673 - RNA, 23 nt, Human
gccauggccugcaaacugggaac

SEQ ID NO: 1317674 - RNA, 20 nt, Human
gccauggacucuguccugaa

SEQ ID NO: 1317675 - RNA, 21 nt, Human
gccauggacucuguccugaag

SEQ ID NO: 1317676 - RNA, 22 nt, Human
gccauggacucuguccugaagg

SEQ ID NO: 1317677 - RNA, 14 nt, Human
gccauggagaaagc

SEQ ID NO: 1317678 - RNA, 15 nt, Human
gccauggagaaagcu

SEQ ID NO: 1317679 - RNA, 16 nt, Human
gccauggagaaagcug

SEQ ID NO: 1317680 - RNA, 17 nt, Human
gccauggagaaagcuga

SEQ ID NO: 1317681 - RNA, 20 nt, Human
gccauggagaaagcugacuu

SEQ ID NO: 1317682 - RNA, 22 nt, Human
gccauggagaaagcugacuugg

SEQ ID NO: 1317683 - RNA, 21 nt, Human
gccauggagaaagcugacuug

SEQ ID NO: 1317684 - RNA, 19 nt, Human
gccaggaagaucccccaga

SEQ ID NO: 1317685 - RNA, 16 nt, Human
gccagggccccucucc

SEQ ID NO: 1317686 - RNA, 17 nt, Human
gccagggccccucuccc

SEQ ID NO: 1317687 - RNA, 18 nt, Human
gccagggccccucucccc

SEQ ID NO: 1317688 - RNA, 19 nt, Human
gccagggccccucucccca

SEQ ID NO: 1317689 - RNA, 20 nt, Human
gccagggccccucuccccag

SEQ ID NO: 1317690 - RNA, 22 nt, Human
gccagggccccucuccccaggg

SEQ ID NO: 1317691 - RNA, 23 nt, Human
gccagggccccucuccccaggga

SEQ ID NO: 1317692 - RNA, 20 nt, Human
gccagcuuguuuacaugcuu

SEQ ID NO: 1317693 - RNA, 23 nt, Human
gccagcuuguuuacaugcuuauu

SEQ ID NO: 1317694 - RNA, 15 nt, Human
gccagcuuucccugc

SEQ ID NO: 1317695 - RNA, 14 nt, Human
gccagcuuuucaaa

SEQ ID NO: 1317696 - RNA, 21 nt, Human
gccaggucacccuuugcugug

SEQ ID NO: 1317697 - RNA, 22 nt, Human
gccaggucacccuuugcuguga

SEQ ID NO: 1317698 - RNA, 14 nt, Human
gccaggucccucuc

SEQ ID NO: 1317699 - RNA, 21 nt, Human
gccaggugacugucuggggag

SEQ ID NO: 1317700 - RNA, 12 nt, Human
gccagucugugg

SEQ ID NO: 1317701 - RNA, 13 nt, Human
gccagucugugga

SEQ ID NO: 1317702 - RNA, 20 nt, Human
gccagucuguggaucagaga

SEQ ID NO: 1317703 - RNA, 13 nt, Human
gccagugacagac

SEQ ID NO: 1317704 - RNA, 18 nt, Human
gccagguggccacuccag

SEQ ID NO: 1317705 - RNA, 18 nt, Human
gccaggugaggucagcac

SEQ ID NO: 1317706 - RNA, 13 nt, Human
gccaggucccucu

SEQ ID NO: 1317707 - RNA, 14 nt, Human
gccaguccuguccu

SEQ ID NO: 1317708 - RNA, 17 nt, Human
gccagugaccaaccuuu

SEQ ID NO: 1317709 - RNA, 14 nt, Human
gccagugacagaca

SEQ ID NO: 1317710 - RNA, 17 nt, Human
gccaucccgucuucucc

SEQ ID NO: 1317711 - RNA, 10 nt, Human
gccagccccu

SEQ ID NO: 1317712 - RNA, 18 nt, Human
gccagcccugccuggagg

SEQ ID NO: 1317713 - RNA, 19 nt, Human
gccagcccugccuggagga

SEQ ID NO: 1317714 - RNA, 20 nt, Human
gccagcccugccuggaggac

SEQ ID NO: 1317715 - RNA, 23 nt, Human
gccagcccugccuggaggaccug

SEQ ID NO: 1317716 - RNA, 14 nt, Human
gccagccccuggcc

SEQ ID NO: 1317717 - RNA, 19 nt, Human
gccagccccuggccccagg

SEQ ID NO: 1317718 - RNA, 20 nt, Human
gccagccccuggccccagga

SEQ ID NO: 1317719 - RNA, 14 nt, Human
gccagccccugcca

SEQ ID NO: 1317720 - RNA, 19 nt, Human
gccagccccuuagacagag

SEQ ID NO: 1317721 - RNA, 22 nt, Human
gccagccccuuagacagaggcc

SEQ ID NO: 1317722 - RNA, 20 nt, Human
gccagccccuuagacagagg

SEQ ID NO: 1317723 - RNA, 10 nt, Human
gccagcccug

SEQ ID NO: 1317724 - RNA, 13 nt, Human
gccagcccugccu

SEQ ID NO: 1317725 - RNA, 14 nt, Human
gccagcccugccug

SEQ ID NO: 1317726 - RNA, 15 nt, Human
gccagcccugccugg

SEQ ID NO: 1317727 - RNA, 16 nt, Human
gccagcccugccugga

SEQ ID NO: 1317728 - RNA, 17 nt, Human
gccagcccugccuggag

SEQ ID NO: 1317729 - RNA, 22 nt, Human
gccagcgagcgcccagcuccug

SEQ ID NO: 1317730 - RNA, 20 nt, Human
gccagcgagcgcccagcucc

SEQ ID NO: 1317731 - RNA, 12 nt, Human
gccagcguccuc

SEQ ID NO: 1317732 - RNA, 13 nt, Human
gccagcguccucc

SEQ ID NO: 1317733 - RNA, 19 nt, Human
gccagcguccuccucugug

SEQ ID NO: 1317734 - RNA, 22 nt, Human
gccagcguccuccucugugacc

SEQ ID NO: 1317735 - RNA, 18 nt, Human
gccagcgucggucugugc

SEQ ID NO: 1317736 - RNA, 19 nt, Human
gccagcgucggucugugcc

SEQ ID NO: 1317737 - RNA, 20 nt, Human
gccagcgucggucugugccc

SEQ ID NO: 1317738 - RNA, 21 nt, Human
gccagcgucggucugugcccc

SEQ ID NO: 1317739 - RNA, 22 nt, Human
gccagcgucggucugugccccu

SEQ ID NO: 1317740 - RNA, 15 nt, Human
gccagcuaaggggug

SEQ ID NO: 1317741 - RNA, 16 nt, Human
gccagcuaaggggugg

SEQ ID NO: 1317742 - RNA, 22 nt, Human
gccagcuaagggguggggcugc

SEQ ID NO: 1317743 - RNA, 23 nt, Human
gccagcuacuuccuccuccccac

SEQ ID NO: 1317744 - RNA, 13 nt, Human
gccagcucuguau

SEQ ID NO: 1317745 - RNA, 15 nt, Human
gccagcucuguauca

SEQ ID NO: 1317746 - RNA, 14 nt, Human
gccagcuggaggca

SEQ ID NO: 1317747 - RNA, 17 nt, Human
gccagcuggaggcaggg

SEQ ID NO: 1317748 - RNA, 15 nt, Human
gccagcuggaggcag

SEQ ID NO: 1317749 - RNA, 20 nt, Human
gccagcugugguuuucuuuu

SEQ ID NO: 1317750 - RNA, 14 nt, Human
gccagcuuguuuac

SEQ ID NO: 1317751 - RNA, 15 nt, Human
gccagcuuguuuaca

SEQ ID NO: 1317752 - RNA, 16 nt, Human
gccagcuuguuuacau

SEQ ID NO: 1317753 - RNA, 17 nt, Human
gccagcuuguuuacaug

SEQ ID NO: 1317754 - RNA, 16 nt, Human
gccaaaggaugugaua

SEQ ID NO: 1317755 - RNA, 17 nt, Human
gccaaaggaugugauau

SEQ ID NO: 1317756 - RNA, 18 nt, Human
gccaaaggaugugauaua

SEQ ID NO: 1317757 - RNA, 18 nt, Human
gccaaaggggaccuggaa

SEQ ID NO: 1317758 - RNA, 20 nt, Human
gccaaaggggaccuggaagg

SEQ ID NO: 1317759 - RNA, 15 nt, Human
gccaaauauguccug

SEQ ID NO: 1317760 - RNA, 17 nt, Human
gccaaauauguccuggg

SEQ ID NO: 1317761 - RNA, 19 nt, Human
gccaaaggggaccuggaag

SEQ ID NO: 1317762 - RNA, 12 nt, Human
gccaaauuaaaa

SEQ ID NO: 1317763 - RNA, 14 nt, Human
gccaaauuaaaaaa

SEQ ID NO: 1317764 - RNA, 16 nt, Human
gccaaauuaaaaaaga

SEQ ID NO: 1317765 - RNA, 18 nt, Human
gccaaauuaaaaaagaua

SEQ ID NO: 1317766 - RNA, 21 nt, Human
gccaaauuaaaaaagauaaac

SEQ ID NO: 1317767 - RNA, 22 nt, Human
gccaaauuaaaaaagauaaaca

SEQ ID NO: 1317768 - RNA, 23 nt, Human
gccaaauuaaaaaagauaaacac

SEQ ID NO: 1317769 - RNA, 21 nt, Human
gccacguguuuagaccuagau

SEQ ID NO: 1317770 - RNA, 22 nt, Human
gccacguucuuacuaguuuccc

SEQ ID NO: 1317771 - RNA, 23 nt, Human
gccacguguuugugcuguggugu

SEQ ID NO: 1317772 - RNA, 22 nt, Human
gccacguuggagaagcccgugu

SEQ ID NO: 1317773 - RNA, 19 nt, Human
gccacuaaccuugccuggu

SEQ ID NO: 1317774 - RNA, 22 nt, Human
gccacuaaccuugccugguaca

SEQ ID NO: 1317775 - RNA, 23 nt, Human
gccacuaaccuugccugguacag

SEQ ID NO: 1317776 - RNA, 14 nt, Human
gccacucacuaggc

SEQ ID NO: 1317777 - RNA, 15 nt, Human
gccacucacuaggcc

SEQ ID NO: 1317778 - RNA, 18 nt, Human
gccacucacuaggccccc

SEQ ID NO: 1317779 - RNA, 19 nt, Human
gccacucacuaggccccca

SEQ ID NO: 1317780 - RNA, 23 nt, Human
gccacucacuaggcccccacuug

SEQ ID NO: 1317781 - RNA, 22 nt, Human
gccagagccaaggggcuucagg

SEQ ID NO: 1317782 - RNA, 12 nt, Human
gccagagccagg

SEQ ID NO: 1317783 - RNA, 14 nt, Human
gccagagccagggg

SEQ ID NO: 1317784 - RNA, 15 nt, Human
gccagagcccacucc

SEQ ID NO: 1317785 - RNA, 16 nt, Human
gccagagcccacucca

SEQ ID NO: 1317786 - RNA, 23 nt, Human
gccagagauccaaaagaagcccc

SEQ ID NO: 1317787 - RNA, 20 nt, Human
gccagagcccacuccaucug

SEQ ID NO: 1317788 - RNA, 23 nt, Human
gccagagcccacuccaucuggua

SEQ ID NO: 1317789 - RNA, 24 nt, Human
gccagagcccacuccaucugguag

SEQ ID NO: 1317790 - RNA, 12 nt, Human
gccagagccugg

SEQ ID NO: 1317791 - RNA, 13 nt, Human
gccagagccuggg

SEQ ID NO: 1317792 - RNA, 14 nt, Human
gccagagccugggg

SEQ ID NO: 1317793 - RNA, 15 nt, Human
gccagagccuggggc

SEQ ID NO: 1317794 - RNA, 19 nt, Human
gccagagccuggggcucua

SEQ ID NO: 1317795 - RNA, 16 nt, Human
gccagagccuggggcu

SEQ ID NO: 1317796 - RNA, 17 nt, Human
gccagagccuggggcuc

SEQ ID NO: 1317797 - RNA, 18 nt, Human
gccagagccuggggcucu

SEQ ID NO: 1317798 - RNA, 20 nt, Human
gccacugaggggggauccag

SEQ ID NO: 1317799 - RNA, 18 nt, Human
gccagagaacccagccca

SEQ ID NO: 1317800 - RNA, 17 nt, Human
gccagagaacccagccc

SEQ ID NO: 1317801 - RNA, 16 nt, Human
gccacuccagaccccu

SEQ ID NO: 1317802 - RNA, 18 nt, Human
gccacuccagaccccugg

SEQ ID NO: 1317803 - RNA, 19 nt, Human
gccacuccagaccccuggc

SEQ ID NO: 1317804 - RNA, 21 nt, Human
gcaggaguuucguuuucaaaa

SEQ ID NO: 1317805 - RNA, 20 nt, Human
gcaggaguuucguuuucaaa

SEQ ID NO: 1317806 - RNA, 14 nt, Human
gcaggaggggggag

SEQ ID NO: 1317807 - RNA, 15 nt, Human
gcaggaggggggagg

SEQ ID NO: 1317808 - RNA, 18 nt, Human
gcaggaggggggagggaa

SEQ ID NO: 1317809 - RNA, 14 nt, Human
gcaggaguagcuga

SEQ ID NO: 1317810 - RNA, 15 nt, Human
gcaggaguagcugag

SEQ ID NO: 1317811 - RNA, 16 nt, Human
gcaggaguagcugagc

SEQ ID NO: 1317812 - RNA, 17 nt, Human
gcaggaguagcugagcu

SEQ ID NO: 1317813 - RNA, 18 nt, Human
gcaggaguagcugagcuc

SEQ ID NO: 1317814 - RNA, 19 nt, Human
gcaggaguagcugagcuca

SEQ ID NO: 1317815 - RNA, 21 nt, Human
gcaggaguagcugagcucaca

SEQ ID NO: 1317816 - RNA, 15 nt, Human
gcaggagggaggugc

SEQ ID NO: 1317817 - RNA, 21 nt, Human
gcaggagcggcagauggggag

SEQ ID NO: 1317818 - RNA, 16 nt, Human
gcagcgaccgcccccu

SEQ ID NO: 1317819 - RNA, 17 nt, Human
gcagcgaccgcccccuc

SEQ ID NO: 1317820 - RNA, 18 nt, Human
gcagcgaccgcccccucc

SEQ ID NO: 1317821 - RNA, 22 nt, Human
gcagcgaccgcccccuccucua

SEQ ID NO: 1317822 - RNA, 15 nt, Human
gcagcgagccugcua

SEQ ID NO: 1317823 - RNA, 12 nt, Human
gcagcgagccug

SEQ ID NO: 1317824 - RNA, 13 nt, Human
gcagcgccaggcu

SEQ ID NO: 1317825 - RNA, 14 nt, Human
gcagcgccaggcug

SEQ ID NO: 1317826 - RNA, 20 nt, Human
gcaggaccuucgggcugugc

SEQ ID NO: 1317827 - RNA, 15 nt, Human
gcagccgugccuuca

SEQ ID NO: 1317828 - RNA, 17 nt, Human
gcagccgugccuucagc

SEQ ID NO: 1317829 - RNA, 12 nt, Human
gcagcagggcua

SEQ ID NO: 1317830 - RNA, 17 nt, Human
gcagcagggcuacccug

SEQ ID NO: 1317831 - RNA, 19 nt, Human
gcagcagggcuacccugag

SEQ ID NO: 1317832 - RNA, 20 nt, Human
gcagcagggcuacccugagc

SEQ ID NO: 1317833 - RNA, 13 nt, Human
gcagcagggguug

SEQ ID NO: 1317834 - RNA, 14 nt, Human
gcagcagggguugg

SEQ ID NO: 1317835 - RNA, 18 nt, Human
gcagccgugccuucagcu

SEQ ID NO: 1317836 - RNA, 23 nt, Human
gcagccugcgccaccgcccagag

SEQ ID NO: 1317837 - RNA, 14 nt, Human
gcagcgaccgcccc

SEQ ID NO: 1317838 - RNA, 16 nt, Human
gcagcaacaauaaaua

SEQ ID NO: 1317839 - RNA, 11 nt, Human
gcagcaacaau

SEQ ID NO: 1317840 - RNA, 15 nt, Human
gcagcaacuuguccu

SEQ ID NO: 1317841 - RNA, 16 nt, Human
gcagcaacuuguccua

SEQ ID NO: 1317842 - RNA, 18 nt, Human
gcagcaacuuguccuagc

SEQ ID NO: 1317843 - RNA, 19 nt, Human
gcagcaacuuguccuagca

SEQ ID NO: 1317844 - RNA, 22 nt, Human
gcagcaacuuguccuagcacag

SEQ ID NO: 1317845 - RNA, 16 nt, Human
gcagcaaggcccgagc

SEQ ID NO: 1317846 - RNA, 17 nt, Human
gcagcaaggcccgagca

SEQ ID NO: 1317847 - RNA, 22 nt, Human
gcagcaaggcccgagcagcuga

SEQ ID NO: 1317848 - RNA, 21 nt, Human
gcagcaaggcccgagcagcug

SEQ ID NO: 1317849 - RNA, 15 nt, Human
gcagcacagcugaga

SEQ ID NO: 1317850 - RNA, 15 nt, Human
gcagcacaggagggc

SEQ ID NO: 1317851 - RNA, 17 nt, Human
gcagcaccguucugugc

SEQ ID NO: 1317852 - RNA, 18 nt, Human
gcagcaccguucugugca

SEQ ID NO: 1317853 - RNA, 19 nt, Human
gcagcaccguucugugcac

SEQ ID NO: 1317854 - RNA, 15 nt, Human
gcagcaccuccucag

SEQ ID NO: 1317855 - RNA, 16 nt, Human
gcagcaccuccucagc

SEQ ID NO: 1317856 - RNA, 17 nt, Human
gcagcaccuccucagcc

SEQ ID NO: 1317857 - RNA, 18 nt, Human
gcagcaccuccucagccu

SEQ ID NO: 1317858 - RNA, 19 nt, Human
gcagcaccuccucagccug

SEQ ID NO: 1317859 - RNA, 20 nt, Human
gcagcaccuccucagccuga

SEQ ID NO: 1317860 - RNA, 13 nt, Human
gcagcaccugccc

SEQ ID NO: 1317861 - RNA, 14 nt, Human
gcagcaccugcccu

SEQ ID NO: 1317862 - RNA, 17 nt, Human
gcagcaccugcccuacc

SEQ ID NO: 1317863 - RNA, 21 nt, Human
gcagaguuacaguucuguggu

SEQ ID NO: 1317864 - RNA, 13 nt, Human
gcagaagcagcaa

SEQ ID NO: 1317865 - RNA, 17 nt, Human
gcagaguuacaguucug

SEQ ID NO: 1317866 - RNA, 18 nt, Human
gcagaguuacaguucugu

SEQ ID NO: 1317867 - RNA, 20 nt, Human
gcagaguuacaguucugugg

SEQ ID NO: 1317868 - RNA, 20 nt, Human
gcacagccucuuagaugcag

SEQ ID NO: 1317869 - RNA, 12 nt, Human
gcacagccuggc

SEQ ID NO: 1317870 - RNA, 19 nt, Human
gcacagccuggcuguggcc

SEQ ID NO: 1317871 - RNA, 15 nt, Human
gcacagcuaauucua

SEQ ID NO: 1317872 - RNA, 13 nt, Human
gcacagcuaugaa

SEQ ID NO: 1317873 - RNA, 16 nt, Human
gcacagcuaugaaggc

SEQ ID NO: 1317874 - RNA, 15 nt, Human
gcacagcuuagauuu

SEQ ID NO: 1317875 - RNA, 16 nt, Human
gcacagcuuagauuuc

SEQ ID NO: 1317876 - RNA, 17 nt, Human
gcacagcuuagauuuca

SEQ ID NO: 1317877 - RNA, 21 nt, Human
gcacaggacaugcgguagcca

SEQ ID NO: 1317878 - RNA, 22 nt, Human
gcacaggacaugcgguagccag

SEQ ID NO: 1317879 - RNA, 19 nt, Human
gcacagcuuagauuucaua

SEQ ID NO: 1317880 - RNA, 12 nt, Human
gcacaggagcua

SEQ ID NO: 1317881 - RNA, 15 nt, Human
gcacaggagcuaccu

SEQ ID NO: 1317882 - RNA, 16 nt, Human
gcacaggagcuaccug

SEQ ID NO: 1317883 - RNA, 21 nt, Human
gcacaggagcuaccugugugg

SEQ ID NO: 1317884 - RNA, 20 nt, Human
gcacaggagcuaccugugug

SEQ ID NO: 1317885 - RNA, 12 nt, Human
gcacaggagggg

SEQ ID NO: 1317886 - RNA, 21 nt, Human
gcacaggagggggucguggag

SEQ ID NO: 1317887 - RNA, 22 nt, Human
gcacaggagggggucguggaga

SEQ ID NO: 1317888 - RNA, 20 nt, Human
gcacaggaguguccucuucc

SEQ ID NO: 1317889 - RNA, 23 nt, Human
gcacaggagggggucguggagag

SEQ ID NO: 1317890 - RNA, 14 nt, Human
gcacaggcccccuu

SEQ ID NO: 1317891 - RNA, 16 nt, Human
gcacaggcuaauuuuu

SEQ ID NO: 1317892 - RNA, 15 nt, Human
gcacaggcuaauuuu

SEQ ID NO: 1317893 - RNA, 18 nt, Human
gcaccaccaagccaaggg

SEQ ID NO: 1317894 - RNA, 19 nt, Human
gcaccaccaugccaggcua

SEQ ID NO: 1317895 - RNA, 21 nt, Human
gcacccaucugucugccaacc

SEQ ID NO: 1317896 - RNA, 17 nt, Human
gcaccccaaagcuuucc

SEQ ID NO: 1317897 - RNA, 20 nt, Human
gcaccccaaagcuuuccugc

SEQ ID NO: 1317898 - RNA, 20 nt, Human
gcacuaacguugagccccug

SEQ ID NO: 1317899 - RNA, 17 nt, Human
gcacuacugacaugugg

SEQ ID NO: 1317900 - RNA, 18 nt, Human
gcacuacugacauguggg

SEQ ID NO: 1317901 - RNA, 17 nt, Human
gcacugaggaccagcca

SEQ ID NO: 1317902 - RNA, 13 nt, Human
gcacugaugcugc

SEQ ID NO: 1317903 - RNA, 15 nt, Human
gcacuagccaaaccu

SEQ ID NO: 1317904 - RNA, 17 nt, Human
gcacuagccaaaccuca

SEQ ID NO: 1317905 - RNA, 18 nt, Human
gcacuagccaaaccucac

SEQ ID NO: 1317906 - RNA, 20 nt, Human
gcacuagccaaaccucacca

SEQ ID NO: 1317907 - RNA, 21 nt, Human
gcacuagccaaaccucaccaa

SEQ ID NO: 1317908 - RNA, 15 nt, Human
gcaccugcugucugg

SEQ ID NO: 1317909 - RNA, 19 nt, Human
gcacuaacguugagccccu

SEQ ID NO: 1317910 - RNA, 12 nt, Human
gcaccugcuguc

SEQ ID NO: 1317911 - RNA, 23 nt, Human
gcaccugcugucuggguggcuca

SEQ ID NO: 1317912 - RNA, 21 nt, Human
gcaccugcccuaccugcccca

SEQ ID NO: 1317913 - RNA, 12 nt, Human
gcaccugccuca

SEQ ID NO: 1317914 - RNA, 13 nt, Human
gcaccugccucag

SEQ ID NO: 1317915 - RNA, 14 nt, Human
gcaccugccucagg

SEQ ID NO: 1317916 - RNA, 15 nt, Human
gcaccugccucagga

SEQ ID NO: 1317917 - RNA, 16 nt, Human
gcaccugccucaggac

SEQ ID NO: 1317918 - RNA, 18 nt, Human
gcacugaugcugccccuc

SEQ ID NO: 1317919 - RNA, 19 nt, Human
gcacugaugcugccccuca

SEQ ID NO: 1317920 - RNA, 22 nt, Human
gcacugaugcugccccucaucu

SEQ ID NO: 1317921 - RNA, 17 nt, Human
gcacugauguuguguuu

SEQ ID NO: 1317922 - RNA, 20 nt, Human
gcacugauguuguguuuuua

SEQ ID NO: 1317923 - RNA, 18 nt, Human
gcacugauguuguguuuu

SEQ ID NO: 1317924 - RNA, 13 nt, Human
gcacugccacugg

SEQ ID NO: 1317925 - RNA, 15 nt, Human
gcacuggggagcccg

SEQ ID NO: 1317926 - RNA, 18 nt, Human
gcacuggggagcccgucu

SEQ ID NO: 1317927 - RNA, 19 nt, Human
gcacuggggagcccgucuc

SEQ ID NO: 1317928 - RNA, 22 nt, Human
gcacuggggagcccgucucagu

SEQ ID NO: 1317929 - RNA, 23 nt, Human
gcacuggggagcccgucucagug

SEQ ID NO: 1317930 - RNA, 16 nt, Human
gcacuguaguucuaag

SEQ ID NO: 1317931 - RNA, 17 nt, Human
gcacuguaguucuaaga

SEQ ID NO: 1317932 - RNA, 18 nt, Human
gcacuguaguucuaagac

SEQ ID NO: 1317933 - RNA, 19 nt, Human
gcacuguaguucuaagacu

SEQ ID NO: 1317934 - RNA, 16 nt, Human
gcagaagcagcaacuu

SEQ ID NO: 1317935 - RNA, 14 nt, Human
gcagaagacaguau

SEQ ID NO: 1317936 - RNA, 17 nt, Human
gcacugucccuugccuc

SEQ ID NO: 1317937 - RNA, 18 nt, Human
gcacugucccuugccuca

SEQ ID NO: 1317938 - RNA, 23 nt, Human
gcacugucccuugccucaaugcc

SEQ ID NO: 1317939 - RNA, 11 nt, Human
gcaggucccua

SEQ ID NO: 1317940 - RNA, 10 nt, Human
gcaggucccu

SEQ ID NO: 1317941 - RNA, 22 nt, Human
gcaggggcuuccuggugcugga

SEQ ID NO: 1317942 - RNA, 18 nt, Human
gcaggggcuuccuggugc

SEQ ID NO: 1317943 - RNA, 14 nt, Human
gcagggggcugcug

SEQ ID NO: 1317944 - RNA, 15 nt, Human
gcagggggcugcugc

SEQ ID NO: 1317945 - RNA, 16 nt, Human
gcagggggcugcugcu

SEQ ID NO: 1317946 - RNA, 17 nt, Human
gcagggggcugcugcug

SEQ ID NO: 1317947 - RNA, 22 nt, Human
gcagggggcugcugcugggcuc

SEQ ID NO: 1317948 - RNA, 13 nt, Human
gcaggucccuaau

SEQ ID NO: 1317949 - RNA, 12 nt, Human
gcaggucccuaa

SEQ ID NO: 1317950 - RNA, 17 nt, Human
gcaggugcuggucccgg

SEQ ID NO: 1317951 - RNA, 13 nt, Human
gcagguggaucua

SEQ ID NO: 1317952 - RNA, 19 nt, Human
gcagguggaucuauuucau

SEQ ID NO: 1317953 - RNA, 20 nt, Human
gcagguggaucuauuucaug

SEQ ID NO: 1317954 - RNA, 21 nt, Human
gcagguggaucuauuucaugu

SEQ ID NO: 1317955 - RNA, 21 nt, Human
gcagguggccaaguuccucua

SEQ ID NO: 1317956 - RNA, 17 nt, Human
gcagguggggagacugg

SEQ ID NO: 1317957 - RNA, 21 nt, Human
gcagguggggagacugggcug

SEQ ID NO: 1317958 - RNA, 18 nt, Human
gcagguggccaaguuccu

SEQ ID NO: 1317959 - RNA, 17 nt, Human
gcaggaucucaccaggc

SEQ ID NO: 1317960 - RNA, 18 nt, Human
gcaggaucucaccaggca

SEQ ID NO: 1317961 - RNA, 19 nt, Human
gcaggaucucaccaggcag

SEQ ID NO: 1317962 - RNA, 20 nt, Human
gcaggaucucaccaggcagc

SEQ ID NO: 1317963 - RNA, 22 nt, Human
gcaggaucucaccaggcagccu

SEQ ID NO: 1317964 - RNA, 21 nt, Human
gcaggaucucaccaggcagcc

SEQ ID NO: 1317965 - RNA, 14 nt, Human
gcaggauugaaaau

SEQ ID NO: 1317966 - RNA, 22 nt, Human
gcaggauugaaaauguccagga

SEQ ID NO: 1317967 - RNA, 20 nt, Human
gcaggauuggggaagagagc

SEQ ID NO: 1317968 - RNA, 21 nt, Human
gcaggauuggggaagagagcc

SEQ ID NO: 1317969 - RNA, 14 nt, Human
gcagggagggccug

SEQ ID NO: 1317970 - RNA, 17 nt, Human
gcagggagggccugggc

SEQ ID NO: 1317971 - RNA, 14 nt, Human
gcaggcucccaggg

SEQ ID NO: 1317972 - RNA, 22 nt, Human
gcaggcucccagggacaccugg

SEQ ID NO: 1317973 - RNA, 18 nt, Human
gcagggagggccugggcc

SEQ ID NO: 1317974 - RNA, 22 nt, Human
gcagggagggccugggccccag

SEQ ID NO: 1317975 - RNA, 23 nt, Human
gcaggcucccagggacaccuggg

SEQ ID NO: 1317976 - RNA, 17 nt, Human
gcagggcgggcagaggg

SEQ ID NO: 1317977 - RNA, 18 nt, Human
gcagggcgggcagagggc

SEQ ID NO: 1317978 - RNA, 20 nt, Human
gcagggcgggcagagggcug

SEQ ID NO: 1317979 - RNA, 21 nt, Human
gcagggcgggcagagggcugg

SEQ ID NO: 1317980 - RNA, 17 nt, Human
gcagggcuacccugagc

SEQ ID NO: 1317981 - RNA, 20 nt, Human
gcagggcuacccugagcuga

SEQ ID NO: 1317982 - RNA, 21 nt, Human
gcagggcuacccugagcugag

SEQ ID NO: 1317983 - RNA, 22 nt, Human
gcagggcuacccugagcugagg

SEQ ID NO: 1317984 - RNA, 23 nt, Human
gcagggcuacccugagcugaggc

SEQ ID NO: 1317985 - RNA, 22 nt, Human
gcagggcgggcagagggcugga

SEQ ID NO: 1317986 - RNA, 13 nt, Human
gcaggggcuuccu

SEQ ID NO: 1317987 - RNA, 14 nt, Human
gcaggggcuuccug

SEQ ID NO: 1317988 - RNA, 15 nt, Human
gcaggggcuuccugg

SEQ ID NO: 1317989 - RNA, 13 nt, Human
gcaguucugaaga

SEQ ID NO: 1317990 - RNA, 14 nt, Human
gcaguucugaagaa

SEQ ID NO: 1317991 - RNA, 23 nt, Human
gcaguucgcagccacccugagga

SEQ ID NO: 1317992 - RNA, 22 nt, Human
gcaguucgcagccacccugagg

SEQ ID NO: 1317993 - RNA, 23 nt, Human
gcauauaagggaaguaguuauca

SEQ ID NO: 1317994 - RNA, 16 nt, Human
gcauauagauuguccu

SEQ ID NO: 1317995 - RNA, 19 nt, Human
gcauaggugauccauguaa

SEQ ID NO: 1317996 - RNA, 20 nt, Human
gcauaggugauccauguaac

SEQ ID NO: 1317997 - RNA, 14 nt, Human
gcauagcucugggg

SEQ ID NO: 1317998 - RNA, 15 nt, Human
gcauagcucuggggu

SEQ ID NO: 1317999 - RNA, 19 nt, Human
gcauaggaccuuuccacca

SEQ ID NO: 1318000 - RNA, 22 nt, Human
gcauagcuacuaaaaucaguga

SEQ ID NO: 1318001 - RNA, 18 nt, Human
gcauaggaguuuggagga

SEQ ID NO: 1318002 - RNA, 21 nt, Human
gcauaggaguuuggaggaagu

SEQ ID NO: 1318003 - RNA, 19 nt, Human
gcagugugaggccagggca

SEQ ID NO: 1318004 - RNA, 21 nt, Human
gcagugugaggccagggcaga

SEQ ID NO: 1318005 - RNA, 18 nt, Human
gcagugggaggguaccag

SEQ ID NO: 1318006 - RNA, 13 nt, Human
gcaguguuagcuu

SEQ ID NO: 1318007 - RNA, 14 nt, Human
gcaguguuagcuua

SEQ ID NO: 1318008 - RNA, 14 nt, Human
gcaguuaccauuaa

SEQ ID NO: 1318009 - RNA, 15 nt, Human
gcaguuaccauuaaa

SEQ ID NO: 1318010 - RNA, 19 nt, Human
gcaguuaccauuaaaccau

SEQ ID NO: 1318011 - RNA, 18 nt, Human
gcaguuaccauuaaacca

SEQ ID NO: 1318012 - RNA, 11 nt, Human
gcaguuauauu

SEQ ID NO: 1318013 - RNA, 13 nt, Human
gcaguuauauuuu

SEQ ID NO: 1318014 - RNA, 16 nt, Human
gcaguuauauuuugca

SEQ ID NO: 1318015 - RNA, 17 nt, Human
gcaguucgacucugugc

SEQ ID NO: 1318016 - RNA, 15 nt, Human
gcaguucgcagccac

SEQ ID NO: 1318017 - RNA, 16 nt, Human
gcaguucgcagccacc

SEQ ID NO: 1318018 - RNA, 17 nt, Human
gcaguucgcagccaccc

SEQ ID NO: 1318019 - RNA, 18 nt, Human
gcaguucgcagccacccu

SEQ ID NO: 1318020 - RNA, 19 nt, Human
gcaguucgcagccacccug

SEQ ID NO: 1318021 - RNA, 20 nt, Human
gcaguucgcagccacccuga

SEQ ID NO: 1318022 - RNA, 19 nt, Human
gcauauuuauaaaaauaaa

SEQ ID NO: 1318023 - RNA, 12 nt, Human
gcauauguugaa

SEQ ID NO: 1318024 - RNA, 14 nt, Human
gcauauguugaaua

SEQ ID NO: 1318025 - RNA, 17 nt, Human
gcauauguugaauacuu

SEQ ID NO: 1318026 - RNA, 15 nt, Human
gcauauaagggaagu

SEQ ID NO: 1318027 - RNA, 18 nt, Human
gcauauuauuuuauguug

SEQ ID NO: 1318028 - RNA, 18 nt, Human
gcauauguugaauacuuu

SEQ ID NO: 1318029 - RNA, 19 nt, Human
gcauauguugaauacuuuu

SEQ ID NO: 1318030 - RNA, 20 nt, Human
gcauauguugaauacuuuuu

SEQ ID NO: 1318031 - RNA, 21 nt, Human
gcauauguugaauacuuuuua

SEQ ID NO: 1318032 - RNA, 23 nt, Human
gcauauuauuuuauguugcauag

SEQ ID NO: 1318033 - RNA, 15 nt, Human
gcauuauaaaaagaa

SEQ ID NO: 1318034 - RNA, 15 nt, Human
gcauuagcuaaaacc

SEQ ID NO: 1318035 - RNA, 20 nt, Human
gcauuagauuucucauuugc

SEQ ID NO: 1318036 - RNA, 17 nt, Human
gcauuagaauuauuuaa

SEQ ID NO: 1318037 - RNA, 18 nt, Human
gcauuagaauuauuuaaa

SEQ ID NO: 1318038 - RNA, 18 nt, Human
gcauuagggaugccuccu

SEQ ID NO: 1318039 - RNA, 12 nt, Human
gcauuccagccc

SEQ ID NO: 1318040 - RNA, 15 nt, Human
gcauuccagccccuc

SEQ ID NO: 1318041 - RNA, 16 nt, Human
gcauuccagccccucu

SEQ ID NO: 1318042 - RNA, 19 nt, Human
gcauuccagccccucuggu

SEQ ID NO: 1318043 - RNA, 12 nt, Human
gcauucccaggu

SEQ ID NO: 1318044 - RNA, 13 nt, Human
gcauucccaggua

SEQ ID NO: 1318045 - RNA, 22 nt, Human
gcauguuuagacuuuaacauaa

SEQ ID NO: 1318046 - RNA, 16 nt, Human
gcauguuuagacuuua

SEQ ID NO: 1318047 - RNA, 14 nt, Human
gcauuacugcaugc

SEQ ID NO: 1318048 - RNA, 17 nt, Human
gcauuacugcaugcacu

SEQ ID NO: 1318049 - RNA, 15 nt, Human
gcauuagaauuauuu

SEQ ID NO: 1318050 - RNA, 23 nt, Human
gcauggaaauucccuucaucugg

SEQ ID NO: 1318051 - RNA, 11 nt, Human
gcauggaaauu

SEQ ID NO: 1318052 - RNA, 17 nt, Human
gcauggaaauuuaaagc

SEQ ID NO: 1318053 - RNA, 19 nt, Human
gcauggaaauuuaaagcag

SEQ ID NO: 1318054 - RNA, 23 nt, Human
gcauggaaauuuaaagcagguuc

SEQ ID NO: 1318055 - RNA, 21 nt, Human
gcauggaaggcaagauugugu

SEQ ID NO: 1318056 - RNA, 16 nt, Human
gcauggaacacuucga

SEQ ID NO: 1318057 - RNA, 14 nt, Human
gcauggacaaugga

SEQ ID NO: 1318058 - RNA, 18 nt, Human
gcauggacaauggaccgg

SEQ ID NO: 1318059 - RNA, 21 nt, Human
gcauggacaauggaccggaga

SEQ ID NO: 1318060 - RNA, 17 nt, Human
gcauguugucuaagaaa

SEQ ID NO: 1318061 - RNA, 15 nt, Human
gcaugccuucaaauc

SEQ ID NO: 1318062 - RNA, 20 nt, Human
gcaugcccagagacccagcg

SEQ ID NO: 1318063 - RNA, 17 nt, Human
gcaugcuggugagccaa

SEQ ID NO: 1318064 - RNA, 17 nt, Human
gcaugaauuugugaagg

SEQ ID NO: 1318065 - RNA, 15 nt, Human
gcaugaauuuguaau

SEQ ID NO: 1318066 - RNA, 22 nt, Human
gcaugaauuuguaaugucuuga

SEQ ID NO: 1318067 - RNA, 16 nt, Human
gcaugcacuguucccc

SEQ ID NO: 1318068 - RNA, 17 nt, Human
gcaugcacuguuccccc

SEQ ID NO: 1318069 - RNA, 21 nt, Human
gcaugcacuguucccccugug

SEQ ID NO: 1318070 - RNA, 22 nt, Human
gcaugcacuguucccccugugc

SEQ ID NO: 1318071 - RNA, 23 nt, Human
gcaugcacuguucccccugugca

SEQ ID NO: 1318072 - RNA, 12 nt, Human
gcaugcaguguu

SEQ ID NO: 1318073 - RNA, 12 nt, Human
gcaugcccagag

SEQ ID NO: 1318074 - RNA, 18 nt, Human
gcaugcccagagacccag

SEQ ID NO: 1318075 - RNA, 19 nt, Human
gcaugcccagagacccagc

SEQ ID NO: 1318076 - RNA, 15 nt, Human
gcaugaauuugugaa

SEQ ID NO: 1318077 - RNA, 17 nt, Human
gcauuuuacuguacaga

SEQ ID NO: 1318078 - RNA, 16 nt, Human
gcauuuuacuguacag

SEQ ID NO: 1318079 - RNA, 15 nt, Human
gcauuuggguccagg

SEQ ID NO: 1318080 - RNA, 16 nt, Human
gcauuuggguccagga

SEQ ID NO: 1318081 - RNA, 17 nt, Human
gcauuuggguccaggag

SEQ ID NO: 1318082 - RNA, 18 nt, Human
gcauuuggguccaggagg

SEQ ID NO: 1318083 - RNA, 17 nt, Human
gcauuuguuuuguuuac

SEQ ID NO: 1318084 - RNA, 19 nt, Human
gcauuggaacuggaggcag

SEQ ID NO: 1318085 - RNA, 16 nt, Human
gcauuggaacuggagg

SEQ ID NO: 1318086 - RNA, 12 nt, Human
gcauuggauauu

SEQ ID NO: 1318087 - RNA, 18 nt, Human
gcauuggauauuuuuuac

SEQ ID NO: 1318088 - RNA, 21 nt, Human
gcauucccagguaggccaagg

SEQ ID NO: 1318089 - RNA, 20 nt, Human
gcauucccagguaggccaag

SEQ ID NO: 1318090 - RNA, 13 nt, Human
gcauucucacucc

SEQ ID NO: 1318091 - RNA, 15 nt, Human
gcauucucacuccua

SEQ ID NO: 1318092 - RNA, 13 nt, Human
gcauucuaguacu

SEQ ID NO: 1318093 - RNA, 18 nt, Human
gcauucucacuccuaccu

SEQ ID NO: 1318094 - RNA, 18 nt, Human
gcauucucauuggaaauu

SEQ ID NO: 1318095 - RNA, 20 nt, Human
gcauucucauuggaaauuua

SEQ ID NO: 1318096 - RNA, 14 nt, Human
gcauugccaagggc

SEQ ID NO: 1318097 - RNA, 16 nt, Human
gcauugccaagggcuu

SEQ ID NO: 1318098 - RNA, 22 nt, Human
gcauuuuggagaguuuccugaa

SEQ ID NO: 1318099 - RNA, 23 nt, Human
gcauuuuggagaguuuccugaaa

SEQ ID NO: 1318100 - RNA, 18 nt, Human
gcauuuucugcaucucca

SEQ ID NO: 1318101 - RNA, 17 nt, Human
gcauuuucugcaucucc

SEQ ID NO: 1318102 - RNA, 22 nt, Human
gcauuuuguaaguugaagcaaa

SEQ ID NO: 1318103 - RNA, 12 nt, Human
gcauuuuguaau

SEQ ID NO: 1318104 - RNA, 23 nt, Human
gccaaaacaauguuuaaaccuuu

SEQ ID NO: 1318105 - RNA, 23 nt, Human
gccaaacaaaaagguucucaggu

SEQ ID NO: 1318106 - RNA, 18 nt, Human
gccaaaccaggacccugu

SEQ ID NO: 1318107 - RNA, 21 nt, Human
gccaaaccaggacccugucca

SEQ ID NO: 1318108 - RNA, 21 nt, Human
gccaaagaaccaaagaagaaa

SEQ ID NO: 1318109 - RNA, 19 nt, Human
gaguguuccccuuccacug

SEQ ID NO: 1318110 - RNA, 13 nt, Human
gaguguucccuau

SEQ ID NO: 1318111 - RNA, 21 nt, Human
gaguucagaguccuuaaaaug

SEQ ID NO: 1318112 - RNA, 13 nt, Human
gacuucccugugu

SEQ ID NO: 1318113 - RNA, 18 nt, Human
gacuuccuguccagcucc

SEQ ID NO: 1318114 - RNA, 19 nt, Human
gacuuccuguccagcucca

SEQ ID NO: 1318115 - RNA, 20 nt, Human
gacuuccuguccagcuccaa

SEQ ID NO: 1318116 - RNA, 21 nt, Human
gacuuccuguccagcuccaac

SEQ ID NO: 1318117 - RNA, 22 nt, Human
gacuuccuguccagcuccaacc

SEQ ID NO: 1318118 - RNA, 18 nt, Human
gacuucccacggcuccuc

SEQ ID NO: 1318119 - RNA, 12 nt, Human
gacuucauccca

SEQ ID NO: 1318120 - RNA, 12 nt, Human
gacuucccagcu

SEQ ID NO: 1318121 - RNA, 13 nt, Human
gacuucccagcua

SEQ ID NO: 1318122 - RNA, 18 nt, Human
gacuucccagcuaggaag

SEQ ID NO: 1318123 - RNA, 24 nt, Human
gacuucaucucccaccuagcagca

SEQ ID NO: 1318124 - RNA, 16 nt, Human
gauaaccuugaaaaaa

SEQ ID NO: 1318125 - RNA, 13 nt, Human
gauaaaagauggc

SEQ ID NO: 1318126 - RNA, 16 nt, Human
gaguucucccuguaca

SEQ ID NO: 1318127 - RNA, 22 nt, Human
gaguucucccuguacaguguua

SEQ ID NO: 1318128 - RNA, 13 nt, Human
gauaaacaguagu

SEQ ID NO: 1318129 - RNA, 16 nt, Human
gauaaaagauggccau

SEQ ID NO: 1318130 - RNA, 14 nt, Human
gauaaacacaagau

SEQ ID NO: 1318131 - RNA, 15 nt, Human
gauaaacacaagauu

SEQ ID NO: 1318132 - RNA, 22 nt, Human
gauaaacacaagauugguguuu

SEQ ID NO: 1318133 - RNA, 14 nt, Human
gauaaagagacagu

SEQ ID NO: 1318134 - RNA, 23 nt, Human
gaucaccgacugaaaauauuguu

SEQ ID NO: 1318135 - RNA, 16 nt, Human
gaucacauguggacuu

SEQ ID NO: 1318136 - RNA, 16 nt, Human
gauaucaugcaaauuu

SEQ ID NO: 1318137 - RNA, 20 nt, Human
gauauaucaugagugaauaa

SEQ ID NO: 1318138 - RNA, 23 nt, Human
gauaucgacuuguuuuugcacau

SEQ ID NO: 1318139 - RNA, 13 nt, Human
gauaucucaucuc

SEQ ID NO: 1318140 - RNA, 14 nt, Human
gauaucucaucucu

SEQ ID NO: 1318141 - RNA, 17 nt, Human
gaucaggaagagaagga

SEQ ID NO: 1318142 - RNA, 18 nt, Human
gaucaggaagagaaggag

SEQ ID NO: 1318143 - RNA, 16 nt, Human
gaucaggaagagaagg

SEQ ID NO: 1318144 - RNA, 15 nt, Human
gaucaggaagagaag

SEQ ID NO: 1318145 - RNA, 12 nt, Human
gaucaggaagag

SEQ ID NO: 1318146 - RNA, 23 nt, Human
gaucagcuuauugucuagugaaa

SEQ ID NO: 1318147 - RNA, 13 nt, Human
gaucagcguggcc

SEQ ID NO: 1318148 - RNA, 15 nt, Human
gaucagcguggccuu

SEQ ID NO: 1318149 - RNA, 16 nt, Human
gaucagcguggccuug

SEQ ID NO: 1318150 - RNA, 17 nt, Human
gaucagcguggccuugu

SEQ ID NO: 1318151 - RNA, 17 nt, Human
gauaggucagugcaaau

SEQ ID NO: 1318152 - RNA, 13 nt, Human
gauaggccagccg

SEQ ID NO: 1318153 - RNA, 19 nt, Human
gauaggaagaaagaagaca

SEQ ID NO: 1318154 - RNA, 18 nt, Human
gauaauucuagcuuugag

SEQ ID NO: 1318155 - RNA, 18 nt, Human
gauaauuuuaaauucucu

SEQ ID NO: 1318156 - RNA, 12 nt, Human
gauaauuuuaaa

SEQ ID NO: 1318157 - RNA, 12 nt, Human
gauaauagauuc

SEQ ID NO: 1318158 - RNA, 13 nt, Human
gauaauagauucu

SEQ ID NO: 1318159 - RNA, 14 nt, Human
gauaauagauucuc

SEQ ID NO: 1318160 - RNA, 14 nt, Human
gauaauuauaauau

SEQ ID NO: 1318161 - RNA, 14 nt, Human
gauaguuuucaucc

SEQ ID NO: 1318162 - RNA, 22 nt, Human
gauaguuuucauccauaacuga

SEQ ID NO: 1318163 - RNA, 23 nt, Human
gauaguuuucauccauaacugaa

SEQ ID NO: 1318164 - RNA, 21 nt, Human
gauauaucaugagugaauaaa

SEQ ID NO: 1318165 - RNA, 19 nt, Human
gauauaguuuuacuuuuaa

SEQ ID NO: 1318166 - RNA, 21 nt, Human
gauauaguuuuacuuuuaaac

SEQ ID NO: 1318167 - RNA, 24 nt, Human
gauauaguuuuacuuuuaaacugu

SEQ ID NO: 1318168 - RNA, 15 nt, Human
gauauauaaguguac

SEQ ID NO: 1318169 - RNA, 17 nt, Human
gauauauaaguguacau

SEQ ID NO: 1318170 - RNA, 18 nt, Human
gaugcaguucugaagaag

SEQ ID NO: 1318171 - RNA, 15 nt, Human
gaugcacuucaaauu

SEQ ID NO: 1318172 - RNA, 22 nt, Human
gaugcacuucaaauucaaauaa

SEQ ID NO: 1318173 - RNA, 21 nt, Human
gaugcacuuugcuuuaauaua

SEQ ID NO: 1318174 - RNA, 23 nt, Human
gaugcacuuugcuuuaauauaaa

SEQ ID NO: 1318175 - RNA, 22 nt, Human
gaugcacuuugcuuuaauauaa

SEQ ID NO: 1318176 - RNA, 14 nt, Human
gaugcagcucaaga

SEQ ID NO: 1318177 - RNA, 15 nt, Human
gaugcagcuuauacg

SEQ ID NO: 1318178 - RNA, 14 nt, Human
gaugcagcuuauac

SEQ ID NO: 1318179 - RNA, 14 nt, Human
gaugcagggcaguc

SEQ ID NO: 1318180 - RNA, 15 nt, Human
gaugcagggcaguca

SEQ ID NO: 1318181 - RNA, 15 nt, Human
gaucuguccucagcc

SEQ ID NO: 1318182 - RNA, 16 nt, Human
gaucuguccucagccu

SEQ ID NO: 1318183 - RNA, 17 nt, Human
gaucuguccucagccuu

SEQ ID NO: 1318184 - RNA, 18 nt, Human
gaucuguccucagccuug

SEQ ID NO: 1318185 - RNA, 14 nt, Human
gaucuguccucagc

SEQ ID NO: 1318186 - RNA, 13 nt, Human
gaucugucugugg

SEQ ID NO: 1318187 - RNA, 16 nt, Human
gaugaaauguaaauac

SEQ ID NO: 1318188 - RNA, 17 nt, Human
gaugaaauuccauuugu

SEQ ID NO: 1318189 - RNA, 22 nt, Human
gaugaaguuuuacauuguugag

SEQ ID NO: 1318190 - RNA, 23 nt, Human
gaugaaguuuuacauuguugagc

SEQ ID NO: 1318191 - RNA, 13 nt, Human
gaugaaugagaau

SEQ ID NO: 1318192 - RNA, 15 nt, Human
gaugaaugccgugga

SEQ ID NO: 1318193 - RNA, 16 nt, Human
gaugaaugccguggau

SEQ ID NO: 1318194 - RNA, 14 nt, Human
gaugaccacuuuuu

SEQ ID NO: 1318195 - RNA, 15 nt, Human
gaugacccuuuucau

SEQ ID NO: 1318196 - RNA, 17 nt, Human
gaugacccuuuucauga

SEQ ID NO: 1318197 - RNA, 20 nt, Human
gaucuacuucuguaauugug

SEQ ID NO: 1318198 - RNA, 14 nt, Human
gauccuggaaauca

SEQ ID NO: 1318199 - RNA, 12 nt, Human
gauccuggaggc

SEQ ID NO: 1318200 - RNA, 15 nt, Human
gauccuggaggccca

SEQ ID NO: 1318201 - RNA, 16 nt, Human
gauccuggaggcccag

SEQ ID NO: 1318202 - RNA, 17 nt, Human
gauccuggaggcccagu

SEQ ID NO: 1318203 - RNA, 20 nt, Human
gauccuguauucagacagau

SEQ ID NO: 1318204 - RNA, 19 nt, Human
gauccuguguggagaggga

SEQ ID NO: 1318205 - RNA, 22 nt, Human
gauccuccugcagaccacgccc

SEQ ID NO: 1318206 - RNA, 16 nt, Human
gauccucccaggcuuc

SEQ ID NO: 1318207 - RNA, 12 nt, Human
gauccuccucau

SEQ ID NO: 1318208 - RNA, 15 nt, Human
gauccuccugcagac

SEQ ID NO: 1318209 - RNA, 16 nt, Human
gauccuccugcagacc

SEQ ID NO: 1318210 - RNA, 21 nt, Human
gauccuccugcagaccacgcc

SEQ ID NO: 1318211 - RNA, 23 nt, Human
gauccuaaugaaugcauaaaaug

SEQ ID NO: 1318212 - RNA, 15 nt, Human
gauccuagauccuaa

SEQ ID NO: 1318213 - RNA, 14 nt, Human
gauccgacugcuuu

SEQ ID NO: 1318214 - RNA, 17 nt, Human
gauccgacugcuuugga

SEQ ID NO: 1318215 - RNA, 18 nt, Human
gauccgacugcuuuggac

SEQ ID NO: 1318216 - RNA, 20 nt, Human
gauccgacugcuuuggaccu

SEQ ID NO: 1318217 - RNA, 14 nt, Human
gauccggaaagaag

SEQ ID NO: 1318218 - RNA, 16 nt, Human
gauccuaagcaucuaa

SEQ ID NO: 1318219 - RNA, 19 nt, Human
gauccuaagcaucuaaguu

SEQ ID NO: 1318220 - RNA, 13 nt, Human
gaucauaaggcuu

SEQ ID NO: 1318221 - RNA, 17 nt, Human
gaucauaaggcuucaaa

SEQ ID NO: 1318222 - RNA, 14 nt, Human
gaucccucaucugu

SEQ ID NO: 1318223 - RNA, 18 nt, Human
gaucccucaucugucccu

SEQ ID NO: 1318224 - RNA, 13 nt, Human
gaucccucccccc

SEQ ID NO: 1318225 - RNA, 19 nt, Human
gaucccucccccccaugca

SEQ ID NO: 1318226 - RNA, 21 nt, Human
gaucccucccccccaugcacu

SEQ ID NO: 1318227 - RNA, 23 nt, Human
gaucccucccccccaugcacugu

SEQ ID NO: 1318228 - RNA, 23 nt, Human
gaucccucuacagagcuucccug

SEQ ID NO: 1318229 - RNA, 14 nt, Human
gaucccuguguugu

SEQ ID NO: 1318230 - RNA, 18 nt, Human
gaucccuguguugucucu

SEQ ID NO: 1318231 - RNA, 19 nt, Human
gaucccuguguugucucua

SEQ ID NO: 1318232 - RNA, 20 nt, Human
gaucccuguguugucucuag

SEQ ID NO: 1318233 - RNA, 21 nt, Human
gaucccuguguugucucuaga

SEQ ID NO: 1318234 - RNA, 24 nt, Human
gaucccuguguugucucuagagca

SEQ ID NO: 1318235 - RNA, 16 nt, Human
gauugggaauccgccc

SEQ ID NO: 1318236 - RNA, 16 nt, Human
gauuguuacagaagcu

SEQ ID NO: 1318237 - RNA, 15 nt, Human
gauuguuccugcuuu

SEQ ID NO: 1318238 - RNA, 11 nt, Human
gauuguuugca

SEQ ID NO: 1318239 - RNA, 16 nt, Human
gauuuaaaagccugcu

SEQ ID NO: 1318240 - RNA, 18 nt, Human
gauuuaaaagccugcuca

SEQ ID NO: 1318241 - RNA, 20 nt, Human
gauuucauguacugcauuau

SEQ ID NO: 1318242 - RNA, 19 nt, Human
gauuucauguacugcauua

SEQ ID NO: 1318243 - RNA, 20 nt, Human
gauuucauuucaacuguuug

SEQ ID NO: 1318244 - RNA, 16 nt, Human
gauuucauguacugca

SEQ ID NO: 1318245 - RNA, 13 nt, Human
gauuucauguacu

SEQ ID NO: 1318246 - RNA, 12 nt, Human
gauuucauguac

SEQ ID NO: 1318247 - RNA, 13 nt, Human
gauuucaugauuu

SEQ ID NO: 1318248 - RNA, 16 nt, Human
gauuucaugcuaucuc

SEQ ID NO: 1318249 - RNA, 18 nt, Human
gauuucaugcuaucucug

SEQ ID NO: 1318250 - RNA, 20 nt, Human
gauuucaugcuaucucugug

SEQ ID NO: 1318251 - RNA, 21 nt, Human
gauuucauguacugcauuauu

SEQ ID NO: 1318252 - RNA, 21 nt, Human
gauuucauuucaacuguuugc

SEQ ID NO: 1318253 - RNA, 17 nt, Human
gauuucuuugaaaaaaa

SEQ ID NO: 1318254 - RNA, 14 nt, Human
gauuucuuugaaaa

SEQ ID NO: 1318255 - RNA, 18 nt, Human
gauuugaagaacauguga

SEQ ID NO: 1318256 - RNA, 16 nt, Human
gauuuguuuuuaaacu

SEQ ID NO: 1318257 - RNA, 16 nt, Human
gauugcugccccauca

SEQ ID NO: 1318258 - RNA, 20 nt, Human
gauugcugccccaucagugc

SEQ ID NO: 1318259 - RNA, 11 nt, Human
gauuggccugu

SEQ ID NO: 1318260 - RNA, 16 nt, Human
gauuggccuguagagu

SEQ ID NO: 1318261 - RNA, 23 nt, Human
gauuggccuguagaguugcugag

SEQ ID NO: 1318262 - RNA, 20 nt, Human
gauuggccuguagaguugcu

SEQ ID NO: 1318263 - RNA, 21 nt, Human
gauugcugccccaucagugcu

SEQ ID NO: 1318264 - RNA, 22 nt, Human
gauuaaguaaugauaacuggaa

SEQ ID NO: 1318265 - RNA, 14 nt, Human
gauuaaguaaugau

SEQ ID NO: 1318266 - RNA, 18 nt, Human
gauguucuggauaccauu

SEQ ID NO: 1318267 - RNA, 19 nt, Human
gauguuuauucuucuagag

SEQ ID NO: 1318268 - RNA, 21 nt, Human
gauguuuauucuucuagaguu

SEQ ID NO: 1318269 - RNA, 23 nt, Human
gauguuuauucuucuagaguuca

SEQ ID NO: 1318270 - RNA, 20 nt, Human
gaugccugugaacugaacuc

SEQ ID NO: 1318271 - RNA, 22 nt, Human
gaugcagugccaggaacccuua

SEQ ID NO: 1318272 - RNA, 16 nt, Human
gaugcuagaacucccu

SEQ ID NO: 1318273 - RNA, 22 nt, Human
gauguucuauuuuuuguuuugu

SEQ ID NO: 1318274 - RNA, 13 nt, Human
gauguucuaaggc

SEQ ID NO: 1318275 - RNA, 13 nt, Human
gaugcuaaaaccu

SEQ ID NO: 1318276 - RNA, 14 nt, Human
gaugcuaaaaccug

SEQ ID NO: 1318277 - RNA, 23 nt, Human
gaugcuaagagaaaaaaaagacu

SEQ ID NO: 1318278 - RNA, 14 nt, Human
gauguucuaaggcu

SEQ ID NO: 1318279 - RNA, 16 nt, Human
gauguucuaaggcucu

SEQ ID NO: 1318280 - RNA, 18 nt, Human
gauguucuaaggcucuga

SEQ ID NO: 1318281 - RNA, 19 nt, Human
gauguucuaaggcucugag

SEQ ID NO: 1318282 - RNA, 19 nt, Human
gauguucuaagucuuucca

SEQ ID NO: 1318283 - RNA, 20 nt, Human
gauguucuaaggcucugaga

SEQ ID NO: 1318284 - RNA, 16 nt, Human
gauuacaaaucagaag

SEQ ID NO: 1318285 - RNA, 17 nt, Human
gauuacaaaucagaagu

SEQ ID NO: 1318286 - RNA, 19 nt, Human
gauuacaaaucagaaguca

SEQ ID NO: 1318287 - RNA, 20 nt, Human
gauuacaaaucagaagucau

SEQ ID NO: 1318288 - RNA, 21 nt, Human
gauuacaaaucagaagucauc

SEQ ID NO: 1318289 - RNA, 23 nt, Human
gauuacaaaucagaagucaucuu

SEQ ID NO: 1318290 - RNA, 18 nt, Human
gauuccaaagaguagaau

SEQ ID NO: 1318291 - RNA, 19 nt, Human
gauuccaaagaguagaauu

SEQ ID NO: 1318292 - RNA, 23 nt, Human
gauuccaaagaguagaauugcau

SEQ ID NO: 1318293 - RNA, 21 nt, Human
gauucaugccaauuagcaauu

SEQ ID NO: 1318294 - RNA, 19 nt, Human
gauucauuuuaacaucuga

SEQ ID NO: 1318295 - RNA, 17 nt, Human
gauucaggaaaaggccu

SEQ ID NO: 1318296 - RNA, 18 nt, Human
gauucaggaaaaggccug

SEQ ID NO: 1318297 - RNA, 19 nt, Human
gauucaggaaaaggccugg

SEQ ID NO: 1318298 - RNA, 20 nt, Human
gauucaggaaaaggccuggg

SEQ ID NO: 1318299 - RNA, 21 nt, Human
gauucaggaaaaggccugggg

SEQ ID NO: 1318300 - RNA, 22 nt, Human
gauucaggaaaaggccuggggu

SEQ ID NO: 1318301 - RNA, 23 nt, Human
gauucaggaaaaggccuggggug

SEQ ID NO: 1318302 - RNA, 22 nt, Human
gauucagggaaagugggacagc

SEQ ID NO: 1318303 - RNA, 20 nt, Human
gauucaguguuaaaugugau

SEQ ID NO: 1318304 - RNA, 15 nt, Human
gauucaguuuucauu

SEQ ID NO: 1318305 - RNA, 22 nt, Human
gauucaguuuucauuugguuca

SEQ ID NO: 1318306 - RNA, 16 nt, Human
gauucauaguaacuuc

SEQ ID NO: 1318307 - RNA, 15 nt, Human
gauucagggaaagug

SEQ ID NO: 1318308 - RNA, 23 nt, Human
gcaauccucccacuucagccucc

SEQ ID NO: 1318309 - RNA, 20 nt, Human
gcaauccucccacuucagcc

SEQ ID NO: 1318310 - RNA, 18 nt, Human
gcaagguccggcccaucc

SEQ ID NO: 1318311 - RNA, 22 nt, Human
gcaaucugacccuaugggucua

SEQ ID NO: 1318312 - RNA, 14 nt, Human
gcaaugaacacuua

SEQ ID NO: 1318313 - RNA, 21 nt, Human
gcaagggaauuucuucaacuc

SEQ ID NO: 1318314 - RNA, 17 nt, Human
gcaagcauucagaagaa

SEQ ID NO: 1318315 - RNA, 18 nt, Human
gcaagcauucagaagaaa

SEQ ID NO: 1318316 - RNA, 17 nt, Human
gcaagcugauuaaauga

SEQ ID NO: 1318317 - RNA, 19 nt, Human
gcaagcugauuaaaugaca

SEQ ID NO: 1318318 - RNA, 17 nt, Human
gcaagcuggcggcuggg

SEQ ID NO: 1318319 - RNA, 23 nt, Human
gcaagcuuaauggcugauaauuu

SEQ ID NO: 1318320 - RNA, 16 nt, Human
gcaaggaaaaacaggu

SEQ ID NO: 1318321 - RNA, 23 nt, Human
gcaagauggggagugagaggcug

SEQ ID NO: 1318322 - RNA, 14 nt, Human
gcaagauugugucc

SEQ ID NO: 1318323 - RNA, 22 nt, Human
gcaacuuuguauaaaagggacu

SEQ ID NO: 1318324 - RNA, 21 nt, Human
gcaacuuguccuagcacagau

SEQ ID NO: 1318325 - RNA, 19 nt, Human
gcaacuuguccuagcacag

SEQ ID NO: 1318326 - RNA, 20 nt, Human
gcaacuuguccuagcacaga

SEQ ID NO: 1318327 - RNA, 22 nt, Human
gcaacuuguccuagcacagaug

SEQ ID NO: 1318328 - RNA, 18 nt, Human
gcaagcaagaaacacugg

SEQ ID NO: 1318329 - RNA, 14 nt, Human
gcaagcaagaggcc

SEQ ID NO: 1318330 - RNA, 15 nt, Human
gcaagcaagaggccg

SEQ ID NO: 1318331 - RNA, 15 nt, Human
gcaagcacagcccuu

SEQ ID NO: 1318332 - RNA, 23 nt, Human
gcaagcaagaggccguggcugcu

SEQ ID NO: 1318333 - RNA, 18 nt, Human
gcaaacuuuauuuugugu

SEQ ID NO: 1318334 - RNA, 22 nt, Human
gcaaacugcaugcccagagacc

SEQ ID NO: 1318335 - RNA, 19 nt, Human
gcaaacugcaugcccagag

SEQ ID NO: 1318336 - RNA, 17 nt, Human
gcaaacugggaaccccu

SEQ ID NO: 1318337 - RNA, 23 nt, Human
gcaaacugggaaccccuuuccca

SEQ ID NO: 1318338 - RNA, 10 nt, Human
gcaaacucuu

SEQ ID NO: 1318339 - RNA, 20 nt, Human
gcaaacucuuuggucguuuu

SEQ ID NO: 1318340 - RNA, 22 nt, Human
gcaaacucuuuggucguuuuuu

SEQ ID NO: 1318341 - RNA, 23 nt, Human
gcaaacucuuuggucguuuuuuu

SEQ ID NO: 1318342 - RNA, 13 nt, Human
gcaaacugcaugc

SEQ ID NO: 1318343 - RNA, 14 nt, Human
gcaaacugcaugcc

SEQ ID NO: 1318344 - RNA, 15 nt, Human
gcaaacugcaugccc

SEQ ID NO: 1318345 - RNA, 16 nt, Human
gcaaacugcaugccca

SEQ ID NO: 1318346 - RNA, 19 nt, Human
gcaaacccaucaacaaaaa

SEQ ID NO: 1318347 - RNA, 19 nt, Human
gcaaaccugaccccugcuc

SEQ ID NO: 1318348 - RNA, 21 nt, Human
gcaaaccugaccccugcucag

SEQ ID NO: 1318349 - RNA, 18 nt, Human
gauuuguuuuuaaacugu

SEQ ID NO: 1318350 - RNA, 21 nt, Human
gauuuguuuuuaaacuguaca

SEQ ID NO: 1318351 - RNA, 23 nt, Human
gauuuguuuuuaaacuguacagu

SEQ ID NO: 1318352 - RNA, 22 nt, Human
gauuuguuuuuaaacuguacag

SEQ ID NO: 1318353 - RNA, 20 nt, Human
gcaaacuuuauuuuguguuu

SEQ ID NO: 1318354 - RNA, 20 nt, Human
gcaaacugggaaccccuuuc

SEQ ID NO: 1318355 - RNA, 22 nt, Human
gcaaacugggaaccccuuuccc

SEQ ID NO: 1318356 - RNA, 14 nt, Human
gcaaagaauugacu

SEQ ID NO: 1318357 - RNA, 21 nt, Human
gcaaagacuauucccuucuaa

SEQ ID NO: 1318358 - RNA, 22 nt, Human
gcaaagacuauucccuucuaac

SEQ ID NO: 1318359 - RNA, 14 nt, Human
gcaaagagagauuu

SEQ ID NO: 1318360 - RNA, 23 nt, Human
gcaaaguucccuacuuccuguga

SEQ ID NO: 1318361 - RNA, 12 nt, Human
gcaaauaaaagu

SEQ ID NO: 1318362 - RNA, 19 nt, Human
gcaaauaacaaaugccaaa

SEQ ID NO: 1318363 - RNA, 17 nt, Human
gcaaauaacaaaugcca

SEQ ID NO: 1318364 - RNA, 15 nt, Human
gcaaagugguucccu

SEQ ID NO: 1318365 - RNA, 23 nt, Human
gcaaaugugaaucauuuuaccuu

SEQ ID NO: 1318366 - RNA, 18 nt, Human
gcaaaugucaugcugccu

SEQ ID NO: 1318367 - RNA, 19 nt, Human
gcaaaugucaugcugccuu

SEQ ID NO: 1318368 - RNA, 23 nt, Human
gcaaauguaguauggccuguguc

SEQ ID NO: 1318369 - RNA, 12 nt, Human
gcaaaugugaau

SEQ ID NO: 1318370 - RNA, 12 nt, Human
gcaaaucuugaa

SEQ ID NO: 1318371 - RNA, 14 nt, Human
gcaaauggccucau

SEQ ID NO: 1318372 - RNA, 15 nt, Human
gcaacucuugauuau

SEQ ID NO: 1318373 - RNA, 20 nt, Human
gcaaaugucaugcugccuua

SEQ ID NO: 1318374 - RNA, 16 nt, Human
gaagagaucaggaaga

SEQ ID NO: 1318375 - RNA, 17 nt, Human
gaagagaucaggaagag

SEQ ID NO: 1318376 - RNA, 18 nt, Human
gaagagauuuuucaugau

SEQ ID NO: 1318377 - RNA, 15 nt, Human
gaagagauuuuucau

SEQ ID NO: 1318378 - RNA, 20 nt, Human
gaagagagccugcaggaucu

SEQ ID NO: 1318379 - RNA, 14 nt, Human
gaagagcagcaccu

SEQ ID NO: 1318380 - RNA, 18 nt, Human
gaagagcagcaccuccuc

SEQ ID NO: 1318381 - RNA, 12 nt, Human
gaagagcagccc

SEQ ID NO: 1318382 - RNA, 23 nt, Human
gaagagcagcaccuccucagccu

SEQ ID NO: 1318383 - RNA, 18 nt, Human
gaagagcaggacuccagg

SEQ ID NO: 1318384 - RNA, 22 nt, Human
gaagagcaggacuccaggccca

SEQ ID NO: 1318385 - RNA, 23 nt, Human
gaagagcaggacuccaggcccaa

SEQ ID NO: 1318386 - RNA, 18 nt, Human
gaagaggaggggaagagg

SEQ ID NO: 1318387 - RNA, 20 nt, Human
gaagaggccuguuuggccuc

SEQ ID NO: 1318388 - RNA, 15 nt, Human
gaagagaaggagcag

SEQ ID NO: 1318389 - RNA, 15 nt, Human
gaagagacagcccag

SEQ ID NO: 1318390 - RNA, 14 nt, Human
gaagagaaggagca

SEQ ID NO: 1318391 - RNA, 13 nt, Human
gaagagaaggagc

SEQ ID NO: 1318392 - RNA, 12 nt, Human
gaagagaaggag

SEQ ID NO: 1318393 - RNA, 20 nt, Human
gaagacuuacagcaaauccu

SEQ ID NO: 1318394 - RNA, 21 nt, Human
gaagacuuacagcaaauccuu

SEQ ID NO: 1318395 - RNA, 12 nt, Human
gaagaacugaaa

SEQ ID NO: 1318396 - RNA, 19 nt, Human
gaagacugcauuauauuua

SEQ ID NO: 1318397 - RNA, 13 nt, Human
gaagaacugcagg

SEQ ID NO: 1318398 - RNA, 14 nt, Human
gaagaacugcaggc

SEQ ID NO: 1318399 - RNA, 15 nt, Human
gaagaacugcaggcc

SEQ ID NO: 1318400 - RNA, 19 nt, Human
gaagaacugcaggcccugg

SEQ ID NO: 1318401 - RNA, 15 nt, Human
gaagacuggaagcua

SEQ ID NO: 1318402 - RNA, 16 nt, Human
gaagacuggaagcuaa

SEQ ID NO: 1318403 - RNA, 17 nt, Human
gaagacuggaagcuaau

SEQ ID NO: 1318404 - RNA, 19 nt, Human
gaacuuugcugagccugua

SEQ ID NO: 1318405 - RNA, 22 nt, Human
gaacucaucuagguaaauuaca

SEQ ID NO: 1318406 - RNA, 16 nt, Human
gaacuuuuuauugauu

SEQ ID NO: 1318407 - RNA, 19 nt, Human
gaagaaaaaaaaaaauuca

SEQ ID NO: 1318408 - RNA, 13 nt, Human
gaagaaaaacuca

SEQ ID NO: 1318409 - RNA, 13 nt, Human
gaagaaaaagaag

SEQ ID NO: 1318410 - RNA, 19 nt, Human
gaagaaccaguccccccac

SEQ ID NO: 1318411 - RNA, 22 nt, Human
gaagaaccaguccccccacccu

SEQ ID NO: 1318412 - RNA, 20 nt, Human
gaacucaucuagguaaauua

SEQ ID NO: 1318413 - RNA, 21 nt, Human
gaacucaucuagguaaauuac

SEQ ID NO: 1318414 - RNA, 15 nt, Human
gaagauacugaaaua

SEQ ID NO: 1318415 - RNA, 23 nt, Human
gaagaguaagucaaccugccuga

SEQ ID NO: 1318416 - RNA, 16 nt, Human
gaagauagcugugacu

SEQ ID NO: 1318417 - RNA, 18 nt, Human
gaagauguagaggagaaa

SEQ ID NO: 1318418 - RNA, 20 nt, Human
gaagagguuuuaaagcuucc

SEQ ID NO: 1318419 - RNA, 21 nt, Human
gaagauaaacguggauguuac

SEQ ID NO: 1318420 - RNA, 16 nt, Human
gaagcauucucauugg

SEQ ID NO: 1318421 - RNA, 21 nt, Human
gaagcauucucauuggaaauu

SEQ ID NO: 1318422 - RNA, 18 nt, Human
gaagcauucucauuggaa

SEQ ID NO: 1318423 - RNA, 13 nt, Human
gaagcauuguaaa

SEQ ID NO: 1318424 - RNA, 17 nt, Human
gaagcauuguaaaauaa

SEQ ID NO: 1318425 - RNA, 20 nt, Human
gaagcauuguaaaauaauuc

SEQ ID NO: 1318426 - RNA, 18 nt, Human
gaagccaauucagacagg

SEQ ID NO: 1318427 - RNA, 20 nt, Human
gaagccaauucagacaggca

SEQ ID NO: 1318428 - RNA, 16 nt, Human
gaagcccauccugacc

SEQ ID NO: 1318429 - RNA, 17 nt, Human
gaagcccauccugacca

SEQ ID NO: 1318430 - RNA, 21 nt, Human
gaagcccauccugaccagcug

SEQ ID NO: 1318431 - RNA, 20 nt, Human
gaagcccccaccgugggcag

SEQ ID NO: 1318432 - RNA, 14 nt, Human
gaagcccccagcua

SEQ ID NO: 1318433 - RNA, 17 nt, Human
gaagcccccagcuaaga

SEQ ID NO: 1318434 - RNA, 21 nt, Human
gaagcccccagcuaagaaccu

SEQ ID NO: 1318435 - RNA, 22 nt, Human
gaagcccccagcuaagaaccug

SEQ ID NO: 1318436 - RNA, 19 nt, Human
gaagcccauccugaccagc

SEQ ID NO: 1318437 - RNA, 14 nt, Human
gaagccccugggcc

SEQ ID NO: 1318438 - RNA, 18 nt, Human
gaagccccugggcccagu

SEQ ID NO: 1318439 - RNA, 14 nt, Human
gaagcccggcuccu

SEQ ID NO: 1318440 - RNA, 15 nt, Human
gaagcccggcuccug

SEQ ID NO: 1318441 - RNA, 16 nt, Human
gaagcccggcuccugg

SEQ ID NO: 1318442 - RNA, 17 nt, Human
gaagcccggcuccuggu

SEQ ID NO: 1318443 - RNA, 18 nt, Human
gaagcccggcuccugguc

SEQ ID NO: 1318444 - RNA, 19 nt, Human
gaagcccggcuccugguca

SEQ ID NO: 1318445 - RNA, 21 nt, Human
gaagcccggcuccuggucacc

SEQ ID NO: 1318446 - RNA, 13 nt, Human
gaagcccucccag

SEQ ID NO: 1318447 - RNA, 15 nt, Human
gaagcccucccaggu

SEQ ID NO: 1318448 - RNA, 22 nt, Human
gaacauaaaaaggacaucagca

SEQ ID NO: 1318449 - RNA, 18 nt, Human
gaacauaaaaaggacauc

SEQ ID NO: 1318450 - RNA, 16 nt, Human
gaacauaaaaaggaca

SEQ ID NO: 1318451 - RNA, 14 nt, Human
gaacauaaaaagga

SEQ ID NO: 1318452 - RNA, 24 nt, Human
gaacagugugcaaggcagccgugg

SEQ ID NO: 1318453 - RNA, 17 nt, Human
gaacagugugcaaggca

SEQ ID NO: 1318454 - RNA, 21 nt, Human
gaacagugugcaaggcagccg

SEQ ID NO: 1318455 - RNA, 22 nt, Human
gaacagugugcaaggcagccgu

SEQ ID NO: 1318456 - RNA, 12 nt, Human
gaacagcuggug

SEQ ID NO: 1318457 - RNA, 14 nt, Human
gaacagcuggugua

SEQ ID NO: 1318458 - RNA, 13 nt, Human
gaacagcuggugu

SEQ ID NO: 1318459 - RNA, 22 nt, Human
gaacauaccccuuacaaaugaa

SEQ ID NO: 1318460 - RNA, 16 nt, Human
gaacauagacagaaga

SEQ ID NO: 1318461 - RNA, 12 nt, Human
gaacauauuguu

SEQ ID NO: 1318462 - RNA, 18 nt, Human
gaacauauuguugaaagg

SEQ ID NO: 1318463 - RNA, 17 nt, Human
gaacaucacauuccucu

SEQ ID NO: 1318464 - RNA, 19 nt, Human
gaacauccaaaaucuugau

SEQ ID NO: 1318465 - RNA, 21 nt, Human
gaaauuucagauucccagagc

SEQ ID NO: 1318466 - RNA, 23 nt, Human
gaaauuucagauucccagagcaa

SEQ ID NO: 1318467 - RNA, 16 nt, Human
gaacacucuuuugcuu

SEQ ID NO: 1318468 - RNA, 18 nt, Human
gaacacucuuuugcuuua

SEQ ID NO: 1318469 - RNA, 17 nt, Human
gaacagauaaucccugu

SEQ ID NO: 1318470 - RNA, 18 nt, Human
gaacagauaaucccugua

SEQ ID NO: 1318471 - RNA, 21 nt, Human
gaacagcagacucagcucuga

SEQ ID NO: 1318472 - RNA, 20 nt, Human
gaacagcagacucagcucug

SEQ ID NO: 1318473 - RNA, 20 nt, Human
gaacagugauuaccagggac

SEQ ID NO: 1318474 - RNA, 16 nt, Human
gaacagugauuaccag

SEQ ID NO: 1318475 - RNA, 16 nt, Human
gaaauuguauuacaaa

SEQ ID NO: 1318476 - RNA, 16 nt, Human
gaaaauauaaccagcc

SEQ ID NO: 1318477 - RNA, 12 nt, Human
gaaaauaaagaa

SEQ ID NO: 1318478 - RNA, 13 nt, Human
gaaaauaaagaau

SEQ ID NO: 1318479 - RNA, 16 nt, Human
gaaaauaaagaaugga

SEQ ID NO: 1318480 - RNA, 23 nt, Human
gaaaauaaaucaaugcuauaacu

SEQ ID NO: 1318481 - RNA, 15 nt, Human
gaaaauaaagaaugg

SEQ ID NO: 1318482 - RNA, 17 nt, Human
gaaaauaggcaggaagc

SEQ ID NO: 1318483 - RNA, 19 nt, Human
gaaaauaggcaggaagccc

SEQ ID NO: 1318484 - RNA, 17 nt, Human
gaaauuuauaaacuuuu

SEQ ID NO: 1318485 - RNA, 16 nt, Human
gaaauuuauaaacuuu

SEQ ID NO: 1318486 - RNA, 18 nt, Human
gaaauuguauuacaaauc

SEQ ID NO: 1318487 - RNA, 13 nt, Human
gaaauuguauauu

SEQ ID NO: 1318488 - RNA, 19 nt, Human
gaaauuguauauuguaauu

SEQ ID NO: 1318489 - RNA, 18 nt, Human
gaaauuucacauagccca

SEQ ID NO: 1318490 - RNA, 11 nt, Human
gaaauuucaga

SEQ ID NO: 1318491 - RNA, 14 nt, Human
gaacaucccuccug

SEQ ID NO: 1318492 - RNA, 12 nt, Human
gaacauuggaau

SEQ ID NO: 1318493 - RNA, 21 nt, Human
gaacauuggaauguucucaga

SEQ ID NO: 1318494 - RNA, 22 nt, Human
gaacauuggaauguucucagau

SEQ ID NO: 1318495 - RNA, 15 nt, Human
gaacauugguucuuu

SEQ ID NO: 1318496 - RNA, 12 nt, Human
gaaccucagccu

SEQ ID NO: 1318497 - RNA, 13 nt, Human
gaaccucagccug

SEQ ID NO: 1318498 - RNA, 14 nt, Human
gaaccucagccugg

SEQ ID NO: 1318499 - RNA, 15 nt, Human
gaaccucagccuggc

SEQ ID NO: 1318500 - RNA, 17 nt, Human
gaaccucagccuggcca

SEQ ID NO: 1318501 - RNA, 18 nt, Human
gaaccucagccuggccag

SEQ ID NO: 1318502 - RNA, 19 nt, Human
gaaccucagccuggccaga

SEQ ID NO: 1318503 - RNA, 21 nt, Human
gaaccucagccuggccagaca

SEQ ID NO: 1318504 - RNA, 14 nt, Human
gaacuacugaggau

SEQ ID NO: 1318505 - RNA, 20 nt, Human
gaacuaccuugguuccccca

SEQ ID NO: 1318506 - RNA, 19 nt, Human
gaacuagaauuugauuauu

SEQ ID NO: 1318507 - RNA, 21 nt, Human
gaacuaaagugcugcacucaa

SEQ ID NO: 1318508 - RNA, 19 nt, Human
gaacuaccuugguuccccc

SEQ ID NO: 1318509 - RNA, 21 nt, Human
gaacuagaguuuagcuggaaa

SEQ ID NO: 1318510 - RNA, 13 nt, Human
gaacucagaucca

SEQ ID NO: 1318511 - RNA, 14 nt, Human
gaacucagauccag

SEQ ID NO: 1318512 - RNA, 15 nt, Human
gaacucagauccagg

SEQ ID NO: 1318513 - RNA, 16 nt, Human
gaacucagauccaggg

SEQ ID NO: 1318514 - RNA, 18 nt, Human
gaacucagauccagggac

SEQ ID NO: 1318515 - RNA, 19 nt, Human
gaacucagauccagggaca

SEQ ID NO: 1318516 - RNA, 21 nt, Human
gaacucagauccagggacaga

SEQ ID NO: 1318517 - RNA, 23 nt, Human
gaacguuuagcugacaaaauacu

SEQ ID NO: 1318518 - RNA, 14 nt, Human
gaacguuuucuaau

SEQ ID NO: 1318519 - RNA, 15 nt, Human
gaacguuuucuaauu

SEQ ID NO: 1318520 - RNA, 16 nt, Human
gaacguuuucuaauug

SEQ ID NO: 1318521 - RNA, 20 nt, Human
gaacguuuucuaauugcuua

SEQ ID NO: 1318522 - RNA, 18 nt, Human
gaacguuuucuaauugcu

SEQ ID NO: 1318523 - RNA, 17 nt, Human
gaaccuuugugcccuau

SEQ ID NO: 1318524 - RNA, 19 nt, Human
gaaccuuugugcccuauca

SEQ ID NO: 1318525 - RNA, 20 nt, Human
gaaccuuugugcccuaucac

SEQ ID NO: 1318526 - RNA, 16 nt, Human
gaacgaaaaugaaagc

SEQ ID NO: 1318527 - RNA, 12 nt, Human
gaaguccaagca

SEQ ID NO: 1318528 - RNA, 22 nt, Human
gaaguccaagcauuuagaugua

SEQ ID NO: 1318529 - RNA, 13 nt, Human
gaagucucagcua

SEQ ID NO: 1318530 - RNA, 18 nt, Human
gaagucucaucuggggag

SEQ ID NO: 1318531 - RNA, 24 nt, Human
gaagucucaucuggggagcaggca

SEQ ID NO: 1318532 - RNA, 19 nt, Human
gaagucucaucuggggagc

SEQ ID NO: 1318533 - RNA, 14 nt, Human
gaaguauccuucag

SEQ ID NO: 1318534 - RNA, 21 nt, Human
gaaguaguuaucauguuagua

SEQ ID NO: 1318535 - RNA, 18 nt, Human
gaaguaguuaucauguua

SEQ ID NO: 1318536 - RNA, 17 nt, Human
gaaguaguuaucauguu

SEQ ID NO: 1318537 - RNA, 16 nt, Human
gaaguaguuaucaugu

SEQ ID NO: 1318538 - RNA, 15 nt, Human
gaaguaguuaucaug

SEQ ID NO: 1318539 - RNA, 14 nt, Human
gaaguaguuaucau

SEQ ID NO: 1318540 - RNA, 13 nt, Human
gaaguaguuauca

SEQ ID NO: 1318541 - RNA, 13 nt, Human
gaaguaggaagua

SEQ ID NO: 1318542 - RNA, 16 nt, Human
gaaguauccuucagcc

SEQ ID NO: 1318543 - RNA, 19 nt, Human
gaaguaguuaucauguuag

SEQ ID NO: 1318544 - RNA, 14 nt, Human
gaaguauaccugau

SEQ ID NO: 1318545 - RNA, 14 nt, Human
gaaguauaaagaau

SEQ ID NO: 1318546 - RNA, 15 nt, Human
gaagucaucuugcua

SEQ ID NO: 1318547 - RNA, 18 nt, Human
gaagucaucuugcuacca

SEQ ID NO: 1318548 - RNA, 22 nt, Human
gaagguggauggccccagcaca

SEQ ID NO: 1318549 - RNA, 18 nt, Human
gaaggugcugacggccag

SEQ ID NO: 1318550 - RNA, 19 nt, Human
gaaggugcugacggccagg

SEQ ID NO: 1318551 - RNA, 21 nt, Human
gaaggugcugacggccaggga

SEQ ID NO: 1318552 - RNA, 14 nt, Human
gaaggugggaggau

SEQ ID NO: 1318553 - RNA, 13 nt, Human
gaaguaccagacu

SEQ ID NO: 1318554 - RNA, 14 nt, Human
gaaguaccagacua

SEQ ID NO: 1318555 - RNA, 21 nt, Human
gaaguacccguucacauuuuu

SEQ ID NO: 1318556 - RNA, 20 nt, Human
gaaguagaaacaaaauacaa

SEQ ID NO: 1318557 - RNA, 13 nt, Human
gaagcguuguccu

SEQ ID NO: 1318558 - RNA, 19 nt, Human
gaagcguuguccucagccc

SEQ ID NO: 1318559 - RNA, 20 nt, Human
gaagcguuguccucagcccc

SEQ ID NO: 1318560 - RNA, 14 nt, Human
gaagcuaacaggga

SEQ ID NO: 1318561 - RNA, 15 nt, Human
gaagcuaacagggaa

SEQ ID NO: 1318562 - RNA, 16 nt, Human
gaagcuaacagggaag

SEQ ID NO: 1318563 - RNA, 17 nt, Human
gaagcuaacagggaagg

SEQ ID NO: 1318564 - RNA, 18 nt, Human
gaagcuaacagggaaggc

SEQ ID NO: 1318565 - RNA, 19 nt, Human
gaagcuaacagggaaggca

SEQ ID NO: 1318566 - RNA, 20 nt, Human
gaagcuaacagggaaggcag

SEQ ID NO: 1318567 - RNA, 21 nt, Human
gaagcuaacagggaaggcagg

SEQ ID NO: 1318568 - RNA, 22 nt, Human
gaagcuaacagggaaggcaggc

SEQ ID NO: 1318569 - RNA, 20 nt, Human
gaauacucuuauaucuauau

SEQ ID NO: 1318570 - RNA, 21 nt, Human
gaauaccuuagugcaguuauu

SEQ ID NO: 1318571 - RNA, 20 nt, Human
gaauacuacuuaugaaaugu

SEQ ID NO: 1318572 - RNA, 13 nt, Human
gaauacugaacau

SEQ ID NO: 1318573 - RNA, 22 nt, Human
gaauacugaacaucugaguccu

SEQ ID NO: 1318574 - RNA, 22 nt, Human
gaauagcuuuaaugauaugcuu

SEQ ID NO: 1318575 - RNA, 20 nt, Human
gaauaccuuagugcaguuau

SEQ ID NO: 1318576 - RNA, 17 nt, Human
gaauaccuuagugcagu

SEQ ID NO: 1318577 - RNA, 13 nt, Human
gaauaccugcuca

SEQ ID NO: 1318578 - RNA, 17 nt, Human
gaauaccacucuguaau

SEQ ID NO: 1318579 - RNA, 19 nt, Human
gaauaccacucuguaauug

SEQ ID NO: 1318580 - RNA, 21 nt, Human
gaauaccacucuguaauugca

SEQ ID NO: 1318581 - RNA, 12 nt, Human
gaauacccuuuu

SEQ ID NO: 1318582 - RNA, 15 nt, Human
gaauaccacucugua

SEQ ID NO: 1318583 - RNA, 16 nt, Human
gaauaccacucuguaa

SEQ ID NO: 1318584 - RNA, 23 nt, Human
gaauaccacucuguaauugcaaa

SEQ ID NO: 1318585 - RNA, 22 nt, Human
gaauauuuguuauguagauaac

SEQ ID NO: 1318586 - RNA, 23 nt, Human
gaauauuuuguuuugugcagaga

SEQ ID NO: 1318587 - RNA, 14 nt, Human
gaaucaaacauuuu

SEQ ID NO: 1318588 - RNA, 17 nt, Human
gaaucaacauuucucaa

SEQ ID NO: 1318589 - RNA, 20 nt, Human
gaauaauccuaaacauauga

SEQ ID NO: 1318590 - RNA, 18 nt, Human
gaauaaucacgcuuuccu

SEQ ID NO: 1318591 - RNA, 19 nt, Human
gaauaaucacgcuuuccug

SEQ ID NO: 1318592 - RNA, 20 nt, Human
gaauaaucacgcuuuccuga

SEQ ID NO: 1318593 - RNA, 21 nt, Human
gaauaaucacgcuuuccugaa

SEQ ID NO: 1318594 - RNA, 13 nt, Human
gaaguuuuacauu

SEQ ID NO: 1318595 - RNA, 17 nt, Human
gaaugaagauacugaaa

SEQ ID NO: 1318596 - RNA, 18 nt, Human
gaaugaagauacugaaau

SEQ ID NO: 1318597 - RNA, 21 nt, Human
gaaugaagauacugaaauaaa

SEQ ID NO: 1318598 - RNA, 19 nt, Human
gaaugaagauacugaaaua

SEQ ID NO: 1318599 - RNA, 14 nt, Human
gaaugcauaaaaug

SEQ ID NO: 1318600 - RNA, 22 nt, Human
gaaugccacugccuucgcuucu

SEQ ID NO: 1318601 - RNA, 13 nt, Human
gaaugcuuuagga

SEQ ID NO: 1318602 - RNA, 14 nt, Human
gaaugccguggauu

SEQ ID NO: 1318603 - RNA, 21 nt, Human
gaaugccacugccuucgcuuc

SEQ ID NO: 1318604 - RNA, 16 nt, Human
gaaucaagggucaggc

SEQ ID NO: 1318605 - RNA, 17 nt, Human
gaaucaagggucaggcc

SEQ ID NO: 1318606 - RNA, 11 nt, Human
gaaucaauaau

SEQ ID NO: 1318607 - RNA, 19 nt, Human
gaaucuuuaaaagaugcuu

SEQ ID NO: 1318608 - RNA, 19 nt, Human
gaaucaagggucaggccuu

SEQ ID NO: 1318609 - RNA, 22 nt, Human
gaaucuuuagagaaguauacau

SEQ ID NO: 1318610 - RNA, 23 nt, Human
gaaucuuuagagaaguauacaua

SEQ ID NO: 1318611 - RNA, 21 nt, Human
gaauggugugggagagggaug

SEQ ID NO: 1318612 - RNA, 16 nt, Human
gaaugggugcccacag

SEQ ID NO: 1318613 - RNA, 22 nt, Human
gaauggaggggcagagccagga

SEQ ID NO: 1318614 - RNA, 21 nt, Human
gaauggaggggcagagccagg

SEQ ID NO: 1318615 - RNA, 20 nt, Human
gaauggaggggcagagccag

SEQ ID NO: 1318616 - RNA, 16 nt, Human
gaauggaggggcagag

SEQ ID NO: 1318617 - RNA, 15 nt, Human
gaauggaggggcaga

SEQ ID NO: 1318618 - RNA, 15 nt, Human
gaauggaaagcuuca

SEQ ID NO: 1318619 - RNA, 14 nt, Human
gaauggaucacaag

SEQ ID NO: 1318620 - RNA, 19 nt, Human
gaauggaucacaagaugga

SEQ ID NO: 1318621 - RNA, 17 nt, Human
gaauggaucacaagaug

SEQ ID NO: 1318622 - RNA, 21 nt, Human
gaauggauuuuucuuuaacug

SEQ ID NO: 1318623 - RNA, 13 nt, Human
gaauguaaauguc

SEQ ID NO: 1318624 - RNA, 20 nt, Human
gaauguaaagcuugucugau

SEQ ID NO: 1318625 - RNA, 15 nt, Human
gaauguaaagcuugu

SEQ ID NO: 1318626 - RNA, 16 nt, Human
gaauguaaaugucuca

SEQ ID NO: 1318627 - RNA, 14 nt, Human
gaauguaaaugucu

SEQ ID NO: 1318628 - RNA, 17 nt, Human
gaauguaaauuuguacu

SEQ ID NO: 1318629 - RNA, 14 nt, Human
gaauguaaauuugu

SEQ ID NO: 1318630 - RNA, 23 nt, Human
gaauuguguuuauaauuuuaaau

SEQ ID NO: 1318631 - RNA, 15 nt, Human
gaauuguguuuauaa

SEQ ID NO: 1318632 - RNA, 22 nt, Human
gaauuuaaauagcuuuuuucuc

SEQ ID NO: 1318633 - RNA, 22 nt, Human
gaauugugguuuauauauuuaa

SEQ ID NO: 1318634 - RNA, 16 nt, Human
gaauugugguuuauau

SEQ ID NO: 1318635 - RNA, 15 nt, Human
gaauuguuaguuucu

SEQ ID NO: 1318636 - RNA, 22 nt, Human
gaauuguugagauacuuuacua

SEQ ID NO: 1318637 - RNA, 18 nt, Human
gaauugauuugcauugaa

SEQ ID NO: 1318638 - RNA, 15 nt, Human
gaauugaguguuuaa

SEQ ID NO: 1318639 - RNA, 12 nt, Human
gaauugauuugc

SEQ ID NO: 1318640 - RNA, 13 nt, Human
gaauugauuugca

SEQ ID NO: 1318641 - RNA, 14 nt, Human
gaauugauuugcau

SEQ ID NO: 1318642 - RNA, 15 nt, Human
gaauugauuugcauu

SEQ ID NO: 1318643 - RNA, 17 nt, Human
gaauugauuugcauuga

SEQ ID NO: 1318644 - RNA, 16 nt, Human
gaauuuaauaaucugu

SEQ ID NO: 1318645 - RNA, 19 nt, Human
gaauucuuuaaaauuacaa

SEQ ID NO: 1318646 - RNA, 20 nt, Human
gaauucuugguugaggaaac

SEQ ID NO: 1318647 - RNA, 19 nt, Human
gaauucuugguugaggaaa

SEQ ID NO: 1318648 - RNA, 14 nt, Human
gaauugaguaaugg

SEQ ID NO: 1318649 - RNA, 16 nt, Human
gaauugaguaauggug

SEQ ID NO: 1318650 - RNA, 19 nt, Human
gaauugaguguuuaaaguu

SEQ ID NO: 1318651 - RNA, 18 nt, Human
gaauucaaauuuuaucug

SEQ ID NO: 1318652 - RNA, 13 nt, Human
gaauucagacauc

SEQ ID NO: 1318653 - RNA, 16 nt, Human
gaauucaaauuuuauc

SEQ ID NO: 1318654 - RNA, 14 nt, Human
gaauucauuucacu

SEQ ID NO: 1318655 - RNA, 12 nt, Human
gaauucccucac

SEQ ID NO: 1318656 - RNA, 13 nt, Human
gaauucccucacu

SEQ ID NO: 1318657 - RNA, 14 nt, Human
gaauucccucacuc

SEQ ID NO: 1318658 - RNA, 21 nt, Human
gaauucccucacucgucuccc

SEQ ID NO: 1318659 - RNA, 20 nt, Human
gaauucccucacucgucucc

SEQ ID NO: 1318660 - RNA, 17 nt, Human
gaauucggugugcacca

SEQ ID NO: 1318661 - RNA, 15 nt, Human
gaccccagccaucca

SEQ ID NO: 1318662 - RNA, 12 nt, Human
gaccccagagga

SEQ ID NO: 1318663 - RNA, 13 nt, Human
gacccccagcucc

SEQ ID NO: 1318664 - RNA, 17 nt, Human
gacccccagcuccggcc

SEQ ID NO: 1318665 - RNA, 23 nt, Human
gacccccagcuccggccuguccu

SEQ ID NO: 1318666 - RNA, 15 nt, Human
gaccccccuuucaca

SEQ ID NO: 1318667 - RNA, 19 nt, Human
gaccccccuuucacaggca

SEQ ID NO: 1318668 - RNA, 22 nt, Human
gaccccccuuucacaggcagcc

SEQ ID NO: 1318669 - RNA, 14 nt, Human
gacccauuccuucc

SEQ ID NO: 1318670 - RNA, 16 nt, Human
gacccauuccuuccca

SEQ ID NO: 1318671 - RNA, 15 nt, Human
gacccauuccuuccc

SEQ ID NO: 1318672 - RNA, 22 nt, Human
gacccauuugauauuuuuuaaa

SEQ ID NO: 1318673 - RNA, 23 nt, Human
gaccccaaacaccuuccagcucc

SEQ ID NO: 1318674 - RNA, 20 nt, Human
gaccccccuuucacaggcag

SEQ ID NO: 1318675 - RNA, 17 nt, Human
gacccccucucccugca

SEQ ID NO: 1318676 - RNA, 23 nt, Human
gacccaugaguuggggucuggca

SEQ ID NO: 1318677 - RNA, 17 nt, Human
gacccagccaggcccag

SEQ ID NO: 1318678 - RNA, 19 nt, Human
gacccagccaggcccagcc

SEQ ID NO: 1318679 - RNA, 22 nt, Human
gacccagccaggcccagccgac

SEQ ID NO: 1318680 - RNA, 16 nt, Human
gacccagcccucaucc

SEQ ID NO: 1318681 - RNA, 17 nt, Human
gacccagcccucauccc

SEQ ID NO: 1318682 - RNA, 15 nt, Human
gacccagugccccca

SEQ ID NO: 1318683 - RNA, 16 nt, Human
gacccagugcccccac

SEQ ID NO: 1318684 - RNA, 17 nt, Human
gacccagugcccccacu

SEQ ID NO: 1318685 - RNA, 20 nt, Human
gacccagugcccccacugac

SEQ ID NO: 1318686 - RNA, 19 nt, Human
gacccaaaaggcagaagca

SEQ ID NO: 1318687 - RNA, 18 nt, Human
gacccaaaaggcagaagc

SEQ ID NO: 1318688 - RNA, 16 nt, Human
gaccagcagccccaca

SEQ ID NO: 1318689 - RNA, 12 nt, Human
gaccagcagccc

SEQ ID NO: 1318690 - RNA, 17 nt, Human
gaccagcaggcuggccu

SEQ ID NO: 1318691 - RNA, 20 nt, Human
gacccaaaaggcagaagcaa

SEQ ID NO: 1318692 - RNA, 19 nt, Human
gacccacuggacucaccuc

SEQ ID NO: 1318693 - RNA, 18 nt, Human
gaccagccgugagcaugu

SEQ ID NO: 1318694 - RNA, 22 nt, Human
gaccagccgugagcauguuugg

SEQ ID NO: 1318695 - RNA, 14 nt, Human
gacccagccaggcc

SEQ ID NO: 1318696 - RNA, 15 nt, Human
gacccagccaggccc

SEQ ID NO: 1318697 - RNA, 22 nt, Human
gacauccagcagauuuccagcc

SEQ ID NO: 1318698 - RNA, 13 nt, Human
gacauccaggagg

SEQ ID NO: 1318699 - RNA, 13 nt, Human
gacauccagcaga

SEQ ID NO: 1318700 - RNA, 14 nt, Human
gacaucagcaaaca

SEQ ID NO: 1318701 - RNA, 16 nt, Human
gacaucagguuuuucc

SEQ ID NO: 1318702 - RNA, 16 nt, Human
gacaucacuuguacaa

SEQ ID NO: 1318703 - RNA, 22 nt, Human
gacaucacuuguacaaaauaaa

SEQ ID NO: 1318704 - RNA, 23 nt, Human
gacauccauguuccgagaagaac

SEQ ID NO: 1318705 - RNA, 20 nt, Human
gaccaagcaucuuggggggg

SEQ ID NO: 1318706 - RNA, 15 nt, Human
gaccaagcaucuugg

SEQ ID NO: 1318707 - RNA, 12 nt, Human
gaccaauaaaga

SEQ ID NO: 1318708 - RNA, 14 nt, Human
gaccacaacaugag

SEQ ID NO: 1318709 - RNA, 16 nt, Human
gaccacacccuguacu

SEQ ID NO: 1318710 - RNA, 14 nt, Human
gaccacacuccagc

SEQ ID NO: 1318711 - RNA, 16 nt, Human
gaccacacuccagcug

SEQ ID NO: 1318712 - RNA, 22 nt, Human
gaccacacuccagcugggauca

SEQ ID NO: 1318713 - RNA, 12 nt, Human
gaccacagcaca

SEQ ID NO: 1318714 - RNA, 14 nt, Human
gaccacagcacagc

SEQ ID NO: 1318715 - RNA, 15 nt, Human
gaccacagcacagcc

SEQ ID NO: 1318716 - RNA, 16 nt, Human
gaccacagcacagcca

SEQ ID NO: 1318717 - RNA, 18 nt, Human
gaccacugcagaagacag

SEQ ID NO: 1318718 - RNA, 16 nt, Human
gaccacugcagaagac

SEQ ID NO: 1318719 - RNA, 13 nt, Human
gaccacaggcuca

SEQ ID NO: 1318720 - RNA, 18 nt, Human
gaccacaggcucaggcag

SEQ ID NO: 1318721 - RNA, 16 nt, Human
gaccacaggcucaggc

SEQ ID NO: 1318722 - RNA, 13 nt, Human
gaccacaugcccc

SEQ ID NO: 1318723 - RNA, 12 nt, Human
gaccaccaagcc

SEQ ID NO: 1318724 - RNA, 13 nt, Human
gaccaccaagccu

SEQ ID NO: 1318725 - RNA, 14 nt, Human
gaccaccaagccuu

SEQ ID NO: 1318726 - RNA, 15 nt, Human
gaccaccaagccuug

SEQ ID NO: 1318727 - RNA, 22 nt, Human
gaccaccaagccuugauuggug

SEQ ID NO: 1318728 - RNA, 13 nt, Human
gaccaccagggca

SEQ ID NO: 1318729 - RNA, 19 nt, Human
gaccaccagggcaucucug

SEQ ID NO: 1318730 - RNA, 20 nt, Human
gaccaccagggcaucucugg

SEQ ID NO: 1318731 - RNA, 21 nt, Human
gaccaccagggcaucucuggg

SEQ ID NO: 1318732 - RNA, 22 nt, Human
gaccaccagggcaucucugggc

SEQ ID NO: 1318733 - RNA, 23 nt, Human
gaccaccagggcaucucugggcu

SEQ ID NO: 1318734 - RNA, 13 nt, Human
gaccacucagaga

SEQ ID NO: 1318735 - RNA, 14 nt, Human
gaccacucagagac

SEQ ID NO: 1318736 - RNA, 19 nt, Human
gaccacucagagacaugca

SEQ ID NO: 1318737 - RNA, 21 nt, Human
gaccacucagagacaugcaga

SEQ ID NO: 1318738 - RNA, 15 nt, Human
gaccagcagacagag

SEQ ID NO: 1318739 - RNA, 18 nt, Human
gaccagcagacagagcca

SEQ ID NO: 1318740 - RNA, 19 nt, Human
gaccagcagacagagccag

SEQ ID NO: 1318741 - RNA, 20 nt, Human
gaccagcagacagagccagg

SEQ ID NO: 1318742 - RNA, 23 nt, Human
gaccagcagacagagccaggaga

SEQ ID NO: 1318743 - RNA, 22 nt, Human
gaccagcagacagagccaggag

SEQ ID NO: 1318744 - RNA, 20 nt, Human
gacacuacacccagcaauag

SEQ ID NO: 1318745 - RNA, 19 nt, Human
gacacuacacccagcaaua

SEQ ID NO: 1318746 - RNA, 18 nt, Human
gacacuacacccagcaau

SEQ ID NO: 1318747 - RNA, 17 nt, Human
gacacuacacccagcaa

SEQ ID NO: 1318748 - RNA, 16 nt, Human
gacacuacacccagca

SEQ ID NO: 1318749 - RNA, 15 nt, Human
gacacuacacccagc

SEQ ID NO: 1318750 - RNA, 14 nt, Human
gacacuacacccag

SEQ ID NO: 1318751 - RNA, 15 nt, Human
gacacgggccugucc

SEQ ID NO: 1318752 - RNA, 18 nt, Human
gacacgggccuguccaca

SEQ ID NO: 1318753 - RNA, 19 nt, Human
gacacgggccuguccacag

SEQ ID NO: 1318754 - RNA, 20 nt, Human
gacacgggccuguccacagg

SEQ ID NO: 1318755 - RNA, 21 nt, Human
gacacgggccuguccacaggc

SEQ ID NO: 1318756 - RNA, 22 nt, Human
gacacgggccuguccacaggcu

SEQ ID NO: 1318757 - RNA, 22 nt, Human
gacacgcacggcagccacagcu

SEQ ID NO: 1318758 - RNA, 21 nt, Human
gacacgcacggcagccacagc

SEQ ID NO: 1318759 - RNA, 20 nt, Human
gacacgcacggcagccacag

SEQ ID NO: 1318760 - RNA, 19 nt, Human
gacacgcacggcagccaca

SEQ ID NO: 1318761 - RNA, 14 nt, Human
gacacgcacggcag

SEQ ID NO: 1318762 - RNA, 16 nt, Human
gaauuucacugucuuu

SEQ ID NO: 1318763 - RNA, 22 nt, Human
gaauuucccaggacccugaagg

SEQ ID NO: 1318764 - RNA, 14 nt, Human
gaauuucccaggac

SEQ ID NO: 1318765 - RNA, 15 nt, Human
gaauuucccaggacc

SEQ ID NO: 1318766 - RNA, 16 nt, Human
gaauuucccaggaccc

SEQ ID NO: 1318767 - RNA, 17 nt, Human
gaauuucccaggacccu

SEQ ID NO: 1318768 - RNA, 12 nt, Human
gaauuucaccug

SEQ ID NO: 1318769 - RNA, 17 nt, Human
gaauuucaccuguaaac

SEQ ID NO: 1318770 - RNA, 21 nt, Human
gaauuucaccuguaaaccuga

SEQ ID NO: 1318771 - RNA, 17 nt, Human
gaauuucccacauaccc

SEQ ID NO: 1318772 - RNA, 23 nt, Human
gacagagcgugagcugagcaggc

SEQ ID NO: 1318773 - RNA, 16 nt, Human
gacagagcccugugag

SEQ ID NO: 1318774 - RNA, 17 nt, Human
gacagagcccugugagg

SEQ ID NO: 1318775 - RNA, 16 nt, Human
gacagacagcccucca

SEQ ID NO: 1318776 - RNA, 18 nt, Human
gacacuagcccaaugaaa

SEQ ID NO: 1318777 - RNA, 14 nt, Human
gacagacaggcucu

SEQ ID NO: 1318778 - RNA, 15 nt, Human
gacagacaggcucuu

SEQ ID NO: 1318779 - RNA, 21 nt, Human
gacagacaggcucuuagcagc

SEQ ID NO: 1318780 - RNA, 13 nt, Human
gacagaggcccca

SEQ ID NO: 1318781 - RNA, 18 nt, Human
gacagaggccccagccuc

SEQ ID NO: 1318782 - RNA, 19 nt, Human
gacagaggccccagccucc

SEQ ID NO: 1318783 - RNA, 13 nt, Human
gacagaggcccuc

SEQ ID NO: 1318784 - RNA, 14 nt, Human
gacagaugccuccu

SEQ ID NO: 1318785 - RNA, 14 nt, Human
gacagggcauggcc

SEQ ID NO: 1318786 - RNA, 16 nt, Human
gacaggcaaauaaaag

SEQ ID NO: 1318787 - RNA, 15 nt, Human
gacagggcauggcca

SEQ ID NO: 1318788 - RNA, 20 nt, Human
gacagggcauggccaggugg

SEQ ID NO: 1318789 - RNA, 22 nt, Human
gacagggcauggccagguggcc

SEQ ID NO: 1318790 - RNA, 18 nt, Human
gacagggcggggguggcg

SEQ ID NO: 1318791 - RNA, 16 nt, Human
gacagggcgggggugg

SEQ ID NO: 1318792 - RNA, 17 nt, Human
gacagggcggggguggc

SEQ ID NO: 1318793 - RNA, 14 nt, Human
gacaguucaagaaa

SEQ ID NO: 1318794 - RNA, 15 nt, Human
gacaguucauaugua

SEQ ID NO: 1318795 - RNA, 17 nt, Human
gacaguucauauguacc

SEQ ID NO: 1318796 - RNA, 21 nt, Human
gacaguuccagaagugugacu

SEQ ID NO: 1318797 - RNA, 22 nt, Human
gacauaaaguugauaaagauuu

SEQ ID NO: 1318798 - RNA, 17 nt, Human
gacauaaccacugcuuc

SEQ ID NO: 1318799 - RNA, 15 nt, Human
gacaucacuuguaca

SEQ ID NO: 1318800 - RNA, 23 nt, Human
gacaguuuaccaguugccuuuua

SEQ ID NO: 1318801 - RNA, 19 nt, Human
gacaguuuaccaguugccu

SEQ ID NO: 1318802 - RNA, 16 nt, Human
gacaguuuauuuguug

SEQ ID NO: 1318803 - RNA, 21 nt, Human
gacaguuuaccaguugccuuu

SEQ ID NO: 1318804 - RNA, 14 nt, Human
gacauaaaggaaaa

SEQ ID NO: 1318805 - RNA, 15 nt, Human
gacauaaaggaaaag

SEQ ID NO: 1318806 - RNA, 17 nt, Human
gacauaaaggaaaagac

SEQ ID NO: 1318807 - RNA, 21 nt, Human
gacauaaaggaaaagacacau

SEQ ID NO: 1318808 - RNA, 17 nt, Human
gacauaaaguugauaaa

SEQ ID NO: 1318809 - RNA, 19 nt, Human
gacauaaaguugauaaaga

SEQ ID NO: 1318810 - RNA, 20 nt, Human
gacauaaaguugauaaagau

SEQ ID NO: 1318811 - RNA, 14 nt, Human
gacaggauguguuu

SEQ ID NO: 1318812 - RNA, 18 nt, Human
gacaggauguguuugcuu

SEQ ID NO: 1318813 - RNA, 19 nt, Human
gacagaugccuccuuccuc

SEQ ID NO: 1318814 - RNA, 18 nt, Human
gacagcaaccuguagagu

SEQ ID NO: 1318815 - RNA, 14 nt, Human
gacagcagaacugc

SEQ ID NO: 1318816 - RNA, 20 nt, Human
gacagcagaacugcuauuuu

SEQ ID NO: 1318817 - RNA, 14 nt, Human
gacagcagcaucuc

SEQ ID NO: 1318818 - RNA, 16 nt, Human
gacagcagcaucucua

SEQ ID NO: 1318819 - RNA, 19 nt, Human
gacagcagcaucucuaccu

SEQ ID NO: 1318820 - RNA, 19 nt, Human
gacaggauguguuugcuuu

SEQ ID NO: 1318821 - RNA, 20 nt, Human
gacaggauguguuugcuuuc

SEQ ID NO: 1318822 - RNA, 18 nt, Human
gacaggauguuugcucag

SEQ ID NO: 1318823 - RNA, 23 nt, Human
gacugcggaggaaggaggaccca

SEQ ID NO: 1318824 - RNA, 12 nt, Human
gacugcuaaaua

SEQ ID NO: 1318825 - RNA, 15 nt, Human
gacugcggaggaagg

SEQ ID NO: 1318826 - RNA, 17 nt, Human
gacugccauauuaaauu

SEQ ID NO: 1318827 - RNA, 14 nt, Human
gacugcuaaauaaa

SEQ ID NO: 1318828 - RNA, 17 nt, Human
gacugcuaaauaaaauu

SEQ ID NO: 1318829 - RNA, 18 nt, Human
gacugcuaaauaaaauuu

SEQ ID NO: 1318830 - RNA, 17 nt, Human
gacuggauguaccacca

SEQ ID NO: 1318831 - RNA, 22 nt, Human
gacuggcauacuauguggaugu

SEQ ID NO: 1318832 - RNA, 23 nt, Human
gacuggcauacuauguggaugug

SEQ ID NO: 1318833 - RNA, 24 nt, Human
gacuggcauacuauguggauguga

SEQ ID NO: 1318834 - RNA, 15 nt, Human
gacuggccagggcca

SEQ ID NO: 1318835 - RNA, 12 nt, Human
gacuggccaggg

SEQ ID NO: 1318836 - RNA, 18 nt, Human
gacuggcggggggcccau

SEQ ID NO: 1318837 - RNA, 18 nt, Human
gacuuacagcaaauccuu

SEQ ID NO: 1318838 - RNA, 21 nt, Human
gacugggagcccccagccugu

SEQ ID NO: 1318839 - RNA, 17 nt, Human
gacugggagcccccagc

SEQ ID NO: 1318840 - RNA, 18 nt, Human
gacugggagcccccagcc

SEQ ID NO: 1318841 - RNA, 19 nt, Human
gacugggagcccccagccu

SEQ ID NO: 1318842 - RNA, 20 nt, Human
gacugggagcccccagccug

SEQ ID NO: 1318843 - RNA, 16 nt, Human
gacugggaccaggcac

SEQ ID NO: 1318844 - RNA, 18 nt, Human
gacugggaccaggcacca

SEQ ID NO: 1318845 - RNA, 20 nt, Human
gacugggaccaggcaccagg

SEQ ID NO: 1318846 - RNA, 10 nt, Human
gacuggcuuu

SEQ ID NO: 1318847 - RNA, 20 nt, Human
gacuggcuuuuauuaaugca

SEQ ID NO: 1318848 - RNA, 21 nt, Human
gacuggcuuuuauuaaugcac

SEQ ID NO: 1318849 - RNA, 22 nt, Human
gacuggcuuuuauuaaugcacu

SEQ ID NO: 1318850 - RNA, 23 nt, Human
gacuggcuuuuauuaaugcacuu

SEQ ID NO: 1318851 - RNA, 18 nt, Human
gacuuauaguacaugaua

SEQ ID NO: 1318852 - RNA, 17 nt, Human
gacuuauaguacaugau

SEQ ID NO: 1318853 - RNA, 16 nt, Human
gacuuauaguacauga

SEQ ID NO: 1318854 - RNA, 15 nt, Human
gacuuagcugggaga

SEQ ID NO: 1318855 - RNA, 16 nt, Human
gacuuagggcaccagg

SEQ ID NO: 1318856 - RNA, 17 nt, Human
gacuuagggcaccaggg

SEQ ID NO: 1318857 - RNA, 21 nt, Human
gacuucaagcauggcuauuuu

SEQ ID NO: 1318858 - RNA, 14 nt, Human
gacuucagcucugu

SEQ ID NO: 1318859 - RNA, 14 nt, Human
gacuuacaugauuc

SEQ ID NO: 1318860 - RNA, 15 nt, Human
gacuuacaugauuca

SEQ ID NO: 1318861 - RNA, 16 nt, Human
gacuuacaugauucau

SEQ ID NO: 1318862 - RNA, 18 nt, Human
gacuuacaugauucauuu

SEQ ID NO: 1318863 - RNA, 19 nt, Human
gacuuacaugauucauuuu

SEQ ID NO: 1318864 - RNA, 12 nt, Human
gacuuacucuaa

SEQ ID NO: 1318865 - RNA, 14 nt, Human
gacuuacucuaaga

SEQ ID NO: 1318866 - RNA, 15 nt, Human
gacuuacucuaagau

SEQ ID NO: 1318867 - RNA, 23 nt, Human
gacuuagaaaaccagcucagcac

SEQ ID NO: 1318868 - RNA, 21 nt, Human
gacuuagaaaaccagcucagc

SEQ ID NO: 1318869 - RNA, 11 nt, Human
gacugagaaau

SEQ ID NO: 1318870 - RNA, 21 nt, Human
gacugacaguuuacagacgcu

SEQ ID NO: 1318871 - RNA, 13 nt, Human
gacugaccagcag

SEQ ID NO: 1318872 - RNA, 15 nt, Human
gacugaccagcagcu

SEQ ID NO: 1318873 - RNA, 15 nt, Human
gacucuaaagucugu

SEQ ID NO: 1318874 - RNA, 14 nt, Human
gacucuaagaaaga

SEQ ID NO: 1318875 - RNA, 15 nt, Human
gacucuaagaaagaa

SEQ ID NO: 1318876 - RNA, 16 nt, Human
gacucuaagaaagaac

SEQ ID NO: 1318877 - RNA, 21 nt, Human
gacucuaagguuaucuacuuu

SEQ ID NO: 1318878 - RNA, 20 nt, Human
gacuaauggcaugagaaaua

SEQ ID NO: 1318879 - RNA, 14 nt, Human
gacuaauggcauga

SEQ ID NO: 1318880 - RNA, 16 nt, Human
gacuaauggcaugaga

SEQ ID NO: 1318881 - RNA, 14 nt, Human
gacuacaggcguga

SEQ ID NO: 1318882 - RNA, 17 nt, Human
gacugaugucuccuaag

SEQ ID NO: 1318883 - RNA, 18 nt, Human
gacugaugucuccuaagc

SEQ ID NO: 1318884 - RNA, 14 nt, Human
gacugauuucagag

SEQ ID NO: 1318885 - RNA, 16 nt, Human
gacugauuucagagug

SEQ ID NO: 1318886 - RNA, 22 nt, Human
gacugaugucuccuaagcaccu

SEQ ID NO: 1318887 - RNA, 22 nt, Human
gacugagugggaagcccauccu

SEQ ID NO: 1318888 - RNA, 14 nt, Human
gacugaugucuccu

SEQ ID NO: 1318889 - RNA, 15 nt, Human
gacugaugucuccua

SEQ ID NO: 1318890 - RNA, 16 nt, Human
gacugaugucuccuaa

SEQ ID NO: 1318891 - RNA, 20 nt, Human
gacugccagucccccugccc

SEQ ID NO: 1318892 - RNA, 15 nt, Human
gacugccaagccaug

SEQ ID NO: 1318893 - RNA, 19 nt, Human
gacugccaagacugcugug

SEQ ID NO: 1318894 - RNA, 20 nt, Human
gacugccaagacugcugugg

SEQ ID NO: 1318895 - RNA, 12 nt, Human
gacugccaagcc

SEQ ID NO: 1318896 - RNA, 13 nt, Human
gacugccaagcca

SEQ ID NO: 1318897 - RNA, 14 nt, Human
gacugccaagccau

SEQ ID NO: 1318898 - RNA, 16 nt, Human
gacugccaagccaugg

SEQ ID NO: 1318899 - RNA, 13 nt, Human
gacugagaaauuu

SEQ ID NO: 1318900 - RNA, 14 nt, Human
gacugaccagcagc

SEQ ID NO: 1318901 - RNA, 16 nt, Human
gacugagugggaagcc

SEQ ID NO: 1318902 - RNA, 17 nt, Human
gacugagugggaagccc

SEQ ID NO: 1318903 - RNA, 16 nt, Human
gacugaggggagggga

SEQ ID NO: 1318904 - RNA, 13 nt, Human
gacccugcccuug

SEQ ID NO: 1318905 - RNA, 15 nt, Human
gacccugcccuuguu

SEQ ID NO: 1318906 - RNA, 23 nt, Human
gacccugcccuuguuuggggcag

SEQ ID NO: 1318907 - RNA, 12 nt, Human
gacccugccucu

SEQ ID NO: 1318908 - RNA, 13 nt, Human
gacccugccucuc

SEQ ID NO: 1318909 - RNA, 16 nt, Human
gacccugccucuccca

SEQ ID NO: 1318910 - RNA, 23 nt, Human
gacccugccucucccaggcaggg

SEQ ID NO: 1318911 - RNA, 21 nt, Human
gacccugccucucccaggcag

SEQ ID NO: 1318912 - RNA, 21 nt, Human
gacccuugacaccugcugaga

SEQ ID NO: 1318913 - RNA, 10 nt, Human
gaccuggcag

SEQ ID NO: 1318914 - RNA, 15 nt, Human
gaccuggcagcucug

SEQ ID NO: 1318915 - RNA, 16 nt, Human
gaccuggcagcucugg

SEQ ID NO: 1318916 - RNA, 17 nt, Human
gaccugguacccuccug

SEQ ID NO: 1318917 - RNA, 19 nt, Human
gaccugguacccuccuggc

SEQ ID NO: 1318918 - RNA, 21 nt, Human
gaccugguacccuccuggcuc

SEQ ID NO: 1318919 - RNA, 23 nt, Human
gaccugguacccuccuggcucuu

SEQ ID NO: 1318920 - RNA, 17 nt, Human
gaccuggugcugccucu

SEQ ID NO: 1318921 - RNA, 22 nt, Human
gaccuggugcugccucuaccug

SEQ ID NO: 1318922 - RNA, 12 nt, Human
gaccuguaauca

SEQ ID NO: 1318923 - RNA, 15 nt, Human
gaccugugagcccag

SEQ ID NO: 1318924 - RNA, 16 nt, Human
gaccugugagcccagc

SEQ ID NO: 1318925 - RNA, 19 nt, Human
gaccugugagcccagcugg

SEQ ID NO: 1318926 - RNA, 14 nt, Human
gaccugugcacacc

SEQ ID NO: 1318927 - RNA, 23 nt, Human
gaccugugagcccagcuggguca

SEQ ID NO: 1318928 - RNA, 17 nt, Human
gaccuguuagcagacag

SEQ ID NO: 1318929 - RNA, 18 nt, Human
gaccuguuagcagacagg

SEQ ID NO: 1318930 - RNA, 19 nt, Human
gaccuguuagcagacaggc

SEQ ID NO: 1318931 - RNA, 14 nt, Human
gaccuuaaaugcaa

SEQ ID NO: 1318932 - RNA, 18 nt, Human
gaccuucgggcugugccc

SEQ ID NO: 1318933 - RNA, 19 nt, Human
gaccuucgggcugugcccg

SEQ ID NO: 1318934 - RNA, 12 nt, Human
gaccuuccucau

SEQ ID NO: 1318935 - RNA, 14 nt, Human
gaccuuccucaucc

SEQ ID NO: 1318936 - RNA, 22 nt, Human
gaccuuccucauccaccccauc

SEQ ID NO: 1318937 - RNA, 23 nt, Human
gaccuuccucauccaccccaucc

SEQ ID NO: 1318938 - RNA, 16 nt, Human
gaccuucgggcugugc

SEQ ID NO: 1318939 - RNA, 18 nt, Human
gacggaaggguaaacaau

SEQ ID NO: 1318940 - RNA, 17 nt, Human
gacgucuggguggcccu

SEQ ID NO: 1318941 - RNA, 22 nt, Human
gacgugaccggacuuuucugca

SEQ ID NO: 1318942 - RNA, 12 nt, Human
gacguggcucag

SEQ ID NO: 1318943 - RNA, 14 nt, Human
gacguggcucagcc

SEQ ID NO: 1318944 - RNA, 15 nt, Human
gacguggcucagcca

SEQ ID NO: 1318945 - RNA, 16 nt, Human
gacguggcucagccag

SEQ ID NO: 1318946 - RNA, 18 nt, Human
gacuaaaccauugugcau

SEQ ID NO: 1318947 - RNA, 16 nt, Human
gacguuuuauaagcau

SEQ ID NO: 1318948 - RNA, 22 nt, Human
gacguuuuauaagcaucauuau

SEQ ID NO: 1318949 - RNA, 16 nt, Human
gacuaagagaaguugu

SEQ ID NO: 1318950 - RNA, 23 nt, Human
gacuaagagaaguuguaaaguau

SEQ ID NO: 1318951 - RNA, 18 nt, Human
gacuaagccagcaccgga

SEQ ID NO: 1318952 - RNA, 12 nt, Human
gacuaagccagc

SEQ ID NO: 1318953 - RNA, 22 nt, Human
gacuaauagaaaaguauguucu

SEQ ID NO: 1318954 - RNA, 15 nt, Human
gacuaaucuuauuca

SEQ ID NO: 1318955 - RNA, 22 nt, Human
gacuaaucuuauucauuuucuc

SEQ ID NO: 1318956 - RNA, 23 nt, Human
gacuaacacucagaagccugggg

SEQ ID NO: 1318957 - RNA, 21 nt, Human
gacuaacuagacaccaaaguu

SEQ ID NO: 1318958 - RNA, 23 nt, Human
gacuaacuagacaccaaaguucu

SEQ ID NO: 1318959 - RNA, 14 nt, Human
gacuaacacucaga

SEQ ID NO: 1318960 - RNA, 16 nt, Human
gacuaacacucagaag

SEQ ID NO: 1318961 - RNA, 19 nt, Human
gacuaacacucagaagccu

SEQ ID NO: 1318962 - RNA, 21 nt, Human
gacuaacacucagaagccugg

SEQ ID NO: 1318963 - RNA, 22 nt, Human
gacuaacacucagaagccuggg

SEQ ID NO: 1318964 - RNA, 23 nt, Human
gacuaaccauguguuauguuuuc

SEQ ID NO: 1318965 - RNA, 22 nt, Human
gacuaaaccauugugcauucua

SEQ ID NO: 1318966 - RNA, 19 nt, Human
gacuaaaccauugugcauu

SEQ ID NO: 1318967 - RNA, 18 nt, Human
gacuaaacuuuuuuucug

SEQ ID NO: 1318968 - RNA, 19 nt, Human
gacuaaacuuuuuuucugu

SEQ ID NO: 1318969 - RNA, 20 nt, Human
gacuaaacuuuuuuucugua

SEQ ID NO: 1318970 - RNA, 22 nt, Human
gacuaaacuuuuuuucuguacc

SEQ ID NO: 1318971 - RNA, 16 nt, Human
cuuccuucccugcugu

SEQ ID NO: 1318972 - RNA, 14 nt, Human
cuuccuuccucucc

SEQ ID NO: 1318973 - RNA, 15 nt, Human
cuuccuaccuauccc

SEQ ID NO: 1318974 - RNA, 21 nt, Human
cuuccuugaagaacugcaggc

SEQ ID NO: 1318975 - RNA, 22 nt, Human
cuuccuugaagaacugcaggcc

SEQ ID NO: 1318976 - RNA, 22 nt, Human
cuucgacuguuguuaucuguuu

SEQ ID NO: 1318977 - RNA, 14 nt, Human
cuucgacuguuguu

SEQ ID NO: 1318978 - RNA, 16 nt, Human
cuucgacacuguucuu

SEQ ID NO: 1318979 - RNA, 17 nt, Human
cuucgacacuguucuua

SEQ ID NO: 1318980 - RNA, 22 nt, Human
cuucucagauuucugaggaaau

SEQ ID NO: 1318981 - RNA, 19 nt, Human
cuucucagauuucugagga

SEQ ID NO: 1318982 - RNA, 14 nt, Human
cuucucagauuucu

SEQ ID NO: 1318983 - RNA, 17 nt, Human
cuucucaggacacaggc

SEQ ID NO: 1318984 - RNA, 18 nt, Human
cuucucaggacacaggcc

SEQ ID NO: 1318985 - RNA, 19 nt, Human
cuucucaggacacaggccu

SEQ ID NO: 1318986 - RNA, 20 nt, Human
cuucucaggacacaggccug

SEQ ID NO: 1318987 - RNA, 21 nt, Human
cuucucaggacacaggccugu

SEQ ID NO: 1318988 - RNA, 22 nt, Human
cuucucaggacacaggccugug

SEQ ID NO: 1318989 - RNA, 23 nt, Human
cuucucaggacacaggccugugu

SEQ ID NO: 1318990 - RNA, 15 nt, Human
cuucguuuaaugaau

SEQ ID NO: 1318991 - RNA, 15 nt, Human
cuucguuuauuuuca

SEQ ID NO: 1318992 - RNA, 16 nt, Human
cuucguuuauuuucaa

SEQ ID NO: 1318993 - RNA, 18 nt, Human
cuucguuuauuuucaaga

SEQ ID NO: 1318994 - RNA, 19 nt, Human
cuucuaaacccaauccaaa

SEQ ID NO: 1318995 - RNA, 18 nt, Human
cuucuaaacuuccccauc

SEQ ID NO: 1318996 - RNA, 19 nt, Human
cuucuaaacuuccccaucu

SEQ ID NO: 1318997 - RNA, 22 nt, Human
cuucuaaacuuccccaucuucu

SEQ ID NO: 1318998 - RNA, 16 nt, Human
cuucgauacaccgggc

SEQ ID NO: 1318999 - RNA, 16 nt, Human
cuucgaguucccaggg

SEQ ID NO: 1319000 - RNA, 16 nt, Human
cuucgggcccuuccca

SEQ ID NO: 1319001 - RNA, 17 nt, Human
cuucgggcccuucccac

SEQ ID NO: 1319002 - RNA, 14 nt, Human
cuucgggcugugcc

SEQ ID NO: 1319003 - RNA, 15 nt, Human
cuucgggcugugccc

SEQ ID NO: 1319004 - RNA, 23 nt, Human
cuucgacuguuguuaucuguuug

SEQ ID NO: 1319005 - RNA, 17 nt, Human
cuucggccuccauccug

SEQ ID NO: 1319006 - RNA, 19 nt, Human
cuucggccuccauccugag

SEQ ID NO: 1319007 - RNA, 18 nt, Human
cuucggccuccauccuga

SEQ ID NO: 1319008 - RNA, 19 nt, Human
cuucuccauggcccugcca

SEQ ID NO: 1319009 - RNA, 15 nt, Human
cuucucccaauucau

SEQ ID NO: 1319010 - RNA, 17 nt, Human
cuucuccauggcccugc

SEQ ID NO: 1319011 - RNA, 16 nt, Human
cuucuccauccacaug

SEQ ID NO: 1319012 - RNA, 14 nt, Human
cuucuccauccaca

SEQ ID NO: 1319013 - RNA, 20 nt, Human
cuucucauuuuuuaaaaaag

SEQ ID NO: 1319014 - RNA, 18 nt, Human
cuucucccaggcaaggcu

SEQ ID NO: 1319015 - RNA, 19 nt, Human
cuucucccaggcaaggcug

SEQ ID NO: 1319016 - RNA, 21 nt, Human
cuucucccaggcaaggcugug

SEQ ID NO: 1319017 - RNA, 20 nt, Human
cuucucccaggcaaggcugu

SEQ ID NO: 1319018 - RNA, 12 nt, Human
cuucucccacuc

SEQ ID NO: 1319019 - RNA, 13 nt, Human
cuucucccacucu

SEQ ID NO: 1319020 - RNA, 15 nt, Human
cuucucccacucucc

SEQ ID NO: 1319021 - RNA, 16 nt, Human
cuucucccacucuccu

SEQ ID NO: 1319022 - RNA, 17 nt, Human
cuucucccacucuccua

SEQ ID NO: 1319023 - RNA, 20 nt, Human
cuucucccacucuccuaggc

SEQ ID NO: 1319024 - RNA, 19 nt, Human
cuucucccacucuccuagg

SEQ ID NO: 1319025 - RNA, 14 nt, Human
cuucucccaggcaa

SEQ ID NO: 1319026 - RNA, 15 nt, Human
cuucucccaggcaag

SEQ ID NO: 1319027 - RNA, 17 nt, Human
cuucucccaggcaaggc

SEQ ID NO: 1319028 - RNA, 14 nt, Human
cuucuccuuucaca

SEQ ID NO: 1319029 - RNA, 17 nt, Human
cuucuccuuucacaacc

SEQ ID NO: 1319030 - RNA, 17 nt, Human
cuucuccccagcuccca

SEQ ID NO: 1319031 - RNA, 18 nt, Human
cuucuccccagcucccag

SEQ ID NO: 1319032 - RNA, 20 nt, Human
cuucuccccagcucccagga

SEQ ID NO: 1319033 - RNA, 20 nt, Human
cuucuccuuucacaaccuuc

SEQ ID NO: 1319034 - RNA, 22 nt, Human
cuucuccuuucacaaccuucug

SEQ ID NO: 1319035 - RNA, 19 nt, Human
cuucuccccagcucccagg

SEQ ID NO: 1319036 - RNA, 21 nt, Human
cuucucguccucguuuguguu

SEQ ID NO: 1319037 - RNA, 20 nt, Human
cuucucuaauucuuccuuug

SEQ ID NO: 1319038 - RNA, 23 nt, Human
cuucucuaauucuuccuuuguaa

SEQ ID NO: 1319039 - RNA, 20 nt, Human
cuucugccuuagucucaguu

SEQ ID NO: 1319040 - RNA, 21 nt, Human
cuucugccuuagucucaguuu

SEQ ID NO: 1319041 - RNA, 14 nt, Human
cuucugccuucuca

SEQ ID NO: 1319042 - RNA, 16 nt, Human
cuucugccuucucaug

SEQ ID NO: 1319043 - RNA, 14 nt, Human
cuucugcucagcuc

SEQ ID NO: 1319044 - RNA, 15 nt, Human
cuucugcucagcucu

SEQ ID NO: 1319045 - RNA, 16 nt, Human
cuucugcucagcucug

SEQ ID NO: 1319046 - RNA, 18 nt, Human
cuucugcucagcucuggg

SEQ ID NO: 1319047 - RNA, 15 nt, Human
cuucuggacugguuu

SEQ ID NO: 1319048 - RNA, 18 nt, Human
cuucagcgguuuauauaa

SEQ ID NO: 1319049 - RNA, 17 nt, Human
cuuauuuuugacagugu

SEQ ID NO: 1319050 - RNA, 14 nt, Human
cuucaggcucuucu

SEQ ID NO: 1319051 - RNA, 13 nt, Human
cuucagcucugaa

SEQ ID NO: 1319052 - RNA, 14 nt, Human
cuucagcucugaaa

SEQ ID NO: 1319053 - RNA, 15 nt, Human
cuucaggcucuucuc

SEQ ID NO: 1319054 - RNA, 16 nt, Human
cuucaggcucuucucc

SEQ ID NO: 1319055 - RNA, 17 nt, Human
cuucaggcucuucuccu

SEQ ID NO: 1319056 - RNA, 18 nt, Human
cuucaggcucuucuccuu

SEQ ID NO: 1319057 - RNA, 14 nt, Human
cuucauuuccuccg

SEQ ID NO: 1319058 - RNA, 15 nt, Human
cuuccaaugucugga

SEQ ID NO: 1319059 - RNA, 13 nt, Human
cuuccacaggguc

SEQ ID NO: 1319060 - RNA, 15 nt, Human
cuuccacaggguccc

SEQ ID NO: 1319061 - RNA, 18 nt, Human
cuuccacagggucccaca

SEQ ID NO: 1319062 - RNA, 16 nt, Human
cuuccaaugucuggag

SEQ ID NO: 1319063 - RNA, 19 nt, Human
cuuccaaauccccuaagca

SEQ ID NO: 1319064 - RNA, 20 nt, Human
cuuccaaauccccuaagcag

SEQ ID NO: 1319065 - RNA, 13 nt, Human
cuucauuuggaga

SEQ ID NO: 1319066 - RNA, 14 nt, Human
cuucauuuggagau

SEQ ID NO: 1319067 - RNA, 18 nt, Human
cuucauuugggaugcuac

SEQ ID NO: 1319068 - RNA, 16 nt, Human
cuuccaaauccccuaa

SEQ ID NO: 1319069 - RNA, 14 nt, Human
cuucccuuuucugu

SEQ ID NO: 1319070 - RNA, 16 nt, Human
cuucccucucuggaga

SEQ ID NO: 1319071 - RNA, 16 nt, Human
cuucccuuuucuguuc

SEQ ID NO: 1319072 - RNA, 14 nt, Human
cuuccgccacuggg

SEQ ID NO: 1319073 - RNA, 15 nt, Human
cuuccgccacugggg

SEQ ID NO: 1319074 - RNA, 16 nt, Human
cuuccgccacuggggc

SEQ ID NO: 1319075 - RNA, 22 nt, Human
cuuccgccacuggggcucagag

SEQ ID NO: 1319076 - RNA, 17 nt, Human
cuuccgccacuggggcu

SEQ ID NO: 1319077 - RNA, 22 nt, Human
cuuccgcuuggagcuauuuucc

SEQ ID NO: 1319078 - RNA, 23 nt, Human
cuuccgcuuggagcuauuuucca

SEQ ID NO: 1319079 - RNA, 13 nt, Human
cuuccggccccuc

SEQ ID NO: 1319080 - RNA, 17 nt, Human
cuuccggccccuccccu

SEQ ID NO: 1319081 - RNA, 22 nt, Human
cuuccggggaaggauuuugcag

SEQ ID NO: 1319082 - RNA, 19 nt, Human
cuuccuaccaagucaaacu

SEQ ID NO: 1319083 - RNA, 17 nt, Human
cuuccuaccaagucaaa

SEQ ID NO: 1319084 - RNA, 15 nt, Human
cuucccgcucagccc

SEQ ID NO: 1319085 - RNA, 16 nt, Human
cuucccgcucagcccu

SEQ ID NO: 1319086 - RNA, 17 nt, Human
cuucccgcucagcccuc

SEQ ID NO: 1319087 - RNA, 18 nt, Human
cuucccgcucagcccucc

SEQ ID NO: 1319088 - RNA, 17 nt, Human
cuucccucaccuuggca

SEQ ID NO: 1319089 - RNA, 19 nt, Human
cuucccuccccucuaguuu

SEQ ID NO: 1319090 - RNA, 20 nt, Human
cuucccuccccucuaguuuu

SEQ ID NO: 1319091 - RNA, 14 nt, Human
cuucccucucugga

SEQ ID NO: 1319092 - RNA, 16 nt, Human
cuuccagcuagugacc

SEQ ID NO: 1319093 - RNA, 18 nt, Human
cuuccagcuagugaccca

SEQ ID NO: 1319094 - RNA, 22 nt, Human
cuuccagcuagugacccacaug

SEQ ID NO: 1319095 - RNA, 12 nt, Human
cuuccagcuccu

SEQ ID NO: 1319096 - RNA, 13 nt, Human
cuuccagcuccug

SEQ ID NO: 1319097 - RNA, 15 nt, Human
cuuccagcuccugua

SEQ ID NO: 1319098 - RNA, 19 nt, Human
cuuccacagggucccacag

SEQ ID NO: 1319099 - RNA, 22 nt, Human
cuuccacagggucccacagcca

SEQ ID NO: 1319100 - RNA, 23 nt, Human
cuuccacagggucccacagccac

SEQ ID NO: 1319101 - RNA, 23 nt, Human
cuuccaccaaguuggaacauccu

SEQ ID NO: 1319102 - RNA, 13 nt, Human
cuuccaccacaga

SEQ ID NO: 1319103 - RNA, 20 nt, Human
cuuccagucuuccugacacu

SEQ ID NO: 1319104 - RNA, 21 nt, Human
cuuccagucuuccugacacuu

SEQ ID NO: 1319105 - RNA, 14 nt, Human
cuuccagcuccugu

SEQ ID NO: 1319106 - RNA, 16 nt, Human
cuuccagguguuacug

SEQ ID NO: 1319107 - RNA, 19 nt, Human
cuuccagguguuacuguaa

SEQ ID NO: 1319108 - RNA, 20 nt, Human
cuuccagguguuacuguaau

SEQ ID NO: 1319109 - RNA, 22 nt, Human
cuuccagguguuacuguaauuc

SEQ ID NO: 1319110 - RNA, 22 nt, Human
cuuccagucuuccugacacuuu

SEQ ID NO: 1319111 - RNA, 18 nt, Human
cuucccagaggggccugc

SEQ ID NO: 1319112 - RNA, 19 nt, Human
cuucccagaggggccugcc

SEQ ID NO: 1319113 - RNA, 22 nt, Human
cuucccagaggggccugccacc

SEQ ID NO: 1319114 - RNA, 16 nt, Human
cuucccagcuaggaag

SEQ ID NO: 1319115 - RNA, 21 nt, Human
cuucccagaggggccugccac

SEQ ID NO: 1319116 - RNA, 19 nt, Human
cuguuuuauaauuuuguga

SEQ ID NO: 1319117 - RNA, 16 nt, Human
cuguuuuaaaaaccug

SEQ ID NO: 1319118 - RNA, 12 nt, Human
cuguuuucuucu

SEQ ID NO: 1319119 - RNA, 18 nt, Human
cuguuuucuucuauucca

SEQ ID NO: 1319120 - RNA, 17 nt, Human
cuguuuugaaggcaaaa

SEQ ID NO: 1319121 - RNA, 13 nt, Human
cuguuuuguuaua

SEQ ID NO: 1319122 - RNA, 17 nt, Human
cuguuuuguuauauaau

SEQ ID NO: 1319123 - RNA, 18 nt, Human
cuguuuuguuauauaauu

SEQ ID NO: 1319124 - RNA, 20 nt, Human
cuguuuuguuauauaauuua

SEQ ID NO: 1319125 - RNA, 19 nt, Human
cuguuuuguuauauaauuu

SEQ ID NO: 1319126 - RNA, 13 nt, Human
cuguuuuguugac

SEQ ID NO: 1319127 - RNA, 14 nt, Human
cuguuuuguugaca

SEQ ID NO: 1319128 - RNA, 16 nt, Human
cuguuuuguugacauu

SEQ ID NO: 1319129 - RNA, 17 nt, Human
cuguuuuguugacauuc

SEQ ID NO: 1319130 - RNA, 19 nt, Human
cuguuuuguugacauucug

SEQ ID NO: 1319131 - RNA, 20 nt, Human
cuguuuuguugacauucuga

SEQ ID NO: 1319132 - RNA, 21 nt, Human
cuguuuuguugacauucugaa

SEQ ID NO: 1319133 - RNA, 22 nt, Human
cuguuuuguugacauucugaau

SEQ ID NO: 1319134 - RNA, 16 nt, Human
cuguuuuguuucgcuc

SEQ ID NO: 1319135 - RNA, 23 nt, Human
cuguuuuguuucgcucuuugaga

SEQ ID NO: 1319136 - RNA, 15 nt, Human
cuguuuuucggacag

SEQ ID NO: 1319137 - RNA, 17 nt, Human
cuguuuuucggacaguu

SEQ ID NO: 1319138 - RNA, 20 nt, Human
cuguuuuucggacaguuuau

SEQ ID NO: 1319139 - RNA, 17 nt, Human
cuguuuuucuaacuggg

SEQ ID NO: 1319140 - RNA, 22 nt, Human
cuguuuuucggacaguuuauuu

SEQ ID NO: 1319141 - RNA, 16 nt, Human
cuguuuccuagcugug

SEQ ID NO: 1319142 - RNA, 20 nt, Human
cuguuuauucauaugcauau

SEQ ID NO: 1319143 - RNA, 17 nt, Human
cuguuuauucauaugca

SEQ ID NO: 1319144 - RNA, 16 nt, Human
cuguuuauucauaugc

SEQ ID NO: 1319145 - RNA, 18 nt, Human
cuguuuauuaaucuuagu

SEQ ID NO: 1319146 - RNA, 16 nt, Human
cuguuucccaggccca

SEQ ID NO: 1319147 - RNA, 17 nt, Human
cuguuuccuagcugugu

SEQ ID NO: 1319148 - RNA, 22 nt, Human
cuguuuauuaaaguacaaccau

SEQ ID NO: 1319149 - RNA, 14 nt, Human
cuguuuauuaaucu

SEQ ID NO: 1319150 - RNA, 16 nt, Human
cuguuuauuaaucuua

SEQ ID NO: 1319151 - RNA, 15 nt, Human
cuguuuacugcaagg

SEQ ID NO: 1319152 - RNA, 17 nt, Human
cuguuuacugcaagguu

SEQ ID NO: 1319153 - RNA, 13 nt, Human
cuguuuagaacac

SEQ ID NO: 1319154 - RNA, 14 nt, Human
cuguuuagaacaca

SEQ ID NO: 1319155 - RNA, 20 nt, Human
cuguuuaguagcagugauug

SEQ ID NO: 1319156 - RNA, 17 nt, Human
cugguugggcagccaga

SEQ ID NO: 1319157 - RNA, 13 nt, Human
cugguugggcagc

SEQ ID NO: 1319158 - RNA, 17 nt, Human
cugguugaugccuguga

SEQ ID NO: 1319159 - RNA, 17 nt, Human
cugguucucaauuccaa

SEQ ID NO: 1319160 - RNA, 20 nt, Human
cugguucuuguguuggcugu

SEQ ID NO: 1319161 - RNA, 14 nt, Human
cuguuuuuuuguua

SEQ ID NO: 1319162 - RNA, 22 nt, Human
cuuaaaugcaaccauuugaaac

SEQ ID NO: 1319163 - RNA, 16 nt, Human
cuuaaauguuauuauc

SEQ ID NO: 1319164 - RNA, 16 nt, Human
cuuaacggaccaaagc

SEQ ID NO: 1319165 - RNA, 17 nt, Human
cuuaacggaccaaagca

SEQ ID NO: 1319166 - RNA, 20 nt, Human
cuuaacggaccaaagcaaga

SEQ ID NO: 1319167 - RNA, 16 nt, Human
cuuaacuggucuccuu

SEQ ID NO: 1319168 - RNA, 21 nt, Human
cuuaagaagacugcauuauau

SEQ ID NO: 1319169 - RNA, 14 nt, Human
cuuaacuucuugcu

SEQ ID NO: 1319170 - RNA, 15 nt, Human
cuuaacuucuugcuu

SEQ ID NO: 1319171 - RNA, 18 nt, Human
cuuaacuucuugcuucuu

SEQ ID NO: 1319172 - RNA, 21 nt, Human
cuuaacuucuugcuucuuucu

SEQ ID NO: 1319173 - RNA, 22 nt, Human
cuuaacuucuugcuucuuucua

SEQ ID NO: 1319174 - RNA, 15 nt, Human
cuuaagcaucuggcu

SEQ ID NO: 1319175 - RNA, 17 nt, Human
cuuaagcaucuggcucu

SEQ ID NO: 1319176 - RNA, 18 nt, Human
cuuaagcaucuggcucua

SEQ ID NO: 1319177 - RNA, 23 nt, Human
cuuaagcaucuggcucuaauuca

SEQ ID NO: 1319178 - RNA, 19 nt, Human
cuuaagcccagugcacuga

SEQ ID NO: 1319179 - RNA, 22 nt, Human
cuuaagcccagugcacugaaag

SEQ ID NO: 1319180 - RNA, 18 nt, Human
cuuaagucagaacagcag

SEQ ID NO: 1319181 - RNA, 17 nt, Human
cuuaagucagaacagca

SEQ ID NO: 1319182 - RNA, 16 nt, Human
cuuaagugcugcaauu

SEQ ID NO: 1319183 - RNA, 18 nt, Human
cuuaaugccacuaaauug

SEQ ID NO: 1319184 - RNA, 16 nt, Human
cuuaaguuuauacucu

SEQ ID NO: 1319185 - RNA, 19 nt, Human
cuuaaguuaguuccacuga

SEQ ID NO: 1319186 - RNA, 21 nt, Human
cuuaaguuaguuccacugaga

SEQ ID NO: 1319187 - RNA, 21 nt, Human
cuuaaucagauagauauuccu

SEQ ID NO: 1319188 - RNA, 20 nt, Human
cuuaaucagguccucagaga

SEQ ID NO: 1319189 - RNA, 22 nt, Human
cuuaaucagguccucagagaau

SEQ ID NO: 1319190 - RNA, 19 nt, Human
cuuauaguacaugauaaau

SEQ ID NO: 1319191 - RNA, 21 nt, Human
cuuauacaauuaugaagauuu

SEQ ID NO: 1319192 - RNA, 14 nt, Human
cuuauaguuacugu

SEQ ID NO: 1319193 - RNA, 17 nt, Human
cuuauaguacaugauaa

SEQ ID NO: 1319194 - RNA, 13 nt, Human
cuuauaguacaug

SEQ ID NO: 1319195 - RNA, 14 nt, Human
cuuauaauuguucu

SEQ ID NO: 1319196 - RNA, 21 nt, Human
cuuauaauuguucucagaauc

SEQ ID NO: 1319197 - RNA, 15 nt, Human
cuuauaguuacugug

SEQ ID NO: 1319198 - RNA, 16 nt, Human
cuuauaguuacugugu

SEQ ID NO: 1319199 - RNA, 18 nt, Human
cuuauaguuacuguguaa

SEQ ID NO: 1319200 - RNA, 19 nt, Human
cuuauaguuacuguguaau

SEQ ID NO: 1319201 - RNA, 21 nt, Human
cuuauaguuacuguguaauua

SEQ ID NO: 1319202 - RNA, 14 nt, Human
cuuauaguucuagg

SEQ ID NO: 1319203 - RNA, 15 nt, Human
cuuauaguucuaggc

SEQ ID NO: 1319204 - RNA, 16 nt, Human
cuuauaguucuaggca

SEQ ID NO: 1319205 - RNA, 14 nt, Human
cuuauaauuuaaaa

SEQ ID NO: 1319206 - RNA, 17 nt, Human
cuuauaauaaaggacug

SEQ ID NO: 1319207 - RNA, 22 nt, Human
cuuauaauucuuucaauacaga

SEQ ID NO: 1319208 - RNA, 20 nt, Human
cuuauaauaaaggacuguaa

SEQ ID NO: 1319209 - RNA, 16 nt, Human
cuuauaauaaaggacu

SEQ ID NO: 1319210 - RNA, 14 nt, Human
cuuauaauaaagga

SEQ ID NO: 1319211 - RNA, 13 nt, Human
cuuauaauuuaaa

SEQ ID NO: 1319212 - RNA, 21 nt, Human
cuuaggguuaugauuaaguaa

SEQ ID NO: 1319213 - RNA, 20 nt, Human
cuuaggugauccacucgccu

SEQ ID NO: 1319214 - RNA, 21 nt, Human
cuuagaucuggcauguuagcc

SEQ ID NO: 1319215 - RNA, 12 nt, Human
cuuauuuucaag

SEQ ID NO: 1319216 - RNA, 14 nt, Human
cuuauuuucaagaa

SEQ ID NO: 1319217 - RNA, 15 nt, Human
cuuauuuucaagaaa

SEQ ID NO: 1319218 - RNA, 18 nt, Human
cuuauuuucaagaaacug

SEQ ID NO: 1319219 - RNA, 19 nt, Human
cuuauuuucaagaaacuga

SEQ ID NO: 1319220 - RNA, 18 nt, Human
cuuaugaaaagaauuguu

SEQ ID NO: 1319221 - RNA, 21 nt, Human
cuuaugaaaagaauuguuggg

SEQ ID NO: 1319222 - RNA, 13 nt, Human
cuuaugaaaugug

SEQ ID NO: 1319223 - RNA, 21 nt, Human
cuuaugacaucacuuguacaa

SEQ ID NO: 1319224 - RNA, 22 nt, Human
cuuaugacaucacuuguacaaa

SEQ ID NO: 1319225 - RNA, 23 nt, Human
cuuaugauagcaaauggccucau

SEQ ID NO: 1319226 - RNA, 14 nt, Human
cuuaucaaaggaca

SEQ ID NO: 1319227 - RNA, 14 nt, Human
cuuauauuguucac

SEQ ID NO: 1319228 - RNA, 16 nt, Human
cuuauauuguucacuu

SEQ ID NO: 1319229 - RNA, 16 nt, Human
cuuaucaaaggacacc

SEQ ID NO: 1319230 - RNA, 22 nt, Human
cuuaucugaucagaacaaaugu

SEQ ID NO: 1319231 - RNA, 11 nt, Human
cuuaugaaaag

SEQ ID NO: 1319232 - RNA, 13 nt, Human
cuuaugaaaagaa

SEQ ID NO: 1319233 - RNA, 14 nt, Human
cuuaugaaaagaau

SEQ ID NO: 1319234 - RNA, 19 nt, Human
cuuagaugcaguucugaag

SEQ ID NO: 1319235 - RNA, 20 nt, Human
cuuagaugcaguucugaaga

SEQ ID NO: 1319236 - RNA, 15 nt, Human
cuuagaucuggcaug

SEQ ID NO: 1319237 - RNA, 16 nt, Human
cuuagaucuggcaugu

SEQ ID NO: 1319238 - RNA, 20 nt, Human
cuuagaccaccaagccuuga

SEQ ID NO: 1319239 - RNA, 17 nt, Human
cuuagaguuggccauau

SEQ ID NO: 1319240 - RNA, 15 nt, Human
cuuagaccaccaagc

SEQ ID NO: 1319241 - RNA, 17 nt, Human
cuuagaccaccaagccu

SEQ ID NO: 1319242 - RNA, 19 nt, Human
cuuagaccaccaagccuug

SEQ ID NO: 1319243 - RNA, 17 nt, Human
cuuagaaauugcauuuc

SEQ ID NO: 1319244 - RNA, 16 nt, Human
cuuacuuuuuauauau

SEQ ID NO: 1319245 - RNA, 17 nt, Human
cuuacuuuuuauauaua

SEQ ID NO: 1319246 - RNA, 14 nt, Human
cuuacuuuuuauau

SEQ ID NO: 1319247 - RNA, 15 nt, Human
cuuagaaccuuucuu

SEQ ID NO: 1319248 - RNA, 19 nt, Human
cuuacuaguuucccuugca

SEQ ID NO: 1319249 - RNA, 15 nt, Human
cuuaauguacauagu

SEQ ID NO: 1319250 - RNA, 13 nt, Human
cuuaauguacaua

SEQ ID NO: 1319251 - RNA, 17 nt, Human
cuuaauguauguuacca

SEQ ID NO: 1319252 - RNA, 14 nt, Human
cuuaauguaucaaa

SEQ ID NO: 1319253 - RNA, 16 nt, Human
cuuaauguaucaaacu

SEQ ID NO: 1319254 - RNA, 18 nt, Human
cuuaauguaucaaacugu

SEQ ID NO: 1319255 - RNA, 23 nt, Human
cuuaauguaucaaacuguauaac

SEQ ID NO: 1319256 - RNA, 14 nt, Human
cuuaauguauguua

SEQ ID NO: 1319257 - RNA, 16 nt, Human
cuuaauggcugauaau

SEQ ID NO: 1319258 - RNA, 20 nt, Human
cuuaauggcugauaauuuua

SEQ ID NO: 1319259 - RNA, 22 nt, Human
cuuaauggcugauaauuuuaaa

SEQ ID NO: 1319260 - RNA, 21 nt, Human
cuuaauguauguuaccaaaaa

SEQ ID NO: 1319261 - RNA, 19 nt, Human
cuuaccuuuuuauuugcau

SEQ ID NO: 1319262 - RNA, 23 nt, Human
cuuacgaauacuuuugcccuuug

SEQ ID NO: 1319263 - RNA, 20 nt, Human
cuuaccuuuuuauuugcaug

SEQ ID NO: 1319264 - RNA, 15 nt, Human
cuuacuccuguggga

SEQ ID NO: 1319265 - RNA, 15 nt, Human
cuuacucccaggcac

SEQ ID NO: 1319266 - RNA, 12 nt, Human
cuuacuccugug

SEQ ID NO: 1319267 - RNA, 13 nt, Human
cuuacuccugugg

SEQ ID NO: 1319268 - RNA, 14 nt, Human
cuuacuccuguggg

SEQ ID NO: 1319269 - RNA, 16 nt, Human
cuuacuccugugggag

SEQ ID NO: 1319270 - RNA, 23 nt, Human
cuuacuuaaacccagcucccuuc

SEQ ID NO: 1319271 - RNA, 18 nt, Human
cuuacuuauuaucuucag

SEQ ID NO: 1319272 - RNA, 14 nt, Human
cuuacuucucacua

SEQ ID NO: 1319273 - RNA, 19 nt, Human
cuuacuuggaacugaaggg

SEQ ID NO: 1319274 - RNA, 14 nt, Human
cuuacuuggaacug

SEQ ID NO: 1319275 - RNA, 20 nt, Human
cuugcuugauuguauggugg

SEQ ID NO: 1319276 - RNA, 21 nt, Human
cuugcugcaguaugaaaauaa

SEQ ID NO: 1319277 - RNA, 21 nt, Human
cuugcugaaacgcaucuaguu

SEQ ID NO: 1319278 - RNA, 22 nt, Human
cuugcugaaacgcaucuaguuc

SEQ ID NO: 1319279 - RNA, 20 nt, Human
cuugcugcaagcacagcccu

SEQ ID NO: 1319280 - RNA, 21 nt, Human
cuugcugcaagcacagcccuu

SEQ ID NO: 1319281 - RNA, 13 nt, Human
cuugcuucccuaa

SEQ ID NO: 1319282 - RNA, 17 nt, Human
cuugcuucccuaaucua

SEQ ID NO: 1319283 - RNA, 14 nt, Human
cuugcuucuuucua

SEQ ID NO: 1319284 - RNA, 15 nt, Human
cuugcuucuuucuag

SEQ ID NO: 1319285 - RNA, 18 nt, Human
cuugcuucuuucuagaaa

SEQ ID NO: 1319286 - RNA, 19 nt, Human
cuugcuucuuucuagaaag

SEQ ID NO: 1319287 - RNA, 19 nt, Human
cuugcucuugaugccuggc

SEQ ID NO: 1319288 - RNA, 18 nt, Human
cuugcucuugaugccugg

SEQ ID NO: 1319289 - RNA, 17 nt, Human
cuugcucuugaugccug

SEQ ID NO: 1319290 - RNA, 23 nt, Human
cuugccacaccccccaccccuag

SEQ ID NO: 1319291 - RNA, 19 nt, Human
cuugccacaccccccaccc

SEQ ID NO: 1319292 - RNA, 13 nt, Human
cuugccacacccc

SEQ ID NO: 1319293 - RNA, 20 nt, Human
cuugccaaggcagaggccug

SEQ ID NO: 1319294 - RNA, 19 nt, Human
cuugccaaggcagaggccu

SEQ ID NO: 1319295 - RNA, 13 nt, Human
cuugccacugccu

SEQ ID NO: 1319296 - RNA, 13 nt, Human
cuugccaaauuua

SEQ ID NO: 1319297 - RNA, 14 nt, Human
cuugccaaggcaga

SEQ ID NO: 1319298 - RNA, 17 nt, Human
cuugccaaggcagaggc

SEQ ID NO: 1319299 - RNA, 19 nt, Human
cuugaggggaagcuagucu

SEQ ID NO: 1319300 - RNA, 21 nt, Human
cuugaggggaagcuagucuuu

SEQ ID NO: 1319301 - RNA, 23 nt, Human
cuugaggggaagcuagucuuuug

SEQ ID NO: 1319302 - RNA, 15 nt, Human
cuugaggggaccagg

SEQ ID NO: 1319303 - RNA, 16 nt, Human
cuugaggggaccagga

SEQ ID NO: 1319304 - RNA, 17 nt, Human
cuugaggggaccaggag

SEQ ID NO: 1319305 - RNA, 18 nt, Human
cuugaggggaccaggagu

SEQ ID NO: 1319306 - RNA, 21 nt, Human
cuugaggggaccaggaguggg

SEQ ID NO: 1319307 - RNA, 17 nt, Human
cuucuggcacuuggaga

SEQ ID NO: 1319308 - RNA, 12 nt, Human
cuucuggccagg

SEQ ID NO: 1319309 - RNA, 16 nt, Human
cuucuggauggauuuu

SEQ ID NO: 1319310 - RNA, 18 nt, Human
cuucuggauggauuuuau

SEQ ID NO: 1319311 - RNA, 22 nt, Human
cuucuggccaggaagcuuuggu

SEQ ID NO: 1319312 - RNA, 13 nt, Human
cuucuggccagga

SEQ ID NO: 1319313 - RNA, 15 nt, Human
cuucuggccaggaag

SEQ ID NO: 1319314 - RNA, 13 nt, Human
cuucuggccuugu

SEQ ID NO: 1319315 - RNA, 17 nt, Human
cuucuggccaggaagcu

SEQ ID NO: 1319316 - RNA, 15 nt, Human
cuucugggagggcag

SEQ ID NO: 1319317 - RNA, 19 nt, Human
cuucugggagggcagcagg

SEQ ID NO: 1319318 - RNA, 18 nt, Human
cuugagaaaccccucgau

SEQ ID NO: 1319319 - RNA, 22 nt, Human
cuugagaaauauggacacuuaa

SEQ ID NO: 1319320 - RNA, 19 nt, Human
cuugaggggaccaggagug

SEQ ID NO: 1319321 - RNA, 13 nt, Human
cuugagggggaag

SEQ ID NO: 1319322 - RNA, 20 nt, Human
cuugagggggaaggauucug

SEQ ID NO: 1319323 - RNA, 15 nt, Human
cuugcacagucacug

SEQ ID NO: 1319324 - RNA, 19 nt, Human
cuugcacagucacugcucu

SEQ ID NO: 1319325 - RNA, 23 nt, Human
cuugcacagucacugcucuucag

SEQ ID NO: 1319326 - RNA, 22 nt, Human
cuugcaccccaaagcuuuccug

SEQ ID NO: 1319327 - RNA, 23 nt, Human
cuugcaccccaaagcuuuccugc

SEQ ID NO: 1319328 - RNA, 16 nt, Human
cuuggggcugaugcag

SEQ ID NO: 1319329 - RNA, 16 nt, Human
cuugggcucugaugaa

SEQ ID NO: 1319330 - RNA, 17 nt, Human
cuugggcucugaugaaa

SEQ ID NO: 1319331 - RNA, 18 nt, Human
cuugggcucugaugaaaa

SEQ ID NO: 1319332 - RNA, 17 nt, Human
cuugggccuaggcugca

SEQ ID NO: 1319333 - RNA, 23 nt, Human
cuugggcucagggaccauggcuu

SEQ ID NO: 1319334 - RNA, 13 nt, Human
cuugggcucccug

SEQ ID NO: 1319335 - RNA, 21 nt, Human
cuugggcucccuguaaccucu

SEQ ID NO: 1319336 - RNA, 21 nt, Human
cuugggcuccgugugggagac

SEQ ID NO: 1319337 - RNA, 13 nt, Human
cuugggcucugau

SEQ ID NO: 1319338 - RNA, 18 nt, Human
cuuggggcugaugcaguu

SEQ ID NO: 1319339 - RNA, 18 nt, Human
cuuggggcucacacaccu

SEQ ID NO: 1319340 - RNA, 16 nt, Human
cuuggggcuggagagg

SEQ ID NO: 1319341 - RNA, 19 nt, Human
cuugguugguaggguggga

SEQ ID NO: 1319342 - RNA, 15 nt, Human
cuugguugucuggca

SEQ ID NO: 1319343 - RNA, 15 nt, Human
cuugguuugccuucc

SEQ ID NO: 1319344 - RNA, 10 nt, Human
cuuguaauua

SEQ ID NO: 1319345 - RNA, 11 nt, Human
cuuguaauuau

SEQ ID NO: 1319346 - RNA, 14 nt, Human
cuuguaauuaugga

SEQ ID NO: 1319347 - RNA, 13 nt, Human
cuuguaauucuaa

SEQ ID NO: 1319348 - RNA, 15 nt, Human
cuuguaauucuaaau

SEQ ID NO: 1319349 - RNA, 12 nt, Human
cuuguacaaaau

SEQ ID NO: 1319350 - RNA, 16 nt, Human
cuuguaauucuaaaug

SEQ ID NO: 1319351 - RNA, 23 nt, Human
cuuguaauucuaaaugaauguuu

SEQ ID NO: 1319352 - RNA, 18 nt, Human
cuuguaauuauggaguca

SEQ ID NO: 1319353 - RNA, 22 nt, Human
cuuguaauuuuacacgcuuuug

SEQ ID NO: 1319354 - RNA, 22 nt, Human
cuuguaauuuuuuuaauuuaca

SEQ ID NO: 1319355 - RNA, 13 nt, Human
cuuguacaaaaua

SEQ ID NO: 1319356 - RNA, 17 nt, Human
cuugggauuugcugugu

SEQ ID NO: 1319357 - RNA, 13 nt, Human
cuugggcaccccc

SEQ ID NO: 1319358 - RNA, 17 nt, Human
cuugggcacccccagcc

SEQ ID NO: 1319359 - RNA, 18 nt, Human
cuugggcacccccagccu

SEQ ID NO: 1319360 - RNA, 19 nt, Human
cuugggcacccccagccug

SEQ ID NO: 1319361 - RNA, 20 nt, Human
cuugggcacccccagccugg

SEQ ID NO: 1319362 - RNA, 22 nt, Human
cuugggcacccccagccugggc

SEQ ID NO: 1319363 - RNA, 13 nt, Human
cuugggcagagcu

SEQ ID NO: 1319364 - RNA, 21 nt, Human
cuugggcacccccagccuggg

SEQ ID NO: 1319365 - RNA, 15 nt, Human
cuugggccagaagua

SEQ ID NO: 1319366 - RNA, 23 nt, Human
cuugggccagaaguaccagacua

SEQ ID NO: 1319367 - RNA, 15 nt, Human
cuugggcccacaccu

SEQ ID NO: 1319368 - RNA, 18 nt, Human
cuugggcccacaccuccu

SEQ ID NO: 1319369 - RNA, 16 nt, Human
cuugggcccacaccuc

SEQ ID NO: 1319370 - RNA, 14 nt, Human
cuugggcccuuuga

SEQ ID NO: 1319371 - RNA, 16 nt, Human
cuugggcccuuugagu

SEQ ID NO: 1319372 - RNA, 17 nt, Human
cuugggcccuuugagug

SEQ ID NO: 1319373 - RNA, 19 nt, Human
cuugggcccuuugagugca

SEQ ID NO: 1319374 - RNA, 15 nt, Human
cuuggacacgcucag

SEQ ID NO: 1319375 - RNA, 14 nt, Human
cuuggacaaaucac

SEQ ID NO: 1319376 - RNA, 22 nt, Human
cuuggagccaauggagacuguc

SEQ ID NO: 1319377 - RNA, 19 nt, Human
cuuggagaagucucagcua

SEQ ID NO: 1319378 - RNA, 17 nt, Human
cuuggagaagucucagc

SEQ ID NO: 1319379 - RNA, 18 nt, Human
cuuggagaagucucagcu

SEQ ID NO: 1319380 - RNA, 13 nt, Human
cuuguucugucac

SEQ ID NO: 1319381 - RNA, 14 nt, Human
cuuguuacuucuga

SEQ ID NO: 1319382 - RNA, 15 nt, Human
cuuguuacuucugag

SEQ ID NO: 1319383 - RNA, 17 nt, Human
cuuguuacuucugaggu

SEQ ID NO: 1319384 - RNA, 15 nt, Human
cuuguggggccuggg

SEQ ID NO: 1319385 - RNA, 16 nt, Human
cuuguggggccuggga

SEQ ID NO: 1319386 - RNA, 18 nt, Human
cuuguggggccugggagg

SEQ ID NO: 1319387 - RNA, 17 nt, Human
cuuguggggccugggag

SEQ ID NO: 1319388 - RNA, 22 nt, Human
cuugucgccccucccucccaga

SEQ ID NO: 1319389 - RNA, 20 nt, Human
cuuguccuuagccuggaccu

SEQ ID NO: 1319390 - RNA, 14 nt, Human
cuuguggggccugg

SEQ ID NO: 1319391 - RNA, 20 nt, Human
cuuguccuagcacagauggc

SEQ ID NO: 1319392 - RNA, 17 nt, Human
cuuguccuagcacagau

SEQ ID NO: 1319393 - RNA, 14 nt, Human
cuuguccuuagccu

SEQ ID NO: 1319394 - RNA, 16 nt, Human
cuuguccuuagccugg

SEQ ID NO: 1319395 - RNA, 17 nt, Human
cuuguccuuagccugga

SEQ ID NO: 1319396 - RNA, 18 nt, Human
cuuguccuuagccuggac

SEQ ID NO: 1319397 - RNA, 19 nt, Human
cuuguccuuagccuggacc

SEQ ID NO: 1319398 - RNA, 14 nt, Human
cuuguccuuucccu

SEQ ID NO: 1319399 - RNA, 15 nt, Human
cuuguccuuucccuu

SEQ ID NO: 1319400 - RNA, 13 nt, Human
cuuguagccagcc

SEQ ID NO: 1319401 - RNA, 14 nt, Human
cuuguagccagccg

SEQ ID NO: 1319402 - RNA, 15 nt, Human
cuuguagccagccgg

SEQ ID NO: 1319403 - RNA, 16 nt, Human
cuuguagccagccggg

SEQ ID NO: 1319404 - RNA, 21 nt, Human
cuuguagccagccggggcgag

SEQ ID NO: 1319405 - RNA, 21 nt, Human
cuuguagcccuuuccaagcuu

SEQ ID NO: 1319406 - RNA, 13 nt, Human
cuuguagcuccuc

SEQ ID NO: 1319407 - RNA, 14 nt, Human
cuuguagcuccucc

SEQ ID NO: 1319408 - RNA, 16 nt, Human
cuuguagcuccucccc

SEQ ID NO: 1319409 - RNA, 18 nt, Human
cuuguagcuccuccccug

SEQ ID NO: 1319410 - RNA, 19 nt, Human
cuuguagcuccuccccugg

SEQ ID NO: 1319411 - RNA, 23 nt, Human
cuuguagcuccuccccuggaggg

SEQ ID NO: 1319412 - RNA, 21 nt, Human
cuuguagcuccuccccuggag

SEQ ID NO: 1319413 - RNA, 16 nt, Human
cuuguccuagcacaga

SEQ ID NO: 1319414 - RNA, 13 nt, Human
cuuguuucauauu

SEQ ID NO: 1319415 - RNA, 22 nt, Human
cuuguuucaauuccaccugcaa

SEQ ID NO: 1319416 - RNA, 17 nt, Human
cuuguuuacaugcuuau

SEQ ID NO: 1319417 - RNA, 18 nt, Human
cuuguuuacaugcuuauu

SEQ ID NO: 1319418 - RNA, 21 nt, Human
cuuguuuacaugcuuauucca

SEQ ID NO: 1319419 - RNA, 12 nt, Human
cuuguuucaauu

SEQ ID NO: 1319420 - RNA, 17 nt, Human
cuuguuugcuucaacug

SEQ ID NO: 1319421 - RNA, 14 nt, Human
cuuguuuggggcag

SEQ ID NO: 1319422 - RNA, 19 nt, Human
cuuguugagccgugggcaa

SEQ ID NO: 1319423 - RNA, 13 nt, Human
cuuguugagccgu

SEQ ID NO: 1319424 - RNA, 18 nt, Human
cuuguugagccgugggca

SEQ ID NO: 1319425 - RNA, 14 nt, Human
cuuguuuacaugcu

SEQ ID NO: 1319426 - RNA, 16 nt, Human
cuuguuuacaugcuua

SEQ ID NO: 1319427 - RNA, 22 nt, Human
cuuguuuacaugcuuauuccau

SEQ ID NO: 1319428 - RNA, 22 nt, Human
cuuuaaaaaauuaaucugggcc

SEQ ID NO: 1319429 - RNA, 21 nt, Human
cuuuaaaaagcuccaaaugca

SEQ ID NO: 1319430 - RNA, 16 nt, Human
cuuuaaaaaugucuua

SEQ ID NO: 1319431 - RNA, 18 nt, Human
cuuuaaaaaugucuuauu

SEQ ID NO: 1319432 - RNA, 23 nt, Human
cuuuagaaucccagcccccugac

SEQ ID NO: 1319433 - RNA, 17 nt, Human
cuuugacaaagguaaau

SEQ ID NO: 1319434 - RNA, 15 nt, Human
cuuugaaaaaaaaua

SEQ ID NO: 1319435 - RNA, 13 nt, Human
cuuugaaacagaa

SEQ ID NO: 1319436 - RNA, 19 nt, Human
cuuucuuuuuuuuuuuuga

SEQ ID NO: 1319437 - RNA, 23 nt, Human
cuuucuuuuuuggccaucugcuc

SEQ ID NO: 1319438 - RNA, 17 nt, Human
cuuugaaaaaaaauaaa

SEQ ID NO: 1319439 - RNA, 16 nt, Human
cuuucuuuuuguagcu

SEQ ID NO: 1319440 - RNA, 21 nt, Human
cuuucuuuuuguagcuggggc

SEQ ID NO: 1319441 - RNA, 22 nt, Human
cuuucuuuuuguagcuggggcu

SEQ ID NO: 1319442 - RNA, 15 nt, Human
cuuucuuuuuugaua

SEQ ID NO: 1319443 - RNA, 16 nt, Human
cuuucuuuuuugauau

SEQ ID NO: 1319444 - RNA, 18 nt, Human
cuuucuuuuuuggccauc

SEQ ID NO: 1319445 - RNA, 19 nt, Human
cuuucuuuuuuggccaucu

SEQ ID NO: 1319446 - RNA, 17 nt, Human
cuuucuuuaaaguucuu

SEQ ID NO: 1319447 - RNA, 18 nt, Human
cuuucugucuucuacaga

SEQ ID NO: 1319448 - RNA, 16 nt, Human
cuuucuuccucugcug

SEQ ID NO: 1319449 - RNA, 22 nt, Human
cuuucuguuccaaauucaguuu

SEQ ID NO: 1319450 - RNA, 12 nt, Human
cuuucuguucca

SEQ ID NO: 1319451 - RNA, 13 nt, Human
cuuucuguuccaa

SEQ ID NO: 1319452 - RNA, 14 nt, Human
cuuucuguuccaaa

SEQ ID NO: 1319453 - RNA, 15 nt, Human
cuuucuguuccaaau

SEQ ID NO: 1319454 - RNA, 16 nt, Human
cuuucuguuccaaauu

SEQ ID NO: 1319455 - RNA, 20 nt, Human
cuuucuguuccaaauucagu

SEQ ID NO: 1319456 - RNA, 20 nt, Human
cuuucugaucaaggccuuau

SEQ ID NO: 1319457 - RNA, 11 nt, Human
cuuucugccug

SEQ ID NO: 1319458 - RNA, 12 nt, Human
cuuucugccugg

SEQ ID NO: 1319459 - RNA, 14 nt, Human
cuuucugccuggag

SEQ ID NO: 1319460 - RNA, 15 nt, Human
cuuucugccuggagu

SEQ ID NO: 1319461 - RNA, 19 nt, Human
cuuucuguauauacuuuuu

SEQ ID NO: 1319462 - RNA, 20 nt, Human
cuuucuguauauacuuuuuu

SEQ ID NO: 1319463 - RNA, 22 nt, Human
cuuuccuccucaggcacacagc

SEQ ID NO: 1319464 - RNA, 13 nt, Human
cuuuccucgccug

SEQ ID NO: 1319465 - RNA, 20 nt, Human
cuuucucuuuuccucuacca

SEQ ID NO: 1319466 - RNA, 13 nt, Human
cuuucugaacagc

SEQ ID NO: 1319467 - RNA, 14 nt, Human
cuuucugaacagcu

SEQ ID NO: 1319468 - RNA, 15 nt, Human
cuuucugaacagcug

SEQ ID NO: 1319469 - RNA, 16 nt, Human
cuuucugaacagcugg

SEQ ID NO: 1319470 - RNA, 17 nt, Human
cuuucugaacagcuggu

SEQ ID NO: 1319471 - RNA, 18 nt, Human
cuuucugaacagcuggug

SEQ ID NO: 1319472 - RNA, 19 nt, Human
cuuucugaacagcuggugu

SEQ ID NO: 1319473 - RNA, 20 nt, Human
cuuucugaacagcuggugua

SEQ ID NO: 1319474 - RNA, 21 nt, Human
cuuucugaacagcugguguag

SEQ ID NO: 1319475 - RNA, 23 nt, Human
cuuucugaacagcugguguagcu

SEQ ID NO: 1319476 - RNA, 17 nt, Human
cuuucugaauugcacau

SEQ ID NO: 1319477 - RNA, 14 nt, Human
cuuucugaauugca

SEQ ID NO: 1319478 - RNA, 15 nt, Human
cuuucugaucaaggc

SEQ ID NO: 1319479 - RNA, 16 nt, Human
cuuucugaucaaggcc

SEQ ID NO: 1319480 - RNA, 17 nt, Human
cuuucugaucaaggccu

SEQ ID NO: 1319481 - RNA, 18 nt, Human
cuuucugaucaaggccuu

SEQ ID NO: 1319482 - RNA, 19 nt, Human
cuuuagagaaguauacaua

SEQ ID NO: 1319483 - RNA, 22 nt, Human
cuuuagagaaguauacauaagu

SEQ ID NO: 1319484 - RNA, 15 nt, Human
cuuuaggagcagugg

SEQ ID NO: 1319485 - RNA, 23 nt, Human
cuuuaggcauuaaauuuuagcaa

SEQ ID NO: 1319486 - RNA, 15 nt, Human
cuuuaggcauuaaau

SEQ ID NO: 1319487 - RNA, 24 nt, Human
cuuuggcaggugcagcccccacug

SEQ ID NO: 1319488 - RNA, 13 nt, Human
cuuuggcaggugc

SEQ ID NO: 1319489 - RNA, 13 nt, Human
cuuuggauuugac

SEQ ID NO: 1319490 - RNA, 15 nt, Human
cuuuggauuugacau

SEQ ID NO: 1319491 - RNA, 16 nt, Human
cuuuggauuugacauu

SEQ ID NO: 1319492 - RNA, 17 nt, Human
cuuuggauuugacauug

SEQ ID NO: 1319493 - RNA, 12 nt, Human
cuuugggccaga

SEQ ID NO: 1319494 - RNA, 13 nt, Human
cuuugggccagac

SEQ ID NO: 1319495 - RNA, 21 nt, Human
cuuugggccagacaugccaca

SEQ ID NO: 1319496 - RNA, 19 nt, Human
cuuugugagucaauacaua

SEQ ID NO: 1319497 - RNA, 13 nt, Human
cuuugugagucaa

SEQ ID NO: 1319498 - RNA, 22 nt, Human
cuuugugauucaaucuguaaac

SEQ ID NO: 1319499 - RNA, 23 nt, Human
cuuugugauucaaucuguaaacu

SEQ ID NO: 1319500 - RNA, 16 nt, Human
cuuuguguagcuuugc

SEQ ID NO: 1319501 - RNA, 18 nt, Human
cuuuguguagcuuugcuc

SEQ ID NO: 1319502 - RNA, 23 nt, Human
cuuugcuucauucaagucagcuc

SEQ ID NO: 1319503 - RNA, 12 nt, Human
cuuugcuugcuu

SEQ ID NO: 1319504 - RNA, 13 nt, Human
cuuugcuugcuuu

SEQ ID NO: 1319505 - RNA, 18 nt, Human
cuuugcuugcuuugaagu

SEQ ID NO: 1319506 - RNA, 19 nt, Human
cuuugcuugcuuugaagua

SEQ ID NO: 1319507 - RNA, 16 nt, Human
cuuugcuuuaauauaa

SEQ ID NO: 1319508 - RNA, 17 nt, Human
cuuugcuuuaauauaaa

SEQ ID NO: 1319509 - RNA, 18 nt, Human
cuuugcuuuaauauaaau

SEQ ID NO: 1319510 - RNA, 19 nt, Human
cuuugcuuuaauauaaaug

SEQ ID NO: 1319511 - RNA, 21 nt, Human
cuuugcuuuaauauaaaugca

SEQ ID NO: 1319512 - RNA, 18 nt, Human
cuuugccacccucaugcu

SEQ ID NO: 1319513 - RNA, 12 nt, Human
cuuugcuucauu

SEQ ID NO: 1319514 - RNA, 17 nt, Human
cuuugccacccucaugc

SEQ ID NO: 1319515 - RNA, 16 nt, Human
cuuugccacccucaug

SEQ ID NO: 1319516 - RNA, 14 nt, Human
cuuugcauuuugga

SEQ ID NO: 1319517 - RNA, 22 nt, Human
cuuugcaucucaguaugaauua

SEQ ID NO: 1319518 - RNA, 16 nt, Human
cuuugcaucucaguau

SEQ ID NO: 1319519 - RNA, 15 nt, Human
cuuugcauggauuuc

SEQ ID NO: 1319520 - RNA, 17 nt, Human
cuuugcauggauuucuu

SEQ ID NO: 1319521 - RNA, 22 nt, Human
cuuugcauggauuucuuugaaa

SEQ ID NO: 1319522 - RNA, 19 nt, Human
cuuugacaaagguaaauca

SEQ ID NO: 1319523 - RNA, 20 nt, Human
cuuugaaagguuagagaaua

SEQ ID NO: 1319524 - RNA, 21 nt, Human
cuuugaccuaaauuauuuacu

SEQ ID NO: 1319525 - RNA, 18 nt, Human
cuuugacaauugggagcu

SEQ ID NO: 1319526 - RNA, 21 nt, Human
cuuugacaauugggagcugcc

SEQ ID NO: 1319527 - RNA, 23 nt, Human
cuuugacaauugggagcugccaa

SEQ ID NO: 1319528 - RNA, 22 nt, Human
cuuugacaauugggagcugcca

SEQ ID NO: 1319529 - RNA, 14 nt, Human
gaaaacaaggauga

SEQ ID NO: 1319530 - RNA, 13 nt, Human
gaaaacaaaacug

SEQ ID NO: 1319531 - RNA, 12 nt, Human
gaaaacaaggaa

SEQ ID NO: 1319532 - RNA, 19 nt, Human
gaaaaauauauacuaaaca

SEQ ID NO: 1319533 - RNA, 16 nt, Human
gaaaaauauguaccaa

SEQ ID NO: 1319534 - RNA, 16 nt, Human
gaaaaaucuaagugau

SEQ ID NO: 1319535 - RNA, 16 nt, Human
gaaaaauuccacucaa

SEQ ID NO: 1319536 - RNA, 22 nt, Human
gaaaaauugcugacuguagcuu

SEQ ID NO: 1319537 - RNA, 21 nt, Human
gaaaaauugcugacuguagcu

SEQ ID NO: 1319538 - RNA, 19 nt, Human
gaaaauaacaauaaaagac

SEQ ID NO: 1319539 - RNA, 15 nt, Human
gaaaaguauguucua

SEQ ID NO: 1319540 - RNA, 22 nt, Human
gaaaagucaaggguaggguggg

SEQ ID NO: 1319541 - RNA, 19 nt, Human
gaaaaguauguucuaaccu

SEQ ID NO: 1319542 - RNA, 14 nt, Human
gaaaaguauguuag

SEQ ID NO: 1319543 - RNA, 17 nt, Human
gaaaagguuuaugaaaa

SEQ ID NO: 1319544 - RNA, 22 nt, Human
gaaaagguuuaugaaaaagaag

SEQ ID NO: 1319545 - RNA, 23 nt, Human
gaaaagguuuaugaaaaagaaga

SEQ ID NO: 1319546 - RNA, 20 nt, Human
gaaaaguauguuagugcaaa

SEQ ID NO: 1319547 - RNA, 20 nt, Human
gaaaaguauauugauaaccu

SEQ ID NO: 1319548 - RNA, 13 nt, Human
gaaaaguauguuc

SEQ ID NO: 1319549 - RNA, 17 nt, Human
gaaaacauuccauccuu

SEQ ID NO: 1319550 - RNA, 20 nt, Human
gaaaacccccaaaccagaua

SEQ ID NO: 1319551 - RNA, 17 nt, Human
gaaaacccuugggccag

SEQ ID NO: 1319552 - RNA, 20 nt, Human
gaaaacccuugggccagaag

SEQ ID NO: 1319553 - RNA, 22 nt, Human
gaaaacccuugggccagaagua

SEQ ID NO: 1319554 - RNA, 21 nt, Human
gaaaacccuugggccagaagu

SEQ ID NO: 1319555 - RNA, 13 nt, Human
gaaaacauuccau

SEQ ID NO: 1319556 - RNA, 14 nt, Human
gaaaacaaggaagu

SEQ ID NO: 1319557 - RNA, 11 nt, Human
gaaaaccuuuc

SEQ ID NO: 1319558 - RNA, 15 nt, Human
gaaaaccuuucuuca

SEQ ID NO: 1319559 - RNA, 23 nt, Human
gaaaagguagaggagucacguua

SEQ ID NO: 1319560 - RNA, 20 nt, Human
gaaaagguucuuacugcuug

SEQ ID NO: 1319561 - RNA, 18 nt, Human
cuuuuuuaaaugaagaaa

SEQ ID NO: 1319562 - RNA, 14 nt, Human
cuuuuugcagcuuu

SEQ ID NO: 1319563 - RNA, 13 nt, Human
cuuuuugcagcuu

SEQ ID NO: 1319564 - RNA, 13 nt, Human
cuuuuugcuuucg

SEQ ID NO: 1319565 - RNA, 12 nt, Human
cuuuuugcagcu

SEQ ID NO: 1319566 - RNA, 14 nt, Human
cuuuuugaggcaaa

SEQ ID NO: 1319567 - RNA, 15 nt, Human
cuuuuugaggcaaaa

SEQ ID NO: 1319568 - RNA, 20 nt, Human
cuuuuugaggcaaaagaagg

SEQ ID NO: 1319569 - RNA, 16 nt, Human
cuuuuugaaguauuua

SEQ ID NO: 1319570 - RNA, 17 nt, Human
cuuuugacaaaggcaag

SEQ ID NO: 1319571 - RNA, 16 nt, Human
cuuuuguuuccuuuuu

SEQ ID NO: 1319572 - RNA, 13 nt, Human
cuuuuguuuauuu

SEQ ID NO: 1319573 - RNA, 19 nt, Human
cuuuuuaaaaauagacacu

SEQ ID NO: 1319574 - RNA, 13 nt, Human
cuuuuuauuucug

SEQ ID NO: 1319575 - RNA, 16 nt, Human
cuuuuuauuucugcau

SEQ ID NO: 1319576 - RNA, 13 nt, Human
cuuuuuauuugca

SEQ ID NO: 1319577 - RNA, 14 nt, Human
cuuuuuauuugcau

SEQ ID NO: 1319578 - RNA, 15 nt, Human
cuuuuuauuugcaug

SEQ ID NO: 1319579 - RNA, 20 nt, Human
cuuuuucaaugaauuuuaua

SEQ ID NO: 1319580 - RNA, 18 nt, Human
cuuuucuucuauugccuc

SEQ ID NO: 1319581 - RNA, 19 nt, Human
cuuuucuucuauugccucu

SEQ ID NO: 1319582 - RNA, 23 nt, Human
cuuuucuucuauugccucugaga

SEQ ID NO: 1319583 - RNA, 16 nt, Human
cuuuucuguucuaguu

SEQ ID NO: 1319584 - RNA, 17 nt, Human
cuuuucuguucuaguuu

SEQ ID NO: 1319585 - RNA, 15 nt, Human
cuuuucuuaaaccuu

SEQ ID NO: 1319586 - RNA, 16 nt, Human
cuuuucuuaaaccuuc

SEQ ID NO: 1319587 - RNA, 14 nt, Human
cuuuguuuuguguc

SEQ ID NO: 1319588 - RNA, 17 nt, Human
cuuuguuuugugucucu

SEQ ID NO: 1319589 - RNA, 18 nt, Human
cuuuguuuugugucucuu

SEQ ID NO: 1319590 - RNA, 15 nt, Human
cuuuguuuuauuuuc

SEQ ID NO: 1319591 - RNA, 16 nt, Human
cuuuguuuuauuuuca

SEQ ID NO: 1319592 - RNA, 19 nt, Human
cuuuguuuugcacacuuug

SEQ ID NO: 1319593 - RNA, 23 nt, Human
cuuuguuuugcacacuuugccau

SEQ ID NO: 1319594 - RNA, 17 nt, Human
cuuuguuuuacugucuu

SEQ ID NO: 1319595 - RNA, 17 nt, Human
cuuuguguagcuuugcu

SEQ ID NO: 1319596 - RNA, 15 nt, Human
cuuuguuggagucaa

SEQ ID NO: 1319597 - RNA, 21 nt, Human
cuggauuccccaucucaggcc

SEQ ID NO: 1319598 - RNA, 12 nt, Human
cuggauuuucag

SEQ ID NO: 1319599 - RNA, 15 nt, Human
cuggauuuuuaccag

SEQ ID NO: 1319600 - RNA, 14 nt, Human
cuggauuuuuacca

SEQ ID NO: 1319601 - RNA, 12 nt, Human
cuggcaaugcca

SEQ ID NO: 1319602 - RNA, 15 nt, Human
cuggcaaugccacag

SEQ ID NO: 1319603 - RNA, 19 nt, Human
cuggcaaugccacagcccu

SEQ ID NO: 1319604 - RNA, 20 nt, Human
cuggcaaugccacagcccug

SEQ ID NO: 1319605 - RNA, 21 nt, Human
cuggcaaugccacagcccugu

SEQ ID NO: 1319606 - RNA, 12 nt, Human
cuggcacagagg

SEQ ID NO: 1319607 - RNA, 13 nt, Human
cuggcacagaggu

SEQ ID NO: 1319608 - RNA, 14 nt, Human
cuggcacagccugg

SEQ ID NO: 1319609 - RNA, 17 nt, Human
cuggcacagggcagugg

SEQ ID NO: 1319610 - RNA, 13 nt, Human
cuggauuccagag

SEQ ID NO: 1319611 - RNA, 20 nt, Human
cuggauuccccaucucaggc

SEQ ID NO: 1319612 - RNA, 21 nt, Human
cuggauuccagagcacugcuc

SEQ ID NO: 1319613 - RNA, 16 nt, Human
cuggauuauucugggg

SEQ ID NO: 1319614 - RNA, 17 nt, Human
cuggauuauauuaugaa

SEQ ID NO: 1319615 - RNA, 23 nt, Human
cuggauuauucaaaaugauguau

SEQ ID NO: 1319616 - RNA, 15 nt, Human
cuggauggggcaggc

SEQ ID NO: 1319617 - RNA, 17 nt, Human
cuggauggggcaggcca

SEQ ID NO: 1319618 - RNA, 24 nt, Human
cuggauggggcaggccaccuggcu

SEQ ID NO: 1319619 - RNA, 15 nt, Human
cuggauguaccacca

SEQ ID NO: 1319620 - RNA, 13 nt, Human
cuggauggggcag

SEQ ID NO: 1319621 - RNA, 21 nt, Human
cuggauggaggaaaaccaagc

SEQ ID NO: 1319622 - RNA, 12 nt, Human
cuggaggagccc

SEQ ID NO: 1319623 - RNA, 13 nt, Human
cuggaggagccca

SEQ ID NO: 1319624 - RNA, 14 nt, Human
cuggaggagcccag

SEQ ID NO: 1319625 - RNA, 15 nt, Human
cuggaggagcccagg

SEQ ID NO: 1319626 - RNA, 16 nt, Human
cuggaggagcccaggc

SEQ ID NO: 1319627 - RNA, 19 nt, Human
cuggaggagcccaggccag

SEQ ID NO: 1319628 - RNA, 21 nt, Human
cuggaggagcccaggccagga

SEQ ID NO: 1319629 - RNA, 16 nt, Human
cuggaggcaccuggug

SEQ ID NO: 1319630 - RNA, 16 nt, Human
cuggccaacgggguga

SEQ ID NO: 1319631 - RNA, 20 nt, Human
cuggcauuagaauuauuuaa

SEQ ID NO: 1319632 - RNA, 22 nt, Human
cuggcauuagaauuauuuaaac

SEQ ID NO: 1319633 - RNA, 13 nt, Human
cuggccaagcuga

SEQ ID NO: 1319634 - RNA, 14 nt, Human
cuggccaagcugag

SEQ ID NO: 1319635 - RNA, 15 nt, Human
cuggccaagcugagg

SEQ ID NO: 1319636 - RNA, 16 nt, Human
cuggccaagcugaggu

SEQ ID NO: 1319637 - RNA, 17 nt, Human
cuggccaagcugaggug

SEQ ID NO: 1319638 - RNA, 18 nt, Human
cuggccauggagaaagcu

SEQ ID NO: 1319639 - RNA, 19 nt, Human
cuggccauggagaaagcug

SEQ ID NO: 1319640 - RNA, 20 nt, Human
cuggccauggagaaagcuga

SEQ ID NO: 1319641 - RNA, 21 nt, Human
cuggccauggagaaagcugac

SEQ ID NO: 1319642 - RNA, 23 nt, Human
cuggccauggagaaagcugacuu

SEQ ID NO: 1319643 - RNA, 13 nt, Human
cuggccauggccu

SEQ ID NO: 1319644 - RNA, 14 nt, Human
cuggccauggccug

SEQ ID NO: 1319645 - RNA, 15 nt, Human
cuggccauggccugc

SEQ ID NO: 1319646 - RNA, 16 nt, Human
cuggccauggccugca

SEQ ID NO: 1319647 - RNA, 22 nt, Human
cuggccauggccugcaaacugg

SEQ ID NO: 1319648 - RNA, 20 nt, Human
cuggccauggccugcaaacu

SEQ ID NO: 1319649 - RNA, 13 nt, Human
cuggcccaccagg

SEQ ID NO: 1319650 - RNA, 14 nt, Human
cuggcccaccaggg

SEQ ID NO: 1319651 - RNA, 14 nt, Human
cuggcccaccccac

SEQ ID NO: 1319652 - RNA, 16 nt, Human
cuggcccaccccaccc

SEQ ID NO: 1319653 - RNA, 13 nt, Human
cuggcccagccuu

SEQ ID NO: 1319654 - RNA, 21 nt, Human
cuggcccagccuuuguucccc

SEQ ID NO: 1319655 - RNA, 15 nt, Human
cuggcccagccuuug

SEQ ID NO: 1319656 - RNA, 13 nt, Human
cuggcccagggcc

SEQ ID NO: 1319657 - RNA, 14 nt, Human
cuggcccagggccc

SEQ ID NO: 1319658 - RNA, 15 nt, Human
cuggcccagggccca

SEQ ID NO: 1319659 - RNA, 12 nt, Human
cuggcccagggc

SEQ ID NO: 1319660 - RNA, 11 nt, Human
cuggcccaggg

SEQ ID NO: 1319661 - RNA, 16 nt, Human
cuggcccagggcccag

SEQ ID NO: 1319662 - RNA, 16 nt, Human
cuggccucaaagcaag

SEQ ID NO: 1319663 - RNA, 21 nt, Human
cuggccucaaagcaagcauuc

SEQ ID NO: 1319664 - RNA, 14 nt, Human
cuggccucccccac

SEQ ID NO: 1319665 - RNA, 15 nt, Human
cuggccucccccacu

SEQ ID NO: 1319666 - RNA, 16 nt, Human
cuggccuccccugcca

SEQ ID NO: 1319667 - RNA, 17 nt, Human
cuggccuccccugccac

SEQ ID NO: 1319668 - RNA, 18 nt, Human
cuggccuccccugccacc

SEQ ID NO: 1319669 - RNA, 21 nt, Human
cuggccuccccugccaccagg

SEQ ID NO: 1319670 - RNA, 17 nt, Human
cuggccucccccacuuu

SEQ ID NO: 1319671 - RNA, 13 nt, Human
cuggccuccugcc

SEQ ID NO: 1319672 - RNA, 14 nt, Human
cuggccuccugccu

SEQ ID NO: 1319673 - RNA, 16 nt, Human
cuggccuccugccucu

SEQ ID NO: 1319674 - RNA, 15 nt, Human
cuggccuccugccuc

SEQ ID NO: 1319675 - RNA, 15 nt, Human
cuggccucugcuuuc

SEQ ID NO: 1319676 - RNA, 20 nt, Human
cuggagcccacuguacuugc

SEQ ID NO: 1319677 - RNA, 17 nt, Human
cuggagcccacuguacu

SEQ ID NO: 1319678 - RNA, 16 nt, Human
cuggagcccacuguac

SEQ ID NO: 1319679 - RNA, 15 nt, Human
cuggagcccacugua

SEQ ID NO: 1319680 - RNA, 13 nt, Human
cuggagcccacug

SEQ ID NO: 1319681 - RNA, 12 nt, Human
cuggagccagcc

SEQ ID NO: 1319682 - RNA, 22 nt, Human
cuggagccagccgagcaggagg

SEQ ID NO: 1319683 - RNA, 14 nt, Human
cuggagccagccga

SEQ ID NO: 1319684 - RNA, 22 nt, Human
cuggagcauuguguauagaacu

SEQ ID NO: 1319685 - RNA, 14 nt, Human
cuggagcauuucuc

SEQ ID NO: 1319686 - RNA, 21 nt, Human
cuggagcccacuguacuugcu

SEQ ID NO: 1319687 - RNA, 16 nt, Human
cuggagcuagaauuug

SEQ ID NO: 1319688 - RNA, 17 nt, Human
cuggagcuagaauuuga

SEQ ID NO: 1319689 - RNA, 22 nt, Human
cuggagcuagaauuugauaugu

SEQ ID NO: 1319690 - RNA, 12 nt, Human
cuggagcucugc

SEQ ID NO: 1319691 - RNA, 12 nt, Human
cuggaggaccug

SEQ ID NO: 1319692 - RNA, 14 nt, Human
cuggaggaccugag

SEQ ID NO: 1319693 - RNA, 15 nt, Human
cuggaggaccugagc

SEQ ID NO: 1319694 - RNA, 16 nt, Human
cuggaggaccugagcc

SEQ ID NO: 1319695 - RNA, 17 nt, Human
cuggaggaccugagccu

SEQ ID NO: 1319696 - RNA, 18 nt, Human
cuggaggaccugagccug

SEQ ID NO: 1319697 - RNA, 19 nt, Human
cuggaggaccugagccugc

SEQ ID NO: 1319698 - RNA, 20 nt, Human
cuggaggaccugagccugcc

SEQ ID NO: 1319699 - RNA, 22 nt, Human
cuggaggaccugagccugccga

SEQ ID NO: 1319700 - RNA, 21 nt, Human
cuggaggaccugagccugccg

SEQ ID NO: 1319701 - RNA, 12 nt, Human
cuggacagcuug

SEQ ID NO: 1319702 - RNA, 14 nt, Human
cuggacagcuugug

SEQ ID NO: 1319703 - RNA, 17 nt, Human
cuggacagcugugccuc

SEQ ID NO: 1319704 - RNA, 18 nt, Human
cuggacagcugugccucg

SEQ ID NO: 1319705 - RNA, 19 nt, Human
cuggacagcugugccucgc

SEQ ID NO: 1319706 - RNA, 20 nt, Human
cuggacagcugugccucgcu

SEQ ID NO: 1319707 - RNA, 23 nt, Human
cuggacaugaagauucuuuccca

SEQ ID NO: 1319708 - RNA, 14 nt, Human
cuggaccacugggc

SEQ ID NO: 1319709 - RNA, 15 nt, Human
cuggaccacugggca

SEQ ID NO: 1319710 - RNA, 12 nt, Human
cuggaccagccu

SEQ ID NO: 1319711 - RNA, 16 nt, Human
cuggacucaccucccc

SEQ ID NO: 1319712 - RNA, 21 nt, Human
cuggagacuuagggcaccagg

SEQ ID NO: 1319713 - RNA, 16 nt, Human
cuggagagaacagguu

SEQ ID NO: 1319714 - RNA, 14 nt, Human
cuggagagaacagg

SEQ ID NO: 1319715 - RNA, 20 nt, Human
cuggagagcauagggucugg

SEQ ID NO: 1319716 - RNA, 12 nt, Human
cuggagaggccc

SEQ ID NO: 1319717 - RNA, 23 nt, Human
cuggagcacaauaaauggcugua

SEQ ID NO: 1319718 - RNA, 16 nt, Human
cuggagcagaagcagc

SEQ ID NO: 1319719 - RNA, 17 nt, Human
cuggagcagaagcagca

SEQ ID NO: 1319720 - RNA, 13 nt, Human
cuggagcagacca

SEQ ID NO: 1319721 - RNA, 15 nt, Human
cuggagcagaccacc

SEQ ID NO: 1319722 - RNA, 18 nt, Human
cuggagcagaccaccccg

SEQ ID NO: 1319723 - RNA, 22 nt, Human
cuggagcagaccaccccgccug

SEQ ID NO: 1319724 - RNA, 13 nt, Human
cuggagcagaagg

SEQ ID NO: 1319725 - RNA, 22 nt, Human
cugcucuuucucugccagugac

SEQ ID NO: 1319726 - RNA, 12 nt, Human
cugcucugauga

SEQ ID NO: 1319727 - RNA, 22 nt, Human
cugcucugagaauuguugagau

SEQ ID NO: 1319728 - RNA, 20 nt, Human
cugcucugaugaagaggagu

SEQ ID NO: 1319729 - RNA, 23 nt, Human
cugcucuuggcuggacccagcca

SEQ ID NO: 1319730 - RNA, 14 nt, Human
cugcucuuucucug

SEQ ID NO: 1319731 - RNA, 15 nt, Human
cugcucuuucucugc

SEQ ID NO: 1319732 - RNA, 16 nt, Human
cugcucuuucucugcc

SEQ ID NO: 1319733 - RNA, 17 nt, Human
cugcucuuucucugcca

SEQ ID NO: 1319734 - RNA, 18 nt, Human
cugcucuuucucugccag

SEQ ID NO: 1319735 - RNA, 19 nt, Human
cugcucuuucucugccagu

SEQ ID NO: 1319736 - RNA, 20 nt, Human
cugcucuuucucugccagug

SEQ ID NO: 1319737 - RNA, 21 nt, Human
cugcucuuucucugccaguga

SEQ ID NO: 1319738 - RNA, 18 nt, Human
cugcuuugggcugcccug

SEQ ID NO: 1319739 - RNA, 11 nt, Human
cugcuuucugu

SEQ ID NO: 1319740 - RNA, 13 nt, Human
cugcuuucuguuc

SEQ ID NO: 1319741 - RNA, 15 nt, Human
cugcuuucuguucca

SEQ ID NO: 1319742 - RNA, 19 nt, Human
cugcuuugggcugcccugg

SEQ ID NO: 1319743 - RNA, 20 nt, Human
cugcuuugggcugcccuggu

SEQ ID NO: 1319744 - RNA, 14 nt, Human
cugcuuucuccuuu

SEQ ID NO: 1319745 - RNA, 21 nt, Human
cugcuuugggcugcccuggug

SEQ ID NO: 1319746 - RNA, 22 nt, Human
cugcuuugggcugcccuggugc

SEQ ID NO: 1319747 - RNA, 23 nt, Human
cugcuuugggcugcccuggugcu

SEQ ID NO: 1319748 - RNA, 12 nt, Human
cugcuuuucaau

SEQ ID NO: 1319749 - RNA, 15 nt, Human
cugcuuuucaaugug

SEQ ID NO: 1319750 - RNA, 18 nt, Human
cugcuuuucccuuuguga

SEQ ID NO: 1319751 - RNA, 19 nt, Human
cugcuuuucccuuugugag

SEQ ID NO: 1319752 - RNA, 23 nt, Human
cuggaauaauccuaaacauauga

SEQ ID NO: 1319753 - RNA, 22 nt, Human
cuggaagcauuuguuucuacuu

SEQ ID NO: 1319754 - RNA, 21 nt, Human
cuggaagugcuaauuuugaaa

SEQ ID NO: 1319755 - RNA, 22 nt, Human
cugcuuuucccuuugugaguca

SEQ ID NO: 1319756 - RNA, 14 nt, Human
cuggaauguaauca

SEQ ID NO: 1319757 - RNA, 15 nt, Human
cuggaauguaaucaa

SEQ ID NO: 1319758 - RNA, 20 nt, Human
cuggaauguaaucaauguuu

SEQ ID NO: 1319759 - RNA, 14 nt, Human
cuggaauaaguuca

SEQ ID NO: 1319760 - RNA, 15 nt, Human
cuggaauacaugaaa

SEQ ID NO: 1319761 - RNA, 21 nt, Human
cuggaauguaaucaauguuuc

SEQ ID NO: 1319762 - RNA, 18 nt, Human
cuggacacucagaccuga

SEQ ID NO: 1319763 - RNA, 13 nt, Human
cuggacagcccca

SEQ ID NO: 1319764 - RNA, 14 nt, Human
cuggacagccccac

SEQ ID NO: 1319765 - RNA, 15 nt, Human
cuggacagccccacc

SEQ ID NO: 1319766 - RNA, 16 nt, Human
cuggacagccccaccc

SEQ ID NO: 1319767 - RNA, 18 nt, Human
cuggacagccccacccug

SEQ ID NO: 1319768 - RNA, 19 nt, Human
cuggacagccccacccugg

SEQ ID NO: 1319769 - RNA, 13 nt, Human
cuggacagcugug

SEQ ID NO: 1319770 - RNA, 14 nt, Human
cuggacagcugugc

SEQ ID NO: 1319771 - RNA, 15 nt, Human
cuggacagcugugcc

SEQ ID NO: 1319772 - RNA, 16 nt, Human
cuggacagcugugccu

SEQ ID NO: 1319773 - RNA, 16 nt, Human
cugggagcuuuuguag

SEQ ID NO: 1319774 - RNA, 14 nt, Human
cugggagcucugca

SEQ ID NO: 1319775 - RNA, 15 nt, Human
cugggagcucugcag

SEQ ID NO: 1319776 - RNA, 13 nt, Human
cugggagcucugc

SEQ ID NO: 1319777 - RNA, 23 nt, Human
cugggaaggcuacuucggggcug

SEQ ID NO: 1319778 - RNA, 23 nt, Human
cugggagcuccacucugcuucuc

SEQ ID NO: 1319779 - RNA, 16 nt, Human
cugggaaggcuacuuc

SEQ ID NO: 1319780 - RNA, 23 nt, Human
cugggaacaucacauuccucugc

SEQ ID NO: 1319781 - RNA, 21 nt, Human
cugggaacagugugcaaggca

SEQ ID NO: 1319782 - RNA, 19 nt, Human
cugggaaccccuuucccac

SEQ ID NO: 1319783 - RNA, 17 nt, Human
cugggaaccccuuuccc

SEQ ID NO: 1319784 - RNA, 18 nt, Human
cugggaaccccuuuccca

SEQ ID NO: 1319785 - RNA, 17 nt, Human
cugggaacucaucuggu

SEQ ID NO: 1319786 - RNA, 16 nt, Human
cugggaggcucuggag

SEQ ID NO: 1319787 - RNA, 15 nt, Human
cugggaggcucugga

SEQ ID NO: 1319788 - RNA, 16 nt, Human
cugggaggcagugaug

SEQ ID NO: 1319789 - RNA, 17 nt, Human
cugggaggcucuggagc

SEQ ID NO: 1319790 - RNA, 16 nt, Human
cugggaggcuccccuu

SEQ ID NO: 1319791 - RNA, 22 nt, Human
cugggagggacaugcuuagcag

SEQ ID NO: 1319792 - RNA, 11 nt, Human
cugggagggca

SEQ ID NO: 1319793 - RNA, 13 nt, Human
cugggagggcagc

SEQ ID NO: 1319794 - RNA, 15 nt, Human
cugggagggcagcag

SEQ ID NO: 1319795 - RNA, 17 nt, Human
cugggagggcagcaggg

SEQ ID NO: 1319796 - RNA, 19 nt, Human
cugggagggcagcagggcu

SEQ ID NO: 1319797 - RNA, 20 nt, Human
cugggagggcagcagggcua

SEQ ID NO: 1319798 - RNA, 17 nt, Human
cugggccccugccucuc

SEQ ID NO: 1319799 - RNA, 16 nt, Human
cugggccccugccucu

SEQ ID NO: 1319800 - RNA, 12 nt, Human
cugggccccugc

SEQ ID NO: 1319801 - RNA, 20 nt, Human
cugggcaccggggccucgga

SEQ ID NO: 1319802 - RNA, 22 nt, Human
cugggagggcagcagggcuacc

SEQ ID NO: 1319803 - RNA, 17 nt, Human
cugggaggcuccccuuc

SEQ ID NO: 1319804 - RNA, 23 nt, Human
cugggaguugaucgccuuuccca

SEQ ID NO: 1319805 - RNA, 21 nt, Human
cugggauuacaggcgugagcc

SEQ ID NO: 1319806 - RNA, 15 nt, Human
cugggauagaggggu

SEQ ID NO: 1319807 - RNA, 19 nt, Human
cugggauuacaggcuccug

SEQ ID NO: 1319808 - RNA, 20 nt, Human
cugggauuacaggcuccugc

SEQ ID NO: 1319809 - RNA, 21 nt, Human
cugggauuacaggcuccugcc

SEQ ID NO: 1319810 - RNA, 22 nt, Human
cugggauuacaggcuccugcca

SEQ ID NO: 1319811 - RNA, 23 nt, Human
cugggauuacaggcuccugccac

SEQ ID NO: 1319812 - RNA, 20 nt, Human
cugggaucacauguggacuu

SEQ ID NO: 1319813 - RNA, 20 nt, Human
cuggcucuugauaccccccu

SEQ ID NO: 1319814 - RNA, 21 nt, Human
cuggcucuugauaccccccuc

SEQ ID NO: 1319815 - RNA, 22 nt, Human
cuggcucuugauaccccccucu

SEQ ID NO: 1319816 - RNA, 23 nt, Human
cuggcucuugauaccccccucug

SEQ ID NO: 1319817 - RNA, 14 nt, Human
cuggcugccuuaga

SEQ ID NO: 1319818 - RNA, 19 nt, Human
cuggcugccuuagaaccuu

SEQ ID NO: 1319819 - RNA, 21 nt, Human
cuggcugcugaucgccuuccc

SEQ ID NO: 1319820 - RNA, 20 nt, Human
cuggcugcugaucgccuucc

SEQ ID NO: 1319821 - RNA, 12 nt, Human
cuggcuguuuga

SEQ ID NO: 1319822 - RNA, 14 nt, Human
cuggcuucacagau

SEQ ID NO: 1319823 - RNA, 16 nt, Human
cuggcuucccaucccc

SEQ ID NO: 1319824 - RNA, 15 nt, Human
cuggcuuuucacugc

SEQ ID NO: 1319825 - RNA, 16 nt, Human
cuggcuuuucacugcu

SEQ ID NO: 1319826 - RNA, 12 nt, Human
cuggcuucuggc

SEQ ID NO: 1319827 - RNA, 13 nt, Human
cuggcuucuggcc

SEQ ID NO: 1319828 - RNA, 17 nt, Human
cuggcuucuggccagga

SEQ ID NO: 1319829 - RNA, 19 nt, Human
cuggcuucuggccaggaag

SEQ ID NO: 1319830 - RNA, 18 nt, Human
cuggcuucccauccccag

SEQ ID NO: 1319831 - RNA, 20 nt, Human
cuggcuucccauccccagcg

SEQ ID NO: 1319832 - RNA, 22 nt, Human
cuggcuucccauccccagcgau

SEQ ID NO: 1319833 - RNA, 21 nt, Human
cuggcuucccauccccagcga

SEQ ID NO: 1319834 - RNA, 17 nt, Human
cuggcuuuucacugcug

SEQ ID NO: 1319835 - RNA, 19 nt, Human
cuggcuuuucacugcuggc

SEQ ID NO: 1319836 - RNA, 20 nt, Human
cuggcuuuucacugcuggcu

SEQ ID NO: 1319837 - RNA, 22 nt, Human
cuggcuuuucacugcuggcugc

SEQ ID NO: 1319838 - RNA, 19 nt, Human
cugggaacaccauagguca

SEQ ID NO: 1319839 - RNA, 14 nt, Human
cugggaaaugagau

SEQ ID NO: 1319840 - RNA, 16 nt, Human
cugggaaauauucccu

SEQ ID NO: 1319841 - RNA, 18 nt, Human
cugggaaauauucccuag

SEQ ID NO: 1319842 - RNA, 17 nt, Human
cuggguaggaaagagga

SEQ ID NO: 1319843 - RNA, 15 nt, Human
cuggguaggaaagag

SEQ ID NO: 1319844 - RNA, 14 nt, Human
cuggguaggaaaga

SEQ ID NO: 1319845 - RNA, 17 nt, Human
cuggguagcgggggagg

SEQ ID NO: 1319846 - RNA, 16 nt, Human
cugggguggccaccag

SEQ ID NO: 1319847 - RNA, 16 nt, Human
cuggggugggcaguuu

SEQ ID NO: 1319848 - RNA, 18 nt, Human
cuggggugggcaguuuuu

SEQ ID NO: 1319849 - RNA, 19 nt, Human
cugggccccugccucucug

SEQ ID NO: 1319850 - RNA, 16 nt, Human
cugggccuuggccugg

SEQ ID NO: 1319851 - RNA, 17 nt, Human
cugggccuuggccugga

SEQ ID NO: 1319852 - RNA, 18 nt, Human
cugggccuuggccuggag

SEQ ID NO: 1319853 - RNA, 19 nt, Human
cugggccuuggccuggagc

SEQ ID NO: 1319854 - RNA, 20 nt, Human
cugggccuuggccuggagca

SEQ ID NO: 1319855 - RNA, 14 nt, Human
cugggccuugggcu

SEQ ID NO: 1319856 - RNA, 15 nt, Human
cugggccuugggcuc

SEQ ID NO: 1319857 - RNA, 17 nt, Human
cugggccuugggcuccg

SEQ ID NO: 1319858 - RNA, 14 nt, Human
cugggcgcuggucc

SEQ ID NO: 1319859 - RNA, 12 nt, Human
cugggcucagug

SEQ ID NO: 1319860 - RNA, 19 nt, Human
cuggguaggaaagaggaag

SEQ ID NO: 1319861 - RNA, 15 nt, Human
cugggguggccacca

SEQ ID NO: 1319862 - RNA, 15 nt, Human
cuggguugcagacag

SEQ ID NO: 1319863 - RNA, 17 nt, Human
cuggguugccuuuauuu

SEQ ID NO: 1319864 - RNA, 13 nt, Human
cuggguuggaaaa

SEQ ID NO: 1319865 - RNA, 18 nt, Human
cuggguuggaaaacagua

SEQ ID NO: 1319866 - RNA, 13 nt, Human
cugguccagggcu

SEQ ID NO: 1319867 - RNA, 14 nt, Human
cugguccagggcua

SEQ ID NO: 1319868 - RNA, 18 nt, Human
cuggguugcagacaggaa

SEQ ID NO: 1319869 - RNA, 14 nt, Human
cugguccccuccuu

SEQ ID NO: 1319870 - RNA, 17 nt, Human
cugguccccuccuuccc

SEQ ID NO: 1319871 - RNA, 19 nt, Human
cuggucccggggccagcac

SEQ ID NO: 1319872 - RNA, 9 nt, Human
cuggucccu

SEQ ID NO: 1319873 - RNA, 20 nt, Human
cuggucccggggccagcacu

SEQ ID NO: 1319874 - RNA, 16 nt, Human
cugguccuuucuuccg

SEQ ID NO: 1319875 - RNA, 15 nt, Human
cugguccuuuuuggu

SEQ ID NO: 1319876 - RNA, 22 nt, Human
cugguccuuuuuggucgaggag

SEQ ID NO: 1319877 - RNA, 13 nt, Human
cuggucgcuccug

SEQ ID NO: 1319878 - RNA, 14 nt, Human
cuggucgcuccugc

SEQ ID NO: 1319879 - RNA, 15 nt, Human
cuggucgcuccugcc

SEQ ID NO: 1319880 - RNA, 16 nt, Human
cuggucgcuccugccc

SEQ ID NO: 1319881 - RNA, 18 nt, Human
cuggucgcuccugcccac

SEQ ID NO: 1319882 - RNA, 23 nt, Human
cuggucgcuccugcccacggagu

SEQ ID NO: 1319883 - RNA, 19 nt, Human
cuggucucaaacuccugac

SEQ ID NO: 1319884 - RNA, 14 nt, Human
cuggugcuggaggu

SEQ ID NO: 1319885 - RNA, 17 nt, Human
cuggugcuuaugcucuu

SEQ ID NO: 1319886 - RNA, 19 nt, Human
cuggugcuuaugcucuuaa

SEQ ID NO: 1319887 - RNA, 21 nt, Human
cuggugcuucuccucuccuag

SEQ ID NO: 1319888 - RNA, 20 nt, Human
cugguggcccgacagccugg

SEQ ID NO: 1319889 - RNA, 21 nt, Human
cugguggccccguuucuggug

SEQ ID NO: 1319890 - RNA, 22 nt, Human
cugguggccccguuucuggugg

SEQ ID NO: 1319891 - RNA, 20 nt, Human
cugguggccccguuucuggu

SEQ ID NO: 1319892 - RNA, 13 nt, Human
cuggugggccaac

SEQ ID NO: 1319893 - RNA, 21 nt, Human
cugguggggauaggccagccg

SEQ ID NO: 1319894 - RNA, 22 nt, Human
cugguggggauaggccagccgc

SEQ ID NO: 1319895 - RNA, 14 nt, Human
cugguggggcagcu

SEQ ID NO: 1319896 - RNA, 15 nt, Human
cugguggggcagcuc

SEQ ID NO: 1319897 - RNA, 16 nt, Human
cugguggggcagcucc

SEQ ID NO: 1319898 - RNA, 20 nt, Human
cugguggggcagcuccucug

SEQ ID NO: 1319899 - RNA, 17 nt, Human
cugguggggcagcuccu

SEQ ID NO: 1319900 - RNA, 18 nt, Human
cuggugggugccuaggcc

SEQ ID NO: 1319901 - RNA, 21 nt, Human
cuggugggugccuaggccugg

SEQ ID NO: 1319902 - RNA, 16 nt, Human
cuggugguauuuucaa

SEQ ID NO: 1319903 - RNA, 18 nt, Human
cugguggucuguuggcag

SEQ ID NO: 1319904 - RNA, 20 nt, Human
cugguggucuguuggcaggc

SEQ ID NO: 1319905 - RNA, 22 nt, Human
cugguggucuguuggcaggcug

SEQ ID NO: 1319906 - RNA, 23 nt, Human
cugguggucuguuggcaggcugg

SEQ ID NO: 1319907 - RNA, 15 nt, Human
cuggugguauuuuca

SEQ ID NO: 1319908 - RNA, 16 nt, Human
cugguucucaauucca

SEQ ID NO: 1319909 - RNA, 20 nt, Human
cugguucucaauuccaacag

SEQ ID NO: 1319910 - RNA, 11 nt, Human
cugcccugccc

SEQ ID NO: 1319911 - RNA, 21 nt, Human
cugcccugccaccugucuguc

SEQ ID NO: 1319912 - RNA, 20 nt, Human
cugcccugccaccugucugu

SEQ ID NO: 1319913 - RNA, 18 nt, Human
cugcccugccaccugucu

SEQ ID NO: 1319914 - RNA, 17 nt, Human
cugcccugccaccuguc

SEQ ID NO: 1319915 - RNA, 16 nt, Human
cugcccugccaccugu

SEQ ID NO: 1319916 - RNA, 15 nt, Human
cugcccugccaccug

SEQ ID NO: 1319917 - RNA, 14 nt, Human
cugcccugccaccu

SEQ ID NO: 1319918 - RNA, 13 nt, Human
cugcccugccacc

SEQ ID NO: 1319919 - RNA, 11 nt, Human
cugcccugcca

SEQ ID NO: 1319920 - RNA, 20 nt, Human
cugcccucugcauccucugg

SEQ ID NO: 1319921 - RNA, 17 nt, Human
cugcccucugcauccuc

SEQ ID NO: 1319922 - RNA, 13 nt, Human
cugcccugcccac

SEQ ID NO: 1319923 - RNA, 21 nt, Human
cugcccagugcacuugcugga

SEQ ID NO: 1319924 - RNA, 18 nt, Human
cugcccgggagcucagga

SEQ ID NO: 1319925 - RNA, 12 nt, Human
cugcccuccugu

SEQ ID NO: 1319926 - RNA, 16 nt, Human
cugcccuccugugcuc

SEQ ID NO: 1319927 - RNA, 19 nt, Human
cugcccuccugugcucagc

SEQ ID NO: 1319928 - RNA, 20 nt, Human
cugcccuccugugcucagcc

SEQ ID NO: 1319929 - RNA, 21 nt, Human
cugcccuccugugcucagccc

SEQ ID NO: 1319930 - RNA, 22 nt, Human
cugcccuccugugcucagcccu

SEQ ID NO: 1319931 - RNA, 23 nt, Human
cugcccuccugugcucagcccug

SEQ ID NO: 1319932 - RNA, 14 nt, Human
cugcccaggcacug

SEQ ID NO: 1319933 - RNA, 19 nt, Human
cugcccaaccugcucuccu

SEQ ID NO: 1319934 - RNA, 17 nt, Human
cugcccaaccugcucuc

SEQ ID NO: 1319935 - RNA, 17 nt, Human
cugcccaacccuucccu

SEQ ID NO: 1319936 - RNA, 20 nt, Human
cugcccaacccuucccucac

SEQ ID NO: 1319937 - RNA, 13 nt, Human
cugcccaaagcag

SEQ ID NO: 1319938 - RNA, 23 nt, Human
cugcccaaagcagcacuuauaaa

SEQ ID NO: 1319939 - RNA, 18 nt, Human
cugcccaggccugccugu

SEQ ID NO: 1319940 - RNA, 15 nt, Human
cugcccaggcacugc

SEQ ID NO: 1319941 - RNA, 16 nt, Human
cugcccaggcacugca

SEQ ID NO: 1319942 - RNA, 20 nt, Human
cugcccaggcacugcuaggc

SEQ ID NO: 1319943 - RNA, 19 nt, Human
cugcccaggccugccuguu

SEQ ID NO: 1319944 - RNA, 16 nt, Human
cugcccagugcacuug

SEQ ID NO: 1319945 - RNA, 19 nt, Human
cugcccagugcacuugcug

SEQ ID NO: 1319946 - RNA, 20 nt, Human
cugccagcauuucccuuccu

SEQ ID NO: 1319947 - RNA, 13 nt, Human
cugccacacuuca

SEQ ID NO: 1319948 - RNA, 17 nt, Human
cugccacacuucaggcu

SEQ ID NO: 1319949 - RNA, 22 nt, Human
cugccacacuucaggcucuucu

SEQ ID NO: 1319950 - RNA, 19 nt, Human
cugccaccacgcccggcua

SEQ ID NO: 1319951 - RNA, 21 nt, Human
cugccacagccuccccugcca

SEQ ID NO: 1319952 - RNA, 22 nt, Human
cugccacagccuccccugccag

SEQ ID NO: 1319953 - RNA, 23 nt, Human
cugccacagccuccccugccagg

SEQ ID NO: 1319954 - RNA, 13 nt, Human
cugccaccaggcc

SEQ ID NO: 1319955 - RNA, 14 nt, Human
cugccaccaggcca

SEQ ID NO: 1319956 - RNA, 15 nt, Human
cugccaccaggccac

SEQ ID NO: 1319957 - RNA, 17 nt, Human
cugccaccaggccaccu

SEQ ID NO: 1319958 - RNA, 18 nt, Human
cugccaccaggccaccuc

SEQ ID NO: 1319959 - RNA, 23 nt, Human
cugccaccaggccaccuccccag

SEQ ID NO: 1319960 - RNA, 12 nt, Human
cugccagccccu

SEQ ID NO: 1319961 - RNA, 14 nt, Human
cugccagccccugc

SEQ ID NO: 1319962 - RNA, 16 nt, Human
cugccagccccugcca

SEQ ID NO: 1319963 - RNA, 16 nt, Human
cugccaggagacaggu

SEQ ID NO: 1319964 - RNA, 17 nt, Human
cugccagcucuguauca

SEQ ID NO: 1319965 - RNA, 20 nt, Human
cugccaggagcacggcucug

SEQ ID NO: 1319966 - RNA, 15 nt, Human
cugccaggagcuuug

SEQ ID NO: 1319967 - RNA, 11 nt, Human
cugccaggagg

SEQ ID NO: 1319968 - RNA, 16 nt, Human
cugccaggaggaccca

SEQ ID NO: 1319969 - RNA, 18 nt, Human
cugccaggaggacccagg

SEQ ID NO: 1319970 - RNA, 19 nt, Human
cugccaggaggacccaggg

SEQ ID NO: 1319971 - RNA, 21 nt, Human
cugccaggaggacccagggcu

SEQ ID NO: 1319972 - RNA, 22 nt, Human
cugccaggaggacccagggcuc

SEQ ID NO: 1319973 - RNA, 23 nt, Human
cugccaggaggacccagggcucu

SEQ ID NO: 1319974 - RNA, 13 nt, Human
cugccaggaggga

SEQ ID NO: 1319975 - RNA, 18 nt, Human
cugccaggagggacaaag

SEQ ID NO: 1319976 - RNA, 20 nt, Human
cugccaggagggacaaagga

SEQ ID NO: 1319977 - RNA, 21 nt, Human
cugccaggagggacaaaggag

SEQ ID NO: 1319978 - RNA, 22 nt, Human
cugccaggagggacaaaggagc

SEQ ID NO: 1319979 - RNA, 23 nt, Human
cugccaggagggacaaaggagcc

SEQ ID NO: 1319980 - RNA, 14 nt, Human
cugccucucugcag

SEQ ID NO: 1319981 - RNA, 21 nt, Human
cugccucucgcuccucaaccc

SEQ ID NO: 1319982 - RNA, 14 nt, Human
cugccucucuagga

SEQ ID NO: 1319983 - RNA, 13 nt, Human
cugccucucugca

SEQ ID NO: 1319984 - RNA, 12 nt, Human
cugccucucugc

SEQ ID NO: 1319985 - RNA, 19 nt, Human
cugccucuucccucuuccu

SEQ ID NO: 1319986 - RNA, 18 nt, Human
cugccucuucccucuucc

SEQ ID NO: 1319987 - RNA, 12 nt, Human
cugccucuuccu

SEQ ID NO: 1319988 - RNA, 19 nt, Human
cugccucuuaaauaaaccu

SEQ ID NO: 1319989 - RNA, 20 nt, Human
cugccugacauuuggagugu

SEQ ID NO: 1319990 - RNA, 23 nt, Human
cugccugacauuuggaguguucc

SEQ ID NO: 1319991 - RNA, 19 nt, Human
cugccugagucgugaccug

SEQ ID NO: 1319992 - RNA, 21 nt, Human
cugccugagucgugaccugcu

SEQ ID NO: 1319993 - RNA, 20 nt, Human
cugccugagucgugaccugc

SEQ ID NO: 1319994 - RNA, 15 nt, Human
cugccuaagugcagc

SEQ ID NO: 1319995 - RNA, 11 nt, Human
cugcccuggga

SEQ ID NO: 1319996 - RNA, 12 nt, Human
cugcccugggag

SEQ ID NO: 1319997 - RNA, 13 nt, Human
cugcccugggagg

SEQ ID NO: 1319998 - RNA, 15 nt, Human
cugcccugggaggca

SEQ ID NO: 1319999 - RNA, 22 nt, Human
cugcccugggaggcagugaugg

SEQ ID NO: 1320000 - RNA, 12 nt, Human
cugccucaggac

SEQ ID NO: 1320001 - RNA, 13 nt, Human
cugccucaggacu

SEQ ID NO: 1320002 - RNA, 14 nt, Human
cugccucaggacug

SEQ ID NO: 1320003 - RNA, 22 nt, Human
cugccucaggaggcaggaccuu

SEQ ID NO: 1320004 - RNA, 23 nt, Human
cugccucaggaggcaggaccuuc

SEQ ID NO: 1320005 - RNA, 17 nt, Human
cugccuuaucuugcacc

SEQ ID NO: 1320006 - RNA, 18 nt, Human
cugccuuauucagggaag

SEQ ID NO: 1320007 - RNA, 19 nt, Human
cugccuuauucagggaagg

SEQ ID NO: 1320008 - RNA, 20 nt, Human
cugccuuauucagggaagga

SEQ ID NO: 1320009 - RNA, 21 nt, Human
cugccuuauucagggaaggag

SEQ ID NO: 1320010 - RNA, 15 nt, Human
cugccuucaccuuca

SEQ ID NO: 1320011 - RNA, 16 nt, Human
cugccuuagucucagu

SEQ ID NO: 1320012 - RNA, 20 nt, Human
cugccuuagucucaguuugu

SEQ ID NO: 1320013 - RNA, 23 nt, Human
cugccuuagucucaguuugugug

SEQ ID NO: 1320014 - RNA, 15 nt, Human
cugccuuaucuugca

SEQ ID NO: 1320015 - RNA, 13 nt, Human
cugcggguggggc

SEQ ID NO: 1320016 - RNA, 21 nt, Human
cugcggguggggcuuggggcu

SEQ ID NO: 1320017 - RNA, 22 nt, Human
cugcgguagaugggagggaggc

SEQ ID NO: 1320018 - RNA, 19 nt, Human
cugcgugucaccugugcuu

SEQ ID NO: 1320019 - RNA, 22 nt, Human
cugcgugggugugugcguguuu

SEQ ID NO: 1320020 - RNA, 12 nt, Human
cugcuaaauaaa

SEQ ID NO: 1320021 - RNA, 15 nt, Human
cugcuaaauaaaauu

SEQ ID NO: 1320022 - RNA, 23 nt, Human
cugcuaaauaaaauuuguugcau

SEQ ID NO: 1320023 - RNA, 16 nt, Human
cugcuaaggucuugga

SEQ ID NO: 1320024 - RNA, 13 nt, Human
cugcuccagaccu

SEQ ID NO: 1320025 - RNA, 14 nt, Human
cugcuccagaccug

SEQ ID NO: 1320026 - RNA, 15 nt, Human
cugcuccagaccuga

SEQ ID NO: 1320027 - RNA, 19 nt, Human
cugcuaacggugcucaggg

SEQ ID NO: 1320028 - RNA, 18 nt, Human
cugcuaacggugcucagg

SEQ ID NO: 1320029 - RNA, 21 nt, Human
cugcuccagaccugauccugg

SEQ ID NO: 1320030 - RNA, 22 nt, Human
cugcuccagaccugauccugga

SEQ ID NO: 1320031 - RNA, 14 nt, Human
cugcuccagacagg

SEQ ID NO: 1320032 - RNA, 19 nt, Human
cugcuccccuaaagccuca

SEQ ID NO: 1320033 - RNA, 12 nt, Human
cugcucccucag

SEQ ID NO: 1320034 - RNA, 13 nt, Human
cugcucccucaga

SEQ ID NO: 1320035 - RNA, 14 nt, Human
cugcucccucagac

SEQ ID NO: 1320036 - RNA, 14 nt, Human
cugcuccuucccca

SEQ ID NO: 1320037 - RNA, 15 nt, Human
cugcuccuuccccau

SEQ ID NO: 1320038 - RNA, 23 nt, Human
cugcuccuuccccaucguugccc

SEQ ID NO: 1320039 - RNA, 14 nt, Human
cugcucgcucccug

SEQ ID NO: 1320040 - RNA, 17 nt, Human
cugcucggggugcacag

SEQ ID NO: 1320041 - RNA, 13 nt, Human
cugcucggggugc

SEQ ID NO: 1320042 - RNA, 16 nt, Human
cugcucugaacacgaa

SEQ ID NO: 1320043 - RNA, 19 nt, Human
cugcucugaacacgaagcu

SEQ ID NO: 1320044 - RNA, 12 nt, Human
cugcucugagaa

SEQ ID NO: 1320045 - RNA, 13 nt, Human
cugcucugagaau

SEQ ID NO: 1320046 - RNA, 15 nt, Human
cugaucccagagagc

SEQ ID NO: 1320047 - RNA, 22 nt, Human
cugaucagugggccuccaagga

SEQ ID NO: 1320048 - RNA, 20 nt, Human
cugauacuuugacaguguuu

SEQ ID NO: 1320049 - RNA, 18 nt, Human
cugauaaaagauggccau

SEQ ID NO: 1320050 - RNA, 19 nt, Human
cugauaggguuugugacag

SEQ ID NO: 1320051 - RNA, 20 nt, Human
cugauaggguuugugacagg

SEQ ID NO: 1320052 - RNA, 23 nt, Human
cugauaggguuugugacagggcg

SEQ ID NO: 1320053 - RNA, 13 nt, Human
cugaucucguuuu

SEQ ID NO: 1320054 - RNA, 15 nt, Human
cugauguacucuaaa

SEQ ID NO: 1320055 - RNA, 16 nt, Human
cugauguacucuaaau

SEQ ID NO: 1320056 - RNA, 18 nt, Human
cugaugucaauuucugug

SEQ ID NO: 1320057 - RNA, 19 nt, Human
cugaugucaauuucugugu

SEQ ID NO: 1320058 - RNA, 20 nt, Human
cugaugucaauuucuguguu

SEQ ID NO: 1320059 - RNA, 22 nt, Human
cugaugucaauuucuguguugc

SEQ ID NO: 1320060 - RNA, 13 nt, Human
cugaugucuccua

SEQ ID NO: 1320061 - RNA, 15 nt, Human
cugaugucuccuaag

SEQ ID NO: 1320062 - RNA, 18 nt, Human
cugaugucuccuaagcac

SEQ ID NO: 1320063 - RNA, 21 nt, Human
cugaugucuccuaagcaccug

SEQ ID NO: 1320064 - RNA, 18 nt, Human
cugaucccagagagcccg

SEQ ID NO: 1320065 - RNA, 20 nt, Human
cugaucccagagagcccgag

SEQ ID NO: 1320066 - RNA, 12 nt, Human
cugaucccucua

SEQ ID NO: 1320067 - RNA, 13 nt, Human
cugaucccucuac

SEQ ID NO: 1320068 - RNA, 21 nt, Human
cugauccuggaggcccaguuc

SEQ ID NO: 1320069 - RNA, 21 nt, Human
cugaucccagagagcccgagg

SEQ ID NO: 1320070 - RNA, 13 nt, Human
cugaucgccuucc

SEQ ID NO: 1320071 - RNA, 15 nt, Human
cugaucgccuucccc

SEQ ID NO: 1320072 - RNA, 16 nt, Human
cugaucgccuucccca

SEQ ID NO: 1320073 - RNA, 17 nt, Human
cugauucaauuugaugu

SEQ ID NO: 1320074 - RNA, 17 nt, Human
cugauucacaucucauu

SEQ ID NO: 1320075 - RNA, 21 nt, Human
cugauucacaucucauuuuuc

SEQ ID NO: 1320076 - RNA, 16 nt, Human
cugauucaauuugaug

SEQ ID NO: 1320077 - RNA, 17 nt, Human
cugauucgaaugacacu

SEQ ID NO: 1320078 - RNA, 19 nt, Human
cugauucgaaugacacugu

SEQ ID NO: 1320079 - RNA, 12 nt, Human
cugauguugugu

SEQ ID NO: 1320080 - RNA, 21 nt, Human
cugauuaaaaugcuuccuccc

SEQ ID NO: 1320081 - RNA, 16 nt, Human
cugauuaaaugacacu

SEQ ID NO: 1320082 - RNA, 15 nt, Human
cugauuaaaugacac

SEQ ID NO: 1320083 - RNA, 13 nt, Human
cugagucccaucc

SEQ ID NO: 1320084 - RNA, 17 nt, Human
cugagucguacagaaag

SEQ ID NO: 1320085 - RNA, 18 nt, Human
cugagucguacagaaagc

SEQ ID NO: 1320086 - RNA, 19 nt, Human
cugagucguacagaaagcu

SEQ ID NO: 1320087 - RNA, 20 nt, Human
cugagucguacagaaagcug

SEQ ID NO: 1320088 - RNA, 21 nt, Human
cugagucguacagaaagcugc

SEQ ID NO: 1320089 - RNA, 23 nt, Human
cugagucguacagaaagcugccu

SEQ ID NO: 1320090 - RNA, 17 nt, Human
cugagucgugaccugcu

SEQ ID NO: 1320091 - RNA, 20 nt, Human
cugagucgugaccugcuagg

SEQ ID NO: 1320092 - RNA, 21 nt, Human
cugagucgugaccugcuaggc

SEQ ID NO: 1320093 - RNA, 16 nt, Human
cugagggcagucgaua

SEQ ID NO: 1320094 - RNA, 12 nt, Human
cugagggcaguu

SEQ ID NO: 1320095 - RNA, 19 nt, Human
cugagggcaguucgcagcc

SEQ ID NO: 1320096 - RNA, 21 nt, Human
cugagggcaguucgcagccac

SEQ ID NO: 1320097 - RNA, 22 nt, Human
cugagggcaguucgcagccacc

SEQ ID NO: 1320098 - RNA, 20 nt, Human
cugaccaugcucaucugcug

SEQ ID NO: 1320099 - RNA, 21 nt, Human
cugaccaugcucaucugcugg

SEQ ID NO: 1320100 - RNA, 22 nt, Human
cugaccaugcucaucugcuggu

SEQ ID NO: 1320101 - RNA, 10 nt, Human
cugacccagu

SEQ ID NO: 1320102 - RNA, 12 nt, Human
cugacccagugc

SEQ ID NO: 1320103 - RNA, 13 nt, Human
cugacccagugcc

SEQ ID NO: 1320104 - RNA, 18 nt, Human
cugacccagugcccccac

SEQ ID NO: 1320105 - RNA, 23 nt, Human
cugacccagugcccccacugacc

SEQ ID NO: 1320106 - RNA, 20 nt, Human
cugacccagugcccccacug

SEQ ID NO: 1320107 - RNA, 21 nt, Human
cugacccagugcccccacuga

SEQ ID NO: 1320108 - RNA, 15 nt, Human
cugaggcuuuggauu

SEQ ID NO: 1320109 - RNA, 17 nt, Human
cugaggcuuuggauuug

SEQ ID NO: 1320110 - RNA, 18 nt, Human
cugaggcuuuggauuuga

SEQ ID NO: 1320111 - RNA, 21 nt, Human
cugaggcuuuggauuugacau

SEQ ID NO: 1320112 - RNA, 17 nt, Human
cugagggaaaggccagc

SEQ ID NO: 1320113 - RNA, 18 nt, Human
cugagggaaaggccagca

SEQ ID NO: 1320114 - RNA, 20 nt, Human
cugagggaaaggccagcacu

SEQ ID NO: 1320115 - RNA, 21 nt, Human
cugagggaaaggccagcacuc

SEQ ID NO: 1320116 - RNA, 11 nt, Human
cugagugacuc

SEQ ID NO: 1320117 - RNA, 21 nt, Human
cugagugacucuauauagcug

SEQ ID NO: 1320118 - RNA, 14 nt, Human
cugagugccuuuug

SEQ ID NO: 1320119 - RNA, 21 nt, Human
cugagugggaagcccauccug

SEQ ID NO: 1320120 - RNA, 18 nt, Human
cugaguuuuccauggcag

SEQ ID NO: 1320121 - RNA, 19 nt, Human
cugaguuuuccauggcagg

SEQ ID NO: 1320122 - RNA, 20 nt, Human
cugaguuuuccauggcagga

SEQ ID NO: 1320123 - RNA, 22 nt, Human
cugaguuuuccauggcaggaag

SEQ ID NO: 1320124 - RNA, 13 nt, Human
cugaguuuugugu

SEQ ID NO: 1320125 - RNA, 14 nt, Human
cugaguuuuguguu

SEQ ID NO: 1320126 - RNA, 17 nt, Human
cugaguuuuguguuugu

SEQ ID NO: 1320127 - RNA, 19 nt, Human
cugaguuuuguguuuguug

SEQ ID NO: 1320128 - RNA, 20 nt, Human
cugaguuuuguguuuguugu

SEQ ID NO: 1320129 - RNA, 21 nt, Human
cugaguuuuguguuuguugua

SEQ ID NO: 1320130 - RNA, 19 nt, Human
cugauaaaaccauguagaa

SEQ ID NO: 1320131 - RNA, 23 nt, Human
cugauaaaaccauguagaaaauu

SEQ ID NO: 1320132 - RNA, 15 nt, Human
cugagugccuuuugg

SEQ ID NO: 1320133 - RNA, 16 nt, Human
cugagugccuuuuggu

SEQ ID NO: 1320134 - RNA, 17 nt, Human
cugagugcuugcuuuuc

SEQ ID NO: 1320135 - RNA, 13 nt, Human
cugaguggcaggg

SEQ ID NO: 1320136 - RNA, 16 nt, Human
cugaguggcaggggac

SEQ ID NO: 1320137 - RNA, 18 nt, Human
cugaguggcaggggacag

SEQ ID NO: 1320138 - RNA, 13 nt, Human
cugagugggaagc

SEQ ID NO: 1320139 - RNA, 15 nt, Human
cugagugggaagccc

SEQ ID NO: 1320140 - RNA, 17 nt, Human
cugagugggaagcccau

SEQ ID NO: 1320141 - RNA, 23 nt, Human
cugauugaccguguuggucugua

SEQ ID NO: 1320142 - RNA, 18 nt, Human
cugcaaaaggacucucag

SEQ ID NO: 1320143 - RNA, 22 nt, Human
cugcaaacaccaacauguuggg

SEQ ID NO: 1320144 - RNA, 18 nt, Human
cugcaaaccugaccccug

SEQ ID NO: 1320145 - RNA, 20 nt, Human
cugcaaaccugaccccugcu

SEQ ID NO: 1320146 - RNA, 13 nt, Human
cugcacaaagccc

SEQ ID NO: 1320147 - RNA, 22 nt, Human
cugcaauuggcaccgaagccca

SEQ ID NO: 1320148 - RNA, 18 nt, Human
cugcacaaagcccuucca

SEQ ID NO: 1320149 - RNA, 20 nt, Human
cugcacaaagcccuuccaug

SEQ ID NO: 1320150 - RNA, 21 nt, Human
cugcacaaagcccuuccaugu

SEQ ID NO: 1320151 - RNA, 14 nt, Human
cugcaauucaaaag

SEQ ID NO: 1320152 - RNA, 18 nt, Human
cugcaauucaaaaguucc

SEQ ID NO: 1320153 - RNA, 21 nt, Human
cugcaauucaaaaguuccaag

SEQ ID NO: 1320154 - RNA, 22 nt, Human
cugcaauucaaaaguuccaaga

SEQ ID NO: 1320155 - RNA, 15 nt, Human
cugcaauuccccucu

SEQ ID NO: 1320156 - RNA, 16 nt, Human
cugcaauuccccucug

SEQ ID NO: 1320157 - RNA, 17 nt, Human
cugcaauuccccucugc

SEQ ID NO: 1320158 - RNA, 20 nt, Human
cugcaauuccccucugcugc

SEQ ID NO: 1320159 - RNA, 24 nt, Human
cugcaauucaaaaguuccaagagu

SEQ ID NO: 1320160 - RNA, 18 nt, Human
cugcacagugcaucucag

SEQ ID NO: 1320161 - RNA, 18 nt, Human
cugcacagugacuucuga

SEQ ID NO: 1320162 - RNA, 19 nt, Human
cugcacagugacuucugag

SEQ ID NO: 1320163 - RNA, 20 nt, Human
cugcacagugacuucugaga

SEQ ID NO: 1320164 - RNA, 21 nt, Human
cugcacagugacuucugagau

SEQ ID NO: 1320165 - RNA, 14 nt, Human
cugcacagugacuu

SEQ ID NO: 1320166 - RNA, 16 nt, Human
cugcacagugacuucu

SEQ ID NO: 1320167 - RNA, 21 nt, Human
cugcacagugcaucucagccc

SEQ ID NO: 1320168 - RNA, 22 nt, Human
cugcacagugcaucucagccca

SEQ ID NO: 1320169 - RNA, 22 nt, Human
cugcacagugacuucugagauc

SEQ ID NO: 1320170 - RNA, 17 nt, Human
cugcaccaguugcugcu

SEQ ID NO: 1320171 - RNA, 19 nt, Human
cugcaccaugcugcugggg

SEQ ID NO: 1320172 - RNA, 20 nt, Human
cugcaccaugcugcugggga

SEQ ID NO: 1320173 - RNA, 23 nt, Human
cugcaccaugcugcuggggaaga

SEQ ID NO: 1320174 - RNA, 21 nt, Human
cugcaccaugcugcuggggaa

SEQ ID NO: 1320175 - RNA, 16 nt, Human
cugcagggccaagcac

SEQ ID NO: 1320176 - RNA, 23 nt, Human
cugcagggaaaauuauuugcaua

SEQ ID NO: 1320177 - RNA, 15 nt, Human
cugcagggacugcca

SEQ ID NO: 1320178 - RNA, 17 nt, Human
cugcagggacugccagu

SEQ ID NO: 1320179 - RNA, 12 nt, Human
cugcagggaaaa

SEQ ID NO: 1320180 - RNA, 22 nt, Human
cugcagggaaaauuauuugcau

SEQ ID NO: 1320181 - RNA, 14 nt, Human
cugcaggcugagug

SEQ ID NO: 1320182 - RNA, 21 nt, Human
cugcaggcccuggccuccccu

SEQ ID NO: 1320183 - RNA, 16 nt, Human
cugcaggcugagugca

SEQ ID NO: 1320184 - RNA, 15 nt, Human
cugcaggcugagugc

SEQ ID NO: 1320185 - RNA, 21 nt, Human
cugcagccccacccagaugcc

SEQ ID NO: 1320186 - RNA, 16 nt, Human
cugcacuuacuugcuu

SEQ ID NO: 1320187 - RNA, 20 nt, Human
cugcagagcaggaaacauga

SEQ ID NO: 1320188 - RNA, 23 nt, Human
cugcagaagacaguauggcagcu

SEQ ID NO: 1320189 - RNA, 13 nt, Human
cugcagaagacag

SEQ ID NO: 1320190 - RNA, 16 nt, Human
cugcagaaccggagag

SEQ ID NO: 1320191 - RNA, 19 nt, Human
cugcagaaccggagagcca

SEQ ID NO: 1320192 - RNA, 21 nt, Human
cugcagaaccggagagccagc

SEQ ID NO: 1320193 - RNA, 22 nt, Human
cugcagaaccggagagccagcu

SEQ ID NO: 1320194 - RNA, 18 nt, Human
cugaagugagcacagccu

SEQ ID NO: 1320195 - RNA, 19 nt, Human
cugaagugagcacagccua

SEQ ID NO: 1320196 - RNA, 21 nt, Human
cugaagugagcacagccuagg

SEQ ID NO: 1320197 - RNA, 16 nt, Human
cugaagugcuuagugu

SEQ ID NO: 1320198 - RNA, 22 nt, Human
cugaauaaauuguacagccggc

SEQ ID NO: 1320199 - RNA, 21 nt, Human
cugaauaaauuguacagccgg

SEQ ID NO: 1320200 - RNA, 15 nt, Human
cugaauaccacucug

SEQ ID NO: 1320201 - RNA, 17 nt, Human
cugaauaccacucugua

SEQ ID NO: 1320202 - RNA, 18 nt, Human
cugaauaccacucuguaa

SEQ ID NO: 1320203 - RNA, 19 nt, Human
cugaauaccacucuguaau

SEQ ID NO: 1320204 - RNA, 20 nt, Human
cugaauaccacucuguaauu

SEQ ID NO: 1320205 - RNA, 21 nt, Human
cugaauaccacucuguaauug

SEQ ID NO: 1320206 - RNA, 23 nt, Human
cugaauaccacucuguaauugca

SEQ ID NO: 1320207 - RNA, 22 nt, Human
cugaagucacugcacagugcau

SEQ ID NO: 1320208 - RNA, 17 nt, Human
cugaagucacugcacag

SEQ ID NO: 1320209 - RNA, 16 nt, Human
cugaagucacugcaca

SEQ ID NO: 1320210 - RNA, 21 nt, Human
cugaaguaaaacaaacaauac

SEQ ID NO: 1320211 - RNA, 17 nt, Human
cugaagguuguggccuu

SEQ ID NO: 1320212 - RNA, 22 nt, Human
cugaaggugaaacauuuucucc

SEQ ID NO: 1320213 - RNA, 16 nt, Human
cugaagguuguggccu

SEQ ID NO: 1320214 - RNA, 21 nt, Human
cucuuuggcgaccuccuuuca

SEQ ID NO: 1320215 - RNA, 18 nt, Human
cucuuuggcuccccugua

SEQ ID NO: 1320216 - RNA, 23 nt, Human
cugaaccuauuucuuaaacacuu

SEQ ID NO: 1320217 - RNA, 17 nt, Human
cugaacuugcauuguga

SEQ ID NO: 1320218 - RNA, 18 nt, Human
cugaacuugcauugugau

SEQ ID NO: 1320219 - RNA, 14 nt, Human
cugaauuuaaauag

SEQ ID NO: 1320220 - RNA, 18 nt, Human
cugaauuuaaauagcuuu

SEQ ID NO: 1320221 - RNA, 13 nt, Human
cugaauuucccuc

SEQ ID NO: 1320222 - RNA, 23 nt, Human
cugaauuuaaauagcuuuuuucu

SEQ ID NO: 1320223 - RNA, 17 nt, Human
cugacagacagcccucc

SEQ ID NO: 1320224 - RNA, 19 nt, Human
cugacagacagcccuccau

SEQ ID NO: 1320225 - RNA, 13 nt, Human
cugacagaggggg

SEQ ID NO: 1320226 - RNA, 15 nt, Human
cugaaucugcuacca

SEQ ID NO: 1320227 - RNA, 17 nt, Human
cugaaucugcuaccaaa

SEQ ID NO: 1320228 - RNA, 22 nt, Human
cugaaucugcuaccaaaacagu

SEQ ID NO: 1320229 - RNA, 17 nt, Human
cugaauacccuuuucug

SEQ ID NO: 1320230 - RNA, 22 nt, Human
cugaauaccacucuguaauugc

SEQ ID NO: 1320231 - RNA, 15 nt, Human
cugaauagauaugaa

SEQ ID NO: 1320232 - RNA, 15 nt, Human
cugaauagcagaagg

SEQ ID NO: 1320233 - RNA, 17 nt, Human
cugaauauacagcaggu

SEQ ID NO: 1320234 - RNA, 21 nt, Human
cugaauauugccauuaugcuu

SEQ ID NO: 1320235 - RNA, 19 nt, Human
cugaauccaaacuaaucca

SEQ ID NO: 1320236 - RNA, 20 nt, Human
cugaauccaaacuaauccau

SEQ ID NO: 1320237 - RNA, 16 nt, Human
cugacauuccuugcug

SEQ ID NO: 1320238 - RNA, 18 nt, Human
cugacauuccuugcugaa

SEQ ID NO: 1320239 - RNA, 12 nt, Human
cugaccacagca

SEQ ID NO: 1320240 - RNA, 14 nt, Human
cugaccacagcaca

SEQ ID NO: 1320241 - RNA, 15 nt, Human
cugaccacagcacag

SEQ ID NO: 1320242 - RNA, 18 nt, Human
cugaccacagcacagcca

SEQ ID NO: 1320243 - RNA, 22 nt, Human
cugaccaccuuuguuucucccc

SEQ ID NO: 1320244 - RNA, 13 nt, Human
cugaccacucaga

SEQ ID NO: 1320245 - RNA, 14 nt, Human
cugaccacucagag

SEQ ID NO: 1320246 - RNA, 15 nt, Human
cugaccacucagaga

SEQ ID NO: 1320247 - RNA, 16 nt, Human
cugaccacucagagac

SEQ ID NO: 1320248 - RNA, 15 nt, Human
cugaccaugcucauc

SEQ ID NO: 1320249 - RNA, 17 nt, Human
cugaccacucagagaca

SEQ ID NO: 1320250 - RNA, 22 nt, Human
cugaccacucagagacaugcag

SEQ ID NO: 1320251 - RNA, 23 nt, Human
cugaccacucagagacaugcaga

SEQ ID NO: 1320252 - RNA, 13 nt, Human
cugaccagaacua

SEQ ID NO: 1320253 - RNA, 12 nt, Human
cugaccagcagc

SEQ ID NO: 1320254 - RNA, 16 nt, Human
cugacauucaccugcc

SEQ ID NO: 1320255 - RNA, 17 nt, Human
cugacauucaccugccc

SEQ ID NO: 1320256 - RNA, 23 nt, Human
cugacauucaccugccccaacuc

SEQ ID NO: 1320257 - RNA, 15 nt, Human
cugacauucugauuc

SEQ ID NO: 1320258 - RNA, 13 nt, Human
cucuucagucucu

SEQ ID NO: 1320259 - RNA, 19 nt, Human
cucuuccagucuuccugac

SEQ ID NO: 1320260 - RNA, 19 nt, Human
cucuucuccacuggaugga

SEQ ID NO: 1320261 - RNA, 14 nt, Human
cucuucuccacugg

SEQ ID NO: 1320262 - RNA, 22 nt, Human
cucuuccagucuuccugacacu

SEQ ID NO: 1320263 - RNA, 23 nt, Human
cucuuccagucuuccugacacuu

SEQ ID NO: 1320264 - RNA, 15 nt, Human
cucuucuccacugga

SEQ ID NO: 1320265 - RNA, 17 nt, Human
cucuucuccacuggaug

SEQ ID NO: 1320266 - RNA, 13 nt, Human
cucuucuccuuuc

SEQ ID NO: 1320267 - RNA, 15 nt, Human
cucuucuccuuucac

SEQ ID NO: 1320268 - RNA, 16 nt, Human
cucuucuccuuucaca

SEQ ID NO: 1320269 - RNA, 13 nt, Human
cucuucucuccag

SEQ ID NO: 1320270 - RNA, 14 nt, Human
cucuucucuccagc

SEQ ID NO: 1320271 - RNA, 15 nt, Human
cucuucucuccagcu

SEQ ID NO: 1320272 - RNA, 19 nt, Human
cucuucucuccagcugacu

SEQ ID NO: 1320273 - RNA, 22 nt, Human
cucuucucuccagcugacuaaa

SEQ ID NO: 1320274 - RNA, 21 nt, Human
cucuucugggagggcagcagg

SEQ ID NO: 1320275 - RNA, 22 nt, Human
cucuucugggagggcagcaggg

SEQ ID NO: 1320276 - RNA, 15 nt, Human
cucuucugggccuga

SEQ ID NO: 1320277 - RNA, 19 nt, Human
cucuucuggggcaggcugg

SEQ ID NO: 1320278 - RNA, 21 nt, Human
cucuucuggggcaggcugggc

SEQ ID NO: 1320279 - RNA, 23 nt, Human
cucuucuggggcaggcugggcca

SEQ ID NO: 1320280 - RNA, 13 nt, Human
cucuuaagaagac

SEQ ID NO: 1320281 - RNA, 19 nt, Human
cucuucaguuaagccuuug

SEQ ID NO: 1320282 - RNA, 20 nt, Human
cucuucaguuaagccuuugg

SEQ ID NO: 1320283 - RNA, 23 nt, Human
cucuucaguuaagccuuuggaaa

SEQ ID NO: 1320284 - RNA, 22 nt, Human
cucuguuccuucccugugccuc

SEQ ID NO: 1320285 - RNA, 13 nt, Human
cucuguucuuccu

SEQ ID NO: 1320286 - RNA, 15 nt, Human
cucuguucuuccuca

SEQ ID NO: 1320287 - RNA, 18 nt, Human
cucuguucuuccucagcc

SEQ ID NO: 1320288 - RNA, 19 nt, Human
cucuguucuuccucagcca

SEQ ID NO: 1320289 - RNA, 20 nt, Human
cucuguucuuccucagccag

SEQ ID NO: 1320290 - RNA, 22 nt, Human
cucuguucuuccucagccagcc

SEQ ID NO: 1320291 - RNA, 20 nt, Human
cucuguugcaagugcaauaa

SEQ ID NO: 1320292 - RNA, 21 nt, Human
cucuguucuuccucagccagc

SEQ ID NO: 1320293 - RNA, 19 nt, Human
cucuggagcccacuguacu

SEQ ID NO: 1320294 - RNA, 13 nt, Human
cucuggagccagc

SEQ ID NO: 1320295 - RNA, 15 nt, Human
cucuggagccagccg

SEQ ID NO: 1320296 - RNA, 15 nt, Human
cucuggagcccacug

SEQ ID NO: 1320297 - RNA, 21 nt, Human
cucuggagccagccgagcagg

SEQ ID NO: 1320298 - RNA, 23 nt, Human
cucuggagccagccgagcaggag

SEQ ID NO: 1320299 - RNA, 19 nt, Human
cucuguucugcacacagca

SEQ ID NO: 1320300 - RNA, 15 nt, Human
cucuguuccuucccu

SEQ ID NO: 1320301 - RNA, 20 nt, Human
cucuguucugcacacagcac

SEQ ID NO: 1320302 - RNA, 21 nt, Human
cucuguucugcacacagcacg

SEQ ID NO: 1320303 - RNA, 13 nt, Human
cucuuucagcucc

SEQ ID NO: 1320304 - RNA, 14 nt, Human
cucuuucagcuccu

SEQ ID NO: 1320305 - RNA, 15 nt, Human
cucuuucagcuccug

SEQ ID NO: 1320306 - RNA, 18 nt, Human
cucuuuccaugacaucaa

SEQ ID NO: 1320307 - RNA, 12 nt, Human
cucuuucaaaac

SEQ ID NO: 1320308 - RNA, 22 nt, Human
cucuuucaagcagucgugccug

SEQ ID NO: 1320309 - RNA, 11 nt, Human
cucuuucagcu

SEQ ID NO: 1320310 - RNA, 12 nt, Human
cucuuucagcuc

SEQ ID NO: 1320311 - RNA, 21 nt, Human
cucuuguaauccgaaucucuu

SEQ ID NO: 1320312 - RNA, 20 nt, Human
cucuuguauaagauccuaga

SEQ ID NO: 1320313 - RNA, 21 nt, Human
cucuuguauaagauccuagau

SEQ ID NO: 1320314 - RNA, 12 nt, Human
cucuuucucugc

SEQ ID NO: 1320315 - RNA, 13 nt, Human
cucuuucucugcc

SEQ ID NO: 1320316 - RNA, 15 nt, Human
cucuuucucugccag

SEQ ID NO: 1320317 - RNA, 16 nt, Human
cucuuucucugccagu

SEQ ID NO: 1320318 - RNA, 17 nt, Human
cucuuucucugccagug

SEQ ID NO: 1320319 - RNA, 18 nt, Human
cucuuucucugccaguga

SEQ ID NO: 1320320 - RNA, 11 nt, Human
cucuuucugua

SEQ ID NO: 1320321 - RNA, 13 nt, Human
cucuuucuguaua

SEQ ID NO: 1320322 - RNA, 14 nt, Human
cucuuucuguauau

SEQ ID NO: 1320323 - RNA, 14 nt, Human
cucuuccaguuugc

SEQ ID NO: 1320324 - RNA, 15 nt, Human
cucuugagcaguggc

SEQ ID NO: 1320325 - RNA, 18 nt, Human
cucuugagcaguggcugg

SEQ ID NO: 1320326 - RNA, 22 nt, Human
cucuugagcaguggcuggucca

SEQ ID NO: 1320327 - RNA, 14 nt, Human
cucuugaccaggcu

SEQ ID NO: 1320328 - RNA, 15 nt, Human
cucuugaccaggcug

SEQ ID NO: 1320329 - RNA, 19 nt, Human
cucuugaccaggcugccuc

SEQ ID NO: 1320330 - RNA, 18 nt, Human
cucuugaacuccugaccu

SEQ ID NO: 1320331 - RNA, 18 nt, Human
cucuucuggguuccuucc

SEQ ID NO: 1320332 - RNA, 15 nt, Human
cucuuggagcuguga

SEQ ID NO: 1320333 - RNA, 16 nt, Human
cucuuggccugaucag

SEQ ID NO: 1320334 - RNA, 12 nt, Human
cucuuggcugga

SEQ ID NO: 1320335 - RNA, 14 nt, Human
cucuuggcuggacc

SEQ ID NO: 1320336 - RNA, 15 nt, Human
cucuuggcuggaccc

SEQ ID NO: 1320337 - RNA, 16 nt, Human
cucuuggcuggaccca

SEQ ID NO: 1320338 - RNA, 17 nt, Human
cucuuggcuggacccag

SEQ ID NO: 1320339 - RNA, 20 nt, Human
cucuuggcuggacccagcca

SEQ ID NO: 1320340 - RNA, 21 nt, Human
cucuugggaacugaacucacu

SEQ ID NO: 1320341 - RNA, 19 nt, Human
cucuuggcuggacccagcc

SEQ ID NO: 1320342 - RNA, 21 nt, Human
cucuuggggaguuuagggugg

SEQ ID NO: 1320343 - RNA, 15 nt, Human
cucucauacccuccc

SEQ ID NO: 1320344 - RNA, 16 nt, Human
cucucaucaacugaau

SEQ ID NO: 1320345 - RNA, 22 nt, Human
cucucaguugcagcccugcugc

SEQ ID NO: 1320346 - RNA, 19 nt, Human
cucucaguugcagcccugc

SEQ ID NO: 1320347 - RNA, 15 nt, Human
cucucaguugcagcc

SEQ ID NO: 1320348 - RNA, 18 nt, Human
cucucagucucugagcag

SEQ ID NO: 1320349 - RNA, 17 nt, Human
cucucaucaacugaaug

SEQ ID NO: 1320350 - RNA, 18 nt, Human
cucucaucaacugaauga

SEQ ID NO: 1320351 - RNA, 13 nt, Human
cucucaugaaccu

SEQ ID NO: 1320352 - RNA, 14 nt, Human
cucucaugaaccuc

SEQ ID NO: 1320353 - RNA, 17 nt, Human
cucuccacagcugccuc

SEQ ID NO: 1320354 - RNA, 22 nt, Human
cucuccacacagugcucaaggc

SEQ ID NO: 1320355 - RNA, 23 nt, Human
cucuccacacagugcucaaggcc

SEQ ID NO: 1320356 - RNA, 19 nt, Human
cucuccacucaugugacuc

SEQ ID NO: 1320357 - RNA, 16 nt, Human
cucuccacugccuucg

SEQ ID NO: 1320358 - RNA, 17 nt, Human
cucuaauucacagugcu

SEQ ID NO: 1320359 - RNA, 15 nt, Human
cucucagggccaggc

SEQ ID NO: 1320360 - RNA, 18 nt, Human
cucucagggccaggccuc

SEQ ID NO: 1320361 - RNA, 19 nt, Human
cucucagggccaggccucu

SEQ ID NO: 1320362 - RNA, 18 nt, Human
cucucaggugaaaggaaa

SEQ ID NO: 1320363 - RNA, 13 nt, Human
cucucagucucug

SEQ ID NO: 1320364 - RNA, 14 nt, Human
cucucagucucuga

SEQ ID NO: 1320365 - RNA, 15 nt, Human
cucucagucucugag

SEQ ID NO: 1320366 - RNA, 16 nt, Human
cucucagucucugagc

SEQ ID NO: 1320367 - RNA, 17 nt, Human
cucucagucucugagca

SEQ ID NO: 1320368 - RNA, 18 nt, Human
cucuaauguuugcauaua

SEQ ID NO: 1320369 - RNA, 17 nt, Human
cucuaauguuugcauau

SEQ ID NO: 1320370 - RNA, 15 nt, Human
cucuaauguuugcau

SEQ ID NO: 1320371 - RNA, 22 nt, Human
cucuaaucugugcuguuucaaa

SEQ ID NO: 1320372 - RNA, 15 nt, Human
cucuaauucacagug

SEQ ID NO: 1320373 - RNA, 16 nt, Human
cucuaauucacagugc

SEQ ID NO: 1320374 - RNA, 15 nt, Human
cucuaauacauucca

SEQ ID NO: 1320375 - RNA, 19 nt, Human
cucuaauauggcaaccauu

SEQ ID NO: 1320376 - RNA, 14 nt, Human
cucuaagguugggc

SEQ ID NO: 1320377 - RNA, 13 nt, Human
cucucccaaaaaa

SEQ ID NO: 1320378 - RNA, 13 nt, Human
cucucccaacucu

SEQ ID NO: 1320379 - RNA, 12 nt, Human
cucuccauucug

SEQ ID NO: 1320380 - RNA, 15 nt, Human
cucuccauucugcuc

SEQ ID NO: 1320381 - RNA, 16 nt, Human
cucuccauucugcucc

SEQ ID NO: 1320382 - RNA, 17 nt, Human
cucuccauucugcuccu

SEQ ID NO: 1320383 - RNA, 19 nt, Human
cucuccauucugcuccuuc

SEQ ID NO: 1320384 - RNA, 20 nt, Human
cucuccauucugcuccuucc

SEQ ID NO: 1320385 - RNA, 21 nt, Human
cucuccauucugcuccuuccc

SEQ ID NO: 1320386 - RNA, 23 nt, Human
cucuccaggcaggucugaagcuc

SEQ ID NO: 1320387 - RNA, 14 nt, Human
cucuccacuuucag

SEQ ID NO: 1320388 - RNA, 15 nt, Human
cucuccacuuucagc

SEQ ID NO: 1320389 - RNA, 16 nt, Human
cucuccacuuucagcu

SEQ ID NO: 1320390 - RNA, 17 nt, Human
cucuccacuuucagcug

SEQ ID NO: 1320391 - RNA, 18 nt, Human
cucuccacuuucagcugu

SEQ ID NO: 1320392 - RNA, 21 nt, Human
cucuccacuuucagcugucuu

SEQ ID NO: 1320393 - RNA, 19 nt, Human
cucuccacuuucagcuguc

SEQ ID NO: 1320394 - RNA, 18 nt, Human
cucuccagcugacuaaac

SEQ ID NO: 1320395 - RNA, 24 nt, Human
cucucccaggccccaugaccucca

SEQ ID NO: 1320396 - RNA, 19 nt, Human
cucucccaggccccaugac

SEQ ID NO: 1320397 - RNA, 21 nt, Human
cucucccaggccccaugaccu

SEQ ID NO: 1320398 - RNA, 14 nt, Human
cucucccaacucuu

SEQ ID NO: 1320399 - RNA, 13 nt, Human
cucucccacccuc

SEQ ID NO: 1320400 - RNA, 14 nt, Human
cucucccacccucu

SEQ ID NO: 1320401 - RNA, 16 nt, Human
cucucccacccucuuc

SEQ ID NO: 1320402 - RNA, 17 nt, Human
cucucccacccucuucc

SEQ ID NO: 1320403 - RNA, 19 nt, Human
cucucccacccucuuccua

SEQ ID NO: 1320404 - RNA, 21 nt, Human
cucucccacccucuuccuacu

SEQ ID NO: 1320405 - RNA, 13 nt, Human
cucucccaggcag

SEQ ID NO: 1320406 - RNA, 14 nt, Human
cucucccaggcagg

SEQ ID NO: 1320407 - RNA, 12 nt, Human
cucucccaggcc

SEQ ID NO: 1320408 - RNA, 13 nt, Human
cucucccaggccc

SEQ ID NO: 1320409 - RNA, 14 nt, Human
cucucccaggcccc

SEQ ID NO: 1320410 - RNA, 16 nt, Human
cucucccaggccccau

SEQ ID NO: 1320411 - RNA, 12 nt, Human
cucucccaguug

SEQ ID NO: 1320412 - RNA, 22 nt, Human
cucucugcaggucccuaauaaa

SEQ ID NO: 1320413 - RNA, 19 nt, Human
cucucugcaggucccuaau

SEQ ID NO: 1320414 - RNA, 17 nt, Human
cucucugcaggucccua

SEQ ID NO: 1320415 - RNA, 16 nt, Human
cucucugcaggucccu

SEQ ID NO: 1320416 - RNA, 14 nt, Human
cucucugcaggucc

SEQ ID NO: 1320417 - RNA, 13 nt, Human
cucucugcagguc

SEQ ID NO: 1320418 - RNA, 12 nt, Human
cucucugcaggu

SEQ ID NO: 1320419 - RNA, 14 nt, Human
cucucggcucccca

SEQ ID NO: 1320420 - RNA, 15 nt, Human
cucucggcuccccau

SEQ ID NO: 1320421 - RNA, 16 nt, Human
cucucggcuccccaug

SEQ ID NO: 1320422 - RNA, 17 nt, Human
cucucggcuccccaugu

SEQ ID NO: 1320423 - RNA, 18 nt, Human
cucucggcuccccaugug

SEQ ID NO: 1320424 - RNA, 19 nt, Human
cucucggguugugugucug

SEQ ID NO: 1320425 - RNA, 19 nt, Human
cucucuacaaacucccacu

SEQ ID NO: 1320426 - RNA, 14 nt, Human
cucucuacagucuc

SEQ ID NO: 1320427 - RNA, 18 nt, Human
cucucuacagucucgucu

SEQ ID NO: 1320428 - RNA, 16 nt, Human
cucucuacagucucgu

SEQ ID NO: 1320429 - RNA, 18 nt, Human
cucuccccacgagggcug

SEQ ID NO: 1320430 - RNA, 19 nt, Human
cucuccccacgagggcugg

SEQ ID NO: 1320431 - RNA, 21 nt, Human
cucuccccacgagggcuggcu

SEQ ID NO: 1320432 - RNA, 11 nt, Human
cucuccccagc

SEQ ID NO: 1320433 - RNA, 15 nt, Human
cucucgcacaccucu

SEQ ID NO: 1320434 - RNA, 13 nt, Human
cucucgcacaccu

SEQ ID NO: 1320435 - RNA, 12 nt, Human
cucuggagccca

SEQ ID NO: 1320436 - RNA, 14 nt, Human
cucuggagcauuuc

SEQ ID NO: 1320437 - RNA, 15 nt, Human
cucuggagcauuucu

SEQ ID NO: 1320438 - RNA, 21 nt, Human
cucuggagaaagggcccuggg

SEQ ID NO: 1320439 - RNA, 18 nt, Human
cucuggacagccccaccc

SEQ ID NO: 1320440 - RNA, 15 nt, Human
cucuggacagcccca

SEQ ID NO: 1320441 - RNA, 14 nt, Human
cucuggaauuugaa

SEQ ID NO: 1320442 - RNA, 15 nt, Human
cucugcuuuggaaau

SEQ ID NO: 1320443 - RNA, 15 nt, Human
cucugccuccucuuc

SEQ ID NO: 1320444 - RNA, 16 nt, Human
cucugccuccucuuca

SEQ ID NO: 1320445 - RNA, 12 nt, Human
cucugcccugcg

SEQ ID NO: 1320446 - RNA, 14 nt, Human
cucugccuccucuu

SEQ ID NO: 1320447 - RNA, 21 nt, Human
cucugcccuugaucagcccca

SEQ ID NO: 1320448 - RNA, 23 nt, Human
cucugcccuaaugcgcaggcugg

SEQ ID NO: 1320449 - RNA, 11 nt, Human
cucugcccugc

SEQ ID NO: 1320450 - RNA, 13 nt, Human
cucugccaguccu

SEQ ID NO: 1320451 - RNA, 19 nt, Human
cucugcccaggcacugcua

SEQ ID NO: 1320452 - RNA, 14 nt, Human
cucugcccaggcac

SEQ ID NO: 1320453 - RNA, 14 nt, Human
cucugcagucucua

SEQ ID NO: 1320454 - RNA, 15 nt, Human
cucugcagucccagc

SEQ ID NO: 1320455 - RNA, 22 nt, Human
cucugcaauuccccucugcugc

SEQ ID NO: 1320456 - RNA, 23 nt, Human
cucugcaauuccccucugcugcu

SEQ ID NO: 1320457 - RNA, 23 nt, Human
cucugcaggucccuaauaaagcu

SEQ ID NO: 1320458 - RNA, 22 nt, Human
cucugcagucucuauaccaaua

SEQ ID NO: 1320459 - RNA, 23 nt, Human
cucugcauacucauuaggauggc

SEQ ID NO: 1320460 - RNA, 18 nt, Human
cucugcaauuccccucug

SEQ ID NO: 1320461 - RNA, 19 nt, Human
cucugcaauuccccucugc

SEQ ID NO: 1320462 - RNA, 20 nt, Human
cucugcaauuccccucugcu

SEQ ID NO: 1320463 - RNA, 21 nt, Human
cucugcaauuccccucugcug

SEQ ID NO: 1320464 - RNA, 20 nt, Human
cucugcaaacugccuucuuc

SEQ ID NO: 1320465 - RNA, 16 nt, Human
cucugcaaacugccuu

SEQ ID NO: 1320466 - RNA, 15 nt, Human
cucugcaauuccccu

SEQ ID NO: 1320467 - RNA, 16 nt, Human
cucugcaauuccccuc

SEQ ID NO: 1320468 - RNA, 17 nt, Human
cucugcaauuccccucu

SEQ ID NO: 1320469 - RNA, 21 nt, Human
cucugaggggcuaccaggaaa

SEQ ID NO: 1320470 - RNA, 20 nt, Human
cucugaggggcuaccaggaa

SEQ ID NO: 1320471 - RNA, 17 nt, Human
cucugaugaagaggagu

SEQ ID NO: 1320472 - RNA, 14 nt, Human
cucugaugaaaaau

SEQ ID NO: 1320473 - RNA, 22 nt, Human
cucugaugaaaaauugcugacu

SEQ ID NO: 1320474 - RNA, 12 nt, Human
cucugaucccuc

SEQ ID NO: 1320475 - RNA, 21 nt, Human
cucugaucccucuacagagcu

SEQ ID NO: 1320476 - RNA, 22 nt, Human
cucugaucccucuacagagcuu

SEQ ID NO: 1320477 - RNA, 22 nt, Human
cucugauuuucaaagcuuuuuc

SEQ ID NO: 1320478 - RNA, 20 nt, Human
cucugauuuucaaagcuuuu

SEQ ID NO: 1320479 - RNA, 15 nt, Human
cucugcaaacugccu

SEQ ID NO: 1320480 - RNA, 23 nt, Human
cucugaugaaaaauugcugacug

SEQ ID NO: 1320481 - RNA, 13 nt, Human
cucugaugcagcu

SEQ ID NO: 1320482 - RNA, 14 nt, Human
cucugaugcagcuu

SEQ ID NO: 1320483 - RNA, 18 nt, Human
cucugaugcagcuuauac

SEQ ID NO: 1320484 - RNA, 15 nt, Human
cucugaugcaucaga

SEQ ID NO: 1320485 - RNA, 20 nt, Human
cucugaugcaucagaaaggg

SEQ ID NO: 1320486 - RNA, 15 nt, Human
cucugauuuucaaag

SEQ ID NO: 1320487 - RNA, 18 nt, Human
cucugauuuucaaagcuu

SEQ ID NO: 1320488 - RNA, 19 nt, Human
cucugauuuucaaagcuuu

SEQ ID NO: 1320489 - RNA, 20 nt, Human
cucugagaauuguugagaua

SEQ ID NO: 1320490 - RNA, 23 nt, Human
cucugagaauuguugagauacuu

SEQ ID NO: 1320491 - RNA, 14 nt, Human
cucugagacuccag

SEQ ID NO: 1320492 - RNA, 15 nt, Human
cucugagacuccaga

SEQ ID NO: 1320493 - RNA, 10 nt, Human
cucugagaac

SEQ ID NO: 1320494 - RNA, 16 nt, Human
cucugagaagcucuga

SEQ ID NO: 1320495 - RNA, 13 nt, Human
cucugacuucugc

SEQ ID NO: 1320496 - RNA, 14 nt, Human
cucugacuucugcc

SEQ ID NO: 1320497 - RNA, 15 nt, Human
cucugacuucugccu

SEQ ID NO: 1320498 - RNA, 16 nt, Human
cucugacuucugccug

SEQ ID NO: 1320499 - RNA, 17 nt, Human
cucugacuucugccugg

SEQ ID NO: 1320500 - RNA, 18 nt, Human
cucugacuucugccugga

SEQ ID NO: 1320501 - RNA, 19 nt, Human
cucugacuucugccuggag

SEQ ID NO: 1320502 - RNA, 21 nt, Human
cucugacuucugccuggagac

SEQ ID NO: 1320503 - RNA, 12 nt, Human
cucucugcccua

SEQ ID NO: 1320504 - RNA, 13 nt, Human
cucucugcccuaa

SEQ ID NO: 1320505 - RNA, 21 nt, Human
cucucugcccuaaugcgcagg

SEQ ID NO: 1320506 - RNA, 17 nt, Human
cucucugcccuugauca

SEQ ID NO: 1320507 - RNA, 12 nt, Human
cucucugcucug

SEQ ID NO: 1320508 - RNA, 14 nt, Human
cucucugcucugcg

SEQ ID NO: 1320509 - RNA, 22 nt, Human
cucucugcucugcgugucaccu

SEQ ID NO: 1320510 - RNA, 16 nt, Human
cucugagcaaaugugg

SEQ ID NO: 1320511 - RNA, 23 nt, Human
cucugagacuccagaccugaggc

SEQ ID NO: 1320512 - RNA, 19 nt, Human
cucugagagucuagauucu

SEQ ID NO: 1320513 - RNA, 22 nt, Human
cucugagagucuagauucucug

SEQ ID NO: 1320514 - RNA, 13 nt, Human
cucugagcaguga

SEQ ID NO: 1320515 - RNA, 15 nt, Human
cucugagccuuggga

SEQ ID NO: 1320516 - RNA, 13 nt, Human
cucugagcgccuc

SEQ ID NO: 1320517 - RNA, 11 nt, Human
cucugagcugu

SEQ ID NO: 1320518 - RNA, 13 nt, Human
cucugagcuguca

SEQ ID NO: 1320519 - RNA, 15 nt, Human
cucugagcugugcag

SEQ ID NO: 1320520 - RNA, 15 nt, Human
cucugagcugucaac

SEQ ID NO: 1320521 - RNA, 19 nt, Human
cucugagcugucaacgaga

SEQ ID NO: 1320522 - RNA, 13 nt, Human
cucugaggccagc

SEQ ID NO: 1320523 - RNA, 14 nt, Human
cucugaggccagcc

SEQ ID NO: 1320524 - RNA, 15 nt, Human
cucugaggccagccu

SEQ ID NO: 1320525 - RNA, 16 nt, Human
cucugaggccagccug

SEQ ID NO: 1320526 - RNA, 17 nt, Human
cucugaggccagccugg

SEQ ID NO: 1320527 - RNA, 18 nt, Human
cucugaggccagccuggc

SEQ ID NO: 1320528 - RNA, 19 nt, Human
cucugaggccagccuggcc

SEQ ID NO: 1320529 - RNA, 20 nt, Human
cucugaggccagccuggccu

SEQ ID NO: 1320530 - RNA, 21 nt, Human
cucugaggccagccuggccuc

SEQ ID NO: 1320531 - RNA, 10 nt, Human
cucugaggcg

SEQ ID NO: 1320532 - RNA, 12 nt, Human
cucugaggcgcc

SEQ ID NO: 1320533 - RNA, 19 nt, Human
cucugaggcgccccaaccc

SEQ ID NO: 1320534 - RNA, 21 nt, Human
cucugaggcgccccaacccgu

SEQ ID NO: 1320535 - RNA, 23 nt, Human
cucugaggcgccccaacccgugg

SEQ ID NO: 1320536 - RNA, 22 nt, Human
cucugaggcgccccaacccgug

SEQ ID NO: 1320537 - RNA, 14 nt, Human
cucauauuuucaug

SEQ ID NO: 1320538 - RNA, 13 nt, Human
cucaucaacugaa

SEQ ID NO: 1320539 - RNA, 23 nt, Human
cucaucauucucugucucaucca

SEQ ID NO: 1320540 - RNA, 18 nt, Human
cucauccacauacccuga

SEQ ID NO: 1320541 - RNA, 20 nt, Human
cucauccacauacccugacc

SEQ ID NO: 1320542 - RNA, 12 nt, Human
cucauauuuccc

SEQ ID NO: 1320543 - RNA, 19 nt, Human
cucauauugugauucugcc

SEQ ID NO: 1320544 - RNA, 21 nt, Human
cucauauugugauucugccuu

SEQ ID NO: 1320545 - RNA, 13 nt, Human
cucauauugugau

SEQ ID NO: 1320546 - RNA, 13 nt, Human
cucauccacccca

SEQ ID NO: 1320547 - RNA, 15 nt, Human
cucauccaccccauc

SEQ ID NO: 1320548 - RNA, 16 nt, Human
cucauccaccccaucc

SEQ ID NO: 1320549 - RNA, 19 nt, Human
cucauccaccccaucccuc

SEQ ID NO: 1320550 - RNA, 24 nt, Human
cucauccaccccaucccuccccag

SEQ ID NO: 1320551 - RNA, 22 nt, Human
cucauccacucuacuaaugccu

SEQ ID NO: 1320552 - RNA, 16 nt, Human
cucauccaucaucaug

SEQ ID NO: 1320553 - RNA, 19 nt, Human
cucauccaucaucaugugu

SEQ ID NO: 1320554 - RNA, 13 nt, Human
cucauccugcagg

SEQ ID NO: 1320555 - RNA, 21 nt, Human
cucaucuagguaaauuacagu

SEQ ID NO: 1320556 - RNA, 14 nt, Human
cucauccugcaggc

SEQ ID NO: 1320557 - RNA, 17 nt, Human
cucaucuccccaucauu

SEQ ID NO: 1320558 - RNA, 18 nt, Human
cucauuaggauggcuagu

SEQ ID NO: 1320559 - RNA, 17 nt, Human
cucauuaggauggcuag

SEQ ID NO: 1320560 - RNA, 11 nt, Human
cucaucucagu

SEQ ID NO: 1320561 - RNA, 18 nt, Human
cucaucucagugaagaau

SEQ ID NO: 1320562 - RNA, 14 nt, Human
cucauuagacugga

SEQ ID NO: 1320563 - RNA, 21 nt, Human
cucauuauuuauguccaggug

SEQ ID NO: 1320564 - RNA, 22 nt, Human
cucauuauuuauguccaggugu

SEQ ID NO: 1320565 - RNA, 19 nt, Human
cucauugcuuacaagccua

SEQ ID NO: 1320566 - RNA, 16 nt, Human
cucauuggaaauuuag

SEQ ID NO: 1320567 - RNA, 18 nt, Human
cucauuggaaauuuagca

SEQ ID NO: 1320568 - RNA, 19 nt, Human
cucauuggaaauuuagcau

SEQ ID NO: 1320569 - RNA, 20 nt, Human
cucauuggaaauuuagcauu

SEQ ID NO: 1320570 - RNA, 13 nt, Human
cucauuggacccu

SEQ ID NO: 1320571 - RNA, 17 nt, Human
cucauuggacccuucca

SEQ ID NO: 1320572 - RNA, 18 nt, Human
cucauuggacccuuccau

SEQ ID NO: 1320573 - RNA, 22 nt, Human
cucauuggaaauuuagcauugu

SEQ ID NO: 1320574 - RNA, 15 nt, Human
cucauuguaaacaaa

SEQ ID NO: 1320575 - RNA, 18 nt, Human
cucauucccuccccagaa

SEQ ID NO: 1320576 - RNA, 17 nt, Human
cucauuccauaaauguc

SEQ ID NO: 1320577 - RNA, 18 nt, Human
cucauuccauaaaugucg

SEQ ID NO: 1320578 - RNA, 21 nt, Human
cucauuccaccuucccaugcc

SEQ ID NO: 1320579 - RNA, 18 nt, Human
cucauuccaccuucccau

SEQ ID NO: 1320580 - RNA, 17 nt, Human
cguuuuuuaaauguaua

SEQ ID NO: 1320581 - RNA, 15 nt, Human
cguuuuuuucauucc

SEQ ID NO: 1320582 - RNA, 20 nt, Human
cguuuuuuuuuuguuuguug

SEQ ID NO: 1320583 - RNA, 17 nt, Human
cucaggggccugcccag

SEQ ID NO: 1320584 - RNA, 19 nt, Human
cuaaaagugggcuugauuc

SEQ ID NO: 1320585 - RNA, 14 nt, Human
cucagggggcgccu

SEQ ID NO: 1320586 - RNA, 19 nt, Human
cucagggggcgccuguggu

SEQ ID NO: 1320587 - RNA, 23 nt, Human
cucagggggcgccugugguucug

SEQ ID NO: 1320588 - RNA, 21 nt, Human
cucaggggucugagcuccagc

SEQ ID NO: 1320589 - RNA, 15 nt, Human
cucagguacuuguaa

SEQ ID NO: 1320590 - RNA, 19 nt, Human
cucaggucacauaaaacuu

SEQ ID NO: 1320591 - RNA, 17 nt, Human
cucaggucccugcaggg

SEQ ID NO: 1320592 - RNA, 18 nt, Human
cucaggucccugcagggc

SEQ ID NO: 1320593 - RNA, 20 nt, Human
cucaggucccuggggcuagg

SEQ ID NO: 1320594 - RNA, 14 nt, Human
cucauaacuugaga

SEQ ID NO: 1320595 - RNA, 17 nt, Human
cucauaacuugagaccu

SEQ ID NO: 1320596 - RNA, 20 nt, Human
cucauaacuugagaccuaau

SEQ ID NO: 1320597 - RNA, 17 nt, Human
cucauacacucguauga

SEQ ID NO: 1320598 - RNA, 18 nt, Human
cucaguucauccauucua

SEQ ID NO: 1320599 - RNA, 20 nt, Human
cucaguucauccauucuauu

SEQ ID NO: 1320600 - RNA, 15 nt, Human
cuccacagcugccuc

SEQ ID NO: 1320601 - RNA, 20 nt, Human
cuccacauauuucagugagg

SEQ ID NO: 1320602 - RNA, 13 nt, Human
cuccacauccucc

SEQ ID NO: 1320603 - RNA, 19 nt, Human
cucauugucuguguagagu

SEQ ID NO: 1320604 - RNA, 13 nt, Human
cucauuuaauccu

SEQ ID NO: 1320605 - RNA, 22 nt, Human
cucauuuaauccucccuuccuc

SEQ ID NO: 1320606 - RNA, 19 nt, Human
cucauuuaauccucccuuc

SEQ ID NO: 1320607 - RNA, 14 nt, Human
cucauuuagccugu

SEQ ID NO: 1320608 - RNA, 16 nt, Human
cucauuuagccugucc

SEQ ID NO: 1320609 - RNA, 13 nt, Human
cuccacaccugcg

SEQ ID NO: 1320610 - RNA, 15 nt, Human
cuccacaccugcggc

SEQ ID NO: 1320611 - RNA, 16 nt, Human
cuccacaccugcggcc

SEQ ID NO: 1320612 - RNA, 14 nt, Human
cuccacacugcaca

SEQ ID NO: 1320613 - RNA, 15 nt, Human
cuccacacugcacaa

SEQ ID NO: 1320614 - RNA, 16 nt, Human
cuccacagcaacccca

SEQ ID NO: 1320615 - RNA, 19 nt, Human
cuccacagcaaccccaggc

SEQ ID NO: 1320616 - RNA, 14 nt, Human
cuccacucuuucuu

SEQ ID NO: 1320617 - RNA, 11 nt, Human
cuccacugccu

SEQ ID NO: 1320618 - RNA, 16 nt, Human
cuccacucugcuucuc

SEQ ID NO: 1320619 - RNA, 17 nt, Human
cuccacucugcuucucu

SEQ ID NO: 1320620 - RNA, 20 nt, Human
cuccacucugcuucucugac

SEQ ID NO: 1320621 - RNA, 21 nt, Human
cuccacucugcuucucugacu

SEQ ID NO: 1320622 - RNA, 12 nt, Human
cuccacucugcu

SEQ ID NO: 1320623 - RNA, 13 nt, Human
cuccacucugcuu

SEQ ID NO: 1320624 - RNA, 14 nt, Human
cuccacucugcuuc

SEQ ID NO: 1320625 - RNA, 15 nt, Human
cuccacucugcuucu

SEQ ID NO: 1320626 - RNA, 15 nt, Human
cuccagaccccuggc

SEQ ID NO: 1320627 - RNA, 17 nt, Human
cuccagaccccuggcuu

SEQ ID NO: 1320628 - RNA, 18 nt, Human
cuccagaccccuggcuuu

SEQ ID NO: 1320629 - RNA, 19 nt, Human
cuccagaccccuggcuuuu

SEQ ID NO: 1320630 - RNA, 20 nt, Human
cuccagaccccuggcuuuuc

SEQ ID NO: 1320631 - RNA, 21 nt, Human
cuccagaccccuggcuuuuca

SEQ ID NO: 1320632 - RNA, 14 nt, Human
cuccagccucagcu

SEQ ID NO: 1320633 - RNA, 17 nt, Human
cuccagccucagccucc

SEQ ID NO: 1320634 - RNA, 15 nt, Human
cuccagccucagccu

SEQ ID NO: 1320635 - RNA, 12 nt, Human
cuccagccucag

SEQ ID NO: 1320636 - RNA, 12 nt, Human
cuccagccugac

SEQ ID NO: 1320637 - RNA, 13 nt, Human
cuccagccugaca

SEQ ID NO: 1320638 - RNA, 20 nt, Human
cuccagccugacaucaaaaa

SEQ ID NO: 1320639 - RNA, 20 nt, Human
cuccagccaucaagagacug

SEQ ID NO: 1320640 - RNA, 21 nt, Human
cuccagccaucaagagacuga

SEQ ID NO: 1320641 - RNA, 23 nt, Human
cuccagccaucaagagacugagu

SEQ ID NO: 1320642 - RNA, 21 nt, Human
cuccauccugaggcuccacuu

SEQ ID NO: 1320643 - RNA, 23 nt, Human
cuccauccugaggcuccacuugg

SEQ ID NO: 1320644 - RNA, 20 nt, Human
cuccaucgcugucaucucag

SEQ ID NO: 1320645 - RNA, 17 nt, Human
cuccaucuaaacugccc

SEQ ID NO: 1320646 - RNA, 18 nt, Human
cuccaucuaaacugcccc

SEQ ID NO: 1320647 - RNA, 13 nt, Human
cuccaucuccacu

SEQ ID NO: 1320648 - RNA, 17 nt, Human
cuccagcucccugugcc

SEQ ID NO: 1320649 - RNA, 21 nt, Human
cuccagcucccugugccccca

SEQ ID NO: 1320650 - RNA, 22 nt, Human
cuccagcucccugugcccccag

SEQ ID NO: 1320651 - RNA, 17 nt, Human
cuccagcuccuuugggc

SEQ ID NO: 1320652 - RNA, 13 nt, Human
cuccagcucccug

SEQ ID NO: 1320653 - RNA, 15 nt, Human
cuccagcucccugug

SEQ ID NO: 1320654 - RNA, 16 nt, Human
cuccagcuccuuuggg

SEQ ID NO: 1320655 - RNA, 11 nt, Human
cuccaggccca

SEQ ID NO: 1320656 - RNA, 12 nt, Human
cuccaggcccaa

SEQ ID NO: 1320657 - RNA, 19 nt, Human
cuccaggcccaaggcuccc

SEQ ID NO: 1320658 - RNA, 16 nt, Human
cuccaggcccaaggcu

SEQ ID NO: 1320659 - RNA, 17 nt, Human
cuccaggcccaaggcuc

SEQ ID NO: 1320660 - RNA, 12 nt, Human
cucccaggcccc

SEQ ID NO: 1320661 - RNA, 15 nt, Human
cucccaggccccaug

SEQ ID NO: 1320662 - RNA, 14 nt, Human
cucccaggcgcccc

SEQ ID NO: 1320663 - RNA, 16 nt, Human
cucccaggccccauga

SEQ ID NO: 1320664 - RNA, 19 nt, Human
cucccaggccccaugaccu

SEQ ID NO: 1320665 - RNA, 21 nt, Human
cucccaggccccaugaccucc

SEQ ID NO: 1320666 - RNA, 19 nt, Human
cucccaaggggccugagca

SEQ ID NO: 1320667 - RNA, 22 nt, Human
cucccaaguagcugggauuaca

SEQ ID NO: 1320668 - RNA, 18 nt, Human
cucccaaggggccugagc

SEQ ID NO: 1320669 - RNA, 14 nt, Human
cuccauucugcucc

SEQ ID NO: 1320670 - RNA, 15 nt, Human
cuccauucugcuccu

SEQ ID NO: 1320671 - RNA, 16 nt, Human
cuccauucugcuccuu

SEQ ID NO: 1320672 - RNA, 17 nt, Human
cuccauucugcuccuuc

SEQ ID NO: 1320673 - RNA, 14 nt, Human
cuccaucuccacuc

SEQ ID NO: 1320674 - RNA, 13 nt, Human
cuccuuagaaaaa

SEQ ID NO: 1320675 - RNA, 22 nt, Human
cuccuuaaggcucuuuuguaag

SEQ ID NO: 1320676 - RNA, 13 nt, Human
cuccuuaaggcuc

SEQ ID NO: 1320677 - RNA, 24 nt, Human
cuccuguugggagagggcgcaggc

SEQ ID NO: 1320678 - RNA, 22 nt, Human
cuccuguugggagagggcgcag

SEQ ID NO: 1320679 - RNA, 19 nt, Human
cuccuguuuugcacagcca

SEQ ID NO: 1320680 - RNA, 17 nt, Human
cuccugcccacggaguc

SEQ ID NO: 1320681 - RNA, 13 nt, Human
cuccuguugggag

SEQ ID NO: 1320682 - RNA, 14 nt, Human
cuccuguugggaga

SEQ ID NO: 1320683 - RNA, 16 nt, Human
cuccuguugggagagg

SEQ ID NO: 1320684 - RNA, 11 nt, Human
cuccugccacc

SEQ ID NO: 1320685 - RNA, 13 nt, Human
cuccugcccacgg

SEQ ID NO: 1320686 - RNA, 19 nt, Human
cuccugaggauguguccca

SEQ ID NO: 1320687 - RNA, 14 nt, Human
cuccuuagaaaaaa

SEQ ID NO: 1320688 - RNA, 19 nt, Human
cuccuucaugacagccucc

SEQ ID NO: 1320689 - RNA, 16 nt, Human
cuccuuccagcuagug

SEQ ID NO: 1320690 - RNA, 13 nt, Human
cuccuucugagcu

SEQ ID NO: 1320691 - RNA, 14 nt, Human
cuccuucugagcuc

SEQ ID NO: 1320692 - RNA, 16 nt, Human
cuccuucugagcuccu

SEQ ID NO: 1320693 - RNA, 18 nt, Human
cuccuucugagcuccugu

SEQ ID NO: 1320694 - RNA, 19 nt, Human
cuccuucugagcuccuguc

SEQ ID NO: 1320695 - RNA, 20 nt, Human
cuccuucugagcuccugucc

SEQ ID NO: 1320696 - RNA, 23 nt, Human
cuccuucugagcuccuguccccu

SEQ ID NO: 1320697 - RNA, 22 nt, Human
cuccuugagggcaagagccaca

SEQ ID NO: 1320698 - RNA, 21 nt, Human
cuccuugauuuuagccuucuc

SEQ ID NO: 1320699 - RNA, 19 nt, Human
cucuaacaguggacaaagu

SEQ ID NO: 1320700 - RNA, 15 nt, Human
cucuaacaguggaca

SEQ ID NO: 1320701 - RNA, 13 nt, Human
cucuaacagcacc

SEQ ID NO: 1320702 - RNA, 14 nt, Human
cucuaacagcacca

SEQ ID NO: 1320703 - RNA, 14 nt, Human
cucuaacagcccuc

SEQ ID NO: 1320704 - RNA, 13 nt, Human
cucuaaauucuuu

SEQ ID NO: 1320705 - RNA, 17 nt, Human
cucuaaauucuuucauu

SEQ ID NO: 1320706 - RNA, 14 nt, Human
cucggcucacugca

SEQ ID NO: 1320707 - RNA, 11 nt, Human
cucggccugcc

SEQ ID NO: 1320708 - RNA, 17 nt, Human
cucggccuucacaaucu

SEQ ID NO: 1320709 - RNA, 22 nt, Human
cucuaaagucuguugauuaaag

SEQ ID NO: 1320710 - RNA, 23 nt, Human
cucuaaauacugagaaaaccugu

SEQ ID NO: 1320711 - RNA, 22 nt, Human
cucggccucccaaagugcuggg

SEQ ID NO: 1320712 - RNA, 18 nt, Human
cucggccucccaaagugc

SEQ ID NO: 1320713 - RNA, 20 nt, Human
cucggccucccaaagugcug

SEQ ID NO: 1320714 - RNA, 23 nt, Human
cucggccucccaaagugcuggga

SEQ ID NO: 1320715 - RNA, 13 nt, Human
cucggccugcccc

SEQ ID NO: 1320716 - RNA, 14 nt, Human
cucggaucucuccu

SEQ ID NO: 1320717 - RNA, 23 nt, Human
cucggcagcccuuccaaacucuu

SEQ ID NO: 1320718 - RNA, 15 nt, Human
cucggccucccaaag

SEQ ID NO: 1320719 - RNA, 22 nt, Human
cucgcuauugucaccagggcug

SEQ ID NO: 1320720 - RNA, 21 nt, Human
cucgcuauugucaccagggcu

SEQ ID NO: 1320721 - RNA, 22 nt, Human
cucgcuagcaguggcaggcaga

SEQ ID NO: 1320722 - RNA, 14 nt, Human
cucggaaucuauuu

SEQ ID NO: 1320723 - RNA, 20 nt, Human
cucggaaucuauuuucucau

SEQ ID NO: 1320724 - RNA, 18 nt, Human
cucggacuuagcugggag

SEQ ID NO: 1320725 - RNA, 19 nt, Human
cucggacuuagcugggaga

SEQ ID NO: 1320726 - RNA, 19 nt, Human
cucgcuauugucaccaggg

SEQ ID NO: 1320727 - RNA, 15 nt, Human
cucgcggcccucagu

SEQ ID NO: 1320728 - RNA, 16 nt, Human
cucgcggcccucagua

SEQ ID NO: 1320729 - RNA, 16 nt, Human
cucgccccuggcagag

SEQ ID NO: 1320730 - RNA, 17 nt, Human
cucgccccuggcagaga

SEQ ID NO: 1320731 - RNA, 20 nt, Human
cucgccccuggcagagaugc

SEQ ID NO: 1320732 - RNA, 19 nt, Human
cucgauguggucacagcug

SEQ ID NO: 1320733 - RNA, 24 nt, Human
cucgauguggucacagcuguauag

SEQ ID NO: 1320734 - RNA, 22 nt, Human
cucgcauaggaccuuuccacca

SEQ ID NO: 1320735 - RNA, 20 nt, Human
cucgauguggucacagcugu

SEQ ID NO: 1320736 - RNA, 19 nt, Human
cucgcccauccccuugagg

SEQ ID NO: 1320737 - RNA, 14 nt, Human
cucgccccagcagg

SEQ ID NO: 1320738 - RNA, 14 nt, Human
cucgccccuggcag

SEQ ID NO: 1320739 - RNA, 15 nt, Human
cucgccccuggcaga

SEQ ID NO: 1320740 - RNA, 21 nt, Human
cucgaggucgggcagcacaag

SEQ ID NO: 1320741 - RNA, 13 nt, Human
cucgaaucucugu

SEQ ID NO: 1320742 - RNA, 14 nt, Human
cucgaaucucugug

SEQ ID NO: 1320743 - RNA, 15 nt, Human
cucgaaucucugugc

SEQ ID NO: 1320744 - RNA, 16 nt, Human
cucgaaucucugugcc

SEQ ID NO: 1320745 - RNA, 17 nt, Human
cucgaaucucugugccu

SEQ ID NO: 1320746 - RNA, 18 nt, Human
cucgaaucucugugccuu

SEQ ID NO: 1320747 - RNA, 14 nt, Human
cucgaaucugugug

SEQ ID NO: 1320748 - RNA, 19 nt, Human
cucgacaugaaaauucaga

SEQ ID NO: 1320749 - RNA, 22 nt, Human
cuccuaucagaaguuucucagc

SEQ ID NO: 1320750 - RNA, 14 nt, Human
cuccucacuguauc

SEQ ID NO: 1320751 - RNA, 16 nt, Human
cuccucacuguaucca

SEQ ID NO: 1320752 - RNA, 19 nt, Human
cuccucacuguauccaggu

SEQ ID NO: 1320753 - RNA, 19 nt, Human
cuccucuugccacugccuc

SEQ ID NO: 1320754 - RNA, 15 nt, Human
cuccucuccaccauc

SEQ ID NO: 1320755 - RNA, 13 nt, Human
cuccucuccacca

SEQ ID NO: 1320756 - RNA, 14 nt, Human
cuccucuccaccau

SEQ ID NO: 1320757 - RNA, 17 nt, Human
cuccucuagcugugggg

SEQ ID NO: 1320758 - RNA, 18 nt, Human
cuccucuagcuguggggg

SEQ ID NO: 1320759 - RNA, 19 nt, Human
cuccucuagcugugggggu

SEQ ID NO: 1320760 - RNA, 17 nt, Human
cuccugaguagcuggga

SEQ ID NO: 1320761 - RNA, 22 nt, Human
cuccugaguagcugggauuaca

SEQ ID NO: 1320762 - RNA, 17 nt, Human
cuccugaggcuuuggau

SEQ ID NO: 1320763 - RNA, 16 nt, Human
cuccugaggcuuugga

SEQ ID NO: 1320764 - RNA, 14 nt, Human
cuccugaccucagg

SEQ ID NO: 1320765 - RNA, 15 nt, Human
cuccugaccucaagu

SEQ ID NO: 1320766 - RNA, 14 nt, Human
cuccugaccuuagg

SEQ ID NO: 1320767 - RNA, 16 nt, Human
cuccugaccucaggca

SEQ ID NO: 1320768 - RNA, 15 nt, Human
cuccugaccucaggc

SEQ ID NO: 1320769 - RNA, 20 nt, Human
cuccugagaaaaaagguucc

SEQ ID NO: 1320770 - RNA, 21 nt, Human
cuccugaaaaaaaaccugaga

SEQ ID NO: 1320771 - RNA, 22 nt, Human
cuccugaaaagguuuaugaaaa

SEQ ID NO: 1320772 - RNA, 23 nt, Human
cuccugaaaaaaaaccugagauu

SEQ ID NO: 1320773 - RNA, 17 nt, Human
cuccugacacccuucuc

SEQ ID NO: 1320774 - RNA, 18 nt, Human
cuccugacacccuucucc

SEQ ID NO: 1320775 - RNA, 20 nt, Human
cuccugacacccuucuccca

SEQ ID NO: 1320776 - RNA, 22 nt, Human
cuccugacacccuucucccacu

SEQ ID NO: 1320777 - RNA, 14 nt, Human
cuccugacacugcu

SEQ ID NO: 1320778 - RNA, 17 nt, Human
cuccugacacugcugga

SEQ ID NO: 1320779 - RNA, 18 nt, Human
cuccugacacugcuggag

SEQ ID NO: 1320780 - RNA, 12 nt, Human
cuccugaccagu

SEQ ID NO: 1320781 - RNA, 16 nt, Human
cuccugaccaguugca

SEQ ID NO: 1320782 - RNA, 22 nt, Human
cuccugaccaguugcagucacu

SEQ ID NO: 1320783 - RNA, 23 nt, Human
cuccugaccaguugcagucacuc

SEQ ID NO: 1320784 - RNA, 21 nt, Human
cucccagguguuaacauucca

SEQ ID NO: 1320785 - RNA, 22 nt, Human
cucccagguguuaacauuccaa

SEQ ID NO: 1320786 - RNA, 13 nt, Human
cucccauccugug

SEQ ID NO: 1320787 - RNA, 15 nt, Human
cucccauccugugug

SEQ ID NO: 1320788 - RNA, 16 nt, Human
cucccauccugugugu

SEQ ID NO: 1320789 - RNA, 19 nt, Human
cucccauccuguguguuaa

SEQ ID NO: 1320790 - RNA, 12 nt, Human
cucccuucaacc

SEQ ID NO: 1320791 - RNA, 18 nt, Human
cucccuucaaccauuccc

SEQ ID NO: 1320792 - RNA, 19 nt, Human
cucccuucaaccauucccc

SEQ ID NO: 1320793 - RNA, 20 nt, Human
cucccuucaaccauucccca

SEQ ID NO: 1320794 - RNA, 11 nt, Human
cucccuggggg

SEQ ID NO: 1320795 - RNA, 10 nt, Human
cucccugggg

SEQ ID NO: 1320796 - RNA, 16 nt, Human
cucccuucuacagccu

SEQ ID NO: 1320797 - RNA, 16 nt, Human
cucccuucucuucaca

SEQ ID NO: 1320798 - RNA, 21 nt, Human
cucccuucucuacacucuugu

SEQ ID NO: 1320799 - RNA, 14 nt, Human
cucccuucuucccu

SEQ ID NO: 1320800 - RNA, 13 nt, Human
cucccuuucaaca

SEQ ID NO: 1320801 - RNA, 15 nt, Human
cucccuuucacuaaa

SEQ ID NO: 1320802 - RNA, 19 nt, Human
cucccuuucuaucguucuc

SEQ ID NO: 1320803 - RNA, 19 nt, Human
cuccuaggcauucuggacc

SEQ ID NO: 1320804 - RNA, 15 nt, Human
cuccuaggcauucug

SEQ ID NO: 1320805 - RNA, 22 nt, Human
cuccuaguacuaacuccuagga

SEQ ID NO: 1320806 - RNA, 14 nt, Human
cuccuaguucuaga

SEQ ID NO: 1320807 - RNA, 17 nt, Human
cuccuaguucuagaaaa

SEQ ID NO: 1320808 - RNA, 23 nt, Human
cuccuaguucuagaaaaacaggc

SEQ ID NO: 1320809 - RNA, 21 nt, Human
cuccuaguucuucaucccacu

SEQ ID NO: 1320810 - RNA, 16 nt, Human
cgucaacucauauuuu

SEQ ID NO: 1320811 - RNA, 22 nt, Human
cgucaaaacagauuguuugcaa

SEQ ID NO: 1320812 - RNA, 20 nt, Human
cgucaacucauauuuucaug

SEQ ID NO: 1320813 - RNA, 21 nt, Human
cgucaaaacagauuguuugca

SEQ ID NO: 1320814 - RNA, 22 nt, Human
cgucaagagugaauucccucac

SEQ ID NO: 1320815 - RNA, 23 nt, Human
cgucaagagugaauucccucacu

SEQ ID NO: 1320816 - RNA, 18 nt, Human
cgucaccacgacuggcca

SEQ ID NO: 1320817 - RNA, 12 nt, Human
cgucaccucaga

SEQ ID NO: 1320818 - RNA, 21 nt, Human
cgucaccccuguuucuggcac

SEQ ID NO: 1320819 - RNA, 22 nt, Human
cguauaugucucaggucccugc

SEQ ID NO: 1320820 - RNA, 15 nt, Human
cguaugucugguucu

SEQ ID NO: 1320821 - RNA, 18 nt, Human
cguaugucugguucucaa

SEQ ID NO: 1320822 - RNA, 19 nt, Human
cguaugucugguucucaau

SEQ ID NO: 1320823 - RNA, 15 nt, Human
cguauuuaauagcaa

SEQ ID NO: 1320824 - RNA, 21 nt, Human
cguauuuaauagcaaagaauu

SEQ ID NO: 1320825 - RNA, 23 nt, Human
cguauuuaauagcaaagaauuga

SEQ ID NO: 1320826 - RNA, 19 nt, Human
cgucagcugggacaccccg

SEQ ID NO: 1320827 - RNA, 14 nt, Human
cgucagugcugugc

SEQ ID NO: 1320828 - RNA, 21 nt, Human
cgucaugaggagauucugccu

SEQ ID NO: 1320829 - RNA, 14 nt, Human
cgucccccucuggc

SEQ ID NO: 1320830 - RNA, 21 nt, Human
cgucccccucuggcuccagcu

SEQ ID NO: 1320831 - RNA, 23 nt, Human
cguccaucacguuagcuguccca

SEQ ID NO: 1320832 - RNA, 20 nt, Human
cgucaugcacaguauuugua

SEQ ID NO: 1320833 - RNA, 22 nt, Human
cgucaugaggagauucugccuu

SEQ ID NO: 1320834 - RNA, 19 nt, Human
cguccaggagccugugccu

SEQ ID NO: 1320835 - RNA, 22 nt, Human
cguauaaaagccuguuuaagag

SEQ ID NO: 1320836 - RNA, 21 nt, Human
cguauaaaagccuguuuaaga

SEQ ID NO: 1320837 - RNA, 17 nt, Human
cguauaaaagccuguuu

SEQ ID NO: 1320838 - RNA, 16 nt, Human
cguauaaaagccuguu

SEQ ID NO: 1320839 - RNA, 14 nt, Human
cguagaugauuuca

SEQ ID NO: 1320840 - RNA, 19 nt, Human
cguagcuauccggacagag

SEQ ID NO: 1320841 - RNA, 14 nt, Human
cguaggcuacagag

SEQ ID NO: 1320842 - RNA, 15 nt, Human
cguaggcuacagaga

SEQ ID NO: 1320843 - RNA, 16 nt, Human
cguaggcuacagagaa

SEQ ID NO: 1320844 - RNA, 17 nt, Human
cguaggcuacagagaag

SEQ ID NO: 1320845 - RNA, 19 nt, Human
cguaggcuacagagaagcc

SEQ ID NO: 1320846 - RNA, 20 nt, Human
cguaggcuacagagaagccu

SEQ ID NO: 1320847 - RNA, 23 nt, Human
cguaggcuacagagaagccuuca

SEQ ID NO: 1320848 - RNA, 21 nt, Human
cguaggcuacagagaagccuu

SEQ ID NO: 1320849 - RNA, 15 nt, Human
cggggcaucuggccu

SEQ ID NO: 1320850 - RNA, 23 nt, Human
cggggauguguccugacacugca

SEQ ID NO: 1320851 - RNA, 14 nt, Human
cggggauguguccu

SEQ ID NO: 1320852 - RNA, 13 nt, Human
cggggcagccccc

SEQ ID NO: 1320853 - RNA, 19 nt, Human
cggggcagcccccucacag

SEQ ID NO: 1320854 - RNA, 17 nt, Human
cggggcaucuggccugg

SEQ ID NO: 1320855 - RNA, 13 nt, Human
cggugcucagggg

SEQ ID NO: 1320856 - RNA, 23 nt, Human
cguagauauuggacaaagaaccu

SEQ ID NO: 1320857 - RNA, 22 nt, Human
cguagauauuggacaaagaacc

SEQ ID NO: 1320858 - RNA, 22 nt, Human
cgucccccucuggcuccagcug

SEQ ID NO: 1320859 - RNA, 15 nt, Human
cgucggucugugccc

SEQ ID NO: 1320860 - RNA, 19 nt, Human
cgucucccccaacagcugg

SEQ ID NO: 1320861 - RNA, 20 nt, Human
cgucucccccaacagcugga

SEQ ID NO: 1320862 - RNA, 15 nt, Human
cgucuacccugggau

SEQ ID NO: 1320863 - RNA, 24 nt, Human
cgucucccccaacagcuggacccu

SEQ ID NO: 1320864 - RNA, 16 nt, Human
cgucucggccuucaca

SEQ ID NO: 1320865 - RNA, 21 nt, Human
cgucucuuuuacccuggcccc

SEQ ID NO: 1320866 - RNA, 20 nt, Human
cgucucuuuuacccuggccc

SEQ ID NO: 1320867 - RNA, 15 nt, Human
cgucuggaaguccaa

SEQ ID NO: 1320868 - RNA, 17 nt, Human
cgucuggcccaccaggg

SEQ ID NO: 1320869 - RNA, 12 nt, Human
cgucuggguggc

SEQ ID NO: 1320870 - RNA, 17 nt, Human
cgucuguuuauaaacau

SEQ ID NO: 1320871 - RNA, 18 nt, Human
cgugaaugggugcccaca

SEQ ID NO: 1320872 - RNA, 18 nt, Human
cguucuuguaauuuuaca

SEQ ID NO: 1320873 - RNA, 15 nt, Human
cguucuuguaauuuu

SEQ ID NO: 1320874 - RNA, 12 nt, Human
cguucuuguaau

SEQ ID NO: 1320875 - RNA, 13 nt, Human
cguucuuguaauu

SEQ ID NO: 1320876 - RNA, 14 nt, Human
cguucuuguaauuu

SEQ ID NO: 1320877 - RNA, 16 nt, Human
cguuuagcugacaaaa

SEQ ID NO: 1320878 - RNA, 15 nt, Human
cguuuauuuucaaga

SEQ ID NO: 1320879 - RNA, 18 nt, Human
cguuuagcugacaaaaua

SEQ ID NO: 1320880 - RNA, 14 nt, Human
cguuuauuuucaag

SEQ ID NO: 1320881 - RNA, 22 nt, Human
cguuucagcgacuccguuggcc

SEQ ID NO: 1320882 - RNA, 22 nt, Human
cguuucauuuagucaugugacc

SEQ ID NO: 1320883 - RNA, 22 nt, Human
cguuccuucaaagcaaaugucu

SEQ ID NO: 1320884 - RNA, 23 nt, Human
cguuccuagagaagacaggcugg

SEQ ID NO: 1320885 - RNA, 16 nt, Human
cguuccuuucuuuucc

SEQ ID NO: 1320886 - RNA, 19 nt, Human
cguucucucuuugcaugga

SEQ ID NO: 1320887 - RNA, 14 nt, Human
cguucugcucauca

SEQ ID NO: 1320888 - RNA, 13 nt, Human
cguucucucuuug

SEQ ID NO: 1320889 - RNA, 12 nt, Human
cguucugugcac

SEQ ID NO: 1320890 - RNA, 12 nt, Human
cguuuccuaccg

SEQ ID NO: 1320891 - RNA, 18 nt, Human
cguuucuccaccuagacu

SEQ ID NO: 1320892 - RNA, 22 nt, Human
cguuucuccaccuagacuguaa

SEQ ID NO: 1320893 - RNA, 14 nt, Human
cguuuccuuuguug

SEQ ID NO: 1320894 - RNA, 17 nt, Human
cguuugaccuuuuaugu

SEQ ID NO: 1320895 - RNA, 12 nt, Human
cguuuucuaauu

SEQ ID NO: 1320896 - RNA, 15 nt, Human
cguuuucuaauugcu

SEQ ID NO: 1320897 - RNA, 17 nt, Human
cguuuucuaauugcuua

SEQ ID NO: 1320898 - RNA, 20 nt, Human
cguuuucuaauugcuuauuu

SEQ ID NO: 1320899 - RNA, 13 nt, Human
cguuuugaagcua

SEQ ID NO: 1320900 - RNA, 20 nt, Human
cguuuugaagcuacugugug

SEQ ID NO: 1320901 - RNA, 14 nt, Human
cguuuucuuaaagu

SEQ ID NO: 1320902 - RNA, 11 nt, Human
cguuuugucac

SEQ ID NO: 1320903 - RNA, 21 nt, Human
cguucaugggggagggggcag

SEQ ID NO: 1320904 - RNA, 18 nt, Human
cguggcugcugugggaaa

SEQ ID NO: 1320905 - RNA, 13 nt, Human
cguggccuuguuc

SEQ ID NO: 1320906 - RNA, 12 nt, Human
cgugccuggcca

SEQ ID NO: 1320907 - RNA, 16 nt, Human
cgugccuggccacgcc

SEQ ID NO: 1320908 - RNA, 12 nt, Human
cgugccuguguc

SEQ ID NO: 1320909 - RNA, 14 nt, Human
cgugccugugucca

SEQ ID NO: 1320910 - RNA, 13 nt, Human
cgugccuucagcu

SEQ ID NO: 1320911 - RNA, 15 nt, Human
cgugccuucagcucu

SEQ ID NO: 1320912 - RNA, 16 nt, Human
cgugccuucagcucua

SEQ ID NO: 1320913 - RNA, 18 nt, Human
cgugccuucagcucuaca

SEQ ID NO: 1320914 - RNA, 15 nt, Human
cgugccuguguccau

SEQ ID NO: 1320915 - RNA, 14 nt, Human
cguggcccuuccug

SEQ ID NO: 1320916 - RNA, 15 nt, Human
cguggcccuuccugg

SEQ ID NO: 1320917 - RNA, 16 nt, Human
cguggcccuuccugga

SEQ ID NO: 1320918 - RNA, 17 nt, Human
cguggcccuuccuggac

SEQ ID NO: 1320919 - RNA, 18 nt, Human
cguggcccuuccuggaca

SEQ ID NO: 1320920 - RNA, 20 nt, Human
cguggcccuuccuggacagc

SEQ ID NO: 1320921 - RNA, 15 nt, Human
cguggccucuugagc

SEQ ID NO: 1320922 - RNA, 16 nt, Human
cguggccucuugagca

SEQ ID NO: 1320923 - RNA, 23 nt, Human
cguggccucuugagcaguggcug

SEQ ID NO: 1320924 - RNA, 22 nt, Human
cguggcccuuccuggacagcug

SEQ ID NO: 1320925 - RNA, 20 nt, Human
cguggccuuguucugucacc

SEQ ID NO: 1320926 - RNA, 14 nt, Human
cguggcucagccag

SEQ ID NO: 1320927 - RNA, 15 nt, Human
cguggcucagccagc

SEQ ID NO: 1320928 - RNA, 18 nt, Human
cguggcucagccagcacu

SEQ ID NO: 1320929 - RNA, 12 nt, Human
cguccuccucug

SEQ ID NO: 1320930 - RNA, 13 nt, Human
cgaucucagcuca

SEQ ID NO: 1320931 - RNA, 14 nt, Human
cgaucucccaccuu

SEQ ID NO: 1320932 - RNA, 20 nt, Human
cgaucuugguucacugcaac

SEQ ID NO: 1320933 - RNA, 18 nt, Human
cgaucuguaccugagagg

SEQ ID NO: 1320934 - RNA, 19 nt, Human
cgauucccucucccaggcc

SEQ ID NO: 1320935 - RNA, 23 nt, Human
cgauucccucucccaggccccau

SEQ ID NO: 1320936 - RNA, 16 nt, Human
cgauucucuugccuca

SEQ ID NO: 1320937 - RNA, 12 nt, Human
cgcagaaggaag

SEQ ID NO: 1320938 - RNA, 11 nt, Human
cgcaaugugac

SEQ ID NO: 1320939 - RNA, 14 nt, Human
cgcaagggccugau

SEQ ID NO: 1320940 - RNA, 14 nt, Human
cgcaaguucccagu

SEQ ID NO: 1320941 - RNA, 21 nt, Human
cgauucccucucccaggcccc

SEQ ID NO: 1320942 - RNA, 12 nt, Human
cgauuguaacuc

SEQ ID NO: 1320943 - RNA, 15 nt, Human
cgagcgcccugcaga

SEQ ID NO: 1320944 - RNA, 16 nt, Human
cgagcgcccugcagac

SEQ ID NO: 1320945 - RNA, 19 nt, Human
cgagcgcccugcagacccu

SEQ ID NO: 1320946 - RNA, 20 nt, Human
cgagcgcccugcagacccug

SEQ ID NO: 1320947 - RNA, 21 nt, Human
cgagcgcccugcagacccugc

SEQ ID NO: 1320948 - RNA, 10 nt, Human
cgagcuccuc

SEQ ID NO: 1320949 - RNA, 16 nt, Human
cgaggaaucugugggu

SEQ ID NO: 1320950 - RNA, 22 nt, Human
cgaggaaucugugggucuggga

SEQ ID NO: 1320951 - RNA, 12 nt, Human
cgaggcugagaa

SEQ ID NO: 1320952 - RNA, 20 nt, Human
cgaggcugagaaucagacug

SEQ ID NO: 1320953 - RNA, 13 nt, Human
cgaggcugagaau

SEQ ID NO: 1320954 - RNA, 20 nt, Human
ccuuuaacugacaagccauc

SEQ ID NO: 1320955 - RNA, 22 nt, Human
ccuuuaacaacauguuuccagc

SEQ ID NO: 1320956 - RNA, 19 nt, Human
ccuuuaacugacaagccau

SEQ ID NO: 1320957 - RNA, 22 nt, Human
ccuuucucucuuuauacagcug

SEQ ID NO: 1320958 - RNA, 23 nt, Human
ccuuucuggauuauucugggggc

SEQ ID NO: 1320959 - RNA, 16 nt, Human
ccuuguuuuggacagu

SEQ ID NO: 1320960 - RNA, 16 nt, Human
ccuuuaacaacauguu

SEQ ID NO: 1320961 - RNA, 17 nt, Human
ccuuuaacaacauguuu

SEQ ID NO: 1320962 - RNA, 21 nt, Human
ccuuuaacaacauguuuccag

SEQ ID NO: 1320963 - RNA, 15 nt, Human
ccuuguuacuucuga

SEQ ID NO: 1320964 - RNA, 16 nt, Human
ccuuguuuggggcagg

SEQ ID NO: 1320965 - RNA, 17 nt, Human
ccuuguuuggggcagga

SEQ ID NO: 1320966 - RNA, 19 nt, Human
ccuuguuuggggcaggagu

SEQ ID NO: 1320967 - RNA, 14 nt, Human
ccuuguuuuuuucu

SEQ ID NO: 1320968 - RNA, 17 nt, Human
ccuuggccaugcagaaa

SEQ ID NO: 1320969 - RNA, 15 nt, Human
ccuuggccaugcaga

SEQ ID NO: 1320970 - RNA, 20 nt, Human
ccuuggcugacaugaagcug

SEQ ID NO: 1320971 - RNA, 15 nt, Human
ccuuugaccugccuc

SEQ ID NO: 1320972 - RNA, 14 nt, Human
ccuuugacaaaggu

SEQ ID NO: 1320973 - RNA, 20 nt, Human
ccuuugaauccucucucugu

SEQ ID NO: 1320974 - RNA, 19 nt, Human
ccuuugagugcaguccuga

SEQ ID NO: 1320975 - RNA, 22 nt, Human
ccuuugagugcaguccugauca

SEQ ID NO: 1320976 - RNA, 21 nt, Human
ccuuugauuaaagacuccagu

SEQ ID NO: 1320977 - RNA, 11 nt, Human
ccuuucuuccg

SEQ ID NO: 1320978 - RNA, 19 nt, Human
ccuuucuuccggccccucc

SEQ ID NO: 1320979 - RNA, 12 nt, Human
ccuuucuuccgg

SEQ ID NO: 1320980 - RNA, 19 nt, Human
ccuuucuuuucccccuuug

SEQ ID NO: 1320981 - RNA, 12 nt, Human
ccuuucuuuucc

SEQ ID NO: 1320982 - RNA, 14 nt, Human
ccuuugaauccucu

SEQ ID NO: 1320983 - RNA, 16 nt, Human
ccuuugaauccucucu

SEQ ID NO: 1320984 - RNA, 20 nt, Human
ccuuuggcaggugcagcccc

SEQ ID NO: 1320985 - RNA, 19 nt, Human
ccuuuggcaggugcagccc

SEQ ID NO: 1320986 - RNA, 18 nt, Human
ccuuuggcaggugcagcc

SEQ ID NO: 1320987 - RNA, 13 nt, Human
ccuuugcugugag

SEQ ID NO: 1320988 - RNA, 17 nt, Human
ccuuugcugugaggcug

SEQ ID NO: 1320989 - RNA, 22 nt, Human
ccuuugcugugaggcuguccug

SEQ ID NO: 1320990 - RNA, 23 nt, Human
ccuuugcugugaggcuguccugu

SEQ ID NO: 1320991 - RNA, 13 nt, Human
ccuuugccaggug

SEQ ID NO: 1320992 - RNA, 16 nt, Human
ccuuugcccagaaaga

SEQ ID NO: 1320993 - RNA, 23 nt, Human
ccuuugcgcuccuggcccagccu

SEQ ID NO: 1320994 - RNA, 14 nt, Human
ccuuugcugacccu

SEQ ID NO: 1320995 - RNA, 17 nt, Human
ccuuugcugacccuccc

SEQ ID NO: 1320996 - RNA, 21 nt, Human
ccuuugcugacccuccccaaa

SEQ ID NO: 1320997 - RNA, 16 nt, Human
ccuuugcugcauggca

SEQ ID NO: 1320998 - RNA, 18 nt, Human
ccuuugcugacccucccc

SEQ ID NO: 1320999 - RNA, 20 nt, Human
cgcuacuaugauuuaauuug

SEQ ID NO: 1321000 - RNA, 18 nt, Human
cgcuagaggaagcagcca

SEQ ID NO: 1321001 - RNA, 14 nt, Human
cgcuagcaguggca

SEQ ID NO: 1321002 - RNA, 15 nt, Human
cgcuagcaguggcag

SEQ ID NO: 1321003 - RNA, 20 nt, Human
cgcuagcaguggcaggcaga

SEQ ID NO: 1321004 - RNA, 15 nt, Human
cgcgaucucagcuca

SEQ ID NO: 1321005 - RNA, 14 nt, Human
cgcgauguggaacu

SEQ ID NO: 1321006 - RNA, 14 nt, Human
cgcgaucucagcuc

SEQ ID NO: 1321007 - RNA, 15 nt, Human
cgcgacuaauuucaa

SEQ ID NO: 1321008 - RNA, 12 nt, Human
cgcccugccacu

SEQ ID NO: 1321009 - RNA, 21 nt, Human
cgcccugcagacccugcccuu

SEQ ID NO: 1321010 - RNA, 22 nt, Human
cgcgacuaauuucaaaaugcuu

SEQ ID NO: 1321011 - RNA, 18 nt, Human
cgcgauguggaacugcug

SEQ ID NO: 1321012 - RNA, 14 nt, Human
cgcgucuacccugg

SEQ ID NO: 1321013 - RNA, 15 nt, Human
cgcgucuacccuggg

SEQ ID NO: 1321014 - RNA, 17 nt, Human
cgcgucuacccugggau

SEQ ID NO: 1321015 - RNA, 16 nt, Human
cgcgucuacccuggga

SEQ ID NO: 1321016 - RNA, 12 nt, Human
cgcgucuuccug

SEQ ID NO: 1321017 - RNA, 13 nt, Human
cgcgucuuccuga

SEQ ID NO: 1321018 - RNA, 14 nt, Human
cgcgucuuccugag

SEQ ID NO: 1321019 - RNA, 16 nt, Human
cgcgucuuccugagug

SEQ ID NO: 1321020 - RNA, 13 nt, Human
cgcagaaggaagg

SEQ ID NO: 1321021 - RNA, 17 nt, Human
cgcagacaccuuggaca

SEQ ID NO: 1321022 - RNA, 15 nt, Human
cgcccagcuccugac

SEQ ID NO: 1321023 - RNA, 22 nt, Human
cgcccagcuccugacacugcug

SEQ ID NO: 1321024 - RNA, 14 nt, Human
cgcccaggacccca

SEQ ID NO: 1321025 - RNA, 12 nt, Human
cgcccaggcugg

SEQ ID NO: 1321026 - RNA, 16 nt, Human
cgcccagcuccugaca

SEQ ID NO: 1321027 - RNA, 19 nt, Human
cgcccaggcuggagugcaa

SEQ ID NO: 1321028 - RNA, 20 nt, Human
cgcccaggcuggagugcaau

SEQ ID NO: 1321029 - RNA, 11 nt, Human
cgcccugcaga

SEQ ID NO: 1321030 - RNA, 12 nt, Human
cgcccugcagac

SEQ ID NO: 1321031 - RNA, 15 nt, Human
cgcccugcagacccu

SEQ ID NO: 1321032 - RNA, 16 nt, Human
cgcccugcagacccug

SEQ ID NO: 1321033 - RNA, 20 nt, Human
cgcccugcagacccugcccu

SEQ ID NO: 1321034 - RNA, 11 nt, Human
cgcccugccac

SEQ ID NO: 1321035 - RNA, 14 nt, Human
cgcccugccacuca

SEQ ID NO: 1321036 - RNA, 17 nt, Human
cgcccccuccgcccugc

SEQ ID NO: 1321037 - RNA, 19 nt, Human
cgcccccuccgcccugcca

SEQ ID NO: 1321038 - RNA, 20 nt, Human
cgcccccuccgcccugccac

SEQ ID NO: 1321039 - RNA, 14 nt, Human
cgcccccuccucua

SEQ ID NO: 1321040 - RNA, 20 nt, Human
cgcccaggcuggagugcagu

SEQ ID NO: 1321041 - RNA, 22 nt, Human
cggaagaagagaucaggaagag

SEQ ID NO: 1321042 - RNA, 21 nt, Human
cggaagaagagaucaggaaga

SEQ ID NO: 1321043 - RNA, 21 nt, Human
cggaauccugucgauuagacu

SEQ ID NO: 1321044 - RNA, 22 nt, Human
cggaauccugucgauuagacug

SEQ ID NO: 1321045 - RNA, 22 nt, Human
cggacaaaaccccccagauauc

SEQ ID NO: 1321046 - RNA, 16 nt, Human
cggacaagacccccag

SEQ ID NO: 1321047 - RNA, 18 nt, Human
cggacaagacccccagca

SEQ ID NO: 1321048 - RNA, 20 nt, Human
cggacaagacccccagcacu

SEQ ID NO: 1321049 - RNA, 17 nt, Human
cgcuauugucaccaggg

SEQ ID NO: 1321050 - RNA, 21 nt, Human
cgcuaucucccugccuccugc

SEQ ID NO: 1321051 - RNA, 18 nt, Human
cgcuaucugggaagcuau

SEQ ID NO: 1321052 - RNA, 16 nt, Human
cgcuauuccagcuguc

SEQ ID NO: 1321053 - RNA, 12 nt, Human
cggaaagaagag

SEQ ID NO: 1321054 - RNA, 18 nt, Human
cggaaagaagagcgagag

SEQ ID NO: 1321055 - RNA, 14 nt, Human
cgcucucaguucuc

SEQ ID NO: 1321056 - RNA, 14 nt, Human
cgcucucuccaggc

SEQ ID NO: 1321057 - RNA, 16 nt, Human
cggaaagaagaaggug

SEQ ID NO: 1321058 - RNA, 20 nt, Human
cggauccuaagcaucuaagu

SEQ ID NO: 1321059 - RNA, 21 nt, Human
cggacuuagaaaaccagcuca

SEQ ID NO: 1321060 - RNA, 22 nt, Human
cggacuuagaaaaccagcucag

SEQ ID NO: 1321061 - RNA, 19 nt, Human
cggauccuaagcaucuaag

SEQ ID NO: 1321062 - RNA, 15 nt, Human
cggaccccagccauc

SEQ ID NO: 1321063 - RNA, 17 nt, Human
cggaccagccuggccca

SEQ ID NO: 1321064 - RNA, 14 nt, Human
cggaccagccuggc

SEQ ID NO: 1321065 - RNA, 13 nt, Human
cggaccagccugg

SEQ ID NO: 1321066 - RNA, 16 nt, Human
cggacgcccaggaccc

SEQ ID NO: 1321067 - RNA, 24 nt, Human
cggauuccaaagaguagaauugca

SEQ ID NO: 1321068 - RNA, 16 nt, Human
cggauuuauuuuucca

SEQ ID NO: 1321069 - RNA, 13 nt, Human
cggauuuuuucca

SEQ ID NO: 1321070 - RNA, 16 nt, Human
cggauuuuuuccaaaa

SEQ ID NO: 1321071 - RNA, 12 nt, Human
cggcaacaucaa

SEQ ID NO: 1321072 - RNA, 17 nt, Human
cggauuuuuuccaaaau

SEQ ID NO: 1321073 - RNA, 14 nt, Human
cggcacagggucug

SEQ ID NO: 1321074 - RNA, 18 nt, Human
cggcacagggucugcucu

SEQ ID NO: 1321075 - RNA, 19 nt, Human
cggcacagggucugcucuu

SEQ ID NO: 1321076 - RNA, 11 nt, Human
cggcaggacac

SEQ ID NO: 1321077 - RNA, 20 nt, Human
cggcagggcgggcagagggc

SEQ ID NO: 1321078 - RNA, 22 nt, Human
cggcagggcgggcagagggcug

SEQ ID NO: 1321079 - RNA, 23 nt, Human
cggcagggcgggcagagggcugg

SEQ ID NO: 1321080 - RNA, 14 nt, Human
cggcaggggccugg

SEQ ID NO: 1321081 - RNA, 14 nt, Human
cgcucucuggccuu

SEQ ID NO: 1321082 - RNA, 21 nt, Human
cggccuguccuccaacaccaa

SEQ ID NO: 1321083 - RNA, 12 nt, Human
cggccuguccuc

SEQ ID NO: 1321084 - RNA, 15 nt, Human
cggccuguccuccaa

SEQ ID NO: 1321085 - RNA, 15 nt, Human
cggccucccaaagug

SEQ ID NO: 1321086 - RNA, 13 nt, Human
cggccugccagga

SEQ ID NO: 1321087 - RNA, 14 nt, Human
cggccugccaggag

SEQ ID NO: 1321088 - RNA, 15 nt, Human
cggccugccaggagg

SEQ ID NO: 1321089 - RNA, 20 nt, Human
cggccugcccccaccccauu

SEQ ID NO: 1321090 - RNA, 22 nt, Human
cggccugccaggaggacccagg

SEQ ID NO: 1321091 - RNA, 17 nt, Human
cggccuccauccugagg

SEQ ID NO: 1321092 - RNA, 16 nt, Human
cggccuccauccugag

SEQ ID NO: 1321093 - RNA, 14 nt, Human
cggccccucccccu

SEQ ID NO: 1321094 - RNA, 17 nt, Human
cggccccuccccuccaa

SEQ ID NO: 1321095 - RNA, 15 nt, Human
cggcaggggccugga

SEQ ID NO: 1321096 - RNA, 17 nt, Human
cggcaggggccuggaga

SEQ ID NO: 1321097 - RNA, 18 nt, Human
cggcaggggccuggagau

SEQ ID NO: 1321098 - RNA, 19 nt, Human
cggcaggggccuggagauc

SEQ ID NO: 1321099 - RNA, 20 nt, Human
cggcccauccccaggcaccu

SEQ ID NO: 1321100 - RNA, 22 nt, Human
cgggagccugaucaccugcccu

SEQ ID NO: 1321101 - RNA, 16 nt, Human
cgggagcucaggaacc

SEQ ID NO: 1321102 - RNA, 22 nt, Human
cggcugggaggagggcaggcau

SEQ ID NO: 1321103 - RNA, 23 nt, Human
cggcugggaggagggcaggcauc

SEQ ID NO: 1321104 - RNA, 15 nt, Human
cggccuuucuagccu

SEQ ID NO: 1321105 - RNA, 16 nt, Human
cggcuggggucccagc

SEQ ID NO: 1321106 - RNA, 18 nt, Human
cggcuggggucccagcag

SEQ ID NO: 1321107 - RNA, 23 nt, Human
cggcuggggucccagcagcugcc

SEQ ID NO: 1321108 - RNA, 11 nt, Human
cggcugugugu

SEQ ID NO: 1321109 - RNA, 20 nt, Human
ccuggaaaccuuccacccag

SEQ ID NO: 1321110 - RNA, 18 nt, Human
ccuggaaaccuuccaccc

SEQ ID NO: 1321111 - RNA, 17 nt, Human
ccuggaaaccuuccacc

SEQ ID NO: 1321112 - RNA, 21 nt, Human
ccuggacagcugugccucgcu

SEQ ID NO: 1321113 - RNA, 22 nt, Human
ccuggacagcugugccucgcuc

SEQ ID NO: 1321114 - RNA, 21 nt, Human
ccuggacaugaagauucuuuc

SEQ ID NO: 1321115 - RNA, 23 nt, Human
ccuggacaugaagauucuuuccc

SEQ ID NO: 1321116 - RNA, 24 nt, Human
ccuggacaugaagauucuuuccca

SEQ ID NO: 1321117 - RNA, 14 nt, Human
ccuggaccagccuc

SEQ ID NO: 1321118 - RNA, 15 nt, Human
ccuggaccagccucu

SEQ ID NO: 1321119 - RNA, 16 nt, Human
ccuggaccagccucuc

SEQ ID NO: 1321120 - RNA, 18 nt, Human
ccuggaccccccuuucac

SEQ ID NO: 1321121 - RNA, 23 nt, Human
ccuggaccccccuuucacaggca

SEQ ID NO: 1321122 - RNA, 24 nt, Human
ccuggaccccccuuucacaggcag

SEQ ID NO: 1321123 - RNA, 13 nt, Human
ccuggaccccugc

SEQ ID NO: 1321124 - RNA, 14 nt, Human
ccuggaccccugca

SEQ ID NO: 1321125 - RNA, 15 nt, Human
ccuggaccccugcau

SEQ ID NO: 1321126 - RNA, 20 nt, Human
ccuggacugugugcucagga

SEQ ID NO: 1321127 - RNA, 17 nt, Human
ccuggacugugugcuca

SEQ ID NO: 1321128 - RNA, 14 nt, Human
ccuggacuccugca

SEQ ID NO: 1321129 - RNA, 22 nt, Human
ccuggacccguucaugggggag

SEQ ID NO: 1321130 - RNA, 23 nt, Human
ccuggacccguucaugggggagg

SEQ ID NO: 1321131 - RNA, 12 nt, Human
ccuggaccucug

SEQ ID NO: 1321132 - RNA, 15 nt, Human
ccuggaccucugaca

SEQ ID NO: 1321133 - RNA, 17 nt, Human
ccuggaccucugacagc

SEQ ID NO: 1321134 - RNA, 18 nt, Human
ccuggaccucugacagca

SEQ ID NO: 1321135 - RNA, 20 nt, Human
ccuggaccucugacagcagc

SEQ ID NO: 1321136 - RNA, 19 nt, Human
ccuggaccucugacagcag

SEQ ID NO: 1321137 - RNA, 19 nt, Human
ccuggacuuggccccugcc

SEQ ID NO: 1321138 - RNA, 13 nt, Human
ccuggacuugccu

SEQ ID NO: 1321139 - RNA, 20 nt, Human
ccuggacuuaagcaucuggc

SEQ ID NO: 1321140 - RNA, 24 nt, Human
ccuggacuuaagcaucuggcucua

SEQ ID NO: 1321141 - RNA, 14 nt, Human
ccuggacuguuuuc

SEQ ID NO: 1321142 - RNA, 21 nt, Human
ccuggagauccuccugcagac

SEQ ID NO: 1321143 - RNA, 21 nt, Human
ccuggagaugacuugaggccu

SEQ ID NO: 1321144 - RNA, 16 nt, Human
ccuggacuugccucug

SEQ ID NO: 1321145 - RNA, 16 nt, Human
ccuggagcacaaagac

SEQ ID NO: 1321146 - RNA, 13 nt, Human
ccuggagcagaag

SEQ ID NO: 1321147 - RNA, 15 nt, Human
ccuggagcagaagca

SEQ ID NO: 1321148 - RNA, 17 nt, Human
ccuggagcagaagcagc

SEQ ID NO: 1321149 - RNA, 21 nt, Human
ccuggagcagaagcagcaacu

SEQ ID NO: 1321150 - RNA, 18 nt, Human
ccuggagcagaccacccc

SEQ ID NO: 1321151 - RNA, 22 nt, Human
ccuggagcagaagcagcaacuu

SEQ ID NO: 1321152 - RNA, 12 nt, Human
ccuggcagccgu

SEQ ID NO: 1321153 - RNA, 18 nt, Human
ccuggcagccgugccuuc

SEQ ID NO: 1321154 - RNA, 19 nt, Human
ccuggcagccgugccuuca

SEQ ID NO: 1321155 - RNA, 12 nt, Human
ccuggcggggug

SEQ ID NO: 1321156 - RNA, 13 nt, Human
ccuggcccccucc

SEQ ID NO: 1321157 - RNA, 15 nt, Human
ccuggcgccuggcag

SEQ ID NO: 1321158 - RNA, 17 nt, Human
ccuggcucucaccucua

SEQ ID NO: 1321159 - RNA, 19 nt, Human
ccuggcucucaccucuagg

SEQ ID NO: 1321160 - RNA, 17 nt, Human
ccuggcucaccuugugc

SEQ ID NO: 1321161 - RNA, 16 nt, Human
ccuggcuauguccuaa

SEQ ID NO: 1321162 - RNA, 21 nt, Human
ccuggcucucaccucuagguc

SEQ ID NO: 1321163 - RNA, 16 nt, Human
ccuggccagugcccug

SEQ ID NO: 1321164 - RNA, 12 nt, Human
ccuggccagugc

SEQ ID NO: 1321165 - RNA, 12 nt, Human
ccuggcccccuc

SEQ ID NO: 1321166 - RNA, 20 nt, Human
ccuggcccccucccuggaug

SEQ ID NO: 1321167 - RNA, 13 nt, Human
ccugggauuacag

SEQ ID NO: 1321168 - RNA, 16 nt, Human
ccugggauucaggaaa

SEQ ID NO: 1321169 - RNA, 18 nt, Human
ccugggauucaggaaaag

SEQ ID NO: 1321170 - RNA, 13 nt, Human
ccugggcaaagcc

SEQ ID NO: 1321171 - RNA, 23 nt, Human
ccugggauucaggaaaaggccug

SEQ ID NO: 1321172 - RNA, 21 nt, Human
ccugggaggcucuggagccca

SEQ ID NO: 1321173 - RNA, 13 nt, Human
ccugggaggcucu

SEQ ID NO: 1321174 - RNA, 13 nt, Human
ccugggaggcagu

SEQ ID NO: 1321175 - RNA, 22 nt, Human
ccugggagggacaugcuuagca

SEQ ID NO: 1321176 - RNA, 21 nt, Human
ccugcuugaugggauucugga

SEQ ID NO: 1321177 - RNA, 22 nt, Human
ccugcuugaugggauucuggac

SEQ ID NO: 1321178 - RNA, 15 nt, Human
ccugcuugccaaggc

SEQ ID NO: 1321179 - RNA, 17 nt, Human
ccugcuugccaaggcag

SEQ ID NO: 1321180 - RNA, 18 nt, Human
ccugcuugccaaggcaga

SEQ ID NO: 1321181 - RNA, 21 nt, Human
ccugcuugccaaggcagaggc

SEQ ID NO: 1321182 - RNA, 23 nt, Human
ccugcuugccaaggcagaggccu

SEQ ID NO: 1321183 - RNA, 22 nt, Human
ccugcuugccaaggcagaggcc

SEQ ID NO: 1321184 - RNA, 23 nt, Human
ccugcuuggggggugaugagggc

SEQ ID NO: 1321185 - RNA, 14 nt, Human
ccuggaaaccuucc

SEQ ID NO: 1321186 - RNA, 16 nt, Human
ccugcuuuuuguguuu

SEQ ID NO: 1321187 - RNA, 17 nt, Human
ccugcuuugggcugccc

SEQ ID NO: 1321188 - RNA, 18 nt, Human
ccugcuuugggcugcccu

SEQ ID NO: 1321189 - RNA, 19 nt, Human
ccugcuuugggcugcccug

SEQ ID NO: 1321190 - RNA, 20 nt, Human
ccugcucccauccugugugu

SEQ ID NO: 1321191 - RNA, 15 nt, Human
ccugcucccauccug

SEQ ID NO: 1321192 - RNA, 14 nt, Human
ccugcuuccugcuu

SEQ ID NO: 1321193 - RNA, 18 nt, Human
ccugcuuccugcuugcca

SEQ ID NO: 1321194 - RNA, 15 nt, Human
ccugcuuccugcuug

SEQ ID NO: 1321195 - RNA, 16 nt, Human
ccugauuuuuuuuccu

SEQ ID NO: 1321196 - RNA, 18 nt, Human
ccugauuuaggagaagcc

SEQ ID NO: 1321197 - RNA, 19 nt, Human
ccugauuuaggagaagcca

SEQ ID NO: 1321198 - RNA, 20 nt, Human
ccugauuuaggagaagccag

SEQ ID NO: 1321199 - RNA, 21 nt, Human
ccugauuuaggagaagccagg

SEQ ID NO: 1321200 - RNA, 22 nt, Human
ccugauuuaggagaagccagga

SEQ ID NO: 1321201 - RNA, 16 nt, Human
ccugcuccagaccuga

SEQ ID NO: 1321202 - RNA, 22 nt, Human
ccugcuccagaccugauccugg

SEQ ID NO: 1321203 - RNA, 18 nt, Human
ccugcuaacggugcucag

SEQ ID NO: 1321204 - RNA, 19 nt, Human
ccugcuaacggugcucagg

SEQ ID NO: 1321205 - RNA, 17 nt, Human
ccugcuaaggucuugga

SEQ ID NO: 1321206 - RNA, 21 nt, Human
ccuggcagccgugccuucagc

SEQ ID NO: 1321207 - RNA, 22 nt, Human
ccugugagcuaggaauuguguu

SEQ ID NO: 1321208 - RNA, 16 nt, Human
ccuguccucuuucagc

SEQ ID NO: 1321209 - RNA, 17 nt, Human
ccuguccucuuucagcu

SEQ ID NO: 1321210 - RNA, 15 nt, Human
ccugugagcccagcu

SEQ ID NO: 1321211 - RNA, 17 nt, Human
ccugugagcccagcugg

SEQ ID NO: 1321212 - RNA, 20 nt, Human
ccugugagcccagcuggguc

SEQ ID NO: 1321213 - RNA, 18 nt, Human
ccuguccucuuucagcuc

SEQ ID NO: 1321214 - RNA, 14 nt, Human
ccuguccccugcua

SEQ ID NO: 1321215 - RNA, 13 nt, Human
ccuguccccugcu

SEQ ID NO: 1321216 - RNA, 13 nt, Human
ccuguccuccaac

SEQ ID NO: 1321217 - RNA, 21 nt, Human
ccuguccuccaacaccaagca

SEQ ID NO: 1321218 - RNA, 22 nt, Human
ccuguccuccaacaccaagcac

SEQ ID NO: 1321219 - RNA, 19 nt, Human
ccuguccucuuucagcucc

SEQ ID NO: 1321220 - RNA, 19 nt, Human
ccuguccagcuccaaccug

SEQ ID NO: 1321221 - RNA, 18 nt, Human
ccuguccacaggcuucug

SEQ ID NO: 1321222 - RNA, 16 nt, Human
ccuguccaaucuuuga

SEQ ID NO: 1321223 - RNA, 14 nt, Human
ccuguccacaggcu

SEQ ID NO: 1321224 - RNA, 21 nt, Human
ccuguccacaggcuucugagc

SEQ ID NO: 1321225 - RNA, 13 nt, Human
ccuguccagcucc

SEQ ID NO: 1321226 - RNA, 14 nt, Human
ccuguccagcucca

SEQ ID NO: 1321227 - RNA, 15 nt, Human
ccuguccagcuccaa

SEQ ID NO: 1321228 - RNA, 20 nt, Human
ccugugccuccucaccccca

SEQ ID NO: 1321229 - RNA, 21 nt, Human
ccugugccuccucacccccag

SEQ ID NO: 1321230 - RNA, 15 nt, Human
ccugugccuccuccc

SEQ ID NO: 1321231 - RNA, 16 nt, Human
ccugugccuccucccu

SEQ ID NO: 1321232 - RNA, 13 nt, Human
ccugugcacagcc

SEQ ID NO: 1321233 - RNA, 12 nt, Human
ccugugcacagc

SEQ ID NO: 1321234 - RNA, 18 nt, Human
ccugugcagccgcugagc

SEQ ID NO: 1321235 - RNA, 20 nt, Human
ccugugcagccgcugagcga

SEQ ID NO: 1321236 - RNA, 21 nt, Human
ccugugcagccgcugagcgag

SEQ ID NO: 1321237 - RNA, 13 nt, Human
ccugugcccccag

SEQ ID NO: 1321238 - RNA, 12 nt, Human
ccugugccuccu

SEQ ID NO: 1321239 - RNA, 15 nt, Human
ccugugccuccucac

SEQ ID NO: 1321240 - RNA, 17 nt, Human
ccugugcaaugcauuag

SEQ ID NO: 1321241 - RNA, 18 nt, Human
ccugugcacaccccacuc

SEQ ID NO: 1321242 - RNA, 22 nt, Human
ccugugcacaccccacucccac

SEQ ID NO: 1321243 - RNA, 23 nt, Human
ccugugcacaccccacucccaca

SEQ ID NO: 1321244 - RNA, 14 nt, Human
ccuggugcuucucc

SEQ ID NO: 1321245 - RNA, 16 nt, Human
ccuggugcuucuccuc

SEQ ID NO: 1321246 - RNA, 20 nt, Human
ccuggugcuucuccucuccu

SEQ ID NO: 1321247 - RNA, 15 nt, Human
ccuggugcugccaca

SEQ ID NO: 1321248 - RNA, 18 nt, Human
ccuggugcugccacacuu

SEQ ID NO: 1321249 - RNA, 21 nt, Human
ccuggugcugccacacuucag

SEQ ID NO: 1321250 - RNA, 15 nt, Human
ccuggugcugccucu

SEQ ID NO: 1321251 - RNA, 20 nt, Human
ccuggugcugccucuaccug

SEQ ID NO: 1321252 - RNA, 13 nt, Human
ccuggugcuggag

SEQ ID NO: 1321253 - RNA, 14 nt, Human
ccuggugcuggagg

SEQ ID NO: 1321254 - RNA, 15 nt, Human
ccuggugcuggaggu

SEQ ID NO: 1321255 - RNA, 20 nt, Human
ccuguacuguucugugucuu

SEQ ID NO: 1321256 - RNA, 18 nt, Human
ccuguacuguucuguguc

SEQ ID NO: 1321257 - RNA, 13 nt, Human
ccuguagaguugc

SEQ ID NO: 1321258 - RNA, 14 nt, Human
ccuguagaguugcu

SEQ ID NO: 1321259 - RNA, 16 nt, Human
ccuguagaguugcuga

SEQ ID NO: 1321260 - RNA, 17 nt, Human
ccuguagaguugcugag

SEQ ID NO: 1321261 - RNA, 15 nt, Human
ccuguagcacuuacu

SEQ ID NO: 1321262 - RNA, 17 nt, Human
ccuguacacaacucacu

SEQ ID NO: 1321263 - RNA, 22 nt, Human
ccuguaccuuuugaggagcccc

SEQ ID NO: 1321264 - RNA, 23 nt, Human
ccuguaccuuuugaggagcccca

SEQ ID NO: 1321265 - RNA, 13 nt, Human
ccuguacugccug

SEQ ID NO: 1321266 - RNA, 14 nt, Human
ccuguacugccugc

SEQ ID NO: 1321267 - RNA, 15 nt, Human
ccuguacugccugcu

SEQ ID NO: 1321268 - RNA, 16 nt, Human
ccuguacugccugcuu

SEQ ID NO: 1321269 - RNA, 17 nt, Human
ccuguacugccugcuug

SEQ ID NO: 1321270 - RNA, 17 nt, Human
ccuguacuguucugugu

SEQ ID NO: 1321271 - RNA, 17 nt, Human
ccuguagcacuuacugg

SEQ ID NO: 1321272 - RNA, 20 nt, Human
ccuguaggaagguacuguau

SEQ ID NO: 1321273 - RNA, 21 nt, Human
ccuguagauucagguaauaca

SEQ ID NO: 1321274 - RNA, 17 nt, Human
ccuguaugucuccagua

SEQ ID NO: 1321275 - RNA, 15 nt, Human
ccuguauucagacag

SEQ ID NO: 1321276 - RNA, 16 nt, Human
ccuguauucagacaga

SEQ ID NO: 1321277 - RNA, 23 nt, Human
ccuguauuccugaccuccgccau

SEQ ID NO: 1321278 - RNA, 19 nt, Human
ccuguauuccugaccuccg

SEQ ID NO: 1321279 - RNA, 16 nt, Human
ccuguauuuguuccca

SEQ ID NO: 1321280 - RNA, 19 nt, Human
ccuguauuuguucccaaga

SEQ ID NO: 1321281 - RNA, 21 nt, Human
ccuguauuuguucccaagagc

SEQ ID NO: 1321282 - RNA, 22 nt, Human
ccuguauuuguucccaagagca

SEQ ID NO: 1321283 - RNA, 14 nt, Human
ccuugaugaagaag

SEQ ID NO: 1321284 - RNA, 20 nt, Human
ccuugaucagccccacccug

SEQ ID NO: 1321285 - RNA, 18 nt, Human
ccuugaucagccccaccc

SEQ ID NO: 1321286 - RNA, 15 nt, Human
ccuuggcaccagaca

SEQ ID NO: 1321287 - RNA, 20 nt, Human
ccuuggcaccagacacccag

SEQ ID NO: 1321288 - RNA, 21 nt, Human
ccuuggcaccagacacccagg

SEQ ID NO: 1321289 - RNA, 22 nt, Human
ccuuggcaccagacacccagga

SEQ ID NO: 1321290 - RNA, 23 nt, Human
ccuuggcaccagacacccaggac

SEQ ID NO: 1321291 - RNA, 16 nt, Human
ccuugacaacuggcag

SEQ ID NO: 1321292 - RNA, 21 nt, Human
ccuugacaacuggcaggcagg

SEQ ID NO: 1321293 - RNA, 14 nt, Human
ccuugacaccugcu

SEQ ID NO: 1321294 - RNA, 12 nt, Human
ccuugaaugugg

SEQ ID NO: 1321295 - RNA, 17 nt, Human
ccuugaaaaaaaacagu

SEQ ID NO: 1321296 - RNA, 15 nt, Human
ccuugacaacuggca

SEQ ID NO: 1321297 - RNA, 14 nt, Human
ccuucuuuuucuuc

SEQ ID NO: 1321298 - RNA, 16 nt, Human
ccuucuuuuucuucuu

SEQ ID NO: 1321299 - RNA, 13 nt, Human
ccuuccuggacag

SEQ ID NO: 1321300 - RNA, 16 nt, Human
ccuuccuggacagcug

SEQ ID NO: 1321301 - RNA, 19 nt, Human
ccuucuuucuacccugcug

SEQ ID NO: 1321302 - RNA, 20 nt, Human
ccuugaaaacuuuaugcuaa

SEQ ID NO: 1321303 - RNA, 13 nt, Human
ccuuccacccagu

SEQ ID NO: 1321304 - RNA, 15 nt, Human
ccuuccacccagggg

SEQ ID NO: 1321305 - RNA, 18 nt, Human
ccuuccaaugucuggaga

SEQ ID NO: 1321306 - RNA, 19 nt, Human
ccuuccaaugucuggagac

SEQ ID NO: 1321307 - RNA, 21 nt, Human
ccuuccaaugucuggagacca

SEQ ID NO: 1321308 - RNA, 20 nt, Human
ccuuccaaugucuggagacc

SEQ ID NO: 1321309 - RNA, 13 nt, Human
ccuuccacccagg

SEQ ID NO: 1321310 - RNA, 14 nt, Human
ccuuccacccaggg

SEQ ID NO: 1321311 - RNA, 14 nt, Human
ccuucaucuggaac

SEQ ID NO: 1321312 - RNA, 17 nt, Human
ccuuccaaugucuggag

SEQ ID NO: 1321313 - RNA, 20 nt, Human
ccuucaucuggauuccagag

SEQ ID NO: 1321314 - RNA, 13 nt, Human
ccuucaucuggaa

SEQ ID NO: 1321315 - RNA, 18 nt, Human
ccuucauaucauccacac

SEQ ID NO: 1321316 - RNA, 19 nt, Human
ccuucauaucauccacaca

SEQ ID NO: 1321317 - RNA, 24 nt, Human
ccuucaguacccucucagcuccag

SEQ ID NO: 1321318 - RNA, 18 nt, Human
ccuucaguuaugauuuuu

SEQ ID NO: 1321319 - RNA, 15 nt, Human
ccuucauacuugaac

SEQ ID NO: 1321320 - RNA, 19 nt, Human
ccuucauacuugaacguuu

SEQ ID NO: 1321321 - RNA, 20 nt, Human
ccuucauacuugaacguuuu

SEQ ID NO: 1321322 - RNA, 17 nt, Human
ccuucaguacccucuca

SEQ ID NO: 1321323 - RNA, 19 nt, Human
ccuucaguacccucucagc

SEQ ID NO: 1321324 - RNA, 20 nt, Human
ccuucaguacccucucagcu

SEQ ID NO: 1321325 - RNA, 23 nt, Human
ccuucaguacccucucagcucca

SEQ ID NO: 1321326 - RNA, 18 nt, Human
ccuucaagcucugaggga

SEQ ID NO: 1321327 - RNA, 19 nt, Human
ccuuccaugucgccucugc

SEQ ID NO: 1321328 - RNA, 20 nt, Human
ccuuccaugucgccucugca

SEQ ID NO: 1321329 - RNA, 21 nt, Human
ccuuccaugucgccucugcau

SEQ ID NO: 1321330 - RNA, 23 nt, Human
ccuuccaugucgccucugcauuc

SEQ ID NO: 1321331 - RNA, 17 nt, Human
ccuuccacugagggcag

SEQ ID NO: 1321332 - RNA, 15 nt, Human
ccuuccacugagggc

SEQ ID NO: 1321333 - RNA, 14 nt, Human
ccuuccagaaaaca

SEQ ID NO: 1321334 - RNA, 20 nt, Human
ccuuccucuuuuccuuccca

SEQ ID NO: 1321335 - RNA, 10 nt, Human
ccuucccaaa

SEQ ID NO: 1321336 - RNA, 20 nt, Human
ccuucgauacaccgggccug

SEQ ID NO: 1321337 - RNA, 22 nt, Human
ccuucgauacaccgggccugga

SEQ ID NO: 1321338 - RNA, 23 nt, Human
ccuucgauacaccgggccuggag

SEQ ID NO: 1321339 - RNA, 13 nt, Human
ccuucgccaccug

SEQ ID NO: 1321340 - RNA, 16 nt, Human
ccuuccugccagcccc

SEQ ID NO: 1321341 - RNA, 17 nt, Human
ccuuccugccagccccu

SEQ ID NO: 1321342 - RNA, 23 nt, Human
ccuuccugccccaacuccuucca

SEQ ID NO: 1321343 - RNA, 17 nt, Human
ccuuccuggacagcugu

SEQ ID NO: 1321344 - RNA, 24 nt, Human
ccuguggaacauaaaaaggacauc

SEQ ID NO: 1321345 - RNA, 23 nt, Human
ccuguggaacauaaaaaggacau

SEQ ID NO: 1321346 - RNA, 19 nt, Human
ccuguggaacauaaaaagg

SEQ ID NO: 1321347 - RNA, 22 nt, Human
ccugugcuucgggcccuuccca

SEQ ID NO: 1321348 - RNA, 18 nt, Human
ccuguggccccacccugg

SEQ ID NO: 1321349 - RNA, 20 nt, Human
ccuguggccccacccugggc

SEQ ID NO: 1321350 - RNA, 22 nt, Human
ccuguggccccacccugggccc

SEQ ID NO: 1321351 - RNA, 17 nt, Human
ccuguggccaugacccu

SEQ ID NO: 1321352 - RNA, 22 nt, Human
ccuguggccaugacccugccuc

SEQ ID NO: 1321353 - RNA, 15 nt, Human
ccuguggccccaccc

SEQ ID NO: 1321354 - RNA, 16 nt, Human
ccuguggccccacccu

SEQ ID NO: 1321355 - RNA, 17 nt, Human
ccuguggccccacccug

SEQ ID NO: 1321356 - RNA, 17 nt, Human
ccuuacccuccuuggga

SEQ ID NO: 1321357 - RNA, 21 nt, Human
ccuuacccugccccagcuggg

SEQ ID NO: 1321358 - RNA, 23 nt, Human
ccuguggccaugacccugccucu

SEQ ID NO: 1321359 - RNA, 15 nt, Human
ccuuacuuuuuauau

SEQ ID NO: 1321360 - RNA, 18 nt, Human
ccuuacuuuuuauauaua

SEQ ID NO: 1321361 - RNA, 14 nt, Human
ccuuagaaccuuuc

SEQ ID NO: 1321362 - RNA, 15 nt, Human
ccuuagaaccuuucu

SEQ ID NO: 1321363 - RNA, 16 nt, Human
ccuuagaaccuuucuu

SEQ ID NO: 1321364 - RNA, 18 nt, Human
ccuuagaaccuuucuuac

SEQ ID NO: 1321365 - RNA, 17 nt, Human
ccuuacuuuuuauauau

SEQ ID NO: 1321366 - RNA, 15 nt, Human
ccuuagaccaccaag

SEQ ID NO: 1321367 - RNA, 16 nt, Human
ccuuagaccaccaagc

SEQ ID NO: 1321368 - RNA, 15 nt, Human
ccuucaaagcaaaug

SEQ ID NO: 1321369 - RNA, 14 nt, Human
ccuuauuuucaaga

SEQ ID NO: 1321370 - RNA, 18 nt, Human
ccuuauuuucaagaaacu

SEQ ID NO: 1321371 - RNA, 21 nt, Human
ccuuagaccaccaagccuuga

SEQ ID NO: 1321372 - RNA, 18 nt, Human
ccuuagaccaccaagccu

SEQ ID NO: 1321373 - RNA, 16 nt, Human
ccuuagacucuuuucc

SEQ ID NO: 1321374 - RNA, 20 nt, Human
ccuuagacucuuuuccuucc

SEQ ID NO: 1321375 - RNA, 17 nt, Human
ccuuagacucuuuuccu

SEQ ID NO: 1321376 - RNA, 14 nt, Human
ccuuagaucuggca

SEQ ID NO: 1321377 - RNA, 19 nt, Human
ccuucaaagcaaaugucuu

SEQ ID NO: 1321378 - RNA, 14 nt, Human
ccuucaaccauucc

SEQ ID NO: 1321379 - RNA, 22 nt, Human
ccuucaacaauucuaaaaugau

SEQ ID NO: 1321380 - RNA, 14 nt, Human
ccuucaacccgaga

SEQ ID NO: 1321381 - RNA, 18 nt, Human
ccuucaagaaaacaggca

SEQ ID NO: 1321382 - RNA, 13 nt, Human
ccuucaagcucug

SEQ ID NO: 1321383 - RNA, 14 nt, Human
ccuucaagcucuga

SEQ ID NO: 1321384 - RNA, 15 nt, Human
ccuucaagcucugag

SEQ ID NO: 1321385 - RNA, 16 nt, Human
ccuucaagcucugagg

SEQ ID NO: 1321386 - RNA, 21 nt, Human
ccuucaagcucugagggaaag

SEQ ID NO: 1321387 - RNA, 23 nt, Human
ccucugcagucucuauaccaaua

SEQ ID NO: 1321388 - RNA, 17 nt, Human
ccucugcagucucuaua

SEQ ID NO: 1321389 - RNA, 16 nt, Human
ccucugcagucucuau

SEQ ID NO: 1321390 - RNA, 16 nt, Human
ccucugcauccucugg

SEQ ID NO: 1321391 - RNA, 17 nt, Human
ccucugcauccucugga

SEQ ID NO: 1321392 - RNA, 18 nt, Human
ccucugcauccucuggag

SEQ ID NO: 1321393 - RNA, 19 nt, Human
ccucugccaaaggauguga

SEQ ID NO: 1321394 - RNA, 16 nt, Human
ccucugcacucccacc

SEQ ID NO: 1321395 - RNA, 20 nt, Human
ccucugcacacccuccagag

SEQ ID NO: 1321396 - RNA, 19 nt, Human
ccucugcacacccuccaga

SEQ ID NO: 1321397 - RNA, 19 nt, Human
ccucugcaccuuugcacgu

SEQ ID NO: 1321398 - RNA, 20 nt, Human
ccucugcacuacugacaugu

SEQ ID NO: 1321399 - RNA, 21 nt, Human
ccucugcacuacugacaugug

SEQ ID NO: 1321400 - RNA, 21 nt, Human
ccucuggcuuggccacagcca

SEQ ID NO: 1321401 - RNA, 23 nt, Human
ccucuggcuuggccacagccagg

SEQ ID NO: 1321402 - RNA, 12 nt, Human
ccucugggcucu

SEQ ID NO: 1321403 - RNA, 14 nt, Human
ccucugggcucuga

SEQ ID NO: 1321404 - RNA, 16 nt, Human
ccucugggcucugagu

SEQ ID NO: 1321405 - RNA, 15 nt, Human
ccucugggggguggc

SEQ ID NO: 1321406 - RNA, 19 nt, Human
ccucugggggguggccagg

SEQ ID NO: 1321407 - RNA, 20 nt, Human
ccucugggggguggccaggc

SEQ ID NO: 1321408 - RNA, 19 nt, Human
ccucugguaaccucuuacu

SEQ ID NO: 1321409 - RNA, 16 nt, Human
ccucuggucgcuccug

SEQ ID NO: 1321410 - RNA, 16 nt, Human
ccucuggcuccagcug

SEQ ID NO: 1321411 - RNA, 17 nt, Human
ccucuggcuccagcugg

SEQ ID NO: 1321412 - RNA, 18 nt, Human
ccucuggcuuggccacag

SEQ ID NO: 1321413 - RNA, 20 nt, Human
ccucuggcuuggccacagcc

SEQ ID NO: 1321414 - RNA, 20 nt, Human
ccucugccaaaggaugugau

SEQ ID NO: 1321415 - RNA, 22 nt, Human
ccucugccaaaggaugugauau

SEQ ID NO: 1321416 - RNA, 19 nt, Human
ccucugcauccucuggagc

SEQ ID NO: 1321417 - RNA, 22 nt, Human
ccucugcuuucuccuuuaauug

SEQ ID NO: 1321418 - RNA, 16 nt, Human
ccucuggagccagccg

SEQ ID NO: 1321419 - RNA, 17 nt, Human
ccucuggaggggugugg

SEQ ID NO: 1321420 - RNA, 20 nt, Human
ccucuggagggguguggcuc

SEQ ID NO: 1321421 - RNA, 22 nt, Human
ccucuggagggguguggcuccu

SEQ ID NO: 1321422 - RNA, 14 nt, Human
ccucuggagccagc

SEQ ID NO: 1321423 - RNA, 21 nt, Human
ccucuggcauuagaauuauuu

SEQ ID NO: 1321424 - RNA, 23 nt, Human
ccucuggcauuagaauuauuuaa

SEQ ID NO: 1321425 - RNA, 13 nt, Human
ccucucuggagaa

SEQ ID NO: 1321426 - RNA, 22 nt, Human
ccucucuggagaaagggcccug

SEQ ID NO: 1321427 - RNA, 23 nt, Human
ccucucuggagaaagggcccugg

SEQ ID NO: 1321428 - RNA, 11 nt, Human
ccucucuuccu

SEQ ID NO: 1321429 - RNA, 12 nt, Human
ccucucuuccuc

SEQ ID NO: 1321430 - RNA, 13 nt, Human
ccucucugcccua

SEQ ID NO: 1321431 - RNA, 12 nt, Human
ccucucugcucu

SEQ ID NO: 1321432 - RNA, 15 nt, Human
ccucucugcucugcg

SEQ ID NO: 1321433 - RNA, 16 nt, Human
ccucucugcucugcgu

SEQ ID NO: 1321434 - RNA, 12 nt, Human
ccucucuggaga

SEQ ID NO: 1321435 - RNA, 22 nt, Human
ccucuccccagggaagcagcag

SEQ ID NO: 1321436 - RNA, 21 nt, Human
ccucuccccagguccagcucu

SEQ ID NO: 1321437 - RNA, 23 nt, Human
ccucuccccagguccagcucugg

SEQ ID NO: 1321438 - RNA, 18 nt, Human
ccucuccccucagccucu

SEQ ID NO: 1321439 - RNA, 12 nt, Human
ccucuccccuca

SEQ ID NO: 1321440 - RNA, 15 nt, Human
ccucuccccucagcc

SEQ ID NO: 1321441 - RNA, 16 nt, Human
ccucuccccucagccu

SEQ ID NO: 1321442 - RNA, 12 nt, Human
ccucuccccugc

SEQ ID NO: 1321443 - RNA, 13 nt, Human
ccucuccccugcc

SEQ ID NO: 1321444 - RNA, 16 nt, Human
ccucuccccugccccc

SEQ ID NO: 1321445 - RNA, 20 nt, Human
ccucuccccugcccccugca

SEQ ID NO: 1321446 - RNA, 21 nt, Human
ccucuccccugcccccugcag

SEQ ID NO: 1321447 - RNA, 22 nt, Human
ccucuccccugcccccugcagg

SEQ ID NO: 1321448 - RNA, 15 nt, Human
ccucuccccugccug

SEQ ID NO: 1321449 - RNA, 23 nt, Human
ccucuccccugcccccugcagga

SEQ ID NO: 1321450 - RNA, 16 nt, Human
ccucucccaggcccca

SEQ ID NO: 1321451 - RNA, 17 nt, Human
ccucucccaggccccau

SEQ ID NO: 1321452 - RNA, 18 nt, Human
ccucucccaggccccaug

SEQ ID NO: 1321453 - RNA, 12 nt, Human
ccucucccaguu

SEQ ID NO: 1321454 - RNA, 13 nt, Human
ccucucccaguug

SEQ ID NO: 1321455 - RNA, 15 nt, Human
ccucucccaguuguc

SEQ ID NO: 1321456 - RNA, 18 nt, Human
ccucuccccagcccagag

SEQ ID NO: 1321457 - RNA, 19 nt, Human
ccucuccccagcccagaga

SEQ ID NO: 1321458 - RNA, 20 nt, Human
ccucuccccagcccagagac

SEQ ID NO: 1321459 - RNA, 21 nt, Human
ccucuccccagcccagagaca

SEQ ID NO: 1321460 - RNA, 12 nt, Human
ccucuccacugc

SEQ ID NO: 1321461 - RNA, 13 nt, Human
ccucuccacugcc

SEQ ID NO: 1321462 - RNA, 14 nt, Human
ccucuccacugccu

SEQ ID NO: 1321463 - RNA, 16 nt, Human
ccucuccacugccuuc

SEQ ID NO: 1321464 - RNA, 19 nt, Human
ccucuccacugccuucgau

SEQ ID NO: 1321465 - RNA, 14 nt, Human
ccucucccaggcag

SEQ ID NO: 1321466 - RNA, 19 nt, Human
ccucucccaggcaggggcc

SEQ ID NO: 1321467 - RNA, 22 nt, Human
ccucucccaggcaggggcccgc

SEQ ID NO: 1321468 - RNA, 13 nt, Human
ccucucccaggcc

SEQ ID NO: 1321469 - RNA, 14 nt, Human
ccucucccaggccc

SEQ ID NO: 1321470 - RNA, 15 nt, Human
ccucucccaggcccc

SEQ ID NO: 1321471 - RNA, 23 nt, Human
ccucucccaggccccaugaccuc

SEQ ID NO: 1321472 - RNA, 18 nt, Human
ccuccuuaucaaaggaca

SEQ ID NO: 1321473 - RNA, 20 nt, Human
ccuccuuaucaaaggacacc

SEQ ID NO: 1321474 - RNA, 23 nt, Human
ccuccuguugggagagggcgcag

SEQ ID NO: 1321475 - RNA, 23 nt, Human
ccucuccacucaugugacucuuu

SEQ ID NO: 1321476 - RNA, 23 nt, Human
ccucucaggauccaagcuaagca

SEQ ID NO: 1321477 - RNA, 13 nt, Human
ccucucagcucca

SEQ ID NO: 1321478 - RNA, 16 nt, Human
ccucucagcuccaggu

SEQ ID NO: 1321479 - RNA, 18 nt, Human
ccucucagcuccaggugg

SEQ ID NO: 1321480 - RNA, 15 nt, Human
ccucucaggauccaa

SEQ ID NO: 1321481 - RNA, 18 nt, Human
ccucucaggauccaagcu

SEQ ID NO: 1321482 - RNA, 11 nt, Human
ccucucagccc

SEQ ID NO: 1321483 - RNA, 13 nt, Human
ccucucagcccuc

SEQ ID NO: 1321484 - RNA, 14 nt, Human
ccucucagcccuca

SEQ ID NO: 1321485 - RNA, 17 nt, Human
ccuccugggaaugaagc

SEQ ID NO: 1321486 - RNA, 13 nt, Human
ccuccuggacucc

SEQ ID NO: 1321487 - RNA, 19 nt, Human
ccuccugccggcuccuugg

SEQ ID NO: 1321488 - RNA, 21 nt, Human
ccuccugggcccucucugcuc

SEQ ID NO: 1321489 - RNA, 19 nt, Human
ccuccugcagaccacgccc

SEQ ID NO: 1321490 - RNA, 14 nt, Human
ccuccucugcccgg

SEQ ID NO: 1321491 - RNA, 15 nt, Human
ccuccucugcccggg

SEQ ID NO: 1321492 - RNA, 21 nt, Human
ccuccucugcacucccaccug

SEQ ID NO: 1321493 - RNA, 14 nt, Human
ccuccuccuggacu

SEQ ID NO: 1321494 - RNA, 21 nt, Human
ccucccucaaccucauccucu

SEQ ID NO: 1321495 - RNA, 17 nt, Human
ccucccucaaccucauc

SEQ ID NO: 1321496 - RNA, 22 nt, Human
ccucccuacccuaaccaaguuc

SEQ ID NO: 1321497 - RNA, 16 nt, Human
ccucccggugcccaag

SEQ ID NO: 1321498 - RNA, 13 nt, Human
ccucccggugccc

SEQ ID NO: 1321499 - RNA, 17 nt, Human
ccuccccucuccuuccu

SEQ ID NO: 1321500 - RNA, 15 nt, Human
ccucccuccccuugc

SEQ ID NO: 1321501 - RNA, 14 nt, Human
ccucccucccucuc

SEQ ID NO: 1321502 - RNA, 15 nt, Human
ccucccucccucucc

SEQ ID NO: 1321503 - RNA, 19 nt, Human
ccucccugaagccuuugca

SEQ ID NO: 1321504 - RNA, 13 nt, Human
ccucccugccccu

SEQ ID NO: 1321505 - RNA, 22 nt, Human
ccucccugagcuagaacccucu

SEQ ID NO: 1321506 - RNA, 23 nt, Human
ccucccugagcuagaacccucug

SEQ ID NO: 1321507 - RNA, 21 nt, Human
ccuccuccccaacuguggggg

SEQ ID NO: 1321508 - RNA, 13 nt, Human
ccuccuccccacu

SEQ ID NO: 1321509 - RNA, 14 nt, Human
ccuccuccccacuu

SEQ ID NO: 1321510 - RNA, 13 nt, Human
ccuccucccuccc

SEQ ID NO: 1321511 - RNA, 14 nt, Human
ccuccucccucccu

SEQ ID NO: 1321512 - RNA, 20 nt, Human
ccucagaaaacaaggaugaa

SEQ ID NO: 1321513 - RNA, 21 nt, Human
ccucacuaggcuucugguuga

SEQ ID NO: 1321514 - RNA, 21 nt, Human
ccucacuaucccggcugcccu

SEQ ID NO: 1321515 - RNA, 22 nt, Human
ccucacuaucccggcugcccuu

SEQ ID NO: 1321516 - RNA, 18 nt, Human
ccucacuuuuaaugaaca

SEQ ID NO: 1321517 - RNA, 22 nt, Human
ccucacuuuuaaugaacaaaug

SEQ ID NO: 1321518 - RNA, 15 nt, Human
ccucagacucuaaga

SEQ ID NO: 1321519 - RNA, 19 nt, Human
ccucagacucuaagaaaga

SEQ ID NO: 1321520 - RNA, 20 nt, Human
ccucagacucuaagaaagaa

SEQ ID NO: 1321521 - RNA, 21 nt, Human
ccucagacucuaagaaagaac

SEQ ID NO: 1321522 - RNA, 18 nt, Human
ccucagccacuugccugu

SEQ ID NO: 1321523 - RNA, 14 nt, Human
ccucagggcaaagc

SEQ ID NO: 1321524 - RNA, 15 nt, Human
ccucagggcaaagcc

SEQ ID NO: 1321525 - RNA, 16 nt, Human
ccucagggcaaagcca

SEQ ID NO: 1321526 - RNA, 17 nt, Human
ccucagggcaaagccag

SEQ ID NO: 1321527 - RNA, 21 nt, Human
ccucagggcaaagccaggucc

SEQ ID NO: 1321528 - RNA, 22 nt, Human
ccucagggcaaagccagguccc

SEQ ID NO: 1321529 - RNA, 16 nt, Human
ccucagggcuccuugu

SEQ ID NO: 1321530 - RNA, 22 nt, Human
ccucagggcuccuugugggccu

SEQ ID NO: 1321531 - RNA, 23 nt, Human
ccucagggcuccuugugggccug

SEQ ID NO: 1321532 - RNA, 13 nt, Human
ccucaggggucug

SEQ ID NO: 1321533 - RNA, 16 nt, Human
ccucaggggucugagc

SEQ ID NO: 1321534 - RNA, 18 nt, Human
ccucaggggucugagcuc

SEQ ID NO: 1321535 - RNA, 22 nt, Human
ccucaggggucugagcuccagc

SEQ ID NO: 1321536 - RNA, 21 nt, Human
ccucagguaaucgaccugccu

SEQ ID NO: 1321537 - RNA, 22 nt, Human
ccucagguaaucgaccugccuc

SEQ ID NO: 1321538 - RNA, 23 nt, Human
ccucagguaaucgaccugccucg

SEQ ID NO: 1321539 - RNA, 23 nt, Human
ccucaggggucugagcuccagcu

SEQ ID NO: 1321540 - RNA, 14 nt, Human
ccucagucucccuc

SEQ ID NO: 1321541 - RNA, 15 nt, Human
ccucaguagucccug

SEQ ID NO: 1321542 - RNA, 18 nt, Human
ccucaguagucccugcac

SEQ ID NO: 1321543 - RNA, 19 nt, Human
ccucaguagucccugcaca

SEQ ID NO: 1321544 - RNA, 21 nt, Human
ccucaguagucccugcacagu

SEQ ID NO: 1321545 - RNA, 20 nt, Human
ccugaacaggauauucucac

SEQ ID NO: 1321546 - RNA, 21 nt, Human
ccugaacaagaauuggaagcu

SEQ ID NO: 1321547 - RNA, 16 nt, Human
ccugaaccccagggcu

SEQ ID NO: 1321548 - RNA, 18 nt, Human
ccugaaccccagggcugu

SEQ ID NO: 1321549 - RNA, 17 nt, Human
ccugaaccccagggcug

SEQ ID NO: 1321550 - RNA, 17 nt, Human
ccugaacugaacaccau

SEQ ID NO: 1321551 - RNA, 13 nt, Human
ccugaagaaccag

SEQ ID NO: 1321552 - RNA, 16 nt, Human
ccugaagaaccagucc

SEQ ID NO: 1321553 - RNA, 23 nt, Human
ccugaagcuaucguaaaauuaag

SEQ ID NO: 1321554 - RNA, 22 nt, Human
ccugaagcuaucguaaaauuaa

SEQ ID NO: 1321555 - RNA, 17 nt, Human
ccugaagaaccaguccc

SEQ ID NO: 1321556 - RNA, 12 nt, Human
ccugaaguauuu

SEQ ID NO: 1321557 - RNA, 17 nt, Human
ccugaauccaaacuaau

SEQ ID NO: 1321558 - RNA, 20 nt, Human
ccugaauccaaacuaaucca

SEQ ID NO: 1321559 - RNA, 21 nt, Human
ccugaauccaaacuaauccau

SEQ ID NO: 1321560 - RNA, 15 nt, Human
ccugaaugcucugua

SEQ ID NO: 1321561 - RNA, 16 nt, Human
ccugaaugcucuguag

SEQ ID NO: 1321562 - RNA, 15 nt, Human
ccugaauucuuuuuc

SEQ ID NO: 1321563 - RNA, 15 nt, Human
ccucuuccucccuca

SEQ ID NO: 1321564 - RNA, 16 nt, Human
ccucuuccucccucau

SEQ ID NO: 1321565 - RNA, 19 nt, Human
ccucuuccucccucauucc

SEQ ID NO: 1321566 - RNA, 21 nt, Human
ccucuuccuacuggucucucu

SEQ ID NO: 1321567 - RNA, 18 nt, Human
ccucuuccgugacgucac

SEQ ID NO: 1321568 - RNA, 15 nt, Human
ccucuuccuacuggu

SEQ ID NO: 1321569 - RNA, 19 nt, Human
ccucuuccuacuggucucu

SEQ ID NO: 1321570 - RNA, 23 nt, Human
ccugaaagaggaaugaaguacuc

SEQ ID NO: 1321571 - RNA, 15 nt, Human
ccugaaagaggcuga

SEQ ID NO: 1321572 - RNA, 19 nt, Human
ccugaaagaggcugaggcc

SEQ ID NO: 1321573 - RNA, 22 nt, Human
ccugaaagaggcugaggccugg

SEQ ID NO: 1321574 - RNA, 21 nt, Human
ccugaaaaaaaaccugagauu

SEQ ID NO: 1321575 - RNA, 14 nt, Human
ccugaaauuccaaa

SEQ ID NO: 1321576 - RNA, 15 nt, Human
ccugaaauuccaaag

SEQ ID NO: 1321577 - RNA, 16 nt, Human
ccugaaauuccaaagu

SEQ ID NO: 1321578 - RNA, 18 nt, Human
ccugaaauuccaaagucu

SEQ ID NO: 1321579 - RNA, 14 nt, Human
ccugaaauuucaga

SEQ ID NO: 1321580 - RNA, 15 nt, Human
ccugaaauuucagau

SEQ ID NO: 1321581 - RNA, 13 nt, Human
ccugaacaagaau

SEQ ID NO: 1321582 - RNA, 15 nt, Human
ccugaacaagaauug

SEQ ID NO: 1321583 - RNA, 16 nt, Human
ccugaacaagaauugg

SEQ ID NO: 1321584 - RNA, 17 nt, Human
ccugaacaagaauugga

SEQ ID NO: 1321585 - RNA, 18 nt, Human
ccugaaagaggaaugaag

SEQ ID NO: 1321586 - RNA, 17 nt, Human
ccugaaaacacugugca

SEQ ID NO: 1321587 - RNA, 17 nt, Human
ccucuuuuccuucccaa

SEQ ID NO: 1321588 - RNA, 21 nt, Human
ccucuuuuuaaaguucaaacu

SEQ ID NO: 1321589 - RNA, 23 nt, Human
ccucuuuuuccaacuuggcugca

SEQ ID NO: 1321590 - RNA, 13 nt, Human
ccucuuuuuucgu

SEQ ID NO: 1321591 - RNA, 19 nt, Human
ccucuuuuuucguuuguuu

SEQ ID NO: 1321592 - RNA, 23 nt, Human
ccucuuagaugcaguucugaaga

SEQ ID NO: 1321593 - RNA, 17 nt, Human
ccucuuaaauaaaccuu

SEQ ID NO: 1321594 - RNA, 18 nt, Human
ccucuuaaauaaaccuuu

SEQ ID NO: 1321595 - RNA, 20 nt, Human
ccucuuaccaguauuuaacu

SEQ ID NO: 1321596 - RNA, 23 nt, Human
ccucuuaccaguauuuaacuucu

SEQ ID NO: 1321597 - RNA, 21 nt, Human
ccucuguucugcacacagcac

SEQ ID NO: 1321598 - RNA, 18 nt, Human
ccucuguucaaagcugcc

SEQ ID NO: 1321599 - RNA, 16 nt, Human
ccucuguucaaagcug

SEQ ID NO: 1321600 - RNA, 16 nt, Human
ccucuguuccuucccu

SEQ ID NO: 1321601 - RNA, 15 nt, Human
ccucugugcugugug

SEQ ID NO: 1321602 - RNA, 18 nt, Human
ccucuguguauuugcuuu

SEQ ID NO: 1321603 - RNA, 22 nt, Human
ccucugucucgagcgcccugca

SEQ ID NO: 1321604 - RNA, 22 nt, Human
ccucugucuggcaaugccacag

SEQ ID NO: 1321605 - RNA, 14 nt, Human
ccucugucuggcaa

SEQ ID NO: 1321606 - RNA, 15 nt, Human
ccucugucuucugga

SEQ ID NO: 1321607 - RNA, 16 nt, Human
ccucugucuucuggac

SEQ ID NO: 1321608 - RNA, 22 nt, Human
ccucugucuugugaaggcaggg

SEQ ID NO: 1321609 - RNA, 18 nt, Human
ccucugugaccaaugucu

SEQ ID NO: 1321610 - RNA, 19 nt, Human
ccucugugaccaaugucuu

SEQ ID NO: 1321611 - RNA, 21 nt, Human
ccucugugaccaaugucuuga

SEQ ID NO: 1321612 - RNA, 13 nt, Human
ccucugugcugug

SEQ ID NO: 1321613 - RNA, 16 nt, Human
ccucugugcugugugu

SEQ ID NO: 1321614 - RNA, 17 nt, Human
ccucuggucgcuccugc

SEQ ID NO: 1321615 - RNA, 19 nt, Human
ccucuggucgcuccugccc

SEQ ID NO: 1321616 - RNA, 20 nt, Human
ccucuggucgcuccugccca

SEQ ID NO: 1321617 - RNA, 21 nt, Human
ccucuggucgcuccugcccac

SEQ ID NO: 1321618 - RNA, 17 nt, Human
ccucuguccaggcacug

SEQ ID NO: 1321619 - RNA, 15 nt, Human
ccucuguccaggcac

SEQ ID NO: 1321620 - RNA, 19 nt, Human
ccucuguccaggcacugag

SEQ ID NO: 1321621 - RNA, 20 nt, Human
ccucuguccaggcacugaga

SEQ ID NO: 1321622 - RNA, 21 nt, Human
ccucuguccaggcacugagau

SEQ ID NO: 1321623 - RNA, 23 nt, Human
ccucuguauuugaaucagccuac

SEQ ID NO: 1321624 - RNA, 15 nt, Human
ccucugucagucaca

SEQ ID NO: 1321625 - RNA, 16 nt, Human
ccucugucagucacag

SEQ ID NO: 1321626 - RNA, 18 nt, Human
ccucugucagucacagcc

SEQ ID NO: 1321627 - RNA, 19 nt, Human
ccucugucagucacagcca

SEQ ID NO: 1321628 - RNA, 21 nt, Human
ccucugucagucacagccacc

SEQ ID NO: 1321629 - RNA, 15 nt, Human
ccucugucucgagcg

SEQ ID NO: 1321630 - RNA, 18 nt, Human
ccucugucucgagcgccc

SEQ ID NO: 1321631 - RNA, 19 nt, Human
ccucugucucgagcgcccu

SEQ ID NO: 1321632 - RNA, 20 nt, Human
ccucugucucgagcgcccug

SEQ ID NO: 1321633 - RNA, 21 nt, Human
ccucugucucgagcgcccugc

SEQ ID NO: 1321634 - RNA, 23 nt, Human
ccucugucucgagcgcccugcag

SEQ ID NO: 1321635 - RNA, 23 nt, Human
ccugaugcugacauucaccugcc

SEQ ID NO: 1321636 - RNA, 13 nt, Human
ccugaugcugaca

SEQ ID NO: 1321637 - RNA, 21 nt, Human
ccugaugcugacauucaccug

SEQ ID NO: 1321638 - RNA, 21 nt, Human
ccugaugggguggaaggcaug

SEQ ID NO: 1321639 - RNA, 15 nt, Human
ccugaugaaaauaaa

SEQ ID NO: 1321640 - RNA, 17 nt, Human
ccugaugaaaauaaaga

SEQ ID NO: 1321641 - RNA, 18 nt, Human
ccugaugaaaauaaagaa

SEQ ID NO: 1321642 - RNA, 19 nt, Human
ccugaugaaaauaaagaau

SEQ ID NO: 1321643 - RNA, 21 nt, Human
ccugaugaaaauaaagaaugg

SEQ ID NO: 1321644 - RNA, 20 nt, Human
ccugaggcuccacuuggucu

SEQ ID NO: 1321645 - RNA, 18 nt, Human
ccugaggcuccacuuggu

SEQ ID NO: 1321646 - RNA, 13 nt, Human
ccugaggccuaga

SEQ ID NO: 1321647 - RNA, 13 nt, Human
ccugaugaaaaua

SEQ ID NO: 1321648 - RNA, 14 nt, Human
ccugaugaaaauaa

SEQ ID NO: 1321649 - RNA, 18 nt, Human
ccugaggccuagacucug

SEQ ID NO: 1321650 - RNA, 21 nt, Human
ccugaauuuuguugcuguuuu

SEQ ID NO: 1321651 - RNA, 16 nt, Human
cccuuuccugaguccc

SEQ ID NO: 1321652 - RNA, 14 nt, Human
cccuuuccuccuca

SEQ ID NO: 1321653 - RNA, 17 nt, Human
cccuuuccuccucaggc

SEQ ID NO: 1321654 - RNA, 23 nt, Human
cccuuggggguccuccuccaggg

SEQ ID NO: 1321655 - RNA, 15 nt, Human
cccuugggcccacac

SEQ ID NO: 1321656 - RNA, 14 nt, Human
cccuugggcccaca

SEQ ID NO: 1321657 - RNA, 15 nt, Human
cccuugggcucugau

SEQ ID NO: 1321658 - RNA, 16 nt, Human
cccuugggcucugaug

SEQ ID NO: 1321659 - RNA, 12 nt, Human
cccuuggggguc

SEQ ID NO: 1321660 - RNA, 21 nt, Human
cccuuggggguccuccuccag

SEQ ID NO: 1321661 - RNA, 22 nt, Human
cccuuggggguccuccuccagg

SEQ ID NO: 1321662 - RNA, 22 nt, Human
cccuuucugggcaccggggccu

SEQ ID NO: 1321663 - RNA, 18 nt, Human
cccuuucggauccaggga

SEQ ID NO: 1321664 - RNA, 16 nt, Human
cccuuucuagaccaau

SEQ ID NO: 1321665 - RNA, 17 nt, Human
cccuuucuagaccaaua

SEQ ID NO: 1321666 - RNA, 22 nt, Human
cccuuucuaucguucucucuuu

SEQ ID NO: 1321667 - RNA, 12 nt, Human
cccuuugagugc

SEQ ID NO: 1321668 - RNA, 14 nt, Human
cccuuugagugcag

SEQ ID NO: 1321669 - RNA, 17 nt, Human
cccuuugcccagaaaga

SEQ ID NO: 1321670 - RNA, 14 nt, Human
cccuuugccuucau

SEQ ID NO: 1321671 - RNA, 17 nt, Human
cccuuugcugcauggca

SEQ ID NO: 1321672 - RNA, 15 nt, Human
cccuuugcugacccu

SEQ ID NO: 1321673 - RNA, 23 nt, Human
cccuuugcugugaggcuguccug

SEQ ID NO: 1321674 - RNA, 23 nt, Human
cccuuugugugcucuccauucug

SEQ ID NO: 1321675 - RNA, 16 nt, Human
cccuugaugaagaagu

SEQ ID NO: 1321676 - RNA, 20 nt, Human
cccuuccucuccacugccuu

SEQ ID NO: 1321677 - RNA, 16 nt, Human
cccuuccucuccacug

SEQ ID NO: 1321678 - RNA, 17 nt, Human
cccuuccucuccacugc

SEQ ID NO: 1321679 - RNA, 21 nt, Human
cccuuccucuccacugccuuc

SEQ ID NO: 1321680 - RNA, 17 nt, Human
cccuuaccacugcucug

SEQ ID NO: 1321681 - RNA, 21 nt, Human
cccuuaccacugcucugauga

SEQ ID NO: 1321682 - RNA, 13 nt, Human
cccuuccucucca

SEQ ID NO: 1321683 - RNA, 21 nt, Human
cccuuccucccuauuaaccua

SEQ ID NO: 1321684 - RNA, 15 nt, Human
cccuugggccagaag

SEQ ID NO: 1321685 - RNA, 16 nt, Human
cccuugggccagaagu

SEQ ID NO: 1321686 - RNA, 21 nt, Human
cccuugggccagaaguaccag

SEQ ID NO: 1321687 - RNA, 14 nt, Human
ccgagcaaccgugg

SEQ ID NO: 1321688 - RNA, 16 nt, Human
ccgagcaaccguggcc

SEQ ID NO: 1321689 - RNA, 18 nt, Human
ccgagcaaccguggcccu

SEQ ID NO: 1321690 - RNA, 16 nt, Human
ccgagcaggaggccua

SEQ ID NO: 1321691 - RNA, 21 nt, Human
ccgagcagcugagcagggccg

SEQ ID NO: 1321692 - RNA, 23 nt, Human
ccgagcaaccguggcccuuccug

SEQ ID NO: 1321693 - RNA, 12 nt, Human
ccgagcagcuga

SEQ ID NO: 1321694 - RNA, 14 nt, Human
ccgagcagcugagc

SEQ ID NO: 1321695 - RNA, 15 nt, Human
ccgagcagcugagca

SEQ ID NO: 1321696 - RNA, 16 nt, Human
ccgagcagcugagcag

SEQ ID NO: 1321697 - RNA, 17 nt, Human
ccgagcagcugagcagg

SEQ ID NO: 1321698 - RNA, 18 nt, Human
ccgagcagcugagcaggg

SEQ ID NO: 1321699 - RNA, 20 nt, Human
ccgagcagcugagcagggcc

SEQ ID NO: 1321700 - RNA, 11 nt, Human
ccgagcuccuc

SEQ ID NO: 1321701 - RNA, 16 nt, Human
ccgagcuccucuucca

SEQ ID NO: 1321702 - RNA, 17 nt, Human
ccgagcuccucuuccau

SEQ ID NO: 1321703 - RNA, 18 nt, Human
ccgagcuccucuuccaug

SEQ ID NO: 1321704 - RNA, 12 nt, Human
ccgaggcugaga

SEQ ID NO: 1321705 - RNA, 22 nt, Human
ccgagucucuucuccacuggau

SEQ ID NO: 1321706 - RNA, 16 nt, Human
ccgaugcccagagaca

SEQ ID NO: 1321707 - RNA, 13 nt, Human
ccgaugcccagag

SEQ ID NO: 1321708 - RNA, 11 nt, Human
ccgcccugcca

SEQ ID NO: 1321709 - RNA, 12 nt, Human
ccgcccugccac

SEQ ID NO: 1321710 - RNA, 13 nt, Human
cccuuuucuguuc

SEQ ID NO: 1321711 - RNA, 16 nt, Human
cccuuuuggguuucug

SEQ ID NO: 1321712 - RNA, 13 nt, Human
cccuuuugucucu

SEQ ID NO: 1321713 - RNA, 20 nt, Human
cccuuuuggguuucugcccu

SEQ ID NO: 1321714 - RNA, 14 nt, Human
cccuuuuucaauga

SEQ ID NO: 1321715 - RNA, 15 nt, Human
cccuuuuucuccagc

SEQ ID NO: 1321716 - RNA, 16 nt, Human
cccuuuuucuccagcu

SEQ ID NO: 1321717 - RNA, 15 nt, Human
ccgacuggggcaggg

SEQ ID NO: 1321718 - RNA, 22 nt, Human
ccgacuuuuguuuaccagagaa

SEQ ID NO: 1321719 - RNA, 13 nt, Human
ccgagaagaacag

SEQ ID NO: 1321720 - RNA, 20 nt, Human
ccccuaaaagaaacccugca

SEQ ID NO: 1321721 - RNA, 19 nt, Human
ccccuaaagccucaaaaca

SEQ ID NO: 1321722 - RNA, 14 nt, Human
ccccguuucuggug

SEQ ID NO: 1321723 - RNA, 22 nt, Human
ccccuaacccuuugugugcucu

SEQ ID NO: 1321724 - RNA, 23 nt, Human
ccccuaacccuuugugugcucuc

SEQ ID NO: 1321725 - RNA, 17 nt, Human
ccccuaagagagcaccu

SEQ ID NO: 1321726 - RNA, 18 nt, Human
ccccuaagagagcaccug

SEQ ID NO: 1321727 - RNA, 23 nt, Human
ccccuaaugacaucaccacaguu

SEQ ID NO: 1321728 - RNA, 14 nt, Human
ccccuagaguccca

SEQ ID NO: 1321729 - RNA, 21 nt, Human
cccugguuuccugcccuggga

SEQ ID NO: 1321730 - RNA, 20 nt, Human
ccccucccccugagauucag

SEQ ID NO: 1321731 - RNA, 13 nt, Human
ccccuccccucca

SEQ ID NO: 1321732 - RNA, 20 nt, Human
cccuguacaguguuaccauc

SEQ ID NO: 1321733 - RNA, 19 nt, Human
cccuguaccuuuugaggag

SEQ ID NO: 1321734 - RNA, 18 nt, Human
cccuguacuguucugugu

SEQ ID NO: 1321735 - RNA, 15 nt, Human
cccuguacaguguua

SEQ ID NO: 1321736 - RNA, 22 nt, Human
cccugguuuccugcccugggag

SEQ ID NO: 1321737 - RNA, 23 nt, Human
cccugguuuccugcccugggagg

SEQ ID NO: 1321738 - RNA, 11 nt, Human
cccuguaacuu

SEQ ID NO: 1321739 - RNA, 18 nt, Human
cccuguacacaacucacu

SEQ ID NO: 1321740 - RNA, 13 nt, Human
cccuguacagugu

SEQ ID NO: 1321741 - RNA, 16 nt, Human
cccuguuucagaggcu

SEQ ID NO: 1321742 - RNA, 19 nt, Human
cccuguuucagaggcucag

SEQ ID NO: 1321743 - RNA, 14 nt, Human
cccuuacaguagga

SEQ ID NO: 1321744 - RNA, 18 nt, Human
cccccaguaucucuucag

SEQ ID NO: 1321745 - RNA, 16 nt, Human
cccccaucauccucug

SEQ ID NO: 1321746 - RNA, 18 nt, Human
cccccaggguccugggag

SEQ ID NO: 1321747 - RNA, 16 nt, Human
cccccaucucuucugg

SEQ ID NO: 1321748 - RNA, 18 nt, Human
cccccaugcacugugaag

SEQ ID NO: 1321749 - RNA, 14 nt, Human
cccccaugcacugu

SEQ ID NO: 1321750 - RNA, 19 nt, Human
ccccccaagggaggcugcu

SEQ ID NO: 1321751 - RNA, 21 nt, Human
ccccccaagggaggcugcugc

SEQ ID NO: 1321752 - RNA, 21 nt, Human
ccccccagauaucaucuaccu

SEQ ID NO: 1321753 - RNA, 12 nt, Human
ccccccagccuc

SEQ ID NO: 1321754 - RNA, 13 nt, Human
ccccccagccucu

SEQ ID NO: 1321755 - RNA, 14 nt, Human
ccccccagauauca

SEQ ID NO: 1321756 - RNA, 14 nt, Human
ccccccaugcacug

SEQ ID NO: 1321757 - RNA, 22 nt, Human
cccccagcccccuccuggugcc

SEQ ID NO: 1321758 - RNA, 14 nt, Human
cccccaggaccaga

SEQ ID NO: 1321759 - RNA, 23 nt, Human
cccccagcuuugcuaccaaagca

SEQ ID NO: 1321760 - RNA, 15 nt, Human
cccccaggaccagaa

SEQ ID NO: 1321761 - RNA, 18 nt, Human
cccccaagguucuccaac

SEQ ID NO: 1321762 - RNA, 13 nt, Human
cccccaauccaug

SEQ ID NO: 1321763 - RNA, 20 nt, Human
cccccaagggaggcugcugc

SEQ ID NO: 1321764 - RNA, 18 nt, Human
cccccaagggaggcugcu

SEQ ID NO: 1321765 - RNA, 12 nt, Human
cccccagcacuu

SEQ ID NO: 1321766 - RNA, 13 nt, Human
cccccagcccagg

SEQ ID NO: 1321767 - RNA, 14 nt, Human
cccccagcccaggg

SEQ ID NO: 1321768 - RNA, 21 nt, Human
cccccagcccagggcuccugc

SEQ ID NO: 1321769 - RNA, 14 nt, Human
cccccggcagcagc

SEQ ID NO: 1321770 - RNA, 14 nt, Human
cccccucucccagu

SEQ ID NO: 1321771 - RNA, 14 nt, Human
cccccucucccugc

SEQ ID NO: 1321772 - RNA, 15 nt, Human
cccccucucccugca

SEQ ID NO: 1321773 - RNA, 17 nt, Human
cccccucucccugcaug

SEQ ID NO: 1321774 - RNA, 12 nt, Human
ccccccucuguc

SEQ ID NO: 1321775 - RNA, 12 nt, Human
ccccccuggccu

SEQ ID NO: 1321776 - RNA, 13 nt, Human
ccccccuguacac

SEQ ID NO: 1321777 - RNA, 13 nt, Human
cccccucugcccu

SEQ ID NO: 1321778 - RNA, 14 nt, Human
cccccucugcccug

SEQ ID NO: 1321779 - RNA, 16 nt, Human
cccccucugcccugcg

SEQ ID NO: 1321780 - RNA, 18 nt, Human
cccccucucccugcaugg

SEQ ID NO: 1321781 - RNA, 19 nt, Human
cccccucucccugcauggc

SEQ ID NO: 1321782 - RNA, 22 nt, Human
cccccugccccccagccucugg

SEQ ID NO: 1321783 - RNA, 14 nt, Human
cccccugcugccau

SEQ ID NO: 1321784 - RNA, 16 nt, Human
ccccgucccccucugg

SEQ ID NO: 1321785 - RNA, 20 nt, Human
ccccgucccccucuggcucc

SEQ ID NO: 1321786 - RNA, 21 nt, Human
ccccgucucugguuccucccc

SEQ ID NO: 1321787 - RNA, 17 nt, Human
cccccuggccuccccca

SEQ ID NO: 1321788 - RNA, 15 nt, Human
ccccgucaagaguga

SEQ ID NO: 1321789 - RNA, 23 nt, Human
cccccaaccaaguggcucccaca

SEQ ID NO: 1321790 - RNA, 20 nt, Human
cccccaaccauuuccucaga

SEQ ID NO: 1321791 - RNA, 19 nt, Human
cccccaagcuguuuucuuc

SEQ ID NO: 1321792 - RNA, 16 nt, Human
ccccaggaccagcuca

SEQ ID NO: 1321793 - RNA, 11 nt, Human
ccccaggacca

SEQ ID NO: 1321794 - RNA, 13 nt, Human
ccccaggaccaga

SEQ ID NO: 1321795 - RNA, 14 nt, Human
ccccaggaccagaa

SEQ ID NO: 1321796 - RNA, 18 nt, Human
ccccaggaccagaagcuc

SEQ ID NO: 1321797 - RNA, 20 nt, Human
ccccaggaccagaagcuccc

SEQ ID NO: 1321798 - RNA, 13 nt, Human
ccccaggaccagc

SEQ ID NO: 1321799 - RNA, 15 nt, Human
ccccaggaccagcuc

SEQ ID NO: 1321800 - RNA, 11 nt, Human
ccccagcuacc

SEQ ID NO: 1321801 - RNA, 22 nt, Human
ccccagcuacccuuuuucucca

SEQ ID NO: 1321802 - RNA, 14 nt, Human
ccccagcucaaugg

SEQ ID NO: 1321803 - RNA, 13 nt, Human
ccccagcucccac

SEQ ID NO: 1321804 - RNA, 14 nt, Human
ccccagcucccacc

SEQ ID NO: 1321805 - RNA, 13 nt, Human
ccccagcucccag

SEQ ID NO: 1321806 - RNA, 11 nt, Human
ccccagcuccg

SEQ ID NO: 1321807 - RNA, 13 nt, Human
ccccagcuccggc

SEQ ID NO: 1321808 - RNA, 14 nt, Human
ccccagcucccagg

SEQ ID NO: 1321809 - RNA, 23 nt, Human
ccccagcugucaucaauuaaagg

SEQ ID NO: 1321810 - RNA, 21 nt, Human
ccccagccgcuuggcgaugcc

SEQ ID NO: 1321811 - RNA, 13 nt, Human
ccccagccucccu

SEQ ID NO: 1321812 - RNA, 15 nt, Human
ccccagccucccuga

SEQ ID NO: 1321813 - RNA, 14 nt, Human
ccccagccucuggc

SEQ ID NO: 1321814 - RNA, 15 nt, Human
ccccagccucuggca

SEQ ID NO: 1321815 - RNA, 16 nt, Human
ccccagccucuggcau

SEQ ID NO: 1321816 - RNA, 10 nt, Human
ccccagccug

SEQ ID NO: 1321817 - RNA, 20 nt, Human
ccccagccugggccuaugga

SEQ ID NO: 1321818 - RNA, 11 nt, Human
ccccagccugu

SEQ ID NO: 1321819 - RNA, 17 nt, Human
ccccagcuaagaaccug

SEQ ID NO: 1321820 - RNA, 19 nt, Human
ccccagcuaagaaccugga

SEQ ID NO: 1321821 - RNA, 21 nt, Human
ccccagcuaagaaccuggaac

SEQ ID NO: 1321822 - RNA, 12 nt, Human
ccccacucugcu

SEQ ID NO: 1321823 - RNA, 13 nt, Human
ccccacucugcuc

SEQ ID NO: 1321824 - RNA, 15 nt, Human
ccccacucugcucug

SEQ ID NO: 1321825 - RNA, 16 nt, Human
ccccacucugcucuga

SEQ ID NO: 1321826 - RNA, 19 nt, Human
ccccacucugcucugaugc

SEQ ID NO: 1321827 - RNA, 17 nt, Human
ccccacucugcucugau

SEQ ID NO: 1321828 - RNA, 14 nt, Human
ccccacugaccaga

SEQ ID NO: 1321829 - RNA, 15 nt, Human
ccccacugaccagaa

SEQ ID NO: 1321830 - RNA, 24 nt, Human
ccccacuggagcagaaggggagau

SEQ ID NO: 1321831 - RNA, 12 nt, Human
ccccacuggagc

SEQ ID NO: 1321832 - RNA, 13 nt, Human
ccccacuggagca

SEQ ID NO: 1321833 - RNA, 14 nt, Human
ccccacuggagcag

SEQ ID NO: 1321834 - RNA, 16 nt, Human
ccucacccaccccugc

SEQ ID NO: 1321835 - RNA, 17 nt, Human
ccucacaguauugcuca

SEQ ID NO: 1321836 - RNA, 22 nt, Human
ccucacaguauugcucacccag

SEQ ID NO: 1321837 - RNA, 19 nt, Human
ccucacccaccccugcaca

SEQ ID NO: 1321838 - RNA, 21 nt, Human
ccucacccaccccugcacagu

SEQ ID NO: 1321839 - RNA, 17 nt, Human
ccucacccccagcuuug

SEQ ID NO: 1321840 - RNA, 19 nt, Human
ccucacccccagcuuugcu

SEQ ID NO: 1321841 - RNA, 15 nt, Human
ccucaccuguagcag

SEQ ID NO: 1321842 - RNA, 15 nt, Human
ccucaccuucugagu

SEQ ID NO: 1321843 - RNA, 15 nt, Human
ccucaccuuggcacc

SEQ ID NO: 1321844 - RNA, 16 nt, Human
ccucaccuuggcacca

SEQ ID NO: 1321845 - RNA, 21 nt, Human
ccucaccuuggcaccagacac

SEQ ID NO: 1321846 - RNA, 14 nt, Human
ccucaccuccucua

SEQ ID NO: 1321847 - RNA, 23 nt, Human
ccucacacacaaugugucugaga

SEQ ID NO: 1321848 - RNA, 13 nt, Human
ccucacacacccu

SEQ ID NO: 1321849 - RNA, 15 nt, Human
ccucacaggccccag

SEQ ID NO: 1321850 - RNA, 17 nt, Human
ccucaauuuucacugug

SEQ ID NO: 1321851 - RNA, 21 nt, Human
ccucacaaguggguaccccca

SEQ ID NO: 1321852 - RNA, 22 nt, Human
ccucacaaguggguacccccag

SEQ ID NO: 1321853 - RNA, 16 nt, Human
ccucaauuuucacugu

SEQ ID NO: 1321854 - RNA, 16 nt, Human
ccucaauuucugaaca

SEQ ID NO: 1321855 - RNA, 18 nt, Human
ccuaugucauuucauuuc

SEQ ID NO: 1321856 - RNA, 13 nt, Human
ccucaauccagcu

SEQ ID NO: 1321857 - RNA, 18 nt, Human
ccucaauccagcuauguu

SEQ ID NO: 1321858 - RNA, 23 nt, Human
ccucaaugccaguaacgcgucuu

SEQ ID NO: 1321859 - RNA, 17 nt, Human
ccuaucagaaguuucuc

SEQ ID NO: 1321860 - RNA, 20 nt, Human
ccuaucagaguugcugcaaa

SEQ ID NO: 1321861 - RNA, 19 nt, Human
ccuauggagagcccuggga

SEQ ID NO: 1321862 - RNA, 21 nt, Human
ccuauggagagcccugggacc

SEQ ID NO: 1321863 - RNA, 22 nt, Human
ccuauggagagcccugggaccg

SEQ ID NO: 1321864 - RNA, 15 nt, Human
ccuauggccucaugu

SEQ ID NO: 1321865 - RNA, 12 nt, Human
ccuauggccuca

SEQ ID NO: 1321866 - RNA, 24 nt, Human
ccuagagaagacaggcuggaagau

SEQ ID NO: 1321867 - RNA, 12 nt, Human
ccuagaggccug

SEQ ID NO: 1321868 - RNA, 20 nt, Human
ccuaucacccaacgcuccaa

SEQ ID NO: 1321869 - RNA, 16 nt, Human
ccuaucaccuauuucc

SEQ ID NO: 1321870 - RNA, 17 nt, Human
ccuaucaccuauuucca

SEQ ID NO: 1321871 - RNA, 23 nt, Human
ccucaguagucccugcacaguga

SEQ ID NO: 1321872 - RNA, 18 nt, Human
ccuacccuaaccaaguuc

SEQ ID NO: 1321873 - RNA, 16 nt, Human
ccuacccuaaccaagu

SEQ ID NO: 1321874 - RNA, 15 nt, Human
ccuacccuaaccaag

SEQ ID NO: 1321875 - RNA, 13 nt, Human
ccuaccuccaaag

SEQ ID NO: 1321876 - RNA, 22 nt, Human
ccuaccccauggugcuaggaag

SEQ ID NO: 1321877 - RNA, 20 nt, Human
ccuaccccgcagacaccuug

SEQ ID NO: 1321878 - RNA, 21 nt, Human
ccuaccccgcagacaccuugg

SEQ ID NO: 1321879 - RNA, 12 nt, Human
ccuaccugguaa

SEQ ID NO: 1321880 - RNA, 13 nt, Human
ccuaccugcccca

SEQ ID NO: 1321881 - RNA, 14 nt, Human
ccuaccugugccug

SEQ ID NO: 1321882 - RNA, 15 nt, Human
ccuaccugugccuga

SEQ ID NO: 1321883 - RNA, 16 nt, Human
ccuaccugugccugac

SEQ ID NO: 1321884 - RNA, 17 nt, Human
ccuagagaagacaggcu

SEQ ID NO: 1321885 - RNA, 19 nt, Human
ccuagagaagacaggcugg

SEQ ID NO: 1321886 - RNA, 22 nt, Human
ccuagagaagacaggcuggaag

SEQ ID NO: 1321887 - RNA, 13 nt, Human
ccuaaagccucaa

SEQ ID NO: 1321888 - RNA, 19 nt, Human
ccuaaagccucaaaacaaa

SEQ ID NO: 1321889 - RNA, 12 nt, Human
ccuaaagagaua

SEQ ID NO: 1321890 - RNA, 14 nt, Human
ccuaaagaacaaag

SEQ ID NO: 1321891 - RNA, 15 nt, Human
ccuaaagaacaaagu

SEQ ID NO: 1321892 - RNA, 16 nt, Human
ccuaaagaaaaacaaa

SEQ ID NO: 1321893 - RNA, 14 nt, Human
ccuaauuccacagc

SEQ ID NO: 1321894 - RNA, 15 nt, Human
ccuaauuccacagcu

SEQ ID NO: 1321895 - RNA, 16 nt, Human
ccuaauuccacagcug

SEQ ID NO: 1321896 - RNA, 17 nt, Human
ccuaauuccacagcugc

SEQ ID NO: 1321897 - RNA, 17 nt, Human
ccuaauucuaugccugu

SEQ ID NO: 1321898 - RNA, 18 nt, Human
ccuaaaagaaacccugca

SEQ ID NO: 1321899 - RNA, 14 nt, Human
ccguuuugucacuu

SEQ ID NO: 1321900 - RNA, 19 nt, Human
ccguuuugucacuuuuucu

SEQ ID NO: 1321901 - RNA, 15 nt, Human
ccguggcuucccgcu

SEQ ID NO: 1321902 - RNA, 21 nt, Human
ccguggcuucccgcucagccc

SEQ ID NO: 1321903 - RNA, 23 nt, Human
ccguggcuucccgcucagcccuc

SEQ ID NO: 1321904 - RNA, 22 nt, Human
ccgugggcaauugucugaaaag

SEQ ID NO: 1321905 - RNA, 19 nt, Human
ccgugggccccacccucgg

SEQ ID NO: 1321906 - RNA, 15 nt, Human
ccguggcuuugguuu

SEQ ID NO: 1321907 - RNA, 14 nt, Human
ccgugggcucccug

SEQ ID NO: 1321908 - RNA, 17 nt, Human
ccguggggccgccgccu

SEQ ID NO: 1321909 - RNA, 23 nt, Human
ccguuucauuuagucaugugacc

SEQ ID NO: 1321910 - RNA, 16 nt, Human
ccgugccuucagcucu

SEQ ID NO: 1321911 - RNA, 17 nt, Human
ccgugccuucagcucua

SEQ ID NO: 1321912 - RNA, 14 nt, Human
ccgugccuucagcu

SEQ ID NO: 1321913 - RNA, 15 nt, Human
ccgugccuucagcuc

SEQ ID NO: 1321914 - RNA, 19 nt, Human
ccgggccacuccuuccugc

SEQ ID NO: 1321915 - RNA, 20 nt, Human
ccgggccacuccuuccugcc

SEQ ID NO: 1321916 - RNA, 21 nt, Human
ccgggccacuccuuccugccc

SEQ ID NO: 1321917 - RNA, 19 nt, Human
ccgggccuggagaacuaga

SEQ ID NO: 1321918 - RNA, 12 nt, Human
ccggcugcccuu

SEQ ID NO: 1321919 - RNA, 11 nt, Human
ccggaaagaag

SEQ ID NO: 1321920 - RNA, 13 nt, Human
ccggaccagccug

SEQ ID NO: 1321921 - RNA, 14 nt, Human
ccggaccagccugg

SEQ ID NO: 1321922 - RNA, 15 nt, Human
ccggaccagccuggc

SEQ ID NO: 1321923 - RNA, 16 nt, Human
ccggaccagccuggcc

SEQ ID NO: 1321924 - RNA, 18 nt, Human
ccggaccagccuggccca

SEQ ID NO: 1321925 - RNA, 15 nt, Human
ccggcugcagaggcc

SEQ ID NO: 1321926 - RNA, 13 nt, Human
ccgcccugccacu

SEQ ID NO: 1321927 - RNA, 14 nt, Human
ccgcccugccacuc

SEQ ID NO: 1321928 - RNA, 15 nt, Human
ccgcccugccacuca

SEQ ID NO: 1321929 - RNA, 15 nt, Human
ccgcuguaugucuua

SEQ ID NO: 1321930 - RNA, 15 nt, Human
ccgcuuggagcagag

SEQ ID NO: 1321931 - RNA, 20 nt, Human
ccgcuuggagcuauuuucca

SEQ ID NO: 1321932 - RNA, 17 nt, Human
ccgcuuggagcagaggg

SEQ ID NO: 1321933 - RNA, 18 nt, Human
ccgcuuggagcagagggg

SEQ ID NO: 1321934 - RNA, 20 nt, Human
ccguggggccgccgccucuu

SEQ ID NO: 1321935 - RNA, 15 nt, Human
cccaauugagaaaaa

SEQ ID NO: 1321936 - RNA, 14 nt, Human
cccaauugcuggag

SEQ ID NO: 1321937 - RNA, 15 nt, Human
cccaauuucagacuc

SEQ ID NO: 1321938 - RNA, 22 nt, Human
cccaauuucggauuuuuuccaa

SEQ ID NO: 1321939 - RNA, 19 nt, Human
cccaaguucaugcagcugu

SEQ ID NO: 1321940 - RNA, 14 nt, Human
cccaauccagugga

SEQ ID NO: 1321941 - RNA, 13 nt, Human
cccaacaccucuu

SEQ ID NO: 1321942 - RNA, 16 nt, Human
cccaaauuugauugau

SEQ ID NO: 1321943 - RNA, 13 nt, Human
cccaacacaaaga

SEQ ID NO: 1321944 - RNA, 14 nt, Human
cccaaauggcccug

SEQ ID NO: 1321945 - RNA, 19 nt, Human
cccaaauuugauugauuug

SEQ ID NO: 1321946 - RNA, 21 nt, Human
cccacacucagauccuccuca

SEQ ID NO: 1321947 - RNA, 12 nt, Human
cccacacucaga

SEQ ID NO: 1321948 - RNA, 13 nt, Human
cccagaggggccu

SEQ ID NO: 1321949 - RNA, 14 nt, Human
cccagaggggccug

SEQ ID NO: 1321950 - RNA, 15 nt, Human
cccagaggggccugc

SEQ ID NO: 1321951 - RNA, 17 nt, Human
cccagaggggccugcca

SEQ ID NO: 1321952 - RNA, 18 nt, Human
cccagaggggccugccac

SEQ ID NO: 1321953 - RNA, 19 nt, Human
cccagaggggccugccacc

SEQ ID NO: 1321954 - RNA, 20 nt, Human
cccagaggggccugccaccu

SEQ ID NO: 1321955 - RNA, 21 nt, Human
cccagaggggccugccaccug

SEQ ID NO: 1321956 - RNA, 23 nt, Human
cccagaggggccugccaccugga

SEQ ID NO: 1321957 - RNA, 15 nt, Human
cccagagggucuggg

SEQ ID NO: 1321958 - RNA, 22 nt, Human
cccagagggucugggggcacaa

SEQ ID NO: 1321959 - RNA, 22 nt, Human
cccagccgacccccucucccug

SEQ ID NO: 1321960 - RNA, 19 nt, Human
cccagccgacccccucucc

SEQ ID NO: 1321961 - RNA, 23 nt, Human
cccagccgcuuggcgaugccagc

SEQ ID NO: 1321962 - RNA, 10 nt, Human
cccagccugg

SEQ ID NO: 1321963 - RNA, 14 nt, Human
cccagcgauucccu

SEQ ID NO: 1321964 - RNA, 23 nt, Human
cccagcgauucccucucccaggc

SEQ ID NO: 1321965 - RNA, 21 nt, Human
cccagcgauucccucucccag

SEQ ID NO: 1321966 - RNA, 15 nt, Human
cccagcggacacacg

SEQ ID NO: 1321967 - RNA, 14 nt, Human
cccagcggacacac

SEQ ID NO: 1321968 - RNA, 16 nt, Human
cccagcggcaucaggc

SEQ ID NO: 1321969 - RNA, 16 nt, Human
cccagcuaagaaccug

SEQ ID NO: 1321970 - RNA, 17 nt, Human
cccagcuaagaaccugg

SEQ ID NO: 1321971 - RNA, 18 nt, Human
cccagcuaagaaccugga

SEQ ID NO: 1321972 - RNA, 19 nt, Human
cccagcuaagaaccuggaa

SEQ ID NO: 1321973 - RNA, 20 nt, Human
cccagcuaagaaccuggaac

SEQ ID NO: 1321974 - RNA, 22 nt, Human
cccagcuaagaaccuggaacuu

SEQ ID NO: 1321975 - RNA, 22 nt, Human
cccagcuacccuuuuucuccag

SEQ ID NO: 1321976 - RNA, 12 nt, Human
cccagcucccac

SEQ ID NO: 1321977 - RNA, 16 nt, Human
cccagcucccaccucc

SEQ ID NO: 1321978 - RNA, 14 nt, Human
cccagcucccagga

SEQ ID NO: 1321979 - RNA, 13 nt, Human
cccagcucccagg

SEQ ID NO: 1321980 - RNA, 17 nt, Human
cccagcuccggccuguc

SEQ ID NO: 1321981 - RNA, 11 nt, Human
cccagcuccug

SEQ ID NO: 1321982 - RNA, 12 nt, Human
cccagcuccuga

SEQ ID NO: 1321983 - RNA, 20 nt, Human
cccagcuccugacacugcug

SEQ ID NO: 1321984 - RNA, 22 nt, Human
cccagcuccugacacugcugga

SEQ ID NO: 1321985 - RNA, 16 nt, Human
cccaguaucucuucag

SEQ ID NO: 1321986 - RNA, 15 nt, Human
cccaguaucucuuca

SEQ ID NO: 1321987 - RNA, 17 nt, Human
cccagucauucugggaa

SEQ ID NO: 1321988 - RNA, 11 nt, Human
cccagucuguc

SEQ ID NO: 1321989 - RNA, 15 nt, Human
cccagugacagcuag

SEQ ID NO: 1321990 - RNA, 14 nt, Human
cccagugacagcua

SEQ ID NO: 1321991 - RNA, 19 nt, Human
cccagguuggagugcagug

SEQ ID NO: 1321992 - RNA, 14 nt, Human
cccagguuggcucu

SEQ ID NO: 1321993 - RNA, 15 nt, Human
cccagguuggcucug

SEQ ID NO: 1321994 - RNA, 16 nt, Human
cccagguuggcucugc

SEQ ID NO: 1321995 - RNA, 18 nt, Human
cccagguuggcucugcca

SEQ ID NO: 1321996 - RNA, 20 nt, Human
cccagguuggcucugccagu

SEQ ID NO: 1321997 - RNA, 21 nt, Human
cccagguuggcucugccaguc

SEQ ID NO: 1321998 - RNA, 18 nt, Human
cccagguuggagugcagu

SEQ ID NO: 1321999 - RNA, 21 nt, Human
cccagguguuaacauuccaag

SEQ ID NO: 1322000 - RNA, 22 nt, Human
cccagguguuaacauuccaaga

SEQ ID NO: 1322001 - RNA, 19 nt, Human
cccagguguuaacauucca

SEQ ID NO: 1322002 - RNA, 17 nt, Human
cccagguccagcucugg

SEQ ID NO: 1322003 - RNA, 18 nt, Human
cccagguccagcucugga

SEQ ID NO: 1322004 - RNA, 13 nt, Human
cccagguccucac

SEQ ID NO: 1322005 - RNA, 21 nt, Human
cccaggucucccuggaucaga

SEQ ID NO: 1322006 - RNA, 22 nt, Human
cccaggccccaugaccuccagc

SEQ ID NO: 1322007 - RNA, 21 nt, Human
cccaggccccaugaccuccag

SEQ ID NO: 1322008 - RNA, 15 nt, Human
cccaggccugccugu

SEQ ID NO: 1322009 - RNA, 16 nt, Human
cccaggccugccuguu

SEQ ID NO: 1322010 - RNA, 18 nt, Human
cccaggcgccccuucccc

SEQ ID NO: 1322011 - RNA, 14 nt, Human
cccaggcugagccu

SEQ ID NO: 1322012 - RNA, 15 nt, Human
cccaggcugagccuc

SEQ ID NO: 1322013 - RNA, 17 nt, Human
cccaggcucggccugcc

SEQ ID NO: 1322014 - RNA, 19 nt, Human
cccaggcucggccugcccc

SEQ ID NO: 1322015 - RNA, 17 nt, Human
cccaggcucguggacug

SEQ ID NO: 1322016 - RNA, 22 nt, Human
cccaggcucguggacugagugg

SEQ ID NO: 1322017 - RNA, 16 nt, Human
cccaggggcagcccca

SEQ ID NO: 1322018 - RNA, 14 nt, Human
cccaggggcucccu

SEQ ID NO: 1322019 - RNA, 16 nt, Human
cccaggggcucccucc

SEQ ID NO: 1322020 - RNA, 17 nt, Human
cccaggggcucccuccg

SEQ ID NO: 1322021 - RNA, 23 nt, Human
cccaggggcucccuccgccccca

SEQ ID NO: 1322022 - RNA, 15 nt, Human
cccaggguccuggga

SEQ ID NO: 1322023 - RNA, 16 nt, Human
cccaggguccugggag

SEQ ID NO: 1322024 - RNA, 18 nt, Human
cccaggguccugggagga

SEQ ID NO: 1322025 - RNA, 17 nt, Human
cccaggguccugggagg

SEQ ID NO: 1322026 - RNA, 12 nt, Human
cccaggagcucc

SEQ ID NO: 1322027 - RNA, 20 nt, Human
cccaggagcuccccucccca

SEQ ID NO: 1322028 - RNA, 13 nt, Human
cccaggagcuccc

SEQ ID NO: 1322029 - RNA, 19 nt, Human
cccaggauacuggcacaga

SEQ ID NO: 1322030 - RNA, 17 nt, Human
cccaggauacuggcaca

SEQ ID NO: 1322031 - RNA, 15 nt, Human
cccaggauccccaag

SEQ ID NO: 1322032 - RNA, 13 nt, Human
cccaggcaaggcu

SEQ ID NO: 1322033 - RNA, 18 nt, Human
cccaggcaaggcugugga

SEQ ID NO: 1322034 - RNA, 19 nt, Human
cccaggcaaggcuguggac

SEQ ID NO: 1322035 - RNA, 12 nt, Human
cccaggcacugc

SEQ ID NO: 1322036 - RNA, 17 nt, Human
cccaggcacugggcucc

SEQ ID NO: 1322037 - RNA, 14 nt, Human
cccaggcauugcca

SEQ ID NO: 1322038 - RNA, 21 nt, Human
cccaggcauugccaagggcuu

SEQ ID NO: 1322039 - RNA, 13 nt, Human
cccaggcacugca

SEQ ID NO: 1322040 - RNA, 13 nt, Human
cccaggccaggac

SEQ ID NO: 1322041 - RNA, 14 nt, Human
cccaggccaggacu

SEQ ID NO: 1322042 - RNA, 15 nt, Human
cccaggccaggacuc

SEQ ID NO: 1322043 - RNA, 17 nt, Human
cccaggccaggacucug

SEQ ID NO: 1322044 - RNA, 18 nt, Human
cccaggccaggacucugc

SEQ ID NO: 1322045 - RNA, 19 nt, Human
cccaggccaggacucugca

SEQ ID NO: 1322046 - RNA, 20 nt, Human
cccaggccaggacucugcag

SEQ ID NO: 1322047 - RNA, 21 nt, Human
cccaggccaggacucugcagc

SEQ ID NO: 1322048 - RNA, 22 nt, Human
cccaggccaggacucugcagcc

SEQ ID NO: 1322049 - RNA, 23 nt, Human
cccaggccaggacucugcagccu

SEQ ID NO: 1322050 - RNA, 22 nt, Human
cccaggcccacugugccucaga

SEQ ID NO: 1322051 - RNA, 14 nt, Human
cccaggccccauga

SEQ ID NO: 1322052 - RNA, 16 nt, Human
cccaggccccaugacc
